United States Patent Application Publication US 2014/0004565 A1 - sequence listing, part 95

SEQ ID NO: 2355330 - RNA, 19 nt, Artificial Sequence
  Description of Artificial Sequence: Synthetic oligonucleotide
agcauccgaggcugacuuc

SEQ ID NO: 2355331 - RNA, 19 nt, Artificial Sequence
  Description of Artificial Sequence: Synthetic oligonucleotide
uucacggcucugccuuuca

SEQ ID NO: 2355332 - RNA, 19 nt, Artificial Sequence
  Description of Artificial Sequence: Synthetic oligonucleotide
uuagcuagugcaggagauu

SEQ ID NO: 2355333 - RNA, 19 nt, Artificial Sequence
  Description of Artificial Sequence: Synthetic oligonucleotide
ccacuaaauagucuucauc

SEQ ID NO: 2355334 - RNA, 19 nt, Artificial Sequence
  Description of Artificial Sequence: Synthetic oligonucleotide
agccuugggugguugcuga

SEQ ID NO: 2355335 - RNA, 19 nt, Artificial Sequence
  Description of Artificial Sequence: Synthetic oligonucleotide
uaaaccggcuuuguauguu

SEQ ID NO: 2355336 - RNA, 19 nt, Artificial Sequence
  Description of Artificial Sequence: Synthetic oligonucleotide
uccccaacgucugcauaag

SEQ ID NO: 2355337 - RNA, 19 nt, Artificial Sequence
  Description of Artificial Sequence: Synthetic oligonucleotide
ggauugaauacugcccgug

SEQ ID NO: 2355338 - RNA, 19 nt, Artificial Sequence
  Description of Artificial Sequence: Synthetic oligonucleotide
ucugcccuugguugauccu

SEQ ID NO: 2355339 - RNA, 19 nt, Artificial Sequence
  Description of Artificial Sequence: Synthetic oligonucleotide
caugcugucccgcuuccga

SEQ ID NO: 2355340 - RNA, 19 nt, Artificial Sequence
  Description of Artificial Sequence: Synthetic oligonucleotide
ccugaccagaauaaucguc

SEQ ID NO: 2355341 - RNA, 19 nt, Artificial Sequence
  Description of Artificial Sequence: Synthetic oligonucleotide
ccuaggagcaggccggcgg

SEQ ID NO: 2355342 - RNA, 19 nt, Artificial Sequence
  Description of Artificial Sequence: Synthetic oligonucleotide
aucgucccauaauucccca

SEQ ID NO: 2355343 - RNA, 19 nt, Artificial Sequence
  Description of Artificial Sequence: Synthetic oligonucleotide
gugagugccagaggagaug

SEQ ID NO: 2355344 - RNA, 19 nt, Artificial Sequence
  Description of Artificial Sequence: Synthetic oligonucleotide
cucaugauaucagaagagu

SEQ ID NO: 2355345 - RNA, 19 nt, Artificial Sequence
  Description of Artificial Sequence: Synthetic oligonucleotide
accggcuuuguauguugga

SEQ ID NO: 2355346 - RNA, 19 nt, Artificial Sequence
  Description of Artificial Sequence: Synthetic oligonucleotide
aggaguuggcggugggaga

SEQ ID NO: 2355347 - RNA, 19 nt, Artificial Sequence
  Description of Artificial Sequence: Synthetic oligonucleotide
cacaucuagcacacugaga

SEQ ID NO: 2355348 - RNA, 19 nt, Artificial Sequence
  Description of Artificial Sequence: Synthetic oligonucleotide
ucacggcucugccuuucac

SEQ ID NO: 2355349 - RNA, 19 nt, Artificial Sequence
  Description of Artificial Sequence: Synthetic oligonucleotide
uugcugaggugcuccugga

SEQ ID NO: 2355350 - RNA, 19 nt, Artificial Sequence
  Description of Artificial Sequence: Synthetic oligonucleotide
accacuaaaccggcuuugu

SEQ ID NO: 2355351 - RNA, 19 nt, Artificial Sequence
  Description of Artificial Sequence: Synthetic oligonucleotide
aguucuccuccaacaagca

SEQ ID NO: 2355352 - RNA, 19 nt, Artificial Sequence
  Description of Artificial Sequence: Synthetic oligonucleotide
ggcuuagaagacccuuggc

SEQ ID NO: 2355353 - RNA, 19 nt, Artificial Sequence
  Description of Artificial Sequence: Synthetic oligonucleotide
caacgucugcauaagcucu

SEQ ID NO: 2355354 - RNA, 19 nt, Artificial Sequence
  Description of Artificial Sequence: Synthetic oligonucleotide
cuucuaggguuggcgacug

SEQ ID NO: 2355355 - RNA, 19 nt, Artificial Sequence
  Description of Artificial Sequence: Synthetic oligonucleotide
caaacucguccacuaaaua

SEQ ID NO: 2355356 - RNA, 19 nt, Artificial Sequence
  Description of Artificial Sequence: Synthetic oligonucleotide
agucgaaguucuccuccaa

SEQ ID NO: 2355357 - RNA, 19 nt, Artificial Sequence
  Description of Artificial Sequence: Synthetic oligonucleotide
acugagagccgaguggcua

SEQ ID NO: 2355358 - RNA, 19 nt, Artificial Sequence
  Description of Artificial Sequence: Synthetic oligonucleotide
uucuagccuugggugguug

SEQ ID NO: 2355359 - RNA, 19 nt, Artificial Sequence
  Description of Artificial Sequence: Synthetic oligonucleotide
ugcugucccgcuuccgaau

SEQ ID NO: 2355360 - RNA, 19 nt, Artificial Sequence
  Description of Artificial Sequence: Synthetic oligonucleotide
uggaagcauccgaggcuga

SEQ ID NO: 2355361 - RNA, 19 nt, Artificial Sequence
  Description of Artificial Sequence: Synthetic oligonucleotide
agccaauccuuggucuuug

SEQ ID NO: 2355362 - RNA, 19 nt, Artificial Sequence
  Description of Artificial Sequence: Synthetic oligonucleotide
caccacuaaaccggcuuug

SEQ ID NO: 2355363 - RNA, 19 nt, Artificial Sequence
  Description of Artificial Sequence: Synthetic oligonucleotide
ucgucccauaauuccccaa

SEQ ID NO: 2355364 - RNA, 19 nt, Artificial Sequence
  Description of Artificial Sequence: Synthetic oligonucleotide
ggaguuggcggugggagac

SEQ ID NO: 2355365 - RNA, 19 nt, Artificial Sequence
  Description of Artificial Sequence: Synthetic oligonucleotide
uaagcucugugcgcagguc

SEQ ID NO: 2355366 - RNA, 19 nt, Artificial Sequence
  Description of Artificial Sequence: Synthetic oligonucleotide
cuugggugguugcugaggu

SEQ ID NO: 2355367 - RNA, 19 nt, Artificial Sequence
  Description of Artificial Sequence: Synthetic oligonucleotide
auuccccaacgucugcaua

SEQ ID NO: 2355368 - RNA, 19 nt, Artificial Sequence
  Description of Artificial Sequence: Synthetic oligonucleotide
aggggccaugcugucccgc

SEQ ID NO: 2355369 - RNA, 19 nt, Artificial Sequence
  Description of Artificial Sequence: Synthetic oligonucleotide
uucuaggguuggcgacuga

SEQ ID NO: 2355370 - RNA, 19 nt, Artificial Sequence
  Description of Artificial Sequence: Synthetic oligonucleotide
ccuucugacucauagucua

SEQ ID NO: 2355371 - RNA, 19 nt, Artificial Sequence
  Description of Artificial Sequence: Synthetic oligonucleotide
cuaaaccggcuuuguaugu

SEQ ID NO: 2355372 - RNA, 19 nt, Artificial Sequence
  Description of Artificial Sequence: Synthetic oligonucleotide
uccuuggucuuuggucgga

SEQ ID NO: 2355373 - RNA, 19 nt, Artificial Sequence
  Description of Artificial Sequence: Synthetic oligonucleotide
acccuaggagcaggccggc

SEQ ID NO: 2355374 - RNA, 19 nt, Artificial Sequence
  Description of Artificial Sequence: Synthetic oligonucleotide
cuagcacacugagagccga

SEQ ID NO: 2355375 - RNA, 19 nt, Artificial Sequence
  Description of Artificial Sequence: Synthetic oligonucleotide
ggugggagacacaggggcc

SEQ ID NO: 2355376 - RNA, 19 nt, Artificial Sequence
  Description of Artificial Sequence: Synthetic oligonucleotide
cuagacucgugaagucgaa

SEQ ID NO: 2355377 - RNA, 19 nt, Artificial Sequence
  Description of Artificial Sequence: Synthetic oligonucleotide
cacaggggccaugcugucc

SEQ ID NO: 2355378 - RNA, 19 nt, Artificial Sequence
  Description of Artificial Sequence: Synthetic oligonucleotide
ccaagagacaccggaucgc

SEQ ID NO: 2355379 - RNA, 19 nt, Artificial Sequence
  Description of Artificial Sequence: Synthetic oligonucleotide
gcugucccgcuuccgaaug

SEQ ID NO: 2355380 - RNA, 19 nt, Artificial Sequence
  Description of Artificial Sequence: Synthetic oligonucleotide
gcauaagcucugugcgcag

SEQ ID NO: 2355381 - RNA, 19 nt, Artificial Sequence
  Description of Artificial Sequence: Synthetic oligonucleotide
ggaucgcugcuucugccuc

SEQ ID NO: 2355382 - RNA, 19 nt, Artificial Sequence
  Description of Artificial Sequence: Synthetic oligonucleotide
agaagacccuuggccucuc

SEQ ID NO: 2355383 - RNA, 19 nt, Artificial Sequence
  Description of Artificial Sequence: Synthetic oligonucleotide
cuccgccaaguucaccauc

SEQ ID NO: 2355384 - RNA, 19 nt, Artificial Sequence
  Description of Artificial Sequence: Synthetic oligonucleotide
ugagagccgaguggcuauc

SEQ ID NO: 2355385 - RNA, 19 nt, Artificial Sequence
  Description of Artificial Sequence: Synthetic oligonucleotide
agggaggccucuggcuuag

SEQ ID NO: 2355386 - RNA, 19 nt, Artificial Sequence
  Description of Artificial Sequence: Synthetic oligonucleotide
cggcuuuguauguuggaug

SEQ ID NO: 2355387 - RNA, 19 nt, Artificial Sequence
  Description of Artificial Sequence: Synthetic oligonucleotide
caccuggggccaguucugg

SEQ ID NO: 2355388 - RNA, 19 nt, Artificial Sequence
  Description of Artificial Sequence: Synthetic oligonucleotide
cuugacguuguaggguuua

SEQ ID NO: 2355389 - RNA, 19 nt, Artificial Sequence
  Description of Artificial Sequence: Synthetic oligonucleotide
uaccuccacuagcuuccaa

SEQ ID NO: 2355390 - RNA, 19 nt, Artificial Sequence
  Description of Artificial Sequence: Synthetic oligonucleotide
cccuugguugauccugacc

SEQ ID NO: 2355391 - RNA, 19 nt, Artificial Sequence
  Description of Artificial Sequence: Synthetic oligonucleotide
ggucggaucuucacggcuc

SEQ ID NO: 2355392 - RNA, 19 nt, Artificial Sequence
  Description of Artificial Sequence: Synthetic oligonucleotide
ccuugggugguugcugagg

SEQ ID NO: 2355393 - RNA, 19 nt, Artificial Sequence
  Description of Artificial Sequence: Synthetic oligonucleotide
gaagacccuuggccucuca

SEQ ID NO: 2355394 - RNA, 19 nt, Artificial Sequence
  Description of Artificial Sequence: Synthetic oligonucleotide
ccuucauaccauccacauc

SEQ ID NO: 2355395 - RNA, 19 nt, Artificial Sequence
  Description of Artificial Sequence: Synthetic oligonucleotide
ggaacccuaggagcaggcc

SEQ ID NO: 2355396 - RNA, 19 nt, Artificial Sequence
  Description of Artificial Sequence: Synthetic oligonucleotide
agcuuccaagagacaccgg

SEQ ID NO: 2355397 - RNA, 19 nt, Artificial Sequence
  Description of Artificial Sequence: Synthetic oligonucleotide
caucuccgccaaguucacc

SEQ ID NO: 2355398 - RNA, 19 nt, Artificial Sequence
  Description of Artificial Sequence: Synthetic oligonucleotide
ccgaaugagcuccucucuc

SEQ ID NO: 2355399 - RNA, 19 nt, Artificial Sequence
  Description of Artificial Sequence: Synthetic oligonucleotide
cuucacggcucugccuuuc

SEQ ID NO: 2355400 - RNA, 19 nt, Artificial Sequence
  Description of Artificial Sequence: Synthetic oligonucleotide
ccuccacuagcuuccaaga

SEQ ID NO: 2355401 - RNA, 19 nt, Artificial Sequence
  Description of Artificial Sequence: Synthetic oligonucleotide
ucggaucuucacggcucug

SEQ ID NO: 2355402 - RNA, 19 nt, Artificial Sequence
  Description of Artificial Sequence: Synthetic oligonucleotide
ggguuuacuuauuccaguu

SEQ ID NO: 2355403 - RNA, 19 nt, Artificial Sequence
  Description of Artificial Sequence: Synthetic oligonucleotide
caagagacaccggaucgcu

SEQ ID NO: 2355404 - RNA, 19 nt, Artificial Sequence
  Description of Artificial Sequence: Synthetic oligonucleotide
cccaacgucugcauaagcu

SEQ ID NO: 2355405 - RNA, 19 nt, Artificial Sequence
  Description of Artificial Sequence: Synthetic oligonucleotide
gcugacuucuucaccacua

SEQ ID NO: 2355406 - RNA, 19 nt, Artificial Sequence
  Description of Artificial Sequence: Synthetic oligonucleotide
ccgaggcugacuucuucac

SEQ ID NO: 2355407 - RNA, 19 nt, Artificial Sequence
  Description of Artificial Sequence: Synthetic oligonucleotide
cuccucuucuaggguuggc

SEQ ID NO: 2355408 - RNA, 19 nt, Artificial Sequence
  Description of Artificial Sequence: Synthetic oligonucleotide
gugcgcagguccucgggaa

SEQ ID NO: 2355409 - RNA, 19 nt, Artificial Sequence
  Description of Artificial Sequence: Synthetic oligonucleotide
cacuagcuuccaagagaca

SEQ ID NO: 2355410 - RNA, 19 nt, Artificial Sequence
  Description of Artificial Sequence: Synthetic oligonucleotide
acauccccuucugacucau

SEQ ID NO: 2355411 - RNA, 19 nt, Artificial Sequence
  Description of Artificial Sequence: Synthetic oligonucleotide
gucccgcuuccgaaugagc

SEQ ID NO: 2355412 - RNA, 19 nt, Artificial Sequence
  Description of Artificial Sequence: Synthetic oligonucleotide
gucggaucuucacggcucu

SEQ ID NO: 2355413 - RNA, 19 nt, Artificial Sequence
  Description of Artificial Sequence: Synthetic oligonucleotide
gagucaucuccgccaaguu

SEQ ID NO: 2355414 - RNA, 19 nt, Artificial Sequence
  Description of Artificial Sequence: Synthetic oligonucleotide
auaccuccacuagcuucca

SEQ ID NO: 2355415 - RNA, 19 nt, Artificial Sequence
  Description of Artificial Sequence: Synthetic oligonucleotide
cccgugagugccagaggag

SEQ ID NO: 2355416 - RNA, 19 nt, Artificial Sequence
  Description of Artificial Sequence: Synthetic oligonucleotide
cgaggcugacuucuucacc

SEQ ID NO: 2355417 - RNA, 19 nt, Artificial Sequence
  Description of Artificial Sequence: Synthetic oligonucleotide
cccgcuuccgaaugagcuc

SEQ ID NO: 2355418 - RNA, 19 nt, Artificial Sequence
  Description of Artificial Sequence: Synthetic oligonucleotide
ugggagacacaggggccau

SEQ ID NO: 2355419 - RNA, 19 nt, Artificial Sequence
  Description of Artificial Sequence: Synthetic oligonucleotide
cguccacuaaauagucuuc

SEQ ID NO: 2355420 - RNA, 19 nt, Artificial Sequence
  Description of Artificial Sequence: Synthetic oligonucleotide
ggagauuuugcuggauggu

SEQ ID NO: 2355421 - RNA, 19 nt, Artificial Sequence
  Description of Artificial Sequence: Synthetic oligonucleotide
cgaaugagcuccucucuca

SEQ ID NO: 2355422 - RNA, 19 nt, Artificial Sequence
  Description of Artificial Sequence: Synthetic oligonucleotide
cguuguaggguuuacuuau

SEQ ID NO: 2355423 - RNA, 19 nt, Artificial Sequence
  Description of Artificial Sequence: Synthetic oligonucleotide
ggaggccucuggcuuagaa

SEQ ID NO: 2355424 - RNA, 19 nt, Artificial Sequence
  Description of Artificial Sequence: Synthetic oligonucleotide
agcuagugcaggagauuuu

SEQ ID NO: 2355425 - RNA, 19 nt, Artificial Sequence
  Description of Artificial Sequence: Synthetic oligonucleotide
ggaagaaguuuugcagucu

SEQ ID NO: 2355426 - RNA, 19 nt, Artificial Sequence
  Description of Artificial Sequence: Synthetic oligonucleotide
cugcuugacguuguagggu

SEQ ID NO: 2355427 - RNA, 19 nt, Artificial Sequence
  Description of Artificial Sequence: Synthetic oligonucleotide
cugagagccgaguggcuau

SEQ ID NO: 2355428 - RNA, 19 nt, Artificial Sequence
  Description of Artificial Sequence: Synthetic oligonucleotide
gaguuggcggugggagaca

SEQ ID NO: 2355429 - RNA, 19 nt, Artificial Sequence
  Description of Artificial Sequence: Synthetic oligonucleotide
gcggugggagacacagggg

SEQ ID NO: 2355430 - RNA, 19 nt, Artificial Sequence
  Description of Artificial Sequence: Synthetic oligonucleotide
gccuugggugguugcugag

SEQ ID NO: 2355431 - RNA, 19 nt, Artificial Sequence
  Description of Artificial Sequence: Synthetic oligonucleotide
ccaaacucguccacuaaau

SEQ ID NO: 2355432 - RNA, 19 nt, Artificial Sequence
  Description of Artificial Sequence: Synthetic oligonucleotide
cgggaaauucguucuccuc

SEQ ID NO: 2355433 - RNA, 19 nt, Artificial Sequence
  Description of Artificial Sequence: Synthetic oligonucleotide
cuucaccacuaaaccggcu

SEQ ID NO: 2355434 - RNA, 19 nt, Artificial Sequence
  Description of Artificial Sequence: Synthetic oligonucleotide
ccccaacgucugcauaagc

SEQ ID NO: 2355435 - RNA, 19 nt, Artificial Sequence
  Description of Artificial Sequence: Synthetic oligonucleotide
ggcuaucugcgaaggucac

SEQ ID NO: 2355436 - RNA, 19 nt, Artificial Sequence
  Description of Artificial Sequence: Synthetic oligonucleotide
ccucgggaaauucguucuc

SEQ ID NO: 2355437 - RNA, 19 nt, Artificial Sequence
  Description of Artificial Sequence: Synthetic oligonucleotide
ggccaaacucguccacuaa

SEQ ID NO: 2355438 - RNA, 19 nt, Artificial Sequence
  Description of Artificial Sequence: Synthetic oligonucleotide
auacugcccgugagugcca

SEQ ID NO: 2355439 - RNA, 19 nt, Artificial Sequence
  Description of Artificial Sequence: Synthetic oligonucleotide
cuggccaaacucguccacu

SEQ ID NO: 2355440 - RNA, 19 nt, Artificial Sequence
  Description of Artificial Sequence: Synthetic oligonucleotide
ccgaguggcuaucugcgaa

SEQ ID NO: 2355441 - RNA, 19 nt, Artificial Sequence
  Description of Artificial Sequence: Synthetic oligonucleotide
agacaccggaucgcugcuu

SEQ ID NO: 2355442 - RNA, 19 nt, Artificial Sequence
  Description of Artificial Sequence: Synthetic oligonucleotide
gagagccgaguggcuaucu

SEQ ID NO: 2355443 - RNA, 19 nt, Artificial Sequence
  Description of Artificial Sequence: Synthetic oligonucleotide
ccgugagugccagaggaga

SEQ ID NO: 2355444 - RNA, 19 nt, Artificial Sequence
  Description of Artificial Sequence: Synthetic oligonucleotide
gccgaguggcuaucugcga

SEQ ID NO: 2355445 - RNA, 19 nt, Artificial Sequence
  Description of Artificial Sequence: Synthetic oligonucleotide
ggcugacuucuucaccacu

SEQ ID NO: 2355446 - RNA, 19 nt, Artificial Sequence
  Description of Artificial Sequence: Synthetic oligonucleotide
ggccaguucugggauaccu

SEQ ID NO: 2355447 - RNA, 19 nt, Artificial Sequence
  Description of Artificial Sequence: Synthetic oligonucleotide
guuggcggugggagacaca

SEQ ID NO: 2355448 - RNA, 19 nt, Artificial Sequence
  Description of Artificial Sequence: Synthetic oligonucleotide
gcccuugguugauccugac

SEQ ID NO: 2355449 - RNA, 19 nt, Artificial Sequence
  Description of Artificial Sequence: Synthetic oligonucleotide
ccacuaaaccggcuuugua

SEQ ID NO: 2355450 - RNA, 19 nt, Artificial Sequence
  Description of Artificial Sequence: Synthetic oligonucleotide
guuuugcagucugcaggau

SEQ ID NO: 2355451 - RNA, 19 nt, Artificial Sequence
  Description of Artificial Sequence: Synthetic oligonucleotide
ccgccaaguucaccaucug

SEQ ID NO: 2355452 - RNA, 19 nt, Artificial Sequence
  Description of Artificial Sequence: Synthetic oligonucleotide
gcuuccgaaugagcuccuc

SEQ ID NO: 2355453 - RNA, 19 nt, Artificial Sequence
  Description of Artificial Sequence: Synthetic oligonucleotide
ggauggugcugaggagcuc

SEQ ID NO: 2355454 - RNA, 19 nt, Artificial Sequence
  Description of Artificial Sequence: Synthetic oligonucleotide
cugcgaaggucaccagcau

SEQ ID NO: 2355455 - RNA, 19 nt, Artificial Sequence
  Description of Artificial Sequence: Synthetic oligonucleotide
cccuaggagcaggccggcg

SEQ ID NO: 2355456 - RNA, 19 nt, Artificial Sequence
  Description of Artificial Sequence: Synthetic oligonucleotide
cucaagccuuucagccaau

SEQ ID NO: 2355457 - RNA, 19 nt, Artificial Sequence
  Description of Artificial Sequence: Synthetic oligonucleotide
gggauaccuccacuagcuu

SEQ ID NO: 2355458 - RNA, 19 nt, Artificial Sequence
  Description of Artificial Sequence: Synthetic oligonucleotide
gcauggcaccuggggccag

SEQ ID NO: 2355459 - RNA, 19 nt, Artificial Sequence
  Description of Artificial Sequence: Synthetic oligonucleotide
guucuagccuugggugguu

SEQ ID NO: 2355460 - RNA, 19 nt, Artificial Sequence
  Description of Artificial Sequence: Synthetic oligonucleotide
cauggcaccuggggccagu

SEQ ID NO: 2355461 - RNA, 19 nt, Artificial Sequence
  Description of Artificial Sequence: Synthetic oligonucleotide
gcucugccuuucaccuuca

SEQ ID NO: 2355462 - RNA, 19 nt, Artificial Sequence
  Description of Artificial Sequence: Synthetic oligonucleotide
gggugguugcugaggugcu

SEQ ID NO: 2355463 - RNA, 19 nt, Artificial Sequence
  Description of Artificial Sequence: Synthetic oligonucleotide
gguccucgggaaauucguu

SEQ ID NO: 2355464 - RNA, 19 nt, Artificial Sequence
  Description of Artificial Sequence: Synthetic oligonucleotide
cgugagugccagaggagau

SEQ ID NO: 2355465 - RNA, 19 nt, Artificial Sequence
  Description of Artificial Sequence: Synthetic oligonucleotide
gcaggagauuuugcuggau

SEQ ID NO: 2355466 - RNA, 19 nt, Artificial Sequence
  Description of Artificial Sequence: Synthetic oligonucleotide
gcgcagguccucgggaaau

SEQ ID NO: 2355467 - RNA, 19 nt, Artificial Sequence
  Description of Artificial Sequence: Synthetic oligonucleotide
gggccaugcugucccgcuu

SEQ ID NO: 2355468 - RNA, 19 nt, Artificial Sequence
  Description of Artificial Sequence: Synthetic oligonucleotide
gcuugacguuguaggguuu

SEQ ID NO: 2355469 - RNA, 19 nt, Artificial Sequence
  Description of Artificial Sequence: Synthetic oligonucleotide
ccuuggucuuuggucggau

SEQ ID NO: 2355470 - RNA, 19 nt, Artificial Sequence
  Description of Artificial Sequence: Synthetic oligonucleotide
cgcuuccgaaugagcuccu

SEQ ID NO: 2355471 - RNA, 19 nt, Artificial Sequence
  Description of Artificial Sequence: Synthetic oligonucleotide
cgcagguccucgggaaauu

SEQ ID NO: 2355472 - RNA, 19 nt, Artificial Sequence
  Description of Artificial Sequence: Synthetic oligonucleotide
aagaccaagauucagaauc

SEQ ID NO: 2355473 - RNA, 19 nt, Artificial Sequence
  Description of Artificial Sequence: Synthetic oligonucleotide
aaaucaucuacuuugagca

SEQ ID NO: 2355474 - RNA, 19 nt, Artificial Sequence
  Description of Artificial Sequence: Synthetic oligonucleotide
ucuagauuaaacuucacag

SEQ ID NO: 2355475 - RNA, 19 nt, Artificial Sequence
  Description of Artificial Sequence: Synthetic oligonucleotide
uacuaaaagaccaagauuc

SEQ ID NO: 2355476 - RNA, 19 nt, Artificial Sequence
  Description of Artificial Sequence: Synthetic oligonucleotide
ugaauuauaaacuuucaca

SEQ ID NO: 2355477 - RNA, 19 nt, Artificial Sequence
  Description of Artificial Sequence: Synthetic oligonucleotide
uucagaauccacaagcugg

SEQ ID NO: 2355478 - RNA, 19 nt, Artificial Sequence
  Description of Artificial Sequence: Synthetic oligonucleotide
acaauguucgaucauuucc

SEQ ID NO: 2355479 - RNA, 19 nt, Artificial Sequence
  Description of Artificial Sequence: Synthetic oligonucleotide
gaauuauaaacuuucacac

SEQ ID NO: 2355480 - RNA, 19 nt, Artificial Sequence
  Description of Artificial Sequence: Synthetic oligonucleotide
aaguaaaugagucuucuug

SEQ ID NO: 2355481 - RNA, 19 nt, Artificial Sequence
  Description of Artificial Sequence: Synthetic oligonucleotide
ucaaauucaagaauccucc

SEQ ID NO: 2355482 - RNA, 19 nt, Artificial Sequence
  Description of Artificial Sequence: Synthetic oligonucleotide
uauuugguaaguaacgugc

SEQ ID NO: 2355483 - RNA, 19 nt, Artificial Sequence
  Description of Artificial Sequence: Synthetic oligonucleotide
ucuucuugaauuauaaacu

SEQ ID NO: 2355484 - RNA, 19 nt, Artificial Sequence
  Description of Artificial Sequence: Synthetic oligonucleotide
uagauuaaacuucacagca

SEQ ID NO: 2355485 - RNA, 19 nt, Artificial Sequence
  Description of Artificial Sequence: Synthetic oligonucleotide
ucuuuuaaguaaaugaguc

SEQ ID NO: 2355486 - RNA, 19 nt, Artificial Sequence
  Description of Artificial Sequence: Synthetic oligonucleotide
auaaucaaauucaagaauc

SEQ ID NO: 2355487 - RNA, 19 nt, Artificial Sequence
  Description of Artificial Sequence: Synthetic oligonucleotide
gaaaccaaagaucucagug

SEQ ID NO: 2355488 - RNA, 19 nt, Artificial Sequence
  Description of Artificial Sequence: Synthetic oligonucleotide
uuuacuaaaagaccaagau

SEQ ID NO: 2355489 - RNA, 19 nt, Artificial Sequence
  Description of Artificial Sequence: Synthetic oligonucleotide
ugaagaacgagaauauuug

SEQ ID NO: 2355490 - RNA, 19 nt, Artificial Sequence
  Description of Artificial Sequence: Synthetic oligonucleotide
uuugcauugaagaacgaga

SEQ ID NO: 2355491 - RNA, 19 nt, Artificial Sequence
  Description of Artificial Sequence: Synthetic oligonucleotide
cauuuugcauugaagaacg

SEQ ID NO: 2355492 - RNA, 19 nt, Artificial Sequence
  Description of Artificial Sequence: Synthetic oligonucleotide
uuuaguuuaggucugcauc

SEQ ID NO: 2355493 - RNA, 19 nt, Artificial Sequence
  Description of Artificial Sequence: Synthetic oligonucleotide
ucaagaauccuccaauagc

SEQ ID NO: 2355494 - RNA, 19 nt, Artificial Sequence
  Description of Artificial Sequence: Synthetic oligonucleotide
agaauauuugguaaguaac

SEQ ID NO: 2355495 - RNA, 19 nt, Artificial Sequence
  Description of Artificial Sequence: Synthetic oligonucleotide
auagccuccaaucucacag

SEQ ID NO: 2355496 - RNA, 19 nt, Artificial Sequence
  Description of Artificial Sequence: Synthetic oligonucleotide
uaaaagaccaagauucaga

SEQ ID NO: 2355497 - RNA, 19 nt, Artificial Sequence
  Description of Artificial Sequence: Synthetic oligonucleotide
aacgagaauauuugguaag

SEQ ID NO: 2355498 - RNA, 19 nt, Artificial Sequence
  Description of Artificial Sequence: Synthetic oligonucleotide
agaacagacuauugaaucg

SEQ ID NO: 2355499 - RNA, 19 nt, Artificial Sequence
  Description of Artificial Sequence: Synthetic oligonucleotide
aaaauaugauuuccggucu

SEQ ID NO: 2355500 - RNA, 19 nt, Artificial Sequence
  Description of Artificial Sequence: Synthetic oligonucleotide
uuuaggguuuguaacuggg

SEQ ID NO: 2355501 - RNA, 19 nt, Artificial Sequence
  Description of Artificial Sequence: Synthetic oligonucleotide
aaaccaaagaucucagugu

SEQ ID NO: 2355502 - RNA, 19 nt, Artificial Sequence
  Description of Artificial Sequence: Synthetic oligonucleotide
uaaucaaauucaagaaucc

SEQ ID NO: 2355503 - RNA, 19 nt, Artificial Sequence
  Description of Artificial Sequence: Synthetic oligonucleotide
auuuugagcggcuuggauc

SEQ ID NO: 2355504 - RNA, 19 nt, Artificial Sequence
  Description of Artificial Sequence: Synthetic oligonucleotide
auuagagaaaccaaagauc

SEQ ID NO: 2355505 - RNA, 19 nt, Artificial Sequence
  Description of Artificial Sequence: Synthetic oligonucleotide
aauucaagaauccuccaau

SEQ ID NO: 2355506 - RNA, 19 nt, Artificial Sequence
  Description of Artificial Sequence: Synthetic oligonucleotide
ugaucaagcaaaucuuccg

SEQ ID NO: 2355507 - RNA, 19 nt, Artificial Sequence
  Description of Artificial Sequence: Synthetic oligonucleotide
uauauuuugagcggcuugg

SEQ ID NO: 2355508 - RNA, 19 nt, Artificial Sequence
  Description of Artificial Sequence: Synthetic oligonucleotide
ucauaaucaaauucaagaa

SEQ ID NO: 2355509 - RNA, 19 nt, Artificial Sequence
  Description of Artificial Sequence: Synthetic oligonucleotide
cuagauuaaacuucacagc

SEQ ID NO: 2355510 - RNA, 19 nt, Artificial Sequence
  Description of Artificial Sequence: Synthetic oligonucleotide
ugcaacagcaucucggccg

SEQ ID NO: 2355511 - RNA, 19 nt, Artificial Sequence
  Description of Artificial Sequence: Synthetic oligonucleotide
uugaauuauaaacuuucac

SEQ ID NO: 2355512 - RNA, 19 nt, Artificial Sequence
  Description of Artificial Sequence: Synthetic oligonucleotide
cuuuaugacugucagggcc

SEQ ID NO: 2355513 - RNA, 19 nt, Artificial Sequence
  Description of Artificial Sequence: Synthetic oligonucleotide
aaaucccggauauauggag

SEQ ID NO: 2355514 - RNA, 19 nt, Artificial Sequence
  Description of Artificial Sequence: Synthetic oligonucleotide
uauagauugcuucucgcca

SEQ ID NO: 2355515 - RNA, 19 nt, Artificial Sequence
  Description of Artificial Sequence: Synthetic oligonucleotide
guaacgugccuauagauug

SEQ ID NO: 2355516 - RNA, 19 nt, Artificial Sequence
  Description of Artificial Sequence: Synthetic oligonucleotide
uucaagaauccuccaauag

SEQ ID NO: 2355517 - RNA, 19 nt, Artificial Sequence
  Description of Artificial Sequence: Synthetic oligonucleotide
aaccaaagaucucagugug

SEQ ID NO: 2355518 - RNA, 19 nt, Artificial Sequence
  Description of Artificial Sequence: Synthetic oligonucleotide
gaagaacgagaauauuugg

SEQ ID NO: 2355519 - RNA, 19 nt, Artificial Sequence
  Description of Artificial Sequence: Synthetic oligonucleotide
uaucuuaucagcauccaau

SEQ ID NO: 2355520 - RNA, 19 nt, Artificial Sequence
  Description of Artificial Sequence: Synthetic oligonucleotide
acuugccugaauuugauca

SEQ ID NO: 2355521 - RNA, 19 nt, Artificial Sequence
  Description of Artificial Sequence: Synthetic oligonucleotide
uucuuuuaaguaaaugagu

SEQ ID NO: 2355522 - RNA, 19 nt, Artificial Sequence
  Description of Artificial Sequence: Synthetic oligonucleotide
cuucucgccacacaaaucc

SEQ ID NO: 2355523 - RNA, 19 nt, Artificial Sequence
  Description of Artificial Sequence: Synthetic oligonucleotide
uauugaaucgcuccugugu

SEQ ID NO: 2355524 - RNA, 19 nt, Artificial Sequence
  Description of Artificial Sequence: Synthetic oligonucleotide
ucucuuagagagaacagac

SEQ ID NO: 2355525 - RNA, 19 nt, Artificial Sequence
  Description of Artificial Sequence: Synthetic oligonucleotide
uuaguuuaggucugcaucu

SEQ ID NO: 2355526 - RNA, 19 nt, Artificial Sequence
  Description of Artificial Sequence: Synthetic oligonucleotide
gaaguuugaucucauaauc

SEQ ID NO: 2355527 - RNA, 19 nt, Artificial Sequence
  Description of Artificial Sequence: Synthetic oligonucleotide
aauuauuagagaaaccaaa

SEQ ID NO: 2355528 - RNA, 19 nt, Artificial Sequence
  Description of Artificial Sequence: Synthetic oligonucleotide
aguaaaugagucuucuuga

SEQ ID NO: 2355529 - RNA, 19 nt, Artificial Sequence
  Description of Artificial Sequence: Synthetic oligonucleotide
auuauuagagaaaccaaag

SEQ ID NO: 2355530 - RNA, 19 nt, Artificial Sequence
  Description of Artificial Sequence: Synthetic oligonucleotide
uuuugagcggcuuggaucu

SEQ ID NO: 2355531 - RNA, 19 nt, Artificial Sequence
  Description of Artificial Sequence: Synthetic oligonucleotide
uuuagcuucuuuaguuuag

SEQ ID NO: 2355532 - RNA, 19 nt, Artificial Sequence
  Description of Artificial Sequence: Synthetic oligonucleotide
uguucgaucauuuccucug

SEQ ID NO: 2355533 - RNA, 19 nt, Artificial Sequence
  Description of Artificial Sequence: Synthetic oligonucleotide
cuuuccauagcauuuaaga

SEQ ID NO: 2355534 - RNA, 19 nt, Artificial Sequence
  Description of Artificial Sequence: Synthetic oligonucleotide
aguguggacaauguuuucc

SEQ ID NO: 2355535 - RNA, 19 nt, Artificial Sequence
  Description of Artificial Sequence: Synthetic oligonucleotide
ucucauaaucaaauucaag

SEQ ID NO: 2355536 - RNA, 19 nt, Artificial Sequence
  Description of Artificial Sequence: Synthetic oligonucleotide
uugaucaagcaaaucuucc

SEQ ID NO: 2355537 - RNA, 19 nt, Artificial Sequence
  Description of Artificial Sequence: Synthetic oligonucleotide
aucaaauucaagaauccuc

SEQ ID NO: 2355538 - RNA, 19 nt, Artificial Sequence
  Description of Artificial Sequence: Synthetic oligonucleotide
aauguucgaucauuuccuc

SEQ ID NO: 2355539 - RNA, 19 nt, Artificial Sequence
  Description of Artificial Sequence: Synthetic oligonucleotide
aaauaaacuuuaucuuccu

SEQ ID NO: 2355540 - RNA, 19 nt, Artificial Sequence
  Description of Artificial Sequence: Synthetic oligonucleotide
cagacuauugaaucgcucc

SEQ ID NO: 2355541 - RNA, 19 nt, Artificial Sequence
  Description of Artificial Sequence: Synthetic oligonucleotide
aaggggacuuuacuaaaag

SEQ ID NO: 2355542 - RNA, 19 nt, Artificial Sequence
  Description of Artificial Sequence: Synthetic oligonucleotide
ugauuuccggucuugagcu

SEQ ID NO: 2355543 - RNA, 19 nt, Artificial Sequence
  Description of Artificial Sequence: Synthetic oligonucleotide
aguuccugcaggcauacag

SEQ ID NO: 2355544 - RNA, 19 nt, Artificial Sequence
  Description of Artificial Sequence: Synthetic oligonucleotide
uuaagacaauguucgauca

SEQ ID NO: 2355545 - RNA, 19 nt, Artificial Sequence
  Description of Artificial Sequence: Synthetic oligonucleotide
gagaacagacuauugaauc

SEQ ID NO: 2355546 - RNA, 19 nt, Artificial Sequence
  Description of Artificial Sequence: Synthetic oligonucleotide
aaauucaagaauccuccaa

SEQ ID NO: 2355547 - RNA, 19 nt, Artificial Sequence
  Description of Artificial Sequence: Synthetic oligonucleotide
ugagcuucuauccaccagu

SEQ ID NO: 2355548 - RNA, 19 nt, Artificial Sequence
  Description of Artificial Sequence: Synthetic oligonucleotide
ucauagguauuuuccauca

SEQ ID NO: 2355549 - RNA, 19 nt, Artificial Sequence
  Description of Artificial Sequence: Synthetic oligonucleotide
uuugaucaagcaaaucuuc

SEQ ID NO: 2355550 - RNA, 19 nt, Artificial Sequence
  Description of Artificial Sequence: Synthetic oligonucleotide
aaacuuuaucuuccuccac

SEQ ID NO: 2355551 - RNA, 19 nt, Artificial Sequence
  Description of Artificial Sequence: Synthetic oligonucleotide
ucuuccguuguauauuuug

SEQ ID NO: 2355552 - RNA, 19 nt, Artificial Sequence
  Description of Artificial Sequence: Synthetic oligonucleotide
agagagaacagacuauuga

SEQ ID NO: 2355553 - RNA, 19 nt, Artificial Sequence
  Description of Artificial Sequence: Synthetic oligonucleotide
cucaucuagauuaaacuuc

SEQ ID NO: 2355554 - RNA, 19 nt, Artificial Sequence
  Description of Artificial Sequence: Synthetic oligonucleotide
auauuugguaaguaacgug

SEQ ID NO: 2355555 - RNA, 19 nt, Artificial Sequence
  Description of Artificial Sequence: Synthetic oligonucleotide
gaucauuuccucuggcucc

SEQ ID NO: 2355556 - RNA, 19 nt, Artificial Sequence
  Description of Artificial Sequence: Synthetic oligonucleotide
uuuaugacugucagggccu

SEQ ID NO: 2355557 - RNA, 19 nt, Artificial Sequence
  Description of Artificial Sequence: Synthetic oligonucleotide
aaucucacaggcauuuagg

SEQ ID NO: 2355558 - RNA, 19 nt, Artificial Sequence
  Description of Artificial Sequence: Synthetic oligonucleotide
aaucccggauauauggagc

SEQ ID NO: 2355559 - RNA, 19 nt, Artificial Sequence
  Description of Artificial Sequence: Synthetic oligonucleotide
uuaacucccaauaauuauu

SEQ ID NO: 2355560 - RNA, 19 nt, Artificial Sequence
  Description of Artificial Sequence: Synthetic oligonucleotide
uuuugcauugaagaacgag

SEQ ID NO: 2355561 - RNA, 19 nt, Artificial Sequence
  Description of Artificial Sequence: Synthetic oligonucleotide
caggcauacagucaagggg

SEQ ID NO: 2355562 - RNA, 19 nt, Artificial Sequence
  Description of Artificial Sequence: Synthetic oligonucleotide
uuucucuuagagagaacag

SEQ ID NO: 2355563 - RNA, 19 nt, Artificial Sequence
  Description of Artificial Sequence: Synthetic oligonucleotide
uuacuaaaagaccaagauu

SEQ ID NO: 2355564 - RNA, 19 nt, Artificial Sequence
  Description of Artificial Sequence: Synthetic oligonucleotide
cuuaucagcauccaauuca

SEQ ID NO: 2355565 - RNA, 19 nt, Artificial Sequence
  Description of Artificial Sequence: Synthetic oligonucleotide
uccguuguauauuuugagc

SEQ ID NO: 2355566 - RNA, 19 nt, Artificial Sequence
  Description of Artificial Sequence: Synthetic oligonucleotide
aagccgaguugucauuccc

SEQ ID NO: 2355567 - RNA, 19 nt, Artificial Sequence
  Description of Artificial Sequence: Synthetic oligonucleotide
auagguauuuuccaucaga

SEQ ID NO: 2355568 - RNA, 19 nt, Artificial Sequence
  Description of Artificial Sequence: Synthetic oligonucleotide
uaaguaacgugccuauaga

SEQ ID NO: 2355569 - RNA, 19 nt, Artificial Sequence
  Description of Artificial Sequence: Synthetic oligonucleotide
cugaaacucaucuagauua

SEQ ID NO: 2355570 - RNA, 19 nt, Artificial Sequence
  Description of Artificial Sequence: Synthetic oligonucleotide
uuuaaguaaaugagucuuc

SEQ ID NO: 2355571 - RNA, 19 nt, Artificial Sequence
  Description of Artificial Sequence: Synthetic oligonucleotide
ucaagcaaaucuuccguug

SEQ ID NO: 2355572 - RNA, 19 nt, Artificial Sequence
  Description of Artificial Sequence: Synthetic oligonucleotide
cucugcauaucuuaucagc

SEQ ID NO: 2355573 - RNA, 19 nt, Artificial Sequence
  Description of Artificial Sequence: Synthetic oligonucleotide
cuccaaagguccaaguucc

SEQ ID NO: 2355574 - RNA, 19 nt, Artificial Sequence
  Description of Artificial Sequence: Synthetic oligonucleotide
uucuuaacucccaauaauu

SEQ ID NO: 2355575 - RNA, 19 nt, Artificial Sequence
  Description of Artificial Sequence: Synthetic oligonucleotide
uggaucucccucuuuauga

SEQ ID NO: 2355576 - RNA, 19 nt, Artificial Sequence
  Description of Artificial Sequence: Synthetic oligonucleotide
ucuucuuaacucccaauaa

SEQ ID NO: 2355577 - RNA, 19 nt, Artificial Sequence
  Description of Artificial Sequence: Synthetic oligonucleotide
ucuuaacucccaauaauua

SEQ ID NO: 2355578 - RNA, 19 nt, Artificial Sequence
  Description of Artificial Sequence: Synthetic oligonucleotide
uuaaguaaaugagucuucu

SEQ ID NO: 2355579 - RNA, 19 nt, Artificial Sequence
  Description of Artificial Sequence: Synthetic oligonucleotide
uaugauuuccggucuugag

SEQ ID NO: 2355580 - RNA, 19 nt, Artificial Sequence
  Description of Artificial Sequence: Synthetic oligonucleotide
auuuaggguuuguaacugg

SEQ ID NO: 2355581 - RNA, 19 nt, Artificial Sequence
  Description of Artificial Sequence: Synthetic oligonucleotide
auccaauucaaaauaaacu

SEQ ID NO: 2355582 - RNA, 19 nt, Artificial Sequence
  Description of Artificial Sequence: Synthetic oligonucleotide
uccacuuuucucuuagaga

SEQ ID NO: 2355583 - RNA, 19 nt, Artificial Sequence
  Description of Artificial Sequence: Synthetic oligonucleotide
agaacgagaauauuuggua

SEQ ID NO: 2355584 - RNA, 19 nt, Artificial Sequence
  Description of Artificial Sequence: Synthetic oligonucleotide
aaugagucuucuugaauua

SEQ ID NO: 2355585 - RNA, 19 nt, Artificial Sequence
  Description of Artificial Sequence: Synthetic oligonucleotide
uuucuuuagcuucuuuagu

SEQ ID NO: 2355586 - RNA, 19 nt, Artificial Sequence
  Description of Artificial Sequence: Synthetic oligonucleotide
aaguaacgugccuauagau

SEQ ID NO: 2355587 - RNA, 19 nt, Artificial Sequence
  Description of Artificial Sequence: Synthetic oligonucleotide
uguucccucgggcaaauca

SEQ ID NO: 2355588 - RNA, 19 nt, Artificial Sequence
  Description of Artificial Sequence: Synthetic oligonucleotide
ucucgccacacaaaucccg

SEQ ID NO: 2355589 - RNA, 19 nt, Artificial Sequence
  Description of Artificial Sequence: Synthetic oligonucleotide
aagaacgagaauauuuggu

SEQ ID NO: 2355590 - RNA, 19 nt, Artificial Sequence
  Description of Artificial Sequence: Synthetic oligonucleotide
auuugguaaguaacgugcc

SEQ ID NO: 2355591 - RNA, 19 nt, Artificial Sequence
  Description of Artificial Sequence: Synthetic oligonucleotide
cauagcauuuaagacaaug

SEQ ID NO: 2355592 - RNA, 19 nt, Artificial Sequence
  Description of Artificial Sequence: Synthetic oligonucleotide
agcgaugucuucuuccguc

SEQ ID NO: 2355593 - RNA, 19 nt, Artificial Sequence
  Description of Artificial Sequence: Synthetic oligonucleotide
uuccguuguauauuuugag

SEQ ID NO: 2355594 - RNA, 19 nt, Artificial Sequence
  Description of Artificial Sequence: Synthetic oligonucleotide
uuagcuucuuuaguuuagg

SEQ ID NO: 2355595 - RNA, 19 nt, Artificial Sequence
  Description of Artificial Sequence: Synthetic oligonucleotide
gaacagacuauugaaucgc

SEQ ID NO: 2355596 - RNA, 19 nt, Artificial Sequence
  Description of Artificial Sequence: Synthetic oligonucleotide
aucccggauauauggagcg

SEQ ID NO: 2355597 - RNA, 19 nt, Artificial Sequence
  Description of Artificial Sequence: Synthetic oligonucleotide
ugaauuugaucaagcaaau

SEQ ID NO: 2355598 - RNA, 19 nt, Artificial Sequence
  Description of Artificial Sequence: Synthetic oligonucleotide
aauaugauuuccggucuug

SEQ ID NO: 2355599 - RNA, 19 nt, Artificial Sequence
  Description of Artificial Sequence: Synthetic oligonucleotide
uuaggguuuguaacugggc

SEQ ID NO: 2355600 - RNA, 19 nt, Artificial Sequence
  Description of Artificial Sequence: Synthetic oligonucleotide
gagagaacagacuauugaa

SEQ ID NO: 2355601 - RNA, 19 nt, Artificial Sequence
  Description of Artificial Sequence: Synthetic oligonucleotide
ccguuguauauuuugagcg

SEQ ID NO: 2355602 - RNA, 19 nt, Artificial Sequence
  Description of Artificial Sequence: Synthetic oligonucleotide
guggacaauguuuuccuag

SEQ ID NO: 2355603 - RNA, 19 nt, Artificial Sequence
  Description of Artificial Sequence: Synthetic oligonucleotide
aacucccaauaauuauuag

SEQ ID NO: 2355604 - RNA, 19 nt, Artificial Sequence
  Description of Artificial Sequence: Synthetic oligonucleotide
uccaauagccuccaaucuc

SEQ ID NO: 2355605 - RNA, 19 nt, Artificial Sequence
  Description of Artificial Sequence: Synthetic oligonucleotide
caccauuuugcauugaaga

SEQ ID NO: 2355606 - RNA, 19 nt, Artificial Sequence
  Description of Artificial Sequence: Synthetic oligonucleotide
uccaucagaaguuucuuua

SEQ ID NO: 2355607 - RNA, 19 nt, Artificial Sequence
  Description of Artificial Sequence: Synthetic oligonucleotide
acucaucuagauuaaacuu

SEQ ID NO: 2355608 - RNA, 19 nt, Artificial Sequence
  Description of Artificial Sequence: Synthetic oligonucleotide
aaucuuccguuguauauuu

SEQ ID NO: 2355609 - RNA, 19 nt, Artificial Sequence
  Description of Artificial Sequence: Synthetic oligonucleotide
uaaaugagucuucuugaau

SEQ ID NO: 2355610 - RNA, 19 nt, Artificial Sequence
  Description of Artificial Sequence: Synthetic oligonucleotide
agaccaagauucagaaucc

SEQ ID NO: 2355611 - RNA, 19 nt, Artificial Sequence
  Description of Artificial Sequence: Synthetic oligonucleotide
agguccaaguuccugcagg

SEQ ID NO: 2355612 - RNA, 19 nt, Artificial Sequence
  Description of Artificial Sequence: Synthetic oligonucleotide
acuuucacaccauuuugca

SEQ ID NO: 2355613 - RNA, 19 nt, Artificial Sequence
  Description of Artificial Sequence: Synthetic oligonucleotide
acuuuacuaaaagaccaag

SEQ ID NO: 2355614 - RNA, 19 nt, Artificial Sequence
  Description of Artificial Sequence: Synthetic oligonucleotide
uaacucccaauaauuauua

SEQ ID NO: 2355615 - RNA, 19 nt, Artificial Sequence
  Description of Artificial Sequence: Synthetic oligonucleotide
auagcauuuaagacaaugu

SEQ ID NO: 2355616 - RNA, 19 nt, Artificial Sequence
  Description of Artificial Sequence: Synthetic oligonucleotide
cuuuacuaaaagaccaaga

SEQ ID NO: 2355617 - RNA, 19 nt, Artificial Sequence
  Description of Artificial Sequence: Synthetic oligonucleotide
guuguauauuuugagcggc

SEQ ID NO: 2355618 - RNA, 19 nt, Artificial Sequence
  Description of Artificial Sequence: Synthetic oligonucleotide
cuaaaagaccaagauucag

SEQ ID NO: 2355619 - RNA, 19 nt, Artificial Sequence
  Description of Artificial Sequence: Synthetic oligonucleotide
ugucagggccuucauaggu

SEQ ID NO: 2355620 - RNA, 19 nt, Artificial Sequence
  Description of Artificial Sequence: Synthetic oligonucleotide
guccacuuuucucuuagag

SEQ ID NO: 2355621 - RNA, 19 nt, Artificial Sequence
  Description of Artificial Sequence: Synthetic oligonucleotide
acuauugaaucgcuccugu

SEQ ID NO: 2355622 - RNA, 19 nt, Artificial Sequence
  Description of Artificial Sequence: Synthetic oligonucleotide
aucuucuuaacucccaaua

SEQ ID NO: 2355623 - RNA, 19 nt, Artificial Sequence
  Description of Artificial Sequence: Synthetic oligonucleotide
ucuuaucagcauccaauuc

SEQ ID NO: 2355624 - RNA, 19 nt, Artificial Sequence
  Description of Artificial Sequence: Synthetic oligonucleotide
uggacaauguuuuccuagu

SEQ ID NO: 2355625 - RNA, 19 nt, Artificial Sequence
  Description of Artificial Sequence: Synthetic oligonucleotide
accauuuugcauugaagaa

SEQ ID NO: 2355626 - RNA, 19 nt, Artificial Sequence
  Description of Artificial Sequence: Synthetic oligonucleotide
ugaaacucaucuagauuaa

SEQ ID NO: 2355627 - RNA, 19 nt, Artificial Sequence
  Description of Artificial Sequence: Synthetic oligonucleotide
gaacgagaauauuugguaa

SEQ ID NO: 2355628 - RNA, 19 nt, Artificial Sequence
  Description of Artificial Sequence: Synthetic oligonucleotide
aguuuaggucugcaucuuc

SEQ ID NO: 2355629 - RNA, 19 nt, Artificial Sequence
  Description of Artificial Sequence: Synthetic oligonucleotide
uuauaaacuuucacaccau

SEQ ID NO: 2355630 - RNA, 19 nt, Artificial Sequence
  Description of Artificial Sequence: Synthetic oligonucleotide
ucagaaguuucuuuagcuu

SEQ ID NO: 2355631 - RNA, 19 nt, Artificial Sequence
  Description of Artificial Sequence: Synthetic oligonucleotide
uugucauucccucggggac

SEQ ID NO: 2355632 - RNA, 19 nt, Artificial Sequence
  Description of Artificial Sequence: Synthetic oligonucleotide
ucccaauaauuauuagaga

SEQ ID NO: 2355633 - RNA, 19 nt, Artificial Sequence
  Description of Artificial Sequence: Synthetic oligonucleotide
cuugaauuauaaacuuuca

SEQ ID NO: 2355634 - RNA, 19 nt, Artificial Sequence
  Description of Artificial Sequence: Synthetic oligonucleotide
uuagagagaacagacuauu

SEQ ID NO: 2355635 - RNA, 19 nt, Artificial Sequence
  Description of Artificial Sequence: Synthetic oligonucleotide
cuauccaccagugcuaaac

SEQ ID NO: 2355636 - RNA, 19 nt, Artificial Sequence
  Description of Artificial Sequence: Synthetic oligonucleotide
uuguauauuuugagcggcu

SEQ ID NO: 2355637 - RNA, 19 nt, Artificial Sequence
  Description of Artificial Sequence: Synthetic oligonucleotide
cacgugauucagaaguuug

SEQ ID NO: 2355638 - RNA, 19 nt, Artificial Sequence
  Description of Artificial Sequence: Synthetic oligonucleotide
aauagccuccaaucucaca

SEQ ID NO: 2355639 - RNA, 19 nt, Artificial Sequence
  Description of Artificial Sequence: Synthetic oligonucleotide
auugaaucgcuccuguguu

SEQ ID NO: 2355640 - RNA, 19 nt, Artificial Sequence
  Description of Artificial Sequence: Synthetic oligonucleotide
agcuucuauccaccagugc

SEQ ID NO: 2355641 - RNA, 19 nt, Artificial Sequence
  Description of Artificial Sequence: Synthetic oligonucleotide
ggcauuuaggguuuguaac

SEQ ID NO: 2355642 - RNA, 19 nt, Artificial Sequence
  Description of Artificial Sequence: Synthetic oligonucleotide
ugagucuucuugaauuaua

SEQ ID NO: 2355643 - RNA, 19 nt, Artificial Sequence
  Description of Artificial Sequence: Synthetic oligonucleotide
uaacugggccauuauuucu

SEQ ID NO: 2355644 - RNA, 19 nt, Artificial Sequence
  Description of Artificial Sequence: Synthetic oligonucleotide
ucgaucauuuccucuggcu

SEQ ID NO: 2355645 - RNA, 19 nt, Artificial Sequence
  Description of Artificial Sequence: Synthetic oligonucleotide
guaacugggccauuauuuc

SEQ ID NO: 2355646 - RNA, 19 nt, Artificial Sequence
  Description of Artificial Sequence: Synthetic oligonucleotide
ugcuucucgccacacaaau

SEQ ID NO: 2355647 - RNA, 19 nt, Artificial Sequence
  Description of Artificial Sequence: Synthetic oligonucleotide
uccugaaacucaucuagau

SEQ ID NO: 2355648 - RNA, 19 nt, Artificial Sequence
  Description of Artificial Sequence: Synthetic oligonucleotide
ucuuuaugacugucagggc

SEQ ID NO: 2355649 - RNA, 19 nt, Artificial Sequence
  Description of Artificial Sequence: Synthetic oligonucleotide
uauuuugagcggcuuggau

SEQ ID NO: 2355650 - RNA, 19 nt, Artificial Sequence
  Description of Artificial Sequence: Synthetic oligonucleotide
accaagauucagaauccac

SEQ ID NO: 2355651 - RNA, 19 nt, Artificial Sequence
  Description of Artificial Sequence: Synthetic oligonucleotide
ugggucacgugauucagaa

SEQ ID NO: 2355652 - RNA, 19 nt, Artificial Sequence
  Description of Artificial Sequence: Synthetic oligonucleotide
ggggacuuuacuaaaagac

SEQ ID NO: 2355653 - RNA, 19 nt, Artificial Sequence
  Description of Artificial Sequence: Synthetic oligonucleotide
ugaucaagccgaguuguca

SEQ ID NO: 2355654 - RNA, 19 nt, Artificial Sequence
  Description of Artificial Sequence: Synthetic oligonucleotide
agucaaggggacuuuacua

SEQ ID NO: 2355655 - RNA, 19 nt, Artificial Sequence
  Description of Artificial Sequence: Synthetic oligonucleotide
cagaaguuugaucucauaa

SEQ ID NO: 2355656 - RNA, 19 nt, Artificial Sequence
  Description of Artificial Sequence: Synthetic oligonucleotide
uaacgugccuauagauugc

SEQ ID NO: 2355657 - RNA, 19 nt, Artificial Sequence
  Description of Artificial Sequence: Synthetic oligonucleotide
auucagaaguuugaucuca

SEQ ID NO: 2355658 - RNA, 19 nt, Artificial Sequence
  Description of Artificial Sequence: Synthetic oligonucleotide
aaucaucuacuuugagcaa

SEQ ID NO: 2355659 - RNA, 19 nt, Artificial Sequence
  Description of Artificial Sequence: Synthetic oligonucleotide
uccuccacauauuucuuuc

SEQ ID NO: 2355660 - RNA, 19 nt, Artificial Sequence
  Description of Artificial Sequence: Synthetic oligonucleotide
agcggcuuggaucucccuc

SEQ ID NO: 2355661 - RNA, 19 nt, Artificial Sequence
  Description of Artificial Sequence: Synthetic oligonucleotide
ucggccgucacucugcaua

SEQ ID NO: 2355662 - RNA, 19 nt, Artificial Sequence
  Description of Artificial Sequence: Synthetic oligonucleotide
caagauucagaauccacaa

SEQ ID NO: 2355663 - RNA, 19 nt, Artificial Sequence
  Description of Artificial Sequence: Synthetic oligonucleotide
aagcugggucacgugauuc

SEQ ID NO: 2355664 - RNA, 19 nt, Artificial Sequence
  Description of Artificial Sequence: Synthetic oligonucleotide
aucuuaucagcauccaauu

SEQ ID NO: 2355665 - RNA, 19 nt, Artificial Sequence
  Description of Artificial Sequence: Synthetic oligonucleotide
guucgaucauuuccucugg

SEQ ID NO: 2355666 - RNA, 19 nt, Artificial Sequence
  Description of Artificial Sequence: Synthetic oligonucleotide
uuuguaacugggccauuau

SEQ ID NO: 2355667 - RNA, 19 nt, Artificial Sequence
  Description of Artificial Sequence: Synthetic oligonucleotide
cucgccacacaaaucccgg

SEQ ID NO: 2355668 - RNA, 19 nt, Artificial Sequence
  Description of Artificial Sequence: Synthetic oligonucleotide
aggcauacagucaagggga

SEQ ID NO: 2355669 - RNA, 19 nt, Artificial Sequence
  Description of Artificial Sequence: Synthetic oligonucleotide
gacaauguucgaucauuuc

SEQ ID NO: 2355670 - RNA, 19 nt, Artificial Sequence
  Description of Artificial Sequence: Synthetic oligonucleotide
uaagacaauguucgaucau

SEQ ID NO: 2355671 - RNA, 19 nt, Artificial Sequence
  Description of Artificial Sequence: Synthetic oligonucleotide
uucgaucauuuccucuggc

SEQ ID NO: 2355672 - RNA, 19 nt, Artificial Sequence
  Description of Artificial Sequence: Synthetic oligonucleotide
acucugcauaucuuaucag

SEQ ID NO: 2355673 - RNA, 19 nt, Artificial Sequence
  Description of Artificial Sequence: Synthetic oligonucleotide
auuuccggucuugagcuuc

SEQ ID NO: 2355674 - RNA, 19 nt, Artificial Sequence
  Description of Artificial Sequence: Synthetic oligonucleotide
gauuaaacuucacagcauu

SEQ ID NO: 2355675 - RNA, 19 nt, Artificial Sequence
  Description of Artificial Sequence: Synthetic oligonucleotide
gacaauguuuuccuagugu

SEQ ID NO: 2355676 - RNA, 19 nt, Artificial Sequence
  Description of Artificial Sequence: Synthetic oligonucleotide
ucaaggggacuuuacuaaa

SEQ ID NO: 2355677 - RNA, 19 nt, Artificial Sequence
  Description of Artificial Sequence: Synthetic oligonucleotide
auucaagaauccuccaaua

SEQ ID NO: 2355678 - RNA, 19 nt, Artificial Sequence
  Description of Artificial Sequence: Synthetic oligonucleotide
aggggacuuuacuaaaaga

SEQ ID NO: 2355679 - RNA, 19 nt, Artificial Sequence
  Description of Artificial Sequence: Synthetic oligonucleotide
agcugaucaagccgaguug

SEQ ID NO: 2355680 - RNA, 19 nt, Artificial Sequence
  Description of Artificial Sequence: Synthetic oligonucleotide
auaucuuaucagcauccaa

SEQ ID NO: 2355681 - RNA, 19 nt, Artificial Sequence
  Description of Artificial Sequence: Synthetic oligonucleotide
aagguccaaguuccugcag

SEQ ID NO: 2355682 - RNA, 19 nt, Artificial Sequence
  Description of Artificial Sequence: Synthetic oligonucleotide
aggcauuuaggguuuguaa

SEQ ID NO: 2355683 - RNA, 19 nt, Artificial Sequence
  Description of Artificial Sequence: Synthetic oligonucleotide
cccaauaauuauuagagaa

SEQ ID NO: 2355684 - RNA, 19 nt, Artificial Sequence
  Description of Artificial Sequence: Synthetic oligonucleotide
cacucugcauaucuuauca

SEQ ID NO: 2355685 - RNA, 19 nt, Artificial Sequence
  Description of Artificial Sequence: Synthetic oligonucleotide
gggacuuuacuaaaagacc

SEQ ID NO: 2355686 - RNA, 19 nt, Artificial Sequence
  Description of Artificial Sequence: Synthetic oligonucleotide
uuccucacuugccugaauu

SEQ ID NO: 2355687 - RNA, 19 nt, Artificial Sequence
  Description of Artificial Sequence: Synthetic oligonucleotide
gucaaggggacuuuacuaa

SEQ ID NO: 2355688 - RNA, 19 nt, Artificial Sequence
  Description of Artificial Sequence: Synthetic oligonucleotide
guaaaugagucuucuugaa

SEQ ID NO: 2355689 - RNA, 19 nt, Artificial Sequence
  Description of Artificial Sequence: Synthetic oligonucleotide
ggacuuuacuaaaagacca

SEQ ID NO: 2355690 - RNA, 19 nt, Artificial Sequence
  Description of Artificial Sequence: Synthetic oligonucleotide
cacaaaucccggauauaug

SEQ ID NO: 2355691 - RNA, 19 nt, Artificial Sequence
  Description of Artificial Sequence: Synthetic oligonucleotide
uugguaaguaacgugccua

SEQ ID NO: 2355692 - RNA, 19 nt, Artificial Sequence
  Description of Artificial Sequence: Synthetic oligonucleotide
gucuugagcuucuauccac

SEQ ID NO: 2355693 - RNA, 19 nt, Artificial Sequence
  Description of Artificial Sequence: Synthetic oligonucleotide
auauggagcgaugucuucu

SEQ ID NO: 2355694 - RNA, 19 nt, Artificial Sequence
  Description of Artificial Sequence: Synthetic oligonucleotide
ugguaaguaacgugccuau

SEQ ID NO: 2355695 - RNA, 19 nt, Artificial Sequence
  Description of Artificial Sequence: Synthetic oligonucleotide
uaaguaaaugagucuucuu

SEQ ID NO: 2355696 - RNA, 19 nt, Artificial Sequence
  Description of Artificial Sequence: Synthetic oligonucleotide
cuuuuaaguaaaugagucu

SEQ ID NO: 2355697 - RNA, 19 nt, Artificial Sequence
  Description of Artificial Sequence: Synthetic oligonucleotide
cauaaucaaauucaagaau

SEQ ID NO: 2355698 - RNA, 19 nt, Artificial Sequence
  Description of Artificial Sequence: Synthetic oligonucleotide
uuguaacugggccauuauu

SEQ ID NO: 2355699 - RNA, 19 nt, Artificial Sequence
  Description of Artificial Sequence: Synthetic oligonucleotide
uucagaaguuugaucucau

SEQ ID NO: 2355700 - RNA, 19 nt, Artificial Sequence
  Description of Artificial Sequence: Synthetic oligonucleotide
aucaagcaaaucuuccguu

SEQ ID NO: 2355701 - RNA, 19 nt, Artificial Sequence
  Description of Artificial Sequence: Synthetic oligonucleotide
aagcaaaucuuccguugua

SEQ ID NO: 2355702 - RNA, 19 nt, Artificial Sequence
  Description of Artificial Sequence: Synthetic oligonucleotide
acuaaaagaccaagauuca

SEQ ID NO: 2355703 - RNA, 19 nt, Artificial Sequence
  Description of Artificial Sequence: Synthetic oligonucleotide
ucacuugccugaauuugau

SEQ ID NO: 2355704 - RNA, 19 nt, Artificial Sequence
  Description of Artificial Sequence: Synthetic oligonucleotide
cuauugaaucgcuccugug

SEQ ID NO: 2355705 - RNA, 19 nt, Artificial Sequence
  Description of Artificial Sequence: Synthetic oligonucleotide
cauagguauuuuccaucag

SEQ ID NO: 2355706 - RNA, 19 nt, Artificial Sequence
  Description of Artificial Sequence: Synthetic oligonucleotide
aacagacuauugaaucgcu

SEQ ID NO: 2355707 - RNA, 19 nt, Artificial Sequence
  Description of Artificial Sequence: Synthetic oligonucleotide
uauauggagcgaugucuuc

SEQ ID NO: 2355708 - RNA, 19 nt, Artificial Sequence
  Description of Artificial Sequence: Synthetic oligonucleotide
acagacuauugaaucgcuc

SEQ ID NO: 2355709 - RNA, 19 nt, Artificial Sequence
  Description of Artificial Sequence: Synthetic oligonucleotide
acgagaauauuugguaagu

SEQ ID NO: 2355710 - RNA, 19 nt, Artificial Sequence
  Description of Artificial Sequence: Synthetic oligonucleotide
acaccauuuugcauugaag

SEQ ID NO: 2355711 - RNA, 19 nt, Artificial Sequence
  Description of Artificial Sequence: Synthetic oligonucleotide
gaauuugaucaagcaaauc

SEQ ID NO: 2355712 - RNA, 19 nt, Artificial Sequence
  Description of Artificial Sequence: Synthetic oligonucleotide
acagucaaggggacuuuac

SEQ ID NO: 2355713 - RNA, 19 nt, Artificial Sequence
  Description of Artificial Sequence: Synthetic oligonucleotide
aucaucuacuuugagcaaa

SEQ ID NO: 2355714 - RNA, 19 nt, Artificial Sequence
  Description of Artificial Sequence: Synthetic oligonucleotide
ucccucgggcaaaucaucu

SEQ ID NO: 2355715 - RNA, 19 nt, Artificial Sequence
  Description of Artificial Sequence: Synthetic oligonucleotide
ugccacacuuccugaaacu

SEQ ID NO: 2355716 - RNA, 19 nt, Artificial Sequence
  Description of Artificial Sequence: Synthetic oligonucleotide
cucacuugccugaauuuga

SEQ ID NO: 2355717 - RNA, 19 nt, Artificial Sequence
  Description of Artificial Sequence: Synthetic oligonucleotide
uguauauuuugagcggcuu

SEQ ID NO: 2355718 - RNA, 19 nt, Artificial Sequence
  Description of Artificial Sequence: Synthetic oligonucleotide
gcauugaagaacgagaaua

SEQ ID NO: 2355719 - RNA, 19 nt, Artificial Sequence
  Description of Artificial Sequence: Synthetic oligonucleotide
aacgugccuauagauugcu

SEQ ID NO: 2355720 - RNA, 19 nt, Artificial Sequence
  Description of Artificial Sequence: Synthetic oligonucleotide
uccacaagcugggucacgu

SEQ ID NO: 2355721 - RNA, 19 nt, Artificial Sequence
  Description of Artificial Sequence: Synthetic oligonucleotide
cuuuagcuucuuuaguuua

SEQ ID NO: 2355722 - RNA, 19 nt, Artificial Sequence
  Description of Artificial Sequence: Synthetic oligonucleotide
aguaacgugccuauagauu

SEQ ID NO: 2355723 - RNA, 19 nt, Artificial Sequence
  Description of Artificial Sequence: Synthetic oligonucleotide
cguuguauauuuugagcgg

SEQ ID NO: 2355724 - RNA, 19 nt, Artificial Sequence
  Description of Artificial Sequence: Synthetic oligonucleotide
caaagaucucaguguggac

SEQ ID NO: 2355725 - RNA, 19 nt, Artificial Sequence
  Description of Artificial Sequence: Synthetic oligonucleotide
gauucagaauccacaagcu

SEQ ID NO: 2355726 - RNA, 19 nt, Artificial Sequence
  Description of Artificial Sequence: Synthetic oligonucleotide
ugagcggcuuggaucuccc

SEQ ID NO: 2355727 - RNA, 19 nt, Artificial Sequence
  Description of Artificial Sequence: Synthetic oligonucleotide
ugucauucccucggggaca

SEQ ID NO: 2355728 - RNA, 19 nt, Artificial Sequence
  Description of Artificial Sequence: Synthetic oligonucleotide
ucagaaguuugaucucaua

SEQ ID NO: 2355729 - RNA, 19 nt, Artificial Sequence
  Description of Artificial Sequence: Synthetic oligonucleotide
uauggagcgaugucuucuu

SEQ ID NO: 2355730 - RNA, 19 nt, Artificial Sequence
  Description of Artificial Sequence: Synthetic oligonucleotide
accaaagaucucagugugg

SEQ ID NO: 2355731 - RNA, 19 nt, Artificial Sequence
  Description of Artificial Sequence: Synthetic oligonucleotide
auaugauuuccggucuuga

SEQ ID NO: 2355732 - RNA, 19 nt, Artificial Sequence
  Description of Artificial Sequence: Synthetic oligonucleotide
caagccgaguugucauucc

SEQ ID NO: 2355733 - RNA, 19 nt, Artificial Sequence
  Description of Artificial Sequence: Synthetic oligonucleotide
cucacaggcauuuaggguu

SEQ ID NO: 2355734 - RNA, 19 nt, Artificial Sequence
  Description of Artificial Sequence: Synthetic oligonucleotide
ccuccaauagccuccaauc

SEQ ID NO: 2355735 - RNA, 19 nt, Artificial Sequence
  Description of Artificial Sequence: Synthetic oligonucleotide
aucucggccgucacucugc

SEQ ID NO: 2355736 - RNA, 19 nt, Artificial Sequence
  Description of Artificial Sequence: Synthetic oligonucleotide
aauccuccaauagccucca

SEQ ID NO: 2355737 - RNA, 19 nt, Artificial Sequence
  Description of Artificial Sequence: Synthetic oligonucleotide
cugccacacuuccugaaac

SEQ ID NO: 2355738 - RNA, 19 nt, Artificial Sequence
  Description of Artificial Sequence: Synthetic oligonucleotide
ucucaguguggacaauguu

SEQ ID NO: 2355739 - RNA, 19 nt, Artificial Sequence
  Description of Artificial Sequence: Synthetic oligonucleotide
aaucgcuccuguguucccu

SEQ ID NO: 2355740 - RNA, 19 nt, Artificial Sequence
  Description of Artificial Sequence: Synthetic oligonucleotide
caaaucccggauauaugga

SEQ ID NO: 2355741 - RNA, 19 nt, Artificial Sequence
  Description of Artificial Sequence: Synthetic oligonucleotide
cauuuaagacaauguucga

SEQ ID NO: 2355742 - RNA, 19 nt, Artificial Sequence
  Description of Artificial Sequence: Synthetic oligonucleotide
gcuucuauccaccagugcu

SEQ ID NO: 2355743 - RNA, 19 nt, Artificial Sequence
  Description of Artificial Sequence: Synthetic oligonucleotide
uugaaucgcuccuguguuc

SEQ ID NO: 2355744 - RNA, 19 nt, Artificial Sequence
  Description of Artificial Sequence: Synthetic oligonucleotide
uuuccggucuugagcuucu

SEQ ID NO: 2355745 - RNA, 19 nt, Artificial Sequence
  Description of Artificial Sequence: Synthetic oligonucleotide
agcaaaucuuccguuguau

SEQ ID NO: 2355746 - RNA, 19 nt, Artificial Sequence
  Description of Artificial Sequence: Synthetic oligonucleotide
auauauggagcgaugucuu

SEQ ID NO: 2355747 - RNA, 19 nt, Artificial Sequence
  Description of Artificial Sequence: Synthetic oligonucleotide
gacuuuacuaaaagaccaa

SEQ ID NO: 2355748 - RNA, 19 nt, Artificial Sequence
  Description of Artificial Sequence: Synthetic oligonucleotide
cuccacauauuucuuucca

SEQ ID NO: 2355749 - RNA, 19 nt, Artificial Sequence
  Description of Artificial Sequence: Synthetic oligonucleotide
ucgggcaaaucaucuacuu

SEQ ID NO: 2355750 - RNA, 19 nt, Artificial Sequence
  Description of Artificial Sequence: Synthetic oligonucleotide
ccaauaauuauuagagaaa

SEQ ID NO: 2355751 - RNA, 19 nt, Artificial Sequence
  Description of Artificial Sequence: Synthetic oligonucleotide
agcauccaauucaaaauaa

SEQ ID NO: 2355752 - RNA, 19 nt, Artificial Sequence
  Description of Artificial Sequence: Synthetic oligonucleotide
gccauuauuucuuccucac

SEQ ID NO: 2355753 - RNA, 19 nt, Artificial Sequence
  Description of Artificial Sequence: Synthetic oligonucleotide
gaucaagccgaguugucau

SEQ ID NO: 2355754 - RNA, 19 nt, Artificial Sequence
  Description of Artificial Sequence: Synthetic oligonucleotide
gguccaaguuccugcaggc

SEQ ID NO: 2355755 - RNA, 19 nt, Artificial Sequence
  Description of Artificial Sequence: Synthetic oligonucleotide
uccaaagguccaaguuccu

SEQ ID NO: 2355756 - RNA, 19 nt, Artificial Sequence
  Description of Artificial Sequence: Synthetic oligonucleotide
ggauauauggagcgauguc

SEQ ID NO: 2355757 - RNA, 19 nt, Artificial Sequence
  Description of Artificial Sequence: Synthetic oligonucleotide
gcaaaucaucuacuuugag

SEQ ID NO: 2355758 - RNA, 19 nt, Artificial Sequence
  Description of Artificial Sequence: Synthetic oligonucleotide
uucccucggggacacucug

SEQ ID NO: 2355759 - RNA, 19 nt, Artificial Sequence
  Description of Artificial Sequence: Synthetic oligonucleotide
gagcuucuauccaccagug

SEQ ID NO: 2355760 - RNA, 19 nt, Artificial Sequence
  Description of Artificial Sequence: Synthetic oligonucleotide
uucccucgggcaaaucauc

SEQ ID NO: 2355761 - RNA, 19 nt, Artificial Sequence
  Description of Artificial Sequence: Synthetic oligonucleotide
caaaucuuccguuguauau

SEQ ID NO: 2355762 - RNA, 19 nt, Artificial Sequence
  Description of Artificial Sequence: Synthetic oligonucleotide
ggacaauguuuuccuagug

SEQ ID NO: 2355763 - RNA, 19 nt, Artificial Sequence
  Description of Artificial Sequence: Synthetic oligonucleotide
cagcauccaauucaaaaua

SEQ ID NO: 2355764 - RNA, 19 nt, Artificial Sequence
  Description of Artificial Sequence: Synthetic oligonucleotide
uugagcggcuuggaucucc

SEQ ID NO: 2355765 - RNA, 19 nt, Artificial Sequence
  Description of Artificial Sequence: Synthetic oligonucleotide
auauuuugagcggcuugga

SEQ ID NO: 2355766 - RNA, 19 nt, Artificial Sequence
  Description of Artificial Sequence: Synthetic oligonucleotide
cgaguugucauucccucgg

SEQ ID NO: 2355767 - RNA, 19 nt, Artificial Sequence
  Description of Artificial Sequence: Synthetic oligonucleotide
uugcuucucgccacacaaa

SEQ ID NO: 2355768 - RNA, 19 nt, Artificial Sequence
  Description of Artificial Sequence: Synthetic oligonucleotide
gaaucgcuccuguguuccc

SEQ ID NO: 2355769 - RNA, 19 nt, Artificial Sequence
  Description of Artificial Sequence: Synthetic oligonucleotide
acgugauucagaaguuuga

SEQ ID NO: 2355770 - RNA, 19 nt, Artificial Sequence
  Description of Artificial Sequence: Synthetic oligonucleotide
ggaucucccucuuuaugac

SEQ ID NO: 2355771 - RNA, 19 nt, Artificial Sequence
  Description of Artificial Sequence: Synthetic oligonucleotide
uucuuccguccacuuuucu

SEQ ID NO: 2355772 - RNA, 19 nt, Artificial Sequence
  Description of Artificial Sequence: Synthetic oligonucleotide
ucggggacacucugcugcc

SEQ ID NO: 2355773 - RNA, 19 nt, Artificial Sequence
  Description of Artificial Sequence: Synthetic oligonucleotide
ccucuggcuccaaaggucc

SEQ ID NO: 2355774 - RNA, 19 nt, Artificial Sequence
  Description of Artificial Sequence: Synthetic oligonucleotide
ucgcuccuguguucccucg

SEQ ID NO: 2355775 - RNA, 19 nt, Artificial Sequence
  Description of Artificial Sequence: Synthetic oligonucleotide
ucucccucuuuaugacugu

SEQ ID NO: 2355776 - RNA, 19 nt, Artificial Sequence
  Description of Artificial Sequence: Synthetic oligonucleotide
ucacgugauucagaaguuu

SEQ ID NO: 2355777 - RNA, 19 nt, Artificial Sequence
  Description of Artificial Sequence: Synthetic oligonucleotide
gcauuuaggguuuguaacu

SEQ ID NO: 2355778 - RNA, 19 nt, Artificial Sequence
  Description of Artificial Sequence: Synthetic oligonucleotide
ccucuuuaugacugucagg

SEQ ID NO: 2355779 - RNA, 19 nt, Artificial Sequence
  Description of Artificial Sequence: Synthetic oligonucleotide
gugccuauagauugcuucu

SEQ ID NO: 2355780 - RNA, 19 nt, Artificial Sequence
  Description of Artificial Sequence: Synthetic oligonucleotide
caaguuccugcaggcauac

SEQ ID NO: 2355781 - RNA, 19 nt, Artificial Sequence
  Description of Artificial Sequence: Synthetic oligonucleotide
cauaucuuaucagcaucca

SEQ ID NO: 2355782 - RNA, 19 nt, Artificial Sequence
  Description of Artificial Sequence: Synthetic oligonucleotide
ugccuauagauugcuucuc

SEQ ID NO: 2355783 - RNA, 19 nt, Artificial Sequence
  Description of Artificial Sequence: Synthetic oligonucleotide
caaggggacuuuacuaaaa

SEQ ID NO: 2355784 - RNA, 19 nt, Artificial Sequence
  Description of Artificial Sequence: Synthetic oligonucleotide
uccggucuugagcuucuau

SEQ ID NO: 2355785 - RNA, 19 nt, Artificial Sequence
  Description of Artificial Sequence: Synthetic oligonucleotide
cugaucaagccgaguuguc

SEQ ID NO: 2355786 - RNA, 19 nt, Artificial Sequence
  Description of Artificial Sequence: Synthetic oligonucleotide
cuucuuccguccacuuuuc

SEQ ID NO: 2355787 - RNA, 19 nt, Artificial Sequence
  Description of Artificial Sequence: Synthetic oligonucleotide
agggccuucauagguauuu

SEQ ID NO: 2355788 - RNA, 19 nt, Artificial Sequence
  Description of Artificial Sequence: Synthetic oligonucleotide
cauucccucggggacacuc

SEQ ID NO: 2355789 - RNA, 19 nt, Artificial Sequence
  Description of Artificial Sequence: Synthetic oligonucleotide
cacaccauuuugcauugaa

SEQ ID NO: 2355790 - RNA, 19 nt, Artificial Sequence
  Description of Artificial Sequence: Synthetic oligonucleotide
cgugccuauagauugcuuc

SEQ ID NO: 2355791 - RNA, 19 nt, Artificial Sequence
  Description of Artificial Sequence: Synthetic oligonucleotide
cacuugccugaauuugauc

SEQ ID NO: 2355792 - RNA, 19 nt, Artificial Sequence
  Description of Artificial Sequence: Synthetic oligonucleotide
agacaauguucgaucauuu

SEQ ID NO: 2355793 - RNA, 19 nt, Artificial Sequence
  Description of Artificial Sequence: Synthetic oligonucleotide
caucucggccgucacucug

SEQ ID NO: 2355794 - RNA, 19 nt, Artificial Sequence
  Description of Artificial Sequence: Synthetic oligonucleotide
gaccaagauucagaaucca

SEQ ID NO: 2355795 - RNA, 19 nt, Artificial Sequence
  Description of Artificial Sequence: Synthetic oligonucleotide
gccugaauuugaucaagca

SEQ ID NO: 2355796 - RNA, 19 nt, Artificial Sequence
  Description of Artificial Sequence: Synthetic oligonucleotide
ucuggcuccaaagguccaa

SEQ ID NO: 2355797 - RNA, 19 nt, Artificial Sequence
  Description of Artificial Sequence: Synthetic oligonucleotide
ugagcugaucaagccgagu

SEQ ID NO: 2355798 - RNA, 19 nt, Artificial Sequence
  Description of Artificial Sequence: Synthetic oligonucleotide
uggcuccaaagguccaagu

SEQ ID NO: 2355799 - RNA, 19 nt, Artificial Sequence
  Description of Artificial Sequence: Synthetic oligonucleotide
ucucggccgucacucugca

SEQ ID NO: 2355800 - RNA, 19 nt, Artificial Sequence
  Description of Artificial Sequence: Synthetic oligonucleotide
ggccauuauuucuuccuca

SEQ ID NO: 2355801 - RNA, 19 nt, Artificial Sequence
  Description of Artificial Sequence: Synthetic oligonucleotide
ccucgggcaaaucaucuac

SEQ ID NO: 2355802 - RNA, 19 nt, Artificial Sequence
  Description of Artificial Sequence: Synthetic oligonucleotide
guuuguaacugggccauua

SEQ ID NO: 2355803 - RNA, 19 nt, Artificial Sequence
  Description of Artificial Sequence: Synthetic oligonucleotide
aucaagccgaguugucauu

SEQ ID NO: 2355804 - RNA, 19 nt, Artificial Sequence
  Description of Artificial Sequence: Synthetic oligonucleotide
gcgaugucuucuuccgucc

SEQ ID NO: 2355805 - RNA, 19 nt, Artificial Sequence
  Description of Artificial Sequence: Synthetic oligonucleotide
ccuccacauauuucuuucc

SEQ ID NO: 2355806 - RNA, 19 nt, Artificial Sequence
  Description of Artificial Sequence: Synthetic oligonucleotide
ccggucuugagcuucuauc

SEQ ID NO: 2355807 - RNA, 19 nt, Artificial Sequence
  Description of Artificial Sequence: Synthetic oligonucleotide
caguguggacaauguuuuc

SEQ ID NO: 2355808 - RNA, 19 nt, Artificial Sequence
  Description of Artificial Sequence: Synthetic oligonucleotide
acaagcugggucacgugau

SEQ ID NO: 2355809 - RNA, 19 nt, Artificial Sequence
  Description of Artificial Sequence: Synthetic oligonucleotide
cugcaggcauacagucaag

SEQ ID NO: 2355810 - RNA, 19 nt, Artificial Sequence
  Description of Artificial Sequence: Synthetic oligonucleotide
ccgaguugucauucccucg

SEQ ID NO: 2355811 - RNA, 19 nt, Artificial Sequence
  Description of Artificial Sequence: Synthetic oligonucleotide
cuccaauagccuccaaucu

SEQ ID NO: 2355812 - RNA, 19 nt, Artificial Sequence
  Description of Artificial Sequence: Synthetic oligonucleotide
auuuugcauugaagaacga

SEQ ID NO: 2355813 - RNA, 19 nt, Artificial Sequence
  Description of Artificial Sequence: Synthetic oligonucleotide
ucccggauauauggagcga

SEQ ID NO: 2355814 - RNA, 19 nt, Artificial Sequence
  Description of Artificial Sequence: Synthetic oligonucleotide
agccgaguugucauucccu

SEQ ID NO: 2355815 - RNA, 19 nt, Artificial Sequence
  Description of Artificial Sequence: Synthetic oligonucleotide
cuuucacaccauuuugcau

SEQ ID NO: 2355816 - RNA, 19 nt, Artificial Sequence
  Description of Artificial Sequence: Synthetic oligonucleotide
gggccauuauuucuuccuc

SEQ ID NO: 2355817 - RNA, 19 nt, Artificial Sequence
  Description of Artificial Sequence: Synthetic oligonucleotide
ccugcaggcauacagucaa

SEQ ID NO: 2355818 - RNA, 19 nt, Artificial Sequence
  Description of Artificial Sequence: Synthetic oligonucleotide
ccucacuugccugaauuug

SEQ ID NO: 2355819 - RNA, 19 nt, Artificial Sequence
  Description of Artificial Sequence: Synthetic oligonucleotide
gucauucccucggggacac

SEQ ID NO: 2355820 - RNA, 19 nt, Artificial Sequence
  Description of Artificial Sequence: Synthetic oligonucleotide
gccgaguugucauucccuc

SEQ ID NO: 2355821 - RNA, 19 nt, Artificial Sequence
  Description of Artificial Sequence: Synthetic oligonucleotide
ccguccacuuuucucuuag

SEQ ID NO: 2355822 - RNA, 19 nt, Artificial Sequence
  Description of Artificial Sequence: Synthetic oligonucleotide
uguguucccucgggcaaau

SEQ ID NO: 2355823 - RNA, 19 nt, Artificial Sequence
  Description of Artificial Sequence: Synthetic oligonucleotide
cugggucacgugauucaga

SEQ ID NO: 2355824 - RNA, 19 nt, Artificial Sequence
  Description of Artificial Sequence: Synthetic oligonucleotide
cagucaaggggacuuuacu

SEQ ID NO: 2355825 - RNA, 19 nt, Artificial Sequence
  Description of Artificial Sequence: Synthetic oligonucleotide
uuaugacugucagggccuu

SEQ ID NO: 2355826 - RNA, 19 nt, Artificial Sequence
  Description of Artificial Sequence: Synthetic oligonucleotide
uccguccacuuuucucuua

SEQ ID NO: 2355827 - RNA, 19 nt, Artificial Sequence
  Description of Artificial Sequence: Synthetic oligonucleotide
gcauccaauucaaaauaaa

SEQ ID NO: 2355828 - RNA, 19 nt, Artificial Sequence
  Description of Artificial Sequence: Synthetic oligonucleotide
ccggauauauggagcgaug

SEQ ID NO: 2355829 - RNA, 19 nt, Artificial Sequence
  Description of Artificial Sequence: Synthetic oligonucleotide
auucccucggggacacucu

SEQ ID NO: 2355830 - RNA, 19 nt, Artificial Sequence
  Description of Artificial Sequence: Synthetic oligonucleotide
ccaaagguccaaguuccug

SEQ ID NO: 2355831 - RNA, 19 nt, Artificial Sequence
  Description of Artificial Sequence: Synthetic oligonucleotide
ucacaccauuuugcauuga

SEQ ID NO: 2355832 - RNA, 19 nt, Artificial Sequence
  Description of Artificial Sequence: Synthetic oligonucleotide
auacagucaaggggacuuu

SEQ ID NO: 2355833 - RNA, 19 nt, Artificial Sequence
  Description of Artificial Sequence: Synthetic oligonucleotide
cuuggaucucccucuuuau

SEQ ID NO: 2355834 - RNA, 19 nt, Artificial Sequence
  Description of Artificial Sequence: Synthetic oligonucleotide
gcugaucaagccgaguugu

SEQ ID NO: 2355835 - RNA, 19 nt, Artificial Sequence
  Description of Artificial Sequence: Synthetic oligonucleotide
gucacucugcauaucuuau

SEQ ID NO: 2355836 - RNA, 19 nt, Artificial Sequence
  Description of Artificial Sequence: Synthetic oligonucleotide
caggcauuuaggguuugua

SEQ ID NO: 2355837 - RNA, 19 nt, Artificial Sequence
  Description of Artificial Sequence: Synthetic oligonucleotide
gucagggccuucauaggua

SEQ ID NO: 2355838 - RNA, 19 nt, Artificial Sequence
  Description of Artificial Sequence: Synthetic oligonucleotide
gccgucacucugcauaucu

SEQ ID NO: 2355839 - RNA, 19 nt, Artificial Sequence
  Description of Artificial Sequence: Synthetic oligonucleotide
gagcgaugucuucuuccgu

SEQ ID NO: 2355840 - RNA, 19 nt, Artificial Sequence
  Description of Artificial Sequence: Synthetic oligonucleotide
guucccucgggcaaaucau

SEQ ID NO: 2355841 - RNA, 19 nt, Artificial Sequence
  Description of Artificial Sequence: Synthetic oligonucleotide
uuugagcggcuuggaucuc

SEQ ID NO: 2355842 - RNA, 19 nt, Artificial Sequence
  Description of Artificial Sequence: Synthetic oligonucleotide
gcggcuuggaucucccucu

SEQ ID NO: 2355843 - RNA, 19 nt, Artificial Sequence
  Description of Artificial Sequence: Synthetic oligonucleotide
gcuucucgccacacaaauc

SEQ ID NO: 2355844 - RNA, 19 nt, Artificial Sequence
  Description of Artificial Sequence: Synthetic oligonucleotide
gauuuccggucuugagcuu

SEQ ID NO: 2355845 - RNA, 19 nt, Artificial Sequence
  Description of Artificial Sequence: Synthetic oligonucleotide
ccaaguuccugcaggcaua

SEQ ID NO: 2355846 - RNA, 19 nt, Artificial Sequence
  Description of Artificial Sequence: Synthetic oligonucleotide
ccuguguucccucgggcaa

SEQ ID NO: 2355847 - RNA, 19 nt, Artificial Sequence
  Description of Artificial Sequence: Synthetic oligonucleotide
cuguguucccucgggcaaa

SEQ ID NO: 2355848 - RNA, 19 nt, Artificial Sequence
  Description of Artificial Sequence: Synthetic oligonucleotide
gucacgugauucagaaguu

SEQ ID NO: 2355849 - RNA, 19 nt, Artificial Sequence
  Description of Artificial Sequence: Synthetic oligonucleotide
cgucacucugcauaucuua

SEQ ID NO: 2355850 - RNA, 19 nt, Artificial Sequence
  Description of Artificial Sequence: Synthetic oligonucleotide
cucccucuucagcugcucu

SEQ ID NO: 2355851 - RNA, 19 nt, Artificial Sequence
  Description of Artificial Sequence: Synthetic oligonucleotide
gccuccaaucucacaggca

SEQ ID NO: 2355852 - RNA, 19 nt, Artificial Sequence
  Description of Artificial Sequence: Synthetic oligonucleotide
acgugccuauagauugcuu

SEQ ID NO: 2355853 - RNA, 19 nt, Artificial Sequence
  Description of Artificial Sequence: Synthetic oligonucleotide
ucauucccucggggacacu

SEQ ID NO: 2355854 - RNA, 19 nt, Artificial Sequence
  Description of Artificial Sequence: Synthetic oligonucleotide
uuccggucuugagcuucua

SEQ ID NO: 2355855 - RNA, 19 nt, Artificial Sequence
  Description of Artificial Sequence: Synthetic oligonucleotide
ccucggggacacucugcug

SEQ ID NO: 2355856 - RNA, 19 nt, Artificial Sequence
  Description of Artificial Sequence: Synthetic oligonucleotide
gagcggcuuggaucucccu

SEQ ID NO: 2355857 - RNA, 19 nt, Artificial Sequence
  Description of Artificial Sequence: Synthetic oligonucleotide
cgagaauauuugguaagua

SEQ ID NO: 2355858 - RNA, 19 nt, Artificial Sequence
  Description of Artificial Sequence: Synthetic oligonucleotide
caacagcaucucggccguc

SEQ ID NO: 2355859 - RNA, 19 nt, Artificial Sequence
  Description of Artificial Sequence: Synthetic oligonucleotide
cuuccucacuugccugaau

SEQ ID NO: 2355860 - RNA, 19 nt, Artificial Sequence
  Description of Artificial Sequence: Synthetic oligonucleotide
cccucggggacacucugcu

SEQ ID NO: 2355861 - RNA, 19 nt, Artificial Sequence
  Description of Artificial Sequence: Synthetic oligonucleotide
cccggauauauggagcgau

SEQ ID NO: 2355862 - RNA, 19 nt, Artificial Sequence
  Description of Artificial Sequence: Synthetic oligonucleotide
ccaaucucacaggcauuua

SEQ ID NO: 2355863 - RNA, 19 nt, Artificial Sequence
  Description of Artificial Sequence: Synthetic oligonucleotide
cagggccuucauagguauu

SEQ ID NO: 2355864 - RNA, 19 nt, Artificial Sequence
  Description of Artificial Sequence: Synthetic oligonucleotide
ggcuuggaucucccucuuu

SEQ ID NO: 2355865 - RNA, 19 nt, Artificial Sequence
  Description of Artificial Sequence: Synthetic oligonucleotide
gcuaaacccuugagcugau

SEQ ID NO: 2355866 - RNA, 19 nt, Artificial Sequence
  Description of Artificial Sequence: Synthetic oligonucleotide
cgccacacaaaucccggau

SEQ ID NO: 2355867 - RNA, 19 nt, Artificial Sequence
  Description of Artificial Sequence: Synthetic oligonucleotide
cgggcaaaucaucuacuuu

SEQ ID NO: 2355868 - RNA, 19 nt, Artificial Sequence
  Description of Artificial Sequence: Synthetic oligonucleotide
cucggccgucacucugcau

SEQ ID NO: 2355869 - RNA, 19 nt, Artificial Sequence
  Description of Artificial Sequence: Synthetic oligonucleotide
gguuuguaacugggccauu

SEQ ID NO: 2355870 - RNA, 19 nt, Artificial Sequence
  Description of Artificial Sequence: Synthetic oligonucleotide
ccgucacucugcauaucuu

SEQ ID NO: 2355871 - RNA, 19 nt, Artificial Sequence
  Description of Artificial Sequence: Synthetic oligonucleotide
ccauagcauuuaagacaau

SEQ ID NO: 2355872 - RNA, 19 nt, Artificial Sequence
  Description of Artificial Sequence: Synthetic oligonucleotide
aauaccauuauuuuggagg

SEQ ID NO: 2355873 - RNA, 19 nt, Artificial Sequence
  Description of Artificial Sequence: Synthetic oligonucleotide
aaugaauggacuuuucucc

SEQ ID NO: 2355874 - RNA, 19 nt, Artificial Sequence
  Description of Artificial Sequence: Synthetic oligonucleotide
aaauuuuccaguaauaccc

SEQ ID NO: 2355875 - RNA, 19 nt, Artificial Sequence
  Description of Artificial Sequence: Synthetic oligonucleotide
aaaauuuuccaguaauacc

SEQ ID NO: 2355876 - RNA, 19 nt, Artificial Sequence
  Description of Artificial Sequence: Synthetic oligonucleotide
aauuuaaaucaucauagcu

SEQ ID NO: 2355877 - RNA, 19 nt, Artificial Sequence
  Description of Artificial Sequence: Synthetic oligonucleotide
auaauuuaaaucaucauag

SEQ ID NO: 2355878 - RNA, 19 nt, Artificial Sequence
  Description of Artificial Sequence: Synthetic oligonucleotide
cagaauaccauuauuuugg

SEQ ID NO: 2355879 - RNA, 19 nt, Artificial Sequence
  Description of Artificial Sequence: Synthetic oligonucleotide
uguacauaggccuuaaggc

SEQ ID NO: 2355880 - RNA, 19 nt, Artificial Sequence
  Description of Artificial Sequence: Synthetic oligonucleotide
uuuuggagggcucugauca

SEQ ID NO: 2355881 - RNA, 19 nt, Artificial Sequence
  Description of Artificial Sequence: Synthetic oligonucleotide
aaagugaacacgcuauuug

SEQ ID NO: 2355882 - RNA, 19 nt, Artificial Sequence
  Description of Artificial Sequence: Synthetic oligonucleotide
uuguguuagaaaugaaugg

SEQ ID NO: 2355883 - RNA, 19 nt, Artificial Sequence
  Description of Artificial Sequence: Synthetic oligonucleotide
uccaguaauacccagaaua

SEQ ID NO: 2355884 - RNA, 19 nt, Artificial Sequence
  Description of Artificial Sequence: Synthetic oligonucleotide
auguacauaggccuuaagg

SEQ ID NO: 2355885 - RNA, 19 nt, Artificial Sequence
  Description of Artificial Sequence: Synthetic oligonucleotide
ucugagauguaguagaacu

SEQ ID NO: 2355886 - RNA, 19 nt, Artificial Sequence
  Description of Artificial Sequence: Synthetic oligonucleotide
auuacucacauacacuggg

SEQ ID NO: 2355887 - RNA, 19 nt, Artificial Sequence
  Description of Artificial Sequence: Synthetic oligonucleotide
aucaucauagcuuugguga

SEQ ID NO: 2355888 - RNA, 19 nt, Artificial Sequence
  Description of Artificial Sequence: Synthetic oligonucleotide
uuaacuguggaaaauuuuc

SEQ ID NO: 2355889 - RNA, 19 nt, Artificial Sequence
  Description of Artificial Sequence: Synthetic oligonucleotide
uaaaucaucauagcuuugg

SEQ ID NO: 2355890 - RNA, 19 nt, Artificial Sequence
  Description of Artificial Sequence: Synthetic oligonucleotide
acauuacucacauacacug

SEQ ID NO: 2355891 - RNA, 19 nt, Artificial Sequence
  Description of Artificial Sequence: Synthetic oligonucleotide
auaccauuauuuuggaggg

SEQ ID NO: 2355892 - RNA, 19 nt, Artificial Sequence
  Description of Artificial Sequence: Synthetic oligonucleotide
ugaucauuguguuagaaau

SEQ ID NO: 2355893 - RNA, 19 nt, Artificial Sequence
  Description of Artificial Sequence: Synthetic oligonucleotide
uuuaaaucaucauagcuuu

SEQ ID NO: 2355894 - RNA, 19 nt, Artificial Sequence
  Description of Artificial Sequence: Synthetic oligonucleotide
ucuuguaggagaaagugaa

SEQ ID NO: 2355895 - RNA, 19 nt, Artificial Sequence
  Description of Artificial Sequence: Synthetic oligonucleotide
gaaaauuuuccaguaauac

SEQ ID NO: 2355896 - RNA, 19 nt, Artificial Sequence
  Description of Artificial Sequence: Synthetic oligonucleotide
ugaacacgcuauuugagag

SEQ ID NO: 2355897 - RNA, 19 nt, Artificial Sequence
  Description of Artificial Sequence: Synthetic oligonucleotide
uaggagaaagugaacacgc

SEQ ID NO: 2355898 - RNA, 19 nt, Artificial Sequence
  Description of Artificial Sequence: Synthetic oligonucleotide
augaauggacuuuucuccc

SEQ ID NO: 2355899 - RNA, 19 nt, Artificial Sequence
  Description of Artificial Sequence: Synthetic oligonucleotide
uccccauagauguacauag

SEQ ID NO: 2355900 - RNA, 19 nt, Artificial Sequence
  Description of Artificial Sequence: Synthetic oligonucleotide
ucaucugagauguaguaga

SEQ ID NO: 2355901 - RNA, 19 nt, Artificial Sequence
  Description of Artificial Sequence: Synthetic oligonucleotide
uguuagaaaugaauggacu

SEQ ID NO: 2355902 - RNA, 19 nt, Artificial Sequence
  Description of Artificial Sequence: Synthetic oligonucleotide
ugauuggugacuucuuggg

SEQ ID NO: 2355903 - RNA, 19 nt, Artificial Sequence
  Description of Artificial Sequence: Synthetic oligonucleotide
ugagcuuucuuguaggaga

SEQ ID NO: 2355904 - RNA, 19 nt, Artificial Sequence
  Description of Artificial Sequence: Synthetic oligonucleotide
uaauuuaaaucaucauagc

SEQ ID NO: 2355905 - RNA, 19 nt, Artificial Sequence
  Description of Artificial Sequence: Synthetic oligonucleotide
auuguguuagaaaugaaug

SEQ ID NO: 2355906 - RNA, 19 nt, Artificial Sequence
  Description of Artificial Sequence: Synthetic oligonucleotide
uguguuagaaaugaaugga

SEQ ID NO: 2355907 - RNA, 19 nt, Artificial Sequence
  Description of Artificial Sequence: Synthetic oligonucleotide
ucuuguaggccccuggcag

SEQ ID NO: 2355908 - RNA, 19 nt, Artificial Sequence
  Description of Artificial Sequence: Synthetic oligonucleotide
uuucuuguaggagaaagug

SEQ ID NO: 2355909 - RNA, 19 nt, Artificial Sequence
  Description of Artificial Sequence: Synthetic oligonucleotide
uaacuguggaaaauuuucc

SEQ ID NO: 2355910 - RNA, 19 nt, Artificial Sequence
  Description of Artificial Sequence: Synthetic oligonucleotide
aaguuuucuccuuggcuuc

SEQ ID NO: 2355911 - RNA, 19 nt, Artificial Sequence
  Description of Artificial Sequence: Synthetic oligonucleotide
aacuguggaaaauuuucca

SEQ ID NO: 2355912 - RNA, 19 nt, Artificial Sequence
  Description of Artificial Sequence: Synthetic oligonucleotide
aaguguggaaagugucacc

SEQ ID NO: 2355913 - RNA, 19 nt, Artificial Sequence
  Description of Artificial Sequence: Synthetic oligonucleotide
acuguggaaaauuuuccag

SEQ ID NO: 2355914 - RNA, 19 nt, Artificial Sequence
  Description of Artificial Sequence: Synthetic oligonucleotide
aagugaacacgcuauuuga

SEQ ID NO: 2355915 - RNA, 19 nt, Artificial Sequence
  Description of Artificial Sequence: Synthetic oligonucleotide
uggaaaauuuuccaguaau

SEQ ID NO: 2355916 - RNA, 19 nt, Artificial Sequence
  Description of Artificial Sequence: Synthetic oligonucleotide
gagagugugaccaaauggc

SEQ ID NO: 2355917 - RNA, 19 nt, Artificial Sequence
  Description of Artificial Sequence: Synthetic oligonucleotide
augauuggugacuucuugg

SEQ ID NO: 2355918 - RNA, 19 nt, Artificial Sequence
  Description of Artificial Sequence: Synthetic oligonucleotide
ugaaguuuucuccuuggcu

SEQ ID NO: 2355919 - RNA, 19 nt, Artificial Sequence
  Description of Artificial Sequence: Synthetic oligonucleotide
uggacuuuucuccccauag

SEQ ID NO: 2355920 - RNA, 19 nt, Artificial Sequence
  Description of Artificial Sequence: Synthetic oligonucleotide
ugagauguaguagaacugc

SEQ ID NO: 2355921 - RNA, 19 nt, Artificial Sequence
  Description of Artificial Sequence: Synthetic oligonucleotide
cauaauuuaaaucaucaua

SEQ ID NO: 2355922 - RNA, 19 nt, Artificial Sequence
  Description of Artificial Sequence: Synthetic oligonucleotide
uuuccaguaauacccagaa

SEQ ID NO: 2355923 - RNA, 19 nt, Artificial Sequence
  Description of Artificial Sequence: Synthetic oligonucleotide
uaggccuuaaggcacaagu

SEQ ID NO: 2355924 - RNA, 19 nt, Artificial Sequence
  Description of Artificial Sequence: Synthetic oligonucleotide
acuucuuggggucuuguag

SEQ ID NO: 2355925 - RNA, 19 nt, Artificial Sequence
  Description of Artificial Sequence: Synthetic oligonucleotide
aguaauacccagaauacca

SEQ ID NO: 2355926 - RNA, 19 nt, Artificial Sequence
  Description of Artificial Sequence: Synthetic oligonucleotide
uuguaggagaaagugaaca

SEQ ID NO: 2355927 - RNA, 19 nt, Artificial Sequence
  Description of Artificial Sequence: Synthetic oligonucleotide
uacauaggccuuaaggcac

SEQ ID NO: 2355928 - RNA, 19 nt, Artificial Sequence
  Description of Artificial Sequence: Synthetic oligonucleotide
auuuaaaucaucauagcuu

SEQ ID NO: 2355929 - RNA, 19 nt, Artificial Sequence
  Description of Artificial Sequence: Synthetic oligonucleotide
aacacgcuauuugagagug

SEQ ID NO: 2355930 - RNA, 19 nt, Artificial Sequence
  Description of Artificial Sequence: Synthetic oligonucleotide
auuggugacuucuuggggu

SEQ ID NO: 2355931 - RNA, 19 nt, Artificial Sequence
  Description of Artificial Sequence: Synthetic oligonucleotide
cacuacgugacccaacucc

SEQ ID NO: 2355932 - RNA, 19 nt, Artificial Sequence
  Description of Artificial Sequence: Synthetic oligonucleotide
uguaggagaaagugaacac

SEQ ID NO: 2355933 - RNA, 19 nt, Artificial Sequence
  Description of Artificial Sequence: Synthetic oligonucleotide
gauuggugacuucuugggg

SEQ ID NO: 2355934 - RNA, 19 nt, Artificial Sequence
  Description of Artificial Sequence: Synthetic oligonucleotide
acauacacuggguuaacug

SEQ ID NO: 2355935 - RNA, 19 nt, Artificial Sequence
  Description of Artificial Sequence: Synthetic oligonucleotide
uucuuguaggagaaaguga

SEQ ID NO: 2355936 - RNA, 19 nt, Artificial Sequence
  Description of Artificial Sequence: Synthetic oligonucleotide
uuuuccaguaauacccaga

SEQ ID NO: 2355937 - RNA, 19 nt, Artificial Sequence
  Description of Artificial Sequence: Synthetic oligonucleotide
uguaguagaacugcccuug

SEQ ID NO: 2355938 - RNA, 19 nt, Artificial Sequence
  Description of Artificial Sequence: Synthetic oligonucleotide
gaugauuggugacuucuug

SEQ ID NO: 2355939 - RNA, 19 nt, Artificial Sequence
  Description of Artificial Sequence: Synthetic oligonucleotide
ucaaggcauaauuuaaauc

SEQ ID NO: 2355940 - RNA, 19 nt, Artificial Sequence
  Description of Artificial Sequence: Synthetic oligonucleotide
uacacuggguuaacugugg

SEQ ID NO: 2355941 - RNA, 19 nt, Artificial Sequence
  Description of Artificial Sequence: Synthetic oligonucleotide
aucauuguguuagaaauga

SEQ ID NO: 2355942 - RNA, 19 nt, Artificial Sequence
  Description of Artificial Sequence: Synthetic oligonucleotide
guaggagaaagugaacacg

SEQ ID NO: 2355943 - RNA, 19 nt, Artificial Sequence
  Description of Artificial Sequence: Synthetic oligonucleotide
agaaugugugcccaggcca

SEQ ID NO: 2355944 - RNA, 19 nt, Artificial Sequence
  Description of Artificial Sequence: Synthetic oligonucleotide
ucaucauagcuuuggugag

SEQ ID NO: 2355945 - RNA, 19 nt, Artificial Sequence
  Description of Artificial Sequence: Synthetic oligonucleotide
agauguaguagaacugccc

SEQ ID NO: 2355946 - RNA, 19 nt, Artificial Sequence
  Description of Artificial Sequence: Synthetic oligonucleotide
uagaacugcccuuggauga

SEQ ID NO: 2355947 - RNA, 19 nt, Artificial Sequence
  Description of Artificial Sequence: Synthetic oligonucleotide
gaccaaauggcgguuaaag

SEQ ID NO: 2355948 - RNA, 19 nt, Artificial Sequence
  Description of Artificial Sequence: Synthetic oligonucleotide
cuauuugagagugugacca

SEQ ID NO: 2355949 - RNA, 19 nt, Artificial Sequence
  Description of Artificial Sequence: Synthetic oligonucleotide
ucuugcucaaggcauaauu

SEQ ID NO: 2355950 - RNA, 19 nt, Artificial Sequence
  Description of Artificial Sequence: Synthetic oligonucleotide
gaauaccauuauuuuggag

SEQ ID NO: 2355951 - RNA, 19 nt, Artificial Sequence
  Description of Artificial Sequence: Synthetic oligonucleotide
uuggcuuccucccacgcug

SEQ ID NO: 2355952 - RNA, 19 nt, Artificial Sequence
  Description of Artificial Sequence: Synthetic oligonucleotide
aaggcacaaguguggaaag

SEQ ID NO: 2355953 - RNA, 19 nt, Artificial Sequence
  Description of Artificial Sequence: Synthetic oligonucleotide
aguagaacugcccuuggau

SEQ ID NO: 2355954 - RNA, 19 nt, Artificial Sequence
  Description of Artificial Sequence: Synthetic oligonucleotide
uguggaaaauuuuccagua

SEQ ID NO: 2355955 - RNA, 19 nt, Artificial Sequence
  Description of Artificial Sequence: Synthetic oligonucleotide
agugugaccaaauggcggu

SEQ ID NO: 2355956 - RNA, 19 nt, Artificial Sequence
  Description of Artificial Sequence: Synthetic oligonucleotide
cauuacucacauacacugg

SEQ ID NO: 2355957 - RNA, 19 nt, Artificial Sequence
  Description of Artificial Sequence: Synthetic oligonucleotide
uaaggcacaaguguggaaa

SEQ ID NO: 2355958 - RNA, 19 nt, Artificial Sequence
  Description of Artificial Sequence: Synthetic oligonucleotide
auuuuggagggcucugauc

SEQ ID NO: 2355959 - RNA, 19 nt, Artificial Sequence
  Description of Artificial Sequence: Synthetic oligonucleotide
ugggaaugcagcagcagca

SEQ ID NO: 2355960 - RNA, 19 nt, Artificial Sequence
  Description of Artificial Sequence: Synthetic oligonucleotide
guagaacugcccuuggaug

SEQ ID NO: 2355961 - RNA, 19 nt, Artificial Sequence
  Description of Artificial Sequence: Synthetic oligonucleotide
ggccacauuacucacauac

SEQ ID NO: 2355962 - RNA, 19 nt, Artificial Sequence
  Description of Artificial Sequence: Synthetic oligonucleotide
ugcagcagcagcagcagca

SEQ ID NO: 2355963 - RNA, 19 nt, Artificial Sequence
  Description of Artificial Sequence: Synthetic oligonucleotide
guacauaggccuuaaggca

SEQ ID NO: 2355964 - RNA, 19 nt, Artificial Sequence
  Description of Artificial Sequence: Synthetic oligonucleotide
uccacuacgugacccaacu

SEQ ID NO: 2355965 - RNA, 19 nt, Artificial Sequence
  Description of Artificial Sequence: Synthetic oligonucleotide
uuaaaucaucauagcuuug

SEQ ID NO: 2355966 - RNA, 19 nt, Artificial Sequence
  Description of Artificial Sequence: Synthetic oligonucleotide
aucauagcuuuggugaggg

SEQ ID NO: 2355967 - RNA, 19 nt, Artificial Sequence
  Description of Artificial Sequence: Synthetic oligonucleotide
ugcucaaggcauaauuuaa

SEQ ID NO: 2355968 - RNA, 19 nt, Artificial Sequence
  Description of Artificial Sequence: Synthetic oligonucleotide
gagugugaccaaauggcgg

SEQ ID NO: 2355969 - RNA, 19 nt, Artificial Sequence
  Description of Artificial Sequence: Synthetic oligonucleotide
uuagaaaugaauggacuuu

SEQ ID NO: 2355970 - RNA, 19 nt, Artificial Sequence
  Description of Artificial Sequence: Synthetic oligonucleotide
auuuuccaguaauacccag

SEQ ID NO: 2355971 - RNA, 19 nt, Artificial Sequence
  Description of Artificial Sequence: Synthetic oligonucleotide
cauagauguacauaggccu

SEQ ID NO: 2355972 - RNA, 19 nt, Artificial Sequence
  Description of Artificial Sequence: Synthetic oligonucleotide
ugaauggacuuuucucccc

SEQ ID NO: 2355973 - RNA, 19 nt, Artificial Sequence
  Description of Artificial Sequence: Synthetic oligonucleotide
cuuuucuccccauagaugu

SEQ ID NO: 2355974 - RNA, 19 nt, Artificial Sequence
  Description of Artificial Sequence: Synthetic oligonucleotide
uucauagcccagaucucgc

SEQ ID NO: 2355975 - RNA, 19 nt, Artificial Sequence
  Description of Artificial Sequence: Synthetic oligonucleotide
ucugucugggaaugcagca

SEQ ID NO: 2355976 - RNA, 19 nt, Artificial Sequence
  Description of Artificial Sequence: Synthetic oligonucleotide
gauguaguagaacugcccu

SEQ ID NO: 2355977 - RNA, 19 nt, Artificial Sequence
  Description of Artificial Sequence: Synthetic oligonucleotide
aauuuuccaguaauaccca

SEQ ID NO: 2355978 - RNA, 19 nt, Artificial Sequence
  Description of Artificial Sequence: Synthetic oligonucleotide
uggaugauuggugacuucu

SEQ ID NO: 2355979 - RNA, 19 nt, Artificial Sequence
  Description of Artificial Sequence: Synthetic oligonucleotide
cuggcagccagaaugugug

SEQ ID NO: 2355980 - RNA, 19 nt, Artificial Sequence
  Description of Artificial Sequence: Synthetic oligonucleotide
uuugagagugugaccaaau

SEQ ID NO: 2355981 - RNA, 19 nt, Artificial Sequence
  Description of Artificial Sequence: Synthetic oligonucleotide
cugagauguaguagaacug

SEQ ID NO: 2355982 - RNA, 19 nt, Artificial Sequence
  Description of Artificial Sequence: Synthetic oligonucleotide
uguggaaagugucaccauu

SEQ ID NO: 2355983 - RNA, 19 nt, Artificial Sequence
  Description of Artificial Sequence: Synthetic oligonucleotide
aauacccagaauaccauua

SEQ ID NO: 2355984 - RNA, 19 nt, Artificial Sequence
  Description of Artificial Sequence: Synthetic oligonucleotide
ugugcugcuccacuacgug

SEQ ID NO: 2355985 - RNA, 19 nt, Artificial Sequence
  Description of Artificial Sequence: Synthetic oligonucleotide
ugcccuuggaugauuggug

SEQ ID NO: 2355986 - RNA, 19 nt, Artificial Sequence
  Description of Artificial Sequence: Synthetic oligonucleotide
ucgcugagcuuucuuguag

SEQ ID NO: 2355987 - RNA, 19 nt, Artificial Sequence
  Description of Artificial Sequence: Synthetic oligonucleotide
cugggaaugcagcagcagc

SEQ ID NO: 2355988 - RNA, 19 nt, Artificial Sequence
  Description of Artificial Sequence: Synthetic oligonucleotide
accauuauuuuggagggcu

SEQ ID NO: 2355989 - RNA, 19 nt, Artificial Sequence
  Description of Artificial Sequence: Synthetic oligonucleotide
agagugugaccaaauggcg

SEQ ID NO: 2355990 - RNA, 19 nt, Artificial Sequence
  Description of Artificial Sequence: Synthetic oligonucleotide
gaaguuuucuccuuggcuu

SEQ ID NO: 2355991 - RNA, 19 nt, Artificial Sequence
  Description of Artificial Sequence: Synthetic oligonucleotide
ugcugcuccacuacgugac

SEQ ID NO: 2355992 - RNA, 19 nt, Artificial Sequence
  Description of Artificial Sequence: Synthetic oligonucleotide
acuggguuaacuguggaaa

SEQ ID NO: 2355993 - RNA, 19 nt, Artificial Sequence
  Description of Artificial Sequence: Synthetic oligonucleotide
agaauaccauuauuuugga

SEQ ID NO: 2355994 - RNA, 19 nt, Artificial Sequence
  Description of Artificial Sequence: Synthetic oligonucleotide
uugcucaaggcauaauuua

SEQ ID NO: 2355995 - RNA, 19 nt, Artificial Sequence
  Description of Artificial Sequence: Synthetic oligonucleotide
uuacucacauacacugggu

SEQ ID NO: 2355996 - RNA, 19 nt, Artificial Sequence
  Description of Artificial Sequence: Synthetic oligonucleotide
aggggugucaucugagaug

SEQ ID NO: 2355997 - RNA, 19 nt, Artificial Sequence
  Description of Artificial Sequence: Synthetic oligonucleotide
uuggugaggggugucaucu

SEQ ID NO: 2355998 - RNA, 19 nt, Artificial Sequence
  Description of Artificial Sequence: Synthetic oligonucleotide
ccauagauguacauaggcc

SEQ ID NO: 2355999 - RNA, 19 nt, Artificial Sequence
  Description of Artificial Sequence: Synthetic oligonucleotide
cuugugcugcuccacuacg

SEQ ID NO: 2356000 - RNA, 19 nt, Artificial Sequence
  Description of Artificial Sequence: Synthetic oligonucleotide
gcucugaucauuguguuag

SEQ ID NO: 2356001 - RNA, 19 nt, Artificial Sequence
  Description of Artificial Sequence: Synthetic oligonucleotide
cacaaguguggaaaguguc

SEQ ID NO: 2356002 - RNA, 19 nt, Artificial Sequence
  Description of Artificial Sequence: Synthetic oligonucleotide
uauuuuggagggcucugau

SEQ ID NO: 2356003 - RNA, 19 nt, Artificial Sequence
  Description of Artificial Sequence: Synthetic oligonucleotide
acgugacccaacuccacuc

SEQ ID NO: 2356004 - RNA, 19 nt, Artificial Sequence
  Description of Artificial Sequence: Synthetic oligonucleotide
gagauguaguagaacugcc

SEQ ID NO: 2356005 - RNA, 19 nt, Artificial Sequence
  Description of Artificial Sequence: Synthetic oligonucleotide
aaggcauaauuuaaaucau

SEQ ID NO: 2356006 - RNA, 19 nt, Artificial Sequence
  Description of Artificial Sequence: Synthetic oligonucleotide
gucaucugagauguaguag

SEQ ID NO: 2356007 - RNA, 19 nt, Artificial Sequence
  Description of Artificial Sequence: Synthetic oligonucleotide
agugaacacgcuauuugag

SEQ ID NO: 2356008 - RNA, 19 nt, Artificial Sequence
  Description of Artificial Sequence: Synthetic oligonucleotide
ggcauaauuuaaaucauca

SEQ ID NO: 2356009 - RNA, 19 nt, Artificial Sequence
  Description of Artificial Sequence: Synthetic oligonucleotide
guguuagaaaugaauggac

SEQ ID NO: 2356010 - RNA, 19 nt, Artificial Sequence
  Description of Artificial Sequence: Synthetic oligonucleotide
uggagggcucugaucauug

SEQ ID NO: 2356011 - RNA, 19 nt, Artificial Sequence
  Description of Artificial Sequence: Synthetic oligonucleotide
uacgugacccaacuccacu

SEQ ID NO: 2356012 - RNA, 19 nt, Artificial Sequence
  Description of Artificial Sequence: Synthetic oligonucleotide
uacucacauacacuggguu

SEQ ID NO: 2356013 - RNA, 19 nt, Artificial Sequence
  Description of Artificial Sequence: Synthetic oligonucleotide
aucugagauguaguagaac

SEQ ID NO: 2356014 - RNA, 19 nt, Artificial Sequence
  Description of Artificial Sequence: Synthetic oligonucleotide
auagcccagaucucgcuga

SEQ ID NO: 2356015 - RNA, 19 nt, Artificial Sequence
  Description of Artificial Sequence: Synthetic oligonucleotide
gagggcucugaucauugug

SEQ ID NO: 2356016 - RNA, 19 nt, Artificial Sequence
  Description of Artificial Sequence: Synthetic oligonucleotide
cuuguaggagaaagugaac

SEQ ID NO: 2356017 - RNA, 19 nt, Artificial Sequence
  Description of Artificial Sequence: Synthetic oligonucleotide
cagaaugugugcccaggcc

SEQ ID NO: 2356018 - RNA, 19 nt, Artificial Sequence
  Description of Artificial Sequence: Synthetic oligonucleotide
uagaaaugaauggacuuuu

SEQ ID NO: 2356019 - RNA, 19 nt, Artificial Sequence
  Description of Artificial Sequence: Synthetic oligonucleotide
gugaacacgcuauuugaga

SEQ ID NO: 2356020 - RNA, 19 nt, Artificial Sequence
  Description of Artificial Sequence: Synthetic oligonucleotide
aggcauaauuuaaaucauc

SEQ ID NO: 2356021 - RNA, 19 nt, Artificial Sequence
  Description of Artificial Sequence: Synthetic oligonucleotide
uuauuuuggagggcucuga

SEQ ID NO: 2356022 - RNA, 19 nt, Artificial Sequence
  Description of Artificial Sequence: Synthetic oligonucleotide
ugacccaacuccacucuga

SEQ ID NO: 2356023 - RNA, 19 nt, Artificial Sequence
  Description of Artificial Sequence: Synthetic oligonucleotide
gauguacauaggccuuaag

SEQ ID NO: 2356024 - RNA, 19 nt, Artificial Sequence
  Description of Artificial Sequence: Synthetic oligonucleotide
caguaauacccagaauacc

SEQ ID NO: 2356025 - RNA, 19 nt, Artificial Sequence
  Description of Artificial Sequence: Synthetic oligonucleotide
agaaaugaauggacuuuuc

SEQ ID NO: 2356026 - RNA, 19 nt, Artificial Sequence
  Description of Artificial Sequence: Synthetic oligonucleotide
cugaaguuuucuccuuggc

SEQ ID NO: 2356027 - RNA, 19 nt, Artificial Sequence
  Description of Artificial Sequence: Synthetic oligonucleotide
ccagaauaccauuauuuug

SEQ ID NO: 2356028 - RNA, 19 nt, Artificial Sequence
  Description of Artificial Sequence: Synthetic oligonucleotide
uuucuccccauagauguac

SEQ ID NO: 2356029 - RNA, 19 nt, Artificial Sequence
  Description of Artificial Sequence: Synthetic oligonucleotide
ggguucauagcccagaucu

SEQ ID NO: 2356030 - RNA, 19 nt, Artificial Sequence
  Description of Artificial Sequence: Synthetic oligonucleotide
gaauggacuuuucucccca

SEQ ID NO: 2356031 - RNA, 19 nt, Artificial Sequence
  Description of Artificial Sequence: Synthetic oligonucleotide
caaguguggaaagugucac

SEQ ID NO: 2356032 - RNA, 19 nt, Artificial Sequence
  Description of Artificial Sequence: Synthetic oligonucleotide
guaguagaacugcccuugg

SEQ ID NO: 2356033 - RNA, 19 nt, Artificial Sequence
  Description of Artificial Sequence: Synthetic oligonucleotide
auagcuuuggugaggggug

SEQ ID NO: 2356034 - RNA, 19 nt, Artificial Sequence
  Description of Artificial Sequence: Synthetic oligonucleotide
ccaguaauacccagaauac

SEQ ID NO: 2356035 - RNA, 19 nt, Artificial Sequence
  Description of Artificial Sequence: Synthetic oligonucleotide
cuuguaggccccuggcagc

SEQ ID NO: 2356036 - RNA, 19 nt, Artificial Sequence
  Description of Artificial Sequence: Synthetic oligonucleotide
uaguagaacugcccuugga

SEQ ID NO: 2356037 - RNA, 19 nt, Artificial Sequence
  Description of Artificial Sequence: Synthetic oligonucleotide
cacgcuauuugagagugug

SEQ ID NO: 2356038 - RNA, 19 nt, Artificial Sequence
  Description of Artificial Sequence: Synthetic oligonucleotide
ucauuguguuagaaaugaa

SEQ ID NO: 2356039 - RNA, 19 nt, Artificial Sequence
  Description of Artificial Sequence: Synthetic oligonucleotide
cccauagauguacauaggc

SEQ ID NO: 2356040 - RNA, 19 nt, Artificial Sequence
  Description of Artificial Sequence: Synthetic oligonucleotide
ccuuaaggcacaagugugg

SEQ ID NO: 2356041 - RNA, 19 nt, Artificial Sequence
  Description of Artificial Sequence: Synthetic oligonucleotide
uguccccuugugcugcucc

SEQ ID NO: 2356042 - RNA, 19 nt, Artificial Sequence
  Description of Artificial Sequence: Synthetic oligonucleotide
acucacauacacuggguua

SEQ ID NO: 2356043 - RNA, 19 nt, Artificial Sequence
  Description of Artificial Sequence: Synthetic oligonucleotide
uaauacccagaauaccauu

SEQ ID NO: 2356044 - RNA, 19 nt, Artificial Sequence
  Description of Artificial Sequence: Synthetic oligonucleotide
guuagaaaugaauggacuu

SEQ ID NO: 2356045 - RNA, 19 nt, Artificial Sequence
  Description of Artificial Sequence: Synthetic oligonucleotide
auacccagaauaccauuau

SEQ ID NO: 2356046 - RNA, 19 nt, Artificial Sequence
  Description of Artificial Sequence: Synthetic oligonucleotide
ucugaucauuguguuagaa

SEQ ID NO: 2356047 - RNA, 19 nt, Artificial Sequence
  Description of Artificial Sequence: Synthetic oligonucleotide
auacacuggguuaacugug

SEQ ID NO: 2356048 - RNA, 19 nt, Artificial Sequence
  Description of Artificial Sequence: Synthetic oligonucleotide
ugaggggugucaucugaga

SEQ ID NO: 2356049 - RNA, 19 nt, Artificial Sequence
  Description of Artificial Sequence: Synthetic oligonucleotide
acaaguguggaaaguguca

SEQ ID NO: 2356050 - RNA, 19 nt, Artificial Sequence
  Description of Artificial Sequence: Synthetic oligonucleotide
cucugaaguuuucuccuug

SEQ ID NO: 2356051 - RNA, 19 nt, Artificial Sequence
  Description of Artificial Sequence: Synthetic oligonucleotide
caucauagcuuuggugagg

SEQ ID NO: 2356052 - RNA, 19 nt, Artificial Sequence
  Description of Artificial Sequence: Synthetic oligonucleotide
uugugcugcuccacuacgu

SEQ ID NO: 2356053 - RNA, 19 nt, Artificial Sequence
  Description of Artificial Sequence: Synthetic oligonucleotide
cauuguguuagaaaugaau

SEQ ID NO: 2356054 - RNA, 19 nt, Artificial Sequence
  Description of Artificial Sequence: Synthetic oligonucleotide
gacuuuucuccccauagau

SEQ ID NO: 2356055 - RNA, 19 nt, Artificial Sequence
  Description of Artificial Sequence: Synthetic oligonucleotide
acuuuucuccccauagaug

SEQ ID NO: 2356056 - RNA, 19 nt, Artificial Sequence
  Description of Artificial Sequence: Synthetic oligonucleotide
ucugggaaugcagcagcag

SEQ ID NO: 2356057 - RNA, 19 nt, Artificial Sequence
  Description of Artificial Sequence: Synthetic oligonucleotide
uauuugagagugugaccaa

SEQ ID NO: 2356058 - RNA, 19 nt, Artificial Sequence
  Description of Artificial Sequence: Synthetic oligonucleotide
agaaagugaacacgcuauu

SEQ ID NO: 2356059 - RNA, 19 nt, Artificial Sequence
  Description of Artificial Sequence: Synthetic oligonucleotide
uuggugacuucuugggguc

SEQ ID NO: 2356060 - RNA, 19 nt, Artificial Sequence
  Description of Artificial Sequence: Synthetic oligonucleotide
cugaucauuguguuagaaa

SEQ ID NO: 2356061 - RNA, 19 nt, Artificial Sequence
  Description of Artificial Sequence: Synthetic oligonucleotide
uggaaagugucaccauuuu

SEQ ID NO: 2356062 - RNA, 19 nt, Artificial Sequence
  Description of Artificial Sequence: Synthetic oligonucleotide
augcagcagcagcagcagc

SEQ ID NO: 2356063 - RNA, 19 nt, Artificial Sequence
  Description of Artificial Sequence: Synthetic oligonucleotide
acugcccuuggaugauugg

SEQ ID NO: 2356064 - RNA, 19 nt, Artificial Sequence
  Description of Artificial Sequence: Synthetic oligonucleotide
aauggacuuuucuccccau

SEQ ID NO: 2356065 - RNA, 19 nt, Artificial Sequence
  Description of Artificial Sequence: Synthetic oligonucleotide
ucauagcccagaucucgcu

SEQ ID NO: 2356066 - RNA, 19 nt, Artificial Sequence
  Description of Artificial Sequence: Synthetic oligonucleotide
acccagaauaccauuauuu

SEQ ID NO: 2356067 - RNA, 19 nt, Artificial Sequence
  Description of Artificial Sequence: Synthetic oligonucleotide
cauagcccagaucucgcug

SEQ ID NO: 2356068 - RNA, 19 nt, Artificial Sequence
  Description of Artificial Sequence: Synthetic oligonucleotide
ucauagcuuuggugagggg

SEQ ID NO: 2356069 - RNA, 19 nt, Artificial Sequence
  Description of Artificial Sequence: Synthetic oligonucleotide
cauacacuggguuaacugu

SEQ ID NO: 2356070 - RNA, 19 nt, Artificial Sequence
  Description of Artificial Sequence: Synthetic oligonucleotide
gaaugugugcccaggccac

SEQ ID NO: 2356071 - RNA, 19 nt, Artificial Sequence
  Description of Artificial Sequence: Synthetic oligonucleotide
gcuauuugagagugugacc

SEQ ID NO: 2356072 - RNA, 19 nt, Artificial Sequence
  Description of Artificial Sequence: Synthetic oligonucleotide
gagaaagugaacacgcuau

SEQ ID NO: 2356073 - RNA, 19 nt, Artificial Sequence
  Description of Artificial Sequence: Synthetic oligonucleotide
ccacucugaaguuuucucc

SEQ ID NO: 2356074 - RNA, 19 nt, Artificial Sequence
  Description of Artificial Sequence: Synthetic oligonucleotide
ugcccaggccacauuacuc

SEQ ID NO: 2356075 - RNA, 19 nt, Artificial Sequence
  Description of Artificial Sequence: Synthetic oligonucleotide
cugagcuuucuuguaggag

SEQ ID NO: 2356076 - RNA, 19 nt, Artificial Sequence
  Description of Artificial Sequence: Synthetic oligonucleotide
ugcuccacuacgugaccca

SEQ ID NO: 2356077 - RNA, 19 nt, Artificial Sequence
  Description of Artificial Sequence: Synthetic oligonucleotide
aacuccacucugaaguuuu

SEQ ID NO: 2356078 - RNA, 19 nt, Artificial Sequence
  Description of Artificial Sequence: Synthetic oligonucleotide
ugugcccaggccacauuac

SEQ ID NO: 2356079 - RNA, 19 nt, Artificial Sequence
  Description of Artificial Sequence: Synthetic oligonucleotide
acuacgugacccaacucca

SEQ ID NO: 2356080 - RNA, 19 nt, Artificial Sequence
  Description of Artificial Sequence: Synthetic oligonucleotide
cauuucuugcucaaggcau

SEQ ID NO: 2356081 - RNA, 19 nt, Artificial Sequence
  Description of Artificial Sequence: Synthetic oligonucleotide
uacccagaauaccauuauu

SEQ ID NO: 2356082 - RNA, 19 nt, Artificial Sequence
  Description of Artificial Sequence: Synthetic oligonucleotide
uuuggugaggggugucauc

SEQ ID NO: 2356083 - RNA, 19 nt, Artificial Sequence
  Description of Artificial Sequence: Synthetic oligonucleotide
uuggggucuuguaggcccc

SEQ ID NO: 2356084 - RNA, 19 nt, Artificial Sequence
  Description of Artificial Sequence: Synthetic oligonucleotide
uggguuaacuguggaaaau

SEQ ID NO: 2356085 - RNA, 19 nt, Artificial Sequence
  Description of Artificial Sequence: Synthetic oligonucleotide
ggcacaaguguggaaagug

SEQ ID NO: 2356086 - RNA, 19 nt, Artificial Sequence
  Description of Artificial Sequence: Synthetic oligonucleotide
auguaguagaacugcccuu

SEQ ID NO: 2356087 - RNA, 19 nt, Artificial Sequence
  Description of Artificial Sequence: Synthetic oligonucleotide
gucugucugggaaugcagc

SEQ ID NO: 2356088 - RNA, 19 nt, Artificial Sequence
  Description of Artificial Sequence: Synthetic oligonucleotide
agcagcagcagcagcagca

SEQ ID NO: 2356089 - RNA, 19 nt, Artificial Sequence
  Description of Artificial Sequence: Synthetic oligonucleotide
cuuaaggcacaagugugga

SEQ ID NO: 2356090 - RNA, 19 nt, Artificial Sequence
  Description of Artificial Sequence: Synthetic oligonucleotide
uagcccagaucucgcugag

SEQ ID NO: 2356091 - RNA, 19 nt, Artificial Sequence
  Description of Artificial Sequence: Synthetic oligonucleotide
auuugagagugugaccaaa

SEQ ID NO: 2356092 - RNA, 19 nt, Artificial Sequence
  Description of Artificial Sequence: Synthetic oligonucleotide
uuuucuccccauagaugua

SEQ ID NO: 2356093 - RNA, 19 nt, Artificial Sequence
  Description of Artificial Sequence: Synthetic oligonucleotide
agucugucugggaaugcag

SEQ ID NO: 2356094 - RNA, 19 nt, Artificial Sequence
  Description of Artificial Sequence: Synthetic oligonucleotide
uuguaggccccuggcagcc

SEQ ID NO: 2356095 - RNA, 19 nt, Artificial Sequence
  Description of Artificial Sequence: Synthetic oligonucleotide
ucuuggggucuuguaggcc

SEQ ID NO: 2356096 - RNA, 19 nt, Artificial Sequence
  Description of Artificial Sequence: Synthetic oligonucleotide
uaccauuauuuuggagggc

SEQ ID NO: 2356097 - RNA, 19 nt, Artificial Sequence
  Description of Artificial Sequence: Synthetic oligonucleotide
guagcagcagcagcagcag

SEQ ID NO: 2356098 - RNA, 19 nt, Artificial Sequence
  Description of Artificial Sequence: Synthetic oligonucleotide
guggaaaauuuuccaguaa

SEQ ID NO: 2356099 - RNA, 19 nt, Artificial Sequence
  Description of Artificial Sequence: Synthetic oligonucleotide
cucacauacacuggguuaa

SEQ ID NO: 2356100 - RNA, 19 nt, Artificial Sequence
  Description of Artificial Sequence: Synthetic oligonucleotide
uuccaguaauacccagaau

SEQ ID NO: 2356101 - RNA, 19 nt, Artificial Sequence
  Description of Artificial Sequence: Synthetic oligonucleotide
cugucugggaaugcagcag

SEQ ID NO: 2356102 - RNA, 19 nt, Artificial Sequence
  Description of Artificial Sequence: Synthetic oligonucleotide
uagauguacauaggccuua

SEQ ID NO: 2356103 - RNA, 19 nt, Artificial Sequence
  Description of Artificial Sequence: Synthetic oligonucleotide
aggccuuaaggcacaagug

SEQ ID NO: 2356104 - RNA, 19 nt, Artificial Sequence
  Description of Artificial Sequence: Synthetic oligonucleotide
cuuucuuguaggagaaagu

SEQ ID NO: 2356105 - RNA, 19 nt, Artificial Sequence
  Description of Artificial Sequence: Synthetic oligonucleotide
cacauuacucacauacacu

SEQ ID NO: 2356106 - RNA, 19 nt, Artificial Sequence
  Description of Artificial Sequence: Synthetic oligonucleotide
uagcagcagcagcagcagc

SEQ ID NO: 2356107 - RNA, 19 nt, Artificial Sequence
  Description of Artificial Sequence: Synthetic oligonucleotide
auagauguacauaggccuu

SEQ ID NO: 2356108 - RNA, 19 nt, Artificial Sequence
  Description of Artificial Sequence: Synthetic oligonucleotide
cuacgugacccaacuccac

SEQ ID NO: 2356109 - RNA, 19 nt, Artificial Sequence
  Description of Artificial Sequence: Synthetic oligonucleotide
acccaacuccacucugaag

SEQ ID NO: 2356110 - RNA, 19 nt, Artificial Sequence
  Description of Artificial Sequence: Synthetic oligonucleotide
acacuggguuaacugugga

SEQ ID NO: 2356111 - RNA, 19 nt, Artificial Sequence
  Description of Artificial Sequence: Synthetic oligonucleotide
ggagaaagugaacacgcua

SEQ ID NO: 2356112 - RNA, 19 nt, Artificial Sequence
  Description of Artificial Sequence: Synthetic oligonucleotide
cauagcuuuggugaggggu

SEQ ID NO: 2356113 - RNA, 19 nt, Artificial Sequence
  Description of Artificial Sequence: Synthetic oligonucleotide
gaacacgcuauuugagagu

SEQ ID NO: 2356114 - RNA, 19 nt, Artificial Sequence
  Description of Artificial Sequence: Synthetic oligonucleotide
cucaaggcauaauuuaaau

SEQ ID NO: 2356115 - RNA, 19 nt, Artificial Sequence
  Description of Artificial Sequence: Synthetic oligonucleotide
aaugugugcccaggccaca

SEQ ID NO: 2356116 - RNA, 19 nt, Artificial Sequence
  Description of Artificial Sequence: Synthetic oligonucleotide
cuugcucaaggcauaauuu

SEQ ID NO: 2356117 - RNA, 19 nt, Artificial Sequence
  Description of Artificial Sequence: Synthetic oligonucleotide
uuuggagggcucugaucau

SEQ ID NO: 2356118 - RNA, 19 nt, Artificial Sequence
  Description of Artificial Sequence: Synthetic oligonucleotide
ggucuuguaggccccuggc

SEQ ID NO: 2356119 - RNA, 19 nt, Artificial Sequence
  Description of Artificial Sequence: Synthetic oligonucleotide
gugacccaacuccacucug

SEQ ID NO: 2356120 - RNA, 19 nt, Artificial Sequence
  Description of Artificial Sequence: Synthetic oligonucleotide
agccagaaugugugcccag

SEQ ID NO: 2356121 - RNA, 19 nt, Artificial Sequence
  Description of Artificial Sequence: Synthetic oligonucleotide
uuggaugauuggugacuuc

SEQ ID NO: 2356122 - RNA, 19 nt, Artificial Sequence
  Description of Artificial Sequence: Synthetic oligonucleotide
ggaaugcagcagcagcagc

SEQ ID NO: 2356123 - RNA, 19 nt, Artificial Sequence
  Description of Artificial Sequence: Synthetic oligonucleotide
gcagccagaaugugugccc

SEQ ID NO: 2356124 - RNA, 19 nt, Artificial Sequence
  Description of Artificial Sequence: Synthetic oligonucleotide
gucuuguaggccccuggca

SEQ ID NO: 2356125 - RNA, 19 nt, Artificial Sequence
  Description of Artificial Sequence: Synthetic oligonucleotide
ugugaccaaauggcgguua

SEQ ID NO: 2356126 - RNA, 19 nt, Artificial Sequence
  Description of Artificial Sequence: Synthetic oligonucleotide
gccuuaaggcacaagugug

SEQ ID NO: 2356127 - RNA, 19 nt, Artificial Sequence
  Description of Artificial Sequence: Synthetic oligonucleotide
caucugagauguaguagaa

SEQ ID NO: 2356128 - RNA, 19 nt, Artificial Sequence
  Description of Artificial Sequence: Synthetic oligonucleotide
cacucugaaguuuucuccu

SEQ ID NO: 2356129 - RNA, 19 nt, Artificial Sequence
  Description of Artificial Sequence: Synthetic oligonucleotide
cuggguuaacuguggaaaa

SEQ ID NO: 2356130 - RNA, 19 nt, Artificial Sequence
  Description of Artificial Sequence: Synthetic oligonucleotide
gacccaacuccacucugaa

SEQ ID NO: 2356131 - RNA, 19 nt, Artificial Sequence
  Description of Artificial Sequence: Synthetic oligonucleotide
ggaaaauuuuccaguaaua

SEQ ID NO: 2356132 - RNA, 19 nt, Artificial Sequence
  Description of Artificial Sequence: Synthetic oligonucleotide
cugcuccacuacgugaccc

SEQ ID NO: 2356133 - RNA, 19 nt, Artificial Sequence
  Description of Artificial Sequence: Synthetic oligonucleotide
gugaggggugucaucugag

SEQ ID NO: 2356134 - RNA, 19 nt, Artificial Sequence
  Description of Artificial Sequence: Synthetic oligonucleotide
ucacauacacuggguuaac

SEQ ID NO: 2356135 - RNA, 19 nt, Artificial Sequence
  Description of Artificial Sequence: Synthetic oligonucleotide
guaggccccuggcagccag

SEQ ID NO: 2356136 - RNA, 19 nt, Artificial Sequence
  Description of Artificial Sequence: Synthetic oligonucleotide
uggugaggggugucaucug

SEQ ID NO: 2356137 - RNA, 19 nt, Artificial Sequence
  Description of Artificial Sequence: Synthetic oligonucleotide
gaaagugaacacgcuauuu

SEQ ID NO: 2356138 - RNA, 19 nt, Artificial Sequence
  Description of Artificial Sequence: Synthetic oligonucleotide
aggagaaagugaacacgcu

SEQ ID NO: 2356139 - RNA, 19 nt, Artificial Sequence
  Description of Artificial Sequence: Synthetic oligonucleotide
gggucuuguaggccccugg

SEQ ID NO: 2356140 - RNA, 19 nt, Artificial Sequence
  Description of Artificial Sequence: Synthetic oligonucleotide
auuucuugcucaaggcaua

SEQ ID NO: 2356141 - RNA, 19 nt, Artificial Sequence
  Description of Artificial Sequence: Synthetic oligonucleotide
ggccuuaaggcacaagugu

SEQ ID NO: 2356142 - RNA, 19 nt, Artificial Sequence
  Description of Artificial Sequence: Synthetic oligonucleotide
ugacuucuuggggucuugu

SEQ ID NO: 2356143 - RNA, 19 nt, Artificial Sequence
  Description of Artificial Sequence: Synthetic oligonucleotide
auggacuuuucuccccaua

SEQ ID NO: 2356144 - RNA, 19 nt, Artificial Sequence
  Description of Artificial Sequence: Synthetic oligonucleotide
cgcuauuugagagugugac

SEQ ID NO: 2356145 - RNA, 19 nt, Artificial Sequence
  Description of Artificial Sequence: Synthetic oligonucleotide
agauguacauaggccuuaa

SEQ ID NO: 2356146 - RNA, 19 nt, Artificial Sequence
  Description of Artificial Sequence: Synthetic oligonucleotide
ugaccaaauggcgguuaaa

SEQ ID NO: 2356147 - RNA, 19 nt, Artificial Sequence
  Description of Artificial Sequence: Synthetic oligonucleotide
cuccacuacgugacccaac

SEQ ID NO: 2356148 - RNA, 19 nt, Artificial Sequence
  Description of Artificial Sequence: Synthetic oligonucleotide
gacuucuuggggucuugua

SEQ ID NO: 2356149 - RNA, 19 nt, Artificial Sequence
  Description of Artificial Sequence: Synthetic oligonucleotide
agcagcagcagcagcagua

SEQ ID NO: 2356150 - RNA, 19 nt, Artificial Sequence
  Description of Artificial Sequence: Synthetic oligonucleotide
ggugaggggugucaucuga

SEQ ID NO: 2356151 - RNA, 19 nt, Artificial Sequence
  Description of Artificial Sequence: Synthetic oligonucleotide
gugcugcuccacuacguga

SEQ ID NO: 2356152 - RNA, 19 nt, Artificial Sequence
  Description of Artificial Sequence: Synthetic oligonucleotide
gaggggugucaucugagau

SEQ ID NO: 2356153 - RNA, 19 nt, Artificial Sequence
  Description of Artificial Sequence: Synthetic oligonucleotide
ccagaaugugugcccaggc

SEQ ID NO: 2356154 - RNA, 19 nt, Artificial Sequence
  Description of Artificial Sequence: Synthetic oligonucleotide
uggcuuccucccacgcuga

SEQ ID NO: 2356155 - RNA, 19 nt, Artificial Sequence
  Description of Artificial Sequence: Synthetic oligonucleotide
ggcagccagaaugugugcc

SEQ ID NO: 2356156 - RNA, 19 nt, Artificial Sequence
  Description of Artificial Sequence: Synthetic oligonucleotide
ggacuuuucuccccauaga

SEQ ID NO: 2356157 - RNA, 19 nt, Artificial Sequence
  Description of Artificial Sequence: Synthetic oligonucleotide
auaggccuuaaggcacaag

SEQ ID NO: 2356158 - RNA, 19 nt, Artificial Sequence
  Description of Artificial Sequence: Synthetic oligonucleotide
gggaaugcagcagcagcag

SEQ ID NO: 2356159 - RNA, 19 nt, Artificial Sequence
  Description of Artificial Sequence: Synthetic oligonucleotide
acauaggccuuaaggcaca

SEQ ID NO: 2356160 - RNA, 19 nt, Artificial Sequence
  Description of Artificial Sequence: Synthetic oligonucleotide
ccauuucuugcucaaggca

SEQ ID NO: 2356161 - RNA, 19 nt, Artificial Sequence
  Description of Artificial Sequence: Synthetic oligonucleotide
uagcuuuggugaggggugu

SEQ ID NO: 2356162 - RNA, 19 nt, Artificial Sequence
  Description of Artificial Sequence: Synthetic oligonucleotide
gcauaauuuaaaucaucau

SEQ ID NO: 2356163 - RNA, 19 nt, Artificial Sequence
  Description of Artificial Sequence: Synthetic oligonucleotide
uuccucccacgcugacagg

SEQ ID NO: 2356164 - RNA, 19 nt, Artificial Sequence
  Description of Artificial Sequence: Synthetic oligonucleotide
agcuuuggugagggguguc

SEQ ID NO: 2356165 - RNA, 19 nt, Artificial Sequence
  Description of Artificial Sequence: Synthetic oligonucleotide
ccccauagauguacauagg

SEQ ID NO: 2356166 - RNA, 19 nt, Artificial Sequence
  Description of Artificial Sequence: Synthetic oligonucleotide
cacuggguuaacuguggaa

SEQ ID NO: 2356167 - RNA, 19 nt, Artificial Sequence
  Description of Artificial Sequence: Synthetic oligonucleotide
gugaccaaauggcgguuaa

SEQ ID NO: 2356168 - RNA, 19 nt, Artificial Sequence
  Description of Artificial Sequence: Synthetic oligonucleotide
gccagaaugugugcccagg

SEQ ID NO: 2356169 - RNA, 19 nt, Artificial Sequence
  Description of Artificial Sequence: Synthetic oligonucleotide
uuggagggcucugaucauu

SEQ ID NO: 2356170 - RNA, 19 nt, Artificial Sequence
  Description of Artificial Sequence: Synthetic oligonucleotide
aggcacaaguguggaaagu

SEQ ID NO: 2356171 - RNA, 19 nt, Artificial Sequence
  Description of Artificial Sequence: Synthetic oligonucleotide
cagaucucgcugagcuuuc

SEQ ID NO: 2356172 - RNA, 19 nt, Artificial Sequence
  Description of Artificial Sequence: Synthetic oligonucleotide
gcccaggccacauuacuca

SEQ ID NO: 2356173 - RNA, 19 nt, Artificial Sequence
  Description of Artificial Sequence: Synthetic oligonucleotide
gugugcccaggccacauua

SEQ ID NO: 2356174 - RNA, 19 nt, Artificial Sequence
  Description of Artificial Sequence: Synthetic oligonucleotide
cagcagcagcagcagcagc

SEQ ID NO: 2356175 - RNA, 19 nt, Artificial Sequence
  Description of Artificial Sequence: Synthetic oligonucleotide
ugugugcccaggccacauu

SEQ ID NO: 2356176 - RNA, 19 nt, Artificial Sequence
  Description of Artificial Sequence: Synthetic oligonucleotide
cgcugagcuuucuuguagg

SEQ ID NO: 2356177 - RNA, 19 nt, Artificial Sequence
  Description of Artificial Sequence: Synthetic oligonucleotide
uggugacuucuuggggucu

SEQ ID NO: 2356178 - RNA, 19 nt, Artificial Sequence
  Description of Artificial Sequence: Synthetic oligonucleotide
cucugaucauuguguuaga

SEQ ID NO: 2356179 - RNA, 19 nt, Artificial Sequence
  Description of Artificial Sequence: Synthetic oligonucleotide
gcugagcuuucuuguagga

SEQ ID NO: 2356180 - RNA, 19 nt, Artificial Sequence
  Description of Artificial Sequence: Synthetic oligonucleotide
ccauuauuuuggagggcuc

SEQ ID NO: 2356181 - RNA, 19 nt, Artificial Sequence
  Description of Artificial Sequence: Synthetic oligonucleotide
ggggugucaucugagaugu

SEQ ID NO: 2356182 - RNA, 19 nt, Artificial Sequence
  Description of Artificial Sequence: Synthetic oligonucleotide
gcccuuggaugauugguga

SEQ ID NO: 2356183 - RNA, 19 nt, Artificial Sequence
  Description of Artificial Sequence: Synthetic oligonucleotide
ccuugugcugcuccacuac

SEQ ID NO: 2356184 - RNA, 19 nt, Artificial Sequence
  Description of Artificial Sequence: Synthetic oligonucleotide
acgcuauuugagaguguga

SEQ ID NO: 2356185 - RNA, 19 nt, Artificial Sequence
  Description of Artificial Sequence: Synthetic oligonucleotide
gcucaaggcauaauuuaaa

SEQ ID NO: 2356186 - RNA, 19 nt, Artificial Sequence
  Description of Artificial Sequence: Synthetic oligonucleotide
caggccacauuacucacau

SEQ ID NO: 2356187 - RNA, 19 nt, Artificial Sequence
  Description of Artificial Sequence: Synthetic oligonucleotide
gcccagaucucgcugagcu

SEQ ID NO: 2356188 - RNA, 19 nt, Artificial Sequence
  Description of Artificial Sequence: Synthetic oligonucleotide
gugacuucuuggggucuug

SEQ ID NO: 2356189 - RNA, 19 nt, Artificial Sequence
  Description of Artificial Sequence: Synthetic oligonucleotide
cucgcugagcuuucuugua

SEQ ID NO: 2356190 - RNA, 19 nt, Artificial Sequence
  Description of Artificial Sequence: Synthetic oligonucleotide
uccccuugugcugcuccac

SEQ ID NO: 2356191 - RNA, 19 nt, Artificial Sequence
  Description of Artificial Sequence: Synthetic oligonucleotide
guggaaagugucaccauuu

SEQ ID NO: 2356192 - RNA, 19 nt, Artificial Sequence
  Description of Artificial Sequence: Synthetic oligonucleotide
cuccccauagauguacaua

SEQ ID NO: 2356193 - RNA, 19 nt, Artificial Sequence
  Description of Artificial Sequence: Synthetic oligonucleotide
gucugggaaugcagcagca

SEQ ID NO: 2356194 - RNA, 19 nt, Artificial Sequence
  Description of Artificial Sequence: Synthetic oligonucleotide
gcagcagcagcagcagcag

SEQ ID NO: 2356195 - RNA, 19 nt, Artificial Sequence
  Description of Artificial Sequence: Synthetic oligonucleotide
gguucauagcccagaucuc

SEQ ID NO: 2356196 - RNA, 19 nt, Artificial Sequence
  Description of Artificial Sequence: Synthetic oligonucleotide
guccccuugugcugcucca

SEQ ID NO: 2356197 - RNA, 19 nt, Artificial Sequence
  Description of Artificial Sequence: Synthetic oligonucleotide
ccucccacgcugacagggg

SEQ ID NO: 2356198 - RNA, 19 nt, Artificial Sequence
  Description of Artificial Sequence: Synthetic oligonucleotide
cccuuggaugauuggugac

SEQ ID NO: 2356199 - RNA, 19 nt, Artificial Sequence
  Description of Artificial Sequence: Synthetic oligonucleotide
cuuggaugauuggugacuu

SEQ ID NO: 2356200 - RNA, 19 nt, Artificial Sequence
  Description of Artificial Sequence: Synthetic oligonucleotide
gcugcuccacuacgugacc

SEQ ID NO: 2356201 - RNA, 19 nt, Artificial Sequence
  Description of Artificial Sequence: Synthetic oligonucleotide
cuuggcuuccucccacgcu

SEQ ID NO: 2356202 - RNA, 19 nt, Artificial Sequence
  Description of Artificial Sequence: Synthetic oligonucleotide
uguaggccccuggcagcca

SEQ ID NO: 2356203 - RNA, 19 nt, Artificial Sequence
  Description of Artificial Sequence: Synthetic oligonucleotide
augugugcccaggccacau

SEQ ID NO: 2356204 - RNA, 19 nt, Artificial Sequence
  Description of Artificial Sequence: Synthetic oligonucleotide
cagccagaaugugugccca

SEQ ID NO: 2356205 - RNA, 19 nt, Artificial Sequence
  Description of Artificial Sequence: Synthetic oligonucleotide
ccuuggcuuccucccacgc

SEQ ID NO: 2356206 - RNA, 19 nt, Artificial Sequence
  Description of Artificial Sequence: Synthetic oligonucleotide
gugcccaggccacauuacu

SEQ ID NO: 2356207 - RNA, 19 nt, Artificial Sequence
  Description of Artificial Sequence: Synthetic oligonucleotide
gggguucauagcccagauc

SEQ ID NO: 2356208 - RNA, 19 nt, Artificial Sequence
  Description of Artificial Sequence: Synthetic oligonucleotide
gaucucgcugagcuuucuu

SEQ ID NO: 2356209 - RNA, 19 nt, Artificial Sequence
  Description of Artificial Sequence: Synthetic oligonucleotide
cccaggccacauuacucac

SEQ ID NO: 2356210 - RNA, 19 nt, Artificial Sequence
  Description of Artificial Sequence: Synthetic oligonucleotide
gcuuuggugagggguguca

SEQ ID NO: 2356211 - RNA, 19 nt, Artificial Sequence
  Description of Artificial Sequence: Synthetic oligonucleotide
uggggucuuguaggccccu

SEQ ID NO: 2356212 - RNA, 19 nt, Artificial Sequence
  Description of Artificial Sequence: Synthetic oligonucleotide
cugcccuuggaugauuggu

SEQ ID NO: 2356213 - RNA, 19 nt, Artificial Sequence
  Description of Artificial Sequence: Synthetic oligonucleotide
ggcucugaucauuguguua

SEQ ID NO: 2356214 - RNA, 19 nt, Artificial Sequence
  Description of Artificial Sequence: Synthetic oligonucleotide
acacgcuauuugagagugu

SEQ ID NO: 2356215 - RNA, 19 nt, Artificial Sequence
  Description of Artificial Sequence: Synthetic oligonucleotide
cccagaauaccauuauuuu

SEQ ID NO: 2356216 - RNA, 19 nt, Artificial Sequence
  Description of Artificial Sequence: Synthetic oligonucleotide
guguggaaagugucaccau

SEQ ID NO: 2356217 - RNA, 19 nt, Artificial Sequence
  Description of Artificial Sequence: Synthetic oligonucleotide
ggguuaacuguggaaaauu

SEQ ID NO: 2356218 - RNA, 19 nt, Artificial Sequence
  Description of Artificial Sequence: Synthetic oligonucleotide
gcacaaguguggaaagugu

SEQ ID NO: 2356219 - RNA, 19 nt, Artificial Sequence
  Description of Artificial Sequence: Synthetic oligonucleotide
cuccacucugaaguuuucu

SEQ ID NO: 2356220 - RNA, 19 nt, Artificial Sequence
  Description of Artificial Sequence: Synthetic oligonucleotide
aggccacauuacucacaua

SEQ ID NO: 2356221 - RNA, 19 nt, Artificial Sequence
  Description of Artificial Sequence: Synthetic oligonucleotide
ccaggccacauuacucaca

SEQ ID NO: 2356222 - RNA, 19 nt, Artificial Sequence
  Description of Artificial Sequence: Synthetic oligonucleotide
cuuuggugaggggugucau

SEQ ID NO: 2356223 - RNA, 19 nt, Artificial Sequence
  Description of Artificial Sequence: Synthetic oligonucleotide
ccuggcagccagaaugugu

SEQ ID NO: 2356224 - RNA, 19 nt, Artificial Sequence
  Description of Artificial Sequence: Synthetic oligonucleotide
cauaggccuuaaggcacaa

SEQ ID NO: 2356225 - RNA, 19 nt, Artificial Sequence
  Description of Artificial Sequence: Synthetic oligonucleotide
ccuuggaugauuggugacu

SEQ ID NO: 2356226 - RNA, 19 nt, Artificial Sequence
  Description of Artificial Sequence: Synthetic oligonucleotide
ccacuacgugacccaacuc

SEQ ID NO: 2356227 - RNA, 19 nt, Artificial Sequence
  Description of Artificial Sequence: Synthetic oligonucleotide
ggcuuccucccacgcugac

SEQ ID NO: 2356228 - RNA, 19 nt, Artificial Sequence
  Description of Artificial Sequence: Synthetic oligonucleotide
ggagggcucugaucauugu

SEQ ID NO: 2356229 - RNA, 19 nt, Artificial Sequence
  Description of Artificial Sequence: Synthetic oligonucleotide
ggggucuuguaggccccug

SEQ ID NO: 2356230 - RNA, 19 nt, Artificial Sequence
  Description of Artificial Sequence: Synthetic oligonucleotide
gggcucugaucauuguguu

SEQ ID NO: 2356231 - RNA, 19 nt, Artificial Sequence
  Description of Artificial Sequence: Synthetic oligonucleotide
ggaugauuggugacuucuu

SEQ ID NO: 2356232 - RNA, 19 nt, Artificial Sequence
  Description of Artificial Sequence: Synthetic oligonucleotide
gaacugcccuuggaugauu

SEQ ID NO: 2356233 - RNA, 19 nt, Artificial Sequence
  Description of Artificial Sequence: Synthetic oligonucleotide
gcuccacuacgugacccaa

SEQ ID NO: 2356234 - RNA, 19 nt, Artificial Sequence
  Description of Artificial Sequence: Synthetic oligonucleotide
cagcagcagcagcagcagu

SEQ ID NO: 2356235 - RNA, 19 nt, Artificial Sequence
  Description of Artificial Sequence: Synthetic oligonucleotide
cccuugugcugcuccacua

SEQ ID NO: 2356236 - RNA, 19 nt, Artificial Sequence
  Description of Artificial Sequence: Synthetic oligonucleotide
guguccccuugugcugcuc

SEQ ID NO: 2356237 - RNA, 19 nt, Artificial Sequence
  Description of Artificial Sequence: Synthetic oligonucleotide
gugugaccaaauggcgguu

SEQ ID NO: 2356238 - RNA, 19 nt, Artificial Sequence
  Description of Artificial Sequence: Synthetic oligonucleotide
cccuggcagccagaaugug

SEQ ID NO: 2356239 - RNA, 19 nt, Artificial Sequence
  Description of Artificial Sequence: Synthetic oligonucleotide
ggugacuucuuggggucuu

SEQ ID NO: 2356240 - RNA, 19 nt, Artificial Sequence
  Description of Artificial Sequence: Synthetic oligonucleotide
ccccuggcagccagaaugu

SEQ ID NO: 2356241 - RNA, 19 nt, Artificial Sequence
  Description of Artificial Sequence: Synthetic oligonucleotide
ccccuugugcugcuccacu

SEQ ID NO: 2356242 - RNA, 19 nt, Artificial Sequence
  Description of Artificial Sequence: Synthetic oligonucleotide
ggccccuggcagccagaau

SEQ ID NO: 2356243 - RNA, 19 nt, Artificial Sequence
  Description of Artificial Sequence: Synthetic oligonucleotide
uaugaguccaaccuuagag

SEQ ID NO: 2356244 - RNA, 19 nt, Artificial Sequence
  Description of Artificial Sequence: Synthetic oligonucleotide
uaaaguagcagucuugaag

SEQ ID NO: 2356245 - RNA, 19 nt, Artificial Sequence
  Description of Artificial Sequence: Synthetic oligonucleotide
aaaguagcagucuugaagu

SEQ ID NO: 2356246 - RNA, 19 nt, Artificial Sequence
  Description of Artificial Sequence: Synthetic oligonucleotide
ucgugaauaaguaagcucc

SEQ ID NO: 2356247 - RNA, 19 nt, Artificial Sequence
  Description of Artificial Sequence: Synthetic oligonucleotide
augaccuuaauccaacagc

SEQ ID NO: 2356248 - RNA, 19 nt, Artificial Sequence
  Description of Artificial Sequence: Synthetic oligonucleotide
agacuuacaaccauuaggc

SEQ ID NO: 2356249 - RNA, 19 nt, Artificial Sequence
  Description of Artificial Sequence: Synthetic oligonucleotide
ugguaguuuauucagguag

SEQ ID NO: 2356250 - RNA, 19 nt, Artificial Sequence
  Description of Artificial Sequence: Synthetic oligonucleotide
cacaagauaaacuuguccc

SEQ ID NO: 2356251 - RNA, 19 nt, Artificial Sequence
  Description of Artificial Sequence: Synthetic oligonucleotide
ucaggaaucgggaagaaga

SEQ ID NO: 2356252 - RNA, 19 nt, Artificial Sequence
  Description of Artificial Sequence: Synthetic oligonucleotide
ugaauaaguaagcuccgcg

SEQ ID NO: 2356253 - RNA, 19 nt, Artificial Sequence
  Description of Artificial Sequence: Synthetic oligonucleotide
acuuacaaccauuaggcuc

SEQ ID NO: 2356254 - RNA, 19 nt, Artificial Sequence
  Description of Artificial Sequence: Synthetic oligonucleotide
ucuaggaaggaaaaugcag

SEQ ID NO: 2356255 - RNA, 19 nt, Artificial Sequence
  Description of Artificial Sequence: Synthetic oligonucleotide
uuaauuucaggucugacuu

SEQ ID NO: 2356256 - RNA, 19 nt, Artificial Sequence
  Description of Artificial Sequence: Synthetic oligonucleotide
gaauaaguaagcuccgcgg

SEQ ID NO: 2356257 - RNA, 19 nt, Artificial Sequence
  Description of Artificial Sequence: Synthetic oligonucleotide
uuaucugacaucccuaagc

SEQ ID NO: 2356258 - RNA, 19 nt, Artificial Sequence
  Description of Artificial Sequence: Synthetic oligonucleotide
agaguuuagcuuuugaucu

SEQ ID NO: 2356259 - RNA, 19 nt, Artificial Sequence
  Description of Artificial Sequence: Synthetic oligonucleotide
aguuuauucagguagcugu

SEQ ID NO: 2356260 - RNA, 19 nt, Artificial Sequence
  Description of Artificial Sequence: Synthetic oligonucleotide
cuaggaaggaaaaugcagg

SEQ ID NO: 2356261 - RNA, 19 nt, Artificial Sequence
  Description of Artificial Sequence: Synthetic oligonucleotide
uuuaauuucaggucugacu

SEQ ID NO: 2356262 - RNA, 19 nt, Artificial Sequence
  Description of Artificial Sequence: Synthetic oligonucleotide
acugguuuaauuucagguc

SEQ ID NO: 2356263 - RNA, 19 nt, Artificial Sequence
  Description of Artificial Sequence: Synthetic oligonucleotide
uuaacugguaguuuauuca

SEQ ID NO: 2356264 - RNA, 19 nt, Artificial Sequence
  Description of Artificial Sequence: Synthetic oligonucleotide
uucacuuccuuuaugaguc

SEQ ID NO: 2356265 - RNA, 19 nt, Artificial Sequence
  Description of Artificial Sequence: Synthetic oligonucleotide
uugagaggcauaaaguagc

SEQ ID NO: 2356266 - RNA, 19 nt, Artificial Sequence
  Description of Artificial Sequence: Synthetic oligonucleotide
aauaaguaagcuccgcggu

SEQ ID NO: 2356267 - RNA, 19 nt, Artificial Sequence
  Description of Artificial Sequence: Synthetic oligonucleotide
augaguccaaccuuagagc

SEQ ID NO: 2356268 - RNA, 19 nt, Artificial Sequence
  Description of Artificial Sequence: Synthetic oligonucleotide
acaagauaaacuugucccg

SEQ ID NO: 2356269 - RNA, 19 nt, Artificial Sequence
  Description of Artificial Sequence: Synthetic oligonucleotide
ugaccuuaauccaacagca

SEQ ID NO: 2356270 - RNA, 19 nt, Artificial Sequence
  Description of Artificial Sequence: Synthetic oligonucleotide
cagacuuacaaccauuagg

SEQ ID NO: 2356271 - RNA, 19 nt, Artificial Sequence
  Description of Artificial Sequence: Synthetic oligonucleotide
ucacaagauaaacuugucc

SEQ ID NO: 2356272 - RNA, 19 nt, Artificial Sequence
  Description of Artificial Sequence: Synthetic oligonucleotide
uuauucagguagcuguagg

SEQ ID NO: 2356273 - RNA, 19 nt, Artificial Sequence
  Description of Artificial Sequence: Synthetic oligonucleotide
aagauaaacuugucccggg

SEQ ID NO: 2356274 - RNA, 19 nt, Artificial Sequence
  Description of Artificial Sequence: Synthetic oligonucleotide
auaaacuugucccgggccg

SEQ ID NO: 2356275 - RNA, 19 nt, Artificial Sequence
  Description of Artificial Sequence: Synthetic oligonucleotide
agaggcauaaaguagcagu

SEQ ID NO: 2356276 - RNA, 19 nt, Artificial Sequence
  Description of Artificial Sequence: Synthetic oligonucleotide
aucgugaauaaguaagcuc

SEQ ID NO: 2356277 - RNA, 19 nt, Artificial Sequence
  Description of Artificial Sequence: Synthetic oligonucleotide
uacucuagcucucaagagc

SEQ ID NO: 2356278 - RNA, 19 nt, Artificial Sequence
  Description of Artificial Sequence: Synthetic oligonucleotide
ugaguccaaccuuagagcc

SEQ ID NO: 2356279 - RNA, 19 nt, Artificial Sequence
  Description of Artificial Sequence: Synthetic oligonucleotide
acaaccauuaggcucagga

SEQ ID NO: 2356280 - RNA, 19 nt, Artificial Sequence
  Description of Artificial Sequence: Synthetic oligonucleotide
aaucgggaagaagacaggg

SEQ ID NO: 2356281 - RNA, 19 nt, Artificial Sequence
  Description of Artificial Sequence: Synthetic oligonucleotide
gcagauacgguuuuggagg

SEQ ID NO: 2356282 - RNA, 19 nt, Artificial Sequence
  Description of Artificial Sequence: Synthetic oligonucleotide
auggagacuacucuagcuc

SEQ ID NO: 2356283 - RNA, 19 nt, Artificial Sequence
  Description of Artificial Sequence: Synthetic oligonucleotide
uuaauccaacagcaaacag

SEQ ID NO: 2356284 - RNA, 19 nt, Artificial Sequence
  Description of Artificial Sequence: Synthetic oligonucleotide
agauaaacuugucccgggc

SEQ ID NO: 2356285 - RNA, 19 nt, Artificial Sequence
  Description of Artificial Sequence: Synthetic oligonucleotide
acuacucuagcucucaaga

SEQ ID NO: 2356286 - RNA, 19 nt, Artificial Sequence
  Description of Artificial Sequence: Synthetic oligonucleotide
cuuuguguagcucgcaggg

SEQ ID NO: 2356287 - RNA, 19 nt, Artificial Sequence
  Description of Artificial Sequence: Synthetic oligonucleotide
cuuacaaccauuaggcuca

SEQ ID NO: 2356288 - RNA, 19 nt, Artificial Sequence
  Description of Artificial Sequence: Synthetic oligonucleotide
gaugaccuuaauccaacag

SEQ ID NO: 2356289 - RNA, 19 nt, Artificial Sequence
  Description of Artificial Sequence: Synthetic oligonucleotide
ucgggaagaagacagggac

SEQ ID NO: 2356290 - RNA, 19 nt, Artificial Sequence
  Description of Artificial Sequence: Synthetic oligonucleotide
uuuaugaguccaaccuuag

SEQ ID NO: 2356291 - RNA, 19 nt, Artificial Sequence
  Description of Artificial Sequence: Synthetic oligonucleotide
gauaaacuugucccgggcc

SEQ ID NO: 2356292 - RNA, 19 nt, Artificial Sequence
  Description of Artificial Sequence: Synthetic oligonucleotide
uuaaggagggguauucacu

SEQ ID NO: 2356293 - RNA, 19 nt, Artificial Sequence
  Description of Artificial Sequence: Synthetic oligonucleotide
aguuuagcuuuugaucucc

SEQ ID NO: 2356294 - RNA, 19 nt, Artificial Sequence
  Description of Artificial Sequence: Synthetic oligonucleotide
aaccuuagagccgcagucc

SEQ ID NO: 2356295 - RNA, 19 nt, Artificial Sequence
  Description of Artificial Sequence: Synthetic oligonucleotide
aaacgcaucgugaauaagu

SEQ ID NO: 2356296 - RNA, 19 nt, Artificial Sequence
  Description of Artificial Sequence: Synthetic oligonucleotide
auaaguaagcuccgcgguc

SEQ ID NO: 2356297 - RNA, 19 nt, Artificial Sequence
  Description of Artificial Sequence: Synthetic oligonucleotide
uuuaaggagggguauucac

SEQ ID NO: 2356298 - RNA, 19 nt, Artificial Sequence
  Description of Artificial Sequence: Synthetic oligonucleotide
auucacucuuaacugguag

SEQ ID NO: 2356299 - RNA, 19 nt, Artificial Sequence
  Description of Artificial Sequence: Synthetic oligonucleotide
ugaccaguaaccagcgaag

SEQ ID NO: 2356300 - RNA, 19 nt, Artificial Sequence
  Description of Artificial Sequence: Synthetic oligonucleotide
accaguaaccagcgaaggc

SEQ ID NO: 2356301 - RNA, 19 nt, Artificial Sequence
  Description of Artificial Sequence: Synthetic oligonucleotide
ucuagaaagccauccuuca

SEQ ID NO: 2356302 - RNA, 19 nt, Artificial Sequence
  Description of Artificial Sequence: Synthetic oligonucleotide
aagacuggccuuuguguag

SEQ ID NO: 2356303 - RNA, 19 nt, Artificial Sequence
  Description of Artificial Sequence: Synthetic oligonucleotide
ugggcucacauucacuucc

SEQ ID NO: 2356304 - RNA, 19 nt, Artificial Sequence
  Description of Artificial Sequence: Synthetic oligonucleotide
cuagcucucaagagcaggg

SEQ ID NO: 2356305 - RNA, 19 nt, Artificial Sequence
  Description of Artificial Sequence: Synthetic oligonucleotide
cauugacacuguaagacug

SEQ ID NO: 2356306 - RNA, 19 nt, Artificial Sequence
  Description of Artificial Sequence: Synthetic oligonucleotide
cuggccuuuguguagcucg

SEQ ID NO: 2356307 - RNA, 19 nt, Artificial Sequence
  Description of Artificial Sequence: Synthetic oligonucleotide
acaucccuaagcaaccucc

SEQ ID NO: 2356308 - RNA, 19 nt, Artificial Sequence
  Description of Artificial Sequence: Synthetic oligonucleotide
aaaaugcaggggcagcagu

SEQ ID NO: 2356309 - RNA, 19 nt, Artificial Sequence
  Description of Artificial Sequence: Synthetic oligonucleotide
uuguguagcucgcagggcu

SEQ ID NO: 2356310 - RNA, 19 nt, Artificial Sequence
  Description of Artificial Sequence: Synthetic oligonucleotide
ucuagcucucaagagcagg

SEQ ID NO: 2356311 - RNA, 19 nt, Artificial Sequence
  Description of Artificial Sequence: Synthetic oligonucleotide
gggccgaugaccuuaaucc

SEQ ID NO: 2356312 - RNA, 19 nt, Artificial Sequence
  Description of Artificial Sequence: Synthetic oligonucleotide
uaaggagggguauucacuc

SEQ ID NO: 2356313 - RNA, 19 nt, Artificial Sequence
  Description of Artificial Sequence: Synthetic oligonucleotide
gaagacagggacuccugcc

SEQ ID NO: 2356314 - RNA, 19 nt, Artificial Sequence
  Description of Artificial Sequence: Synthetic oligonucleotide
agcagggucgcagauacgg

SEQ ID NO: 2356315 - RNA, 19 nt, Artificial Sequence
  Description of Artificial Sequence: Synthetic oligonucleotide
aaaugcaggggcagcaguc

SEQ ID NO: 2356316 - RNA, 19 nt, Artificial Sequence
  Description of Artificial Sequence: Synthetic oligonucleotide
aaggaaaaugcaggggcag

SEQ ID NO: 2356317 - RNA, 19 nt, Artificial Sequence
  Description of Artificial Sequence: Synthetic oligonucleotide
gauacgguuuuggagguug

SEQ ID NO: 2356318 - RNA, 19 nt, Artificial Sequence
  Description of Artificial Sequence: Synthetic oligonucleotide
uguucuccgacugagugcu

SEQ ID NO: 2356319 - RNA, 19 nt, Artificial Sequence
  Description of Artificial Sequence: Synthetic oligonucleotide
agcuccgcggucuaggaag

SEQ ID NO: 2356320 - RNA, 19 nt, Artificial Sequence
  Description of Artificial Sequence: Synthetic oligonucleotide
agagccgcaguccuuguag

SEQ ID NO: 2356321 - RNA, 19 nt, Artificial Sequence
  Description of Artificial Sequence: Synthetic oligonucleotide
acuugugaccaguaaccag

SEQ ID NO: 2356322 - RNA, 19 nt, Artificial Sequence
  Description of Artificial Sequence: Synthetic oligonucleotide
uuuauucagguagcuguag

SEQ ID NO: 2356323 - RNA, 19 nt, Artificial Sequence
  Description of Artificial Sequence: Synthetic oligonucleotide
agucacaagauaaacuugu

SEQ ID NO: 2356324 - RNA, 19 nt, Artificial Sequence
  Description of Artificial Sequence: Synthetic oligonucleotide
aacugguaguuuauucagg

SEQ ID NO: 2356325 - RNA, 19 nt, Artificial Sequence
  Description of Artificial Sequence: Synthetic oligonucleotide
uuccuuuaugaguccaacc

SEQ ID NO: 2356326 - RNA, 19 nt, Artificial Sequence
  Description of Artificial Sequence: Synthetic oligonucleotide
aguccuuguagcgaagggg

SEQ ID NO: 2356327 - RNA, 19 nt, Artificial Sequence
  Description of Artificial Sequence: Synthetic oligonucleotide
ggaaucgggaagaagacag

SEQ ID NO: 2356328 - RNA, 19 nt, Artificial Sequence
  Description of Artificial Sequence: Synthetic oligonucleotide
agggguauucacucuuaac

SEQ ID NO: 2356329 - RNA, 19 nt, Artificial Sequence
  Description of Artificial Sequence: Synthetic oligonucleotide
ugagaggcauaaaguagca

SEQ ID NO: 2356330 - RNA, 19 nt, Artificial Sequence
  Description of Artificial Sequence: Synthetic oligonucleotide
uggagacuacucuagcucu

SEQ ID NO: 2356331 - RNA, 19 nt, Artificial Sequence
  Description of Artificial Sequence: Synthetic oligonucleotide
uccgacugagugcugcuag

SEQ ID NO: 2356332 - RNA, 19 nt, Artificial Sequence
  Description of Artificial Sequence: Synthetic oligonucleotide
gacuacucuagcucucaag

SEQ ID NO: 2356333 - RNA, 19 nt, Artificial Sequence
  Description of Artificial Sequence: Synthetic oligonucleotide
auuaggcucaggaaucggg

SEQ ID NO: 2356334 - RNA, 19 nt, Artificial Sequence
  Description of Artificial Sequence: Synthetic oligonucleotide
aguuaucugacaucccuaa

SEQ ID NO: 2356335 - RNA, 19 nt, Artificial Sequence
  Description of Artificial Sequence: Synthetic oligonucleotide
agcucucaagagcaggguc

SEQ ID NO: 2356336 - RNA, 19 nt, Artificial Sequence
  Description of Artificial Sequence: Synthetic oligonucleotide
uucggcacugguuuaauuu

SEQ ID NO: 2356337 - RNA, 19 nt, Artificial Sequence
  Description of Artificial Sequence: Synthetic oligonucleotide
aguggauccguaguccugg

SEQ ID NO: 2356338 - RNA, 19 nt, Artificial Sequence
  Description of Artificial Sequence: Synthetic oligonucleotide
uaguccugggucaaguuau

SEQ ID NO: 2356339 - RNA, 19 nt, Artificial Sequence
  Description of Artificial Sequence: Synthetic oligonucleotide
aagagguuuugcucuuugu

SEQ ID NO: 2356340 - RNA, 19 nt, Artificial Sequence
  Description of Artificial Sequence: Synthetic oligonucleotide
uuaugaguccaaccuuaga

SEQ ID NO: 2356341 - RNA, 19 nt, Artificial Sequence
  Description of Artificial Sequence: Synthetic oligonucleotide
ucaaguuaucugacauccc

SEQ ID NO: 2356342 - RNA, 19 nt, Artificial Sequence
  Description of Artificial Sequence: Synthetic oligonucleotide
accauuaggcucaggaauc

SEQ ID NO: 2356343 - RNA, 19 nt, Artificial Sequence
  Description of Artificial Sequence: Synthetic oligonucleotide
cuugaagcucccauuucac

SEQ ID NO: 2356344 - RNA, 19 nt, Artificial Sequence
  Description of Artificial Sequence: Synthetic oligonucleotide
cuacucuagcucucaagag

SEQ ID NO: 2356345 - RNA, 19 nt, Artificial Sequence
  Description of Artificial Sequence: Synthetic oligonucleotide
uaaguaagcuccgcggucu

SEQ ID NO: 2356346 - RNA, 19 nt, Artificial Sequence
  Description of Artificial Sequence: Synthetic oligonucleotide
uccagacuuacaaccauua

SEQ ID NO: 2356347 - RNA, 19 nt, Artificial Sequence
  Description of Artificial Sequence: Synthetic oligonucleotide
aggaaaaugcaggggcagc

SEQ ID NO: 2356348 - RNA, 19 nt, Artificial Sequence
  Description of Artificial Sequence: Synthetic oligonucleotide
agcgccagcaguaggaccg

SEQ ID NO: 2356349 - RNA, 19 nt, Artificial Sequence
  Description of Artificial Sequence: Synthetic oligonucleotide
ggguauucacucuuaacug

SEQ ID NO: 2356350 - RNA, 19 nt, Artificial Sequence
  Description of Artificial Sequence: Synthetic oligonucleotide
ugacacuguaagacuggcc

SEQ ID NO: 2356351 - RNA, 19 nt, Artificial Sequence
  Description of Artificial Sequence: Synthetic oligonucleotide
cauaaaguagcagucuuga

SEQ ID NO: 2356352 - RNA, 19 nt, Artificial Sequence
  Description of Artificial Sequence: Synthetic oligonucleotide
cagucuugaaguucuguuc

SEQ ID NO: 2356353 - RNA, 19 nt, Artificial Sequence
  Description of Artificial Sequence: Synthetic oligonucleotide
gcuagugaaggugacauug

SEQ ID NO: 2356354 - RNA, 19 nt, Artificial Sequence
  Description of Artificial Sequence: Synthetic oligonucleotide
agcuuuugaucuccaccgg

SEQ ID NO: 2356355 - RNA, 19 nt, Artificial Sequence
  Description of Artificial Sequence: Synthetic oligonucleotide
cuugucuuucuggaugggg

SEQ ID NO: 2356356 - RNA, 19 nt, Artificial Sequence
  Description of Artificial Sequence: Synthetic oligonucleotide
cugccgaccugucuggugg

SEQ ID NO: 2356357 - RNA, 19 nt, Artificial Sequence
  Description of Artificial Sequence: Synthetic oligonucleotide
ccuuaauccaacagcaaac

SEQ ID NO: 2356358 - RNA, 19 nt, Artificial Sequence
  Description of Artificial Sequence: Synthetic oligonucleotide
cuuguagcgaaggggcucg

SEQ ID NO: 2356359 - RNA, 19 nt, Artificial Sequence
  Description of Artificial Sequence: Synthetic oligonucleotide
accgggaucucccagcaga

SEQ ID NO: 2356360 - RNA, 19 nt, Artificial Sequence
  Description of Artificial Sequence: Synthetic oligonucleotide
cuucacaguggauccguag

SEQ ID NO: 2356361 - RNA, 19 nt, Artificial Sequence
  Description of Artificial Sequence: Synthetic oligonucleotide
cuuuaugaguccaaccuua

SEQ ID NO: 2356362 - RNA, 19 nt, Artificial Sequence
  Description of Artificial Sequence: Synthetic oligonucleotide
gaggcauaaaguagcaguc

SEQ ID NO: 2356363 - RNA, 19 nt, Artificial Sequence
  Description of Artificial Sequence: Synthetic oligonucleotide
guagcgaaggggcucggcc

SEQ ID NO: 2356364 - RNA, 19 nt, Artificial Sequence
  Description of Artificial Sequence: Synthetic oligonucleotide
augccguacacuguggcag

SEQ ID NO: 2356365 - RNA, 19 nt, Artificial Sequence
  Description of Artificial Sequence: Synthetic oligonucleotide
gaccaguaaccagcgaagg

SEQ ID NO: 2356366 - RNA, 19 nt, Artificial Sequence
  Description of Artificial Sequence: Synthetic oligonucleotide
ucggcacugguuuaauuuc

SEQ ID NO: 2356367 - RNA, 19 nt, Artificial Sequence
  Description of Artificial Sequence: Synthetic oligonucleotide
caaccuuagagccgcaguc

SEQ ID NO: 2356368 - RNA, 19 nt, Artificial Sequence
  Description of Artificial Sequence: Synthetic oligonucleotide
cuuaauccaacagcaaaca

SEQ ID NO: 2356369 - RNA, 19 nt, Artificial Sequence
  Description of Artificial Sequence: Synthetic oligonucleotide
gaaucgggaagaagacagg

SEQ ID NO: 2356370 - RNA, 19 nt, Artificial Sequence
  Description of Artificial Sequence: Synthetic oligonucleotide
gugaccaguaaccagcgaa

SEQ ID NO: 2356371 - RNA, 19 nt, Artificial Sequence
  Description of Artificial Sequence: Synthetic oligonucleotide
ccacuugugaccaguaacc

SEQ ID NO: 2356372 - RNA, 19 nt, Artificial Sequence
  Description of Artificial Sequence: Synthetic oligonucleotide
cuuuugaucuccaccggga

SEQ ID NO: 2356373 - RNA, 19 nt, Artificial Sequence
  Description of Artificial Sequence: Synthetic oligonucleotide
caggaaucgggaagaagac

SEQ ID NO: 2356374 - RNA, 19 nt, Artificial Sequence
  Description of Artificial Sequence: Synthetic oligonucleotide
acucuagcucucaagagca

SEQ ID NO: 2356375 - RNA, 19 nt, Artificial Sequence
  Description of Artificial Sequence: Synthetic oligonucleotide
cuagaaagccauccuucac

SEQ ID NO: 2356376 - RNA, 19 nt, Artificial Sequence
  Description of Artificial Sequence: Synthetic oligonucleotide
cuuagagccgcaguccuug

SEQ ID NO: 2356377 - RNA, 19 nt, Artificial Sequence
  Description of Artificial Sequence: Synthetic oligonucleotide
cuguucuccgacugagugc

SEQ ID NO: 2356378 - RNA, 19 nt, Artificial Sequence
  Description of Artificial Sequence: Synthetic oligonucleotide
aaggagggguauucacucu

SEQ ID NO: 2356379 - RNA, 19 nt, Artificial Sequence
  Description of Artificial Sequence: Synthetic oligonucleotide
gacaugggcucacauucac

SEQ ID NO: 2356380 - RNA, 19 nt, Artificial Sequence
  Description of Artificial Sequence: Synthetic oligonucleotide
ucuguucaucuuucggcac

SEQ ID NO: 2356381 - RNA, 19 nt, Artificial Sequence
  Description of Artificial Sequence: Synthetic oligonucleotide
cuaagcaaccuccugccga

SEQ ID NO: 2356382 - RNA, 19 nt, Artificial Sequence
  Description of Artificial Sequence: Synthetic oligonucleotide
ugggucaaguuaucugaca

SEQ ID NO: 2356383 - RNA, 19 nt, Artificial Sequence
  Description of Artificial Sequence: Synthetic oligonucleotide
cgcaucgugaauaaguaag

SEQ ID NO: 2356384 - RNA, 19 nt, Artificial Sequence
  Description of Artificial Sequence: Synthetic oligonucleotide
accagcuuuaaggaggggu

SEQ ID NO: 2356385 - RNA, 19 nt, Artificial Sequence
  Description of Artificial Sequence: Synthetic oligonucleotide
gaguccaaccuuagagccg

SEQ ID NO: 2356386 - RNA, 19 nt, Artificial Sequence
  Description of Artificial Sequence: Synthetic oligonucleotide
aacgcaucgugaauaagua

SEQ ID NO: 2356387 - RNA, 19 nt, Artificial Sequence
  Description of Artificial Sequence: Synthetic oligonucleotide
gauccguaguccuggguca

SEQ ID NO: 2356388 - RNA, 19 nt, Artificial Sequence
  Description of Artificial Sequence: Synthetic oligonucleotide
gaaggaaaaugcaggggca

SEQ ID NO: 2356389 - RNA, 19 nt, Artificial Sequence
  Description of Artificial Sequence: Synthetic oligonucleotide
gucgcagauacgguuuugg

SEQ ID NO: 2356390 - RNA, 19 nt, Artificial Sequence
  Description of Artificial Sequence: Synthetic oligonucleotide
caacagcaaacagccaugg

SEQ ID NO: 2356391 - RNA, 19 nt, Artificial Sequence
  Description of Artificial Sequence: Synthetic oligonucleotide
agcagucacaagauaaacu

SEQ ID NO: 2356392 - RNA, 19 nt, Artificial Sequence
  Description of Artificial Sequence: Synthetic oligonucleotide
gggguauucacucuuaacu

SEQ ID NO: 2356393 - RNA, 19 nt, Artificial Sequence
  Description of Artificial Sequence: Synthetic oligonucleotide
auuccagacuuacaaccau

SEQ ID NO: 2356394 - RNA, 19 nt, Artificial Sequence
  Description of Artificial Sequence: Synthetic oligonucleotide
guaagcuccgcggucuagg

SEQ ID NO: 2356395 - RNA, 19 nt, Artificial Sequence
  Description of Artificial Sequence: Synthetic oligonucleotide
uggggcauuugauuccaga

SEQ ID NO: 2356396 - RNA, 19 nt, Artificial Sequence
  Description of Artificial Sequence: Synthetic oligonucleotide
cacugguuuaauuucaggu

SEQ ID NO: 2356397 - RNA, 19 nt, Artificial Sequence
  Description of Artificial Sequence: Synthetic oligonucleotide
gguugagaggcauaaagua

SEQ ID NO: 2356398 - RNA, 19 nt, Artificial Sequence
  Description of Artificial Sequence: Synthetic oligonucleotide
gaguuuagcuuuugaucuc

SEQ ID NO: 2356399 - RNA, 19 nt, Artificial Sequence
  Description of Artificial Sequence: Synthetic oligonucleotide
ccaguaaccagcgaaggcc

SEQ ID NO: 2356400 - RNA, 19 nt, Artificial Sequence
  Description of Artificial Sequence: Synthetic oligonucleotide
gguaguuuauucagguagc

SEQ ID NO: 2356401 - RNA, 19 nt, Artificial Sequence
  Description of Artificial Sequence: Synthetic oligonucleotide
uauucacucuuaacuggua

SEQ ID NO: 2356402 - RNA, 19 nt, Artificial Sequence
  Description of Artificial Sequence: Synthetic oligonucleotide
cugguuuaauuucaggucu

SEQ ID NO: 2356403 - RNA, 19 nt, Artificial Sequence
  Description of Artificial Sequence: Synthetic oligonucleotide
uccaccgggaucucccagc

SEQ ID NO: 2356404 - RNA, 19 nt, Artificial Sequence
  Description of Artificial Sequence: Synthetic oligonucleotide
guaagacuggccuuugugu

SEQ ID NO: 2356405 - RNA, 19 nt, Artificial Sequence
  Description of Artificial Sequence: Synthetic oligonucleotide
gaugccguacacuguggca

SEQ ID NO: 2356406 - RNA, 19 nt, Artificial Sequence
  Description of Artificial Sequence: Synthetic oligonucleotide
gcuguucuccgacugagug

SEQ ID NO: 2356407 - RNA, 19 nt, Artificial Sequence
  Description of Artificial Sequence: Synthetic oligonucleotide
uuuguguagcucgcagggc

SEQ ID NO: 2356408 - RNA, 19 nt, Artificial Sequence
  Description of Artificial Sequence: Synthetic oligonucleotide
agguugagaggcauaaagu

SEQ ID NO: 2356409 - RNA, 19 nt, Artificial Sequence
  Description of Artificial Sequence: Synthetic oligonucleotide
uuccccacacagacacagg

SEQ ID NO: 2356410 - RNA, 19 nt, Artificial Sequence
  Description of Artificial Sequence: Synthetic oligonucleotide
accuuagagccgcaguccu

SEQ ID NO: 2356411 - RNA, 19 nt, Artificial Sequence
  Description of Artificial Sequence: Synthetic oligonucleotide
ucgcagauacgguuuugga

SEQ ID NO: 2356412 - RNA, 19 nt, Artificial Sequence
  Description of Artificial Sequence: Synthetic oligonucleotide
caaguuaucugacaucccu

SEQ ID NO: 2356413 - RNA, 19 nt, Artificial Sequence
  Description of Artificial Sequence: Synthetic oligonucleotide
uucuccgacugagugcugc

SEQ ID NO: 2356414 - RNA, 19 nt, Artificial Sequence
  Description of Artificial Sequence: Synthetic oligonucleotide
gcucucaagagcagggucg

SEQ ID NO: 2356415 - RNA, 19 nt, Artificial Sequence
  Description of Artificial Sequence: Synthetic oligonucleotide
gugaauaaguaagcuccgc

SEQ ID NO: 2356416 - RNA, 19 nt, Artificial Sequence
  Description of Artificial Sequence: Synthetic oligonucleotide
guuuaauuucaggucugac

SEQ ID NO: 2356417 - RNA, 19 nt, Artificial Sequence
  Description of Artificial Sequence: Synthetic oligonucleotide
cugggucaaguuaucugac

SEQ ID NO: 2356418 - RNA, 19 nt, Artificial Sequence
  Description of Artificial Sequence: Synthetic oligonucleotide
uucaggucugacuucucuu

SEQ ID NO: 2356419 - RNA, 19 nt, Artificial Sequence
  Description of Artificial Sequence: Synthetic oligonucleotide
aaguagcagucuugaaguu

SEQ ID NO: 2356420 - RNA, 19 nt, Artificial Sequence
  Description of Artificial Sequence: Synthetic oligonucleotide
uagcucgcagggcugggug

SEQ ID NO: 2356421 - RNA, 19 nt, Artificial Sequence
  Description of Artificial Sequence: Synthetic oligonucleotide
aggaaacgcaucgugaaua

SEQ ID NO: 2356422 - RNA, 19 nt, Artificial Sequence
  Description of Artificial Sequence: Synthetic oligonucleotide
ggggcauuugauuccagac

SEQ ID NO: 2356423 - RNA, 19 nt, Artificial Sequence
  Description of Artificial Sequence: Synthetic oligonucleotide
uaaacuugucccgggccga

SEQ ID NO: 2356424 - RNA, 19 nt, Artificial Sequence
  Description of Artificial Sequence: Synthetic oligonucleotide
ggauccguaguccuggguc

SEQ ID NO: 2356425 - RNA, 19 nt, Artificial Sequence
  Description of Artificial Sequence: Synthetic oligonucleotide
uccuuguagcgaaggggcu

SEQ ID NO: 2356426 - RNA, 19 nt, Artificial Sequence
  Description of Artificial Sequence: Synthetic oligonucleotide
uagcgaaggggcucggccu

SEQ ID NO: 2356427 - RNA, 19 nt, Artificial Sequence
  Description of Artificial Sequence: Synthetic oligonucleotide
aaguuaucugacaucccua

SEQ ID NO: 2356428 - RNA, 19 nt, Artificial Sequence
  Description of Artificial Sequence: Synthetic oligonucleotide
gcggccaggaaacgcaucg

SEQ ID NO: 2356429 - RNA, 19 nt, Artificial Sequence
  Description of Artificial Sequence: Synthetic oligonucleotide
aaacuugucccgggccgag

SEQ ID NO: 2356430 - RNA, 19 nt, Artificial Sequence
  Description of Artificial Sequence: Synthetic oligonucleotide
uaggcucaggaaucgggaa

SEQ ID NO: 2356431 - RNA, 19 nt, Artificial Sequence
  Description of Artificial Sequence: Synthetic oligonucleotide
agcucgcagggcugggugg

SEQ ID NO: 2356432 - RNA, 19 nt, Artificial Sequence
  Description of Artificial Sequence: Synthetic oligonucleotide
gacaucccuaagcaaccuc

SEQ ID NO: 2356433 - RNA, 19 nt, Artificial Sequence
  Description of Artificial Sequence: Synthetic oligonucleotide
cauuaggcucaggaaucgg

SEQ ID NO: 2356434 - RNA, 19 nt, Artificial Sequence
  Description of Artificial Sequence: Synthetic oligonucleotide
ccuuuguguagcucgcagg

SEQ ID NO: 2356435 - RNA, 19 nt, Artificial Sequence
  Description of Artificial Sequence: Synthetic oligonucleotide
ugugaccaguaaccagcga

SEQ ID NO: 2356436 - RNA, 19 nt, Artificial Sequence
  Description of Artificial Sequence: Synthetic oligonucleotide
aagcaaccuccugccgacc

SEQ ID NO: 2356437 - RNA, 19 nt, Artificial Sequence
  Description of Artificial Sequence: Synthetic oligonucleotide
aggcauaaaguagcagucu

SEQ ID NO: 2356438 - RNA, 19 nt, Artificial Sequence
  Description of Artificial Sequence: Synthetic oligonucleotide
ucuuaacugguaguuuauu

SEQ ID NO: 2356439 - RNA, 19 nt, Artificial Sequence
  Description of Artificial Sequence: Synthetic oligonucleotide
cucucaagagcagggucgc

SEQ ID NO: 2356440 - RNA, 19 nt, Artificial Sequence
  Description of Artificial Sequence: Synthetic oligonucleotide
agcaaccuccugccgaccu

SEQ ID NO: 2356441 - RNA, 19 nt, Artificial Sequence
  Description of Artificial Sequence: Synthetic oligonucleotide
ucuuucggcacugguuuaa

SEQ ID NO: 2356442 - RNA, 19 nt, Artificial Sequence
  Description of Artificial Sequence: Synthetic oligonucleotide
cagcagucacaagauaaac

SEQ ID NO: 2356443 - RNA, 19 nt, Artificial Sequence
  Description of Artificial Sequence: Synthetic oligonucleotide
uccaaccuuagagccgcag

SEQ ID NO: 2356444 - RNA, 19 nt, Artificial Sequence
  Description of Artificial Sequence: Synthetic oligonucleotide
auuugauuccagacuuaca

SEQ ID NO: 2356445 - RNA, 19 nt, Artificial Sequence
  Description of Artificial Sequence: Synthetic oligonucleotide
gggaucucccagcagaaga

SEQ ID NO: 2356446 - RNA, 19 nt, Artificial Sequence
  Description of Artificial Sequence: Synthetic oligonucleotide
ugggacaugggcucacauu

SEQ ID NO: 2356447 - RNA, 19 nt, Artificial Sequence
  Description of Artificial Sequence: Synthetic oligonucleotide
aggaaucgggaagaagaca

SEQ ID NO: 2356448 - RNA, 19 nt, Artificial Sequence
  Description of Artificial Sequence: Synthetic oligonucleotide
gaggagccgggucagucca

SEQ ID NO: 2356449 - RNA, 19 nt, Artificial Sequence
  Description of Artificial Sequence: Synthetic oligonucleotide
aguaggaccguggcggcca

SEQ ID NO: 2356450 - RNA, 19 nt, Artificial Sequence
  Description of Artificial Sequence: Synthetic oligonucleotide
agcgaaggggcucggccug

SEQ ID NO: 2356451 - RNA, 19 nt, Artificial Sequence
  Description of Artificial Sequence: Synthetic oligonucleotide
ggaucucccagcagaagag

SEQ ID NO: 2356452 - RNA, 19 nt, Artificial Sequence
  Description of Artificial Sequence: Synthetic oligonucleotide
cagcaguaggaccguggcg

SEQ ID NO: 2356453 - RNA, 19 nt, Artificial Sequence
  Description of Artificial Sequence: Synthetic oligonucleotide
aggagggguauucacucuu

SEQ ID NO: 2356454 - RNA, 19 nt, Artificial Sequence
  Description of Artificial Sequence: Synthetic oligonucleotide
gcagucacaagauaaacuu

SEQ ID NO: 2356455 - RNA, 19 nt, Artificial Sequence
  Description of Artificial Sequence: Synthetic oligonucleotide
agccgggucaguccacuug

SEQ ID NO: 2356456 - RNA, 19 nt, Artificial Sequence
  Description of Artificial Sequence: Synthetic oligonucleotide
caaccauuaggcucaggaa

SEQ ID NO: 2356457 - RNA, 19 nt, Artificial Sequence
  Description of Artificial Sequence: Synthetic oligonucleotide
gcaucgugaauaaguaagc

SEQ ID NO: 2356458 - RNA, 19 nt, Artificial Sequence
  Description of Artificial Sequence: Synthetic oligonucleotide
gcagaagagguuuugcucu

SEQ ID NO: 2356459 - RNA, 19 nt, Artificial Sequence
  Description of Artificial Sequence: Synthetic oligonucleotide
aggccaacaaagaguuuag

SEQ ID NO: 2356460 - RNA, 19 nt, Artificial Sequence
  Description of Artificial Sequence: Synthetic oligonucleotide
gccaacaaagaguuuagcu

SEQ ID NO: 2356461 - RNA, 19 nt, Artificial Sequence
  Description of Artificial Sequence: Synthetic oligonucleotide
caggccaacaaagaguuua

SEQ ID NO: 2356462 - RNA, 19 nt, Artificial Sequence
  Description of Artificial Sequence: Synthetic oligonucleotide
ggucaaguuaucugacauc

SEQ ID NO: 2356463 - RNA, 19 nt, Artificial Sequence
  Description of Artificial Sequence: Synthetic oligonucleotide
gagacuacucuagcucuca

SEQ ID NO: 2356464 - RNA, 19 nt, Artificial Sequence
  Description of Artificial Sequence: Synthetic oligonucleotide
uguagcucgcagggcuggg

SEQ ID NO: 2356465 - RNA, 19 nt, Artificial Sequence
  Description of Artificial Sequence: Synthetic oligonucleotide
ccugggucaaguuaucuga

SEQ ID NO: 2356466 - RNA, 19 nt, Artificial Sequence
  Description of Artificial Sequence: Synthetic oligonucleotide
cgugaauaaguaagcuccg

SEQ ID NO: 2356467 - RNA, 19 nt, Artificial Sequence
  Description of Artificial Sequence: Synthetic oligonucleotide
gacuuacaaccauuaggcu

SEQ ID NO: 2356468 - RNA, 19 nt, Artificial Sequence
  Description of Artificial Sequence: Synthetic oligonucleotide
cccuaagcaaccuccugcc

SEQ ID NO: 2356469 - RNA, 19 nt, Artificial Sequence
  Description of Artificial Sequence: Synthetic oligonucleotide
acgcaucgugaauaaguaa

SEQ ID NO: 2356470 - RNA, 19 nt, Artificial Sequence
  Description of Artificial Sequence: Synthetic oligonucleotide
uggauccguaguccugggu

SEQ ID NO: 2356471 - RNA, 19 nt, Artificial Sequence
  Description of Artificial Sequence: Synthetic oligonucleotide
ugccguacacuguggcaga

SEQ ID NO: 2356472 - RNA, 19 nt, Artificial Sequence
  Description of Artificial Sequence: Synthetic oligonucleotide
cuccugccgaccugucugg

SEQ ID NO: 2356473 - RNA, 19 nt, Artificial Sequence
  Description of Artificial Sequence: Synthetic oligonucleotide
ucuccgacugagugcugcu

SEQ ID NO: 2356474 - RNA, 19 nt, Artificial Sequence
  Description of Artificial Sequence: Synthetic oligonucleotide
cgcagauacgguuuuggag

SEQ ID NO: 2356475 - RNA, 19 nt, Artificial Sequence
  Description of Artificial Sequence: Synthetic oligonucleotide
cauggagacuacucuagcu

SEQ ID NO: 2356476 - RNA, 19 nt, Artificial Sequence
  Description of Artificial Sequence: Synthetic oligonucleotide
gcauaaaguagcagucuug

SEQ ID NO: 2356477 - RNA, 19 nt, Artificial Sequence
  Description of Artificial Sequence: Synthetic oligonucleotide
cacacagacacaggccaac

SEQ ID NO: 2356478 - RNA, 19 nt, Artificial Sequence
  Description of Artificial Sequence: Synthetic oligonucleotide
cuuuaaggagggguauuca

SEQ ID NO: 2356479 - RNA, 19 nt, Artificial Sequence
  Description of Artificial Sequence: Synthetic oligonucleotide
acacuguaagacuggccuu

SEQ ID NO: 2356480 - RNA, 19 nt, Artificial Sequence
  Description of Artificial Sequence: Synthetic oligonucleotide
agcuguaggucuugucuuu

SEQ ID NO: 2356481 - RNA, 19 nt, Artificial Sequence
  Description of Artificial Sequence: Synthetic oligonucleotide
ugccgaccugucugguggg

SEQ ID NO: 2356482 - RNA, 19 nt, Artificial Sequence
  Description of Artificial Sequence: Synthetic oligonucleotide
gaccugucugguggggccg

SEQ ID NO: 2356483 - RNA, 19 nt, Artificial Sequence
  Description of Artificial Sequence: Synthetic oligonucleotide
ggaugccguacacuguggc

SEQ ID NO: 2356484 - RNA, 19 nt, Artificial Sequence
  Description of Artificial Sequence: Synthetic oligonucleotide
gucacaagauaaacuuguc

SEQ ID NO: 2356485 - RNA, 19 nt, Artificial Sequence
  Description of Artificial Sequence: Synthetic oligonucleotide
caguggauccguaguccug

SEQ ID NO: 2356486 - RNA, 19 nt, Artificial Sequence
  Description of Artificial Sequence: Synthetic oligonucleotide
acuguaagacuggccuuug

SEQ ID NO: 2356487 - RNA, 19 nt, Artificial Sequence
  Description of Artificial Sequence: Synthetic oligonucleotide
uuucggcacugguuuaauu

SEQ ID NO: 2356488 - RNA, 19 nt, Artificial Sequence
  Description of Artificial Sequence: Synthetic oligonucleotide
uguagcgaaggggcucggc

SEQ ID NO: 2356489 - RNA, 19 nt, Artificial Sequence
  Description of Artificial Sequence: Synthetic oligonucleotide
ugucaucuugaagcuccca

SEQ ID NO: 2356490 - RNA, 19 nt, Artificial Sequence
  Description of Artificial Sequence: Synthetic oligonucleotide
aucgggaagaagacaggga

SEQ ID NO: 2356491 - RNA, 19 nt, Artificial Sequence
  Description of Artificial Sequence: Synthetic oligonucleotide
guauucacucuuaacuggu

SEQ ID NO: 2356492 - RNA, 19 nt, Artificial Sequence
  Description of Artificial Sequence: Synthetic oligonucleotide
guuuugcucuuugucaucu

SEQ ID NO: 2356493 - RNA, 19 nt, Artificial Sequence
  Description of Artificial Sequence: Synthetic oligonucleotide
aaguaagcuccgcggucua

SEQ ID NO: 2356494 - RNA, 19 nt, Artificial Sequence
  Description of Artificial Sequence: Synthetic oligonucleotide
guggauccguaguccuggg

SEQ ID NO: 2356495 - RNA, 19 nt, Artificial Sequence
  Description of Artificial Sequence: Synthetic oligonucleotide
ccaccagcuuuaaggaggg

SEQ ID NO: 2356496 - RNA, 19 nt, Artificial Sequence
  Description of Artificial Sequence: Synthetic oligonucleotide
gccuuuguguagcucgcag

SEQ ID NO: 2356497 - RNA, 19 nt, Artificial Sequence
  Description of Artificial Sequence: Synthetic oligonucleotide
ucaguccacuugugaccag

SEQ ID NO: 2356498 - RNA, 19 nt, Artificial Sequence
  Description of Artificial Sequence: Synthetic oligonucleotide
aagcuccgcggucuaggaa

SEQ ID NO: 2356499 - RNA, 19 nt, Artificial Sequence
  Description of Artificial Sequence: Synthetic oligonucleotide
ggcauuugauuccagacuu

SEQ ID NO: 2356500 - RNA, 19 nt, Artificial Sequence
  Description of Artificial Sequence: Synthetic oligonucleotide
uuagagccgcaguccuugu

SEQ ID NO: 2356501 - RNA, 19 nt, Artificial Sequence
  Description of Artificial Sequence: Synthetic oligonucleotide
aagagcagggucgcagaua

SEQ ID NO: 2356502 - RNA, 19 nt, Artificial Sequence
  Description of Artificial Sequence: Synthetic oligonucleotide
gucaucuugaagcucccau

SEQ ID NO: 2356503 - RNA, 19 nt, Artificial Sequence
  Description of Artificial Sequence: Synthetic oligonucleotide
uggcagagcuguucuccga

SEQ ID NO: 2356504 - RNA, 19 nt, Artificial Sequence
  Description of Artificial Sequence: Synthetic oligonucleotide
caucuuucggcacugguuu

SEQ ID NO: 2356505 - RNA, 19 nt, Artificial Sequence
  Description of Artificial Sequence: Synthetic oligonucleotide
caugggcucacauucacuu

SEQ ID NO: 2356506 - RNA, 19 nt, Artificial Sequence
  Description of Artificial Sequence: Synthetic oligonucleotide
ggaaacgcaucgugaauaa

SEQ ID NO: 2356507 - RNA, 19 nt, Artificial Sequence
  Description of Artificial Sequence: Synthetic oligonucleotide
acagggacuccugccagga

SEQ ID NO: 2356508 - RNA, 19 nt, Artificial Sequence
  Description of Artificial Sequence: Synthetic oligonucleotide
uagcucucaagagcagggu

SEQ ID NO: 2356509 - RNA, 19 nt, Artificial Sequence
  Description of Artificial Sequence: Synthetic oligonucleotide
ggaggagccgggucagucc

SEQ ID NO: 2356510 - RNA, 19 nt, Artificial Sequence
  Description of Artificial Sequence: Synthetic oligonucleotide
uuacaaccauuaggcucag

SEQ ID NO: 2356511 - RNA, 19 nt, Artificial Sequence
  Description of Artificial Sequence: Synthetic oligonucleotide
ggugacauugacacuguaa

SEQ ID NO: 2356512 - RNA, 19 nt, Artificial Sequence
  Description of Artificial Sequence: Synthetic oligonucleotide
cuggguggcggcgaccagc

SEQ ID NO: 2356513 - RNA, 19 nt, Artificial Sequence
  Description of Artificial Sequence: Synthetic oligonucleotide
ccgaugaccuuaauccaac

SEQ ID NO: 2356514 - RNA, 19 nt, Artificial Sequence
  Description of Artificial Sequence: Synthetic oligonucleotide
agacuacucuagcucucaa

SEQ ID NO: 2356515 - RNA, 19 nt, Artificial Sequence
  Description of Artificial Sequence: Synthetic oligonucleotide
gcaguccuuguagcgaagg

SEQ ID NO: 2356516 - RNA, 19 nt, Artificial Sequence
  Description of Artificial Sequence: Synthetic oligonucleotide
ggcagagcuguucuccgac

SEQ ID NO: 2356517 - RNA, 19 nt, Artificial Sequence
  Description of Artificial Sequence: Synthetic oligonucleotide
cagcgccagcaguaggacc

SEQ ID NO: 2356518 - RNA, 19 nt, Artificial Sequence
  Description of Artificial Sequence: Synthetic oligonucleotide
aguccugggucaaguuauc

SEQ ID NO: 2356519 - RNA, 19 nt, Artificial Sequence
  Description of Artificial Sequence: Synthetic oligonucleotide
gcuuuaaggagggguauuc

SEQ ID NO: 2356520 - RNA, 19 nt, Artificial Sequence
  Description of Artificial Sequence: Synthetic oligonucleotide
aggaugccguacacugugg

SEQ ID NO: 2356521 - RNA, 19 nt, Artificial Sequence
  Description of Artificial Sequence: Synthetic oligonucleotide
uacaaccauuaggcucagg

SEQ ID NO: 2356522 - RNA, 19 nt, Artificial Sequence
  Description of Artificial Sequence: Synthetic oligonucleotide
guaguuuauucagguagcu

SEQ ID NO: 2356523 - RNA, 19 nt, Artificial Sequence
  Description of Artificial Sequence: Synthetic oligonucleotide
gggacuccugccaggaugc

SEQ ID NO: 2356524 - RNA, 19 nt, Artificial Sequence
  Description of Artificial Sequence: Synthetic oligonucleotide
ccauuaggcucaggaaucg

SEQ ID NO: 2356525 - RNA, 19 nt, Artificial Sequence
  Description of Artificial Sequence: Synthetic oligonucleotide
uccgcggucuaggaaggaa

SEQ ID NO: 2356526 - RNA, 19 nt, Artificial Sequence
  Description of Artificial Sequence: Synthetic oligonucleotide
cacuugugaccaguaacca

SEQ ID NO: 2356527 - RNA, 19 nt, Artificial Sequence
  Description of Artificial Sequence: Synthetic oligonucleotide
uagagccgcaguccuugua

SEQ ID NO: 2356528 - RNA, 19 nt, Artificial Sequence
  Description of Artificial Sequence: Synthetic oligonucleotide
ggggccgaugaccuuaauc

SEQ ID NO: 2356529 - RNA, 19 nt, Artificial Sequence
  Description of Artificial Sequence: Synthetic oligonucleotide
gaccuuaauccaacagcaa

SEQ ID NO: 2356530 - RNA, 19 nt, Artificial Sequence
  Description of Artificial Sequence: Synthetic oligonucleotide
ccauggagacuacucuagc

SEQ ID NO: 2356531 - RNA, 19 nt, Artificial Sequence
  Description of Artificial Sequence: Synthetic oligonucleotide
ccuccugccgaccugucug

SEQ ID NO: 2356532 - RNA, 19 nt, Artificial Sequence
  Description of Artificial Sequence: Synthetic oligonucleotide
cugguaguuuauucaggua

SEQ ID NO: 2356533 - RNA, 19 nt, Artificial Sequence
  Description of Artificial Sequence: Synthetic oligonucleotide
cggucuaggaaggaaaaug

SEQ ID NO: 2356534 - RNA, 19 nt, Artificial Sequence
  Description of Artificial Sequence: Synthetic oligonucleotide
ccuaagcaaccuccugccg

SEQ ID NO: 2356535 - RNA, 19 nt, Artificial Sequence
  Description of Artificial Sequence: Synthetic oligonucleotide
accuccugccgaccugucu

SEQ ID NO: 2356536 - RNA, 19 nt, Artificial Sequence
  Description of Artificial Sequence: Synthetic oligonucleotide
aucuuucggcacugguuua

SEQ ID NO: 2356537 - RNA, 19 nt, Artificial Sequence
  Description of Artificial Sequence: Synthetic oligonucleotide
caucgugaauaaguaagcu

SEQ ID NO: 2356538 - RNA, 19 nt, Artificial Sequence
  Description of Artificial Sequence: Synthetic oligonucleotide
guuuagcuuuugaucucca

SEQ ID NO: 2356539 - RNA, 19 nt, Artificial Sequence
  Description of Artificial Sequence: Synthetic oligonucleotide
gggucaaguuaucugacau

SEQ ID NO: 2356540 - RNA, 19 nt, Artificial Sequence
  Description of Artificial Sequence: Synthetic oligonucleotide
gggcauuugauuccagacu

SEQ ID NO: 2356541 - RNA, 19 nt, Artificial Sequence
  Description of Artificial Sequence: Synthetic oligonucleotide
agcuuuaaggagggguauu

SEQ ID NO: 2356542 - RNA, 19 nt, Artificial Sequence
  Description of Artificial Sequence: Synthetic oligonucleotide
guggcggccaggaaacgca

SEQ ID NO: 2356543 - RNA, 19 nt, Artificial Sequence
  Description of Artificial Sequence: Synthetic oligonucleotide
cuguucaucuuucggcacu

SEQ ID NO: 2356544 - RNA, 19 nt, Artificial Sequence
  Description of Artificial Sequence: Synthetic oligonucleotide
cuccaccgggaucucccag

SEQ ID NO: 2356545 - RNA, 19 nt, Artificial Sequence
  Description of Artificial Sequence: Synthetic oligonucleotide
ggccgaugaccuuaaucca

SEQ ID NO: 2356546 - RNA, 19 nt, Artificial Sequence
  Description of Artificial Sequence: Synthetic oligonucleotide
ucucaagagcagggucgca

SEQ ID NO: 2356547 - RNA, 19 nt, Artificial Sequence
  Description of Artificial Sequence: Synthetic oligonucleotide
gccagcaguaggaccgugg

SEQ ID NO: 2356548 - RNA, 19 nt, Artificial Sequence
  Description of Artificial Sequence: Synthetic oligonucleotide
ccaggaaacgcaucgugaa

SEQ ID NO: 2356549 - RNA, 19 nt, Artificial Sequence
  Description of Artificial Sequence: Synthetic oligonucleotide
uggcggccaggaaacgcau

SEQ ID NO: 2356550 - RNA, 19 nt, Artificial Sequence
  Description of Artificial Sequence: Synthetic oligonucleotide
auacgguuuuggagguuga

SEQ ID NO: 2356551 - RNA, 19 nt, Artificial Sequence
  Description of Artificial Sequence: Synthetic oligonucleotide
ggcauaaaguagcagucuu

SEQ ID NO: 2356552 - RNA, 19 nt, Artificial Sequence
  Description of Artificial Sequence: Synthetic oligonucleotide
cagauacgguuuuggaggu

SEQ ID NO: 2356553 - RNA, 19 nt, Artificial Sequence
  Description of Artificial Sequence: Synthetic oligonucleotide
aaccuccugccgaccuguc

SEQ ID NO: 2356554 - RNA, 19 nt, Artificial Sequence
  Description of Artificial Sequence: Synthetic oligonucleotide
agggucgcagauacgguuu

SEQ ID NO: 2356555 - RNA, 19 nt, Artificial Sequence
  Description of Artificial Sequence: Synthetic oligonucleotide
guaggaccguggcggccag

SEQ ID NO: 2356556 - RNA, 19 nt, Artificial Sequence
  Description of Artificial Sequence: Synthetic oligonucleotide
gagugcugcuagugaaggu

SEQ ID NO: 2356557 - RNA, 19 nt, Artificial Sequence
  Description of Artificial Sequence: Synthetic oligonucleotide
ccagcuuuaaggaggggua

SEQ ID NO: 2356558 - RNA, 19 nt, Artificial Sequence
  Description of Artificial Sequence: Synthetic oligonucleotide
gagcagggucgcagauacg

SEQ ID NO: 2356559 - RNA, 19 nt, Artificial Sequence
  Description of Artificial Sequence: Synthetic oligonucleotide
cagccauggagacuacucu

SEQ ID NO: 2356560 - RNA, 19 nt, Artificial Sequence
  Description of Artificial Sequence: Synthetic oligonucleotide
ggucugacuucucuucugu

SEQ ID NO: 2356561 - RNA, 19 nt, Artificial Sequence
  Description of Artificial Sequence: Synthetic oligonucleotide
gcagcagucacaagauaaa

SEQ ID NO: 2356562 - RNA, 19 nt, Artificial Sequence
  Description of Artificial Sequence: Synthetic oligonucleotide
ggagacuacucuagcucuc

SEQ ID NO: 2356563 - RNA, 19 nt, Artificial Sequence
  Description of Artificial Sequence: Synthetic oligonucleotide
gcucgcagggcuggguggg

SEQ ID NO: 2356564 - RNA, 19 nt, Artificial Sequence
  Description of Artificial Sequence: Synthetic oligonucleotide
ccuuguagcgaaggggcuc

SEQ ID NO: 2356565 - RNA, 19 nt, Artificial Sequence
  Description of Artificial Sequence: Synthetic oligonucleotide
agcucccauuucaccacca

SEQ ID NO: 2356566 - RNA, 19 nt, Artificial Sequence
  Description of Artificial Sequence: Synthetic oligonucleotide
aggagccgggucaguccac

SEQ ID NO: 2356567 - RNA, 19 nt, Artificial Sequence
  Description of Artificial Sequence: Synthetic oligonucleotide
gccgaugaccuuaauccaa

SEQ ID NO: 2356568 - RNA, 19 nt, Artificial Sequence
  Description of Artificial Sequence: Synthetic oligonucleotide
caccgggaucucccagcag

SEQ ID NO: 2356569 - RNA, 19 nt, Artificial Sequence
  Description of Artificial Sequence: Synthetic oligonucleotide
ccugccaggaugccguaca

SEQ ID NO: 2356570 - RNA, 19 nt, Artificial Sequence
  Description of Artificial Sequence: Synthetic oligonucleotide
auccguaguccugggucaa

SEQ ID NO: 2356571 - RNA, 19 nt, Artificial Sequence
  Description of Artificial Sequence: Synthetic oligonucleotide
cuugucccgggccgaggga

SEQ ID NO: 2356572 - RNA, 19 nt, Artificial Sequence
  Description of Artificial Sequence: Synthetic oligonucleotide
agauacgguuuuggagguu

SEQ ID NO: 2356573 - RNA, 19 nt, Artificial Sequence
  Description of Artificial Sequence: Synthetic oligonucleotide
caggaaacgcaucgugaau

SEQ ID NO: 2356574 - RNA, 19 nt, Artificial Sequence
  Description of Artificial Sequence: Synthetic oligonucleotide
cagggucgcagauacgguu

SEQ ID NO: 2356575 - RNA, 19 nt, Artificial Sequence
  Description of Artificial Sequence: Synthetic oligonucleotide
gcggcgaccagcgccagca

SEQ ID NO: 2356576 - RNA, 19 nt, Artificial Sequence
  Description of Artificial Sequence: Synthetic oligonucleotide
gguggggccgaugaccuua

SEQ ID NO: 2356577 - RNA, 19 nt, Artificial Sequence
  Description of Artificial Sequence: Synthetic oligonucleotide
ggucgcagauacgguuuug

SEQ ID NO: 2356578 - RNA, 19 nt, Artificial Sequence
  Description of Artificial Sequence: Synthetic oligonucleotide
cacuguaagacuggccuuu

SEQ ID NO: 2356579 - RNA, 19 nt, Artificial Sequence
  Description of Artificial Sequence: Synthetic oligonucleotide
ccugccgaccugucuggug

SEQ ID NO: 2356580 - RNA, 19 nt, Artificial Sequence
  Description of Artificial Sequence: Synthetic oligonucleotide
gccgcaguccuuguagcga

SEQ ID NO: 2356581 - RNA, 19 nt, Artificial Sequence
  Description of Artificial Sequence: Synthetic oligonucleotide
ucccgggccgagggaggag

SEQ ID NO: 2356582 - RNA, 19 nt, Artificial Sequence
  Description of Artificial Sequence: Synthetic oligonucleotide
cguacacuguggcagagcu

SEQ ID NO: 2356583 - RNA, 19 nt, Artificial Sequence
  Description of Artificial Sequence: Synthetic oligonucleotide
gacuggccuuuguguagcu

SEQ ID NO: 2356584 - RNA, 19 nt, Artificial Sequence
  Description of Artificial Sequence: Synthetic oligonucleotide
cuguaagacuggccuuugu

SEQ ID NO: 2356585 - RNA, 19 nt, Artificial Sequence
  Description of Artificial Sequence: Synthetic oligonucleotide
accugucugguggggccga

SEQ ID NO: 2356586 - RNA, 19 nt, Artificial Sequence
  Description of Artificial Sequence: Synthetic oligonucleotide
caagagcagggucgcagau

SEQ ID NO: 2356587 - RNA, 19 nt, Artificial Sequence
  Description of Artificial Sequence: Synthetic oligonucleotide
gccguacacuguggcagag

SEQ ID NO: 2356588 - RNA, 19 nt, Artificial Sequence
  Description of Artificial Sequence: Synthetic oligonucleotide
uggggccgaugaccuuaau

SEQ ID NO: 2356589 - RNA, 19 nt, Artificial Sequence
  Description of Artificial Sequence: Synthetic oligonucleotide
cgacugagugcugcuagug

SEQ ID NO: 2356590 - RNA, 19 nt, Artificial Sequence
  Description of Artificial Sequence: Synthetic oligonucleotide
gaaggggcucggccugggu

SEQ ID NO: 2356591 - RNA, 19 nt, Artificial Sequence
  Description of Artificial Sequence: Synthetic oligonucleotide
cacucuuaacugguaguuu

SEQ ID NO: 2356592 - RNA, 19 nt, Artificial Sequence
  Description of Artificial Sequence: Synthetic oligonucleotide
cguggcggccaggaaacgc

SEQ ID NO: 2356593 - RNA, 19 nt, Artificial Sequence
  Description of Artificial Sequence: Synthetic oligonucleotide
ggagggguauucacucuua

SEQ ID NO: 2356594 - RNA, 19 nt, Artificial Sequence
  Description of Artificial Sequence: Synthetic oligonucleotide
gcauuugauuccagacuua

SEQ ID NO: 2356595 - RNA, 19 nt, Artificial Sequence
  Description of Artificial Sequence: Synthetic oligonucleotide
guucuccgacugagugcug

SEQ ID NO: 2356596 - RNA, 19 nt, Artificial Sequence
  Description of Artificial Sequence: Synthetic oligonucleotide
cggcacugguuuaauuuca

SEQ ID NO: 2356597 - RNA, 19 nt, Artificial Sequence
  Description of Artificial Sequence: Synthetic oligonucleotide
ccgcggucuaggaaggaaa

SEQ ID NO: 2356598 - RNA, 19 nt, Artificial Sequence
  Description of Artificial Sequence: Synthetic oligonucleotide
cagcuuuaaggagggguau

SEQ ID NO: 2356599 - RNA, 19 nt, Artificial Sequence
  Description of Artificial Sequence: Synthetic oligonucleotide
gcagagcuguucuccgacu

SEQ ID NO: 2356600 - RNA, 19 nt, Artificial Sequence
  Description of Artificial Sequence: Synthetic oligonucleotide
guagcucgcagggcugggu

SEQ ID NO: 2356601 - RNA, 19 nt, Artificial Sequence
  Description of Artificial Sequence: Synthetic oligonucleotide
cgaugaccuuaauccaaca

SEQ ID NO: 2356602 - RNA, 19 nt, Artificial Sequence
  Description of Artificial Sequence: Synthetic oligonucleotide
ccgcaguccuuguagcgaa

SEQ ID NO: 2356603 - RNA, 19 nt, Artificial Sequence
  Description of Artificial Sequence: Synthetic oligonucleotide
ccgagggaggagccggguc

SEQ ID NO: 2356604 - RNA, 19 nt, Artificial Sequence
  Description of Artificial Sequence: Synthetic oligonucleotide
cuuucggcacugguuuaau

SEQ ID NO: 2356605 - RNA, 19 nt, Artificial Sequence
  Description of Artificial Sequence: Synthetic oligonucleotide
cccgggccgagggaggagc

SEQ ID NO: 2356606 - RNA, 19 nt, Artificial Sequence
  Description of Artificial Sequence: Synthetic oligonucleotide
ccgggucaguccacuugug

SEQ ID NO: 2356607 - RNA, 19 nt, Artificial Sequence
  Description of Artificial Sequence: Synthetic oligonucleotide
ccaccgggaucucccagca

SEQ ID NO: 2356608 - RNA, 19 nt, Artificial Sequence
  Description of Artificial Sequence: Synthetic oligonucleotide
ccgggccgagggaggagcc

SEQ ID NO: 2356609 - RNA, 19 nt, Artificial Sequence
  Description of Artificial Sequence: Synthetic oligonucleotide
ggacuccugccaggaugcc

SEQ ID NO: 2356610 - RNA, 19 nt, Artificial Sequence
  Description of Artificial Sequence: Synthetic oligonucleotide
cuccgacugagugcugcua

SEQ ID NO: 2356611 - RNA, 19 nt, Artificial Sequence
  Description of Artificial Sequence: Synthetic oligonucleotide
ggccuuuguguagcucgca

SEQ ID NO: 2356612 - RNA, 19 nt, Artificial Sequence
  Description of Artificial Sequence: Synthetic oligonucleotide
ggcgaccagcgccagcagu

SEQ ID NO: 2356613 - RNA, 19 nt, Artificial Sequence
  Description of Artificial Sequence: Synthetic oligonucleotide
cgcggucuaggaaggaaaa

SEQ ID NO: 2356614 - RNA, 19 nt, Artificial Sequence
  Description of Artificial Sequence: Synthetic oligonucleotide
cgggucaguccacuuguga

SEQ ID NO: 2356615 - RNA, 19 nt, Artificial Sequence
  Description of Artificial Sequence: Synthetic oligonucleotide
ccgggaucucccagcagaa

SEQ ID NO: 2356616 - RNA, 19 nt, Artificial Sequence
  Description of Artificial Sequence: Synthetic oligonucleotide
ggcggcgaccagcgccagc

SEQ ID NO: 2356617 - RNA, 19 nt, Artificial Sequence
  Description of Artificial Sequence: Synthetic oligonucleotide
acacuguggcagagcuguu

SEQ ID NO: 2356618 - RNA, 19 nt, Artificial Sequence
  Description of Artificial Sequence: Synthetic oligonucleotide
cgaccagcgccagcaguag

SEQ ID NO: 2356619 - RNA, 19 nt, Artificial Sequence
  Description of Artificial Sequence: Synthetic oligonucleotide
ggcggccaggaaacgcauc

SEQ ID NO: 2356620 - RNA, 19 nt, Artificial Sequence
  Description of Artificial Sequence: Synthetic oligonucleotide
gagccgggucaguccacuu

SEQ ID NO: 2356621 - RNA, 19 nt, Artificial Sequence
  Description of Artificial Sequence: Synthetic oligonucleotide
cucgcagggcuggguggga

SEQ ID NO: 2356622 - RNA, 19 nt, Artificial Sequence
  Description of Artificial Sequence: Synthetic oligonucleotide
cuccgcggucuaggaagga

SEQ ID NO: 2356623 - RNA, 19 nt, Artificial Sequence
  Description of Artificial Sequence: Synthetic oligonucleotide
guccaaccuuagagccgca

SEQ ID NO: 2356624 - RNA, 19 nt, Artificial Sequence
  Description of Artificial Sequence: Synthetic oligonucleotide
ggagccgggucaguccacu

SEQ ID NO: 2356625 - RNA, 19 nt, Artificial Sequence
  Description of Artificial Sequence: Synthetic oligonucleotide
gggucgcagauacgguuuu

SEQ ID NO: 2356626 - RNA, 19 nt, Artificial Sequence
  Description of Artificial Sequence: Synthetic oligonucleotide
gcagggucgcagauacggu

SEQ ID NO: 2356627 - RNA, 19 nt, Artificial Sequence
  Description of Artificial Sequence: Synthetic oligonucleotide
ggaccguggcggccaggaa

SEQ ID NO: 2356628 - RNA, 19 nt, Artificial Sequence
  Description of Artificial Sequence: Synthetic oligonucleotide
gcggucuaggaaggaaaau

SEQ ID NO: 2356629 - RNA, 19 nt, Artificial Sequence
  Description of Artificial Sequence: Synthetic oligonucleotide
ccgacugagugcugcuagu

SEQ ID NO: 2356630 - RNA, 19 nt, Artificial Sequence
  Description of Artificial Sequence: Synthetic oligonucleotide
ggcucacauucacuuccuu

SEQ ID NO: 2356631 - RNA, 19 nt, Artificial Sequence
  Description of Artificial Sequence: Synthetic oligonucleotide
cgggccgagggaggagccg

SEQ ID NO: 2356632 - RNA, 19 nt, Artificial Sequence
  Description of Artificial Sequence: Synthetic oligonucleotide
cagggacuccugccaggau

SEQ ID NO: 2356633 - RNA, 19 nt, Artificial Sequence
  Description of Artificial Sequence: Synthetic oligonucleotide
ccuuagagccgcaguccuu

SEQ ID NO: 2356634 - RNA, 19 nt, Artificial Sequence
  Description of Artificial Sequence: Synthetic oligonucleotide
gccauccuucacaguggau

SEQ ID NO: 2356635 - RNA, 19 nt, Artificial Sequence
  Description of Artificial Sequence: Synthetic oligonucleotide
gcgccagcaguaggaccgu

SEQ ID NO: 2356636 - RNA, 19 nt, Artificial Sequence
  Description of Artificial Sequence: Synthetic oligonucleotide
cggccaggaaacgcaucgu

SEQ ID NO: 2356637 - RNA, 19 nt, Artificial Sequence
  Description of Artificial Sequence: Synthetic oligonucleotide
ucagauucagaacucucgg

SEQ ID NO: 2356638 - RNA, 19 nt, Artificial Sequence
  Description of Artificial Sequence: Synthetic oligonucleotide
uuaggaggagcucugacug

SEQ ID NO: 2356639 - RNA, 19 nt, Artificial Sequence
  Description of Artificial Sequence: Synthetic oligonucleotide
cuuaacugccuuuugcugg

SEQ ID NO: 2356640 - RNA, 19 nt, Artificial Sequence
  Description of Artificial Sequence: Synthetic oligonucleotide
cucagauucagaacucucg

SEQ ID NO: 2356641 - RNA, 19 nt, Artificial Sequence
  Description of Artificial Sequence: Synthetic oligonucleotide
uuugcuaaacuuguuggcc

SEQ ID NO: 2356642 - RNA, 19 nt, Artificial Sequence
  Description of Artificial Sequence: Synthetic oligonucleotide
uuuugcuaaacuuguuggc

SEQ ID NO: 2356643 - RNA, 19 nt, Artificial Sequence
  Description of Artificial Sequence: Synthetic oligonucleotide
agauucagaacucucggcu

SEQ ID NO: 2356644 - RNA, 19 nt, Artificial Sequence
  Description of Artificial Sequence: Synthetic oligonucleotide
cagagcuugagucagacuc

SEQ ID NO: 2356645 - RNA, 19 nt, Artificial Sequence
  Description of Artificial Sequence: Synthetic oligonucleotide
uuggcuuggggcuuaacug

SEQ ID NO: 2356646 - RNA, 19 nt, Artificial Sequence
  Description of Artificial Sequence: Synthetic oligonucleotide
ucucggcuuucuuaggagg

SEQ ID NO: 2356647 - RNA, 19 nt, Artificial Sequence
  Description of Artificial Sequence: Synthetic oligonucleotide
uugcuaaacuuguuggcca

SEQ ID NO: 2356648 - RNA, 19 nt, Artificial Sequence
  Description of Artificial Sequence: Synthetic oligonucleotide
uuaacugccuuuugcugga

SEQ ID NO: 2356649 - RNA, 19 nt, Artificial Sequence
  Description of Artificial Sequence: Synthetic oligonucleotide
uuucuuaggaggagcucug

SEQ ID NO: 2356650 - RNA, 19 nt, Artificial Sequence
  Description of Artificial Sequence: Synthetic oligonucleotide
ucagacucagauucagaac

SEQ ID NO: 2356651 - RNA, 19 nt, Artificial Sequence
  Description of Artificial Sequence: Synthetic oligonucleotide
ucgcuuuugcuaaacuugu

SEQ ID NO: 2356652 - RNA, 19 nt, Artificial Sequence
  Description of Artificial Sequence: Synthetic oligonucleotide
gucgcuuuugcuaaacuug

SEQ ID NO: 2356653 - RNA, 19 nt, Artificial Sequence
  Description of Artificial Sequence: Synthetic oligonucleotide
uggcuuggggcuuaacugc

SEQ ID NO: 2356654 - RNA, 19 nt, Artificial Sequence
  Description of Artificial Sequence: Synthetic oligonucleotide
acugccuuggcuuggggcu

SEQ ID NO: 2356655 - RNA, 19 nt, Artificial Sequence
  Description of Artificial Sequence: Synthetic oligonucleotide
aacucucggcuuucuuagg

SEQ ID NO: 2356656 - RNA, 19 nt, Artificial Sequence
  Description of Artificial Sequence: Synthetic oligonucleotide
gcuuuugcuaaacuuguug

SEQ ID NO: 2356657 - RNA, 19 nt, Artificial Sequence
  Description of Artificial Sequence: Synthetic oligonucleotide
ucuuaggaggagcucugac

SEQ ID NO: 2356658 - RNA, 19 nt, Artificial Sequence
  Description of Artificial Sequence: Synthetic oligonucleotide
gucagacucagauucagaa

SEQ ID NO: 2356659 - RNA, 19 nt, Artificial Sequence
  Description of Artificial Sequence: Synthetic oligonucleotide
cagauucagaacucucggc

SEQ ID NO: 2356660 - RNA, 19 nt, Artificial Sequence
  Description of Artificial Sequence: Synthetic oligonucleotide
agaacucucggcuuucuua

SEQ ID NO: 2356661 - RNA, 19 nt, Artificial Sequence
  Description of Artificial Sequence: Synthetic oligonucleotide
ugucgcuuuugcuaaacuu

SEQ ID NO: 2356662 - RNA, 19 nt, Artificial Sequence
  Description of Artificial Sequence: Synthetic oligonucleotide
ugccuuuugcuggacaggc

SEQ ID NO: 2356663 - RNA, 19 nt, Artificial Sequence
  Description of Artificial Sequence: Synthetic oligonucleotide
ugcuaaacuuguuggccac

SEQ ID NO: 2356664 - RNA, 19 nt, Artificial Sequence
  Description of Artificial Sequence: Synthetic oligonucleotide
cagacucagauucagaacu

SEQ ID NO: 2356665 - RNA, 19 nt, Artificial Sequence
  Description of Artificial Sequence: Synthetic oligonucleotide
acucucggcuuucuuagga

SEQ ID NO: 2356666 - RNA, 19 nt, Artificial Sequence
  Description of Artificial Sequence: Synthetic oligonucleotide
gguuuggcagggcugcugg

SEQ ID NO: 2356667 - RNA, 19 nt, Artificial Sequence
  Description of Artificial Sequence: Synthetic oligonucleotide
acucagauucagaacucuc

SEQ ID NO: 2356668 - RNA, 19 nt, Artificial Sequence
  Description of Artificial Sequence: Synthetic oligonucleotide
agcucugacugccuuggcu

SEQ ID NO: 2356669 - RNA, 19 nt, Artificial Sequence
  Description of Artificial Sequence: Synthetic oligonucleotide
cucucggcuuucuuaggag

SEQ ID NO: 2356670 - RNA, 19 nt, Artificial Sequence
  Description of Artificial Sequence: Synthetic oligonucleotide
auucagaacucucggcuuu

SEQ ID NO: 2356671 - RNA, 19 nt, Artificial Sequence
  Description of Artificial Sequence: Synthetic oligonucleotide
ucugacugccuuggcuugg

SEQ ID NO: 2356672 - RNA, 19 nt, Artificial Sequence
  Description of Artificial Sequence: Synthetic oligonucleotide
agacucagauucagaacuc

SEQ ID NO: 2356673 - RNA, 19 nt, Artificial Sequence
  Description of Artificial Sequence: Synthetic oligonucleotide
gagcuugagucagacucag

SEQ ID NO: 2356674 - RNA, 19 nt, Artificial Sequence
  Description of Artificial Sequence: Synthetic oligonucleotide
uuuggcagggcugcuggcu

SEQ ID NO: 2356675 - RNA, 19 nt, Artificial Sequence
  Description of Artificial Sequence: Synthetic oligonucleotide
gcuuaacugccuuuugcug

SEQ ID NO: 2356676 - RNA, 19 nt, Artificial Sequence
  Description of Artificial Sequence: Synthetic oligonucleotide
ucggcuuucuuaggaggag

SEQ ID NO: 2356677 - RNA, 19 nt, Artificial Sequence
  Description of Artificial Sequence: Synthetic oligonucleotide
uaggaggagcucugacugc

SEQ ID NO: 2356678 - RNA, 19 nt, Artificial Sequence
  Description of Artificial Sequence: Synthetic oligonucleotide
cuuaggaggagcucugacu

SEQ ID NO: 2356679 - RNA, 19 nt, Artificial Sequence
  Description of Artificial Sequence: Synthetic oligonucleotide
cucagagcuugagucagac

SEQ ID NO: 2356680 - RNA, 19 nt, Artificial Sequence
  Description of Artificial Sequence: Synthetic oligonucleotide
gggcuuaacugccuuuugc

SEQ ID NO: 2356681 - RNA, 19 nt, Artificial Sequence
  Description of Artificial Sequence: Synthetic oligonucleotide
ucagagcuugagucagacu

SEQ ID NO: 2356682 - RNA, 19 nt, Artificial Sequence
  Description of Artificial Sequence: Synthetic oligonucleotide
aggagcucugacugccuug

SEQ ID NO: 2356683 - RNA, 19 nt, Artificial Sequence
  Description of Artificial Sequence: Synthetic oligonucleotide
ugacugccuuggcuugggg

SEQ ID NO: 2356684 - RNA, 19 nt, Artificial Sequence
  Description of Artificial Sequence: Synthetic oligonucleotide
cuuucuuaggaggagcucu

SEQ ID NO: 2356685 - RNA, 19 nt, Artificial Sequence
  Description of Artificial Sequence: Synthetic oligonucleotide
cucggcuuucuuaggagga

SEQ ID NO: 2356686 - RNA, 19 nt, Artificial Sequence
  Description of Artificial Sequence: Synthetic oligonucleotide
agagcuugagucagacuca

SEQ ID NO: 2356687 - RNA, 19 nt, Artificial Sequence
  Description of Artificial Sequence: Synthetic oligonucleotide
cucugacugccuuggcuug

SEQ ID NO: 2356688 - RNA, 19 nt, Artificial Sequence
  Description of Artificial Sequence: Synthetic oligonucleotide
cuuggcuuggggcuuaacu

SEQ ID NO: 2356689 - RNA, 19 nt, Artificial Sequence
  Description of Artificial Sequence: Synthetic oligonucleotide
gauucagaacucucggcuu

SEQ ID NO: 2356690 - RNA, 19 nt, Artificial Sequence
  Description of Artificial Sequence: Synthetic oligonucleotide
uucuuaggaggagcucuga

SEQ ID NO: 2356691 - RNA, 19 nt, Artificial Sequence
  Description of Artificial Sequence: Synthetic oligonucleotide
cugccuuuugcuggacagg

SEQ ID NO: 2356692 - RNA, 19 nt, Artificial Sequence
  Description of Artificial Sequence: Synthetic oligonucleotide
uuuugcuggacaggcuuuu

SEQ ID NO: 2356693 - RNA, 19 nt, Artificial Sequence
  Description of Artificial Sequence: Synthetic oligonucleotide
gcuugagucagacucagau

SEQ ID NO: 2356694 - RNA, 19 nt, Artificial Sequence
  Description of Artificial Sequence: Synthetic oligonucleotide
uucagaacucucggcuuuc

SEQ ID NO: 2356695 - RNA, 19 nt, Artificial Sequence
  Description of Artificial Sequence: Synthetic oligonucleotide
ucagaacucucggcuuucu

SEQ ID NO: 2356696 - RNA, 19 nt, Artificial Sequence
  Description of Artificial Sequence: Synthetic oligonucleotide
uggggcuuaacugccuuuu

SEQ ID NO: 2356697 - RNA, 19 nt, Artificial Sequence
  Description of Artificial Sequence: Synthetic oligonucleotide
gcugguuuggcagggcugc

SEQ ID NO: 2356698 - RNA, 19 nt, Artificial Sequence
  Description of Artificial Sequence: Synthetic oligonucleotide
cugacugccuuggcuuggg

SEQ ID NO: 2356699 - RNA, 19 nt, Artificial Sequence
  Description of Artificial Sequence: Synthetic oligonucleotide
guuuggcagggcugcuggc

SEQ ID NO: 2356700 - RNA, 19 nt, Artificial Sequence
  Description of Artificial Sequence: Synthetic oligonucleotide
ggcuuaacugccuuuugcu

SEQ ID NO: 2356701 - RNA, 19 nt, Artificial Sequence
  Description of Artificial Sequence: Synthetic oligonucleotide
agucagacucagauucaga

SEQ ID NO: 2356702 - RNA, 19 nt, Artificial Sequence
  Description of Artificial Sequence: Synthetic oligonucleotide
uggcagggcugcuggcugc

SEQ ID NO: 2356703 - RNA, 19 nt, Artificial Sequence
  Description of Artificial Sequence: Synthetic oligonucleotide
gacucagauucagaacucu

SEQ ID NO: 2356704 - RNA, 19 nt, Artificial Sequence
  Description of Artificial Sequence: Synthetic oligonucleotide
agcugguuuggcagggcug

SEQ ID NO: 2356705 - RNA, 19 nt, Artificial Sequence
  Description of Artificial Sequence: Synthetic oligonucleotide
uuggggcuuaacugccuuu

SEQ ID NO: 2356706 - RNA, 19 nt, Artificial Sequence
  Description of Artificial Sequence: Synthetic oligonucleotide
cuaaacuuguuggccaccu

SEQ ID NO: 2356707 - RNA, 19 nt, Artificial Sequence
  Description of Artificial Sequence: Synthetic oligonucleotide
cuugagucagacucagauu

SEQ ID NO: 2356708 - RNA, 19 nt, Artificial Sequence
  Description of Artificial Sequence: Synthetic oligonucleotide
gagcucugacugccuuggc

SEQ ID NO: 2356709 - RNA, 19 nt, Artificial Sequence
  Description of Artificial Sequence: Synthetic oligonucleotide
gcuaaacuuguuggccacc

SEQ ID NO: 2356710 - RNA, 19 nt, Artificial Sequence
  Description of Artificial Sequence: Synthetic oligonucleotide
ggggcuuaacugccuuuug

SEQ ID NO: 2356711 - RNA, 19 nt, Artificial Sequence
  Description of Artificial Sequence: Synthetic oligonucleotide
ggcuuggggcuuaacugcc

SEQ ID NO: 2356712 - RNA, 19 nt, Artificial Sequence
  Description of Artificial Sequence: Synthetic oligonucleotide
cuuuugcuggacaggcuuu

SEQ ID NO: 2356713 - RNA, 19 nt, Artificial Sequence
  Description of Artificial Sequence: Synthetic oligonucleotide
gcuuucuuaggaggagcuc

SEQ ID NO: 2356714 - RNA, 19 nt, Artificial Sequence
  Description of Artificial Sequence: Synthetic oligonucleotide
gcucugacugccuuggcuu

SEQ ID NO: 2356715 - RNA, 19 nt, Artificial Sequence
  Description of Artificial Sequence: Synthetic oligonucleotide
ccugucgcuuuugcuaaac

SEQ ID NO: 2356716 - RNA, 19 nt, Artificial Sequence
  Description of Artificial Sequence: Synthetic oligonucleotide
cugucgcuuuugcuaaacu

SEQ ID NO: 2356717 - RNA, 19 nt, Artificial Sequence
  Description of Artificial Sequence: Synthetic oligonucleotide
agcuugagucagacucaga

SEQ ID NO: 2356718 - RNA, 19 nt, Artificial Sequence
  Description of Artificial Sequence: Synthetic oligonucleotide
ggcuuucuuaggaggagcu

SEQ ID NO: 2356719 - RNA, 19 nt, Artificial Sequence
  Description of Artificial Sequence: Synthetic oligonucleotide
cuuggggcuuaacugccuu

SEQ ID NO: 2356720 - RNA, 19 nt, Artificial Sequence
  Description of Artificial Sequence: Synthetic oligonucleotide
ugccuuggcuuggggcuua

SEQ ID NO: 2356721 - RNA, 19 nt, Artificial Sequence
  Description of Artificial Sequence: Synthetic oligonucleotide
cggcuuucuuaggaggagc

SEQ ID NO: 2356722 - RNA, 19 nt, Artificial Sequence
  Description of Artificial Sequence: Synthetic oligonucleotide
cagaacucucggcuuucuu

SEQ ID NO: 2356723 - RNA, 19 nt, Artificial Sequence
  Description of Artificial Sequence: Synthetic oligonucleotide
cagggcugcuggcugcuuu

SEQ ID NO: 2356724 - RNA, 19 nt, Artificial Sequence
  Description of Artificial Sequence: Synthetic oligonucleotide
ggaggagcucugacugccu

SEQ ID NO: 2356725 - RNA, 19 nt, Artificial Sequence
  Description of Artificial Sequence: Synthetic oligonucleotide
gcuuggggcuuaacugccu

SEQ ID NO: 2356726 - RNA, 19 nt, Artificial Sequence
  Description of Artificial Sequence: Synthetic oligonucleotide
cugguuuggcagggcugcu

SEQ ID NO: 2356727 - RNA, 19 nt, Artificial Sequence
  Description of Artificial Sequence: Synthetic oligonucleotide
cgcuuuugcuaaacuuguu

SEQ ID NO: 2356728 - RNA, 19 nt, Artificial Sequence
  Description of Artificial Sequence: Synthetic oligonucleotide
aagacaaauggucacacca

SEQ ID NO: 2356729 - RNA, 19 nt, Artificial Sequence
  Description of Artificial Sequence: Synthetic oligonucleotide
aaucuaaaagaaauugaac

SEQ ID NO: 2356730 - RNA, 19 nt, Artificial Sequence
  Description of Artificial Sequence: Synthetic oligonucleotide
aauugaaccgaaauucuuc

SEQ ID NO: 2356731 - RNA, 19 nt, Artificial Sequence
  Description of Artificial Sequence: Synthetic oligonucleotide
auauucaagacaaaugguc

SEQ ID NO: 2356732 - RNA, 19 nt, Artificial Sequence
  Description of Artificial Sequence: Synthetic oligonucleotide
ucuaggacagguuucucgg

SEQ ID NO: 2356733 - RNA, 19 nt, Artificial Sequence
  Description of Artificial Sequence: Synthetic oligonucleotide
aaacaaggaucgcaucagc

SEQ ID NO: 2356734 - RNA, 19 nt, Artificial Sequence
  Description of Artificial Sequence: Synthetic oligonucleotide
uugcacuaaacugacaagg

SEQ ID NO: 2356735 - RNA, 19 nt, Artificial Sequence
  Description of Artificial Sequence: Synthetic oligonucleotide
aagaaauugaaccgaaauu

SEQ ID NO: 2356736 - RNA, 19 nt, Artificial Sequence
  Description of Artificial Sequence: Synthetic oligonucleotide
aacgccuucuuccaaagcu

SEQ ID NO: 2356737 - RNA, 19 nt, Artificial Sequence
  Description of Artificial Sequence: Synthetic oligonucleotide
ugcacuaaacugacaaggg

SEQ ID NO: 2356738 - RNA, 19 nt, Artificial Sequence
  Description of Artificial Sequence: Synthetic oligonucleotide
aucaggaaaguccacagug

SEQ ID NO: 2356739 - RNA, 19 nt, Artificial Sequence
  Description of Artificial Sequence: Synthetic oligonucleotide
uauauucaagacaaauggu

SEQ ID NO: 2356740 - RNA, 19 nt, Artificial Sequence
  Description of Artificial Sequence: Synthetic oligonucleotide
ucaggaaaguccacagugg

SEQ ID NO: 2356741 - RNA, 19 nt, Artificial Sequence
  Description of Artificial Sequence: Synthetic oligonucleotide
aggaaauucacaggggccc

SEQ ID NO: 2356742 - RNA, 19 nt, Artificial Sequence
  Description of Artificial Sequence: Synthetic oligonucleotide
ucggauugccccaacagcc

SEQ ID NO: 2356743 - RNA, 19 nt, Artificial Sequence
  Description of Artificial Sequence: Synthetic oligonucleotide
aauguaggagaaucuaaaa

SEQ ID NO: 2356744 - RNA, 19 nt, Artificial Sequence
  Description of Artificial Sequence: Synthetic oligonucleotide
agcaggacgcccuaacgcc

SEQ ID NO: 2356745 - RNA, 19 nt, Artificial Sequence
  Description of Artificial Sequence: Synthetic oligonucleotide
gacuaguccagaauguagg

SEQ ID NO: 2356746 - RNA, 19 nt, Artificial Sequence
  Description of Artificial Sequence: Synthetic oligonucleotide
uuucacugcgcaagguucg

SEQ ID NO: 2356747 - RNA, 19 nt, Artificial Sequence
  Description of Artificial Sequence: Synthetic oligonucleotide
uggaacaggaggaaauuca

SEQ ID NO: 2356748 - RNA, 19 nt, Artificial Sequence
  Description of Artificial Sequence: Synthetic oligonucleotide
cuccauuugucccagagac

SEQ ID NO: 2356749 - RNA, 19 nt, Artificial Sequence
  Description of Artificial Sequence: Synthetic oligonucleotide
aagaccccuauauucaaga

SEQ ID NO: 2356750 - RNA, 19 nt, Artificial Sequence
  Description of Artificial Sequence: Synthetic oligonucleotide
gaaccgaaauucuucauca

SEQ ID NO: 2356751 - RNA, 19 nt, Artificial Sequence
  Description of Artificial Sequence: Synthetic oligonucleotide
gaaucuaaaagaaauugaa

SEQ ID NO: 2356752 - RNA, 19 nt, Artificial Sequence
  Description of Artificial Sequence: Synthetic oligonucleotide
uuucucggagaucuuuccg

SEQ ID NO: 2356753 - RNA, 19 nt, Artificial Sequence
  Description of Artificial Sequence: Synthetic oligonucleotide
agcagguugcacuaaacug

SEQ ID NO: 2356754 - RNA, 19 nt, Artificial Sequence
  Description of Artificial Sequence: Synthetic oligonucleotide
ucaucaggaaaguccacag

SEQ ID NO: 2356755 - RNA, 19 nt, Artificial Sequence
  Description of Artificial Sequence: Synthetic oligonucleotide
uguuggacgaggccuacag

SEQ ID NO: 2356756 - RNA, 19 nt, Artificial Sequence
  Description of Artificial Sequence: Synthetic oligonucleotide
gguagcaguccuuagagcc

SEQ ID NO: 2356757 - RNA, 19 nt, Artificial Sequence
  Description of Artificial Sequence: Synthetic oligonucleotide
ugaaccgaaauucuucauc

SEQ ID NO: 2356758 - RNA, 19 nt, Artificial Sequence
  Description of Artificial Sequence: Synthetic oligonucleotide
auugaaccgaaauucuuca

SEQ ID NO: 2356759 - RNA, 19 nt, Artificial Sequence
  Description of Artificial Sequence: Synthetic oligonucleotide
ugguucuuccuguuggacg

SEQ ID NO: 2356760 - RNA, 19 nt, Artificial Sequence
  Description of Artificial Sequence: Synthetic oligonucleotide
uucaucgacacaguguugc

SEQ ID NO: 2356761 - RNA, 19 nt, Artificial Sequence
  Description of Artificial Sequence: Synthetic oligonucleotide
uccggcuugaggcugcugg

SEQ ID NO: 2356762 - RNA, 19 nt, Artificial Sequence
  Description of Artificial Sequence: Synthetic oligonucleotide
gacaaagcaauccuacuuc

SEQ ID NO: 2356763 - RNA, 19 nt, Artificial Sequence
  Description of Artificial Sequence: Synthetic oligonucleotide
cacgcaaacgccuucuucc

SEQ ID NO: 2356764 - RNA, 19 nt, Artificial Sequence
  Description of Artificial Sequence: Synthetic oligonucleotide
uccauuugagcccuguagu

SEQ ID NO: 2356765 - RNA, 19 nt, Artificial Sequence
  Description of Artificial Sequence: Synthetic oligonucleotide
uuggacgaggccuacagac

SEQ ID NO: 2356766 - RNA, 19 nt, Artificial Sequence
  Description of Artificial Sequence: Synthetic oligonucleotide
uuuucacugcgcaagguuc

SEQ ID NO: 2356767 - RNA, 19 nt, Artificial Sequence
  Description of Artificial Sequence: Synthetic oligonucleotide
cugccaaaagaguucauag

SEQ ID NO: 2356768 - RNA, 19 nt, Artificial Sequence
  Description of Artificial Sequence: Synthetic oligonucleotide
aagcagguugcacuaaacu

SEQ ID NO: 2356769 - RNA, 19 nt, Artificial Sequence
  Description of Artificial Sequence: Synthetic oligonucleotide
gacaaauggucacaccacc

SEQ ID NO: 2356770 - RNA, 19 nt, Artificial Sequence
  Description of Artificial Sequence: Synthetic oligonucleotide
auccauuugagcccuguag

SEQ ID NO: 2356771 - RNA, 19 nt, Artificial Sequence
  Description of Artificial Sequence: Synthetic oligonucleotide
aaacgccuucuuccaaagc

SEQ ID NO: 2356772 - RNA, 19 nt, Artificial Sequence
  Description of Artificial Sequence: Synthetic oligonucleotide
ggucacaccacccuggagg

SEQ ID NO: 2356773 - RNA, 19 nt, Artificial Sequence
  Description of Artificial Sequence: Synthetic oligonucleotide
ucuccuacaagcuguacuc

SEQ ID NO: 2356774 - RNA, 19 nt, Artificial Sequence
  Description of Artificial Sequence: Synthetic oligonucleotide
gucccagagacccuguucg

SEQ ID NO: 2356775 - RNA, 19 nt, Artificial Sequence
  Description of Artificial Sequence: Synthetic oligonucleotide
ccuacuucugccaaaagag

SEQ ID NO: 2356776 - RNA, 19 nt, Artificial Sequence
  Description of Artificial Sequence: Synthetic oligonucleotide
uucggauugccccaacagc

SEQ ID NO: 2356777 - RNA, 19 nt, Artificial Sequence
  Description of Artificial Sequence: Synthetic oligonucleotide
auucacaggggccccacac

SEQ ID NO: 2356778 - RNA, 19 nt, Artificial Sequence
  Description of Artificial Sequence: Synthetic oligonucleotide
uccuacaagcuguacucgg

SEQ ID NO: 2356779 - RNA, 19 nt, Artificial Sequence
  Description of Artificial Sequence: Synthetic oligonucleotide
uucgggguggguuucugcg

SEQ ID NO: 2356780 - RNA, 19 nt, Artificial Sequence
  Description of Artificial Sequence: Synthetic oligonucleotide
gucuaggacagguuucucg

SEQ ID NO: 2356781 - RNA, 19 nt, Artificial Sequence
  Description of Artificial Sequence: Synthetic oligonucleotide
acagguuucucggagaucu

SEQ ID NO: 2356782 - RNA, 19 nt, Artificial Sequence
  Description of Artificial Sequence: Synthetic oligonucleotide
ugcgucuugagucccagcu

SEQ ID NO: 2356783 - RNA, 19 nt, Artificial Sequence
  Description of Artificial Sequence: Synthetic oligonucleotide
uccagaauguaggagaauc

SEQ ID NO: 2356784 - RNA, 19 nt, Artificial Sequence
  Description of Artificial Sequence: Synthetic oligonucleotide
agaaucuaaaagaaauuga

SEQ ID NO: 2356785 - RNA, 19 nt, Artificial Sequence
  Description of Artificial Sequence: Synthetic oligonucleotide
uuuccgucuccauuugucc

SEQ ID NO: 2356786 - RNA, 19 nt, Artificial Sequence
  Description of Artificial Sequence: Synthetic oligonucleotide
acaaauggucacaccaccc

SEQ ID NO: 2356787 - RNA, 19 nt, Artificial Sequence
  Description of Artificial Sequence: Synthetic oligonucleotide
aauggguagcaguccuuag

SEQ ID NO: 2356788 - RNA, 19 nt, Artificial Sequence
  Description of Artificial Sequence: Synthetic oligonucleotide
gugggaugugcucuggugg

SEQ ID NO: 2356789 - RNA, 19 nt, Artificial Sequence
  Description of Artificial Sequence: Synthetic oligonucleotide
ugcuucaucgacacagugu

SEQ ID NO: 2356790 - RNA, 19 nt, Artificial Sequence
  Description of Artificial Sequence: Synthetic oligonucleotide
agcccuguaguccccaaac

SEQ ID NO: 2356791 - RNA, 19 nt, Artificial Sequence
  Description of Artificial Sequence: Synthetic oligonucleotide
aucgacacaguguugccug

SEQ ID NO: 2356792 - RNA, 19 nt, Artificial Sequence
  Description of Artificial Sequence: Synthetic oligonucleotide
cuaaaagaaauugaaccga

SEQ ID NO: 2356793 - RNA, 19 nt, Artificial Sequence
  Description of Artificial Sequence: Synthetic oligonucleotide
aguucauagaaagaccccu

SEQ ID NO: 2356794 - RNA, 19 nt, Artificial Sequence
  Description of Artificial Sequence: Synthetic oligonucleotide
ggaugacuaguccagaaug

SEQ ID NO: 2356795 - RNA, 19 nt, Artificial Sequence
  Description of Artificial Sequence: Synthetic oligonucleotide
ugccaaaagaguucauaga

SEQ ID NO: 2356796 - RNA, 19 nt, Artificial Sequence
  Description of Artificial Sequence: Synthetic oligonucleotide
uaggagaaucuaaaagaaa

SEQ ID NO: 2356797 - RNA, 19 nt, Artificial Sequence
  Description of Artificial Sequence: Synthetic oligonucleotide
agcgcguugaguucuccgg

SEQ ID NO: 2356798 - RNA, 19 nt, Artificial Sequence
  Description of Artificial Sequence: Synthetic oligonucleotide
agacaaagcaauccuacuu

SEQ ID NO: 2356799 - RNA, 19 nt, Artificial Sequence
  Description of Artificial Sequence: Synthetic oligonucleotide
ucggcauccauuugagccc

SEQ ID NO: 2356800 - RNA, 19 nt, Artificial Sequence
  Description of Artificial Sequence: Synthetic oligonucleotide
uucauagaaagaccccuau

SEQ ID NO: 2356801 - RNA, 19 nt, Artificial Sequence
  Description of Artificial Sequence: Synthetic oligonucleotide
gaggucugcgcgcagcgcg

SEQ ID NO: 2356802 - RNA, 19 nt, Artificial Sequence
  Description of Artificial Sequence: Synthetic oligonucleotide
guuucugcgucuugagucc

SEQ ID NO: 2356803 - RNA, 19 nt, Artificial Sequence
  Description of Artificial Sequence: Synthetic oligonucleotide
guugcacuaaacugacaag

SEQ ID NO: 2356804 - RNA, 19 nt, Artificial Sequence
  Description of Artificial Sequence: Synthetic oligonucleotide
agggcuuccugccauucgg

SEQ ID NO: 2356805 - RNA, 19 nt, Artificial Sequence
  Description of Artificial Sequence: Synthetic oligonucleotide
agaccccuauauucaagac

SEQ ID NO: 2356806 - RNA, 19 nt, Artificial Sequence
  Description of Artificial Sequence: Synthetic oligonucleotide
agaaagaccccuauauuca

SEQ ID NO: 2356807 - RNA, 19 nt, Artificial Sequence
  Description of Artificial Sequence: Synthetic oligonucleotide
uucucggagaucuuuccgu

SEQ ID NO: 2356808 - RNA, 19 nt, Artificial Sequence
  Description of Artificial Sequence: Synthetic oligonucleotide
guucggauugccccaacag

SEQ ID NO: 2356809 - RNA, 19 nt, Artificial Sequence
  Description of Artificial Sequence: Synthetic oligonucleotide
uucaagacaaauggucaca

SEQ ID NO: 2356810 - RNA, 19 nt, Artificial Sequence
  Description of Artificial Sequence: Synthetic oligonucleotide
aacaaggaucgcaucagcu

SEQ ID NO: 2356811 - RNA, 19 nt, Artificial Sequence
  Description of Artificial Sequence: Synthetic oligonucleotide
cuagcuguuccacacacca

SEQ ID NO: 2356812 - RNA, 19 nt, Artificial Sequence
  Description of Artificial Sequence: Synthetic oligonucleotide
gagcaggacgcccuaacgc

SEQ ID NO: 2356813 - RNA, 19 nt, Artificial Sequence
  Description of Artificial Sequence: Synthetic oligonucleotide
cauucggcauccauuugag

SEQ ID NO: 2356814 - RNA, 19 nt, Artificial Sequence
  Description of Artificial Sequence: Synthetic oligonucleotide
uaaacugacaaggggcgga

SEQ ID NO: 2356815 - RNA, 19 nt, Artificial Sequence
  Description of Artificial Sequence: Synthetic oligonucleotide
gaggaaauucacaggggcc

SEQ ID NO: 2356816 - RNA, 19 nt, Artificial Sequence
  Description of Artificial Sequence: Synthetic oligonucleotide
gguuucugcgucuugaguc

SEQ ID NO: 2356817 - RNA, 19 nt, Artificial Sequence
  Description of Artificial Sequence: Synthetic oligonucleotide
acuaguccagaauguagga

SEQ ID NO: 2356818 - RNA, 19 nt, Artificial Sequence
  Description of Artificial Sequence: Synthetic oligonucleotide
caaacaaggaucgcaucag

SEQ ID NO: 2356819 - RNA, 19 nt, Artificial Sequence
  Description of Artificial Sequence: Synthetic oligonucleotide
uuugcuucaucgacacagu

SEQ ID NO: 2356820 - RNA, 19 nt, Artificial Sequence
  Description of Artificial Sequence: Synthetic oligonucleotide
auagaaagaccccuauauu

SEQ ID NO: 2356821 - RNA, 19 nt, Artificial Sequence
  Description of Artificial Sequence: Synthetic oligonucleotide
aguccccaaacaaggaucg

SEQ ID NO: 2356822 - RNA, 19 nt, Artificial Sequence
  Description of Artificial Sequence: Synthetic oligonucleotide
aauccuacuucugccaaaa

SEQ ID NO: 2356823 - RNA, 19 nt, Artificial Sequence
  Description of Artificial Sequence: Synthetic oligonucleotide
uuccgucuccauuuguccc

SEQ ID NO: 2356824 - RNA, 19 nt, Artificial Sequence
  Description of Artificial Sequence: Synthetic oligonucleotide
aaagaccccuauauucaag

SEQ ID NO: 2356825 - RNA, 19 nt, Artificial Sequence
  Description of Artificial Sequence: Synthetic oligonucleotide
ucugguggcagagucacaa

SEQ ID NO: 2356826 - RNA, 19 nt, Artificial Sequence
  Description of Artificial Sequence: Synthetic oligonucleotide
ucauagaaagaccccuaua

SEQ ID NO: 2356827 - RNA, 19 nt, Artificial Sequence
  Description of Artificial Sequence: Synthetic oligonucleotide
aaauugaaccgaaauucuu

SEQ ID NO: 2356828 - RNA, 19 nt, Artificial Sequence
  Description of Artificial Sequence: Synthetic oligonucleotide
uccauuugucccagagacc

SEQ ID NO: 2356829 - RNA, 19 nt, Artificial Sequence
  Description of Artificial Sequence: Synthetic oligonucleotide
guuucucggagaucuuucc

SEQ ID NO: 2356830 - RNA, 19 nt, Artificial Sequence
  Description of Artificial Sequence: Synthetic oligonucleotide
gcacuaaacugacaagggg

SEQ ID NO: 2356831 - RNA, 19 nt, Artificial Sequence
  Description of Artificial Sequence: Synthetic oligonucleotide
gguugcacuaaacugacaa

SEQ ID NO: 2356832 - RNA, 19 nt, Artificial Sequence
  Description of Artificial Sequence: Synthetic oligonucleotide
agcaauccuacuucugcca

SEQ ID NO: 2356833 - RNA, 19 nt, Artificial Sequence
  Description of Artificial Sequence: Synthetic oligonucleotide
cauagaaagaccccuauau

SEQ ID NO: 2356834 - RNA, 19 nt, Artificial Sequence
  Description of Artificial Sequence: Synthetic oligonucleotide
ugggaugugcucugguggc

SEQ ID NO: 2356835 - RNA, 19 nt, Artificial Sequence
  Description of Artificial Sequence: Synthetic oligonucleotide
aaaagaaauugaaccgaaa

SEQ ID NO: 2356836 - RNA, 19 nt, Artificial Sequence
  Description of Artificial Sequence: Synthetic oligonucleotide
uucacaggggccccacacc

SEQ ID NO: 2356837 - RNA, 19 nt, Artificial Sequence
  Description of Artificial Sequence: Synthetic oligonucleotide
gcaagguucggauugcccc

SEQ ID NO: 2356838 - RNA, 19 nt, Artificial Sequence
  Description of Artificial Sequence: Synthetic oligonucleotide
uggacgaggccuacagacc

SEQ ID NO: 2356839 - RNA, 19 nt, Artificial Sequence
  Description of Artificial Sequence: Synthetic oligonucleotide
uucgucuaggacagguuuc

SEQ ID NO: 2356840 - RNA, 19 nt, Artificial Sequence
  Description of Artificial Sequence: Synthetic oligonucleotide
guaggagaaucuaaaagaa

SEQ ID NO: 2356841 - RNA, 19 nt, Artificial Sequence
  Description of Artificial Sequence: Synthetic oligonucleotide
guggcagagucacaagcag

SEQ ID NO: 2356842 - RNA, 19 nt, Artificial Sequence
  Description of Artificial Sequence: Synthetic oligonucleotide
ccauuugucccagagaccc

SEQ ID NO: 2356843 - RNA, 19 nt, Artificial Sequence
  Description of Artificial Sequence: Synthetic oligonucleotide
ugcggcaccgcaagcagga

SEQ ID NO: 2356844 - RNA, 19 nt, Artificial Sequence
  Description of Artificial Sequence: Synthetic oligonucleotide
agaucuuuccgucuccauu

SEQ ID NO: 2356845 - RNA, 19 nt, Artificial Sequence
  Description of Artificial Sequence: Synthetic oligonucleotide
auggguagcaguccuuaga

SEQ ID NO: 2356846 - RNA, 19 nt, Artificial Sequence
  Description of Artificial Sequence: Synthetic oligonucleotide
caaggggcggaucugcggc

SEQ ID NO: 2356847 - RNA, 19 nt, Artificial Sequence
  Description of Artificial Sequence: Synthetic oligonucleotide
uccccaaacaaggaucgca

SEQ ID NO: 2356848 - RNA, 19 nt, Artificial Sequence
  Description of Artificial Sequence: Synthetic oligonucleotide
cagguugcacuaaacugac

SEQ ID NO: 2356849 - RNA, 19 nt, Artificial Sequence
  Description of Artificial Sequence: Synthetic oligonucleotide
caaacgccuucuuccaaag

SEQ ID NO: 2356850 - RNA, 19 nt, Artificial Sequence
  Description of Artificial Sequence: Synthetic oligonucleotide
uccgucuccauuuguccca

SEQ ID NO: 2356851 - RNA, 19 nt, Artificial Sequence
  Description of Artificial Sequence: Synthetic oligonucleotide
gggagcuucgucuaggaca

SEQ ID NO: 2356852 - RNA, 19 nt, Artificial Sequence
  Description of Artificial Sequence: Synthetic oligonucleotide
ucaucgacacaguguugcc

SEQ ID NO: 2356853 - RNA, 19 nt, Artificial Sequence
  Description of Artificial Sequence: Synthetic oligonucleotide
aggaggaugacuaguccag

SEQ ID NO: 2356854 - RNA, 19 nt, Artificial Sequence
  Description of Artificial Sequence: Synthetic oligonucleotide
ugccauucggcauccauuu

SEQ ID NO: 2356855 - RNA, 19 nt, Artificial Sequence
  Description of Artificial Sequence: Synthetic oligonucleotide
agucacaagcagguugcac

SEQ ID NO: 2356856 - RNA, 19 nt, Artificial Sequence
  Description of Artificial Sequence: Synthetic oligonucleotide
auuugucccagagacccug

SEQ ID NO: 2356857 - RNA, 19 nt, Artificial Sequence
  Description of Artificial Sequence: Synthetic oligonucleotide
gucacaagcagguugcacu

SEQ ID NO: 2356858 - RNA, 19 nt, Artificial Sequence
  Description of Artificial Sequence: Synthetic oligonucleotide
aguguugccugugggaugu

SEQ ID NO: 2356859 - RNA, 19 nt, Artificial Sequence
  Description of Artificial Sequence: Synthetic oligonucleotide
aggaugacuaguccagaau

SEQ ID NO: 2356860 - RNA, 19 nt, Artificial Sequence
  Description of Artificial Sequence: Synthetic oligonucleotide
ccuugguucuuccuguugg

SEQ ID NO: 2356861 - RNA, 19 nt, Artificial Sequence
  Description of Artificial Sequence: Synthetic oligonucleotide
cuuagacaaagcaauccua

SEQ ID NO: 2356862 - RNA, 19 nt, Artificial Sequence
  Description of Artificial Sequence: Synthetic oligonucleotide
cugcgcaagguucggauug

SEQ ID NO: 2356863 - RNA, 19 nt, Artificial Sequence
  Description of Artificial Sequence: Synthetic oligonucleotide
agaauguaggagaaucuaa

SEQ ID NO: 2356864 - RNA, 19 nt, Artificial Sequence
  Description of Artificial Sequence: Synthetic oligonucleotide
aaggaucgcaucagcuguc

SEQ ID NO: 2356865 - RNA, 19 nt, Artificial Sequence
  Description of Artificial Sequence: Synthetic oligonucleotide
cuuccuguuggacgaggcc

SEQ ID NO: 2356866 - RNA, 19 nt, Artificial Sequence
  Description of Artificial Sequence: Synthetic oligonucleotide
caagcagguugcacuaaac

SEQ ID NO: 2356867 - RNA, 19 nt, Artificial Sequence
  Description of Artificial Sequence: Synthetic oligonucleotide
ucucggagaucuuuccguc

SEQ ID NO: 2356868 - RNA, 19 nt, Artificial Sequence
  Description of Artificial Sequence: Synthetic oligonucleotide
gguucuuccuguuggacga

SEQ ID NO: 2356869 - RNA, 19 nt, Artificial Sequence
  Description of Artificial Sequence: Synthetic oligonucleotide
agucucuccuacaagcugu

SEQ ID NO: 2356870 - RNA, 19 nt, Artificial Sequence
  Description of Artificial Sequence: Synthetic oligonucleotide
agggccucgccacgcaaac

SEQ ID NO: 2356871 - RNA, 19 nt, Artificial Sequence
  Description of Artificial Sequence: Synthetic oligonucleotide
ugacaaggggcggaucugc

SEQ ID NO: 2356872 - RNA, 19 nt, Artificial Sequence
  Description of Artificial Sequence: Synthetic oligonucleotide
acucgggcugaauggguag

SEQ ID NO: 2356873 - RNA, 19 nt, Artificial Sequence
  Description of Artificial Sequence: Synthetic oligonucleotide
ggacgaggccuacagaccc

SEQ ID NO: 2356874 - RNA, 19 nt, Artificial Sequence
  Description of Artificial Sequence: Synthetic oligonucleotide
gugccucccgagcaggacg

SEQ ID NO: 2356875 - RNA, 19 nt, Artificial Sequence
  Description of Artificial Sequence: Synthetic oligonucleotide
ucgucuaggacagguuucu

SEQ ID NO: 2356876 - RNA, 19 nt, Artificial Sequence
  Description of Artificial Sequence: Synthetic oligonucleotide
uuugagcccuguagucccc

SEQ ID NO: 2356877 - RNA, 19 nt, Artificial Sequence
  Description of Artificial Sequence: Synthetic oligonucleotide
uucacugcgcaagguucgg

SEQ ID NO: 2356878 - RNA, 19 nt, Artificial Sequence
  Description of Artificial Sequence: Synthetic oligonucleotide
gaggaugacuaguccagaa

SEQ ID NO: 2356879 - RNA, 19 nt, Artificial Sequence
  Description of Artificial Sequence: Synthetic oligonucleotide
aggggccccacacccaggg

SEQ ID NO: 2356880 - RNA, 19 nt, Artificial Sequence
  Description of Artificial Sequence: Synthetic oligonucleotide
ucgccaguugcuccgccug

SEQ ID NO: 2356881 - RNA, 19 nt, Artificial Sequence
  Description of Artificial Sequence: Synthetic oligonucleotide
ucccagagacccuguucgg

SEQ ID NO: 2356882 - RNA, 19 nt, Artificial Sequence
  Description of Artificial Sequence: Synthetic oligonucleotide
ugcucugguggcagaguca

SEQ ID NO: 2356883 - RNA, 19 nt, Artificial Sequence
  Description of Artificial Sequence: Synthetic oligonucleotide
gaacaggaggaaauucaca

SEQ ID NO: 2356884 - RNA, 19 nt, Artificial Sequence
  Description of Artificial Sequence: Synthetic oligonucleotide
uugaaccgaaauucuucau

SEQ ID NO: 2356885 - RNA, 19 nt, Artificial Sequence
  Description of Artificial Sequence: Synthetic oligonucleotide
guagcaguccuuagagccc

SEQ ID NO: 2356886 - RNA, 19 nt, Artificial Sequence
  Description of Artificial Sequence: Synthetic oligonucleotide
acaguguugccugugggau

SEQ ID NO: 2356887 - RNA, 19 nt, Artificial Sequence
  Description of Artificial Sequence: Synthetic oligonucleotide
ugccucccgagcaggacgc

SEQ ID NO: 2356888 - RNA, 19 nt, Artificial Sequence
  Description of Artificial Sequence: Synthetic oligonucleotide
ggcaccgcaagcaggacgg

SEQ ID NO: 2356889 - RNA, 19 nt, Artificial Sequence
  Description of Artificial Sequence: Synthetic oligonucleotide
ucuggcagucucuccuaca

SEQ ID NO: 2356890 - RNA, 19 nt, Artificial Sequence
  Description of Artificial Sequence: Synthetic oligonucleotide
ccuacaagcuguacucggg

SEQ ID NO: 2356891 - RNA, 19 nt, Artificial Sequence
  Description of Artificial Sequence: Synthetic oligonucleotide
gacaaggggcggaucugcg

SEQ ID NO: 2356892 - RNA, 19 nt, Artificial Sequence
  Description of Artificial Sequence: Synthetic oligonucleotide
aggacagguuucucggaga

SEQ ID NO: 2356893 - RNA, 19 nt, Artificial Sequence
  Description of Artificial Sequence: Synthetic oligonucleotide
ggaucugcggcaccgcaag

SEQ ID NO: 2356894 - RNA, 19 nt, Artificial Sequence
  Description of Artificial Sequence: Synthetic oligonucleotide
gaugacuaguccagaaugu

SEQ ID NO: 2356895 - RNA, 19 nt, Artificial Sequence
  Description of Artificial Sequence: Synthetic oligonucleotide
uacucgggcugaaugggua

SEQ ID NO: 2356896 - RNA, 19 nt, Artificial Sequence
  Description of Artificial Sequence: Synthetic oligonucleotide
uuugucccagagacccugu

SEQ ID NO: 2356897 - RNA, 19 nt, Artificial Sequence
  Description of Artificial Sequence: Synthetic oligonucleotide
cuccuacaagcuguacucg

SEQ ID NO: 2356898 - RNA, 19 nt, Artificial Sequence
  Description of Artificial Sequence: Synthetic oligonucleotide
aguugcuccgccugggcuu

SEQ ID NO: 2356899 - RNA, 19 nt, Artificial Sequence
  Description of Artificial Sequence: Synthetic oligonucleotide
gauugccccaacagccugc

SEQ ID NO: 2356900 - RNA, 19 nt, Artificial Sequence
  Description of Artificial Sequence: Synthetic oligonucleotide
agcuucgucuaggacaggu

SEQ ID NO: 2356901 - RNA, 19 nt, Artificial Sequence
  Description of Artificial Sequence: Synthetic oligonucleotide
ugaauggguagcaguccuu

SEQ ID NO: 2356902 - RNA, 19 nt, Artificial Sequence
  Description of Artificial Sequence: Synthetic oligonucleotide
aggccuacagacccuucca

SEQ ID NO: 2356903 - RNA, 19 nt, Artificial Sequence
  Description of Artificial Sequence: Synthetic oligonucleotide
acgcaaacgccuucuucca

SEQ ID NO: 2356904 - RNA, 19 nt, Artificial Sequence
  Description of Artificial Sequence: Synthetic oligonucleotide
acgcccuaacgccugaaaa

SEQ ID NO: 2356905 - RNA, 19 nt, Artificial Sequence
  Description of Artificial Sequence: Synthetic oligonucleotide
aaacugacaaggggcggau

SEQ ID NO: 2356906 - RNA, 19 nt, Artificial Sequence
  Description of Artificial Sequence: Synthetic oligonucleotide
uucuccggcuugaggcugc

SEQ ID NO: 2356907 - RNA, 19 nt, Artificial Sequence
  Description of Artificial Sequence: Synthetic oligonucleotide
uccuguuggacgaggccua

SEQ ID NO: 2356908 - RNA, 19 nt, Artificial Sequence
  Description of Artificial Sequence: Synthetic oligonucleotide
cuucgggguggguuucugc

SEQ ID NO: 2356909 - RNA, 19 nt, Artificial Sequence
  Description of Artificial Sequence: Synthetic oligonucleotide
ccaaacaaggaucgcauca

SEQ ID NO: 2356910 - RNA, 19 nt, Artificial Sequence
  Description of Artificial Sequence: Synthetic oligonucleotide
caagguucggauugcccca

SEQ ID NO: 2356911 - RNA, 19 nt, Artificial Sequence
  Description of Artificial Sequence: Synthetic oligonucleotide
cagcgcguugaguucuccg

SEQ ID NO: 2356912 - RNA, 19 nt, Artificial Sequence
  Description of Artificial Sequence: Synthetic oligonucleotide
gucacaccacccuggagga

SEQ ID NO: 2356913 - RNA, 19 nt, Artificial Sequence
  Description of Artificial Sequence: Synthetic oligonucleotide
uuucugcgucuugaguccc

SEQ ID NO: 2356914 - RNA, 19 nt, Artificial Sequence
  Description of Artificial Sequence: Synthetic oligonucleotide
ggccucgccacgcaaacgc

SEQ ID NO: 2356915 - RNA, 19 nt, Artificial Sequence
  Description of Artificial Sequence: Synthetic oligonucleotide
aaggggcggaucugcggca

SEQ ID NO: 2356916 - RNA, 19 nt, Artificial Sequence
  Description of Artificial Sequence: Synthetic oligonucleotide
uuucuggcagucucuccua

SEQ ID NO: 2356917 - RNA, 19 nt, Artificial Sequence
  Description of Artificial Sequence: Synthetic oligonucleotide
caaggaucgcaucagcugu

SEQ ID NO: 2356918 - RNA, 19 nt, Artificial Sequence
  Description of Artificial Sequence: Synthetic oligonucleotide
ccuacagacccuuccacuc

SEQ ID NO: 2356919 - RNA, 19 nt, Artificial Sequence
  Description of Artificial Sequence: Synthetic oligonucleotide
uugaguucuccggcuugag

SEQ ID NO: 2356920 - RNA, 19 nt, Artificial Sequence
  Description of Artificial Sequence: Synthetic oligonucleotide
gaauggguagcaguccuua

SEQ ID NO: 2356921 - RNA, 19 nt, Artificial Sequence
  Description of Artificial Sequence: Synthetic oligonucleotide
guggaacaggaggaaauuc

SEQ ID NO: 2356922 - RNA, 19 nt, Artificial Sequence
  Description of Artificial Sequence: Synthetic oligonucleotide
uucugcgucuugaguccca

SEQ ID NO: 2356923 - RNA, 19 nt, Artificial Sequence
  Description of Artificial Sequence: Synthetic oligonucleotide
aucugcggcaccgcaagca

SEQ ID NO: 2356924 - RNA, 19 nt, Artificial Sequence
  Description of Artificial Sequence: Synthetic oligonucleotide
cucccucgccaguugcucc

SEQ ID NO: 2356925 - RNA, 19 nt, Artificial Sequence
  Description of Artificial Sequence: Synthetic oligonucleotide
caaauggucacaccacccu

SEQ ID NO: 2356926 - RNA, 19 nt, Artificial Sequence
  Description of Artificial Sequence: Synthetic oligonucleotide
guucgggauuuucuucuuc

SEQ ID NO: 2356927 - RNA, 19 nt, Artificial Sequence
  Description of Artificial Sequence: Synthetic oligonucleotide
ugcgcaagguucggauugc

SEQ ID NO: 2356928 - RNA, 19 nt, Artificial Sequence
  Description of Artificial Sequence: Synthetic oligonucleotide
cuguucgggauuuucuucu

SEQ ID NO: 2356929 - RNA, 19 nt, Artificial Sequence
  Description of Artificial Sequence: Synthetic oligonucleotide
cugguggcagagucacaag

SEQ ID NO: 2356930 - RNA, 19 nt, Artificial Sequence
  Description of Artificial Sequence: Synthetic oligonucleotide
augugcucugguggcagag

SEQ ID NO: 2356931 - RNA, 19 nt, Artificial Sequence
  Description of Artificial Sequence: Synthetic oligonucleotide
cugcggcaccgcaagcagg

SEQ ID NO: 2356932 - RNA, 19 nt, Artificial Sequence
  Description of Artificial Sequence: Synthetic oligonucleotide
uguucgggauuuucuucuu

SEQ ID NO: 2356933 - RNA, 19 nt, Artificial Sequence
  Description of Artificial Sequence: Synthetic oligonucleotide
gaucugcggcaccgcaagc

SEQ ID NO: 2356934 - RNA, 19 nt, Artificial Sequence
  Description of Artificial Sequence: Synthetic oligonucleotide
cagaauguaggagaaucua

SEQ ID NO: 2356935 - RNA, 19 nt, Artificial Sequence
  Description of Artificial Sequence: Synthetic oligonucleotide
ucgacacaguguugccugu

SEQ ID NO: 2356936 - RNA, 19 nt, Artificial Sequence
  Description of Artificial Sequence: Synthetic oligonucleotide
ucgggcugaauggguagca

SEQ ID NO: 2356937 - RNA, 19 nt, Artificial Sequence
  Description of Artificial Sequence: Synthetic oligonucleotide
gaaauucacaggggcccca

SEQ ID NO: 2356938 - RNA, 19 nt, Artificial Sequence
  Description of Artificial Sequence: Synthetic oligonucleotide
cucuccuacaagcuguacu

SEQ ID NO: 2356939 - RNA, 19 nt, Artificial Sequence
  Description of Artificial Sequence: Synthetic oligonucleotide
ccauuugagcccuguaguc

SEQ ID NO: 2356940 - RNA, 19 nt, Artificial Sequence
  Description of Artificial Sequence: Synthetic oligonucleotide
acugcgcaagguucggauu

SEQ ID NO: 2356941 - RNA, 19 nt, Artificial Sequence
  Description of Artificial Sequence: Synthetic oligonucleotide
cuacuucugccaaaagagu

SEQ ID NO: 2356942 - RNA, 19 nt, Artificial Sequence
  Description of Artificial Sequence: Synthetic oligonucleotide
agguucggauugccccaac

SEQ ID NO: 2356943 - RNA, 19 nt, Artificial Sequence
  Description of Artificial Sequence: Synthetic oligonucleotide
guaguccccaaacaaggau

SEQ ID NO: 2356944 - RNA, 19 nt, Artificial Sequence
  Description of Artificial Sequence: Synthetic oligonucleotide
guugaguucuccggcuuga

SEQ ID NO: 2356945 - RNA, 19 nt, Artificial Sequence
  Description of Artificial Sequence: Synthetic oligonucleotide
ucugcgcgcagcgcguuga

SEQ ID NO: 2356946 - RNA, 19 nt, Artificial Sequence
  Description of Artificial Sequence: Synthetic oligonucleotide
ggaaauucacaggggcccc

SEQ ID NO: 2356947 - RNA, 19 nt, Artificial Sequence
  Description of Artificial Sequence: Synthetic oligonucleotide
ugugcucugguggcagagu

SEQ ID NO: 2356948 - RNA, 19 nt, Artificial Sequence
  Description of Artificial Sequence: Synthetic oligonucleotide
cuaggacagguuucucgga

SEQ ID NO: 2356949 - RNA, 19 nt, Artificial Sequence
  Description of Artificial Sequence: Synthetic oligonucleotide
agacccuuccacucuucuu

SEQ ID NO: 2356950 - RNA, 19 nt, Artificial Sequence
  Description of Artificial Sequence: Synthetic oligonucleotide
gggccccacacccagggcc

SEQ ID NO: 2356951 - RNA, 19 nt, Artificial Sequence
  Description of Artificial Sequence: Synthetic oligonucleotide
cagcugucucuuccggggc

SEQ ID NO: 2356952 - RNA, 19 nt, Artificial Sequence
  Description of Artificial Sequence: Synthetic oligonucleotide
gguggcagagucacaagca

SEQ ID NO: 2356953 - RNA, 19 nt, Artificial Sequence
  Description of Artificial Sequence: Synthetic oligonucleotide
caggacgcccuaacgccug

SEQ ID NO: 2356954 - RNA, 19 nt, Artificial Sequence
  Description of Artificial Sequence: Synthetic oligonucleotide
guucauagaaagaccccua

SEQ ID NO: 2356955 - RNA, 19 nt, Artificial Sequence
  Description of Artificial Sequence: Synthetic oligonucleotide
caccgcaagcaggacgggg

SEQ ID NO: 2356956 - RNA, 19 nt, Artificial Sequence
  Description of Artificial Sequence: Synthetic oligonucleotide
aagguucggauugccccaa

SEQ ID NO: 2356957 - RNA, 19 nt, Artificial Sequence
  Description of Artificial Sequence: Synthetic oligonucleotide
cugaauggguagcaguccu

SEQ ID NO: 2356958 - RNA, 19 nt, Artificial Sequence
  Description of Artificial Sequence: Synthetic oligonucleotide
uucugccaaaagaguucau

SEQ ID NO: 2356959 - RNA, 19 nt, Artificial Sequence
  Description of Artificial Sequence: Synthetic oligonucleotide
ccuguucgggauuuucuuc

SEQ ID NO: 2356960 - RNA, 19 nt, Artificial Sequence
  Description of Artificial Sequence: Synthetic oligonucleotide
cuccgccugggcuucagca

SEQ ID NO: 2356961 - RNA, 19 nt, Artificial Sequence
  Description of Artificial Sequence: Synthetic oligonucleotide
gguuucucggagaucuuuc

SEQ ID NO: 2356962 - RNA, 19 nt, Artificial Sequence
  Description of Artificial Sequence: Synthetic oligonucleotide
gcugcuggugccucccgag

SEQ ID NO: 2356963 - RNA, 19 nt, Artificial Sequence
  Description of Artificial Sequence: Synthetic oligonucleotide
agguuucucggagaucuuu

SEQ ID NO: 2356964 - RNA, 19 nt, Artificial Sequence
  Description of Artificial Sequence: Synthetic oligonucleotide
ccauucggcauccauuuga

SEQ ID NO: 2356965 - RNA, 19 nt, Artificial Sequence
  Description of Artificial Sequence: Synthetic oligonucleotide
acccuguucgggauuuucu

SEQ ID NO: 2356966 - RNA, 19 nt, Artificial Sequence
  Description of Artificial Sequence: Synthetic oligonucleotide
aggaucgcaucagcugucu

SEQ ID NO: 2356967 - RNA, 19 nt, Artificial Sequence
  Description of Artificial Sequence: Synthetic oligonucleotide
ggagccgaggucugcgcgc

SEQ ID NO: 2356968 - RNA, 19 nt, Artificial Sequence
  Description of Artificial Sequence: Synthetic oligonucleotide
guucuccggcuugaggcug

SEQ ID NO: 2356969 - RNA, 19 nt, Artificial Sequence
  Description of Artificial Sequence: Synthetic oligonucleotide
gacccuguucgggauuuuc

SEQ ID NO: 2356970 - RNA, 19 nt, Artificial Sequence
  Description of Artificial Sequence: Synthetic oligonucleotide
agagacccuguucgggauu

SEQ ID NO: 2356971 - RNA, 19 nt, Artificial Sequence
  Description of Artificial Sequence: Synthetic oligonucleotide
cagcucccucgccaguugc

SEQ ID NO: 2356972 - RNA, 19 nt, Artificial Sequence
  Description of Artificial Sequence: Synthetic oligonucleotide
ucucuccuacaagcuguac

SEQ ID NO: 2356973 - RNA, 19 nt, Artificial Sequence
  Description of Artificial Sequence: Synthetic oligonucleotide
aggggcggaucugcggcac

SEQ ID NO: 2356974 - RNA, 19 nt, Artificial Sequence
  Description of Artificial Sequence: Synthetic oligonucleotide
gacgcccuaacgccugaaa

SEQ ID NO: 2356975 - RNA, 19 nt, Artificial Sequence
  Description of Artificial Sequence: Synthetic oligonucleotide
cuucgucuaggacagguuu

SEQ ID NO: 2356976 - RNA, 19 nt, Artificial Sequence
  Description of Artificial Sequence: Synthetic oligonucleotide
ucacugcgcaagguucgga

SEQ ID NO: 2356977 - RNA, 19 nt, Artificial Sequence
  Description of Artificial Sequence: Synthetic oligonucleotide
gcucugguggcagagucac

SEQ ID NO: 2356978 - RNA, 19 nt, Artificial Sequence
  Description of Artificial Sequence: Synthetic oligonucleotide
gguucggauugccccaaca

SEQ ID NO: 2356979 - RNA, 19 nt, Artificial Sequence
  Description of Artificial Sequence: Synthetic oligonucleotide
cugcgucuugagucccagc

SEQ ID NO: 2356980 - RNA, 19 nt, Artificial Sequence
  Description of Artificial Sequence: Synthetic oligonucleotide
guucuuccuguuggacgag

SEQ ID NO: 2356981 - RNA, 19 nt, Artificial Sequence
  Description of Artificial Sequence: Synthetic oligonucleotide
ccuuagacaaagcaauccu

SEQ ID NO: 2356982 - RNA, 19 nt, Artificial Sequence
  Description of Artificial Sequence: Synthetic oligonucleotide
gcaauccuacuucugccaa

SEQ ID NO: 2356983 - RNA, 19 nt, Artificial Sequence
  Description of Artificial Sequence: Synthetic oligonucleotide
ugagcccuguaguccccaa

SEQ ID NO: 2356984 - RNA, 19 nt, Artificial Sequence
  Description of Artificial Sequence: Synthetic oligonucleotide
ggccuacagacccuuccac

SEQ ID NO: 2356985 - RNA, 19 nt, Artificial Sequence
  Description of Artificial Sequence: Synthetic oligonucleotide
gcgcguugaguucuccggc

SEQ ID NO: 2356986 - RNA, 19 nt, Artificial Sequence
  Description of Artificial Sequence: Synthetic oligonucleotide
ucgccacgcaaacgccuuc

SEQ ID NO: 2356987 - RNA, 19 nt, Artificial Sequence
  Description of Artificial Sequence: Synthetic oligonucleotide
caucaggaaaguccacagu

SEQ ID NO: 2356988 - RNA, 19 nt, Artificial Sequence
  Description of Artificial Sequence: Synthetic oligonucleotide
cacccagggccucgccacg

SEQ ID NO: 2356989 - RNA, 19 nt, Artificial Sequence
  Description of Artificial Sequence: Synthetic oligonucleotide
ggagaaucuaaaagaaauu

SEQ ID NO: 2356990 - RNA, 19 nt, Artificial Sequence
  Description of Artificial Sequence: Synthetic oligonucleotide
cagcucuagcuguuccaca

SEQ ID NO: 2356991 - RNA, 19 nt, Artificial Sequence
  Description of Artificial Sequence: Synthetic oligonucleotide
cgagcaggacgcccuaacg

SEQ ID NO: 2356992 - RNA, 19 nt, Artificial Sequence
  Description of Artificial Sequence: Synthetic oligonucleotide
gagaucuuuccgucuccau

SEQ ID NO: 2356993 - RNA, 19 nt, Artificial Sequence
  Description of Artificial Sequence: Synthetic oligonucleotide
cccaaacaaggaucgcauc

SEQ ID NO: 2356994 - RNA, 19 nt, Artificial Sequence
  Description of Artificial Sequence: Synthetic oligonucleotide
guugcuccgccugggcuuc

SEQ ID NO: 2356995 - RNA, 19 nt, Artificial Sequence
  Description of Artificial Sequence: Synthetic oligonucleotide
aggacgcccuaacgccuga

SEQ ID NO: 2356996 - RNA, 19 nt, Artificial Sequence
  Description of Artificial Sequence: Synthetic oligonucleotide
cauccauuugagcccugua

SEQ ID NO: 2356997 - RNA, 19 nt, Artificial Sequence
  Description of Artificial Sequence: Synthetic oligonucleotide
gggcggaucugcggcaccg

SEQ ID NO: 2356998 - RNA, 19 nt, Artificial Sequence
  Description of Artificial Sequence: Synthetic oligonucleotide
guccccaaacaaggaucgc

SEQ ID NO: 2356999 - RNA, 19 nt, Artificial Sequence
  Description of Artificial Sequence: Synthetic oligonucleotide
ccgaggucugcgcgcagcg

SEQ ID NO: 2357000 - RNA, 19 nt, Artificial Sequence
  Description of Artificial Sequence: Synthetic oligonucleotide
gagccgaggucugcgcgca

SEQ ID NO: 2357001 - RNA, 19 nt, Artificial Sequence
  Description of Artificial Sequence: Synthetic oligonucleotide
ccagaauguaggagaaucu

SEQ ID NO: 2357002 - RNA, 19 nt, Artificial Sequence
  Description of Artificial Sequence: Synthetic oligonucleotide
ccacgcaaacgccuucuuc

SEQ ID NO: 2357003 - RNA, 19 nt, Artificial Sequence
  Description of Artificial Sequence: Synthetic oligonucleotide
ggggagcuucgucuaggac

SEQ ID NO: 2357004 - RNA, 19 nt, Artificial Sequence
  Description of Artificial Sequence: Synthetic oligonucleotide
gucugcgcgcagcgcguug

SEQ ID NO: 2357005 - RNA, 19 nt, Artificial Sequence
  Description of Artificial Sequence: Synthetic oligonucleotide
ugcuucgggguggguuucu

SEQ ID NO: 2357006 - RNA, 19 nt, Artificial Sequence
  Description of Artificial Sequence: Synthetic oligonucleotide
gccauucggcauccauuug

SEQ ID NO: 2357007 - RNA, 19 nt, Artificial Sequence
  Description of Artificial Sequence: Synthetic oligonucleotide
gcgucuugagucccagcuc

SEQ ID NO: 2357008 - RNA, 19 nt, Artificial Sequence
  Description of Artificial Sequence: Synthetic oligonucleotide
gcucuagcuguuccacaca

SEQ ID NO: 2357009 - RNA, 19 nt, Artificial Sequence
  Description of Artificial Sequence: Synthetic oligonucleotide
ggaggaugacuaguccaga

SEQ ID NO: 2357010 - RNA, 19 nt, Artificial Sequence
  Description of Artificial Sequence: Synthetic oligonucleotide
cacugcgcaagguucggau

SEQ ID NO: 2357011 - RNA, 19 nt, Artificial Sequence
  Description of Artificial Sequence: Synthetic oligonucleotide
ucccgagcaggacgcccua

SEQ ID NO: 2357012 - RNA, 19 nt, Artificial Sequence
  Description of Artificial Sequence: Synthetic oligonucleotide
ugcgcgcagcgcguugagu

SEQ ID NO: 2357013 - RNA, 19 nt, Artificial Sequence
  Description of Artificial Sequence: Synthetic oligonucleotide
agguugcacuaaacugaca

SEQ ID NO: 2357014 - RNA, 19 nt, Artificial Sequence
  Description of Artificial Sequence: Synthetic oligonucleotide
gagcuucgucuaggacagg

SEQ ID NO: 2357015 - RNA, 19 nt, Artificial Sequence
  Description of Artificial Sequence: Synthetic oligonucleotide
ggacagguuucucggagau

SEQ ID NO: 2357016 - RNA, 19 nt, Artificial Sequence
  Description of Artificial Sequence: Synthetic oligonucleotide
cacaggggccccacaccca

SEQ ID NO: 2357017 - RNA, 19 nt, Artificial Sequence
  Description of Artificial Sequence: Synthetic oligonucleotide
gcccuguaguccccaaaca

SEQ ID NO: 2357018 - RNA, 19 nt, Artificial Sequence
  Description of Artificial Sequence: Synthetic oligonucleotide
acgaggccuacagacccuu

SEQ ID NO: 2357019 - RNA, 19 nt, Artificial Sequence
  Description of Artificial Sequence: Synthetic oligonucleotide
cguugaguucuccggcuug

SEQ ID NO: 2357020 - RNA, 19 nt, Artificial Sequence
  Description of Artificial Sequence: Synthetic oligonucleotide
cugcgcgcagcgcguugag

SEQ ID NO: 2357021 - RNA, 19 nt, Artificial Sequence
  Description of Artificial Sequence: Synthetic oligonucleotide
gccuacagacccuuccacu

SEQ ID NO: 2357022 - RNA, 19 nt, Artificial Sequence
  Description of Artificial Sequence: Synthetic oligonucleotide
agucccagcucuagcuguu

SEQ ID NO: 2357023 - RNA, 19 nt, Artificial Sequence
  Description of Artificial Sequence: Synthetic oligonucleotide
ggaucgcaucagcugucuc

SEQ ID NO: 2357024 - RNA, 19 nt, Artificial Sequence
  Description of Artificial Sequence: Synthetic oligonucleotide
agcuguacucgggcugaau

SEQ ID NO: 2357025 - RNA, 19 nt, Artificial Sequence
  Description of Artificial Sequence: Synthetic oligonucleotide
cagggccucgccacgcaaa

SEQ ID NO: 2357026 - RNA, 19 nt, Artificial Sequence
  Description of Artificial Sequence: Synthetic oligonucleotide
ccgagcaggacgcccuaac

SEQ ID NO: 2357027 - RNA, 19 nt, Artificial Sequence
  Description of Artificial Sequence: Synthetic oligonucleotide
cccuauauucaagacaaau

SEQ ID NO: 2357028 - RNA, 19 nt, Artificial Sequence
  Description of Artificial Sequence: Synthetic oligonucleotide
agccgaggucugcgcgcag

SEQ ID NO: 2357029 - RNA, 19 nt, Artificial Sequence
  Description of Artificial Sequence: Synthetic oligonucleotide
cggcaccgcaagcaggacg

SEQ ID NO: 2357030 - RNA, 19 nt, Artificial Sequence
  Description of Artificial Sequence: Synthetic oligonucleotide
aggucugcgcgcagcgcgu

SEQ ID NO: 2357031 - RNA, 19 nt, Artificial Sequence
  Description of Artificial Sequence: Synthetic oligonucleotide
uugccccaacagccugcuc

SEQ ID NO: 2357032 - RNA, 19 nt, Artificial Sequence
  Description of Artificial Sequence: Synthetic oligonucleotide
cucccgagcaggacgcccu

SEQ ID NO: 2357033 - RNA, 19 nt, Artificial Sequence
  Description of Artificial Sequence: Synthetic oligonucleotide
cggagaucuuuccgucucc

SEQ ID NO: 2357034 - RNA, 19 nt, Artificial Sequence
  Description of Artificial Sequence: Synthetic oligonucleotide
gucucuccuacaagcugua

SEQ ID NO: 2357035 - RNA, 19 nt, Artificial Sequence
  Description of Artificial Sequence: Synthetic oligonucleotide
guacucgggcugaaugggu

SEQ ID NO: 2357036 - RNA, 19 nt, Artificial Sequence
  Description of Artificial Sequence: Synthetic oligonucleotide
cugcuucgggguggguuuc

SEQ ID NO: 2357037 - RNA, 19 nt, Artificial Sequence
  Description of Artificial Sequence: Synthetic oligonucleotide
gggccucgccacgcaaacg

SEQ ID NO: 2357038 - RNA, 19 nt, Artificial Sequence
  Description of Artificial Sequence: Synthetic oligonucleotide
gacgaggccuacagacccu

SEQ ID NO: 2357039 - RNA, 19 nt, Artificial Sequence
  Description of Artificial Sequence: Synthetic oligonucleotide
cucgccaguugcuccgccu

SEQ ID NO: 2357040 - RNA, 19 nt, Artificial Sequence
  Description of Artificial Sequence: Synthetic oligonucleotide
cuguuggacgaggccuaca

SEQ ID NO: 2357041 - RNA, 19 nt, Artificial Sequence
  Description of Artificial Sequence: Synthetic oligonucleotide
gcggaucugcggcaccgca

SEQ ID NO: 2357042 - RNA, 19 nt, Artificial Sequence
  Description of Artificial Sequence: Synthetic oligonucleotide
gccgaggucugcgcgcagc

SEQ ID NO: 2357043 - RNA, 19 nt, Artificial Sequence
  Description of Artificial Sequence: Synthetic oligonucleotide
ccagcucccucgccaguug

SEQ ID NO: 2357044 - RNA, 19 nt, Artificial Sequence
  Description of Artificial Sequence: Synthetic oligonucleotide
ccucccgagcaggacgccc

SEQ ID NO: 2357045 - RNA, 19 nt, Artificial Sequence
  Description of Artificial Sequence: Synthetic oligonucleotide
gcaguccuuagagcccuca

SEQ ID NO: 2357046 - RNA, 19 nt, Artificial Sequence
  Description of Artificial Sequence: Synthetic oligonucleotide
gcgcaagguucggauugcc

SEQ ID NO: 2357047 - RNA, 19 nt, Artificial Sequence
  Description of Artificial Sequence: Synthetic oligonucleotide
ggggcggaucugcggcacc

SEQ ID NO: 2357048 - RNA, 19 nt, Artificial Sequence
  Description of Artificial Sequence: Synthetic oligonucleotide
ccccaaacaaggaucgcau

SEQ ID NO: 2357049 - RNA, 19 nt, Artificial Sequence
  Description of Artificial Sequence: Synthetic oligonucleotide
ccgucuccauuugucccag

SEQ ID NO: 2357050 - RNA, 19 nt, Artificial Sequence
  Description of Artificial Sequence: Synthetic oligonucleotide
cgccaguugcuccgccugg

SEQ ID NO: 2357051 - RNA, 19 nt, Artificial Sequence
  Description of Artificial Sequence: Synthetic oligonucleotide
ccuguuggacgaggccuac

SEQ ID NO: 2357052 - RNA, 19 nt, Artificial Sequence
  Description of Artificial Sequence: Synthetic oligonucleotide
gcagcgcguugaguucucc

SEQ ID NO: 2357053 - RNA, 19 nt, Artificial Sequence
  Description of Artificial Sequence: Synthetic oligonucleotide
ggggccccacacccagggc

SEQ ID NO: 2357054 - RNA, 19 nt, Artificial Sequence
  Description of Artificial Sequence: Synthetic oligonucleotide
guccagaauguaggagaau

SEQ ID NO: 2357055 - RNA, 19 nt, Artificial Sequence
  Description of Artificial Sequence: Synthetic oligonucleotide
gcaccgcaagcaggacggg

SEQ ID NO: 2357056 - RNA, 19 nt, Artificial Sequence
  Description of Artificial Sequence: Synthetic oligonucleotide
gcaggacgcccuaacgccu

SEQ ID NO: 2357057 - RNA, 19 nt, Artificial Sequence
  Description of Artificial Sequence: Synthetic oligonucleotide
cucagggcuuccugccauu

SEQ ID NO: 2357058 - RNA, 19 nt, Artificial Sequence
  Description of Artificial Sequence: Synthetic oligonucleotide
gggguggguuucugcgucu

SEQ ID NO: 2357059 - RNA, 19 nt, Artificial Sequence
  Description of Artificial Sequence: Synthetic oligonucleotide
ccucgccacgcaaacgccu

SEQ ID NO: 2357060 - RNA, 19 nt, Artificial Sequence
  Description of Artificial Sequence: Synthetic oligonucleotide
ggcauccauuugagcccug

SEQ ID NO: 2357061 - RNA, 19 nt, Artificial Sequence
  Description of Artificial Sequence: Synthetic oligonucleotide
ccccuauauucaagacaaa

SEQ ID NO: 2357062 - RNA, 19 nt, Artificial Sequence
  Description of Artificial Sequence: Synthetic oligonucleotide
cagguuucucggagaucuu

SEQ ID NO: 2357063 - RNA, 19 nt, Artificial Sequence
  Description of Artificial Sequence: Synthetic oligonucleotide
cgaggucugcgcgcagcgc

SEQ ID NO: 2357064 - RNA, 19 nt, Artificial Sequence
  Description of Artificial Sequence: Synthetic oligonucleotide
gcuucgucuaggacagguu

SEQ ID NO: 2357065 - RNA, 19 nt, Artificial Sequence
  Description of Artificial Sequence: Synthetic oligonucleotide
cgaggccuacagacccuuc

SEQ ID NO: 2357066 - RNA, 19 nt, Artificial Sequence
  Description of Artificial Sequence: Synthetic oligonucleotide
ggccccacacccagggccu

SEQ ID NO: 2357067 - RNA, 19 nt, Artificial Sequence
  Description of Artificial Sequence: Synthetic oligonucleotide
cggaucugcggcaccgcaa

SEQ ID NO: 2357068 - RNA, 19 nt, Artificial Sequence
  Description of Artificial Sequence: Synthetic oligonucleotide
cggauugccccaacagccu

SEQ ID NO: 2357069 - RNA, 19 nt, Artificial Sequence
  Description of Artificial Sequence: Synthetic oligonucleotide
cgucuaggacagguuucuc

SEQ ID NO: 2357070 - RNA, 19 nt, Artificial Sequence
  Description of Artificial Sequence: Synthetic oligonucleotide
cccucgccaguugcuccgc

SEQ ID NO: 2357071 - RNA, 19 nt, Artificial Sequence
  Description of Artificial Sequence: Synthetic oligonucleotide
ccucagggcuuccugccau

SEQ ID NO: 2357072 - RNA, 19 nt, Artificial Sequence
  Description of Artificial Sequence: Synthetic oligonucleotide
gccucccgagcaggacgcc

SEQ ID NO: 2357073 - RNA, 19 nt, Artificial Sequence
  Description of Artificial Sequence: Synthetic oligonucleotide
ggacgcccuaacgccugaa

SEQ ID NO: 2357074 - RNA, 19 nt, Artificial Sequence
  Description of Artificial Sequence: Synthetic oligonucleotide
gcggcaccgcaagcaggac

SEQ ID NO: 2357075 - RNA, 19 nt, Artificial Sequence
  Description of Artificial Sequence: Synthetic oligonucleotide
cacaguggccuugguucuu

SEQ ID NO: 2357076 - RNA, 19 nt, Artificial Sequence
  Description of Artificial Sequence: Synthetic oligonucleotide
cgcagcgcguugaguucuc

SEQ ID NO: 2357077 - RNA, 19 nt, Artificial Sequence
  Description of Artificial Sequence: Synthetic oligonucleotide
ccagggccucgccacgcaa

SEQ ID NO: 2357078 - RNA, 19 nt, Artificial Sequence
  Description of Artificial Sequence: Synthetic oligonucleotide
cguggaacaggaggaaauu

SEQ ID NO: 2357079 - RNA, 19 nt, Artificial Sequence
  Description of Artificial Sequence: Synthetic oligonucleotide
gccacgcaaacgccuucuu

SEQ ID NO: 2357080 - RNA, 19 nt, Artificial Sequence
  Description of Artificial Sequence: Synthetic oligonucleotide
gccccacacccagggccuc

SEQ ID NO: 2357081 - RNA, 19 nt, Artificial Sequence
  Description of Artificial Sequence: Synthetic oligonucleotide
cccgagcaggacgcccuaa

SEQ ID NO: 2357082 - RNA, 19 nt, Artificial Sequence
  Description of Artificial Sequence: Synthetic oligonucleotide
ggucugcgcgcagcgcguu

SEQ ID NO: 2357083 - RNA, 19 nt, Artificial Sequence
  Description of Artificial Sequence: Synthetic oligonucleotide
cgccacgcaaacgccuucu

SEQ ID NO: 2357084 - RNA, 19 nt, Artificial Sequence
  Description of Artificial Sequence: Synthetic oligonucleotide
caccacccuggaggaggau

SEQ ID NO: 2357085 - RNA, 19 nt, Artificial Sequence
  Description of Artificial Sequence: Synthetic oligonucleotide
aauaaagacaucuuucacc

SEQ ID NO: 2357086 - RNA, 19 nt, Artificial Sequence
  Description of Artificial Sequence: Synthetic oligonucleotide
aauugaaaacccuucacuc

SEQ ID NO: 2357087 - RNA, 19 nt, Artificial Sequence
  Description of Artificial Sequence: Synthetic oligonucleotide
gaugauauuguaaacauag

SEQ ID NO: 2357088 - RNA, 19 nt, Artificial Sequence
  Description of Artificial Sequence: Synthetic oligonucleotide
aaacccuucacucaaccgg

SEQ ID NO: 2357089 - RNA, 19 nt, Artificial Sequence
  Description of Artificial Sequence: Synthetic oligonucleotide
uuaugcuuagagaagaagc

SEQ ID NO: 2357090 - RNA, 19 nt, Artificial Sequence
  Description of Artificial Sequence: Synthetic oligonucleotide
auuguaaacauaguaaggg

SEQ ID NO: 2357091 - RNA, 19 nt, Artificial Sequence
  Description of Artificial Sequence: Synthetic oligonucleotide
uauuguaaacauaguaagg

SEQ ID NO: 2357092 - RNA, 19 nt, Artificial Sequence
  Description of Artificial Sequence: Synthetic oligonucleotide
uaauguauggcccacaauc

SEQ ID NO: 2357093 - RNA, 19 nt, Artificial Sequence
  Description of Artificial Sequence: Synthetic oligonucleotide
aacgcaucugcacagggac

SEQ ID NO: 2357094 - RNA, 19 nt, Artificial Sequence
  Description of Artificial Sequence: Synthetic oligonucleotide
ucaguuuguaacauuuggg

SEQ ID NO: 2357095 - RNA, 19 nt, Artificial Sequence
  Description of Artificial Sequence: Synthetic oligonucleotide
auaguaagggaagaaacgc

SEQ ID NO: 2357096 - RNA, 19 nt, Artificial Sequence
  Description of Artificial Sequence: Synthetic oligonucleotide
acagcucuaauguauggcc

SEQ ID NO: 2357097 - RNA, 19 nt, Artificial Sequence
  Description of Artificial Sequence: Synthetic oligonucleotide
aaggcauacggcgagaaac

SEQ ID NO: 2357098 - RNA, 19 nt, Artificial Sequence
  Description of Artificial Sequence: Synthetic oligonucleotide
ugauauuguaaacauagua

SEQ ID NO: 2357099 - RNA, 19 nt, Artificial Sequence
  Description of Artificial Sequence: Synthetic oligonucleotide
acagucuccucccugauac

SEQ ID NO: 2357100 - RNA, 19 nt, Artificial Sequence
  Description of Artificial Sequence: Synthetic oligonucleotide
cuuguuauuggaaugcuug

SEQ ID NO: 2357101 - RNA, 19 nt, Artificial Sequence
  Description of Artificial Sequence: Synthetic oligonucleotide
uaugcuuagagaagaagca

SEQ ID NO: 2357102 - RNA, 19 nt, Artificial Sequence
  Description of Artificial Sequence: Synthetic oligonucleotide
agagaagaagcacuguacg

SEQ ID NO: 2357103 - RNA, 19 nt, Artificial Sequence
  Description of Artificial Sequence: Synthetic oligonucleotide
ucugaagcaacaauggaaa

SEQ ID NO: 2357104 - RNA, 19 nt, Artificial Sequence
  Description of Artificial Sequence: Synthetic oligonucleotide
caaagcuauacacagcucc

SEQ ID NO: 2357105 - RNA, 19 nt, Artificial Sequence
  Description of Artificial Sequence: Synthetic oligonucleotide
aguacaggaugguagagag

SEQ ID NO: 2357106 - RNA, 19 nt, Artificial Sequence
  Description of Artificial Sequence: Synthetic oligonucleotide
gaaggagucucucugguag

SEQ ID NO: 2357107 - RNA, 19 nt, Artificial Sequence
  Description of Artificial Sequence: Synthetic oligonucleotide
uaaucuugcuucaauaauc

SEQ ID NO: 2357108 - RNA, 19 nt, Artificial Sequence
  Description of Artificial Sequence: Synthetic oligonucleotide
aaaacccuucacucaaccg

SEQ ID NO: 2357109 - RNA, 19 nt, Artificial Sequence
  Description of Artificial Sequence: Synthetic oligonucleotide
aaagcuauacacagcuccc

SEQ ID NO: 2357110 - RNA, 19 nt, Artificial Sequence
  Description of Artificial Sequence: Synthetic oligonucleotide
agugagacaaucuccauga

SEQ ID NO: 2357111 - RNA, 19 nt, Artificial Sequence
  Description of Artificial Sequence: Synthetic oligonucleotide
aagacaggggaacaugcuc

SEQ ID NO: 2357112 - RNA, 19 nt, Artificial Sequence
  Description of Artificial Sequence: Synthetic oligonucleotide
aacauuuggggcugucucg

SEQ ID NO: 2357113 - RNA, 19 nt, Artificial Sequence
  Description of Artificial Sequence: Synthetic oligonucleotide
ugcagaaauaaagacaucu

SEQ ID NO: 2357114 - RNA, 19 nt, Artificial Sequence
  Description of Artificial Sequence: Synthetic oligonucleotide
auacuuucuuaacagauga

SEQ ID NO: 2357115 - RNA, 19 nt, Artificial Sequence
  Description of Artificial Sequence: Synthetic oligonucleotide
uaugaauugaaaacccuuc

SEQ ID NO: 2357116 - RNA, 19 nt, Artificial Sequence
  Description of Artificial Sequence: Synthetic oligonucleotide
gucaguuuguaacauuugg

SEQ ID NO: 2357117 - RNA, 19 nt, Artificial Sequence
  Description of Artificial Sequence: Synthetic oligonucleotide
aaguccaccgaugauauug

SEQ ID NO: 2357118 - RNA, 19 nt, Artificial Sequence
  Description of Artificial Sequence: Synthetic oligonucleotide
ucaaccggguaucugaagc

SEQ ID NO: 2357119 - RNA, 19 nt, Artificial Sequence
  Description of Artificial Sequence: Synthetic oligonucleotide
cuucaauaaucuuugucag

SEQ ID NO: 2357120 - RNA, 19 nt, Artificial Sequence
  Description of Artificial Sequence: Synthetic oligonucleotide
aagacaucuuucaccagcc

SEQ ID NO: 2357121 - RNA, 19 nt, Artificial Sequence
  Description of Artificial Sequence: Synthetic oligonucleotide
agagcauugcagcaaucgc

SEQ ID NO: 2357122 - RNA, 19 nt, Artificial Sequence
  Description of Artificial Sequence: Synthetic oligonucleotide
caugaaaaccacugcagcc

SEQ ID NO: 2357123 - RNA, 19 nt, Artificial Sequence
  Description of Artificial Sequence: Synthetic oligonucleotide
ucggguaugaauugaaaac

SEQ ID NO: 2357124 - RNA, 19 nt, Artificial Sequence
  Description of Artificial Sequence: Synthetic oligonucleotide
ucuugcuucaauaaucuuu

SEQ ID NO: 2357125 - RNA, 19 nt, Artificial Sequence
  Description of Artificial Sequence: Synthetic oligonucleotide
aucgccaguguacacgucc

SEQ ID NO: 2357126 - RNA, 19 nt, Artificial Sequence
  Description of Artificial Sequence: Synthetic oligonucleotide
acgaugcagauccugaggg

SEQ ID NO: 2357127 - RNA, 19 nt, Artificial Sequence
  Description of Artificial Sequence: Synthetic oligonucleotide
ugaauugaaaacccuucac

SEQ ID NO: 2357128 - RNA, 19 nt, Artificial Sequence
  Description of Artificial Sequence: Synthetic oligonucleotide
uggaucaaagcuauacaca

SEQ ID NO: 2357129 - RNA, 19 nt, Artificial Sequence
  Description of Artificial Sequence: Synthetic oligonucleotide
agaugaaccaucucuucag

SEQ ID NO: 2357130 - RNA, 19 nt, Artificial Sequence
  Description of Artificial Sequence: Synthetic oligonucleotide
uuaaucuugcuucaauaau

SEQ ID NO: 2357131 - RNA, 19 nt, Artificial Sequence
  Description of Artificial Sequence: Synthetic oligonucleotide
aaucagucuuuccgcaggg

SEQ ID NO: 2357132 - RNA, 19 nt, Artificial Sequence
  Description of Artificial Sequence: Synthetic oligonucleotide
ggaucaaagcuauacacag

SEQ ID NO: 2357133 - RNA, 19 nt, Artificial Sequence
  Description of Artificial Sequence: Synthetic oligonucleotide
guaucugaagcaacaaugg

SEQ ID NO: 2357134 - RNA, 19 nt, Artificial Sequence
  Description of Artificial Sequence: Synthetic oligonucleotide
uuguaaacauaguaaggga

SEQ ID NO: 2357135 - RNA, 19 nt, Artificial Sequence
  Description of Artificial Sequence: Synthetic oligonucleotide
uuagagaagaagcacugua

SEQ ID NO: 2357136 - RNA, 19 nt, Artificial Sequence
  Description of Artificial Sequence: Synthetic oligonucleotide
cuggaucaaagcuauacac

SEQ ID NO: 2357137 - RNA, 19 nt, Artificial Sequence
  Description of Artificial Sequence: Synthetic oligonucleotide
aguaagggaagaaacgccg

SEQ ID NO: 2357138 - RNA, 19 nt, Artificial Sequence
  Description of Artificial Sequence: Synthetic oligonucleotide
guuauuggaaugcuuguac

SEQ ID NO: 2357139 - RNA, 19 nt, Artificial Sequence
  Description of Artificial Sequence: Synthetic oligonucleotide
uuuaugcuuagagaagaag

SEQ ID NO: 2357140 - RNA, 19 nt, Artificial Sequence
  Description of Artificial Sequence: Synthetic oligonucleotide
guaaacauaguaagggaag

SEQ ID NO: 2357141 - RNA, 19 nt, Artificial Sequence
  Description of Artificial Sequence: Synthetic oligonucleotide
uaguaagggaagaaacgcc

SEQ ID NO: 2357142 - RNA, 19 nt, Artificial Sequence
  Description of Artificial Sequence: Synthetic oligonucleotide
agagccauacuuucuuaac

SEQ ID NO: 2357143 - RNA, 19 nt, Artificial Sequence
  Description of Artificial Sequence: Synthetic oligonucleotide
uuggaaugcuuguacaucu

SEQ ID NO: 2357144 - RNA, 19 nt, Artificial Sequence
  Description of Artificial Sequence: Synthetic oligonucleotide
ucuguccaaagacagggga

SEQ ID NO: 2357145 - RNA, 19 nt, Artificial Sequence
  Description of Artificial Sequence: Synthetic oligonucleotide
gagacaaucuccaugaaaa

SEQ ID NO: 2357146 - RNA, 19 nt, Artificial Sequence
  Description of Artificial Sequence: Synthetic oligonucleotide
uuauuggaaugcuuguaca

SEQ ID NO: 2357147 - RNA, 19 nt, Artificial Sequence
  Description of Artificial Sequence: Synthetic oligonucleotide
aaugaguacuuuauauucu

SEQ ID NO: 2357148 - RNA, 19 nt, Artificial Sequence
  Description of Artificial Sequence: Synthetic oligonucleotide
ugccaauacaguaccuccg

SEQ ID NO: 2357149 - RNA, 19 nt, Artificial Sequence
  Description of Artificial Sequence: Synthetic oligonucleotide
aaucuugcuucaauaaucu

SEQ ID NO: 2357150 - RNA, 19 nt, Artificial Sequence
  Description of Artificial Sequence: Synthetic oligonucleotide
gagagcauugcagcaaucg

SEQ ID NO: 2357151 - RNA, 19 nt, Artificial Sequence
  Description of Artificial Sequence: Synthetic oligonucleotide
uacaucuuuaaucuugcuu

SEQ ID NO: 2357152 - RNA, 19 nt, Artificial Sequence
  Description of Artificial Sequence: Synthetic oligonucleotide
agacaaucuccaugaaaac

SEQ ID NO: 2357153 - RNA, 19 nt, Artificial Sequence
  Description of Artificial Sequence: Synthetic oligonucleotide
agauccugagggcaucgcc

SEQ ID NO: 2357154 - RNA, 19 nt, Artificial Sequence
  Description of Artificial Sequence: Synthetic oligonucleotide
aaaucuucuccagcaauug

SEQ ID NO: 2357155 - RNA, 19 nt, Artificial Sequence
  Description of Artificial Sequence: Synthetic oligonucleotide
ugacuguuuugucugucag

SEQ ID NO: 2357156 - RNA, 19 nt, Artificial Sequence
  Description of Artificial Sequence: Synthetic oligonucleotide
agacaggggaacaugcucc

SEQ ID NO: 2357157 - RNA, 19 nt, Artificial Sequence
  Description of Artificial Sequence: Synthetic oligonucleotide
acuguacgaaaaugaguac

SEQ ID NO: 2357158 - RNA, 19 nt, Artificial Sequence
  Description of Artificial Sequence: Synthetic oligonucleotide
auugccaauacaguaccuc

SEQ ID NO: 2357159 - RNA, 19 nt, Artificial Sequence
  Description of Artificial Sequence: Synthetic oligonucleotide
gaaacgcaucugcacaggg

SEQ ID NO: 2357160 - RNA, 19 nt, Artificial Sequence
  Description of Artificial Sequence: Synthetic oligonucleotide
ucuaauguauggcccacaa

SEQ ID NO: 2357161 - RNA, 19 nt, Artificial Sequence
  Description of Artificial Sequence: Synthetic oligonucleotide
ugcuucaauaaucuuuguc

SEQ ID NO: 2357162 - RNA, 19 nt, Artificial Sequence
  Description of Artificial Sequence: Synthetic oligonucleotide
gagaaacgcaucugcacag

SEQ ID NO: 2357163 - RNA, 19 nt, Artificial Sequence
  Description of Artificial Sequence: Synthetic oligonucleotide
auuggaaugcuuguacauc

SEQ ID NO: 2357164 - RNA, 19 nt, Artificial Sequence
  Description of Artificial Sequence: Synthetic oligonucleotide
acaguaccuccguugaagg

SEQ ID NO: 2357165 - RNA, 19 nt, Artificial Sequence
  Description of Artificial Sequence: Synthetic oligonucleotide
uacaguaccuccguugaag

SEQ ID NO: 2357166 - RNA, 19 nt, Artificial Sequence
  Description of Artificial Sequence: Synthetic oligonucleotide
ucagucuuuccgcagggga

SEQ ID NO: 2357167 - RNA, 19 nt, Artificial Sequence
  Description of Artificial Sequence: Synthetic oligonucleotide
aauguauggcccacaauca

SEQ ID NO: 2357168 - RNA, 19 nt, Artificial Sequence
  Description of Artificial Sequence: Synthetic oligonucleotide
acagaugaaccaucucuuc

SEQ ID NO: 2357169 - RNA, 19 nt, Artificial Sequence
  Description of Artificial Sequence: Synthetic oligonucleotide
uucaucaaguccaccgaug

SEQ ID NO: 2357170 - RNA, 19 nt, Artificial Sequence
  Description of Artificial Sequence: Synthetic oligonucleotide
aaaccaaccugguugucaa

SEQ ID NO: 2357171 - RNA, 19 nt, Artificial Sequence
  Description of Artificial Sequence: Synthetic oligonucleotide
uguauggcccacaaucagu

SEQ ID NO: 2357172 - RNA, 19 nt, Artificial Sequence
  Description of Artificial Sequence: Synthetic oligonucleotide
aaggagucucucugguagg

SEQ ID NO: 2357173 - RNA, 19 nt, Artificial Sequence
  Description of Artificial Sequence: Synthetic oligonucleotide
gaugguagagagcauugca

SEQ ID NO: 2357174 - RNA, 19 nt, Artificial Sequence
  Description of Artificial Sequence: Synthetic oligonucleotide
aaugacuguuuugucuguc

SEQ ID NO: 2357175 - RNA, 19 nt, Artificial Sequence
  Description of Artificial Sequence: Synthetic oligonucleotide
gaauugaaaacccuucacu

SEQ ID NO: 2357176 - RNA, 19 nt, Artificial Sequence
  Description of Artificial Sequence: Synthetic oligonucleotide
uaagggaagaaacgccgug

SEQ ID NO: 2357177 - RNA, 19 nt, Artificial Sequence
  Description of Artificial Sequence: Synthetic oligonucleotide
cuccguugaaggcauacgg

SEQ ID NO: 2357178 - RNA, 19 nt, Artificial Sequence
  Description of Artificial Sequence: Synthetic oligonucleotide
cacuguacgaaaaugagua

SEQ ID NO: 2357179 - RNA, 19 nt, Artificial Sequence
  Description of Artificial Sequence: Synthetic oligonucleotide
uauuggaaugcuuguacau

SEQ ID NO: 2357180 - RNA, 19 nt, Artificial Sequence
  Description of Artificial Sequence: Synthetic oligonucleotide
ucuuaacagaugaaccauc

SEQ ID NO: 2357181 - RNA, 19 nt, Artificial Sequence
  Description of Artificial Sequence: Synthetic oligonucleotide
uccguugaaggcauacggc

SEQ ID NO: 2357182 - RNA, 19 nt, Artificial Sequence
  Description of Artificial Sequence: Synthetic oligonucleotide
cauggcucuguccaaagac

SEQ ID NO: 2357183 - RNA, 19 nt, Artificial Sequence
  Description of Artificial Sequence: Synthetic oligonucleotide
uuuguaacauuuggggcug

SEQ ID NO: 2357184 - RNA, 19 nt, Artificial Sequence
  Description of Artificial Sequence: Synthetic oligonucleotide
caaucagucuuuccgcagg

SEQ ID NO: 2357185 - RNA, 19 nt, Artificial Sequence
  Description of Artificial Sequence: Synthetic oligonucleotide
uacgaaaaugaguacuuua

SEQ ID NO: 2357186 - RNA, 19 nt, Artificial Sequence
  Description of Artificial Sequence: Synthetic oligonucleotide
guuuguaacauuuggggcu

SEQ ID NO: 2357187 - RNA, 19 nt, Artificial Sequence
  Description of Artificial Sequence: Synthetic oligonucleotide
ugucaguuuguaacauuug

SEQ ID NO: 2357188 - RNA, 19 nt, Artificial Sequence
  Description of Artificial Sequence: Synthetic oligonucleotide
acuggaucaaagcuauaca

SEQ ID NO: 2357189 - RNA, 19 nt, Artificial Sequence
  Description of Artificial Sequence: Synthetic oligonucleotide
aagagccauacuuucuuaa

SEQ ID NO: 2357190 - RNA, 19 nt, Artificial Sequence
  Description of Artificial Sequence: Synthetic oligonucleotide
guugaaggcauacggcgag

SEQ ID NO: 2357191 - RNA, 19 nt, Artificial Sequence
  Description of Artificial Sequence: Synthetic oligonucleotide
gaagcacuguacgaaaaug

SEQ ID NO: 2357192 - RNA, 19 nt, Artificial Sequence
  Description of Artificial Sequence: Synthetic oligonucleotide
aacccuucacucaaccggg

SEQ ID NO: 2357193 - RNA, 19 nt, Artificial Sequence
  Description of Artificial Sequence: Synthetic oligonucleotide
uuuuaugcuuagagaagaa

SEQ ID NO: 2357194 - RNA, 19 nt, Artificial Sequence
  Description of Artificial Sequence: Synthetic oligonucleotide
ugucauggccuuguuauug

SEQ ID NO: 2357195 - RNA, 19 nt, Artificial Sequence
  Description of Artificial Sequence: Synthetic oligonucleotide
gagcauugcagcaaucgcc

SEQ ID NO: 2357196 - RNA, 19 nt, Artificial Sequence
  Description of Artificial Sequence: Synthetic oligonucleotide
uuguuauuggaaugcuugu

SEQ ID NO: 2357197 - RNA, 19 nt, Artificial Sequence
  Description of Artificial Sequence: Synthetic oligonucleotide
uauacacagcucccuuucc

SEQ ID NO: 2357198 - RNA, 19 nt, Artificial Sequence
  Description of Artificial Sequence: Synthetic oligonucleotide
gacaucuuucaccagccuc

SEQ ID NO: 2357199 - RNA, 19 nt, Artificial Sequence
  Description of Artificial Sequence: Synthetic oligonucleotide
ucccugauacccucuuugg

SEQ ID NO: 2357200 - RNA, 19 nt, Artificial Sequence
  Description of Artificial Sequence: Synthetic oligonucleotide
auguauggcccacaaucag

SEQ ID NO: 2357201 - RNA, 19 nt, Artificial Sequence
  Description of Artificial Sequence: Synthetic oligonucleotide
gaagaaacgccgugaguac

SEQ ID NO: 2357202 - RNA, 19 nt, Artificial Sequence
  Description of Artificial Sequence: Synthetic oligonucleotide
accgaugauauuguaaaca

SEQ ID NO: 2357203 - RNA, 19 nt, Artificial Sequence
  Description of Artificial Sequence: Synthetic oligonucleotide
ugucagagugagacaaucu

SEQ ID NO: 2357204 - RNA, 19 nt, Artificial Sequence
  Description of Artificial Sequence: Synthetic oligonucleotide
aaaaucuucuccagcaauu

SEQ ID NO: 2357205 - RNA, 19 nt, Artificial Sequence
  Description of Artificial Sequence: Synthetic oligonucleotide
uccaccgaugauauuguaa

SEQ ID NO: 2357206 - RNA, 19 nt, Artificial Sequence
  Description of Artificial Sequence: Synthetic oligonucleotide
gagaagaagcacuguacga

SEQ ID NO: 2357207 - RNA, 19 nt, Artificial Sequence
  Description of Artificial Sequence: Synthetic oligonucleotide
uuaacagaugaaccaucuc

SEQ ID NO: 2357208 - RNA, 19 nt, Artificial Sequence
  Description of Artificial Sequence: Synthetic oligonucleotide
gucagagugagacaaucuc

SEQ ID NO: 2357209 - RNA, 19 nt, Artificial Sequence
  Description of Artificial Sequence: Synthetic oligonucleotide
cauugcagcaaucgccccg

SEQ ID NO: 2357210 - RNA, 19 nt, Artificial Sequence
  Description of Artificial Sequence: Synthetic oligonucleotide
gagccauacuuucuuaaca

SEQ ID NO: 2357211 - RNA, 19 nt, Artificial Sequence
  Description of Artificial Sequence: Synthetic oligonucleotide
aguaccuccguugaaggca

SEQ ID NO: 2357212 - RNA, 19 nt, Artificial Sequence
  Description of Artificial Sequence: Synthetic oligonucleotide
uacggcgagaaacgcaucu

SEQ ID NO: 2357213 - RNA, 19 nt, Artificial Sequence
  Description of Artificial Sequence: Synthetic oligonucleotide
gucauggccuuguuauugg

SEQ ID NO: 2357214 - RNA, 19 nt, Artificial Sequence
  Description of Artificial Sequence: Synthetic oligonucleotide
agggaagaaacgccgugag

SEQ ID NO: 2357215 - RNA, 19 nt, Artificial Sequence
  Description of Artificial Sequence: Synthetic oligonucleotide
agaagaagcacuguacgaa

SEQ ID NO: 2357216 - RNA, 19 nt, Artificial Sequence
  Description of Artificial Sequence: Synthetic oligonucleotide
gggaacaugcuccacauuc

SEQ ID NO: 2357217 - RNA, 19 nt, Artificial Sequence
  Description of Artificial Sequence: Synthetic oligonucleotide
guugucauggccuuguuau

SEQ ID NO: 2357218 - RNA, 19 nt, Artificial Sequence
  Description of Artificial Sequence: Synthetic oligonucleotide
uuuugaaaccaaccugguu

SEQ ID NO: 2357219 - RNA, 19 nt, Artificial Sequence
  Description of Artificial Sequence: Synthetic oligonucleotide
ugaaaaccacugcagccaa

SEQ ID NO: 2357220 - RNA, 19 nt, Artificial Sequence
  Description of Artificial Sequence: Synthetic oligonucleotide
augaguacuuuauauucuu

SEQ ID NO: 2357221 - RNA, 19 nt, Artificial Sequence
  Description of Artificial Sequence: Synthetic oligonucleotide
uagcauggcacuugccgag

SEQ ID NO: 2357222 - RNA, 19 nt, Artificial Sequence
  Description of Artificial Sequence: Synthetic oligonucleotide
agcacuguacgaaaaugag

SEQ ID NO: 2357223 - RNA, 19 nt, Artificial Sequence
  Description of Artificial Sequence: Synthetic oligonucleotide
acauuuggggcugucucgg

SEQ ID NO: 2357224 - RNA, 19 nt, Artificial Sequence
  Description of Artificial Sequence: Synthetic oligonucleotide
cacgaugcagauccugagg

SEQ ID NO: 2357225 - RNA, 19 nt, Artificial Sequence
  Description of Artificial Sequence: Synthetic oligonucleotide
gaagaagcacuguacgaaa

SEQ ID NO: 2357226 - RNA, 19 nt, Artificial Sequence
  Description of Artificial Sequence: Synthetic oligonucleotide
acaucuuucaccagccuca

SEQ ID NO: 2357227 - RNA, 19 nt, Artificial Sequence
  Description of Artificial Sequence: Synthetic oligonucleotide
auugcagcaaucgccccgg

SEQ ID NO: 2357228 - RNA, 19 nt, Artificial Sequence
  Description of Artificial Sequence: Synthetic oligonucleotide
cagcucuaauguauggccc

SEQ ID NO: 2357229 - RNA, 19 nt, Artificial Sequence
  Description of Artificial Sequence: Synthetic oligonucleotide
agcucuaauguauggccca

SEQ ID NO: 2357230 - RNA, 19 nt, Artificial Sequence
  Description of Artificial Sequence: Synthetic oligonucleotide
aucugaagcaacaauggaa

SEQ ID NO: 2357231 - RNA, 19 nt, Artificial Sequence
  Description of Artificial Sequence: Synthetic oligonucleotide
aaacgccgugaguacagga

SEQ ID NO: 2357232 - RNA, 19 nt, Artificial Sequence
  Description of Artificial Sequence: Synthetic oligonucleotide
caaacuugugccacagcuc

SEQ ID NO: 2357233 - RNA, 19 nt, Artificial Sequence
  Description of Artificial Sequence: Synthetic oligonucleotide
acgaaaaugaguacuuuau

SEQ ID NO: 2357234 - RNA, 19 nt, Artificial Sequence
  Description of Artificial Sequence: Synthetic oligonucleotide
uggccuuguuauuggaaug

SEQ ID NO: 2357235 - RNA, 19 nt, Artificial Sequence
  Description of Artificial Sequence: Synthetic oligonucleotide
augacuguuuugucuguca

SEQ ID NO: 2357236 - RNA, 19 nt, Artificial Sequence
  Description of Artificial Sequence: Synthetic oligonucleotide
aaagacaggggaacaugcu

SEQ ID NO: 2357237 - RNA, 19 nt, Artificial Sequence
  Description of Artificial Sequence: Synthetic oligonucleotide
guguacacgucccucucag

SEQ ID NO: 2357238 - RNA, 19 nt, Artificial Sequence
  Description of Artificial Sequence: Synthetic oligonucleotide
gaaaccaaccugguuguca

SEQ ID NO: 2357239 - RNA, 19 nt, Artificial Sequence
  Description of Artificial Sequence: Synthetic oligonucleotide
ugguugucaagcagaggcu

SEQ ID NO: 2357240 - RNA, 19 nt, Artificial Sequence
  Description of Artificial Sequence: Synthetic oligonucleotide
aggccccaugcccagcucc

SEQ ID NO: 2357241 - RNA, 19 nt, Artificial Sequence
  Description of Artificial Sequence: Synthetic oligonucleotide
auaaucuuugucagaguga

SEQ ID NO: 2357242 - RNA, 19 nt, Artificial Sequence
  Description of Artificial Sequence: Synthetic oligonucleotide
aaccugguugucaagcaga

SEQ ID NO: 2357243 - RNA, 19 nt, Artificial Sequence
  Description of Artificial Sequence: Synthetic oligonucleotide
gcagcaaucgccccgguug

SEQ ID NO: 2357244 - RNA, 19 nt, Artificial Sequence
  Description of Artificial Sequence: Synthetic oligonucleotide
cuccaugaaaaccacugca

SEQ ID NO: 2357245 - RNA, 19 nt, Artificial Sequence
  Description of Artificial Sequence: Synthetic oligonucleotide
uguuauuggaaugcuugua

SEQ ID NO: 2357246 - RNA, 19 nt, Artificial Sequence
  Description of Artificial Sequence: Synthetic oligonucleotide
aagaaacgccgugaguaca

SEQ ID NO: 2357247 - RNA, 19 nt, Artificial Sequence
  Description of Artificial Sequence: Synthetic oligonucleotide
cugauacccucuuugguca

SEQ ID NO: 2357248 - RNA, 19 nt, Artificial Sequence
  Description of Artificial Sequence: Synthetic oligonucleotide
ugaguacuuuauauucuuu

SEQ ID NO: 2357249 - RNA, 19 nt, Artificial Sequence
  Description of Artificial Sequence: Synthetic oligonucleotide
cucccugauacccucuuug

SEQ ID NO: 2357250 - RNA, 19 nt, Artificial Sequence
  Description of Artificial Sequence: Synthetic oligonucleotide
gcuuguacaucuuuaaucu

SEQ ID NO: 2357251 - RNA, 19 nt, Artificial Sequence
  Description of Artificial Sequence: Synthetic oligonucleotide
cacagcucuaauguauggc

SEQ ID NO: 2357252 - RNA, 19 nt, Artificial Sequence
  Description of Artificial Sequence: Synthetic oligonucleotide
acccucuuuggucacgaug

SEQ ID NO: 2357253 - RNA, 19 nt, Artificial Sequence
  Description of Artificial Sequence: Synthetic oligonucleotide
uccgcaggggaacagucuc

SEQ ID NO: 2357254 - RNA, 19 nt, Artificial Sequence
  Description of Artificial Sequence: Synthetic oligonucleotide
uacacgucccucucagcug

SEQ ID NO: 2357255 - RNA, 19 nt, Artificial Sequence
  Description of Artificial Sequence: Synthetic oligonucleotide
uucccgaaagcagccgugg

SEQ ID NO: 2357256 - RNA, 19 nt, Artificial Sequence
  Description of Artificial Sequence: Synthetic oligonucleotide
guagcauggcacuugccga

SEQ ID NO: 2357257 - RNA, 19 nt, Artificial Sequence
  Description of Artificial Sequence: Synthetic oligonucleotide
ccguugaaggcauacggcg

SEQ ID NO: 2357258 - RNA, 19 nt, Artificial Sequence
  Description of Artificial Sequence: Synthetic oligonucleotide
agccaaugacuguuuuguc

SEQ ID NO: 2357259 - RNA, 19 nt, Artificial Sequence
  Description of Artificial Sequence: Synthetic oligonucleotide
agccgugaggccccaugcc

SEQ ID NO: 2357260 - RNA, 19 nt, Artificial Sequence
  Description of Artificial Sequence: Synthetic oligonucleotide
uuuccgcaggggaacaguc

SEQ ID NO: 2357261 - RNA, 19 nt, Artificial Sequence
  Description of Artificial Sequence: Synthetic oligonucleotide
uugucagagugagacaauc

SEQ ID NO: 2357262 - RNA, 19 nt, Artificial Sequence
  Description of Artificial Sequence: Synthetic oligonucleotide
ucucggguaugaauugaaa

SEQ ID NO: 2357263 - RNA, 19 nt, Artificial Sequence
  Description of Artificial Sequence: Synthetic oligonucleotide
gugaguacaggaugguaga

SEQ ID NO: 2357264 - RNA, 19 nt, Artificial Sequence
  Description of Artificial Sequence: Synthetic oligonucleotide
cuuaacagaugaaccaucu

SEQ ID NO: 2357265 - RNA, 19 nt, Artificial Sequence
  Description of Artificial Sequence: Synthetic oligonucleotide
uucuccagcaauugccaau

SEQ ID NO: 2357266 - RNA, 19 nt, Artificial Sequence
  Description of Artificial Sequence: Synthetic oligonucleotide
agaaacgcaucugcacagg

SEQ ID NO: 2357267 - RNA, 19 nt, Artificial Sequence
  Description of Artificial Sequence: Synthetic oligonucleotide
cucggguaugaauugaaaa

SEQ ID NO: 2357268 - RNA, 19 nt, Artificial Sequence
  Description of Artificial Sequence: Synthetic oligonucleotide
aggcauacggcgagaaacg

SEQ ID NO: 2357269 - RNA, 19 nt, Artificial Sequence
  Description of Artificial Sequence: Synthetic oligonucleotide
aagcuauacacagcucccu

SEQ ID NO: 2357270 - RNA, 19 nt, Artificial Sequence
  Description of Artificial Sequence: Synthetic oligonucleotide
cucuguccaaagacagggg

SEQ ID NO: 2357271 - RNA, 19 nt, Artificial Sequence
  Description of Artificial Sequence: Synthetic oligonucleotide
agaaacgccgugaguacag

SEQ ID NO: 2357272 - RNA, 19 nt, Artificial Sequence
  Description of Artificial Sequence: Synthetic oligonucleotide
cacucaaccggguaucuga

SEQ ID NO: 2357273 - RNA, 19 nt, Artificial Sequence
  Description of Artificial Sequence: Synthetic oligonucleotide
ucgccaguguacacguccc

SEQ ID NO: 2357274 - RNA, 19 nt, Artificial Sequence
  Description of Artificial Sequence: Synthetic oligonucleotide
caaccugguugucaagcag

SEQ ID NO: 2357275 - RNA, 19 nt, Artificial Sequence
  Description of Artificial Sequence: Synthetic oligonucleotide
gauacccucuuuggucacg

SEQ ID NO: 2357276 - RNA, 19 nt, Artificial Sequence
  Description of Artificial Sequence: Synthetic oligonucleotide
ggguaugaauugaaaaccc

SEQ ID NO: 2357277 - RNA, 19 nt, Artificial Sequence
  Description of Artificial Sequence: Synthetic oligonucleotide
cgugaguacaggaugguag

SEQ ID NO: 2357278 - RNA, 19 nt, Artificial Sequence
  Description of Artificial Sequence: Synthetic oligonucleotide
acgccgugaguacaggaug

SEQ ID NO: 2357279 - RNA, 19 nt, Artificial Sequence
  Description of Artificial Sequence: Synthetic oligonucleotide
ggaagaaacgccgugagua

SEQ ID NO: 2357280 - RNA, 19 nt, Artificial Sequence
  Description of Artificial Sequence: Synthetic oligonucleotide
cagaugaaccaucucuuca

SEQ ID NO: 2357281 - RNA, 19 nt, Artificial Sequence
  Description of Artificial Sequence: Synthetic oligonucleotide
aaccaaccugguugucaag

SEQ ID NO: 2357282 - RNA, 19 nt, Artificial Sequence
  Description of Artificial Sequence: Synthetic oligonucleotide
aaacgcaucugcacaggga

SEQ ID NO: 2357283 - RNA, 19 nt, Artificial Sequence
  Description of Artificial Sequence: Synthetic oligonucleotide
ccaugaaaaccacugcagc

SEQ ID NO: 2357284 - RNA, 19 nt, Artificial Sequence
  Description of Artificial Sequence: Synthetic oligonucleotide
caucuuuaaucuugcuuca

SEQ ID NO: 2357285 - RNA, 19 nt, Artificial Sequence
  Description of Artificial Sequence: Synthetic oligonucleotide
auuuggggcugucucgggu

SEQ ID NO: 2357286 - RNA, 19 nt, Artificial Sequence
  Description of Artificial Sequence: Synthetic oligonucleotide
gcaauugccaauacaguac

SEQ ID NO: 2357287 - RNA, 19 nt, Artificial Sequence
  Description of Artificial Sequence: Synthetic oligonucleotide
augcuuguacaucuuuaau

SEQ ID NO: 2357288 - RNA, 19 nt, Artificial Sequence
  Description of Artificial Sequence: Synthetic oligonucleotide
gauccugagggcaucgcca

SEQ ID NO: 2357289 - RNA, 19 nt, Artificial Sequence
  Description of Artificial Sequence: Synthetic oligonucleotide
ucugucaguuuguaacauu

SEQ ID NO: 2357290 - RNA, 19 nt, Artificial Sequence
  Description of Artificial Sequence: Synthetic oligonucleotide
aaucuccaugaaaaccacu

SEQ ID NO: 2357291 - RNA, 19 nt, Artificial Sequence
  Description of Artificial Sequence: Synthetic oligonucleotide
ccugauacccucuuugguc

SEQ ID NO: 2357292 - RNA, 19 nt, Artificial Sequence
  Description of Artificial Sequence: Synthetic oligonucleotide
ucuccagcaauugccaaua

SEQ ID NO: 2357293 - RNA, 19 nt, Artificial Sequence
  Description of Artificial Sequence: Synthetic oligonucleotide
aauugccaauacaguaccu

SEQ ID NO: 2357294 - RNA, 19 nt, Artificial Sequence
  Description of Artificial Sequence: Synthetic oligonucleotide
aguguacacgucccucuca

SEQ ID NO: 2357295 - RNA, 19 nt, Artificial Sequence
  Description of Artificial Sequence: Synthetic oligonucleotide
guauggcccacaaucaguc

SEQ ID NO: 2357296 - RNA, 19 nt, Artificial Sequence
  Description of Artificial Sequence: Synthetic oligonucleotide
aagaagcacuguacgaaaa

SEQ ID NO: 2357297 - RNA, 19 nt, Artificial Sequence
  Description of Artificial Sequence: Synthetic oligonucleotide
accuccguugaaggcauac

SEQ ID NO: 2357298 - RNA, 19 nt, Artificial Sequence
  Description of Artificial Sequence: Synthetic oligonucleotide
uuuggggcugucucgggua

SEQ ID NO: 2357299 - RNA, 19 nt, Artificial Sequence
  Description of Artificial Sequence: Synthetic oligonucleotide
acugcagccaaugacuguu

SEQ ID NO: 2357300 - RNA, 19 nt, Artificial Sequence
  Description of Artificial Sequence: Synthetic oligonucleotide
gaaacgccgugaguacagg

SEQ ID NO: 2357301 - RNA, 19 nt, Artificial Sequence
  Description of Artificial Sequence: Synthetic oligonucleotide
uguacacgucccucucagc

SEQ ID NO: 2357302 - RNA, 19 nt, Artificial Sequence
  Description of Artificial Sequence: Synthetic oligonucleotide
aggggaacaugcuccacau

SEQ ID NO: 2357303 - RNA, 19 nt, Artificial Sequence
  Description of Artificial Sequence: Synthetic oligonucleotide
aacgccgugaguacaggau

SEQ ID NO: 2357304 - RNA, 19 nt, Artificial Sequence
  Description of Artificial Sequence: Synthetic oligonucleotide
auggcccacaaucagucuu

SEQ ID NO: 2357305 - RNA, 19 nt, Artificial Sequence
  Description of Artificial Sequence: Synthetic oligonucleotide
gagggcaucgccaguguac

SEQ ID NO: 2357306 - RNA, 19 nt, Artificial Sequence
  Description of Artificial Sequence: Synthetic oligonucleotide
augauauuguaaacauagu

SEQ ID NO: 2357307 - RNA, 19 nt, Artificial Sequence
  Description of Artificial Sequence: Synthetic oligonucleotide
cugucucggguaugaauug

SEQ ID NO: 2357308 - RNA, 19 nt, Artificial Sequence
  Description of Artificial Sequence: Synthetic oligonucleotide
ugcacagggacggcggagc

SEQ ID NO: 2357309 - RNA, 19 nt, Artificial Sequence
  Description of Artificial Sequence: Synthetic oligonucleotide
caguaccuccguugaaggc

SEQ ID NO: 2357310 - RNA, 19 nt, Artificial Sequence
  Description of Artificial Sequence: Synthetic oligonucleotide
ccacaaucagucuuuccgc

SEQ ID NO: 2357311 - RNA, 19 nt, Artificial Sequence
  Description of Artificial Sequence: Synthetic oligonucleotide
gagccgugaggccccaugc

SEQ ID NO: 2357312 - RNA, 19 nt, Artificial Sequence
  Description of Artificial Sequence: Synthetic oligonucleotide
gaaugcuuguacaucuuua

SEQ ID NO: 2357313 - RNA, 19 nt, Artificial Sequence
  Description of Artificial Sequence: Synthetic oligonucleotide
caccgaugauauuguaaac

SEQ ID NO: 2357314 - RNA, 19 nt, Artificial Sequence
  Description of Artificial Sequence: Synthetic oligonucleotide
agcauggcacuugccgagc

SEQ ID NO: 2357315 - RNA, 19 nt, Artificial Sequence
  Description of Artificial Sequence: Synthetic oligonucleotide
ugaaggagucucucuggua

SEQ ID NO: 2357316 - RNA, 19 nt, Artificial Sequence
  Description of Artificial Sequence: Synthetic oligonucleotide
ugucucggguaugaauuga

SEQ ID NO: 2357317 - RNA, 19 nt, Artificial Sequence
  Description of Artificial Sequence: Synthetic oligonucleotide
aggaugguagagagcauug

SEQ ID NO: 2357318 - RNA, 19 nt, Artificial Sequence
  Description of Artificial Sequence: Synthetic oligonucleotide
aaucgccccgguugucaug

SEQ ID NO: 2357319 - RNA, 19 nt, Artificial Sequence
  Description of Artificial Sequence: Synthetic oligonucleotide
gaaagcagccguggagagc

SEQ ID NO: 2357320 - RNA, 19 nt, Artificial Sequence
  Description of Artificial Sequence: Synthetic oligonucleotide
ucucagcugcagaaauaaa

SEQ ID NO: 2357321 - RNA, 19 nt, Artificial Sequence
  Description of Artificial Sequence: Synthetic oligonucleotide
guacacgucccucucagcu

SEQ ID NO: 2357322 - RNA, 19 nt, Artificial Sequence
  Description of Artificial Sequence: Synthetic oligonucleotide
ggcaucgccaguguacacg

SEQ ID NO: 2357323 - RNA, 19 nt, Artificial Sequence
  Description of Artificial Sequence: Synthetic oligonucleotide
uauggcccacaaucagucu

SEQ ID NO: 2357324 - RNA, 19 nt, Artificial Sequence
  Description of Artificial Sequence: Synthetic oligonucleotide
cucaaccggguaucugaag

SEQ ID NO: 2357325 - RNA, 19 nt, Artificial Sequence
  Description of Artificial Sequence: Synthetic oligonucleotide
cucuuuggucacgaugcag

SEQ ID NO: 2357326 - RNA, 19 nt, Artificial Sequence
  Description of Artificial Sequence: Synthetic oligonucleotide
agcuauacacagcucccuu

SEQ ID NO: 2357327 - RNA, 19 nt, Artificial Sequence
  Description of Artificial Sequence: Synthetic oligonucleotide
cuucacucaaccggguauc

SEQ ID NO: 2357328 - RNA, 19 nt, Artificial Sequence
  Description of Artificial Sequence: Synthetic oligonucleotide
gaugaaccaucucuucagu

SEQ ID NO: 2357329 - RNA, 19 nt, Artificial Sequence
  Description of Artificial Sequence: Synthetic oligonucleotide
aaccggguaucugaagcaa

SEQ ID NO: 2357330 - RNA, 19 nt, Artificial Sequence
  Description of Artificial Sequence: Synthetic oligonucleotide
cauuuggggcugucucggg

SEQ ID NO: 2357331 - RNA, 19 nt, Artificial Sequence
  Description of Artificial Sequence: Synthetic oligonucleotide
gaggcuguagcauggcacu

SEQ ID NO: 2357332 - RNA, 19 nt, Artificial Sequence
  Description of Artificial Sequence: Synthetic oligonucleotide
agagugagacaaucuccau

SEQ ID NO: 2357333 - RNA, 19 nt, Artificial Sequence
  Description of Artificial Sequence: Synthetic oligonucleotide
auggcucuguccaaagaca

SEQ ID NO: 2357334 - RNA, 19 nt, Artificial Sequence
  Description of Artificial Sequence: Synthetic oligonucleotide
cauacggcgagaaacgcau

SEQ ID NO: 2357335 - RNA, 19 nt, Artificial Sequence
  Description of Artificial Sequence: Synthetic oligonucleotide
cggguaugaauugaaaacc

SEQ ID NO: 2357336 - RNA, 19 nt, Artificial Sequence
  Description of Artificial Sequence: Synthetic oligonucleotide
accggguaucugaagcaac

SEQ ID NO: 2357337 - RNA, 19 nt, Artificial Sequence
  Description of Artificial Sequence: Synthetic oligonucleotide
agacaucuuucaccagccu

SEQ ID NO: 2357338 - RNA, 19 nt, Artificial Sequence
  Description of Artificial Sequence: Synthetic oligonucleotide
uggaaugcuuguacaucuu

SEQ ID NO: 2357339 - RNA, 19 nt, Artificial Sequence
  Description of Artificial Sequence: Synthetic oligonucleotide
uugcuucaauaaucuuugu

SEQ ID NO: 2357340 - RNA, 19 nt, Artificial Sequence
  Description of Artificial Sequence: Synthetic oligonucleotide
ucucucugguaggagccca

SEQ ID NO: 2357341 - RNA, 19 nt, Artificial Sequence
  Description of Artificial Sequence: Synthetic oligonucleotide
ggccuuguuauuggaaugc

SEQ ID NO: 2357342 - RNA, 19 nt, Artificial Sequence
  Description of Artificial Sequence: Synthetic oligonucleotide
accugguugucaagcagag

SEQ ID NO: 2357343 - RNA, 19 nt, Artificial Sequence
  Description of Artificial Sequence: Synthetic oligonucleotide
ugauacccucuuuggucac

SEQ ID NO: 2357344 - RNA, 19 nt, Artificial Sequence
  Description of Artificial Sequence: Synthetic oligonucleotide
cucucagcugcagaaauaa

SEQ ID NO: 2357345 - RNA, 19 nt, Artificial Sequence
  Description of Artificial Sequence: Synthetic oligonucleotide
uuuggucacgaugcagauc

SEQ ID NO: 2357346 - RNA, 19 nt, Artificial Sequence
  Description of Artificial Sequence: Synthetic oligonucleotide
cacuugccgagccuccagc

SEQ ID NO: 2357347 - RNA, 19 nt, Artificial Sequence
  Description of Artificial Sequence: Synthetic oligonucleotide
ucccgaaagcagccgugga

SEQ ID NO: 2357348 - RNA, 19 nt, Artificial Sequence
  Description of Artificial Sequence: Synthetic oligonucleotide
acggcggagccgugaggcc

SEQ ID NO: 2357349 - RNA, 19 nt, Artificial Sequence
  Description of Artificial Sequence: Synthetic oligonucleotide
gcuguagcauggcacuugc

SEQ ID NO: 2357350 - RNA, 19 nt, Artificial Sequence
  Description of Artificial Sequence: Synthetic oligonucleotide
gucacgaugcagauccuga

SEQ ID NO: 2357351 - RNA, 19 nt, Artificial Sequence
  Description of Artificial Sequence: Synthetic oligonucleotide
aaucuuugucagagugaga

SEQ ID NO: 2357352 - RNA, 19 nt, Artificial Sequence
  Description of Artificial Sequence: Synthetic oligonucleotide
caaccggguaucugaagca

SEQ ID NO: 2357353 - RNA, 19 nt, Artificial Sequence
  Description of Artificial Sequence: Synthetic oligonucleotide
uguaacauuuggggcuguc

SEQ ID NO: 2357354 - RNA, 19 nt, Artificial Sequence
  Description of Artificial Sequence: Synthetic oligonucleotide
uggcacuugccgagccucc

SEQ ID NO: 2357355 - RNA, 19 nt, Artificial Sequence
  Description of Artificial Sequence: Synthetic oligonucleotide
gcgagaaacgcaucugcac

SEQ ID NO: 2357356 - RNA, 19 nt, Artificial Sequence
  Description of Artificial Sequence: Synthetic oligonucleotide
agucacaaaggaagaaauu

SEQ ID NO: 2357357 - RNA, 19 nt, Artificial Sequence
  Description of Artificial Sequence: Synthetic oligonucleotide
accaucucuucagucacaa

SEQ ID NO: 2357358 - RNA, 19 nt, Artificial Sequence
  Description of Artificial Sequence: Synthetic oligonucleotide
ccaccgaugauauuguaaa

SEQ ID NO: 2357359 - RNA, 19 nt, Artificial Sequence
  Description of Artificial Sequence: Synthetic oligonucleotide
guaugaauugaaaacccuu

SEQ ID NO: 2357360 - RNA, 19 nt, Artificial Sequence
  Description of Artificial Sequence: Synthetic oligonucleotide
agggcaucgccaguguaca

SEQ ID NO: 2357361 - RNA, 19 nt, Artificial Sequence
  Description of Artificial Sequence: Synthetic oligonucleotide
ugagggcaucgccagugua

SEQ ID NO: 2357362 - RNA, 19 nt, Artificial Sequence
  Description of Artificial Sequence: Synthetic oligonucleotide
uugaaggcauacggcgaga

SEQ ID NO: 2357363 - RNA, 19 nt, Artificial Sequence
  Description of Artificial Sequence: Synthetic oligonucleotide
aucuugcuucaauaaucuu

SEQ ID NO: 2357364 - RNA, 19 nt, Artificial Sequence
  Description of Artificial Sequence: Synthetic oligonucleotide
aguccaccgaugauauugu

SEQ ID NO: 2357365 - RNA, 19 nt, Artificial Sequence
  Description of Artificial Sequence: Synthetic oligonucleotide
auacccucuuuggucacga

SEQ ID NO: 2357366 - RNA, 19 nt, Artificial Sequence
  Description of Artificial Sequence: Synthetic oligonucleotide
uugucauggccuuguuauu

SEQ ID NO: 2357367 - RNA, 19 nt, Artificial Sequence
  Description of Artificial Sequence: Synthetic oligonucleotide
ccacagcucuaauguaugg

SEQ ID NO: 2357368 - RNA, 19 nt, Artificial Sequence
  Description of Artificial Sequence: Synthetic oligonucleotide
uuggggcugucucggguau

SEQ ID NO: 2357369 - RNA, 19 nt, Artificial Sequence
  Description of Artificial Sequence: Synthetic oligonucleotide
guacaggaugguagagagc

SEQ ID NO: 2357370 - RNA, 19 nt, Artificial Sequence
  Description of Artificial Sequence: Synthetic oligonucleotide
ggaugguagagagcauugc

SEQ ID NO: 2357371 - RNA, 19 nt, Artificial Sequence
  Description of Artificial Sequence: Synthetic oligonucleotide
guucccgaaagcagccgug

SEQ ID NO: 2357372 - RNA, 19 nt, Artificial Sequence
  Description of Artificial Sequence: Synthetic oligonucleotide
acggcgagaaacgcaucug

SEQ ID NO: 2357373 - RNA, 19 nt, Artificial Sequence
  Description of Artificial Sequence: Synthetic oligonucleotide
ugcagcaaucgccccgguu

SEQ ID NO: 2357374 - RNA, 19 nt, Artificial Sequence
  Description of Artificial Sequence: Synthetic oligonucleotide
cucgggguucccgaaagca

SEQ ID NO: 2357375 - RNA, 19 nt, Artificial Sequence
  Description of Artificial Sequence: Synthetic oligonucleotide
cagucuccucccugauacc

SEQ ID NO: 2357376 - RNA, 19 nt, Artificial Sequence
  Description of Artificial Sequence: Synthetic oligonucleotide
gccgugaggccccaugccc

SEQ ID NO: 2357377 - RNA, 19 nt, Artificial Sequence
  Description of Artificial Sequence: Synthetic oligonucleotide
cccgaaagcagccguggag

SEQ ID NO: 2357378 - RNA, 19 nt, Artificial Sequence
  Description of Artificial Sequence: Synthetic oligonucleotide
ggcucuguccaaagacagg

SEQ ID NO: 2357379 - RNA, 19 nt, Artificial Sequence
  Description of Artificial Sequence: Synthetic oligonucleotide
gguaugaauugaaaacccu

SEQ ID NO: 2357380 - RNA, 19 nt, Artificial Sequence
  Description of Artificial Sequence: Synthetic oligonucleotide
ugaaaccaaccugguuguc

SEQ ID NO: 2357381 - RNA, 19 nt, Artificial Sequence
  Description of Artificial Sequence: Synthetic oligonucleotide
cacagggacggcggagccg

SEQ ID NO: 2357382 - RNA, 19 nt, Artificial Sequence
  Description of Artificial Sequence: Synthetic oligonucleotide
uccugagggcaucgccagu

SEQ ID NO: 2357383 - RNA, 19 nt, Artificial Sequence
  Description of Artificial Sequence: Synthetic oligonucleotide
cagcaauugccaauacagu

SEQ ID NO: 2357384 - RNA, 19 nt, Artificial Sequence
  Description of Artificial Sequence: Synthetic oligonucleotide
cuccagcaauugccaauac

SEQ ID NO: 2357385 - RNA, 19 nt, Artificial Sequence
  Description of Artificial Sequence: Synthetic oligonucleotide
ggucacgaugcagauccug

SEQ ID NO: 2357386 - RNA, 19 nt, Artificial Sequence
  Description of Artificial Sequence: Synthetic oligonucleotide
gccacagcucuaauguaug

SEQ ID NO: 2357387 - RNA, 19 nt, Artificial Sequence
  Description of Artificial Sequence: Synthetic oligonucleotide
auacggcgagaaacgcauc

SEQ ID NO: 2357388 - RNA, 19 nt, Artificial Sequence
  Description of Artificial Sequence: Synthetic oligonucleotide
ggcauacggcgagaaacgc

SEQ ID NO: 2357389 - RNA, 19 nt, Artificial Sequence
  Description of Artificial Sequence: Synthetic oligonucleotide
cgagaaacgcaucugcaca

SEQ ID NO: 2357390 - RNA, 19 nt, Artificial Sequence
  Description of Artificial Sequence: Synthetic oligonucleotide
guaagggaagaaacgccgu

SEQ ID NO: 2357391 - RNA, 19 nt, Artificial Sequence
  Description of Artificial Sequence: Synthetic oligonucleotide
ggagcccacuggaucaaag

SEQ ID NO: 2357392 - RNA, 19 nt, Artificial Sequence
  Description of Artificial Sequence: Synthetic oligonucleotide
gcagauccugagggcaucg

SEQ ID NO: 2357393 - RNA, 19 nt, Artificial Sequence
  Description of Artificial Sequence: Synthetic oligonucleotide
agcaaucgccccgguuguc

SEQ ID NO: 2357394 - RNA, 19 nt, Artificial Sequence
  Description of Artificial Sequence: Synthetic oligonucleotide
cgggguucccgaaagcagc

SEQ ID NO: 2357395 - RNA, 19 nt, Artificial Sequence
  Description of Artificial Sequence: Synthetic oligonucleotide
cgccgugaguacaggaugg

SEQ ID NO: 2357396 - RNA, 19 nt, Artificial Sequence
  Description of Artificial Sequence: Synthetic oligonucleotide
acucaaccggguaucugaa

SEQ ID NO: 2357397 - RNA, 19 nt, Artificial Sequence
  Description of Artificial Sequence: Synthetic oligonucleotide
cuuagagaagaagcacugu

SEQ ID NO: 2357398 - RNA, 19 nt, Artificial Sequence
  Description of Artificial Sequence: Synthetic oligonucleotide
uccagccuugaaggagucu

SEQ ID NO: 2357399 - RNA, 19 nt, Artificial Sequence
  Description of Artificial Sequence: Synthetic oligonucleotide
ucccucucagcugcagaaa

SEQ ID NO: 2357400 - RNA, 19 nt, Artificial Sequence
  Description of Artificial Sequence: Synthetic oligonucleotide
guacaucuuuaaucuugcu

SEQ ID NO: 2357401 - RNA, 19 nt, Artificial Sequence
  Description of Artificial Sequence: Synthetic oligonucleotide
uggucacgaugcagauccu

SEQ ID NO: 2357402 - RNA, 19 nt, Artificial Sequence
  Description of Artificial Sequence: Synthetic oligonucleotide
cuucaucaaguccaccgau

SEQ ID NO: 2357403 - RNA, 19 nt, Artificial Sequence
  Description of Artificial Sequence: Synthetic oligonucleotide
cagaggcuguagcauggca

SEQ ID NO: 2357404 - RNA, 19 nt, Artificial Sequence
  Description of Artificial Sequence: Synthetic oligonucleotide
ggaagaaauucuucccaau

SEQ ID NO: 2357405 - RNA, 19 nt, Artificial Sequence
  Description of Artificial Sequence: Synthetic oligonucleotide
gucucggguaugaauugaa

SEQ ID NO: 2357406 - RNA, 19 nt, Artificial Sequence
  Description of Artificial Sequence: Synthetic oligonucleotide
gguugucauggccuuguua

SEQ ID NO: 2357407 - RNA, 19 nt, Artificial Sequence
  Description of Artificial Sequence: Synthetic oligonucleotide
ggcgagaaacgcaucugca

SEQ ID NO: 2357408 - RNA, 19 nt, Artificial Sequence
  Description of Artificial Sequence: Synthetic oligonucleotide
ccggguaucugaagcaaca

SEQ ID NO: 2357409 - RNA, 19 nt, Artificial Sequence
  Description of Artificial Sequence: Synthetic oligonucleotide
ccugagggcaucgccagug

SEQ ID NO: 2357410 - RNA, 19 nt, Artificial Sequence
  Description of Artificial Sequence: Synthetic oligonucleotide
gggacggcggagccgugag

SEQ ID NO: 2357411 - RNA, 19 nt, Artificial Sequence
  Description of Artificial Sequence: Synthetic oligonucleotide
cucuaauguauggcccaca

SEQ ID NO: 2357412 - RNA, 19 nt, Artificial Sequence
  Description of Artificial Sequence: Synthetic oligonucleotide
ccgaugauauuguaaacau

SEQ ID NO: 2357413 - RNA, 19 nt, Artificial Sequence
  Description of Artificial Sequence: Synthetic oligonucleotide
gggguucccgaaagcagcc

SEQ ID NO: 2357414 - RNA, 19 nt, Artificial Sequence
  Description of Artificial Sequence: Synthetic oligonucleotide
ccuccguugaaggcauacg

SEQ ID NO: 2357415 - RNA, 19 nt, Artificial Sequence
  Description of Artificial Sequence: Synthetic oligonucleotide
aacuugugccacagcucua

SEQ ID NO: 2357416 - RNA, 19 nt, Artificial Sequence
  Description of Artificial Sequence: Synthetic oligonucleotide
cgaaagcagccguggagag

SEQ ID NO: 2357417 - RNA, 19 nt, Artificial Sequence
  Description of Artificial Sequence: Synthetic oligonucleotide
cuaauguauggcccacaau

SEQ ID NO: 2357418 - RNA, 19 nt, Artificial Sequence
  Description of Artificial Sequence: Synthetic oligonucleotide
gccaauacaguaccuccgu

SEQ ID NO: 2357419 - RNA, 19 nt, Artificial Sequence
  Description of Artificial Sequence: Synthetic oligonucleotide
cggcgagaaacgcaucugc

SEQ ID NO: 2357420 - RNA, 19 nt, Artificial Sequence
  Description of Artificial Sequence: Synthetic oligonucleotide
gcauacggcgagaaacgca

SEQ ID NO: 2357421 - RNA, 19 nt, Artificial Sequence
  Description of Artificial Sequence: Synthetic oligonucleotide
gcucuaauguauggcccac

SEQ ID NO: 2357422 - RNA, 19 nt, Artificial Sequence
  Description of Artificial Sequence: Synthetic oligonucleotide
ggguaucugaagcaacaau

SEQ ID NO: 2357423 - RNA, 19 nt, Artificial Sequence
  Description of Artificial Sequence: Synthetic oligonucleotide
ggguucccgaaagcagccg

SEQ ID NO: 2357424 - RNA, 19 nt, Artificial Sequence
  Description of Artificial Sequence: Synthetic oligonucleotide
ggaaugcuuguacaucuuu

SEQ ID NO: 2357425 - RNA, 19 nt, Artificial Sequence
  Description of Artificial Sequence: Synthetic oligonucleotide
caucgccaguguacacguc

SEQ ID NO: 2357426 - RNA, 19 nt, Artificial Sequence
  Description of Artificial Sequence: Synthetic oligonucleotide
ccgaaagcagccguggaga

SEQ ID NO: 2357427 - RNA, 19 nt, Artificial Sequence
  Description of Artificial Sequence: Synthetic oligonucleotide
gugccacagcucuaaugua

SEQ ID NO: 2357428 - RNA, 19 nt, Artificial Sequence
  Description of Artificial Sequence: Synthetic oligonucleotide
uacccucuuuggucacgau

SEQ ID NO: 2357429 - RNA, 19 nt, Artificial Sequence
  Description of Artificial Sequence: Synthetic oligonucleotide
acgucccucucagcugcag

SEQ ID NO: 2357430 - RNA, 19 nt, Artificial Sequence
  Description of Artificial Sequence: Synthetic oligonucleotide
uggggcugucucggguaug

SEQ ID NO: 2357431 - RNA, 19 nt, Artificial Sequence
  Description of Artificial Sequence: Synthetic oligonucleotide
gguucccgaaagcagccgu

SEQ ID NO: 2357432 - RNA, 19 nt, Artificial Sequence
  Description of Artificial Sequence: Synthetic oligonucleotide
guacgaaaaugaguacuuu

SEQ ID NO: 2357433 - RNA, 19 nt, Artificial Sequence
  Description of Artificial Sequence: Synthetic oligonucleotide
cgaaaaugaguacuuuaua

SEQ ID NO: 2357434 - RNA, 19 nt, Artificial Sequence
  Description of Artificial Sequence: Synthetic oligonucleotide
ccugguugucaagcagagg

SEQ ID NO: 2357435 - RNA, 19 nt, Artificial Sequence
  Description of Artificial Sequence: Synthetic oligonucleotide
gcaucgccaguguacacgu

SEQ ID NO: 2357436 - RNA, 19 nt, Artificial Sequence
  Description of Artificial Sequence: Synthetic oligonucleotide
gcacuguacgaaaaugagu

SEQ ID NO: 2357437 - RNA, 19 nt, Artificial Sequence
  Description of Artificial Sequence: Synthetic oligonucleotide
cguugaaggcauacggcga

SEQ ID NO: 2357438 - RNA, 19 nt, Artificial Sequence
  Description of Artificial Sequence: Synthetic oligonucleotide
gcaaucgccccgguuguca

SEQ ID NO: 2357439 - RNA, 19 nt, Artificial Sequence
  Description of Artificial Sequence: Synthetic oligonucleotide
ccgcaggggaacagucucc

SEQ ID NO: 2357440 - RNA, 19 nt, Artificial Sequence
  Description of Artificial Sequence: Synthetic oligonucleotide
gccaguguacacgucccuc

SEQ ID NO: 2357441 - RNA, 19 nt, Artificial Sequence
  Description of Artificial Sequence: Synthetic oligonucleotide
gucugucaguuuguaacau

SEQ ID NO: 2357442 - RNA, 19 nt, Artificial Sequence
  Description of Artificial Sequence: Synthetic oligonucleotide
cuuuccgcaggggaacagu

SEQ ID NO: 2357443 - RNA, 19 nt, Artificial Sequence
  Description of Artificial Sequence: Synthetic oligonucleotide
guccaccgaugauauugua

SEQ ID NO: 2357444 - RNA, 19 nt, Artificial Sequence
  Description of Artificial Sequence: Synthetic oligonucleotide
gggaagaaacgccgugagu

SEQ ID NO: 2357445 - RNA, 19 nt, Artificial Sequence
  Description of Artificial Sequence: Synthetic oligonucleotide
acccuucacucaaccgggu

SEQ ID NO: 2357446 - RNA, 19 nt, Artificial Sequence
  Description of Artificial Sequence: Synthetic oligonucleotide
guaccuccguugaaggcau

SEQ ID NO: 2357447 - RNA, 19 nt, Artificial Sequence
  Description of Artificial Sequence: Synthetic oligonucleotide
cgaugauauuguaaacaua

SEQ ID NO: 2357448 - RNA, 19 nt, Artificial Sequence
  Description of Artificial Sequence: Synthetic oligonucleotide
cagcaaucgccccgguugu

SEQ ID NO: 2357449 - RNA, 19 nt, Artificial Sequence
  Description of Artificial Sequence: Synthetic oligonucleotide
uaccuccguugaaggcaua

SEQ ID NO: 2357450 - RNA, 19 nt, Artificial Sequence
  Description of Artificial Sequence: Synthetic oligonucleotide
ucgccccgguugucauggc

SEQ ID NO: 2357451 - RNA, 19 nt, Artificial Sequence
  Description of Artificial Sequence: Synthetic oligonucleotide
cgcucgggguucccgaaag

SEQ ID NO: 2357452 - RNA, 19 nt, Artificial Sequence
  Description of Artificial Sequence: Synthetic oligonucleotide
ggcggagccgugaggcccc

SEQ ID NO: 2357453 - RNA, 19 nt, Artificial Sequence
  Description of Artificial Sequence: Synthetic oligonucleotide
ccccaugcccagcucccgc

SEQ ID NO: 2357454 - RNA, 19 nt, Artificial Sequence
  Description of Artificial Sequence: Synthetic oligonucleotide
aggagcccacuggaucaaa

SEQ ID NO: 2357455 - RNA, 19 nt, Artificial Sequence
  Description of Artificial Sequence: Synthetic oligonucleotide
gggcaucgccaguguacac

SEQ ID NO: 2357456 - RNA, 19 nt, Artificial Sequence
  Description of Artificial Sequence: Synthetic oligonucleotide
ccuucacucaaccggguau

SEQ ID NO: 2357457 - RNA, 19 nt, Artificial Sequence
  Description of Artificial Sequence: Synthetic oligonucleotide
ccgugaggccccaugccca

SEQ ID NO: 2357458 - RNA, 19 nt, Artificial Sequence
  Description of Artificial Sequence: Synthetic oligonucleotide
caaucgccccgguugucau

SEQ ID NO: 2357459 - RNA, 19 nt, Artificial Sequence
  Description of Artificial Sequence: Synthetic oligonucleotide
cugagggcaucgccagugu

SEQ ID NO: 2357460 - RNA, 19 nt, Artificial Sequence
  Description of Artificial Sequence: Synthetic oligonucleotide
ccucuuuggucacgaugca

SEQ ID NO: 2357461 - RNA, 19 nt, Artificial Sequence
  Description of Artificial Sequence: Synthetic oligonucleotide
gccuuguuauuggaaugcu

SEQ ID NO: 2357462 - RNA, 19 nt, Artificial Sequence
  Description of Artificial Sequence: Synthetic oligonucleotide
ccuuguuauuggaaugcuu

SEQ ID NO: 2357463 - RNA, 19 nt, Artificial Sequence
  Description of Artificial Sequence: Synthetic oligonucleotide
gccccaugcccagcucccg

SEQ ID NO: 2357464 - RNA, 19 nt, Artificial Sequence
  Description of Artificial Sequence: Synthetic oligonucleotide
aagcagccguggagagcau

SEQ ID NO: 2357465 - RNA, 19 nt, Artificial Sequence
  Description of Artificial Sequence: Synthetic oligonucleotide
cccugauacccucuuuggu

SEQ ID NO: 2357466 - RNA, 19 nt, Artificial Sequence
  Description of Artificial Sequence: Synthetic oligonucleotide
cggcggagccgugaggccc

SEQ ID NO: 2357467 - RNA, 19 nt, Artificial Sequence
  Description of Artificial Sequence: Synthetic oligonucleotide
cccucucagcugcagaaau

SEQ ID NO: 2357468 - RNA, 19 nt, Artificial Sequence
  Description of Artificial Sequence: Synthetic oligonucleotide
cccuucacucaaccgggua

SEQ ID NO: 2357469 - RNA, 19 nt, Artificial Sequence
  Description of Artificial Sequence: Synthetic oligonucleotide
caaguccaccgaugauauu

SEQ ID NO: 2357470 - RNA, 19 nt, Artificial Sequence
  Description of Artificial Sequence: Synthetic oligonucleotide
ccaauacaguaccuccguu

SEQ ID NO: 2357471 - RNA, 19 nt, Artificial Sequence
  Description of Artificial Sequence: Synthetic oligonucleotide
cccgguugucauggccuug

SEQ ID NO: 2357472 - RNA, 19 nt, Artificial Sequence
  Description of Artificial Sequence: Synthetic oligonucleotide
gccgugaguacaggauggu

SEQ ID NO: 2357473 - RNA, 19 nt, Artificial Sequence
  Description of Artificial Sequence: Synthetic oligonucleotide
ccgugaguacaggauggua

SEQ ID NO: 2357474 - RNA, 19 nt, Artificial Sequence
  Description of Artificial Sequence: Synthetic oligonucleotide
cggguaucugaagcaacaa

SEQ ID NO: 2357475 - RNA, 19 nt, Artificial Sequence
  Description of Artificial Sequence: Synthetic oligonucleotide
ggggaacaugcuccacauu

SEQ ID NO: 2357476 - RNA, 19 nt, Artificial Sequence
  Description of Artificial Sequence: Synthetic oligonucleotide
ccgguugucauggccuugu

SEQ ID NO: 2357477 - RNA, 19 nt, Artificial Sequence
  Description of Artificial Sequence: Synthetic oligonucleotide
ccacuggaucaaagcuaua

SEQ ID NO: 2357478 - RNA, 19 nt, Artificial Sequence
  Description of Artificial Sequence: Synthetic oligonucleotide
cccgcucgggguucccgaa

SEQ ID NO: 2357479 - RNA, 19 nt, Artificial Sequence
  Description of Artificial Sequence: Synthetic oligonucleotide
ccgcucgggguucccgaaa

SEQ ID NO: 2357480 - RNA, 19 nt, Artificial Sequence
  Description of Artificial Sequence: Synthetic oligonucleotide
ccgagccuccagccuugaa

SEQ ID NO: 2357481 - RNA, 19 nt, Artificial Sequence
  Description of Artificial Sequence: Synthetic oligonucleotide
ccucccugauacccucuuu

SEQ ID NO: 2357482 - RNA, 19 nt, Artificial Sequence
  Description of Artificial Sequence: Synthetic oligonucleotide
gcggagccgugaggcccca

SEQ ID NO: 2357483 - RNA, 19 nt, Artificial Sequence
  Description of Artificial Sequence: Synthetic oligonucleotide
cgguugucauggccuuguu

SEQ ID NO: 2357484 - RNA, 19 nt, Artificial Sequence
  Description of Artificial Sequence: Synthetic oligonucleotide
cggagccgugaggccccau

SEQ ID NO: 2357485 - RNA, 19 nt, Artificial Sequence
  Description of Artificial Sequence: Synthetic oligonucleotide
ugcaaguuaaaccagacag

SEQ ID NO: 2357486 - RNA, 19 nt, Artificial Sequence
  Description of Artificial Sequence: Synthetic oligonucleotide
aauaugucaaucugggaac

SEQ ID NO: 2357487 - RNA, 19 nt, Artificial Sequence
  Description of Artificial Sequence: Synthetic oligonucleotide
auuuauaaguuguggaagc

SEQ ID NO: 2357488 - RNA, 19 nt, Artificial Sequence
  Description of Artificial Sequence: Synthetic oligonucleotide
uguaauuaguuuuccaggg

SEQ ID NO: 2357489 - RNA, 19 nt, Artificial Sequence
  Description of Artificial Sequence: Synthetic oligonucleotide
aaaauagacauccucugug

SEQ ID NO: 2357490 - RNA, 19 nt, Artificial Sequence
  Description of Artificial Sequence: Synthetic oligonucleotide
aguuaaaccagacagccag

SEQ ID NO: 2357491 - RNA, 19 nt, Artificial Sequence
  Description of Artificial Sequence: Synthetic oligonucleotide
ucuguaauuaguuuuccag

SEQ ID NO: 2357492 - RNA, 19 nt, Artificial Sequence
  Description of Artificial Sequence: Synthetic oligonucleotide
ugcaaauuggagcaaaugc

SEQ ID NO: 2357493 - RNA, 19 nt, Artificial Sequence
  Description of Artificial Sequence: Synthetic oligonucleotide
aucauaacccucuuguagc

SEQ ID NO: 2357494 - RNA, 19 nt, Artificial Sequence
  Description of Artificial Sequence: Synthetic oligonucleotide
ugaucaaucaauaugucaa

SEQ ID NO: 2357495 - RNA, 19 nt, Artificial Sequence
  Description of Artificial Sequence: Synthetic oligonucleotide
ucacguaaaacccagcacc

SEQ ID NO: 2357496 - RNA, 19 nt, Artificial Sequence
  Description of Artificial Sequence: Synthetic oligonucleotide
aacacugucauguucaaaa

SEQ ID NO: 2357497 - RNA, 19 nt, Artificial Sequence
  Description of Artificial Sequence: Synthetic oligonucleotide
guaacugcccauuugaaag

SEQ ID NO: 2357498 - RNA, 19 nt, Artificial Sequence
  Description of Artificial Sequence: Synthetic oligonucleotide
augaaauucuguucugugc

SEQ ID NO: 2357499 - RNA, 19 nt, Artificial Sequence
  Description of Artificial Sequence: Synthetic oligonucleotide
aauuggagcaaaugcugac

SEQ ID NO: 2357500 - RNA, 19 nt, Artificial Sequence
  Description of Artificial Sequence: Synthetic oligonucleotide
auuugaaagaaacucguca

SEQ ID NO: 2357501 - RNA, 19 nt, Artificial Sequence
  Description of Artificial Sequence: Synthetic oligonucleotide
uaagaauacauucuguaau

SEQ ID NO: 2357502 - RNA, 19 nt, Artificial Sequence
  Description of Artificial Sequence: Synthetic oligonucleotide
uuuacuuuggucugguccc

SEQ ID NO: 2357503 - RNA, 19 nt, Artificial Sequence
  Description of Artificial Sequence: Synthetic oligonucleotide
uucaaagcacaaaucagag

SEQ ID NO: 2357504 - RNA, 19 nt, Artificial Sequence
  Description of Artificial Sequence: Synthetic oligonucleotide
gaucauaacccucuuguag

SEQ ID NO: 2357505 - RNA, 19 nt, Artificial Sequence
  Description of Artificial Sequence: Synthetic oligonucleotide
uuacauuucagcucaacac

SEQ ID NO: 2357506 - RNA, 19 nt, Artificial Sequence
  Description of Artificial Sequence: Synthetic oligonucleotide
aaucaauaugucaaucugg

SEQ ID NO: 2357507 - RNA, 19 nt, Artificial Sequence
  Description of Artificial Sequence: Synthetic oligonucleotide
uccuugaucaaucaauaug

SEQ ID NO: 2357508 - RNA, 19 nt, Artificial Sequence
  Description of Artificial Sequence: Synthetic oligonucleotide
aauagacauccucuguggg

SEQ ID NO: 2357509 - RNA, 19 nt, Artificial Sequence
  Description of Artificial Sequence: Synthetic oligonucleotide
uuaucagggaguaacugcc

SEQ ID NO: 2357510 - RNA, 19 nt, Artificial Sequence
  Description of Artificial Sequence: Synthetic oligonucleotide
guuacguaagaauacauuc

SEQ ID NO: 2357511 - RNA, 19 nt, Artificial Sequence
  Description of Artificial Sequence: Synthetic oligonucleotide
ccaaauauccacuaaaagc

SEQ ID NO: 2357512 - RNA, 19 nt, Artificial Sequence
  Description of Artificial Sequence: Synthetic oligonucleotide
uacguaagaauacauucug

SEQ ID NO: 2357513 - RNA, 19 nt, Artificial Sequence
  Description of Artificial Sequence: Synthetic oligonucleotide
aaacucgucaucuuuuccu

SEQ ID NO: 2357514 - RNA, 19 nt, Artificial Sequence
  Description of Artificial Sequence: Synthetic oligonucleotide
ugugcaggcagcuaugaag

SEQ ID NO: 2357515 - RNA, 19 nt, Artificial Sequence
  Description of Artificial Sequence: Synthetic oligonucleotide
cuggaaaucugcuucaaag

SEQ ID NO: 2357516 - RNA, 19 nt, Artificial Sequence
  Description of Artificial Sequence: Synthetic oligonucleotide
augaucauaacccucuugu

SEQ ID NO: 2357517 - RNA, 19 nt, Artificial Sequence
  Description of Artificial Sequence: Synthetic oligonucleotide
gaagguugcaaugaaguag

SEQ ID NO: 2357518 - RNA, 19 nt, Artificial Sequence
  Description of Artificial Sequence: Synthetic oligonucleotide
gaugucacgagagagguug

SEQ ID NO: 2357519 - RNA, 19 nt, Artificial Sequence
  Description of Artificial Sequence: Synthetic oligonucleotide
uuacguaagaauacauucu

SEQ ID NO: 2357520 - RNA, 19 nt, Artificial Sequence
  Description of Artificial Sequence: Synthetic oligonucleotide
caugcauucagguacuuug

SEQ ID NO: 2357521 - RNA, 19 nt, Artificial Sequence
  Description of Artificial Sequence: Synthetic oligonucleotide
gaugagauucuucugucug

SEQ ID NO: 2357522 - RNA, 19 nt, Artificial Sequence
  Description of Artificial Sequence: Synthetic oligonucleotide
uuugaaagaaacucgucau

SEQ ID NO: 2357523 - RNA, 19 nt, Artificial Sequence
  Description of Artificial Sequence: Synthetic oligonucleotide
caaauauccacuaaaagcu

SEQ ID NO: 2357524 - RNA, 19 nt, Artificial Sequence
  Description of Artificial Sequence: Synthetic oligonucleotide
caaguuaaaccagacagcc

SEQ ID NO: 2357525 - RNA, 19 nt, Artificial Sequence
  Description of Artificial Sequence: Synthetic oligonucleotide
aaugaaguaguagcuauga

SEQ ID NO: 2357526 - RNA, 19 nt, Artificial Sequence
  Description of Artificial Sequence: Synthetic oligonucleotide
uugaucaaucaauauguca

SEQ ID NO: 2357527 - RNA, 19 nt, Artificial Sequence
  Description of Artificial Sequence: Synthetic oligonucleotide
aucaauaugucaaucuggg

SEQ ID NO: 2357528 - RNA, 19 nt, Artificial Sequence
  Description of Artificial Sequence: Synthetic oligonucleotide
uaugaaauucuguucugug

SEQ ID NO: 2357529 - RNA, 19 nt, Artificial Sequence
  Description of Artificial Sequence: Synthetic oligonucleotide
uucaguggcauucacguaa

SEQ ID NO: 2357530 - RNA, 19 nt, Artificial Sequence
  Description of Artificial Sequence: Synthetic oligonucleotide
uuggauaugaaauucuguu

SEQ ID NO: 2357531 - RNA, 19 nt, Artificial Sequence
  Description of Artificial Sequence: Synthetic oligonucleotide
uggaaaucugcuucaaagc

SEQ ID NO: 2357532 - RNA, 19 nt, Artificial Sequence
  Description of Artificial Sequence: Synthetic oligonucleotide
uaggaugucacgagagagg

SEQ ID NO: 2357533 - RNA, 19 nt, Artificial Sequence
  Description of Artificial Sequence: Synthetic oligonucleotide
uaauuaguuuuccagggau

SEQ ID NO: 2357534 - RNA, 19 nt, Artificial Sequence
  Description of Artificial Sequence: Synthetic oligonucleotide
uggcauucacguaaaaccc

SEQ ID NO: 2357535 - RNA, 19 nt, Artificial Sequence
  Description of Artificial Sequence: Synthetic oligonucleotide
ugaaagaaacucgucaucu

SEQ ID NO: 2357536 - RNA, 19 nt, Artificial Sequence
  Description of Artificial Sequence: Synthetic oligonucleotide
caaauuggagcaaaugcug

SEQ ID NO: 2357537 - RNA, 19 nt, Artificial Sequence
  Description of Artificial Sequence: Synthetic oligonucleotide
agagguugcaucguaggcc

SEQ ID NO: 2357538 - RNA, 19 nt, Artificial Sequence
  Description of Artificial Sequence: Synthetic oligonucleotide
aaaacaacagggauuuucu

SEQ ID NO: 2357539 - RNA, 19 nt, Artificial Sequence
  Description of Artificial Sequence: Synthetic oligonucleotide
aaugcugacacggauuugu

SEQ ID NO: 2357540 - RNA, 19 nt, Artificial Sequence
  Description of Artificial Sequence: Synthetic oligonucleotide
guuaucagggaguaacugc

SEQ ID NO: 2357541 - RNA, 19 nt, Artificial Sequence
  Description of Artificial Sequence: Synthetic oligonucleotide
auuuguauuuuccaggauu

SEQ ID NO: 2357542 - RNA, 19 nt, Artificial Sequence
  Description of Artificial Sequence: Synthetic oligonucleotide
ucauuuuacauuucagcuc

SEQ ID NO: 2357543 - RNA, 19 nt, Artificial Sequence
  Description of Artificial Sequence: Synthetic oligonucleotide
aauaggaugucacgagaga

SEQ ID NO: 2357544 - RNA, 19 nt, Artificial Sequence
  Description of Artificial Sequence: Synthetic oligonucleotide
agcuaugaaguuaucaggg

SEQ ID NO: 2357545 - RNA, 19 nt, Artificial Sequence
  Description of Artificial Sequence: Synthetic oligonucleotide
aauuaguuuuccagggauc

SEQ ID NO: 2357546 - RNA, 19 nt, Artificial Sequence
  Description of Artificial Sequence: Synthetic oligonucleotide
cauucagguacuuugcaug

SEQ ID NO: 2357547 - RNA, 19 nt, Artificial Sequence
  Description of Artificial Sequence: Synthetic oligonucleotide
cauuuauaaguuguggaag

SEQ ID NO: 2357548 - RNA, 19 nt, Artificial Sequence
  Description of Artificial Sequence: Synthetic oligonucleotide
aauuggcauuuauaaguug

SEQ ID NO: 2357549 - RNA, 19 nt, Artificial Sequence
  Description of Artificial Sequence: Synthetic oligonucleotide
caaucaauaugucaaucug

SEQ ID NO: 2357550 - RNA, 19 nt, Artificial Sequence
  Description of Artificial Sequence: Synthetic oligonucleotide
aauucuguucugugcaagu

SEQ ID NO: 2357551 - RNA, 19 nt, Artificial Sequence
  Description of Artificial Sequence: Synthetic oligonucleotide
caauaugucaaucugggaa

SEQ ID NO: 2357552 - RNA, 19 nt, Artificial Sequence
  Description of Artificial Sequence: Synthetic oligonucleotide
auucacguaaaacccagca

SEQ ID NO: 2357553 - RNA, 19 nt, Artificial Sequence
  Description of Artificial Sequence: Synthetic oligonucleotide
agagagguugcaucguagg

SEQ ID NO: 2357554 - RNA, 19 nt, Artificial Sequence
  Description of Artificial Sequence: Synthetic oligonucleotide
agaaacucgucaucuuuuc

SEQ ID NO: 2357555 - RNA, 19 nt, Artificial Sequence
  Description of Artificial Sequence: Synthetic oligonucleotide
gacacuuuccacucucugc

SEQ ID NO: 2357556 - RNA, 19 nt, Artificial Sequence
  Description of Artificial Sequence: Synthetic oligonucleotide
cagcuaugaaguuaucagg

SEQ ID NO: 2357557 - RNA, 19 nt, Artificial Sequence
  Description of Artificial Sequence: Synthetic oligonucleotide
ggaaaucugcuucaaagcc

SEQ ID NO: 2357558 - RNA, 19 nt, Artificial Sequence
  Description of Artificial Sequence: Synthetic oligonucleotide
gaauaggaugucacgagag

SEQ ID NO: 2357559 - RNA, 19 nt, Artificial Sequence
  Description of Artificial Sequence: Synthetic oligonucleotide
augagauucuucugucugg

SEQ ID NO: 2357560 - RNA, 19 nt, Artificial Sequence
  Description of Artificial Sequence: Synthetic oligonucleotide
uaugaucauaacccucuug

SEQ ID NO: 2357561 - RNA, 19 nt, Artificial Sequence
  Description of Artificial Sequence: Synthetic oligonucleotide
aaucugggaaccagaauag

SEQ ID NO: 2357562 - RNA, 19 nt, Artificial Sequence
  Description of Artificial Sequence: Synthetic oligonucleotide
uucagcucaacacugucau

SEQ ID NO: 2357563 - RNA, 19 nt, Artificial Sequence
  Description of Artificial Sequence: Synthetic oligonucleotide
ucaaagcacaaaucagagc

SEQ ID NO: 2357564 - RNA, 19 nt, Artificial Sequence
  Description of Artificial Sequence: Synthetic oligonucleotide
uggauaugaaauucuguuc

SEQ ID NO: 2357565 - RNA, 19 nt, Artificial Sequence
  Description of Artificial Sequence: Synthetic oligonucleotide
ucuggagcaaugacgacaa

SEQ ID NO: 2357566 - RNA, 19 nt, Artificial Sequence
  Description of Artificial Sequence: Synthetic oligonucleotide
agguacuuugcaugaugcc

SEQ ID NO: 2357567 - RNA, 19 nt, Artificial Sequence
  Description of Artificial Sequence: Synthetic oligonucleotide
aagguugcaaugaaguagu

SEQ ID NO: 2357568 - RNA, 19 nt, Artificial Sequence
  Description of Artificial Sequence: Synthetic oligonucleotide
uagguagacagcaaaucuc

SEQ ID NO: 2357569 - RNA, 19 nt, Artificial Sequence
  Description of Artificial Sequence: Synthetic oligonucleotide
auucuguaauuaguuuucc

SEQ ID NO: 2357570 - RNA, 19 nt, Artificial Sequence
  Description of Artificial Sequence: Synthetic oligonucleotide
uggcauuuauaaguugugg

SEQ ID NO: 2357571 - RNA, 19 nt, Artificial Sequence
  Description of Artificial Sequence: Synthetic oligonucleotide
agugcaggacacuuuccac

SEQ ID NO: 2357572 - RNA, 19 nt, Artificial Sequence
  Description of Artificial Sequence: Synthetic oligonucleotide
cacgagagagguugcaucg

SEQ ID NO: 2357573 - RNA, 19 nt, Artificial Sequence
  Description of Artificial Sequence: Synthetic oligonucleotide
uucacguaaaacccagcac

SEQ ID NO: 2357574 - RNA, 19 nt, Artificial Sequence
  Description of Artificial Sequence: Synthetic oligonucleotide
auaggaugucacgagagag

SEQ ID NO: 2357575 - RNA, 19 nt, Artificial Sequence
  Description of Artificial Sequence: Synthetic oligonucleotide
agcaaaucucauuuuacau

SEQ ID NO: 2357576 - RNA, 19 nt, Artificial Sequence
  Description of Artificial Sequence: Synthetic oligonucleotide
uaaaccagacagccaguag

SEQ ID NO: 2357577 - RNA, 19 nt, Artificial Sequence
  Description of Artificial Sequence: Synthetic oligonucleotide
uuggagcaaaugcugacac

SEQ ID NO: 2357578 - RNA, 19 nt, Artificial Sequence
  Description of Artificial Sequence: Synthetic oligonucleotide
gcagcuaugaaguuaucag

SEQ ID NO: 2357579 - RNA, 19 nt, Artificial Sequence
  Description of Artificial Sequence: Synthetic oligonucleotide
gguaucuggagcaaugacg

SEQ ID NO: 2357580 - RNA, 19 nt, Artificial Sequence
  Description of Artificial Sequence: Synthetic oligonucleotide
cugcccauuugaaagaaac

SEQ ID NO: 2357581 - RNA, 19 nt, Artificial Sequence
  Description of Artificial Sequence: Synthetic oligonucleotide
ucaguuacguaagaauaca

SEQ ID NO: 2357582 - RNA, 19 nt, Artificial Sequence
  Description of Artificial Sequence: Synthetic oligonucleotide
ggaaauuggcauuuauaag

SEQ ID NO: 2357583 - RNA, 19 nt, Artificial Sequence
  Description of Artificial Sequence: Synthetic oligonucleotide
agaauaggaugucacgaga

SEQ ID NO: 2357584 - RNA, 19 nt, Artificial Sequence
  Description of Artificial Sequence: Synthetic oligonucleotide
aaagcacuggguugcaaau

SEQ ID NO: 2357585 - RNA, 19 nt, Artificial Sequence
  Description of Artificial Sequence: Synthetic oligonucleotide
acagcaaaucucauuuuac

SEQ ID NO: 2357586 - RNA, 19 nt, Artificial Sequence
  Description of Artificial Sequence: Synthetic oligonucleotide
ucauaacccucuuguagcc

SEQ ID NO: 2357587 - RNA, 19 nt, Artificial Sequence
  Description of Artificial Sequence: Synthetic oligonucleotide
ugcugaaagccagacuugg

SEQ ID NO: 2357588 - RNA, 19 nt, Artificial Sequence
  Description of Artificial Sequence: Synthetic oligonucleotide
cagaauaggaugucacgag

SEQ ID NO: 2357589 - RNA, 19 nt, Artificial Sequence
  Description of Artificial Sequence: Synthetic oligonucleotide
cagguacuuugcaugaugc

SEQ ID NO: 2357590 - RNA, 19 nt, Artificial Sequence
  Description of Artificial Sequence: Synthetic oligonucleotide
uaaaacccagcaccagugc

SEQ ID NO: 2357591 - RNA, 19 nt, Artificial Sequence
  Description of Artificial Sequence: Synthetic oligonucleotide
aagcuccucaguuacguaa

SEQ ID NO: 2357592 - RNA, 19 nt, Artificial Sequence
  Description of Artificial Sequence: Synthetic oligonucleotide
gaugaagguugcaaugaag

SEQ ID NO: 2357593 - RNA, 19 nt, Artificial Sequence
  Description of Artificial Sequence: Synthetic oligonucleotide
uuuugccccaaggacaaag

SEQ ID NO: 2357594 - RNA, 19 nt, Artificial Sequence
  Description of Artificial Sequence: Synthetic oligonucleotide
uuuauaaguuguggaagcu

SEQ ID NO: 2357595 - RNA, 19 nt, Artificial Sequence
  Description of Artificial Sequence: Synthetic oligonucleotide
guaagaauacauucuguaa

SEQ ID NO: 2357596 - RNA, 19 nt, Artificial Sequence
  Description of Artificial Sequence: Synthetic oligonucleotide
agcaaugacgacaaggcca

SEQ ID NO: 2357597 - RNA, 19 nt, Artificial Sequence
  Description of Artificial Sequence: Synthetic oligonucleotide
cucaacacugucauguuca

SEQ ID NO: 2357598 - RNA, 19 nt, Artificial Sequence
  Description of Artificial Sequence: Synthetic oligonucleotide
aaauuggagcaaaugcuga

SEQ ID NO: 2357599 - RNA, 19 nt, Artificial Sequence
  Description of Artificial Sequence: Synthetic oligonucleotide
uuggucuggucccaaauau

SEQ ID NO: 2357600 - RNA, 19 nt, Artificial Sequence
  Description of Artificial Sequence: Synthetic oligonucleotide
uucuguaauuaguuuucca

SEQ ID NO: 2357601 - RNA, 19 nt, Artificial Sequence
  Description of Artificial Sequence: Synthetic oligonucleotide
caaucugggaaccagaaua

SEQ ID NO: 2357602 - RNA, 19 nt, Artificial Sequence
  Description of Artificial Sequence: Synthetic oligonucleotide
uccucaguuacguaagaau

SEQ ID NO: 2357603 - RNA, 19 nt, Artificial Sequence
  Description of Artificial Sequence: Synthetic oligonucleotide
gggaaauuggcauuuauaa

SEQ ID NO: 2357604 - RNA, 19 nt, Artificial Sequence
  Description of Artificial Sequence: Synthetic oligonucleotide
aaucagagcuccguggccu

SEQ ID NO: 2357605 - RNA, 19 nt, Artificial Sequence
  Description of Artificial Sequence: Synthetic oligonucleotide
acacggauuuguauuuucc

SEQ ID NO: 2357606 - RNA, 19 nt, Artificial Sequence
  Description of Artificial Sequence: Synthetic oligonucleotide
uuucaugcauucagguacu

SEQ ID NO: 2357607 - RNA, 19 nt, Artificial Sequence
  Description of Artificial Sequence: Synthetic oligonucleotide
cagacagccaguagagugc

SEQ ID NO: 2357608 - RNA, 19 nt, Artificial Sequence
  Description of Artificial Sequence: Synthetic oligonucleotide
cccauuugaaagaaacucg

SEQ ID NO: 2357609 - RNA, 19 nt, Artificial Sequence
  Description of Artificial Sequence: Synthetic oligonucleotide
ugucaaucugggaaccaga

SEQ ID NO: 2357610 - RNA, 19 nt, Artificial Sequence
  Description of Artificial Sequence: Synthetic oligonucleotide
aguaacugcccauuugaaa

SEQ ID NO: 2357611 - RNA, 19 nt, Artificial Sequence
  Description of Artificial Sequence: Synthetic oligonucleotide
guaucuggagcaaugacga

SEQ ID NO: 2357612 - RNA, 19 nt, Artificial Sequence
  Description of Artificial Sequence: Synthetic oligonucleotide
ucaauaugucaaucuggga

SEQ ID NO: 2357613 - RNA, 19 nt, Artificial Sequence
  Description of Artificial Sequence: Synthetic oligonucleotide
gagagguugcaucguaggc

SEQ ID NO: 2357614 - RNA, 19 nt, Artificial Sequence
  Description of Artificial Sequence: Synthetic oligonucleotide
ugcauucagguacuuugca

SEQ ID NO: 2357615 - RNA, 19 nt, Artificial Sequence
  Description of Artificial Sequence: Synthetic oligonucleotide
uuauaaguuguggaagcuc

SEQ ID NO: 2357616 - RNA, 19 nt, Artificial Sequence
  Description of Artificial Sequence: Synthetic oligonucleotide
gaaaucugcuucaaagcca

SEQ ID NO: 2357617 - RNA, 19 nt, Artificial Sequence
  Description of Artificial Sequence: Synthetic oligonucleotide
agugccaaagucccagcug

SEQ ID NO: 2357618 - RNA, 19 nt, Artificial Sequence
  Description of Artificial Sequence: Synthetic oligonucleotide
cauuugaaagaaacucguc

SEQ ID NO: 2357619 - RNA, 19 nt, Artificial Sequence
  Description of Artificial Sequence: Synthetic oligonucleotide
uaacugcccauuugaaaga

SEQ ID NO: 2357620 - RNA, 19 nt, Artificial Sequence
  Description of Artificial Sequence: Synthetic oligonucleotide
uccguggccucccauggag

SEQ ID NO: 2357621 - RNA, 19 nt, Artificial Sequence
  Description of Artificial Sequence: Synthetic oligonucleotide
ugaagguugcaaugaagua

SEQ ID NO: 2357622 - RNA, 19 nt, Artificial Sequence
  Description of Artificial Sequence: Synthetic oligonucleotide
uugcaaauuggagcaaaug

SEQ ID NO: 2357623 - RNA, 19 nt, Artificial Sequence
  Description of Artificial Sequence: Synthetic oligonucleotide
ugcccauuugaaagaaacu

SEQ ID NO: 2357624 - RNA, 19 nt, Artificial Sequence
  Description of Artificial Sequence: Synthetic oligonucleotide
uucuguucugugcaaguua

SEQ ID NO: 2357625 - RNA, 19 nt, Artificial Sequence
  Description of Artificial Sequence: Synthetic oligonucleotide
cuugaucaaucaauauguc

SEQ ID NO: 2357626 - RNA, 19 nt, Artificial Sequence
  Description of Artificial Sequence: Synthetic oligonucleotide
uaucagggaguaacugccc

SEQ ID NO: 2357627 - RNA, 19 nt, Artificial Sequence
  Description of Artificial Sequence: Synthetic oligonucleotide
aguuaucagggaguaacug

SEQ ID NO: 2357628 - RNA, 19 nt, Artificial Sequence
  Description of Artificial Sequence: Synthetic oligonucleotide
ugagauucuucugucugga

SEQ ID NO: 2357629 - RNA, 19 nt, Artificial Sequence
  Description of Artificial Sequence: Synthetic oligonucleotide
aacucgucaucuuuuccuu

SEQ ID NO: 2357630 - RNA, 19 nt, Artificial Sequence
  Description of Artificial Sequence: Synthetic oligonucleotide
cugucuggagcuuuucaug

SEQ ID NO: 2357631 - RNA, 19 nt, Artificial Sequence
  Description of Artificial Sequence: Synthetic oligonucleotide
guacuuugcaugaugccug

SEQ ID NO: 2357632 - RNA, 19 nt, Artificial Sequence
  Description of Artificial Sequence: Synthetic oligonucleotide
acuuggauaugaaauucug

SEQ ID NO: 2357633 - RNA, 19 nt, Artificial Sequence
  Description of Artificial Sequence: Synthetic oligonucleotide
ugguaucuggagcaaugac

SEQ ID NO: 2357634 - RNA, 19 nt, Artificial Sequence
  Description of Artificial Sequence: Synthetic oligonucleotide
uugcugaaagccagacuug

SEQ ID NO: 2357635 - RNA, 19 nt, Artificial Sequence
  Description of Artificial Sequence: Synthetic oligonucleotide
guaauuaguuuuccaggga

SEQ ID NO: 2357636 - RNA, 19 nt, Artificial Sequence
  Description of Artificial Sequence: Synthetic oligonucleotide
uagacauccucuguggguc

SEQ ID NO: 2357637 - RNA, 19 nt, Artificial Sequence
  Description of Artificial Sequence: Synthetic oligonucleotide
ucguaggccuuccauuuac

SEQ ID NO: 2357638 - RNA, 19 nt, Artificial Sequence
  Description of Artificial Sequence: Synthetic oligonucleotide
ggcauuuauaaguugugga

SEQ ID NO: 2357639 - RNA, 19 nt, Artificial Sequence
  Description of Artificial Sequence: Synthetic oligonucleotide
uuguggaagcuccucaguu

SEQ ID NO: 2357640 - RNA, 19 nt, Artificial Sequence
  Description of Artificial Sequence: Synthetic oligonucleotide
ucacgagagagguugcauc

SEQ ID NO: 2357641 - RNA, 19 nt, Artificial Sequence
  Description of Artificial Sequence: Synthetic oligonucleotide
uggugguagguagacagca

SEQ ID NO: 2357642 - RNA, 19 nt, Artificial Sequence
  Description of Artificial Sequence: Synthetic oligonucleotide
guggaagcuccucaguuac

SEQ ID NO: 2357643 - RNA, 19 nt, Artificial Sequence
  Description of Artificial Sequence: Synthetic oligonucleotide
ugaugccugauguggucag

SEQ ID NO: 2357644 - RNA, 19 nt, Artificial Sequence
  Description of Artificial Sequence: Synthetic oligonucleotide
aagccagacuuggauauga

SEQ ID NO: 2357645 - RNA, 19 nt, Artificial Sequence
  Description of Artificial Sequence: Synthetic oligonucleotide
ggauuuguauuuuccagga

SEQ ID NO: 2357646 - RNA, 19 nt, Artificial Sequence
  Description of Artificial Sequence: Synthetic oligonucleotide
agcaaaugcugacacggau

SEQ ID NO: 2357647 - RNA, 19 nt, Artificial Sequence
  Description of Artificial Sequence: Synthetic oligonucleotide
uguggguccacugggaaau

SEQ ID NO: 2357648 - RNA, 19 nt, Artificial Sequence
  Description of Artificial Sequence: Synthetic oligonucleotide
guagguagacagcaaaucu

SEQ ID NO: 2357649 - RNA, 19 nt, Artificial Sequence
  Description of Artificial Sequence: Synthetic oligonucleotide
guaguagcuaugaucauaa

SEQ ID NO: 2357650 - RNA, 19 nt, Artificial Sequence
  Description of Artificial Sequence: Synthetic oligonucleotide
agguagacagcaaaucuca

SEQ ID NO: 2357651 - RNA, 19 nt, Artificial Sequence
  Description of Artificial Sequence: Synthetic oligonucleotide
uguggaagcuccucaguua

SEQ ID NO: 2357652 - RNA, 19 nt, Artificial Sequence
  Description of Artificial Sequence: Synthetic oligonucleotide
ucaaucugggaaccagaau

SEQ ID NO: 2357653 - RNA, 19 nt, Artificial Sequence
  Description of Artificial Sequence: Synthetic oligonucleotide
auacauucuguaauuaguu

SEQ ID NO: 2357654 - RNA, 19 nt, Artificial Sequence
  Description of Artificial Sequence: Synthetic oligonucleotide
aucuucaguggcauucacg

SEQ ID NO: 2357655 - RNA, 19 nt, Artificial Sequence
  Description of Artificial Sequence: Synthetic oligonucleotide
agcuaugaucauaacccuc

SEQ ID NO: 2357656 - RNA, 19 nt, Artificial Sequence
  Description of Artificial Sequence: Synthetic oligonucleotide
uauugcuggaaaucugcuu

SEQ ID NO: 2357657 - RNA, 19 nt, Artificial Sequence
  Description of Artificial Sequence: Synthetic oligonucleotide
aaauauccacuaaaagcuu

SEQ ID NO: 2357658 - RNA, 19 nt, Artificial Sequence
  Description of Artificial Sequence: Synthetic oligonucleotide
caaaucucauuuuacauuu

SEQ ID NO: 2357659 - RNA, 19 nt, Artificial Sequence
  Description of Artificial Sequence: Synthetic oligonucleotide
uuaaaccagacagccagua

SEQ ID NO: 2357660 - RNA, 19 nt, Artificial Sequence
  Description of Artificial Sequence: Synthetic oligonucleotide
augucaaucugggaaccag

SEQ ID NO: 2357661 - RNA, 19 nt, Artificial Sequence
  Description of Artificial Sequence: Synthetic oligonucleotide
accagugccaaagucccag

SEQ ID NO: 2357662 - RNA, 19 nt, Artificial Sequence
  Description of Artificial Sequence: Synthetic oligonucleotide
ccuuuaauauugcagccac

SEQ ID NO: 2357663 - RNA, 19 nt, Artificial Sequence
  Description of Artificial Sequence: Synthetic oligonucleotide
aucagggaguaacugccca

SEQ ID NO: 2357664 - RNA, 19 nt, Artificial Sequence
  Description of Artificial Sequence: Synthetic oligonucleotide
gcauuuauaaguuguggaa

SEQ ID NO: 2357665 - RNA, 19 nt, Artificial Sequence
  Description of Artificial Sequence: Synthetic oligonucleotide
ugacgacaaggccauguuc

SEQ ID NO: 2357666 - RNA, 19 nt, Artificial Sequence
  Description of Artificial Sequence: Synthetic oligonucleotide
gagauucuucugucuggag

SEQ ID NO: 2357667 - RNA, 19 nt, Artificial Sequence
  Description of Artificial Sequence: Synthetic oligonucleotide
cacucucugcuuguggugg

SEQ ID NO: 2357668 - RNA, 19 nt, Artificial Sequence
  Description of Artificial Sequence: Synthetic oligonucleotide
uucugugcaggcagcuaug

SEQ ID NO: 2357669 - RNA, 19 nt, Artificial Sequence
  Description of Artificial Sequence: Synthetic oligonucleotide
uuccuugaucaaucaauau

SEQ ID NO: 2357670 - RNA, 19 nt, Artificial Sequence
  Description of Artificial Sequence: Synthetic oligonucleotide
gagagagguugcaucguag

SEQ ID NO: 2357671 - RNA, 19 nt, Artificial Sequence
  Description of Artificial Sequence: Synthetic oligonucleotide
cauucacguaaaacccagc

SEQ ID NO: 2357672 - RNA, 19 nt, Artificial Sequence
  Description of Artificial Sequence: Synthetic oligonucleotide
gaaauucuguucugugcaa

SEQ ID NO: 2357673 - RNA, 19 nt, Artificial Sequence
  Description of Artificial Sequence: Synthetic oligonucleotide
auaacccucuuguagccua

SEQ ID NO: 2357674 - RNA, 19 nt, Artificial Sequence
  Description of Artificial Sequence: Synthetic oligonucleotide
aaguuaaaccagacagcca

SEQ ID NO: 2357675 - RNA, 19 nt, Artificial Sequence
  Description of Artificial Sequence: Synthetic oligonucleotide
uacuuugcaugaugccuga

SEQ ID NO: 2357676 - RNA, 19 nt, Artificial Sequence
  Description of Artificial Sequence: Synthetic oligonucleotide
aguuacguaagaauacauu

SEQ ID NO: 2357677 - RNA, 19 nt, Artificial Sequence
  Description of Artificial Sequence: Synthetic oligonucleotide
gacgacaaggccauguucu

SEQ ID NO: 2357678 - RNA, 19 nt, Artificial Sequence
  Description of Artificial Sequence: Synthetic oligonucleotide
cccaaauauccacuaaaag

SEQ ID NO: 2357679 - RNA, 19 nt, Artificial Sequence
  Description of Artificial Sequence: Synthetic oligonucleotide
aaagccagacuuggauaug

SEQ ID NO: 2357680 - RNA, 19 nt, Artificial Sequence
  Description of Artificial Sequence: Synthetic oligonucleotide
agcaccuauugcuggaaau

SEQ ID NO: 2357681 - RNA, 19 nt, Artificial Sequence
  Description of Artificial Sequence: Synthetic oligonucleotide
agagugcaggacacuuucc

SEQ ID NO: 2357682 - RNA, 19 nt, Artificial Sequence
  Description of Artificial Sequence: Synthetic oligonucleotide
cuuguggugguagguagac

SEQ ID NO: 2357683 - RNA, 19 nt, Artificial Sequence
  Description of Artificial Sequence: Synthetic oligonucleotide
ucugcuuguggugguaggu

SEQ ID NO: 2357684 - RNA, 19 nt, Artificial Sequence
  Description of Artificial Sequence: Synthetic oligonucleotide
cacguaaaacccagcacca

SEQ ID NO: 2357685 - RNA, 19 nt, Artificial Sequence
  Description of Artificial Sequence: Synthetic oligonucleotide
uaaguuguggaagcuccuc

SEQ ID NO: 2357686 - RNA, 19 nt, Artificial Sequence
  Description of Artificial Sequence: Synthetic oligonucleotide
augaaguaguagcuaugau

SEQ ID NO: 2357687 - RNA, 19 nt, Artificial Sequence
  Description of Artificial Sequence: Synthetic oligonucleotide
gagguugcaucguaggccu

SEQ ID NO: 2357688 - RNA, 19 nt, Artificial Sequence
  Description of Artificial Sequence: Synthetic oligonucleotide
caaagucccagcugucauc

SEQ ID NO: 2357689 - RNA, 19 nt, Artificial Sequence
  Description of Artificial Sequence: Synthetic oligonucleotide
acgacaaggccauguucug

SEQ ID NO: 2357690 - RNA, 19 nt, Artificial Sequence
  Description of Artificial Sequence: Synthetic oligonucleotide
agccaguagagugcaggac

SEQ ID NO: 2357691 - RNA, 19 nt, Artificial Sequence
  Description of Artificial Sequence: Synthetic oligonucleotide
gaaccagaauaggauguca

SEQ ID NO: 2357692 - RNA, 19 nt, Artificial Sequence
  Description of Artificial Sequence: Synthetic oligonucleotide
caaagcacuggguugcaaa

SEQ ID NO: 2357693 - RNA, 19 nt, Artificial Sequence
  Description of Artificial Sequence: Synthetic oligonucleotide
ucagcucaacacugucaug

SEQ ID NO: 2357694 - RNA, 19 nt, Artificial Sequence
  Description of Artificial Sequence: Synthetic oligonucleotide
ugcugacacggauuuguau

SEQ ID NO: 2357695 - RNA, 19 nt, Artificial Sequence
  Description of Artificial Sequence: Synthetic oligonucleotide
augaaguuaucagggagua

SEQ ID NO: 2357696 - RNA, 19 nt, Artificial Sequence
  Description of Artificial Sequence: Synthetic oligonucleotide
gcccauuugaaagaaacuc

SEQ ID NO: 2357697 - RNA, 19 nt, Artificial Sequence
  Description of Artificial Sequence: Synthetic oligonucleotide
ucagggaguaacugcccau

SEQ ID NO: 2357698 - RNA, 19 nt, Artificial Sequence
  Description of Artificial Sequence: Synthetic oligonucleotide
cugugcaaguuaaaccaga

SEQ ID NO: 2357699 - RNA, 19 nt, Artificial Sequence
  Description of Artificial Sequence: Synthetic oligonucleotide
ucccauggagugaccaaaa

SEQ ID NO: 2357700 - RNA, 19 nt, Artificial Sequence
  Description of Artificial Sequence: Synthetic oligonucleotide
agcuccucaguuacguaag

SEQ ID NO: 2357701 - RNA, 19 nt, Artificial Sequence
  Description of Artificial Sequence: Synthetic oligonucleotide
agcuccguggccucccaug

SEQ ID NO: 2357702 - RNA, 19 nt, Artificial Sequence
  Description of Artificial Sequence: Synthetic oligonucleotide
caggacacuuuccacucuc

SEQ ID NO: 2357703 - RNA, 19 nt, Artificial Sequence
  Description of Artificial Sequence: Synthetic oligonucleotide
acguaagaauacauucugu

SEQ ID NO: 2357704 - RNA, 19 nt, Artificial Sequence
  Description of Artificial Sequence: Synthetic oligonucleotide
gccaguagagugcaggaca

SEQ ID NO: 2357705 - RNA, 19 nt, Artificial Sequence
  Description of Artificial Sequence: Synthetic oligonucleotide
gguagguagacagcaaauc

SEQ ID NO: 2357706 - RNA, 19 nt, Artificial Sequence
  Description of Artificial Sequence: Synthetic oligonucleotide
gcauucacguaaaacccag

SEQ ID NO: 2357707 - RNA, 19 nt, Artificial Sequence
  Description of Artificial Sequence: Synthetic oligonucleotide
uaucuggagcaaugacgac

SEQ ID NO: 2357708 - RNA, 19 nt, Artificial Sequence
  Description of Artificial Sequence: Synthetic oligonucleotide
augacgacaaggccauguu

SEQ ID NO: 2357709 - RNA, 19 nt, Artificial Sequence
  Description of Artificial Sequence: Synthetic oligonucleotide
acguaaaacccagcaccag

SEQ ID NO: 2357710 - RNA, 19 nt, Artificial Sequence
  Description of Artificial Sequence: Synthetic oligonucleotide
gcuaugaaguuaucaggga

SEQ ID NO: 2357711 - RNA, 19 nt, Artificial Sequence
  Description of Artificial Sequence: Synthetic oligonucleotide
uuacuuuggucugguccca

SEQ ID NO: 2357712 - RNA, 19 nt, Artificial Sequence
  Description of Artificial Sequence: Synthetic oligonucleotide
uaguagcuaugaucauaac

SEQ ID NO: 2357713 - RNA, 19 nt, Artificial Sequence
  Description of Artificial Sequence: Synthetic oligonucleotide
auauccacuaaaagcuuuu

SEQ ID NO: 2357714 - RNA, 19 nt, Artificial Sequence
  Description of Artificial Sequence: Synthetic oligonucleotide
ugucacgagagagguugca

SEQ ID NO: 2357715 - RNA, 19 nt, Artificial Sequence
  Description of Artificial Sequence: Synthetic oligonucleotide
accuauugcuggaaaucug

SEQ ID NO: 2357716 - RNA, 19 nt, Artificial Sequence
  Description of Artificial Sequence: Synthetic oligonucleotide
augucacgagagagguugc

SEQ ID NO: 2357717 - RNA, 19 nt, Artificial Sequence
  Description of Artificial Sequence: Synthetic oligonucleotide
auaaguuguggaagcuccu

SEQ ID NO: 2357718 - RNA, 19 nt, Artificial Sequence
  Description of Artificial Sequence: Synthetic oligonucleotide
ugaaguuaucagggaguaa

SEQ ID NO: 2357719 - RNA, 19 nt, Artificial Sequence
  Description of Artificial Sequence: Synthetic oligonucleotide
agacagcaaaucucauuuu

SEQ ID NO: 2357720 - RNA, 19 nt, Artificial Sequence
  Description of Artificial Sequence: Synthetic oligonucleotide
uaacccucuuguagccuaa

SEQ ID NO: 2357721 - RNA, 19 nt, Artificial Sequence
  Description of Artificial Sequence: Synthetic oligonucleotide
guugcaucguaggccuucc

SEQ ID NO: 2357722 - RNA, 19 nt, Artificial Sequence
  Description of Artificial Sequence: Synthetic oligonucleotide
ggacacuuuccacucucug

SEQ ID NO: 2357723 - RNA, 19 nt, Artificial Sequence
  Description of Artificial Sequence: Synthetic oligonucleotide
auucuguucugugcaaguu

SEQ ID NO: 2357724 - RNA, 19 nt, Artificial Sequence
  Description of Artificial Sequence: Synthetic oligonucleotide
agacagccaguagagugca

SEQ ID NO: 2357725 - RNA, 19 nt, Artificial Sequence
  Description of Artificial Sequence: Synthetic oligonucleotide
gucaaucugggaaccagaa

SEQ ID NO: 2357726 - RNA, 19 nt, Artificial Sequence
  Description of Artificial Sequence: Synthetic oligonucleotide
ccaguagagugcaggacac

SEQ ID NO: 2357727 - RNA, 19 nt, Artificial Sequence
  Description of Artificial Sequence: Synthetic oligonucleotide
ucaugcauucagguacuuu

SEQ ID NO: 2357728 - RNA, 19 nt, Artificial Sequence
  Description of Artificial Sequence: Synthetic oligonucleotide
ccucaguuacguaagaaua

SEQ ID NO: 2357729 - RNA, 19 nt, Artificial Sequence
  Description of Artificial Sequence: Synthetic oligonucleotide
ccgaagcaccuauugcugg

SEQ ID NO: 2357730 - RNA, 19 nt, Artificial Sequence
  Description of Artificial Sequence: Synthetic oligonucleotide
cagcucaacacugucaugu

SEQ ID NO: 2357731 - RNA, 19 nt, Artificial Sequence
  Description of Artificial Sequence: Synthetic oligonucleotide
gugcaggacacuuuccacu

SEQ ID NO: 2357732 - RNA, 19 nt, Artificial Sequence
  Description of Artificial Sequence: Synthetic oligonucleotide
gauuuguauuuuccaggau

SEQ ID NO: 2357733 - RNA, 19 nt, Artificial Sequence
  Description of Artificial Sequence: Synthetic oligonucleotide
ggcagcuaugaaguuauca

SEQ ID NO: 2357734 - RNA, 19 nt, Artificial Sequence
  Description of Artificial Sequence: Synthetic oligonucleotide
guagacagcaaaucucauu

SEQ ID NO: 2357735 - RNA, 19 nt, Artificial Sequence
  Description of Artificial Sequence: Synthetic oligonucleotide
ccagacuuggauaugaaau

SEQ ID NO: 2357736 - RNA, 19 nt, Artificial Sequence
  Description of Artificial Sequence: Synthetic oligonucleotide
acuuuggucuggucccaaa

SEQ ID NO: 2357737 - RNA, 19 nt, Artificial Sequence
  Description of Artificial Sequence: Synthetic oligonucleotide
gucuggagcuuuucaugca

SEQ ID NO: 2357738 - RNA, 19 nt, Artificial Sequence
  Description of Artificial Sequence: Synthetic oligonucleotide
gcuaugaucauaacccucu

SEQ ID NO: 2357739 - RNA, 19 nt, Artificial Sequence
  Description of Artificial Sequence: Synthetic oligonucleotide
gaguaacugcccauuugaa

SEQ ID NO: 2357740 - RNA, 19 nt, Artificial Sequence
  Description of Artificial Sequence: Synthetic oligonucleotide
acucucugcuugugguggu

SEQ ID NO: 2357741 - RNA, 19 nt, Artificial Sequence
  Description of Artificial Sequence: Synthetic oligonucleotide
uugcaucguaggccuucca

SEQ ID NO: 2357742 - RNA, 19 nt, Artificial Sequence
  Description of Artificial Sequence: Synthetic oligonucleotide
ccagaauaggaugucacga

SEQ ID NO: 2357743 - RNA, 19 nt, Artificial Sequence
  Description of Artificial Sequence: Synthetic oligonucleotide
cguaagaauacauucugua

SEQ ID NO: 2357744 - RNA, 19 nt, Artificial Sequence
  Description of Artificial Sequence: Synthetic oligonucleotide
acccucuuguagccuaaaa

SEQ ID NO: 2357745 - RNA, 19 nt, Artificial Sequence
  Description of Artificial Sequence: Synthetic oligonucleotide
guggugguagguagacagc

SEQ ID NO: 2357746 - RNA, 19 nt, Artificial Sequence
  Description of Artificial Sequence: Synthetic oligonucleotide
aucguaggccuuccauuua

SEQ ID NO: 2357747 - RNA, 19 nt, Artificial Sequence
  Description of Artificial Sequence: Synthetic oligonucleotide
guccacugggaaauuggca

SEQ ID NO: 2357748 - RNA, 19 nt, Artificial Sequence
  Description of Artificial Sequence: Synthetic oligonucleotide
ugacacggauuuguauuuu

SEQ ID NO: 2357749 - RNA, 19 nt, Artificial Sequence
  Description of Artificial Sequence: Synthetic oligonucleotide
gcaccuauugcuggaaauc

SEQ ID NO: 2357750 - RNA, 19 nt, Artificial Sequence
  Description of Artificial Sequence: Synthetic oligonucleotide
gcucaacacugucauguuc

SEQ ID NO: 2357751 - RNA, 19 nt, Artificial Sequence
  Description of Artificial Sequence: Synthetic oligonucleotide
gcugacacggauuuguauu

SEQ ID NO: 2357752 - RNA, 19 nt, Artificial Sequence
  Description of Artificial Sequence: Synthetic oligonucleotide
ggaaccagaauaggauguc

SEQ ID NO: 2357753 - RNA, 19 nt, Artificial Sequence
  Description of Artificial Sequence: Synthetic oligonucleotide
caucguaggccuuccauuu

SEQ ID NO: 2357754 - RNA, 19 nt, Artificial Sequence
  Description of Artificial Sequence: Synthetic oligonucleotide
acgagagagguugcaucgu

SEQ ID NO: 2357755 - RNA, 19 nt, Artificial Sequence
  Description of Artificial Sequence: Synthetic oligonucleotide
ggagcuuuucaugcauuca

SEQ ID NO: 2357756 - RNA, 19 nt, Artificial Sequence
  Description of Artificial Sequence: Synthetic oligonucleotide
caguuacguaagaauacau

SEQ ID NO: 2357757 - RNA, 19 nt, Artificial Sequence
  Description of Artificial Sequence: Synthetic oligonucleotide
gguugcaaauuggagcaaa

SEQ ID NO: 2357758 - RNA, 19 nt, Artificial Sequence
  Description of Artificial Sequence: Synthetic oligonucleotide
aggacacuuuccacucucu

SEQ ID NO: 2357759 - RNA, 19 nt, Artificial Sequence
  Description of Artificial Sequence: Synthetic oligonucleotide
caccuauugcuggaaaucu

SEQ ID NO: 2357760 - RNA, 19 nt, Artificial Sequence
  Description of Artificial Sequence: Synthetic oligonucleotide
caaggacaaagcacugggu

SEQ ID NO: 2357761 - RNA, 19 nt, Artificial Sequence
  Description of Artificial Sequence: Synthetic oligonucleotide
cuggucccaaauauccacu

SEQ ID NO: 2357762 - RNA, 19 nt, Artificial Sequence
  Description of Artificial Sequence: Synthetic oligonucleotide
caucuucuccuuuaauauu

SEQ ID NO: 2357763 - RNA, 19 nt, Artificial Sequence
  Description of Artificial Sequence: Synthetic oligonucleotide
uacuuuggucuggucccaa

SEQ ID NO: 2357764 - RNA, 19 nt, Artificial Sequence
  Description of Artificial Sequence: Synthetic oligonucleotide
cucccauggagugaccaaa

SEQ ID NO: 2357765 - RNA, 19 nt, Artificial Sequence
  Description of Artificial Sequence: Synthetic oligonucleotide
cccagcugucaucuucucc

SEQ ID NO: 2357766 - RNA, 19 nt, Artificial Sequence
  Description of Artificial Sequence: Synthetic oligonucleotide
gguugcaucguaggccuuc

SEQ ID NO: 2357767 - RNA, 19 nt, Artificial Sequence
  Description of Artificial Sequence: Synthetic oligonucleotide
guaggccuuccauuuacuu

SEQ ID NO: 2357768 - RNA, 19 nt, Artificial Sequence
  Description of Artificial Sequence: Synthetic oligonucleotide
ggaagcuccucaguuacgu

SEQ ID NO: 2357769 - RNA, 19 nt, Artificial Sequence
  Description of Artificial Sequence: Synthetic oligonucleotide
agagcuccguggccuccca

SEQ ID NO: 2357770 - RNA, 19 nt, Artificial Sequence
  Description of Artificial Sequence: Synthetic oligonucleotide
cuccucaguuacguaagaa

SEQ ID NO: 2357771 - RNA, 19 nt, Artificial Sequence
  Description of Artificial Sequence: Synthetic oligonucleotide
guugcaaauuggagcaaau

SEQ ID NO: 2357772 - RNA, 19 nt, Artificial Sequence
  Description of Artificial Sequence: Synthetic oligonucleotide
cuucaguggcauucacgua

SEQ ID NO: 2357773 - RNA, 19 nt, Artificial Sequence
  Description of Artificial Sequence: Synthetic oligonucleotide
gcauucagguacuuugcau

SEQ ID NO: 2357774 - RNA, 19 nt, Artificial Sequence
  Description of Artificial Sequence: Synthetic oligonucleotide
acuuugcaugaugccugau

SEQ ID NO: 2357775 - RNA, 19 nt, Artificial Sequence
  Description of Artificial Sequence: Synthetic oligonucleotide
gcaaugacgacaaggccau

SEQ ID NO: 2357776 - RNA, 19 nt, Artificial Sequence
  Description of Artificial Sequence: Synthetic oligonucleotide
cagugccaaagucccagcu

SEQ ID NO: 2357777 - RNA, 19 nt, Artificial Sequence
  Description of Artificial Sequence: Synthetic oligonucleotide
gucccagcugucaucuucu

SEQ ID NO: 2357778 - RNA, 19 nt, Artificial Sequence
  Description of Artificial Sequence: Synthetic oligonucleotide
gucacgagagagguugcau

SEQ ID NO: 2357779 - RNA, 19 nt, Artificial Sequence
  Description of Artificial Sequence: Synthetic oligonucleotide
guggucagugaugaagguu

SEQ ID NO: 2357780 - RNA, 19 nt, Artificial Sequence
  Description of Artificial Sequence: Synthetic oligonucleotide
augcugacacggauuugua

SEQ ID NO: 2357781 - RNA, 19 nt, Artificial Sequence
  Description of Artificial Sequence: Synthetic oligonucleotide
ccccaaggacaaagcacug

SEQ ID NO: 2357782 - RNA, 19 nt, Artificial Sequence
  Description of Artificial Sequence: Synthetic oligonucleotide
cuaugaucauaacccucuu

SEQ ID NO: 2357783 - RNA, 19 nt, Artificial Sequence
  Description of Artificial Sequence: Synthetic oligonucleotide
gaugccugauguggucagu

SEQ ID NO: 2357784 - RNA, 19 nt, Artificial Sequence
  Description of Artificial Sequence: Synthetic oligonucleotide
ggugguagguagacagcaa

SEQ ID NO: 2357785 - RNA, 19 nt, Artificial Sequence
  Description of Artificial Sequence: Synthetic oligonucleotide
ggccauguucugaggcagc

SEQ ID NO: 2357786 - RNA, 19 nt, Artificial Sequence
  Description of Artificial Sequence: Synthetic oligonucleotide
caaugacgacaaggccaug

SEQ ID NO: 2357787 - RNA, 19 nt, Artificial Sequence
  Description of Artificial Sequence: Synthetic oligonucleotide
cguaaaacccagcaccagu

SEQ ID NO: 2357788 - RNA, 19 nt, Artificial Sequence
  Description of Artificial Sequence: Synthetic oligonucleotide
gcaaaugcugacacggauu

SEQ ID NO: 2357789 - RNA, 19 nt, Artificial Sequence
  Description of Artificial Sequence: Synthetic oligonucleotide
gccugauguggucagugau

SEQ ID NO: 2357790 - RNA, 19 nt, Artificial Sequence
  Description of Artificial Sequence: Synthetic oligonucleotide
cgaagcaccuauugcugga

SEQ ID NO: 2357791 - RNA, 19 nt, Artificial Sequence
  Description of Artificial Sequence: Synthetic oligonucleotide
agguugcaaugaaguagua

SEQ ID NO: 2357792 - RNA, 19 nt, Artificial Sequence
  Description of Artificial Sequence: Synthetic oligonucleotide
gccucccauggagugacca

SEQ ID NO: 2357793 - RNA, 19 nt, Artificial Sequence
  Description of Artificial Sequence: Synthetic oligonucleotide
caguggcauucacguaaaa

SEQ ID NO: 2357794 - RNA, 19 nt, Artificial Sequence
  Description of Artificial Sequence: Synthetic oligonucleotide
gguagacagcaaaucucau

SEQ ID NO: 2357795 - RNA, 19 nt, Artificial Sequence
  Description of Artificial Sequence: Synthetic oligonucleotide
cagggaguaacugcccauu

SEQ ID NO: 2357796 - RNA, 19 nt, Artificial Sequence
  Description of Artificial Sequence: Synthetic oligonucleotide
ccucccauggagugaccaa

SEQ ID NO: 2357797 - RNA, 19 nt, Artificial Sequence
  Description of Artificial Sequence: Synthetic oligonucleotide
ggguugcaaauuggagcaa

SEQ ID NO: 2357798 - RNA, 19 nt, Artificial Sequence
  Description of Artificial Sequence: Synthetic oligonucleotide
cauccucuguggguccacu

SEQ ID NO: 2357799 - RNA, 19 nt, Artificial Sequence
  Description of Artificial Sequence: Synthetic oligonucleotide
cgagagagguugcaucgua

SEQ ID NO: 2357800 - RNA, 19 nt, Artificial Sequence
  Description of Artificial Sequence: Synthetic oligonucleotide
agguugcaucguaggccuu

SEQ ID NO: 2357801 - RNA, 19 nt, Artificial Sequence
  Description of Artificial Sequence: Synthetic oligonucleotide
gagcuccguggccucccau

SEQ ID NO: 2357802 - RNA, 19 nt, Artificial Sequence
  Description of Artificial Sequence: Synthetic oligonucleotide
cgacaaggccauguucuga

SEQ ID NO: 2357803 - RNA, 19 nt, Artificial Sequence
  Description of Artificial Sequence: Synthetic oligonucleotide
gggcugguaucuggagcaa

SEQ ID NO: 2357804 - RNA, 19 nt, Artificial Sequence
  Description of Artificial Sequence: Synthetic oligonucleotide
ggcugguaucuggagcaau

SEQ ID NO: 2357805 - RNA, 19 nt, Artificial Sequence
  Description of Artificial Sequence: Synthetic oligonucleotide
cguaggccuuccauuuacu

SEQ ID NO: 2357806 - RNA, 19 nt, Artificial Sequence
  Description of Artificial Sequence: Synthetic oligonucleotide
ggccucccauggagugacc

SEQ ID NO: 2357807 - RNA, 19 nt, Artificial Sequence
  Description of Artificial Sequence: Synthetic oligonucleotide
ccguggccucccauggagu

SEQ ID NO: 2357808 - RNA, 19 nt, Artificial Sequence
  Description of Artificial Sequence: Synthetic oligonucleotide
aauaccguguauuuggcgg

SEQ ID NO: 2357809 - RNA, 19 nt, Artificial Sequence
  Description of Artificial Sequence: Synthetic oligonucleotide
ucgaauaccguguauuugg

SEQ ID NO: 2357810 - RNA, 19 nt, Artificial Sequence
  Description of Artificial Sequence: Synthetic oligonucleotide
uuuucguccaaccacacgu

SEQ ID NO: 2357811 - RNA, 19 nt, Artificial Sequence
  Description of Artificial Sequence: Synthetic oligonucleotide
gucaaugcaagacugaggc

SEQ ID NO: 2357812 - RNA, 19 nt, Artificial Sequence
  Description of Artificial Sequence: Synthetic oligonucleotide
uggguguuggcucagaaug

SEQ ID NO: 2357813 - RNA, 19 nt, Artificial Sequence
  Description of Artificial Sequence: Synthetic oligonucleotide
acugaggcuucacauagcc

SEQ ID NO: 2357814 - RNA, 19 nt, Artificial Sequence
  Description of Artificial Sequence: Synthetic oligonucleotide
caaggugcaaacaucacag

SEQ ID NO: 2357815 - RNA, 19 nt, Artificial Sequence
  Description of Artificial Sequence: Synthetic oligonucleotide
gaacaccauaguuaggagg

SEQ ID NO: 2357816 - RNA, 19 nt, Artificial Sequence
  Description of Artificial Sequence: Synthetic oligonucleotide
cugaauacuagauccgggg

SEQ ID NO: 2357817 - RNA, 19 nt, Artificial Sequence
  Description of Artificial Sequence: Synthetic oligonucleotide
cucaauucggaaucggucc

SEQ ID NO: 2357818 - RNA, 19 nt, Artificial Sequence
  Description of Artificial Sequence: Synthetic oligonucleotide
gaugacaacggaugggcag

SEQ ID NO: 2357819 - RNA, 19 nt, Artificial Sequence
  Description of Artificial Sequence: Synthetic oligonucleotide
ugucaaugcaagacugagg

SEQ ID NO: 2357820 - RNA, 19 nt, Artificial Sequence
  Description of Artificial Sequence: Synthetic oligonucleotide
aguuaggaggccuaagaug

SEQ ID NO: 2357821 - RNA, 19 nt, Artificial Sequence
  Description of Artificial Sequence: Synthetic oligonucleotide
gauguaagcugccacuagc

SEQ ID NO: 2357822 - RNA, 19 nt, Artificial Sequence
  Description of Artificial Sequence: Synthetic oligonucleotide
aggaugacaacggaugggc

SEQ ID NO: 2357823 - RNA, 19 nt, Artificial Sequence
  Description of Artificial Sequence: Synthetic oligonucleotide
ugccguaucacaaugucaa

SEQ ID NO: 2357824 - RNA, 19 nt, Artificial Sequence
  Description of Artificial Sequence: Synthetic oligonucleotide
ucugcaucgaauaccgugu

SEQ ID NO: 2357825 - RNA, 19 nt, Artificial Sequence
  Description of Artificial Sequence: Synthetic oligonucleotide
agacugaggcuucacauag

SEQ ID NO: 2357826 - RNA, 19 nt, Artificial Sequence
  Description of Artificial Sequence: Synthetic oligonucleotide
uguuggcucagaauguccc

SEQ ID NO: 2357827 - RNA, 19 nt, Artificial Sequence
  Description of Artificial Sequence: Synthetic oligonucleotide
aagaacagaggugaugucu

SEQ ID NO: 2357828 - RNA, 19 nt, Artificial Sequence
  Description of Artificial Sequence: Synthetic oligonucleotide
guuguagagggucagcagc

SEQ ID NO: 2357829 - RNA, 19 nt, Artificial Sequence
  Description of Artificial Sequence: Synthetic oligonucleotide
auaguuaggaggccuaaga

SEQ ID NO: 2357830 - RNA, 19 nt, Artificial Sequence
  Description of Artificial Sequence: Synthetic oligonucleotide
gaugucuuuucguccaacc

SEQ ID NO: 2357831 - RNA, 19 nt, Artificial Sequence
  Description of Artificial Sequence: Synthetic oligonucleotide
ucggaaucgguccuggaca

SEQ ID NO: 2357832 - RNA, 19 nt, Artificial Sequence
  Description of Artificial Sequence: Synthetic oligonucleotide
ggaggaacaccauaguuag

SEQ ID NO: 2357833 - RNA, 19 nt, Artificial Sequence
  Description of Artificial Sequence: Synthetic oligonucleotide
gaauaccguguauuuggcg

SEQ ID NO: 2357834 - RNA, 19 nt, Artificial Sequence
  Description of Artificial Sequence: Synthetic oligonucleotide
ucgaagaagagggagggug

SEQ ID NO: 2357835 - RNA, 19 nt, Artificial Sequence
  Description of Artificial Sequence: Synthetic oligonucleotide
ucgguccuggacaucauag

SEQ ID NO: 2357836 - RNA, 19 nt, Artificial Sequence
  Description of Artificial Sequence: Synthetic oligonucleotide
aaacaucacaguggcugcc

SEQ ID NO: 2357837 - RNA, 19 nt, Artificial Sequence
  Description of Artificial Sequence: Synthetic oligonucleotide
aggugcaaacaucacagug

SEQ ID NO: 2357838 - RNA, 19 nt, Artificial Sequence
  Description of Artificial Sequence: Synthetic oligonucleotide
ucugacagcucaauucgga

SEQ ID NO: 2357839 - RNA, 19 nt, Artificial Sequence
  Description of Artificial Sequence: Synthetic oligonucleotide
agaacucggaagcgaagcg

SEQ ID NO: 2357840 - RNA, 19 nt, Artificial Sequence
  Description of Artificial Sequence: Synthetic oligonucleotide
gacagcucaauucggaauc

SEQ ID NO: 2357841 - RNA, 19 nt, Artificial Sequence
  Description of Artificial Sequence: Synthetic oligonucleotide
cacauagcccucugcaucg

SEQ ID NO: 2357842 - RNA, 19 nt, Artificial Sequence
  Description of Artificial Sequence: Synthetic oligonucleotide
aagacgagcaccgggacga

SEQ ID NO: 2357843 - RNA, 19 nt, Artificial Sequence
  Description of Artificial Sequence: Synthetic oligonucleotide
cucugcaucgaauaccgug

SEQ ID NO: 2357844 - RNA, 19 nt, Artificial Sequence
  Description of Artificial Sequence: Synthetic oligonucleotide
auaccguguauuuggcggg

SEQ ID NO: 2357845 - RNA, 19 nt, Artificial Sequence
  Description of Artificial Sequence: Synthetic oligonucleotide
uggacaucauaguggcugg

SEQ ID NO: 2357846 - RNA, 19 nt, Artificial Sequence
  Description of Artificial Sequence: Synthetic oligonucleotide
aaugcaagacugaggcuuc

SEQ ID NO: 2357847 - RNA, 19 nt, Artificial Sequence
  Description of Artificial Sequence: Synthetic oligonucleotide
gaagacgagcaccgggacg

SEQ ID NO: 2357848 - RNA, 19 nt, Artificial Sequence
  Description of Artificial Sequence: Synthetic oligonucleotide
ucaauucggaaucgguccu

SEQ ID NO: 2357849 - RNA, 19 nt, Artificial Sequence
  Description of Artificial Sequence: Synthetic oligonucleotide
ugcugugcacagaacucgg

SEQ ID NO: 2357850 - RNA, 19 nt, Artificial Sequence
  Description of Artificial Sequence: Synthetic oligonucleotide
gagcucacgaggauaagag

SEQ ID NO: 2357851 - RNA, 19 nt, Artificial Sequence
  Description of Artificial Sequence: Synthetic oligonucleotide
acacgugcaggacuugagg

SEQ ID NO: 2357852 - RNA, 19 nt, Artificial Sequence
  Description of Artificial Sequence: Synthetic oligonucleotide
gugcacagaacucggaagc

SEQ ID NO: 2357853 - RNA, 19 nt, Artificial Sequence
  Description of Artificial Sequence: Synthetic oligonucleotide
uaguuaggaggccuaagau

SEQ ID NO: 2357854 - RNA, 19 nt, Artificial Sequence
  Description of Artificial Sequence: Synthetic oligonucleotide
cacgugcaggacuugaggc

SEQ ID NO: 2357855 - RNA, 19 nt, Artificial Sequence
  Description of Artificial Sequence: Synthetic oligonucleotide
guaagcugccacuagcuuc

SEQ ID NO: 2357856 - RNA, 19 nt, Artificial Sequence
  Description of Artificial Sequence: Synthetic oligonucleotide
ucagaaugucccugaagcu

SEQ ID NO: 2357857 - RNA, 19 nt, Artificial Sequence
  Description of Artificial Sequence: Synthetic oligonucleotide
gacaucauaguggcugggg

SEQ ID NO: 2357858 - RNA, 19 nt, Artificial Sequence
  Description of Artificial Sequence: Synthetic oligonucleotide
augucaaugcaagacugag

SEQ ID NO: 2357859 - RNA, 19 nt, Artificial Sequence
  Description of Artificial Sequence: Synthetic oligonucleotide
aagacugaggcuucacaua

SEQ ID NO: 2357860 - RNA, 19 nt, Artificial Sequence
  Description of Artificial Sequence: Synthetic oligonucleotide
agcucacgaggauaagagg

SEQ ID NO: 2357861 - RNA, 19 nt, Artificial Sequence
  Description of Artificial Sequence: Synthetic oligonucleotide
gcucacgaggauaagaggg

SEQ ID NO: 2357862 - RNA, 19 nt, Artificial Sequence
  Description of Artificial Sequence: Synthetic oligonucleotide
uggggcccgaagaacagag

SEQ ID NO: 2357863 - RNA, 19 nt, Artificial Sequence
  Description of Artificial Sequence: Synthetic oligonucleotide
gaugccugucagcaagaag

SEQ ID NO: 2357864 - RNA, 19 nt, Artificial Sequence
  Description of Artificial Sequence: Synthetic oligonucleotide
acggaugggcagcaaagag

SEQ ID NO: 2357865 - RNA, 19 nt, Artificial Sequence
  Description of Artificial Sequence: Synthetic oligonucleotide
ugucagcaagaagagcagg

SEQ ID NO: 2357866 - RNA, 19 nt, Artificial Sequence
  Description of Artificial Sequence: Synthetic oligonucleotide
uucguccaaccacacgucc

SEQ ID NO: 2357867 - RNA, 19 nt, Artificial Sequence
  Description of Artificial Sequence: Synthetic oligonucleotide
ugccacuagcuucuguccc

SEQ ID NO: 2357868 - RNA, 19 nt, Artificial Sequence
  Description of Artificial Sequence: Synthetic oligonucleotide
ugcacagaacucggaagcg

SEQ ID NO: 2357869 - RNA, 19 nt, Artificial Sequence
  Description of Artificial Sequence: Synthetic oligonucleotide
agaaggagagcggcggggc

SEQ ID NO: 2357870 - RNA, 19 nt, Artificial Sequence
  Description of Artificial Sequence: Synthetic oligonucleotide
aguagcaggaaggccacag

SEQ ID NO: 2357871 - RNA, 19 nt, Artificial Sequence
  Description of Artificial Sequence: Synthetic oligonucleotide
aagcgaagcgcaguccccg

SEQ ID NO: 2357872 - RNA, 19 nt, Artificial Sequence
  Description of Artificial Sequence: Synthetic oligonucleotide
cuuuucguccaaccacacg

SEQ ID NO: 2357873 - RNA, 19 nt, Artificial Sequence
  Description of Artificial Sequence: Synthetic oligonucleotide
cagcuggcugccaagcucg

SEQ ID NO: 2357874 - RNA, 19 nt, Artificial Sequence
  Description of Artificial Sequence: Synthetic oligonucleotide
uuugguccgcccugaauac

SEQ ID NO: 2357875 - RNA, 19 nt, Artificial Sequence
  Description of Artificial Sequence: Synthetic oligonucleotide
ucguccaaccacacguccc

SEQ ID NO: 2357876 - RNA, 19 nt, Artificial Sequence
  Description of Artificial Sequence: Synthetic oligonucleotide
aaggugcaaacaucacagu

SEQ ID NO: 2357877 - RNA, 19 nt, Artificial Sequence
  Description of Artificial Sequence: Synthetic oligonucleotide
ugacagcucaauucggaau

SEQ ID NO: 2357878 - RNA, 19 nt, Artificial Sequence
  Description of Artificial Sequence: Synthetic oligonucleotide
gaaucgguccuggacauca

SEQ ID NO: 2357879 - RNA, 19 nt, Artificial Sequence
  Description of Artificial Sequence: Synthetic oligonucleotide
uguauuuggcgggugcugu

SEQ ID NO: 2357880 - RNA, 19 nt, Artificial Sequence
  Description of Artificial Sequence: Synthetic oligonucleotide
aacucggaagcgaagcgca

SEQ ID NO: 2357881 - RNA, 19 nt, Artificial Sequence
  Description of Artificial Sequence: Synthetic oligonucleotide
gaacucggaagcgaagcgc

SEQ ID NO: 2357882 - RNA, 19 nt, Artificial Sequence
  Description of Artificial Sequence: Synthetic oligonucleotide
aucauaguggcuggggaug

SEQ ID NO: 2357883 - RNA, 19 nt, Artificial Sequence
  Description of Artificial Sequence: Synthetic oligonucleotide
agcuccacgggguacgcug

SEQ ID NO: 2357884 - RNA, 19 nt, Artificial Sequence
  Description of Artificial Sequence: Synthetic oligonucleotide
gugcugugcacagaacucg

SEQ ID NO: 2357885 - RNA, 19 nt, Artificial Sequence
  Description of Artificial Sequence: Synthetic oligonucleotide
cuuugguccgcccugaaua

SEQ ID NO: 2357886 - RNA, 19 nt, Artificial Sequence
  Description of Artificial Sequence: Synthetic oligonucleotide
ucuuuucguccaaccacac

SEQ ID NO: 2357887 - RNA, 19 nt, Artificial Sequence
  Description of Artificial Sequence: Synthetic oligonucleotide
uguaagcugccacuagcuu

SEQ ID NO: 2357888 - RNA, 19 nt, Artificial Sequence
  Description of Artificial Sequence: Synthetic oligonucleotide
uccgcccugaauacuagau

SEQ ID NO: 2357889 - RNA, 19 nt, Artificial Sequence
  Description of Artificial Sequence: Synthetic oligonucleotide
uauuuggcgggugcugugc

SEQ ID NO: 2357890 - RNA, 19 nt, Artificial Sequence
  Description of Artificial Sequence: Synthetic oligonucleotide
aucgaauaccguguauuug

SEQ ID NO: 2357891 - RNA, 19 nt, Artificial Sequence
  Description of Artificial Sequence: Synthetic oligonucleotide
acagcucaauucggaaucg

SEQ ID NO: 2357892 - RNA, 19 nt, Artificial Sequence
  Description of Artificial Sequence: Synthetic oligonucleotide
aacggaugggcagcaaaga

SEQ ID NO: 2357893 - RNA, 19 nt, Artificial Sequence
  Description of Artificial Sequence: Synthetic oligonucleotide
ggaagcgaagcgcaguccc

SEQ ID NO: 2357894 - RNA, 19 nt, Artificial Sequence
  Description of Artificial Sequence: Synthetic oligonucleotide
aacaucacaguggcugccu

SEQ ID NO: 2357895 - RNA, 19 nt, Artificial Sequence
  Description of Artificial Sequence: Synthetic oligonucleotide
uuucguccaaccacacguc

SEQ ID NO: 2357896 - RNA, 19 nt, Artificial Sequence
  Description of Artificial Sequence: Synthetic oligonucleotide
ucggaagcgaagcgcaguc

SEQ ID NO: 2357897 - RNA, 19 nt, Artificial Sequence
  Description of Artificial Sequence: Synthetic oligonucleotide
gaagcgcaguccccguggg

SEQ ID NO: 2357898 - RNA, 19 nt, Artificial Sequence
  Description of Artificial Sequence: Synthetic oligonucleotide
cugccacuagcuucugucc

SEQ ID NO: 2357899 - RNA, 19 nt, Artificial Sequence
  Description of Artificial Sequence: Synthetic oligonucleotide
acaccauaguuaggaggcc

SEQ ID NO: 2357900 - RNA, 19 nt, Artificial Sequence
  Description of Artificial Sequence: Synthetic oligonucleotide
acaacggaugggcagcaaa

SEQ ID NO: 2357901 - RNA, 19 nt, Artificial Sequence
  Description of Artificial Sequence: Synthetic oligonucleotide
acgugcaggacuugaggca

SEQ ID NO: 2357902 - RNA, 19 nt, Artificial Sequence
  Description of Artificial Sequence: Synthetic oligonucleotide
agagcucacgaggauaaga

SEQ ID NO: 2357903 - RNA, 19 nt, Artificial Sequence
  Description of Artificial Sequence: Synthetic oligonucleotide
aaugucccugaagcuccac

SEQ ID NO: 2357904 - RNA, 19 nt, Artificial Sequence
  Description of Artificial Sequence: Synthetic oligonucleotide
guaucacaaugucaaugca

SEQ ID NO: 2357905 - RNA, 19 nt, Artificial Sequence
  Description of Artificial Sequence: Synthetic oligonucleotide
ccugaauacuagauccggg

SEQ ID NO: 2357906 - RNA, 19 nt, Artificial Sequence
  Description of Artificial Sequence: Synthetic oligonucleotide
acgaaggagguccuggguu

SEQ ID NO: 2357907 - RNA, 19 nt, Artificial Sequence
  Description of Artificial Sequence: Synthetic oligonucleotide
accacacgucccucagccc

SEQ ID NO: 2357908 - RNA, 19 nt, Artificial Sequence
  Description of Artificial Sequence: Synthetic oligonucleotide
cauaguuaggaggccuaag

SEQ ID NO: 2357909 - RNA, 19 nt, Artificial Sequence
  Description of Artificial Sequence: Synthetic oligonucleotide
gaagaacagaggugauguc

SEQ ID NO: 2357910 - RNA, 19 nt, Artificial Sequence
  Description of Artificial Sequence: Synthetic oligonucleotide
cugaggcuucacauagccc

SEQ ID NO: 2357911 - RNA, 19 nt, Artificial Sequence
  Description of Artificial Sequence: Synthetic oligonucleotide
aagcgcaguccccgugggg

SEQ ID NO: 2357912 - RNA, 19 nt, Artificial Sequence
  Description of Artificial Sequence: Synthetic oligonucleotide
cgcccugaauacuagaucc

SEQ ID NO: 2357913 - RNA, 19 nt, Artificial Sequence
  Description of Artificial Sequence: Synthetic oligonucleotide
ggaacaccauaguuaggag

SEQ ID NO: 2357914 - RNA, 19 nt, Artificial Sequence
  Description of Artificial Sequence: Synthetic oligonucleotide
gacacgugcaggacuugag

SEQ ID NO: 2357915 - RNA, 19 nt, Artificial Sequence
  Description of Artificial Sequence: Synthetic oligonucleotide
auguaagcugccacuagcu

SEQ ID NO: 2357916 - RNA, 19 nt, Artificial Sequence
  Description of Artificial Sequence: Synthetic oligonucleotide
gaaggugucuggcuggggu

SEQ ID NO: 2357917 - RNA, 19 nt, Artificial Sequence
  Description of Artificial Sequence: Synthetic oligonucleotide
uuggguguuggcucagaau

SEQ ID NO: 2357918 - RNA, 19 nt, Artificial Sequence
  Description of Artificial Sequence: Synthetic oligonucleotide
ggaggccuaagauguaagc

SEQ ID NO: 2357919 - RNA, 19 nt, Artificial Sequence
  Description of Artificial Sequence: Synthetic oligonucleotide
ucccugccuucgaagaaga

SEQ ID NO: 2357920 - RNA, 19 nt, Artificial Sequence
  Description of Artificial Sequence: Synthetic oligonucleotide
ggccuguccacgaaggagg

SEQ ID NO: 2357921 - RNA, 19 nt, Artificial Sequence
  Description of Artificial Sequence: Synthetic oligonucleotide
gucuuuucguccaaccaca

SEQ ID NO: 2357922 - RNA, 19 nt, Artificial Sequence
  Description of Artificial Sequence: Synthetic oligonucleotide
uagcccucugcaucgaaua

SEQ ID NO: 2357923 - RNA, 19 nt, Artificial Sequence
  Description of Artificial Sequence: Synthetic oligonucleotide
ugguccgcccugaauacua

SEQ ID NO: 2357924 - RNA, 19 nt, Artificial Sequence
  Description of Artificial Sequence: Synthetic oligonucleotide
ugcaucgaauaccguguau

SEQ ID NO: 2357925 - RNA, 19 nt, Artificial Sequence
  Description of Artificial Sequence: Synthetic oligonucleotide
ggcaguagcaggaaggcca

SEQ ID NO: 2357926 - RNA, 19 nt, Artificial Sequence
  Description of Artificial Sequence: Synthetic oligonucleotide
cacgugccguaucacaaug

SEQ ID NO: 2357927 - RNA, 19 nt, Artificial Sequence
  Description of Artificial Sequence: Synthetic oligonucleotide
agcucagguccggaggaac

SEQ ID NO: 2357928 - RNA, 19 nt, Artificial Sequence
  Description of Artificial Sequence: Synthetic oligonucleotide
uaggaggccuaagauguaa

SEQ ID NO: 2357929 - RNA, 19 nt, Artificial Sequence
  Description of Artificial Sequence: Synthetic oligonucleotide
acgggguacgcuggggccc

SEQ ID NO: 2357930 - RNA, 19 nt, Artificial Sequence
  Description of Artificial Sequence: Synthetic oligonucleotide
cggguccugaagaagaagg

SEQ ID NO: 2357931 - RNA, 19 nt, Artificial Sequence
  Description of Artificial Sequence: Synthetic oligonucleotide
ggccuaagauguaagcugc

SEQ ID NO: 2357932 - RNA, 19 nt, Artificial Sequence
  Description of Artificial Sequence: Synthetic oligonucleotide
ucagguccggaggaacacc

SEQ ID NO: 2357933 - RNA, 19 nt, Artificial Sequence
  Description of Artificial Sequence: Synthetic oligonucleotide
gugggugcagcugagagcu

SEQ ID NO: 2357934 - RNA, 19 nt, Artificial Sequence
  Description of Artificial Sequence: Synthetic oligonucleotide
cacgggguacgcuggggcc

SEQ ID NO: 2357935 - RNA, 19 nt, Artificial Sequence
  Description of Artificial Sequence: Synthetic oligonucleotide
cacagaacucggaagcgaa

SEQ ID NO: 2357936 - RNA, 19 nt, Artificial Sequence
  Description of Artificial Sequence: Synthetic oligonucleotide
agcucaauucggaaucggu

SEQ ID NO: 2357937 - RNA, 19 nt, Artificial Sequence
  Description of Artificial Sequence: Synthetic oligonucleotide
agcaccgggacgacggguc

SEQ ID NO: 2357938 - RNA, 19 nt, Artificial Sequence
  Description of Artificial Sequence: Synthetic oligonucleotide
ugccuucgaagaagaggga

SEQ ID NO: 2357939 - RNA, 19 nt, Artificial Sequence
  Description of Artificial Sequence: Synthetic oligonucleotide
gucccugccuucgaagaag

SEQ ID NO: 2357940 - RNA, 19 nt, Artificial Sequence
  Description of Artificial Sequence: Synthetic oligonucleotide
acagaacucggaagcgaag

SEQ ID NO: 2357941 - RNA, 19 nt, Artificial Sequence
  Description of Artificial Sequence: Synthetic oligonucleotide
cauccgagggcagagcuca

SEQ ID NO: 2357942 - RNA, 19 nt, Artificial Sequence
  Description of Artificial Sequence: Synthetic oligonucleotide
agcgcaguccccguggggu

SEQ ID NO: 2357943 - RNA, 19 nt, Artificial Sequence
  Description of Artificial Sequence: Synthetic oligonucleotide
uuaggaggccuaagaugua

SEQ ID NO: 2357944 - RNA, 19 nt, Artificial Sequence
  Description of Artificial Sequence: Synthetic oligonucleotide
cgaagaagagggagggugg

SEQ ID NO: 2357945 - RNA, 19 nt, Artificial Sequence
  Description of Artificial Sequence: Synthetic oligonucleotide
guguuggcucagaaugucc

SEQ ID NO: 2357946 - RNA, 19 nt, Artificial Sequence
  Description of Artificial Sequence: Synthetic oligonucleotide
gcucagaaugucccugaag

SEQ ID NO: 2357947 - RNA, 19 nt, Artificial Sequence
  Description of Artificial Sequence: Synthetic oligonucleotide
gggacgacggguccugaag

SEQ ID NO: 2357948 - RNA, 19 nt, Artificial Sequence
  Description of Artificial Sequence: Synthetic oligonucleotide
ccacacgucccucagcccc

SEQ ID NO: 2357949 - RNA, 19 nt, Artificial Sequence
  Description of Artificial Sequence: Synthetic oligonucleotide
guacgcuggggcccgaaga

SEQ ID NO: 2357950 - RNA, 19 nt, Artificial Sequence
  Description of Artificial Sequence: Synthetic oligonucleotide
aggaggccuaagauguaag

SEQ ID NO: 2357951 - RNA, 19 nt, Artificial Sequence
  Description of Artificial Sequence: Synthetic oligonucleotide
acgacggguccugaagaag

SEQ ID NO: 2357952 - RNA, 19 nt, Artificial Sequence
  Description of Artificial Sequence: Synthetic oligonucleotide
gacgacggguccugaagaa

SEQ ID NO: 2357953 - RNA, 19 nt, Artificial Sequence
  Description of Artificial Sequence: Synthetic oligonucleotide
caugcaggcuccgggcggg

SEQ ID NO: 2357954 - RNA, 19 nt, Artificial Sequence
  Description of Artificial Sequence: Synthetic oligonucleotide
cagcucaauucggaaucgg

SEQ ID NO: 2357955 - RNA, 19 nt, Artificial Sequence
  Description of Artificial Sequence: Synthetic oligonucleotide
ugacaacggaugggcagca

SEQ ID NO: 2357956 - RNA, 19 nt, Artificial Sequence
  Description of Artificial Sequence: Synthetic oligonucleotide
gccuucgaagaagagggag

SEQ ID NO: 2357957 - RNA, 19 nt, Artificial Sequence
  Description of Artificial Sequence: Synthetic oligonucleotide
cugugcacagaacucggaa

SEQ ID NO: 2357958 - RNA, 19 nt, Artificial Sequence
  Description of Artificial Sequence: Synthetic oligonucleotide
gacgagcaccgggacgacg

SEQ ID NO: 2357959 - RNA, 19 nt, Artificial Sequence
  Description of Artificial Sequence: Synthetic oligonucleotide
cacggcgcaugcaggcucc

SEQ ID NO: 2357960 - RNA, 19 nt, Artificial Sequence
  Description of Artificial Sequence: Synthetic oligonucleotide
guagcaggaaggccacaga

SEQ ID NO: 2357961 - RNA, 19 nt, Artificial Sequence
  Description of Artificial Sequence: Synthetic oligonucleotide
ugcaagacugaggcuucac

SEQ ID NO: 2357962 - RNA, 19 nt, Artificial Sequence
  Description of Artificial Sequence: Synthetic oligonucleotide
gcucaauucggaaucgguc

SEQ ID NO: 2357963 - RNA, 19 nt, Artificial Sequence
  Description of Artificial Sequence: Synthetic oligonucleotide
caaccacacgucccucagc

SEQ ID NO: 2357964 - RNA, 19 nt, Artificial Sequence
  Description of Artificial Sequence: Synthetic oligonucleotide
cccugaauacuagauccgg

SEQ ID NO: 2357965 - RNA, 19 nt, Artificial Sequence
  Description of Artificial Sequence: Synthetic oligonucleotide
uggcgggugcugugcacag

SEQ ID NO: 2357966 - RNA, 19 nt, Artificial Sequence
  Description of Artificial Sequence: Synthetic oligonucleotide
cucagguccggaggaacac

SEQ ID NO: 2357967 - RNA, 19 nt, Artificial Sequence
  Description of Artificial Sequence: Synthetic oligonucleotide
cagguccggaggaacacca

SEQ ID NO: 2357968 - RNA, 19 nt, Artificial Sequence
  Description of Artificial Sequence: Synthetic oligonucleotide
acggguccugaagaagaag

SEQ ID NO: 2357969 - RNA, 19 nt, Artificial Sequence
  Description of Artificial Sequence: Synthetic oligonucleotide
ccguaucacaaugucaaug

SEQ ID NO: 2357970 - RNA, 19 nt, Artificial Sequence
  Description of Artificial Sequence: Synthetic oligonucleotide
caauucggaaucgguccug

SEQ ID NO: 2357971 - RNA, 19 nt, Artificial Sequence
  Description of Artificial Sequence: Synthetic oligonucleotide
guuggguguuggcucagaa

SEQ ID NO: 2357972 - RNA, 19 nt, Artificial Sequence
  Description of Artificial Sequence: Synthetic oligonucleotide
cauaguggcuggggauggg

SEQ ID NO: 2357973 - RNA, 19 nt, Artificial Sequence
  Description of Artificial Sequence: Synthetic oligonucleotide
guccccgugggguuguaga

SEQ ID NO: 2357974 - RNA, 19 nt, Artificial Sequence
  Description of Artificial Sequence: Synthetic oligonucleotide
uccgggcgggcggacaucc

SEQ ID NO: 2357975 - RNA, 19 nt, Artificial Sequence
  Description of Artificial Sequence: Synthetic oligonucleotide
gaagcuccacgggguacgc

SEQ ID NO: 2357976 - RNA, 19 nt, Artificial Sequence
  Description of Artificial Sequence: Synthetic oligonucleotide
gguccgcuccuuugguccg

SEQ ID NO: 2357977 - RNA, 19 nt, Artificial Sequence
  Description of Artificial Sequence: Synthetic oligonucleotide
gcaugcaggcuccgggcgg

SEQ ID NO: 2357978 - RNA, 19 nt, Artificial Sequence
  Description of Artificial Sequence: Synthetic oligonucleotide
gugccguaucacaauguca

SEQ ID NO: 2357979 - RNA, 19 nt, Artificial Sequence
  Description of Artificial Sequence: Synthetic oligonucleotide
uaccguguauuuggcgggu

SEQ ID NO: 2357980 - RNA, 19 nt, Artificial Sequence
  Description of Artificial Sequence: Synthetic oligonucleotide
gcccugaauacuagauccg

SEQ ID NO: 2357981 - RNA, 19 nt, Artificial Sequence
  Description of Artificial Sequence: Synthetic oligonucleotide
aucgguccuggacaucaua

SEQ ID NO: 2357982 - RNA, 19 nt, Artificial Sequence
  Description of Artificial Sequence: Synthetic oligonucleotide
cgaauaccguguauuuggc

SEQ ID NO: 2357983 - RNA, 19 nt, Artificial Sequence
  Description of Artificial Sequence: Synthetic oligonucleotide
ggacgacggguccugaaga

SEQ ID NO: 2357984 - RNA, 19 nt, Artificial Sequence
  Description of Artificial Sequence: Synthetic oligonucleotide
gguguuggcucagaauguc

SEQ ID NO: 2357985 - RNA, 19 nt, Artificial Sequence
  Description of Artificial Sequence: Synthetic oligonucleotide
ggcagcaaagagagagaag

SEQ ID NO: 2357986 - RNA, 19 nt, Artificial Sequence
  Description of Artificial Sequence: Synthetic oligonucleotide
auagcccucugcaucgaau

SEQ ID NO: 2357987 - RNA, 19 nt, Artificial Sequence
  Description of Artificial Sequence: Synthetic oligonucleotide
ggguuguagagggucagca

SEQ ID NO: 2357988 - RNA, 19 nt, Artificial Sequence
  Description of Artificial Sequence: Synthetic oligonucleotide
uugguccgcccugaauacu

SEQ ID NO: 2357989 - RNA, 19 nt, Artificial Sequence
  Description of Artificial Sequence: Synthetic oligonucleotide
caucgaauaccguguauuu

SEQ ID NO: 2357990 - RNA, 19 nt, Artificial Sequence
  Description of Artificial Sequence: Synthetic oligonucleotide
gcuccuuugguccgcccug

SEQ ID NO: 2357991 - RNA, 19 nt, Artificial Sequence
  Description of Artificial Sequence: Synthetic oligonucleotide
agcgaagcgcaguccccgu

SEQ ID NO: 2357992 - RNA, 19 nt, Artificial Sequence
  Description of Artificial Sequence: Synthetic oligonucleotide
ugcaggcuccgggcgggcg

SEQ ID NO: 2357993 - RNA, 19 nt, Artificial Sequence
  Description of Artificial Sequence: Synthetic oligonucleotide
augaugccugucagcaaga

SEQ ID NO: 2357994 - RNA, 19 nt, Artificial Sequence
  Description of Artificial Sequence: Synthetic oligonucleotide
accauaguuaggaggccua

SEQ ID NO: 2357995 - RNA, 19 nt, Artificial Sequence
  Description of Artificial Sequence: Synthetic oligonucleotide
ccaaccacacgucccucag

SEQ ID NO: 2357996 - RNA, 19 nt, Artificial Sequence
  Description of Artificial Sequence: Synthetic oligonucleotide
gcgggcggacauccgaggg

SEQ ID NO: 2357997 - RNA, 19 nt, Artificial Sequence
  Description of Artificial Sequence: Synthetic oligonucleotide
gguacgcuggggcccgaag

SEQ ID NO: 2357998 - RNA, 19 nt, Artificial Sequence
  Description of Artificial Sequence: Synthetic oligonucleotide
agggacacgugcaggacuu

SEQ ID NO: 2357999 - RNA, 19 nt, Artificial Sequence
  Description of Artificial Sequence: Synthetic oligonucleotide
gucccggggcgccccacgg

SEQ ID NO: 2358000 - RNA, 19 nt, Artificial Sequence
  Description of Artificial Sequence: Synthetic oligonucleotide
ccguguauuuggcgggugc

SEQ ID NO: 2358001 - RNA, 19 nt, Artificial Sequence
  Description of Artificial Sequence: Synthetic oligonucleotide
gacggguccugaagaagaa

SEQ ID NO: 2358002 - RNA, 19 nt, Artificial Sequence
  Description of Artificial Sequence: Synthetic oligonucleotide
ccccggacccaccagcucc

SEQ ID NO: 2358003 - RNA, 19 nt, Artificial Sequence
  Description of Artificial Sequence: Synthetic oligonucleotide
gcccucugcaucgaauacc

SEQ ID NO: 2358004 - RNA, 19 nt, Artificial Sequence
  Description of Artificial Sequence: Synthetic oligonucleotide
ggggcauucuccugaaggu

SEQ ID NO: 2358005 - RNA, 19 nt, Artificial Sequence
  Description of Artificial Sequence: Synthetic oligonucleotide
gggcccgaagaacagaggu

SEQ ID NO: 2358006 - RNA, 19 nt, Artificial Sequence
  Description of Artificial Sequence: Synthetic oligonucleotide
aaucgguccuggacaucau

SEQ ID NO: 2358007 - RNA, 19 nt, Artificial Sequence
  Description of Artificial Sequence: Synthetic oligonucleotide
acgugccguaucacaaugu

SEQ ID NO: 2358008 - RNA, 19 nt, Artificial Sequence
  Description of Artificial Sequence: Synthetic oligonucleotide
cgaagcgcaguccccgugg

SEQ ID NO: 2358009 - RNA, 19 nt, Artificial Sequence
  Description of Artificial Sequence: Synthetic oligonucleotide
gugggguuguagaggguca

SEQ ID NO: 2358010 - RNA, 19 nt, Artificial Sequence
  Description of Artificial Sequence: Synthetic oligonucleotide
ucccggggcgccccacggc

SEQ ID NO: 2358011 - RNA, 19 nt, Artificial Sequence
  Description of Artificial Sequence: Synthetic oligonucleotide
accguguauuuggcgggug

SEQ ID NO: 2358012 - RNA, 19 nt, Artificial Sequence
  Description of Artificial Sequence: Synthetic oligonucleotide
gcugagagcucagguccgg

SEQ ID NO: 2358013 - RNA, 19 nt, Artificial Sequence
  Description of Artificial Sequence: Synthetic oligonucleotide
ccgaagaacagaggugaug

SEQ ID NO: 2358014 - RNA, 19 nt, Artificial Sequence
  Description of Artificial Sequence: Synthetic oligonucleotide
ggggccacgugccguauca

SEQ ID NO: 2358015 - RNA, 19 nt, Artificial Sequence
  Description of Artificial Sequence: Synthetic oligonucleotide
uccgcuccuuugguccgcc

SEQ ID NO: 2358016 - RNA, 19 nt, Artificial Sequence
  Description of Artificial Sequence: Synthetic oligonucleotide
cgugccguaucacaauguc

SEQ ID NO: 2358017 - RNA, 19 nt, Artificial Sequence
  Description of Artificial Sequence: Synthetic oligonucleotide
augcaagacugaggcuuca

SEQ ID NO: 2358018 - RNA, 19 nt, Artificial Sequence
  Description of Artificial Sequence: Synthetic oligonucleotide
ccacgggguacgcuggggc

SEQ ID NO: 2358019 - RNA, 19 nt, Artificial Sequence
  Description of Artificial Sequence: Synthetic oligonucleotide
ggccacgugccguaucaca

SEQ ID NO: 2358020 - RNA, 19 nt, Artificial Sequence
  Description of Artificial Sequence: Synthetic oligonucleotide
ggcauucuccugaaggugu

SEQ ID NO: 2358021 - RNA, 19 nt, Artificial Sequence
  Description of Artificial Sequence: Synthetic oligonucleotide
accgggacgacggguccug

SEQ ID NO: 2358022 - RNA, 19 nt, Artificial Sequence
  Description of Artificial Sequence: Synthetic oligonucleotide
aguccccgugggguuguag

SEQ ID NO: 2358023 - RNA, 19 nt, Artificial Sequence
  Description of Artificial Sequence: Synthetic oligonucleotide
acauagcccucugcaucga

SEQ ID NO: 2358024 - RNA, 19 nt, Artificial Sequence
  Description of Artificial Sequence: Synthetic oligonucleotide
ccgggguccgcuccuuugg

SEQ ID NO: 2358025 - RNA, 19 nt, Artificial Sequence
  Description of Artificial Sequence: Synthetic oligonucleotide
gcgggugcugugcacagaa

SEQ ID NO: 2358026 - RNA, 19 nt, Artificial Sequence
  Description of Artificial Sequence: Synthetic oligonucleotide
gguccggaggaacaccaua

SEQ ID NO: 2358027 - RNA, 19 nt, Artificial Sequence
  Description of Artificial Sequence: Synthetic oligonucleotide
ggaugacaacggaugggca

SEQ ID NO: 2358028 - RNA, 19 nt, Artificial Sequence
  Description of Artificial Sequence: Synthetic oligonucleotide
gcacagaacucggaagcga

SEQ ID NO: 2358029 - RNA, 19 nt, Artificial Sequence
  Description of Artificial Sequence: Synthetic oligonucleotide
gcuccacgggguacgcugg

SEQ ID NO: 2358030 - RNA, 19 nt, Artificial Sequence
  Description of Artificial Sequence: Synthetic oligonucleotide
cauagcccucugcaucgaa

SEQ ID NO: 2358031 - RNA, 19 nt, Artificial Sequence
  Description of Artificial Sequence: Synthetic oligonucleotide
gguccgcccugaauacuag

SEQ ID NO: 2358032 - RNA, 19 nt, Artificial Sequence
  Description of Artificial Sequence: Synthetic oligonucleotide
caccauaguuaggaggccu

SEQ ID NO: 2358033 - RNA, 19 nt, Artificial Sequence
  Description of Artificial Sequence: Synthetic oligonucleotide
ccgcccugaauacuagauc

SEQ ID NO: 2358034 - RNA, 19 nt, Artificial Sequence
  Description of Artificial Sequence: Synthetic oligonucleotide
cgacggguccugaagaaga

SEQ ID NO: 2358035 - RNA, 19 nt, Artificial Sequence
  Description of Artificial Sequence: Synthetic oligonucleotide
gcaucgaauaccguguauu

SEQ ID NO: 2358036 - RNA, 19 nt, Artificial Sequence
  Description of Artificial Sequence: Synthetic oligonucleotide
ggacacgugcaggacuuga

SEQ ID NO: 2358037 - RNA, 19 nt, Artificial Sequence
  Description of Artificial Sequence: Synthetic oligonucleotide
cgcaugcaggcuccgggcg

SEQ ID NO: 2358038 - RNA, 19 nt, Artificial Sequence
  Description of Artificial Sequence: Synthetic oligonucleotide
ggggcccgaagaacagagg

SEQ ID NO: 2358039 - RNA, 19 nt, Artificial Sequence
  Description of Artificial Sequence: Synthetic oligonucleotide
ggucccugccuucgaagaa

SEQ ID NO: 2358040 - RNA, 19 nt, Artificial Sequence
  Description of Artificial Sequence: Synthetic oligonucleotide
cacgaaggagguccugggu

SEQ ID NO: 2358041 - RNA, 19 nt, Artificial Sequence
  Description of Artificial Sequence: Synthetic oligonucleotide
auccgagggcagagcucac

SEQ ID NO: 2358042 - RNA, 19 nt, Artificial Sequence
  Description of Artificial Sequence: Synthetic oligonucleotide
ugggugcagcugagagcuc

SEQ ID NO: 2358043 - RNA, 19 nt, Artificial Sequence
  Description of Artificial Sequence: Synthetic oligonucleotide
ggcagagcucacgaggaua

SEQ ID NO: 2358044 - RNA, 19 nt, Artificial Sequence
  Description of Artificial Sequence: Synthetic oligonucleotide
gcgaagcgcaguccccgug

SEQ ID NO: 2358045 - RNA, 19 nt, Artificial Sequence
  Description of Artificial Sequence: Synthetic oligonucleotide
gcaccgggacgacgggucc

SEQ ID NO: 2358046 - RNA, 19 nt, Artificial Sequence
  Description of Artificial Sequence: Synthetic oligonucleotide
gacaacggaugggcagcaa

SEQ ID NO: 2358047 - RNA, 19 nt, Artificial Sequence
  Description of Artificial Sequence: Synthetic oligonucleotide
gccgggguccgcuccuuug

SEQ ID NO: 2358048 - RNA, 19 nt, Artificial Sequence
  Description of Artificial Sequence: Synthetic oligonucleotide
cugagagcucagguccgga

SEQ ID NO: 2358049 - RNA, 19 nt, Artificial Sequence
  Description of Artificial Sequence: Synthetic oligonucleotide
gggguccgcuccuuugguc

SEQ ID NO: 2358050 - RNA, 19 nt, Artificial Sequence
  Description of Artificial Sequence: Synthetic oligonucleotide
ggcucagaaugucccugaa

SEQ ID NO: 2358051 - RNA, 19 nt, Artificial Sequence
  Description of Artificial Sequence: Synthetic oligonucleotide
cuccuuugguccgcccuga

SEQ ID NO: 2358052 - RNA, 19 nt, Artificial Sequence
  Description of Artificial Sequence: Synthetic oligonucleotide
cucggaagcgaagcgcagu

SEQ ID NO: 2358053 - RNA, 19 nt, Artificial Sequence
  Description of Artificial Sequence: Synthetic oligonucleotide
gggcgggcggacauccgag

SEQ ID NO: 2358054 - RNA, 19 nt, Artificial Sequence
  Description of Artificial Sequence: Synthetic oligonucleotide
guccgcuccuuugguccgc

SEQ ID NO: 2358055 - RNA, 19 nt, Artificial Sequence
  Description of Artificial Sequence: Synthetic oligonucleotide
cuggggcccgaagaacaga

SEQ ID NO: 2358056 - RNA, 19 nt, Artificial Sequence
  Description of Artificial Sequence: Synthetic oligonucleotide
cgccccacggcgcaugcag

SEQ ID NO: 2358057 - RNA, 19 nt, Artificial Sequence
  Description of Artificial Sequence: Synthetic oligonucleotide
gguccuggguuggguguug

SEQ ID NO: 2358058 - RNA, 19 nt, Artificial Sequence
  Description of Artificial Sequence: Synthetic oligonucleotide
agguccggaggaacaccau

SEQ ID NO: 2358059 - RNA, 19 nt, Artificial Sequence
  Description of Artificial Sequence: Synthetic oligonucleotide
ggguguuggcucagaaugu

SEQ ID NO: 2358060 - RNA, 19 nt, Artificial Sequence
  Description of Artificial Sequence: Synthetic oligonucleotide
ggaaucgguccuggacauc

SEQ ID NO: 2358061 - RNA, 19 nt, Artificial Sequence
  Description of Artificial Sequence: Synthetic oligonucleotide
gagcaccgggacgacgggu

SEQ ID NO: 2358062 - RNA, 19 nt, Artificial Sequence
  Description of Artificial Sequence: Synthetic oligonucleotide
ggguuggguguuggcucag

SEQ ID NO: 2358063 - RNA, 19 nt, Artificial Sequence
  Description of Artificial Sequence: Synthetic oligonucleotide
agcuggcugccaagcucgu

SEQ ID NO: 2358064 - RNA, 19 nt, Artificial Sequence
  Description of Artificial Sequence: Synthetic oligonucleotide
gggacacgugcaggacuug

SEQ ID NO: 2358065 - RNA, 19 nt, Artificial Sequence
  Description of Artificial Sequence: Synthetic oligonucleotide
ccauaguuaggaggccuaa

SEQ ID NO: 2358066 - RNA, 19 nt, Artificial Sequence
  Description of Artificial Sequence: Synthetic oligonucleotide
cggaagcgaagcgcagucc

SEQ ID NO: 2358067 - RNA, 19 nt, Artificial Sequence
  Description of Artificial Sequence: Synthetic oligonucleotide
cgagcaccgggacgacggg

SEQ ID NO: 2358068 - RNA, 19 nt, Artificial Sequence
  Description of Artificial Sequence: Synthetic oligonucleotide
caguagcaggaaggccaca

SEQ ID NO: 2358069 - RNA, 19 nt, Artificial Sequence
  Description of Artificial Sequence: Synthetic oligonucleotide
ggcggacauccgagggcag

SEQ ID NO: 2358070 - RNA, 19 nt, Artificial Sequence
  Description of Artificial Sequence: Synthetic oligonucleotide
uggucccggggcgccccac

SEQ ID NO: 2358071 - RNA, 19 nt, Artificial Sequence
  Description of Artificial Sequence: Synthetic oligonucleotide
gggcaggaugacaacggau

SEQ ID NO: 2358072 - RNA, 19 nt, Artificial Sequence
  Description of Artificial Sequence: Synthetic oligonucleotide
ccggaggaacaccauaguu

SEQ ID NO: 2358073 - RNA, 19 nt, Artificial Sequence
  Description of Artificial Sequence: Synthetic oligonucleotide
caggcuccgggcgggcgga

SEQ ID NO: 2358074 - RNA, 19 nt, Artificial Sequence
  Description of Artificial Sequence: Synthetic oligonucleotide
ccuggucccggggcgcccc

SEQ ID NO: 2358075 - RNA, 19 nt, Artificial Sequence
  Description of Artificial Sequence: Synthetic oligonucleotide
cuccgggcgggcggacauc

SEQ ID NO: 2358076 - RNA, 19 nt, Artificial Sequence
  Description of Artificial Sequence: Synthetic oligonucleotide
gcuggcugccaagcucguc

SEQ ID NO: 2358077 - RNA, 19 nt, Artificial Sequence
  Description of Artificial Sequence: Synthetic oligonucleotide
gggccacgugccguaucac

SEQ ID NO: 2358078 - RNA, 19 nt, Artificial Sequence
  Description of Artificial Sequence: Synthetic oligonucleotide
cgggguacgcuggggcccg

SEQ ID NO: 2358079 - RNA, 19 nt, Artificial Sequence
  Description of Artificial Sequence: Synthetic oligonucleotide
ccgggcgggcggacauccg

SEQ ID NO: 2358080 - RNA, 19 nt, Artificial Sequence
  Description of Artificial Sequence: Synthetic oligonucleotide
ccgcuccuuugguccgccc

SEQ ID NO: 2358081 - RNA, 19 nt, Artificial Sequence
  Description of Artificial Sequence: Synthetic oligonucleotide
gggcagagcucacgaggau

SEQ ID NO: 2358082 - RNA, 19 nt, Artificial Sequence
  Description of Artificial Sequence: Synthetic oligonucleotide
cguguauuuggcgggugcu

SEQ ID NO: 2358083 - RNA, 19 nt, Artificial Sequence
  Description of Artificial Sequence: Synthetic oligonucleotide
gccuguccacgaaggaggu

SEQ ID NO: 2358084 - RNA, 19 nt, Artificial Sequence
  Description of Artificial Sequence: Synthetic oligonucleotide
ggcgggugcugugcacaga

SEQ ID NO: 2358085 - RNA, 19 nt, Artificial Sequence
  Description of Artificial Sequence: Synthetic oligonucleotide
ccuuugguccgcccugaau

SEQ ID NO: 2358086 - RNA, 19 nt, Artificial Sequence
  Description of Artificial Sequence: Synthetic oligonucleotide
ccacgugccguaucacaau

SEQ ID NO: 2358087 - RNA, 19 nt, Artificial Sequence
  Description of Artificial Sequence: Synthetic oligonucleotide
ccuggacaucauaguggcu

SEQ ID NO: 2358088 - RNA, 19 nt, Artificial Sequence
  Description of Artificial Sequence: Synthetic oligonucleotide
cggaaucgguccuggacau

SEQ ID NO: 2358089 - RNA, 19 nt, Artificial Sequence
  Description of Artificial Sequence: Synthetic oligonucleotide
caccgggacgacggguccu

SEQ ID NO: 2358090 - RNA, 19 nt, Artificial Sequence
  Description of Artificial Sequence: Synthetic oligonucleotide
gcuccgggcgggcggacau

SEQ ID NO: 2358091 - RNA, 19 nt, Artificial Sequence
  Description of Artificial Sequence: Synthetic oligonucleotide
cccgaagaacagaggugau

SEQ ID NO: 2358092 - RNA, 19 nt, Artificial Sequence
  Description of Artificial Sequence: Synthetic oligonucleotide
ggcuccgggcgggcggaca

SEQ ID NO: 2358093 - RNA, 19 nt, Artificial Sequence
  Description of Artificial Sequence: Synthetic oligonucleotide
cggcgcaugcaggcuccgg

SEQ ID NO: 2358094 - RNA, 19 nt, Artificial Sequence
  Description of Artificial Sequence: Synthetic oligonucleotide
ccucugcaucgaauaccgu

SEQ ID NO: 2358095 - RNA, 19 nt, Artificial Sequence
  Description of Artificial Sequence: Synthetic oligonucleotide
ggguacgcuggggcccgaa

SEQ ID NO: 2358096 - RNA, 19 nt, Artificial Sequence
  Description of Artificial Sequence: Synthetic oligonucleotide
cgggacgacggguccugaa

SEQ ID NO: 2358097 - RNA, 19 nt, Artificial Sequence
  Description of Artificial Sequence: Synthetic oligonucleotide
gcaguccccgugggguugu

SEQ ID NO: 2358098 - RNA, 19 nt, Artificial Sequence
  Description of Artificial Sequence: Synthetic oligonucleotide
ccggacccaccagcuccug

SEQ ID NO: 2358099 - RNA, 19 nt, Artificial Sequence
  Description of Artificial Sequence: Synthetic oligonucleotide
gcgcaguccccgugggguu

SEQ ID NO: 2358100 - RNA, 19 nt, Artificial Sequence
  Description of Artificial Sequence: Synthetic oligonucleotide
gcgccccacggcgcaugca

SEQ ID NO: 2358101 - RNA, 19 nt, Artificial Sequence
  Description of Artificial Sequence: Synthetic oligonucleotide
cggggcgccccacggcgca

SEQ ID NO: 2358102 - RNA, 19 nt, Artificial Sequence
  Description of Artificial Sequence: Synthetic oligonucleotide
caguccccgugggguugua

SEQ ID NO: 2358103 - RNA, 19 nt, Artificial Sequence
  Description of Artificial Sequence: Synthetic oligonucleotide
gggguacgcuggggcccga

SEQ ID NO: 2358104 - RNA, 19 nt, Artificial Sequence
  Description of Artificial Sequence: Synthetic oligonucleotide
cgggguccgcuccuuuggu

SEQ ID NO: 2358105 - RNA, 19 nt, Artificial Sequence
  Description of Artificial Sequence: Synthetic oligonucleotide
ccgggacgacggguccuga

SEQ ID NO: 2358106 - RNA, 19 nt, Artificial Sequence
  Description of Artificial Sequence: Synthetic oligonucleotide
ggggcgccccacggcgcau

SEQ ID NO: 2358107 - RNA, 19 nt, Artificial Sequence
  Description of Artificial Sequence: Synthetic oligonucleotide
uuuauugcgccccaggagg

SEQ ID NO: 2358108 - RNA, 19 nt, Artificial Sequence
  Description of Artificial Sequence: Synthetic oligonucleotide
gaguauuugagguaggugc

SEQ ID NO: 2358109 - RNA, 19 nt, Artificial Sequence
  Description of Artificial Sequence: Synthetic oligonucleotide
guuggaaccguuuauugcg

SEQ ID NO: 2358110 - RNA, 19 nt, Artificial Sequence
  Description of Artificial Sequence: Synthetic oligonucleotide
aaccguacggaaccgguac

SEQ ID NO: 2358111 - RNA, 19 nt, Artificial Sequence
  Description of Artificial Sequence: Synthetic oligonucleotide
ugcaccagcgcccggaucg

SEQ ID NO: 2358112 - RNA, 19 nt, Artificial Sequence
  Description of Artificial Sequence: Synthetic oligonucleotide
guaaccaugacgacggccg

SEQ ID NO: 2358113 - RNA, 19 nt, Artificial Sequence
  Description of Artificial Sequence: Synthetic oligonucleotide
guugccaagggugagagcc

SEQ ID NO: 2358114 - RNA, 19 nt, Artificial Sequence
  Description of Artificial Sequence: Synthetic oligonucleotide
uagaugcgcgccaaggagg

SEQ ID NO: 2358115 - RNA, 19 nt, Artificial Sequence
  Description of Artificial Sequence: Synthetic oligonucleotide
aaacagaacgcagcaucgc

SEQ ID NO: 2358116 - RNA, 19 nt, Artificial Sequence
  Description of Artificial Sequence: Synthetic oligonucleotide
gaucgaguauuugagguag

SEQ ID NO: 2358117 - RNA, 19 nt, Artificial Sequence
  Description of Artificial Sequence: Synthetic oligonucleotide
cuggccucggcguagaugc

SEQ ID NO: 2358118 - RNA, 19 nt, Artificial Sequence
  Description of Artificial Sequence: Synthetic oligonucleotide
aacagaacgcagcaucgcu

SEQ ID NO: 2358119 - RNA, 19 nt, Artificial Sequence
  Description of Artificial Sequence: Synthetic oligonucleotide
aguauuugagguaggugcg

SEQ ID NO: 2358120 - RNA, 19 nt, Artificial Sequence
  Description of Artificial Sequence: Synthetic oligonucleotide
guacggaaccgguacaccg

SEQ ID NO: 2358121 - RNA, 19 nt, Artificial Sequence
  Description of Artificial Sequence: Synthetic oligonucleotide
aauggaggcgucgccaggg

SEQ ID NO: 2358122 - RNA, 19 nt, Artificial Sequence
  Description of Artificial Sequence: Synthetic oligonucleotide
auuugagguaggugcgccc

SEQ ID NO: 2358123 - RNA, 19 nt, Artificial Sequence
  Description of Artificial Sequence: Synthetic oligonucleotide
uuugagguaggugcgcccg

SEQ ID NO: 2358124 - RNA, 19 nt, Artificial Sequence
  Description of Artificial Sequence: Synthetic oligonucleotide
uuauugcgccccaggaggg

SEQ ID NO: 2358125 - RNA, 19 nt, Artificial Sequence
  Description of Artificial Sequence: Synthetic oligonucleotide
cagcguaucguucugcacc

SEQ ID NO: 2358126 - RNA, 19 nt, Artificial Sequence
  Description of Artificial Sequence: Synthetic oligonucleotide
  modified_base (8)..(8): a, c, u, g, unknown or other
uugaaggngccguuggcgc

SEQ ID NO: 2358127 - RNA, 19 nt, Artificial Sequence
  Description of Artificial Sequence: Synthetic oligonucleotide
  modified_base (9)..(9): a, c, u, g, unknown or other
cuugaaggngccguuggcg

SEQ ID NO: 2358128 - RNA, 19 nt, Artificial Sequence
  Description of Artificial Sequence: Synthetic oligonucleotide
ugcuggucgaaccacgcca

SEQ ID NO: 2358129 - RNA, 19 nt, Artificial Sequence
  Description of Artificial Sequence: Synthetic oligonucleotide
guagaugcgcgccaaggag

SEQ ID NO: 2358130 - RNA, 19 nt, Artificial Sequence
  Description of Artificial Sequence: Synthetic oligonucleotide
  modified_base (19)..(19): a, c, u, g, unknown or other
ugcgguucagcuugaaggn

SEQ ID NO: 2358131 - RNA, 19 nt, Artificial Sequence
  Description of Artificial Sequence: Synthetic oligonucleotide
agcaaagcgccgcgcaacc

SEQ ID NO: 2358132 - RNA, 19 nt, Artificial Sequence
  Description of Artificial Sequence: Synthetic oligonucleotide
  modified_base (11)..(11): a, c, u, g, unknown or other
agcuugaaggngccguugg

SEQ ID NO: 2358133 - RNA, 19 nt, Artificial Sequence
  Description of Artificial Sequence: Synthetic oligonucleotide
  modified_base (14)..(14): a, c, u, g, unknown or other
uucagcuugaaggngccgu

SEQ ID NO: 2358134 - RNA, 19 nt, Artificial Sequence
  Description of Artificial Sequence: Synthetic oligonucleotide
ucuagguuggaaccguuua

SEQ ID NO: 2358135 - RNA, 19 nt, Artificial Sequence
  Description of Artificial Sequence: Synthetic oligonucleotide
cagaacgcagcaucgcugg

SEQ ID NO: 2358136 - RNA, 19 nt, Artificial Sequence
  Description of Artificial Sequence: Synthetic oligonucleotide
ccuaaagcaaacagaacgc

SEQ ID NO: 2358137 - RNA, 19 nt, Artificial Sequence
  Description of Artificial Sequence: Synthetic oligonucleotide
guaucguucugcaccagcg

SEQ ID NO: 2358138 - RNA, 19 nt, Artificial Sequence
  Description of Artificial Sequence: Synthetic oligonucleotide
acagacaugguggccaggg

SEQ ID NO: 2358139 - RNA, 19 nt, Artificial Sequence
  Description of Artificial Sequence: Synthetic oligonucleotide
  modified_base (7)..(7): a, c, u, g, unknown or other
ugaaggngccguuggcgcc

SEQ ID NO: 2358140 - RNA, 19 nt, Artificial Sequence
  Description of Artificial Sequence: Synthetic oligonucleotide
gaaccgguacaccgcaggg

SEQ ID NO: 2358141 - RNA, 19 nt, Artificial Sequence
  Description of Artificial Sequence: Synthetic oligonucleotide
uaucguucugcaccagcgc

SEQ ID NO: 2358142 - RNA, 19 nt, Artificial Sequence
  Description of Artificial Sequence: Synthetic oligonucleotide
uucccgucggcgcucgucg

SEQ ID NO: 2358143 - RNA, 19 nt, Artificial Sequence
  Description of Artificial Sequence: Synthetic oligonucleotide
uuggaaccguuuauugcgc

SEQ ID NO: 2358144 - RNA, 19 nt, Artificial Sequence
  Description of Artificial Sequence: Synthetic oligonucleotide
agguuggaaccguuuauug

SEQ ID NO: 2358145 - RNA, 19 nt, Artificial Sequence
  Description of Artificial Sequence: Synthetic oligonucleotide
uauuugagguaggugcgcc

SEQ ID NO: 2358146 - RNA, 19 nt, Artificial Sequence
  Description of Artificial Sequence: Synthetic oligonucleotide
uacggaaccgguacaccgc

SEQ ID NO: 2358147 - RNA, 19 nt, Artificial Sequence
  Description of Artificial Sequence: Synthetic oligonucleotide
uggccuugugcgcacgccg

SEQ ID NO: 2358148 - RNA, 19 nt, Artificial Sequence
  Description of Artificial Sequence: Synthetic oligonucleotide
ucugcuggucgaaccacgc

SEQ ID NO: 2358149 - RNA, 19 nt, Artificial Sequence
  Description of Artificial Sequence: Synthetic oligonucleotide
cuucucuugggcugcgcgg

SEQ ID NO: 2358150 - RNA, 19 nt, Artificial Sequence
  Description of Artificial Sequence: Synthetic oligonucleotide
uuuucuagguuggaaccgu

SEQ ID NO: 2358151 - RNA, 19 nt, Artificial Sequence
  Description of Artificial Sequence: Synthetic oligonucleotide
caagggugagagccaaugg

SEQ ID NO: 2358152 - RNA, 19 nt, Artificial Sequence
  Description of Artificial Sequence: Synthetic oligonucleotide
caaagcgccgcgcaaccgg

SEQ ID NO: 2358153 - RNA, 19 nt, Artificial Sequence
  Description of Artificial Sequence: Synthetic oligonucleotide
gaaccguuuauugcgcccc

SEQ ID NO: 2358154 - RNA, 19 nt, Artificial Sequence
  Description of Artificial Sequence: Synthetic oligonucleotide
gguuggaaccguuuauugc

SEQ ID NO: 2358155 - RNA, 19 nt, Artificial Sequence
  Description of Artificial Sequence: Synthetic oligonucleotide
uacaccgcaggguucgcgc

SEQ ID NO: 2358156 - RNA, 19 nt, Artificial Sequence
  Description of Artificial Sequence: Synthetic oligonucleotide
ggugagagccaauggaggc

SEQ ID NO: 2358157 - RNA, 19 nt, Artificial Sequence
  Description of Artificial Sequence: Synthetic oligonucleotide
gaacgcagcaucgcugggg

SEQ ID NO: 2358158 - RNA, 19 nt, Artificial Sequence
  Description of Artificial Sequence: Synthetic oligonucleotide
ccgguaaccaugacgacgg

SEQ ID NO: 2358159 - RNA, 19 nt, Artificial Sequence
  Description of Artificial Sequence: Synthetic oligonucleotide
augcgcgccaaggaggagc

SEQ ID NO: 2358160 - RNA, 19 nt, Artificial Sequence
  Description of Artificial Sequence: Synthetic oligonucleotide
agggugagagccaauggag

SEQ ID NO: 2358161 - RNA, 19 nt, Artificial Sequence
  Description of Artificial Sequence: Synthetic oligonucleotide
  modified_base (6)..(6): a, c, u, g, unknown or other
gaaggngccguuggcgccg

SEQ ID NO: 2358162 - RNA, 19 nt, Artificial Sequence
  Description of Artificial Sequence: Synthetic oligonucleotide
agcguaucguucugcacca

SEQ ID NO: 2358163 - RNA, 19 nt, Artificial Sequence
  Description of Artificial Sequence: Synthetic oligonucleotide
agccaauggaggcgucgcc

SEQ ID NO: 2358164 - RNA, 19 nt, Artificial Sequence
  Description of Artificial Sequence: Synthetic oligonucleotide
gugagagccaauggaggcg

SEQ ID NO: 2358165 - RNA, 19 nt, Artificial Sequence
  Description of Artificial Sequence: Synthetic oligonucleotide
ucgaaccacgccaccuucc

SEQ ID NO: 2358166 - RNA, 19 nt, Artificial Sequence
  Description of Artificial Sequence: Synthetic oligonucleotide
acaccgcaggguucgcgcc

SEQ ID NO: 2358167 - RNA, 19 nt, Artificial Sequence
  Description of Artificial Sequence: Synthetic oligonucleotide
uggaaccguuuauugcgcc

SEQ ID NO: 2358168 - RNA, 19 nt, Artificial Sequence
  Description of Artificial Sequence: Synthetic oligonucleotide
ucgaguauuugagguaggu

SEQ ID NO: 2358169 - RNA, 19 nt, Artificial Sequence
  Description of Artificial Sequence: Synthetic oligonucleotide
cuugcgguucagcuugaag

SEQ ID NO: 2358170 - RNA, 19 nt, Artificial Sequence
  Description of Artificial Sequence: Synthetic oligonucleotide
ggaaccgguacaccgcagg

SEQ ID NO: 2358171 - RNA, 19 nt, Artificial Sequence
  Description of Artificial Sequence: Synthetic oligonucleotide
cuuggcgcggggcugcagg

SEQ ID NO: 2358172 - RNA, 19 nt, Artificial Sequence
  Description of Artificial Sequence: Synthetic oligonucleotide
cuugugcgcacgccgcucg

SEQ ID NO: 2358173 - RNA, 19 nt, Artificial Sequence
  Description of Artificial Sequence: Synthetic oligonucleotide
agcagcguaucguucugca

SEQ ID NO: 2358174 - RNA, 19 nt, Artificial Sequence
  Description of Artificial Sequence: Synthetic oligonucleotide
ugcgcgccaaggaggagcc

SEQ ID NO: 2358175 - RNA, 19 nt, Artificial Sequence
  Description of Artificial Sequence: Synthetic oligonucleotide
  modified_base (2)..(2): a, c, u, g, unknown or other
gngccguuggcgccggugc

SEQ ID NO: 2358176 - RNA, 19 nt, Artificial Sequence
  Description of Artificial Sequence: Synthetic oligonucleotide
cuggccggcguccuguccg

SEQ ID NO: 2358177 - RNA, 19 nt, Artificial Sequence
  Description of Artificial Sequence: Synthetic oligonucleotide
augacgacggccguugcca

SEQ ID NO: 2358178 - RNA, 19 nt, Artificial Sequence
  Description of Artificial Sequence: Synthetic oligonucleotide
cuugcgggccuucccgucg

SEQ ID NO: 2358179 - RNA, 19 nt, Artificial Sequence
  Description of Artificial Sequence: Synthetic oligonucleotide
aggccauuggcgccgccgg

SEQ ID NO: 2358180 - RNA, 19 nt, Artificial Sequence
  Description of Artificial Sequence: Synthetic oligonucleotide
caugacgacggccguugcc

SEQ ID NO: 2358181 - RNA, 19 nt, Artificial Sequence
  Description of Artificial Sequence: Synthetic oligonucleotide
accacgccaccuuccuggc

SEQ ID NO: 2358182 - RNA, 19 nt, Artificial Sequence
  Description of Artificial Sequence: Synthetic oligonucleotide
ggugcgcccguucugcugg

SEQ ID NO: 2358183 - RNA, 19 nt, Artificial Sequence
  Description of Artificial Sequence: Synthetic oligonucleotide
uucuagguuggaaccguuu

SEQ ID NO: 2358184 - RNA, 19 nt, Artificial Sequence
  Description of Artificial Sequence: Synthetic oligonucleotide
guauuugagguaggugcgc

SEQ ID NO: 2358185 - RNA, 19 nt, Artificial Sequence
  Description of Artificial Sequence: Synthetic oligonucleotide
acgacggccguugccaagg

SEQ ID NO: 2358186 - RNA, 19 nt, Artificial Sequence
  Description of Artificial Sequence: Synthetic oligonucleotide
aaccguuuauugcgcccca

SEQ ID NO: 2358187 - RNA, 19 nt, Artificial Sequence
  Description of Artificial Sequence: Synthetic oligonucleotide
  modified_base (13)..(13): a, c, u, g, unknown or other
ucagcuugaaggngccguu

SEQ ID NO: 2358188 - RNA, 19 nt, Artificial Sequence
  Description of Artificial Sequence: Synthetic oligonucleotide
agaacgcagcaucgcuggg

SEQ ID NO: 2358189 - RNA, 19 nt, Artificial Sequence
  Description of Artificial Sequence: Synthetic oligonucleotide
auugcgccccaggagggcg

SEQ ID NO: 2358190 - RNA, 19 nt, Artificial Sequence
  Description of Artificial Sequence: Synthetic oligonucleotide
acagaacgcagcaucgcug

SEQ ID NO: 2358191 - RNA, 19 nt, Artificial Sequence
  Description of Artificial Sequence: Synthetic oligonucleotide
acggccguugccaagggug

SEQ ID NO: 2358192 - RNA, 19 nt, Artificial Sequence
  Description of Artificial Sequence: Synthetic oligonucleotide
ucuugggcugcgcgggcgc

SEQ ID NO: 2358193 - RNA, 19 nt, Artificial Sequence
  Description of Artificial Sequence: Synthetic oligonucleotide
uagguuggaaccguuuauu

SEQ ID NO: 2358194 - RNA, 19 nt, Artificial Sequence
  Description of Artificial Sequence: Synthetic oligonucleotide
uugccaagggugagagcca

SEQ ID NO: 2358195 - RNA, 19 nt, Artificial Sequence
  Description of Artificial Sequence: Synthetic oligonucleotide
guacuugcccggcugguuc

SEQ ID NO: 2358196 - RNA, 19 nt, Artificial Sequence
  Description of Artificial Sequence: Synthetic oligonucleotide
uaaccaugacgacggccgu

SEQ ID NO: 2358197 - RNA, 19 nt, Artificial Sequence
  Description of Artificial Sequence: Synthetic oligonucleotide
uugcgggccuucccgucgg

SEQ ID NO: 2358198 - RNA, 19 nt, Artificial Sequence
  Description of Artificial Sequence: Synthetic oligonucleotide
ggaaccguuuauugcgccc

SEQ ID NO: 2358199 - RNA, 19 nt, Artificial Sequence
  Description of Artificial Sequence: Synthetic oligonucleotide
guaggugcgcccguucugc

SEQ ID NO: 2358200 - RNA, 19 nt, Artificial Sequence
  Description of Artificial Sequence: Synthetic oligonucleotide
aaccgguacaccgcagggu

SEQ ID NO: 2358201 - RNA, 19 nt, Artificial Sequence
  Description of Artificial Sequence: Synthetic oligonucleotide
ggggaccugggccaggccg

SEQ ID NO: 2358202 - RNA, 19 nt, Artificial Sequence
  Description of Artificial Sequence: Synthetic oligonucleotide
uggaggcgucgccagggcc

SEQ ID NO: 2358203 - RNA, 19 nt, Artificial Sequence
  Description of Artificial Sequence: Synthetic oligonucleotide
ucggcguagaugcgcgcca

SEQ ID NO: 2358204 - RNA, 19 nt, Artificial Sequence
  Description of Artificial Sequence: Synthetic oligonucleotide
gcgggaaaggggcagggag

SEQ ID NO: 2358205 - RNA, 19 nt, Artificial Sequence
  Description of Artificial Sequence: Synthetic oligonucleotide
agcgccgcgcaaccggagg

SEQ ID NO: 2358206 - RNA, 19 nt, Artificial Sequence
  Description of Artificial Sequence: Synthetic oligonucleotide
  modified_base (10)..(10): a, c, u, g, unknown or other
gcuugaaggngccguuggc

SEQ ID NO: 2358207 - RNA, 19 nt, Artificial Sequence
  Description of Artificial Sequence: Synthetic oligonucleotide
agguaggugcgcccguucu

SEQ ID NO: 2358208 - RNA, 19 nt, Artificial Sequence
  Description of Artificial Sequence: Synthetic oligonucleotide
  modified_base (16)..(16): a, c, u, g, unknown or other
gguucagcuugaaggngcc

SEQ ID NO: 2358209 - RNA, 19 nt, Artificial Sequence
  Description of Artificial Sequence: Synthetic oligonucleotide
uuucuagguuggaaccguu

SEQ ID NO: 2358210 - RNA, 19 nt, Artificial Sequence
  Description of Artificial Sequence: Synthetic oligonucleotide
cccggaucgaguauuugag

SEQ ID NO: 2358211 - RNA, 19 nt, Artificial Sequence
  Description of Artificial Sequence: Synthetic oligonucleotide
ucgccuuggccgucuugcg

SEQ ID NO: 2358212 - RNA, 19 nt, Artificial Sequence
  Description of Artificial Sequence: Synthetic oligonucleotide
acggaaccgguacaccgca

SEQ ID NO: 2358213 - RNA, 19 nt, Artificial Sequence
  Description of Artificial Sequence: Synthetic oligonucleotide
ugcgguucuuccuucucuu

SEQ ID NO: 2358214 - RNA, 19 nt, Artificial Sequence
  Description of Artificial Sequence: Synthetic oligonucleotide
aaccggaggagcgcggggu

SEQ ID NO: 2358215 - RNA, 19 nt, Artificial Sequence
  Description of Artificial Sequence: Synthetic oligonucleotide
aggguucgcgccggcagcc

SEQ ID NO: 2358216 - RNA, 19 nt, Artificial Sequence
  Description of Artificial Sequence: Synthetic oligonucleotide
ggagccgccgcgcucaccc

SEQ ID NO: 2358217 - RNA, 19 nt, Artificial Sequence
  Description of Artificial Sequence: Synthetic oligonucleotide
caauggaggcgucgccagg

SEQ ID NO: 2358218 - RNA, 19 nt, Artificial Sequence
  Description of Artificial Sequence: Synthetic oligonucleotide
uggucgaaccacgccaccu

SEQ ID NO: 2358219 - RNA, 19 nt, Artificial Sequence
  Description of Artificial Sequence: Synthetic oligonucleotide
uugugcgcacgccgcucgg

SEQ ID NO: 2358220 - RNA, 19 nt, Artificial Sequence
  Description of Artificial Sequence: Synthetic oligonucleotide
uuggccgucuugcgggccu

SEQ ID NO: 2358221 - RNA, 19 nt, Artificial Sequence
  Description of Artificial Sequence: Synthetic oligonucleotide
acgccgcucgggcugcggc

SEQ ID NO: 2358222 - RNA, 19 nt, Artificial Sequence
  Description of Artificial Sequence: Synthetic oligonucleotide
aucgaguauuugagguagg

SEQ ID NO: 2358223 - RNA, 19 nt, Artificial Sequence
  Description of Artificial Sequence: Synthetic oligonucleotide
gaaccacgccaccuuccug

SEQ ID NO: 2358224 - RNA, 19 nt, Artificial Sequence
  Description of Artificial Sequence: Synthetic oligonucleotide
accuuccuggccucggcgu

SEQ ID NO: 2358225 - RNA, 19 nt, Artificial Sequence
  Description of Artificial Sequence: Synthetic oligonucleotide
aggccgaaccguacggaac

SEQ ID NO: 2358226 - RNA, 19 nt, Artificial Sequence
  Description of Artificial Sequence: Synthetic oligonucleotide
gagcaaagcgccgcgcaac

SEQ ID NO: 2358227 - RNA, 19 nt, Artificial Sequence
  Description of Artificial Sequence: Synthetic oligonucleotide
uugagguaggugcgcccgu

SEQ ID NO: 2358228 - RNA, 19 nt, Artificial Sequence
  Description of Artificial Sequence: Synthetic oligonucleotide
uugcgccccaggagggcgg

SEQ ID NO: 2358229 - RNA, 19 nt, Artificial Sequence
  Description of Artificial Sequence: Synthetic oligonucleotide
cuuggccuugugcgcacgc

SEQ ID NO: 2358230 - RNA, 19 nt, Artificial Sequence
  Description of Artificial Sequence: Synthetic oligonucleotide
gacgacggccguugccaag

SEQ ID NO: 2358231 - RNA, 19 nt, Artificial Sequence
  Description of Artificial Sequence: Synthetic oligonucleotide
cgcgccuuggccuugugcg

SEQ ID NO: 2358232 - RNA, 19 nt, Artificial Sequence
  Description of Artificial Sequence: Synthetic oligonucleotide
gggccgguaaccaugacga

SEQ ID NO: 2358233 - RNA, 19 nt, Artificial Sequence
  Description of Artificial Sequence: Synthetic oligonucleotide
cugcuggucgaaccacgcc

SEQ ID NO: 2358234 - RNA, 19 nt, Artificial Sequence
  Description of Artificial Sequence: Synthetic oligonucleotide
aggaggagccgccgcgcuc

SEQ ID NO: 2358235 - RNA, 19 nt, Artificial Sequence
  Description of Artificial Sequence: Synthetic oligonucleotide
aaagcgccgcgcaaccgga

SEQ ID NO: 2358236 - RNA, 19 nt, Artificial Sequence
  Description of Artificial Sequence: Synthetic oligonucleotide
ugugcgcacgccgcucggg

SEQ ID NO: 2358237 - RNA, 19 nt, Artificial Sequence
  Description of Artificial Sequence: Synthetic oligonucleotide
accguacggaaccgguaca

SEQ ID NO: 2358238 - RNA, 19 nt, Artificial Sequence
  Description of Artificial Sequence: Synthetic oligonucleotide
uauugcgccccaggagggc

SEQ ID NO: 2358239 - RNA, 19 nt, Artificial Sequence
  Description of Artificial Sequence: Synthetic oligonucleotide
caggccauuggcgccgccg

SEQ ID NO: 2358240 - RNA, 19 nt, Artificial Sequence
  Description of Artificial Sequence: Synthetic oligonucleotide
ccuucucuugggcugcgcg

SEQ ID NO: 2358241 - RNA, 19 nt, Artificial Sequence
  Description of Artificial Sequence: Synthetic oligonucleotide
  modified_base (15)..(15): a, c, u, g, unknown or other
guucagcuugaaggngccg

SEQ ID NO: 2358242 - RNA, 19 nt, Artificial Sequence
  Description of Artificial Sequence: Synthetic oligonucleotide
uuggccuugugcgcacgcc

SEQ ID NO: 2358243 - RNA, 19 nt, Artificial Sequence
  Description of Artificial Sequence: Synthetic oligonucleotide
ccggaucgaguauuugagg

SEQ ID NO: 2358244 - RNA, 19 nt, Artificial Sequence
  Description of Artificial Sequence: Synthetic oligonucleotide
agaugcgcgccaaggagga

SEQ ID NO: 2358245 - RNA, 19 nt, Artificial Sequence
  Description of Artificial Sequence: Synthetic oligonucleotide
aggcaggcgccgccaggcc

SEQ ID NO: 2358246 - RNA, 19 nt, Artificial Sequence
  Description of Artificial Sequence: Synthetic oligonucleotide
ugggccaggccgaaccgua

SEQ ID NO: 2358247 - RNA, 19 nt, Artificial Sequence
  Description of Artificial Sequence: Synthetic oligonucleotide
guacaccgcaggguucgcg

SEQ ID NO: 2358248 - RNA, 19 nt, Artificial Sequence
  Description of Artificial Sequence: Synthetic oligonucleotide
gucgaaccacgccaccuuc

SEQ ID NO: 2358249 - RNA, 19 nt, Artificial Sequence
  Description of Artificial Sequence: Synthetic oligonucleotide
  modified_base (5)..(5): a, c, u, g, unknown or other
aaggngccguuggcgccgg

SEQ ID NO: 2358250 - RNA, 19 nt, Artificial Sequence
  Description of Artificial Sequence: Synthetic oligonucleotide
caaggaggagccgccgcgc

SEQ ID NO: 2358251 - RNA, 19 nt, Artificial Sequence
  Description of Artificial Sequence: Synthetic oligonucleotide
gccgccaggccauuggcgc

SEQ ID NO: 2358252 - RNA, 19 nt, Artificial Sequence
  Description of Artificial Sequence: Synthetic oligonucleotide
uucuugcgguucagcuuga

SEQ ID NO: 2358253 - RNA, 19 nt, Artificial Sequence
  Description of Artificial Sequence: Synthetic oligonucleotide
gcaggguucgcgccggcag

SEQ ID NO: 2358254 - RNA, 19 nt, Artificial Sequence
  Description of Artificial Sequence: Synthetic oligonucleotide
caccgcaggguucgcgccg

SEQ ID NO: 2358255 - RNA, 19 nt, Artificial Sequence
  Description of Artificial Sequence: Synthetic oligonucleotide
caggcaggcgccgccaggc

SEQ ID NO: 2358256 - RNA, 19 nt, Artificial Sequence
  Description of Artificial Sequence: Synthetic oligonucleotide
ccaauggaggcgucgccag

SEQ ID NO: 2358257 - RNA, 19 nt, Artificial Sequence
  Description of Artificial Sequence: Synthetic oligonucleotide
caaccggaggagcgcgggg

SEQ ID NO: 2358258 - RNA, 19 nt, Artificial Sequence
  Description of Artificial Sequence: Synthetic oligonucleotide
gccgcgcucacccagccug

SEQ ID NO: 2358259 - RNA, 19 nt, Artificial Sequence
  Description of Artificial Sequence: Synthetic oligonucleotide
gcguagaugcgcgccaagg

SEQ ID NO: 2358260 - RNA, 19 nt, Artificial Sequence
  Description of Artificial Sequence: Synthetic oligonucleotide
uggccucggcguagaugcg

SEQ ID NO: 2358261 - RNA, 19 nt, Artificial Sequence
  Description of Artificial Sequence: Synthetic oligonucleotide
gagguaggugcgcccguuc

SEQ ID NO: 2358262 - RNA, 19 nt, Artificial Sequence
  Description of Artificial Sequence: Synthetic oligonucleotide
  modified_base (17)..(17): a, c, u, g, unknown or other
cgguucagcuugaaggngc

SEQ ID NO: 2358263 - RNA, 19 nt, Artificial Sequence
  Description of Artificial Sequence: Synthetic oligonucleotide
ggaucgaguauuugaggua

SEQ ID NO: 2358264 - RNA, 19 nt, Artificial Sequence
  Description of Artificial Sequence: Synthetic oligonucleotide
cuggucgaaccacgccacc

SEQ ID NO: 2358265 - RNA, 19 nt, Artificial Sequence
  Description of Artificial Sequence: Synthetic oligonucleotide
aggugcgcccguucugcug

SEQ ID NO: 2358266 - RNA, 19 nt, Artificial Sequence
  Description of Artificial Sequence: Synthetic oligonucleotide
gguaggugcgcccguucug

SEQ ID NO: 2358267 - RNA, 19 nt, Artificial Sequence
  Description of Artificial Sequence: Synthetic oligonucleotide
gccaggccgaaccguacgg

SEQ ID NO: 2358268 - RNA, 19 nt, Artificial Sequence
  Description of Artificial Sequence: Synthetic oligonucleotide
ggccaggccgaaccguacg

SEQ ID NO: 2358269 - RNA, 19 nt, Artificial Sequence
  Description of Artificial Sequence: Synthetic oligonucleotide
accggaggagcgcggggug

SEQ ID NO: 2358270 - RNA, 19 nt, Artificial Sequence
  Description of Artificial Sequence: Synthetic oligonucleotide
ugcaggccgccgaggcucc

SEQ ID NO: 2358271 - RNA, 19 nt, Artificial Sequence
  Description of Artificial Sequence: Synthetic oligonucleotide
ccaagggugagagccaaug

SEQ ID NO: 2358272 - RNA, 19 nt, Artificial Sequence
  Description of Artificial Sequence: Synthetic oligonucleotide
cuccaguuucuugcgguuc

SEQ ID NO: 2358273 - RNA, 19 nt, Artificial Sequence
  Description of Artificial Sequence: Synthetic oligonucleotide
gaggcuccgcgccgcuccg

SEQ ID NO: 2358274 - RNA, 19 nt, Artificial Sequence
  Description of Artificial Sequence: Synthetic oligonucleotide
ucccgucggcgcucgucgg

SEQ ID NO: 2358275 - RNA, 19 nt, Artificial Sequence
  Description of Artificial Sequence: Synthetic oligonucleotide
accguuuauugcgccccag

SEQ ID NO: 2358276 - RNA, 19 nt, Artificial Sequence
  Description of Artificial Sequence: Synthetic oligonucleotide
ggcggagcaaagcgccgcg

SEQ ID NO: 2358277 - RNA, 19 nt, Artificial Sequence
  Description of Artificial Sequence: Synthetic oligonucleotide
  modified_base (12)..(12): a, c, u, g, unknown or other
cagcuugaaggngccguug

SEQ ID NO: 2358278 - RNA, 19 nt, Artificial Sequence
  Description of Artificial Sequence: Synthetic oligonucleotide
ugacgacggccguugccaa

SEQ ID NO: 2358279 - RNA, 19 nt, Artificial Sequence
  Description of Artificial Sequence: Synthetic oligonucleotide
aaccaugacgacggccguu

SEQ ID NO: 2358280 - RNA, 19 nt, Artificial Sequence
  Description of Artificial Sequence: Synthetic oligonucleotide
uucgcgccggcagccgccg

SEQ ID NO: 2358281 - RNA, 19 nt, Artificial Sequence
  Description of Artificial Sequence: Synthetic oligonucleotide
cauuggcgccgccgggccg

SEQ ID NO: 2358282 - RNA, 19 nt, Artificial Sequence
  Description of Artificial Sequence: Synthetic oligonucleotide
agccgccgcgcucacccag

SEQ ID NO: 2358283 - RNA, 19 nt, Artificial Sequence
  Description of Artificial Sequence: Synthetic oligonucleotide
ggcgcggggcugcaggccg

SEQ ID NO: 2358284 - RNA, 19 nt, Artificial Sequence
  Description of Artificial Sequence: Synthetic oligonucleotide
cuagguuggaaccguuuau

SEQ ID NO: 2358285 - RNA, 19 nt, Artificial Sequence
  Description of Artificial Sequence: Synthetic oligonucleotide
uaggugcgcccguucugcu

SEQ ID NO: 2358286 - RNA, 19 nt, Artificial Sequence
  Description of Artificial Sequence: Synthetic oligonucleotide
uuggcgccggugcccuuca

SEQ ID NO: 2358287 - RNA, 19 nt, Artificial Sequence
  Description of Artificial Sequence: Synthetic oligonucleotide
ggcgccgccaggccauugg

SEQ ID NO: 2358288 - RNA, 19 nt, Artificial Sequence
  Description of Artificial Sequence: Synthetic oligonucleotide
accgcaggguucgcgccgg

SEQ ID NO: 2358289 - RNA, 19 nt, Artificial Sequence
  Description of Artificial Sequence: Synthetic oligonucleotide
gagggcggcgggcggagca

SEQ ID NO: 2358290 - RNA, 19 nt, Artificial Sequence
  Description of Artificial Sequence: Synthetic oligonucleotide
cguaucguucugcaccagc

SEQ ID NO: 2358291 - RNA, 19 nt, Artificial Sequence
  Description of Artificial Sequence: Synthetic oligonucleotide
cacgccaccuuccuggccu

SEQ ID NO: 2358292 - RNA, 19 nt, Artificial Sequence
  Description of Artificial Sequence: Synthetic oligonucleotide
gcgcccguucugcuggucg

SEQ ID NO: 2358293 - RNA, 19 nt, Artificial Sequence
  Description of Artificial Sequence: Synthetic oligonucleotide
ucgccagggccguuucaaa

SEQ ID NO: 2358294 - RNA, 19 nt, Artificial Sequence
  Description of Artificial Sequence: Synthetic oligonucleotide
cagcagcguaucguucugc

SEQ ID NO: 2358295 - RNA, 19 nt, Artificial Sequence
  Description of Artificial Sequence: Synthetic oligonucleotide
guccuguccgccgccgugc

SEQ ID NO: 2358296 - RNA, 19 nt, Artificial Sequence
  Description of Artificial Sequence: Synthetic oligonucleotide
ugagguaggugcgcccguu

SEQ ID NO: 2358297 - RNA, 19 nt, Artificial Sequence
  Description of Artificial Sequence: Synthetic oligonucleotide
caggccgaaccguacggaa

SEQ ID NO: 2358298 - RNA, 19 nt, Artificial Sequence
  Description of Artificial Sequence: Synthetic oligonucleotide
gaaccguacggaaccggua

SEQ ID NO: 2358299 - RNA, 19 nt, Artificial Sequence
  Description of Artificial Sequence: Synthetic oligonucleotide
cgggccgguaaccaugacg

SEQ ID NO: 2358300 - RNA, 19 nt, Artificial Sequence
  Description of Artificial Sequence: Synthetic oligonucleotide
gaugcgcgccaaggaggag

SEQ ID NO: 2358301 - RNA, 19 nt, Artificial Sequence
  Description of Artificial Sequence: Synthetic oligonucleotide
gcaaccggaggagcgcggg

SEQ ID NO: 2358302 - RNA, 19 nt, Artificial Sequence
  Description of Artificial Sequence: Synthetic oligonucleotide
cccggcugguucuucuugc

SEQ ID NO: 2358303 - RNA, 19 nt, Artificial Sequence
  Description of Artificial Sequence: Synthetic oligonucleotide
gcagcguaucguucugcac

SEQ ID NO: 2358304 - RNA, 19 nt, Artificial Sequence
  Description of Artificial Sequence: Synthetic oligonucleotide
uggccggcguccuguccgc

SEQ ID NO: 2358305 - RNA, 19 nt, Artificial Sequence
  Description of Artificial Sequence: Synthetic oligonucleotide
  modified_base (18)..(18): a, c, u, g, unknown or other
gcgguucagcuugaaggng

SEQ ID NO: 2358306 - RNA, 19 nt, Artificial Sequence
  Description of Artificial Sequence: Synthetic oligonucleotide
uccuucucuugggcugcgc

SEQ ID NO: 2358307 - RNA, 19 nt, Artificial Sequence
  Description of Artificial Sequence: Synthetic oligonucleotide
ggcgccggugcccuucacc

SEQ ID NO: 2358308 - RNA, 19 nt, Artificial Sequence
  Description of Artificial Sequence: Synthetic oligonucleotide
cuucuugcgguucuuccuu

SEQ ID NO: 2358309 - RNA, 19 nt, Artificial Sequence
  Description of Artificial Sequence: Synthetic oligonucleotide
ccggcugguucuucuugcg

SEQ ID NO: 2358310 - RNA, 19 nt, Artificial Sequence
  Description of Artificial Sequence: Synthetic oligonucleotide
gccgugcgcgccuuggcgc

SEQ ID NO: 2358311 - RNA, 19 nt, Artificial Sequence
  Description of Artificial Sequence: Synthetic oligonucleotide
aagcgccgcgcaaccggag

SEQ ID NO: 2358312 - RNA, 19 nt, Artificial Sequence
  Description of Artificial Sequence: Synthetic oligonucleotide
gcgguucuuccuucucuug

SEQ ID NO: 2358313 - RNA, 19 nt, Artificial Sequence
  Description of Artificial Sequence: Synthetic oligonucleotide
cuucccgucggcgcucguc

SEQ ID NO: 2358314 - RNA, 19 nt, Artificial Sequence
  Description of Artificial Sequence: Synthetic oligonucleotide
agcgcccggaucgaguauu

SEQ ID NO: 2358315 - RNA, 19 nt, Artificial Sequence
  Description of Artificial Sequence: Synthetic oligonucleotide
gucgccagggccguuucaa

SEQ ID NO: 2358316 - RNA, 19 nt, Artificial Sequence
  Description of Artificial Sequence: Synthetic oligonucleotide
gcgggcggagcaaagcgcc

SEQ ID NO: 2358317 - RNA, 19 nt, Artificial Sequence
  Description of Artificial Sequence: Synthetic oligonucleotide
uugggcugcgcgggcgccc

SEQ ID NO: 2358318 - RNA, 19 nt, Artificial Sequence
  Description of Artificial Sequence: Synthetic oligonucleotide
ccgcgcaaccggaggagcg

SEQ ID NO: 2358319 - RNA, 19 nt, Artificial Sequence
  Description of Artificial Sequence: Synthetic oligonucleotide
ugcgcgccuuggcgcgggg

SEQ ID NO: 2358320 - RNA, 19 nt, Artificial Sequence
  Description of Artificial Sequence: Synthetic oligonucleotide
gcuggucgaaccacgccac

SEQ ID NO: 2358321 - RNA, 19 nt, Artificial Sequence
  Description of Artificial Sequence: Synthetic oligonucleotide
guuggcgccggugcccuuc

SEQ ID NO: 2358322 - RNA, 19 nt, Artificial Sequence
  Description of Artificial Sequence: Synthetic oligonucleotide
ggagcaaagcgccgcgcaa

SEQ ID NO: 2358323 - RNA, 19 nt, Artificial Sequence
  Description of Artificial Sequence: Synthetic oligonucleotide
guucgcgccggcagccgcc

SEQ ID NO: 2358324 - RNA, 19 nt, Artificial Sequence
  Description of Artificial Sequence: Synthetic oligonucleotide
gccaauggaggcgucgcca

SEQ ID NO: 2358325 - RNA, 19 nt, Artificial Sequence
  Description of Artificial Sequence: Synthetic oligonucleotide
gguucgcgccggcagccgc

SEQ ID NO: 2358326 - RNA, 19 nt, Artificial Sequence
  Description of Artificial Sequence: Synthetic oligonucleotide
ggaggagccgccgcgcuca

SEQ ID NO: 2358327 - RNA, 19 nt, Artificial Sequence
  Description of Artificial Sequence: Synthetic oligonucleotide
ugcgggccuucccgucggc

SEQ ID NO: 2358328 - RNA, 19 nt, Artificial Sequence
  Description of Artificial Sequence: Synthetic oligonucleotide
  modified_base (3)..(3): a, c, u, g, unknown or other
ggngccguuggcgccggug

SEQ ID NO: 2358329 - RNA, 19 nt, Artificial Sequence
  Description of Artificial Sequence: Synthetic oligonucleotide
caccgggccgcucgccuug

SEQ ID NO: 2358330 - RNA, 19 nt, Artificial Sequence
  Description of Artificial Sequence: Synthetic oligonucleotide
ucggcgcucgucggcggca

SEQ ID NO: 2358331 - RNA, 19 nt, Artificial Sequence
  Description of Artificial Sequence: Synthetic oligonucleotide
gcucgucggcggcagggcc

SEQ ID NO: 2358332 - RNA, 19 nt, Artificial Sequence
  Description of Artificial Sequence: Synthetic oligonucleotide
gccgaaccguacggaaccg

SEQ ID NO: 2358333 - RNA, 19 nt, Artificial Sequence
  Description of Artificial Sequence: Synthetic oligonucleotide
ugcccggcugguucuucuu

SEQ ID NO: 2358334 - RNA, 19 nt, Artificial Sequence
  Description of Artificial Sequence: Synthetic oligonucleotide
ccauuggcgccgccgggcc

SEQ ID NO: 2358335 - RNA, 19 nt, Artificial Sequence
  Description of Artificial Sequence: Synthetic oligonucleotide
ggccuugugcgcacgccgc

SEQ ID NO: 2358336 - RNA, 19 nt, Artificial Sequence
  Description of Artificial Sequence: Synthetic oligonucleotide
gccauuggcgccgccgggc

SEQ ID NO: 2358337 - RNA, 19 nt, Artificial Sequence
  Description of Artificial Sequence: Synthetic oligonucleotide
cggaucgaguauuugaggu

SEQ ID NO: 2358338 - RNA, 19 nt, Artificial Sequence
  Description of Artificial Sequence: Synthetic oligonucleotide
ggccucggcguagaugcgc

SEQ ID NO: 2358339 - RNA, 19 nt, Artificial Sequence
  Description of Artificial Sequence: Synthetic oligonucleotide
gcgcaaccggaggagcgcg

SEQ ID NO: 2358340 - RNA, 19 nt, Artificial Sequence
  Description of Artificial Sequence: Synthetic oligonucleotide
cguagaugcgcgccaagga

SEQ ID NO: 2358341 - RNA, 19 nt, Artificial Sequence
  Description of Artificial Sequence: Synthetic oligonucleotide
gcccggcugguucuucuug

SEQ ID NO: 2358342 - RNA, 19 nt, Artificial Sequence
  Description of Artificial Sequence: Synthetic oligonucleotide
ccguacggaaccgguacac

SEQ ID NO: 2358343 - RNA, 19 nt, Artificial Sequence
  Description of Artificial Sequence: Synthetic oligonucleotide
gggcgggaaaggggcaggg

SEQ ID NO: 2358344 - RNA, 19 nt, Artificial Sequence
  Description of Artificial Sequence: Synthetic oligonucleotide
ccgugcgcgccuuggcgcg

SEQ ID NO: 2358345 - RNA, 19 nt, Artificial Sequence
  Description of Artificial Sequence: Synthetic oligonucleotide
gggcggagcaaagcgccgc

SEQ ID NO: 2358346 - RNA, 19 nt, Artificial Sequence
  Description of Artificial Sequence: Synthetic oligonucleotide
ggggcgggaaaggggcagg

SEQ ID NO: 2358347 - RNA, 19 nt, Artificial Sequence
  Description of Artificial Sequence: Synthetic oligonucleotide
gcgcucacccagccugcgg

SEQ ID NO: 2358348 - RNA, 19 nt, Artificial Sequence
  Description of Artificial Sequence: Synthetic oligonucleotide
cuugcccggcugguucuuc

SEQ ID NO: 2358349 - RNA, 19 nt, Artificial Sequence
  Description of Artificial Sequence: Synthetic oligonucleotide
gucuugcgggccuucccgu

SEQ ID NO: 2358350 - RNA, 19 nt, Artificial Sequence
  Description of Artificial Sequence: Synthetic oligonucleotide
ccgaaccguacggaaccgg

SEQ ID NO: 2358351 - RNA, 19 nt, Artificial Sequence
  Description of Artificial Sequence: Synthetic oligonucleotide
gccagcggcgggcauggca

SEQ ID NO: 2358352 - RNA, 19 nt, Artificial Sequence
  Description of Artificial Sequence: Synthetic oligonucleotide
cguacggaaccgguacacc

SEQ ID NO: 2358353 - RNA, 19 nt, Artificial Sequence
  Description of Artificial Sequence: Synthetic oligonucleotide
ggcaggcgccgccaggcca

SEQ ID NO: 2358354 - RNA, 19 nt, Artificial Sequence
  Description of Artificial Sequence: Synthetic oligonucleotide
gacggccguugccaagggu

SEQ ID NO: 2358355 - RNA, 19 nt, Artificial Sequence
  Description of Artificial Sequence: Synthetic oligonucleotide
ccgucuugcgggccuuccc

SEQ ID NO: 2358356 - RNA, 19 nt, Artificial Sequence
  Description of Artificial Sequence: Synthetic oligonucleotide
caggccgccgaggcuccgc

SEQ ID NO: 2358357 - RNA, 19 nt, Artificial Sequence
  Description of Artificial Sequence: Synthetic oligonucleotide
cucgucggcggcagggccu

SEQ ID NO: 2358358 - RNA, 19 nt, Artificial Sequence
  Description of Artificial Sequence: Synthetic oligonucleotide
gaggagccgccgcgcucac

SEQ ID NO: 2358359 - RNA, 19 nt, Artificial Sequence
  Description of Artificial Sequence: Synthetic oligonucleotide
accgggccgcucgccuugg

SEQ ID NO: 2358360 - RNA, 19 nt, Artificial Sequence
  Description of Artificial Sequence: Synthetic oligonucleotide
cgggccuucccgucggcgc

SEQ ID NO: 2358361 - RNA, 19 nt, Artificial Sequence
  Description of Artificial Sequence: Synthetic oligonucleotide
ggcguccuguccgccgccg

SEQ ID NO: 2358362 - RNA, 19 nt, Artificial Sequence
  Description of Artificial Sequence: Synthetic oligonucleotide
ccuggccucggcguagaug

SEQ ID NO: 2358363 - RNA, 19 nt, Artificial Sequence
  Description of Artificial Sequence: Synthetic oligonucleotide
ggcggcagggccuccucaa

SEQ ID NO: 2358364 - RNA, 19 nt, Artificial Sequence
  Description of Artificial Sequence: Synthetic oligonucleotide
gggaccugggccaggccga

SEQ ID NO: 2358365 - RNA, 19 nt, Artificial Sequence
  Description of Artificial Sequence: Synthetic oligonucleotide
gcgccggugcccuucaccu

SEQ ID NO: 2358366 - RNA, 19 nt, Artificial Sequence
  Description of Artificial Sequence: Synthetic oligonucleotide
caccagcgcccggaucgag

SEQ ID NO: 2358367 - RNA, 19 nt, Artificial Sequence
  Description of Artificial Sequence: Synthetic oligonucleotide
gcgccgccaggccauuggc

SEQ ID NO: 2358368 - RNA, 19 nt, Artificial Sequence
  Description of Artificial Sequence: Synthetic oligonucleotide
gccguuggcgccggugccc

SEQ ID NO: 2358369 - RNA, 19 nt, Artificial Sequence
  Description of Artificial Sequence: Synthetic oligonucleotide
cacgccgcucgggcugcgg

SEQ ID NO: 2358370 - RNA, 19 nt, Artificial Sequence
  Description of Artificial Sequence: Synthetic oligonucleotide
ccaugacgacggccguugc

SEQ ID NO: 2358371 - RNA, 19 nt, Artificial Sequence
  Description of Artificial Sequence: Synthetic oligonucleotide
gguacaccgcaggguucgc

SEQ ID NO: 2358372 - RNA, 19 nt, Artificial Sequence
  Description of Artificial Sequence: Synthetic oligonucleotide
cgccgccaggccauuggcg

SEQ ID NO: 2358373 - RNA, 19 nt, Artificial Sequence
  Description of Artificial Sequence: Synthetic oligonucleotide
cgcgccgcccuccaguuuc

SEQ ID NO: 2358374 - RNA, 19 nt, Artificial Sequence
  Description of Artificial Sequence: Synthetic oligonucleotide
ccgucggcgcucgucggcg

SEQ ID NO: 2358375 - RNA, 19 nt, Artificial Sequence
  Description of Artificial Sequence: Synthetic oligonucleotide
ggucgaaccacgccaccuu

SEQ ID NO: 2358376 - RNA, 19 nt, Artificial Sequence
  Description of Artificial Sequence: Synthetic oligonucleotide
ggguucgcgccggcagccg

SEQ ID NO: 2358377 - RNA, 19 nt, Artificial Sequence
  Description of Artificial Sequence: Synthetic oligonucleotide
gagccgccgcgcucaccca

SEQ ID NO: 2358378 - RNA, 19 nt, Artificial Sequence
  Description of Artificial Sequence: Synthetic oligonucleotide
ccgcgccuuggccuugugc

SEQ ID NO: 2358379 - RNA, 19 nt, Artificial Sequence
  Description of Artificial Sequence: Synthetic oligonucleotide
gccgccgugcgcgccuugg

SEQ ID NO: 2358380 - RNA, 19 nt, Artificial Sequence
  Description of Artificial Sequence: Synthetic oligonucleotide
ggcgggcauggcaggcagg

SEQ ID NO: 2358381 - RNA, 19 nt, Artificial Sequence
  Description of Artificial Sequence: Synthetic oligonucleotide
ccgguacaccgcaggguuc

SEQ ID NO: 2358382 - RNA, 19 nt, Artificial Sequence
  Description of Artificial Sequence: Synthetic oligonucleotide
gcgggccuucccgucggcg

SEQ ID NO: 2358383 - RNA, 19 nt, Artificial Sequence
  Description of Artificial Sequence: Synthetic oligonucleotide
gccgcgcaaccggaggagc

SEQ ID NO: 2358384 - RNA, 19 nt, Artificial Sequence
  Description of Artificial Sequence: Synthetic oligonucleotide
uggcgccggugcccuucac

SEQ ID NO: 2358385 - RNA, 19 nt, Artificial Sequence
  Description of Artificial Sequence: Synthetic oligonucleotide
cccgucggcgcucgucggc

SEQ ID NO: 2358386 - RNA, 19 nt, Artificial Sequence
  Description of Artificial Sequence: Synthetic oligonucleotide
ggaggagcgcgggguggcc

SEQ ID NO: 2358387 - RNA, 19 nt, Artificial Sequence
  Description of Artificial Sequence: Synthetic oligonucleotide
cgcaaccggaggagcgcgg

SEQ ID NO: 2358388 - RNA, 19 nt, Artificial Sequence
  Description of Artificial Sequence: Synthetic oligonucleotide
ugcgcccguucugcugguc

SEQ ID NO: 2358389 - RNA, 19 nt, Artificial Sequence
  Description of Artificial Sequence: Synthetic oligonucleotide
gcggagcaaagcgccgcgc

SEQ ID NO: 2358390 - RNA, 19 nt, Artificial Sequence
  Description of Artificial Sequence: Synthetic oligonucleotide
gcgccgcgcaaccggagga

SEQ ID NO: 2358391 - RNA, 19 nt, Artificial Sequence
  Description of Artificial Sequence: Synthetic oligonucleotide
gccgucuugcgggccuucc

SEQ ID NO: 2358392 - RNA, 19 nt, Artificial Sequence
  Description of Artificial Sequence: Synthetic oligonucleotide
cuccgcgccgcccuccagu

SEQ ID NO: 2358393 - RNA, 19 nt, Artificial Sequence
  Description of Artificial Sequence: Synthetic oligonucleotide
ccagcgcccggaucgagua

SEQ ID NO: 2358394 - RNA, 19 nt, Artificial Sequence
  Description of Artificial Sequence: Synthetic oligonucleotide
ccacgccaccuuccuggcc

SEQ ID NO: 2358395 - RNA, 19 nt, Artificial Sequence
  Description of Artificial Sequence: Synthetic oligonucleotide
cgggcggagcaaagcgccg

SEQ ID NO: 2358396 - RNA, 19 nt, Artificial Sequence
  Description of Artificial Sequence: Synthetic oligonucleotide
cgcucacccagccugcgga

SEQ ID NO: 2358397 - RNA, 19 nt, Artificial Sequence
  Description of Artificial Sequence: Synthetic oligonucleotide
ccgcgcucacccagccugc

SEQ ID NO: 2358398 - RNA, 19 nt, Artificial Sequence
  Description of Artificial Sequence: Synthetic oligonucleotide
agggcggcgggcggagcaa

SEQ ID NO: 2358399 - RNA, 19 nt, Artificial Sequence
  Description of Artificial Sequence: Synthetic oligonucleotide
ccuugugcgcacgccgcuc

SEQ ID NO: 2358400 - RNA, 19 nt, Artificial Sequence
  Description of Artificial Sequence: Synthetic oligonucleotide
caggagggcggcgggcgga

SEQ ID NO: 2358401 - RNA, 19 nt, Artificial Sequence
  Description of Artificial Sequence: Synthetic oligonucleotide
  modified_base (4)..(4): a, c, u, g, unknown or other
aggngccguuggcgccggu

SEQ ID NO: 2358402 - RNA, 19 nt, Artificial Sequence
  Description of Artificial Sequence: Synthetic oligonucleotide
gcguaucguucugcaccag

SEQ ID NO: 2358403 - RNA, 19 nt, Artificial Sequence
  Description of Artificial Sequence: Synthetic oligonucleotide
cccguucugcuggucgaac

SEQ ID NO: 2358404 - RNA, 19 nt, Artificial Sequence
  Description of Artificial Sequence: Synthetic oligonucleotide
gccuucccgucggcgcucg

SEQ ID NO: 2358405 - RNA, 19 nt, Artificial Sequence
  Description of Artificial Sequence: Synthetic oligonucleotide
ggcgggaaaggggcaggga

SEQ ID NO: 2358406 - RNA, 19 nt, Artificial Sequence
  Description of Artificial Sequence: Synthetic oligonucleotide
cgcgcaaccggaggagcgc

SEQ ID NO: 2358407 - RNA, 19 nt, Artificial Sequence
  Description of Artificial Sequence: Synthetic oligonucleotide
cggagcaaagcgccgcgca

SEQ ID NO: 2358408 - RNA, 19 nt, Artificial Sequence
  Description of Artificial Sequence: Synthetic oligonucleotide
cggaaccgguacaccgcag

SEQ ID NO: 2358409 - RNA, 19 nt, Artificial Sequence
  Description of Artificial Sequence: Synthetic oligonucleotide
cgaaccguacggaaccggu

SEQ ID NO: 2358410 - RNA, 19 nt, Artificial Sequence
  Description of Artificial Sequence: Synthetic oligonucleotide
uggccgucuugcgggccuu

SEQ ID NO: 2358411 - RNA, 19 nt, Artificial Sequence
  Description of Artificial Sequence: Synthetic oligonucleotide
gggccaggccgaaccguac

SEQ ID NO: 2358412 - RNA, 19 nt, Artificial Sequence
  Description of Artificial Sequence: Synthetic oligonucleotide
aggcgccgccaggccauug

SEQ ID NO: 2358413 - RNA, 19 nt, Artificial Sequence
  Description of Artificial Sequence: Synthetic oligonucleotide
gggccuucccgucggcgcu

SEQ ID NO: 2358414 - RNA, 19 nt, Artificial Sequence
  Description of Artificial Sequence: Synthetic oligonucleotide
cgacggccguugccaaggg

SEQ ID NO: 2358415 - RNA, 19 nt, Artificial Sequence
  Description of Artificial Sequence: Synthetic oligonucleotide
ccaggccgaaccguacgga

SEQ ID NO: 2358416 - RNA, 19 nt, Artificial Sequence
  Description of Artificial Sequence: Synthetic oligonucleotide
gccgccgcgcucacccagc

SEQ ID NO: 2358417 - RNA, 19 nt, Artificial Sequence
  Description of Artificial Sequence: Synthetic oligonucleotide
gcugcgcgggcgcccgcac

SEQ ID NO: 2358418 - RNA, 19 nt, Artificial Sequence
  Description of Artificial Sequence: Synthetic oligonucleotide
cggccguugccaaggguga

SEQ ID NO: 2358419 - RNA, 19 nt, Artificial Sequence
  Description of Artificial Sequence: Synthetic oligonucleotide
gcgucgccagggccguuuc

SEQ ID NO: 2358420 - RNA, 19 nt, Artificial Sequence
  Description of Artificial Sequence: Synthetic oligonucleotide
cgucggcgcucgucggcgg

SEQ ID NO: 2358421 - RNA, 19 nt, Artificial Sequence
  Description of Artificial Sequence: Synthetic oligonucleotide
cgggcgcccgcaccgggcc

SEQ ID NO: 2358422 - RNA, 19 nt, Artificial Sequence
  Description of Artificial Sequence: Synthetic oligonucleotide
gccuugugcgcacgccgcu

SEQ ID NO: 2358423 - RNA, 19 nt, Artificial Sequence
  Description of Artificial Sequence: Synthetic oligonucleotide
cgaaccacgccaccuuccu

SEQ ID NO: 2358424 - RNA, 19 nt, Artificial Sequence
  Description of Artificial Sequence: Synthetic oligonucleotide
gcggcgggcauggcaggca

SEQ ID NO: 2358425 - RNA, 19 nt, Artificial Sequence
  Description of Artificial Sequence: Synthetic oligonucleotide
cgcucgucggcggcagggc

SEQ ID NO: 2358426 - RNA, 19 nt, Artificial Sequence
  Description of Artificial Sequence: Synthetic oligonucleotide
ggagggcggcgggcggagc

SEQ ID NO: 2358427 - RNA, 19 nt, Artificial Sequence
  Description of Artificial Sequence: Synthetic oligonucleotide
gcgcgccaaggaggagccg

SEQ ID NO: 2358428 - RNA, 19 nt, Artificial Sequence
  Description of Artificial Sequence: Synthetic oligonucleotide
cgcgcucacccagccugcg

SEQ ID NO: 2358429 - RNA, 19 nt, Artificial Sequence
  Description of Artificial Sequence: Synthetic oligonucleotide
gccuggccggcguccuguc

SEQ ID NO: 2358430 - RNA, 19 nt, Artificial Sequence
  Description of Artificial Sequence: Synthetic oligonucleotide
ccaccagcuggcuguacuu

SEQ ID NO: 2358431 - RNA, 19 nt, Artificial Sequence
  Description of Artificial Sequence: Synthetic oligonucleotide
cgccggugcccuucaccug

SEQ ID NO: 2358432 - RNA, 19 nt, Artificial Sequence
  Description of Artificial Sequence: Synthetic oligonucleotide
ggaccugggccaggccgaa

SEQ ID NO: 2358433 - RNA, 19 nt, Artificial Sequence
  Description of Artificial Sequence: Synthetic oligonucleotide
gcccguucugcuggucgaa

SEQ ID NO: 2358434 - RNA, 19 nt, Artificial Sequence
  Description of Artificial Sequence: Synthetic oligonucleotide
gugcgcccguucugcuggu

SEQ ID NO: 2358435 - RNA, 19 nt, Artificial Sequence
  Description of Artificial Sequence: Synthetic oligonucleotide
gcgcgccuuggcgcggggc

SEQ ID NO: 2358436 - RNA, 19 nt, Artificial Sequence
  Description of Artificial Sequence: Synthetic oligonucleotide
ggccggcguccuguccgcc

SEQ ID NO: 2358437 - RNA, 19 nt, Artificial Sequence
  Description of Artificial Sequence: Synthetic oligonucleotide
gcgccgccgggccgguaac

SEQ ID NO: 2358438 - RNA, 19 nt, Artificial Sequence
  Description of Artificial Sequence: Synthetic oligonucleotide
ccggugcccuucaccugca

SEQ ID NO: 2358439 - RNA, 19 nt, Artificial Sequence
  Description of Artificial Sequence: Synthetic oligonucleotide
gccgcgccuuggccuugug

SEQ ID NO: 2358440 - RNA, 19 nt, Artificial Sequence
  Description of Artificial Sequence: Synthetic oligonucleotide
gcaggcgccgccaggccau

SEQ ID NO: 2358441 - RNA, 19 nt, Artificial Sequence
  Description of Artificial Sequence: Synthetic oligonucleotide
cggugcccuucaccugcag

SEQ ID NO: 2358442 - RNA, 19 nt, Artificial Sequence
  Description of Artificial Sequence: Synthetic oligonucleotide
ccgggccgguaaccaugac

SEQ ID NO: 2358443 - RNA, 19 nt, Artificial Sequence
  Description of Artificial Sequence: Synthetic oligonucleotide
cagcgcccggaucgaguau

SEQ ID NO: 2358444 - RNA, 19 nt, Artificial Sequence
  Description of Artificial Sequence: Synthetic oligonucleotide
cgugcgcgccuuggcgcgg

SEQ ID NO: 2358445 - RNA, 19 nt, Artificial Sequence
  Description of Artificial Sequence: Synthetic oligonucleotide
ccgcaggguucgcgccggc

SEQ ID NO: 2358446 - RNA, 19 nt, Artificial Sequence
  Description of Artificial Sequence: Synthetic oligonucleotide
cggcguccuguccgccgcc

SEQ ID NO: 2358447 - RNA, 19 nt, Artificial Sequence
  Description of Artificial Sequence: Synthetic oligonucleotide
ccgggccgcucgccuuggc

SEQ ID NO: 2358448 - RNA, 19 nt, Artificial Sequence
  Description of Artificial Sequence: Synthetic oligonucleotide
ggcgucgccagggccguuu

SEQ ID NO: 2358449 - RNA, 19 nt, Artificial Sequence
  Description of Artificial Sequence: Synthetic oligonucleotide
gcguccuguccgccgccgu

SEQ ID NO: 2358450 - RNA, 19 nt, Artificial Sequence
  Description of Artificial Sequence: Synthetic oligonucleotide
ccgaggcuccgcgccgcuc

SEQ ID NO: 2358451 - RNA, 19 nt, Artificial Sequence
  Description of Artificial Sequence: Synthetic oligonucleotide
cgccgccgggccgguaacc

SEQ ID NO: 2358452 - RNA, 19 nt, Artificial Sequence
  Description of Artificial Sequence: Synthetic oligonucleotide
gccaagggugagagccaau

SEQ ID NO: 2358453 - RNA, 19 nt, Artificial Sequence
  Description of Artificial Sequence: Synthetic oligonucleotide
gccuuggcgcggggcugca

SEQ ID NO: 2358454 - RNA, 19 nt, Artificial Sequence
  Description of Artificial Sequence: Synthetic oligonucleotide
aggcgucgccagggccguu

SEQ ID NO: 2358455 - RNA, 19 nt, Artificial Sequence
  Description of Artificial Sequence: Synthetic oligonucleotide
ccguuggcgccggugcccu

SEQ ID NO: 2358456 - RNA, 19 nt, Artificial Sequence
  Description of Artificial Sequence: Synthetic oligonucleotide
cggcguagaugcgcgccaa

SEQ ID NO: 2358457 - RNA, 19 nt, Artificial Sequence
  Description of Artificial Sequence: Synthetic oligonucleotide
cgcaccgggccgcucgccu

SEQ ID NO: 2358458 - RNA, 19 nt, Artificial Sequence
  Description of Artificial Sequence: Synthetic oligonucleotide
gcggccuggccggcguccu

SEQ ID NO: 2358459 - RNA, 19 nt, Artificial Sequence
  Description of Artificial Sequence: Synthetic oligonucleotide
gcgcccggaucgaguauuu

SEQ ID NO: 2358460 - RNA, 19 nt, Artificial Sequence
  Description of Artificial Sequence: Synthetic oligonucleotide
ccgccgggccgguaaccau

SEQ ID NO: 2358461 - RNA, 19 nt, Artificial Sequence
  Description of Artificial Sequence: Synthetic oligonucleotide
ccgccgcgccuuggccuug

SEQ ID NO: 2358462 - RNA, 19 nt, Artificial Sequence
  Description of Artificial Sequence: Synthetic oligonucleotide
cggcagccgccgcgccuug

SEQ ID NO: 2358463 - RNA, 19 nt, Artificial Sequence
  Description of Artificial Sequence: Synthetic oligonucleotide
cgucggcggcagggccucc

SEQ ID NO: 2358464 - RNA, 19 nt, Artificial Sequence
  Description of Artificial Sequence: Synthetic oligonucleotide
caggcgccgccaggccauu

SEQ ID NO: 2358465 - RNA, 19 nt, Artificial Sequence
  Description of Artificial Sequence: Synthetic oligonucleotide
ccgcucgccuuggccgucu

SEQ ID NO: 2358466 - RNA, 19 nt, Artificial Sequence
  Description of Artificial Sequence: Synthetic oligonucleotide
ccuucccgucggcgcucgu

SEQ ID NO: 2358467 - RNA, 19 nt, Artificial Sequence
  Description of Artificial Sequence: Synthetic oligonucleotide
cgcccgcaccgggccgcuc

SEQ ID NO: 2358468 - RNA, 19 nt, Artificial Sequence
  Description of Artificial Sequence: Synthetic oligonucleotide
cguuggcgccggugcccuu

SEQ ID NO: 2358469 - RNA, 19 nt, Artificial Sequence
  Description of Artificial Sequence: Synthetic oligonucleotide
cgccgcgccuuggccuugu

SEQ ID NO: 2358470 - RNA, 19 nt, Artificial Sequence
  Description of Artificial Sequence: Synthetic oligonucleotide
cgcucgccuuggccgucuu

SEQ ID NO: 2358471 - RNA, 19 nt, Artificial Sequence
  Description of Artificial Sequence: Synthetic oligonucleotide
  modified_base (1)..(1): a, c, u, g, unknown or other
ngccguuggcgccggugcc

SEQ ID NO: 2358472 - RNA, 19 nt, Artificial Sequence
  Description of Artificial Sequence: Synthetic oligonucleotide
aauaaaaucuuccuaaauc

SEQ ID NO: 2358473 - RNA, 19 nt, Artificial Sequence
  Description of Artificial Sequence: Synthetic oligonucleotide
aauuagguagaucuugucc

SEQ ID NO: 2358474 - RNA, 19 nt, Artificial Sequence
  Description of Artificial Sequence: Synthetic oligonucleotide
aauaauggucaccaguucc

SEQ ID NO: 2358475 - RNA, 19 nt, Artificial Sequence
  Description of Artificial Sequence: Synthetic oligonucleotide
uuaauggccagccaaaggg

SEQ ID NO: 2358476 - RNA, 19 nt, Artificial Sequence
  Description of Artificial Sequence: Synthetic oligonucleotide
uuuuauauuaccaccacca

SEQ ID NO: 2358477 - RNA, 19 nt, Artificial Sequence
  Description of Artificial Sequence: Synthetic oligonucleotide
uuugaauuaacuuguauug

SEQ ID NO: 2358478 - RNA, 19 nt, Artificial Sequence
  Description of Artificial Sequence: Synthetic oligonucleotide
uuuuguuugaauuaacuug

SEQ ID NO: 2358479 - RNA, 19 nt, Artificial Sequence
  Description of Artificial Sequence: Synthetic oligonucleotide
aucauuuuauauuaccacc

SEQ ID NO: 2358480 - RNA, 19 nt, Artificial Sequence
  Description of Artificial Sequence: Synthetic oligonucleotide
uauauuaccaccaccacca

SEQ ID NO: 2358481 - RNA, 19 nt, Artificial Sequence
  Description of Artificial Sequence: Synthetic oligonucleotide
uuugaauguaguaauuagg

SEQ ID NO: 2358482 - RNA, 19 nt, Artificial Sequence
  Description of Artificial Sequence: Synthetic oligonucleotide
uccuaaaucauguuaagag

SEQ ID NO: 2358483 - RNA, 19 nt, Artificial Sequence
  Description of Artificial Sequence: Synthetic oligonucleotide
agaagcaugauucagcaag

SEQ ID NO: 2358484 - RNA, 19 nt, Artificial Sequence
  Description of Artificial Sequence: Synthetic oligonucleotide
aguaauuagguauuuauga

SEQ ID NO: 2358485 - RNA, 19 nt, Artificial Sequence
  Description of Artificial Sequence: Synthetic oligonucleotide
uuuucaacugaauacagcu

SEQ ID NO: 2358486 - RNA, 19 nt, Artificial Sequence
  Description of Artificial Sequence: Synthetic oligonucleotide
uuuguuugaauuaacuugu

SEQ ID NO: 2358487 - RNA, 19 nt, Artificial Sequence
  Description of Artificial Sequence: Synthetic oligonucleotide
aacuaaacuggccugaaca

SEQ ID NO: 2358488 - RNA, 19 nt, Artificial Sequence
  Description of Artificial Sequence: Synthetic oligonucleotide
uugaauguaguaauuaggu

SEQ ID NO: 2358489 - RNA, 19 nt, Artificial Sequence
  Description of Artificial Sequence: Synthetic oligonucleotide
auuuuauauuaccaccacc

SEQ ID NO: 2358490 - RNA, 19 nt, Artificial Sequence
  Description of Artificial Sequence: Synthetic oligonucleotide
aagacgcugaacuaaacug

SEQ ID NO: 2358491 - RNA, 19 nt, Artificial Sequence
  Description of Artificial Sequence: Synthetic oligonucleotide
aauuccugagacugugugc

SEQ ID NO: 2358492 - RNA, 19 nt, Artificial Sequence
  Description of Artificial Sequence: Synthetic oligonucleotide
cugaaguucggaauaaugg

SEQ ID NO: 2358493 - RNA, 19 nt, Artificial Sequence
  Description of Artificial Sequence: Synthetic oligonucleotide
uauuuaugaauauauugcu

SEQ ID NO: 2358494 - RNA, 19 nt, Artificial Sequence
  Description of Artificial Sequence: Synthetic oligonucleotide
uuauauuaccaccaccacc

SEQ ID NO: 2358495 - RNA, 19 nt, Artificial Sequence
  Description of Artificial Sequence: Synthetic oligonucleotide
aagaguucacgcuacaggu

SEQ ID NO: 2358496 - RNA, 19 nt, Artificial Sequence
  Description of Artificial Sequence: Synthetic oligonucleotide
gaagaguucacgcuacagg

SEQ ID NO: 2358497 - RNA, 19 nt, Artificial Sequence
  Description of Artificial Sequence: Synthetic oligonucleotide
auuagguagaucuugucca

SEQ ID NO: 2358498 - RNA, 19 nt, Artificial Sequence
  Description of Artificial Sequence: Synthetic oligonucleotide
aacugaauacagcuuucac

SEQ ID NO: 2358499 - RNA, 19 nt, Artificial Sequence
  Description of Artificial Sequence: Synthetic oligonucleotide
uagguauuuaugaauauau

SEQ ID NO: 2358500 - RNA, 19 nt, Artificial Sequence
  Description of Artificial Sequence: Synthetic oligonucleotide
aaagcugucagcagacacc

SEQ ID NO: 2358501 - RNA, 19 nt, Artificial Sequence
  Description of Artificial Sequence: Synthetic oligonucleotide
uguaauuugacaucccaaa

SEQ ID NO: 2358502 - RNA, 19 nt, Artificial Sequence
  Description of Artificial Sequence: Synthetic oligonucleotide
aaaacuccacuucggcagc

SEQ ID NO: 2358503 - RNA, 19 nt, Artificial Sequence
  Description of Artificial Sequence: Synthetic oligonucleotide
aaguuaucgagcuuggcau

SEQ ID NO: 2358504 - RNA, 19 nt, Artificial Sequence
  Description of Artificial Sequence: Synthetic oligonucleotide
gugaucuccauguagugcg

SEQ ID NO: 2358505 - RNA, 19 nt, Artificial Sequence
  Description of Artificial Sequence: Synthetic oligonucleotide
guuugaauguaguaauuag

SEQ ID NO: 2358506 - RNA, 19 nt, Artificial Sequence
  Description of Artificial Sequence: Synthetic oligonucleotide
auauuauuuguuugaaugu

SEQ ID NO: 2358507 - RNA, 19 nt, Artificial Sequence
  Description of Artificial Sequence: Synthetic oligonucleotide
cauccauccacucuggagg

SEQ ID NO: 2358508 - RNA, 19 nt, Artificial Sequence
  Description of Artificial Sequence: Synthetic oligonucleotide
ucccaaaauaaaaucuucc

SEQ ID NO: 2358509 - RNA, 19 nt, Artificial Sequence
  Description of Artificial Sequence: Synthetic oligonucleotide
aauguugucagaagcauga

SEQ ID NO: 2358510 - RNA, 19 nt, Artificial Sequence
  Description of Artificial Sequence: Synthetic oligonucleotide
uuaacuuguauuguaauau

SEQ ID NO: 2358511 - RNA, 19 nt, Artificial Sequence
  Description of Artificial Sequence: Synthetic oligonucleotide
aauuaacuuguauuguaau

SEQ ID NO: 2358512 - RNA, 19 nt, Artificial Sequence
  Description of Artificial Sequence: Synthetic oligonucleotide
uaauuugacaucccaaaau

SEQ ID NO: 2358513 - RNA, 19 nt, Artificial Sequence
  Description of Artificial Sequence: Synthetic oligonucleotide
aagcugucagcagacaccc

SEQ ID NO: 2358514 - RNA, 19 nt, Artificial Sequence
  Description of Artificial Sequence: Synthetic oligonucleotide
agcaugauucagcaagagc

SEQ ID NO: 2358515 - RNA, 19 nt, Artificial Sequence
  Description of Artificial Sequence: Synthetic oligonucleotide
aaggucaaguuaucgagcu

SEQ ID NO: 2358516 - RNA, 19 nt, Artificial Sequence
  Description of Artificial Sequence: Synthetic oligonucleotide
gaauacagcuuucacaguc

SEQ ID NO: 2358517 - RNA, 19 nt, Artificial Sequence
  Description of Artificial Sequence: Synthetic oligonucleotide
uaauuagguauuuaugaau

SEQ ID NO: 2358518 - RNA, 19 nt, Artificial Sequence
  Description of Artificial Sequence: Synthetic oligonucleotide
uucggcagcguccaugacg

SEQ ID NO: 2358519 - RNA, 19 nt, Artificial Sequence
  Description of Artificial Sequence: Synthetic oligonucleotide
gaauguaguaauuagguau

SEQ ID NO: 2358520 - RNA, 19 nt, Artificial Sequence
  Description of Artificial Sequence: Synthetic oligonucleotide
uccaucaaggucaaguuau

SEQ ID NO: 2358521 - RNA, 19 nt, Artificial Sequence
  Description of Artificial Sequence: Synthetic oligonucleotide
uucaacugaauacagcuuu

SEQ ID NO: 2358522 - RNA, 19 nt, Artificial Sequence
  Description of Artificial Sequence: Synthetic oligonucleotide
aauuagguauuuaugaaua

SEQ ID NO: 2358523 - RNA, 19 nt, Artificial Sequence
  Description of Artificial Sequence: Synthetic oligonucleotide
guacaugugauugagugcc

SEQ ID NO: 2358524 - RNA, 19 nt, Artificial Sequence
  Description of Artificial Sequence: Synthetic oligonucleotide
ugauucagcaagagcuugg

SEQ ID NO: 2358525 - RNA, 19 nt, Artificial Sequence
  Description of Artificial Sequence: Synthetic oligonucleotide
gaguuuguacaugugauug

SEQ ID NO: 2358526 - RNA, 19 nt, Artificial Sequence
  Description of Artificial Sequence: Synthetic oligonucleotide
acuaaacuggccugaacag

SEQ ID NO: 2358527 - RNA, 19 nt, Artificial Sequence
  Description of Artificial Sequence: Synthetic oligonucleotide
uuuauauuaccaccaccac

SEQ ID NO: 2358528 - RNA, 19 nt, Artificial Sequence
  Description of Artificial Sequence: Synthetic oligonucleotide
caaaggggcacuuccacgg

SEQ ID NO: 2358529 - RNA, 19 nt, Artificial Sequence
  Description of Artificial Sequence: Synthetic oligonucleotide
ugaauuaacuuguauugua

SEQ ID NO: 2358530 - RNA, 19 nt, Artificial Sequence
  Description of Artificial Sequence: Synthetic oligonucleotide
uucggaauaauggucacca

SEQ ID NO: 2358531 - RNA, 19 nt, Artificial Sequence
  Description of Artificial Sequence: Synthetic oligonucleotide
gaguucacgcuacaggucc

SEQ ID NO: 2358532 - RNA, 19 nt, Artificial Sequence
  Description of Artificial Sequence: Synthetic oligonucleotide
aaggguuugcacaucacag

SEQ ID NO: 2358533 - RNA, 19 nt, Artificial Sequence
  Description of Artificial Sequence: Synthetic oligonucleotide
caugacgaagaguucacgc

SEQ ID NO: 2358534 - RNA, 19 nt, Artificial Sequence
  Description of Artificial Sequence: Synthetic oligonucleotide
uugaucaguguccggauga

SEQ ID NO: 2358535 - RNA, 19 nt, Artificial Sequence
  Description of Artificial Sequence: Synthetic oligonucleotide
aauggccagccaaaggggc

SEQ ID NO: 2358536 - RNA, 19 nt, Artificial Sequence
  Description of Artificial Sequence: Synthetic oligonucleotide
auuuguuugaauguaguaa

SEQ ID NO: 2358537 - RNA, 19 nt, Artificial Sequence
  Description of Artificial Sequence: Synthetic oligonucleotide
gauugagugccugagugag

SEQ ID NO: 2358538 - RNA, 19 nt, Artificial Sequence
  Description of Artificial Sequence: Synthetic oligonucleotide
accaccaccaccaccaccc

SEQ ID NO: 2358539 - RNA, 19 nt, Artificial Sequence
  Description of Artificial Sequence: Synthetic oligonucleotide
ucuuugaucaguguccgga

SEQ ID NO: 2358540 - RNA, 19 nt, Artificial Sequence
  Description of Artificial Sequence: Synthetic oligonucleotide
acugguguugaucuccauc

SEQ ID NO: 2358541 - RNA, 19 nt, Artificial Sequence
  Description of Artificial Sequence: Synthetic oligonucleotide
augaauauauugcuguaau

SEQ ID NO: 2358542 - RNA, 19 nt, Artificial Sequence
  Description of Artificial Sequence: Synthetic oligonucleotide
ucuggcuagaauuccugag

SEQ ID NO: 2358543 - RNA, 19 nt, Artificial Sequence
  Description of Artificial Sequence: Synthetic oligonucleotide
ugacaucccaaaauaaaau

SEQ ID NO: 2358544 - RNA, 19 nt, Artificial Sequence
  Description of Artificial Sequence: Synthetic oligonucleotide
gugauugagugccugagug

SEQ ID NO: 2358545 - RNA, 19 nt, Artificial Sequence
  Description of Artificial Sequence: Synthetic oligonucleotide
auuaacuuguauuguaaua

SEQ ID NO: 2358546 - RNA, 19 nt, Artificial Sequence
  Description of Artificial Sequence: Synthetic oligonucleotide
guuaauggccagccaaagg

SEQ ID NO: 2358547 - RNA, 19 nt, Artificial Sequence
  Description of Artificial Sequence: Synthetic oligonucleotide
cagucagacuugaagacgc

SEQ ID NO: 2358548 - RNA, 19 nt, Artificial Sequence
  Description of Artificial Sequence: Synthetic oligonucleotide
uuagguagaucuuguccag

SEQ ID NO: 2358549 - RNA, 19 nt, Artificial Sequence
  Description of Artificial Sequence: Synthetic oligonucleotide
agggcuggagguuugugcg

SEQ ID NO: 2358550 - RNA, 19 nt, Artificial Sequence
  Description of Artificial Sequence: Synthetic oligonucleotide
uuugugcggaguuuguaca

SEQ ID NO: 2358551 - RNA, 19 nt, Artificial Sequence
  Description of Artificial Sequence: Synthetic oligonucleotide
aaguucggaauaaugguca

SEQ ID NO: 2358552 - RNA, 19 nt, Artificial Sequence
  Description of Artificial Sequence: Synthetic oligonucleotide
acuuccacggguaagccgg

SEQ ID NO: 2358553 - RNA, 19 nt, Artificial Sequence
  Description of Artificial Sequence: Synthetic oligonucleotide
gacagcaaggguuugcaca

SEQ ID NO: 2358554 - RNA, 19 nt, Artificial Sequence
  Description of Artificial Sequence: Synthetic oligonucleotide
uggccugaacagcagacag

SEQ ID NO: 2358555 - RNA, 19 nt, Artificial Sequence
  Description of Artificial Sequence: Synthetic oligonucleotide
auuuaugaauauauugcug

SEQ ID NO: 2358556 - RNA, 19 nt, Artificial Sequence
  Description of Artificial Sequence: Synthetic oligonucleotide
uacagguccguucccaccc

SEQ ID NO: 2358557 - RNA, 19 nt, Artificial Sequence
  Description of Artificial Sequence: Synthetic oligonucleotide
cuguuucagguuaauggcc

SEQ ID NO: 2358558 - RNA, 19 nt, Artificial Sequence
  Description of Artificial Sequence: Synthetic oligonucleotide
uauuuguuugaauguagua

SEQ ID NO: 2358559 - RNA, 19 nt, Artificial Sequence
  Description of Artificial Sequence: Synthetic oligonucleotide
uaugaauauauugcuguaa

SEQ ID NO: 2358560 - RNA, 19 nt, Artificial Sequence
  Description of Artificial Sequence: Synthetic oligonucleotide
guaauuagguauuuaugaa

SEQ ID NO: 2358561 - RNA, 19 nt, Artificial Sequence
  Description of Artificial Sequence: Synthetic oligonucleotide
uggcuagaauuccugagac

SEQ ID NO: 2358562 - RNA, 19 nt, Artificial Sequence
  Description of Artificial Sequence: Synthetic oligonucleotide
ucggcagcguccaugacga

SEQ ID NO: 2358563 - RNA, 19 nt, Artificial Sequence
  Description of Artificial Sequence: Synthetic oligonucleotide
uugcuguaauuugacaucc

SEQ ID NO: 2358564 - RNA, 19 nt, Artificial Sequence
  Description of Artificial Sequence: Synthetic oligonucleotide
uugaauuaacuuguauugu

SEQ ID NO: 2358565 - RNA, 19 nt, Artificial Sequence
  Description of Artificial Sequence: Synthetic oligonucleotide
ugaauguaguaauuaggua

SEQ ID NO: 2358566 - RNA, 19 nt, Artificial Sequence
  Description of Artificial Sequence: Synthetic oligonucleotide
uguuugaauguaguaauua

SEQ ID NO: 2358567 - RNA, 19 nt, Artificial Sequence
  Description of Artificial Sequence: Synthetic oligonucleotide
aguucggaauaauggucac

SEQ ID NO: 2358568 - RNA, 19 nt, Artificial Sequence
  Description of Artificial Sequence: Synthetic oligonucleotide
uucagguuaauggccagcc

SEQ ID NO: 2358569 - RNA, 19 nt, Artificial Sequence
  Description of Artificial Sequence: Synthetic oligonucleotide
augacgaagaguucacgcu

SEQ ID NO: 2358570 - RNA, 19 nt, Artificial Sequence
  Description of Artificial Sequence: Synthetic oligonucleotide
caaggucaaguuaucgagc

SEQ ID NO: 2358571 - RNA, 19 nt, Artificial Sequence
  Description of Artificial Sequence: Synthetic oligonucleotide
agacgcugaacuaaacugg

SEQ ID NO: 2358572 - RNA, 19 nt, Artificial Sequence
  Description of Artificial Sequence: Synthetic oligonucleotide
cagaucuuugaucaguguc

SEQ ID NO: 2358573 - RNA, 19 nt, Artificial Sequence
  Description of Artificial Sequence: Synthetic oligonucleotide
gcuagaauuccugagacug

SEQ ID NO: 2358574 - RNA, 19 nt, Artificial Sequence
  Description of Artificial Sequence: Synthetic oligonucleotide
acagucagacuugaagacg

SEQ ID NO: 2358575 - RNA, 19 nt, Artificial Sequence
  Description of Artificial Sequence: Synthetic oligonucleotide
uuaugaauauauugcugua

SEQ ID NO: 2358576 - RNA, 19 nt, Artificial Sequence
  Description of Artificial Sequence: Synthetic oligonucleotide
cuuccuaaaucauguuaag

SEQ ID NO: 2358577 - RNA, 19 nt, Artificial Sequence
  Description of Artificial Sequence: Synthetic oligonucleotide
caaguuaucgagcuuggca

SEQ ID NO: 2358578 - RNA, 19 nt, Artificial Sequence
  Description of Artificial Sequence: Synthetic oligonucleotide
ucgaaucuguuccaauuuc

SEQ ID NO: 2358579 - RNA, 19 nt, Artificial Sequence
  Description of Artificial Sequence: Synthetic oligonucleotide
uuagguauuuaugaauaua

SEQ ID NO: 2358580 - RNA, 19 nt, Artificial Sequence
  Description of Artificial Sequence: Synthetic oligonucleotide
aucuccaucaaggucaagu

SEQ ID NO: 2358581 - RNA, 19 nt, Artificial Sequence
  Description of Artificial Sequence: Synthetic oligonucleotide
augaugucugccuugggaa

SEQ ID NO: 2358582 - RNA, 19 nt, Artificial Sequence
  Description of Artificial Sequence: Synthetic oligonucleotide
gguaagccgggguugaagg

SEQ ID NO: 2358583 - RNA, 19 nt, Artificial Sequence
  Description of Artificial Sequence: Synthetic oligonucleotide
gaaguucggaauaaugguc

SEQ ID NO: 2358584 - RNA, 19 nt, Artificial Sequence
  Description of Artificial Sequence: Synthetic oligonucleotide
uugaagacgcugaacuaaa

SEQ ID NO: 2358585 - RNA, 19 nt, Artificial Sequence
  Description of Artificial Sequence: Synthetic oligonucleotide
aauacagcuuucacaguca

SEQ ID NO: 2358586 - RNA, 19 nt, Artificial Sequence
  Description of Artificial Sequence: Synthetic oligonucleotide
cacgcuacagguccguucc

SEQ ID NO: 2358587 - RNA, 19 nt, Artificial Sequence
  Description of Artificial Sequence: Synthetic oligonucleotide
gucaccaguuccuucucgg

SEQ ID NO: 2358588 - RNA, 19 nt, Artificial Sequence
  Description of Artificial Sequence: Synthetic oligonucleotide
cugguguugaucuccauca

SEQ ID NO: 2358589 - RNA, 19 nt, Artificial Sequence
  Description of Artificial Sequence: Synthetic oligonucleotide
aucccaaaauaaaaucuuc

SEQ ID NO: 2358590 - RNA, 19 nt, Artificial Sequence
  Description of Artificial Sequence: Synthetic oligonucleotide
uuuguacaugugauugagu

SEQ ID NO: 2358591 - RNA, 19 nt, Artificial Sequence
  Description of Artificial Sequence: Synthetic oligonucleotide
uguagugcgggcugggcac

SEQ ID NO: 2358592 - RNA, 19 nt, Artificial Sequence
  Description of Artificial Sequence: Synthetic oligonucleotide
uuccuaaaucauguuaaga

SEQ ID NO: 2358593 - RNA, 19 nt, Artificial Sequence
  Description of Artificial Sequence: Synthetic oligonucleotide
ugacgaagaguucacgcua

SEQ ID NO: 2358594 - RNA, 19 nt, Artificial Sequence
  Description of Artificial Sequence: Synthetic oligonucleotide
ugauugagugccugaguga

SEQ ID NO: 2358595 - RNA, 19 nt, Artificial Sequence
  Description of Artificial Sequence: Synthetic oligonucleotide
ucaacugaauacagcuuuc

SEQ ID NO: 2358596 - RNA, 19 nt, Artificial Sequence
  Description of Artificial Sequence: Synthetic oligonucleotide
auauugcuguaauuugaca

SEQ ID NO: 2358597 - RNA, 19 nt, Artificial Sequence
  Description of Artificial Sequence: Synthetic oligonucleotide
auacagcuuucacagucag

SEQ ID NO: 2358598 - RNA, 19 nt, Artificial Sequence
  Description of Artificial Sequence: Synthetic oligonucleotide
aacuuguauuguaauauua

SEQ ID NO: 2358599 - RNA, 19 nt, Artificial Sequence
  Description of Artificial Sequence: Synthetic oligonucleotide
ugagacugugugcucucag

SEQ ID NO: 2358600 - RNA, 19 nt, Artificial Sequence
  Description of Artificial Sequence: Synthetic oligonucleotide
ugugauugagugccugagu

SEQ ID NO: 2358601 - RNA, 19 nt, Artificial Sequence
  Description of Artificial Sequence: Synthetic oligonucleotide
gaauuaacuuguauuguaa

SEQ ID NO: 2358602 - RNA, 19 nt, Artificial Sequence
  Description of Artificial Sequence: Synthetic oligonucleotide
uaucgagcuuggcaugugc

SEQ ID NO: 2358603 - RNA, 19 nt, Artificial Sequence
  Description of Artificial Sequence: Synthetic oligonucleotide
caucaaggucaaguuaucg

SEQ ID NO: 2358604 - RNA, 19 nt, Artificial Sequence
  Description of Artificial Sequence: Synthetic oligonucleotide
agugaggaaggccccacug

SEQ ID NO: 2358605 - RNA, 19 nt, Artificial Sequence
  Description of Artificial Sequence: Synthetic oligonucleotide
acugaaguucggaauaaug

SEQ ID NO: 2358606 - RNA, 19 nt, Artificial Sequence
  Description of Artificial Sequence: Synthetic oligonucleotide
gaauaauggucaccaguuc

SEQ ID NO: 2358607 - RNA, 19 nt, Artificial Sequence
  Description of Artificial Sequence: Synthetic oligonucleotide
uugucagaagcaugauuca

SEQ ID NO: 2358608 - RNA, 19 nt, Artificial Sequence
  Description of Artificial Sequence: Synthetic oligonucleotide
ucucgaaucuguuccaauu

SEQ ID NO: 2358609 - RNA, 19 nt, Artificial Sequence
  Description of Artificial Sequence: Synthetic oligonucleotide
cuaaacuggccugaacagc

SEQ ID NO: 2358610 - RNA, 19 nt, Artificial Sequence
  Description of Artificial Sequence: Synthetic oligonucleotide
aucaguguccggaugaugu

SEQ ID NO: 2358611 - RNA, 19 nt, Artificial Sequence
  Description of Artificial Sequence: Synthetic oligonucleotide
uuucaacugaauacagcuu

SEQ ID NO: 2358612 - RNA, 19 nt, Artificial Sequence
  Description of Artificial Sequence: Synthetic oligonucleotide
gaauguugucagaagcaug

SEQ ID NO: 2358613 - RNA, 19 nt, Artificial Sequence
  Description of Artificial Sequence: Synthetic oligonucleotide
uguugucagaagcaugauu

SEQ ID NO: 2358614 - RNA, 19 nt, Artificial Sequence
  Description of Artificial Sequence: Synthetic oligonucleotide
acagcaaggguuugcacau

SEQ ID NO: 2358615 - RNA, 19 nt, Artificial Sequence
  Description of Artificial Sequence: Synthetic oligonucleotide
aguuaucgagcuuggcaug

SEQ ID NO: 2358616 - RNA, 19 nt, Artificial Sequence
  Description of Artificial Sequence: Synthetic oligonucleotide
cacaaagcugucagcagac

SEQ ID NO: 2358617 - RNA, 19 nt, Artificial Sequence
  Description of Artificial Sequence: Synthetic oligonucleotide
uaacuuguauuguaauauu

SEQ ID NO: 2358618 - RNA, 19 nt, Artificial Sequence
  Description of Artificial Sequence: Synthetic oligonucleotide
gcugucagcagacacccgg

SEQ ID NO: 2358619 - RNA, 19 nt, Artificial Sequence
  Description of Artificial Sequence: Synthetic oligonucleotide
aagcaugauucagcaagag

SEQ ID NO: 2358620 - RNA, 19 nt, Artificial Sequence
  Description of Artificial Sequence: Synthetic oligonucleotide
uccaugacgaagaguucac

SEQ ID NO: 2358621 - RNA, 19 nt, Artificial Sequence
  Description of Artificial Sequence: Synthetic oligonucleotide
uguccagacugaaguucgg

SEQ ID NO: 2358622 - RNA, 19 nt, Artificial Sequence
  Description of Artificial Sequence: Synthetic oligonucleotide
gacgcugaacuaaacuggc

SEQ ID NO: 2358623 - RNA, 19 nt, Artificial Sequence
  Description of Artificial Sequence: Synthetic oligonucleotide
uccagacugaaguucggaa

SEQ ID NO: 2358624 - RNA, 19 nt, Artificial Sequence
  Description of Artificial Sequence: Synthetic oligonucleotide
uaagccgggguugaagggc

SEQ ID NO: 2358625 - RNA, 19 nt, Artificial Sequence
  Description of Artificial Sequence: Synthetic oligonucleotide
aucgagcuuggcaugugcc

SEQ ID NO: 2358626 - RNA, 19 nt, Artificial Sequence
  Description of Artificial Sequence: Synthetic oligonucleotide
ugucagcagacacccggag

SEQ ID NO: 2358627 - RNA, 19 nt, Artificial Sequence
  Description of Artificial Sequence: Synthetic oligonucleotide
ucuccaucaaggucaaguu

SEQ ID NO: 2358628 - RNA, 19 nt, Artificial Sequence
  Description of Artificial Sequence: Synthetic oligonucleotide
auauuaccaccaccaccac

SEQ ID NO: 2358629 - RNA, 19 nt, Artificial Sequence
  Description of Artificial Sequence: Synthetic oligonucleotide
ggguuugcacaucacaggc

SEQ ID NO: 2358630 - RNA, 19 nt, Artificial Sequence
  Description of Artificial Sequence: Synthetic oligonucleotide
gaagacgcugaacuaaacu

SEQ ID NO: 2358631 - RNA, 19 nt, Artificial Sequence
  Description of Artificial Sequence: Synthetic oligonucleotide
agacacccggagcuuggcc

SEQ ID NO: 2358632 - RNA, 19 nt, Artificial Sequence
  Description of Artificial Sequence: Synthetic oligonucleotide
guaagccgggguugaaggg

SEQ ID NO: 2358633 - RNA, 19 nt, Artificial Sequence
  Description of Artificial Sequence: Synthetic oligonucleotide
uuguuugaauguaguaauu

SEQ ID NO: 2358634 - RNA, 19 nt, Artificial Sequence
  Description of Artificial Sequence: Synthetic oligonucleotide
ugaagacgcugaacuaaac

SEQ ID NO: 2358635 - RNA, 19 nt, Artificial Sequence
  Description of Artificial Sequence: Synthetic oligonucleotide
gagguuugugcggaguuug

SEQ ID NO: 2358636 - RNA, 19 nt, Artificial Sequence
  Description of Artificial Sequence: Synthetic oligonucleotide
ugcuguaauuugacauccc

SEQ ID NO: 2358637 - RNA, 19 nt, Artificial Sequence
  Description of Artificial Sequence: Synthetic oligonucleotide
gaugucugccuugggaaug

SEQ ID NO: 2358638 - RNA, 19 nt, Artificial Sequence
  Description of Artificial Sequence: Synthetic oligonucleotide
caauuucuccacauccauc

SEQ ID NO: 2358639 - RNA, 19 nt, Artificial Sequence
  Description of Artificial Sequence: Synthetic oligonucleotide
uggugaucuccauguagug

SEQ ID NO: 2358640 - RNA, 19 nt, Artificial Sequence
  Description of Artificial Sequence: Synthetic oligonucleotide
acagcagacagcaaggguu

SEQ ID NO: 2358641 - RNA, 19 nt, Artificial Sequence
  Description of Artificial Sequence: Synthetic oligonucleotide
aucauguuaagaggaaaau

SEQ ID NO: 2358642 - RNA, 19 nt, Artificial Sequence
  Description of Artificial Sequence: Synthetic oligonucleotide
uuucagguuaauggccagc

SEQ ID NO: 2358643 - RNA, 19 nt, Artificial Sequence
  Description of Artificial Sequence: Synthetic oligonucleotide
caauuagguagaucuuguc

SEQ ID NO: 2358644 - RNA, 19 nt, Artificial Sequence
  Description of Artificial Sequence: Synthetic oligonucleotide
augugauugagugccugag

SEQ ID NO: 2358645 - RNA, 19 nt, Artificial Sequence
  Description of Artificial Sequence: Synthetic oligonucleotide
accaccaccaccaccacca

SEQ ID NO: 2358646 - RNA, 19 nt, Artificial Sequence
  Description of Artificial Sequence: Synthetic oligonucleotide
gaucuuguccagacugaag

SEQ ID NO: 2358647 - RNA, 19 nt, Artificial Sequence
  Description of Artificial Sequence: Synthetic oligonucleotide
guuugcacaucacaggccu

SEQ ID NO: 2358648 - RNA, 19 nt, Artificial Sequence
  Description of Artificial Sequence: Synthetic oligonucleotide
gcaugauucagcaagagcu

SEQ ID NO: 2358649 - RNA, 19 nt, Artificial Sequence
  Description of Artificial Sequence: Synthetic oligonucleotide
gacacccggagcuuggcca

SEQ ID NO: 2358650 - RNA, 19 nt, Artificial Sequence
  Description of Artificial Sequence: Synthetic oligonucleotide
gaacuaaacuggccugaac

SEQ ID NO: 2358651 - RNA, 19 nt, Artificial Sequence
  Description of Artificial Sequence: Synthetic oligonucleotide
aaacuccacuucggcagcg

SEQ ID NO: 2358652 - RNA, 19 nt, Artificial Sequence
  Description of Artificial Sequence: Synthetic oligonucleotide
ucgagcuuggcaugugccu

SEQ ID NO: 2358653 - RNA, 19 nt, Artificial Sequence
  Description of Artificial Sequence: Synthetic oligonucleotide
auguagugcgggcugggca

SEQ ID NO: 2358654 - RNA, 19 nt, Artificial Sequence
  Description of Artificial Sequence: Synthetic oligonucleotide
ucggaauaauggucaccag

SEQ ID NO: 2358655 - RNA, 19 nt, Artificial Sequence
  Description of Artificial Sequence: Synthetic oligonucleotide
gucaaguuaucgagcuugg

SEQ ID NO: 2358656 - RNA, 19 nt, Artificial Sequence
  Description of Artificial Sequence: Synthetic oligonucleotide
acagaucuuugaucagugu

SEQ ID NO: 2358657 - RNA, 19 nt, Artificial Sequence
  Description of Artificial Sequence: Synthetic oligonucleotide
cacucuggagguagcagac

SEQ ID NO: 2358658 - RNA, 19 nt, Artificial Sequence
  Description of Artificial Sequence: Synthetic oligonucleotide
cacuuccacggguaagccg

SEQ ID NO: 2358659 - RNA, 19 nt, Artificial Sequence
  Description of Artificial Sequence: Synthetic oligonucleotide
aucuuugaucaguguccgg

SEQ ID NO: 2358660 - RNA, 19 nt, Artificial Sequence
  Description of Artificial Sequence: Synthetic oligonucleotide
auucagcaagagcuuggug

SEQ ID NO: 2358661 - RNA, 19 nt, Artificial Sequence
  Description of Artificial Sequence: Synthetic oligonucleotide
gaagcaugauucagcaaga

SEQ ID NO: 2358662 - RNA, 19 nt, Artificial Sequence
  Description of Artificial Sequence: Synthetic oligonucleotide
cuacagguccguucccacc

SEQ ID NO: 2358663 - RNA, 19 nt, Artificial Sequence
  Description of Artificial Sequence: Synthetic oligonucleotide
caaggguuugcacaucaca

SEQ ID NO: 2358664 - RNA, 19 nt, Artificial Sequence
  Description of Artificial Sequence: Synthetic oligonucleotide
uuguuugaauuaacuugua

SEQ ID NO: 2358665 - RNA, 19 nt, Artificial Sequence
  Description of Artificial Sequence: Synthetic oligonucleotide
cuguaauuugacaucccaa

SEQ ID NO: 2358666 - RNA, 19 nt, Artificial Sequence
  Description of Artificial Sequence: Synthetic oligonucleotide
acagguccguucccacccc

SEQ ID NO: 2358667 - RNA, 19 nt, Artificial Sequence
  Description of Artificial Sequence: Synthetic oligonucleotide
uccacuucggcagcgucca

SEQ ID NO: 2358668 - RNA, 19 nt, Artificial Sequence
  Description of Artificial Sequence: Synthetic oligonucleotide
cuugaagacgcugaacuaa

SEQ ID NO: 2358669 - RNA, 19 nt, Artificial Sequence
  Description of Artificial Sequence: Synthetic oligonucleotide
uugcacaucacaggccucu

SEQ ID NO: 2358670 - RNA, 19 nt, Artificial Sequence
  Description of Artificial Sequence: Synthetic oligonucleotide
ucaaguuaucgagcuuggc

SEQ ID NO: 2358671 - RNA, 19 nt, Artificial Sequence
  Description of Artificial Sequence: Synthetic oligonucleotide
ugaugucugccuugggaau

SEQ ID NO: 2358672 - RNA, 19 nt, Artificial Sequence
  Description of Artificial Sequence: Synthetic oligonucleotide
ugcggaguuuguacaugug

SEQ ID NO: 2358673 - RNA, 19 nt, Artificial Sequence
  Description of Artificial Sequence: Synthetic oligonucleotide
ugugcggaguuuguacaug

SEQ ID NO: 2358674 - RNA, 19 nt, Artificial Sequence
  Description of Artificial Sequence: Synthetic oligonucleotide
gacgaagaguucacgcuac

SEQ ID NO: 2358675 - RNA, 19 nt, Artificial Sequence
  Description of Artificial Sequence: Synthetic oligonucleotide
auguuaagaggaaaaucau

SEQ ID NO: 2358676 - RNA, 19 nt, Artificial Sequence
  Description of Artificial Sequence: Synthetic oligonucleotide
uggagguuugugcggaguu

SEQ ID NO: 2358677 - RNA, 19 nt, Artificial Sequence
  Description of Artificial Sequence: Synthetic oligonucleotide
gcuguaauuugacauccca

SEQ ID NO: 2358678 - RNA, 19 nt, Artificial Sequence
  Description of Artificial Sequence: Synthetic oligonucleotide
ugaacuaaacuggccugaa

SEQ ID NO: 2358679 - RNA, 19 nt, Artificial Sequence
  Description of Artificial Sequence: Synthetic oligonucleotide
cuugggaauguugucagaa

SEQ ID NO: 2358680 - RNA, 19 nt, Artificial Sequence
  Description of Artificial Sequence: Synthetic oligonucleotide
acgcugaacuaaacuggcc

SEQ ID NO: 2358681 - RNA, 19 nt, Artificial Sequence
  Description of Artificial Sequence: Synthetic oligonucleotide
uacaugugauugagugccu

SEQ ID NO: 2358682 - RNA, 19 nt, Artificial Sequence
  Description of Artificial Sequence: Synthetic oligonucleotide
cuuguauuguaauauuauu

SEQ ID NO: 2358683 - RNA, 19 nt, Artificial Sequence
  Description of Artificial Sequence: Synthetic oligonucleotide
uaccaccaccaccaccacc

SEQ ID NO: 2358684 - RNA, 19 nt, Artificial Sequence
  Description of Artificial Sequence: Synthetic oligonucleotide
ucacgcuacagguccguuc

SEQ ID NO: 2358685 - RNA, 19 nt, Artificial Sequence
  Description of Artificial Sequence: Synthetic oligonucleotide
ucaguguccggaugauguc

SEQ ID NO: 2358686 - RNA, 19 nt, Artificial Sequence
  Description of Artificial Sequence: Synthetic oligonucleotide
uccacggguaagccggggu

SEQ ID NO: 2358687 - RNA, 19 nt, Artificial Sequence
  Description of Artificial Sequence: Synthetic oligonucleotide
acaugugauugagugccug

SEQ ID NO: 2358688 - RNA, 19 nt, Artificial Sequence
  Description of Artificial Sequence: Synthetic oligonucleotide
uugugcggaguuuguacau

SEQ ID NO: 2358689 - RNA, 19 nt, Artificial Sequence
  Description of Artificial Sequence: Synthetic oligonucleotide
caugugauugagugccuga

SEQ ID NO: 2358690 - RNA, 19 nt, Artificial Sequence
  Description of Artificial Sequence: Synthetic oligonucleotide
guucggaauaauggucacc

SEQ ID NO: 2358691 - RNA, 19 nt, Artificial Sequence
  Description of Artificial Sequence: Synthetic oligonucleotide
gucccacagaucuuugauc

SEQ ID NO: 2358692 - RNA, 19 nt, Artificial Sequence
  Description of Artificial Sequence: Synthetic oligonucleotide
uuugcacaucacaggccuc

SEQ ID NO: 2358693 - RNA, 19 nt, Artificial Sequence
  Description of Artificial Sequence: Synthetic oligonucleotide
ggcaugugccuccugcugc

SEQ ID NO: 2358694 - RNA, 19 nt, Artificial Sequence
  Description of Artificial Sequence: Synthetic oligonucleotide
aggccucuggcuagaauuc

SEQ ID NO: 2358695 - RNA, 19 nt, Artificial Sequence
  Description of Artificial Sequence: Synthetic oligonucleotide
cagacggcacuucugucuc

SEQ ID NO: 2358696 - RNA, 19 nt, Artificial Sequence
  Description of Artificial Sequence: Synthetic oligonucleotide
gguuaauggccagccaaag

SEQ ID NO: 2358697 - RNA, 19 nt, Artificial Sequence
  Description of Artificial Sequence: Synthetic oligonucleotide
aucucgaaucuguuccaau

SEQ ID NO: 2358698 - RNA, 19 nt, Artificial Sequence
  Description of Artificial Sequence: Synthetic oligonucleotide
acucuggagguagcagacg

SEQ ID NO: 2358699 - RNA, 19 nt, Artificial Sequence
  Description of Artificial Sequence: Synthetic oligonucleotide
gccugagugaggaaggccc

SEQ ID NO: 2358700 - RNA, 19 nt, Artificial Sequence
  Description of Artificial Sequence: Synthetic oligonucleotide
uuaucgagcuuggcaugug

SEQ ID NO: 2358701 - RNA, 19 nt, Artificial Sequence
  Description of Artificial Sequence: Synthetic oligonucleotide
caucccaaaauaaaaucuu

SEQ ID NO: 2358702 - RNA, 19 nt, Artificial Sequence
  Description of Artificial Sequence: Synthetic oligonucleotide
ggcacuuccacggguaagc

SEQ ID NO: 2358703 - RNA, 19 nt, Artificial Sequence
  Description of Artificial Sequence: Synthetic oligonucleotide
acgcuacagguccguuccc

SEQ ID NO: 2358704 - RNA, 19 nt, Artificial Sequence
  Description of Artificial Sequence: Synthetic oligonucleotide
gacggcacuucugucucug

SEQ ID NO: 2358705 - RNA, 19 nt, Artificial Sequence
  Description of Artificial Sequence: Synthetic oligonucleotide
agcuuggccaugcgugugu

SEQ ID NO: 2358706 - RNA, 19 nt, Artificial Sequence
  Description of Artificial Sequence: Synthetic oligonucleotide
cccaauuagguagaucuug

SEQ ID NO: 2358707 - RNA, 19 nt, Artificial Sequence
  Description of Artificial Sequence: Synthetic oligonucleotide
aguucacgcuacagguccg

SEQ ID NO: 2358708 - RNA, 19 nt, Artificial Sequence
  Description of Artificial Sequence: Synthetic oligonucleotide
gguccguucccaccccucg

SEQ ID NO: 2358709 - RNA, 19 nt, Artificial Sequence
  Description of Artificial Sequence: Synthetic oligonucleotide
cugaacuaaacuggccuga

SEQ ID NO: 2358710 - RNA, 19 nt, Artificial Sequence
  Description of Artificial Sequence: Synthetic oligonucleotide
gggaauguugucagaagca

SEQ ID NO: 2358711 - RNA, 19 nt, Artificial Sequence
  Description of Artificial Sequence: Synthetic oligonucleotide
acgaagaguucacgcuaca

SEQ ID NO: 2358712 - RNA, 19 nt, Artificial Sequence
  Description of Artificial Sequence: Synthetic oligonucleotide
cauccacucuggagguagc

SEQ ID NO: 2358713 - RNA, 19 nt, Artificial Sequence
  Description of Artificial Sequence: Synthetic oligonucleotide
cuuccacggguaagccggg

SEQ ID NO: 2358714 - RNA, 19 nt, Artificial Sequence
  Description of Artificial Sequence: Synthetic oligonucleotide
aguuccuucucggccaaaa

SEQ ID NO: 2358715 - RNA, 19 nt, Artificial Sequence
  Description of Artificial Sequence: Synthetic oligonucleotide
cuggagguagcagacggca

SEQ ID NO: 2358716 - RNA, 19 nt, Artificial Sequence
  Description of Artificial Sequence: Synthetic oligonucleotide
gcggaguuuguacauguga

SEQ ID NO: 2358717 - RNA, 19 nt, Artificial Sequence
  Description of Artificial Sequence: Synthetic oligonucleotide
cucuggcuagaauuccuga

SEQ ID NO: 2358718 - RNA, 19 nt, Artificial Sequence
  Description of Artificial Sequence: Synthetic oligonucleotide
gccugaacagcagacagca

SEQ ID NO: 2358719 - RNA, 19 nt, Artificial Sequence
  Description of Artificial Sequence: Synthetic oligonucleotide
gcgugugucccacagaucu

SEQ ID NO: 2358720 - RNA, 19 nt, Artificial Sequence
  Description of Artificial Sequence: Synthetic oligonucleotide
uuaccaccaccaccaccac

SEQ ID NO: 2358721 - RNA, 19 nt, Artificial Sequence
  Description of Artificial Sequence: Synthetic oligonucleotide
cauguagugcgggcugggc

SEQ ID NO: 2358722 - RNA, 19 nt, Artificial Sequence
  Description of Artificial Sequence: Synthetic oligonucleotide
ccugaucucgaaucuguuc

SEQ ID NO: 2358723 - RNA, 19 nt, Artificial Sequence
  Description of Artificial Sequence: Synthetic oligonucleotide
ugaucaguguccggaugau

SEQ ID NO: 2358724 - RNA, 19 nt, Artificial Sequence
  Description of Artificial Sequence: Synthetic oligonucleotide
ggcagcguccaugacgaag

SEQ ID NO: 2358725 - RNA, 19 nt, Artificial Sequence
  Description of Artificial Sequence: Synthetic oligonucleotide
ggaauaauggucaccaguu

SEQ ID NO: 2358726 - RNA, 19 nt, Artificial Sequence
  Description of Artificial Sequence: Synthetic oligonucleotide
aacuccacuucggcagcgu

SEQ ID NO: 2358727 - RNA, 19 nt, Artificial Sequence
  Description of Artificial Sequence: Synthetic oligonucleotide
cucucagagggcuggaggu

SEQ ID NO: 2358728 - RNA, 19 nt, Artificial Sequence
  Description of Artificial Sequence: Synthetic oligonucleotide
ugcgugugucccacagauc

SEQ ID NO: 2358729 - RNA, 19 nt, Artificial Sequence
  Description of Artificial Sequence: Synthetic oligonucleotide
augucugccuugggaaugu

SEQ ID NO: 2358730 - RNA, 19 nt, Artificial Sequence
  Description of Artificial Sequence: Synthetic oligonucleotide
cuagaauuccugagacugu

SEQ ID NO: 2358731 - RNA, 19 nt, Artificial Sequence
  Description of Artificial Sequence: Synthetic oligonucleotide
uuccacggguaagccgggg

SEQ ID NO: 2358732 - RNA, 19 nt, Artificial Sequence
  Description of Artificial Sequence: Synthetic oligonucleotide
caccaccaccaccaccacc

SEQ ID NO: 2358733 - RNA, 19 nt, Artificial Sequence
  Description of Artificial Sequence: Synthetic oligonucleotide
cagacuugaagacgcugaa

SEQ ID NO: 2358734 - RNA, 19 nt, Artificial Sequence
  Description of Artificial Sequence: Synthetic oligonucleotide
ccugagugaggaaggcccc

SEQ ID NO: 2358735 - RNA, 19 nt, Artificial Sequence
  Description of Artificial Sequence: Synthetic oligonucleotide
cacggguaagccgggguug

SEQ ID NO: 2358736 - RNA, 19 nt, Artificial Sequence
  Description of Artificial Sequence: Synthetic oligonucleotide
gcaugugccuccugcugcc

SEQ ID NO: 2358737 - RNA, 19 nt, Artificial Sequence
  Description of Artificial Sequence: Synthetic oligonucleotide
acacccggagcuuggccau

SEQ ID NO: 2358738 - RNA, 19 nt, Artificial Sequence
  Description of Artificial Sequence: Synthetic oligonucleotide
caggccucuggcuagaauu

SEQ ID NO: 2358739 - RNA, 19 nt, Artificial Sequence
  Description of Artificial Sequence: Synthetic oligonucleotide
cugcugccgcacaaagcug

SEQ ID NO: 2358740 - RNA, 19 nt, Artificial Sequence
  Description of Artificial Sequence: Synthetic oligonucleotide
ccauccacucuggagguag

SEQ ID NO: 2358741 - RNA, 19 nt, Artificial Sequence
  Description of Artificial Sequence: Synthetic oligonucleotide
guuaucgagcuuggcaugu

SEQ ID NO: 2358742 - RNA, 19 nt, Artificial Sequence
  Description of Artificial Sequence: Synthetic oligonucleotide
gagcuuggccaugcgugug

SEQ ID NO: 2358743 - RNA, 19 nt, Artificial Sequence
  Description of Artificial Sequence: Synthetic oligonucleotide
agguagcagacggcacuuc

SEQ ID NO: 2358744 - RNA, 19 nt, Artificial Sequence
  Description of Artificial Sequence: Synthetic oligonucleotide
gugcgggcugggcacuggg

SEQ ID NO: 2358745 - RNA, 19 nt, Artificial Sequence
  Description of Artificial Sequence: Synthetic oligonucleotide
gggcuggagguuugugcgg

SEQ ID NO: 2358746 - RNA, 19 nt, Artificial Sequence
  Description of Artificial Sequence: Synthetic oligonucleotide
cccaguuuucaacugaaua

SEQ ID NO: 2358747 - RNA, 19 nt, Artificial Sequence
  Description of Artificial Sequence: Synthetic oligonucleotide
ccaugcgugugucccacag

SEQ ID NO: 2358748 - RNA, 19 nt, Artificial Sequence
  Description of Artificial Sequence: Synthetic oligonucleotide
ugagugccugagugaggaa

SEQ ID NO: 2358749 - RNA, 19 nt, Artificial Sequence
  Description of Artificial Sequence: Synthetic oligonucleotide
cucgaaucuguuccaauuu

SEQ ID NO: 2358750 - RNA, 19 nt, Artificial Sequence
  Description of Artificial Sequence: Synthetic oligonucleotide
gcuacagguccguucccac

SEQ ID NO: 2358751 - RNA, 19 nt, Artificial Sequence
  Description of Artificial Sequence: Synthetic oligonucleotide
agcguccaugacgaagagu

SEQ ID NO: 2358752 - RNA, 19 nt, Artificial Sequence
  Description of Artificial Sequence: Synthetic oligonucleotide
cuuugaucaguguccggau

SEQ ID NO: 2358753 - RNA, 19 nt, Artificial Sequence
  Description of Artificial Sequence: Synthetic oligonucleotide
guccagacugaaguucgga

SEQ ID NO: 2358754 - RNA, 19 nt, Artificial Sequence
  Description of Artificial Sequence: Synthetic oligonucleotide
gcagacagcaaggguuugc

SEQ ID NO: 2358755 - RNA, 19 nt, Artificial Sequence
  Description of Artificial Sequence: Synthetic oligonucleotide
agccaaaggggcacuucca

SEQ ID NO: 2358756 - RNA, 19 nt, Artificial Sequence
  Description of Artificial Sequence: Synthetic oligonucleotide
ggguaagccgggguugaag

SEQ ID NO: 2358757 - RNA, 19 nt, Artificial Sequence
  Description of Artificial Sequence: Synthetic oligonucleotide
gcguccaugacgaagaguu

SEQ ID NO: 2358758 - RNA, 19 nt, Artificial Sequence
  Description of Artificial Sequence: Synthetic oligonucleotide
agacggcacuucugucucu

SEQ ID NO: 2358759 - RNA, 19 nt, Artificial Sequence
  Description of Artificial Sequence: Synthetic oligonucleotide
caugcgugugucccacaga

SEQ ID NO: 2358760 - RNA, 19 nt, Artificial Sequence
  Description of Artificial Sequence: Synthetic oligonucleotide
cagcguccaugacgaagag

SEQ ID NO: 2358761 - RNA, 19 nt, Artificial Sequence
  Description of Artificial Sequence: Synthetic oligonucleotide
gcagacggcacuucugucu

SEQ ID NO: 2358762 - RNA, 19 nt, Artificial Sequence
  Description of Artificial Sequence: Synthetic oligonucleotide
ccaugacgaagaguucacg

SEQ ID NO: 2358763 - RNA, 19 nt, Artificial Sequence
  Description of Artificial Sequence: Synthetic oligonucleotide
agugcgggcugggcacugg

SEQ ID NO: 2358764 - RNA, 19 nt, Artificial Sequence
  Description of Artificial Sequence: Synthetic oligonucleotide
ccaucaaggucaaguuauc

SEQ ID NO: 2358765 - RNA, 19 nt, Artificial Sequence
  Description of Artificial Sequence: Synthetic oligonucleotide
acggguaagccgggguuga

SEQ ID NO: 2358766 - RNA, 19 nt, Artificial Sequence
  Description of Artificial Sequence: Synthetic oligonucleotide
cagaagcaugauucagcaa

SEQ ID NO: 2358767 - RNA, 19 nt, Artificial Sequence
  Description of Artificial Sequence: Synthetic oligonucleotide
ccacucuggagguagcaga

SEQ ID NO: 2358768 - RNA, 19 nt, Artificial Sequence
  Description of Artificial Sequence: Synthetic oligonucleotide
ggaauguugucagaagcau

SEQ ID NO: 2358769 - RNA, 19 nt, Artificial Sequence
  Description of Artificial Sequence: Synthetic oligonucleotide
agguccguucccaccccuc

SEQ ID NO: 2358770 - RNA, 19 nt, Artificial Sequence
  Description of Artificial Sequence: Synthetic oligonucleotide
ggccugaacagcagacagc

SEQ ID NO: 2358771 - RNA, 19 nt, Artificial Sequence
  Description of Artificial Sequence: Synthetic oligonucleotide
ccaauuagguagaucuugu

SEQ ID NO: 2358772 - RNA, 19 nt, Artificial Sequence
  Description of Artificial Sequence: Synthetic oligonucleotide
cagacacccggagcuuggc

SEQ ID NO: 2358773 - RNA, 19 nt, Artificial Sequence
  Description of Artificial Sequence: Synthetic oligonucleotide
acggcacuucugucucugu

SEQ ID NO: 2358774 - RNA, 19 nt, Artificial Sequence
  Description of Artificial Sequence: Synthetic oligonucleotide
agguuugugcggaguuugu

SEQ ID NO: 2358775 - RNA, 19 nt, Artificial Sequence
  Description of Artificial Sequence: Synthetic oligonucleotide
ccgcuccugaucucgaauc

SEQ ID NO: 2358776 - RNA, 19 nt, Artificial Sequence
  Description of Artificial Sequence: Synthetic oligonucleotide
ggaguuuguacaugugauu

SEQ ID NO: 2358777 - RNA, 19 nt, Artificial Sequence
  Description of Artificial Sequence: Synthetic oligonucleotide
cgaagaguucacgcuacag

SEQ ID NO: 2358778 - RNA, 19 nt, Artificial Sequence
  Description of Artificial Sequence: Synthetic oligonucleotide
uucacgcuacagguccguu

SEQ ID NO: 2358779 - RNA, 19 nt, Artificial Sequence
  Description of Artificial Sequence: Synthetic oligonucleotide
ggcacuggggugaaugucu

SEQ ID NO: 2358780 - RNA, 19 nt, Artificial Sequence
  Description of Artificial Sequence: Synthetic oligonucleotide
cuucggcagcguccaugac

SEQ ID NO: 2358781 - RNA, 19 nt, Artificial Sequence
  Description of Artificial Sequence: Synthetic oligonucleotide
gccccacugguguugaucu

SEQ ID NO: 2358782 - RNA, 19 nt, Artificial Sequence
  Description of Artificial Sequence: Synthetic oligonucleotide
uagugcgggcugggcacug

SEQ ID NO: 2358783 - RNA, 19 nt, Artificial Sequence
  Description of Artificial Sequence: Synthetic oligonucleotide
ccgcacaaagcugucagca

SEQ ID NO: 2358784 - RNA, 19 nt, Artificial Sequence
  Description of Artificial Sequence: Synthetic oligonucleotide
gugugcucucagagggcug

SEQ ID NO: 2358785 - RNA, 19 nt, Artificial Sequence
  Description of Artificial Sequence: Synthetic oligonucleotide
ggcuagaauuccugagacu

SEQ ID NO: 2358786 - RNA, 19 nt, Artificial Sequence
  Description of Artificial Sequence: Synthetic oligonucleotide
cagcagacagcaaggguuu

SEQ ID NO: 2358787 - RNA, 19 nt, Artificial Sequence
  Description of Artificial Sequence: Synthetic oligonucleotide
uccauccacucuggaggua

SEQ ID NO: 2358788 - RNA, 19 nt, Artificial Sequence
  Description of Artificial Sequence: Synthetic oligonucleotide
cagcaagagcuuggugauc

SEQ ID NO: 2358789 - RNA, 19 nt, Artificial Sequence
  Description of Artificial Sequence: Synthetic oligonucleotide
gggcacuuccacggguaag

SEQ ID NO: 2358790 - RNA, 19 nt, Artificial Sequence
  Description of Artificial Sequence: Synthetic oligonucleotide
ccauguagugcgggcuggg

SEQ ID NO: 2358791 - RNA, 19 nt, Artificial Sequence
  Description of Artificial Sequence: Synthetic oligonucleotide
ccagacugaaguucggaau

SEQ ID NO: 2358792 - RNA, 19 nt, Artificial Sequence
  Description of Artificial Sequence: Synthetic oligonucleotide
gcaaggguuugcacaucac

SEQ ID NO: 2358793 - RNA, 19 nt, Artificial Sequence
  Description of Artificial Sequence: Synthetic oligonucleotide
gguuugugcggaguuugua

SEQ ID NO: 2358794 - RNA, 19 nt, Artificial Sequence
  Description of Artificial Sequence: Synthetic oligonucleotide
gagguagcagacggcacuu

SEQ ID NO: 2358795 - RNA, 19 nt, Artificial Sequence
  Description of Artificial Sequence: Synthetic oligonucleotide
ccguucccaccccucggcg

SEQ ID NO: 2358796 - RNA, 19 nt, Artificial Sequence
  Description of Artificial Sequence: Synthetic oligonucleotide
cagcuuucacagucagacu

SEQ ID NO: 2358797 - RNA, 19 nt, Artificial Sequence
  Description of Artificial Sequence: Synthetic oligonucleotide
cggaauaauggucaccagu

SEQ ID NO: 2358798 - RNA, 19 nt, Artificial Sequence
  Description of Artificial Sequence: Synthetic oligonucleotide
cgcugaacuaaacuggccu

SEQ ID NO: 2358799 - RNA, 19 nt, Artificial Sequence
  Description of Artificial Sequence: Synthetic oligonucleotide
cagcaaggguuugcacauc

SEQ ID NO: 2358800 - RNA, 19 nt, Artificial Sequence
  Description of Artificial Sequence: Synthetic oligonucleotide
ggccccacugguguugauc

SEQ ID NO: 2358801 - RNA, 19 nt, Artificial Sequence
  Description of Artificial Sequence: Synthetic oligonucleotide
ggccaugcgugugucccac

SEQ ID NO: 2358802 - RNA, 19 nt, Artificial Sequence
  Description of Artificial Sequence: Synthetic oligonucleotide
guucacgcuacagguccgu

SEQ ID NO: 2358803 - RNA, 19 nt, Artificial Sequence
  Description of Artificial Sequence: Synthetic oligonucleotide
ugucugccuugggaauguu

SEQ ID NO: 2358804 - RNA, 19 nt, Artificial Sequence
  Description of Artificial Sequence: Synthetic oligonucleotide
cggaguuuguacaugugau

SEQ ID NO: 2358805 - RNA, 19 nt, Artificial Sequence
  Description of Artificial Sequence: Synthetic oligonucleotide
cuggagguuugugcggagu

SEQ ID NO: 2358806 - RNA, 19 nt, Artificial Sequence
  Description of Artificial Sequence: Synthetic oligonucleotide
gggugaaugucuccuccuu

SEQ ID NO: 2358807 - RNA, 19 nt, Artificial Sequence
  Description of Artificial Sequence: Synthetic oligonucleotide
gucucuguuucagguuaau

SEQ ID NO: 2358808 - RNA, 19 nt, Artificial Sequence
  Description of Artificial Sequence: Synthetic oligonucleotide
ccaccaccaccaccacccc

SEQ ID NO: 2358809 - RNA, 19 nt, Artificial Sequence
  Description of Artificial Sequence: Synthetic oligonucleotide
cacccggagcuuggccaug

SEQ ID NO: 2358810 - RNA, 19 nt, Artificial Sequence
  Description of Artificial Sequence: Synthetic oligonucleotide
guagugcgggcugggcacu

SEQ ID NO: 2358811 - RNA, 19 nt, Artificial Sequence
  Description of Artificial Sequence: Synthetic oligonucleotide
ggagguuugugcggaguuu

SEQ ID NO: 2358812 - RNA, 19 nt, Artificial Sequence
  Description of Artificial Sequence: Synthetic oligonucleotide
aggccccacugguguugau

SEQ ID NO: 2358813 - RNA, 19 nt, Artificial Sequence
  Description of Artificial Sequence: Synthetic oligonucleotide
gccucuggcuagaauuccu

SEQ ID NO: 2358814 - RNA, 19 nt, Artificial Sequence
  Description of Artificial Sequence: Synthetic oligonucleotide
cagguccguucccaccccu

SEQ ID NO: 2358815 - RNA, 19 nt, Artificial Sequence
  Description of Artificial Sequence: Synthetic oligonucleotide
ccaccaccaccaccaccac

SEQ ID NO: 2358816 - RNA, 19 nt, Artificial Sequence
  Description of Artificial Sequence: Synthetic oligonucleotide
ccaguuccuucucggccaa

SEQ ID NO: 2358817 - RNA, 19 nt, Artificial Sequence
  Description of Artificial Sequence: Synthetic oligonucleotide
ggaaggccccacugguguu

SEQ ID NO: 2358818 - RNA, 19 nt, Artificial Sequence
  Description of Artificial Sequence: Synthetic oligonucleotide
cgcuacagguccguuccca

SEQ ID NO: 2358819 - RNA, 19 nt, Artificial Sequence
  Description of Artificial Sequence: Synthetic oligonucleotide
ccccaauuagguagaucuu

SEQ ID NO: 2358820 - RNA, 19 nt, Artificial Sequence
  Description of Artificial Sequence: Synthetic oligonucleotide
cgcuccugaucucgaaucu

SEQ ID NO: 2358821 - RNA, 19 nt, Artificial Sequence
  Description of Artificial Sequence: Synthetic oligonucleotide
caguuccuucucggccaaa

SEQ ID NO: 2358822 - RNA, 19 nt, Artificial Sequence
  Description of Artificial Sequence: Synthetic oligonucleotide
ccacggguaagccgggguu

SEQ ID NO: 2358823 - RNA, 19 nt, Artificial Sequence
  Description of Artificial Sequence: Synthetic oligonucleotide
ccccaguuuucaacugaau

SEQ ID NO: 2358824 - RNA, 19 nt, Artificial Sequence
  Description of Artificial Sequence: Synthetic oligonucleotide
cagcagacacccggagcuu

SEQ ID NO: 2358825 - RNA, 19 nt, Artificial Sequence
  Description of Artificial Sequence: Synthetic oligonucleotide
ggcugggcacuggggugaa

SEQ ID NO: 2358826 - RNA, 19 nt, Artificial Sequence
  Description of Artificial Sequence: Synthetic oligonucleotide
cggguaagccgggguugaa

SEQ ID NO: 2358827 - RNA, 19 nt, Artificial Sequence
  Description of Artificial Sequence: Synthetic oligonucleotide
cggcagcguccaugacgaa

SEQ ID NO: 2358828 - RNA, 19 nt, Artificial Sequence
  Description of Artificial Sequence: Synthetic oligonucleotide
aaagaaugcaucugcaucc

SEQ ID NO: 2358829 - RNA, 19 nt, Artificial Sequence
  Description of Artificial Sequence: Synthetic oligonucleotide
auauuuauacuuuuaacac

SEQ ID NO: 2358830 - RNA, 19 nt, Artificial Sequence
  Description of Artificial Sequence: Synthetic oligonucleotide
  modified_base (4)..(4): a, c, u, g, unknown or other
aacnucuauaaucuuuacc

SEQ ID NO: 2358831 - RNA, 19 nt, Artificial Sequence
  Description of Artificial Sequence: Synthetic oligonucleotide
  modified_base (11)..(11): a, c, u, g, unknown or other
aauaguacaanguuuacau

SEQ ID NO: 2358832 - RNA, 19 nt, Artificial Sequence
  Description of Artificial Sequence: Synthetic oligonucleotide
uucauuagcagcaaggaag

SEQ ID NO: 2358833 - RNA, 19 nt, Artificial Sequence
  Description of Artificial Sequence: Synthetic oligonucleotide
uaucacaggaugcagaugg

SEQ ID NO: 2358834 - RNA, 19 nt, Artificial Sequence
  Description of Artificial Sequence: Synthetic oligonucleotide
aacucauuacaacuggugc

SEQ ID NO: 2358835 - RNA, 19 nt, Artificial Sequence
  Description of Artificial Sequence: Synthetic oligonucleotide
aauaucuuaucacaggaug

SEQ ID NO: 2358836 - RNA, 19 nt, Artificial Sequence
  Description of Artificial Sequence: Synthetic oligonucleotide
aaaacguagcuauaaacag

SEQ ID NO: 2358837 - RNA, 19 nt, Artificial Sequence
  Description of Artificial Sequence: Synthetic oligonucleotide
  modified_base (3)..(3): a, c, u, g, unknown or other
acnucuauaaucuuuacca

SEQ ID NO: 2358838 - RNA, 19 nt, Artificial Sequence
  Description of Artificial Sequence: Synthetic oligonucleotide
uucuucauaaacauggugc

SEQ ID NO: 2358839 - RNA, 19 nt, Artificial Sequence
  Description of Artificial Sequence: Synthetic oligonucleotide
aauuugaacucauuacaac

SEQ ID NO: 2358840 - RNA, 19 nt, Artificial Sequence
  Description of Artificial Sequence: Synthetic oligonucleotide
uaaauuugaacucauuaca

SEQ ID NO: 2358841 - RNA, 19 nt, Artificial Sequence
  Description of Artificial Sequence: Synthetic oligonucleotide
aaugacauacucccaauag

SEQ ID NO: 2358842 - RNA, 19 nt, Artificial Sequence
  Description of Artificial Sequence: Synthetic oligonucleotide
auaaaauacagaaagacug

SEQ ID NO: 2358843 - RNA, 19 nt, Artificial Sequence
  Description of Artificial Sequence: Synthetic oligonucleotide
aagucaacggcucuauccc

SEQ ID NO: 2358844 - RNA, 19 nt, Artificial Sequence
  Description of Artificial Sequence: Synthetic oligonucleotide
uuuacauucacucuugcaa

SEQ ID NO: 2358845 - RNA, 19 nt, Artificial Sequence
  Description of Artificial Sequence: Synthetic oligonucleotide
auaaauugagaauuuaaca

SEQ ID NO: 2358846 - RNA, 19 nt, Artificial Sequence
  Description of Artificial Sequence: Synthetic oligonucleotide
aauagcacuguuauagccc

SEQ ID NO: 2358847 - RNA, 19 nt, Artificial Sequence
  Description of Artificial Sequence: Synthetic oligonucleotide
  modified_base (17)..(17): a, c, u, g, unknown or other
uaauaaaauaguacaangu

SEQ ID NO: 2358848 - RNA, 19 nt, Artificial Sequence
  Description of Artificial Sequence: Synthetic oligonucleotide
ucuagauucauuagcagca

SEQ ID NO: 2358849 - RNA, 19 nt, Artificial Sequence
  Description of Artificial Sequence: Synthetic oligonucleotide
uuucuuacagaauagugug

SEQ ID NO: 2358850 - RNA, 19 nt, Artificial Sequence
  Description of Artificial Sequence: Synthetic oligonucleotide
  modified_base (9)..(9): a, c, u, g, unknown or other
uaguacaanguuuacauga

SEQ ID NO: 2358851 - RNA, 19 nt, Artificial Sequence
  Description of Artificial Sequence: Synthetic oligonucleotide
ucugauaacaaacauuuau

SEQ ID NO: 2358852 - RNA, 19 nt, Artificial Sequence
  Description of Artificial Sequence: Synthetic oligonucleotide
ugcauaauaguauauauua

SEQ ID NO: 2358853 - RNA, 19 nt, Artificial Sequence
  Description of Artificial Sequence: Synthetic oligonucleotide
acuaagcucaaauaaauca

SEQ ID NO: 2358854 - RNA, 19 nt, Artificial Sequence
  Description of Artificial Sequence: Synthetic oligonucleotide
uauuaaggaaucucgaaca

SEQ ID NO: 2358855 - RNA, 19 nt, Artificial Sequence
  Description of Artificial Sequence: Synthetic oligonucleotide
acucauuacaacuggugcc

SEQ ID NO: 2358856 - RNA, 19 nt, Artificial Sequence
  Description of Artificial Sequence: Synthetic oligonucleotide
uaaggaaucucgaacaugu

SEQ ID NO: 2358857 - RNA, 19 nt, Artificial Sequence
  Description of Artificial Sequence: Synthetic oligonucleotide
agaccagaaaaucugcacc

SEQ ID NO: 2358858 - RNA, 19 nt, Artificial Sequence
  Description of Artificial Sequence: Synthetic oligonucleotide
aacguagcuauaaacagac

SEQ ID NO: 2358859 - RNA, 19 nt, Artificial Sequence
  Description of Artificial Sequence: Synthetic oligonucleotide
acacauuagcaucugagac

SEQ ID NO: 2358860 - RNA, 19 nt, Artificial Sequence
  Description of Artificial Sequence: Synthetic oligonucleotide
aucacuaugaugcacauaa

SEQ ID NO: 2358861 - RNA, 19 nt, Artificial Sequence
  Description of Artificial Sequence: Synthetic oligonucleotide
acuaauaucuuaucacagg

SEQ ID NO: 2358862 - RNA, 19 nt, Artificial Sequence
  Description of Artificial Sequence: Synthetic oligonucleotide
aacauuaacucucuucuga

SEQ ID NO: 2358863 - RNA, 19 nt, Artificial Sequence
  Description of Artificial Sequence: Synthetic oligonucleotide
aaggugaccuguuaaaaug

SEQ ID NO: 2358864 - RNA, 19 nt, Artificial Sequence
  Description of Artificial Sequence: Synthetic oligonucleotide
uaaaucacuaugaugcaca

SEQ ID NO: 2358865 - RNA, 19 nt, Artificial Sequence
  Description of Artificial Sequence: Synthetic oligonucleotide
uuacuaauaucuuaucaca

SEQ ID NO: 2358866 - RNA, 19 nt, Artificial Sequence
  Description of Artificial Sequence: Synthetic oligonucleotide
uaacacauuagcaucugag

SEQ ID NO: 2358867 - RNA, 19 nt, Artificial Sequence
  Description of Artificial Sequence: Synthetic oligonucleotide
auagcacuguuauagcccc

SEQ ID NO: 2358868 - RNA, 19 nt, Artificial Sequence
  Description of Artificial Sequence: Synthetic oligonucleotide
agaauuuaacauuaacucu

SEQ ID NO: 2358869 - RNA, 19 nt, Artificial Sequence
  Description of Artificial Sequence: Synthetic oligonucleotide
  modified_base (7)..(7): a, c, u, g, unknown or other
uaaaacnucuauaaucuuu

SEQ ID NO: 2358870 - RNA, 19 nt, Artificial Sequence
  Description of Artificial Sequence: Synthetic oligonucleotide
uaaaaugccacaacuauuu

SEQ ID NO: 2358871 - RNA, 19 nt, Artificial Sequence
  Description of Artificial Sequence: Synthetic oligonucleotide
uaauaaauacagcuuuuca

SEQ ID NO: 2358872 - RNA, 19 nt, Artificial Sequence
  Description of Artificial Sequence: Synthetic oligonucleotide
uacuaagcagaaaacguag

SEQ ID NO: 2358873 - RNA, 19 nt, Artificial Sequence
  Description of Artificial Sequence: Synthetic oligonucleotide
uacuaauaucuuaucacag

SEQ ID NO: 2358874 - RNA, 19 nt, Artificial Sequence
  Description of Artificial Sequence: Synthetic oligonucleotide
  modified_base (19)..(19): a, c, u, g, unknown or other
auuaugacuucguaaaacn

SEQ ID NO: 2358875 - RNA, 19 nt, Artificial Sequence
  Description of Artificial Sequence: Synthetic oligonucleotide
aauagugugcaucauguuu

SEQ ID NO: 2358876 - RNA, 19 nt, Artificial Sequence
  Description of Artificial Sequence: Synthetic oligonucleotide
uauaaucuuuaccacauau

SEQ ID NO: 2358877 - RNA, 19 nt, Artificial Sequence
  Description of Artificial Sequence: Synthetic oligonucleotide
uacuuuuaacacauuagca

SEQ ID NO: 2358878 - RNA, 19 nt, Artificial Sequence
  Description of Artificial Sequence: Synthetic oligonucleotide
guuuacuaagcagaaaacg

SEQ ID NO: 2358879 - RNA, 19 nt, Artificial Sequence
  Description of Artificial Sequence: Synthetic oligonucleotide
gaagucaacggcucuaucc

SEQ ID NO: 2358880 - RNA, 19 nt, Artificial Sequence
  Description of Artificial Sequence: Synthetic oligonucleotide
aagguuguaaaucuuuuau

SEQ ID NO: 2358881 - RNA, 19 nt, Artificial Sequence
  Description of Artificial Sequence: Synthetic oligonucleotide
ucuauaaucuuuaccacau

SEQ ID NO: 2358882 - RNA, 19 nt, Artificial Sequence
  Description of Artificial Sequence: Synthetic oligonucleotide
ucuucauaaacauggugcc

SEQ ID NO: 2358883 - RNA, 19 nt, Artificial Sequence
  Description of Artificial Sequence: Synthetic oligonucleotide
ucgaacauguggaauaggc

SEQ ID NO: 2358884 - RNA, 19 nt, Artificial Sequence
  Description of Artificial Sequence: Synthetic oligonucleotide
  modified_base (6)..(6): a, c, u, g, unknown or other
uacaanguuuacaugaaau

SEQ ID NO: 2358885 - RNA, 19 nt, Artificial Sequence
  Description of Artificial Sequence: Synthetic oligonucleotide
cauaauaguauauauuaca

SEQ ID NO: 2358886 - RNA, 19 nt, Artificial Sequence
  Description of Artificial Sequence: Synthetic oligonucleotide
  modified_base (3)..(3): a, c, u, g, unknown or other
aanguuuacaugaaauaca

SEQ ID NO: 2358887 - RNA, 19 nt, Artificial Sequence
  Description of Artificial Sequence: Synthetic oligonucleotide
  modified_base (5)..(5): a, c, u, g, unknown or other
aaacnucuauaaucuuuac

SEQ ID NO: 2358888 - RNA, 19 nt, Artificial Sequence
  Description of Artificial Sequence: Synthetic oligonucleotide
uauauauuauauauuuaua

SEQ ID NO: 2358889 - RNA, 19 nt, Artificial Sequence
  Description of Artificial Sequence: Synthetic oligonucleotide
  modified_base (4)..(4): a, c, u, g, unknown or other
caanguuuacaugaaauac

SEQ ID NO: 2358890 - RNA, 19 nt, Artificial Sequence
  Description of Artificial Sequence: Synthetic oligonucleotide
cuaagcucaaauaaaucac

SEQ ID NO: 2358891 - RNA, 19 nt, Artificial Sequence
  Description of Artificial Sequence: Synthetic oligonucleotide
auguuuacuaagcagaaaa

SEQ ID NO: 2358892 - RNA, 19 nt, Artificial Sequence
  Description of Artificial Sequence: Synthetic oligonucleotide
aacacauuagcaucugaga

SEQ ID NO: 2358893 - RNA, 19 nt, Artificial Sequence
  Description of Artificial Sequence: Synthetic oligonucleotide
uuauugcucacauaaauuu

SEQ ID NO: 2358894 - RNA, 19 nt, Artificial Sequence
  Description of Artificial Sequence: Synthetic oligonucleotide
  modified_base (17)..(17): a, c, u, g, unknown or other
uaugacuucguaaaacnuc

SEQ ID NO: 2358895 - RNA, 19 nt, Artificial Sequence
  Description of Artificial Sequence: Synthetic oligonucleotide
aagcagaaaacguagcuau

SEQ ID NO: 2358896 - RNA, 19 nt, Artificial Sequence
  Description of Artificial Sequence: Synthetic oligonucleotide
ugcaucauguuuacuaagc

SEQ ID NO: 2358897 - RNA, 19 nt, Artificial Sequence
  Description of Artificial Sequence: Synthetic oligonucleotide
aauaaaucacuaugaugca

SEQ ID NO: 2358898 - RNA, 19 nt, Artificial Sequence
  Description of Artificial Sequence: Synthetic oligonucleotide
auuaacucucuucugauaa

SEQ ID NO: 2358899 - RNA, 19 nt, Artificial Sequence
  Description of Artificial Sequence: Synthetic oligonucleotide
auaucuuaucacaggaugc

SEQ ID NO: 2358900 - RNA, 19 nt, Artificial Sequence
  Description of Artificial Sequence: Synthetic oligonucleotide
guagcuauaaacagacugg

SEQ ID NO: 2358901 - RNA, 19 nt, Artificial Sequence
  Description of Artificial Sequence: Synthetic oligonucleotide
auaucguacaucugccucg

SEQ ID NO: 2358902 - RNA, 19 nt, Artificial Sequence
  Description of Artificial Sequence: Synthetic oligonucleotide
uuggcaagcuucauuauga

SEQ ID NO: 2358903 - RNA, 19 nt, Artificial Sequence
  Description of Artificial Sequence: Synthetic oligonucleotide
aauugcuucuuuauugcuc

SEQ ID NO: 2358904 - RNA, 19 nt, Artificial Sequence
  Description of Artificial Sequence: Synthetic oligonucleotide
ugggaaaaugacauacucc

SEQ ID NO: 2358905 - RNA, 19 nt, Artificial Sequence
  Description of Artificial Sequence: Synthetic oligonucleotide
cuugcaacagguuacaaga

SEQ ID NO: 2358906 - RNA, 19 nt, Artificial Sequence
  Description of Artificial Sequence: Synthetic oligonucleotide
  modified_base (12)..(12): a, c, u, g, unknown or other
aaauaguacaanguuuaca

SEQ ID NO: 2358907 - RNA, 19 nt, Artificial Sequence
  Description of Artificial Sequence: Synthetic oligonucleotide
uauugcucacauaaauuug

SEQ ID NO: 2358908 - RNA, 19 nt, Artificial Sequence
  Description of Artificial Sequence: Synthetic oligonucleotide
uacagaauagugugcauca

SEQ ID NO: 2358909 - RNA, 19 nt, Artificial Sequence
  Description of Artificial Sequence: Synthetic oligonucleotide
cucuagauucauuagcagc

SEQ ID NO: 2358910 - RNA, 19 nt, Artificial Sequence
  Description of Artificial Sequence: Synthetic oligonucleotide
ucuugcaacagguuacaag

SEQ ID NO: 2358911 - RNA, 19 nt, Artificial Sequence
  Description of Artificial Sequence: Synthetic oligonucleotide
guauuaaggaaucucgaac

SEQ ID NO: 2358912 - RNA, 19 nt, Artificial Sequence
  Description of Artificial Sequence: Synthetic oligonucleotide
aaacauggugcccacagaa

SEQ ID NO: 2358913 - RNA, 19 nt, Artificial Sequence
  Description of Artificial Sequence: Synthetic oligonucleotide
cucucuucugauaacaaac

SEQ ID NO: 2358914 - RNA, 19 nt, Artificial Sequence
  Description of Artificial Sequence: Synthetic oligonucleotide
uuuagaagguauuacuaau

SEQ ID NO: 2358915 - RNA, 19 nt, Artificial Sequence
  Description of Artificial Sequence: Synthetic oligonucleotide
aagacugguuacuuuauau

SEQ ID NO: 2358916 - RNA, 19 nt, Artificial Sequence
  Description of Artificial Sequence: Synthetic oligonucleotide
uuuauugcucacauaaauu

SEQ ID NO: 2358917 - RNA, 19 nt, Artificial Sequence
  Description of Artificial Sequence: Synthetic oligonucleotide
ucugagacauaaauugaga

SEQ ID NO: 2358918 - RNA, 19 nt, Artificial Sequence
  Description of Artificial Sequence: Synthetic oligonucleotide
ucauggggcuguauuaagg

SEQ ID NO: 2358919 - RNA, 19 nt, Artificial Sequence
  Description of Artificial Sequence: Synthetic oligonucleotide
uguuaaaaugccacaacua

SEQ ID NO: 2358920 - RNA, 19 nt, Artificial Sequence
  Description of Artificial Sequence: Synthetic oligonucleotide
uaacaaacauuuauucuuc

SEQ ID NO: 2358921 - RNA, 19 nt, Artificial Sequence
  Description of Artificial Sequence: Synthetic oligonucleotide
uguuuacuaagcagaaaac

SEQ ID NO: 2358922 - RNA, 19 nt, Artificial Sequence
  Description of Artificial Sequence: Synthetic oligonucleotide
uguauuaaggaaucucgaa

SEQ ID NO: 2358923 - RNA, 19 nt, Artificial Sequence
  Description of Artificial Sequence: Synthetic oligonucleotide
uucauaaacauggugccca

SEQ ID NO: 2358924 - RNA, 19 nt, Artificial Sequence
  Description of Artificial Sequence: Synthetic oligonucleotide
aucuuuaccacauaucgua

SEQ ID NO: 2358925 - RNA, 19 nt, Artificial Sequence
  Description of Artificial Sequence: Synthetic oligonucleotide
  modified_base (10)..(10): a, c, u, g, unknown or other
auaguacaanguuuacaug

SEQ ID NO: 2358926 - RNA, 19 nt, Artificial Sequence
  Description of Artificial Sequence: Synthetic oligonucleotide
ucacuaagcucaaauaaau

SEQ ID NO: 2358927 - RNA, 19 nt, Artificial Sequence
  Description of Artificial Sequence: Synthetic oligonucleotide
auaaaucacuaugaugcac

SEQ ID NO: 2358928 - RNA, 19 nt, Artificial Sequence
  Description of Artificial Sequence: Synthetic oligonucleotide
cucacauaaauuugaacuc

SEQ ID NO: 2358929 - RNA, 19 nt, Artificial Sequence
  Description of Artificial Sequence: Synthetic oligonucleotide
ugagacauaaauugagaau

SEQ ID NO: 2358930 - RNA, 19 nt, Artificial Sequence
  Description of Artificial Sequence: Synthetic oligonucleotide
uuacuaagcagaaaacgua

SEQ ID NO: 2358931 - RNA, 19 nt, Artificial Sequence
  Description of Artificial Sequence: Synthetic oligonucleotide
agauucauuagcagcaagg

SEQ ID NO: 2358932 - RNA, 19 nt, Artificial Sequence
  Description of Artificial Sequence: Synthetic oligonucleotide
uagcuauaaacagacuggg

SEQ ID NO: 2358933 - RNA, 19 nt, Artificial Sequence
  Description of Artificial Sequence: Synthetic oligonucleotide
  modified_base (2)..(2): a, c, u, g, unknown or other
anguuuacaugaaauacau

SEQ ID NO: 2358934 - RNA, 19 nt, Artificial Sequence
  Description of Artificial Sequence: Synthetic oligonucleotide
uaauaguauauauuacaau

SEQ ID NO: 2358935 - RNA, 19 nt, Artificial Sequence
  Description of Artificial Sequence: Synthetic oligonucleotide
  modified_base (6)..(6): a, c, u, g, unknown or other
aaaacnucuauaaucuuua

SEQ ID NO: 2358936 - RNA, 19 nt, Artificial Sequence
  Description of Artificial Sequence: Synthetic oligonucleotide
auuuauacuuuuaacacau

SEQ ID NO: 2358937 - RNA, 19 nt, Artificial Sequence
  Description of Artificial Sequence: Synthetic oligonucleotide
ugcaacagguuacaagaug

SEQ ID NO: 2358938 - RNA, 19 nt, Artificial Sequence
  Description of Artificial Sequence: Synthetic oligonucleotide
uuuuacauucacucuugca

SEQ ID NO: 2358939 - RNA, 19 nt, Artificial Sequence
  Description of Artificial Sequence: Synthetic oligonucleotide
aagauggggucacuaagcu

SEQ ID NO: 2358940 - RNA, 19 nt, Artificial Sequence
  Description of Artificial Sequence: Synthetic oligonucleotide
  modified_base (5)..(5): a, c, u, g, unknown or other
acaanguuuacaugaaaua

SEQ ID NO: 2358941 - RNA, 19 nt, Artificial Sequence
  Description of Artificial Sequence: Synthetic oligonucleotide
cuaauaucuuaucacagga

SEQ ID NO: 2358942 - RNA, 19 nt, Artificial Sequence
  Description of Artificial Sequence: Synthetic oligonucleotide
gauggcuggauccaccgcc

SEQ ID NO: 2358943 - RNA, 19 nt, Artificial Sequence
  Description of Artificial Sequence: Synthetic oligonucleotide
aaacagacugggaaaauga

SEQ ID NO: 2358944 - RNA, 19 nt, Artificial Sequence
  Description of Artificial Sequence: Synthetic oligonucleotide
ucacauaaauuugaacuca

SEQ ID NO: 2358945 - RNA, 19 nt, Artificial Sequence
  Description of Artificial Sequence: Synthetic oligonucleotide
uucuucguguuuccgugcg

SEQ ID NO: 2358946 - RNA, 19 nt, Artificial Sequence
  Description of Artificial Sequence: Synthetic oligonucleotide
auaauaguauauauuacaa

SEQ ID NO: 2358947 - RNA, 19 nt, Artificial Sequence
  Description of Artificial Sequence: Synthetic oligonucleotide
caagauggggucacuaagc

SEQ ID NO: 2358948 - RNA, 19 nt, Artificial Sequence
  Description of Artificial Sequence: Synthetic oligonucleotide
uucuuggcaagcuucauua

SEQ ID NO: 2358949 - RNA, 19 nt, Artificial Sequence
  Description of Artificial Sequence: Synthetic oligonucleotide
uauaaacagacugggaaaa

SEQ ID NO: 2358950 - RNA, 19 nt, Artificial Sequence
  Description of Artificial Sequence: Synthetic oligonucleotide
  modified_base (16)..(16): a, c, u, g, unknown or other
augacuucguaaaacnucu

SEQ ID NO: 2358951 - RNA, 19 nt, Artificial Sequence
  Description of Artificial Sequence: Synthetic oligonucleotide
cuaugaugcacauaaaaua

SEQ ID NO: 2358952 - RNA, 19 nt, Artificial Sequence
  Description of Artificial Sequence: Synthetic oligonucleotide
guuuucuuacagaauagug

SEQ ID NO: 2358953 - RNA, 19 nt, Artificial Sequence
  Description of Artificial Sequence: Synthetic oligonucleotide
  modified_base (18)..(18): a, c, u, g, unknown or other
uuaugacuucguaaaacnu

SEQ ID NO: 2358954 - RNA, 19 nt, Artificial Sequence
  Description of Artificial Sequence: Synthetic oligonucleotide
uagcaucugagacauaaau

SEQ ID NO: 2358955 - RNA, 19 nt, Artificial Sequence
  Description of Artificial Sequence: Synthetic oligonucleotide
agaauagugugcaucaugu

SEQ ID NO: 2358956 - RNA, 19 nt, Artificial Sequence
  Description of Artificial Sequence: Synthetic oligonucleotide
uaucuuaucacaggaugca

SEQ ID NO: 2358957 - RNA, 19 nt, Artificial Sequence
  Description of Artificial Sequence: Synthetic oligonucleotide
uucuuacagaauagugugc

SEQ ID NO: 2358958 - RNA, 19 nt, Artificial Sequence
  Description of Artificial Sequence: Synthetic oligonucleotide
cacauaucguacaucugcc

SEQ ID NO: 2358959 - RNA, 19 nt, Artificial Sequence
  Description of Artificial Sequence: Synthetic oligonucleotide
aggcauauaagguuguaaa

SEQ ID NO: 2358960 - RNA, 19 nt, Artificial Sequence
  Description of Artificial Sequence: Synthetic oligonucleotide
auuagcagcaaggaaguca

SEQ ID NO: 2358961 - RNA, 19 nt, Artificial Sequence
  Description of Artificial Sequence: Synthetic oligonucleotide
acuaagcagaaaacguagc

SEQ ID NO: 2358962 - RNA, 19 nt, Artificial Sequence
  Description of Artificial Sequence: Synthetic oligonucleotide
gcuguauuaaggaaucucg

SEQ ID NO: 2358963 - RNA, 19 nt, Artificial Sequence
  Description of Artificial Sequence: Synthetic oligonucleotide
  modified_base (2)..(2): a, c, u, g, unknown or other
cnucuauaaucuuuaccac

SEQ ID NO: 2358964 - RNA, 19 nt, Artificial Sequence
  Description of Artificial Sequence: Synthetic oligonucleotide
auucuucguguuuccgugc

SEQ ID NO: 2358965 - RNA, 19 nt, Artificial Sequence
  Description of Artificial Sequence: Synthetic oligonucleotide
ugugcaucauguuuacuaa

SEQ ID NO: 2358966 - RNA, 19 nt, Artificial Sequence
  Description of Artificial Sequence: Synthetic oligonucleotide
aaaugacauacucccaaua

SEQ ID NO: 2358967 - RNA, 19 nt, Artificial Sequence
  Description of Artificial Sequence: Synthetic oligonucleotide
  modified_base (15)..(15): a, c, u, g, unknown or other
auaaaauaguacaanguuu

SEQ ID NO: 2358968 - RNA, 19 nt, Artificial Sequence
  Description of Artificial Sequence: Synthetic oligonucleotide
ugaacucauuacaacuggu

SEQ ID NO: 2358969 - RNA, 19 nt, Artificial Sequence
  Description of Artificial Sequence: Synthetic oligonucleotide
aaacguagcuauaaacaga

SEQ ID NO: 2358970 - RNA, 19 nt, Artificial Sequence
  Description of Artificial Sequence: Synthetic oligonucleotide
guuuagaagguauuacuaa

SEQ ID NO: 2358971 - RNA, 19 nt, Artificial Sequence
  Description of Artificial Sequence: Synthetic oligonucleotide
gcaacagguuacaagaugg

SEQ ID NO: 2358972 - RNA, 19 nt, Artificial Sequence
  Description of Artificial Sequence: Synthetic oligonucleotide
gauucauuagcagcaagga

SEQ ID NO: 2358973 - RNA, 19 nt, Artificial Sequence
  Description of Artificial Sequence: Synthetic oligonucleotide
uuaacacauuagcaucuga

SEQ ID NO: 2358974 - RNA, 19 nt, Artificial Sequence
  Description of Artificial Sequence: Synthetic oligonucleotide
gaacucauuacaacuggug

SEQ ID NO: 2358975 - RNA, 19 nt, Artificial Sequence
  Description of Artificial Sequence: Synthetic oligonucleotide
acuaugaugcacauaaaau

SEQ ID NO: 2358976 - RNA, 19 nt, Artificial Sequence
  Description of Artificial Sequence: Synthetic oligonucleotide
cacagaagcacacagguaa

SEQ ID NO: 2358977 - RNA, 19 nt, Artificial Sequence
  Description of Artificial Sequence: Synthetic oligonucleotide
acucuagauucauuagcag

SEQ ID NO: 2358978 - RNA, 19 nt, Artificial Sequence
  Description of Artificial Sequence: Synthetic oligonucleotide
aaaucacuaugaugcacau

SEQ ID NO: 2358979 - RNA, 19 nt, Artificial Sequence
  Description of Artificial Sequence: Synthetic oligonucleotide
aguauauauuacaauaaua

SEQ ID NO: 2358980 - RNA, 19 nt, Artificial Sequence
  Description of Artificial Sequence: Synthetic oligonucleotide
aaucuuuaccacauaucgu

SEQ ID NO: 2358981 - RNA, 19 nt, Artificial Sequence
  Description of Artificial Sequence: Synthetic oligonucleotide
cauaucguacaucugccuc

SEQ ID NO: 2358982 - RNA, 19 nt, Artificial Sequence
  Description of Artificial Sequence: Synthetic oligonucleotide
uaacucucuucugauaaca

SEQ ID NO: 2358983 - RNA, 19 nt, Artificial Sequence
  Description of Artificial Sequence: Synthetic oligonucleotide
ucuuuauugcucacauaaa

SEQ ID NO: 2358984 - RNA, 19 nt, Artificial Sequence
  Description of Artificial Sequence: Synthetic oligonucleotide
gcuauaaacagacugggaa

SEQ ID NO: 2358985 - RNA, 19 nt, Artificial Sequence
  Description of Artificial Sequence: Synthetic oligonucleotide
acaugaaauacaucuuaaa

SEQ ID NO: 2358986 - RNA, 19 nt, Artificial Sequence
  Description of Artificial Sequence: Synthetic oligonucleotide
cccaauagcacuguuauag

SEQ ID NO: 2358987 - RNA, 19 nt, Artificial Sequence
  Description of Artificial Sequence: Synthetic oligonucleotide
cuuggcaagcuucauuaug

SEQ ID NO: 2358988 - RNA, 19 nt, Artificial Sequence
  Description of Artificial Sequence: Synthetic oligonucleotide
cagguuacaagaugggguc

SEQ ID NO: 2358989 - RNA, 19 nt, Artificial Sequence
  Description of Artificial Sequence: Synthetic oligonucleotide
uggauccaccgccagacca

SEQ ID NO: 2358990 - RNA, 19 nt, Artificial Sequence
  Description of Artificial Sequence: Synthetic oligonucleotide
gccaauugcuucuuuauug

SEQ ID NO: 2358991 - RNA, 19 nt, Artificial Sequence
  Description of Artificial Sequence: Synthetic oligonucleotide
uacaacuggugccaguuua

SEQ ID NO: 2358992 - RNA, 19 nt, Artificial Sequence
  Description of Artificial Sequence: Synthetic oligonucleotide
uuuaacacauuagcaucug

SEQ ID NO: 2358993 - RNA, 19 nt, Artificial Sequence
  Description of Artificial Sequence: Synthetic oligonucleotide
cacucuagauucauuagca

SEQ ID NO: 2358994 - RNA, 19 nt, Artificial Sequence
  Description of Artificial Sequence: Synthetic oligonucleotide
gagacauaaauugagaauu

SEQ ID NO: 2358995 - RNA, 19 nt, Artificial Sequence
  Description of Artificial Sequence: Synthetic oligonucleotide
cacucuugcaacagguuac

SEQ ID NO: 2358996 - RNA, 19 nt, Artificial Sequence
  Description of Artificial Sequence: Synthetic oligonucleotide
acauuagcaucugagacau

SEQ ID NO: 2358997 - RNA, 19 nt, Artificial Sequence
  Description of Artificial Sequence: Synthetic oligonucleotide
acaaacauuuauucuucau

SEQ ID NO: 2358998 - RNA, 19 nt, Artificial Sequence
  Description of Artificial Sequence: Synthetic oligonucleotide
uaagguuguaaaucuuuua

SEQ ID NO: 2358999 - RNA, 19 nt, Artificial Sequence
  Description of Artificial Sequence: Synthetic oligonucleotide
agguauuacuaauaucuua

SEQ ID NO: 2359000 - RNA, 19 nt, Artificial Sequence
  Description of Artificial Sequence: Synthetic oligonucleotide
cuauaaacagacugggaaa

SEQ ID NO: 2359001 - RNA, 19 nt, Artificial Sequence
  Description of Artificial Sequence: Synthetic oligonucleotide
uuaacucucuucugauaac

SEQ ID NO: 2359002 - RNA, 19 nt, Artificial Sequence
  Description of Artificial Sequence: Synthetic oligonucleotide
ccacauaucguacaucugc

SEQ ID NO: 2359003 - RNA, 19 nt, Artificial Sequence
  Description of Artificial Sequence: Synthetic oligonucleotide
aaagacugguuacuuuaua

SEQ ID NO: 2359004 - RNA, 19 nt, Artificial Sequence
  Description of Artificial Sequence: Synthetic oligonucleotide
aucucgaacauguggaaua

SEQ ID NO: 2359005 - RNA, 19 nt, Artificial Sequence
  Description of Artificial Sequence: Synthetic oligonucleotide
ugcucacauaaauuugaac

SEQ ID NO: 2359006 - RNA, 19 nt, Artificial Sequence
  Description of Artificial Sequence: Synthetic oligonucleotide
cagaauagugugcaucaug

SEQ ID NO: 2359007 - RNA, 19 nt, Artificial Sequence
  Description of Artificial Sequence: Synthetic oligonucleotide
aacggcucuaucccagacu

SEQ ID NO: 2359008 - RNA, 19 nt, Artificial Sequence
  Description of Artificial Sequence: Synthetic oligonucleotide
ucucgaacauguggaauag

SEQ ID NO: 2359009 - RNA, 19 nt, Artificial Sequence
  Description of Artificial Sequence: Synthetic oligonucleotide
cugguuacuuuauauauua

SEQ ID NO: 2359010 - RNA, 19 nt, Artificial Sequence
  Description of Artificial Sequence: Synthetic oligonucleotide
uaagcagaaaacguagcua

SEQ ID NO: 2359011 - RNA, 19 nt, Artificial Sequence
  Description of Artificial Sequence: Synthetic oligonucleotide
agcucaaauaaaucacuau

SEQ ID NO: 2359012 - RNA, 19 nt, Artificial Sequence
  Description of Artificial Sequence: Synthetic oligonucleotide
cacauuagcaucugagaca

SEQ ID NO: 2359013 - RNA, 19 nt, Artificial Sequence
  Description of Artificial Sequence: Synthetic oligonucleotide
uuuccgugcgcacucuaga

SEQ ID NO: 2359014 - RNA, 19 nt, Artificial Sequence
  Description of Artificial Sequence: Synthetic oligonucleotide
cauucacucuugcaacagg

SEQ ID NO: 2359015 - RNA, 19 nt, Artificial Sequence
  Description of Artificial Sequence: Synthetic oligonucleotide
auagccccgguauuuauaa

SEQ ID NO: 2359016 - RNA, 19 nt, Artificial Sequence
  Description of Artificial Sequence: Synthetic oligonucleotide
cugagacauaaauugagaa

SEQ ID NO: 2359017 - RNA, 19 nt, Artificial Sequence
  Description of Artificial Sequence: Synthetic oligonucleotide
cacuaagcucaaauaaauc

SEQ ID NO: 2359018 - RNA, 19 nt, Artificial Sequence
  Description of Artificial Sequence: Synthetic oligonucleotide
gacugguuacuuuauauau

SEQ ID NO: 2359019 - RNA, 19 nt, Artificial Sequence
  Description of Artificial Sequence: Synthetic oligonucleotide
cagauggcuggauccaccg

SEQ ID NO: 2359020 - RNA, 19 nt, Artificial Sequence
  Description of Artificial Sequence: Synthetic oligonucleotide
aaucugcaccuccuauucu

SEQ ID NO: 2359021 - RNA, 19 nt, Artificial Sequence
  Description of Artificial Sequence: Synthetic oligonucleotide
cgguauuuauaauaaauac

SEQ ID NO: 2359022 - RNA, 19 nt, Artificial Sequence
  Description of Artificial Sequence: Synthetic oligonucleotide
aauaggcauauaagguugu

SEQ ID NO: 2359023 - RNA, 19 nt, Artificial Sequence
  Description of Artificial Sequence: Synthetic oligonucleotide
ucguacaucugccucguuu

SEQ ID NO: 2359024 - RNA, 19 nt, Artificial Sequence
  Description of Artificial Sequence: Synthetic oligonucleotide
cguagcuauaaacagacug

SEQ ID NO: 2359025 - RNA, 19 nt, Artificial Sequence
  Description of Artificial Sequence: Synthetic oligonucleotide
agguuguaaaucuuuuauu

SEQ ID NO: 2359026 - RNA, 19 nt, Artificial Sequence
  Description of Artificial Sequence: Synthetic oligonucleotide
agacugguuacuuuauaua

SEQ ID NO: 2359027 - RNA, 19 nt, Artificial Sequence
  Description of Artificial Sequence: Synthetic oligonucleotide
aguuuagaagguauuacua

SEQ ID NO: 2359028 - RNA, 19 nt, Artificial Sequence
  Description of Artificial Sequence: Synthetic oligonucleotide
aaauacagaaagacugguu

SEQ ID NO: 2359029 - RNA, 19 nt, Artificial Sequence
  Description of Artificial Sequence: Synthetic oligonucleotide
ccaauugcuucuuuauugc

SEQ ID NO: 2359030 - RNA, 19 nt, Artificial Sequence
  Description of Artificial Sequence: Synthetic oligonucleotide
ggucacuaagcucaaauaa

SEQ ID NO: 2359031 - RNA, 19 nt, Artificial Sequence
  Description of Artificial Sequence: Synthetic oligonucleotide
agcacuguuauagccccgg

SEQ ID NO: 2359032 - RNA, 19 nt, Artificial Sequence
  Description of Artificial Sequence: Synthetic oligonucleotide
cuucauaaacauggugccc

SEQ ID NO: 2359033 - RNA, 19 nt, Artificial Sequence
  Description of Artificial Sequence: Synthetic oligonucleotide
gcauauaagguuguaaauc

SEQ ID NO: 2359034 - RNA, 19 nt, Artificial Sequence
  Description of Artificial Sequence: Synthetic oligonucleotide
acauaucguacaucugccu

SEQ ID NO: 2359035 - RNA, 19 nt, Artificial Sequence
  Description of Artificial Sequence: Synthetic oligonucleotide
cacuaugaugcacauaaaa

SEQ ID NO: 2359036 - RNA, 19 nt, Artificial Sequence
  Description of Artificial Sequence: Synthetic oligonucleotide
cuguauuaaggaaucucga

SEQ ID NO: 2359037 - RNA, 19 nt, Artificial Sequence
  Description of Artificial Sequence: Synthetic oligonucleotide
accgccagaccagaaaauc

SEQ ID NO: 2359038 - RNA, 19 nt, Artificial Sequence
  Description of Artificial Sequence: Synthetic oligonucleotide
acuuuauauauuauauauu

SEQ ID NO: 2359039 - RNA, 19 nt, Artificial Sequence
  Description of Artificial Sequence: Synthetic oligonucleotide
auagugugcaucauguuua

SEQ ID NO: 2359040 - RNA, 19 nt, Artificial Sequence
  Description of Artificial Sequence: Synthetic oligonucleotide
  modified_base (14)..(14): a, c, u, g, unknown or other
gacuucguaaaacnucuau

SEQ ID NO: 2359041 - RNA, 19 nt, Artificial Sequence
  Description of Artificial Sequence: Synthetic oligonucleotide
uugcucacauaaauuugaa

SEQ ID NO: 2359042 - RNA, 19 nt, Artificial Sequence
  Description of Artificial Sequence: Synthetic oligonucleotide
uccuauucuucguguuucc

SEQ ID NO: 2359043 - RNA, 19 nt, Artificial Sequence
  Description of Artificial Sequence: Synthetic oligonucleotide
uuuccugucauggggcugu

SEQ ID NO: 2359044 - RNA, 19 nt, Artificial Sequence
  Description of Artificial Sequence: Synthetic oligonucleotide
ucauaaacauggugcccac

SEQ ID NO: 2359045 - RNA, 19 nt, Artificial Sequence
  Description of Artificial Sequence: Synthetic oligonucleotide
auucacucuugcaacaggu

SEQ ID NO: 2359046 - RNA, 19 nt, Artificial Sequence
  Description of Artificial Sequence: Synthetic oligonucleotide
gcacucuagauucauuagc

SEQ ID NO: 2359047 - RNA, 19 nt, Artificial Sequence
  Description of Artificial Sequence: Synthetic oligonucleotide
uguuauagccccgguauuu

SEQ ID NO: 2359048 - RNA, 19 nt, Artificial Sequence
  Description of Artificial Sequence: Synthetic oligonucleotide
uaggcauauaagguuguaa

SEQ ID NO: 2359049 - RNA, 19 nt, Artificial Sequence
  Description of Artificial Sequence: Synthetic oligonucleotide
uauagccccgguauuuaua

SEQ ID NO: 2359050 - RNA, 19 nt, Artificial Sequence
  Description of Artificial Sequence: Synthetic oligonucleotide
auggugcccacagaagcac

SEQ ID NO: 2359051 - RNA, 19 nt, Artificial Sequence
  Description of Artificial Sequence: Synthetic oligonucleotide
aucugcauccaaaggugac

SEQ ID NO: 2359052 - RNA, 19 nt, Artificial Sequence
  Description of Artificial Sequence: Synthetic oligonucleotide
ggaaucucgaacaugugga

SEQ ID NO: 2359053 - RNA, 19 nt, Artificial Sequence
  Description of Artificial Sequence: Synthetic oligonucleotide
agcaaggaagucaacggcu

SEQ ID NO: 2359054 - RNA, 19 nt, Artificial Sequence
  Description of Artificial Sequence: Synthetic oligonucleotide
aagcucaaauaaaucacua

SEQ ID NO: 2359055 - RNA, 19 nt, Artificial Sequence
  Description of Artificial Sequence: Synthetic oligonucleotide
  modified_base (7)..(7): a, c, u, g, unknown or other
guacaanguuuacaugaaa

SEQ ID NO: 2359056 - RNA, 19 nt, Artificial Sequence
  Description of Artificial Sequence: Synthetic oligonucleotide
acggcucuaucccagacuu

SEQ ID NO: 2359057 - RNA, 19 nt, Artificial Sequence
  Description of Artificial Sequence: Synthetic oligonucleotide
gaccuguuaaaaugccaca

SEQ ID NO: 2359058 - RNA, 19 nt, Artificial Sequence
  Description of Artificial Sequence: Synthetic oligonucleotide
cuguuaaaaugccacaacu

SEQ ID NO: 2359059 - RNA, 19 nt, Artificial Sequence
  Description of Artificial Sequence: Synthetic oligonucleotide
ugguuacuuuauauauuau

SEQ ID NO: 2359060 - RNA, 19 nt, Artificial Sequence
  Description of Artificial Sequence: Synthetic oligonucleotide
  modified_base (8)..(8): a, c, u, g, unknown or other
aguacaanguuuacaugaa

SEQ ID NO: 2359061 - RNA, 19 nt, Artificial Sequence
  Description of Artificial Sequence: Synthetic oligonucleotide
cucauuacaacuggugcca

SEQ ID NO: 2359062 - RNA, 19 nt, Artificial Sequence
  Description of Artificial Sequence: Synthetic oligonucleotide
uucugauaacaaacauuua

SEQ ID NO: 2359063 - RNA, 19 nt, Artificial Sequence
  Description of Artificial Sequence: Synthetic oligonucleotide
ugucauggggcuguauuaa

SEQ ID NO: 2359064 - RNA, 19 nt, Artificial Sequence
  Description of Artificial Sequence: Synthetic oligonucleotide
gucauggggcuguauuaag

SEQ ID NO: 2359065 - RNA, 19 nt, Artificial Sequence
  Description of Artificial Sequence: Synthetic oligonucleotide
agccccgguauuuauaaua

SEQ ID NO: 2359066 - RNA, 19 nt, Artificial Sequence
  Description of Artificial Sequence: Synthetic oligonucleotide
cagaagcacacagguaagg

SEQ ID NO: 2359067 - RNA, 19 nt, Artificial Sequence
  Description of Artificial Sequence: Synthetic oligonucleotide
cugcaccuccuauucuucg

SEQ ID NO: 2359068 - RNA, 19 nt, Artificial Sequence
  Description of Artificial Sequence: Synthetic oligonucleotide
aucugcaccuccuauucuu

SEQ ID NO: 2359069 - RNA, 19 nt, Artificial Sequence
  Description of Artificial Sequence: Synthetic oligonucleotide
gucacuaagcucaaauaaa

SEQ ID NO: 2359070 - RNA, 19 nt, Artificial Sequence
  Description of Artificial Sequence: Synthetic oligonucleotide
  modified_base (13)..(13): a, c, u, g, unknown or other
acuucguaaaacnucuaua

SEQ ID NO: 2359071 - RNA, 19 nt, Artificial Sequence
  Description of Artificial Sequence: Synthetic oligonucleotide
cuaagcagaaaacguagcu

SEQ ID NO: 2359072 - RNA, 19 nt, Artificial Sequence
  Description of Artificial Sequence: Synthetic oligonucleotide
ucuucguguuuccgugcgc

SEQ ID NO: 2359073 - RNA, 19 nt, Artificial Sequence
  Description of Artificial Sequence: Synthetic oligonucleotide
ucauuacaacuggugccag

SEQ ID NO: 2359074 - RNA, 19 nt, Artificial Sequence
  Description of Artificial Sequence: Synthetic oligonucleotide
auaagguuguaaaucuuuu

SEQ ID NO: 2359075 - RNA, 19 nt, Artificial Sequence
  Description of Artificial Sequence: Synthetic oligonucleotide
gaaaaucugcaccuccuau

SEQ ID NO: 2359076 - RNA, 19 nt, Artificial Sequence
  Description of Artificial Sequence: Synthetic oligonucleotide
uuauagccccgguauuuau

SEQ ID NO: 2359077 - RNA, 19 nt, Artificial Sequence
  Description of Artificial Sequence: Synthetic oligonucleotide
uagcacuguuauagccccg

SEQ ID NO: 2359078 - RNA, 19 nt, Artificial Sequence
  Description of Artificial Sequence: Synthetic oligonucleotide
caguuuagaagguauuacu

SEQ ID NO: 2359079 - RNA, 19 nt, Artificial Sequence
  Description of Artificial Sequence: Synthetic oligonucleotide
gguauuacuaauaucuuau

SEQ ID NO: 2359080 - RNA, 19 nt, Artificial Sequence
  Description of Artificial Sequence: Synthetic oligonucleotide
cuccuauucuucguguuuc

SEQ ID NO: 2359081 - RNA, 19 nt, Artificial Sequence
  Description of Artificial Sequence: Synthetic oligonucleotide
gcauaauaguauauauuac

SEQ ID NO: 2359082 - RNA, 19 nt, Artificial Sequence
  Description of Artificial Sequence: Synthetic oligonucleotide
  modified_base (9)..(9): a, c, u, g, unknown or other
cguaaaacnucuauaaucu

SEQ ID NO: 2359083 - RNA, 19 nt, Artificial Sequence
  Description of Artificial Sequence: Synthetic oligonucleotide
acagaagcacacagguaag

SEQ ID NO: 2359084 - RNA, 19 nt, Artificial Sequence
  Description of Artificial Sequence: Synthetic oligonucleotide
cuuaucacaggaugcagau

SEQ ID NO: 2359085 - RNA, 19 nt, Artificial Sequence
  Description of Artificial Sequence: Synthetic oligonucleotide
aacucucuucugauaacaa

SEQ ID NO: 2359086 - RNA, 19 nt, Artificial Sequence
  Description of Artificial Sequence: Synthetic oligonucleotide
ucaacggcucuaucccaga

SEQ ID NO: 2359087 - RNA, 19 nt, Artificial Sequence
  Description of Artificial Sequence: Synthetic oligonucleotide
uuacaagauggggucacua

SEQ ID NO: 2359088 - RNA, 19 nt, Artificial Sequence
  Description of Artificial Sequence: Synthetic oligonucleotide
agcaucugagacauaaauu

SEQ ID NO: 2359089 - RNA, 19 nt, Artificial Sequence
  Description of Artificial Sequence: Synthetic oligonucleotide
uaucguacaucugccucgu

SEQ ID NO: 2359090 - RNA, 19 nt, Artificial Sequence
  Description of Artificial Sequence: Synthetic oligonucleotide
ucacuaugaugcacauaaa

SEQ ID NO: 2359091 - RNA, 19 nt, Artificial Sequence
  Description of Artificial Sequence: Synthetic oligonucleotide
aaggaagucaacggcucua

SEQ ID NO: 2359092 - RNA, 19 nt, Artificial Sequence
  Description of Artificial Sequence: Synthetic oligonucleotide
uaucccagacuuucuucau

SEQ ID NO: 2359093 - RNA, 19 nt, Artificial Sequence
  Description of Artificial Sequence: Synthetic oligonucleotide
ucuuggcaagcuucauuau

SEQ ID NO: 2359094 - RNA, 19 nt, Artificial Sequence
  Description of Artificial Sequence: Synthetic oligonucleotide
acagaaagacugguuacuu

SEQ ID NO: 2359095 - RNA, 19 nt, Artificial Sequence
  Description of Artificial Sequence: Synthetic oligonucleotide
ccuguuaaaaugccacaac

SEQ ID NO: 2359096 - RNA, 19 nt, Artificial Sequence
  Description of Artificial Sequence: Synthetic oligonucleotide
guuuccgugcgcacucuag

SEQ ID NO: 2359097 - RNA, 19 nt, Artificial Sequence
  Description of Artificial Sequence: Synthetic oligonucleotide
auaaacagacugggaaaau

SEQ ID NO: 2359098 - RNA, 19 nt, Artificial Sequence
  Description of Artificial Sequence: Synthetic oligonucleotide
uuccgugcgcacucuagau

SEQ ID NO: 2359099 - RNA, 19 nt, Artificial Sequence
  Description of Artificial Sequence: Synthetic oligonucleotide
uuacaacuggugccaguuu

SEQ ID NO: 2359100 - RNA, 19 nt, Artificial Sequence
  Description of Artificial Sequence: Synthetic oligonucleotide
gcaucauguuuacuaagca

SEQ ID NO: 2359101 - RNA, 19 nt, Artificial Sequence
  Description of Artificial Sequence: Synthetic oligonucleotide
acugguuacuuuauauauu

SEQ ID NO: 2359102 - RNA, 19 nt, Artificial Sequence
  Description of Artificial Sequence: Synthetic oligonucleotide
cuauucuucguguuuccgu

SEQ ID NO: 2359103 - RNA, 19 nt, Artificial Sequence
  Description of Artificial Sequence: Synthetic oligonucleotide
cucgaacauguggaauagg

SEQ ID NO: 2359104 - RNA, 19 nt, Artificial Sequence
  Description of Artificial Sequence: Synthetic oligonucleotide
aaucacuaugaugcacaua

SEQ ID NO: 2359105 - RNA, 19 nt, Artificial Sequence
  Description of Artificial Sequence: Synthetic oligonucleotide
acucuugcaacagguuaca

SEQ ID NO: 2359106 - RNA, 19 nt, Artificial Sequence
  Description of Artificial Sequence: Synthetic oligonucleotide
  modified_base (15)..(15): a, c, u, g, unknown or other
ugacuucguaaaacnucua

SEQ ID NO: 2359107 - RNA, 19 nt, Artificial Sequence
  Description of Artificial Sequence: Synthetic oligonucleotide
uucguguuuccgugcgcac

SEQ ID NO: 2359108 - RNA, 19 nt, Artificial Sequence
  Description of Artificial Sequence: Synthetic oligonucleotide
auauaagguuguaaaucuu

SEQ ID NO: 2359109 - RNA, 19 nt, Artificial Sequence
  Description of Artificial Sequence: Synthetic oligonucleotide
ucguguuuccgugcgcacu

SEQ ID NO: 2359110 - RNA, 19 nt, Artificial Sequence
  Description of Artificial Sequence: Synthetic oligonucleotide
uccgugcgcacucuagauu

SEQ ID NO: 2359111 - RNA, 19 nt, Artificial Sequence
  Description of Artificial Sequence: Synthetic oligonucleotide
ggugaccuguuaaaaugcc

SEQ ID NO: 2359112 - RNA, 19 nt, Artificial Sequence
  Description of Artificial Sequence: Synthetic oligonucleotide
ccaguuuagaagguauuac

SEQ ID NO: 2359113 - RNA, 19 nt, Artificial Sequence
  Description of Artificial Sequence: Synthetic oligonucleotide
ggcuguauuaaggaaucuc

SEQ ID NO: 2359114 - RNA, 19 nt, Artificial Sequence
  Description of Artificial Sequence: Synthetic oligonucleotide
ggcucuaucccagacuuuc

SEQ ID NO: 2359115 - RNA, 19 nt, Artificial Sequence
  Description of Artificial Sequence: Synthetic oligonucleotide
uggugccaguuuagaaggu

SEQ ID NO: 2359116 - RNA, 19 nt, Artificial Sequence
  Description of Artificial Sequence: Synthetic oligonucleotide
agcuuuucacaaauauuuu

SEQ ID NO: 2359117 - RNA, 19 nt, Artificial Sequence
  Description of Artificial Sequence: Synthetic oligonucleotide
gugaccuguuaaaaugcca

SEQ ID NO: 2359118 - RNA, 19 nt, Artificial Sequence
  Description of Artificial Sequence: Synthetic oligonucleotide
ccgguauuuauaauaaaua

SEQ ID NO: 2359119 - RNA, 19 nt, Artificial Sequence
  Description of Artificial Sequence: Synthetic oligonucleotide
cugcauaauaguauauauu

SEQ ID NO: 2359120 - RNA, 19 nt, Artificial Sequence
  Description of Artificial Sequence: Synthetic oligonucleotide
gguuacaagauggggucac

SEQ ID NO: 2359121 - RNA, 19 nt, Artificial Sequence
  Description of Artificial Sequence: Synthetic oligonucleotide
ugcagauggcuggauccac

SEQ ID NO: 2359122 - RNA, 19 nt, Artificial Sequence
  Description of Artificial Sequence: Synthetic oligonucleotide
cuucguguuuccgugcgca

SEQ ID NO: 2359123 - RNA, 19 nt, Artificial Sequence
  Description of Artificial Sequence: Synthetic oligonucleotide
uggcuggauccaccgccag

SEQ ID NO: 2359124 - RNA, 19 nt, Artificial Sequence
  Description of Artificial Sequence: Synthetic oligonucleotide
caacggcucuaucccagac

SEQ ID NO: 2359125 - RNA, 19 nt, Artificial Sequence
  Description of Artificial Sequence: Synthetic oligonucleotide
uguuuccgugcgcacucua

SEQ ID NO: 2359126 - RNA, 19 nt, Artificial Sequence
  Description of Artificial Sequence: Synthetic oligonucleotide
cagguaaggcacaaagggu

SEQ ID NO: 2359127 - RNA, 19 nt, Artificial Sequence
  Description of Artificial Sequence: Synthetic oligonucleotide
ccgugcgcacucuagauuc

SEQ ID NO: 2359128 - RNA, 19 nt, Artificial Sequence
  Description of Artificial Sequence: Synthetic oligonucleotide
cguacaucugccucguuuc

SEQ ID NO: 2359129 - RNA, 19 nt, Artificial Sequence
  Description of Artificial Sequence: Synthetic oligonucleotide
accuccuauucuucguguu

SEQ ID NO: 2359130 - RNA, 19 nt, Artificial Sequence
  Description of Artificial Sequence: Synthetic oligonucleotide
  modified_base (8)..(8): a, c, u, g, unknown or other
guaaaacnucuauaaucuu

SEQ ID NO: 2359131 - RNA, 19 nt, Artificial Sequence
  Description of Artificial Sequence: Synthetic oligonucleotide
ugccucguuuccucuuccu

SEQ ID NO: 2359132 - RNA, 19 nt, Artificial Sequence
  Description of Artificial Sequence: Synthetic oligonucleotide
agguuacaagaugggguca

SEQ ID NO: 2359133 - RNA, 19 nt, Artificial Sequence
  Description of Artificial Sequence: Synthetic oligonucleotide
ucccaauagcacuguuaua

SEQ ID NO: 2359134 - RNA, 19 nt, Artificial Sequence
  Description of Artificial Sequence: Synthetic oligonucleotide
augcagauggcuggaucca

SEQ ID NO: 2359135 - RNA, 19 nt, Artificial Sequence
  Description of Artificial Sequence: Synthetic oligonucleotide
accacauaucguacaucug

SEQ ID NO: 2359136 - RNA, 19 nt, Artificial Sequence
  Description of Artificial Sequence: Synthetic oligonucleotide
ugcgcacucuagauucauu

SEQ ID NO: 2359137 - RNA, 19 nt, Artificial Sequence
  Description of Artificial Sequence: Synthetic oligonucleotide
ccuauucuucguguuuccg

SEQ ID NO: 2359138 - RNA, 19 nt, Artificial Sequence
  Description of Artificial Sequence: Synthetic oligonucleotide
ggaugcagauggcuggauc

SEQ ID NO: 2359139 - RNA, 19 nt, Artificial Sequence
  Description of Artificial Sequence: Synthetic oligonucleotide
caauugcuucuuuauugcu

SEQ ID NO: 2359140 - RNA, 19 nt, Artificial Sequence
  Description of Artificial Sequence: Synthetic oligonucleotide
guuauagccccgguauuua

SEQ ID NO: 2359141 - RNA, 19 nt, Artificial Sequence
  Description of Artificial Sequence: Synthetic oligonucleotide
ggcauauaagguuguaaau

SEQ ID NO: 2359142 - RNA, 19 nt, Artificial Sequence
  Description of Artificial Sequence: Synthetic oligonucleotide
cugccucguuuccucuucc

SEQ ID NO: 2359143 - RNA, 19 nt, Artificial Sequence
  Description of Artificial Sequence: Synthetic oligonucleotide
cuagauucauuagcagcaa

SEQ ID NO: 2359144 - RNA, 19 nt, Artificial Sequence
  Description of Artificial Sequence: Synthetic oligonucleotide
gaauagugugcaucauguu

SEQ ID NO: 2359145 - RNA, 19 nt, Artificial Sequence
  Description of Artificial Sequence: Synthetic oligonucleotide
auaggcauauaagguugua

SEQ ID NO: 2359146 - RNA, 19 nt, Artificial Sequence
  Description of Artificial Sequence: Synthetic oligonucleotide
ggggcuguauuaaggaauc

SEQ ID NO: 2359147 - RNA, 19 nt, Artificial Sequence
  Description of Artificial Sequence: Synthetic oligonucleotide
agugugcaucauguuuacu

SEQ ID NO: 2359148 - RNA, 19 nt, Artificial Sequence
  Description of Artificial Sequence: Synthetic oligonucleotide
gccagaccagaaaaucugc

SEQ ID NO: 2359149 - RNA, 19 nt, Artificial Sequence
  Description of Artificial Sequence: Synthetic oligonucleotide
auacucccaauagcacugu

SEQ ID NO: 2359150 - RNA, 19 nt, Artificial Sequence
  Description of Artificial Sequence: Synthetic oligonucleotide
gggucacuaagcucaaaua

SEQ ID NO: 2359151 - RNA, 19 nt, Artificial Sequence
  Description of Artificial Sequence: Synthetic oligonucleotide
cgcacucuagauucauuag

SEQ ID NO: 2359152 - RNA, 19 nt, Artificial Sequence
  Description of Artificial Sequence: Synthetic oligonucleotide
gcgcacucuagauucauua

SEQ ID NO: 2359153 - RNA, 19 nt, Artificial Sequence
  Description of Artificial Sequence: Synthetic oligonucleotide
cauuagcagcaaggaaguc

SEQ ID NO: 2359154 - RNA, 19 nt, Artificial Sequence
  Description of Artificial Sequence: Synthetic oligonucleotide
cacuguuauagccccggua

SEQ ID NO: 2359155 - RNA, 19 nt, Artificial Sequence
  Description of Artificial Sequence: Synthetic oligonucleotide
cccgguauuuauaauaaau

SEQ ID NO: 2359156 - RNA, 19 nt, Artificial Sequence
  Description of Artificial Sequence: Synthetic oligonucleotide
cgaacauguggaauaggca

SEQ ID NO: 2359157 - RNA, 19 nt, Artificial Sequence
  Description of Artificial Sequence: Synthetic oligonucleotide
agcagaaaacguagcuaua

SEQ ID NO: 2359158 - RNA, 19 nt, Artificial Sequence
  Description of Artificial Sequence: Synthetic oligonucleotide
ggggucacuaagcucaaau

SEQ ID NO: 2359159 - RNA, 19 nt, Artificial Sequence
  Description of Artificial Sequence: Synthetic oligonucleotide
uagccccgguauuuauaau

SEQ ID NO: 2359160 - RNA, 19 nt, Artificial Sequence
  Description of Artificial Sequence: Synthetic oligonucleotide
cauuacaacuggugccagu

SEQ ID NO: 2359161 - RNA, 19 nt, Artificial Sequence
  Description of Artificial Sequence: Synthetic oligonucleotide
auacagcuuuucacaaaua

SEQ ID NO: 2359162 - RNA, 19 nt, Artificial Sequence
  Description of Artificial Sequence: Synthetic oligonucleotide
ggaagucaacggcucuauc

SEQ ID NO: 2359163 - RNA, 19 nt, Artificial Sequence
  Description of Artificial Sequence: Synthetic oligonucleotide
acguagcuauaaacagacu

SEQ ID NO: 2359164 - RNA, 19 nt, Artificial Sequence
  Description of Artificial Sequence: Synthetic oligonucleotide
gcauccaaaggugaccugu

SEQ ID NO: 2359165 - RNA, 19 nt, Artificial Sequence
  Description of Artificial Sequence: Synthetic oligonucleotide
gccucguuuccucuuccuc

SEQ ID NO: 2359166 - RNA, 19 nt, Artificial Sequence
  Description of Artificial Sequence: Synthetic oligonucleotide
gccccgguauuuauaauaa

SEQ ID NO: 2359167 - RNA, 19 nt, Artificial Sequence
  Description of Artificial Sequence: Synthetic oligonucleotide
guuacaagauggggucacu

SEQ ID NO: 2359168 - RNA, 19 nt, Artificial Sequence
  Description of Artificial Sequence: Synthetic oligonucleotide
ggugccaguuuagaaggua

SEQ ID NO: 2359169 - RNA, 19 nt, Artificial Sequence
  Description of Artificial Sequence: Synthetic oligonucleotide
caccuccuauucuucgugu

SEQ ID NO: 2359170 - RNA, 19 nt, Artificial Sequence
  Description of Artificial Sequence: Synthetic oligonucleotide
cauccaaaggugaccuguu

SEQ ID NO: 2359171 - RNA, 19 nt, Artificial Sequence
  Description of Artificial Sequence: Synthetic oligonucleotide
uggggucacuaagcucaaa

SEQ ID NO: 2359172 - RNA, 19 nt, Artificial Sequence
  Description of Artificial Sequence: Synthetic oligonucleotide
ggcuggauccaccgccaga

SEQ ID NO: 2359173 - RNA, 19 nt, Artificial Sequence
  Description of Artificial Sequence: Synthetic oligonucleotide
cucuugcaacagguuacaa

SEQ ID NO: 2359174 - RNA, 19 nt, Artificial Sequence
  Description of Artificial Sequence: Synthetic oligonucleotide
guaaggcacaaaggguuuu

SEQ ID NO: 2359175 - RNA, 19 nt, Artificial Sequence
  Description of Artificial Sequence: Synthetic oligonucleotide
uccugucauggggcuguau

SEQ ID NO: 2359176 - RNA, 19 nt, Artificial Sequence
  Description of Artificial Sequence: Synthetic oligonucleotide
aucguacaucugccucguu

SEQ ID NO: 2359177 - RNA, 19 nt, Artificial Sequence
  Description of Artificial Sequence: Synthetic oligonucleotide
cuguuauagccccgguauu

SEQ ID NO: 2359178 - RNA, 19 nt, Artificial Sequence
  Description of Artificial Sequence: Synthetic oligonucleotide
auggggucacuaagcucaa

SEQ ID NO: 2359179 - RNA, 19 nt, Artificial Sequence
  Description of Artificial Sequence: Synthetic oligonucleotide
ccgccagaccagaaaaucu

SEQ ID NO: 2359180 - RNA, 19 nt, Artificial Sequence
  Description of Artificial Sequence: Synthetic oligonucleotide
ccugucauggggcuguauu

SEQ ID NO: 2359181 - RNA, 19 nt, Artificial Sequence
  Description of Artificial Sequence: Synthetic oligonucleotide
caccgccagaccagaaaau

SEQ ID NO: 2359182 - RNA, 19 nt, Artificial Sequence
  Description of Artificial Sequence: Synthetic oligonucleotide
ccccgguauuuauaauaaa

SEQ ID NO: 2359183 - RNA, 19 nt, Artificial Sequence
  Description of Artificial Sequence: Synthetic oligonucleotide
gugcgcacucuagauucau

SEQ ID NO: 2359184 - RNA, 19 nt, Artificial Sequence
  Description of Artificial Sequence: Synthetic oligonucleotide
gcucuaucccagacuuucu

SEQ ID NO: 2359185 - RNA, 19 nt, Artificial Sequence
  Description of Artificial Sequence: Synthetic oligonucleotide
gcacuguuauagccccggu

SEQ ID NO: 2359186 - RNA, 19 nt, Artificial Sequence
  Description of Artificial Sequence: Synthetic oligonucleotide
ccuccuauucuucguguuu

SEQ ID NO: 2359187 - RNA, 19 nt, Artificial Sequence
  Description of Artificial Sequence: Synthetic oligonucleotide
gggcuguauuaaggaaucu

SEQ ID NO: 2359188 - RNA, 19 nt, Artificial Sequence
  Description of Artificial Sequence: Synthetic oligonucleotide
cgugcgcacucuagauuca

SEQ ID NO: 2359189 - RNA, 19 nt, Artificial Sequence
  Description of Artificial Sequence: Synthetic oligonucleotide
cggcucuaucccagacuuu

SEQ ID NO: 2359190 - RNA, 19 nt, Artificial Sequence
  Description of Artificial Sequence: Synthetic oligonucleotide
uagaauauuuaucuccucg

SEQ ID NO: 2359191 - RNA, 19 nt, Artificial Sequence
  Description of Artificial Sequence: Synthetic oligonucleotide
uguagugggguuaugcugg

SEQ ID NO: 2359192 - RNA, 19 nt, Artificial Sequence
  Description of Artificial Sequence: Synthetic oligonucleotide
uuuagaauauuuaucuccu

SEQ ID NO: 2359193 - RNA, 19 nt, Artificial Sequence
  Description of Artificial Sequence: Synthetic oligonucleotide
aauauuuaucuccucgcug

SEQ ID NO: 2359194 - RNA, 19 nt, Artificial Sequence
  Description of Artificial Sequence: Synthetic oligonucleotide
aaccugggcacaaagaggc

SEQ ID NO: 2359195 - RNA, 19 nt, Artificial Sequence
  Description of Artificial Sequence: Synthetic oligonucleotide
cagaauggccaauauaugg

SEQ ID NO: 2359196 - RNA, 19 nt, Artificial Sequence
  Description of Artificial Sequence: Synthetic oligonucleotide
aguuaagcaacugagacca

SEQ ID NO: 2359197 - RNA, 19 nt, Artificial Sequence
  Description of Artificial Sequence: Synthetic oligonucleotide
auauuuaucuccucgcugu

SEQ ID NO: 2359198 - RNA, 19 nt, Artificial Sequence
  Description of Artificial Sequence: Synthetic oligonucleotide
ugucaaaacagcuugugau

SEQ ID NO: 2359199 - RNA, 19 nt, Artificial Sequence
  Description of Artificial Sequence: Synthetic oligonucleotide
aguguagucacuuuccagu

SEQ ID NO: 2359200 - RNA, 19 nt, Artificial Sequence
  Description of Artificial Sequence: Synthetic oligonucleotide
aaagccuuuucaaaccugg

SEQ ID NO: 2359201 - RNA, 19 nt, Artificial Sequence
  Description of Artificial Sequence: Synthetic oligonucleotide
aaaauuccauggcuccugg

SEQ ID NO: 2359202 - RNA, 19 nt, Artificial Sequence
  Description of Artificial Sequence: Synthetic oligonucleotide
auggucacgccucaucucc

SEQ ID NO: 2359203 - RNA, 19 nt, Artificial Sequence
  Description of Artificial Sequence: Synthetic oligonucleotide
aagggaaguccucucucgc

SEQ ID NO: 2359204 - RNA, 19 nt, Artificial Sequence
  Description of Artificial Sequence: Synthetic oligonucleotide
agccuuuucaaaccugggc

SEQ ID NO: 2359205 - RNA, 19 nt, Artificial Sequence
  Description of Artificial Sequence: Synthetic oligonucleotide
acuacgaucucuucaaaga

SEQ ID NO: 2359206 - RNA, 19 nt, Artificial Sequence
  Description of Artificial Sequence: Synthetic oligonucleotide
ugagcaguuaagcaacuga

SEQ ID NO: 2359207 - RNA, 19 nt, Artificial Sequence
  Description of Artificial Sequence: Synthetic oligonucleotide
agcaugugcacgucuaugg

SEQ ID NO: 2359208 - RNA, 19 nt, Artificial Sequence
  Description of Artificial Sequence: Synthetic oligonucleotide
agauucugguuccuuacgg

SEQ ID NO: 2359209 - RNA, 19 nt, Artificial Sequence
  Description of Artificial Sequence: Synthetic oligonucleotide
gauucugguuccuuacggg

SEQ ID NO: 2359210 - RNA, 19 nt, Artificial Sequence
  Description of Artificial Sequence: Synthetic oligonucleotide
ugaucuuugucucuaggaa

SEQ ID NO: 2359211 - RNA, 19 nt, Artificial Sequence
  Description of Artificial Sequence: Synthetic oligonucleotide
caauauauggucacgccuc

SEQ ID NO: 2359212 - RNA, 19 nt, Artificial Sequence
  Description of Artificial Sequence: Synthetic oligonucleotide
gccagaaugacucacuggg

SEQ ID NO: 2359213 - RNA, 19 nt, Artificial Sequence
  Description of Artificial Sequence: Synthetic oligonucleotide
aaagaggcagagcgcgcgc

SEQ ID NO: 2359214 - RNA, 19 nt, Artificial Sequence
  Description of Artificial Sequence: Synthetic oligonucleotide
uucaaaccugggcacaaag

SEQ ID NO: 2359215 - RNA, 19 nt, Artificial Sequence
  Description of Artificial Sequence: Synthetic oligonucleotide
uuuaucuccucgcuguagu

SEQ ID NO: 2359216 - RNA, 19 nt, Artificial Sequence
  Description of Artificial Sequence: Synthetic oligonucleotide
uuaagguaggcacccaggu

SEQ ID NO: 2359217 - RNA, 19 nt, Artificial Sequence
  Description of Artificial Sequence: Synthetic oligonucleotide
aauauauggucacgccuca

SEQ ID NO: 2359218 - RNA, 19 nt, Artificial Sequence
  Description of Artificial Sequence: Synthetic oligonucleotide
ugcacgucuauggacaggg

SEQ ID NO: 2359219 - RNA, 19 nt, Artificial Sequence
  Description of Artificial Sequence: Synthetic oligonucleotide
auggccaauauauggucac

SEQ ID NO: 2359220 - RNA, 19 nt, Artificial Sequence
  Description of Artificial Sequence: Synthetic oligonucleotide
uauucaguccuagaugcag

SEQ ID NO: 2359221 - RNA, 19 nt, Artificial Sequence
  Description of Artificial Sequence: Synthetic oligonucleotide
ugcccacagaccaauggcg

SEQ ID NO: 2359222 - RNA, 19 nt, Artificial Sequence
  Description of Artificial Sequence: Synthetic oligonucleotide
aggaagcuaguguagucac

SEQ ID NO: 2359223 - RNA, 19 nt, Artificial Sequence
  Description of Artificial Sequence: Synthetic oligonucleotide
ucugguuccuuacgggcgg

SEQ ID NO: 2359224 - RNA, 19 nt, Artificial Sequence
  Description of Artificial Sequence: Synthetic oligonucleotide
uucccaacgccucugcucc

SEQ ID NO: 2359225 - RNA, 19 nt, Artificial Sequence
  Description of Artificial Sequence: Synthetic oligonucleotide
ucaaaacagcuugugaucu

SEQ ID NO: 2359226 - RNA, 19 nt, Artificial Sequence
  Description of Artificial Sequence: Synthetic oligonucleotide
agaaugacucacugggcuc

SEQ ID NO: 2359227 - RNA, 19 nt, Artificial Sequence
  Description of Artificial Sequence: Synthetic oligonucleotide
gaggagauagcgccggccg

SEQ ID NO: 2359228 - RNA, 19 nt, Artificial Sequence
  Description of Artificial Sequence: Synthetic oligonucleotide
ucgcucaccgccuuugacg

SEQ ID NO: 2359229 - RNA, 19 nt, Artificial Sequence
  Description of Artificial Sequence: Synthetic oligonucleotide
uugcuauucaguccuagau

SEQ ID NO: 2359230 - RNA, 19 nt, Artificial Sequence
  Description of Artificial Sequence: Synthetic oligonucleotide
caguuaagcaacugagacc

SEQ ID NO: 2359231 - RNA, 19 nt, Artificial Sequence
  Description of Artificial Sequence: Synthetic oligonucleotide
cuacgaucucuucaaagag

SEQ ID NO: 2359232 - RNA, 19 nt, Artificial Sequence
  Description of Artificial Sequence: Synthetic oligonucleotide
cacaaagaggcagagcgcg

SEQ ID NO: 2359233 - RNA, 19 nt, Artificial Sequence
  Description of Artificial Sequence: Synthetic oligonucleotide
uaagcaacugagaccaaaa

SEQ ID NO: 2359234 - RNA, 19 nt, Artificial Sequence
  Description of Artificial Sequence: Synthetic oligonucleotide
agacccuccgccuaccagg

SEQ ID NO: 2359235 - RNA, 19 nt, Artificial Sequence
  Description of Artificial Sequence: Synthetic oligonucleotide
uuagaaagggaaguccucu

SEQ ID NO: 2359236 - RNA, 19 nt, Artificial Sequence
  Description of Artificial Sequence: Synthetic oligonucleotide
gagcaguuaagcaacugag

SEQ ID NO: 2359237 - RNA, 19 nt, Artificial Sequence
  Description of Artificial Sequence: Synthetic oligonucleotide
auauggucacgccucaucu

SEQ ID NO: 2359238 - RNA, 19 nt, Artificial Sequence
  Description of Artificial Sequence: Synthetic oligonucleotide
uauauggucacgccucauc

SEQ ID NO: 2359239 - RNA, 19 nt, Artificial Sequence
  Description of Artificial Sequence: Synthetic oligonucleotide
ugcugggcaguuagaaagg

SEQ ID NO: 2359240 - RNA, 19 nt, Artificial Sequence
  Description of Artificial Sequence: Synthetic oligonucleotide
uccuagaugcaggugauga

SEQ ID NO: 2359241 - RNA, 19 nt, Artificial Sequence
  Description of Artificial Sequence: Synthetic oligonucleotide
uaguguagucacuuuccag

SEQ ID NO: 2359242 - RNA, 19 nt, Artificial Sequence
  Description of Artificial Sequence: Synthetic oligonucleotide
agucacuuuccagucgugc

SEQ ID NO: 2359243 - RNA, 19 nt, Artificial Sequence
  Description of Artificial Sequence: Synthetic oligonucleotide
ugaugagcacauccacggg

SEQ ID NO: 2359244 - RNA, 19 nt, Artificial Sequence
  Description of Artificial Sequence: Synthetic oligonucleotide
gcaguuaagcaacugagac

SEQ ID NO: 2359245 - RNA, 19 nt, Artificial Sequence
  Description of Artificial Sequence: Synthetic oligonucleotide
uaucuccucgcuguagugg

SEQ ID NO: 2359246 - RNA, 19 nt, Artificial Sequence
  Description of Artificial Sequence: Synthetic oligonucleotide
ccugcaaggagccucagcg

SEQ ID NO: 2359247 - RNA, 19 nt, Artificial Sequence
  Description of Artificial Sequence: Synthetic oligonucleotide
cuuugacgccagaaaagcc

SEQ ID NO: 2359248 - RNA, 19 nt, Artificial Sequence
  Description of Artificial Sequence: Synthetic oligonucleotide
acucacugggcucccgacc

SEQ ID NO: 2359249 - RNA, 19 nt, Artificial Sequence
  Description of Artificial Sequence: Synthetic oligonucleotide
cuacgcagugccagaaugg

SEQ ID NO: 2359250 - RNA, 19 nt, Artificial Sequence
  Description of Artificial Sequence: Synthetic oligonucleotide
gagcaccugaccucgggcg

SEQ ID NO: 2359251 - RNA, 19 nt, Artificial Sequence
  Description of Artificial Sequence: Synthetic oligonucleotide
uggaaugccuccacucuug

SEQ ID NO: 2359252 - RNA, 19 nt, Artificial Sequence
  Description of Artificial Sequence: Synthetic oligonucleotide
guagcacucgcucaccgcc

SEQ ID NO: 2359253 - RNA, 19 nt, Artificial Sequence
  Description of Artificial Sequence: Synthetic oligonucleotide
gucaaaacagcuugugauc

SEQ ID NO: 2359254 - RNA, 19 nt, Artificial Sequence
  Description of Artificial Sequence: Synthetic oligonucleotide
cacuacgaucucuucaaag

SEQ ID NO: 2359255 - RNA, 19 nt, Artificial Sequence
  Description of Artificial Sequence: Synthetic oligonucleotide
acgucuauggacaggggcg

SEQ ID NO: 2359256 - RNA, 19 nt, Artificial Sequence
  Description of Artificial Sequence: Synthetic oligonucleotide
aguuagaaagggaaguccu

SEQ ID NO: 2359257 - RNA, 19 nt, Artificial Sequence
  Description of Artificial Sequence: Synthetic oligonucleotide
aauggccaauauaugguca

SEQ ID NO: 2359258 - RNA, 19 nt, Artificial Sequence
  Description of Artificial Sequence: Synthetic oligonucleotide
guuaagguaggcacccagg

SEQ ID NO: 2359259 - RNA, 19 nt, Artificial Sequence
  Description of Artificial Sequence: Synthetic oligonucleotide
gguuaugcugggcaguuag

SEQ ID NO: 2359260 - RNA, 19 nt, Artificial Sequence
  Description of Artificial Sequence: Synthetic oligonucleotide
gaaugacucacugggcucc

SEQ ID NO: 2359261 - RNA, 19 nt, Artificial Sequence
  Description of Artificial Sequence: Synthetic oligonucleotide
aaugacucacugggcuccc

SEQ ID NO: 2359262 - RNA, 19 nt, Artificial Sequence
  Description of Artificial Sequence: Synthetic oligonucleotide
aagucuuggguguggugca

SEQ ID NO: 2359263 - RNA, 19 nt, Artificial Sequence
  Description of Artificial Sequence: Synthetic oligonucleotide
ugcagcagauucugguucc

SEQ ID NO: 2359264 - RNA, 19 nt, Artificial Sequence
  Description of Artificial Sequence: Synthetic oligonucleotide
cacgucuauggacaggggc

SEQ ID NO: 2359265 - RNA, 19 nt, Artificial Sequence
  Description of Artificial Sequence: Synthetic oligonucleotide
ucagucaccggggagggug

SEQ ID NO: 2359266 - RNA, 19 nt, Artificial Sequence
  Description of Artificial Sequence: Synthetic oligonucleotide
ucuaggaagcuaguguagu

SEQ ID NO: 2359267 - RNA, 19 nt, Artificial Sequence
  Description of Artificial Sequence: Synthetic oligonucleotide
caugugcacgucuauggac

SEQ ID NO: 2359268 - RNA, 19 nt, Artificial Sequence
  Description of Artificial Sequence: Synthetic oligonucleotide
agcaccugaccucgggcgc

SEQ ID NO: 2359269 - RNA, 19 nt, Artificial Sequence
  Description of Artificial Sequence: Synthetic oligonucleotide
cuguagugggguuaugcug

SEQ ID NO: 2359270 - RNA, 19 nt, Artificial Sequence
  Description of Artificial Sequence: Synthetic oligonucleotide
ucacgccucaucuccacgc

SEQ ID NO: 2359271 - RNA, 19 nt, Artificial Sequence
  Description of Artificial Sequence: Synthetic oligonucleotide
cagaucugcaggguggugg

SEQ ID NO: 2359272 - RNA, 19 nt, Artificial Sequence
  Description of Artificial Sequence: Synthetic oligonucleotide
acgaucucuucaaagagca

SEQ ID NO: 2359273 - RNA, 19 nt, Artificial Sequence
  Description of Artificial Sequence: Synthetic oligonucleotide
uuaugcugggcaguuagaa

SEQ ID NO: 2359274 - RNA, 19 nt, Artificial Sequence
  Description of Artificial Sequence: Synthetic oligonucleotide
aggagauagcgccggccgc

SEQ ID NO: 2359275 - RNA, 19 nt, Artificial Sequence
  Description of Artificial Sequence: Synthetic oligonucleotide
gaauauuuaucuccucgcu

SEQ ID NO: 2359276 - RNA, 19 nt, Artificial Sequence
  Description of Artificial Sequence: Synthetic oligonucleotide
cagauucugguuccuuacg

SEQ ID NO: 2359277 - RNA, 19 nt, Artificial Sequence
  Description of Artificial Sequence: Synthetic oligonucleotide
uuaucuccucgcuguagug

SEQ ID NO: 2359278 - RNA, 19 nt, Artificial Sequence
  Description of Artificial Sequence: Synthetic oligonucleotide
uaugcugggcaguuagaaa

SEQ ID NO: 2359279 - RNA, 19 nt, Artificial Sequence
  Description of Artificial Sequence: Synthetic oligonucleotide
ucgggcgcugcucucagca

SEQ ID NO: 2359280 - RNA, 19 nt, Artificial Sequence
  Description of Artificial Sequence: Synthetic oligonucleotide
cucagcggucccaacagac

SEQ ID NO: 2359281 - RNA, 19 nt, Artificial Sequence
  Description of Artificial Sequence: Synthetic oligonucleotide
cuaggaagcuaguguaguc

SEQ ID NO: 2359282 - RNA, 19 nt, Artificial Sequence
  Description of Artificial Sequence: Synthetic oligonucleotide
ugucucuaggaagcuagug

SEQ ID NO: 2359283 - RNA, 19 nt, Artificial Sequence
  Description of Artificial Sequence: Synthetic oligonucleotide
gcuccgaggagauagcgcc

SEQ ID NO: 2359284 - RNA, 19 nt, Artificial Sequence
  Description of Artificial Sequence: Synthetic oligonucleotide
cacgugcucagccacgagc

SEQ ID NO: 2359285 - RNA, 19 nt, Artificial Sequence
  Description of Artificial Sequence: Synthetic oligonucleotide
ucaccggggagggugacag

SEQ ID NO: 2359286 - RNA, 19 nt, Artificial Sequence
  Description of Artificial Sequence: Synthetic oligonucleotide
aauggcgggguguucucaa

SEQ ID NO: 2359287 - RNA, 19 nt, Artificial Sequence
  Description of Artificial Sequence: Synthetic oligonucleotide
ucagcggucccaacagacu

SEQ ID NO: 2359288 - RNA, 19 nt, Artificial Sequence
  Description of Artificial Sequence: Synthetic oligonucleotide
uccgaggagauagcgccgg

SEQ ID NO: 2359289 - RNA, 19 nt, Artificial Sequence
  Description of Artificial Sequence: Synthetic oligonucleotide
gagcacacgguguggggag

SEQ ID NO: 2359290 - RNA, 19 nt, Artificial Sequence
  Description of Artificial Sequence: Synthetic oligonucleotide
gccuuuucaaaccugggca

SEQ ID NO: 2359291 - RNA, 19 nt, Artificial Sequence
  Description of Artificial Sequence: Synthetic oligonucleotide
uagaaagggaaguccucuc

SEQ ID NO: 2359292 - RNA, 19 nt, Artificial Sequence
  Description of Artificial Sequence: Synthetic oligonucleotide
acauccacgggaggugggc

SEQ ID NO: 2359293 - RNA, 19 nt, Artificial Sequence
  Description of Artificial Sequence: Synthetic oligonucleotide
uaagguaggcacccaggua

SEQ ID NO: 2359294 - RNA, 19 nt, Artificial Sequence
  Description of Artificial Sequence: Synthetic oligonucleotide
uuuucaaaccugggcacaa

SEQ ID NO: 2359295 - RNA, 19 nt, Artificial Sequence
  Description of Artificial Sequence: Synthetic oligonucleotide
cuucacgugcucagccacg

SEQ ID NO: 2359296 - RNA, 19 nt, Artificial Sequence
  Description of Artificial Sequence: Synthetic oligonucleotide
uggccaauauauggucacg

SEQ ID NO: 2359297 - RNA, 19 nt, Artificial Sequence
  Description of Artificial Sequence: Synthetic oligonucleotide
uauuuaucuccucgcugua

SEQ ID NO: 2359298 - RNA, 19 nt, Artificial Sequence
  Description of Artificial Sequence: Synthetic oligonucleotide
ugcugucaaaacagcuugu

SEQ ID NO: 2359299 - RNA, 19 nt, Artificial Sequence
  Description of Artificial Sequence: Synthetic oligonucleotide
augagcacauccacgggag

SEQ ID NO: 2359300 - RNA, 19 nt, Artificial Sequence
  Description of Artificial Sequence: Synthetic oligonucleotide
uugacgccagaaaagccuu

SEQ ID NO: 2359301 - RNA, 19 nt, Artificial Sequence
  Description of Artificial Sequence: Synthetic oligonucleotide
acaaagaggcagagcgcgc

SEQ ID NO: 2359302 - RNA, 19 nt, Artificial Sequence
  Description of Artificial Sequence: Synthetic oligonucleotide
auccacgggaggugggcac

SEQ ID NO: 2359303 - RNA, 19 nt, Artificial Sequence
  Description of Artificial Sequence: Synthetic oligonucleotide
aaguccucucucgcccgcc

SEQ ID NO: 2359304 - RNA, 19 nt, Artificial Sequence
  Description of Artificial Sequence: Synthetic oligonucleotide
cccacaaaugccuggaaug

SEQ ID NO: 2359305 - RNA, 19 nt, Artificial Sequence
  Description of Artificial Sequence: Synthetic oligonucleotide
cugcaaggagccucagcgg

SEQ ID NO: 2359306 - RNA, 19 nt, Artificial Sequence
  Description of Artificial Sequence: Synthetic oligonucleotide
augugcacgucuauggaca

SEQ ID NO: 2359307 - RNA, 19 nt, Artificial Sequence
  Description of Artificial Sequence: Synthetic oligonucleotide
ugccagaauggccaauaua

SEQ ID NO: 2359308 - RNA, 19 nt, Artificial Sequence
  Description of Artificial Sequence: Synthetic oligonucleotide
uggcuccuggcuucaaagc

SEQ ID NO: 2359309 - RNA, 19 nt, Artificial Sequence
  Description of Artificial Sequence: Synthetic oligonucleotide
acgccagaaaagccuuuuc

SEQ ID NO: 2359310 - RNA, 19 nt, Artificial Sequence
  Description of Artificial Sequence: Synthetic oligonucleotide
guguagucacuuuccaguc

SEQ ID NO: 2359311 - RNA, 19 nt, Artificial Sequence
  Description of Artificial Sequence: Synthetic oligonucleotide
ucuccucgcuguagugggg

SEQ ID NO: 2359312 - RNA, 19 nt, Artificial Sequence
  Description of Artificial Sequence: Synthetic oligonucleotide
cuccacgcaggcguuaagg

SEQ ID NO: 2359313 - RNA, 19 nt, Artificial Sequence
  Description of Artificial Sequence: Synthetic oligonucleotide
uauggucacgccucaucuc

SEQ ID NO: 2359314 - RNA, 19 nt, Artificial Sequence
  Description of Artificial Sequence: Synthetic oligonucleotide
cuugcuauucaguccuaga

SEQ ID NO: 2359315 - RNA, 19 nt, Artificial Sequence
  Description of Artificial Sequence: Synthetic oligonucleotide
auuccauggcuccuggcuu

SEQ ID NO: 2359316 - RNA, 19 nt, Artificial Sequence
  Description of Artificial Sequence: Synthetic oligonucleotide
ugcucucagcaagucuugg

SEQ ID NO: 2359317 - RNA, 19 nt, Artificial Sequence
  Description of Artificial Sequence: Synthetic oligonucleotide
aggcagagcgcgcgcgugc

SEQ ID NO: 2359318 - RNA, 19 nt, Artificial Sequence
  Description of Artificial Sequence: Synthetic oligonucleotide
gcuaguguagucacuuucc

SEQ ID NO: 2359319 - RNA, 19 nt, Artificial Sequence
  Description of Artificial Sequence: Synthetic oligonucleotide
gucucuaggaagcuagugu

SEQ ID NO: 2359320 - RNA, 19 nt, Artificial Sequence
  Description of Artificial Sequence: Synthetic oligonucleotide
guagugggguuaugcuggg

SEQ ID NO: 2359321 - RNA, 19 nt, Artificial Sequence
  Description of Artificial Sequence: Synthetic oligonucleotide
cagcuugugaucuuugucu

SEQ ID NO: 2359322 - RNA, 19 nt, Artificial Sequence
  Description of Artificial Sequence: Synthetic oligonucleotide
gugggguuaugcugggcag

SEQ ID NO: 2359323 - RNA, 19 nt, Artificial Sequence
  Description of Artificial Sequence: Synthetic oligonucleotide
cuaguguagucacuuucca

SEQ ID NO: 2359324 - RNA, 19 nt, Artificial Sequence
  Description of Artificial Sequence: Synthetic oligonucleotide
gaccuggggucagucaccg

SEQ ID NO: 2359325 - RNA, 19 nt, Artificial Sequence
  Description of Artificial Sequence: Synthetic oligonucleotide
gccaauauauggucacgcc

SEQ ID NO: 2359326 - RNA, 19 nt, Artificial Sequence
  Description of Artificial Sequence: Synthetic oligonucleotide
uugucucuaggaagcuagu

SEQ ID NO: 2359327 - RNA, 19 nt, Artificial Sequence
  Description of Artificial Sequence: Synthetic oligonucleotide
ucuauggacaggggcgugu

SEQ ID NO: 2359328 - RNA, 19 nt, Artificial Sequence
  Description of Artificial Sequence: Synthetic oligonucleotide
ucagcaagucuugggugug

SEQ ID NO: 2359329 - RNA, 19 nt, Artificial Sequence
  Description of Artificial Sequence: Synthetic oligonucleotide
guuagaaagggaaguccuc

SEQ ID NO: 2359330 - RNA, 19 nt, Artificial Sequence
  Description of Artificial Sequence: Synthetic oligonucleotide
guagucacuuuccagucgu

SEQ ID NO: 2359331 - RNA, 19 nt, Artificial Sequence
  Description of Artificial Sequence: Synthetic oligonucleotide
ccuuugacgccagaaaagc

SEQ ID NO: 2359332 - RNA, 19 nt, Artificial Sequence
  Description of Artificial Sequence: Synthetic oligonucleotide
agcggucccaacagacucc

SEQ ID NO: 2359333 - RNA, 19 nt, Artificial Sequence
  Description of Artificial Sequence: Synthetic oligonucleotide
agcaguuaagcaacugaga

SEQ ID NO: 2359334 - RNA, 19 nt, Artificial Sequence
  Description of Artificial Sequence: Synthetic oligonucleotide
caaggagccucagcggucc

SEQ ID NO: 2359335 - RNA, 19 nt, Artificial Sequence
  Description of Artificial Sequence: Synthetic oligonucleotide
cagucgugcccacagacca

SEQ ID NO: 2359336 - RNA, 19 nt, Artificial Sequence
  Description of Artificial Sequence: Synthetic oligonucleotide
acacgguguggggagcacc

SEQ ID NO: 2359337 - RNA, 19 nt, Artificial Sequence
  Description of Artificial Sequence: Synthetic oligonucleotide
acgggaggugggcacuacg

SEQ ID NO: 2359338 - RNA, 19 nt, Artificial Sequence
  Description of Artificial Sequence: Synthetic oligonucleotide
uucacgugcucagccacga

SEQ ID NO: 2359339 - RNA, 19 nt, Artificial Sequence
  Description of Artificial Sequence: Synthetic oligonucleotide
gagcaugugcacgucuaug

SEQ ID NO: 2359340 - RNA, 19 nt, Artificial Sequence
  Description of Artificial Sequence: Synthetic oligonucleotide
gcucucagcaagucuuggg

SEQ ID NO: 2359341 - RNA, 19 nt, Artificial Sequence
  Description of Artificial Sequence: Synthetic oligonucleotide
gaggugggcacuacgaucu

SEQ ID NO: 2359342 - RNA, 19 nt, Artificial Sequence
  Description of Artificial Sequence: Synthetic oligonucleotide
gccgagucuacgcagugcc

SEQ ID NO: 2359343 - RNA, 19 nt, Artificial Sequence
  Description of Artificial Sequence: Synthetic oligonucleotide
accaauggcgggguguucu

SEQ ID NO: 2359344 - RNA, 19 nt, Artificial Sequence
  Description of Artificial Sequence: Synthetic oligonucleotide
cagcggucccaacagacuc

SEQ ID NO: 2359345 - RNA, 19 nt, Artificial Sequence
  Description of Artificial Sequence: Synthetic oligonucleotide
gaaguccucucucgcccgc

SEQ ID NO: 2359346 - RNA, 19 nt, Artificial Sequence
  Description of Artificial Sequence: Synthetic oligonucleotide
uagucacuuuccagucgug

SEQ ID NO: 2359347 - RNA, 19 nt, Artificial Sequence
  Description of Artificial Sequence: Synthetic oligonucleotide
agagcacacggugugggga

SEQ ID NO: 2359348 - RNA, 19 nt, Artificial Sequence
  Description of Artificial Sequence: Synthetic oligonucleotide
cagaaugacucacugggcu

SEQ ID NO: 2359349 - RNA, 19 nt, Artificial Sequence
  Description of Artificial Sequence: Synthetic oligonucleotide
agccacgagcaugugcacg

SEQ ID NO: 2359350 - RNA, 19 nt, Artificial Sequence
  Description of Artificial Sequence: Synthetic oligonucleotide
agguaggcacccagguagc

SEQ ID NO: 2359351 - RNA, 19 nt, Artificial Sequence
  Description of Artificial Sequence: Synthetic oligonucleotide
cuccgaggagauagcgccg

SEQ ID NO: 2359352 - RNA, 19 nt, Artificial Sequence
  Description of Artificial Sequence: Synthetic oligonucleotide
ggcacuacgaucucuucaa

SEQ ID NO: 2359353 - RNA, 19 nt, Artificial Sequence
  Description of Artificial Sequence: Synthetic oligonucleotide
ggaaugccuccacucuugg

SEQ ID NO: 2359354 - RNA, 19 nt, Artificial Sequence
  Description of Artificial Sequence: Synthetic oligonucleotide
gggucagucaccggggagg

SEQ ID NO: 2359355 - RNA, 19 nt, Artificial Sequence
  Description of Artificial Sequence: Synthetic oligonucleotide
ggaaguccucucucgcccg

SEQ ID NO: 2359356 - RNA, 19 nt, Artificial Sequence
  Description of Artificial Sequence: Synthetic oligonucleotide
uccucucucgcccgcccgc

SEQ ID NO: 2359357 - RNA, 19 nt, Artificial Sequence
  Description of Artificial Sequence: Synthetic oligonucleotide
agcacauccacgggaggug

SEQ ID NO: 2359358 - RNA, 19 nt, Artificial Sequence
  Description of Artificial Sequence: Synthetic oligonucleotide
uuccuuacgggcggccgag

SEQ ID NO: 2359359 - RNA, 19 nt, Artificial Sequence
  Description of Artificial Sequence: Synthetic oligonucleotide
ucgccggcuucccaacgcc

SEQ ID NO: 2359360 - RNA, 19 nt, Artificial Sequence
  Description of Artificial Sequence: Synthetic oligonucleotide
uugggccagaaugacucac

SEQ ID NO: 2359361 - RNA, 19 nt, Artificial Sequence
  Description of Artificial Sequence: Synthetic oligonucleotide
gaagcuaguguagucacuu

SEQ ID NO: 2359362 - RNA, 19 nt, Artificial Sequence
  Description of Artificial Sequence: Synthetic oligonucleotide
gacucacugggcucccgac

SEQ ID NO: 2359363 - RNA, 19 nt, Artificial Sequence
  Description of Artificial Sequence: Synthetic oligonucleotide
ucuccacgcaggcguuaag

SEQ ID NO: 2359364 - RNA, 19 nt, Artificial Sequence
  Description of Artificial Sequence: Synthetic oligonucleotide
agcgccggccgccuucacg

SEQ ID NO: 2359365 - RNA, 19 nt, Artificial Sequence
  Description of Artificial Sequence: Synthetic oligonucleotide
uggucacgccucaucucca

SEQ ID NO: 2359366 - RNA, 19 nt, Artificial Sequence
  Description of Artificial Sequence: Synthetic oligonucleotide
ccuaccaggcuccugcuug

SEQ ID NO: 2359367 - RNA, 19 nt, Artificial Sequence
  Description of Artificial Sequence: Synthetic oligonucleotide
ccacaaaugccuggaaugc

SEQ ID NO: 2359368 - RNA, 19 nt, Artificial Sequence
  Description of Artificial Sequence: Synthetic oligonucleotide
cacauccacgggagguggg

SEQ ID NO: 2359369 - RNA, 19 nt, Artificial Sequence
  Description of Artificial Sequence: Synthetic oligonucleotide
uggggucagucaccgggga

SEQ ID NO: 2359370 - RNA, 19 nt, Artificial Sequence
  Description of Artificial Sequence: Synthetic oligonucleotide
agugccagaauggccaaua

SEQ ID NO: 2359371 - RNA, 19 nt, Artificial Sequence
  Description of Artificial Sequence: Synthetic oligonucleotide
gccagaauggccaauauau

SEQ ID NO: 2359372 - RNA, 19 nt, Artificial Sequence
  Description of Artificial Sequence: Synthetic oligonucleotide
gagucuacgcagugccaga

SEQ ID NO: 2359373 - RNA, 19 nt, Artificial Sequence
  Description of Artificial Sequence: Synthetic oligonucleotide
uccuggcuucaaagcuggg

SEQ ID NO: 2359374 - RNA, 19 nt, Artificial Sequence
  Description of Artificial Sequence: Synthetic oligonucleotide
uuacgggcggccgagucua

SEQ ID NO: 2359375 - RNA, 19 nt, Artificial Sequence
  Description of Artificial Sequence: Synthetic oligonucleotide
cucgccggcuucccaacgc

SEQ ID NO: 2359376 - RNA, 19 nt, Artificial Sequence
  Description of Artificial Sequence: Synthetic oligonucleotide
ggaggugggcacuacgauc

SEQ ID NO: 2359377 - RNA, 19 nt, Artificial Sequence
  Description of Artificial Sequence: Synthetic oligonucleotide
cucucagcaagucuugggu

SEQ ID NO: 2359378 - RNA, 19 nt, Artificial Sequence
  Description of Artificial Sequence: Synthetic oligonucleotide
ccgcagaccugcaaggagc

SEQ ID NO: 2359379 - RNA, 19 nt, Artificial Sequence
  Description of Artificial Sequence: Synthetic oligonucleotide
gguagcacucgcucaccgc

SEQ ID NO: 2359380 - RNA, 19 nt, Artificial Sequence
  Description of Artificial Sequence: Synthetic oligonucleotide
cuauggacaggggcgugug

SEQ ID NO: 2359381 - RNA, 19 nt, Artificial Sequence
  Description of Artificial Sequence: Synthetic oligonucleotide
cugagcaguuaagcaacug

SEQ ID NO: 2359382 - RNA, 19 nt, Artificial Sequence
  Description of Artificial Sequence: Synthetic oligonucleotide
ugggguuaugcugggcagu

SEQ ID NO: 2359383 - RNA, 19 nt, Artificial Sequence
  Description of Artificial Sequence: Synthetic oligonucleotide
cagcuccgaggagauagcg

SEQ ID NO: 2359384 - RNA, 19 nt, Artificial Sequence
  Description of Artificial Sequence: Synthetic oligonucleotide
guagaggccuugcagcacu

SEQ ID NO: 2359385 - RNA, 19 nt, Artificial Sequence
  Description of Artificial Sequence: Synthetic oligonucleotide
ccuggcuucaaagcugggg

SEQ ID NO: 2359386 - RNA, 19 nt, Artificial Sequence
  Description of Artificial Sequence: Synthetic oligonucleotide
guggggagcaccugaccuc

SEQ ID NO: 2359387 - RNA, 19 nt, Artificial Sequence
  Description of Artificial Sequence: Synthetic oligonucleotide
cagacccuccgccuaccag

SEQ ID NO: 2359388 - RNA, 19 nt, Artificial Sequence
  Description of Artificial Sequence: Synthetic oligonucleotide
gggccagaaugacucacug

SEQ ID NO: 2359389 - RNA, 19 nt, Artificial Sequence
  Description of Artificial Sequence: Synthetic oligonucleotide
cucgcucaccgccuuugac

SEQ ID NO: 2359390 - RNA, 19 nt, Artificial Sequence
  Description of Artificial Sequence: Synthetic oligonucleotide
gccucagcggucccaacag

SEQ ID NO: 2359391 - RNA, 19 nt, Artificial Sequence
  Description of Artificial Sequence: Synthetic oligonucleotide
guguggggagcaccugacc

SEQ ID NO: 2359392 - RNA, 19 nt, Artificial Sequence
  Description of Artificial Sequence: Synthetic oligonucleotide
guuccuuacgggcggccga

SEQ ID NO: 2359393 - RNA, 19 nt, Artificial Sequence
  Description of Artificial Sequence: Synthetic oligonucleotide
gacaggggcgugugguaga

SEQ ID NO: 2359394 - RNA, 19 nt, Artificial Sequence
  Description of Artificial Sequence: Synthetic oligonucleotide
acaggggcgugugguagag

SEQ ID NO: 2359395 - RNA, 19 nt, Artificial Sequence
  Description of Artificial Sequence: Synthetic oligonucleotide
gacccuccgccuaccaggc

SEQ ID NO: 2359396 - RNA, 19 nt, Artificial Sequence
  Description of Artificial Sequence: Synthetic oligonucleotide
gguuccuuacgggcggccg

SEQ ID NO: 2359397 - RNA, 19 nt, Artificial Sequence
  Description of Artificial Sequence: Synthetic oligonucleotide
cacugggcucccgaccugg

SEQ ID NO: 2359398 - RNA, 19 nt, Artificial Sequence
  Description of Artificial Sequence: Synthetic oligonucleotide
ccagguagcacucgcucac

SEQ ID NO: 2359399 - RNA, 19 nt, Artificial Sequence
  Description of Artificial Sequence: Synthetic oligonucleotide
ucgugcccacagaccaaug

SEQ ID NO: 2359400 - RNA, 19 nt, Artificial Sequence
  Description of Artificial Sequence: Synthetic oligonucleotide
cccacagaccaauggcggg

SEQ ID NO: 2359401 - RNA, 19 nt, Artificial Sequence
  Description of Artificial Sequence: Synthetic oligonucleotide
ggagauagcgccggccgcc

SEQ ID NO: 2359402 - RNA, 19 nt, Artificial Sequence
  Description of Artificial Sequence: Synthetic oligonucleotide
ugggcacuacgaucucuuc

SEQ ID NO: 2359403 - RNA, 19 nt, Artificial Sequence
  Description of Artificial Sequence: Synthetic oligonucleotide
uggacaggggcguguggua

SEQ ID NO: 2359404 - RNA, 19 nt, Artificial Sequence
  Description of Artificial Sequence: Synthetic oligonucleotide
ggucagucaccggggaggg

SEQ ID NO: 2359405 - RNA, 19 nt, Artificial Sequence
  Description of Artificial Sequence: Synthetic oligonucleotide
gggcacuacgaucucuuca

SEQ ID NO: 2359406 - RNA, 19 nt, Artificial Sequence
  Description of Artificial Sequence: Synthetic oligonucleotide
agucuacgcagugccagaa

SEQ ID NO: 2359407 - RNA, 19 nt, Artificial Sequence
  Description of Artificial Sequence: Synthetic oligonucleotide
cuuccagguccucgccggc

SEQ ID NO: 2359408 - RNA, 19 nt, Artificial Sequence
  Description of Artificial Sequence: Synthetic oligonucleotide
aguccuagaugcaggugau

SEQ ID NO: 2359409 - RNA, 19 nt, Artificial Sequence
  Description of Artificial Sequence: Synthetic oligonucleotide
gggcgcugcucucagcaag

SEQ ID NO: 2359410 - RNA, 19 nt, Artificial Sequence
  Description of Artificial Sequence: Synthetic oligonucleotide
gcuugcuauucaguccuag

SEQ ID NO: 2359411 - RNA, 19 nt, Artificial Sequence
  Description of Artificial Sequence: Synthetic oligonucleotide
guuaugcugggcaguuaga

SEQ ID NO: 2359412 - RNA, 19 nt, Artificial Sequence
  Description of Artificial Sequence: Synthetic oligonucleotide
ugacgccagaaaagccuuu

SEQ ID NO: 2359413 - RNA, 19 nt, Artificial Sequence
  Description of Artificial Sequence: Synthetic oligonucleotide
gugugguagaggccuugca

SEQ ID NO: 2359414 - RNA, 19 nt, Artificial Sequence
  Description of Artificial Sequence: Synthetic oligonucleotide
cguuaagguaggcacccag

SEQ ID NO: 2359415 - RNA, 19 nt, Artificial Sequence
  Description of Artificial Sequence: Synthetic oligonucleotide
gccgccuucacgugcucag

SEQ ID NO: 2359416 - RNA, 19 nt, Artificial Sequence
  Description of Artificial Sequence: Synthetic oligonucleotide
ccgccuaccaggcuccugc

SEQ ID NO: 2359417 - RNA, 19 nt, Artificial Sequence
  Description of Artificial Sequence: Synthetic oligonucleotide
accgccuuugacgccagaa

SEQ ID NO: 2359418 - RNA, 19 nt, Artificial Sequence
  Description of Artificial Sequence: Synthetic oligonucleotide
gugcacgucuauggacagg

SEQ ID NO: 2359419 - RNA, 19 nt, Artificial Sequence
  Description of Artificial Sequence: Synthetic oligonucleotide
acucgcucaccgccuuuga

SEQ ID NO: 2359420 - RNA, 19 nt, Artificial Sequence
  Description of Artificial Sequence: Synthetic oligonucleotide
augacucacugggcucccg

SEQ ID NO: 2359421 - RNA, 19 nt, Artificial Sequence
  Description of Artificial Sequence: Synthetic oligonucleotide
agaccaauggcgggguguu

SEQ ID NO: 2359422 - RNA, 19 nt, Artificial Sequence
  Description of Artificial Sequence: Synthetic oligonucleotide
ccgaccuggggucagucac

SEQ ID NO: 2359423 - RNA, 19 nt, Artificial Sequence
  Description of Artificial Sequence: Synthetic oligonucleotide
cucucgcccgcccgcagac

SEQ ID NO: 2359424 - RNA, 19 nt, Artificial Sequence
  Description of Artificial Sequence: Synthetic oligonucleotide
gccuggaaugccuccacuc

SEQ ID NO: 2359425 - RNA, 19 nt, Artificial Sequence
  Description of Artificial Sequence: Synthetic oligonucleotide
cgcucaccgccuuugacgc

SEQ ID NO: 2359426 - RNA, 19 nt, Artificial Sequence
  Description of Artificial Sequence: Synthetic oligonucleotide
gcaugugcacgucuaugga

SEQ ID NO: 2359427 - RNA, 19 nt, Artificial Sequence
  Description of Artificial Sequence: Synthetic oligonucleotide
gcacauccacgggaggugg

SEQ ID NO: 2359428 - RNA, 19 nt, Artificial Sequence
  Description of Artificial Sequence: Synthetic oligonucleotide
ggacaggggcgugugguag

SEQ ID NO: 2359429 - RNA, 19 nt, Artificial Sequence
  Description of Artificial Sequence: Synthetic oligonucleotide
auauauggucacgccucau

SEQ ID NO: 2359430 - RNA, 19 nt, Artificial Sequence
  Description of Artificial Sequence: Synthetic oligonucleotide
uccacgggaggugggcacu

SEQ ID NO: 2359431 - RNA, 19 nt, Artificial Sequence
  Description of Artificial Sequence: Synthetic oligonucleotide
ugguuccuuacgggcggcc

SEQ ID NO: 2359432 - RNA, 19 nt, Artificial Sequence
  Description of Artificial Sequence: Synthetic oligonucleotide
cacucgcucaccgccuuug

SEQ ID NO: 2359433 - RNA, 19 nt, Artificial Sequence
  Description of Artificial Sequence: Synthetic oligonucleotide
cagguagcacucgcucacc

SEQ ID NO: 2359434 - RNA, 19 nt, Artificial Sequence
  Description of Artificial Sequence: Synthetic oligonucleotide
ccaauauauggucacgccu

SEQ ID NO: 2359435 - RNA, 19 nt, Artificial Sequence
  Description of Artificial Sequence: Synthetic oligonucleotide
agagcgcgcgcgugcagau

SEQ ID NO: 2359436 - RNA, 19 nt, Artificial Sequence
  Description of Artificial Sequence: Synthetic oligonucleotide
ggcggccgagucuacgcag

SEQ ID NO: 2359437 - RNA, 19 nt, Artificial Sequence
  Description of Artificial Sequence: Synthetic oligonucleotide
ugcuugcuauucaguccua

SEQ ID NO: 2359438 - RNA, 19 nt, Artificial Sequence
  Description of Artificial Sequence: Synthetic oligonucleotide
gcuguagugggguuaugcu

SEQ ID NO: 2359439 - RNA, 19 nt, Artificial Sequence
  Description of Artificial Sequence: Synthetic oligonucleotide
gcaagucuuggguguggug

SEQ ID NO: 2359440 - RNA, 19 nt, Artificial Sequence
  Description of Artificial Sequence: Synthetic oligonucleotide
gcacccagguagcacucgc

SEQ ID NO: 2359441 - RNA, 19 nt, Artificial Sequence
  Description of Artificial Sequence: Synthetic oligonucleotide
acgagcaugugcacgucua

SEQ ID NO: 2359442 - RNA, 19 nt, Artificial Sequence
  Description of Artificial Sequence: Synthetic oligonucleotide
uagaggccuugcagcacuu

SEQ ID NO: 2359443 - RNA, 19 nt, Artificial Sequence
  Description of Artificial Sequence: Synthetic oligonucleotide
cuuugucucuaggaagcua

SEQ ID NO: 2359444 - RNA, 19 nt, Artificial Sequence
  Description of Artificial Sequence: Synthetic oligonucleotide
aucuccacgcaggcguuaa

SEQ ID NO: 2359445 - RNA, 19 nt, Artificial Sequence
  Description of Artificial Sequence: Synthetic oligonucleotide
ggucacgccucaucuccac

SEQ ID NO: 2359446 - RNA, 19 nt, Artificial Sequence
  Description of Artificial Sequence: Synthetic oligonucleotide
cgagucuacgcagugccag

SEQ ID NO: 2359447 - RNA, 19 nt, Artificial Sequence
  Description of Artificial Sequence: Synthetic oligonucleotide
agcacucgcucaccgccuu

SEQ ID NO: 2359448 - RNA, 19 nt, Artificial Sequence
  Description of Artificial Sequence: Synthetic oligonucleotide
cgugcagaucugcagggug

SEQ ID NO: 2359449 - RNA, 19 nt, Artificial Sequence
  Description of Artificial Sequence: Synthetic oligonucleotide
gucuauggacaggggcgug

SEQ ID NO: 2359450 - RNA, 19 nt, Artificial Sequence
  Description of Artificial Sequence: Synthetic oligonucleotide
cugaccucgggcgcugcuc

SEQ ID NO: 2359451 - RNA, 19 nt, Artificial Sequence
  Description of Artificial Sequence: Synthetic oligonucleotide
auagcgccggccgccuuca

SEQ ID NO: 2359452 - RNA, 19 nt, Artificial Sequence
  Description of Artificial Sequence: Synthetic oligonucleotide
acgggcggccgagucuacg

SEQ ID NO: 2359453 - RNA, 19 nt, Artificial Sequence
  Description of Artificial Sequence: Synthetic oligonucleotide
cacgccucaucuccacgca

SEQ ID NO: 2359454 - RNA, 19 nt, Artificial Sequence
  Description of Artificial Sequence: Synthetic oligonucleotide
cgcgugcagaucugcaggg

SEQ ID NO: 2359455 - RNA, 19 nt, Artificial Sequence
  Description of Artificial Sequence: Synthetic oligonucleotide
guccucgccggcuucccaa

SEQ ID NO: 2359456 - RNA, 19 nt, Artificial Sequence
  Description of Artificial Sequence: Synthetic oligonucleotide
gguguggggagcaccugac

SEQ ID NO: 2359457 - RNA, 19 nt, Artificial Sequence
  Description of Artificial Sequence: Synthetic oligonucleotide
cuuacgggcggccgagucu

SEQ ID NO: 2359458 - RNA, 19 nt, Artificial Sequence
  Description of Artificial Sequence: Synthetic oligonucleotide
ucccaacgccucugcucca

SEQ ID NO: 2359459 - RNA, 19 nt, Artificial Sequence
  Description of Artificial Sequence: Synthetic oligonucleotide
ggugacagacccuccgccu

SEQ ID NO: 2359460 - RNA, 19 nt, Artificial Sequence
  Description of Artificial Sequence: Synthetic oligonucleotide
cugguuccuuacgggcggc

SEQ ID NO: 2359461 - RNA, 19 nt, Artificial Sequence
  Description of Artificial Sequence: Synthetic oligonucleotide
accugaccucgggcgcugc

SEQ ID NO: 2359462 - RNA, 19 nt, Artificial Sequence
  Description of Artificial Sequence: Synthetic oligonucleotide
uccucgcuguagugggguu

SEQ ID NO: 2359463 - RNA, 19 nt, Artificial Sequence
  Description of Artificial Sequence: Synthetic oligonucleotide
gcugcaagaugcugucaaa

SEQ ID NO: 2359464 - RNA, 19 nt, Artificial Sequence
  Description of Artificial Sequence: Synthetic oligonucleotide
uccgccuaccaggcuccug

SEQ ID NO: 2359465 - RNA, 19 nt, Artificial Sequence
  Description of Artificial Sequence: Synthetic oligonucleotide
cuuuccagucgugcccaca

SEQ ID NO: 2359466 - RNA, 19 nt, Artificial Sequence
  Description of Artificial Sequence: Synthetic oligonucleotide
accucgggcgcugcucuca

SEQ ID NO: 2359467 - RNA, 19 nt, Artificial Sequence
  Description of Artificial Sequence: Synthetic oligonucleotide
ucgcccgcccgcagaccug

SEQ ID NO: 2359468 - RNA, 19 nt, Artificial Sequence
  Description of Artificial Sequence: Synthetic oligonucleotide
cucgggcgcugcucucagc

SEQ ID NO: 2359469 - RNA, 19 nt, Artificial Sequence
  Description of Artificial Sequence: Synthetic oligonucleotide
cucucucgcccgcccgcag

SEQ ID NO: 2359470 - RNA, 19 nt, Artificial Sequence
  Description of Artificial Sequence: Synthetic oligonucleotide
gccacgagcaugugcacgu

SEQ ID NO: 2359471 - RNA, 19 nt, Artificial Sequence
  Description of Artificial Sequence: Synthetic oligonucleotide
gggguugggccagaaugac

SEQ ID NO: 2359472 - RNA, 19 nt, Artificial Sequence
  Description of Artificial Sequence: Synthetic oligonucleotide
cagucaccggggaggguga

SEQ ID NO: 2359473 - RNA, 19 nt, Artificial Sequence
  Description of Artificial Sequence: Synthetic oligonucleotide
gacgccagaaaagccuuuu

SEQ ID NO: 2359474 - RNA, 19 nt, Artificial Sequence
  Description of Artificial Sequence: Synthetic oligonucleotide
gcggucccaacagacuccc

SEQ ID NO: 2359475 - RNA, 19 nt, Artificial Sequence
  Description of Artificial Sequence: Synthetic oligonucleotide
cauccacgggaggugggca

SEQ ID NO: 2359476 - RNA, 19 nt, Artificial Sequence
  Description of Artificial Sequence: Synthetic oligonucleotide
ccucaucuccacgcaggcg

SEQ ID NO: 2359477 - RNA, 19 nt, Artificial Sequence
  Description of Artificial Sequence: Synthetic oligonucleotide
caauggcgggguguucuca

SEQ ID NO: 2359478 - RNA, 19 nt, Artificial Sequence
  Description of Artificial Sequence: Synthetic oligonucleotide
gggcacaaagaggcagagc

SEQ ID NO: 2359479 - RNA, 19 nt, Artificial Sequence
  Description of Artificial Sequence: Synthetic oligonucleotide
acgguguggggagcaccug

SEQ ID NO: 2359480 - RNA, 19 nt, Artificial Sequence
  Description of Artificial Sequence: Synthetic oligonucleotide
ccgcccgcagaccugcaag

SEQ ID NO: 2359481 - RNA, 19 nt, Artificial Sequence
  Description of Artificial Sequence: Synthetic oligonucleotide
ggccgagucuacgcagugc

SEQ ID NO: 2359482 - RNA, 19 nt, Artificial Sequence
  Description of Artificial Sequence: Synthetic oligonucleotide
ucccgaccuggggucaguc

SEQ ID NO: 2359483 - RNA, 19 nt, Artificial Sequence
  Description of Artificial Sequence: Synthetic oligonucleotide
cgcgcgugcagaucugcag

SEQ ID NO: 2359484 - RNA, 19 nt, Artificial Sequence
  Description of Artificial Sequence: Synthetic oligonucleotide
caggggcgugugguagagg

SEQ ID NO: 2359485 - RNA, 19 nt, Artificial Sequence
  Description of Artificial Sequence: Synthetic oligonucleotide
agucgugcccacagaccaa

SEQ ID NO: 2359486 - RNA, 19 nt, Artificial Sequence
  Description of Artificial Sequence: Synthetic oligonucleotide
uacgggcggccgagucuac

SEQ ID NO: 2359487 - RNA, 19 nt, Artificial Sequence
  Description of Artificial Sequence: Synthetic oligonucleotide
cagaccaauggcggggugu

SEQ ID NO: 2359488 - RNA, 19 nt, Artificial Sequence
  Description of Artificial Sequence: Synthetic oligonucleotide
gaccaauggcgggguguuc

SEQ ID NO: 2359489 - RNA, 19 nt, Artificial Sequence
  Description of Artificial Sequence: Synthetic oligonucleotide
uccuuacgggcggccgagu

SEQ ID NO: 2359490 - RNA, 19 nt, Artificial Sequence
  Description of Artificial Sequence: Synthetic oligonucleotide
cagagcgcgcgcgugcaga

SEQ ID NO: 2359491 - RNA, 19 nt, Artificial Sequence
  Description of Artificial Sequence: Synthetic oligonucleotide
ccuuacgggcggccgaguc

SEQ ID NO: 2359492 - RNA, 19 nt, Artificial Sequence
  Description of Artificial Sequence: Synthetic oligonucleotide
ccggggagggugacagacc

SEQ ID NO: 2359493 - RNA, 19 nt, Artificial Sequence
  Description of Artificial Sequence: Synthetic oligonucleotide
gcacgucuauggacagggg

SEQ ID NO: 2359494 - RNA, 19 nt, Artificial Sequence
  Description of Artificial Sequence: Synthetic oligonucleotide
gaccucgggcgcugcucuc

SEQ ID NO: 2359495 - RNA, 19 nt, Artificial Sequence
  Description of Artificial Sequence: Synthetic oligonucleotide
guuaagcaacugagaccaa

SEQ ID NO: 2359496 - RNA, 19 nt, Artificial Sequence
  Description of Artificial Sequence: Synthetic oligonucleotide
ucgcuguagugggguuaug

SEQ ID NO: 2359497 - RNA, 19 nt, Artificial Sequence
  Description of Artificial Sequence: Synthetic oligonucleotide
gccggccgccuucacgugc

SEQ ID NO: 2359498 - RNA, 19 nt, Artificial Sequence
  Description of Artificial Sequence: Synthetic oligonucleotide
ccaauggcgggguguucuc

SEQ ID NO: 2359499 - RNA, 19 nt, Artificial Sequence
  Description of Artificial Sequence: Synthetic oligonucleotide
cgaccuggggucagucacc

SEQ ID NO: 2359500 - RNA, 19 nt, Artificial Sequence
  Description of Artificial Sequence: Synthetic oligonucleotide
gugccagaauggccaauau

SEQ ID NO: 2359501 - RNA, 19 nt, Artificial Sequence
  Description of Artificial Sequence: Synthetic oligonucleotide
gggcgugugguagaggccu

SEQ ID NO: 2359502 - RNA, 19 nt, Artificial Sequence
  Description of Artificial Sequence: Synthetic oligonucleotide
cgaggagauagcgccggcc

SEQ ID NO: 2359503 - RNA, 19 nt, Artificial Sequence
  Description of Artificial Sequence: Synthetic oligonucleotide
ccuggaaugccuccacucu

SEQ ID NO: 2359504 - RNA, 19 nt, Artificial Sequence
  Description of Artificial Sequence: Synthetic oligonucleotide
agauagcgccggccgccuu

SEQ ID NO: 2359505 - RNA, 19 nt, Artificial Sequence
  Description of Artificial Sequence: Synthetic oligonucleotide
gucuacgcagugccagaau

SEQ ID NO: 2359506 - RNA, 19 nt, Artificial Sequence
  Description of Artificial Sequence: Synthetic oligonucleotide
gggcucccgaccugggguc

SEQ ID NO: 2359507 - RNA, 19 nt, Artificial Sequence
  Description of Artificial Sequence: Synthetic oligonucleotide
cacgggaggugggcacuac

SEQ ID NO: 2359508 - RNA, 19 nt, Artificial Sequence
  Description of Artificial Sequence: Synthetic oligonucleotide
gagauagcgccggccgccu

SEQ ID NO: 2359509 - RNA, 19 nt, Artificial Sequence
  Description of Artificial Sequence: Synthetic oligonucleotide
gugggcacuacgaucucuu

SEQ ID NO: 2359510 - RNA, 19 nt, Artificial Sequence
  Description of Artificial Sequence: Synthetic oligonucleotide
caccugaccucgggcgcug

SEQ ID NO: 2359511 - RNA, 19 nt, Artificial Sequence
  Description of Artificial Sequence: Synthetic oligonucleotide
ccaacgccucugcuccagc

SEQ ID NO: 2359512 - RNA, 19 nt, Artificial Sequence
  Description of Artificial Sequence: Synthetic oligonucleotide
cacccagguagcacucgcu

SEQ ID NO: 2359513 - RNA, 19 nt, Artificial Sequence
  Description of Artificial Sequence: Synthetic oligonucleotide
ccucgccggcuucccaacg

SEQ ID NO: 2359514 - RNA, 19 nt, Artificial Sequence
  Description of Artificial Sequence: Synthetic oligonucleotide
gcacuacgaucucuucaaa

SEQ ID NO: 2359515 - RNA, 19 nt, Artificial Sequence
  Description of Artificial Sequence: Synthetic oligonucleotide
gucaccggggagggugaca

SEQ ID NO: 2359516 - RNA, 19 nt, Artificial Sequence
  Description of Artificial Sequence: Synthetic oligonucleotide
gcucaccgccuuugacgcc

SEQ ID NO: 2359517 - RNA, 19 nt, Artificial Sequence
  Description of Artificial Sequence: Synthetic oligonucleotide
cgggcggccgagucuacgc

SEQ ID NO: 2359518 - RNA, 19 nt, Artificial Sequence
  Description of Artificial Sequence: Synthetic oligonucleotide
cgugugguagaggccuugc

SEQ ID NO: 2359519 - RNA, 19 nt, Artificial Sequence
  Description of Artificial Sequence: Synthetic oligonucleotide
gcagagcgcgcgcgugcag

SEQ ID NO: 2359520 - RNA, 19 nt, Artificial Sequence
  Description of Artificial Sequence: Synthetic oligonucleotide
gcagaucugcaggguggug

SEQ ID NO: 2359521 - RNA, 19 nt, Artificial Sequence
  Description of Artificial Sequence: Synthetic oligonucleotide
ggaagcuaguguagucacu

SEQ ID NO: 2359522 - RNA, 19 nt, Artificial Sequence
  Description of Artificial Sequence: Synthetic oligonucleotide
cuccucgcuguaguggggu

SEQ ID NO: 2359523 - RNA, 19 nt, Artificial Sequence
  Description of Artificial Sequence: Synthetic oligonucleotide
cacagaccaauggcggggu

SEQ ID NO: 2359524 - RNA, 19 nt, Artificial Sequence
  Description of Artificial Sequence: Synthetic oligonucleotide
ccgaggagauagcgccggc

SEQ ID NO: 2359525 - RNA, 19 nt, Artificial Sequence
  Description of Artificial Sequence: Synthetic oligonucleotide
gagcgcgcgcgugcagauc

SEQ ID NO: 2359526 - RNA, 19 nt, Artificial Sequence
  Description of Artificial Sequence: Synthetic oligonucleotide
ccucgggcgcugcucucag

SEQ ID NO: 2359527 - RNA, 19 nt, Artificial Sequence
  Description of Artificial Sequence: Synthetic oligonucleotide
ggugggcacuacgaucucu

SEQ ID NO: 2359528 - RNA, 19 nt, Artificial Sequence
  Description of Artificial Sequence: Synthetic oligonucleotide
ggggagcaccugaccucgg

SEQ ID NO: 2359529 - RNA, 19 nt, Artificial Sequence
  Description of Artificial Sequence: Synthetic oligonucleotide
gcacacgguguggggagca

SEQ ID NO: 2359530 - RNA, 19 nt, Artificial Sequence
  Description of Artificial Sequence: Synthetic oligonucleotide
ccgagucuacgcagugcca

SEQ ID NO: 2359531 - RNA, 19 nt, Artificial Sequence
  Description of Artificial Sequence: Synthetic oligonucleotide
gcucccgaccuggggucag

SEQ ID NO: 2359532 - RNA, 19 nt, Artificial Sequence
  Description of Artificial Sequence: Synthetic oligonucleotide
caccggggagggugacaga

SEQ ID NO: 2359533 - RNA, 19 nt, Artificial Sequence
  Description of Artificial Sequence: Synthetic oligonucleotide
ggcgcugcucucagcaagu

SEQ ID NO: 2359534 - RNA, 19 nt, Artificial Sequence
  Description of Artificial Sequence: Synthetic oligonucleotide
ccucagcggucccaacaga

SEQ ID NO: 2359535 - RNA, 19 nt, Artificial Sequence
  Description of Artificial Sequence: Synthetic oligonucleotide
ccccacaaaugccuggaau

SEQ ID NO: 2359536 - RNA, 19 nt, Artificial Sequence
  Description of Artificial Sequence: Synthetic oligonucleotide
gcguuaagguaggcaccca

SEQ ID NO: 2359537 - RNA, 19 nt, Artificial Sequence
  Description of Artificial Sequence: Synthetic oligonucleotide
cccgaccuggggucaguca

SEQ ID NO: 2359538 - RNA, 19 nt, Artificial Sequence
  Description of Artificial Sequence: Synthetic oligonucleotide
gggguuaugcugggcaguu

SEQ ID NO: 2359539 - RNA, 19 nt, Artificial Sequence
  Description of Artificial Sequence: Synthetic oligonucleotide
ccuccacucuuggcucccc

SEQ ID NO: 2359540 - RNA, 19 nt, Artificial Sequence
  Description of Artificial Sequence: Synthetic oligonucleotide
caggcuccugcuugcuauu

SEQ ID NO: 2359541 - RNA, 19 nt, Artificial Sequence
  Description of Artificial Sequence: Synthetic oligonucleotide
ccacgagcaugugcacguc

SEQ ID NO: 2359542 - RNA, 19 nt, Artificial Sequence
  Description of Artificial Sequence: Synthetic oligonucleotide
gcgcugcucucagcaaguc

SEQ ID NO: 2359543 - RNA, 19 nt, Artificial Sequence
  Description of Artificial Sequence: Synthetic oligonucleotide
ggcucccgaccugggguca

SEQ ID NO: 2359544 - RNA, 19 nt, Artificial Sequence
  Description of Artificial Sequence: Synthetic oligonucleotide
cggccgagucuacgcagug

SEQ ID NO: 2359545 - RNA, 19 nt, Artificial Sequence
  Description of Artificial Sequence: Synthetic oligonucleotide
gcgcgcgugcagaucugca

SEQ ID NO: 2359546 - RNA, 19 nt, Artificial Sequence
  Description of Artificial Sequence: Synthetic oligonucleotide
cagcagauucugguuccuu

SEQ ID NO: 2359547 - RNA, 19 nt, Artificial Sequence
  Description of Artificial Sequence: Synthetic oligonucleotide
cgcgcgcgugcagaucugc

SEQ ID NO: 2359548 - RNA, 19 nt, Artificial Sequence
  Description of Artificial Sequence: Synthetic oligonucleotide
caccgccuuugacgccaga

SEQ ID NO: 2359549 - RNA, 19 nt, Artificial Sequence
  Description of Artificial Sequence: Synthetic oligonucleotide
gucagucaccggggagggu

SEQ ID NO: 2359550 - RNA, 19 nt, Artificial Sequence
  Description of Artificial Sequence: Synthetic oligonucleotide
ccucgcuguagugggguua

SEQ ID NO: 2359551 - RNA, 19 nt, Artificial Sequence
  Description of Artificial Sequence: Synthetic oligonucleotide
gcaccugaccucgggcgcu

SEQ ID NO: 2359552 - RNA, 19 nt, Artificial Sequence
  Description of Artificial Sequence: Synthetic oligonucleotide
gcggccgagucuacgcagu

SEQ ID NO: 2359553 - RNA, 19 nt, Artificial Sequence
  Description of Artificial Sequence: Synthetic oligonucleotide
cgucuauggacaggggcgu

SEQ ID NO: 2359554 - RNA, 19 nt, Artificial Sequence
  Description of Artificial Sequence: Synthetic oligonucleotide
gcgugcagaucugcagggu

SEQ ID NO: 2359555 - RNA, 19 nt, Artificial Sequence
  Description of Artificial Sequence: Synthetic oligonucleotide
cgcaggcguuaagguaggc

SEQ ID NO: 2359556 - RNA, 19 nt, Artificial Sequence
  Description of Artificial Sequence: Synthetic oligonucleotide
cagugccagaauggccaau

SEQ ID NO: 2359557 - RNA, 19 nt, Artificial Sequence
  Description of Artificial Sequence: Synthetic oligonucleotide
ccucucucgcccgcccgca

SEQ ID NO: 2359558 - RNA, 19 nt, Artificial Sequence
  Description of Artificial Sequence: Synthetic oligonucleotide
gccuaccaggcuccugcuu

SEQ ID NO: 2359559 - RNA, 19 nt, Artificial Sequence
  Description of Artificial Sequence: Synthetic oligonucleotide
cucccgaccuggggucagu

SEQ ID NO: 2359560 - RNA, 19 nt, Artificial Sequence
  Description of Artificial Sequence: Synthetic oligonucleotide
ggguguggugcagcagauu

SEQ ID NO: 2359561 - RNA, 19 nt, Artificial Sequence
  Description of Artificial Sequence: Synthetic oligonucleotide
ccugaccucgggcgcugcu

SEQ ID NO: 2359562 - RNA, 19 nt, Artificial Sequence
  Description of Artificial Sequence: Synthetic oligonucleotide
cgccggccgccuucacgug

SEQ ID NO: 2359563 - RNA, 19 nt, Artificial Sequence
  Description of Artificial Sequence: Synthetic oligonucleotide
cuccgccuaccaggcuccu

SEQ ID NO: 2359564 - RNA, 19 nt, Artificial Sequence
  Description of Artificial Sequence: Synthetic oligonucleotide
cgggcgcugcucucagcaa

SEQ ID NO: 2359565 - RNA, 19 nt, Artificial Sequence
  Description of Artificial Sequence: Synthetic oligonucleotide
ggcgugugguagaggccuu

SEQ ID NO: 2359566 - RNA, 19 nt, Artificial Sequence
  Description of Artificial Sequence: Synthetic oligonucleotide
ccacgggaggugggcacua

SEQ ID NO: 2359567 - RNA, 19 nt, Artificial Sequence
  Description of Artificial Sequence: Synthetic oligonucleotide
cgccuaccaggcuccugcu

SEQ ID NO: 2359568 - RNA, 19 nt, Artificial Sequence
  Description of Artificial Sequence: Synthetic oligonucleotide
gcccgcccgcagaccugca

SEQ ID NO: 2359569 - RNA, 19 nt, Artificial Sequence
  Description of Artificial Sequence: Synthetic oligonucleotide
aagguaaugauaucggccg

SEQ ID NO: 2359570 - RNA, 19 nt, Artificial Sequence
  Description of Artificial Sequence: Synthetic oligonucleotide
aaaaguuugaggugucgcg

SEQ ID NO: 2359571 - RNA, 19 nt, Artificial Sequence
  Description of Artificial Sequence: Synthetic oligonucleotide
ugggguaauagauaguugg

SEQ ID NO: 2359572 - RNA, 19 nt, Artificial Sequence
  Description of Artificial Sequence: Synthetic oligonucleotide
uucguuaagaaaaggaaug

SEQ ID NO: 2359573 - RNA, 19 nt, Artificial Sequence
  Description of Artificial Sequence: Synthetic oligonucleotide
ucaucaaccaucaugggcu

SEQ ID NO: 2359574 - RNA, 19 nt, Artificial Sequence
  Description of Artificial Sequence: Synthetic oligonucleotide
aauguccauuuucugacac

SEQ ID NO: 2359575 - RNA, 19 nt, Artificial Sequence
  Description of Artificial Sequence: Synthetic oligonucleotide
acugguacucguuaaauag

SEQ ID NO: 2359576 - RNA, 19 nt, Artificial Sequence
  Description of Artificial Sequence: Synthetic oligonucleotide
aaaguuugaggugucgcgc

SEQ ID NO: 2359577 - RNA, 19 nt, Artificial Sequence
  Description of Artificial Sequence: Synthetic oligonucleotide
agaugaguaagucugguug

SEQ ID NO: 2359578 - RNA, 19 nt, Artificial Sequence
  Description of Artificial Sequence: Synthetic oligonucleotide
aguaagucugguuggauuc

SEQ ID NO: 2359579 - RNA, 19 nt, Artificial Sequence
  Description of Artificial Sequence: Synthetic oligonucleotide
uucuuucuagagcaggugg

SEQ ID NO: 2359580 - RNA, 19 nt, Artificial Sequence
  Description of Artificial Sequence: Synthetic oligonucleotide
aauagcuccucguccacgg

SEQ ID NO: 2359581 - RNA, 19 nt, Artificial Sequence
  Description of Artificial Sequence: Synthetic oligonucleotide
guaauagauaguuggcugg

SEQ ID NO: 2359582 - RNA, 19 nt, Artificial Sequence
  Description of Artificial Sequence: Synthetic oligonucleotide
ucacccuugaagcugaagc

SEQ ID NO: 2359583 - RNA, 19 nt, Artificial Sequence
  Description of Artificial Sequence: Synthetic oligonucleotide
gaugaguaagucugguugg

SEQ ID NO: 2359584 - RNA, 19 nt, Artificial Sequence
  Description of Artificial Sequence: Synthetic oligonucleotide
agucuuauugaaaacugcc

SEQ ID NO: 2359585 - RNA, 19 nt, Artificial Sequence
  Description of Artificial Sequence: Synthetic oligonucleotide
aguugauccacgcugaacu

SEQ ID NO: 2359586 - RNA, 19 nt, Artificial Sequence
  Description of Artificial Sequence: Synthetic oligonucleotide
uuaaauagcuccucgucca

SEQ ID NO: 2359587 - RNA, 19 nt, Artificial Sequence
  Description of Artificial Sequence: Synthetic oligonucleotide
aaugauaucggccgguaaa

SEQ ID NO: 2359588 - RNA, 19 nt, Artificial Sequence
  Description of Artificial Sequence: Synthetic oligonucleotide
uuuucugacacugagucac

SEQ ID NO: 2359589 - RNA, 19 nt, Artificial Sequence
  Description of Artificial Sequence: Synthetic oligonucleotide
cuacaucccauccugaggg

SEQ ID NO: 2359590 - RNA, 19 nt, Artificial Sequence
  Description of Artificial Sequence: Synthetic oligonucleotide
aagucuuauugaaaacugc

SEQ ID NO: 2359591 - RNA, 19 nt, Artificial Sequence
  Description of Artificial Sequence: Synthetic oligonucleotide
ggugaguccacucaggacg

SEQ ID NO: 2359592 - RNA, 19 nt, Artificial Sequence
  Description of Artificial Sequence: Synthetic oligonucleotide
caagguaaugauaucggcc

SEQ ID NO: 2359593 - RNA, 19 nt, Artificial Sequence
  Description of Artificial Sequence: Synthetic oligonucleotide
guuaaauagcuccucgucc

SEQ ID NO: 2359594 - RNA, 19 nt, Artificial Sequence
  Description of Artificial Sequence: Synthetic oligonucleotide
uuucguuaagaaaaggaau

SEQ ID NO: 2359595 - RNA, 19 nt, Artificial Sequence
  Description of Artificial Sequence: Synthetic oligonucleotide
guacucguuaaauagcucc

SEQ ID NO: 2359596 - RNA, 19 nt, Artificial Sequence
  Description of Artificial Sequence: Synthetic oligonucleotide
ugacucagguacuucaccg

SEQ ID NO: 2359597 - RNA, 19 nt, Artificial Sequence
  Description of Artificial Sequence: Synthetic oligonucleotide
ucuacaucccauccugagg

SEQ ID NO: 2359598 - RNA, 19 nt, Artificial Sequence
  Description of Artificial Sequence: Synthetic oligonucleotide
auagauaguuggcugguag

SEQ ID NO: 2359599 - RNA, 19 nt, Artificial Sequence
  Description of Artificial Sequence: Synthetic oligonucleotide
ugaggugucgcgcacagac

SEQ ID NO: 2359600 - RNA, 19 nt, Artificial Sequence
  Description of Artificial Sequence: Synthetic oligonucleotide
caugaguugauccacgcug

SEQ ID NO: 2359601 - RNA, 19 nt, Artificial Sequence
  Description of Artificial Sequence: Synthetic oligonucleotide
agauaguuggcugguagcc

SEQ ID NO: 2359602 - RNA, 19 nt, Artificial Sequence
  Description of Artificial Sequence: Synthetic oligonucleotide
cagaugaccaagacggucg

SEQ ID NO: 2359603 - RNA, 19 nt, Artificial Sequence
  Description of Artificial Sequence: Synthetic oligonucleotide
acucagguacuucaccgcc

SEQ ID NO: 2359604 - RNA, 19 nt, Artificial Sequence
  Description of Artificial Sequence: Synthetic oligonucleotide
agaguggcuuguuagaucu

SEQ ID NO: 2359605 - RNA, 19 nt, Artificial Sequence
  Description of Artificial Sequence: Synthetic oligonucleotide
aacacacucugugucaggg

SEQ ID NO: 2359606 - RNA, 19 nt, Artificial Sequence
  Description of Artificial Sequence: Synthetic oligonucleotide
cuguagacgguaaacacac

SEQ ID NO: 2359607 - RNA, 19 nt, Artificial Sequence
  Description of Artificial Sequence: Synthetic oligonucleotide
gacacugagucacuagucc

SEQ ID NO: 2359608 - RNA, 19 nt, Artificial Sequence
  Description of Artificial Sequence: Synthetic oligonucleotide
ucugugucaggguaggaug

SEQ ID NO: 2359609 - RNA, 19 nt, Artificial Sequence
  Description of Artificial Sequence: Synthetic oligonucleotide
gguacuucuuucuagagca

SEQ ID NO: 2359610 - RNA, 19 nt, Artificial Sequence
  Description of Artificial Sequence: Synthetic oligonucleotide
gcuuguuagaucuuuuggg

SEQ ID NO: 2359611 - RNA, 19 nt, Artificial Sequence
  Description of Artificial Sequence: Synthetic oligonucleotide
cucaucaaccaucaugggc

SEQ ID NO: 2359612 - RNA, 19 nt, Artificial Sequence
  Description of Artificial Sequence: Synthetic oligonucleotide
cauuucguuaagaaaagga

SEQ ID NO: 2359613 - RNA, 19 nt, Artificial Sequence
  Description of Artificial Sequence: Synthetic oligonucleotide
ugguacuucuuucuagagc

SEQ ID NO: 2359614 - RNA, 19 nt, Artificial Sequence
  Description of Artificial Sequence: Synthetic oligonucleotide
acgguaaacacacucugug

SEQ ID NO: 2359615 - RNA, 19 nt, Artificial Sequence
  Description of Artificial Sequence: Synthetic oligonucleotide
ucgcgcacagaccaggccg

SEQ ID NO: 2359616 - RNA, 19 nt, Artificial Sequence
  Description of Artificial Sequence: Synthetic oligonucleotide
aggugguacaaaacgaccc

SEQ ID NO: 2359617 - RNA, 19 nt, Artificial Sequence
  Description of Artificial Sequence: Synthetic oligonucleotide
ugagucacuaguccaguga

SEQ ID NO: 2359618 - RNA, 19 nt, Artificial Sequence
  Description of Artificial Sequence: Synthetic oligonucleotide
agaucuuuugggguaauag

SEQ ID NO: 2359619 - RNA, 19 nt, Artificial Sequence
  Description of Artificial Sequence: Synthetic oligonucleotide
uguggaauggcucccggac

SEQ ID NO: 2359620 - RNA, 19 nt, Artificial Sequence
  Description of Artificial Sequence: Synthetic oligonucleotide
gguaauagauaguuggcug

SEQ ID NO: 2359621 - RNA, 19 nt, Artificial Sequence
  Description of Artificial Sequence: Synthetic oligonucleotide
uguccauuuucugacacug

SEQ ID NO: 2359622 - RNA, 19 nt, Artificial Sequence
  Description of Artificial Sequence: Synthetic oligonucleotide
aaggaauguccauuuucug

SEQ ID NO: 2359623 - RNA, 19 nt, Artificial Sequence
  Description of Artificial Sequence: Synthetic oligonucleotide
gaucuuuugggguaauaga

SEQ ID NO: 2359624 - RNA, 19 nt, Artificial Sequence
  Description of Artificial Sequence: Synthetic oligonucleotide
uacuguagacgguaaacac

SEQ ID NO: 2359625 - RNA, 19 nt, Artificial Sequence
  Description of Artificial Sequence: Synthetic oligonucleotide
uuugggguaauagauaguu

SEQ ID NO: 2359626 - RNA, 19 nt, Artificial Sequence
  Description of Artificial Sequence: Synthetic oligonucleotide
cucguuaaauagcuccucg

SEQ ID NO: 2359627 - RNA, 19 nt, Artificial Sequence
  Description of Artificial Sequence: Synthetic oligonucleotide
ucuuucuagagcagguggu

SEQ ID NO: 2359628 - RNA, 19 nt, Artificial Sequence
  Description of Artificial Sequence: Synthetic oligonucleotide
uacagcucaucaaccauca

SEQ ID NO: 2359629 - RNA, 19 nt, Artificial Sequence
  Description of Artificial Sequence: Synthetic oligonucleotide
uuacuguagacgguaaaca

SEQ ID NO: 2359630 - RNA, 19 nt, Artificial Sequence
  Description of Artificial Sequence: Synthetic oligonucleotide
uuugaggugucgcgcacag

SEQ ID NO: 2359631 - RNA, 19 nt, Artificial Sequence
  Description of Artificial Sequence: Synthetic oligonucleotide
ugaagaguggcuuguuaga

SEQ ID NO: 2359632 - RNA, 19 nt, Artificial Sequence
  Description of Artificial Sequence: Synthetic oligonucleotide
ucgaugcuagcaaugggca

SEQ ID NO: 2359633 - RNA, 19 nt, Artificial Sequence
  Description of Artificial Sequence: Synthetic oligonucleotide
aagaaaaggaauguccauu

SEQ ID NO: 2359634 - RNA, 19 nt, Artificial Sequence
  Description of Artificial Sequence: Synthetic oligonucleotide
ugucgaugcuagcaauggg

SEQ ID NO: 2359635 - RNA, 19 nt, Artificial Sequence
  Description of Artificial Sequence: Synthetic oligonucleotide
auccacgcugaacugguac

SEQ ID NO: 2359636 - RNA, 19 nt, Artificial Sequence
  Description of Artificial Sequence: Synthetic oligonucleotide
cugcagacuucuuuggugc

SEQ ID NO: 2359637 - RNA, 19 nt, Artificial Sequence
  Description of Artificial Sequence: Synthetic oligonucleotide
uagauaguuggcugguagc

SEQ ID NO: 2359638 - RNA, 19 nt, Artificial Sequence
  Description of Artificial Sequence: Synthetic oligonucleotide
ucuuggacauggacguggg

SEQ ID NO: 2359639 - RNA, 19 nt, Artificial Sequence
  Description of Artificial Sequence: Synthetic oligonucleotide
auuucguuaagaaaaggaa

SEQ ID NO: 2359640 - RNA, 19 nt, Artificial Sequence
  Description of Artificial Sequence: Synthetic oligonucleotide
cucaggacgcucaggaugc

SEQ ID NO: 2359641 - RNA, 19 nt, Artificial Sequence
  Description of Artificial Sequence: Synthetic oligonucleotide
cuuacuguagacgguaaac

SEQ ID NO: 2359642 - RNA, 19 nt, Artificial Sequence
  Description of Artificial Sequence: Synthetic oligonucleotide
agacgguaaacacacucug

SEQ ID NO: 2359643 - RNA, 19 nt, Artificial Sequence
  Description of Artificial Sequence: Synthetic oligonucleotide
guagacgguaaacacacuc

SEQ ID NO: 2359644 - RNA, 19 nt, Artificial Sequence
  Description of Artificial Sequence: Synthetic oligonucleotide
aaacacacucugugucagg

SEQ ID NO: 2359645 - RNA, 19 nt, Artificial Sequence
  Description of Artificial Sequence: Synthetic oligonucleotide
augaccaagacggucgggg

SEQ ID NO: 2359646 - RNA, 19 nt, Artificial Sequence
  Description of Artificial Sequence: Synthetic oligonucleotide
aaguuugaggugucgcgca

SEQ ID NO: 2359647 - RNA, 19 nt, Artificial Sequence
  Description of Artificial Sequence: Synthetic oligonucleotide
aaauagcuccucguccacg

SEQ ID NO: 2359648 - RNA, 19 nt, Artificial Sequence
  Description of Artificial Sequence: Synthetic oligonucleotide
uacucguuaaauagcuccu

SEQ ID NO: 2359649 - RNA, 19 nt, Artificial Sequence
  Description of Artificial Sequence: Synthetic oligonucleotide
auggcucccggacaucacc

SEQ ID NO: 2359650 - RNA, 19 nt, Artificial Sequence
  Description of Artificial Sequence: Synthetic oligonucleotide
ggaauguccauuuucugac

SEQ ID NO: 2359651 - RNA, 19 nt, Artificial Sequence
  Description of Artificial Sequence: Synthetic oligonucleotide
aaugucgaugcuagcaaug

SEQ ID NO: 2359652 - RNA, 19 nt, Artificial Sequence
  Description of Artificial Sequence: Synthetic oligonucleotide
ucagguacuucaccgccgc

SEQ ID NO: 2359653 - RNA, 19 nt, Artificial Sequence
  Description of Artificial Sequence: Synthetic oligonucleotide
uugauccacgcugaacugg

SEQ ID NO: 2359654 - RNA, 19 nt, Artificial Sequence
  Description of Artificial Sequence: Synthetic oligonucleotide
acuaguccagugaagagug

SEQ ID NO: 2359655 - RNA, 19 nt, Artificial Sequence
  Description of Artificial Sequence: Synthetic oligonucleotide
cuuuggugcugucagugag

SEQ ID NO: 2359656 - RNA, 19 nt, Artificial Sequence
  Description of Artificial Sequence: Synthetic oligonucleotide
aacugguacucguuaaaua

SEQ ID NO: 2359657 - RNA, 19 nt, Artificial Sequence
  Description of Artificial Sequence: Synthetic oligonucleotide
uacuucaccgccgcgcucg

SEQ ID NO: 2359658 - RNA, 19 nt, Artificial Sequence
  Description of Artificial Sequence: Synthetic oligonucleotide
ugcgauccggggcaggcgg

SEQ ID NO: 2359659 - RNA, 19 nt, Artificial Sequence
  Description of Artificial Sequence: Synthetic oligonucleotide
acagaugaccaagacgguc

SEQ ID NO: 2359660 - RNA, 19 nt, Artificial Sequence
  Description of Artificial Sequence: Synthetic oligonucleotide
ugguuggauuccuccaggg

SEQ ID NO: 2359661 - RNA, 19 nt, Artificial Sequence
  Description of Artificial Sequence: Synthetic oligonucleotide
agguacuucaccgccgcgc

SEQ ID NO: 2359662 - RNA, 19 nt, Artificial Sequence
  Description of Artificial Sequence: Synthetic oligonucleotide
ucguuaagaaaaggaaugu

SEQ ID NO: 2359663 - RNA, 19 nt, Artificial Sequence
  Description of Artificial Sequence: Synthetic oligonucleotide
ugcguuccccaccaggcag

SEQ ID NO: 2359664 - RNA, 19 nt, Artificial Sequence
  Description of Artificial Sequence: Synthetic oligonucleotide
uucuagagcaggugguaca

SEQ ID NO: 2359665 - RNA, 19 nt, Artificial Sequence
  Description of Artificial Sequence: Synthetic oligonucleotide
caggugguacaaaacgacc

SEQ ID NO: 2359666 - RNA, 19 nt, Artificial Sequence
  Description of Artificial Sequence: Synthetic oligonucleotide
uucccggggccacagauga

SEQ ID NO: 2359667 - RNA, 19 nt, Artificial Sequence
  Description of Artificial Sequence: Synthetic oligonucleotide
augucgaugcuagcaaugg

SEQ ID NO: 2359668 - RNA, 19 nt, Artificial Sequence
  Description of Artificial Sequence: Synthetic oligonucleotide
ugauccacgcugaacuggu

SEQ ID NO: 2359669 - RNA, 19 nt, Artificial Sequence
  Description of Artificial Sequence: Synthetic oligonucleotide
gguaaacacacucuguguc

SEQ ID NO: 2359670 - RNA, 19 nt, Artificial Sequence
  Description of Artificial Sequence: Synthetic oligonucleotide
ucguuaaauagcuccucgu

SEQ ID NO: 2359671 - RNA, 19 nt, Artificial Sequence
  Description of Artificial Sequence: Synthetic oligonucleotide
agcugguacuucuuucuag

SEQ ID NO: 2359672 - RNA, 19 nt, Artificial Sequence
  Description of Artificial Sequence: Synthetic oligonucleotide
auacagcucaucaaccauc

SEQ ID NO: 2359673 - RNA, 19 nt, Artificial Sequence
  Description of Artificial Sequence: Synthetic oligonucleotide
aguuugaggugucgcgcac

SEQ ID NO: 2359674 - RNA, 19 nt, Artificial Sequence
  Description of Artificial Sequence: Synthetic oligonucleotide
uccaugaguugauccacgc

SEQ ID NO: 2359675 - RNA, 19 nt, Artificial Sequence
  Description of Artificial Sequence: Synthetic oligonucleotide
agaugaccaagacggucgg

SEQ ID NO: 2359676 - RNA, 19 nt, Artificial Sequence
  Description of Artificial Sequence: Synthetic oligonucleotide
agguaaugauaucggccgg

SEQ ID NO: 2359677 - RNA, 19 nt, Artificial Sequence
  Description of Artificial Sequence: Synthetic oligonucleotide
uaauagauaguuggcuggu

SEQ ID NO: 2359678 - RNA, 19 nt, Artificial Sequence
  Description of Artificial Sequence: Synthetic oligonucleotide
cucuacaucccauccugag

SEQ ID NO: 2359679 - RNA, 19 nt, Artificial Sequence
  Description of Artificial Sequence: Synthetic oligonucleotide
ucggccgguaaaaugggcu

SEQ ID NO: 2359680 - RNA, 19 nt, Artificial Sequence
  Description of Artificial Sequence: Synthetic oligonucleotide
gacucagguacuucaccgc

SEQ ID NO: 2359681 - RNA, 19 nt, Artificial Sequence
  Description of Artificial Sequence: Synthetic oligonucleotide
ugacacugagucacuaguc

SEQ ID NO: 2359682 - RNA, 19 nt, Artificial Sequence
  Description of Artificial Sequence: Synthetic oligonucleotide
uccagugaagaguggcuug

SEQ ID NO: 2359683 - RNA, 19 nt, Artificial Sequence
  Description of Artificial Sequence: Synthetic oligonucleotide
uuuugggguaauagauagu

SEQ ID NO: 2359684 - RNA, 19 nt, Artificial Sequence
  Description of Artificial Sequence: Synthetic oligonucleotide
ucaaccaucaugggcucug

SEQ ID NO: 2359685 - RNA, 19 nt, Artificial Sequence
  Description of Artificial Sequence: Synthetic oligonucleotide
uaaauagcuccucguccac

SEQ ID NO: 2359686 - RNA, 19 nt, Artificial Sequence
  Description of Artificial Sequence: Synthetic oligonucleotide
aacccgaagcccagcagcg

SEQ ID NO: 2359687 - RNA, 19 nt, Artificial Sequence
  Description of Artificial Sequence: Synthetic oligonucleotide
aaaaugggcugcagacuuc

SEQ ID NO: 2359688 - RNA, 19 nt, Artificial Sequence
  Description of Artificial Sequence: Synthetic oligonucleotide
aggugucgcgcacagacca

SEQ ID NO: 2359689 - RNA, 19 nt, Artificial Sequence
  Description of Artificial Sequence: Synthetic oligonucleotide
auaguuggcugguagccaa

SEQ ID NO: 2359690 - RNA, 19 nt, Artificial Sequence
  Description of Artificial Sequence: Synthetic oligonucleotide
cucgccauggucuccgcgc

SEQ ID NO: 2359691 - RNA, 19 nt, Artificial Sequence
  Description of Artificial Sequence: Synthetic oligonucleotide
uauucccggggccacagau

SEQ ID NO: 2359692 - RNA, 19 nt, Artificial Sequence
  Description of Artificial Sequence: Synthetic oligonucleotide
uggacgugggaggauaagc

SEQ ID NO: 2359693 - RNA, 19 nt, Artificial Sequence
  Description of Artificial Sequence: Synthetic oligonucleotide
acuguagacgguaaacaca

SEQ ID NO: 2359694 - RNA, 19 nt, Artificial Sequence
  Description of Artificial Sequence: Synthetic oligonucleotide
cugacucagguacuucacc

SEQ ID NO: 2359695 - RNA, 19 nt, Artificial Sequence
  Description of Artificial Sequence: Synthetic oligonucleotide
cuccaugaguugauccacg

SEQ ID NO: 2359696 - RNA, 19 nt, Artificial Sequence
  Description of Artificial Sequence: Synthetic oligonucleotide
uaaugauaucggccgguaa

SEQ ID NO: 2359697 - RNA, 19 nt, Artificial Sequence
  Description of Artificial Sequence: Synthetic oligonucleotide
ggugguacaaaacgacccc

SEQ ID NO: 2359698 - RNA, 19 nt, Artificial Sequence
  Description of Artificial Sequence: Synthetic oligonucleotide
agcugcguuccccaccagg

SEQ ID NO: 2359699 - RNA, 19 nt, Artificial Sequence
  Description of Artificial Sequence: Synthetic oligonucleotide
cugguacuucuuucuagag

SEQ ID NO: 2359700 - RNA, 19 nt, Artificial Sequence
  Description of Artificial Sequence: Synthetic oligonucleotide
uugcgcggcacacacucug

SEQ ID NO: 2359701 - RNA, 19 nt, Artificial Sequence
  Description of Artificial Sequence: Synthetic oligonucleotide
cugguuggauuccuccagg

SEQ ID NO: 2359702 - RNA, 19 nt, Artificial Sequence
  Description of Artificial Sequence: Synthetic oligonucleotide
uccacgcugaacugguacu

SEQ ID NO: 2359703 - RNA, 19 nt, Artificial Sequence
  Description of Artificial Sequence: Synthetic oligonucleotide
acucguuaaauagcuccuc

SEQ ID NO: 2359704 - RNA, 19 nt, Artificial Sequence
  Description of Artificial Sequence: Synthetic oligonucleotide
gagucacuaguccagugaa

SEQ ID NO: 2359705 - RNA, 19 nt, Artificial Sequence
  Description of Artificial Sequence: Synthetic oligonucleotide
guugauccacgcugaacug

SEQ ID NO: 2359706 - RNA, 19 nt, Artificial Sequence
  Description of Artificial Sequence: Synthetic oligonucleotide
gucuuauugaaaacugcca

SEQ ID NO: 2359707 - RNA, 19 nt, Artificial Sequence
  Description of Artificial Sequence: Synthetic oligonucleotide
cccaagguaaugauaucgg

SEQ ID NO: 2359708 - RNA, 19 nt, Artificial Sequence
  Description of Artificial Sequence: Synthetic oligonucleotide
ucucuacaucccauccuga

SEQ ID NO: 2359709 - RNA, 19 nt, Artificial Sequence
  Description of Artificial Sequence: Synthetic oligonucleotide
gggaggauaagccuuggca

SEQ ID NO: 2359710 - RNA, 19 nt, Artificial Sequence
  Description of Artificial Sequence: Synthetic oligonucleotide
ucuagagcaggugguacaa

SEQ ID NO: 2359711 - RNA, 19 nt, Artificial Sequence
  Description of Artificial Sequence: Synthetic oligonucleotide
ccggacaucacccuugaag

SEQ ID NO: 2359712 - RNA, 19 nt, Artificial Sequence
  Description of Artificial Sequence: Synthetic oligonucleotide
cauccugagggaaugucga

SEQ ID NO: 2359713 - RNA, 19 nt, Artificial Sequence
  Description of Artificial Sequence: Synthetic oligonucleotide
aauggcucccggacaucac

SEQ ID NO: 2359714 - RNA, 19 nt, Artificial Sequence
  Description of Artificial Sequence: Synthetic oligonucleotide
acggugaguccacucagga

SEQ ID NO: 2359715 - RNA, 19 nt, Artificial Sequence
  Description of Artificial Sequence: Synthetic oligonucleotide
ccaaagauggcauccacca

SEQ ID NO: 2359716 - RNA, 19 nt, Artificial Sequence
  Description of Artificial Sequence: Synthetic oligonucleotide
aagccuuggcaauggccgu

SEQ ID NO: 2359717 - RNA, 19 nt, Artificial Sequence
  Description of Artificial Sequence: Synthetic oligonucleotide
gaaaacugccacccaccuc

SEQ ID NO: 2359718 - RNA, 19 nt, Artificial Sequence
  Description of Artificial Sequence: Synthetic oligonucleotide
ccaagguaaugauaucggc

SEQ ID NO: 2359719 - RNA, 19 nt, Artificial Sequence
  Description of Artificial Sequence: Synthetic oligonucleotide
uuucugacacugagucacu

SEQ ID NO: 2359720 - RNA, 19 nt, Artificial Sequence
  Description of Artificial Sequence: Synthetic oligonucleotide
aggauaagccuuggcaaug

SEQ ID NO: 2359721 - RNA, 19 nt, Artificial Sequence
  Description of Artificial Sequence: Synthetic oligonucleotide
uccguuauucccggggcca

SEQ ID NO: 2359722 - RNA, 19 nt, Artificial Sequence
  Description of Artificial Sequence: Synthetic oligonucleotide
cuaguccagugaagagugg

SEQ ID NO: 2359723 - RNA, 19 nt, Artificial Sequence
  Description of Artificial Sequence: Synthetic oligonucleotide
cacggugaguccacucagg

SEQ ID NO: 2359724 - RNA, 19 nt, Artificial Sequence
  Description of Artificial Sequence: Synthetic oligonucleotide
ccauccugagggaaugucg

SEQ ID NO: 2359725 - RNA, 19 nt, Artificial Sequence
  Description of Artificial Sequence: Synthetic oligonucleotide
gauaguuggcugguagcca

SEQ ID NO: 2359726 - RNA, 19 nt, Artificial Sequence
  Description of Artificial Sequence: Synthetic oligonucleotide
agcaggugguacaaaacga

SEQ ID NO: 2359727 - RNA, 19 nt, Artificial Sequence
  Description of Artificial Sequence: Synthetic oligonucleotide
aauagauaguuggcuggua

SEQ ID NO: 2359728 - RNA, 19 nt, Artificial Sequence
  Description of Artificial Sequence: Synthetic oligonucleotide
gggcucuuggacauggacg

SEQ ID NO: 2359729 - RNA, 19 nt, Artificial Sequence
  Description of Artificial Sequence: Synthetic oligonucleotide
uguagacgguaaacacacu

SEQ ID NO: 2359730 - RNA, 19 nt, Artificial Sequence
  Description of Artificial Sequence: Synthetic oligonucleotide
ugucgcgcacagaccaggc

SEQ ID NO: 2359731 - RNA, 19 nt, Artificial Sequence
  Description of Artificial Sequence: Synthetic oligonucleotide
augcuagcaaugggcacgg

SEQ ID NO: 2359732 - RNA, 19 nt, Artificial Sequence
  Description of Artificial Sequence: Synthetic oligonucleotide
ugcaaccagcaacccgaag

SEQ ID NO: 2359733 - RNA, 19 nt, Artificial Sequence
  Description of Artificial Sequence: Synthetic oligonucleotide
uccccuccguuauucccgg

SEQ ID NO: 2359734 - RNA, 19 nt, Artificial Sequence
  Description of Artificial Sequence: Synthetic oligonucleotide
agcaacccgaagcccagca

SEQ ID NO: 2359735 - RNA, 19 nt, Artificial Sequence
  Description of Artificial Sequence: Synthetic oligonucleotide
ggcauuucguuaagaaaag

SEQ ID NO: 2359736 - RNA, 19 nt, Artificial Sequence
  Description of Artificial Sequence: Synthetic oligonucleotide
ccccaagguaaugauaucg

SEQ ID NO: 2359737 - RNA, 19 nt, Artificial Sequence
  Description of Artificial Sequence: Synthetic oligonucleotide
augauaucggccgguaaaa

SEQ ID NO: 2359738 - RNA, 19 nt, Artificial Sequence
  Description of Artificial Sequence: Synthetic oligonucleotide
guccccuccguuauucccg

SEQ ID NO: 2359739 - RNA, 19 nt, Artificial Sequence
  Description of Artificial Sequence: Synthetic oligonucleotide
caggcgggagccugcaacc

SEQ ID NO: 2359740 - RNA, 19 nt, Artificial Sequence
  Description of Artificial Sequence: Synthetic oligonucleotide
uaagucugguuggauuccu

SEQ ID NO: 2359741 - RNA, 19 nt, Artificial Sequence
  Description of Artificial Sequence: Synthetic oligonucleotide
cugagucacuaguccagug

SEQ ID NO: 2359742 - RNA, 19 nt, Artificial Sequence
  Description of Artificial Sequence: Synthetic oligonucleotide
guuauucccggggccacag

SEQ ID NO: 2359743 - RNA, 19 nt, Artificial Sequence
  Description of Artificial Sequence: Synthetic oligonucleotide
gaugaccaagacggucggg

SEQ ID NO: 2359744 - RNA, 19 nt, Artificial Sequence
  Description of Artificial Sequence: Synthetic oligonucleotide
gaauggcucccggacauca

SEQ ID NO: 2359745 - RNA, 19 nt, Artificial Sequence
  Description of Artificial Sequence: Synthetic oligonucleotide
ugcagacuucuuuggugcu

SEQ ID NO: 2359746 - RNA, 19 nt, Artificial Sequence
  Description of Artificial Sequence: Synthetic oligonucleotide
auccggggcaggcgggagc

SEQ ID NO: 2359747 - RNA, 19 nt, Artificial Sequence
  Description of Artificial Sequence: Synthetic oligonucleotide
uccacucaggacgcucagg

SEQ ID NO: 2359748 - RNA, 19 nt, Artificial Sequence
  Description of Artificial Sequence: Synthetic oligonucleotide
cugucagugagaugaguaa

SEQ ID NO: 2359749 - RNA, 19 nt, Artificial Sequence
  Description of Artificial Sequence: Synthetic oligonucleotide
ggaggcauuucguuaagaa

SEQ ID NO: 2359750 - RNA, 19 nt, Artificial Sequence
  Description of Artificial Sequence: Synthetic oligonucleotide
gcggcacacacucugccgg

SEQ ID NO: 2359751 - RNA, 19 nt, Artificial Sequence
  Description of Artificial Sequence: Synthetic oligonucleotide
acacacucugccggccugc

SEQ ID NO: 2359752 - RNA, 19 nt, Artificial Sequence
  Description of Artificial Sequence: Synthetic oligonucleotide
gaguugauccacgcugaac

SEQ ID NO: 2359753 - RNA, 19 nt, Artificial Sequence
  Description of Artificial Sequence: Synthetic oligonucleotide
ucccuuacuguagacggua

SEQ ID NO: 2359754 - RNA, 19 nt, Artificial Sequence
  Description of Artificial Sequence: Synthetic oligonucleotide
gcugguacuucuuucuaga

SEQ ID NO: 2359755 - RNA, 19 nt, Artificial Sequence
  Description of Artificial Sequence: Synthetic oligonucleotide
gcauuucguuaagaaaagg

SEQ ID NO: 2359756 - RNA, 19 nt, Artificial Sequence
  Description of Artificial Sequence: Synthetic oligonucleotide
cuccguuauucccggggcc

SEQ ID NO: 2359757 - RNA, 19 nt, Artificial Sequence
  Description of Artificial Sequence: Synthetic oligonucleotide
augaguaagucugguugga

SEQ ID NO: 2359758 - RNA, 19 nt, Artificial Sequence
  Description of Artificial Sequence: Synthetic oligonucleotide
ggacgugggaggauaagcc

SEQ ID NO: 2359759 - RNA, 19 nt, Artificial Sequence
  Description of Artificial Sequence: Synthetic oligonucleotide
uccucguccacggcccgcg

SEQ ID NO: 2359760 - RNA, 19 nt, Artificial Sequence
  Description of Artificial Sequence: Synthetic oligonucleotide
uacaucccauccugaggga

SEQ ID NO: 2359761 - RNA, 19 nt, Artificial Sequence
  Description of Artificial Sequence: Synthetic oligonucleotide
aucggccgguaaaaugggc

SEQ ID NO: 2359762 - RNA, 19 nt, Artificial Sequence
  Description of Artificial Sequence: Synthetic oligonucleotide
ucugccggccugcgauccg

SEQ ID NO: 2359763 - RNA, 19 nt, Artificial Sequence
  Description of Artificial Sequence: Synthetic oligonucleotide
ucguccacggcccgcgccu

SEQ ID NO: 2359764 - RNA, 19 nt, Artificial Sequence
  Description of Artificial Sequence: Synthetic oligonucleotide
ugaguaagucugguuggau

SEQ ID NO: 2359765 - RNA, 19 nt, Artificial Sequence
  Description of Artificial Sequence: Synthetic oligonucleotide
gggguaauagauaguuggc

SEQ ID NO: 2359766 - RNA, 19 nt, Artificial Sequence
  Description of Artificial Sequence: Synthetic oligonucleotide
accagcaacccgaagccca

SEQ ID NO: 2359767 - RNA, 19 nt, Artificial Sequence
  Description of Artificial Sequence: Synthetic oligonucleotide
agucacuaguccagugaag

SEQ ID NO: 2359768 - RNA, 19 nt, Artificial Sequence
  Description of Artificial Sequence: Synthetic oligonucleotide
caaugggcacggugagucc

SEQ ID NO: 2359769 - RNA, 19 nt, Artificial Sequence
  Description of Artificial Sequence: Synthetic oligonucleotide
acuucaccgccgcgcucgc

SEQ ID NO: 2359770 - RNA, 19 nt, Artificial Sequence
  Description of Artificial Sequence: Synthetic oligonucleotide
gaguaagucugguuggauu

SEQ ID NO: 2359771 - RNA, 19 nt, Artificial Sequence
  Description of Artificial Sequence: Synthetic oligonucleotide
caucaaccaucaugggcuc

SEQ ID NO: 2359772 - RNA, 19 nt, Artificial Sequence
  Description of Artificial Sequence: Synthetic oligonucleotide
gacgugggaggauaagccu

SEQ ID NO: 2359773 - RNA, 19 nt, Artificial Sequence
  Description of Artificial Sequence: Synthetic oligonucleotide
gguaggauggcagguucag

SEQ ID NO: 2359774 - RNA, 19 nt, Artificial Sequence
  Description of Artificial Sequence: Synthetic oligonucleotide
ucccggacaucacccuuga

SEQ ID NO: 2359775 - RNA, 19 nt, Artificial Sequence
  Description of Artificial Sequence: Synthetic oligonucleotide
gaaugucgaugcuagcaau

SEQ ID NO: 2359776 - RNA, 19 nt, Artificial Sequence
  Description of Artificial Sequence: Synthetic oligonucleotide
guuagaucuuuugggguaa

SEQ ID NO: 2359777 - RNA, 19 nt, Artificial Sequence
  Description of Artificial Sequence: Synthetic oligonucleotide
gugaguccacucaggacgc

SEQ ID NO: 2359778 - RNA, 19 nt, Artificial Sequence
  Description of Artificial Sequence: Synthetic oligonucleotide
aauggccguggcacagcuc

SEQ ID NO: 2359779 - RNA, 19 nt, Artificial Sequence
  Description of Artificial Sequence: Synthetic oligonucleotide
acucugccggccugcgauc

SEQ ID NO: 2359780 - RNA, 19 nt, Artificial Sequence
  Description of Artificial Sequence: Synthetic oligonucleotide
gugucgcgcacagaccagg

SEQ ID NO: 2359781 - RNA, 19 nt, Artificial Sequence
  Description of Artificial Sequence: Synthetic oligonucleotide
aucccauccugagggaaug

SEQ ID NO: 2359782 - RNA, 19 nt, Artificial Sequence
  Description of Artificial Sequence: Synthetic oligonucleotide
uuauucccggggccacaga

SEQ ID NO: 2359783 - RNA, 19 nt, Artificial Sequence
  Description of Artificial Sequence: Synthetic oligonucleotide
guacuucuuucuagagcag

SEQ ID NO: 2359784 - RNA, 19 nt, Artificial Sequence
  Description of Artificial Sequence: Synthetic oligonucleotide
guccgcagcccgcacauuc

SEQ ID NO: 2359785 - RNA, 19 nt, Artificial Sequence
  Description of Artificial Sequence: Synthetic oligonucleotide
gaagaguggcuuguuagau

SEQ ID NO: 2359786 - RNA, 19 nt, Artificial Sequence
  Description of Artificial Sequence: Synthetic oligonucleotide
cguuaaauagcuccucguc

SEQ ID NO: 2359787 - RNA, 19 nt, Artificial Sequence
  Description of Artificial Sequence: Synthetic oligonucleotide
cuggaggcauuucguuaag

SEQ ID NO: 2359788 - RNA, 19 nt, Artificial Sequence
  Description of Artificial Sequence: Synthetic oligonucleotide
uggucuccgcgcuccggag

SEQ ID NO: 2359789 - RNA, 19 nt, Artificial Sequence
  Description of Artificial Sequence: Synthetic oligonucleotide
gcaggugguacaaaacgac

SEQ ID NO: 2359790 - RNA, 19 nt, Artificial Sequence
  Description of Artificial Sequence: Synthetic oligonucleotide
guaccaagucuuauugaaa

SEQ ID NO: 2359791 - RNA, 19 nt, Artificial Sequence
  Description of Artificial Sequence: Synthetic oligonucleotide
ggcucuuggacauggacgu

SEQ ID NO: 2359792 - RNA, 19 nt, Artificial Sequence
  Description of Artificial Sequence: Synthetic oligonucleotide
gaggugucgcgcacagacc

SEQ ID NO: 2359793 - RNA, 19 nt, Artificial Sequence
  Description of Artificial Sequence: Synthetic oligonucleotide
ggggccacagaugaccaag

SEQ ID NO: 2359794 - RNA, 19 nt, Artificial Sequence
  Description of Artificial Sequence: Synthetic oligonucleotide
uaguuggcugguagccaaa

SEQ ID NO: 2359795 - RNA, 19 nt, Artificial Sequence
  Description of Artificial Sequence: Synthetic oligonucleotide
guaggauggcagguucagc

SEQ ID NO: 2359796 - RNA, 19 nt, Artificial Sequence
  Description of Artificial Sequence: Synthetic oligonucleotide
uggcaauggccguggcaca

SEQ ID NO: 2359797 - RNA, 19 nt, Artificial Sequence
  Description of Artificial Sequence: Synthetic oligonucleotide
gucgcgcacagaccaggcc

SEQ ID NO: 2359798 - RNA, 19 nt, Artificial Sequence
  Description of Artificial Sequence: Synthetic oligonucleotide
gccaaagauggcauccacc

SEQ ID NO: 2359799 - RNA, 19 nt, Artificial Sequence
  Description of Artificial Sequence: Synthetic oligonucleotide
gcugcguuccccaccaggc

SEQ ID NO: 2359800 - RNA, 19 nt, Artificial Sequence
  Description of Artificial Sequence: Synthetic oligonucleotide
auggacgugggaggauaag

SEQ ID NO: 2359801 - RNA, 19 nt, Artificial Sequence
  Description of Artificial Sequence: Synthetic oligonucleotide
agccugcaaccagcaaccc

SEQ ID NO: 2359802 - RNA, 19 nt, Artificial Sequence
  Description of Artificial Sequence: Synthetic oligonucleotide
uucugacacugagucacua

SEQ ID NO: 2359803 - RNA, 19 nt, Artificial Sequence
  Description of Artificial Sequence: Synthetic oligonucleotide
ggcacggugaguccacuca

SEQ ID NO: 2359804 - RNA, 19 nt, Artificial Sequence
  Description of Artificial Sequence: Synthetic oligonucleotide
caaccaucaugggcucugg

SEQ ID NO: 2359805 - RNA, 19 nt, Artificial Sequence
  Description of Artificial Sequence: Synthetic oligonucleotide
ccuugcgcggcacacacuc

SEQ ID NO: 2359806 - RNA, 19 nt, Artificial Sequence
  Description of Artificial Sequence: Synthetic oligonucleotide
uagaucuuuugggguaaua

SEQ ID NO: 2359807 - RNA, 19 nt, Artificial Sequence
  Description of Artificial Sequence: Synthetic oligonucleotide
acauggacgugggaggaua

SEQ ID NO: 2359808 - RNA, 19 nt, Artificial Sequence
  Description of Artificial Sequence: Synthetic oligonucleotide
gucagugagaugaguaagu

SEQ ID NO: 2359809 - RNA, 19 nt, Artificial Sequence
  Description of Artificial Sequence: Synthetic oligonucleotide
auccugagggaaugucgau

SEQ ID NO: 2359810 - RNA, 19 nt, Artificial Sequence
  Description of Artificial Sequence: Synthetic oligonucleotide
gcuguggaauggcucccgg

SEQ ID NO: 2359811 - RNA, 19 nt, Artificial Sequence
  Description of Artificial Sequence: Synthetic oligonucleotide
accgccgcgcucgccaugg

SEQ ID NO: 2359812 - RNA, 19 nt, Artificial Sequence
  Description of Artificial Sequence: Synthetic oligonucleotide
gcacggugaguccacucag

SEQ ID NO: 2359813 - RNA, 19 nt, Artificial Sequence
  Description of Artificial Sequence: Synthetic oligonucleotide
guccacucaggacgcucag

SEQ ID NO: 2359814 - RNA, 19 nt, Artificial Sequence
  Description of Artificial Sequence: Synthetic oligonucleotide
augggcacggugaguccac

SEQ ID NO: 2359815 - RNA, 19 nt, Artificial Sequence
  Description of Artificial Sequence: Synthetic oligonucleotide
cacacacucugccggccug

SEQ ID NO: 2359816 - RNA, 19 nt, Artificial Sequence
  Description of Artificial Sequence: Synthetic oligonucleotide
ucaugggcucuggaggcau

SEQ ID NO: 2359817 - RNA, 19 nt, Artificial Sequence
  Description of Artificial Sequence: Synthetic oligonucleotide
gacgguaaacacacucugu

SEQ ID NO: 2359818 - RNA, 19 nt, Artificial Sequence
  Description of Artificial Sequence: Synthetic oligonucleotide
guaaugauaucggccggua

SEQ ID NO: 2359819 - RNA, 19 nt, Artificial Sequence
  Description of Artificial Sequence: Synthetic oligonucleotide
ugccggccugcgauccggg

SEQ ID NO: 2359820 - RNA, 19 nt, Artificial Sequence
  Description of Artificial Sequence: Synthetic oligonucleotide
cauacagcucaucaaccau

SEQ ID NO: 2359821 - RNA, 19 nt, Artificial Sequence
  Description of Artificial Sequence: Synthetic oligonucleotide
gaguccacucaggacgcuc

SEQ ID NO: 2359822 - RNA, 19 nt, Artificial Sequence
  Description of Artificial Sequence: Synthetic oligonucleotide
gcaggcgggagccugcaac

SEQ ID NO: 2359823 - RNA, 19 nt, Artificial Sequence
  Description of Artificial Sequence: Synthetic oligonucleotide
cuuucuagagcagguggua

SEQ ID NO: 2359824 - RNA, 19 nt, Artificial Sequence
  Description of Artificial Sequence: Synthetic oligonucleotide
aguuggcugguagccaaaa

SEQ ID NO: 2359825 - RNA, 19 nt, Artificial Sequence
  Description of Artificial Sequence: Synthetic oligonucleotide
ccuccguuauucccggggc

SEQ ID NO: 2359826 - RNA, 19 nt, Artificial Sequence
  Description of Artificial Sequence: Synthetic oligonucleotide
agcguccgcagcccgcaca

SEQ ID NO: 2359827 - RNA, 19 nt, Artificial Sequence
  Description of Artificial Sequence: Synthetic oligonucleotide
cuguggaauggcucccgga

SEQ ID NO: 2359828 - RNA, 19 nt, Artificial Sequence
  Description of Artificial Sequence: Synthetic oligonucleotide
guuugaggugucgcgcaca

SEQ ID NO: 2359829 - RNA, 19 nt, Artificial Sequence
  Description of Artificial Sequence: Synthetic oligonucleotide
ggguaauagauaguuggcu

SEQ ID NO: 2359830 - RNA, 19 nt, Artificial Sequence
  Description of Artificial Sequence: Synthetic oligonucleotide
uggugcugucagugagaug

SEQ ID NO: 2359831 - RNA, 19 nt, Artificial Sequence
  Description of Artificial Sequence: Synthetic oligonucleotide
gcaacccgaagcccagcag

SEQ ID NO: 2359832 - RNA, 19 nt, Artificial Sequence
  Description of Artificial Sequence: Synthetic oligonucleotide
acgugggaggauaagccuu

SEQ ID NO: 2359833 - RNA, 19 nt, Artificial Sequence
  Description of Artificial Sequence: Synthetic oligonucleotide
ccaagucuuauugaaaacu

SEQ ID NO: 2359834 - RNA, 19 nt, Artificial Sequence
  Description of Artificial Sequence: Synthetic oligonucleotide
cacacucugccggccugcg

SEQ ID NO: 2359835 - RNA, 19 nt, Artificial Sequence
  Description of Artificial Sequence: Synthetic oligonucleotide
gccguggcacagcucagcc

SEQ ID NO: 2359836 - RNA, 19 nt, Artificial Sequence
  Description of Artificial Sequence: Synthetic oligonucleotide
aggccguccccuccguuau

SEQ ID NO: 2359837 - RNA, 19 nt, Artificial Sequence
  Description of Artificial Sequence: Synthetic oligonucleotide
aucaaccaucaugggcucu

SEQ ID NO: 2359838 - RNA, 19 nt, Artificial Sequence
  Description of Artificial Sequence: Synthetic oligonucleotide
cauggacgugggaggauaa

SEQ ID NO: 2359839 - RNA, 19 nt, Artificial Sequence
  Description of Artificial Sequence: Synthetic oligonucleotide
gauccggggcaggcgggag

SEQ ID NO: 2359840 - RNA, 19 nt, Artificial Sequence
  Description of Artificial Sequence: Synthetic oligonucleotide
gguacucguuaaauagcuc

SEQ ID NO: 2359841 - RNA, 19 nt, Artificial Sequence
  Description of Artificial Sequence: Synthetic oligonucleotide
caccucccuuacuguagac

SEQ ID NO: 2359842 - RNA, 19 nt, Artificial Sequence
  Description of Artificial Sequence: Synthetic oligonucleotide
ggcgggagccugcaaccag

SEQ ID NO: 2359843 - RNA, 19 nt, Artificial Sequence
  Description of Artificial Sequence: Synthetic oligonucleotide
cuccggagcugcguucccc

SEQ ID NO: 2359844 - RNA, 19 nt, Artificial Sequence
  Description of Artificial Sequence: Synthetic oligonucleotide
cugcgauccggggcaggcg

SEQ ID NO: 2359845 - RNA, 19 nt, Artificial Sequence
  Description of Artificial Sequence: Synthetic oligonucleotide
ggccgguaaaaugggcugc

SEQ ID NO: 2359846 - RNA, 19 nt, Artificial Sequence
  Description of Artificial Sequence: Synthetic oligonucleotide
ccgaagcccagcagcgucc

SEQ ID NO: 2359847 - RNA, 19 nt, Artificial Sequence
  Description of Artificial Sequence: Synthetic oligonucleotide
caggccuugcgcggcacac

SEQ ID NO: 2359848 - RNA, 19 nt, Artificial Sequence
  Description of Artificial Sequence: Synthetic oligonucleotide
gguacuucaccgccgcgcu

SEQ ID NO: 2359849 - RNA, 19 nt, Artificial Sequence
  Description of Artificial Sequence: Synthetic oligonucleotide
ucccauccugagggaaugu

SEQ ID NO: 2359850 - RNA, 19 nt, Artificial Sequence
  Description of Artificial Sequence: Synthetic oligonucleotide
uugaggugucgcgcacaga

SEQ ID NO: 2359851 - RNA, 19 nt, Artificial Sequence
  Description of Artificial Sequence: Synthetic oligonucleotide
cccggggccacagaugacc

SEQ ID NO: 2359852 - RNA, 19 nt, Artificial Sequence
  Description of Artificial Sequence: Synthetic oligonucleotide
caggacgcucaggaugcug

SEQ ID NO: 2359853 - RNA, 19 nt, Artificial Sequence
  Description of Artificial Sequence: Synthetic oligonucleotide
ggucuccgcgcuccggagc

SEQ ID NO: 2359854 - RNA, 19 nt, Artificial Sequence
  Description of Artificial Sequence: Synthetic oligonucleotide
ugaguccacucaggacgcu

SEQ ID NO: 2359855 - RNA, 19 nt, Artificial Sequence
  Description of Artificial Sequence: Synthetic oligonucleotide
gcucgccauggucuccgcg

SEQ ID NO: 2359856 - RNA, 19 nt, Artificial Sequence
  Description of Artificial Sequence: Synthetic oligonucleotide
gguaaugauaucggccggu

SEQ ID NO: 2359857 - RNA, 19 nt, Artificial Sequence
  Description of Artificial Sequence: Synthetic oligonucleotide
cuccgcgcuccggagcugc

SEQ ID NO: 2359858 - RNA, 19 nt, Artificial Sequence
  Description of Artificial Sequence: Synthetic oligonucleotide
gguuggauuccuccagggu

SEQ ID NO: 2359859 - RNA, 19 nt, Artificial Sequence
  Description of Artificial Sequence: Synthetic oligonucleotide
cacucugccggccugcgau

SEQ ID NO: 2359860 - RNA, 19 nt, Artificial Sequence
  Description of Artificial Sequence: Synthetic oligonucleotide
guacuucaccgccgcgcuc

SEQ ID NO: 2359861 - RNA, 19 nt, Artificial Sequence
  Description of Artificial Sequence: Synthetic oligonucleotide
ucaggacgcucaggaugcu

SEQ ID NO: 2359862 - RNA, 19 nt, Artificial Sequence
  Description of Artificial Sequence: Synthetic oligonucleotide
acucugugucaggguagga

SEQ ID NO: 2359863 - RNA, 19 nt, Artificial Sequence
  Description of Artificial Sequence: Synthetic oligonucleotide
caucccauccugagggaau

SEQ ID NO: 2359864 - RNA, 19 nt, Artificial Sequence
  Description of Artificial Sequence: Synthetic oligonucleotide
cguccccuccguuauuccc

SEQ ID NO: 2359865 - RNA, 19 nt, Artificial Sequence
  Description of Artificial Sequence: Synthetic oligonucleotide
gcguuccccaccaggcagg

SEQ ID NO: 2359866 - RNA, 19 nt, Artificial Sequence
  Description of Artificial Sequence: Synthetic oligonucleotide
ucccggggccacagaugac

SEQ ID NO: 2359867 - RNA, 19 nt, Artificial Sequence
  Description of Artificial Sequence: Synthetic oligonucleotide
ggugucgcgcacagaccag

SEQ ID NO: 2359868 - RNA, 19 nt, Artificial Sequence
  Description of Artificial Sequence: Synthetic oligonucleotide
cgaugcuagcaaugggcac

SEQ ID NO: 2359869 - RNA, 19 nt, Artificial Sequence
  Description of Artificial Sequence: Synthetic oligonucleotide
caggccguccccuccguua

SEQ ID NO: 2359870 - RNA, 19 nt, Artificial Sequence
  Description of Artificial Sequence: Synthetic oligonucleotide
cagcugguacuucuuucua

SEQ ID NO: 2359871 - RNA, 19 nt, Artificial Sequence
  Description of Artificial Sequence: Synthetic oligonucleotide
ccugcgauccggggcaggc

SEQ ID NO: 2359872 - RNA, 19 nt, Artificial Sequence
  Description of Artificial Sequence: Synthetic oligonucleotide
cgcggcacacacucugccg

SEQ ID NO: 2359873 - RNA, 19 nt, Artificial Sequence
  Description of Artificial Sequence: Synthetic oligonucleotide
ccggccugcgauccggggc

SEQ ID NO: 2359874 - RNA, 19 nt, Artificial Sequence
  Description of Artificial Sequence: Synthetic oligonucleotide
caauggccguggcacagcu

SEQ ID NO: 2359875 - RNA, 19 nt, Artificial Sequence
  Description of Artificial Sequence: Synthetic oligonucleotide
aggcgggagccugcaacca

SEQ ID NO: 2359876 - RNA, 19 nt, Artificial Sequence
  Description of Artificial Sequence: Synthetic oligonucleotide
accaggccguccccuccgu

SEQ ID NO: 2359877 - RNA, 19 nt, Artificial Sequence
  Description of Artificial Sequence: Synthetic oligonucleotide
ggcacacacucugccggcc

SEQ ID NO: 2359878 - RNA, 19 nt, Artificial Sequence
  Description of Artificial Sequence: Synthetic oligonucleotide
gcgcggcacacacucugcc

SEQ ID NO: 2359879 - RNA, 19 nt, Artificial Sequence
  Description of Artificial Sequence: Synthetic oligonucleotide
cugccacccaccucccuua

SEQ ID NO: 2359880 - RNA, 19 nt, Artificial Sequence
  Description of Artificial Sequence: Synthetic oligonucleotide
ccguggcacagcucagccc

SEQ ID NO: 2359881 - RNA, 19 nt, Artificial Sequence
  Description of Artificial Sequence: Synthetic oligonucleotide
cggccgguaaaaugggcug

SEQ ID NO: 2359882 - RNA, 19 nt, Artificial Sequence
  Description of Artificial Sequence: Synthetic oligonucleotide
cuagagcaggugguacaaa

SEQ ID NO: 2359883 - RNA, 19 nt, Artificial Sequence
  Description of Artificial Sequence: Synthetic oligonucleotide
cucccuuacuguagacggu

SEQ ID NO: 2359884 - RNA, 19 nt, Artificial Sequence
  Description of Artificial Sequence: Synthetic oligonucleotide
cuccucguccacggcccgc

SEQ ID NO: 2359885 - RNA, 19 nt, Artificial Sequence
  Description of Artificial Sequence: Synthetic oligonucleotide
gcaauggccguggcacagc

SEQ ID NO: 2359886 - RNA, 19 nt, Artificial Sequence
  Description of Artificial Sequence: Synthetic oligonucleotide
guccagugaagaguggcuu

SEQ ID NO: 2359887 - RNA, 19 nt, Artificial Sequence
  Description of Artificial Sequence: Synthetic oligonucleotide
ggguaggauggcagguuca

SEQ ID NO: 2359888 - RNA, 19 nt, Artificial Sequence
  Description of Artificial Sequence: Synthetic oligonucleotide
gcuccucguccacggcccg

SEQ ID NO: 2359889 - RNA, 19 nt, Artificial Sequence
  Description of Artificial Sequence: Synthetic oligonucleotide
gccgguaaaaugggcugca

SEQ ID NO: 2359890 - RNA, 19 nt, Artificial Sequence
  Description of Artificial Sequence: Synthetic oligonucleotide
ggccguggcacagcucagc

SEQ ID NO: 2359891 - RNA, 19 nt, Artificial Sequence
  Description of Artificial Sequence: Synthetic oligonucleotide
ucuccgcgcuccggagcug

SEQ ID NO: 2359892 - RNA, 19 nt, Artificial Sequence
  Description of Artificial Sequence: Synthetic oligonucleotide
gauccacgcugaacuggua

SEQ ID NO: 2359893 - RNA, 19 nt, Artificial Sequence
  Description of Artificial Sequence: Synthetic oligonucleotide
ggauuccuccaggguuucc

SEQ ID NO: 2359894 - RNA, 19 nt, Artificial Sequence
  Description of Artificial Sequence: Synthetic oligonucleotide
cccauccugagggaauguc

SEQ ID NO: 2359895 - RNA, 19 nt, Artificial Sequence
  Description of Artificial Sequence: Synthetic oligonucleotide
guuccccaccaggcaggcc

SEQ ID NO: 2359896 - RNA, 19 nt, Artificial Sequence
  Description of Artificial Sequence: Synthetic oligonucleotide
auggcagguucagcuggua

SEQ ID NO: 2359897 - RNA, 19 nt, Artificial Sequence
  Description of Artificial Sequence: Synthetic oligonucleotide
ccgguaaaaugggcugcag

SEQ ID NO: 2359898 - RNA, 19 nt, Artificial Sequence
  Description of Artificial Sequence: Synthetic oligonucleotide
gggcacggugaguccacuc

SEQ ID NO: 2359899 - RNA, 19 nt, Artificial Sequence
  Description of Artificial Sequence: Synthetic oligonucleotide
gacauggacgugggaggau

SEQ ID NO: 2359900 - RNA, 19 nt, Artificial Sequence
  Description of Artificial Sequence: Synthetic oligonucleotide
ccguccccuccguuauucc

SEQ ID NO: 2359901 - RNA, 19 nt, Artificial Sequence
  Description of Artificial Sequence: Synthetic oligonucleotide
gcucuuggacauggacgug

SEQ ID NO: 2359902 - RNA, 19 nt, Artificial Sequence
  Description of Artificial Sequence: Synthetic oligonucleotide
ccaccucccuuacuguaga

SEQ ID NO: 2359903 - RNA, 19 nt, Artificial Sequence
  Description of Artificial Sequence: Synthetic oligonucleotide
gccguccccuccguuauuc

SEQ ID NO: 2359904 - RNA, 19 nt, Artificial Sequence
  Description of Artificial Sequence: Synthetic oligonucleotide
ggcucuggaggcauuucgu

SEQ ID NO: 2359905 - RNA, 19 nt, Artificial Sequence
  Description of Artificial Sequence: Synthetic oligonucleotide
cuugcgcggcacacacucu

SEQ ID NO: 2359906 - RNA, 19 nt, Artificial Sequence
  Description of Artificial Sequence: Synthetic oligonucleotide
cggagcugcguuccccacc

SEQ ID NO: 2359907 - RNA, 19 nt, Artificial Sequence
  Description of Artificial Sequence: Synthetic oligonucleotide
gcucuggaggcauuucguu

SEQ ID NO: 2359908 - RNA, 19 nt, Artificial Sequence
  Description of Artificial Sequence: Synthetic oligonucleotide
ggaauggcucccggacauc

SEQ ID NO: 2359909 - RNA, 19 nt, Artificial Sequence
  Description of Artificial Sequence: Synthetic oligonucleotide
cacccaccucccuuacugu

SEQ ID NO: 2359910 - RNA, 19 nt, Artificial Sequence
  Description of Artificial Sequence: Synthetic oligonucleotide
guggcuuguuagaucuuuu

SEQ ID NO: 2359911 - RNA, 19 nt, Artificial Sequence
  Description of Artificial Sequence: Synthetic oligonucleotide
gcgauccggggcaggcggg

SEQ ID NO: 2359912 - RNA, 19 nt, Artificial Sequence
  Description of Artificial Sequence: Synthetic oligonucleotide
caucacccuugaagcugaa

SEQ ID NO: 2359913 - RNA, 19 nt, Artificial Sequence
  Description of Artificial Sequence: Synthetic oligonucleotide
ccggccagcuccaugaguu

SEQ ID NO: 2359914 - RNA, 19 nt, Artificial Sequence
  Description of Artificial Sequence: Synthetic oligonucleotide
gcuccggagcugcguuccc

SEQ ID NO: 2359915 - RNA, 19 nt, Artificial Sequence
  Description of Artificial Sequence: Synthetic oligonucleotide
ccaugaguugauccacgcu

SEQ ID NO: 2359916 - RNA, 19 nt, Artificial Sequence
  Description of Artificial Sequence: Synthetic oligonucleotide
cggcacacacucugccggc

SEQ ID NO: 2359917 - RNA, 19 nt, Artificial Sequence
  Description of Artificial Sequence: Synthetic oligonucleotide
ccguuauucccggggccac

SEQ ID NO: 2359918 - RNA, 19 nt, Artificial Sequence
  Description of Artificial Sequence: Synthetic oligonucleotide
cccuuacuguagacgguaa

SEQ ID NO: 2359919 - RNA, 19 nt, Artificial Sequence
  Description of Artificial Sequence: Synthetic oligonucleotide
cgcuccggagcugcguucc

SEQ ID NO: 2359920 - RNA, 19 nt, Artificial Sequence
  Description of Artificial Sequence: Synthetic oligonucleotide
ccggggccacagaugacca

SEQ ID NO: 2359921 - RNA, 19 nt, Artificial Sequence
  Description of Artificial Sequence: Synthetic oligonucleotide
gggagccugcaaccagcaa

SEQ ID NO: 2359922 - RNA, 19 nt, Artificial Sequence
  Description of Artificial Sequence: Synthetic oligonucleotide
gcccgcgccuccuccugac

SEQ ID NO: 2359923 - RNA, 19 nt, Artificial Sequence
  Description of Artificial Sequence: Synthetic oligonucleotide
ccccuccguuauucccggg

SEQ ID NO: 2359924 - RNA, 19 nt, Artificial Sequence
  Description of Artificial Sequence: Synthetic oligonucleotide
gccugcgauccggggcagg

SEQ ID NO: 2359925 - RNA, 19 nt, Artificial Sequence
  Description of Artificial Sequence: Synthetic oligonucleotide
gcgcuccggagcugcguuc

SEQ ID NO: 2359926 - RNA, 19 nt, Artificial Sequence
  Description of Artificial Sequence: Synthetic oligonucleotide
cggccugcgauccggggca

SEQ ID NO: 2359927 - RNA, 19 nt, Artificial Sequence
  Description of Artificial Sequence: Synthetic oligonucleotide
gcguccgcagcccgcacau

SEQ ID NO: 2359928 - RNA, 19 nt, Artificial Sequence
  Description of Artificial Sequence: Synthetic oligonucleotide
cguuauucccggggccaca

SEQ ID NO: 2359929 - RNA, 19 nt, Artificial Sequence
  Description of Artificial Sequence: Synthetic oligonucleotide
cgccgcgcucgccaugguc

SEQ ID NO: 2359930 - RNA, 19 nt, Artificial Sequence
  Description of Artificial Sequence: Synthetic oligonucleotide
gcgcacagaccaggccguc

SEQ ID NO: 2359931 - RNA, 19 nt, Artificial Sequence
  Description of Artificial Sequence: Synthetic oligonucleotide
cgcucgccauggucuccgc

SEQ ID NO: 2359932 - RNA, 19 nt, Artificial Sequence
  Description of Artificial Sequence: Synthetic oligonucleotide
cgcgcacagaccaggccgu

SEQ ID NO: 2359933 - RNA, 19 nt, Artificial Sequence
  Description of Artificial Sequence: Synthetic oligonucleotide
cgcugaacugguacucguu

SEQ ID NO: 2359934 - RNA, 19 nt, Artificial Sequence
  Description of Artificial Sequence: Synthetic oligonucleotide
cccggccagcuccaugagu

SEQ ID NO: 2359935 - RNA, 19 nt, Artificial Sequence
  Description of Artificial Sequence: Synthetic oligonucleotide
cccggacaucacccuugaa

SEQ ID NO: 2359936 - RNA, 19 nt, Artificial Sequence
  Description of Artificial Sequence: Synthetic oligonucleotide
gccuugcgcggcacacacu

SEQ ID NO: 2359937 - RNA, 19 nt, Artificial Sequence
  Description of Artificial Sequence: Synthetic oligonucleotide
ggccguccccuccguuauu

SEQ ID NO: 2359938 - RNA, 19 nt, Artificial Sequence
  Description of Artificial Sequence: Synthetic oligonucleotide
cgcgcuccggagcugcguu

SEQ ID NO: 2359939 - RNA, 19 nt, Artificial Sequence
  Description of Artificial Sequence: Synthetic oligonucleotide
ccaggccguccccuccguu

SEQ ID NO: 2359940 - RNA, 19 nt, Artificial Sequence
  Description of Artificial Sequence: Synthetic oligonucleotide
ccgcgcuccggagcugcgu

SEQ ID NO: 2359941 - RNA, 19 nt, Artificial Sequence
  Description of Artificial Sequence: Synthetic oligonucleotide
ccgccgcgcucgccauggu

SEQ ID NO: 2359942 - RNA, 19 nt, Artificial Sequence
  Description of Artificial Sequence: Synthetic oligonucleotide
aaaauauauguacaggagc

SEQ ID NO: 2359943 - RNA, 19 nt, Artificial Sequence
  Description of Artificial Sequence: Synthetic oligonucleotide
aguucaaugauguacuucc

SEQ ID NO: 2359944 - RNA, 19 nt, Artificial Sequence
  Description of Artificial Sequence: Synthetic oligonucleotide
aaagauagugcaccggggc

SEQ ID NO: 2359945 - RNA, 19 nt, Artificial Sequence
  Description of Artificial Sequence: Synthetic oligonucleotide
uuugaaauccgcaccaugg

SEQ ID NO: 2359946 - RNA, 19 nt, Artificial Sequence
  Description of Artificial Sequence: Synthetic oligonucleotide
ugcaauaaaauauauguac

SEQ ID NO: 2359947 - RNA, 19 nt, Artificial Sequence
  Description of Artificial Sequence: Synthetic oligonucleotide
aaggcuugcucauauuucc

SEQ ID NO: 2359948 - RNA, 19 nt, Artificial Sequence
  Description of Artificial Sequence: Synthetic oligonucleotide
uaaaauauauguacaggag

SEQ ID NO: 2359949 - RNA, 19 nt, Artificial Sequence
  Description of Artificial Sequence: Synthetic oligonucleotide
auguacaggagcuggaucc

SEQ ID NO: 2359950 - RNA, 19 nt, Artificial Sequence
  Description of Artificial Sequence: Synthetic oligonucleotide
gugacaaucauccaaguag

SEQ ID NO: 2359951 - RNA, 19 nt, Artificial Sequence
  Description of Artificial Sequence: Synthetic oligonucleotide
agaacgagaacagacacgc

SEQ ID NO: 2359952 - RNA, 19 nt, Artificial Sequence
  Description of Artificial Sequence: Synthetic oligonucleotide
auccaagccagccagaucg

SEQ ID NO: 2359953 - RNA, 19 nt, Artificial Sequence
  Description of Artificial Sequence: Synthetic oligonucleotide
aaugagauccaagccagcc

SEQ ID NO: 2359954 - RNA, 19 nt, Artificial Sequence
  Description of Artificial Sequence: Synthetic oligonucleotide
augaagaccugucagcagc

SEQ ID NO: 2359955 - RNA, 19 nt, Artificial Sequence
  Description of Artificial Sequence: Synthetic oligonucleotide
agaaagauagugcaccggg

SEQ ID NO: 2359956 - RNA, 19 nt, Artificial Sequence
  Description of Artificial Sequence: Synthetic oligonucleotide
aagauagugcaccggggcc

SEQ ID NO: 2359957 - RNA, 19 nt, Artificial Sequence
  Description of Artificial Sequence: Synthetic oligonucleotide
aaauauauguacaggagcu

SEQ ID NO: 2359958 - RNA, 19 nt, Artificial Sequence
  Description of Artificial Sequence: Synthetic oligonucleotide
aacgagaacagacacgcug

SEQ ID NO: 2359959 - RNA, 19 nt, Artificial Sequence
  Description of Artificial Sequence: Synthetic oligonucleotide
aauuccccucccuaacucc

SEQ ID NO: 2359960 - RNA, 19 nt, Artificial Sequence
  Description of Artificial Sequence: Synthetic oligonucleotide
acagaacgagaacagacac

SEQ ID NO: 2359961 - RNA, 19 nt, Artificial Sequence
  Description of Artificial Sequence: Synthetic oligonucleotide
ugaaauccgcaccauggcg

SEQ ID NO: 2359962 - RNA, 19 nt, Artificial Sequence
  Description of Artificial Sequence: Synthetic oligonucleotide
agaguucacagaaagauag

SEQ ID NO: 2359963 - RNA, 19 nt, Artificial Sequence
  Description of Artificial Sequence: Synthetic oligonucleotide
uugaguucaaugauguacu

SEQ ID NO: 2359964 - RNA, 19 nt, Artificial Sequence
  Description of Artificial Sequence: Synthetic oligonucleotide
agcaugaagaccugucagc

SEQ ID NO: 2359965 - RNA, 19 nt, Artificial Sequence
  Description of Artificial Sequence: Synthetic oligonucleotide
aagaccugucagcagcacc

SEQ ID NO: 2359966 - RNA, 19 nt, Artificial Sequence
  Description of Artificial Sequence: Synthetic oligonucleotide
ucauauuuccagcccaaag

SEQ ID NO: 2359967 - RNA, 19 nt, Artificial Sequence
  Description of Artificial Sequence: Synthetic oligonucleotide
aaaguggucuugcaguucu

SEQ ID NO: 2359968 - RNA, 19 nt, Artificial Sequence
  Description of Artificial Sequence: Synthetic oligonucleotide
uccaaguaggccugaaacg

SEQ ID NO: 2359969 - RNA, 19 nt, Artificial Sequence
  Description of Artificial Sequence: Synthetic oligonucleotide
auauuuccagcccaaagug

SEQ ID NO: 2359970 - RNA, 19 nt, Artificial Sequence
  Description of Artificial Sequence: Synthetic oligonucleotide
ucgugguuggccaagucgg

SEQ ID NO: 2359971 - RNA, 19 nt, Artificial Sequence
  Description of Artificial Sequence: Synthetic oligonucleotide
guaggagggauccaguggg

SEQ ID NO: 2359972 - RNA, 19 nt, Artificial Sequence
  Description of Artificial Sequence: Synthetic oligonucleotide
uguaucaugugguugaguu

SEQ ID NO: 2359973 - RNA, 19 nt, Artificial Sequence
  Description of Artificial Sequence: Synthetic oligonucleotide
auauauguacaggagcugg

SEQ ID NO: 2359974 - RNA, 19 nt, Artificial Sequence
  Description of Artificial Sequence: Synthetic oligonucleotide
uacagaacgagaacagaca

SEQ ID NO: 2359975 - RNA, 19 nt, Artificial Sequence
  Description of Artificial Sequence: Synthetic oligonucleotide
gaaauccgcaccauggcgg

SEQ ID NO: 2359976 - RNA, 19 nt, Artificial Sequence
  Description of Artificial Sequence: Synthetic oligonucleotide
acagaaagauagugcaccg

SEQ ID NO: 2359977 - RNA, 19 nt, Artificial Sequence
  Description of Artificial Sequence: Synthetic oligonucleotide
aaauccgcaccauggcggg

SEQ ID NO: 2359978 - RNA, 19 nt, Artificial Sequence
  Description of Artificial Sequence: Synthetic oligonucleotide
uaucuaugggacaggcagg

SEQ ID NO: 2359979 - RNA, 19 nt, Artificial Sequence
  Description of Artificial Sequence: Synthetic oligonucleotide
ugguugaguucaaugaugu

SEQ ID NO: 2359980 - RNA, 19 nt, Artificial Sequence
  Description of Artificial Sequence: Synthetic oligonucleotide
aauauauguacaggagcug

SEQ ID NO: 2359981 - RNA, 19 nt, Artificial Sequence
  Description of Artificial Sequence: Synthetic oligonucleotide
ugaagagguaggcacgccc

SEQ ID NO: 2359982 - RNA, 19 nt, Artificial Sequence
  Description of Artificial Sequence: Synthetic oligonucleotide
acagcuauaccuccgguga

SEQ ID NO: 2359983 - RNA, 19 nt, Artificial Sequence
  Description of Artificial Sequence: Synthetic oligonucleotide
cacagaaagauagugcacc

SEQ ID NO: 2359984 - RNA, 19 nt, Artificial Sequence
  Description of Artificial Sequence: Synthetic oligonucleotide
uugaaauccgcaccauggc

SEQ ID NO: 2359985 - RNA, 19 nt, Artificial Sequence
  Description of Artificial Sequence: Synthetic oligonucleotide
aacgucuugggcuuugaaa

SEQ ID NO: 2359986 - RNA, 19 nt, Artificial Sequence
  Description of Artificial Sequence: Synthetic oligonucleotide
agaccugucagcagcaccc

SEQ ID NO: 2359987 - RNA, 19 nt, Artificial Sequence
  Description of Artificial Sequence: Synthetic oligonucleotide
uauauguacaggagcugga

SEQ ID NO: 2359988 - RNA, 19 nt, Artificial Sequence
  Description of Artificial Sequence: Synthetic oligonucleotide
uguacuuccccuccuuugu

SEQ ID NO: 2359989 - RNA, 19 nt, Artificial Sequence
  Description of Artificial Sequence: Synthetic oligonucleotide
acgucuugggcuuugaaau

SEQ ID NO: 2359990 - RNA, 19 nt, Artificial Sequence
  Description of Artificial Sequence: Synthetic oligonucleotide
caugugguugaguucaaug

SEQ ID NO: 2359991 - RNA, 19 nt, Artificial Sequence
  Description of Artificial Sequence: Synthetic oligonucleotide
caggccauaucuaugggac

SEQ ID NO: 2359992 - RNA, 19 nt, Artificial Sequence
  Description of Artificial Sequence: Synthetic oligonucleotide
gaucgcaggaagguguugg

SEQ ID NO: 2359993 - RNA, 19 nt, Artificial Sequence
  Description of Artificial Sequence: Synthetic oligonucleotide
acgagaacagacacgcugc

SEQ ID NO: 2359994 - RNA, 19 nt, Artificial Sequence
  Description of Artificial Sequence: Synthetic oligonucleotide
guaggcacgccccugacug

SEQ ID NO: 2359995 - RNA, 19 nt, Artificial Sequence
  Description of Artificial Sequence: Synthetic oligonucleotide
cucgcaguggaugucagcg

SEQ ID NO: 2359996 - RNA, 19 nt, Artificial Sequence
  Description of Artificial Sequence: Synthetic oligonucleotide
ucuugggcuuugaaauccg

SEQ ID NO: 2359997 - RNA, 19 nt, Artificial Sequence
  Description of Artificial Sequence: Synthetic oligonucleotide
gucgugguuggccaagucg

SEQ ID NO: 2359998 - RNA, 19 nt, Artificial Sequence
  Description of Artificial Sequence: Synthetic oligonucleotide
uccggugacaaucauccaa

SEQ ID NO: 2359999 - RNA, 19 nt, Artificial Sequence
  Description of Artificial Sequence: Synthetic oligonucleotide
ucuuuguaucaugugguug

SEQ ID NO: 2360000 - RNA, 19 nt, Artificial Sequence
  Description of Artificial Sequence: Synthetic oligonucleotide
cagagcucccuucaggagg

SEQ ID NO: 2360001 - RNA, 19 nt, Artificial Sequence
  Description of Artificial Sequence: Synthetic oligonucleotide
aguuggggcacagcuauac

SEQ ID NO: 2360002 - RNA, 19 nt, Artificial Sequence
  Description of Artificial Sequence: Synthetic oligonucleotide
agcgacagcaugaagaccu

SEQ ID NO: 2360003 - RNA, 19 nt, Artificial Sequence
  Description of Artificial Sequence: Synthetic oligonucleotide
cagaacgagaacagacacg

SEQ ID NO: 2360004 - RNA, 19 nt, Artificial Sequence
  Description of Artificial Sequence: Synthetic oligonucleotide
uggaaggacuuggagauga

SEQ ID NO: 2360005 - RNA, 19 nt, Artificial Sequence
  Description of Artificial Sequence: Synthetic oligonucleotide
acccugaggguccagagcu

SEQ ID NO: 2360006 - RNA, 19 nt, Artificial Sequence
  Description of Artificial Sequence: Synthetic oligonucleotide
uugcucauauuuccagccc

SEQ ID NO: 2360007 - RNA, 19 nt, Artificial Sequence
  Description of Artificial Sequence: Synthetic oligonucleotide
agcgaaaccaguggcuccc

SEQ ID NO: 2360008 - RNA, 19 nt, Artificial Sequence
  Description of Artificial Sequence: Synthetic oligonucleotide
gaggagcgaaaccaguggc

SEQ ID NO: 2360009 - RNA, 19 nt, Artificial Sequence
  Description of Artificial Sequence: Synthetic oligonucleotide
ccuccggugacaaucaucc

SEQ ID NO: 2360010 - RNA, 19 nt, Artificial Sequence
  Description of Artificial Sequence: Synthetic oligonucleotide
ugaagaccugucagcagca

SEQ ID NO: 2360011 - RNA, 19 nt, Artificial Sequence
  Description of Artificial Sequence: Synthetic oligonucleotide
acggcgagcagagggagcc

SEQ ID NO: 2360012 - RNA, 19 nt, Artificial Sequence
  Description of Artificial Sequence: Synthetic oligonucleotide
caaucauccaaguaggccu

SEQ ID NO: 2360013 - RNA, 19 nt, Artificial Sequence
  Description of Artificial Sequence: Synthetic oligonucleotide
cuuugaaauccgcaccaug

SEQ ID NO: 2360014 - RNA, 19 nt, Artificial Sequence
  Description of Artificial Sequence: Synthetic oligonucleotide
ugcaauuccccucccuaac

SEQ ID NO: 2360015 - RNA, 19 nt, Artificial Sequence
  Description of Artificial Sequence: Synthetic oligonucleotide
aaucauccaaguaggccug

SEQ ID NO: 2360016 - RNA, 19 nt, Artificial Sequence
  Description of Artificial Sequence: Synthetic oligonucleotide
ggggagaguucacagaaag

SEQ ID NO: 2360017 - RNA, 19 nt, Artificial Sequence
  Description of Artificial Sequence: Synthetic oligonucleotide
gaagagguaggcacgcccc

SEQ ID NO: 2360018 - RNA, 19 nt, Artificial Sequence
  Description of Artificial Sequence: Synthetic oligonucleotide
gguaggagggauccagugg

SEQ ID NO: 2360019 - RNA, 19 nt, Artificial Sequence
  Description of Artificial Sequence: Synthetic oligonucleotide
auuuccagcccaaaguggu

SEQ ID NO: 2360020 - RNA, 19 nt, Artificial Sequence
  Description of Artificial Sequence: Synthetic oligonucleotide
cauauuuccagcccaaagu

SEQ ID NO: 2360021 - RNA, 19 nt, Artificial Sequence
  Description of Artificial Sequence: Synthetic oligonucleotide
augaggucgucgugguugg

SEQ ID NO: 2360022 - RNA, 19 nt, Artificial Sequence
  Description of Artificial Sequence: Synthetic oligonucleotide
ggaggagcgaaaccagugg

SEQ ID NO: 2360023 - RNA, 19 nt, Artificial Sequence
  Description of Artificial Sequence: Synthetic oligonucleotide
cacagcuauaccuccggug

SEQ ID NO: 2360024 - RNA, 19 nt, Artificial Sequence
  Description of Artificial Sequence: Synthetic oligonucleotide
caaugauguacuuccccuc

SEQ ID NO: 2360025 - RNA, 19 nt, Artificial Sequence
  Description of Artificial Sequence: Synthetic oligonucleotide
agucgggcacggcaguugg

SEQ ID NO: 2360026 - RNA, 19 nt, Artificial Sequence
  Description of Artificial Sequence: Synthetic oligonucleotide
caugaagaccugucagcag

SEQ ID NO: 2360027 - RNA, 19 nt, Artificial Sequence
  Description of Artificial Sequence: Synthetic oligonucleotide
aucgcaggaagguguuggg

SEQ ID NO: 2360028 - RNA, 19 nt, Artificial Sequence
  Description of Artificial Sequence: Synthetic oligonucleotide
cuaugggacaggcaggaca

SEQ ID NO: 2360029 - RNA, 19 nt, Artificial Sequence
  Description of Artificial Sequence: Synthetic oligonucleotide
ugguuggccaagucgggca

SEQ ID NO: 2360030 - RNA, 19 nt, Artificial Sequence
  Description of Artificial Sequence: Synthetic oligonucleotide
uggcccgcagcccacauuc

SEQ ID NO: 2360031 - RNA, 19 nt, Artificial Sequence
  Description of Artificial Sequence: Synthetic oligonucleotide
agggcaguggccccacgcg

SEQ ID NO: 2360032 - RNA, 19 nt, Artificial Sequence
  Description of Artificial Sequence: Synthetic oligonucleotide
aagagguaggcacgccccu

SEQ ID NO: 2360033 - RNA, 19 nt, Artificial Sequence
  Description of Artificial Sequence: Synthetic oligonucleotide
guugaagagguaggcacgc

SEQ ID NO: 2360034 - RNA, 19 nt, Artificial Sequence
  Description of Artificial Sequence: Synthetic oligonucleotide
ggucuugcaguucucgcag

SEQ ID NO: 2360035 - RNA, 19 nt, Artificial Sequence
  Description of Artificial Sequence: Synthetic oligonucleotide
gauccuuccccugugggga

SEQ ID NO: 2360036 - RNA, 19 nt, Artificial Sequence
  Description of Artificial Sequence: Synthetic oligonucleotide
cacacaggccauaucuaug

SEQ ID NO: 2360037 - RNA, 19 nt, Artificial Sequence
  Description of Artificial Sequence: Synthetic oligonucleotide
gacaaucauccaaguaggc

SEQ ID NO: 2360038 - RNA, 19 nt, Artificial Sequence
  Description of Artificial Sequence: Synthetic oligonucleotide
cagaaagauagugcaccgg

SEQ ID NO: 2360039 - RNA, 19 nt, Artificial Sequence
  Description of Artificial Sequence: Synthetic oligonucleotide
agaguugaagagguaggca

SEQ ID NO: 2360040 - RNA, 19 nt, Artificial Sequence
  Description of Artificial Sequence: Synthetic oligonucleotide
aguggaugucagcgacagc

SEQ ID NO: 2360041 - RNA, 19 nt, Artificial Sequence
  Description of Artificial Sequence: Synthetic oligonucleotide
gaguucaaugauguacuuc

SEQ ID NO: 2360042 - RNA, 19 nt, Artificial Sequence
  Description of Artificial Sequence: Synthetic oligonucleotide
gagcgaaaccaguggcucc

SEQ ID NO: 2360043 - RNA, 19 nt, Artificial Sequence
  Description of Artificial Sequence: Synthetic oligonucleotide
guaucaugugguugaguuc

SEQ ID NO: 2360044 - RNA, 19 nt, Artificial Sequence
  Description of Artificial Sequence: Synthetic oligonucleotide
gaugaaggucagucccagc

SEQ ID NO: 2360045 - RNA, 19 nt, Artificial Sequence
  Description of Artificial Sequence: Synthetic oligonucleotide
ggauccuuccccugugggg

SEQ ID NO: 2360046 - RNA, 19 nt, Artificial Sequence
  Description of Artificial Sequence: Synthetic oligonucleotide
aucuaugggacaggcagga

SEQ ID NO: 2360047 - RNA, 19 nt, Artificial Sequence
  Description of Artificial Sequence: Synthetic oligonucleotide
caguggaugucagcgacag

SEQ ID NO: 2360048 - RNA, 19 nt, Artificial Sequence
  Description of Artificial Sequence: Synthetic oligonucleotide
cagccguugucuuuguauc

SEQ ID NO: 2360049 - RNA, 19 nt, Artificial Sequence
  Description of Artificial Sequence: Synthetic oligonucleotide
aaacgucuugggcuuugaa

SEQ ID NO: 2360050 - RNA, 19 nt, Artificial Sequence
  Description of Artificial Sequence: Synthetic oligonucleotide
uuggccaagucgggcacgg

SEQ ID NO: 2360051 - RNA, 19 nt, Artificial Sequence
  Description of Artificial Sequence: Synthetic oligonucleotide
gagaacagacacgcugcag

SEQ ID NO: 2360052 - RNA, 19 nt, Artificial Sequence
  Description of Artificial Sequence: Synthetic oligonucleotide
cagcccacauucaccacag

SEQ ID NO: 2360053 - RNA, 19 nt, Artificial Sequence
  Description of Artificial Sequence: Synthetic oligonucleotide
caauuccccucccuaacuc

SEQ ID NO: 2360054 - RNA, 19 nt, Artificial Sequence
  Description of Artificial Sequence: Synthetic oligonucleotide
ggccauaucuaugggacag

SEQ ID NO: 2360055 - RNA, 19 nt, Artificial Sequence
  Description of Artificial Sequence: Synthetic oligonucleotide
cugcagguaggagggaucc

SEQ ID NO: 2360056 - RNA, 19 nt, Artificial Sequence
  Description of Artificial Sequence: Synthetic oligonucleotide
uguacaggagcuggauccu

SEQ ID NO: 2360057 - RNA, 19 nt, Artificial Sequence
  Description of Artificial Sequence: Synthetic oligonucleotide
gagcagagggagcccagug

SEQ ID NO: 2360058 - RNA, 19 nt, Artificial Sequence
  Description of Artificial Sequence: Synthetic oligonucleotide
gcucccuucaggaggagcg

SEQ ID NO: 2360059 - RNA, 19 nt, Artificial Sequence
  Description of Artificial Sequence: Synthetic oligonucleotide
auauguacaggagcuggau

SEQ ID NO: 2360060 - RNA, 19 nt, Artificial Sequence
  Description of Artificial Sequence: Synthetic oligonucleotide
ugaaacgucuugggcuuug

SEQ ID NO: 2360061 - RNA, 19 nt, Artificial Sequence
  Description of Artificial Sequence: Synthetic oligonucleotide
aggguccagagcucccuuc

SEQ ID NO: 2360062 - RNA, 19 nt, Artificial Sequence
  Description of Artificial Sequence: Synthetic oligonucleotide
ugacugcccuggaaggacu

SEQ ID NO: 2360063 - RNA, 19 nt, Artificial Sequence
  Description of Artificial Sequence: Synthetic oligonucleotide
gaggucgucgugguuggcc

SEQ ID NO: 2360064 - RNA, 19 nt, Artificial Sequence
  Description of Artificial Sequence: Synthetic oligonucleotide
ugaguucaaugauguacuu

SEQ ID NO: 2360065 - RNA, 19 nt, Artificial Sequence
  Description of Artificial Sequence: Synthetic oligonucleotide
ggcacagcuauaccuccgg

SEQ ID NO: 2360066 - RNA, 19 nt, Artificial Sequence
  Description of Artificial Sequence: Synthetic oligonucleotide
cauaucuaugggacaggca

SEQ ID NO: 2360067 - RNA, 19 nt, Artificial Sequence
  Description of Artificial Sequence: Synthetic oligonucleotide
guaggccugaaacgucuug

SEQ ID NO: 2360068 - RNA, 19 nt, Artificial Sequence
  Description of Artificial Sequence: Synthetic oligonucleotide
guuggggcacagcuauacc

SEQ ID NO: 2360069 - RNA, 19 nt, Artificial Sequence
  Description of Artificial Sequence: Synthetic oligonucleotide
aggucgucgugguuggcca

SEQ ID NO: 2360070 - RNA, 19 nt, Artificial Sequence
  Description of Artificial Sequence: Synthetic oligonucleotide
ggcuuugaaauccgcacca

SEQ ID NO: 2360071 - RNA, 19 nt, Artificial Sequence
  Description of Artificial Sequence: Synthetic oligonucleotide
aggcacgccccugacugcc

SEQ ID NO: 2360072 - RNA, 19 nt, Artificial Sequence
  Description of Artificial Sequence: Synthetic oligonucleotide
ccggugacaaucauccaag

SEQ ID NO: 2360073 - RNA, 19 nt, Artificial Sequence
  Description of Artificial Sequence: Synthetic oligonucleotide
gggcuuugaaauccgcacc

SEQ ID NO: 2360074 - RNA, 19 nt, Artificial Sequence
  Description of Artificial Sequence: Synthetic oligonucleotide
agcccagugccucgccugg

SEQ ID NO: 2360075 - RNA, 19 nt, Artificial Sequence
  Description of Artificial Sequence: Synthetic oligonucleotide
aagucgggcacggcaguug

SEQ ID NO: 2360076 - RNA, 19 nt, Artificial Sequence
  Description of Artificial Sequence: Synthetic oligonucleotide
ucucgcaguggaugucagc

SEQ ID NO: 2360077 - RNA, 19 nt, Artificial Sequence
  Description of Artificial Sequence: Synthetic oligonucleotide
auccuuccccuguggggac

SEQ ID NO: 2360078 - RNA, 19 nt, Artificial Sequence
  Description of Artificial Sequence: Synthetic oligonucleotide
gauccaagccagccagauc

SEQ ID NO: 2360079 - RNA, 19 nt, Artificial Sequence
  Description of Artificial Sequence: Synthetic oligonucleotide
ugcaguucucgcaguggau

SEQ ID NO: 2360080 - RNA, 19 nt, Artificial Sequence
  Description of Artificial Sequence: Synthetic oligonucleotide
uagugcaccggggccauga

SEQ ID NO: 2360081 - RNA, 19 nt, Artificial Sequence
  Description of Artificial Sequence: Synthetic oligonucleotide
ucgccugggagcggggagg

SEQ ID NO: 2360082 - RNA, 19 nt, Artificial Sequence
  Description of Artificial Sequence: Synthetic oligonucleotide
agcuauaccuccggugaca

SEQ ID NO: 2360083 - RNA, 19 nt, Artificial Sequence
  Description of Artificial Sequence: Synthetic oligonucleotide
ucgcaguggaugucagcga

SEQ ID NO: 2360084 - RNA, 19 nt, Artificial Sequence
  Description of Artificial Sequence: Synthetic oligonucleotide
cugacugcccuggaaggac

SEQ ID NO: 2360085 - RNA, 19 nt, Artificial Sequence
  Description of Artificial Sequence: Synthetic oligonucleotide
aggccauaucuaugggaca

SEQ ID NO: 2360086 - RNA, 19 nt, Artificial Sequence
  Description of Artificial Sequence: Synthetic oligonucleotide
uuguaucaugugguugagu

SEQ ID NO: 2360087 - RNA, 19 nt, Artificial Sequence
  Description of Artificial Sequence: Synthetic oligonucleotide
aauccgcaccauggcgggg

SEQ ID NO: 2360088 - RNA, 19 nt, Artificial Sequence
  Description of Artificial Sequence: Synthetic oligonucleotide
gucacagugcaugcaauaa

SEQ ID NO: 2360089 - RNA, 19 nt, Artificial Sequence
  Description of Artificial Sequence: Synthetic oligonucleotide
gaccugucagcagcacccg

SEQ ID NO: 2360090 - RNA, 19 nt, Artificial Sequence
  Description of Artificial Sequence: Synthetic oligonucleotide
ugaggguccagagcucccu

SEQ ID NO: 2360091 - RNA, 19 nt, Artificial Sequence
  Description of Artificial Sequence: Synthetic oligonucleotide
gagguaggcacgccccuga

SEQ ID NO: 2360092 - RNA, 19 nt, Artificial Sequence
  Description of Artificial Sequence: Synthetic oligonucleotide
accuccggugacaaucauc

SEQ ID NO: 2360093 - RNA, 19 nt, Artificial Sequence
  Description of Artificial Sequence: Synthetic oligonucleotide
ccagccagaucgcaggaag

SEQ ID NO: 2360094 - RNA, 19 nt, Artificial Sequence
  Description of Artificial Sequence: Synthetic oligonucleotide
gcaguucucgcaguggaug

SEQ ID NO: 2360095 - RNA, 19 nt, Artificial Sequence
  Description of Artificial Sequence: Synthetic oligonucleotide
gcccaaaguggucuugcag

SEQ ID NO: 2360096 - RNA, 19 nt, Artificial Sequence
  Description of Artificial Sequence: Synthetic oligonucleotide
aggagcgaaaccaguggcu

SEQ ID NO: 2360097 - RNA, 19 nt, Artificial Sequence
  Description of Artificial Sequence: Synthetic oligonucleotide
ccauaucuaugggacaggc

SEQ ID NO: 2360098 - RNA, 19 nt, Artificial Sequence
  Description of Artificial Sequence: Synthetic oligonucleotide
cugggagcggggagggccc

SEQ ID NO: 2360099 - RNA, 19 nt, Artificial Sequence
  Description of Artificial Sequence: Synthetic oligonucleotide
ggccugaaacgucuugggc

SEQ ID NO: 2360100 - RNA, 19 nt, Artificial Sequence
  Description of Artificial Sequence: Synthetic oligonucleotide
cugaggguccagagcuccc

SEQ ID NO: 2360101 - RNA, 19 nt, Artificial Sequence
  Description of Artificial Sequence: Synthetic oligonucleotide
gcaugaagaccugucagca

SEQ ID NO: 2360102 - RNA, 19 nt, Artificial Sequence
  Description of Artificial Sequence: Synthetic oligonucleotide
aggaugaaggucaguccca

SEQ ID NO: 2360103 - RNA, 19 nt, Artificial Sequence
  Description of Artificial Sequence: Synthetic oligonucleotide
agcccaaaguggucuugca

SEQ ID NO: 2360104 - RNA, 19 nt, Artificial Sequence
  Description of Artificial Sequence: Synthetic oligonucleotide
uccgcgagguggccuggcc

SEQ ID NO: 2360105 - RNA, 19 nt, Artificial Sequence
  Description of Artificial Sequence: Synthetic oligonucleotide
auaccuccggugacaauca

SEQ ID NO: 2360106 - RNA, 19 nt, Artificial Sequence
  Description of Artificial Sequence: Synthetic oligonucleotide
aacagacacgcugcaggua

SEQ ID NO: 2360107 - RNA, 19 nt, Artificial Sequence
  Description of Artificial Sequence: Synthetic oligonucleotide
guuggccaagucgggcacg

SEQ ID NO: 2360108 - RNA, 19 nt, Artificial Sequence
  Description of Artificial Sequence: Synthetic oligonucleotide
agggagcccagugccucgc

SEQ ID NO: 2360109 - RNA, 19 nt, Artificial Sequence
  Description of Artificial Sequence: Synthetic oligonucleotide
caaaguggucuugcaguuc

SEQ ID NO: 2360110 - RNA, 19 nt, Artificial Sequence
  Description of Artificial Sequence: Synthetic oligonucleotide
cagcuauaccuccggugac

SEQ ID NO: 2360111 - RNA, 19 nt, Artificial Sequence
  Description of Artificial Sequence: Synthetic oligonucleotide
gugguuggccaagucgggc

SEQ ID NO: 2360112 - RNA, 19 nt, Artificial Sequence
  Description of Artificial Sequence: Synthetic oligonucleotide
gugcaauuccccucccuaa

SEQ ID NO: 2360113 - RNA, 19 nt, Artificial Sequence
  Description of Artificial Sequence: Synthetic oligonucleotide
gagaugaggucgucguggu

SEQ ID NO: 2360114 - RNA, 19 nt, Artificial Sequence
  Description of Artificial Sequence: Synthetic oligonucleotide
acggcaguuggggcacagc

SEQ ID NO: 2360115 - RNA, 19 nt, Artificial Sequence
  Description of Artificial Sequence: Synthetic oligonucleotide
agccgccucgacuuguuua

SEQ ID NO: 2360116 - RNA, 19 nt, Artificial Sequence
  Description of Artificial Sequence: Synthetic oligonucleotide
uaggcacgccccugacugc

SEQ ID NO: 2360117 - RNA, 19 nt, Artificial Sequence
  Description of Artificial Sequence: Synthetic oligonucleotide
ucaugugguugaguucaau

SEQ ID NO: 2360118 - RNA, 19 nt, Artificial Sequence
  Description of Artificial Sequence: Synthetic oligonucleotide
ggugcaauuccccucccua

SEQ ID NO: 2360119 - RNA, 19 nt, Artificial Sequence
  Description of Artificial Sequence: Synthetic oligonucleotide
ggagcgaaaccaguggcuc

SEQ ID NO: 2360120 - RNA, 19 nt, Artificial Sequence
  Description of Artificial Sequence: Synthetic oligonucleotide
ucuaugggacaggcaggac

SEQ ID NO: 2360121 - RNA, 19 nt, Artificial Sequence
  Description of Artificial Sequence: Synthetic oligonucleotide
agagguaggcacgccccug

SEQ ID NO: 2360122 - RNA, 19 nt, Artificial Sequence
  Description of Artificial Sequence: Synthetic oligonucleotide
gagcuggauccuuccccug

SEQ ID NO: 2360123 - RNA, 19 nt, Artificial Sequence
  Description of Artificial Sequence: Synthetic oligonucleotide
augucagcgacagcaugaa

SEQ ID NO: 2360124 - RNA, 19 nt, Artificial Sequence
  Description of Artificial Sequence: Synthetic oligonucleotide
cucgccugggagcggggag

SEQ ID NO: 2360125 - RNA, 19 nt, Artificial Sequence
  Description of Artificial Sequence: Synthetic oligonucleotide
gucagucccagccguuguc

SEQ ID NO: 2360126 - RNA, 19 nt, Artificial Sequence
  Description of Artificial Sequence: Synthetic oligonucleotide
cacggcgagcagagggagc

SEQ ID NO: 2360127 - RNA, 19 nt, Artificial Sequence
  Description of Artificial Sequence: Synthetic oligonucleotide
gaaacgucuugggcuuuga

SEQ ID NO: 2360128 - RNA, 19 nt, Artificial Sequence
  Description of Artificial Sequence: Synthetic oligonucleotide
gccgccucgacuuguuuac

SEQ ID NO: 2360129 - RNA, 19 nt, Artificial Sequence
  Description of Artificial Sequence: Synthetic oligonucleotide
gucgucgugguuggccaag

SEQ ID NO: 2360130 - RNA, 19 nt, Artificial Sequence
  Description of Artificial Sequence: Synthetic oligonucleotide
ggcccgguccgcgaggugg

SEQ ID NO: 2360131 - RNA, 19 nt, Artificial Sequence
  Description of Artificial Sequence: Synthetic oligonucleotide
agaucgcaggaagguguug

SEQ ID NO: 2360132 - RNA, 19 nt, Artificial Sequence
  Description of Artificial Sequence: Synthetic oligonucleotide
ccccugacugcccuggaag

SEQ ID NO: 2360133 - RNA, 19 nt, Artificial Sequence
  Description of Artificial Sequence: Synthetic oligonucleotide
cagcgacagcaugaagacc

SEQ ID NO: 2360134 - RNA, 19 nt, Artificial Sequence
  Description of Artificial Sequence: Synthetic oligonucleotide
gccauaucuaugggacagg

SEQ ID NO: 2360135 - RNA, 19 nt, Artificial Sequence
  Description of Artificial Sequence: Synthetic oligonucleotide
uggccccacgcggggagcg

SEQ ID NO: 2360136 - RNA, 19 nt, Artificial Sequence
  Description of Artificial Sequence: Synthetic oligonucleotide
ggccaagucgggcacggca

SEQ ID NO: 2360137 - RNA, 19 nt, Artificial Sequence
  Description of Artificial Sequence: Synthetic oligonucleotide
gcuacagaacgagaacaga

SEQ ID NO: 2360138 - RNA, 19 nt, Artificial Sequence
  Description of Artificial Sequence: Synthetic oligonucleotide
acgccccugacugcccugg

SEQ ID NO: 2360139 - RNA, 19 nt, Artificial Sequence
  Description of Artificial Sequence: Synthetic oligonucleotide
ggucacagugcaugcaaua

SEQ ID NO: 2360140 - RNA, 19 nt, Artificial Sequence
  Description of Artificial Sequence: Synthetic oligonucleotide
caggacagagggguuaaaa

SEQ ID NO: 2360141 - RNA, 19 nt, Artificial Sequence
  Description of Artificial Sequence: Synthetic oligonucleotide
cccgcagcccacauucacc

SEQ ID NO: 2360142 - RNA, 19 nt, Artificial Sequence
  Description of Artificial Sequence: Synthetic oligonucleotide
caaggucacagugcaugca

SEQ ID NO: 2360143 - RNA, 19 nt, Artificial Sequence
  Description of Artificial Sequence: Synthetic oligonucleotide
cccaaaguggucuugcagu

SEQ ID NO: 2360144 - RNA, 19 nt, Artificial Sequence
  Description of Artificial Sequence: Synthetic oligonucleotide
agcacacaggccauaucua

SEQ ID NO: 2360145 - RNA, 19 nt, Artificial Sequence
  Description of Artificial Sequence: Synthetic oligonucleotide
gcaguuggggcacagcuau

SEQ ID NO: 2360146 - RNA, 19 nt, Artificial Sequence
  Description of Artificial Sequence: Synthetic oligonucleotide
ggguccagagcucccuuca

SEQ ID NO: 2360147 - RNA, 19 nt, Artificial Sequence
  Description of Artificial Sequence: Synthetic oligonucleotide
caguucucgcaguggaugu

SEQ ID NO: 2360148 - RNA, 19 nt, Artificial Sequence
  Description of Artificial Sequence: Synthetic oligonucleotide
guacuuccccuccuuugua

SEQ ID NO: 2360149 - RNA, 19 nt, Artificial Sequence
  Description of Artificial Sequence: Synthetic oligonucleotide
ucgucgugguuggccaagu

SEQ ID NO: 2360150 - RNA, 19 nt, Artificial Sequence
  Description of Artificial Sequence: Synthetic oligonucleotide
gacuuggagaugaggucgu

SEQ ID NO: 2360151 - RNA, 19 nt, Artificial Sequence
  Description of Artificial Sequence: Synthetic oligonucleotide
guucgcagccgccucgacu

SEQ ID NO: 2360152 - RNA, 19 nt, Artificial Sequence
  Description of Artificial Sequence: Synthetic oligonucleotide
caccggggccaugagagca

SEQ ID NO: 2360153 - RNA, 19 nt, Artificial Sequence
  Description of Artificial Sequence: Synthetic oligonucleotide
gggcacagcuauaccuccg

SEQ ID NO: 2360154 - RNA, 19 nt, Artificial Sequence
  Description of Artificial Sequence: Synthetic oligonucleotide
cucauauuuccagcccaaa

SEQ ID NO: 2360155 - RNA, 19 nt, Artificial Sequence
  Description of Artificial Sequence: Synthetic oligonucleotide
gcggggagggcccgguccg

SEQ ID NO: 2360156 - RNA, 19 nt, Artificial Sequence
  Description of Artificial Sequence: Synthetic oligonucleotide
ggggcgcuccugaugggcg

SEQ ID NO: 2360157 - RNA, 19 nt, Artificial Sequence
  Description of Artificial Sequence: Synthetic oligonucleotide
gccagaucgcaggaaggug

SEQ ID NO: 2360158 - RNA, 19 nt, Artificial Sequence
  Description of Artificial Sequence: Synthetic oligonucleotide
ccguugucuuuguaucaug

SEQ ID NO: 2360159 - RNA, 19 nt, Artificial Sequence
  Description of Artificial Sequence: Synthetic oligonucleotide
cucugcuggcccgcagccc

SEQ ID NO: 2360160 - RNA, 19 nt, Artificial Sequence
  Description of Artificial Sequence: Synthetic oligonucleotide
aaggucagucccagccguu

SEQ ID NO: 2360161 - RNA, 19 nt, Artificial Sequence
  Description of Artificial Sequence: Synthetic oligonucleotide
ccagaucgcaggaaggugu

SEQ ID NO: 2360162 - RNA, 19 nt, Artificial Sequence
  Description of Artificial Sequence: Synthetic oligonucleotide
ggggccaagggcaguggcc

SEQ ID NO: 2360163 - RNA, 19 nt, Artificial Sequence
  Description of Artificial Sequence: Synthetic oligonucleotide
cccuguggggacccugagg

SEQ ID NO: 2360164 - RNA, 19 nt, Artificial Sequence
  Description of Artificial Sequence: Synthetic oligonucleotide
ggagggcccgguccgcgag

SEQ ID NO: 2360165 - RNA, 19 nt, Artificial Sequence
  Description of Artificial Sequence: Synthetic oligonucleotide
gucgggcacggcaguuggg

SEQ ID NO: 2360166 - RNA, 19 nt, Artificial Sequence
  Description of Artificial Sequence: Synthetic oligonucleotide
gcaauuccccucccuaacu

SEQ ID NO: 2360167 - RNA, 19 nt, Artificial Sequence
  Description of Artificial Sequence: Synthetic oligonucleotide
gcuauaccuccggugacaa

SEQ ID NO: 2360168 - RNA, 19 nt, Artificial Sequence
  Description of Artificial Sequence: Synthetic oligonucleotide
cgucuugggcuuugaaauc

SEQ ID NO: 2360169 - RNA, 19 nt, Artificial Sequence
  Description of Artificial Sequence: Synthetic oligonucleotide
cacggcaguuggggcacag

SEQ ID NO: 2360170 - RNA, 19 nt, Artificial Sequence
  Description of Artificial Sequence: Synthetic oligonucleotide
gauagugcaccggggccau

SEQ ID NO: 2360171 - RNA, 19 nt, Artificial Sequence
  Description of Artificial Sequence: Synthetic oligonucleotide
cauucaccacagaguugaa

SEQ ID NO: 2360172 - RNA, 19 nt, Artificial Sequence
  Description of Artificial Sequence: Synthetic oligonucleotide
gcucauauuuccagcccaa

SEQ ID NO: 2360173 - RNA, 19 nt, Artificial Sequence
  Description of Artificial Sequence: Synthetic oligonucleotide
aucaugugguugaguucaa

SEQ ID NO: 2360174 - RNA, 19 nt, Artificial Sequence
  Description of Artificial Sequence: Synthetic oligonucleotide
cacgccccugacugcccug

SEQ ID NO: 2360175 - RNA, 19 nt, Artificial Sequence
  Description of Artificial Sequence: Synthetic oligonucleotide
gaacgagaacagacacgcu

SEQ ID NO: 2360176 - RNA, 19 nt, Artificial Sequence
  Description of Artificial Sequence: Synthetic oligonucleotide
gcagcacacaggccauauc

SEQ ID NO: 2360177 - RNA, 19 nt, Artificial Sequence
  Description of Artificial Sequence: Synthetic oligonucleotide
ccgguucgcagccgccucg

SEQ ID NO: 2360178 - RNA, 19 nt, Artificial Sequence
  Description of Artificial Sequence: Synthetic oligonucleotide
uggccaagucgggcacggc

SEQ ID NO: 2360179 - RNA, 19 nt, Artificial Sequence
  Description of Artificial Sequence: Synthetic oligonucleotide
cgccucgacuuguuuacac

SEQ ID NO: 2360180 - RNA, 19 nt, Artificial Sequence
  Description of Artificial Sequence: Synthetic oligonucleotide
cucccuucaggaggagcga

SEQ ID NO: 2360181 - RNA, 19 nt, Artificial Sequence
  Description of Artificial Sequence: Synthetic oligonucleotide
cguugucuuuguaucaugu

SEQ ID NO: 2360182 - RNA, 19 nt, Artificial Sequence
  Description of Artificial Sequence: Synthetic oligonucleotide
ccagccguugucuuuguau

SEQ ID NO: 2360183 - RNA, 19 nt, Artificial Sequence
  Description of Artificial Sequence: Synthetic oligonucleotide
ccugaaacgucuugggcuu

SEQ ID NO: 2360184 - RNA, 19 nt, Artificial Sequence
  Description of Artificial Sequence: Synthetic oligonucleotide
ggcgagcagagggagccca

SEQ ID NO: 2360185 - RNA, 19 nt, Artificial Sequence
  Description of Artificial Sequence: Synthetic oligonucleotide
gcaccggggccaugagagc

SEQ ID NO: 2360186 - RNA, 19 nt, Artificial Sequence
  Description of Artificial Sequence: Synthetic oligonucleotide
cgcgagguggccuggccug

SEQ ID NO: 2360187 - RNA, 19 nt, Artificial Sequence
  Description of Artificial Sequence: Synthetic oligonucleotide
ggggugcaauuccccuccc

SEQ ID NO: 2360188 - RNA, 19 nt, Artificial Sequence
  Description of Artificial Sequence: Synthetic oligonucleotide
cagaucgcaggaagguguu

SEQ ID NO: 2360189 - RNA, 19 nt, Artificial Sequence
  Description of Artificial Sequence: Synthetic oligonucleotide
gguaggcacgccccugacu

SEQ ID NO: 2360190 - RNA, 19 nt, Artificial Sequence
  Description of Artificial Sequence: Synthetic oligonucleotide
auagugcaccggggccaug

SEQ ID NO: 2360191 - RNA, 19 nt, Artificial Sequence
  Description of Artificial Sequence: Synthetic oligonucleotide
cacgcggggagcggcccac

SEQ ID NO: 2360192 - RNA, 19 nt, Artificial Sequence
  Description of Artificial Sequence: Synthetic oligonucleotide
gcgacagcaugaagaccug

SEQ ID NO: 2360193 - RNA, 19 nt, Artificial Sequence
  Description of Artificial Sequence: Synthetic oligonucleotide
ggcggccaggccaggauga

SEQ ID NO: 2360194 - RNA, 19 nt, Artificial Sequence
  Description of Artificial Sequence: Synthetic oligonucleotide
gagcggggagggcccgguc

SEQ ID NO: 2360195 - RNA, 19 nt, Artificial Sequence
  Description of Artificial Sequence: Synthetic oligonucleotide
ggucagucccagccguugu

SEQ ID NO: 2360196 - RNA, 19 nt, Artificial Sequence
  Description of Artificial Sequence: Synthetic oligonucleotide
gcgagguggccuggccugg

SEQ ID NO: 2360197 - RNA, 19 nt, Artificial Sequence
  Description of Artificial Sequence: Synthetic oligonucleotide
ggagcggcccacggcgagc

SEQ ID NO: 2360198 - RNA, 19 nt, Artificial Sequence
  Description of Artificial Sequence: Synthetic oligonucleotide
ccccuccuuuguauuucug

SEQ ID NO: 2360199 - RNA, 19 nt, Artificial Sequence
  Description of Artificial Sequence: Synthetic oligonucleotide
acgcggggagcggcccacg

SEQ ID NO: 2360200 - RNA, 19 nt, Artificial Sequence
  Description of Artificial Sequence: Synthetic oligonucleotide
ccagcccaaaguggucuug

SEQ ID NO: 2360201 - RNA, 19 nt, Artificial Sequence
  Description of Artificial Sequence: Synthetic oligonucleotide
gcgagcagagggagcccag

SEQ ID NO: 2360202 - RNA, 19 nt, Artificial Sequence
  Description of Artificial Sequence: Synthetic oligonucleotide
cgagaacagacacgcugca

SEQ ID NO: 2360203 - RNA, 19 nt, Artificial Sequence
  Description of Artificial Sequence: Synthetic oligonucleotide
gcgaaaccaguggcucccc

SEQ ID NO: 2360204 - RNA, 19 nt, Artificial Sequence
  Description of Artificial Sequence: Synthetic oligonucleotide
ggucgucgugguuggccaa

SEQ ID NO: 2360205 - RNA, 19 nt, Artificial Sequence
  Description of Artificial Sequence: Synthetic oligonucleotide
gguccgcgagguggccugg

SEQ ID NO: 2360206 - RNA, 19 nt, Artificial Sequence
  Description of Artificial Sequence: Synthetic oligonucleotide
cgggcacggcaguuggggc

SEQ ID NO: 2360207 - RNA, 19 nt, Artificial Sequence
  Description of Artificial Sequence: Synthetic oligonucleotide
cuauaccuccggugacaau

SEQ ID NO: 2360208 - RNA, 19 nt, Artificial Sequence
  Description of Artificial Sequence: Synthetic oligonucleotide
gcacagcuauaccuccggu

SEQ ID NO: 2360209 - RNA, 19 nt, Artificial Sequence
  Description of Artificial Sequence: Synthetic oligonucleotide
ggagcccagugccucgccu

SEQ ID NO: 2360210 - RNA, 19 nt, Artificial Sequence
  Description of Artificial Sequence: Synthetic oligonucleotide
gcuccugaugggcgccguc

SEQ ID NO: 2360211 - RNA, 19 nt, Artificial Sequence
  Description of Artificial Sequence: Synthetic oligonucleotide
gugccucgccugggagcgg

SEQ ID NO: 2360212 - RNA, 19 nt, Artificial Sequence
  Description of Artificial Sequence: Synthetic oligonucleotide
gggugcaauuccccucccu

SEQ ID NO: 2360213 - RNA, 19 nt, Artificial Sequence
  Description of Artificial Sequence: Synthetic oligonucleotide
gacugcccuggaaggacuu

SEQ ID NO: 2360214 - RNA, 19 nt, Artificial Sequence
  Description of Artificial Sequence: Synthetic oligonucleotide
acgcugcagguaggaggga

SEQ ID NO: 2360215 - RNA, 19 nt, Artificial Sequence
  Description of Artificial Sequence: Synthetic oligonucleotide
ccccuguggggacccugag

SEQ ID NO: 2360216 - RNA, 19 nt, Artificial Sequence
  Description of Artificial Sequence: Synthetic oligonucleotide
gggagggcccgguccgcga

SEQ ID NO: 2360217 - RNA, 19 nt, Artificial Sequence
  Description of Artificial Sequence: Synthetic oligonucleotide
gcuuugaaauccgcaccau

SEQ ID NO: 2360218 - RNA, 19 nt, Artificial Sequence
  Description of Artificial Sequence: Synthetic oligonucleotide
gcgcuccugaugggcgccg

SEQ ID NO: 2360219 - RNA, 19 nt, Artificial Sequence
  Description of Artificial Sequence: Synthetic oligonucleotide
ccaagccagccagaucgca

SEQ ID NO: 2360220 - RNA, 19 nt, Artificial Sequence
  Description of Artificial Sequence: Synthetic oligonucleotide
cgguccgcgagguggccug

SEQ ID NO: 2360221 - RNA, 19 nt, Artificial Sequence
  Description of Artificial Sequence: Synthetic oligonucleotide
cccgguucgcagccgccuc

SEQ ID NO: 2360222 - RNA, 19 nt, Artificial Sequence
  Description of Artificial Sequence: Synthetic oligonucleotide
gggagcggggagggcccgg

SEQ ID NO: 2360223 - RNA, 19 nt, Artificial Sequence
  Description of Artificial Sequence: Synthetic oligonucleotide
ccccacgcggggagcggcc

SEQ ID NO: 2360224 - RNA, 19 nt, Artificial Sequence
  Description of Artificial Sequence: Synthetic oligonucleotide
gccccugacugcccuggaa

SEQ ID NO: 2360225 - RNA, 19 nt, Artificial Sequence
  Description of Artificial Sequence: Synthetic oligonucleotide
cccagugccucgccuggga

SEQ ID NO: 2360226 - RNA, 19 nt, Artificial Sequence
  Description of Artificial Sequence: Synthetic oligonucleotide
ggccccacgcggggagcgg

SEQ ID NO: 2360227 - RNA, 19 nt, Artificial Sequence
  Description of Artificial Sequence: Synthetic oligonucleotide
caggcaggacagagggguu

SEQ ID NO: 2360228 - RNA, 19 nt, Artificial Sequence
  Description of Artificial Sequence: Synthetic oligonucleotide
cgucgugguuggccaaguc

SEQ ID NO: 2360229 - RNA, 19 nt, Artificial Sequence
  Description of Artificial Sequence: Synthetic oligonucleotide
caguggccccacgcgggga

SEQ ID NO: 2360230 - RNA, 19 nt, Artificial Sequence
  Description of Artificial Sequence: Synthetic oligonucleotide
gccccacgcggggagcggc

SEQ ID NO: 2360231 - RNA, 19 nt, Artificial Sequence
  Description of Artificial Sequence: Synthetic oligonucleotide
cgcagcccacauucaccac

SEQ ID NO: 2360232 - RNA, 19 nt, Artificial Sequence
  Description of Artificial Sequence: Synthetic oligonucleotide
cagcacccgcuccucugcu

SEQ ID NO: 2360233 - RNA, 19 nt, Artificial Sequence
  Description of Artificial Sequence: Synthetic oligonucleotide
cgcggggagcggcccacgg

SEQ ID NO: 2360234 - RNA, 19 nt, Artificial Sequence
  Description of Artificial Sequence: Synthetic oligonucleotide
caagucgggcacggcaguu

SEQ ID NO: 2360235 - RNA, 19 nt, Artificial Sequence
  Description of Artificial Sequence: Synthetic oligonucleotide
cccacgcggggagcggccc

SEQ ID NO: 2360236 - RNA, 19 nt, Artificial Sequence
  Description of Artificial Sequence: Synthetic oligonucleotide
cggcccgguucgcagccgc

SEQ ID NO: 2360237 - RNA, 19 nt, Artificial Sequence
  Description of Artificial Sequence: Synthetic oligonucleotide
gccucgccugggagcgggg

SEQ ID NO: 2360238 - RNA, 19 nt, Artificial Sequence
  Description of Artificial Sequence: Synthetic oligonucleotide
ggggagcggcccacggcga

SEQ ID NO: 2360239 - RNA, 19 nt, Artificial Sequence
  Description of Artificial Sequence: Synthetic oligonucleotide
cugaaacgucuugggcuuu

SEQ ID NO: 2360240 - RNA, 19 nt, Artificial Sequence
  Description of Artificial Sequence: Synthetic oligonucleotide
gcacgccccugacugcccu

SEQ ID NO: 2360241 - RNA, 19 nt, Artificial Sequence
  Description of Artificial Sequence: Synthetic oligonucleotide
gggcccgguccgcgaggug

SEQ ID NO: 2360242 - RNA, 19 nt, Artificial Sequence
  Description of Artificial Sequence: Synthetic oligonucleotide
gcuccucugcuggcccgca

SEQ ID NO: 2360243 - RNA, 19 nt, Artificial Sequence
  Description of Artificial Sequence: Synthetic oligonucleotide
cggugacaaucauccaagu

SEQ ID NO: 2360244 - RNA, 19 nt, Artificial Sequence
  Description of Artificial Sequence: Synthetic oligonucleotide
cuggcccgcagcccacauu

SEQ ID NO: 2360245 - RNA, 19 nt, Artificial Sequence
  Description of Artificial Sequence: Synthetic oligonucleotide
cccgguccgcgagguggcc

SEQ ID NO: 2360246 - RNA, 19 nt, Artificial Sequence
  Description of Artificial Sequence: Synthetic oligonucleotide
ggagcggggagggcccggu

SEQ ID NO: 2360247 - RNA, 19 nt, Artificial Sequence
  Description of Artificial Sequence: Synthetic oligonucleotide
ccggcccgguucgcagccg

SEQ ID NO: 2360248 - RNA, 19 nt, Artificial Sequence
  Description of Artificial Sequence: Synthetic oligonucleotide
ccgcgagguggccuggccu

SEQ ID NO: 2360249 - RNA, 19 nt, Artificial Sequence
  Description of Artificial Sequence: Synthetic oligonucleotide
gcggccaggccaggaugaa

SEQ ID NO: 2360250 - RNA, 19 nt, Artificial Sequence
  Description of Artificial Sequence: Synthetic oligonucleotide
gcccgguucgcagccgccu

SEQ ID NO: 2360251 - RNA, 19 nt, Artificial Sequence
  Description of Artificial Sequence: Synthetic oligonucleotide
cagccgccucgacuuguuu

SEQ ID NO: 2360252 - RNA, 19 nt, Artificial Sequence
  Description of Artificial Sequence: Synthetic oligonucleotide
ccgccucgacuuguuuaca

SEQ ID NO: 2360253 - RNA, 19 nt, Artificial Sequence
  Description of Artificial Sequence: Synthetic oligonucleotide
cggcgagcagagggagccc

SEQ ID NO: 2360254 - RNA, 19 nt, Artificial Sequence
  Description of Artificial Sequence: Synthetic oligonucleotide
cccagccguugucuuugua

SEQ ID NO: 2360255 - RNA, 19 nt, Artificial Sequence
  Description of Artificial Sequence: Synthetic oligonucleotide
cggggccaugagagcagca

SEQ ID NO: 2360256 - RNA, 19 nt, Artificial Sequence
  Description of Artificial Sequence: Synthetic oligonucleotide
cuuccccuguggggacccu

SEQ ID NO: 2360257 - RNA, 19 nt, Artificial Sequence
  Description of Artificial Sequence: Synthetic oligonucleotide
cgacagcaugaagaccugu

SEQ ID NO: 2360258 - RNA, 19 nt, Artificial Sequence
  Description of Artificial Sequence: Synthetic oligonucleotide
gcagccgccucgacuuguu

SEQ ID NO: 2360259 - RNA, 19 nt, Artificial Sequence
  Description of Artificial Sequence: Synthetic oligonucleotide
cgguucgcagccgccucga

SEQ ID NO: 2360260 - RNA, 19 nt, Artificial Sequence
  Description of Artificial Sequence: Synthetic oligonucleotide
cggggagggcccgguccgc

SEQ ID NO: 2360261 - RNA, 19 nt, Artificial Sequence
  Description of Artificial Sequence: Synthetic oligonucleotide
ccgguccgcgagguggccu

SEQ ID NO: 2360262 - RNA, 19 nt, Artificial Sequence
  Description of Artificial Sequence: Synthetic oligonucleotide
cgccccugacugcccugga

SEQ ID NO: 2360263 - RNA, 19 nt, Artificial Sequence
  Description of Artificial Sequence: Synthetic oligonucleotide
cgcuccugaugggcgccgu

SEQ ID NO: 2360264 - RNA, 19 nt, Artificial Sequence
  Description of Artificial Sequence: Synthetic oligonucleotide
uaugguaugacaaugaacc

SEQ ID NO: 2360265 - RNA, 19 nt, Artificial Sequence
  Description of Artificial Sequence: Synthetic oligonucleotide
aaaagagacagauaccacc

SEQ ID NO: 2360266 - RNA, 19 nt, Artificial Sequence
  Description of Artificial Sequence: Synthetic oligonucleotide
uaagcauguauuuauaugg

SEQ ID NO: 2360267 - RNA, 19 nt, Artificial Sequence
  Description of Artificial Sequence: Synthetic oligonucleotide
uuuacuauagguucugggg

SEQ ID NO: 2360268 - RNA, 19 nt, Artificial Sequence
  Description of Artificial Sequence: Synthetic oligonucleotide
ucaguagugauguugauag

SEQ ID NO: 2360269 - RNA, 19 nt, Artificial Sequence
  Description of Artificial Sequence: Synthetic oligonucleotide
uuuauauggugucacaagc

SEQ ID NO: 2360270 - RNA, 19 nt, Artificial Sequence
  Description of Artificial Sequence: Synthetic oligonucleotide
uauacauuuauuuaagcau

SEQ ID NO: 2360271 - RNA, 19 nt, Artificial Sequence
  Description of Artificial Sequence: Synthetic oligonucleotide
auaagguauauccagagca

SEQ ID NO: 2360272 - RNA, 19 nt, Artificial Sequence
  Description of Artificial Sequence: Synthetic oligonucleotide
uugguuccaacauacaacg

SEQ ID NO: 2360273 - RNA, 19 nt, Artificial Sequence
  Description of Artificial Sequence: Synthetic oligonucleotide
auuccuuugagacagcauc

SEQ ID NO: 2360274 - RNA, 19 nt, Artificial Sequence
  Description of Artificial Sequence: Synthetic oligonucleotide
agagcuccuaaacauaggc

SEQ ID NO: 2360275 - RNA, 19 nt, Artificial Sequence
  Description of Artificial Sequence: Synthetic oligonucleotide
guggaaaagagacagauac

SEQ ID NO: 2360276 - RNA, 19 nt, Artificial Sequence
  Description of Artificial Sequence: Synthetic oligonucleotide
aaacauaggcguucuugcc

SEQ ID NO: 2360277 - RNA, 19 nt, Artificial Sequence
  Description of Artificial Sequence: Synthetic oligonucleotide
ugaaccuggagcuagguug

SEQ ID NO: 2360278 - RNA, 19 nt, Artificial Sequence
  Description of Artificial Sequence: Synthetic oligonucleotide
acaaucacaauauacauuu

SEQ ID NO: 2360279 - RNA, 19 nt, Artificial Sequence
  Description of Artificial Sequence: Synthetic oligonucleotide
ugccagauaagguauaucc

SEQ ID NO: 2360280 - RNA, 19 nt, Artificial Sequence
  Description of Artificial Sequence: Synthetic oligonucleotide
aacuguagagggcuuauag

SEQ ID NO: 2360281 - RNA, 19 nt, Artificial Sequence
  Description of Artificial Sequence: Synthetic oligonucleotide
aagccaguaagccucagag

SEQ ID NO: 2360282 - RNA, 19 nt, Artificial Sequence
  Description of Artificial Sequence: Synthetic oligonucleotide
aaaaugguguccaccaggc

SEQ ID NO: 2360283 - RNA, 19 nt, Artificial Sequence
  Description of Artificial Sequence: Synthetic oligonucleotide
gagguuauuaacuggagac

SEQ ID NO: 2360284 - RNA, 19 nt, Artificial Sequence
  Description of Artificial Sequence: Synthetic oligonucleotide
uuuuacuauagguucuggg

SEQ ID NO: 2360285 - RNA, 19 nt, Artificial Sequence
  Description of Artificial Sequence: Synthetic oligonucleotide
uuuaccaaagcugauguug

SEQ ID NO: 2360286 - RNA, 19 nt, Artificial Sequence
  Description of Artificial Sequence: Synthetic oligonucleotide
uauuuaccaaagcugaugu

SEQ ID NO: 2360287 - RNA, 19 nt, Artificial Sequence
  Description of Artificial Sequence: Synthetic oligonucleotide
aaucacaauauacauuuau

SEQ ID NO: 2360288 - RNA, 19 nt, Artificial Sequence
  Description of Artificial Sequence: Synthetic oligonucleotide
aaauggucuguccugaggu

SEQ ID NO: 2360289 - RNA, 19 nt, Artificial Sequence
  Description of Artificial Sequence: Synthetic oligonucleotide
uuauagggaagccuggccc

SEQ ID NO: 2360290 - RNA, 19 nt, Artificial Sequence
  Description of Artificial Sequence: Synthetic oligonucleotide
caaugaaccccuuacuugg

SEQ ID NO: 2360291 - RNA, 19 nt, Artificial Sequence
  Description of Artificial Sequence: Synthetic oligonucleotide
uaaacauaggcguucuugc

SEQ ID NO: 2360292 - RNA, 19 nt, Artificial Sequence
  Description of Artificial Sequence: Synthetic oligonucleotide
uauauggugucacaagcug

SEQ ID NO: 2360293 - RNA, 19 nt, Artificial Sequence
  Description of Artificial Sequence: Synthetic oligonucleotide
uauuuaagcauguauuuau

SEQ ID NO: 2360294 - RNA, 19 nt, Artificial Sequence
  Description of Artificial Sequence: Synthetic oligonucleotide
auuuauauggugucacaag

SEQ ID NO: 2360295 - RNA, 19 nt, Artificial Sequence
  Description of Artificial Sequence: Synthetic oligonucleotide
uuacuauagguucugggga

SEQ ID NO: 2360296 - RNA, 19 nt, Artificial Sequence
  Description of Artificial Sequence: Synthetic oligonucleotide
cauaccaggagauagccac

SEQ ID NO: 2360297 - RNA, 19 nt, Artificial Sequence
  Description of Artificial Sequence: Synthetic oligonucleotide
uaagguauauccagagcag

SEQ ID NO: 2360298 - RNA, 19 nt, Artificial Sequence
  Description of Artificial Sequence: Synthetic oligonucleotide
uuauuucacuggaugaggc

SEQ ID NO: 2360299 - RNA, 19 nt, Artificial Sequence
  Description of Artificial Sequence: Synthetic oligonucleotide
ucacauugaaccuggagcu

SEQ ID NO: 2360300 - RNA, 19 nt, Artificial Sequence
  Description of Artificial Sequence: Synthetic oligonucleotide
agauaagguauauccagag

SEQ ID NO: 2360301 - RNA, 19 nt, Artificial Sequence
  Description of Artificial Sequence: Synthetic oligonucleotide
uguccugagguuauuaacu

SEQ ID NO: 2360302 - RNA, 19 nt, Artificial Sequence
  Description of Artificial Sequence: Synthetic oligonucleotide
uugauagcauaccaggaga

SEQ ID NO: 2360303 - RNA, 19 nt, Artificial Sequence
  Description of Artificial Sequence: Synthetic oligonucleotide
aaagugggcagucuugaca

SEQ ID NO: 2360304 - RNA, 19 nt, Artificial Sequence
  Description of Artificial Sequence: Synthetic oligonucleotide
guaucacaacuguagaggg

SEQ ID NO: 2360305 - RNA, 19 nt, Artificial Sequence
  Description of Artificial Sequence: Synthetic oligonucleotide
uuaccaaagcugauguugc

SEQ ID NO: 2360306 - RNA, 19 nt, Artificial Sequence
  Description of Artificial Sequence: Synthetic oligonucleotide
cuugguuccaacauacaac

SEQ ID NO: 2360307 - RNA, 19 nt, Artificial Sequence
  Description of Artificial Sequence: Synthetic oligonucleotide
cacucuuacucacugagcc

SEQ ID NO: 2360308 - RNA, 19 nt, Artificial Sequence
  Description of Artificial Sequence: Synthetic oligonucleotide
cuggguaucacaacuguag

SEQ ID NO: 2360309 - RNA, 19 nt, Artificial Sequence
  Description of Artificial Sequence: Synthetic oligonucleotide
ugauguugauagcauacca

SEQ ID NO: 2360310 - RNA, 19 nt, Artificial Sequence
  Description of Artificial Sequence: Synthetic oligonucleotide
acuguagagggcuuauagg

SEQ ID NO: 2360311 - RNA, 19 nt, Artificial Sequence
  Description of Artificial Sequence: Synthetic oligonucleotide
agugauguugauagcauac

SEQ ID NO: 2360312 - RNA, 19 nt, Artificial Sequence
  Description of Artificial Sequence: Synthetic oligonucleotide
uuauauggugucacaagcu

SEQ ID NO: 2360313 - RNA, 19 nt, Artificial Sequence
  Description of Artificial Sequence: Synthetic oligonucleotide
auagcauaccaggagauag

SEQ ID NO: 2360314 - RNA, 19 nt, Artificial Sequence
  Description of Artificial Sequence: Synthetic oligonucleotide
ugucacaagcugcagacac

SEQ ID NO: 2360315 - RNA, 19 nt, Artificial Sequence
  Description of Artificial Sequence: Synthetic oligonucleotide
aaccucaugagcccugaag

SEQ ID NO: 2360316 - RNA, 19 nt, Artificial Sequence
  Description of Artificial Sequence: Synthetic oligonucleotide
gguuccaacauacaacggg

SEQ ID NO: 2360317 - RNA, 19 nt, Artificial Sequence
  Description of Artificial Sequence: Synthetic oligonucleotide
uuggaagccaguaagccuc

SEQ ID NO: 2360318 - RNA, 19 nt, Artificial Sequence
  Description of Artificial Sequence: Synthetic oligonucleotide
agcuccuaaacauaggcgu

SEQ ID NO: 2360319 - RNA, 19 nt, Artificial Sequence
  Description of Artificial Sequence: Synthetic oligonucleotide
uauggugucacaagcugca

SEQ ID NO: 2360320 - RNA, 19 nt, Artificial Sequence
  Description of Artificial Sequence: Synthetic oligonucleotide
augcuuguguagcaaacac

SEQ ID NO: 2360321 - RNA, 19 nt, Artificial Sequence
  Description of Artificial Sequence: Synthetic oligonucleotide
augguaugacaaugaaccc

SEQ ID NO: 2360322 - RNA, 19 nt, Artificial Sequence
  Description of Artificial Sequence: Synthetic oligonucleotide
gauguugauagcauaccag

SEQ ID NO: 2360323 - RNA, 19 nt, Artificial Sequence
  Description of Artificial Sequence: Synthetic oligonucleotide
uguauuuauauggugucac

SEQ ID NO: 2360324 - RNA, 19 nt, Artificial Sequence
  Description of Artificial Sequence: Synthetic oligonucleotide
ugagguuauuaacuggaga

SEQ ID NO: 2360325 - RNA, 19 nt, Artificial Sequence
  Description of Artificial Sequence: Synthetic oligonucleotide
ugauguugcuuucaucuga

SEQ ID NO: 2360326 - RNA, 19 nt, Artificial Sequence
  Description of Artificial Sequence: Synthetic oligonucleotide
gaaauggucuguccugagg

SEQ ID NO: 2360327 - RNA, 19 nt, Artificial Sequence
  Description of Artificial Sequence: Synthetic oligonucleotide
aacggguugaagaagucag

SEQ ID NO: 2360328 - RNA, 19 nt, Artificial Sequence
  Description of Artificial Sequence: Synthetic oligonucleotide
acucacugagcccuuugcc

SEQ ID NO: 2360329 - RNA, 19 nt, Artificial Sequence
  Description of Artificial Sequence: Synthetic oligonucleotide
uggggauuugaacucaugu

SEQ ID NO: 2360330 - RNA, 19 nt, Artificial Sequence
  Description of Artificial Sequence: Synthetic oligonucleotide
gaagucaguagugauguug

SEQ ID NO: 2360331 - RNA, 19 nt, Artificial Sequence
  Description of Artificial Sequence: Synthetic oligonucleotide
accucuguccccuuggguc

SEQ ID NO: 2360332 - RNA, 19 nt, Artificial Sequence
  Description of Artificial Sequence: Synthetic oligonucleotide
aguagugauguugauagca

SEQ ID NO: 2360333 - RNA, 19 nt, Artificial Sequence
  Description of Artificial Sequence: Synthetic oligonucleotide
gauaccacccagaauggag

SEQ ID NO: 2360334 - RNA, 19 nt, Artificial Sequence
  Description of Artificial Sequence: Synthetic oligonucleotide
ucucacauugaaccuggag

SEQ ID NO: 2360335 - RNA, 19 nt, Artificial Sequence
  Description of Artificial Sequence: Synthetic oligonucleotide
acucuuacucacugagccc

SEQ ID NO: 2360336 - RNA, 19 nt, Artificial Sequence
  Description of Artificial Sequence: Synthetic oligonucleotide
agcauaccaggagauagcc

SEQ ID NO: 2360337 - RNA, 19 nt, Artificial Sequence
  Description of Artificial Sequence: Synthetic oligonucleotide
uggaaaagagacagauacc

SEQ ID NO: 2360338 - RNA, 19 nt, Artificial Sequence
  Description of Artificial Sequence: Synthetic oligonucleotide
cuaaacauaggcguucuug

SEQ ID NO: 2360339 - RNA, 19 nt, Artificial Sequence
  Description of Artificial Sequence: Synthetic oligonucleotide
cauuauuucacuggaugag

SEQ ID NO: 2360340 - RNA, 19 nt, Artificial Sequence
  Description of Artificial Sequence: Synthetic oligonucleotide
uguagagggcuuauaggga

SEQ ID NO: 2360341 - RNA, 19 nt, Artificial Sequence
  Description of Artificial Sequence: Synthetic oligonucleotide
agagacagauaccacccag

SEQ ID NO: 2360342 - RNA, 19 nt, Artificial Sequence
  Description of Artificial Sequence: Synthetic oligonucleotide
caucucacauugaaccugg

SEQ ID NO: 2360343 - RNA, 19 nt, Artificial Sequence
  Description of Artificial Sequence: Synthetic oligonucleotide
acaagcugcagacaccucu

SEQ ID NO: 2360344 - RNA, 19 nt, Artificial Sequence
  Description of Artificial Sequence: Synthetic oligonucleotide
ucaugagcccugaagcccc

SEQ ID NO: 2360345 - RNA, 19 nt, Artificial Sequence
  Description of Artificial Sequence: Synthetic oligonucleotide
aaugaaccccuuacuuggc

SEQ ID NO: 2360346 - RNA, 19 nt, Artificial Sequence
  Description of Artificial Sequence: Synthetic oligonucleotide
uaucacaacuguagagggc

SEQ ID NO: 2360347 - RNA, 19 nt, Artificial Sequence
  Description of Artificial Sequence: Synthetic oligonucleotide
acuugguuccaacauacaa

SEQ ID NO: 2360348 - RNA, 19 nt, Artificial Sequence
  Description of Artificial Sequence: Synthetic oligonucleotide
cuuauagggaagccuggcc

SEQ ID NO: 2360349 - RNA, 19 nt, Artificial Sequence
  Description of Artificial Sequence: Synthetic oligonucleotide
caguaagccucagagagcc

SEQ ID NO: 2360350 - RNA, 19 nt, Artificial Sequence
  Description of Artificial Sequence: Synthetic oligonucleotide
gagcccuuugcccagcucc

SEQ ID NO: 2360351 - RNA, 19 nt, Artificial Sequence
  Description of Artificial Sequence: Synthetic oligonucleotide
uauuucacuggaugaggca

SEQ ID NO: 2360352 - RNA, 19 nt, Artificial Sequence
  Description of Artificial Sequence: Synthetic oligonucleotide
uguguagcaaacacucuua

SEQ ID NO: 2360353 - RNA, 19 nt, Artificial Sequence
  Description of Artificial Sequence: Synthetic oligonucleotide
ggaaaagagacagauacca

SEQ ID NO: 2360354 - RNA, 19 nt, Artificial Sequence
  Description of Artificial Sequence: Synthetic oligonucleotide
uguagcaaacacucuuacu

SEQ ID NO: 2360355 - RNA, 19 nt, Artificial Sequence
  Description of Artificial Sequence: Synthetic oligonucleotide
agaauggagagcagggagg

SEQ ID NO: 2360356 - RNA, 19 nt, Artificial Sequence
  Description of Artificial Sequence: Synthetic oligonucleotide
uggguaucacaacuguaga

SEQ ID NO: 2360357 - RNA, 19 nt, Artificial Sequence
  Description of Artificial Sequence: Synthetic oligonucleotide
ccagauaagguauauccag

SEQ ID NO: 2360358 - RNA, 19 nt, Artificial Sequence
  Description of Artificial Sequence: Synthetic oligonucleotide
aggccaugcgaguugcccc

SEQ ID NO: 2360359 - RNA, 19 nt, Artificial Sequence
  Description of Artificial Sequence: Synthetic oligonucleotide
ugcuuguguagcaaacacu

SEQ ID NO: 2360360 - RNA, 19 nt, Artificial Sequence
  Description of Artificial Sequence: Synthetic oligonucleotide
aggagauagccaccauccc

SEQ ID NO: 2360361 - RNA, 19 nt, Artificial Sequence
  Description of Artificial Sequence: Synthetic oligonucleotide
ucgaaagugggcagucuug

SEQ ID NO: 2360362 - RNA, 19 nt, Artificial Sequence
  Description of Artificial Sequence: Synthetic oligonucleotide
ugauagcauaccaggagau

SEQ ID NO: 2360363 - RNA, 19 nt, Artificial Sequence
  Description of Artificial Sequence: Synthetic oligonucleotide
uauagggaagccuggcccu

SEQ ID NO: 2360364 - RNA, 19 nt, Artificial Sequence
  Description of Artificial Sequence: Synthetic oligonucleotide
ucacugagcccuuugccca

SEQ ID NO: 2360365 - RNA, 19 nt, Artificial Sequence
  Description of Artificial Sequence: Synthetic oligonucleotide
uuggcacauuauuucacug

SEQ ID NO: 2360366 - RNA, 19 nt, Artificial Sequence
  Description of Artificial Sequence: Synthetic oligonucleotide
cuguaggaggccaugcgag

SEQ ID NO: 2360367 - RNA, 19 nt, Artificial Sequence
  Description of Artificial Sequence: Synthetic oligonucleotide
uuucaucugagguggcucu

SEQ ID NO: 2360368 - RNA, 19 nt, Artificial Sequence
  Description of Artificial Sequence: Synthetic oligonucleotide
uccuuggcacauuauuuca

SEQ ID NO: 2360369 - RNA, 19 nt, Artificial Sequence
  Description of Artificial Sequence: Synthetic oligonucleotide
guugaagaagucaguagug

SEQ ID NO: 2360370 - RNA, 19 nt, Artificial Sequence
  Description of Artificial Sequence: Synthetic oligonucleotide
cauacaacggguugaagaa

SEQ ID NO: 2360371 - RNA, 19 nt, Artificial Sequence
  Description of Artificial Sequence: Synthetic oligonucleotide
uagcauaccaggagauagc

SEQ ID NO: 2360372 - RNA, 19 nt, Artificial Sequence
  Description of Artificial Sequence: Synthetic oligonucleotide
gagauagccaccaucccac

SEQ ID NO: 2360373 - RNA, 19 nt, Artificial Sequence
  Description of Artificial Sequence: Synthetic oligonucleotide
gaaccuggagcuagguugg

SEQ ID NO: 2360374 - RNA, 19 nt, Artificial Sequence
  Description of Artificial Sequence: Synthetic oligonucleotide
gaauggagagcagggaggc

SEQ ID NO: 2360375 - RNA, 19 nt, Artificial Sequence
  Description of Artificial Sequence: Synthetic oligonucleotide
ucuugacagccuaugguau

SEQ ID NO: 2360376 - RNA, 19 nt, Artificial Sequence
  Description of Artificial Sequence: Synthetic oligonucleotide
aacaaucacaauauacauu

SEQ ID NO: 2360377 - RNA, 19 nt, Artificial Sequence
  Description of Artificial Sequence: Synthetic oligonucleotide
uacucacugagcccuuugc

SEQ ID NO: 2360378 - RNA, 19 nt, Artificial Sequence
  Description of Artificial Sequence: Synthetic oligonucleotide
gacaccucuguccccuugg

SEQ ID NO: 2360379 - RNA, 19 nt, Artificial Sequence
  Description of Artificial Sequence: Synthetic oligonucleotide
gagcuccuaaacauaggcg

SEQ ID NO: 2360380 - RNA, 19 nt, Artificial Sequence
  Description of Artificial Sequence: Synthetic oligonucleotide
ugaaccccuuacuuggcug

SEQ ID NO: 2360381 - RNA, 19 nt, Artificial Sequence
  Description of Artificial Sequence: Synthetic oligonucleotide
ucguacuugguuccaacau

SEQ ID NO: 2360382 - RNA, 19 nt, Artificial Sequence
  Description of Artificial Sequence: Synthetic oligonucleotide
gaacaaucacaauauacau

SEQ ID NO: 2360383 - RNA, 19 nt, Artificial Sequence
  Description of Artificial Sequence: Synthetic oligonucleotide
uaugacaaugaaccccuua

SEQ ID NO: 2360384 - RNA, 19 nt, Artificial Sequence
  Description of Artificial Sequence: Synthetic oligonucleotide
aacacugggguuaccggag

SEQ ID NO: 2360385 - RNA, 19 nt, Artificial Sequence
  Description of Artificial Sequence: Synthetic oligonucleotide
gaaccccuuacuuggcugc

SEQ ID NO: 2360386 - RNA, 19 nt, Artificial Sequence
  Description of Artificial Sequence: Synthetic oligonucleotide
ugguuccaacauacaacgg

SEQ ID NO: 2360387 - RNA, 19 nt, Artificial Sequence
  Description of Artificial Sequence: Synthetic oligonucleotide
ugucuucaugcuuguguag

SEQ ID NO: 2360388 - RNA, 19 nt, Artificial Sequence
  Description of Artificial Sequence: Synthetic oligonucleotide
uuauuccuuugagacagca

SEQ ID NO: 2360389 - RNA, 19 nt, Artificial Sequence
  Description of Artificial Sequence: Synthetic oligonucleotide
aagagacagauaccaccca

SEQ ID NO: 2360390 - RNA, 19 nt, Artificial Sequence
  Description of Artificial Sequence: Synthetic oligonucleotide
uacuauagguucuggggau

SEQ ID NO: 2360391 - RNA, 19 nt, Artificial Sequence
  Description of Artificial Sequence: Synthetic oligonucleotide
cagauaccacccagaaugg

SEQ ID NO: 2360392 - RNA, 19 nt, Artificial Sequence
  Description of Artificial Sequence: Synthetic oligonucleotide
cuccuuggcacauuauuuc

SEQ ID NO: 2360393 - RNA, 19 nt, Artificial Sequence
  Description of Artificial Sequence: Synthetic oligonucleotide
cuggagcuagguuggaagc

SEQ ID NO: 2360394 - RNA, 19 nt, Artificial Sequence
  Description of Artificial Sequence: Synthetic oligonucleotide
uaccggagugugaucaggc

SEQ ID NO: 2360395 - RNA, 19 nt, Artificial Sequence
  Description of Artificial Sequence: Synthetic oligonucleotide
agcaucucacauugaaccu

SEQ ID NO: 2360396 - RNA, 19 nt, Artificial Sequence
  Description of Artificial Sequence: Synthetic oligonucleotide
uauauccagagcaggucau

SEQ ID NO: 2360397 - RNA, 19 nt, Artificial Sequence
  Description of Artificial Sequence: Synthetic oligonucleotide
ggugucacaagcugcagac

SEQ ID NO: 2360398 - RNA, 19 nt, Artificial Sequence
  Description of Artificial Sequence: Synthetic oligonucleotide
gaaaagagacagauaccac

SEQ ID NO: 2360399 - RNA, 19 nt, Artificial Sequence
  Description of Artificial Sequence: Synthetic oligonucleotide
uauuaacuggagacugguc

SEQ ID NO: 2360400 - RNA, 19 nt, Artificial Sequence
  Description of Artificial Sequence: Synthetic oligonucleotide
ucuguccugagguuauuaa

SEQ ID NO: 2360401 - RNA, 19 nt, Artificial Sequence
  Description of Artificial Sequence: Synthetic oligonucleotide
cugagguuauuaacuggag

SEQ ID NO: 2360402 - RNA, 19 nt, Artificial Sequence
  Description of Artificial Sequence: Synthetic oligonucleotide
uagagggcuuauagggaag

SEQ ID NO: 2360403 - RNA, 19 nt, Artificial Sequence
  Description of Artificial Sequence: Synthetic oligonucleotide
cuugacagccuaugguaug

SEQ ID NO: 2360404 - RNA, 19 nt, Artificial Sequence
  Description of Artificial Sequence: Synthetic oligonucleotide
cuguccugagguuauuaac

SEQ ID NO: 2360405 - RNA, 19 nt, Artificial Sequence
  Description of Artificial Sequence: Synthetic oligonucleotide
guacuugguuccaacauac

SEQ ID NO: 2360406 - RNA, 19 nt, Artificial Sequence
  Description of Artificial Sequence: Synthetic oligonucleotide
agguuggaagccaguaagc

SEQ ID NO: 2360407 - RNA, 19 nt, Artificial Sequence
  Description of Artificial Sequence: Synthetic oligonucleotide
guccugagguuauuaacug

SEQ ID NO: 2360408 - RNA, 19 nt, Artificial Sequence
  Description of Artificial Sequence: Synthetic oligonucleotide
uuaccggagugugaucagg

SEQ ID NO: 2360409 - RNA, 19 nt, Artificial Sequence
  Description of Artificial Sequence: Synthetic oligonucleotide
ccgaacaaucacaauauac

SEQ ID NO: 2360410 - RNA, 19 nt, Artificial Sequence
  Description of Artificial Sequence: Synthetic oligonucleotide
cugcagacaccucuguccc

SEQ ID NO: 2360411 - RNA, 19 nt, Artificial Sequence
  Description of Artificial Sequence: Synthetic oligonucleotide
uauuccuuugagacagcau

SEQ ID NO: 2360412 - RNA, 19 nt, Artificial Sequence
  Description of Artificial Sequence: Synthetic oligonucleotide
cauugaaccuggagcuagg

SEQ ID NO: 2360413 - RNA, 19 nt, Artificial Sequence
  Description of Artificial Sequence: Synthetic oligonucleotide
agcugauguugcuuucauc

SEQ ID NO: 2360414 - RNA, 19 nt, Artificial Sequence
  Description of Artificial Sequence: Synthetic oligonucleotide
cuuacuuggcugcaaccuc

SEQ ID NO: 2360415 - RNA, 19 nt, Artificial Sequence
  Description of Artificial Sequence: Synthetic oligonucleotide
guauuuauauggugucaca

SEQ ID NO: 2360416 - RNA, 19 nt, Artificial Sequence
  Description of Artificial Sequence: Synthetic oligonucleotide
cagucuugacagccuaugg

SEQ ID NO: 2360417 - RNA, 19 nt, Artificial Sequence
  Description of Artificial Sequence: Synthetic oligonucleotide
ucaucugagguggcucugg

SEQ ID NO: 2360418 - RNA, 19 nt, Artificial Sequence
  Description of Artificial Sequence: Synthetic oligonucleotide
ccauauuuaccaaagcuga

SEQ ID NO: 2360419 - RNA, 19 nt, Artificial Sequence
  Description of Artificial Sequence: Synthetic oligonucleotide
cuuggguccagcuguagga

SEQ ID NO: 2360420 - RNA, 19 nt, Artificial Sequence
  Description of Artificial Sequence: Synthetic oligonucleotide
uggaaauggucuguccuga

SEQ ID NO: 2360421 - RNA, 19 nt, Artificial Sequence
  Description of Artificial Sequence: Synthetic oligonucleotide
ggguaucacaacuguagag

SEQ ID NO: 2360422 - RNA, 19 nt, Artificial Sequence
  Description of Artificial Sequence: Synthetic oligonucleotide
ucuggguaucacaacugua

SEQ ID NO: 2360423 - RNA, 19 nt, Artificial Sequence
  Description of Artificial Sequence: Synthetic oligonucleotide
acauaggcguucuugccau

SEQ ID NO: 2360424 - RNA, 19 nt, Artificial Sequence
  Description of Artificial Sequence: Synthetic oligonucleotide
guagagggcuuauagggaa

SEQ ID NO: 2360425 - RNA, 19 nt, Artificial Sequence
  Description of Artificial Sequence: Synthetic oligonucleotide
gcuggagugccagauaagg

SEQ ID NO: 2360426 - RNA, 19 nt, Artificial Sequence
  Description of Artificial Sequence: Synthetic oligonucleotide
agguuauuaacuggagacu

SEQ ID NO: 2360427 - RNA, 19 nt, Artificial Sequence
  Description of Artificial Sequence: Synthetic oligonucleotide
aacauacaacggguugaag

SEQ ID NO: 2360428 - RNA, 19 nt, Artificial Sequence
  Description of Artificial Sequence: Synthetic oligonucleotide
cgaacaaucacaauauaca

SEQ ID NO: 2360429 - RNA, 19 nt, Artificial Sequence
  Description of Artificial Sequence: Synthetic oligonucleotide
cagauaagguauauccaga

SEQ ID NO: 2360430 - RNA, 19 nt, Artificial Sequence
  Description of Artificial Sequence: Synthetic oligonucleotide
acagccuaugguaugacaa

SEQ ID NO: 2360431 - RNA, 19 nt, Artificial Sequence
  Description of Artificial Sequence: Synthetic oligonucleotide
uguaggaggccaugcgagu

SEQ ID NO: 2360432 - RNA, 19 nt, Artificial Sequence
  Description of Artificial Sequence: Synthetic oligonucleotide
uggagcuagguuggaagcc

SEQ ID NO: 2360433 - RNA, 19 nt, Artificial Sequence
  Description of Artificial Sequence: Synthetic oligonucleotide
gggauuugaacucaugucu

SEQ ID NO: 2360434 - RNA, 19 nt, Artificial Sequence
  Description of Artificial Sequence: Synthetic oligonucleotide
gguugaagaagucaguagu

SEQ ID NO: 2360435 - RNA, 19 nt, Artificial Sequence
  Description of Artificial Sequence: Synthetic oligonucleotide
auaccaggagauagccacc

SEQ ID NO: 2360436 - RNA, 19 nt, Artificial Sequence
  Description of Artificial Sequence: Synthetic oligonucleotide
uagugauguugauagcaua

SEQ ID NO: 2360437 - RNA, 19 nt, Artificial Sequence
  Description of Artificial Sequence: Synthetic oligonucleotide
guguagcaaacacucuuac

SEQ ID NO: 2360438 - RNA, 19 nt, Artificial Sequence
  Description of Artificial Sequence: Synthetic oligonucleotide
cagagcuccuaaacauagg

SEQ ID NO: 2360439 - RNA, 19 nt, Artificial Sequence
  Description of Artificial Sequence: Synthetic oligonucleotide
auacaacggguugaagaag

SEQ ID NO: 2360440 - RNA, 19 nt, Artificial Sequence
  Description of Artificial Sequence: Synthetic oligonucleotide
uacuugguuccaacauaca

SEQ ID NO: 2360441 - RNA, 19 nt, Artificial Sequence
  Description of Artificial Sequence: Synthetic oligonucleotide
aggcuggagugccagauaa

SEQ ID NO: 2360442 - RNA, 19 nt, Artificial Sequence
  Description of Artificial Sequence: Synthetic oligonucleotide
agcuccuuggcacauuauu

SEQ ID NO: 2360443 - RNA, 19 nt, Artificial Sequence
  Description of Artificial Sequence: Synthetic oligonucleotide
ccagagcuccuaaacauag

SEQ ID NO: 2360444 - RNA, 19 nt, Artificial Sequence
  Description of Artificial Sequence: Synthetic oligonucleotide
auagguucuggggauuuga

SEQ ID NO: 2360445 - RNA, 19 nt, Artificial Sequence
  Description of Artificial Sequence: Synthetic oligonucleotide
ggcugcaaccucaugagcc

SEQ ID NO: 2360446 - RNA, 19 nt, Artificial Sequence
  Description of Artificial Sequence: Synthetic oligonucleotide
gaugaggcagcucgaaagu

SEQ ID NO: 2360447 - RNA, 19 nt, Artificial Sequence
  Description of Artificial Sequence: Synthetic oligonucleotide
ggggauuugaacucauguc

SEQ ID NO: 2360448 - RNA, 19 nt, Artificial Sequence
  Description of Artificial Sequence: Synthetic oligonucleotide
guuaccggagugugaucag

SEQ ID NO: 2360449 - RNA, 19 nt, Artificial Sequence
  Description of Artificial Sequence: Synthetic oligonucleotide
ggagauagccaccauccca

SEQ ID NO: 2360450 - RNA, 19 nt, Artificial Sequence
  Description of Artificial Sequence: Synthetic oligonucleotide
uggaugaggcagcucgaaa

SEQ ID NO: 2360451 - RNA, 19 nt, Artificial Sequence
  Description of Artificial Sequence: Synthetic oligonucleotide
guaagccucagagagccuc

SEQ ID NO: 2360452 - RNA, 19 nt, Artificial Sequence
  Description of Artificial Sequence: Synthetic oligonucleotide
uccuaaacauaggcguucu

SEQ ID NO: 2360453 - RNA, 19 nt, Artificial Sequence
  Description of Artificial Sequence: Synthetic oligonucleotide
gcuggguccuccuuggcag

SEQ ID NO: 2360454 - RNA, 19 nt, Artificial Sequence
  Description of Artificial Sequence: Synthetic oligonucleotide
augaaccccuuacuuggcu

SEQ ID NO: 2360455 - RNA, 19 nt, Artificial Sequence
  Description of Artificial Sequence: Synthetic oligonucleotide
uauagguucuggggauuug

SEQ ID NO: 2360456 - RNA, 19 nt, Artificial Sequence
  Description of Artificial Sequence: Synthetic oligonucleotide
cuuauuccuuugagacagc

SEQ ID NO: 2360457 - RNA, 19 nt, Artificial Sequence
  Description of Artificial Sequence: Synthetic oligonucleotide
ugugaucaggcaccacuuu

SEQ ID NO: 2360458 - RNA, 19 nt, Artificial Sequence
  Description of Artificial Sequence: Synthetic oligonucleotide
gacagccuaugguaugaca

SEQ ID NO: 2360459 - RNA, 19 nt, Artificial Sequence
  Description of Artificial Sequence: Synthetic oligonucleotide
uugaaccuggagcuagguu

SEQ ID NO: 2360460 - RNA, 19 nt, Artificial Sequence
  Description of Artificial Sequence: Synthetic oligonucleotide
cagagagccuccccaacac

SEQ ID NO: 2360461 - RNA, 19 nt, Artificial Sequence
  Description of Artificial Sequence: Synthetic oligonucleotide
uggcugcaaccucaugagc

SEQ ID NO: 2360462 - RNA, 19 nt, Artificial Sequence
  Description of Artificial Sequence: Synthetic oligonucleotide
agcaggucauggcuuccag

SEQ ID NO: 2360463 - RNA, 19 nt, Artificial Sequence
  Description of Artificial Sequence: Synthetic oligonucleotide
aggcguucuugccauauuu

SEQ ID NO: 2360464 - RNA, 19 nt, Artificial Sequence
  Description of Artificial Sequence: Synthetic oligonucleotide
auuuaccaaagcugauguu

SEQ ID NO: 2360465 - RNA, 19 nt, Artificial Sequence
  Description of Artificial Sequence: Synthetic oligonucleotide
guguccaccaggccagagc

SEQ ID NO: 2360466 - RNA, 19 nt, Artificial Sequence
  Description of Artificial Sequence: Synthetic oligonucleotide
gagacagauaccacccaga

SEQ ID NO: 2360467 - RNA, 19 nt, Artificial Sequence
  Description of Artificial Sequence: Synthetic oligonucleotide
agccaguaagccucagaga

SEQ ID NO: 2360468 - RNA, 19 nt, Artificial Sequence
  Description of Artificial Sequence: Synthetic oligonucleotide
agcucgaaagugggcaguc

SEQ ID NO: 2360469 - RNA, 19 nt, Artificial Sequence
  Description of Artificial Sequence: Synthetic oligonucleotide
ucuggggauuugaacucau

SEQ ID NO: 2360470 - RNA, 19 nt, Artificial Sequence
  Description of Artificial Sequence: Synthetic oligonucleotide
guuggaagccaguaagccu

SEQ ID NO: 2360471 - RNA, 19 nt, Artificial Sequence
  Description of Artificial Sequence: Synthetic oligonucleotide
uggucuguccugagguuau

SEQ ID NO: 2360472 - RNA, 19 nt, Artificial Sequence
  Description of Artificial Sequence: Synthetic oligonucleotide
caguagugauguugauagc

SEQ ID NO: 2360473 - RNA, 19 nt, Artificial Sequence
  Description of Artificial Sequence: Synthetic oligonucleotide
ggcgcuccagcccaaguag

SEQ ID NO: 2360474 - RNA, 19 nt, Artificial Sequence
  Description of Artificial Sequence: Synthetic oligonucleotide
cuccuaaacauaggcguuc

SEQ ID NO: 2360475 - RNA, 19 nt, Artificial Sequence
  Description of Artificial Sequence: Synthetic oligonucleotide
gguuaccggagugugauca

SEQ ID NO: 2360476 - RNA, 19 nt, Artificial Sequence
  Description of Artificial Sequence: Synthetic oligonucleotide
uccuuugagacagcaucuc

SEQ ID NO: 2360477 - RNA, 19 nt, Artificial Sequence
  Description of Artificial Sequence: Synthetic oligonucleotide
ugggguuaccggaguguga

SEQ ID NO: 2360478 - RNA, 19 nt, Artificial Sequence
  Description of Artificial Sequence: Synthetic oligonucleotide
cucguacuugguuccaaca

SEQ ID NO: 2360479 - RNA, 19 nt, Artificial Sequence
  Description of Artificial Sequence: Synthetic oligonucleotide
auauccagagcaggucaug

SEQ ID NO: 2360480 - RNA, 19 nt, Artificial Sequence
  Description of Artificial Sequence: Synthetic oligonucleotide
acaacggguugaagaaguc

SEQ ID NO: 2360481 - RNA, 19 nt, Artificial Sequence
  Description of Artificial Sequence: Synthetic oligonucleotide
agagagccuccccaacacu

SEQ ID NO: 2360482 - RNA, 19 nt, Artificial Sequence
  Description of Artificial Sequence: Synthetic oligonucleotide
ccaaguagaggcgggaccc

SEQ ID NO: 2360483 - RNA, 19 nt, Artificial Sequence
  Description of Artificial Sequence: Synthetic oligonucleotide
ccucaugagcccugaagcc

SEQ ID NO: 2360484 - RNA, 19 nt, Artificial Sequence
  Description of Artificial Sequence: Synthetic oligonucleotide
gagggcuuauagggaagcc

SEQ ID NO: 2360485 - RNA, 19 nt, Artificial Sequence
  Description of Artificial Sequence: Synthetic oligonucleotide
guuccaacauacaacgggu

SEQ ID NO: 2360486 - RNA, 19 nt, Artificial Sequence
  Description of Artificial Sequence: Synthetic oligonucleotide
cuagguuggaagccaguaa

SEQ ID NO: 2360487 - RNA, 19 nt, Artificial Sequence
  Description of Artificial Sequence: Synthetic oligonucleotide
agugccagauaagguauau

SEQ ID NO: 2360488 - RNA, 19 nt, Artificial Sequence
  Description of Artificial Sequence: Synthetic oligonucleotide
ccaacacugggguuaccgg

SEQ ID NO: 2360489 - RNA, 19 nt, Artificial Sequence
  Description of Artificial Sequence: Synthetic oligonucleotide
gauagcauaccaggagaua

SEQ ID NO: 2360490 - RNA, 19 nt, Artificial Sequence
  Description of Artificial Sequence: Synthetic oligonucleotide
ggaaauggucuguccugag

SEQ ID NO: 2360491 - RNA, 19 nt, Artificial Sequence
  Description of Artificial Sequence: Synthetic oligonucleotide
agccuggaaauggucuguc

SEQ ID NO: 2360492 - RNA, 19 nt, Artificial Sequence
  Description of Artificial Sequence: Synthetic oligonucleotide
acugggguuaccggagugu

SEQ ID NO: 2360493 - RNA, 19 nt, Artificial Sequence
  Description of Artificial Sequence: Synthetic oligonucleotide
gguaugacaaugaaccccu

SEQ ID NO: 2360494 - RNA, 19 nt, Artificial Sequence
  Description of Artificial Sequence: Synthetic oligonucleotide
cucagagagccuccccaac

SEQ ID NO: 2360495 - RNA, 19 nt, Artificial Sequence
  Description of Artificial Sequence: Synthetic oligonucleotide
uggggacugugagacaaaa

SEQ ID NO: 2360496 - RNA, 19 nt, Artificial Sequence
  Description of Artificial Sequence: Synthetic oligonucleotide
gguggcuggguccuccuug

SEQ ID NO: 2360497 - RNA, 19 nt, Artificial Sequence
  Description of Artificial Sequence: Synthetic oligonucleotide
agaggcuggagugccagau

SEQ ID NO: 2360498 - RNA, 19 nt, Artificial Sequence
  Description of Artificial Sequence: Synthetic oligonucleotide
ccagcucguacuugguucc

SEQ ID NO: 2360499 - RNA, 19 nt, Artificial Sequence
  Description of Artificial Sequence: Synthetic oligonucleotide
auaggcguucuugccauau

SEQ ID NO: 2360500 - RNA, 19 nt, Artificial Sequence
  Description of Artificial Sequence: Synthetic oligonucleotide
gagacuggucuggggacug

SEQ ID NO: 2360501 - RNA, 19 nt, Artificial Sequence
  Description of Artificial Sequence: Synthetic oligonucleotide
agauagccaccaucccaca

SEQ ID NO: 2360502 - RNA, 19 nt, Artificial Sequence
  Description of Artificial Sequence: Synthetic oligonucleotide
agucaguagugauguugau

SEQ ID NO: 2360503 - RNA, 19 nt, Artificial Sequence
  Description of Artificial Sequence: Synthetic oligonucleotide
cugggguuaccggagugug

SEQ ID NO: 2360504 - RNA, 19 nt, Artificial Sequence
  Description of Artificial Sequence: Synthetic oligonucleotide
agauaccacccagaaugga

SEQ ID NO: 2360505 - RNA, 19 nt, Artificial Sequence
  Description of Artificial Sequence: Synthetic oligonucleotide
gucaguagugauguugaua

SEQ ID NO: 2360506 - RNA, 19 nt, Artificial Sequence
  Description of Artificial Sequence: Synthetic oligonucleotide
agacaccucuguccccuug

SEQ ID NO: 2360507 - RNA, 19 nt, Artificial Sequence
  Description of Artificial Sequence: Synthetic oligonucleotide
ggcuuauagggaagccugg

SEQ ID NO: 2360508 - RNA, 19 nt, Artificial Sequence
  Description of Artificial Sequence: Synthetic oligonucleotide
cccaacacugggguuaccg

SEQ ID NO: 2360509 - RNA, 19 nt, Artificial Sequence
  Description of Artificial Sequence: Synthetic oligonucleotide
ccuuggcacauuauuucac

SEQ ID NO: 2360510 - RNA, 19 nt, Artificial Sequence
  Description of Artificial Sequence: Synthetic oligonucleotide
ccaguaagccucagagagc

SEQ ID NO: 2360511 - RNA, 19 nt, Artificial Sequence
  Description of Artificial Sequence: Synthetic oligonucleotide
gcuguaggaggccaugcga

SEQ ID NO: 2360512 - RNA, 19 nt, Artificial Sequence
  Description of Artificial Sequence: Synthetic oligonucleotide
ccuuggguccagcuguagg

SEQ ID NO: 2360513 - RNA, 19 nt, Artificial Sequence
  Description of Artificial Sequence: Synthetic oligonucleotide
gcuuauagggaagccuggc

SEQ ID NO: 2360514 - RNA, 19 nt, Artificial Sequence
  Description of Artificial Sequence: Synthetic oligonucleotide
ucuuacucacugagcccuu

SEQ ID NO: 2360515 - RNA, 19 nt, Artificial Sequence
  Description of Artificial Sequence: Synthetic oligonucleotide
cucuuacucacugagcccu

SEQ ID NO: 2360516 - RNA, 19 nt, Artificial Sequence
  Description of Artificial Sequence: Synthetic oligonucleotide
caacggguugaagaaguca

SEQ ID NO: 2360517 - RNA, 19 nt, Artificial Sequence
  Description of Artificial Sequence: Synthetic oligonucleotide
aaccccuuacuuggcugca

SEQ ID NO: 2360518 - RNA, 19 nt, Artificial Sequence
  Description of Artificial Sequence: Synthetic oligonucleotide
gcagcucgaaagugggcag

SEQ ID NO: 2360519 - RNA, 19 nt, Artificial Sequence
  Description of Artificial Sequence: Synthetic oligonucleotide
auggucuguccugagguua

SEQ ID NO: 2360520 - RNA, 19 nt, Artificial Sequence
  Description of Artificial Sequence: Synthetic oligonucleotide
cagcacagcagcaggugga

SEQ ID NO: 2360521 - RNA, 19 nt, Artificial Sequence
  Description of Artificial Sequence: Synthetic oligonucleotide
acacugggguuaccggagu

SEQ ID NO: 2360522 - RNA, 19 nt, Artificial Sequence
  Description of Artificial Sequence: Synthetic oligonucleotide
ucacaacuguagagggcuu

SEQ ID NO: 2360523 - RNA, 19 nt, Artificial Sequence
  Description of Artificial Sequence: Synthetic oligonucleotide
auagggaagccuggcccug

SEQ ID NO: 2360524 - RNA, 19 nt, Artificial Sequence
  Description of Artificial Sequence: Synthetic oligonucleotide
cauauuuaccaaagcugau

SEQ ID NO: 2360525 - RNA, 19 nt, Artificial Sequence
  Description of Artificial Sequence: Synthetic oligonucleotide
guagaggcgggacccagcu

SEQ ID NO: 2360526 - RNA, 19 nt, Artificial Sequence
  Description of Artificial Sequence: Synthetic oligonucleotide
ugacagccuaugguaugac

SEQ ID NO: 2360527 - RNA, 19 nt, Artificial Sequence
  Description of Artificial Sequence: Synthetic oligonucleotide
gcagucuugacagccuaug

SEQ ID NO: 2360528 - RNA, 19 nt, Artificial Sequence
  Description of Artificial Sequence: Synthetic oligonucleotide
gacagauaccacccagaau

SEQ ID NO: 2360529 - RNA, 19 nt, Artificial Sequence
  Description of Artificial Sequence: Synthetic oligonucleotide
cuuguguagcaaacacucu

SEQ ID NO: 2360530 - RNA, 19 nt, Artificial Sequence
  Description of Artificial Sequence: Synthetic oligonucleotide
uaggcguucuugccauauu

SEQ ID NO: 2360531 - RNA, 19 nt, Artificial Sequence
  Description of Artificial Sequence: Synthetic oligonucleotide
acuauagguucuggggauu

SEQ ID NO: 2360532 - RNA, 19 nt, Artificial Sequence
  Description of Artificial Sequence: Synthetic oligonucleotide
caacauacaacggguugaa

SEQ ID NO: 2360533 - RNA, 19 nt, Artificial Sequence
  Description of Artificial Sequence: Synthetic oligonucleotide
ccggagugugaucaggcac

SEQ ID NO: 2360534 - RNA, 19 nt, Artificial Sequence
  Description of Artificial Sequence: Synthetic oligonucleotide
gccagauaagguauaucca

SEQ ID NO: 2360535 - RNA, 19 nt, Artificial Sequence
  Description of Artificial Sequence: Synthetic oligonucleotide
guagugauguugauagcau

SEQ ID NO: 2360536 - RNA, 19 nt, Artificial Sequence
  Description of Artificial Sequence: Synthetic oligonucleotide
ggagcuagguuggaagcca

SEQ ID NO: 2360537 - RNA, 19 nt, Artificial Sequence
  Description of Artificial Sequence: Synthetic oligonucleotide
ccaacauacaacggguuga

SEQ ID NO: 2360538 - RNA, 19 nt, Artificial Sequence
  Description of Artificial Sequence: Synthetic oligonucleotide
gcucguacuugguuccaac

SEQ ID NO: 2360539 - RNA, 19 nt, Artificial Sequence
  Description of Artificial Sequence: Synthetic oligonucleotide
cucuggguaucacaacugu

SEQ ID NO: 2360540 - RNA, 19 nt, Artificial Sequence
  Description of Artificial Sequence: Synthetic oligonucleotide
acggguugaagaagucagu

SEQ ID NO: 2360541 - RNA, 19 nt, Artificial Sequence
  Description of Artificial Sequence: Synthetic oligonucleotide
gugaucaggcaccacuuuu

SEQ ID NO: 2360542 - RNA, 19 nt, Artificial Sequence
  Description of Artificial Sequence: Synthetic oligonucleotide
cuggagugccagauaaggu

SEQ ID NO: 2360543 - RNA, 19 nt, Artificial Sequence
  Description of Artificial Sequence: Synthetic oligonucleotide
gccuggaaauggucugucc

SEQ ID NO: 2360544 - RNA, 19 nt, Artificial Sequence
  Description of Artificial Sequence: Synthetic oligonucleotide
uccccaacacugggguuac

SEQ ID NO: 2360545 - RNA, 19 nt, Artificial Sequence
  Description of Artificial Sequence: Synthetic oligonucleotide
acccagcucguacuugguu

SEQ ID NO: 2360546 - RNA, 19 nt, Artificial Sequence
  Description of Artificial Sequence: Synthetic oligonucleotide
agcacagcagcagguggaa

SEQ ID NO: 2360547 - RNA, 19 nt, Artificial Sequence
  Description of Artificial Sequence: Synthetic oligonucleotide
gugccagauaagguauauc

SEQ ID NO: 2360548 - RNA, 19 nt, Artificial Sequence
  Description of Artificial Sequence: Synthetic oligonucleotide
ggcccugguggcugggucc

SEQ ID NO: 2360549 - RNA, 19 nt, Artificial Sequence
  Description of Artificial Sequence: Synthetic oligonucleotide
cacaagcugcagacaccuc

SEQ ID NO: 2360550 - RNA, 19 nt, Artificial Sequence
  Description of Artificial Sequence: Synthetic oligonucleotide
agguggcucuggguaucac

SEQ ID NO: 2360551 - RNA, 19 nt, Artificial Sequence
  Description of Artificial Sequence: Synthetic oligonucleotide
cuccccaacacugggguua

SEQ ID NO: 2360552 - RNA, 19 nt, Artificial Sequence
  Description of Artificial Sequence: Synthetic oligonucleotide
gaggcuggagugccagaua

SEQ ID NO: 2360553 - RNA, 19 nt, Artificial Sequence
  Description of Artificial Sequence: Synthetic oligonucleotide
guggagccuggaaaugguc

SEQ ID NO: 2360554 - RNA, 19 nt, Artificial Sequence
  Description of Artificial Sequence: Synthetic oligonucleotide
ggcgggacccagcucguac

SEQ ID NO: 2360555 - RNA, 19 nt, Artificial Sequence
  Description of Artificial Sequence: Synthetic oligonucleotide
agcuagguuggaagccagu

SEQ ID NO: 2360556 - RNA, 19 nt, Artificial Sequence
  Description of Artificial Sequence: Synthetic oligonucleotide
cucgaaagugggcagucuu

SEQ ID NO: 2360557 - RNA, 19 nt, Artificial Sequence
  Description of Artificial Sequence: Synthetic oligonucleotide
gcuagguuggaagccagua

SEQ ID NO: 2360558 - RNA, 19 nt, Artificial Sequence
  Description of Artificial Sequence: Synthetic oligonucleotide
agcucguacuugguuccaa

SEQ ID NO: 2360559 - RNA, 19 nt, Artificial Sequence
  Description of Artificial Sequence: Synthetic oligonucleotide
cagccuaugguaugacaau

SEQ ID NO: 2360560 - RNA, 19 nt, Artificial Sequence
  Description of Artificial Sequence: Synthetic oligonucleotide
cacaacuguagagggcuua

SEQ ID NO: 2360561 - RNA, 19 nt, Artificial Sequence
  Description of Artificial Sequence: Synthetic oligonucleotide
gucuguccugagguuauua

SEQ ID NO: 2360562 - RNA, 19 nt, Artificial Sequence
  Description of Artificial Sequence: Synthetic oligonucleotide
gagugccagauaagguaua

SEQ ID NO: 2360563 - RNA, 19 nt, Artificial Sequence
  Description of Artificial Sequence: Synthetic oligonucleotide
ggcuggagugccagauaag

SEQ ID NO: 2360564 - RNA, 19 nt, Artificial Sequence
  Description of Artificial Sequence: Synthetic oligonucleotide
ccccuuacuuggcugcaac

SEQ ID NO: 2360565 - RNA, 19 nt, Artificial Sequence
  Description of Artificial Sequence: Synthetic oligonucleotide
aguaagccucagagagccu

SEQ ID NO: 2360566 - RNA, 19 nt, Artificial Sequence
  Description of Artificial Sequence: Synthetic oligonucleotide
ggagugugaucaggcacca

SEQ ID NO: 2360567 - RNA, 19 nt, Artificial Sequence
  Description of Artificial Sequence: Synthetic oligonucleotide
gguccuccuuggcagcaca

SEQ ID NO: 2360568 - RNA, 19 nt, Artificial Sequence
  Description of Artificial Sequence: Synthetic oligonucleotide
cacauugaaccuggagcua

SEQ ID NO: 2360569 - RNA, 19 nt, Artificial Sequence
  Description of Artificial Sequence: Synthetic oligonucleotide
agacagcaucucacauuga

SEQ ID NO: 2360570 - RNA, 19 nt, Artificial Sequence
  Description of Artificial Sequence: Synthetic oligonucleotide
ccaaagcugauguugcuuu

SEQ ID NO: 2360571 - RNA, 19 nt, Artificial Sequence
  Description of Artificial Sequence: Synthetic oligonucleotide
ggcguucuugccauauuua

SEQ ID NO: 2360572 - RNA, 19 nt, Artificial Sequence
  Description of Artificial Sequence: Synthetic oligonucleotide
gcauaccaggagauagcca

SEQ ID NO: 2360573 - RNA, 19 nt, Artificial Sequence
  Description of Artificial Sequence: Synthetic oligonucleotide
guaggaggccaugcgaguu

SEQ ID NO: 2360574 - RNA, 19 nt, Artificial Sequence
  Description of Artificial Sequence: Synthetic oligonucleotide
ccccgaacaaucacaauau

SEQ ID NO: 2360575 - RNA, 19 nt, Artificial Sequence
  Description of Artificial Sequence: Synthetic oligonucleotide
gggguuaccggagugugau

SEQ ID NO: 2360576 - RNA, 19 nt, Artificial Sequence
  Description of Artificial Sequence: Synthetic oligonucleotide
gaggcgcuccagcccaagu

SEQ ID NO: 2360577 - RNA, 19 nt, Artificial Sequence
  Description of Artificial Sequence: Synthetic oligonucleotide
cuauagguucuggggauuu

SEQ ID NO: 2360578 - RNA, 19 nt, Artificial Sequence
  Description of Artificial Sequence: Synthetic oligonucleotide
gggacccagcucguacuug

SEQ ID NO: 2360579 - RNA, 19 nt, Artificial Sequence
  Description of Artificial Sequence: Synthetic oligonucleotide
accccuuacuuggcugcaa

SEQ ID NO: 2360580 - RNA, 19 nt, Artificial Sequence
  Description of Artificial Sequence: Synthetic oligonucleotide
gcuccuuggcacauuauuu

SEQ ID NO: 2360581 - RNA, 19 nt, Artificial Sequence
  Description of Artificial Sequence: Synthetic oligonucleotide
gcaaccucaugagcccuga

SEQ ID NO: 2360582 - RNA, 19 nt, Artificial Sequence
  Description of Artificial Sequence: Synthetic oligonucleotide
caacuguagagggcuuaua

SEQ ID NO: 2360583 - RNA, 19 nt, Artificial Sequence
  Description of Artificial Sequence: Synthetic oligonucleotide
cauaggcguucuugccaua

SEQ ID NO: 2360584 - RNA, 19 nt, Artificial Sequence
  Description of Artificial Sequence: Synthetic oligonucleotide
ggguuaccggagugugauc

SEQ ID NO: 2360585 - RNA, 19 nt, Artificial Sequence
  Description of Artificial Sequence: Synthetic oligonucleotide
gccagagcuccuaaacaua

SEQ ID NO: 2360586 - RNA, 19 nt, Artificial Sequence
  Description of Artificial Sequence: Synthetic oligonucleotide
caaccucaugagcccugaa

SEQ ID NO: 2360587 - RNA, 19 nt, Artificial Sequence
  Description of Artificial Sequence: Synthetic oligonucleotide
ggaggcgcuccagcccaag

SEQ ID NO: 2360588 - RNA, 19 nt, Artificial Sequence
  Description of Artificial Sequence: Synthetic oligonucleotide
ccagcuccuuggcacauua

SEQ ID NO: 2360589 - RNA, 19 nt, Artificial Sequence
  Description of Artificial Sequence: Synthetic oligonucleotide
cagcucguacuugguucca

SEQ ID NO: 2360590 - RNA, 19 nt, Artificial Sequence
  Description of Artificial Sequence: Synthetic oligonucleotide
cccgaacaaucacaauaua

SEQ ID NO: 2360591 - RNA, 19 nt, Artificial Sequence
  Description of Artificial Sequence: Synthetic oligonucleotide
cuuacucacugagcccuuu

SEQ ID NO: 2360592 - RNA, 19 nt, Artificial Sequence
  Description of Artificial Sequence: Synthetic oligonucleotide
gcuccuaaacauaggcguu

SEQ ID NO: 2360593 - RNA, 19 nt, Artificial Sequence
  Description of Artificial Sequence: Synthetic oligonucleotide
gcgggacccagcucguacu

SEQ ID NO: 2360594 - RNA, 19 nt, Artificial Sequence
  Description of Artificial Sequence: Synthetic oligonucleotide
gcgcuccagcccaaguaga

SEQ ID NO: 2360595 - RNA, 19 nt, Artificial Sequence
  Description of Artificial Sequence: Synthetic oligonucleotide
gaggcgggacccagcucgu

SEQ ID NO: 2360596 - RNA, 19 nt, Artificial Sequence
  Description of Artificial Sequence: Synthetic oligonucleotide
guaugacaaugaaccccuu

SEQ ID NO: 2360597 - RNA, 19 nt, Artificial Sequence
  Description of Artificial Sequence: Synthetic oligonucleotide
gcucgaaagugggcagucu

SEQ ID NO: 2360598 - RNA, 19 nt, Artificial Sequence
  Description of Artificial Sequence: Synthetic oligonucleotide
cagcuccuuggcacauuau

SEQ ID NO: 2360599 - RNA, 19 nt, Artificial Sequence
  Description of Artificial Sequence: Synthetic oligonucleotide
aggcgggacccagcucgua

SEQ ID NO: 2360600 - RNA, 19 nt, Artificial Sequence
  Description of Artificial Sequence: Synthetic oligonucleotide
ccuaaacauaggcguucuu

SEQ ID NO: 2360601 - RNA, 19 nt, Artificial Sequence
  Description of Artificial Sequence: Synthetic oligonucleotide
gcccugguggcuggguccu

SEQ ID NO: 2360602 - RNA, 19 nt, Artificial Sequence
  Description of Artificial Sequence: Synthetic oligonucleotide
ccccaacacugggguuacc

SEQ ID NO: 2360603 - RNA, 19 nt, Artificial Sequence
  Description of Artificial Sequence: Synthetic oligonucleotide
ccccuuggguccagcugua

SEQ ID NO: 2360604 - RNA, 19 nt, Artificial Sequence
  Description of Artificial Sequence: Synthetic oligonucleotide
ggucuguccugagguuauu

SEQ ID NO: 2360605 - RNA, 19 nt, Artificial Sequence
  Description of Artificial Sequence: Synthetic oligonucleotide
gggaggcgcuccagcccaa

SEQ ID NO: 2360606 - RNA, 19 nt, Artificial Sequence
  Description of Artificial Sequence: Synthetic oligonucleotide
acucuugcgagacaggggc

SEQ ID NO: 2360607 - RNA, 19 nt, Artificial Sequence
  Description of Artificial Sequence: Synthetic oligonucleotide
gauuggugcuacuugacgg

SEQ ID NO: 2360608 - RNA, 19 nt, Artificial Sequence
  Description of Artificial Sequence: Synthetic oligonucleotide
uugcuuuccagccugugcg

SEQ ID NO: 2360609 - RNA, 19 nt, Artificial Sequence
  Description of Artificial Sequence: Synthetic oligonucleotide
gaggggacgacccacaggg

SEQ ID NO: 2360610 - RNA, 19 nt, Artificial Sequence
  Description of Artificial Sequence: Synthetic oligonucleotide
agacgauggaaucuagggc

SEQ ID NO: 2360611 - RNA, 19 nt, Artificial Sequence
  Description of Artificial Sequence: Synthetic oligonucleotide
uucuuccucacacaguugc

SEQ ID NO: 2360612 - RNA, 19 nt, Artificial Sequence
  Description of Artificial Sequence: Synthetic oligonucleotide
guuauugagaggugugugg

SEQ ID NO: 2360613 - RNA, 19 nt, Artificial Sequence
  Description of Artificial Sequence: Synthetic oligonucleotide
agaagcagucaucacaaag

SEQ ID NO: 2360614 - RNA, 19 nt, Artificial Sequence
  Description of Artificial Sequence: Synthetic oligonucleotide
acuggcagugaacuggagc

SEQ ID NO: 2360615 - RNA, 19 nt, Artificial Sequence
  Description of Artificial Sequence: Synthetic oligonucleotide
cagacgauggaaucuaggg

SEQ ID NO: 2360616 - RNA, 19 nt, Artificial Sequence
  Description of Artificial Sequence: Synthetic oligonucleotide
uugucuagagaaagcacag

SEQ ID NO: 2360617 - RNA, 19 nt, Artificial Sequence
  Description of Artificial Sequence: Synthetic oligonucleotide
uucuggaguguacagagcu

SEQ ID NO: 2360618 - RNA, 19 nt, Artificial Sequence
  Description of Artificial Sequence: Synthetic oligonucleotide
caggggauucacaagaagc

SEQ ID NO: 2360619 - RNA, 19 nt, Artificial Sequence
  Description of Artificial Sequence: Synthetic oligonucleotide
auuggugcuacuugacggg

SEQ ID NO: 2360620 - RNA, 19 nt, Artificial Sequence
  Description of Artificial Sequence: Synthetic oligonucleotide
uuuacacucgcgcuuggca

SEQ ID NO: 2360621 - RNA, 19 nt, Artificial Sequence
  Description of Artificial Sequence: Synthetic oligonucleotide
aacaaggagcccuccgggg

SEQ ID NO: 2360622 - RNA, 19 nt, Artificial Sequence
  Description of Artificial Sequence: Synthetic oligonucleotide
ucuagagaaagcacagccu

SEQ ID NO: 2360623 - RNA, 19 nt, Artificial Sequence
  Description of Artificial Sequence: Synthetic oligonucleotide
agauuggugcuacuugacg

SEQ ID NO: 2360624 - RNA, 19 nt, Artificial Sequence
  Description of Artificial Sequence: Synthetic oligonucleotide
gaguguacagagcugagca

SEQ ID NO: 2360625 - RNA, 19 nt, Artificial Sequence
  Description of Artificial Sequence: Synthetic oligonucleotide
aucucucaccagcagacac

SEQ ID NO: 2360626 - RNA, 19 nt, Artificial Sequence
  Description of Artificial Sequence: Synthetic oligonucleotide
cuugucuagagaaagcaca

SEQ ID NO: 2360627 - RNA, 19 nt, Artificial Sequence
  Description of Artificial Sequence: Synthetic oligonucleotide
auucacaagaagcagucau

SEQ ID NO: 2360628 - RNA, 19 nt, Artificial Sequence
  Description of Artificial Sequence: Synthetic oligonucleotide
acagccuaggaacaaggag

SEQ ID NO: 2360629 - RNA, 19 nt, Artificial Sequence
  Description of Artificial Sequence: Synthetic oligonucleotide
gaacaggggauucacaaga

SEQ ID NO: 2360630 - RNA, 19 nt, Artificial Sequence
  Description of Artificial Sequence: Synthetic oligonucleotide
uuauugagagguguguggc

SEQ ID NO: 2360631 - RNA, 19 nt, Artificial Sequence
  Description of Artificial Sequence: Synthetic oligonucleotide
guguaggugacagugaacc

SEQ ID NO: 2360632 - RNA, 19 nt, Artificial Sequence
  Description of Artificial Sequence: Synthetic oligonucleotide
uggagggugggacacacug

SEQ ID NO: 2360633 - RNA, 19 nt, Artificial Sequence
  Description of Artificial Sequence: Synthetic oligonucleotide
ucuaccaccaggacuuuac

SEQ ID NO: 2360634 - RNA, 19 nt, Artificial Sequence
  Description of Artificial Sequence: Synthetic oligonucleotide
aaggaagucuuggagguug

SEQ ID NO: 2360635 - RNA, 19 nt, Artificial Sequence
  Description of Artificial Sequence: Synthetic oligonucleotide
ucuagggcugccugcauag

SEQ ID NO: 2360636 - RNA, 19 nt, Artificial Sequence
  Description of Artificial Sequence: Synthetic oligonucleotide
accaggacuuuacacucgc

SEQ ID NO: 2360637 - RNA, 19 nt, Artificial Sequence
  Description of Artificial Sequence: Synthetic oligonucleotide
gaacaaggagcccuccggg

SEQ ID NO: 2360638 - RNA, 19 nt, Artificial Sequence
  Description of Artificial Sequence: Synthetic oligonucleotide
agagguguguggcagacga

SEQ ID NO: 2360639 - RNA, 19 nt, Artificial Sequence
  Description of Artificial Sequence: Synthetic oligonucleotide
caggggacggucuaggcgg

SEQ ID NO: 2360640 - RNA, 19 nt, Artificial Sequence
  Description of Artificial Sequence: Synthetic oligonucleotide
uguaggugacagugaaccg

SEQ ID NO: 2360641 - RNA, 19 nt, Artificial Sequence
  Description of Artificial Sequence: Synthetic oligonucleotide
ucuugucuagagaaagcac

SEQ ID NO: 2360642 - RNA, 19 nt, Artificial Sequence
  Description of Artificial Sequence: Synthetic oligonucleotide
gacgauggaaucuagggcu

SEQ ID NO: 2360643 - RNA, 19 nt, Artificial Sequence
  Description of Artificial Sequence: Synthetic oligonucleotide
ucuaggcggacacugggca

SEQ ID NO: 2360644 - RNA, 19 nt, Artificial Sequence
  Description of Artificial Sequence: Synthetic oligonucleotide
caaguagaggggacgaccc

SEQ ID NO: 2360645 - RNA, 19 nt, Artificial Sequence
  Description of Artificial Sequence: Synthetic oligonucleotide
gacggguucuaccaccagg

SEQ ID NO: 2360646 - RNA, 19 nt, Artificial Sequence
  Description of Artificial Sequence: Synthetic oligonucleotide
agugcacugccuuuccggg

SEQ ID NO: 2360647 - RNA, 19 nt, Artificial Sequence
  Description of Artificial Sequence: Synthetic oligonucleotide
cugagagcggccuaggcug

SEQ ID NO: 2360648 - RNA, 19 nt, Artificial Sequence
  Description of Artificial Sequence: Synthetic oligonucleotide
ugcacugccuuuccgggag

SEQ ID NO: 2360649 - RNA, 19 nt, Artificial Sequence
  Description of Artificial Sequence: Synthetic oligonucleotide
uggagguuguugagcagcg

SEQ ID NO: 2360650 - RNA, 19 nt, Artificial Sequence
  Description of Artificial Sequence: Synthetic oligonucleotide
aaagcacagccuuguccgg

SEQ ID NO: 2360651 - RNA, 19 nt, Artificial Sequence
  Description of Artificial Sequence: Synthetic oligonucleotide
uacucuugcgagacagggg

SEQ ID NO: 2360652 - RNA, 19 nt, Artificial Sequence
  Description of Artificial Sequence: Synthetic oligonucleotide
uguuccgggguccacacaa

SEQ ID NO: 2360653 - RNA, 19 nt, Artificial Sequence
  Description of Artificial Sequence: Synthetic oligonucleotide
caggacuuuacacucgcgc

SEQ ID NO: 2360654 - RNA, 19 nt, Artificial Sequence
  Description of Artificial Sequence: Synthetic oligonucleotide
gacagugaaccgcucguag

SEQ ID NO: 2360655 - RNA, 19 nt, Artificial Sequence
  Description of Artificial Sequence: Synthetic oligonucleotide
uucacaagaagcagucauc

SEQ ID NO: 2360656 - RNA, 19 nt, Artificial Sequence
  Description of Artificial Sequence: Synthetic oligonucleotide
cuugacggguucuaccacc

SEQ ID NO: 2360657 - RNA, 19 nt, Artificial Sequence
  Description of Artificial Sequence: Synthetic oligonucleotide
uaagugcacugccuuuccg

SEQ ID NO: 2360658 - RNA, 19 nt, Artificial Sequence
  Description of Artificial Sequence: Synthetic oligonucleotide
gagggugggacacacuggc

SEQ ID NO: 2360659 - RNA, 19 nt, Artificial Sequence
  Description of Artificial Sequence: Synthetic oligonucleotide
agccuaggaacaaggagcc

SEQ ID NO: 2360660 - RNA, 19 nt, Artificial Sequence
  Description of Artificial Sequence: Synthetic oligonucleotide
acgggaaggcuguuggugg

SEQ ID NO: 2360661 - RNA, 19 nt, Artificial Sequence
  Description of Artificial Sequence: Synthetic oligonucleotide
agcagauuggugcuacuug

SEQ ID NO: 2360662 - RNA, 19 nt, Artificial Sequence
  Description of Artificial Sequence: Synthetic oligonucleotide
uggaaucuagggcugccug

SEQ ID NO: 2360663 - RNA, 19 nt, Artificial Sequence
  Description of Artificial Sequence: Synthetic oligonucleotide
cuucaguuucaugugcugg

SEQ ID NO: 2360664 - RNA, 19 nt, Artificial Sequence
  Description of Artificial Sequence: Synthetic oligonucleotide
gucguucuuccucacacag

SEQ ID NO: 2360665 - RNA, 19 nt, Artificial Sequence
  Description of Artificial Sequence: Synthetic oligonucleotide
ugaaccgcucguagguccg

SEQ ID NO: 2360666 - RNA, 19 nt, Artificial Sequence
  Description of Artificial Sequence: Synthetic oligonucleotide
ucaucacaaagcaggggac

SEQ ID NO: 2360667 - RNA, 19 nt, Artificial Sequence
  Description of Artificial Sequence: Synthetic oligonucleotide
cuacuugacggguucuacc

SEQ ID NO: 2360668 - RNA, 19 nt, Artificial Sequence
  Description of Artificial Sequence: Synthetic oligonucleotide
ucaugagguggcuacggga

SEQ ID NO: 2360669 - RNA, 19 nt, Artificial Sequence
  Description of Artificial Sequence: Synthetic oligonucleotide
cucguagguccgaacaggg

SEQ ID NO: 2360670 - RNA, 19 nt, Artificial Sequence
  Description of Artificial Sequence: Synthetic oligonucleotide
agaagccgagguuauugag

SEQ ID NO: 2360671 - RNA, 19 nt, Artificial Sequence
  Description of Artificial Sequence: Synthetic oligonucleotide
aguagaggggacgacccac

SEQ ID NO: 2360672 - RNA, 19 nt, Artificial Sequence
  Description of Artificial Sequence: Synthetic oligonucleotide
acugagagcggccuaggcu

SEQ ID NO: 2360673 - RNA, 19 nt, Artificial Sequence
  Description of Artificial Sequence: Synthetic oligonucleotide
ucuugcgagacaggggccg

SEQ ID NO: 2360674 - RNA, 19 nt, Artificial Sequence
  Description of Artificial Sequence: Synthetic oligonucleotide
guaggugacagugaaccgc

SEQ ID NO: 2360675 - RNA, 19 nt, Artificial Sequence
  Description of Artificial Sequence: Synthetic oligonucleotide
aucacaaagcaggggacgg

SEQ ID NO: 2360676 - RNA, 19 nt, Artificial Sequence
  Description of Artificial Sequence: Synthetic oligonucleotide
caagaagcagucaucacaa

SEQ ID NO: 2360677 - RNA, 19 nt, Artificial Sequence
  Description of Artificial Sequence: Synthetic oligonucleotide
ugaacuggagcuucaguuu

SEQ ID NO: 2360678 - RNA, 19 nt, Artificial Sequence
  Description of Artificial Sequence: Synthetic oligonucleotide
ucuggaguguacagagcug

SEQ ID NO: 2360679 - RNA, 19 nt, Artificial Sequence
  Description of Artificial Sequence: Synthetic oligonucleotide
guguacagagcugagcaag

SEQ ID NO: 2360680 - RNA, 19 nt, Artificial Sequence
  Description of Artificial Sequence: Synthetic oligonucleotide
gaacuggagcuucaguuuc

SEQ ID NO: 2360681 - RNA, 19 nt, Artificial Sequence
  Description of Artificial Sequence: Synthetic oligonucleotide
ucaaagagccccguccuca

SEQ ID NO: 2360682 - RNA, 19 nt, Artificial Sequence
  Description of Artificial Sequence: Synthetic oligonucleotide
guugcuuuccagccugugc

SEQ ID NO: 2360683 - RNA, 19 nt, Artificial Sequence
  Description of Artificial Sequence: Synthetic oligonucleotide
uuacacucgcgcuuggcaa

SEQ ID NO: 2360684 - RNA, 19 nt, Artificial Sequence
  Description of Artificial Sequence: Synthetic oligonucleotide
acuugacggguucuaccac

SEQ ID NO: 2360685 - RNA, 19 nt, Artificial Sequence
  Description of Artificial Sequence: Synthetic oligonucleotide
acaggggauucacaagaag

SEQ ID NO: 2360686 - RNA, 19 nt, Artificial Sequence
  Description of Artificial Sequence: Synthetic oligonucleotide
ucguagguccgaacagggg

SEQ ID NO: 2360687 - RNA, 19 nt, Artificial Sequence
  Description of Artificial Sequence: Synthetic oligonucleotide
uuucuggaguguacagagc

SEQ ID NO: 2360688 - RNA, 19 nt, Artificial Sequence
  Description of Artificial Sequence: Synthetic oligonucleotide
guuggugggagaaggacug

SEQ ID NO: 2360689 - RNA, 19 nt, Artificial Sequence
  Description of Artificial Sequence: Synthetic oligonucleotide
caucacaaagcaggggacg

SEQ ID NO: 2360690 - RNA, 19 nt, Artificial Sequence
  Description of Artificial Sequence: Synthetic oligonucleotide
ugcguuccaucacacugcc

SEQ ID NO: 2360691 - RNA, 19 nt, Artificial Sequence
  Description of Artificial Sequence: Synthetic oligonucleotide
cugcguuccaucacacugc

SEQ ID NO: 2360692 - RNA, 19 nt, Artificial Sequence
  Description of Artificial Sequence: Synthetic oligonucleotide
ggugacagugaaccgcucg

SEQ ID NO: 2360693 - RNA, 19 nt, Artificial Sequence
  Description of Artificial Sequence: Synthetic oligonucleotide
gcuacgggaaggcuguugg

SEQ ID NO: 2360694 - RNA, 19 nt, Artificial Sequence
  Description of Artificial Sequence: Synthetic oligonucleotide
uugacggguucuaccacca

SEQ ID NO: 2360695 - RNA, 19 nt, Artificial Sequence
  Description of Artificial Sequence: Synthetic oligonucleotide
agagaaagcacagccuugu

SEQ ID NO: 2360696 - RNA, 19 nt, Artificial Sequence
  Description of Artificial Sequence: Synthetic oligonucleotide
cagcaaggaagucuuggag

SEQ ID NO: 2360697 - RNA, 19 nt, Artificial Sequence
  Description of Artificial Sequence: Synthetic oligonucleotide
uacgggaaggcuguuggug

SEQ ID NO: 2360698 - RNA, 19 nt, Artificial Sequence
  Description of Artificial Sequence: Synthetic oligonucleotide
cugaagguaagugcacugc

SEQ ID NO: 2360699 - RNA, 19 nt, Artificial Sequence
  Description of Artificial Sequence: Synthetic oligonucleotide
gagguuauugagaggugug

SEQ ID NO: 2360700 - RNA, 19 nt, Artificial Sequence
  Description of Artificial Sequence: Synthetic oligonucleotide
cucagcucaaagagccccg

SEQ ID NO: 2360701 - RNA, 19 nt, Artificial Sequence
  Description of Artificial Sequence: Synthetic oligonucleotide
uaccaccaggacuuuacac

SEQ ID NO: 2360702 - RNA, 19 nt, Artificial Sequence
  Description of Artificial Sequence: Synthetic oligonucleotide
ugcuggcucagcucaaaga

SEQ ID NO: 2360703 - RNA, 19 nt, Artificial Sequence
  Description of Artificial Sequence: Synthetic oligonucleotide
uggcaaucuugucuagaga

SEQ ID NO: 2360704 - RNA, 19 nt, Artificial Sequence
  Description of Artificial Sequence: Synthetic oligonucleotide
ugagagcggccuaggcugg

SEQ ID NO: 2360705 - RNA, 19 nt, Artificial Sequence
  Description of Artificial Sequence: Synthetic oligonucleotide
uggaguguacagagcugag

SEQ ID NO: 2360706 - RNA, 19 nt, Artificial Sequence
  Description of Artificial Sequence: Synthetic oligonucleotide
gugaaccgcucguaggucc

SEQ ID NO: 2360707 - RNA, 19 nt, Artificial Sequence
  Description of Artificial Sequence: Synthetic oligonucleotide
cugagcaagcagauuggug

SEQ ID NO: 2360708 - RNA, 19 nt, Artificial Sequence
  Description of Artificial Sequence: Synthetic oligonucleotide
ugucuagagaaagcacagc

SEQ ID NO: 2360709 - RNA, 19 nt, Artificial Sequence
  Description of Artificial Sequence: Synthetic oligonucleotide
caugugcuggcucagcuca

SEQ ID NO: 2360710 - RNA, 19 nt, Artificial Sequence
  Description of Artificial Sequence: Synthetic oligonucleotide
uuccgggagaagccgaggu

SEQ ID NO: 2360711 - RNA, 19 nt, Artificial Sequence
  Description of Artificial Sequence: Synthetic oligonucleotide
ucgcgcuuggcaaucuugu

SEQ ID NO: 2360712 - RNA, 19 nt, Artificial Sequence
  Description of Artificial Sequence: Synthetic oligonucleotide
uguguggcagacgauggaa

SEQ ID NO: 2360713 - RNA, 19 nt, Artificial Sequence
  Description of Artificial Sequence: Synthetic oligonucleotide
agagccccguccucagggc

SEQ ID NO: 2360714 - RNA, 19 nt, Artificial Sequence
  Description of Artificial Sequence: Synthetic oligonucleotide
uccacacaagccucacagc

SEQ ID NO: 2360715 - RNA, 19 nt, Artificial Sequence
  Description of Artificial Sequence: Synthetic oligonucleotide
cauagcccgucguucuucc

SEQ ID NO: 2360716 - RNA, 19 nt, Artificial Sequence
  Description of Artificial Sequence: Synthetic oligonucleotide
gagaagccgagguuauuga

SEQ ID NO: 2360717 - RNA, 19 nt, Artificial Sequence
  Description of Artificial Sequence: Synthetic oligonucleotide
cuaggaacaaggagcccuc

SEQ ID NO: 2360718 - RNA, 19 nt, Artificial Sequence
  Description of Artificial Sequence: Synthetic oligonucleotide
cuuuccgggagaagccgag

SEQ ID NO: 2360719 - RNA, 19 nt, Artificial Sequence
  Description of Artificial Sequence: Synthetic oligonucleotide
cagauuggugcuacuugac

SEQ ID NO: 2360720 - RNA, 19 nt, Artificial Sequence
  Description of Artificial Sequence: Synthetic oligonucleotide
cucucaccagcagacacag

SEQ ID NO: 2360721 - RNA, 19 nt, Artificial Sequence
  Description of Artificial Sequence: Synthetic oligonucleotide
gaaucuagggcugccugca

SEQ ID NO: 2360722 - RNA, 19 nt, Artificial Sequence
  Description of Artificial Sequence: Synthetic oligonucleotide
caugagguggcuacgggaa

SEQ ID NO: 2360723 - RNA, 19 nt, Artificial Sequence
  Description of Artificial Sequence: Synthetic oligonucleotide
ggucuaggcggacacuggg

SEQ ID NO: 2360724 - RNA, 19 nt, Artificial Sequence
  Description of Artificial Sequence: Synthetic oligonucleotide
uggugggagaaggacugag

SEQ ID NO: 2360725 - RNA, 19 nt, Artificial Sequence
  Description of Artificial Sequence: Synthetic oligonucleotide
acaagccucacagcaagga

SEQ ID NO: 2360726 - RNA, 19 nt, Artificial Sequence
  Description of Artificial Sequence: Synthetic oligonucleotide
ggagaagccgagguuauug

SEQ ID NO: 2360727 - RNA, 19 nt, Artificial Sequence
  Description of Artificial Sequence: Synthetic oligonucleotide
ccugcguuccaucacacug

SEQ ID NO: 2360728 - RNA, 19 nt, Artificial Sequence
  Description of Artificial Sequence: Synthetic oligonucleotide
caccaggacuuuacacucg

SEQ ID NO: 2360729 - RNA, 19 nt, Artificial Sequence
  Description of Artificial Sequence: Synthetic oligonucleotide
ucguucuuccucacacagu

SEQ ID NO: 2360730 - RNA, 19 nt, Artificial Sequence
  Description of Artificial Sequence: Synthetic oligonucleotide
cacaagaagcagucaucac

SEQ ID NO: 2360731 - RNA, 19 nt, Artificial Sequence
  Description of Artificial Sequence: Synthetic oligonucleotide
agguuauugagaggugugu

SEQ ID NO: 2360732 - RNA, 19 nt, Artificial Sequence
  Description of Artificial Sequence: Synthetic oligonucleotide
agccugugcguguuccggg

SEQ ID NO: 2360733 - RNA, 19 nt, Artificial Sequence
  Description of Artificial Sequence: Synthetic oligonucleotide
gguuauugagaggugugug

SEQ ID NO: 2360734 - RNA, 19 nt, Artificial Sequence
  Description of Artificial Sequence: Synthetic oligonucleotide
agugaaccgcucguagguc

SEQ ID NO: 2360735 - RNA, 19 nt, Artificial Sequence
  Description of Artificial Sequence: Synthetic oligonucleotide
caaagagccccguccucag

SEQ ID NO: 2360736 - RNA, 19 nt, Artificial Sequence
  Description of Artificial Sequence: Synthetic oligonucleotide
ggaaucuagggcugccugc

SEQ ID NO: 2360737 - RNA, 19 nt, Artificial Sequence
  Description of Artificial Sequence: Synthetic oligonucleotide
uccgaacaggggauucaca

SEQ ID NO: 2360738 - RNA, 19 nt, Artificial Sequence
  Description of Artificial Sequence: Synthetic oligonucleotide
gacugagagcggccuaggc

SEQ ID NO: 2360739 - RNA, 19 nt, Artificial Sequence
  Description of Artificial Sequence: Synthetic oligonucleotide
uuuccgggagaagccgagg

SEQ ID NO: 2360740 - RNA, 19 nt, Artificial Sequence
  Description of Artificial Sequence: Synthetic oligonucleotide
aagcagauuggugcuacuu

SEQ ID NO: 2360741 - RNA, 19 nt, Artificial Sequence
  Description of Artificial Sequence: Synthetic oligonucleotide
aggacugagagcggccuag

SEQ ID NO: 2360742 - RNA, 19 nt, Artificial Sequence
  Description of Artificial Sequence: Synthetic oligonucleotide
cuggggcuacucuugcgag

SEQ ID NO: 2360743 - RNA, 19 nt, Artificial Sequence
  Description of Artificial Sequence: Synthetic oligonucleotide
cucgcgcuuggcaaucuug

SEQ ID NO: 2360744 - RNA, 19 nt, Artificial Sequence
  Description of Artificial Sequence: Synthetic oligonucleotide
acggucuaggcggacacug

SEQ ID NO: 2360745 - RNA, 19 nt, Artificial Sequence
  Description of Artificial Sequence: Synthetic oligonucleotide
cuaggcggacacugggcag

SEQ ID NO: 2360746 - RNA, 19 nt, Artificial Sequence
  Description of Artificial Sequence: Synthetic oligonucleotide
gcaggggacggucuaggcg

SEQ ID NO: 2360747 - RNA, 19 nt, Artificial Sequence
  Description of Artificial Sequence: Synthetic oligonucleotide
gcagauuggugcuacuuga

SEQ ID NO: 2360748 - RNA, 19 nt, Artificial Sequence
  Description of Artificial Sequence: Synthetic oligonucleotide
ggcuacucuugcgagacag

SEQ ID NO: 2360749 - RNA, 19 nt, Artificial Sequence
  Description of Artificial Sequence: Synthetic oligonucleotide
uccucacacaguugcuuuc

SEQ ID NO: 2360750 - RNA, 19 nt, Artificial Sequence
  Description of Artificial Sequence: Synthetic oligonucleotide
uacacucgcgcuuggcaau

SEQ ID NO: 2360751 - RNA, 19 nt, Artificial Sequence
  Description of Artificial Sequence: Synthetic oligonucleotide
ugugcguguuccggggucc

SEQ ID NO: 2360752 - RNA, 19 nt, Artificial Sequence
  Description of Artificial Sequence: Synthetic oligonucleotide
cuagagaaagcacagccuu

SEQ ID NO: 2360753 - RNA, 19 nt, Artificial Sequence
  Description of Artificial Sequence: Synthetic oligonucleotide
ugggaggcacagccuagga

SEQ ID NO: 2360754 - RNA, 19 nt, Artificial Sequence
  Description of Artificial Sequence: Synthetic oligonucleotide
aacaggggauucacaagaa

SEQ ID NO: 2360755 - RNA, 19 nt, Artificial Sequence
  Description of Artificial Sequence: Synthetic oligonucleotide
cuggaguguacagagcuga

SEQ ID NO: 2360756 - RNA, 19 nt, Artificial Sequence
  Description of Artificial Sequence: Synthetic oligonucleotide
uucacagcuucugcccuca

SEQ ID NO: 2360757 - RNA, 19 nt, Artificial Sequence
  Description of Artificial Sequence: Synthetic oligonucleotide
acacacuggcagugaacug

SEQ ID NO: 2360758 - RNA, 19 nt, Artificial Sequence
  Description of Artificial Sequence: Synthetic oligonucleotide
ugacggguucuaccaccag

SEQ ID NO: 2360759 - RNA, 19 nt, Artificial Sequence
  Description of Artificial Sequence: Synthetic oligonucleotide
gcaaguagaggggacgacc

SEQ ID NO: 2360760 - RNA, 19 nt, Artificial Sequence
  Description of Artificial Sequence: Synthetic oligonucleotide
gggcuuaggguuucuggag

SEQ ID NO: 2360761 - RNA, 19 nt, Artificial Sequence
  Description of Artificial Sequence: Synthetic oligonucleotide
accgcucguagguccgaac

SEQ ID NO: 2360762 - RNA, 19 nt, Artificial Sequence
  Description of Artificial Sequence: Synthetic oligonucleotide
aaucuagggcugccugcau

SEQ ID NO: 2360763 - RNA, 19 nt, Artificial Sequence
  Description of Artificial Sequence: Synthetic oligonucleotide
gcggacacugggcaggcgg

SEQ ID NO: 2360764 - RNA, 19 nt, Artificial Sequence
  Description of Artificial Sequence: Synthetic oligonucleotide
uggggcuacucuugcgaga

SEQ ID NO: 2360765 - RNA, 19 nt, Artificial Sequence
  Description of Artificial Sequence: Synthetic oligonucleotide
agcccgucguucuuccuca

SEQ ID NO: 2360766 - RNA, 19 nt, Artificial Sequence
  Description of Artificial Sequence: Synthetic oligonucleotide
cucuugcgagacaggggcc

SEQ ID NO: 2360767 - RNA, 19 nt, Artificial Sequence
  Description of Artificial Sequence: Synthetic oligonucleotide
agguuguugagcagcgugu

SEQ ID NO: 2360768 - RNA, 19 nt, Artificial Sequence
  Description of Artificial Sequence: Synthetic oligonucleotide
gagaaagcacagccuuguc

SEQ ID NO: 2360769 - RNA, 19 nt, Artificial Sequence
  Description of Artificial Sequence: Synthetic oligonucleotide
agccgagguuauugagagg

SEQ ID NO: 2360770 - RNA, 19 nt, Artificial Sequence
  Description of Artificial Sequence: Synthetic oligonucleotide
gcuuaggguuucuggagug

SEQ ID NO: 2360771 - RNA, 19 nt, Artificial Sequence
  Description of Artificial Sequence: Synthetic oligonucleotide
uuggugcuacuugacgggu

SEQ ID NO: 2360772 - RNA, 19 nt, Artificial Sequence
  Description of Artificial Sequence: Synthetic oligonucleotide
agagcggccuaggcuggcc

SEQ ID NO: 2360773 - RNA, 19 nt, Artificial Sequence
  Description of Artificial Sequence: Synthetic oligonucleotide
ggugcuacuugacggguuc

SEQ ID NO: 2360774 - RNA, 19 nt, Artificial Sequence
  Description of Artificial Sequence: Synthetic oligonucleotide
ggguuucuggaguguacag

SEQ ID NO: 2360775 - RNA, 19 nt, Artificial Sequence
  Description of Artificial Sequence: Synthetic oligonucleotide
aaggacugagagcggccua

SEQ ID NO: 2360776 - RNA, 19 nt, Artificial Sequence
  Description of Artificial Sequence: Synthetic oligonucleotide
gagagguguguggcagacg

SEQ ID NO: 2360777 - RNA, 19 nt, Artificial Sequence
  Description of Artificial Sequence: Synthetic oligonucleotide
accucaugagguggcuacg

SEQ ID NO: 2360778 - RNA, 19 nt, Artificial Sequence
  Description of Artificial Sequence: Synthetic oligonucleotide
gaagguaagugcacugccu

SEQ ID NO: 2360779 - RNA, 19 nt, Artificial Sequence
  Description of Artificial Sequence: Synthetic oligonucleotide
cugccugcauagcccgucg

SEQ ID NO: 2360780 - RNA, 19 nt, Artificial Sequence
  Description of Artificial Sequence: Synthetic oligonucleotide
cugcccucaucucucacca

SEQ ID NO: 2360781 - RNA, 19 nt, Artificial Sequence
  Description of Artificial Sequence: Synthetic oligonucleotide
gguaagugcacugccuuuc

SEQ ID NO: 2360782 - RNA, 19 nt, Artificial Sequence
  Description of Artificial Sequence: Synthetic oligonucleotide
gcucguagguccgaacagg

SEQ ID NO: 2360783 - RNA, 19 nt, Artificial Sequence
  Description of Artificial Sequence: Synthetic oligonucleotide
ggaguguacagagcugagc

SEQ ID NO: 2360784 - RNA, 19 nt, Artificial Sequence
  Description of Artificial Sequence: Synthetic oligonucleotide
ucagcucaaagagccccgu

SEQ ID NO: 2360785 - RNA, 19 nt, Artificial Sequence
  Description of Artificial Sequence: Synthetic oligonucleotide
acgauggaaucuagggcug

SEQ ID NO: 2360786 - RNA, 19 nt, Artificial Sequence
  Description of Artificial Sequence: Synthetic oligonucleotide
gcucagcucaaagagcccc

SEQ ID NO: 2360787 - RNA, 19 nt, Artificial Sequence
  Description of Artificial Sequence: Synthetic oligonucleotide
gagcaagcagauuggugcu

SEQ ID NO: 2360788 - RNA, 19 nt, Artificial Sequence
  Description of Artificial Sequence: Synthetic oligonucleotide
cacagccuaggaacaagga

SEQ ID NO: 2360789 - RNA, 19 nt, Artificial Sequence
  Description of Artificial Sequence: Synthetic oligonucleotide
cucaaagagccccguccuc

SEQ ID NO: 2360790 - RNA, 19 nt, Artificial Sequence
  Description of Artificial Sequence: Synthetic oligonucleotide
uccgggagaagccgagguu

SEQ ID NO: 2360791 - RNA, 19 nt, Artificial Sequence
  Description of Artificial Sequence: Synthetic oligonucleotide
guuccaucacacugccaga

SEQ ID NO: 2360792 - RNA, 19 nt, Artificial Sequence
  Description of Artificial Sequence: Synthetic oligonucleotide
ccacacaagccucacagca

SEQ ID NO: 2360793 - RNA, 19 nt, Artificial Sequence
  Description of Artificial Sequence: Synthetic oligonucleotide
gucuaggcggacacugggc

SEQ ID NO: 2360794 - RNA, 19 nt, Artificial Sequence
  Description of Artificial Sequence: Synthetic oligonucleotide
gguucuaccaccaggacuu

SEQ ID NO: 2360795 - RNA, 19 nt, Artificial Sequence
  Description of Artificial Sequence: Synthetic oligonucleotide
cuugcgagacaggggccgg

SEQ ID NO: 2360796 - RNA, 19 nt, Artificial Sequence
  Description of Artificial Sequence: Synthetic oligonucleotide
ccugcauggccucucugcc

SEQ ID NO: 2360797 - RNA, 19 nt, Artificial Sequence
  Description of Artificial Sequence: Synthetic oligonucleotide
aguugcuuuccagccugug

SEQ ID NO: 2360798 - RNA, 19 nt, Artificial Sequence
  Description of Artificial Sequence: Synthetic oligonucleotide
aggucccggacagcagggc

SEQ ID NO: 2360799 - RNA, 19 nt, Artificial Sequence
  Description of Artificial Sequence: Synthetic oligonucleotide
ugcgagacaggggccgggc

SEQ ID NO: 2360800 - RNA, 19 nt, Artificial Sequence
  Description of Artificial Sequence: Synthetic oligonucleotide
ugcauagcccgucguucuu

SEQ ID NO: 2360801 - RNA, 19 nt, Artificial Sequence
  Description of Artificial Sequence: Synthetic oligonucleotide
acgacccacaggggaggcc

SEQ ID NO: 2360802 - RNA, 19 nt, Artificial Sequence
  Description of Artificial Sequence: Synthetic oligonucleotide
uggugcuacuugacggguu

SEQ ID NO: 2360803 - RNA, 19 nt, Artificial Sequence
  Description of Artificial Sequence: Synthetic oligonucleotide
ccgucguucuuccucacac

SEQ ID NO: 2360804 - RNA, 19 nt, Artificial Sequence
  Description of Artificial Sequence: Synthetic oligonucleotide
ccuacagugggaggcacag

SEQ ID NO: 2360805 - RNA, 19 nt, Artificial Sequence
  Description of Artificial Sequence: Synthetic oligonucleotide
uggcccugcguuccaucac

SEQ ID NO: 2360806 - RNA, 19 nt, Artificial Sequence
  Description of Artificial Sequence: Synthetic oligonucleotide
gcuggggcuacucuugcga

SEQ ID NO: 2360807 - RNA, 19 nt, Artificial Sequence
  Description of Artificial Sequence: Synthetic oligonucleotide
gccagaccucaugaggugg

SEQ ID NO: 2360808 - RNA, 19 nt, Artificial Sequence
  Description of Artificial Sequence: Synthetic oligonucleotide
ugcuacuugacggguucua

SEQ ID NO: 2360809 - RNA, 19 nt, Artificial Sequence
  Description of Artificial Sequence: Synthetic oligonucleotide
ggagggugggacacacugg

SEQ ID NO: 2360810 - RNA, 19 nt, Artificial Sequence
  Description of Artificial Sequence: Synthetic oligonucleotide
ugccugcauagcccgucgu

SEQ ID NO: 2360811 - RNA, 19 nt, Artificial Sequence
  Description of Artificial Sequence: Synthetic oligonucleotide
acugccuuuccgggagaag

SEQ ID NO: 2360812 - RNA, 19 nt, Artificial Sequence
  Description of Artificial Sequence: Synthetic oligonucleotide
gugugauggcccugcguuc

SEQ ID NO: 2360813 - RNA, 19 nt, Artificial Sequence
  Description of Artificial Sequence: Synthetic oligonucleotide
cuaccaccaggacuuuaca

SEQ ID NO: 2360814 - RNA, 19 nt, Artificial Sequence
  Description of Artificial Sequence: Synthetic oligonucleotide
ggugugauggcccugcguu

SEQ ID NO: 2360815 - RNA, 19 nt, Artificial Sequence
  Description of Artificial Sequence: Synthetic oligonucleotide
cagugaaccgcucguaggu

SEQ ID NO: 2360816 - RNA, 19 nt, Artificial Sequence
  Description of Artificial Sequence: Synthetic oligonucleotide
gccgagguuauugagaggu

SEQ ID NO: 2360817 - RNA, 19 nt, Artificial Sequence
  Description of Artificial Sequence: Synthetic oligonucleotide
guucuuccucacacaguug

SEQ ID NO: 2360818 - RNA, 19 nt, Artificial Sequence
  Description of Artificial Sequence: Synthetic oligonucleotide
ggggacgacccacagggga

SEQ ID NO: 2360819 - RNA, 19 nt, Artificial Sequence
  Description of Artificial Sequence: Synthetic oligonucleotide
ggggcuacucuugcgagac

SEQ ID NO: 2360820 - RNA, 19 nt, Artificial Sequence
  Description of Artificial Sequence: Synthetic oligonucleotide
gccugugcguguuccgggg

SEQ ID NO: 2360821 - RNA, 19 nt, Artificial Sequence
  Description of Artificial Sequence: Synthetic oligonucleotide
gggacgacccacaggggag

SEQ ID NO: 2360822 - RNA, 19 nt, Artificial Sequence
  Description of Artificial Sequence: Synthetic oligonucleotide
ggcacagccuaggaacaag

SEQ ID NO: 2360823 - RNA, 19 nt, Artificial Sequence
  Description of Artificial Sequence: Synthetic oligonucleotide
cgaacaggggauucacaag

SEQ ID NO: 2360824 - RNA, 19 nt, Artificial Sequence
  Description of Artificial Sequence: Synthetic oligonucleotide
ccgaacaggggauucacaa

SEQ ID NO: 2360825 - RNA, 19 nt, Artificial Sequence
  Description of Artificial Sequence: Synthetic oligonucleotide
gucccggacagcagggcug

SEQ ID NO: 2360826 - RNA, 19 nt, Artificial Sequence
  Description of Artificial Sequence: Synthetic oligonucleotide
guagaggggacgacccaca

SEQ ID NO: 2360827 - RNA, 19 nt, Artificial Sequence
  Description of Artificial Sequence: Synthetic oligonucleotide
gcaagcagauuggugcuac

SEQ ID NO: 2360828 - RNA, 19 nt, Artificial Sequence
  Description of Artificial Sequence: Synthetic oligonucleotide
cguagguccgaacagggga

SEQ ID NO: 2360829 - RNA, 19 nt, Artificial Sequence
  Description of Artificial Sequence: Synthetic oligonucleotide
agcguguaggugacaguga

SEQ ID NO: 2360830 - RNA, 19 nt, Artificial Sequence
  Description of Artificial Sequence: Synthetic oligonucleotide
gguggggccagcccuuuca

SEQ ID NO: 2360831 - RNA, 19 nt, Artificial Sequence
  Description of Artificial Sequence: Synthetic oligonucleotide
auagcccgucguucuuccu

SEQ ID NO: 2360832 - RNA, 19 nt, Artificial Sequence
  Description of Artificial Sequence: Synthetic oligonucleotide
gccuuuccgggagaagccg

SEQ ID NO: 2360833 - RNA, 19 nt, Artificial Sequence
  Description of Artificial Sequence: Synthetic oligonucleotide
gacgacccacaggggaggc

SEQ ID NO: 2360834 - RNA, 19 nt, Artificial Sequence
  Description of Artificial Sequence: Synthetic oligonucleotide
ggguucuaccaccaggacu

SEQ ID NO: 2360835 - RNA, 19 nt, Artificial Sequence
  Description of Artificial Sequence: Synthetic oligonucleotide
gcccuuucacagcuucugc

SEQ ID NO: 2360836 - RNA, 19 nt, Artificial Sequence
  Description of Artificial Sequence: Synthetic oligonucleotide
caaagcaggggacggucua

SEQ ID NO: 2360837 - RNA, 19 nt, Artificial Sequence
  Description of Artificial Sequence: Synthetic oligonucleotide
gcuacuugacggguucuac

SEQ ID NO: 2360838 - RNA, 19 nt, Artificial Sequence
  Description of Artificial Sequence: Synthetic oligonucleotide
ggacgacccacaggggagg

SEQ ID NO: 2360839 - RNA, 19 nt, Artificial Sequence
  Description of Artificial Sequence: Synthetic oligonucleotide
ugccuacagugggaggcac

SEQ ID NO: 2360840 - RNA, 19 nt, Artificial Sequence
  Description of Artificial Sequence: Synthetic oligonucleotide
gcguguaggugacagugaa

SEQ ID NO: 2360841 - RNA, 19 nt, Artificial Sequence
  Description of Artificial Sequence: Synthetic oligonucleotide
ccaggacuuuacacucgcg

SEQ ID NO: 2360842 - RNA, 19 nt, Artificial Sequence
  Description of Artificial Sequence: Synthetic oligonucleotide
guuccgggguccacacaag

SEQ ID NO: 2360843 - RNA, 19 nt, Artificial Sequence
  Description of Artificial Sequence: Synthetic oligonucleotide
cuugcccugcugggguggg

SEQ ID NO: 2360844 - RNA, 19 nt, Artificial Sequence
  Description of Artificial Sequence: Synthetic oligonucleotide
aggaagucuuggagguugu

SEQ ID NO: 2360845 - RNA, 19 nt, Artificial Sequence
  Description of Artificial Sequence: Synthetic oligonucleotide
guggcagacgauggaaucu

SEQ ID NO: 2360846 - RNA, 19 nt, Artificial Sequence
  Description of Artificial Sequence: Synthetic oligonucleotide
gggauucacaagaagcagu

SEQ ID NO: 2360847 - RNA, 19 nt, Artificial Sequence
  Description of Artificial Sequence: Synthetic oligonucleotide
agcccugcauggccucucu

SEQ ID NO: 2360848 - RNA, 19 nt, Artificial Sequence
  Description of Artificial Sequence: Synthetic oligonucleotide
cugcauagcccgucguucu

SEQ ID NO: 2360849 - RNA, 19 nt, Artificial Sequence
  Description of Artificial Sequence: Synthetic oligonucleotide
gcaaucuugucuagagaaa

SEQ ID NO: 2360850 - RNA, 19 nt, Artificial Sequence
  Description of Artificial Sequence: Synthetic oligonucleotide
aaccgcucguagguccgaa

SEQ ID NO: 2360851 - RNA, 19 nt, Artificial Sequence
  Description of Artificial Sequence: Synthetic oligonucleotide
ggcuuaggguuucuggagu

SEQ ID NO: 2360852 - RNA, 19 nt, Artificial Sequence
  Description of Artificial Sequence: Synthetic oligonucleotide
ggcagacgauggaaucuag

SEQ ID NO: 2360853 - RNA, 19 nt, Artificial Sequence
  Description of Artificial Sequence: Synthetic oligonucleotide
ggacugagagcggccuagg

SEQ ID NO: 2360854 - RNA, 19 nt, Artificial Sequence
  Description of Artificial Sequence: Synthetic oligonucleotide
agcaagcagauuggugcua

SEQ ID NO: 2360855 - RNA, 19 nt, Artificial Sequence
  Description of Artificial Sequence: Synthetic oligonucleotide
agaccucaugagguggcua

SEQ ID NO: 2360856 - RNA, 19 nt, Artificial Sequence
  Description of Artificial Sequence: Synthetic oligonucleotide
gagagcggccuaggcuggc

SEQ ID NO: 2360857 - RNA, 19 nt, Artificial Sequence
  Description of Artificial Sequence: Synthetic oligonucleotide
aggggacgacccacagggg

SEQ ID NO: 2360858 - RNA, 19 nt, Artificial Sequence
  Description of Artificial Sequence: Synthetic oligonucleotide
caucucucaccagcagaca

SEQ ID NO: 2360859 - RNA, 19 nt, Artificial Sequence
  Description of Artificial Sequence: Synthetic oligonucleotide
ugauggcccugcguuccau

SEQ ID NO: 2360860 - RNA, 19 nt, Artificial Sequence
  Description of Artificial Sequence: Synthetic oligonucleotide
cuuaggguuucuggagugu

SEQ ID NO: 2360861 - RNA, 19 nt, Artificial Sequence
  Description of Artificial Sequence: Synthetic oligonucleotide
cguguaggugacagugaac

SEQ ID NO: 2360862 - RNA, 19 nt, Artificial Sequence
  Description of Artificial Sequence: Synthetic oligonucleotide
gguuguugagcagcgugua

SEQ ID NO: 2360863 - RNA, 19 nt, Artificial Sequence
  Description of Artificial Sequence: Synthetic oligonucleotide
ggcuacgggaaggcuguug

SEQ ID NO: 2360864 - RNA, 19 nt, Artificial Sequence
  Description of Artificial Sequence: Synthetic oligonucleotide
ccgagguuauugagaggug

SEQ ID NO: 2360865 - RNA, 19 nt, Artificial Sequence
  Description of Artificial Sequence: Synthetic oligonucleotide
gugauggcccugcguucca

SEQ ID NO: 2360866 - RNA, 19 nt, Artificial Sequence
  Description of Artificial Sequence: Synthetic oligonucleotide
ggccucagguggagggugg

SEQ ID NO: 2360867 - RNA, 19 nt, Artificial Sequence
  Description of Artificial Sequence: Synthetic oligonucleotide
ugcguguuccgggguccac

SEQ ID NO: 2360868 - RNA, 19 nt, Artificial Sequence
  Description of Artificial Sequence: Synthetic oligonucleotide
cgcucguagguccgaacag

SEQ ID NO: 2360869 - RNA, 19 nt, Artificial Sequence
  Description of Artificial Sequence: Synthetic oligonucleotide
aggcagcccugcauggccu

SEQ ID NO: 2360870 - RNA, 19 nt, Artificial Sequence
  Description of Artificial Sequence: Synthetic oligonucleotide
gggcaaguagaggggacga

SEQ ID NO: 2360871 - RNA, 19 nt, Artificial Sequence
  Description of Artificial Sequence: Synthetic oligonucleotide
cugccuacagugggaggca

SEQ ID NO: 2360872 - RNA, 19 nt, Artificial Sequence
  Description of Artificial Sequence: Synthetic oligonucleotide
gaaccgcucguagguccga

SEQ ID NO: 2360873 - RNA, 19 nt, Artificial Sequence
  Description of Artificial Sequence: Synthetic oligonucleotide
ggcucagcucaaagagccc

SEQ ID NO: 2360874 - RNA, 19 nt, Artificial Sequence
  Description of Artificial Sequence: Synthetic oligonucleotide
cguguuccgggguccacac

SEQ ID NO: 2360875 - RNA, 19 nt, Artificial Sequence
  Description of Artificial Sequence: Synthetic oligonucleotide
gcggccuaggcuggccugg

SEQ ID NO: 2360876 - RNA, 19 nt, Artificial Sequence
  Description of Artificial Sequence: Synthetic oligonucleotide
cggucuaggcggacacugg

SEQ ID NO: 2360877 - RNA, 19 nt, Artificial Sequence
  Description of Artificial Sequence: Synthetic oligonucleotide
ccgcucguagguccgaaca

SEQ ID NO: 2360878 - RNA, 19 nt, Artificial Sequence
  Description of Artificial Sequence: Synthetic oligonucleotide
gcauagcccgucguucuuc

SEQ ID NO: 2360879 - RNA, 19 nt, Artificial Sequence
  Description of Artificial Sequence: Synthetic oligonucleotide
gccugcagcccuugcccug

SEQ ID NO: 2360880 - RNA, 19 nt, Artificial Sequence
  Description of Artificial Sequence: Synthetic oligonucleotide
caagcagauuggugcuacu

SEQ ID NO: 2360881 - RNA, 19 nt, Artificial Sequence
  Description of Artificial Sequence: Synthetic oligonucleotide
cuacgggaaggcuguuggu

SEQ ID NO: 2360882 - RNA, 19 nt, Artificial Sequence
  Description of Artificial Sequence: Synthetic oligonucleotide
gagcggccuaggcuggccu

SEQ ID NO: 2360883 - RNA, 19 nt, Artificial Sequence
  Description of Artificial Sequence: Synthetic oligonucleotide
ccuuuccgggagaagccga

SEQ ID NO: 2360884 - RNA, 19 nt, Artificial Sequence
  Description of Artificial Sequence: Synthetic oligonucleotide
gacccacaggggaggccac

SEQ ID NO: 2360885 - RNA, 19 nt, Artificial Sequence
  Description of Artificial Sequence: Synthetic oligonucleotide
ggucccggacagcagggcu

SEQ ID NO: 2360886 - RNA, 19 nt, Artificial Sequence
  Description of Artificial Sequence: Synthetic oligonucleotide
cgauggaaucuagggcugc

SEQ ID NO: 2360887 - RNA, 19 nt, Artificial Sequence
  Description of Artificial Sequence: Synthetic oligonucleotide
aggggacggucuaggcgga

SEQ ID NO: 2360888 - RNA, 19 nt, Artificial Sequence
  Description of Artificial Sequence: Synthetic oligonucleotide
gacggucuaggcggacacu

SEQ ID NO: 2360889 - RNA, 19 nt, Artificial Sequence
  Description of Artificial Sequence: Synthetic oligonucleotide
cagcccugcauggccucuc

SEQ ID NO: 2360890 - RNA, 19 nt, Artificial Sequence
  Description of Artificial Sequence: Synthetic oligonucleotide
cacugccuuuccgggagaa

SEQ ID NO: 2360891 - RNA, 19 nt, Artificial Sequence
  Description of Artificial Sequence: Synthetic oligonucleotide
ccgggguccacacaagccu

SEQ ID NO: 2360892 - RNA, 19 nt, Artificial Sequence
  Description of Artificial Sequence: Synthetic oligonucleotide
gcugagcaagcagauuggu

SEQ ID NO: 2360893 - RNA, 19 nt, Artificial Sequence
  Description of Artificial Sequence: Synthetic oligonucleotide
ggccuaggcuggccuggug

SEQ ID NO: 2360894 - RNA, 19 nt, Artificial Sequence
  Description of Artificial Sequence: Synthetic oligonucleotide
gcccugcugggguggggcc

SEQ ID NO: 2360895 - RNA, 19 nt, Artificial Sequence
  Description of Artificial Sequence: Synthetic oligonucleotide
gcguguuccgggguccaca

SEQ ID NO: 2360896 - RNA, 19 nt, Artificial Sequence
  Description of Artificial Sequence: Synthetic oligonucleotide
gugcguguuccggggucca

SEQ ID NO: 2360897 - RNA, 19 nt, Artificial Sequence
  Description of Artificial Sequence: Synthetic oligonucleotide
gugcuacuugacggguucu

SEQ ID NO: 2360898 - RNA, 19 nt, Artificial Sequence
  Description of Artificial Sequence: Synthetic oligonucleotide
cgcgcuuggcaaucuuguc

SEQ ID NO: 2360899 - RNA, 19 nt, Artificial Sequence
  Description of Artificial Sequence: Synthetic oligonucleotide
caguugcuuuccagccugu

SEQ ID NO: 2360900 - RNA, 19 nt, Artificial Sequence
  Description of Artificial Sequence: Synthetic oligonucleotide
cgucguucuuccucacaca

SEQ ID NO: 2360901 - RNA, 19 nt, Artificial Sequence
  Description of Artificial Sequence: Synthetic oligonucleotide
gggugugauggcccugcgu

SEQ ID NO: 2360902 - RNA, 19 nt, Artificial Sequence
  Description of Artificial Sequence: Synthetic oligonucleotide
cgagguuauugagaggugu

SEQ ID NO: 2360903 - RNA, 19 nt, Artificial Sequence
  Description of Artificial Sequence: Synthetic oligonucleotide
gccuacagugggaggcaca

SEQ ID NO: 2360904 - RNA, 19 nt, Artificial Sequence
  Description of Artificial Sequence: Synthetic oligonucleotide
ggccacacugaagguaagu

SEQ ID NO: 2360905 - RNA, 19 nt, Artificial Sequence
  Description of Artificial Sequence: Synthetic oligonucleotide
cagaccucaugagguggcu

SEQ ID NO: 2360906 - RNA, 19 nt, Artificial Sequence
  Description of Artificial Sequence: Synthetic oligonucleotide
gggcuacucuugcgagaca

SEQ ID NO: 2360907 - RNA, 19 nt, Artificial Sequence
  Description of Artificial Sequence: Synthetic oligonucleotide
cgacccacaggggaggcca

SEQ ID NO: 2360908 - RNA, 19 nt, Artificial Sequence
  Description of Artificial Sequence: Synthetic oligonucleotide
gcccugcguuccaucacac

SEQ ID NO: 2360909 - RNA, 19 nt, Artificial Sequence
  Description of Artificial Sequence: Synthetic oligonucleotide
caaggaagucuuggagguu

SEQ ID NO: 2360910 - RNA, 19 nt, Artificial Sequence
  Description of Artificial Sequence: Synthetic oligonucleotide
uggcuacgggaaggcuguu

SEQ ID NO: 2360911 - RNA, 19 nt, Artificial Sequence
  Description of Artificial Sequence: Synthetic oligonucleotide
cccgucguucuuccucaca

SEQ ID NO: 2360912 - RNA, 19 nt, Artificial Sequence
  Description of Artificial Sequence: Synthetic oligonucleotide
gccugcauagcccgucguu

SEQ ID NO: 2360913 - RNA, 19 nt, Artificial Sequence
  Description of Artificial Sequence: Synthetic oligonucleotide
gcccgucguucuuccucac

SEQ ID NO: 2360914 - RNA, 19 nt, Artificial Sequence
  Description of Artificial Sequence: Synthetic oligonucleotide
ggggacggucuaggcggac

SEQ ID NO: 2360915 - RNA, 19 nt, Artificial Sequence
  Description of Artificial Sequence: Synthetic oligonucleotide
cacucgcgcuuggcaaucu

SEQ ID NO: 2360916 - RNA, 19 nt, Artificial Sequence
  Description of Artificial Sequence: Synthetic oligonucleotide
gcguuccaucacacugcca

SEQ ID NO: 2360917 - RNA, 19 nt, Artificial Sequence
  Description of Artificial Sequence: Synthetic oligonucleotide
gggccgggccucaggugga

SEQ ID NO: 2360918 - RNA, 19 nt, Artificial Sequence
  Description of Artificial Sequence: Synthetic oligonucleotide
cccugcguuccaucacacu

SEQ ID NO: 2360919 - RNA, 19 nt, Artificial Sequence
  Description of Artificial Sequence: Synthetic oligonucleotide
gggagaagccgagguuauu

SEQ ID NO: 2360920 - RNA, 19 nt, Artificial Sequence
  Description of Artificial Sequence: Synthetic oligonucleotide
cggacacugggcaggcggu

SEQ ID NO: 2360921 - RNA, 19 nt, Artificial Sequence
  Description of Artificial Sequence: Synthetic oligonucleotide
gcagcccugcauggccucu

SEQ ID NO: 2360922 - RNA, 19 nt, Artificial Sequence
  Description of Artificial Sequence: Synthetic oligonucleotide
cccguccucagggccugga

SEQ ID NO: 2360923 - RNA, 19 nt, Artificial Sequence
  Description of Artificial Sequence: Synthetic oligonucleotide
ccccguccucagggccugg

SEQ ID NO: 2360924 - RNA, 19 nt, Artificial Sequence
  Description of Artificial Sequence: Synthetic oligonucleotide
cgggccucagguggagggu

SEQ ID NO: 2360925 - RNA, 19 nt, Artificial Sequence
  Description of Artificial Sequence: Synthetic oligonucleotide
cggccuaggcuggccuggu

SEQ ID NO: 2360926 - RNA, 19 nt, Artificial Sequence
  Description of Artificial Sequence: Synthetic oligonucleotide
aaaaguucuaucaaaauac

SEQ ID NO: 2360927 - RNA, 19 nt, Artificial Sequence
  Description of Artificial Sequence: Synthetic oligonucleotide
uaaguaaauacucagaugu

SEQ ID NO: 2360928 - RNA, 19 nt, Artificial Sequence
  Description of Artificial Sequence: Synthetic oligonucleotide
uuuaacugagauuuuaucg

SEQ ID NO: 2360929 - RNA, 19 nt, Artificial Sequence
  Description of Artificial Sequence: Synthetic oligonucleotide
gaauaaacgaaauacauga

SEQ ID NO: 2360930 - RNA, 19 nt, Artificial Sequence
  Description of Artificial Sequence: Synthetic oligonucleotide
uuaagaauaaacgaaauac

SEQ ID NO: 2360931 - RNA, 19 nt, Artificial Sequence
  Description of Artificial Sequence: Synthetic oligonucleotide
aaucagguaacuuggaaag

SEQ ID NO: 2360932 - RNA, 19 nt, Artificial Sequence
  Description of Artificial Sequence: Synthetic oligonucleotide
augacaagcauauuugccc

SEQ ID NO: 2360933 - RNA, 19 nt, Artificial Sequence
  Description of Artificial Sequence: Synthetic oligonucleotide
uuaguuuucacacuaagua

SEQ ID NO: 2360934 - RNA, 19 nt, Artificial Sequence
  Description of Artificial Sequence: Synthetic oligonucleotide
uguauuuacaucugaacug

SEQ ID NO: 2360935 - RNA, 19 nt, Artificial Sequence
  Description of Artificial Sequence: Synthetic oligonucleotide
uaaacgaaauacaugauau

SEQ ID NO: 2360936 - RNA, 19 nt, Artificial Sequence
  Description of Artificial Sequence: Synthetic oligonucleotide
gauauuuugguuaacucag

SEQ ID NO: 2360937 - RNA, 19 nt, Artificial Sequence
  Description of Artificial Sequence: Synthetic oligonucleotide
aauggaucuacucaaagua

SEQ ID NO: 2360938 - RNA, 19 nt, Artificial Sequence
  Description of Artificial Sequence: Synthetic oligonucleotide
aaugguuggaagcuugguc

SEQ ID NO: 2360939 - RNA, 19 nt, Artificial Sequence
  Description of Artificial Sequence: Synthetic oligonucleotide
uuucacacuaaguaaauac

SEQ ID NO: 2360940 - RNA, 19 nt, Artificial Sequence
  Description of Artificial Sequence: Synthetic oligonucleotide
ugauauuuugguuaacuca

SEQ ID NO: 2360941 - RNA, 19 nt, Artificial Sequence
  Description of Artificial Sequence: Synthetic oligonucleotide
aaggaagaacuuuugaaca

SEQ ID NO: 2360942 - RNA, 19 nt, Artificial Sequence
  Description of Artificial Sequence: Synthetic oligonucleotide
uuaacugagauuuuaucgu

SEQ ID NO: 2360943 - RNA, 19 nt, Artificial Sequence
  Description of Artificial Sequence: Synthetic oligonucleotide
uuuacaucugaacugcaug

SEQ ID NO: 2360944 - RNA, 19 nt, Artificial Sequence
  Description of Artificial Sequence: Synthetic oligonucleotide
uuaaguaaacgguaucugc

SEQ ID NO: 2360945 - RNA, 19 nt, Artificial Sequence
  Description of Artificial Sequence: Synthetic oligonucleotide
uuuugguuaacucaguaua

SEQ ID NO: 2360946 - RNA, 19 nt, Artificial Sequence
  Description of Artificial Sequence: Synthetic oligonucleotide
ugucuuaagaauaaacgaa

SEQ ID NO: 2360947 - RNA, 19 nt, Artificial Sequence
  Description of Artificial Sequence: Synthetic oligonucleotide
ugaaguuggggucacuccg

SEQ ID NO: 2360948 - RNA, 19 nt, Artificial Sequence
  Description of Artificial Sequence: Synthetic oligonucleotide
acaauucucugacuaaugg

SEQ ID NO: 2360949 - RNA, 19 nt, Artificial Sequence
  Description of Artificial Sequence: Synthetic oligonucleotide
uguaggacaguucaugaca

SEQ ID NO: 2360950 - RNA, 19 nt, Artificial Sequence
  Description of Artificial Sequence: Synthetic oligonucleotide
uaaugcuuaguuuucacac

SEQ ID NO: 2360951 - RNA, 19 nt, Artificial Sequence
  Description of Artificial Sequence: Synthetic oligonucleotide
acucaaaguacacauucac

SEQ ID NO: 2360952 - RNA, 19 nt, Artificial Sequence
  Description of Artificial Sequence: Synthetic oligonucleotide
aaaucagguaacuuggaaa

SEQ ID NO: 2360953 - RNA, 19 nt, Artificial Sequence
  Description of Artificial Sequence: Synthetic oligonucleotide
ucucauauucaccuugugc

SEQ ID NO: 2360954 - RNA, 19 nt, Artificial Sequence
  Description of Artificial Sequence: Synthetic oligonucleotide
ugagauuuuaucguguuga

SEQ ID NO: 2360955 - RNA, 19 nt, Artificial Sequence
  Description of Artificial Sequence: Synthetic oligonucleotide
aagagggcaccgcacacgc

SEQ ID NO: 2360956 - RNA, 19 nt, Artificial Sequence
  Description of Artificial Sequence: Synthetic oligonucleotide
auagaagagacaauggauc

SEQ ID NO: 2360957 - RNA, 19 nt, Artificial Sequence
  Description of Artificial Sequence: Synthetic oligonucleotide
ugugcuaauaacucuuccc

SEQ ID NO: 2360958 - RNA, 19 nt, Artificial Sequence
  Description of Artificial Sequence: Synthetic oligonucleotide
augauauuuugguuaacuc

SEQ ID NO: 2360959 - RNA, 19 nt, Artificial Sequence
  Description of Artificial Sequence: Synthetic oligonucleotide
aaauacuuuucacuggaaa

SEQ ID NO: 2360960 - RNA, 19 nt, Artificial Sequence
  Description of Artificial Sequence: Synthetic oligonucleotide
uuuuaaguaaacgguaucu

SEQ ID NO: 2360961 - RNA, 19 nt, Artificial Sequence
  Description of Artificial Sequence: Synthetic oligonucleotide
uugcggucaaaguagaugc

SEQ ID NO: 2360962 - RNA, 19 nt, Artificial Sequence
  Description of Artificial Sequence: Synthetic oligonucleotide
caaggaagaacuuuugaac

SEQ ID NO: 2360963 - RNA, 19 nt, Artificial Sequence
  Description of Artificial Sequence: Synthetic oligonucleotide
agcugaucagcuuccaagc

SEQ ID NO: 2360964 - RNA, 19 nt, Artificial Sequence
  Description of Artificial Sequence: Synthetic oligonucleotide
auuuuaucguguugaaauc

SEQ ID NO: 2360965 - RNA, 19 nt, Artificial Sequence
  Description of Artificial Sequence: Synthetic oligonucleotide
cugacuaaugguuggaagc

SEQ ID NO: 2360966 - RNA, 19 nt, Artificial Sequence
  Description of Artificial Sequence: Synthetic oligonucleotide
ucaaggaagaacuuuugaa

SEQ ID NO: 2360967 - RNA, 19 nt, Artificial Sequence
  Description of Artificial Sequence: Synthetic oligonucleotide
accauuuucgcucggcugg

SEQ ID NO: 2360968 - RNA, 19 nt, Artificial Sequence
  Description of Artificial Sequence: Synthetic oligonucleotide
acacuaaguaaauacucag

SEQ ID NO: 2360969 - RNA, 19 nt, Artificial Sequence
  Description of Artificial Sequence: Synthetic oligonucleotide
aacgaaauacaugauauuu

SEQ ID NO: 2360970 - RNA, 19 nt, Artificial Sequence
  Description of Artificial Sequence: Synthetic oligonucleotide
uuuaucguguugaaaucug

SEQ ID NO: 2360971 - RNA, 19 nt, Artificial Sequence
  Description of Artificial Sequence: Synthetic oligonucleotide
ucuggcucauuccacauca

SEQ ID NO: 2360972 - RNA, 19 nt, Artificial Sequence
  Description of Artificial Sequence: Synthetic oligonucleotide
aacugcaugucuuaagaau

SEQ ID NO: 2360973 - RNA, 19 nt, Artificial Sequence
  Description of Artificial Sequence: Synthetic oligonucleotide
agagacaauggaucuacuc

SEQ ID NO: 2360974 - RNA, 19 nt, Artificial Sequence
  Description of Artificial Sequence: Synthetic oligonucleotide
ugguggaagagucugcugc

SEQ ID NO: 2360975 - RNA, 19 nt, Artificial Sequence
  Description of Artificial Sequence: Synthetic oligonucleotide
aacgguaucugcaagauuu

SEQ ID NO: 2360976 - RNA, 19 nt, Artificial Sequence
  Description of Artificial Sequence: Synthetic oligonucleotide
ucacacuaaguaaauacuc

SEQ ID NO: 2360977 - RNA, 19 nt, Artificial Sequence
  Description of Artificial Sequence: Synthetic oligonucleotide
aaaguagaugcaguacccg

SEQ ID NO: 2360978 - RNA, 19 nt, Artificial Sequence
  Description of Artificial Sequence: Synthetic oligonucleotide
caugacaagcauauuugcc

SEQ ID NO: 2360979 - RNA, 19 nt, Artificial Sequence
  Description of Artificial Sequence: Synthetic oligonucleotide
uuuaaguaaacgguaucug

SEQ ID NO: 2360980 - RNA, 19 nt, Artificial Sequence
  Description of Artificial Sequence: Synthetic oligonucleotide
uuuuaacugagauuuuauc

SEQ ID NO: 2360981 - RNA, 19 nt, Artificial Sequence
  Description of Artificial Sequence: Synthetic oligonucleotide
uggaucuacucaaaguaca

SEQ ID NO: 2360982 - RNA, 19 nt, Artificial Sequence
  Description of Artificial Sequence: Synthetic oligonucleotide
uuugguagacuucagugua

SEQ ID NO: 2360983 - RNA, 19 nt, Artificial Sequence
  Description of Artificial Sequence: Synthetic oligonucleotide
augguuggaagcuugguca

SEQ ID NO: 2360984 - RNA, 19 nt, Artificial Sequence
  Description of Artificial Sequence: Synthetic oligonucleotide
ucuucguucucgaagccug

SEQ ID NO: 2360985 - RNA, 19 nt, Artificial Sequence
  Description of Artificial Sequence: Synthetic oligonucleotide
ucagguaacuuggaaagcc

SEQ ID NO: 2360986 - RNA, 19 nt, Artificial Sequence
  Description of Artificial Sequence: Synthetic oligonucleotide
cuaaguaaauacucagaug

SEQ ID NO: 2360987 - RNA, 19 nt, Artificial Sequence
  Description of Artificial Sequence: Synthetic oligonucleotide
gacagaucggagcacgccg

SEQ ID NO: 2360988 - RNA, 19 nt, Artificial Sequence
  Description of Artificial Sequence: Synthetic oligonucleotide
gugcuaauaacucuucccc

SEQ ID NO: 2360989 - RNA, 19 nt, Artificial Sequence
  Description of Artificial Sequence: Synthetic oligonucleotide
uaucguguugaaaucuggc

SEQ ID NO: 2360990 - RNA, 19 nt, Artificial Sequence
  Description of Artificial Sequence: Synthetic oligonucleotide
uaauaacucuuccccaagc

SEQ ID NO: 2360991 - RNA, 19 nt, Artificial Sequence
  Description of Artificial Sequence: Synthetic oligonucleotide
aggaagaacuuuugaacag

SEQ ID NO: 2360992 - RNA, 19 nt, Artificial Sequence
  Description of Artificial Sequence: Synthetic oligonucleotide
aucuacucaaaguacacau

SEQ ID NO: 2360993 - RNA, 19 nt, Artificial Sequence
  Description of Artificial Sequence: Synthetic oligonucleotide
auauuugcccuuauucccc

SEQ ID NO: 2360994 - RNA, 19 nt, Artificial Sequence
  Description of Artificial Sequence: Synthetic oligonucleotide
aaguuggggucacuccgcc

SEQ ID NO: 2360995 - RNA, 19 nt, Artificial Sequence
  Description of Artificial Sequence: Synthetic oligonucleotide
aauucucugacuaaugguu

SEQ ID NO: 2360996 - RNA, 19 nt, Artificial Sequence
  Description of Artificial Sequence: Synthetic oligonucleotide
ugagcacuuacaauucucu

SEQ ID NO: 2360997 - RNA, 19 nt, Artificial Sequence
  Description of Artificial Sequence: Synthetic oligonucleotide
agcacuuacaauucucuga

SEQ ID NO: 2360998 - RNA, 19 nt, Artificial Sequence
  Description of Artificial Sequence: Synthetic oligonucleotide
aucucuucaaggaagaacu

SEQ ID NO: 2360999 - RNA, 19 nt, Artificial Sequence
  Description of Artificial Sequence: Synthetic oligonucleotide
uaaaucagguaacuuggaa

SEQ ID NO: 2361000 - RNA, 19 nt, Artificial Sequence
  Description of Artificial Sequence: Synthetic oligonucleotide
acaauggaucuacucaaag

SEQ ID NO: 2361001 - RNA, 19 nt, Artificial Sequence
  Description of Artificial Sequence: Synthetic oligonucleotide
agaauaaacgaaauacaug

SEQ ID NO: 2361002 - RNA, 19 nt, Artificial Sequence
  Description of Artificial Sequence: Synthetic oligonucleotide
caguacccgaugaagaggg

SEQ ID NO: 2361003 - RNA, 19 nt, Artificial Sequence
  Description of Artificial Sequence: Synthetic oligonucleotide
uuuuaucguguugaaaucu

SEQ ID NO: 2361004 - RNA, 19 nt, Artificial Sequence
  Description of Artificial Sequence: Synthetic oligonucleotide
uuugcggucaaaguagaug

SEQ ID NO: 2361005 - RNA, 19 nt, Artificial Sequence
  Description of Artificial Sequence: Synthetic oligonucleotide
acuuacaauucucugacua

SEQ ID NO: 2361006 - RNA, 19 nt, Artificial Sequence
  Description of Artificial Sequence: Synthetic oligonucleotide
uguucuugaaguugggguc

SEQ ID NO: 2361007 - RNA, 19 nt, Artificial Sequence
  Description of Artificial Sequence: Synthetic oligonucleotide
uuugguuaacucaguauau

SEQ ID NO: 2361008 - RNA, 19 nt, Artificial Sequence
  Description of Artificial Sequence: Synthetic oligonucleotide
uugaaaucuggcucauucc

SEQ ID NO: 2361009 - RNA, 19 nt, Artificial Sequence
  Description of Artificial Sequence: Synthetic oligonucleotide
ucguguugaaaucuggcuc

SEQ ID NO: 2361010 - RNA, 19 nt, Artificial Sequence
  Description of Artificial Sequence: Synthetic oligonucleotide
ugcaguacccgaugaagag

SEQ ID NO: 2361011 - RNA, 19 nt, Artificial Sequence
  Description of Artificial Sequence: Synthetic oligonucleotide
gcaucuggaacacuggugg

SEQ ID NO: 2361012 - RNA, 19 nt, Artificial Sequence
  Description of Artificial Sequence: Synthetic oligonucleotide
ugaucagcuuccaagcuaa

SEQ ID NO: 2361013 - RNA, 19 nt, Artificial Sequence
  Description of Artificial Sequence: Synthetic oligonucleotide
gaugcaguacccgaugaag

SEQ ID NO: 2361014 - RNA, 19 nt, Artificial Sequence
  Description of Artificial Sequence: Synthetic oligonucleotide
uucaccuugugcuaauaac

SEQ ID NO: 2361015 - RNA, 19 nt, Artificial Sequence
  Description of Artificial Sequence: Synthetic oligonucleotide
auuuucgcucggcuggggc

SEQ ID NO: 2361016 - RNA, 19 nt, Artificial Sequence
  Description of Artificial Sequence: Synthetic oligonucleotide
aaguaaacgguaucugcaa

SEQ ID NO: 2361017 - RNA, 19 nt, Artificial Sequence
  Description of Artificial Sequence: Synthetic oligonucleotide
gaagagacaauggaucuac

SEQ ID NO: 2361018 - RNA, 19 nt, Artificial Sequence
  Description of Artificial Sequence: Synthetic oligonucleotide
uuaaaucagguaacuugga

SEQ ID NO: 2361019 - RNA, 19 nt, Artificial Sequence
  Description of Artificial Sequence: Synthetic oligonucleotide
aguucuaucaaaauacuuu

SEQ ID NO: 2361020 - RNA, 19 nt, Artificial Sequence
  Description of Artificial Sequence: Synthetic oligonucleotide
uuuucgcucggcuggggcg

SEQ ID NO: 2361021 - RNA, 19 nt, Artificial Sequence
  Description of Artificial Sequence: Synthetic oligonucleotide
aaaguucuaucaaaauacu

SEQ ID NO: 2361022 - RNA, 19 nt, Artificial Sequence
  Description of Artificial Sequence: Synthetic oligonucleotide
uuuuaaugcuuaguuuuca

SEQ ID NO: 2361023 - RNA, 19 nt, Artificial Sequence
  Description of Artificial Sequence: Synthetic oligonucleotide
aacuuuugaacagcuucag

SEQ ID NO: 2361024 - RNA, 19 nt, Artificial Sequence
  Description of Artificial Sequence: Synthetic oligonucleotide
uaacuuggaaagcccagcu

SEQ ID NO: 2361025 - RNA, 19 nt, Artificial Sequence
  Description of Artificial Sequence: Synthetic oligonucleotide
ugacaagcauauuugcccu

SEQ ID NO: 2361026 - RNA, 19 nt, Artificial Sequence
  Description of Artificial Sequence: Synthetic oligonucleotide
uugugcuaauaacucuucc

SEQ ID NO: 2361027 - RNA, 19 nt, Artificial Sequence
  Description of Artificial Sequence: Synthetic oligonucleotide
cuaaugguuggaagcuugg

SEQ ID NO: 2361028 - RNA, 19 nt, Artificial Sequence
  Description of Artificial Sequence: Synthetic oligonucleotide
aguaaauacucagauguau

SEQ ID NO: 2361029 - RNA, 19 nt, Artificial Sequence
  Description of Artificial Sequence: Synthetic oligonucleotide
aguguaggacaguucauga

SEQ ID NO: 2361030 - RNA, 19 nt, Artificial Sequence
  Description of Artificial Sequence: Synthetic oligonucleotide
aaacgaaauacaugauauu

SEQ ID NO: 2361031 - RNA, 19 nt, Artificial Sequence
  Description of Artificial Sequence: Synthetic oligonucleotide
agaagcaucuggaacacug

SEQ ID NO: 2361032 - RNA, 19 nt, Artificial Sequence
  Description of Artificial Sequence: Synthetic oligonucleotide
aucguguugaaaucuggcu

SEQ ID NO: 2361033 - RNA, 19 nt, Artificial Sequence
  Description of Artificial Sequence: Synthetic oligonucleotide
gaucggagcacgccggccg

SEQ ID NO: 2361034 - RNA, 19 nt, Artificial Sequence
  Description of Artificial Sequence: Synthetic oligonucleotide
uucuaucaaaauacuuuuc

SEQ ID NO: 2361035 - RNA, 19 nt, Artificial Sequence
  Description of Artificial Sequence: Synthetic oligonucleotide
ugcuaauaacucuucccca

SEQ ID NO: 2361036 - RNA, 19 nt, Artificial Sequence
  Description of Artificial Sequence: Synthetic oligonucleotide
uugaaguuggggucacucc

SEQ ID NO: 2361037 - RNA, 19 nt, Artificial Sequence
  Description of Artificial Sequence: Synthetic oligonucleotide
cucagauguauuuacaucu

SEQ ID NO: 2361038 - RNA, 19 nt, Artificial Sequence
  Description of Artificial Sequence: Synthetic oligonucleotide
uuccggcccaccauuuucg

SEQ ID NO: 2361039 - RNA, 19 nt, Artificial Sequence
  Description of Artificial Sequence: Synthetic oligonucleotide
ugacuaaugguuggaagcu

SEQ ID NO: 2361040 - RNA, 19 nt, Artificial Sequence
  Description of Artificial Sequence: Synthetic oligonucleotide
cuaauaacucuuccccaag

SEQ ID NO: 2361041 - RNA, 19 nt, Artificial Sequence
  Description of Artificial Sequence: Synthetic oligonucleotide
aguuuucacacuaaguaaa

SEQ ID NO: 2361042 - RNA, 19 nt, Artificial Sequence
  Description of Artificial Sequence: Synthetic oligonucleotide
cacacuaaguaaauacuca

SEQ ID NO: 2361043 - RNA, 19 nt, Artificial Sequence
  Description of Artificial Sequence: Synthetic oligonucleotide
aucagguaacuuggaaagc

SEQ ID NO: 2361044 - RNA, 19 nt, Artificial Sequence
  Description of Artificial Sequence: Synthetic oligonucleotide
uauuuacaucugaacugca

SEQ ID NO: 2361045 - RNA, 19 nt, Artificial Sequence
  Description of Artificial Sequence: Synthetic oligonucleotide
ucugagcacuuacaauucu

SEQ ID NO: 2361046 - RNA, 19 nt, Artificial Sequence
  Description of Artificial Sequence: Synthetic oligonucleotide
gaacuuuugaacagcuuca

SEQ ID NO: 2361047 - RNA, 19 nt, Artificial Sequence
  Description of Artificial Sequence: Synthetic oligonucleotide
uuugucagguggucuacac

SEQ ID NO: 2361048 - RNA, 19 nt, Artificial Sequence
  Description of Artificial Sequence: Synthetic oligonucleotide
uuacaauucucugacuaau

SEQ ID NO: 2361049 - RNA, 19 nt, Artificial Sequence
  Description of Artificial Sequence: Synthetic oligonucleotide
guaaacgguaucugcaaga

SEQ ID NO: 2361050 - RNA, 19 nt, Artificial Sequence
  Description of Artificial Sequence: Synthetic oligonucleotide
aauaaacgaaauacaugau

SEQ ID NO: 2361051 - RNA, 19 nt, Artificial Sequence
  Description of Artificial Sequence: Synthetic oligonucleotide
ugcaacacuugcagcagcu

SEQ ID NO: 2361052 - RNA, 19 nt, Artificial Sequence
  Description of Artificial Sequence: Synthetic oligonucleotide
uagaugcaguacccgauga

SEQ ID NO: 2361053 - RNA, 19 nt, Artificial Sequence
  Description of Artificial Sequence: Synthetic oligonucleotide
aagagucugcugcaacacu

SEQ ID NO: 2361054 - RNA, 19 nt, Artificial Sequence
  Description of Artificial Sequence: Synthetic oligonucleotide
gucacuccgccuuuugcgg

SEQ ID NO: 2361055 - RNA, 19 nt, Artificial Sequence
  Description of Artificial Sequence: Synthetic oligonucleotide
cagguaacuuggaaagccc

SEQ ID NO: 2361056 - RNA, 19 nt, Artificial Sequence
  Description of Artificial Sequence: Synthetic oligonucleotide
ucgaagccuguucuugaag

SEQ ID NO: 2361057 - RNA, 19 nt, Artificial Sequence
  Description of Artificial Sequence: Synthetic oligonucleotide
ccuuuugcggucaaaguag

SEQ ID NO: 2361058 - RNA, 19 nt, Artificial Sequence
  Description of Artificial Sequence: Synthetic oligonucleotide
ggucacuccgccuuuugcg

SEQ ID NO: 2361059 - RNA, 19 nt, Artificial Sequence
  Description of Artificial Sequence: Synthetic oligonucleotide
uccgacagaucggagcacg

SEQ ID NO: 2361060 - RNA, 19 nt, Artificial Sequence
  Description of Artificial Sequence: Synthetic oligonucleotide
uacccgaugaagagggcac

SEQ ID NO: 2361061 - RNA, 19 nt, Artificial Sequence
  Description of Artificial Sequence: Synthetic oligonucleotide
ugguuggaagcuuggucag

SEQ ID NO: 2361062 - RNA, 19 nt, Artificial Sequence
  Description of Artificial Sequence: Synthetic oligonucleotide
guagaugcaguacccgaug

SEQ ID NO: 2361063 - RNA, 19 nt, Artificial Sequence
  Description of Artificial Sequence: Synthetic oligonucleotide
ucuacucaaaguacacauu

SEQ ID NO: 2361064 - RNA, 19 nt, Artificial Sequence
  Description of Artificial Sequence: Synthetic oligonucleotide
cugaacugcaugucuuaag

SEQ ID NO: 2361065 - RNA, 19 nt, Artificial Sequence
  Description of Artificial Sequence: Synthetic oligonucleotide
caagcagcgguuagcuccg

SEQ ID NO: 2361066 - RNA, 19 nt, Artificial Sequence
  Description of Artificial Sequence: Synthetic oligonucleotide
aacacuugcagcagcugcu

SEQ ID NO: 2361067 - RNA, 19 nt, Artificial Sequence
  Description of Artificial Sequence: Synthetic oligonucleotide
gaagagggcaccgcacacg

SEQ ID NO: 2361068 - RNA, 19 nt, Artificial Sequence
  Description of Artificial Sequence: Synthetic oligonucleotide
acuaaugguuggaagcuug

SEQ ID NO: 2361069 - RNA, 19 nt, Artificial Sequence
  Description of Artificial Sequence: Synthetic oligonucleotide
uaaacgguaucugcaagau

SEQ ID NO: 2361070 - RNA, 19 nt, Artificial Sequence
  Description of Artificial Sequence: Synthetic oligonucleotide
caccuugugcuaauaacuc

SEQ ID NO: 2361071 - RNA, 19 nt, Artificial Sequence
  Description of Artificial Sequence: Synthetic oligonucleotide
cgaaauacaugauauuuug

SEQ ID NO: 2361072 - RNA, 19 nt, Artificial Sequence
  Description of Artificial Sequence: Synthetic oligonucleotide
guaacuuggaaagcccagc

SEQ ID NO: 2361073 - RNA, 19 nt, Artificial Sequence
  Description of Artificial Sequence: Synthetic oligonucleotide
cuugugcuaauaacucuuc

SEQ ID NO: 2361074 - RNA, 19 nt, Artificial Sequence
  Description of Artificial Sequence: Synthetic oligonucleotide
uggucuacacccuucucau

SEQ ID NO: 2361075 - RNA, 19 nt, Artificial Sequence
  Description of Artificial Sequence: Synthetic oligonucleotide
cacuaaguaaauacucaga

SEQ ID NO: 2361076 - RNA, 19 nt, Artificial Sequence
  Description of Artificial Sequence: Synthetic oligonucleotide
augcuuaguuuucacacua

SEQ ID NO: 2361077 - RNA, 19 nt, Artificial Sequence
  Description of Artificial Sequence: Synthetic oligonucleotide
accuugugcuaauaacucu

SEQ ID NO: 2361078 - RNA, 19 nt, Artificial Sequence
  Description of Artificial Sequence: Synthetic oligonucleotide
uccuuagcaagcuucuguu

SEQ ID NO: 2361079 - RNA, 19 nt, Artificial Sequence
  Description of Artificial Sequence: Synthetic oligonucleotide
aaguucuaucaaaauacuu

SEQ ID NO: 2361080 - RNA, 19 nt, Artificial Sequence
  Description of Artificial Sequence: Synthetic oligonucleotide
acugagauuuuaucguguu

SEQ ID NO: 2361081 - RNA, 19 nt, Artificial Sequence
  Description of Artificial Sequence: Synthetic oligonucleotide
uggaagagucugcugcaac

SEQ ID NO: 2361082 - RNA, 19 nt, Artificial Sequence
  Description of Artificial Sequence: Synthetic oligonucleotide
gaaaucuggcucauuccac

SEQ ID NO: 2361083 - RNA, 19 nt, Artificial Sequence
  Description of Artificial Sequence: Synthetic oligonucleotide
cuuacaauucucugacuaa

SEQ ID NO: 2361084 - RNA, 19 nt, Artificial Sequence
  Description of Artificial Sequence: Synthetic oligonucleotide
aguacacauucacuuuggu

SEQ ID NO: 2361085 - RNA, 19 nt, Artificial Sequence
  Description of Artificial Sequence: Synthetic oligonucleotide
uuccccaagcuguaucucu

SEQ ID NO: 2361086 - RNA, 19 nt, Artificial Sequence
  Description of Artificial Sequence: Synthetic oligonucleotide
cuugaaguuggggucacuc

SEQ ID NO: 2361087 - RNA, 19 nt, Artificial Sequence
  Description of Artificial Sequence: Synthetic oligonucleotide
guuagcuccgacagaucgg

SEQ ID NO: 2361088 - RNA, 19 nt, Artificial Sequence
  Description of Artificial Sequence: Synthetic oligonucleotide
cagcgguuagcuccgacag

SEQ ID NO: 2361089 - RNA, 19 nt, Artificial Sequence
  Description of Artificial Sequence: Synthetic oligonucleotide
auucaccuugugcuaauaa

SEQ ID NO: 2361090 - RNA, 19 nt, Artificial Sequence
  Description of Artificial Sequence: Synthetic oligonucleotide
cucugagcacuuacaauuc

SEQ ID NO: 2361091 - RNA, 19 nt, Artificial Sequence
  Description of Artificial Sequence: Synthetic oligonucleotide
guucuaucaaaauacuuuu

SEQ ID NO: 2361092 - RNA, 19 nt, Artificial Sequence
  Description of Artificial Sequence: Synthetic oligonucleotide
aagcauauuugcccuuauu

SEQ ID NO: 2361093 - RNA, 19 nt, Artificial Sequence
  Description of Artificial Sequence: Synthetic oligonucleotide
gaucuacucaaaguacaca

SEQ ID NO: 2361094 - RNA, 19 nt, Artificial Sequence
  Description of Artificial Sequence: Synthetic oligonucleotide
gaugaagagggcaccgcac

SEQ ID NO: 2361095 - RNA, 19 nt, Artificial Sequence
  Description of Artificial Sequence: Synthetic oligonucleotide
uaggacaguucaugacaag

SEQ ID NO: 2361096 - RNA, 19 nt, Artificial Sequence
  Description of Artificial Sequence: Synthetic oligonucleotide
ggucagaagcaucuggaac

SEQ ID NO: 2361097 - RNA, 19 nt, Artificial Sequence
  Description of Artificial Sequence: Synthetic oligonucleotide
aaaauacuuuucacuggaa

SEQ ID NO: 2361098 - RNA, 19 nt, Artificial Sequence
  Description of Artificial Sequence: Synthetic oligonucleotide
guguaggacaguucaugac

SEQ ID NO: 2361099 - RNA, 19 nt, Artificial Sequence
  Description of Artificial Sequence: Synthetic oligonucleotide
caguguaggacaguucaug

SEQ ID NO: 2361100 - RNA, 19 nt, Artificial Sequence
  Description of Artificial Sequence: Synthetic oligonucleotide
ugcuuaguuuucacacuaa

SEQ ID NO: 2361101 - RNA, 19 nt, Artificial Sequence
  Description of Artificial Sequence: Synthetic oligonucleotide
ggaagaacuuuugaacagc

SEQ ID NO: 2361102 - RNA, 19 nt, Artificial Sequence
  Description of Artificial Sequence: Synthetic oligonucleotide
gaaguuggggucacuccgc

SEQ ID NO: 2361103 - RNA, 19 nt, Artificial Sequence
  Description of Artificial Sequence: Synthetic oligonucleotide
guaucugcaagauuuuaau

SEQ ID NO: 2361104 - RNA, 19 nt, Artificial Sequence
  Description of Artificial Sequence: Synthetic oligonucleotide
ugcggucaaaguagaugca

SEQ ID NO: 2361105 - RNA, 19 nt, Artificial Sequence
  Description of Artificial Sequence: Synthetic oligonucleotide
aaacgguaucugcaagauu

SEQ ID NO: 2361106 - RNA, 19 nt, Artificial Sequence
  Description of Artificial Sequence: Synthetic oligonucleotide
aucggagcacgccggccgc

SEQ ID NO: 2361107 - RNA, 19 nt, Artificial Sequence
  Description of Artificial Sequence: Synthetic oligonucleotide
aucagcuuccaagcuaaug

SEQ ID NO: 2361108 - RNA, 19 nt, Artificial Sequence
  Description of Artificial Sequence: Synthetic oligonucleotide
ucaguguaggacaguucau

SEQ ID NO: 2361109 - RNA, 19 nt, Artificial Sequence
  Description of Artificial Sequence: Synthetic oligonucleotide
acgaaauacaugauauuuu

SEQ ID NO: 2361110 - RNA, 19 nt, Artificial Sequence
  Description of Artificial Sequence: Synthetic oligonucleotide
ucguucucgaagccuguuc

SEQ ID NO: 2361111 - RNA, 19 nt, Artificial Sequence
  Description of Artificial Sequence: Synthetic oligonucleotide
agcuuggucagaagcaucu

SEQ ID NO: 2361112 - RNA, 19 nt, Artificial Sequence
  Description of Artificial Sequence: Synthetic oligonucleotide
aaguaaauacucagaugua

SEQ ID NO: 2361113 - RNA, 19 nt, Artificial Sequence
  Description of Artificial Sequence: Synthetic oligonucleotide
guacacauucacuuuggua

SEQ ID NO: 2361114 - RNA, 19 nt, Artificial Sequence
  Description of Artificial Sequence: Synthetic oligonucleotide
aucuggaacacugguggug

SEQ ID NO: 2361115 - RNA, 19 nt, Artificial Sequence
  Description of Artificial Sequence: Synthetic oligonucleotide
gcggcgauggcacuguucc

SEQ ID NO: 2361116 - RNA, 19 nt, Artificial Sequence
  Description of Artificial Sequence: Synthetic oligonucleotide
uugguuaacucaguauauu

SEQ ID NO: 2361117 - RNA, 19 nt, Artificial Sequence
  Description of Artificial Sequence: Synthetic oligonucleotide
ggaaagcccagcucuuucc

SEQ ID NO: 2361118 - RNA, 19 nt, Artificial Sequence
  Description of Artificial Sequence: Synthetic oligonucleotide
uaaugguuggaagcuuggu

SEQ ID NO: 2361119 - RNA, 19 nt, Artificial Sequence
  Description of Artificial Sequence: Synthetic oligonucleotide
uacaucugaacugcauguc

SEQ ID NO: 2361120 - RNA, 19 nt, Artificial Sequence
  Description of Artificial Sequence: Synthetic oligonucleotide
auuuacaucugaacugcau

SEQ ID NO: 2361121 - RNA, 19 nt, Artificial Sequence
  Description of Artificial Sequence: Synthetic oligonucleotide
acagaucggagcacgccgg

SEQ ID NO: 2361122 - RNA, 19 nt, Artificial Sequence
  Description of Artificial Sequence: Synthetic oligonucleotide
ucucugacuaaugguugga

SEQ ID NO: 2361123 - RNA, 19 nt, Artificial Sequence
  Description of Artificial Sequence: Synthetic oligonucleotide
gaacacuggugguggaaga

SEQ ID NO: 2361124 - RNA, 19 nt, Artificial Sequence
  Description of Artificial Sequence: Synthetic oligonucleotide
caauggaucuacucaaagu

SEQ ID NO: 2361125 - RNA, 19 nt, Artificial Sequence
  Description of Artificial Sequence: Synthetic oligonucleotide
ggaagagucugcugcaaca

SEQ ID NO: 2361126 - RNA, 19 nt, Artificial Sequence
  Description of Artificial Sequence: Synthetic oligonucleotide
agaucggagcacgccggcc

SEQ ID NO: 2361127 - RNA, 19 nt, Artificial Sequence
  Description of Artificial Sequence: Synthetic oligonucleotide
acggaggcccgccaagcag

SEQ ID NO: 2361128 - RNA, 19 nt, Artificial Sequence
  Description of Artificial Sequence: Synthetic oligonucleotide
agcaucuggaacacuggug

SEQ ID NO: 2361129 - RNA, 19 nt, Artificial Sequence
  Description of Artificial Sequence: Synthetic oligonucleotide
gcugaggcuguccacacac

SEQ ID NO: 2361130 - RNA, 19 nt, Artificial Sequence
  Description of Artificial Sequence: Synthetic oligonucleotide
auauucaccuugugcuaau

SEQ ID NO: 2361131 - RNA, 19 nt, Artificial Sequence
  Description of Artificial Sequence: Synthetic oligonucleotide
gacaguucaugacaagcau

SEQ ID NO: 2361132 - RNA, 19 nt, Artificial Sequence
  Description of Artificial Sequence: Synthetic oligonucleotide
ggcgauggcacuguuccgg

SEQ ID NO: 2361133 - RNA, 19 nt, Artificial Sequence
  Description of Artificial Sequence: Synthetic oligonucleotide
gcuaauaacucuuccccaa

SEQ ID NO: 2361134 - RNA, 19 nt, Artificial Sequence
  Description of Artificial Sequence: Synthetic oligonucleotide
caguucaugacaagcauau

SEQ ID NO: 2361135 - RNA, 19 nt, Artificial Sequence
  Description of Artificial Sequence: Synthetic oligonucleotide
agguggucuacacccuucu

SEQ ID NO: 2361136 - RNA, 19 nt, Artificial Sequence
  Description of Artificial Sequence: Synthetic oligonucleotide
gucuacacccuucucauau

SEQ ID NO: 2361137 - RNA, 19 nt, Artificial Sequence
  Description of Artificial Sequence: Synthetic oligonucleotide
acuguuccggcccaccauu

SEQ ID NO: 2361138 - RNA, 19 nt, Artificial Sequence
  Description of Artificial Sequence: Synthetic oligonucleotide
gaggcuguccacacacagc

SEQ ID NO: 2361139 - RNA, 19 nt, Artificial Sequence
  Description of Artificial Sequence: Synthetic oligonucleotide
caauucucugacuaauggu

SEQ ID NO: 2361140 - RNA, 19 nt, Artificial Sequence
  Description of Artificial Sequence: Synthetic oligonucleotide
auauuuugguuaacucagu

SEQ ID NO: 2361141 - RNA, 19 nt, Artificial Sequence
  Description of Artificial Sequence: Synthetic oligonucleotide
agcagcgguuagcuccgac

SEQ ID NO: 2361142 - RNA, 19 nt, Artificial Sequence
  Description of Artificial Sequence: Synthetic oligonucleotide
agguaacuuggaaagccca

SEQ ID NO: 2361143 - RNA, 19 nt, Artificial Sequence
  Description of Artificial Sequence: Synthetic oligonucleotide
cugcaacacuugcagcagc

SEQ ID NO: 2361144 - RNA, 19 nt, Artificial Sequence
  Description of Artificial Sequence: Synthetic oligonucleotide
aggcccgccaagcagcggu

SEQ ID NO: 2361145 - RNA, 19 nt, Artificial Sequence
  Description of Artificial Sequence: Synthetic oligonucleotide
acauucacuuugguagacu

SEQ ID NO: 2361146 - RNA, 19 nt, Artificial Sequence
  Description of Artificial Sequence: Synthetic oligonucleotide
guaggacaguucaugacaa

SEQ ID NO: 2361147 - RNA, 19 nt, Artificial Sequence
  Description of Artificial Sequence: Synthetic oligonucleotide
guuccggcccaccauuuuc

SEQ ID NO: 2361148 - RNA, 19 nt, Artificial Sequence
  Description of Artificial Sequence: Synthetic oligonucleotide
ccaagcuaaugguuaaauc

SEQ ID NO: 2361149 - RNA, 19 nt, Artificial Sequence
  Description of Artificial Sequence: Synthetic oligonucleotide
agagucugcugcaacacuu

SEQ ID NO: 2361150 - RNA, 19 nt, Artificial Sequence
  Description of Artificial Sequence: Synthetic oligonucleotide
agagcugaucagcuuccaa

SEQ ID NO: 2361151 - RNA, 19 nt, Artificial Sequence
  Description of Artificial Sequence: Synthetic oligonucleotide
ucacuccgccuuuugcggu

SEQ ID NO: 2361152 - RNA, 19 nt, Artificial Sequence
  Description of Artificial Sequence: Synthetic oligonucleotide
cucuuccccaagcuguauc

SEQ ID NO: 2361153 - RNA, 19 nt, Artificial Sequence
  Description of Artificial Sequence: Synthetic oligonucleotide
cauuugucagguggucuac

SEQ ID NO: 2361154 - RNA, 19 nt, Artificial Sequence
  Description of Artificial Sequence: Synthetic oligonucleotide
cuuuccuuagcaagcuucu

SEQ ID NO: 2361155 - RNA, 19 nt, Artificial Sequence
  Description of Artificial Sequence: Synthetic oligonucleotide
aagagacaauggaucuacu

SEQ ID NO: 2361156 - RNA, 19 nt, Artificial Sequence
  Description of Artificial Sequence: Synthetic oligonucleotide
gcaguacccgaugaagagg

SEQ ID NO: 2361157 - RNA, 19 nt, Artificial Sequence
  Description of Artificial Sequence: Synthetic oligonucleotide
ggaagcuuggucagaagca

SEQ ID NO: 2361158 - RNA, 19 nt, Artificial Sequence
  Description of Artificial Sequence: Synthetic oligonucleotide
ucuacacccuucucauauu

SEQ ID NO: 2361159 - RNA, 19 nt, Artificial Sequence
  Description of Artificial Sequence: Synthetic oligonucleotide
ggaucuacucaaaguacac

SEQ ID NO: 2361160 - RNA, 19 nt, Artificial Sequence
  Description of Artificial Sequence: Synthetic oligonucleotide
gaaagcccagcucuuuccu

SEQ ID NO: 2361161 - RNA, 19 nt, Artificial Sequence
  Description of Artificial Sequence: Synthetic oligonucleotide
aguacccgaugaagagggc

SEQ ID NO: 2361162 - RNA, 19 nt, Artificial Sequence
  Description of Artificial Sequence: Synthetic oligonucleotide
cauauucaccuugugcuaa

SEQ ID NO: 2361163 - RNA, 19 nt, Artificial Sequence
  Description of Artificial Sequence: Synthetic oligonucleotide
cuaaugguuaaaucauuuu

SEQ ID NO: 2361164 - RNA, 19 nt, Artificial Sequence
  Description of Artificial Sequence: Synthetic oligonucleotide
ggacaguucaugacaagca

SEQ ID NO: 2361165 - RNA, 19 nt, Artificial Sequence
  Description of Artificial Sequence: Synthetic oligonucleotide
acaguucaugacaagcaua

SEQ ID NO: 2361166 - RNA, 19 nt, Artificial Sequence
  Description of Artificial Sequence: Synthetic oligonucleotide
guacccgaugaagagggca

SEQ ID NO: 2361167 - RNA, 19 nt, Artificial Sequence
  Description of Artificial Sequence: Synthetic oligonucleotide
gguaucugcaagauuuuaa

SEQ ID NO: 2361168 - RNA, 19 nt, Artificial Sequence
  Description of Artificial Sequence: Synthetic oligonucleotide
uuucgcucggcuggggcgu

SEQ ID NO: 2361169 - RNA, 19 nt, Artificial Sequence
  Description of Artificial Sequence: Synthetic oligonucleotide
gguuaacucaguauauuua

SEQ ID NO: 2361170 - RNA, 19 nt, Artificial Sequence
  Description of Artificial Sequence: Synthetic oligonucleotide
acaagcauauuugcccuua

SEQ ID NO: 2361171 - RNA, 19 nt, Artificial Sequence
  Description of Artificial Sequence: Synthetic oligonucleotide
caagauuuuaaugcuuagu

SEQ ID NO: 2361172 - RNA, 19 nt, Artificial Sequence
  Description of Artificial Sequence: Synthetic oligonucleotide
uugcauuugucaggugguc

SEQ ID NO: 2361173 - RNA, 19 nt, Artificial Sequence
  Description of Artificial Sequence: Synthetic oligonucleotide
uggaacacuggugguggaa

SEQ ID NO: 2361174 - RNA, 19 nt, Artificial Sequence
  Description of Artificial Sequence: Synthetic oligonucleotide
cacacgcccgcggcgaugg

SEQ ID NO: 2361175 - RNA, 19 nt, Artificial Sequence
  Description of Artificial Sequence: Synthetic oligonucleotide
uccggcccaccauuuucgc

SEQ ID NO: 2361176 - RNA, 19 nt, Artificial Sequence
  Description of Artificial Sequence: Synthetic oligonucleotide
gccuuuugcggucaaagua

SEQ ID NO: 2361177 - RNA, 19 nt, Artificial Sequence
  Description of Artificial Sequence: Synthetic oligonucleotide
cagguggucuacacccuuc

SEQ ID NO: 2361178 - RNA, 19 nt, Artificial Sequence
  Description of Artificial Sequence: Synthetic oligonucleotide
uagcuccgacagaucggag

SEQ ID NO: 2361179 - RNA, 19 nt, Artificial Sequence
  Description of Artificial Sequence: Synthetic oligonucleotide
uauucaccuugugcuaaua

SEQ ID NO: 2361180 - RNA, 19 nt, Artificial Sequence
  Description of Artificial Sequence: Synthetic oligonucleotide
cagaucggagcacgccggc

SEQ ID NO: 2361181 - RNA, 19 nt, Artificial Sequence
  Description of Artificial Sequence: Synthetic oligonucleotide
agcgguuagcuccgacaga

SEQ ID NO: 2361182 - RNA, 19 nt, Artificial Sequence
  Description of Artificial Sequence: Synthetic oligonucleotide
auggcacuguuccggccca

SEQ ID NO: 2361183 - RNA, 19 nt, Artificial Sequence
  Description of Artificial Sequence: Synthetic oligonucleotide
caauugcauuugucaggug

SEQ ID NO: 2361184 - RNA, 19 nt, Artificial Sequence
  Description of Artificial Sequence: Synthetic oligonucleotide
cguguugaaaucuggcuca

SEQ ID NO: 2361185 - RNA, 19 nt, Artificial Sequence
  Description of Artificial Sequence: Synthetic oligonucleotide
agcaagcuucuguuucuuu

SEQ ID NO: 2361186 - RNA, 19 nt, Artificial Sequence
  Description of Artificial Sequence: Synthetic oligonucleotide
ggcucauuccacaucaucu

SEQ ID NO: 2361187 - RNA, 19 nt, Artificial Sequence
  Description of Artificial Sequence: Synthetic oligonucleotide
cauuuucgcucggcugggg

SEQ ID NO: 2361188 - RNA, 19 nt, Artificial Sequence
  Description of Artificial Sequence: Synthetic oligonucleotide
gcugcaacacuugcagcag

SEQ ID NO: 2361189 - RNA, 19 nt, Artificial Sequence
  Description of Artificial Sequence: Synthetic oligonucleotide
gaagccuguucuugaaguu

SEQ ID NO: 2361190 - RNA, 19 nt, Artificial Sequence
  Description of Artificial Sequence: Synthetic oligonucleotide
ggcccaccauuuucgcucg

SEQ ID NO: 2361191 - RNA, 19 nt, Artificial Sequence
  Description of Artificial Sequence: Synthetic oligonucleotide
acgcccgcggcgauggcac

SEQ ID NO: 2361192 - RNA, 19 nt, Artificial Sequence
  Description of Artificial Sequence: Synthetic oligonucleotide
gcauuugucagguggucua

SEQ ID NO: 2361193 - RNA, 19 nt, Artificial Sequence
  Description of Artificial Sequence: Synthetic oligonucleotide
gcaauugcauuugucaggu

SEQ ID NO: 2361194 - RNA, 19 nt, Artificial Sequence
  Description of Artificial Sequence: Synthetic oligonucleotide
guuggggucacuccgccuu

SEQ ID NO: 2361195 - RNA, 19 nt, Artificial Sequence
  Description of Artificial Sequence: Synthetic oligonucleotide
gcagcgguuagcuccgaca

SEQ ID NO: 2361196 - RNA, 19 nt, Artificial Sequence
  Description of Artificial Sequence: Synthetic oligonucleotide
cacuccgccuuuugcgguc

SEQ ID NO: 2361197 - RNA, 19 nt, Artificial Sequence
  Description of Artificial Sequence: Synthetic oligonucleotide
cucgaagccuguucuugaa

SEQ ID NO: 2361198 - RNA, 19 nt, Artificial Sequence
  Description of Artificial Sequence: Synthetic oligonucleotide
agcuuccaagcuaaugguu

SEQ ID NO: 2361199 - RNA, 19 nt, Artificial Sequence
  Description of Artificial Sequence: Synthetic oligonucleotide
cuuuuaaaucagguaacuu

SEQ ID NO: 2361200 - RNA, 19 nt, Artificial Sequence
  Description of Artificial Sequence: Synthetic oligonucleotide
gagcacgccggccgcucgc

SEQ ID NO: 2361201 - RNA, 19 nt, Artificial Sequence
  Description of Artificial Sequence: Synthetic oligonucleotide
uucguucucgaagccuguu

SEQ ID NO: 2361202 - RNA, 19 nt, Artificial Sequence
  Description of Artificial Sequence: Synthetic oligonucleotide
guaucucuucaaggaagaa

SEQ ID NO: 2361203 - RNA, 19 nt, Artificial Sequence
  Description of Artificial Sequence: Synthetic oligonucleotide
aguucaugacaagcauauu

SEQ ID NO: 2361204 - RNA, 19 nt, Artificial Sequence
  Description of Artificial Sequence: Synthetic oligonucleotide
cucugacuaaugguuggaa

SEQ ID NO: 2361205 - RNA, 19 nt, Artificial Sequence
  Description of Artificial Sequence: Synthetic oligonucleotide
gcgauggcacuguuccggc

SEQ ID NO: 2361206 - RNA, 19 nt, Artificial Sequence
  Description of Artificial Sequence: Synthetic oligonucleotide
gcuaaugguuaaaucauuu

SEQ ID NO: 2361207 - RNA, 19 nt, Artificial Sequence
  Description of Artificial Sequence: Synthetic oligonucleotide
agggcaccgcacacgcccg

SEQ ID NO: 2361208 - RNA, 19 nt, Artificial Sequence
  Description of Artificial Sequence: Synthetic oligonucleotide
ccgccuuuugcggucaaag

SEQ ID NO: 2361209 - RNA, 19 nt, Artificial Sequence
  Description of Artificial Sequence: Synthetic oligonucleotide
cugcaagauuuuaaugcuu

SEQ ID NO: 2361210 - RNA, 19 nt, Artificial Sequence
  Description of Artificial Sequence: Synthetic oligonucleotide
ccauuuucgcucggcuggg

SEQ ID NO: 2361211 - RNA, 19 nt, Artificial Sequence
  Description of Artificial Sequence: Synthetic oligonucleotide
ggaggcccgccaagcagcg

SEQ ID NO: 2361212 - RNA, 19 nt, Artificial Sequence
  Description of Artificial Sequence: Synthetic oligonucleotide
acgguaucugcaagauuuu

SEQ ID NO: 2361213 - RNA, 19 nt, Artificial Sequence
  Description of Artificial Sequence: Synthetic oligonucleotide
cuggaacacugguggugga

SEQ ID NO: 2361214 - RNA, 19 nt, Artificial Sequence
  Description of Artificial Sequence: Synthetic oligonucleotide
cuuggaaagcccagcucuu

SEQ ID NO: 2361215 - RNA, 19 nt, Artificial Sequence
  Description of Artificial Sequence: Synthetic oligonucleotide
caucuggaacacugguggu

SEQ ID NO: 2361216 - RNA, 19 nt, Artificial Sequence
  Description of Artificial Sequence: Synthetic oligonucleotide
ccgacagaucggagcacgc

SEQ ID NO: 2361217 - RNA, 19 nt, Artificial Sequence
  Description of Artificial Sequence: Synthetic oligonucleotide
gccuguucuugaaguuggg

SEQ ID NO: 2361218 - RNA, 19 nt, Artificial Sequence
  Description of Artificial Sequence: Synthetic oligonucleotide
gccacggaggcccgccaag

SEQ ID NO: 2361219 - RNA, 19 nt, Artificial Sequence
  Description of Artificial Sequence: Synthetic oligonucleotide
cacuuacaauucucugacu

SEQ ID NO: 2361220 - RNA, 19 nt, Artificial Sequence
  Description of Artificial Sequence: Synthetic oligonucleotide
cggaggcccgccaagcagc

SEQ ID NO: 2361221 - RNA, 19 nt, Artificial Sequence
  Description of Artificial Sequence: Synthetic oligonucleotide
ggggucacuccgccuuuug

SEQ ID NO: 2361222 - RNA, 19 nt, Artificial Sequence
  Description of Artificial Sequence: Synthetic oligonucleotide
uccgccuuuugcggucaaa

SEQ ID NO: 2361223 - RNA, 19 nt, Artificial Sequence
  Description of Artificial Sequence: Synthetic oligonucleotide
acuccgccuuuugcgguca

SEQ ID NO: 2361224 - RNA, 19 nt, Artificial Sequence
  Description of Artificial Sequence: Synthetic oligonucleotide
gaggcccgccaagcagcgg

SEQ ID NO: 2361225 - RNA, 19 nt, Artificial Sequence
  Description of Artificial Sequence: Synthetic oligonucleotide
ccuugugcuaauaacucuu

SEQ ID NO: 2361226 - RNA, 19 nt, Artificial Sequence
  Description of Artificial Sequence: Synthetic oligonucleotide
gcaccgcacacgcccgcgg

SEQ ID NO: 2361227 - RNA, 19 nt, Artificial Sequence
  Description of Artificial Sequence: Synthetic oligonucleotide
gcacuguuccggcccacca

SEQ ID NO: 2361228 - RNA, 19 nt, Artificial Sequence
  Description of Artificial Sequence: Synthetic oligonucleotide
cccaccauuuucgcucggc

SEQ ID NO: 2361229 - RNA, 19 nt, Artificial Sequence
  Description of Artificial Sequence: Synthetic oligonucleotide
cuucguucucgaagccugu

SEQ ID NO: 2361230 - RNA, 19 nt, Artificial Sequence
  Description of Artificial Sequence: Synthetic oligonucleotide
uucgcucggcuggggcgug

SEQ ID NO: 2361231 - RNA, 19 nt, Artificial Sequence
  Description of Artificial Sequence: Synthetic oligonucleotide
ggcacuguuccggcccacc

SEQ ID NO: 2361232 - RNA, 19 nt, Artificial Sequence
  Description of Artificial Sequence: Synthetic oligonucleotide
gguuggaagcuuggucaga

SEQ ID NO: 2361233 - RNA, 19 nt, Artificial Sequence
  Description of Artificial Sequence: Synthetic oligonucleotide
gcgguuagcuccgacagau

SEQ ID NO: 2361234 - RNA, 19 nt, Artificial Sequence
  Description of Artificial Sequence: Synthetic oligonucleotide
cccgccaagcagcgguuag

SEQ ID NO: 2361235 - RNA, 19 nt, Artificial Sequence
  Description of Artificial Sequence: Synthetic oligonucleotide
caagcauauuugcccuuau

SEQ ID NO: 2361236 - RNA, 19 nt, Artificial Sequence
  Description of Artificial Sequence: Synthetic oligonucleotide
cgacagaucggagcacgcc

SEQ ID NO: 2361237 - RNA, 19 nt, Artificial Sequence
  Description of Artificial Sequence: Synthetic oligonucleotide
ucggagcacgccggccgcu

SEQ ID NO: 2361238 - RNA, 19 nt, Artificial Sequence
  Description of Artificial Sequence: Synthetic oligonucleotide
agcacgccggccgcucgca

SEQ ID NO: 2361239 - RNA, 19 nt, Artificial Sequence
  Description of Artificial Sequence: Synthetic oligonucleotide
gccaagcagcgguuagcuc

SEQ ID NO: 2361240 - RNA, 19 nt, Artificial Sequence
  Description of Artificial Sequence: Synthetic oligonucleotide
ggucuacacccuucucaua

SEQ ID NO: 2361241 - RNA, 19 nt, Artificial Sequence
  Description of Artificial Sequence: Synthetic oligonucleotide
uggcacuguuccggcccac

SEQ ID NO: 2361242 - RNA, 19 nt, Artificial Sequence
  Description of Artificial Sequence: Synthetic oligonucleotide
ccgccaagcagcgguuagc

SEQ ID NO: 2361243 - RNA, 19 nt, Artificial Sequence
  Description of Artificial Sequence: Synthetic oligonucleotide
cacgcccgcggcgauggca

SEQ ID NO: 2361244 - RNA, 19 nt, Artificial Sequence
  Description of Artificial Sequence: Synthetic oligonucleotide
cacuguuccggcccaccau

SEQ ID NO: 2361245 - RNA, 19 nt, Artificial Sequence
  Description of Artificial Sequence: Synthetic oligonucleotide
guguugaaaucuggcucau

SEQ ID NO: 2361246 - RNA, 19 nt, Artificial Sequence
  Description of Artificial Sequence: Synthetic oligonucleotide
gaucagcuuccaagcuaau

SEQ ID NO: 2361247 - RNA, 19 nt, Artificial Sequence
  Description of Artificial Sequence: Synthetic oligonucleotide
gggcaccgcacacgcccgc

SEQ ID NO: 2361248 - RNA, 19 nt, Artificial Sequence
  Description of Artificial Sequence: Synthetic oligonucleotide
gugccgggccacggaggcc

SEQ ID NO: 2361249 - RNA, 19 nt, Artificial Sequence
  Description of Artificial Sequence: Synthetic oligonucleotide
cggucaaaguagaugcagu

SEQ ID NO: 2361250 - RNA, 19 nt, Artificial Sequence
  Description of Artificial Sequence: Synthetic oligonucleotide
gggcgugugccgggccacg

SEQ ID NO: 2361251 - RNA, 19 nt, Artificial Sequence
  Description of Artificial Sequence: Synthetic oligonucleotide
cggcgauggcacuguuccg

SEQ ID NO: 2361252 - RNA, 19 nt, Artificial Sequence
  Description of Artificial Sequence: Synthetic oligonucleotide
ucgcucggcuggggcgugu

SEQ ID NO: 2361253 - RNA, 19 nt, Artificial Sequence
  Description of Artificial Sequence: Synthetic oligonucleotide
cagaagcaucuggaacacu

SEQ ID NO: 2361254 - RNA, 19 nt, Artificial Sequence
  Description of Artificial Sequence: Synthetic oligonucleotide
gcgugugccgggccacgga

SEQ ID NO: 2361255 - RNA, 19 nt, Artificial Sequence
  Description of Artificial Sequence: Synthetic oligonucleotide
ccuuagcaagcuucuguuu

SEQ ID NO: 2361256 - RNA, 19 nt, Artificial Sequence
  Description of Artificial Sequence: Synthetic oligonucleotide
ggccacggaggcccgccaa

SEQ ID NO: 2361257 - RNA, 19 nt, Artificial Sequence
  Description of Artificial Sequence: Synthetic oligonucleotide
cgcggcgauggcacuguuc

SEQ ID NO: 2361258 - RNA, 19 nt, Artificial Sequence
  Description of Artificial Sequence: Synthetic oligonucleotide
cgguuagcuccgacagauc

SEQ ID NO: 2361259 - RNA, 19 nt, Artificial Sequence
  Description of Artificial Sequence: Synthetic oligonucleotide
gcacacgcccgcggcgaug

SEQ ID NO: 2361260 - RNA, 19 nt, Artificial Sequence
  Description of Artificial Sequence: Synthetic oligonucleotide
cuccgccuuuugcggucaa

SEQ ID NO: 2361261 - RNA, 19 nt, Artificial Sequence
  Description of Artificial Sequence: Synthetic oligonucleotide
cgguaucugcaagauuuua

SEQ ID NO: 2361262 - RNA, 19 nt, Artificial Sequence
  Description of Artificial Sequence: Synthetic oligonucleotide
ccggcccaccauuuucgcu

SEQ ID NO: 2361263 - RNA, 19 nt, Artificial Sequence
  Description of Artificial Sequence: Synthetic oligonucleotide
ccgcacacgcccgcggcga

SEQ ID NO: 2361264 - RNA, 19 nt, Artificial Sequence
  Description of Artificial Sequence: Synthetic oligonucleotide
gcccgccaagcagcgguua

SEQ ID NO: 2361265 - RNA, 19 nt, Artificial Sequence
  Description of Artificial Sequence: Synthetic oligonucleotide
ccgggccacggaggcccgc

SEQ ID NO: 2361266 - RNA, 19 nt, Artificial Sequence
  Description of Artificial Sequence: Synthetic oligonucleotide
cccgcggcgauggcacugu

SEQ ID NO: 2361267 - RNA, 19 nt, Artificial Sequence
  Description of Artificial Sequence: Synthetic oligonucleotide
ggcccgccaagcagcgguu

SEQ ID NO: 2361268 - RNA, 19 nt, Artificial Sequence
  Description of Artificial Sequence: Synthetic oligonucleotide
cgcacacgcccgcggcgau

SEQ ID NO: 2361269 - RNA, 19 nt, Artificial Sequence
  Description of Artificial Sequence: Synthetic oligonucleotide
cgcccgcggcgauggcacu

SEQ ID NO: 2361270 - RNA, 19 nt, Artificial Sequence
  Description of Artificial Sequence: Synthetic oligonucleotide
ccgcggcgauggcacuguu

SEQ ID NO: 2361271 - RNA, 19 nt, Artificial Sequence
  Description of Artificial Sequence: Synthetic oligonucleotide
cuaauuacugcuuacaggc

SEQ ID NO: 2361272 - RNA, 19 nt, Artificial Sequence
  Description of Artificial Sequence: Synthetic oligonucleotide
uuguuaauaaaccaguccu

SEQ ID NO: 2361273 - RNA, 19 nt, Artificial Sequence
  Description of Artificial Sequence: Synthetic oligonucleotide
uuucagacggcucauaaag

SEQ ID NO: 2361274 - RNA, 19 nt, Artificial Sequence
  Description of Artificial Sequence: Synthetic oligonucleotide
aagccauguaucaagagcc

SEQ ID NO: 2361275 - RNA, 19 nt, Artificial Sequence
  Description of Artificial Sequence: Synthetic oligonucleotide
aaagauauaccugucacug

SEQ ID NO: 2361276 - RNA, 19 nt, Artificial Sequence
  Description of Artificial Sequence: Synthetic oligonucleotide
aauaaaccaguccucaugu

SEQ ID NO: 2361277 - RNA, 19 nt, Artificial Sequence
  Description of Artificial Sequence: Synthetic oligonucleotide
uucaagauaggccagcuca

SEQ ID NO: 2361278 - RNA, 19 nt, Artificial Sequence
  Description of Artificial Sequence: Synthetic oligonucleotide
auucuuugcaaagauauac

SEQ ID NO: 2361279 - RNA, 19 nt, Artificial Sequence
  Description of Artificial Sequence: Synthetic oligonucleotide
agauaggccagcucaaugc

SEQ ID NO: 2361280 - RNA, 19 nt, Artificial Sequence
  Description of Artificial Sequence: Synthetic oligonucleotide
uuuccaaacaaaccugggg

SEQ ID NO: 2361281 - RNA, 19 nt, Artificial Sequence
  Description of Artificial Sequence: Synthetic oligonucleotide
aauguguaggaccaucgag

SEQ ID NO: 2361282 - RNA, 19 nt, Artificial Sequence
  Description of Artificial Sequence: Synthetic oligonucleotide
ucggagucgacgcagaagg

SEQ ID NO: 2361283 - RNA, 19 nt, Artificial Sequence
  Description of Artificial Sequence: Synthetic oligonucleotide
aagaugucuaauuacugcu

SEQ ID NO: 2361284 - RNA, 19 nt, Artificial Sequence
  Description of Artificial Sequence: Synthetic oligonucleotide
uuuggcggcauuuucagag

SEQ ID NO: 2361285 - RNA, 19 nt, Artificial Sequence
  Description of Artificial Sequence: Synthetic oligonucleotide
gaaaucgucacugacauuc

SEQ ID NO: 2361286 - RNA, 19 nt, Artificial Sequence
  Description of Artificial Sequence: Synthetic oligonucleotide
uuccaaacaaaccugggga

SEQ ID NO: 2361287 - RNA, 19 nt, Artificial Sequence
  Description of Artificial Sequence: Synthetic oligonucleotide
agaaugccagucuugauag

SEQ ID NO: 2361288 - RNA, 19 nt, Artificial Sequence
  Description of Artificial Sequence: Synthetic oligonucleotide
cuuguuaauaaaccagucc

SEQ ID NO: 2361289 - RNA, 19 nt, Artificial Sequence
  Description of Artificial Sequence: Synthetic oligonucleotide
ucgaaguggagcuugguag

SEQ ID NO: 2361290 - RNA, 19 nt, Artificial Sequence
  Description of Artificial Sequence: Synthetic oligonucleotide
uauucugccauguugcuac

SEQ ID NO: 2361291 - RNA, 19 nt, Artificial Sequence
  Description of Artificial Sequence: Synthetic oligonucleotide
ggcauuuucagagaaaucg

SEQ ID NO: 2361292 - RNA, 19 nt, Artificial Sequence
  Description of Artificial Sequence: Synthetic oligonucleotide
gaagccauguaucaagagc

SEQ ID NO: 2361293 - RNA, 19 nt, Artificial Sequence
  Description of Artificial Sequence: Synthetic oligonucleotide
caagaugucuaauuacugc

SEQ ID NO: 2361294 - RNA, 19 nt, Artificial Sequence
  Description of Artificial Sequence: Synthetic oligonucleotide
uucuuugcaaagauauacc

SEQ ID NO: 2361295 - RNA, 19 nt, Artificial Sequence
  Description of Artificial Sequence: Synthetic oligonucleotide
uuaugaaaguguuuaccug

SEQ ID NO: 2361296 - RNA, 19 nt, Artificial Sequence
  Description of Artificial Sequence: Synthetic oligonucleotide
aagaaugccagucuugaua

SEQ ID NO: 2361297 - RNA, 19 nt, Artificial Sequence
  Description of Artificial Sequence: Synthetic oligonucleotide
aaaagaaugccagucuuga

SEQ ID NO: 2361298 - RNA, 19 nt, Artificial Sequence
  Description of Artificial Sequence: Synthetic oligonucleotide
ugauagaugugccauucga

SEQ ID NO: 2361299 - RNA, 19 nt, Artificial Sequence
  Description of Artificial Sequence: Synthetic oligonucleotide
acaaagguggauuugccca

SEQ ID NO: 2361300 - RNA, 19 nt, Artificial Sequence
  Description of Artificial Sequence: Synthetic oligonucleotide
aaaagauucuuugcaaaga

SEQ ID NO: 2361301 - RNA, 19 nt, Artificial Sequence
  Description of Artificial Sequence: Synthetic oligonucleotide
auagaugaagccauguauc

SEQ ID NO: 2361302 - RNA, 19 nt, Artificial Sequence
  Description of Artificial Sequence: Synthetic oligonucleotide
uccaugagcgcguucagag

SEQ ID NO: 2361303 - RNA, 19 nt, Artificial Sequence
  Description of Artificial Sequence: Synthetic oligonucleotide
gagggaaccauuuucaaaa

SEQ ID NO: 2361304 - RNA, 19 nt, Artificial Sequence
  Description of Artificial Sequence: Synthetic oligonucleotide
auagaugugccauucgaca

SEQ ID NO: 2361305 - RNA, 19 nt, Artificial Sequence
  Description of Artificial Sequence: Synthetic oligonucleotide
uagucuuguuaauaaacca

SEQ ID NO: 2361306 - RNA, 19 nt, Artificial Sequence
  Description of Artificial Sequence: Synthetic oligonucleotide
agagcuucgaaguggagcu

SEQ ID NO: 2361307 - RNA, 19 nt, Artificial Sequence
  Description of Artificial Sequence: Synthetic oligonucleotide
ucgucacugacauucagca

SEQ ID NO: 2361308 - RNA, 19 nt, Artificial Sequence
  Description of Artificial Sequence: Synthetic oligonucleotide
ugaguauucgugaguagcu

SEQ ID NO: 2361309 - RNA, 19 nt, Artificial Sequence
  Description of Artificial Sequence: Synthetic oligonucleotide
aggaccaucgagcuggcuc

SEQ ID NO: 2361310 - RNA, 19 nt, Artificial Sequence
  Description of Artificial Sequence: Synthetic oligonucleotide
aagauaggccagcucaaug

SEQ ID NO: 2361311 - RNA, 19 nt, Artificial Sequence
  Description of Artificial Sequence: Synthetic oligonucleotide
agccaagaugucuaauuac

SEQ ID NO: 2361312 - RNA, 19 nt, Artificial Sequence
  Description of Artificial Sequence: Synthetic oligonucleotide
agagcaagggagcggaagg

SEQ ID NO: 2361313 - RNA, 19 nt, Artificial Sequence
  Description of Artificial Sequence: Synthetic oligonucleotide
ucagacggcucauaaagga

SEQ ID NO: 2361314 - RNA, 19 nt, Artificial Sequence
  Description of Artificial Sequence: Synthetic oligonucleotide
ugcaaagauauaccuguca

SEQ ID NO: 2361315 - RNA, 19 nt, Artificial Sequence
  Description of Artificial Sequence: Synthetic oligonucleotide
uucagacggcucauaaagg

SEQ ID NO: 2361316 - RNA, 19 nt, Artificial Sequence
  Description of Artificial Sequence: Synthetic oligonucleotide
uguuaauaaaccaguccuc

SEQ ID NO: 2361317 - RNA, 19 nt, Artificial Sequence
  Description of Artificial Sequence: Synthetic oligonucleotide
uccaaacaaaccuggggag

SEQ ID NO: 2361318 - RNA, 19 nt, Artificial Sequence
  Description of Artificial Sequence: Synthetic oligonucleotide
agauucuuugcaaagauau

SEQ ID NO: 2361319 - RNA, 19 nt, Artificial Sequence
  Description of Artificial Sequence: Synthetic oligonucleotide
uguuuggcggcauuuucag

SEQ ID NO: 2361320 - RNA, 19 nt, Artificial Sequence
  Description of Artificial Sequence: Synthetic oligonucleotide
ucuuguuaauaaaccaguc

SEQ ID NO: 2361321 - RNA, 19 nt, Artificial Sequence
  Description of Artificial Sequence: Synthetic oligonucleotide
gaaaguguuuaccugucuc

SEQ ID NO: 2361322 - RNA, 19 nt, Artificial Sequence
  Description of Artificial Sequence: Synthetic oligonucleotide
auccuaacccagcucagcg

SEQ ID NO: 2361323 - RNA, 19 nt, Artificial Sequence
  Description of Artificial Sequence: Synthetic oligonucleotide
uggcacauguugcagagcu

SEQ ID NO: 2361324 - RNA, 19 nt, Artificial Sequence
  Description of Artificial Sequence: Synthetic oligonucleotide
agucuuguuaauaaaccag

SEQ ID NO: 2361325 - RNA, 19 nt, Artificial Sequence
  Description of Artificial Sequence: Synthetic oligonucleotide
uucgugaguagcuucacaa

SEQ ID NO: 2361326 - RNA, 19 nt, Artificial Sequence
  Description of Artificial Sequence: Synthetic oligonucleotide
uggagauagaugaagccau

SEQ ID NO: 2361327 - RNA, 19 nt, Artificial Sequence
  Description of Artificial Sequence: Synthetic oligonucleotide
uugauagaugugccauucg

SEQ ID NO: 2361328 - RNA, 19 nt, Artificial Sequence
  Description of Artificial Sequence: Synthetic oligonucleotide
accucucaaagauucgcac

SEQ ID NO: 2361329 - RNA, 19 nt, Artificial Sequence
  Description of Artificial Sequence: Synthetic oligonucleotide
guacacagaccucucaaag

SEQ ID NO: 2361330 - RNA, 19 nt, Artificial Sequence
  Description of Artificial Sequence: Synthetic oligonucleotide
uugguagucuuguuaauaa

SEQ ID NO: 2361331 - RNA, 19 nt, Artificial Sequence
  Description of Artificial Sequence: Synthetic oligonucleotide
ucauuucuagcaaguuucc

SEQ ID NO: 2361332 - RNA, 19 nt, Artificial Sequence
  Description of Artificial Sequence: Synthetic oligonucleotide
ucaagagccgguuugcaaa

SEQ ID NO: 2361333 - RNA, 19 nt, Artificial Sequence
  Description of Artificial Sequence: Synthetic oligonucleotide
agaccucucaaagauucgc

SEQ ID NO: 2361334 - RNA, 19 nt, Artificial Sequence
  Description of Artificial Sequence: Synthetic oligonucleotide
cagaccauagccaagaugu

SEQ ID NO: 2361335 - RNA, 19 nt, Artificial Sequence
  Description of Artificial Sequence: Synthetic oligonucleotide
aaagauucgcacagacuuc

SEQ ID NO: 2361336 - RNA, 19 nt, Artificial Sequence
  Description of Artificial Sequence: Synthetic oligonucleotide
uguguaggaccaucgagcu

SEQ ID NO: 2361337 - RNA, 19 nt, Artificial Sequence
  Description of Artificial Sequence: Synthetic oligonucleotide
agcgauguugccuucgaug

SEQ ID NO: 2361338 - RNA, 19 nt, Artificial Sequence
  Description of Artificial Sequence: Synthetic oligonucleotide
aaucgucacugacauucag

SEQ ID NO: 2361339 - RNA, 19 nt, Artificial Sequence
  Description of Artificial Sequence: Synthetic oligonucleotide
ucuugguacaucauuucua

SEQ ID NO: 2361340 - RNA, 19 nt, Artificial Sequence
  Description of Artificial Sequence: Synthetic oligonucleotide
gccuguaugaguuuccccg

SEQ ID NO: 2361341 - RNA, 19 nt, Artificial Sequence
  Description of Artificial Sequence: Synthetic oligonucleotide
agaugugccauucgacauc

SEQ ID NO: 2361342 - RNA, 19 nt, Artificial Sequence
  Description of Artificial Sequence: Synthetic oligonucleotide
cauuuucagagaaaucguc

SEQ ID NO: 2361343 - RNA, 19 nt, Artificial Sequence
  Description of Artificial Sequence: Synthetic oligonucleotide
agaaggaacccaccugcgg

SEQ ID NO: 2361344 - RNA, 19 nt, Artificial Sequence
  Description of Artificial Sequence: Synthetic oligonucleotide
gauagaugaagccauguau

SEQ ID NO: 2361345 - RNA, 19 nt, Artificial Sequence
  Description of Artificial Sequence: Synthetic oligonucleotide
acacagaccucucaaagau

SEQ ID NO: 2361346 - RNA, 19 nt, Artificial Sequence
  Description of Artificial Sequence: Synthetic oligonucleotide
aagauucgcacagacuucu

SEQ ID NO: 2361347 - RNA, 19 nt, Artificial Sequence
  Description of Artificial Sequence: Synthetic oligonucleotide
ugucucaugagcucuuccu

SEQ ID NO: 2361348 - RNA, 19 nt, Artificial Sequence
  Description of Artificial Sequence: Synthetic oligonucleotide
ucuagcaaguuuccaggac

SEQ ID NO: 2361349 - RNA, 19 nt, Artificial Sequence
  Description of Artificial Sequence: Synthetic oligonucleotide
ucugggugaguauucguga

SEQ ID NO: 2361350 - RNA, 19 nt, Artificial Sequence
  Description of Artificial Sequence: Synthetic oligonucleotide
aagauauaccugucacugu

SEQ ID NO: 2361351 - RNA, 19 nt, Artificial Sequence
  Description of Artificial Sequence: Synthetic oligonucleotide
guguuuaccugucucauga

SEQ ID NO: 2361352 - RNA, 19 nt, Artificial Sequence
  Description of Artificial Sequence: Synthetic oligonucleotide
aaaccaguccucauguuga

SEQ ID NO: 2361353 - RNA, 19 nt, Artificial Sequence
  Description of Artificial Sequence: Synthetic oligonucleotide
agauauaccugucacugua

SEQ ID NO: 2361354 - RNA, 19 nt, Artificial Sequence
  Description of Artificial Sequence: Synthetic oligonucleotide
guuaauaaaccaguccuca

SEQ ID NO: 2361355 - RNA, 19 nt, Artificial Sequence
  Description of Artificial Sequence: Synthetic oligonucleotide
auucgcacagacuucucug

SEQ ID NO: 2361356 - RNA, 19 nt, Artificial Sequence
  Description of Artificial Sequence: Synthetic oligonucleotide
aaccaguccucauguugac

SEQ ID NO: 2361357 - RNA, 19 nt, Artificial Sequence
  Description of Artificial Sequence: Synthetic oligonucleotide
guuuaccugucucaugagc

SEQ ID NO: 2361358 - RNA, 19 nt, Artificial Sequence
  Description of Artificial Sequence: Synthetic oligonucleotide
auagccaagaugucuaauu

SEQ ID NO: 2361359 - RNA, 19 nt, Artificial Sequence
  Description of Artificial Sequence: Synthetic oligonucleotide
uaccugucacuguacacag

SEQ ID NO: 2361360 - RNA, 19 nt, Artificial Sequence
  Description of Artificial Sequence: Synthetic oligonucleotide
cacaaagguggauuugccc

SEQ ID NO: 2361361 - RNA, 19 nt, Artificial Sequence
  Description of Artificial Sequence: Synthetic oligonucleotide
ugaagccauguaucaagag

SEQ ID NO: 2361362 - RNA, 19 nt, Artificial Sequence
  Description of Artificial Sequence: Synthetic oligonucleotide
guacaucauuucuagcaag

SEQ ID NO: 2361363 - RNA, 19 nt, Artificial Sequence
  Description of Artificial Sequence: Synthetic oligonucleotide
uggauuugcccacagcgau

SEQ ID NO: 2361364 - RNA, 19 nt, Artificial Sequence
  Description of Artificial Sequence: Synthetic oligonucleotide
gauagaugugccauucgac

SEQ ID NO: 2361365 - RNA, 19 nt, Artificial Sequence
  Description of Artificial Sequence: Synthetic oligonucleotide
gcgauguugccuucgaugg

SEQ ID NO: 2361366 - RNA, 19 nt, Artificial Sequence
  Description of Artificial Sequence: Synthetic oligonucleotide
gugaguauucgugaguagc

SEQ ID NO: 2361367 - RNA, 19 nt, Artificial Sequence
  Description of Artificial Sequence: Synthetic oligonucleotide
uauaccugucacuguacac

SEQ ID NO: 2361368 - RNA, 19 nt, Artificial Sequence
  Description of Artificial Sequence: Synthetic oligonucleotide
ucauguugaccaugcagcu

SEQ ID NO: 2361369 - RNA, 19 nt, Artificial Sequence
  Description of Artificial Sequence: Synthetic oligonucleotide
ugccauucgacaucacuga

SEQ ID NO: 2361370 - RNA, 19 nt, Artificial Sequence
  Description of Artificial Sequence: Synthetic oligonucleotide
caaguuuccaggaccuuug

SEQ ID NO: 2361371 - RNA, 19 nt, Artificial Sequence
  Description of Artificial Sequence: Synthetic oligonucleotide
auauaccugucacuguaca

SEQ ID NO: 2361372 - RNA, 19 nt, Artificial Sequence
  Description of Artificial Sequence: Synthetic oligonucleotide
uucgcacagacuucucugc

SEQ ID NO: 2361373 - RNA, 19 nt, Artificial Sequence
  Description of Artificial Sequence: Synthetic oligonucleotide
ugagggaaccauuuucaaa

SEQ ID NO: 2361374 - RNA, 19 nt, Artificial Sequence
  Description of Artificial Sequence: Synthetic oligonucleotide
uguaugaguuuccccggga

SEQ ID NO: 2361375 - RNA, 19 nt, Artificial Sequence
  Description of Artificial Sequence: Synthetic oligonucleotide
uaauuacugcuuacaggcu

SEQ ID NO: 2361376 - RNA, 19 nt, Artificial Sequence
  Description of Artificial Sequence: Synthetic oligonucleotide
agcgucuggaauguguagg

SEQ ID NO: 2361377 - RNA, 19 nt, Artificial Sequence
  Description of Artificial Sequence: Synthetic oligonucleotide
cagucuugauagaugugcc

SEQ ID NO: 2361378 - RNA, 19 nt, Artificial Sequence
  Description of Artificial Sequence: Synthetic oligonucleotide
ugcagagcuucgaagugga

SEQ ID NO: 2361379 - RNA, 19 nt, Artificial Sequence
  Description of Artificial Sequence: Synthetic oligonucleotide
guaugaguuuccccgggag

SEQ ID NO: 2361380 - RNA, 19 nt, Artificial Sequence
  Description of Artificial Sequence: Synthetic oligonucleotide
agagccgguuugcaaacuc

SEQ ID NO: 2361381 - RNA, 19 nt, Artificial Sequence
  Description of Artificial Sequence: Synthetic oligonucleotide
aagcgucuggaauguguag

SEQ ID NO: 2361382 - RNA, 19 nt, Artificial Sequence
  Description of Artificial Sequence: Synthetic oligonucleotide
ucugccuguaugaguuucc

SEQ ID NO: 2361383 - RNA, 19 nt, Artificial Sequence
  Description of Artificial Sequence: Synthetic oligonucleotide
ucaagauaggccagcucaa

SEQ ID NO: 2361384 - RNA, 19 nt, Artificial Sequence
  Description of Artificial Sequence: Synthetic oligonucleotide
gagaaaucgucacugacau

SEQ ID NO: 2361385 - RNA, 19 nt, Artificial Sequence
  Description of Artificial Sequence: Synthetic oligonucleotide
gaugucuaauuacugcuua

SEQ ID NO: 2361386 - RNA, 19 nt, Artificial Sequence
  Description of Artificial Sequence: Synthetic oligonucleotide
aaagaaugccagucuugau

SEQ ID NO: 2361387 - RNA, 19 nt, Artificial Sequence
  Description of Artificial Sequence: Synthetic oligonucleotide
uuacaggcuccuuaugaaa

SEQ ID NO: 2361388 - RNA, 19 nt, Artificial Sequence
  Description of Artificial Sequence: Synthetic oligonucleotide
agcgcguucagagcaaggg

SEQ ID NO: 2361389 - RNA, 19 nt, Artificial Sequence
  Description of Artificial Sequence: Synthetic oligonucleotide
caaagauucgcacagacuu

SEQ ID NO: 2361390 - RNA, 19 nt, Artificial Sequence
  Description of Artificial Sequence: Synthetic oligonucleotide
uucgaaguggagcuuggua

SEQ ID NO: 2361391 - RNA, 19 nt, Artificial Sequence
  Description of Artificial Sequence: Synthetic oligonucleotide
uacagguucuguagccacc

SEQ ID NO: 2361392 - RNA, 19 nt, Artificial Sequence
  Description of Artificial Sequence: Synthetic oligonucleotide
uguuuaccugucucaugag

SEQ ID NO: 2361393 - RNA, 19 nt, Artificial Sequence
  Description of Artificial Sequence: Synthetic oligonucleotide
uguugccuucgauggagag

SEQ ID NO: 2361394 - RNA, 19 nt, Artificial Sequence
  Description of Artificial Sequence: Synthetic oligonucleotide
gcagaaggaacccaccugc

SEQ ID NO: 2361395 - RNA, 19 nt, Artificial Sequence
  Description of Artificial Sequence: Synthetic oligonucleotide
agucuugauagaugugcca

SEQ ID NO: 2361396 - RNA, 19 nt, Artificial Sequence
  Description of Artificial Sequence: Synthetic oligonucleotide
uuucucuucugcucgggau

SEQ ID NO: 2361397 - RNA, 19 nt, Artificial Sequence
  Description of Artificial Sequence: Synthetic oligonucleotide
aagguggauuugcccacag

SEQ ID NO: 2361398 - RNA, 19 nt, Artificial Sequence
  Description of Artificial Sequence: Synthetic oligonucleotide
acuuucagacggcucauaa

SEQ ID NO: 2361399 - RNA, 19 nt, Artificial Sequence
  Description of Artificial Sequence: Synthetic oligonucleotide
agucgacgcagaaggaacc

SEQ ID NO: 2361400 - RNA, 19 nt, Artificial Sequence
  Description of Artificial Sequence: Synthetic oligonucleotide
gugccauucgacaucacug

SEQ ID NO: 2361401 - RNA, 19 nt, Artificial Sequence
  Description of Artificial Sequence: Synthetic oligonucleotide
augcagcuguucaagauag

SEQ ID NO: 2361402 - RNA, 19 nt, Artificial Sequence
  Description of Artificial Sequence: Synthetic oligonucleotide
agauagaugaagccaugua

SEQ ID NO: 2361403 - RNA, 19 nt, Artificial Sequence
  Description of Artificial Sequence: Synthetic oligonucleotide
agguggauuugcccacagc

SEQ ID NO: 2361404 - RNA, 19 nt, Artificial Sequence
  Description of Artificial Sequence: Synthetic oligonucleotide
caaagguggauuugcccac

SEQ ID NO: 2361405 - RNA, 19 nt, Artificial Sequence
  Description of Artificial Sequence: Synthetic oligonucleotide
ugguacagucuuuccaaac

SEQ ID NO: 2361406 - RNA, 19 nt, Artificial Sequence
  Description of Artificial Sequence: Synthetic oligonucleotide
accugcggccauccuaacc

SEQ ID NO: 2361407 - RNA, 19 nt, Artificial Sequence
  Description of Artificial Sequence: Synthetic oligonucleotide
ggaauguguaggaccaucg

SEQ ID NO: 2361408 - RNA, 19 nt, Artificial Sequence
  Description of Artificial Sequence: Synthetic oligonucleotide
gagaaaagaaugccagucu

SEQ ID NO: 2361409 - RNA, 19 nt, Artificial Sequence
  Description of Artificial Sequence: Synthetic oligonucleotide
caugagcgcguucagagca

SEQ ID NO: 2361410 - RNA, 19 nt, Artificial Sequence
  Description of Artificial Sequence: Synthetic oligonucleotide
guugccuucgauggagagg

SEQ ID NO: 2361411 - RNA, 19 nt, Artificial Sequence
  Description of Artificial Sequence: Synthetic oligonucleotide
gaauguguaggaccaucga

SEQ ID NO: 2361412 - RNA, 19 nt, Artificial Sequence
  Description of Artificial Sequence: Synthetic oligonucleotide
cuacagguucuguagccac

SEQ ID NO: 2361413 - RNA, 19 nt, Artificial Sequence
  Description of Artificial Sequence: Synthetic oligonucleotide
uaacccagcucagcgaggc

SEQ ID NO: 2361414 - RNA, 19 nt, Artificial Sequence
  Description of Artificial Sequence: Synthetic oligonucleotide
aaguguuuaccugucucau

SEQ ID NO: 2361415 - RNA, 19 nt, Artificial Sequence
  Description of Artificial Sequence: Synthetic oligonucleotide
aaacaaaccuggggagaag

SEQ ID NO: 2361416 - RNA, 19 nt, Artificial Sequence
  Description of Artificial Sequence: Synthetic oligonucleotide
uugguacaucauuucuagc

SEQ ID NO: 2361417 - RNA, 19 nt, Artificial Sequence
  Description of Artificial Sequence: Synthetic oligonucleotide
ucgcacagacuucucugcc

SEQ ID NO: 2361418 - RNA, 19 nt, Artificial Sequence
  Description of Artificial Sequence: Synthetic oligonucleotide
gacggcucauaaaggaaag

SEQ ID NO: 2361419 - RNA, 19 nt, Artificial Sequence
  Description of Artificial Sequence: Synthetic oligonucleotide
ggagaaaagaaugccaguc

SEQ ID NO: 2361420 - RNA, 19 nt, Artificial Sequence
  Description of Artificial Sequence: Synthetic oligonucleotide
gaccaugcagcuguucaag

SEQ ID NO: 2361421 - RNA, 19 nt, Artificial Sequence
  Description of Artificial Sequence: Synthetic oligonucleotide
uggggagaagccuggagau

SEQ ID NO: 2361422 - RNA, 19 nt, Artificial Sequence
  Description of Artificial Sequence: Synthetic oligonucleotide
uuaccugucucaugagcuc

SEQ ID NO: 2361423 - RNA, 19 nt, Artificial Sequence
  Description of Artificial Sequence: Synthetic oligonucleotide
ugguagucuuguuaauaaa

SEQ ID NO: 2361424 - RNA, 19 nt, Artificial Sequence
  Description of Artificial Sequence: Synthetic oligonucleotide
gauauaccugucacuguac

SEQ ID NO: 2361425 - RNA, 19 nt, Artificial Sequence
  Description of Artificial Sequence: Synthetic oligonucleotide
uguucaagauaggccagcu

SEQ ID NO: 2361426 - RNA, 19 nt, Artificial Sequence
  Description of Artificial Sequence: Synthetic oligonucleotide
cuguaugaguuuccccggg

SEQ ID NO: 2361427 - RNA, 19 nt, Artificial Sequence
  Description of Artificial Sequence: Synthetic oligonucleotide
agcggaagggcgcucggag

SEQ ID NO: 2361428 - RNA, 19 nt, Artificial Sequence
  Description of Artificial Sequence: Synthetic oligonucleotide
caagggagcggaagggcgc

SEQ ID NO: 2361429 - RNA, 19 nt, Artificial Sequence
  Description of Artificial Sequence: Synthetic oligonucleotide
ugggugaguauucgugagu

SEQ ID NO: 2361430 - RNA, 19 nt, Artificial Sequence
  Description of Artificial Sequence: Synthetic oligonucleotide
ccagucuugauagaugugc

SEQ ID NO: 2361431 - RNA, 19 nt, Artificial Sequence
  Description of Artificial Sequence: Synthetic oligonucleotide
acggcucauaaaggaaagc

SEQ ID NO: 2361432 - RNA, 19 nt, Artificial Sequence
  Description of Artificial Sequence: Synthetic oligonucleotide
gaugugccauucgacauca

SEQ ID NO: 2361433 - RNA, 19 nt, Artificial Sequence
  Description of Artificial Sequence: Synthetic oligonucleotide
aaagcgucuggaaugugua

SEQ ID NO: 2361434 - RNA, 19 nt, Artificial Sequence
  Description of Artificial Sequence: Synthetic oligonucleotide
ccuuaugaaaguguuuacc

SEQ ID NO: 2361435 - RNA, 19 nt, Artificial Sequence
  Description of Artificial Sequence: Synthetic oligonucleotide
cuggagauagaugaagcca

SEQ ID NO: 2361436 - RNA, 19 nt, Artificial Sequence
  Description of Artificial Sequence: Synthetic oligonucleotide
gagucgacgcagaaggaac

SEQ ID NO: 2361437 - RNA, 19 nt, Artificial Sequence
  Description of Artificial Sequence: Synthetic oligonucleotide
uugcaaagauauaccuguc

SEQ ID NO: 2361438 - RNA, 19 nt, Artificial Sequence
  Description of Artificial Sequence: Synthetic oligonucleotide
aacccaccugcggccaucc

SEQ ID NO: 2361439 - RNA, 19 nt, Artificial Sequence
  Description of Artificial Sequence: Synthetic oligonucleotide
uccuaacccagcucagcga

SEQ ID NO: 2361440 - RNA, 19 nt, Artificial Sequence
  Description of Artificial Sequence: Synthetic oligonucleotide
ucgugaguagcuucacaaa

SEQ ID NO: 2361441 - RNA, 19 nt, Artificial Sequence
  Description of Artificial Sequence: Synthetic oligonucleotide
caagagccgguuugcaaac

SEQ ID NO: 2361442 - RNA, 19 nt, Artificial Sequence
  Description of Artificial Sequence: Synthetic oligonucleotide
auucgugaguagcuucaca

SEQ ID NO: 2361443 - RNA, 19 nt, Artificial Sequence
  Description of Artificial Sequence: Synthetic oligonucleotide
aucaagagccgguuugcaa

SEQ ID NO: 2361444 - RNA, 19 nt, Artificial Sequence
  Description of Artificial Sequence: Synthetic oligonucleotide
ugaguuuccccgggagggg

SEQ ID NO: 2361445 - RNA, 19 nt, Artificial Sequence
  Description of Artificial Sequence: Synthetic oligonucleotide
ucuugauagaugugccauu

SEQ ID NO: 2361446 - RNA, 19 nt, Artificial Sequence
  Description of Artificial Sequence: Synthetic oligonucleotide
agccuggagauagaugaag

SEQ ID NO: 2361447 - RNA, 19 nt, Artificial Sequence
  Description of Artificial Sequence: Synthetic oligonucleotide
ccuggagauagaugaagcc

SEQ ID NO: 2361448 - RNA, 19 nt, Artificial Sequence
  Description of Artificial Sequence: Synthetic oligonucleotide
ugcuuacaggcuccuuaug

SEQ ID NO: 2361449 - RNA, 19 nt, Artificial Sequence
  Description of Artificial Sequence: Synthetic oligonucleotide
ccauucgacaucacugagg

SEQ ID NO: 2361450 - RNA, 19 nt, Artificial Sequence
  Description of Artificial Sequence: Synthetic oligonucleotide
cuccuuaugaaaguguuua

SEQ ID NO: 2361451 - RNA, 19 nt, Artificial Sequence
  Description of Artificial Sequence: Synthetic oligonucleotide
acgcagaaggaacccaccu

SEQ ID NO: 2361452 - RNA, 19 nt, Artificial Sequence
  Description of Artificial Sequence: Synthetic oligonucleotide
ugaccaugcagcuguucaa

SEQ ID NO: 2361453 - RNA, 19 nt, Artificial Sequence
  Description of Artificial Sequence: Synthetic oligonucleotide
gcuuacaggcuccuuauga

SEQ ID NO: 2361454 - RNA, 19 nt, Artificial Sequence
  Description of Artificial Sequence: Synthetic oligonucleotide
cuaacccagcucagcgagg

SEQ ID NO: 2361455 - RNA, 19 nt, Artificial Sequence
  Description of Artificial Sequence: Synthetic oligonucleotide
aaaucgucacugacauuca

SEQ ID NO: 2361456 - RNA, 19 nt, Artificial Sequence
  Description of Artificial Sequence: Synthetic oligonucleotide
aaguggagcuugguagucu

SEQ ID NO: 2361457 - RNA, 19 nt, Artificial Sequence
  Description of Artificial Sequence: Synthetic oligonucleotide
gguacaucauuucuagcaa

SEQ ID NO: 2361458 - RNA, 19 nt, Artificial Sequence
  Description of Artificial Sequence: Synthetic oligonucleotide
guauucgugaguagcuuca

SEQ ID NO: 2361459 - RNA, 19 nt, Artificial Sequence
  Description of Artificial Sequence: Synthetic oligonucleotide
gcagcuguucaagauaggc

SEQ ID NO: 2361460 - RNA, 19 nt, Artificial Sequence
  Description of Artificial Sequence: Synthetic oligonucleotide
gauucgcacagacuucucu

SEQ ID NO: 2361461 - RNA, 19 nt, Artificial Sequence
  Description of Artificial Sequence: Synthetic oligonucleotide
caggaccuuuggaagugcc

SEQ ID NO: 2361462 - RNA, 19 nt, Artificial Sequence
  Description of Artificial Sequence: Synthetic oligonucleotide
cucgggaucucugguacag

SEQ ID NO: 2361463 - RNA, 19 nt, Artificial Sequence
  Description of Artificial Sequence: Synthetic oligonucleotide
agcuucgaaguggagcuug

SEQ ID NO: 2361464 - RNA, 19 nt, Artificial Sequence
  Description of Artificial Sequence: Synthetic oligonucleotide
gccauguugcuacagguuc

SEQ ID NO: 2361465 - RNA, 19 nt, Artificial Sequence
  Description of Artificial Sequence: Synthetic oligonucleotide
cgugaguagcuucacaaag

SEQ ID NO: 2361466 - RNA, 19 nt, Artificial Sequence
  Description of Artificial Sequence: Synthetic oligonucleotide
uucgauggagaggcuccgg

SEQ ID NO: 2361467 - RNA, 19 nt, Artificial Sequence
  Description of Artificial Sequence: Synthetic oligonucleotide
gauauucugccauguugcu

SEQ ID NO: 2361468 - RNA, 19 nt, Artificial Sequence
  Description of Artificial Sequence: Synthetic oligonucleotide
agccauguaucaagagccg

SEQ ID NO: 2361469 - RNA, 19 nt, Artificial Sequence
  Description of Artificial Sequence: Synthetic oligonucleotide
caaagauauaccugucacu

SEQ ID NO: 2361470 - RNA, 19 nt, Artificial Sequence
  Description of Artificial Sequence: Synthetic oligonucleotide
gucuuguuaauaaaccagu

SEQ ID NO: 2361471 - RNA, 19 nt, Artificial Sequence
  Description of Artificial Sequence: Synthetic oligonucleotide
ccuaacccagcucagcgag

SEQ ID NO: 2361472 - RNA, 19 nt, Artificial Sequence
  Description of Artificial Sequence: Synthetic oligonucleotide
gccauccuaacccagcuca

SEQ ID NO: 2361473 - RNA, 19 nt, Artificial Sequence
  Description of Artificial Sequence: Synthetic oligonucleotide
gagcuugguagucuuguua

SEQ ID NO: 2361474 - RNA, 19 nt, Artificial Sequence
  Description of Artificial Sequence: Synthetic oligonucleotide
aguggagcuugguagucuu

SEQ ID NO: 2361475 - RNA, 19 nt, Artificial Sequence
  Description of Artificial Sequence: Synthetic oligonucleotide
ccuucgauggagaggcucc

SEQ ID NO: 2361476 - RNA, 19 nt, Artificial Sequence
  Description of Artificial Sequence: Synthetic oligonucleotide
ugcggccauccuaacccag

SEQ ID NO: 2361477 - RNA, 19 nt, Artificial Sequence
  Description of Artificial Sequence: Synthetic oligonucleotide
cauguugcuacagguucug

SEQ ID NO: 2361478 - RNA, 19 nt, Artificial Sequence
  Description of Artificial Sequence: Synthetic oligonucleotide
cauccuaacccagcucagc

SEQ ID NO: 2361479 - RNA, 19 nt, Artificial Sequence
  Description of Artificial Sequence: Synthetic oligonucleotide
ccuguaugaguuuccccgg

SEQ ID NO: 2361480 - RNA, 19 nt, Artificial Sequence
  Description of Artificial Sequence: Synthetic oligonucleotide
uauucgugaguagcuucac

SEQ ID NO: 2361481 - RNA, 19 nt, Artificial Sequence
  Description of Artificial Sequence: Synthetic oligonucleotide
gaaagcgucuggaaugugu

SEQ ID NO: 2361482 - RNA, 19 nt, Artificial Sequence
  Description of Artificial Sequence: Synthetic oligonucleotide
acagcgauguugccuucga

SEQ ID NO: 2361483 - RNA, 19 nt, Artificial Sequence
  Description of Artificial Sequence: Synthetic oligonucleotide
gacgcagaaggaacccacc

SEQ ID NO: 2361484 - RNA, 19 nt, Artificial Sequence
  Description of Artificial Sequence: Synthetic oligonucleotide
agacggcucauaaaggaaa

SEQ ID NO: 2361485 - RNA, 19 nt, Artificial Sequence
  Description of Artificial Sequence: Synthetic oligonucleotide
cagagcaagggagcggaag

SEQ ID NO: 2361486 - RNA, 19 nt, Artificial Sequence
  Description of Artificial Sequence: Synthetic oligonucleotide
cguggcgcguccaugagcg

SEQ ID NO: 2361487 - RNA, 19 nt, Artificial Sequence
  Description of Artificial Sequence: Synthetic oligonucleotide
ccgguuugcaaacuccugc

SEQ ID NO: 2361488 - RNA, 19 nt, Artificial Sequence
  Description of Artificial Sequence: Synthetic oligonucleotide
ggugaguauucgugaguag

SEQ ID NO: 2361489 - RNA, 19 nt, Artificial Sequence
  Description of Artificial Sequence: Synthetic oligonucleotide
gaccucucaaagauucgca

SEQ ID NO: 2361490 - RNA, 19 nt, Artificial Sequence
  Description of Artificial Sequence: Synthetic oligonucleotide
cuucgauggagaggcuccg

SEQ ID NO: 2361491 - RNA, 19 nt, Artificial Sequence
  Description of Artificial Sequence: Synthetic oligonucleotide
gauucuuugcaaagauaua

SEQ ID NO: 2361492 - RNA, 19 nt, Artificial Sequence
  Description of Artificial Sequence: Synthetic oligonucleotide
guucaagauaggccagcuc

SEQ ID NO: 2361493 - RNA, 19 nt, Artificial Sequence
  Description of Artificial Sequence: Synthetic oligonucleotide
ugagcgcguucagagcaag

SEQ ID NO: 2361494 - RNA, 19 nt, Artificial Sequence
  Description of Artificial Sequence: Synthetic oligonucleotide
auaaaccaguccucauguu

SEQ ID NO: 2361495 - RNA, 19 nt, Artificial Sequence
  Description of Artificial Sequence: Synthetic oligonucleotide
cuugguagucuuguuaaua

SEQ ID NO: 2361496 - RNA, 19 nt, Artificial Sequence
  Description of Artificial Sequence: Synthetic oligonucleotide
cuguacacagaccucucaa

SEQ ID NO: 2361497 - RNA, 19 nt, Artificial Sequence
  Description of Artificial Sequence: Synthetic oligonucleotide
cauguugcagagcuucgaa

SEQ ID NO: 2361498 - RNA, 19 nt, Artificial Sequence
  Description of Artificial Sequence: Synthetic oligonucleotide
gucgugcaugcuccuggcg

SEQ ID NO: 2361499 - RNA, 19 nt, Artificial Sequence
  Description of Artificial Sequence: Synthetic oligonucleotide
auguaucaagagccgguuu

SEQ ID NO: 2361500 - RNA, 19 nt, Artificial Sequence
  Description of Artificial Sequence: Synthetic oligonucleotide
ccaguccucauguugacca

SEQ ID NO: 2361501 - RNA, 19 nt, Artificial Sequence
  Description of Artificial Sequence: Synthetic oligonucleotide
agcugcacuuucagacggc

SEQ ID NO: 2361502 - RNA, 19 nt, Artificial Sequence
  Description of Artificial Sequence: Synthetic oligonucleotide
cacagcgauguugccuucg

SEQ ID NO: 2361503 - RNA, 19 nt, Artificial Sequence
  Description of Artificial Sequence: Synthetic oligonucleotide
cggcucauaaaggaaagcg

SEQ ID NO: 2361504 - RNA, 19 nt, Artificial Sequence
  Description of Artificial Sequence: Synthetic oligonucleotide
ucgacgcagaaggaaccca

SEQ ID NO: 2361505 - RNA, 19 nt, Artificial Sequence
  Description of Artificial Sequence: Synthetic oligonucleotide
cucggagucgacgcagaag

SEQ ID NO: 2361506 - RNA, 19 nt, Artificial Sequence
  Description of Artificial Sequence: Synthetic oligonucleotide
gagauagaugaagccaugu

SEQ ID NO: 2361507 - RNA, 19 nt, Artificial Sequence
  Description of Artificial Sequence: Synthetic oligonucleotide
aagggagcggaagggcgcu

SEQ ID NO: 2361508 - RNA, 19 nt, Artificial Sequence
  Description of Artificial Sequence: Synthetic oligonucleotide
gucgacgcagaaggaaccc

SEQ ID NO: 2361509 - RNA, 19 nt, Artificial Sequence
  Description of Artificial Sequence: Synthetic oligonucleotide
gccauguaucaagagccgg

SEQ ID NO: 2361510 - RNA, 19 nt, Artificial Sequence
  Description of Artificial Sequence: Synthetic oligonucleotide
uguagccaccugccacucu

SEQ ID NO: 2361511 - RNA, 19 nt, Artificial Sequence
  Description of Artificial Sequence: Synthetic oligonucleotide
cgcguucagagcaagggag

SEQ ID NO: 2361512 - RNA, 19 nt, Artificial Sequence
  Description of Artificial Sequence: Synthetic oligonucleotide
aagagccgguuugcaaacu

SEQ ID NO: 2361513 - RNA, 19 nt, Artificial Sequence
  Description of Artificial Sequence: Synthetic oligonucleotide
ugcuccuggcgcguggcgc

SEQ ID NO: 2361514 - RNA, 19 nt, Artificial Sequence
  Description of Artificial Sequence: Synthetic oligonucleotide
cauuucuagcaaguuucca

SEQ ID NO: 2361515 - RNA, 19 nt, Artificial Sequence
  Description of Artificial Sequence: Synthetic oligonucleotide
cuuucucuucugcucggga

SEQ ID NO: 2361516 - RNA, 19 nt, Artificial Sequence
  Description of Artificial Sequence: Synthetic oligonucleotide
cagacggcucauaaaggaa

SEQ ID NO: 2361517 - RNA, 19 nt, Artificial Sequence
  Description of Artificial Sequence: Synthetic oligonucleotide
gccauucgacaucacugag

SEQ ID NO: 2361518 - RNA, 19 nt, Artificial Sequence
  Description of Artificial Sequence: Synthetic oligonucleotide
gccuggagauagaugaagc

SEQ ID NO: 2361519 - RNA, 19 nt, Artificial Sequence
  Description of Artificial Sequence: Synthetic oligonucleotide
cugagggaaccauuuucaa

SEQ ID NO: 2361520 - RNA, 19 nt, Artificial Sequence
  Description of Artificial Sequence: Synthetic oligonucleotide
auucgacaucacugaggga

SEQ ID NO: 2361521 - RNA, 19 nt, Artificial Sequence
  Description of Artificial Sequence: Synthetic oligonucleotide
agauucgcacagacuucuc

SEQ ID NO: 2361522 - RNA, 19 nt, Artificial Sequence
  Description of Artificial Sequence: Synthetic oligonucleotide
gucuugauagaugugccau

SEQ ID NO: 2361523 - RNA, 19 nt, Artificial Sequence
  Description of Artificial Sequence: Synthetic oligonucleotide
gagcgcguucagagcaagg

SEQ ID NO: 2361524 - RNA, 19 nt, Artificial Sequence
  Description of Artificial Sequence: Synthetic oligonucleotide
uuacugcuuacaggcuccu

SEQ ID NO: 2361525 - RNA, 19 nt, Artificial Sequence
  Description of Artificial Sequence: Synthetic oligonucleotide
guuuggcggcauuuucaga

SEQ ID NO: 2361526 - RNA, 19 nt, Artificial Sequence
  Description of Artificial Sequence: Synthetic oligonucleotide
ggagauagaugaagccaug

SEQ ID NO: 2361527 - RNA, 19 nt, Artificial Sequence
  Description of Artificial Sequence: Synthetic oligonucleotide
gucacuguacacagaccuc

SEQ ID NO: 2361528 - RNA, 19 nt, Artificial Sequence
  Description of Artificial Sequence: Synthetic oligonucleotide
ccagaccauagccaagaug

SEQ ID NO: 2361529 - RNA, 19 nt, Artificial Sequence
  Description of Artificial Sequence: Synthetic oligonucleotide
ccaucgagcuggcucuugg

SEQ ID NO: 2361530 - RNA, 19 nt, Artificial Sequence
  Description of Artificial Sequence: Synthetic oligonucleotide
aggcuccuuaugaaagugu

SEQ ID NO: 2361531 - RNA, 19 nt, Artificial Sequence
  Description of Artificial Sequence: Synthetic oligonucleotide
aagccuggagauagaugaa

SEQ ID NO: 2361532 - RNA, 19 nt, Artificial Sequence
  Description of Artificial Sequence: Synthetic oligonucleotide
uuuugggugccagcagcuu

SEQ ID NO: 2361533 - RNA, 19 nt, Artificial Sequence
  Description of Artificial Sequence: Synthetic oligonucleotide
gcuccuggcgcguggcgcg

SEQ ID NO: 2361534 - RNA, 19 nt, Artificial Sequence
  Description of Artificial Sequence: Synthetic oligonucleotide
uccuguuuggcggcauuuu

SEQ ID NO: 2361535 - RNA, 19 nt, Artificial Sequence
  Description of Artificial Sequence: Synthetic oligonucleotide
gccaagaugucuaauuacu

SEQ ID NO: 2361536 - RNA, 19 nt, Artificial Sequence
  Description of Artificial Sequence: Synthetic oligonucleotide
cgugcaugcuccuggcgcg

SEQ ID NO: 2361537 - RNA, 19 nt, Artificial Sequence
  Description of Artificial Sequence: Synthetic oligonucleotide
uguugaccaugcagcuguu

SEQ ID NO: 2361538 - RNA, 19 nt, Artificial Sequence
  Description of Artificial Sequence: Synthetic oligonucleotide
ggauuugcccacagcgaug

SEQ ID NO: 2361539 - RNA, 19 nt, Artificial Sequence
  Description of Artificial Sequence: Synthetic oligonucleotide
gcgucuggaauguguagga

SEQ ID NO: 2361540 - RNA, 19 nt, Artificial Sequence
  Description of Artificial Sequence: Synthetic oligonucleotide
ccaugagcgcguucagagc

SEQ ID NO: 2361541 - RNA, 19 nt, Artificial Sequence
  Description of Artificial Sequence: Synthetic oligonucleotide
gcuucgaaguggagcuugg

SEQ ID NO: 2361542 - RNA, 19 nt, Artificial Sequence
  Description of Artificial Sequence: Synthetic oligonucleotide
ggaccaucgagcuggcucu

SEQ ID NO: 2361543 - RNA, 19 nt, Artificial Sequence
  Description of Artificial Sequence: Synthetic oligonucleotide
cuggcacauguugcagagc

SEQ ID NO: 2361544 - RNA, 19 nt, Artificial Sequence
  Description of Artificial Sequence: Synthetic oligonucleotide
cguucagagcaagggagcg

SEQ ID NO: 2361545 - RNA, 19 nt, Artificial Sequence
  Description of Artificial Sequence: Synthetic oligonucleotide
ggaagggcgcucggagucg

SEQ ID NO: 2361546 - RNA, 19 nt, Artificial Sequence
  Description of Artificial Sequence: Synthetic oligonucleotide
ugccacucugggugaguau

SEQ ID NO: 2361547 - RNA, 19 nt, Artificial Sequence
  Description of Artificial Sequence: Synthetic oligonucleotide
cgauggagaggcuccgggg

SEQ ID NO: 2361548 - RNA, 19 nt, Artificial Sequence
  Description of Artificial Sequence: Synthetic oligonucleotide
gagaagccuggagauagau

SEQ ID NO: 2361549 - RNA, 19 nt, Artificial Sequence
  Description of Artificial Sequence: Synthetic oligonucleotide
ggagucgacgcagaaggaa

SEQ ID NO: 2361550 - RNA, 19 nt, Artificial Sequence
  Description of Artificial Sequence: Synthetic oligonucleotide
aagggcgcucggagucgac

SEQ ID NO: 2361551 - RNA, 19 nt, Artificial Sequence
  Description of Artificial Sequence: Synthetic oligonucleotide
gcguucagagcaagggagc

SEQ ID NO: 2361552 - RNA, 19 nt, Artificial Sequence
  Description of Artificial Sequence: Synthetic oligonucleotide
ccauccuaacccagcucag

SEQ ID NO: 2361553 - RNA, 19 nt, Artificial Sequence
  Description of Artificial Sequence: Synthetic oligonucleotide
uuuccccgggagggguucc

SEQ ID NO: 2361554 - RNA, 19 nt, Artificial Sequence
  Description of Artificial Sequence: Synthetic oligonucleotide
ggagcggaagggcgcucgg

SEQ ID NO: 2361555 - RNA, 19 nt, Artificial Sequence
  Description of Artificial Sequence: Synthetic oligonucleotide
gcauuuucagagaaaucgu

SEQ ID NO: 2361556 - RNA, 19 nt, Artificial Sequence
  Description of Artificial Sequence: Synthetic oligonucleotide
gcuacagguucuguagcca

SEQ ID NO: 2361557 - RNA, 19 nt, Artificial Sequence
  Description of Artificial Sequence: Synthetic oligonucleotide
gcguccaugagcgcguuca

SEQ ID NO: 2361558 - RNA, 19 nt, Artificial Sequence
  Description of Artificial Sequence: Synthetic oligonucleotide
gaguauucgugaguagcuu

SEQ ID NO: 2361559 - RNA, 19 nt, Artificial Sequence
  Description of Artificial Sequence: Synthetic oligonucleotide
cugcuuacaggcuccuuau

SEQ ID NO: 2361560 - RNA, 19 nt, Artificial Sequence
  Description of Artificial Sequence: Synthetic oligonucleotide
ggaccuuuggaagugccgu

SEQ ID NO: 2361561 - RNA, 19 nt, Artificial Sequence
  Description of Artificial Sequence: Synthetic oligonucleotide
gaagggcgcucggagucga

SEQ ID NO: 2361562 - RNA, 19 nt, Artificial Sequence
  Description of Artificial Sequence: Synthetic oligonucleotide
accaucgagcuggcucuug

SEQ ID NO: 2361563 - RNA, 19 nt, Artificial Sequence
  Description of Artificial Sequence: Synthetic oligonucleotide
gaacccaccugcggccauc

SEQ ID NO: 2361564 - RNA, 19 nt, Artificial Sequence
  Description of Artificial Sequence: Synthetic oligonucleotide
gcgcguucagagcaaggga

SEQ ID NO: 2361565 - RNA, 19 nt, Artificial Sequence
  Description of Artificial Sequence: Synthetic oligonucleotide
cgcagaaggaacccaccug

SEQ ID NO: 2361566 - RNA, 19 nt, Artificial Sequence
  Description of Artificial Sequence: Synthetic oligonucleotide
uccccgggagggguuccag

SEQ ID NO: 2361567 - RNA, 19 nt, Artificial Sequence
  Description of Artificial Sequence: Synthetic oligonucleotide
guuuccccgggagggguuc

SEQ ID NO: 2361568 - RNA, 19 nt, Artificial Sequence
  Description of Artificial Sequence: Synthetic oligonucleotide
ccauguaucaagagccggu

SEQ ID NO: 2361569 - RNA, 19 nt, Artificial Sequence
  Description of Artificial Sequence: Synthetic oligonucleotide
cauguaucaagagccgguu

SEQ ID NO: 2361570 - RNA, 19 nt, Artificial Sequence
  Description of Artificial Sequence: Synthetic oligonucleotide
gcggcauuuucagagaaau

SEQ ID NO: 2361571 - RNA, 19 nt, Artificial Sequence
  Description of Artificial Sequence: Synthetic oligonucleotide
agcaaguuuccaggaccuu

SEQ ID NO: 2361572 - RNA, 19 nt, Artificial Sequence
  Description of Artificial Sequence: Synthetic oligonucleotide
cugcggccauccuaaccca

SEQ ID NO: 2361573 - RNA, 19 nt, Artificial Sequence
  Description of Artificial Sequence: Synthetic oligonucleotide
augugccauucgacaucac

SEQ ID NO: 2361574 - RNA, 19 nt, Artificial Sequence
  Description of Artificial Sequence: Synthetic oligonucleotide
gccgguuugcaaacuccug

SEQ ID NO: 2361575 - RNA, 19 nt, Artificial Sequence
  Description of Artificial Sequence: Synthetic oligonucleotide
uacugcuuacaggcuccuu

SEQ ID NO: 2361576 - RNA, 19 nt, Artificial Sequence
  Description of Artificial Sequence: Synthetic oligonucleotide
augagcgcguucagagcaa

SEQ ID NO: 2361577 - RNA, 19 nt, Artificial Sequence
  Description of Artificial Sequence: Synthetic oligonucleotide
gcguggcgcguccaugagc

SEQ ID NO: 2361578 - RNA, 19 nt, Artificial Sequence
  Description of Artificial Sequence: Synthetic oligonucleotide
ccaccugcggccauccuaa

SEQ ID NO: 2361579 - RNA, 19 nt, Artificial Sequence
  Description of Artificial Sequence: Synthetic oligonucleotide
gccuucgauggagaggcuc

SEQ ID NO: 2361580 - RNA, 19 nt, Artificial Sequence
  Description of Artificial Sequence: Synthetic oligonucleotide
cacugacauucagcaccag

SEQ ID NO: 2361581 - RNA, 19 nt, Artificial Sequence
  Description of Artificial Sequence: Synthetic oligonucleotide
uuccccgggagggguucca

SEQ ID NO: 2361582 - RNA, 19 nt, Artificial Sequence
  Description of Artificial Sequence: Synthetic oligonucleotide
auuugcccacagcgauguu

SEQ ID NO: 2361583 - RNA, 19 nt, Artificial Sequence
  Description of Artificial Sequence: Synthetic oligonucleotide
uggcgcguggcgcguccau

SEQ ID NO: 2361584 - RNA, 19 nt, Artificial Sequence
  Description of Artificial Sequence: Synthetic oligonucleotide
guggcgcguccaugagcgc

SEQ ID NO: 2361585 - RNA, 19 nt, Artificial Sequence
  Description of Artificial Sequence: Synthetic oligonucleotide
caagauaggccagcucaau

SEQ ID NO: 2361586 - RNA, 19 nt, Artificial Sequence
  Description of Artificial Sequence: Synthetic oligonucleotide
caccugcggccauccuaac

SEQ ID NO: 2361587 - RNA, 19 nt, Artificial Sequence
  Description of Artificial Sequence: Synthetic oligonucleotide
ggcuccuuaugaaaguguu

SEQ ID NO: 2361588 - RNA, 19 nt, Artificial Sequence
  Description of Artificial Sequence: Synthetic oligonucleotide
gcgcucggagucgacgcag

SEQ ID NO: 2361589 - RNA, 19 nt, Artificial Sequence
  Description of Artificial Sequence: Synthetic oligonucleotide
gcgcguggcgcguccauga

SEQ ID NO: 2361590 - RNA, 19 nt, Artificial Sequence
  Description of Artificial Sequence: Synthetic oligonucleotide
ccauguugcuacagguucu

SEQ ID NO: 2361591 - RNA, 19 nt, Artificial Sequence
  Description of Artificial Sequence: Synthetic oligonucleotide
aguuuccccgggagggguu

SEQ ID NO: 2361592 - RNA, 19 nt, Artificial Sequence
  Description of Artificial Sequence: Synthetic oligonucleotide
ggagggguuccagcugcac

SEQ ID NO: 2361593 - RNA, 19 nt, Artificial Sequence
  Description of Artificial Sequence: Synthetic oligonucleotide
gcucgggaucucugguaca

SEQ ID NO: 2361594 - RNA, 19 nt, Artificial Sequence
  Description of Artificial Sequence: Synthetic oligonucleotide
cucuuccuguuuggcggca

SEQ ID NO: 2361595 - RNA, 19 nt, Artificial Sequence
  Description of Artificial Sequence: Synthetic oligonucleotide
ggcgcucggagucgacgca

SEQ ID NO: 2361596 - RNA, 19 nt, Artificial Sequence
  Description of Artificial Sequence: Synthetic oligonucleotide
cuucgaaguggagcuuggu

SEQ ID NO: 2361597 - RNA, 19 nt, Artificial Sequence
  Description of Artificial Sequence: Synthetic oligonucleotide
ggcggcauuuucagagaaa

SEQ ID NO: 2361598 - RNA, 19 nt, Artificial Sequence
  Description of Artificial Sequence: Synthetic oligonucleotide
cgucuggaauguguaggac

SEQ ID NO: 2361599 - RNA, 19 nt, Artificial Sequence
  Description of Artificial Sequence: Synthetic oligonucleotide
cacuuucagacggcucaua

SEQ ID NO: 2361600 - RNA, 19 nt, Artificial Sequence
  Description of Artificial Sequence: Synthetic oligonucleotide
cccacagcgauguugccuu

SEQ ID NO: 2361601 - RNA, 19 nt, Artificial Sequence
  Description of Artificial Sequence: Synthetic oligonucleotide
ggcgcguggcgcguccaug

SEQ ID NO: 2361602 - RNA, 19 nt, Artificial Sequence
  Description of Artificial Sequence: Synthetic oligonucleotide
gcucggagucgacgcagaa

SEQ ID NO: 2361603 - RNA, 19 nt, Artificial Sequence
  Description of Artificial Sequence: Synthetic oligonucleotide
cccaccugcggccauccua

SEQ ID NO: 2361604 - RNA, 19 nt, Artificial Sequence
  Description of Artificial Sequence: Synthetic oligonucleotide
uccuggcgcguggcgcguc

SEQ ID NO: 2361605 - RNA, 19 nt, Artificial Sequence
  Description of Artificial Sequence: Synthetic oligonucleotide
cccgggagggguuccagcu

SEQ ID NO: 2361606 - RNA, 19 nt, Artificial Sequence
  Description of Artificial Sequence: Synthetic oligonucleotide
cagcgauguugccuucgau

SEQ ID NO: 2361607 - RNA, 19 nt, Artificial Sequence
  Description of Artificial Sequence: Synthetic oligonucleotide
ccacagcgauguugccuuc

SEQ ID NO: 2361608 - RNA, 19 nt, Artificial Sequence
  Description of Artificial Sequence: Synthetic oligonucleotide
gagcuucgaaguggagcuu

SEQ ID NO: 2361609 - RNA, 19 nt, Artificial Sequence
  Description of Artificial Sequence: Synthetic oligonucleotide
cccgucgugcaugcuccug

SEQ ID NO: 2361610 - RNA, 19 nt, Artificial Sequence
  Description of Artificial Sequence: Synthetic oligonucleotide
cgcguggcgcguccaugag

SEQ ID NO: 2361611 - RNA, 19 nt, Artificial Sequence
  Description of Artificial Sequence: Synthetic oligonucleotide
ggcgcguccaugagcgcgu

SEQ ID NO: 2361612 - RNA, 19 nt, Artificial Sequence
  Description of Artificial Sequence: Synthetic oligonucleotide
cuggcgcguggcgcgucca

SEQ ID NO: 2361613 - RNA, 19 nt, Artificial Sequence
  Description of Artificial Sequence: Synthetic oligonucleotide
gaccaucgagcuggcucuu

SEQ ID NO: 2361614 - RNA, 19 nt, Artificial Sequence
  Description of Artificial Sequence: Synthetic oligonucleotide
cgcucggagucgacgcaga

SEQ ID NO: 2361615 - RNA, 19 nt, Artificial Sequence
  Description of Artificial Sequence: Synthetic oligonucleotide
ggcacauguugcagagcuu

SEQ ID NO: 2361616 - RNA, 19 nt, Artificial Sequence
  Description of Artificial Sequence: Synthetic oligonucleotide
cggccauccuaacccagcu

SEQ ID NO: 2361617 - RNA, 19 nt, Artificial Sequence
  Description of Artificial Sequence: Synthetic oligonucleotide
cgcguccaugagcgcguuc

SEQ ID NO: 2361618 - RNA, 19 nt, Artificial Sequence
  Description of Artificial Sequence: Synthetic oligonucleotide
cuccuggcgcguggcgcgu

SEQ ID NO: 2361619 - RNA, 19 nt, Artificial Sequence
  Description of Artificial Sequence: Synthetic oligonucleotide
ccccgucgugcaugcuccu

SEQ ID NO: 2361620 - RNA, 19 nt, Artificial Sequence
  Description of Artificial Sequence: Synthetic oligonucleotide
gcgcguccaugagcgcguu

SEQ ID NO: 2361621 - RNA, 19 nt, Artificial Sequence
  Description of Artificial Sequence: Synthetic oligonucleotide
  modified_base (8)..(8): a, c, u, g, unknown or other
uuuuaaanaaacaagagga

SEQ ID NO: 2361622 - RNA, 19 nt, Artificial Sequence
  Description of Artificial Sequence: Synthetic oligonucleotide
aaauaaauuacauagucug

SEQ ID NO: 2361623 - RNA, 19 nt, Artificial Sequence
  Description of Artificial Sequence: Synthetic oligonucleotide
aaaucagucaauuuaacag

SEQ ID NO: 2361624 - RNA, 19 nt, Artificial Sequence
  Description of Artificial Sequence: Synthetic oligonucleotide
uuucuauucacuuuaaagg

SEQ ID NO: 2361625 - RNA, 19 nt, Artificial Sequence
  Description of Artificial Sequence: Synthetic oligonucleotide
aauauugucacucuuuaug

SEQ ID NO: 2361626 - RNA, 19 nt, Artificial Sequence
  Description of Artificial Sequence: Synthetic oligonucleotide
aaauuacauagucugaggg

SEQ ID NO: 2361627 - RNA, 19 nt, Artificial Sequence
  Description of Artificial Sequence: Synthetic oligonucleotide
uaaaugcacaaaaugaggg

SEQ ID NO: 2361628 - RNA, 19 nt, Artificial Sequence
  Description of Artificial Sequence: Synthetic oligonucleotide
acuuuaaagguaaagaacc

SEQ ID NO: 2361629 - RNA, 19 nt, Artificial Sequence
  Description of Artificial Sequence: Synthetic oligonucleotide
uuugcagcgauaaucagag

SEQ ID NO: 2361630 - RNA, 19 nt, Artificial Sequence
  Description of Artificial Sequence: Synthetic oligonucleotide
  modified_base (7)..(7): a, c, u, g, unknown or other
uuuaaanaaacaagaggac

SEQ ID NO: 2361631 - RNA, 19 nt, Artificial Sequence
  Description of Artificial Sequence: Synthetic oligonucleotide
  modified_base (4)..(4): a, c, u, g, unknown or other
aaanaaacaagaggacuac

SEQ ID NO: 2361632 - RNA, 19 nt, Artificial Sequence
  Description of Artificial Sequence: Synthetic oligonucleotide
agcuuuucgaguuaccacc

SEQ ID NO: 2361633 - RNA, 19 nt, Artificial Sequence
  Description of Artificial Sequence: Synthetic oligonucleotide
uuuauuucagucuuacuca

SEQ ID NO: 2361634 - RNA, 19 nt, Artificial Sequence
  Description of Artificial Sequence: Synthetic oligonucleotide
uuuacuuugcucaggagug

SEQ ID NO: 2361635 - RNA, 19 nt, Artificial Sequence
  Description of Artificial Sequence: Synthetic oligonucleotide
ucagucuuacucaucaggg

SEQ ID NO: 2361636 - RNA, 19 nt, Artificial Sequence
  Description of Artificial Sequence: Synthetic oligonucleotide
  modified_base (5)..(5): a, c, u, g, unknown or other
uaaanaaacaagaggacua

SEQ ID NO: 2361637 - RNA, 19 nt, Artificial Sequence
  Description of Artificial Sequence: Synthetic oligonucleotide
agauaucaacuuuuggacc

SEQ ID NO: 2361638 - RNA, 19 nt, Artificial Sequence
  Description of Artificial Sequence: Synthetic oligonucleotide
uuaaagguaaagaacccca

SEQ ID NO: 2361639 - RNA, 19 nt, Artificial Sequence
  Description of Artificial Sequence: Synthetic oligonucleotide
  modified_base (17)..(17): a, c, u, g, unknown or other
aacacaacacuaugaanag

SEQ ID NO: 2361640 - RNA, 19 nt, Artificial Sequence
  Description of Artificial Sequence: Synthetic oligonucleotide
uauaagaaguuucuauuca

SEQ ID NO: 2361641 - RNA, 19 nt, Artificial Sequence
  Description of Artificial Sequence: Synthetic oligonucleotide
  modified_base (18)..(18): a, c, u, g, unknown or other
aaacacaacacuaugaana

SEQ ID NO: 2361642 - RNA, 19 nt, Artificial Sequence
  Description of Artificial Sequence: Synthetic oligonucleotide
auaagaaguuucuauucac

SEQ ID NO: 2361643 - RNA, 19 nt, Artificial Sequence
  Description of Artificial Sequence: Synthetic oligonucleotide
  modified_base (6)..(6): a, c, u, g, unknown or other
uuaaanaaacaagaggacu

SEQ ID NO: 2361644 - RNA, 19 nt, Artificial Sequence
  Description of Artificial Sequence: Synthetic oligonucleotide
uuuaacagaaccauccauc

SEQ ID NO: 2361645 - RNA, 19 nt, Artificial Sequence
  Description of Artificial Sequence: Synthetic oligonucleotide
uuacucaucagggauacgg

SEQ ID NO: 2361646 - RNA, 19 nt, Artificial Sequence
  Description of Artificial Sequence: Synthetic oligonucleotide
gugauuugagcacagaacc

SEQ ID NO: 2361647 - RNA, 19 nt, Artificial Sequence
  Description of Artificial Sequence: Synthetic oligonucleotide
uuaauugcuucuuuugcag

SEQ ID NO: 2361648 - RNA, 19 nt, Artificial Sequence
  Description of Artificial Sequence: Synthetic oligonucleotide
aauuacauagucugaggga

SEQ ID NO: 2361649 - RNA, 19 nt, Artificial Sequence
  Description of Artificial Sequence: Synthetic oligonucleotide
aagaggacuacuucuaacu

SEQ ID NO: 2361650 - RNA, 19 nt, Artificial Sequence
  Description of Artificial Sequence: Synthetic oligonucleotide
gagagagcgauuuaagaag

SEQ ID NO: 2361651 - RNA, 19 nt, Artificial Sequence
  Description of Artificial Sequence: Synthetic oligonucleotide
aaacaagaggacuacuucu

SEQ ID NO: 2361652 - RNA, 19 nt, Artificial Sequence
  Description of Artificial Sequence: Synthetic oligonucleotide
caacuuuuggaccauaagc

SEQ ID NO: 2361653 - RNA, 19 nt, Artificial Sequence
  Description of Artificial Sequence: Synthetic oligonucleotide
uuaacagaaccauccaucc

SEQ ID NO: 2361654 - RNA, 19 nt, Artificial Sequence
  Description of Artificial Sequence: Synthetic oligonucleotide
aaacaaacacaacacuaug

SEQ ID NO: 2361655 - RNA, 19 nt, Artificial Sequence
  Description of Artificial Sequence: Synthetic oligonucleotide
ugcagcgauaaucagagga

SEQ ID NO: 2361656 - RNA, 19 nt, Artificial Sequence
  Description of Artificial Sequence: Synthetic oligonucleotide
aagcuuuucgaguuaccac

SEQ ID NO: 2361657 - RNA, 19 nt, Artificial Sequence
  Description of Artificial Sequence: Synthetic oligonucleotide
aaaugaggggauucacuac

SEQ ID NO: 2361658 - RNA, 19 nt, Artificial Sequence
  Description of Artificial Sequence: Synthetic oligonucleotide
aaggcuuauaagaaguuuc

SEQ ID NO: 2361659 - RNA, 19 nt, Artificial Sequence
  Description of Artificial Sequence: Synthetic oligonucleotide
aaugaggggauucacuacu

SEQ ID NO: 2361660 - RNA, 19 nt, Artificial Sequence
  Description of Artificial Sequence: Synthetic oligonucleotide
  modified_base (14)..(14): a, c, u, g, unknown or other
acaucagucaaagngccac

SEQ ID NO: 2361661 - RNA, 19 nt, Artificial Sequence
  Description of Artificial Sequence: Synthetic oligonucleotide
uuauaagaaguuucuauuc

SEQ ID NO: 2361662 - RNA, 19 nt, Artificial Sequence
  Description of Artificial Sequence: Synthetic oligonucleotide
gauaucaacuuuuggacca

SEQ ID NO: 2361663 - RNA, 19 nt, Artificial Sequence
  Description of Artificial Sequence: Synthetic oligonucleotide
  modified_base (12)..(12): a, c, u, g, unknown or other
aacacuaugaanagggagu

SEQ ID NO: 2361664 - RNA, 19 nt, Artificial Sequence
  Description of Artificial Sequence: Synthetic oligonucleotide
ucacuuuaaagguaaagaa

SEQ ID NO: 2361665 - RNA, 19 nt, Artificial Sequence
  Description of Artificial Sequence: Synthetic oligonucleotide
aauuuaacagaaccaucca

SEQ ID NO: 2361666 - RNA, 19 nt, Artificial Sequence
  Description of Artificial Sequence: Synthetic oligonucleotide
aaggcucgcaguucuaacg

SEQ ID NO: 2361667 - RNA, 19 nt, Artificial Sequence
  Description of Artificial Sequence: Synthetic oligonucleotide
cagauaucaacuuuuggac

SEQ ID NO: 2361668 - RNA, 19 nt, Artificial Sequence
  Description of Artificial Sequence: Synthetic oligonucleotide
uuuaaagguaaagaacccc

SEQ ID NO: 2361669 - RNA, 19 nt, Artificial Sequence
  Description of Artificial Sequence: Synthetic oligonucleotide
gauuuaagaagucacggaa

SEQ ID NO: 2361670 - RNA, 19 nt, Artificial Sequence
  Description of Artificial Sequence: Synthetic oligonucleotide
uacaaauaaauuacauagu

SEQ ID NO: 2361671 - RNA, 19 nt, Artificial Sequence
  Description of Artificial Sequence: Synthetic oligonucleotide
cuauggaucacuugguuug

SEQ ID NO: 2361672 - RNA, 19 nt, Artificial Sequence
  Description of Artificial Sequence: Synthetic oligonucleotide
guaaaugcacaaaaugagg

SEQ ID NO: 2361673 - RNA, 19 nt, Artificial Sequence
  Description of Artificial Sequence: Synthetic oligonucleotide
gagugcaagaaauccaaag

SEQ ID NO: 2361674 - RNA, 19 nt, Artificial Sequence
  Description of Artificial Sequence: Synthetic oligonucleotide
uuuaagaagucacggaaua

SEQ ID NO: 2361675 - RNA, 19 nt, Artificial Sequence
  Description of Artificial Sequence: Synthetic oligonucleotide
auauugucacucuuuaugu

SEQ ID NO: 2361676 - RNA, 19 nt, Artificial Sequence
  Description of Artificial Sequence: Synthetic oligonucleotide
acgggguucaccuuccacc

SEQ ID NO: 2361677 - RNA, 19 nt, Artificial Sequence
  Description of Artificial Sequence: Synthetic oligonucleotide
cacuuuaaagguaaagaac

SEQ ID NO: 2361678 - RNA, 19 nt, Artificial Sequence
  Description of Artificial Sequence: Synthetic oligonucleotide
agguaaagaaccccacccc

SEQ ID NO: 2361679 - RNA, 19 nt, Artificial Sequence
  Description of Artificial Sequence: Synthetic oligonucleotide
uggaccauaagcuuuucga

SEQ ID NO: 2361680 - RNA, 19 nt, Artificial Sequence
  Description of Artificial Sequence: Synthetic oligonucleotide
  modified_base (7)..(7): a, c, u, g, unknown or other
uaugaanagggagugugca

SEQ ID NO: 2361681 - RNA, 19 nt, Artificial Sequence
  Description of Artificial Sequence: Synthetic oligonucleotide
auggccaugauucccagag

SEQ ID NO: 2361682 - RNA, 19 nt, Artificial Sequence
  Description of Artificial Sequence: Synthetic oligonucleotide
aggcuuacaaauaaauuac

SEQ ID NO: 2361683 - RNA, 19 nt, Artificial Sequence
  Description of Artificial Sequence: Synthetic oligonucleotide
agugauuugagcacagaac

SEQ ID NO: 2361684 - RNA, 19 nt, Artificial Sequence
  Description of Artificial Sequence: Synthetic oligonucleotide
uaagguacgggguucaccu

SEQ ID NO: 2361685 - RNA, 19 nt, Artificial Sequence
  Description of Artificial Sequence: Synthetic oligonucleotide
uaagaaguuucuauucacu

SEQ ID NO: 2361686 - RNA, 19 nt, Artificial Sequence
  Description of Artificial Sequence: Synthetic oligonucleotide
  modified_base (17)..(17): a, c, u, g, unknown or other
accacaucagucaaagngc

SEQ ID NO: 2361687 - RNA, 19 nt, Artificial Sequence
  Description of Artificial Sequence: Synthetic oligonucleotide
  modified_base (9)..(9): a, c, u, g, unknown or other
agucaaagngccaccagcc

SEQ ID NO: 2361688 - RNA, 19 nt, Artificial Sequence
  Description of Artificial Sequence: Synthetic oligonucleotide
auucccagagaccagauau

SEQ ID NO: 2361689 - RNA, 19 nt, Artificial Sequence
  Description of Artificial Sequence: Synthetic oligonucleotide
agaaccauccaucccgagg

SEQ ID NO: 2361690 - RNA, 19 nt, Artificial Sequence
  Description of Artificial Sequence: Synthetic oligonucleotide
ucuuccauguuuccugaag

SEQ ID NO: 2361691 - RNA, 19 nt, Artificial Sequence
  Description of Artificial Sequence: Synthetic oligonucleotide
uaagaagucacggaauaca

SEQ ID NO: 2361692 - RNA, 19 nt, Artificial Sequence
  Description of Artificial Sequence: Synthetic oligonucleotide
  modified_base (7)..(7): a, c, u, g, unknown or other
ucaaagngccaccagccaa

SEQ ID NO: 2361693 - RNA, 19 nt, Artificial Sequence
  Description of Artificial Sequence: Synthetic oligonucleotide
  modified_base (9)..(9): a, c, u, g, unknown or other
acuaugaanagggagugug

SEQ ID NO: 2361694 - RNA, 19 nt, Artificial Sequence
  Description of Artificial Sequence: Synthetic oligonucleotide
uuuucgaguuaccaccuca

SEQ ID NO: 2361695 - RNA, 19 nt, Artificial Sequence
  Description of Artificial Sequence: Synthetic oligonucleotide
ugauuugagcacagaaccc

SEQ ID NO: 2361696 - RNA, 19 nt, Artificial Sequence
  Description of Artificial Sequence: Synthetic oligonucleotide
ucaauuuaacagaaccauc

SEQ ID NO: 2361697 - RNA, 19 nt, Artificial Sequence
  Description of Artificial Sequence: Synthetic oligonucleotide
uucaggcuuacaaauaaau

SEQ ID NO: 2361698 - RNA, 19 nt, Artificial Sequence
  Description of Artificial Sequence: Synthetic oligonucleotide
ugaagcagaguuuuauuuc

SEQ ID NO: 2361699 - RNA, 19 nt, Artificial Sequence
  Description of Artificial Sequence: Synthetic oligonucleotide
gaagcagaguuuuauuuca

SEQ ID NO: 2361700 - RNA, 19 nt, Artificial Sequence
  Description of Artificial Sequence: Synthetic oligonucleotide
gaucacuugguuugagugc

SEQ ID NO: 2361701 - RNA, 19 nt, Artificial Sequence
  Description of Artificial Sequence: Synthetic oligonucleotide
uuucgaguuaccaccucag

SEQ ID NO: 2361702 - RNA, 19 nt, Artificial Sequence
  Description of Artificial Sequence: Synthetic oligonucleotide
aagaagucacggaauacag

SEQ ID NO: 2361703 - RNA, 19 nt, Artificial Sequence
  Description of Artificial Sequence: Synthetic oligonucleotide
guuugagugcaagaaaucc

SEQ ID NO: 2361704 - RNA, 19 nt, Artificial Sequence
  Description of Artificial Sequence: Synthetic oligonucleotide
uggaagugaccacuuuacg

SEQ ID NO: 2361705 - RNA, 19 nt, Artificial Sequence
  Description of Artificial Sequence: Synthetic oligonucleotide
ugaguggauuuucauuaag

SEQ ID NO: 2361706 - RNA, 19 nt, Artificial Sequence
  Description of Artificial Sequence: Synthetic oligonucleotide
uucaacauugcugcccugg

SEQ ID NO: 2361707 - RNA, 19 nt, Artificial Sequence
  Description of Artificial Sequence: Synthetic oligonucleotide
ucaacauugcugcccuggg

SEQ ID NO: 2361708 - RNA, 19 nt, Artificial Sequence
  Description of Artificial Sequence: Synthetic oligonucleotide
  modified_base (2)..(2): a, c, u, g, unknown or other
anaaacaagaggacuacuu

SEQ ID NO: 2361709 - RNA, 19 nt, Artificial Sequence
  Description of Artificial Sequence: Synthetic oligonucleotide
uuucgcuucacgguggaag

SEQ ID NO: 2361710 - RNA, 19 nt, Artificial Sequence
  Description of Artificial Sequence: Synthetic oligonucleotide
aguucuaacggcuacuguu

SEQ ID NO: 2361711 - RNA, 19 nt, Artificial Sequence
  Description of Artificial Sequence: Synthetic oligonucleotide
ucaucagggauacggugag

SEQ ID NO: 2361712 - RNA, 19 nt, Artificial Sequence
  Description of Artificial Sequence: Synthetic oligonucleotide
gauacggugagggguaagg

SEQ ID NO: 2361713 - RNA, 19 nt, Artificial Sequence
  Description of Artificial Sequence: Synthetic oligonucleotide
uaaagguaaagaaccccac

SEQ ID NO: 2361714 - RNA, 19 nt, Artificial Sequence
  Description of Artificial Sequence: Synthetic oligonucleotide
uaagcuuuucgaguuacca

SEQ ID NO: 2361715 - RNA, 19 nt, Artificial Sequence
  Description of Artificial Sequence: Synthetic oligonucleotide
ucuauucacuuuaaaggua

SEQ ID NO: 2361716 - RNA, 19 nt, Artificial Sequence
  Description of Artificial Sequence: Synthetic oligonucleotide
acagaacccaaaaucaguc

SEQ ID NO: 2361717 - RNA, 19 nt, Artificial Sequence
  Description of Artificial Sequence: Synthetic oligonucleotide
ugagggguaaggcucgcag

SEQ ID NO: 2361718 - RNA, 19 nt, Artificial Sequence
  Description of Artificial Sequence: Synthetic oligonucleotide
cacggaauacagcugacag

SEQ ID NO: 2361719 - RNA, 19 nt, Artificial Sequence
  Description of Artificial Sequence: Synthetic oligonucleotide
ucguuuacuuugcucagga

SEQ ID NO: 2361720 - RNA, 19 nt, Artificial Sequence
  Description of Artificial Sequence: Synthetic oligonucleotide
aucagggauacggugaggg

SEQ ID NO: 2361721 - RNA, 19 nt, Artificial Sequence
  Description of Artificial Sequence: Synthetic oligonucleotide
agucacggaauacagcuga

SEQ ID NO: 2361722 - RNA, 19 nt, Artificial Sequence
  Description of Artificial Sequence: Synthetic oligonucleotide
caggcuuacaaauaaauua

SEQ ID NO: 2361723 - RNA, 19 nt, Artificial Sequence
  Description of Artificial Sequence: Synthetic oligonucleotide
  modified_base (8)..(8): a, c, u, g, unknown or other
cuaugaanagggagugugc

SEQ ID NO: 2361724 - RNA, 19 nt, Artificial Sequence
  Description of Artificial Sequence: Synthetic oligonucleotide
auuuaacagaaccauccau

SEQ ID NO: 2361725 - RNA, 19 nt, Artificial Sequence
  Description of Artificial Sequence: Synthetic oligonucleotide
  modified_base (3)..(3): a, c, u, g, unknown or other
aanaaacaagaggacuacu

SEQ ID NO: 2361726 - RNA, 19 nt, Artificial Sequence
  Description of Artificial Sequence: Synthetic oligonucleotide
cauguuuccugaagcagag

SEQ ID NO: 2361727 - RNA, 19 nt, Artificial Sequence
  Description of Artificial Sequence: Synthetic oligonucleotide
ugcaagaaauccaaagcuu

SEQ ID NO: 2361728 - RNA, 19 nt, Artificial Sequence
  Description of Artificial Sequence: Synthetic oligonucleotide
  modified_base (5)..(5): a, c, u, g, unknown or other
ugaanagggagugugcauc

SEQ ID NO: 2361729 - RNA, 19 nt, Artificial Sequence
  Description of Artificial Sequence: Synthetic oligonucleotide
uucgaguuaccaccucagg

SEQ ID NO: 2361730 - RNA, 19 nt, Artificial Sequence
  Description of Artificial Sequence: Synthetic oligonucleotide
uucauuaagguacgggguu

SEQ ID NO: 2361731 - RNA, 19 nt, Artificial Sequence
  Description of Artificial Sequence: Synthetic oligonucleotide
cucaggagugauuugagca

SEQ ID NO: 2361732 - RNA, 19 nt, Artificial Sequence
  Description of Artificial Sequence: Synthetic oligonucleotide
uggagagagcgauuuaaga

SEQ ID NO: 2361733 - RNA, 19 nt, Artificial Sequence
  Description of Artificial Sequence: Synthetic oligonucleotide
uggcucuuucgcuucacgg

SEQ ID NO: 2361734 - RNA, 19 nt, Artificial Sequence
  Description of Artificial Sequence: Synthetic oligonucleotide
aagaaauccaaagcuugga

SEQ ID NO: 2361735 - RNA, 19 nt, Artificial Sequence
  Description of Artificial Sequence: Synthetic oligonucleotide
gaguuaccaccucaggugc

SEQ ID NO: 2361736 - RNA, 19 nt, Artificial Sequence
  Description of Artificial Sequence: Synthetic oligonucleotide
agugcuucguuuacuuugc

SEQ ID NO: 2361737 - RNA, 19 nt, Artificial Sequence
  Description of Artificial Sequence: Synthetic oligonucleotide
  modified_base (6)..(6): a, c, u, g, unknown or other
caaagngccaccagccaag

SEQ ID NO: 2361738 - RNA, 19 nt, Artificial Sequence
  Description of Artificial Sequence: Synthetic oligonucleotide
gauuugagcacagaaccca

SEQ ID NO: 2361739 - RNA, 19 nt, Artificial Sequence
  Description of Artificial Sequence: Synthetic oligonucleotide
gaggggauucacuacuggc

SEQ ID NO: 2361740 - RNA, 19 nt, Artificial Sequence
  Description of Artificial Sequence: Synthetic oligonucleotide
uugagcacagaacccaaaa

SEQ ID NO: 2361741 - RNA, 19 nt, Artificial Sequence
  Description of Artificial Sequence: Synthetic oligonucleotide
caucccgaggagaauauug

SEQ ID NO: 2361742 - RNA, 19 nt, Artificial Sequence
  Description of Artificial Sequence: Synthetic oligonucleotide
gaggagaauauugucacuc

SEQ ID NO: 2361743 - RNA, 19 nt, Artificial Sequence
  Description of Artificial Sequence: Synthetic oligonucleotide
accauagugcuucguuuac

SEQ ID NO: 2361744 - RNA, 19 nt, Artificial Sequence
  Description of Artificial Sequence: Synthetic oligonucleotide
gacuacuucuaacuuaaaa

SEQ ID NO: 2361745 - RNA, 19 nt, Artificial Sequence
  Description of Artificial Sequence: Synthetic oligonucleotide
ucuauggaucacuugguuu

SEQ ID NO: 2361746 - RNA, 19 nt, Artificial Sequence
  Description of Artificial Sequence: Synthetic oligonucleotide
aggcucgcaguucuaacgg

SEQ ID NO: 2361747 - RNA, 19 nt, Artificial Sequence
  Description of Artificial Sequence: Synthetic oligonucleotide
ucuacagacagcugcuauc

SEQ ID NO: 2361748 - RNA, 19 nt, Artificial Sequence
  Description of Artificial Sequence: Synthetic oligonucleotide
agcgauuuaagaagucacg

SEQ ID NO: 2361749 - RNA, 19 nt, Artificial Sequence
  Description of Artificial Sequence: Synthetic oligonucleotide
ucacuacuggcucuuucgc

SEQ ID NO: 2361750 - RNA, 19 nt, Artificial Sequence
  Description of Artificial Sequence: Synthetic oligonucleotide
ggaucacuugguuugagug

SEQ ID NO: 2361751 - RNA, 19 nt, Artificial Sequence
  Description of Artificial Sequence: Synthetic oligonucleotide
aggcacucucuacagacag

SEQ ID NO: 2361752 - RNA, 19 nt, Artificial Sequence
  Description of Artificial Sequence: Synthetic oligonucleotide
accauaagcuuuucgaguu

SEQ ID NO: 2361753 - RNA, 19 nt, Artificial Sequence
  Description of Artificial Sequence: Synthetic oligonucleotide
ucucuauggaucacuuggu

SEQ ID NO: 2361754 - RNA, 19 nt, Artificial Sequence
  Description of Artificial Sequence: Synthetic oligonucleotide
  modified_base (2)..(2): a, c, u, g, unknown or other
anagggagugugcaucuuu

SEQ ID NO: 2361755 - RNA, 19 nt, Artificial Sequence
  Description of Artificial Sequence: Synthetic oligonucleotide
uucaaaguaaaugcacaaa

SEQ ID NO: 2361756 - RNA, 19 nt, Artificial Sequence
  Description of Artificial Sequence: Synthetic oligonucleotide
auacaggucucugugacca

SEQ ID NO: 2361757 - RNA, 19 nt, Artificial Sequence
  Description of Artificial Sequence: Synthetic oligonucleotide
ucuuacucaucagggauac

SEQ ID NO: 2361758 - RNA, 19 nt, Artificial Sequence
  Description of Artificial Sequence: Synthetic oligonucleotide
uuaagaagucacggaauac

SEQ ID NO: 2361759 - RNA, 19 nt, Artificial Sequence
  Description of Artificial Sequence: Synthetic oligonucleotide
agguacgggguucaccuuc

SEQ ID NO: 2361760 - RNA, 19 nt, Artificial Sequence
  Description of Artificial Sequence: Synthetic oligonucleotide
ucagggauacggugagggg

SEQ ID NO: 2361761 - RNA, 19 nt, Artificial Sequence
  Description of Artificial Sequence: Synthetic oligonucleotide
aauacagcugacagucucu

SEQ ID NO: 2361762 - RNA, 19 nt, Artificial Sequence
  Description of Artificial Sequence: Synthetic oligonucleotide
gugaccacaucagucaaag

SEQ ID NO: 2361763 - RNA, 19 nt, Artificial Sequence
  Description of Artificial Sequence: Synthetic oligonucleotide
agcugacagucucugagug

SEQ ID NO: 2361764 - RNA, 19 nt, Artificial Sequence
  Description of Artificial Sequence: Synthetic oligonucleotide
ccagauaucaacuuuugga

SEQ ID NO: 2361765 - RNA, 19 nt, Artificial Sequence
  Description of Artificial Sequence: Synthetic oligonucleotide
  modified_base (11)..(11): a, c, u, g, unknown or other
acacuaugaanagggagug

SEQ ID NO: 2361766 - RNA, 19 nt, Artificial Sequence
  Description of Artificial Sequence: Synthetic oligonucleotide
cucugugaccacaucaguc

SEQ ID NO: 2361767 - RNA, 19 nt, Artificial Sequence
  Description of Artificial Sequence: Synthetic oligonucleotide
uucguuuacuuugcucagg

SEQ ID NO: 2361768 - RNA, 19 nt, Artificial Sequence
  Description of Artificial Sequence: Synthetic oligonucleotide
agagcgauuuaagaaguca

SEQ ID NO: 2361769 - RNA, 19 nt, Artificial Sequence
  Description of Artificial Sequence: Synthetic oligonucleotide
ggaccauaagcuuuucgag

SEQ ID NO: 2361770 - RNA, 19 nt, Artificial Sequence
  Description of Artificial Sequence: Synthetic oligonucleotide
cucuuuaugucucuaugga

SEQ ID NO: 2361771 - RNA, 19 nt, Artificial Sequence
  Description of Artificial Sequence: Synthetic oligonucleotide
acggcuacuguucuuaauu

SEQ ID NO: 2361772 - RNA, 19 nt, Artificial Sequence
  Description of Artificial Sequence: Synthetic oligonucleotide
uacggugagggguaaggcu

SEQ ID NO: 2361773 - RNA, 19 nt, Artificial Sequence
  Description of Artificial Sequence: Synthetic oligonucleotide
ugcaucuuuugagaaaauc

SEQ ID NO: 2361774 - RNA, 19 nt, Artificial Sequence
  Description of Artificial Sequence: Synthetic oligonucleotide
cuuuacggccacuucaaca

SEQ ID NO: 2361775 - RNA, 19 nt, Artificial Sequence
  Description of Artificial Sequence: Synthetic oligonucleotide
gagcgauuuaagaagucac

SEQ ID NO: 2361776 - RNA, 19 nt, Artificial Sequence
  Description of Artificial Sequence: Synthetic oligonucleotide
uuaagguacgggguucacc

SEQ ID NO: 2361777 - RNA, 19 nt, Artificial Sequence
  Description of Artificial Sequence: Synthetic oligonucleotide
cuucguuuacuuugcucag

SEQ ID NO: 2361778 - RNA, 19 nt, Artificial Sequence
  Description of Artificial Sequence: Synthetic oligonucleotide
gcgauuuaagaagucacgg

SEQ ID NO: 2361779 - RNA, 19 nt, Artificial Sequence
  Description of Artificial Sequence: Synthetic oligonucleotide
acuuuacggccacuucaac

SEQ ID NO: 2361780 - RNA, 19 nt, Artificial Sequence
  Description of Artificial Sequence: Synthetic oligonucleotide
aggagaauauugucacucu

SEQ ID NO: 2361781 - RNA, 19 nt, Artificial Sequence
  Description of Artificial Sequence: Synthetic oligonucleotide
cuggagagagcgauuuaag

SEQ ID NO: 2361782 - RNA, 19 nt, Artificial Sequence
  Description of Artificial Sequence: Synthetic oligonucleotide
uuacauagucugagggagu

SEQ ID NO: 2361783 - RNA, 19 nt, Artificial Sequence
  Description of Artificial Sequence: Synthetic oligonucleotide
auaagcuuuucgaguuacc

SEQ ID NO: 2361784 - RNA, 19 nt, Artificial Sequence
  Description of Artificial Sequence: Synthetic oligonucleotide
uaaucagaggagugaggcu

SEQ ID NO: 2361785 - RNA, 19 nt, Artificial Sequence
  Description of Artificial Sequence: Synthetic oligonucleotide
acuacuggcucuuucgcuu

SEQ ID NO: 2361786 - RNA, 19 nt, Artificial Sequence
  Description of Artificial Sequence: Synthetic oligonucleotide
uucuaacggcuacuguucu

SEQ ID NO: 2361787 - RNA, 19 nt, Artificial Sequence
  Description of Artificial Sequence: Synthetic oligonucleotide
cuuauaagaaguuucuauu

SEQ ID NO: 2361788 - RNA, 19 nt, Artificial Sequence
  Description of Artificial Sequence: Synthetic oligonucleotide
accacuuuacggccacuuc

SEQ ID NO: 2361789 - RNA, 19 nt, Artificial Sequence
  Description of Artificial Sequence: Synthetic oligonucleotide
  modified_base (13)..(13): a, c, u, g, unknown or other
caucagucaaagngccacc

SEQ ID NO: 2361790 - RNA, 19 nt, Artificial Sequence
  Description of Artificial Sequence: Synthetic oligonucleotide
  modified_base (16)..(16): a, c, u, g, unknown or other
ccacaucagucaaagngcc

SEQ ID NO: 2361791 - RNA, 19 nt, Artificial Sequence
  Description of Artificial Sequence: Synthetic oligonucleotide
acuugguuugagugcaaga

SEQ ID NO: 2361792 - RNA, 19 nt, Artificial Sequence
  Description of Artificial Sequence: Synthetic oligonucleotide
uuugcucaggagugauuug

SEQ ID NO: 2361793 - RNA, 19 nt, Artificial Sequence
  Description of Artificial Sequence: Synthetic oligonucleotide
cucaucagggauacgguga

SEQ ID NO: 2361794 - RNA, 19 nt, Artificial Sequence
  Description of Artificial Sequence: Synthetic oligonucleotide
aacaagaggacuacuucua

SEQ ID NO: 2361795 - RNA, 19 nt, Artificial Sequence
  Description of Artificial Sequence: Synthetic oligonucleotide
uaaagaaccccaccccauu

SEQ ID NO: 2361796 - RNA, 19 nt, Artificial Sequence
  Description of Artificial Sequence: Synthetic oligonucleotide
acggugagggguaaggcuc

SEQ ID NO: 2361797 - RNA, 19 nt, Artificial Sequence
  Description of Artificial Sequence: Synthetic oligonucleotide
auuuaagaagucacggaau

SEQ ID NO: 2361798 - RNA, 19 nt, Artificial Sequence
  Description of Artificial Sequence: Synthetic oligonucleotide
ugcgguucaggcuuacaaa

SEQ ID NO: 2361799 - RNA, 19 nt, Artificial Sequence
  Description of Artificial Sequence: Synthetic oligonucleotide
aagcagaguuuuauuucag

SEQ ID NO: 2361800 - RNA, 19 nt, Artificial Sequence
  Description of Artificial Sequence: Synthetic oligonucleotide
cucuuucgcuucacggugg

SEQ ID NO: 2361801 - RNA, 19 nt, Artificial Sequence
  Description of Artificial Sequence: Synthetic oligonucleotide
uggaucacuugguuugagu

SEQ ID NO: 2361802 - RNA, 19 nt, Artificial Sequence
  Description of Artificial Sequence: Synthetic oligonucleotide
uuugagcacagaacccaaa

SEQ ID NO: 2361803 - RNA, 19 nt, Artificial Sequence
  Description of Artificial Sequence: Synthetic oligonucleotide
gcagaguuuuauuucaguc

SEQ ID NO: 2361804 - RNA, 19 nt, Artificial Sequence
  Description of Artificial Sequence: Synthetic oligonucleotide
acggaauacagcugacagu

SEQ ID NO: 2361805 - RNA, 19 nt, Artificial Sequence
  Description of Artificial Sequence: Synthetic oligonucleotide
ggauuuucauuaagguacg

SEQ ID NO: 2361806 - RNA, 19 nt, Artificial Sequence
  Description of Artificial Sequence: Synthetic oligonucleotide
  modified_base (4)..(4): a, c, u, g, unknown or other
gaanagggagugugcaucu

SEQ ID NO: 2361807 - RNA, 19 nt, Artificial Sequence
  Description of Artificial Sequence: Synthetic oligonucleotide
agagagcgauuuaagaagu

SEQ ID NO: 2361808 - RNA, 19 nt, Artificial Sequence
  Description of Artificial Sequence: Synthetic oligonucleotide
  modified_base (6)..(6): a, c, u, g, unknown or other
augaanagggagugugcau

SEQ ID NO: 2361809 - RNA, 19 nt, Artificial Sequence
  Description of Artificial Sequence: Synthetic oligonucleotide
ugagugcaagaaauccaaa

SEQ ID NO: 2361810 - RNA, 19 nt, Artificial Sequence
  Description of Artificial Sequence: Synthetic oligonucleotide
gaccauaagcuuuucgagu

SEQ ID NO: 2361811 - RNA, 19 nt, Artificial Sequence
  Description of Artificial Sequence: Synthetic oligonucleotide
uaaggcucgcaguucuaac

SEQ ID NO: 2361812 - RNA, 19 nt, Artificial Sequence
  Description of Artificial Sequence: Synthetic oligonucleotide
agaggacuacuucuaacuu

SEQ ID NO: 2361813 - RNA, 19 nt, Artificial Sequence
  Description of Artificial Sequence: Synthetic oligonucleotide
guggaagugaccacuuuac

SEQ ID NO: 2361814 - RNA, 19 nt, Artificial Sequence
  Description of Artificial Sequence: Synthetic oligonucleotide
cagaguuuuauuucagucu

SEQ ID NO: 2361815 - RNA, 19 nt, Artificial Sequence
  Description of Artificial Sequence: Synthetic oligonucleotide
gguaaagaaccccacccca

SEQ ID NO: 2361816 - RNA, 19 nt, Artificial Sequence
  Description of Artificial Sequence: Synthetic oligonucleotide
ucuuucgcuucacggugga

SEQ ID NO: 2361817 - RNA, 19 nt, Artificial Sequence
  Description of Artificial Sequence: Synthetic oligonucleotide
uacauagucugagggagua

SEQ ID NO: 2361818 - RNA, 19 nt, Artificial Sequence
  Description of Artificial Sequence: Synthetic oligonucleotide
uccugaagcagaguuuuau

SEQ ID NO: 2361819 - RNA, 19 nt, Artificial Sequence
  Description of Artificial Sequence: Synthetic oligonucleotide
guucuaacggcuacuguuc

SEQ ID NO: 2361820 - RNA, 19 nt, Artificial Sequence
  Description of Artificial Sequence: Synthetic oligonucleotide
ucucugaguggauuuucau

SEQ ID NO: 2361821 - RNA, 19 nt, Artificial Sequence
  Description of Artificial Sequence: Synthetic oligonucleotide
uucccagagaccagauauc

SEQ ID NO: 2361822 - RNA, 19 nt, Artificial Sequence
  Description of Artificial Sequence: Synthetic oligonucleotide
agcgauaaucagaggagug

SEQ ID NO: 2361823 - RNA, 19 nt, Artificial Sequence
  Description of Artificial Sequence: Synthetic oligonucleotide
auuaagguacgggguucac

SEQ ID NO: 2361824 - RNA, 19 nt, Artificial Sequence
  Description of Artificial Sequence: Synthetic oligonucleotide
aacggcuacuguucuuaau

SEQ ID NO: 2361825 - RNA, 19 nt, Artificial Sequence
  Description of Artificial Sequence: Synthetic oligonucleotide
aggggauucacuacuggcu

SEQ ID NO: 2361826 - RNA, 19 nt, Artificial Sequence
  Description of Artificial Sequence: Synthetic oligonucleotide
aggcuuauaagaaguuucu

SEQ ID NO: 2361827 - RNA, 19 nt, Artificial Sequence
  Description of Artificial Sequence: Synthetic oligonucleotide
aguuaccaccucaggugcc

SEQ ID NO: 2361828 - RNA, 19 nt, Artificial Sequence
  Description of Artificial Sequence: Synthetic oligonucleotide
gguucaggcuuacaaauaa

SEQ ID NO: 2361829 - RNA, 19 nt, Artificial Sequence
  Description of Artificial Sequence: Synthetic oligonucleotide
ucacggaauacagcugaca

SEQ ID NO: 2361830 - RNA, 19 nt, Artificial Sequence
  Description of Artificial Sequence: Synthetic oligonucleotide
  modified_base (12)..(12): a, c, u, g, unknown or other
aucagucaaagngccacca

SEQ ID NO: 2361831 - RNA, 19 nt, Artificial Sequence
  Description of Artificial Sequence: Synthetic oligonucleotide
augauucccagagaccaga

SEQ ID NO: 2361832 - RNA, 19 nt, Artificial Sequence
  Description of Artificial Sequence: Synthetic oligonucleotide
auugcugcccugggugggc

SEQ ID NO: 2361833 - RNA, 19 nt, Artificial Sequence
  Description of Artificial Sequence: Synthetic oligonucleotide
  modified_base (5)..(5): a, c, u, g, unknown or other
aaagngccaccagccaagu

SEQ ID NO: 2361834 - RNA, 19 nt, Artificial Sequence
  Description of Artificial Sequence: Synthetic oligonucleotide
uacagacagcugcuaucug

SEQ ID NO: 2361835 - RNA, 19 nt, Artificial Sequence
  Description of Artificial Sequence: Synthetic oligonucleotide
ccgaggagaauauugucac

SEQ ID NO: 2361836 - RNA, 19 nt, Artificial Sequence
  Description of Artificial Sequence: Synthetic oligonucleotide
gcagcgauaaucagaggag

SEQ ID NO: 2361837 - RNA, 19 nt, Artificial Sequence
  Description of Artificial Sequence: Synthetic oligonucleotide
ugacugucuuuucuuccau

SEQ ID NO: 2361838 - RNA, 19 nt, Artificial Sequence
  Description of Artificial Sequence: Synthetic oligonucleotide
agggagugugcaucuuuug

SEQ ID NO: 2361839 - RNA, 19 nt, Artificial Sequence
  Description of Artificial Sequence: Synthetic oligonucleotide
ucccgaggagaauauuguc

SEQ ID NO: 2361840 - RNA, 19 nt, Artificial Sequence
  Description of Artificial Sequence: Synthetic oligonucleotide
aucagaggagugaggcugg

SEQ ID NO: 2361841 - RNA, 19 nt, Artificial Sequence
  Description of Artificial Sequence: Synthetic oligonucleotide
ugauucccagagaccagau

SEQ ID NO: 2361842 - RNA, 19 nt, Artificial Sequence
  Description of Artificial Sequence: Synthetic oligonucleotide
cgaguuaccaccucaggug

SEQ ID NO: 2361843 - RNA, 19 nt, Artificial Sequence
  Description of Artificial Sequence: Synthetic oligonucleotide
gcucuuucgcuucacggug

SEQ ID NO: 2361844 - RNA, 19 nt, Artificial Sequence
  Description of Artificial Sequence: Synthetic oligonucleotide
uccaucccgaggagaauau

SEQ ID NO: 2361845 - RNA, 19 nt, Artificial Sequence
  Description of Artificial Sequence: Synthetic oligonucleotide
cagaacccaaaaucaguca

SEQ ID NO: 2361846 - RNA, 19 nt, Artificial Sequence
  Description of Artificial Sequence: Synthetic oligonucleotide
cacaaaaugaggggauuca

SEQ ID NO: 2361847 - RNA, 19 nt, Artificial Sequence
  Description of Artificial Sequence: Synthetic oligonucleotide
caccauuucaauggccaug

SEQ ID NO: 2361848 - RNA, 19 nt, Artificial Sequence
  Description of Artificial Sequence: Synthetic oligonucleotide
  modified_base (8)..(8): a, c, u, g, unknown or other
gucaaagngccaccagcca

SEQ ID NO: 2361849 - RNA, 19 nt, Artificial Sequence
  Description of Artificial Sequence: Synthetic oligonucleotide
aucccgaggagaauauugu

SEQ ID NO: 2361850 - RNA, 19 nt, Artificial Sequence
  Description of Artificial Sequence: Synthetic oligonucleotide
ucuaacggcuacuguucuu

SEQ ID NO: 2361851 - RNA, 19 nt, Artificial Sequence
  Description of Artificial Sequence: Synthetic oligonucleotide
cggaauacagcugacaguc

SEQ ID NO: 2361852 - RNA, 19 nt, Artificial Sequence
  Description of Artificial Sequence: Synthetic oligonucleotide
cacuuuacggccacuucaa

SEQ ID NO: 2361853 - RNA, 19 nt, Artificial Sequence
  Description of Artificial Sequence: Synthetic oligonucleotide
aucaacuuuuggaccauaa

SEQ ID NO: 2361854 - RNA, 19 nt, Artificial Sequence
  Description of Artificial Sequence: Synthetic oligonucleotide
gcacagaacccaaaaucag

SEQ ID NO: 2361855 - RNA, 19 nt, Artificial Sequence
  Description of Artificial Sequence: Synthetic oligonucleotide
acauagucugagggaguag

SEQ ID NO: 2361856 - RNA, 19 nt, Artificial Sequence
  Description of Artificial Sequence: Synthetic oligonucleotide
ugcacaaaaugaggggauu

SEQ ID NO: 2361857 - RNA, 19 nt, Artificial Sequence
  Description of Artificial Sequence: Synthetic oligonucleotide
aagcuuggaggcacucucu

SEQ ID NO: 2361858 - RNA, 19 nt, Artificial Sequence
  Description of Artificial Sequence: Synthetic oligonucleotide
cuuuucgaguuaccaccuc

SEQ ID NO: 2361859 - RNA, 19 nt, Artificial Sequence
  Description of Artificial Sequence: Synthetic oligonucleotide
auagucugagggaguagga

SEQ ID NO: 2361860 - RNA, 19 nt, Artificial Sequence
  Description of Artificial Sequence: Synthetic oligonucleotide
uaacggcuacuguucuuaa

SEQ ID NO: 2361861 - RNA, 19 nt, Artificial Sequence
  Description of Artificial Sequence: Synthetic oligonucleotide
gugaccacuuuacggccac

SEQ ID NO: 2361862 - RNA, 19 nt, Artificial Sequence
  Description of Artificial Sequence: Synthetic oligonucleotide
cuaacggcuacuguucuua

SEQ ID NO: 2361863 - RNA, 19 nt, Artificial Sequence
  Description of Artificial Sequence: Synthetic oligonucleotide
  modified_base (3)..(3): a, c, u, g, unknown or other
aanagggagugugcaucuu

SEQ ID NO: 2361864 - RNA, 19 nt, Artificial Sequence
  Description of Artificial Sequence: Synthetic oligonucleotide
gugugcaucuuuugagaaa

SEQ ID NO: 2361865 - RNA, 19 nt, Artificial Sequence
  Description of Artificial Sequence: Synthetic oligonucleotide
  modified_base (4)..(4): a, c, u, g, unknown or other
aagngccaccagccaagua

SEQ ID NO: 2361866 - RNA, 19 nt, Artificial Sequence
  Description of Artificial Sequence: Synthetic oligonucleotide
gguggaagugaccacuuua

SEQ ID NO: 2361867 - RNA, 19 nt, Artificial Sequence
  Description of Artificial Sequence: Synthetic oligonucleotide
aggagugauuugagcacag

SEQ ID NO: 2361868 - RNA, 19 nt, Artificial Sequence
  Description of Artificial Sequence: Synthetic oligonucleotide
ucacgguggaagugaccac

SEQ ID NO: 2361869 - RNA, 19 nt, Artificial Sequence
  Description of Artificial Sequence: Synthetic oligonucleotide
augaggggauucacuacug

SEQ ID NO: 2361870 - RNA, 19 nt, Artificial Sequence
  Description of Artificial Sequence: Synthetic oligonucleotide
gagagcgauuuaagaaguc

SEQ ID NO: 2361871 - RNA, 19 nt, Artificial Sequence
  Description of Artificial Sequence: Synthetic oligonucleotide
cugcgguucaggcuuacaa

SEQ ID NO: 2361872 - RNA, 19 nt, Artificial Sequence
  Description of Artificial Sequence: Synthetic oligonucleotide
agcuuggaggcacucucua

SEQ ID NO: 2361873 - RNA, 19 nt, Artificial Sequence
  Description of Artificial Sequence: Synthetic oligonucleotide
cauuaagguacgggguuca

SEQ ID NO: 2361874 - RNA, 19 nt, Artificial Sequence
  Description of Artificial Sequence: Synthetic oligonucleotide
cuuacucaucagggauacg

SEQ ID NO: 2361875 - RNA, 19 nt, Artificial Sequence
  Description of Artificial Sequence: Synthetic oligonucleotide
auaucaacuuuuggaccau

SEQ ID NO: 2361876 - RNA, 19 nt, Artificial Sequence
  Description of Artificial Sequence: Synthetic oligonucleotide
ggcuuacaaauaaauuaca

SEQ ID NO: 2361877 - RNA, 19 nt, Artificial Sequence
  Description of Artificial Sequence: Synthetic oligonucleotide
uuacggccacuucaacauu

SEQ ID NO: 2361878 - RNA, 19 nt, Artificial Sequence
  Description of Artificial Sequence: Synthetic oligonucleotide
cugaguggauuuucauuaa

SEQ ID NO: 2361879 - RNA, 19 nt, Artificial Sequence
  Description of Artificial Sequence: Synthetic oligonucleotide
cccgaggagaauauuguca

SEQ ID NO: 2361880 - RNA, 19 nt, Artificial Sequence
  Description of Artificial Sequence: Synthetic oligonucleotide
aagguacgggguucaccuu

SEQ ID NO: 2361881 - RNA, 19 nt, Artificial Sequence
  Description of Artificial Sequence: Synthetic oligonucleotide
gguuugagugcaagaaauc

SEQ ID NO: 2361882 - RNA, 19 nt, Artificial Sequence
  Description of Artificial Sequence: Synthetic oligonucleotide
cuacagacagcugcuaucu

SEQ ID NO: 2361883 - RNA, 19 nt, Artificial Sequence
  Description of Artificial Sequence: Synthetic oligonucleotide
  modified_base (15)..(15): a, c, u, g, unknown or other
cacaucagucaaagngcca

SEQ ID NO: 2361884 - RNA, 19 nt, Artificial Sequence
  Description of Artificial Sequence: Synthetic oligonucleotide
gcgauaaucagaggaguga

SEQ ID NO: 2361885 - RNA, 19 nt, Artificial Sequence
  Description of Artificial Sequence: Synthetic oligonucleotide
gcaguucuaacggcuacug

SEQ ID NO: 2361886 - RNA, 19 nt, Artificial Sequence
  Description of Artificial Sequence: Synthetic oligonucleotide
cacucucuacagacagcug

SEQ ID NO: 2361887 - RNA, 19 nt, Artificial Sequence
  Description of Artificial Sequence: Synthetic oligonucleotide
uuuggaccauaagcuuuuc

SEQ ID NO: 2361888 - RNA, 19 nt, Artificial Sequence
  Description of Artificial Sequence: Synthetic oligonucleotide
gaaccccaccccauuugac

SEQ ID NO: 2361889 - RNA, 19 nt, Artificial Sequence
  Description of Artificial Sequence: Synthetic oligonucleotide
uaucaacuuuuggaccaua

SEQ ID NO: 2361890 - RNA, 19 nt, Artificial Sequence
  Description of Artificial Sequence: Synthetic oligonucleotide
caucagggauacggugagg

SEQ ID NO: 2361891 - RNA, 19 nt, Artificial Sequence
  Description of Artificial Sequence: Synthetic oligonucleotide
cuucaacauugcugcccug

SEQ ID NO: 2361892 - RNA, 19 nt, Artificial Sequence
  Description of Artificial Sequence: Synthetic oligonucleotide
ucucuacagacagcugcua

SEQ ID NO: 2361893 - RNA, 19 nt, Artificial Sequence
  Description of Artificial Sequence: Synthetic oligonucleotide
ccacuuuacggccacuuca

SEQ ID NO: 2361894 - RNA, 19 nt, Artificial Sequence
  Description of Artificial Sequence: Synthetic oligonucleotide
guucaggcuuacaaauaaa

SEQ ID NO: 2361895 - RNA, 19 nt, Artificial Sequence
  Description of Artificial Sequence: Synthetic oligonucleotide
gcuacuguucuuaauugcu

SEQ ID NO: 2361896 - RNA, 19 nt, Artificial Sequence
  Description of Artificial Sequence: Synthetic oligonucleotide
gagggguaaggcucgcagu

SEQ ID NO: 2361897 - RNA, 19 nt, Artificial Sequence
  Description of Artificial Sequence: Synthetic oligonucleotide
gucuuacucaucagggaua

SEQ ID NO: 2361898 - RNA, 19 nt, Artificial Sequence
  Description of Artificial Sequence: Synthetic oligonucleotide
aggcuggagagagcgauuu

SEQ ID NO: 2361899 - RNA, 19 nt, Artificial Sequence
  Description of Artificial Sequence: Synthetic oligonucleotide
ggcucgcaguucuaacggc

SEQ ID NO: 2361900 - RNA, 19 nt, Artificial Sequence
  Description of Artificial Sequence: Synthetic oligonucleotide
cgauuuaagaagucacgga

SEQ ID NO: 2361901 - RNA, 19 nt, Artificial Sequence
  Description of Artificial Sequence: Synthetic oligonucleotide
gcuggagagagcgauuuaa

SEQ ID NO: 2361902 - RNA, 19 nt, Artificial Sequence
  Description of Artificial Sequence: Synthetic oligonucleotide
agggauacggugaggggua

SEQ ID NO: 2361903 - RNA, 19 nt, Artificial Sequence
  Description of Artificial Sequence: Synthetic oligonucleotide
gccaugauucccagagacc

SEQ ID NO: 2361904 - RNA, 19 nt, Artificial Sequence
  Description of Artificial Sequence: Synthetic oligonucleotide
gguacgggguucaccuucc

SEQ ID NO: 2361905 - RNA, 19 nt, Artificial Sequence
  Description of Artificial Sequence: Synthetic oligonucleotide
cugugaccacaucagucaa

SEQ ID NO: 2361906 - RNA, 19 nt, Artificial Sequence
  Description of Artificial Sequence: Synthetic oligonucleotide
guaaagaaccccaccccau

SEQ ID NO: 2361907 - RNA, 19 nt, Artificial Sequence
  Description of Artificial Sequence: Synthetic oligonucleotide
ccauccaucccgaggagaa

SEQ ID NO: 2361908 - RNA, 19 nt, Artificial Sequence
  Description of Artificial Sequence: Synthetic oligonucleotide
cggcuacuguucuuaauug

SEQ ID NO: 2361909 - RNA, 19 nt, Artificial Sequence
  Description of Artificial Sequence: Synthetic oligonucleotide
ggagaauauugucacucuu

SEQ ID NO: 2361910 - RNA, 19 nt, Artificial Sequence
  Description of Artificial Sequence: Synthetic oligonucleotide
gcgguucaggcuuacaaau

SEQ ID NO: 2361911 - RNA, 19 nt, Artificial Sequence
  Description of Artificial Sequence: Synthetic oligonucleotide
cucuacagacagcugcuau

SEQ ID NO: 2361912 - RNA, 19 nt, Artificial Sequence
  Description of Artificial Sequence: Synthetic oligonucleotide
gacagucucugaguggauu

SEQ ID NO: 2361913 - RNA, 19 nt, Artificial Sequence
  Description of Artificial Sequence: Synthetic oligonucleotide
  modified_base (10)..(10): a, c, u, g, unknown or other
cacuaugaanagggagugu

SEQ ID NO: 2361914 - RNA, 19 nt, Artificial Sequence
  Description of Artificial Sequence: Synthetic oligonucleotide
guuuccugaagcagaguuu

SEQ ID NO: 2361915 - RNA, 19 nt, Artificial Sequence
  Description of Artificial Sequence: Synthetic oligonucleotide
cacgguggaagugaccacu

SEQ ID NO: 2361916 - RNA, 19 nt, Artificial Sequence
  Description of Artificial Sequence: Synthetic oligonucleotide
ugaccacuuuacggccacu

SEQ ID NO: 2361917 - RNA, 19 nt, Artificial Sequence
  Description of Artificial Sequence: Synthetic oligonucleotide
ggcuuauaagaaguuucua

SEQ ID NO: 2361918 - RNA, 19 nt, Artificial Sequence
  Description of Artificial Sequence: Synthetic oligonucleotide
cagcgauaaucagaggagu

SEQ ID NO: 2361919 - RNA, 19 nt, Artificial Sequence
  Description of Artificial Sequence: Synthetic oligonucleotide
cggugagggguaaggcucg

SEQ ID NO: 2361920 - RNA, 19 nt, Artificial Sequence
  Description of Artificial Sequence: Synthetic oligonucleotide
ucccaccauagugcuucgu

SEQ ID NO: 2361921 - RNA, 19 nt, Artificial Sequence
  Description of Artificial Sequence: Synthetic oligonucleotide
ggagugauuugagcacaga

SEQ ID NO: 2361922 - RNA, 19 nt, Artificial Sequence
  Description of Artificial Sequence: Synthetic oligonucleotide
acgguggaagugaccacuu

SEQ ID NO: 2361923 - RNA, 19 nt, Artificial Sequence
  Description of Artificial Sequence: Synthetic oligonucleotide
guacgggguucaccuucca

SEQ ID NO: 2361924 - RNA, 19 nt, Artificial Sequence
  Description of Artificial Sequence: Synthetic oligonucleotide
caguucuaacggcuacugu

SEQ ID NO: 2361925 - RNA, 19 nt, Artificial Sequence
  Description of Artificial Sequence: Synthetic oligonucleotide
gcuuuucgaguuaccaccu

SEQ ID NO: 2361926 - RNA, 19 nt, Artificial Sequence
  Description of Artificial Sequence: Synthetic oligonucleotide
gugagggguaaggcucgca

SEQ ID NO: 2361927 - RNA, 19 nt, Artificial Sequence
  Description of Artificial Sequence: Synthetic oligonucleotide
ggugagggguaaggcucgc

SEQ ID NO: 2361928 - RNA, 19 nt, Artificial Sequence
  Description of Artificial Sequence: Synthetic oligonucleotide
ggguucaccuuccaccauu

SEQ ID NO: 2361929 - RNA, 19 nt, Artificial Sequence
  Description of Artificial Sequence: Synthetic oligonucleotide
cgggguucaccuuccacca

SEQ ID NO: 2361930 - RNA, 19 nt, Artificial Sequence
  Description of Artificial Sequence: Synthetic oligonucleotide
gcucgcaguucuaacggcu

SEQ ID NO: 2361931 - RNA, 19 nt, Artificial Sequence
  Description of Artificial Sequence: Synthetic oligonucleotide
ccauaagcuuuucgaguua

SEQ ID NO: 2361932 - RNA, 19 nt, Artificial Sequence
  Description of Artificial Sequence: Synthetic oligonucleotide
cuuucgcuucacgguggaa

SEQ ID NO: 2361933 - RNA, 19 nt, Artificial Sequence
  Description of Artificial Sequence: Synthetic oligonucleotide
ggcuggagagagcgauuua

SEQ ID NO: 2361934 - RNA, 19 nt, Artificial Sequence
  Description of Artificial Sequence: Synthetic oligonucleotide
cgcuucacgguggaaguga

SEQ ID NO: 2361935 - RNA, 19 nt, Artificial Sequence
  Description of Artificial Sequence: Synthetic oligonucleotide
ggacuacuucuaacuuaaa

SEQ ID NO: 2361936 - RNA, 19 nt, Artificial Sequence
  Description of Artificial Sequence: Synthetic oligonucleotide
cgguucaggcuuacaaaua

SEQ ID NO: 2361937 - RNA, 19 nt, Artificial Sequence
  Description of Artificial Sequence: Synthetic oligonucleotide
gcugcgguucaggcuuaca

SEQ ID NO: 2361938 - RNA, 19 nt, Artificial Sequence
  Description of Artificial Sequence: Synthetic oligonucleotide
cgaggagaauauugucacu

SEQ ID NO: 2361939 - RNA, 19 nt, Artificial Sequence
  Description of Artificial Sequence: Synthetic oligonucleotide
cccugggugggcugcgguu

SEQ ID NO: 2361940 - RNA, 19 nt, Artificial Sequence
  Description of Artificial Sequence: Synthetic oligonucleotide
cgguggaagugaccacuuu

SEQ ID NO: 2361941 - RNA, 19 nt, Artificial Sequence
  Description of Artificial Sequence: Synthetic oligonucleotide
  modified_base (1)..(1): a, c, u, g, unknown or other
nagggagugugcaucuuuu

SEQ ID NO: 2361942 - RNA, 19 nt, Artificial Sequence
  Description of Artificial Sequence: Synthetic oligonucleotide
aaagaugauagcaaggucc

SEQ ID NO: 2361943 - RNA, 19 nt, Artificial Sequence
  Description of Artificial Sequence: Synthetic oligonucleotide
gaaaucaggaaccagggug

SEQ ID NO: 2361944 - RNA, 19 nt, Artificial Sequence
  Description of Artificial Sequence: Synthetic oligonucleotide
gauagcaagguccagcgag

SEQ ID NO: 2361945 - RNA, 19 nt, Artificial Sequence
  Description of Artificial Sequence: Synthetic oligonucleotide
uuggcagcaaauccgaagg

SEQ ID NO: 2361946 - RNA, 19 nt, Artificial Sequence
  Description of Artificial Sequence: Synthetic oligonucleotide
aaauccgaaggcuugucuc

SEQ ID NO: 2361947 - RNA, 19 nt, Artificial Sequence
  Description of Artificial Sequence: Synthetic oligonucleotide
ugagcuugaguucugagcu

SEQ ID NO: 2361948 - RNA, 19 nt, Artificial Sequence
  Description of Artificial Sequence: Synthetic oligonucleotide
ucugugcacgucaaaaggg

SEQ ID NO: 2361949 - RNA, 19 nt, Artificial Sequence
  Description of Artificial Sequence: Synthetic oligonucleotide
uccaggucggaguugaugg

SEQ ID NO: 2361950 - RNA, 19 nt, Artificial Sequence
  Description of Artificial Sequence: Synthetic oligonucleotide
acagaaagaugauagcaag

SEQ ID NO: 2361951 - RNA, 19 nt, Artificial Sequence
  Description of Artificial Sequence: Synthetic oligonucleotide
augauagcaagguccagcg

SEQ ID NO: 2361952 - RNA, 19 nt, Artificial Sequence
  Description of Artificial Sequence: Synthetic oligonucleotide
aggcucaacggucagcucc

SEQ ID NO: 2361953 - RNA, 19 nt, Artificial Sequence
  Description of Artificial Sequence: Synthetic oligonucleotide
ucaacggucagcuccaugu

SEQ ID NO: 2361954 - RNA, 19 nt, Artificial Sequence
  Description of Artificial Sequence: Synthetic oligonucleotide
agaugcuugagcuugaguu

SEQ ID NO: 2361955 - RNA, 19 nt, Artificial Sequence
  Description of Artificial Sequence: Synthetic oligonucleotide
uggaugaccugaaugggag

SEQ ID NO: 2361956 - RNA, 19 nt, Artificial Sequence
  Description of Artificial Sequence: Synthetic oligonucleotide
uugucugaggucaagucca

SEQ ID NO: 2361957 - RNA, 19 nt, Artificial Sequence
  Description of Artificial Sequence: Synthetic oligonucleotide
cagguugacaucuucgggg

SEQ ID NO: 2361958 - RNA, 19 nt, Artificial Sequence
  Description of Artificial Sequence: Synthetic oligonucleotide
accgcagguagccaaagac

SEQ ID NO: 2361959 - RNA, 19 nt, Artificial Sequence
  Description of Artificial Sequence: Synthetic oligonucleotide
ugaucucaggcucuccacg

SEQ ID NO: 2361960 - RNA, 19 nt, Artificial Sequence
  Description of Artificial Sequence: Synthetic oligonucleotide
ugggacugaagccuugggg

SEQ ID NO: 2361961 - RNA, 19 nt, Artificial Sequence
  Description of Artificial Sequence: Synthetic oligonucleotide
gaugaccugaaugggaggg

SEQ ID NO: 2361962 - RNA, 19 nt, Artificial Sequence
  Description of Artificial Sequence: Synthetic oligonucleotide
ugucauuguccucagcggc

SEQ ID NO: 2361963 - RNA, 19 nt, Artificial Sequence
  Description of Artificial Sequence: Synthetic oligonucleotide
aguugucugaggucaaguc

SEQ ID NO: 2361964 - RNA, 19 nt, Artificial Sequence
  Description of Artificial Sequence: Synthetic oligonucleotide
uagguugguucccaucugg

SEQ ID NO: 2361965 - RNA, 19 nt, Artificial Sequence
  Description of Artificial Sequence: Synthetic oligonucleotide
ucaccggguagccuggugg

SEQ ID NO: 2361966 - RNA, 19 nt, Artificial Sequence
  Description of Artificial Sequence: Synthetic oligonucleotide
aauccgaaggcuugucuca

SEQ ID NO: 2361967 - RNA, 19 nt, Artificial Sequence
  Description of Artificial Sequence: Synthetic oligonucleotide
uguacaggcucaacgguca

SEQ ID NO: 2361968 - RNA, 19 nt, Artificial Sequence
  Description of Artificial Sequence: Synthetic oligonucleotide
gcugucauuguccucagcg

SEQ ID NO: 2361969 - RNA, 19 nt, Artificial Sequence
  Description of Artificial Sequence: Synthetic oligonucleotide
agggaaaucaggaaccagg

SEQ ID NO: 2361970 - RNA, 19 nt, Artificial Sequence
  Description of Artificial Sequence: Synthetic oligonucleotide
aaggcuugucucaucuugc

SEQ ID NO: 2361971 - RNA, 19 nt, Artificial Sequence
  Description of Artificial Sequence: Synthetic oligonucleotide
ugucaguugucugagguca

SEQ ID NO: 2361972 - RNA, 19 nt, Artificial Sequence
  Description of Artificial Sequence: Synthetic oligonucleotide
gaagcuuccucuguggccc

SEQ ID NO: 2361973 - RNA, 19 nt, Artificial Sequence
  Description of Artificial Sequence: Synthetic oligonucleotide
ucucugugcacgucaaaag

SEQ ID NO: 2361974 - RNA, 19 nt, Artificial Sequence
  Description of Artificial Sequence: Synthetic oligonucleotide
acaggaaccgcagguagcc

SEQ ID NO: 2361975 - RNA, 19 nt, Artificial Sequence
  Description of Artificial Sequence: Synthetic oligonucleotide
ugugaucucaggcucucca

SEQ ID NO: 2361976 - RNA, 19 nt, Artificial Sequence
  Description of Artificial Sequence: Synthetic oligonucleotide
uguagggaggcaucuccgg

SEQ ID NO: 2361977 - RNA, 19 nt, Artificial Sequence
  Description of Artificial Sequence: Synthetic oligonucleotide
aaaagggcuugcgugucgg

SEQ ID NO: 2361978 - RNA, 19 nt, Artificial Sequence
  Description of Artificial Sequence: Synthetic oligonucleotide
gggacagcagcccagauug

SEQ ID NO: 2361979 - RNA, 19 nt, Artificial Sequence
  Description of Artificial Sequence: Synthetic oligonucleotide
gacacucuggccuggauga

SEQ ID NO: 2361980 - RNA, 19 nt, Artificial Sequence
  Description of Artificial Sequence: Synthetic oligonucleotide
uacucgucuguccaucacc

SEQ ID NO: 2361981 - RNA, 19 nt, Artificial Sequence
  Description of Artificial Sequence: Synthetic oligonucleotide
cuugcagugcgacaggcug

SEQ ID NO: 2361982 - RNA, 19 nt, Artificial Sequence
  Description of Artificial Sequence: Synthetic oligonucleotide
gaaagaugauagcaagguc

SEQ ID NO: 2361983 - RNA, 19 nt, Artificial Sequence
  Description of Artificial Sequence: Synthetic oligonucleotide
uccuagugaugucaguugu

SEQ ID NO: 2361984 - RNA, 19 nt, Artificial Sequence
  Description of Artificial Sequence: Synthetic oligonucleotide
cugcuguacaggcucaacg

SEQ ID NO: 2361985 - RNA, 19 nt, Artificial Sequence
  Description of Artificial Sequence: Synthetic oligonucleotide
agggcuugcgugucggggc

SEQ ID NO: 2361986 - RNA, 19 nt, Artificial Sequence
  Description of Artificial Sequence: Synthetic oligonucleotide
cugugcacgucaaaagggc

SEQ ID NO: 2361987 - RNA, 19 nt, Artificial Sequence
  Description of Artificial Sequence: Synthetic oligonucleotide
acugacggcugucauuguc

SEQ ID NO: 2361988 - RNA, 19 nt, Artificial Sequence
  Description of Artificial Sequence: Synthetic oligonucleotide
uucccaucuggucacuggc

SEQ ID NO: 2361989 - RNA, 19 nt, Artificial Sequence
  Description of Artificial Sequence: Synthetic oligonucleotide
ugucuccuagugaugucag

SEQ ID NO: 2361990 - RNA, 19 nt, Artificial Sequence
  Description of Artificial Sequence: Synthetic oligonucleotide
gaggagaccucagaggagc

SEQ ID NO: 2361991 - RNA, 19 nt, Artificial Sequence
  Description of Artificial Sequence: Synthetic oligonucleotide
uucggggucccacuccagg

SEQ ID NO: 2361992 - RNA, 19 nt, Artificial Sequence
  Description of Artificial Sequence: Synthetic oligonucleotide
cucggacugggacugaagc

SEQ ID NO: 2361993 - RNA, 19 nt, Artificial Sequence
  Description of Artificial Sequence: Synthetic oligonucleotide
uccagcgaggcucugccca

SEQ ID NO: 2361994 - RNA, 19 nt, Artificial Sequence
  Description of Artificial Sequence: Synthetic oligonucleotide
ugugcacgucaaaagggcu

SEQ ID NO: 2361995 - RNA, 19 nt, Artificial Sequence
  Description of Artificial Sequence: Synthetic oligonucleotide
cuccauguagcgacugacg

SEQ ID NO: 2361996 - RNA, 19 nt, Artificial Sequence
  Description of Artificial Sequence: Synthetic oligonucleotide
uggcuugucuccuagugau

SEQ ID NO: 2361997 - RNA, 19 nt, Artificial Sequence
  Description of Artificial Sequence: Synthetic oligonucleotide
uccaccgggcucaaagagc

SEQ ID NO: 2361998 - RNA, 19 nt, Artificial Sequence
  Description of Artificial Sequence: Synthetic oligonucleotide
cucaaagagcccuugugca

SEQ ID NO: 2361999 - RNA, 19 nt, Artificial Sequence
  Description of Artificial Sequence: Synthetic oligonucleotide
uggcagaugcuugagcuug

SEQ ID NO: 2362000 - RNA, 19 nt, Artificial Sequence
  Description of Artificial Sequence: Synthetic oligonucleotide
uggguggcacuguagguug

SEQ ID NO: 2362001 - RNA, 19 nt, Artificial Sequence
  Description of Artificial Sequence: Synthetic oligonucleotide
uugucuccuagugauguca

SEQ ID NO: 2362002 - RNA, 19 nt, Artificial Sequence
  Description of Artificial Sequence: Synthetic oligonucleotide
uucucugugcacgucaaaa

SEQ ID NO: 2362003 - RNA, 19 nt, Artificial Sequence
  Description of Artificial Sequence: Synthetic oligonucleotide
ucuucggggucccacucca

SEQ ID NO: 2362004 - RNA, 19 nt, Artificial Sequence
  Description of Artificial Sequence: Synthetic oligonucleotide
aggcugucggucaugggcc

SEQ ID NO: 2362005 - RNA, 19 nt, Artificial Sequence
  Description of Artificial Sequence: Synthetic oligonucleotide
acucgucuguccaucaccg

SEQ ID NO: 2362006 - RNA, 19 nt, Artificial Sequence
  Description of Artificial Sequence: Synthetic oligonucleotide
cuguagggaggcaucuccg

SEQ ID NO: 2362007 - RNA, 19 nt, Artificial Sequence
  Description of Artificial Sequence: Synthetic oligonucleotide
ggcacuguagguugguucc

SEQ ID NO: 2362008 - RNA, 19 nt, Artificial Sequence
  Description of Artificial Sequence: Synthetic oligonucleotide
uugauggaggagaccucag

SEQ ID NO: 2362009 - RNA, 19 nt, Artificial Sequence
  Description of Artificial Sequence: Synthetic oligonucleotide
ugaggcguagaggaggcca

SEQ ID NO: 2362010 - RNA, 19 nt, Artificial Sequence
  Description of Artificial Sequence: Synthetic oligonucleotide
ucaucuugcucuugaccac

SEQ ID NO: 2362011 - RNA, 19 nt, Artificial Sequence
  Description of Artificial Sequence: Synthetic oligonucleotide
uuccauuucugcugugggu

SEQ ID NO: 2362012 - RNA, 19 nt, Artificial Sequence
  Description of Artificial Sequence: Synthetic oligonucleotide
uagccugguggcacuacag

SEQ ID NO: 2362013 - RNA, 19 nt, Artificial Sequence
  Description of Artificial Sequence: Synthetic oligonucleotide
cuccuagugaugucaguug

SEQ ID NO: 2362014 - RNA, 19 nt, Artificial Sequence
  Description of Artificial Sequence: Synthetic oligonucleotide
ugcacgucaaaagggcuug

SEQ ID NO: 2362015 - RNA, 19 nt, Artificial Sequence
  Description of Artificial Sequence: Synthetic oligonucleotide
auagcaagguccagcgagg

SEQ ID NO: 2362016 - RNA, 19 nt, Artificial Sequence
  Description of Artificial Sequence: Synthetic oligonucleotide
cuguccaucaccggguagc

SEQ ID NO: 2362017 - RNA, 19 nt, Artificial Sequence
  Description of Artificial Sequence: Synthetic oligonucleotide
uagugaugucaguugucug

SEQ ID NO: 2362018 - RNA, 19 nt, Artificial Sequence
  Description of Artificial Sequence: Synthetic oligonucleotide
gggaaaucaggaaccaggg

SEQ ID NO: 2362019 - RNA, 19 nt, Artificial Sequence
  Description of Artificial Sequence: Synthetic oligonucleotide
cuguacaggcucaacgguc

SEQ ID NO: 2362020 - RNA, 19 nt, Artificial Sequence
  Description of Artificial Sequence: Synthetic oligonucleotide
ucuccuagugaugucaguu

SEQ ID NO: 2362021 - RNA, 19 nt, Artificial Sequence
  Description of Artificial Sequence: Synthetic oligonucleotide
uguagcgacugacggcugu

SEQ ID NO: 2362022 - RNA, 19 nt, Artificial Sequence
  Description of Artificial Sequence: Synthetic oligonucleotide
acgucaaaagggcuugcgu

SEQ ID NO: 2362023 - RNA, 19 nt, Artificial Sequence
  Description of Artificial Sequence: Synthetic oligonucleotide
acaggcucaacggucagcu

SEQ ID NO: 2362024 - RNA, 19 nt, Artificial Sequence
  Description of Artificial Sequence: Synthetic oligonucleotide
ggcuuuggcagcaaauccg

SEQ ID NO: 2362025 - RNA, 19 nt, Artificial Sequence
  Description of Artificial Sequence: Synthetic oligonucleotide
gaguugauggaggagaccu

SEQ ID NO: 2362026 - RNA, 19 nt, Artificial Sequence
  Description of Artificial Sequence: Synthetic oligonucleotide
uucuggucuucaguccugg

SEQ ID NO: 2362027 - RNA, 19 nt, Artificial Sequence
  Description of Artificial Sequence: Synthetic oligonucleotide
agaggagcugccggaagac

SEQ ID NO: 2362028 - RNA, 19 nt, Artificial Sequence
  Description of Artificial Sequence: Synthetic oligonucleotide
agaggaggccagccagagc

SEQ ID NO: 2362029 - RNA, 19 nt, Artificial Sequence
  Description of Artificial Sequence: Synthetic oligonucleotide
gugaugucaguugucugag

SEQ ID NO: 2362030 - RNA, 19 nt, Artificial Sequence
  Description of Artificial Sequence: Synthetic oligonucleotide
uggcagcaaauccgaaggc

SEQ ID NO: 2362031 - RNA, 19 nt, Artificial Sequence
  Description of Artificial Sequence: Synthetic oligonucleotide
uggugagaggcacccaauc

SEQ ID NO: 2362032 - RNA, 19 nt, Artificial Sequence
  Description of Artificial Sequence: Synthetic oligonucleotide
caaaagggcuugcgugucg

SEQ ID NO: 2362033 - RNA, 19 nt, Artificial Sequence
  Description of Artificial Sequence: Synthetic oligonucleotide
ugauagcaagguccagcga

SEQ ID NO: 2362034 - RNA, 19 nt, Artificial Sequence
  Description of Artificial Sequence: Synthetic oligonucleotide
uggcacuguagguugguuc

SEQ ID NO: 2362035 - RNA, 19 nt, Artificial Sequence
  Description of Artificial Sequence: Synthetic oligonucleotide
cuuggggacagcagcccag

SEQ ID NO: 2362036 - RNA, 19 nt, Artificial Sequence
  Description of Artificial Sequence: Synthetic oligonucleotide
uguggguggcacuguaggu

SEQ ID NO: 2362037 - RNA, 19 nt, Artificial Sequence
  Description of Artificial Sequence: Synthetic oligonucleotide
ggcacuacagccugccugc

SEQ ID NO: 2362038 - RNA, 19 nt, Artificial Sequence
  Description of Artificial Sequence: Synthetic oligonucleotide
guccaccgggcucaaagag

SEQ ID NO: 2362039 - RNA, 19 nt, Artificial Sequence
  Description of Artificial Sequence: Synthetic oligonucleotide
guugauggaggagaccuca

SEQ ID NO: 2362040 - RNA, 19 nt, Artificial Sequence
  Description of Artificial Sequence: Synthetic oligonucleotide
cugauggcuugucuccuag

SEQ ID NO: 2362041 - RNA, 19 nt, Artificial Sequence
  Description of Artificial Sequence: Synthetic oligonucleotide
aaucaggaaccagggugug

SEQ ID NO: 2362042 - RNA, 19 nt, Artificial Sequence
  Description of Artificial Sequence: Synthetic oligonucleotide
acaucuucggggucccacu

SEQ ID NO: 2362043 - RNA, 19 nt, Artificial Sequence
  Description of Artificial Sequence: Synthetic oligonucleotide
gaggcaucuccgguacucg

SEQ ID NO: 2362044 - RNA, 19 nt, Artificial Sequence
  Description of Artificial Sequence: Synthetic oligonucleotide
ugacggcugucauuguccu

SEQ ID NO: 2362045 - RNA, 19 nt, Artificial Sequence
  Description of Artificial Sequence: Synthetic oligonucleotide
caauggcugaggcguagag

SEQ ID NO: 2362046 - RNA, 19 nt, Artificial Sequence
  Description of Artificial Sequence: Synthetic oligonucleotide
agcuugaguucugagcuga

SEQ ID NO: 2362047 - RNA, 19 nt, Artificial Sequence
  Description of Artificial Sequence: Synthetic oligonucleotide
gaggucaaguccaccgggc

SEQ ID NO: 2362048 - RNA, 19 nt, Artificial Sequence
  Description of Artificial Sequence: Synthetic oligonucleotide
gagcuugaguucugagcug

SEQ ID NO: 2362049 - RNA, 19 nt, Artificial Sequence
  Description of Artificial Sequence: Synthetic oligonucleotide
cuggaugaccugaauggga

SEQ ID NO: 2362050 - RNA, 19 nt, Artificial Sequence
  Description of Artificial Sequence: Synthetic oligonucleotide
agagcccuugugcaucugu

SEQ ID NO: 2362051 - RNA, 19 nt, Artificial Sequence
  Description of Artificial Sequence: Synthetic oligonucleotide
cacgucaaaagggcuugcg

SEQ ID NO: 2362052 - RNA, 19 nt, Artificial Sequence
  Description of Artificial Sequence: Synthetic oligonucleotide
aggucaaguccaccgggcu

SEQ ID NO: 2362053 - RNA, 19 nt, Artificial Sequence
  Description of Artificial Sequence: Synthetic oligonucleotide
ugucugaggucaaguccac

SEQ ID NO: 2362054 - RNA, 19 nt, Artificial Sequence
  Description of Artificial Sequence: Synthetic oligonucleotide
aguccaccgggcucaaaga

SEQ ID NO: 2362055 - RNA, 19 nt, Artificial Sequence
  Description of Artificial Sequence: Synthetic oligonucleotide
guagguugguucccaucug

SEQ ID NO: 2362056 - RNA, 19 nt, Artificial Sequence
  Description of Artificial Sequence: Synthetic oligonucleotide
ucagcuccauguagcgacu

SEQ ID NO: 2362057 - RNA, 19 nt, Artificial Sequence
  Description of Artificial Sequence: Synthetic oligonucleotide
aggcuugucucaucuugcu

SEQ ID NO: 2362058 - RNA, 19 nt, Artificial Sequence
  Description of Artificial Sequence: Synthetic oligonucleotide
uguccaucaccggguagcc

SEQ ID NO: 2362059 - RNA, 19 nt, Artificial Sequence
  Description of Artificial Sequence: Synthetic oligonucleotide
gacaucuucggggucccac

SEQ ID NO: 2362060 - RNA, 19 nt, Artificial Sequence
  Description of Artificial Sequence: Synthetic oligonucleotide
gugaucucaggcucuccac

SEQ ID NO: 2362061 - RNA, 19 nt, Artificial Sequence
  Description of Artificial Sequence: Synthetic oligonucleotide
ccaccgggcucaaagagcc

SEQ ID NO: 2362062 - RNA, 19 nt, Artificial Sequence
  Description of Artificial Sequence: Synthetic oligonucleotide
aguugauggaggagaccuc

SEQ ID NO: 2362063 - RNA, 19 nt, Artificial Sequence
  Description of Artificial Sequence: Synthetic oligonucleotide
ucuggucuucaguccuggc

SEQ ID NO: 2362064 - RNA, 19 nt, Artificial Sequence
  Description of Artificial Sequence: Synthetic oligonucleotide
agcgaggcucugcccaggg

SEQ ID NO: 2362065 - RNA, 19 nt, Artificial Sequence
  Description of Artificial Sequence: Synthetic oligonucleotide
ucuguggcccucggacugg

SEQ ID NO: 2362066 - RNA, 19 nt, Artificial Sequence
  Description of Artificial Sequence: Synthetic oligonucleotide
cgucaaaagggcuugcgug

SEQ ID NO: 2362067 - RNA, 19 nt, Artificial Sequence
  Description of Artificial Sequence: Synthetic oligonucleotide
ucggggucccacuccaggu

SEQ ID NO: 2362068 - RNA, 19 nt, Artificial Sequence
  Description of Artificial Sequence: Synthetic oligonucleotide
gaggcguagaggaggccag

SEQ ID NO: 2362069 - RNA, 19 nt, Artificial Sequence
  Description of Artificial Sequence: Synthetic oligonucleotide
uugacaucuucgggguccc

SEQ ID NO: 2362070 - RNA, 19 nt, Artificial Sequence
  Description of Artificial Sequence: Synthetic oligonucleotide
ccagaagcuuccucugugg

SEQ ID NO: 2362071 - RNA, 19 nt, Artificial Sequence
  Description of Artificial Sequence: Synthetic oligonucleotide
accugaaugggaggguaug

SEQ ID NO: 2362072 - RNA, 19 nt, Artificial Sequence
  Description of Artificial Sequence: Synthetic oligonucleotide
gaccucagaggagcugccg

SEQ ID NO: 2362073 - RNA, 19 nt, Artificial Sequence
  Description of Artificial Sequence: Synthetic oligonucleotide
uagcaagguccagcgaggc

SEQ ID NO: 2362074 - RNA, 19 nt, Artificial Sequence
  Description of Artificial Sequence: Synthetic oligonucleotide
ggcugaggcguagaggagg

SEQ ID NO: 2362075 - RNA, 19 nt, Artificial Sequence
  Description of Artificial Sequence: Synthetic oligonucleotide
cucgucuguccaucaccgg

SEQ ID NO: 2362076 - RNA, 19 nt, Artificial Sequence
  Description of Artificial Sequence: Synthetic oligonucleotide
caccggguagccugguggc

SEQ ID NO: 2362077 - RNA, 19 nt, Artificial Sequence
  Description of Artificial Sequence: Synthetic oligonucleotide
acguuguucuuguuccuuu

SEQ ID NO: 2362078 - RNA, 19 nt, Artificial Sequence
  Description of Artificial Sequence: Synthetic oligonucleotide
ucugugaucucaggcucuc

SEQ ID NO: 2362079 - RNA, 19 nt, Artificial Sequence
  Description of Artificial Sequence: Synthetic oligonucleotide
cuguagguugguucccauc

SEQ ID NO: 2362080 - RNA, 19 nt, Artificial Sequence
  Description of Artificial Sequence: Synthetic oligonucleotide
agguccagcgaggcucugc

SEQ ID NO: 2362081 - RNA, 19 nt, Artificial Sequence
  Description of Artificial Sequence: Synthetic oligonucleotide
ugaccugaaugggagggua

SEQ ID NO: 2362082 - RNA, 19 nt, Artificial Sequence
  Description of Artificial Sequence: Synthetic oligonucleotide
guuccuuuccagguugaca

SEQ ID NO: 2362083 - RNA, 19 nt, Artificial Sequence
  Description of Artificial Sequence: Synthetic oligonucleotide
agaccucagaggagcugcc

SEQ ID NO: 2362084 - RNA, 19 nt, Artificial Sequence
  Description of Artificial Sequence: Synthetic oligonucleotide
uacaggcucaacggucagc

SEQ ID NO: 2362085 - RNA, 19 nt, Artificial Sequence
  Description of Artificial Sequence: Synthetic oligonucleotide
gagcccuugugcaucugug

SEQ ID NO: 2362086 - RNA, 19 nt, Artificial Sequence
  Description of Artificial Sequence: Synthetic oligonucleotide
agaugauagcaagguccag

SEQ ID NO: 2362087 - RNA, 19 nt, Artificial Sequence
  Description of Artificial Sequence: Synthetic oligonucleotide
uggcccucggacugggacu

SEQ ID NO: 2362088 - RNA, 19 nt, Artificial Sequence
  Description of Artificial Sequence: Synthetic oligonucleotide
gguccagcgaggcucugcc

SEQ ID NO: 2362089 - RNA, 19 nt, Artificial Sequence
  Description of Artificial Sequence: Synthetic oligonucleotide
agcuccauguagcgacuga

SEQ ID NO: 2362090 - RNA, 19 nt, Artificial Sequence
  Description of Artificial Sequence: Synthetic oligonucleotide
cagugcgacaggcugguga

SEQ ID NO: 2362091 - RNA, 19 nt, Artificial Sequence
  Description of Artificial Sequence: Synthetic oligonucleotide
agcaagguccagcgaggcu

SEQ ID NO: 2362092 - RNA, 19 nt, Artificial Sequence
  Description of Artificial Sequence: Synthetic oligonucleotide
cucugcccagggaaaucag

SEQ ID NO: 2362093 - RNA, 19 nt, Artificial Sequence
  Description of Artificial Sequence: Synthetic oligonucleotide
acuguagguugguucccau

SEQ ID NO: 2362094 - RNA, 19 nt, Artificial Sequence
  Description of Artificial Sequence: Synthetic oligonucleotide
accaggguguggccuggag

SEQ ID NO: 2362095 - RNA, 19 nt, Artificial Sequence
  Description of Artificial Sequence: Synthetic oligonucleotide
agcagcccagauugcccag

SEQ ID NO: 2362096 - RNA, 19 nt, Artificial Sequence
  Description of Artificial Sequence: Synthetic oligonucleotide
guacucgucuguccaucac

SEQ ID NO: 2362097 - RNA, 19 nt, Artificial Sequence
  Description of Artificial Sequence: Synthetic oligonucleotide
guagccugguggcacuaca

SEQ ID NO: 2362098 - RNA, 19 nt, Artificial Sequence
  Description of Artificial Sequence: Synthetic oligonucleotide
gacugaagccuuggggaca

SEQ ID NO: 2362099 - RNA, 19 nt, Artificial Sequence
  Description of Artificial Sequence: Synthetic oligonucleotide
cacaauggcugaggcguag

SEQ ID NO: 2362100 - RNA, 19 nt, Artificial Sequence
  Description of Artificial Sequence: Synthetic oligonucleotide
gucggaguugauggaggag

SEQ ID NO: 2362101 - RNA, 19 nt, Artificial Sequence
  Description of Artificial Sequence: Synthetic oligonucleotide
aggcguagaggaggccagc

SEQ ID NO: 2362102 - RNA, 19 nt, Artificial Sequence
  Description of Artificial Sequence: Synthetic oligonucleotide
aggcaucuccgguacucgu

SEQ ID NO: 2362103 - RNA, 19 nt, Artificial Sequence
  Description of Artificial Sequence: Synthetic oligonucleotide
caucuucggggucccacuc

SEQ ID NO: 2362104 - RNA, 19 nt, Artificial Sequence
  Description of Artificial Sequence: Synthetic oligonucleotide
ggagguacucaggcugucg

SEQ ID NO: 2362105 - RNA, 19 nt, Artificial Sequence
  Description of Artificial Sequence: Synthetic oligonucleotide
ucauuguccucagcggcuu

SEQ ID NO: 2362106 - RNA, 19 nt, Artificial Sequence
  Description of Artificial Sequence: Synthetic oligonucleotide
aucaccggguagccuggug

SEQ ID NO: 2362107 - RNA, 19 nt, Artificial Sequence
  Description of Artificial Sequence: Synthetic oligonucleotide
cccagauugcccagccugg

SEQ ID NO: 2362108 - RNA, 19 nt, Artificial Sequence
  Description of Artificial Sequence: Synthetic oligonucleotide
ucuccgguacucgucuguc

SEQ ID NO: 2362109 - RNA, 19 nt, Artificial Sequence
  Description of Artificial Sequence: Synthetic oligonucleotide
caggaaccaggguguggcc

SEQ ID NO: 2362110 - RNA, 19 nt, Artificial Sequence
  Description of Artificial Sequence: Synthetic oligonucleotide
cuuccucuguggcccucgg

SEQ ID NO: 2362111 - RNA, 19 nt, Artificial Sequence
  Description of Artificial Sequence: Synthetic oligonucleotide
cagauugcccagccugguc

SEQ ID NO: 2362112 - RNA, 19 nt, Artificial Sequence
  Description of Artificial Sequence: Synthetic oligonucleotide
agcgacugacggcugucau

SEQ ID NO: 2362113 - RNA, 19 nt, Artificial Sequence
  Description of Artificial Sequence: Synthetic oligonucleotide
augaccugaaugggagggu

SEQ ID NO: 2362114 - RNA, 19 nt, Artificial Sequence
  Description of Artificial Sequence: Synthetic oligonucleotide
aggagguacucaggcuguc

SEQ ID NO: 2362115 - RNA, 19 nt, Artificial Sequence
  Description of Artificial Sequence: Synthetic oligonucleotide
ccagagcugacaggaaccg

SEQ ID NO: 2362116 - RNA, 19 nt, Artificial Sequence
  Description of Artificial Sequence: Synthetic oligonucleotide
acaauggcugaggcguaga

SEQ ID NO: 2362117 - RNA, 19 nt, Artificial Sequence
  Description of Artificial Sequence: Synthetic oligonucleotide
uccgaaggcuugucucauc

SEQ ID NO: 2362118 - RNA, 19 nt, Artificial Sequence
  Description of Artificial Sequence: Synthetic oligonucleotide
guucuggucuucaguccug

SEQ ID NO: 2362119 - RNA, 19 nt, Artificial Sequence
  Description of Artificial Sequence: Synthetic oligonucleotide
cagagcugacaggaaccgc

SEQ ID NO: 2362120 - RNA, 19 nt, Artificial Sequence
  Description of Artificial Sequence: Synthetic oligonucleotide
caucuugcucuugaccaca

SEQ ID NO: 2362121 - RNA, 19 nt, Artificial Sequence
  Description of Artificial Sequence: Synthetic oligonucleotide
uagcgacugacggcuguca

SEQ ID NO: 2362122 - RNA, 19 nt, Artificial Sequence
  Description of Artificial Sequence: Synthetic oligonucleotide
ggucaaguccaccgggcuc

SEQ ID NO: 2362123 - RNA, 19 nt, Artificial Sequence
  Description of Artificial Sequence: Synthetic oligonucleotide
gguacucgucuguccauca

SEQ ID NO: 2362124 - RNA, 19 nt, Artificial Sequence
  Description of Artificial Sequence: Synthetic oligonucleotide
caaauccgaaggcuugucu

SEQ ID NO: 2362125 - RNA, 19 nt, Artificial Sequence
  Description of Artificial Sequence: Synthetic oligonucleotide
caucuccgguacucgucug

SEQ ID NO: 2362126 - RNA, 19 nt, Artificial Sequence
  Description of Artificial Sequence: Synthetic oligonucleotide
guagggaggcaucuccggu

SEQ ID NO: 2362127 - RNA, 19 nt, Artificial Sequence
  Description of Artificial Sequence: Synthetic oligonucleotide
cccagaagcuuccucugug

SEQ ID NO: 2362128 - RNA, 19 nt, Artificial Sequence
  Description of Artificial Sequence: Synthetic oligonucleotide
gcuuuggcagcaaauccga

SEQ ID NO: 2362129 - RNA, 19 nt, Artificial Sequence
  Description of Artificial Sequence: Synthetic oligonucleotide
cuucggggucccacuccag

SEQ ID NO: 2362130 - RNA, 19 nt, Artificial Sequence
  Description of Artificial Sequence: Synthetic oligonucleotide
ggucggaguugauggagga

SEQ ID NO: 2362131 - RNA, 19 nt, Artificial Sequence
  Description of Artificial Sequence: Synthetic oligonucleotide
ccaaucugaguucuggucu

SEQ ID NO: 2362132 - RNA, 19 nt, Artificial Sequence
  Description of Artificial Sequence: Synthetic oligonucleotide
gcuggugagaggcacccaa

SEQ ID NO: 2362133 - RNA, 19 nt, Artificial Sequence
  Description of Artificial Sequence: Synthetic oligonucleotide
ucaggcucuccacguuguu

SEQ ID NO: 2362134 - RNA, 19 nt, Artificial Sequence
  Description of Artificial Sequence: Synthetic oligonucleotide
gccugccugcuguacaggc

SEQ ID NO: 2362135 - RNA, 19 nt, Artificial Sequence
  Description of Artificial Sequence: Synthetic oligonucleotide
cgacugacggcugucauug

SEQ ID NO: 2362136 - RNA, 19 nt, Artificial Sequence
  Description of Artificial Sequence: Synthetic oligonucleotide
ggaggcaucuccgguacuc

SEQ ID NO: 2362137 - RNA, 19 nt, Artificial Sequence
  Description of Artificial Sequence: Synthetic oligonucleotide
ggcuugucucaucuugcuc

SEQ ID NO: 2362138 - RNA, 19 nt, Artificial Sequence
  Description of Artificial Sequence: Synthetic oligonucleotide
gcugaggcguagaggaggc

SEQ ID NO: 2362139 - RNA, 19 nt, Artificial Sequence
  Description of Artificial Sequence: Synthetic oligonucleotide
cuucuuucucugugcacgu

SEQ ID NO: 2362140 - RNA, 19 nt, Artificial Sequence
  Description of Artificial Sequence: Synthetic oligonucleotide
uccuguagggaggcaucuc

SEQ ID NO: 2362141 - RNA, 19 nt, Artificial Sequence
  Description of Artificial Sequence: Synthetic oligonucleotide
ugcgugucggggcccucuc

SEQ ID NO: 2362142 - RNA, 19 nt, Artificial Sequence
  Description of Artificial Sequence: Synthetic oligonucleotide
cugugaucucaggcucucc

SEQ ID NO: 2362143 - RNA, 19 nt, Artificial Sequence
  Description of Artificial Sequence: Synthetic oligonucleotide
gccaaagacuuccagguuu

SEQ ID NO: 2362144 - RNA, 19 nt, Artificial Sequence
  Description of Artificial Sequence: Synthetic oligonucleotide
cgacaggcuggugagaggc

SEQ ID NO: 2362145 - RNA, 19 nt, Artificial Sequence
  Description of Artificial Sequence: Synthetic oligonucleotide
gccagccagagcugacagg

SEQ ID NO: 2362146 - RNA, 19 nt, Artificial Sequence
  Description of Artificial Sequence: Synthetic oligonucleotide
gucaugggccacaauggcu

SEQ ID NO: 2362147 - RNA, 19 nt, Artificial Sequence
  Description of Artificial Sequence: Synthetic oligonucleotide
guagcgacugacggcuguc

SEQ ID NO: 2362148 - RNA, 19 nt, Artificial Sequence
  Description of Artificial Sequence: Synthetic oligonucleotide
uugcgugucggggcccucu

SEQ ID NO: 2362149 - RNA, 19 nt, Artificial Sequence
  Description of Artificial Sequence: Synthetic oligonucleotide
auccgaaggcuugucucau

SEQ ID NO: 2362150 - RNA, 19 nt, Artificial Sequence
  Description of Artificial Sequence: Synthetic oligonucleotide
ggaaaucaggaaccagggu

SEQ ID NO: 2362151 - RNA, 19 nt, Artificial Sequence
  Description of Artificial Sequence: Synthetic oligonucleotide
guccagcgaggcucugccc

SEQ ID NO: 2362152 - RNA, 19 nt, Artificial Sequence
  Description of Artificial Sequence: Synthetic oligonucleotide
gaggagguacucaggcugu

SEQ ID NO: 2362153 - RNA, 19 nt, Artificial Sequence
  Description of Artificial Sequence: Synthetic oligonucleotide
cuugugcaucugugaucuc

SEQ ID NO: 2362154 - RNA, 19 nt, Artificial Sequence
  Description of Artificial Sequence: Synthetic oligonucleotide
cccuugugcaucugugauc

SEQ ID NO: 2362155 - RNA, 19 nt, Artificial Sequence
  Description of Artificial Sequence: Synthetic oligonucleotide
cggucagcuccauguagcg

SEQ ID NO: 2362156 - RNA, 19 nt, Artificial Sequence
  Description of Artificial Sequence: Synthetic oligonucleotide
gggcuugcgugucggggcc

SEQ ID NO: 2362157 - RNA, 19 nt, Artificial Sequence
  Description of Artificial Sequence: Synthetic oligonucleotide
ggagaccucagaggagcug

SEQ ID NO: 2362158 - RNA, 19 nt, Artificial Sequence
  Description of Artificial Sequence: Synthetic oligonucleotide
caccgggcucaaagagccc

SEQ ID NO: 2362159 - RNA, 19 nt, Artificial Sequence
  Description of Artificial Sequence: Synthetic oligonucleotide
cugacaggaaccgcaggua

SEQ ID NO: 2362160 - RNA, 19 nt, Artificial Sequence
  Description of Artificial Sequence: Synthetic oligonucleotide
caaucugaguucuggucuu

SEQ ID NO: 2362161 - RNA, 19 nt, Artificial Sequence
  Description of Artificial Sequence: Synthetic oligonucleotide
aggagaccucagaggagcu

SEQ ID NO: 2362162 - RNA, 19 nt, Artificial Sequence
  Description of Artificial Sequence: Synthetic oligonucleotide
cugaggcguagaggaggcc

SEQ ID NO: 2362163 - RNA, 19 nt, Artificial Sequence
  Description of Artificial Sequence: Synthetic oligonucleotide
ggcagcaaauccgaaggcu

SEQ ID NO: 2362164 - RNA, 19 nt, Artificial Sequence
  Description of Artificial Sequence: Synthetic oligonucleotide
agguagccaaagacuucca

SEQ ID NO: 2362165 - RNA, 19 nt, Artificial Sequence
  Description of Artificial Sequence: Synthetic oligonucleotide
gcaucuccgguacucgucu

SEQ ID NO: 2362166 - RNA, 19 nt, Artificial Sequence
  Description of Artificial Sequence: Synthetic oligonucleotide
gucuguccaucaccgggua

SEQ ID NO: 2362167 - RNA, 19 nt, Artificial Sequence
  Description of Artificial Sequence: Synthetic oligonucleotide
aaccaggguguggccugga

SEQ ID NO: 2362168 - RNA, 19 nt, Artificial Sequence
  Description of Artificial Sequence: Synthetic oligonucleotide
gguucccaucuggucacug

SEQ ID NO: 2362169 - RNA, 19 nt, Artificial Sequence
  Description of Artificial Sequence: Synthetic oligonucleotide
caacggucagcuccaugua

SEQ ID NO: 2362170 - RNA, 19 nt, Artificial Sequence
  Description of Artificial Sequence: Synthetic oligonucleotide
aagguccagcgaggcucug

SEQ ID NO: 2362171 - RNA, 19 nt, Artificial Sequence
  Description of Artificial Sequence: Synthetic oligonucleotide
ucaaguccaccgggcucaa

SEQ ID NO: 2362172 - RNA, 19 nt, Artificial Sequence
  Description of Artificial Sequence: Synthetic oligonucleotide
ggcucaacggucagcucca

SEQ ID NO: 2362173 - RNA, 19 nt, Artificial Sequence
  Description of Artificial Sequence: Synthetic oligonucleotide
cucagaggagcugccggaa

SEQ ID NO: 2362174 - RNA, 19 nt, Artificial Sequence
  Description of Artificial Sequence: Synthetic oligonucleotide
ugacaucuucgggguccca

SEQ ID NO: 2362175 - RNA, 19 nt, Artificial Sequence
  Description of Artificial Sequence: Synthetic oligonucleotide
caagguccagcgaggcucu

SEQ ID NO: 2362176 - RNA, 19 nt, Artificial Sequence
  Description of Artificial Sequence: Synthetic oligonucleotide
ccucggacugggacugaag

SEQ ID NO: 2362177 - RNA, 19 nt, Artificial Sequence
  Description of Artificial Sequence: Synthetic oligonucleotide
ggcccucggacugggacug

SEQ ID NO: 2362178 - RNA, 19 nt, Artificial Sequence
  Description of Artificial Sequence: Synthetic oligonucleotide
ccagcgaggcucugcccag

SEQ ID NO: 2362179 - RNA, 19 nt, Artificial Sequence
  Description of Artificial Sequence: Synthetic oligonucleotide
cagcggcuugcagugcgac

SEQ ID NO: 2362180 - RNA, 19 nt, Artificial Sequence
  Description of Artificial Sequence: Synthetic oligonucleotide
cagcgaggcucugcccagg

SEQ ID NO: 2362181 - RNA, 19 nt, Artificial Sequence
  Description of Artificial Sequence: Synthetic oligonucleotide
ggcuugucuccuagugaug

SEQ ID NO: 2362182 - RNA, 19 nt, Artificial Sequence
  Description of Artificial Sequence: Synthetic oligonucleotide
gucuccuagugaugucagu

SEQ ID NO: 2362183 - RNA, 19 nt, Artificial Sequence
  Description of Artificial Sequence: Synthetic oligonucleotide
caguugucugaggucaagu

SEQ ID NO: 2362184 - RNA, 19 nt, Artificial Sequence
  Description of Artificial Sequence: Synthetic oligonucleotide
cagaugcuugagcuugagu

SEQ ID NO: 2362185 - RNA, 19 nt, Artificial Sequence
  Description of Artificial Sequence: Synthetic oligonucleotide
ugguucccaucuggucacu

SEQ ID NO: 2362186 - RNA, 19 nt, Artificial Sequence
  Description of Artificial Sequence: Synthetic oligonucleotide
ggguggcacuguagguugg

SEQ ID NO: 2362187 - RNA, 19 nt, Artificial Sequence
  Description of Artificial Sequence: Synthetic oligonucleotide
ggcugucauuguccucagc

SEQ ID NO: 2362188 - RNA, 19 nt, Artificial Sequence
  Description of Artificial Sequence: Synthetic oligonucleotide
ggucagcuccauguagcga

SEQ ID NO: 2362189 - RNA, 19 nt, Artificial Sequence
  Description of Artificial Sequence: Synthetic oligonucleotide
gaccugaaugggaggguau

SEQ ID NO: 2362190 - RNA, 19 nt, Artificial Sequence
  Description of Artificial Sequence: Synthetic oligonucleotide
cgugucggggcccucucug

SEQ ID NO: 2362191 - RNA, 19 nt, Artificial Sequence
  Description of Artificial Sequence: Synthetic oligonucleotide
gggucccacuccaggucgg

SEQ ID NO: 2362192 - RNA, 19 nt, Artificial Sequence
  Description of Artificial Sequence: Synthetic oligonucleotide
gugcacgucaaaagggcuu

SEQ ID NO: 2362193 - RNA, 19 nt, Artificial Sequence
  Description of Artificial Sequence: Synthetic oligonucleotide
gguagccugguggcacuac

SEQ ID NO: 2362194 - RNA, 19 nt, Artificial Sequence
  Description of Artificial Sequence: Synthetic oligonucleotide
ggaaccgcagguagccaaa

SEQ ID NO: 2362195 - RNA, 19 nt, Artificial Sequence
  Description of Artificial Sequence: Synthetic oligonucleotide
cuggugagaggcacccaau

SEQ ID NO: 2362196 - RNA, 19 nt, Artificial Sequence
  Description of Artificial Sequence: Synthetic oligonucleotide
ggcugucggucaugggcca

SEQ ID NO: 2362197 - RNA, 19 nt, Artificial Sequence
  Description of Artificial Sequence: Synthetic oligonucleotide
cuggcagaugcuugagcuu

SEQ ID NO: 2362198 - RNA, 19 nt, Artificial Sequence
  Description of Artificial Sequence: Synthetic oligonucleotide
gcccuugugcaucugugau

SEQ ID NO: 2362199 - RNA, 19 nt, Artificial Sequence
  Description of Artificial Sequence: Synthetic oligonucleotide
gucggggcccucucuggcu

SEQ ID NO: 2362200 - RNA, 19 nt, Artificial Sequence
  Description of Artificial Sequence: Synthetic oligonucleotide
ccgaaggcuugucucaucu

SEQ ID NO: 2362201 - RNA, 19 nt, Artificial Sequence
  Description of Artificial Sequence: Synthetic oligonucleotide
ccgcagguagccaaagacu

SEQ ID NO: 2362202 - RNA, 19 nt, Artificial Sequence
  Description of Artificial Sequence: Synthetic oligonucleotide
gacugacggcugucauugu

SEQ ID NO: 2362203 - RNA, 19 nt, Artificial Sequence
  Description of Artificial Sequence: Synthetic oligonucleotide
ggacagcagcccagauugc

SEQ ID NO: 2362204 - RNA, 19 nt, Artificial Sequence
  Description of Artificial Sequence: Synthetic oligonucleotide
ccggguagccugguggcac

SEQ ID NO: 2362205 - RNA, 19 nt, Artificial Sequence
  Description of Artificial Sequence: Synthetic oligonucleotide
gcugauggcuugucuccua

SEQ ID NO: 2362206 - RNA, 19 nt, Artificial Sequence
  Description of Artificial Sequence: Synthetic oligonucleotide
cuacagccugccugcugua

SEQ ID NO: 2362207 - RNA, 19 nt, Artificial Sequence
  Description of Artificial Sequence: Synthetic oligonucleotide
cuccuguagggaggcaucu

SEQ ID NO: 2362208 - RNA, 19 nt, Artificial Sequence
  Description of Artificial Sequence: Synthetic oligonucleotide
ggcagaugcuugagcuuga

SEQ ID NO: 2362209 - RNA, 19 nt, Artificial Sequence
  Description of Artificial Sequence: Synthetic oligonucleotide
guggcacuacagccugccu

SEQ ID NO: 2362210 - RNA, 19 nt, Artificial Sequence
  Description of Artificial Sequence: Synthetic oligonucleotide
cacguuguucuuguuccuu

SEQ ID NO: 2362211 - RNA, 19 nt, Artificial Sequence
  Description of Artificial Sequence: Synthetic oligonucleotide
cgcagguagccaaagacuu

SEQ ID NO: 2362212 - RNA, 19 nt, Artificial Sequence
  Description of Artificial Sequence: Synthetic oligonucleotide
gcacccaaucugaguucug

SEQ ID NO: 2362213 - RNA, 19 nt, Artificial Sequence
  Description of Artificial Sequence: Synthetic oligonucleotide
cuugcgugucggggcccuc

SEQ ID NO: 2362214 - RNA, 19 nt, Artificial Sequence
  Description of Artificial Sequence: Synthetic oligonucleotide
gggcucaaagagcccuugu

SEQ ID NO: 2362215 - RNA, 19 nt, Artificial Sequence
  Description of Artificial Sequence: Synthetic oligonucleotide
ggggcccucucuggcuuug

SEQ ID NO: 2362216 - RNA, 19 nt, Artificial Sequence
  Description of Artificial Sequence: Synthetic oligonucleotide
cgguacucgucuguccauc

SEQ ID NO: 2362217 - RNA, 19 nt, Artificial Sequence
  Description of Artificial Sequence: Synthetic oligonucleotide
gcgacugacggcugucauu

SEQ ID NO: 2362218 - RNA, 19 nt, Artificial Sequence
  Description of Artificial Sequence: Synthetic oligonucleotide
gcuugcagugcgacaggcu

SEQ ID NO: 2362219 - RNA, 19 nt, Artificial Sequence
  Description of Artificial Sequence: Synthetic oligonucleotide
guccaucaccggguagccu

SEQ ID NO: 2362220 - RNA, 19 nt, Artificial Sequence
  Description of Artificial Sequence: Synthetic oligonucleotide
ccucagcggcuugcagugc

SEQ ID NO: 2362221 - RNA, 19 nt, Artificial Sequence
  Description of Artificial Sequence: Synthetic oligonucleotide
cgggcucaaagagcccuug

SEQ ID NO: 2362222 - RNA, 19 nt, Artificial Sequence
  Description of Artificial Sequence: Synthetic oligonucleotide
ccacaauggcugaggcgua

SEQ ID NO: 2362223 - RNA, 19 nt, Artificial Sequence
  Description of Artificial Sequence: Synthetic oligonucleotide
ggcuggugagaggcaccca

SEQ ID NO: 2362224 - RNA, 19 nt, Artificial Sequence
  Description of Artificial Sequence: Synthetic oligonucleotide
ccacguuguucuuguuccu

SEQ ID NO: 2362225 - RNA, 19 nt, Artificial Sequence
  Description of Artificial Sequence: Synthetic oligonucleotide
caaguccaccgggcucaaa

SEQ ID NO: 2362226 - RNA, 19 nt, Artificial Sequence
  Description of Artificial Sequence: Synthetic oligonucleotide
gcagugcgacaggcuggug

SEQ ID NO: 2362227 - RNA, 19 nt, Artificial Sequence
  Description of Artificial Sequence: Synthetic oligonucleotide
cccacuccaggucggaguu

SEQ ID NO: 2362228 - RNA, 19 nt, Artificial Sequence
  Description of Artificial Sequence: Synthetic oligonucleotide
gccugcuguacaggcucaa

SEQ ID NO: 2362229 - RNA, 19 nt, Artificial Sequence
  Description of Artificial Sequence: Synthetic oligonucleotide
gggaggcaucuccgguacu

SEQ ID NO: 2362230 - RNA, 19 nt, Artificial Sequence
  Description of Artificial Sequence: Synthetic oligonucleotide
caucaccggguagccuggu

SEQ ID NO: 2362231 - RNA, 19 nt, Artificial Sequence
  Description of Artificial Sequence: Synthetic oligonucleotide
ccagauugcccagccuggu

SEQ ID NO: 2362232 - RNA, 19 nt, Artificial Sequence
  Description of Artificial Sequence: Synthetic oligonucleotide
ggguagccugguggcacua

SEQ ID NO: 2362233 - RNA, 19 nt, Artificial Sequence
  Description of Artificial Sequence: Synthetic oligonucleotide
gcuugcgugucggggcccu

SEQ ID NO: 2362234 - RNA, 19 nt, Artificial Sequence
  Description of Artificial Sequence: Synthetic oligonucleotide
cccucggacugggacugaa

SEQ ID NO: 2362235 - RNA, 19 nt, Artificial Sequence
  Description of Artificial Sequence: Synthetic oligonucleotide
ccgguacucgucuguccau

SEQ ID NO: 2362236 - RNA, 19 nt, Artificial Sequence
  Description of Artificial Sequence: Synthetic oligonucleotide
cggguagccugguggcacu

SEQ ID NO: 2362237 - RNA, 19 nt, Artificial Sequence
  Description of Artificial Sequence: Synthetic oligonucleotide
ccgggcucaaagagcccuu

SEQ ID NO: 2362238 - RNA, 19 nt, Artificial Sequence
  Description of Artificial Sequence: Synthetic oligonucleotide
gcccucggacugggacuga

SEQ ID NO: 2362239 - RNA, 19 nt, Artificial Sequence
  Description of Artificial Sequence: Synthetic oligonucleotide
gcucaacggucagcuccau

SEQ ID NO: 2362240 - RNA, 19 nt, Artificial Sequence
  Description of Artificial Sequence: Synthetic oligonucleotide
cggggcccucucuggcuuu

SEQ ID NO: 2362241 - RNA, 19 nt, Artificial Sequence
  Description of Artificial Sequence: Synthetic oligonucleotide
acacuugcaacacagagcg

SEQ ID NO: 2362242 - RNA, 19 nt, Artificial Sequence
  Description of Artificial Sequence: Synthetic oligonucleotide
agauauugacaauggaucc

SEQ ID NO: 2362243 - RNA, 19 nt, Artificial Sequence
  Description of Artificial Sequence: Synthetic oligonucleotide
uugguagacucuaugaaag

SEQ ID NO: 2362244 - RNA, 19 nt, Artificial Sequence
  Description of Artificial Sequence: Synthetic oligonucleotide
guuagugcaccuuuugugg

SEQ ID NO: 2362245 - RNA, 19 nt, Artificial Sequence
  Description of Artificial Sequence: Synthetic oligonucleotide
auuggugcgugucacggcc

SEQ ID NO: 2362246 - RNA, 19 nt, Artificial Sequence
  Description of Artificial Sequence: Synthetic oligonucleotide
auugacaauggauccugcc

SEQ ID NO: 2362247 - RNA, 19 nt, Artificial Sequence
  Description of Artificial Sequence: Synthetic oligonucleotide
ugaaggaccugucaaacac

SEQ ID NO: 2362248 - RNA, 19 nt, Artificial Sequence
  Description of Artificial Sequence: Synthetic oligonucleotide
aggaaguuuggcucgaggg

SEQ ID NO: 2362249 - RNA, 19 nt, Artificial Sequence
  Description of Artificial Sequence: Synthetic oligonucleotide
uuuguggagcuguaugugg

SEQ ID NO: 2362250 - RNA, 19 nt, Artificial Sequence
  Description of Artificial Sequence: Synthetic oligonucleotide
gagauauugacaauggauc

SEQ ID NO: 2362251 - RNA, 19 nt, Artificial Sequence
  Description of Artificial Sequence: Synthetic oligonucleotide
ucuaugaaaggcugcacca

SEQ ID NO: 2362252 - RNA, 19 nt, Artificial Sequence
  Description of Artificial Sequence: Synthetic oligonucleotide
ucuuuggcgaggcugacca

SEQ ID NO: 2362253 - RNA, 19 nt, Artificial Sequence
  Description of Artificial Sequence: Synthetic oligonucleotide
aauauugcgcagugccuuc

SEQ ID NO: 2362254 - RNA, 19 nt, Artificial Sequence
  Description of Artificial Sequence: Synthetic oligonucleotide
uugacaauggauccugcca

SEQ ID NO: 2362255 - RNA, 19 nt, Artificial Sequence
  Description of Artificial Sequence: Synthetic oligonucleotide
acauucacauugaaggacc

SEQ ID NO: 2362256 - RNA, 19 nt, Artificial Sequence
  Description of Artificial Sequence: Synthetic oligonucleotide
agagcgcacauucacauug

SEQ ID NO: 2362257 - RNA, 19 nt, Artificial Sequence
  Description of Artificial Sequence: Synthetic oligonucleotide
aaaggaugcuguugacaac

SEQ ID NO: 2362258 - RNA, 19 nt, Artificial Sequence
  Description of Artificial Sequence: Synthetic oligonucleotide
aauaccaguguaucccuga

SEQ ID NO: 2362259 - RNA, 19 nt, Artificial Sequence
  Description of Artificial Sequence: Synthetic oligonucleotide
accacaguaggguuuacag

SEQ ID NO: 2362260 - RNA, 19 nt, Artificial Sequence
  Description of Artificial Sequence: Synthetic oligonucleotide
ugggacacuugcaacacag

SEQ ID NO: 2362261 - RNA, 19 nt, Artificial Sequence
  Description of Artificial Sequence: Synthetic oligonucleotide
aaaguucgggucugcagag

SEQ ID NO: 2362262 - RNA, 19 nt, Artificial Sequence
  Description of Artificial Sequence: Synthetic oligonucleotide
acagugucacgcccaaucc

SEQ ID NO: 2362263 - RNA, 19 nt, Artificial Sequence
  Description of Artificial Sequence: Synthetic oligonucleotide
ugaggucagaggaaguuug

SEQ ID NO: 2362264 - RNA, 19 nt, Artificial Sequence
  Description of Artificial Sequence: Synthetic oligonucleotide
agggcuuucacagugucac

SEQ ID NO: 2362265 - RNA, 19 nt, Artificial Sequence
  Description of Artificial Sequence: Synthetic oligonucleotide
aggguuuacagaguucacc

SEQ ID NO: 2362266 - RNA, 19 nt, Artificial Sequence
  Description of Artificial Sequence: Synthetic oligonucleotide
guugacaacguccuccacc

SEQ ID NO: 2362267 - RNA, 19 nt, Artificial Sequence
  Description of Artificial Sequence: Synthetic oligonucleotide
uugacaacguccuccaccu

SEQ ID NO: 2362268 - RNA, 19 nt, Artificial Sequence
  Description of Artificial Sequence: Synthetic oligonucleotide
ugaaacucagcuucaugcu

SEQ ID NO: 2362269 - RNA, 19 nt, Artificial Sequence
  Description of Artificial Sequence: Synthetic oligonucleotide
ugguagacucuaugaaagg

SEQ ID NO: 2362270 - RNA, 19 nt, Artificial Sequence
  Description of Artificial Sequence: Synthetic oligonucleotide
cuucaugcugccaauacca

SEQ ID NO: 2362271 - RNA, 19 nt, Artificial Sequence
  Description of Artificial Sequence: Synthetic oligonucleotide
uccuugguagacucuauga

SEQ ID NO: 2362272 - RNA, 19 nt, Artificial Sequence
  Description of Artificial Sequence: Synthetic oligonucleotide
uuuacagaguucacccgga

SEQ ID NO: 2362273 - RNA, 19 nt, Artificial Sequence
  Description of Artificial Sequence: Synthetic oligonucleotide
acuugcaacacagagcgca

SEQ ID NO: 2362274 - RNA, 19 nt, Artificial Sequence
  Description of Artificial Sequence: Synthetic oligonucleotide
uggcauagggagcaaguca

SEQ ID NO: 2362275 - RNA, 19 nt, Artificial Sequence
  Description of Artificial Sequence: Synthetic oligonucleotide
auauugacaauggauccug

SEQ ID NO: 2362276 - RNA, 19 nt, Artificial Sequence
  Description of Artificial Sequence: Synthetic oligonucleotide
uuggucagcaugguuagug

SEQ ID NO: 2362277 - RNA, 19 nt, Artificial Sequence
  Description of Artificial Sequence: Synthetic oligonucleotide
aaacuuccucagugggugg

SEQ ID NO: 2362278 - RNA, 19 nt, Artificial Sequence
  Description of Artificial Sequence: Synthetic oligonucleotide
auagggagcaagucaugag

SEQ ID NO: 2362279 - RNA, 19 nt, Artificial Sequence
  Description of Artificial Sequence: Synthetic oligonucleotide
acauugaaggaccugucaa

SEQ ID NO: 2362280 - RNA, 19 nt, Artificial Sequence
  Description of Artificial Sequence: Synthetic oligonucleotide
ggguuuacagaguucaccc

SEQ ID NO: 2362281 - RNA, 19 nt, Artificial Sequence
  Description of Artificial Sequence: Synthetic oligonucleotide
gccaauauugcgcagugcc

SEQ ID NO: 2362282 - RNA, 19 nt, Artificial Sequence
  Description of Artificial Sequence: Synthetic oligonucleotide
uaaucaugcccuuggcuac

SEQ ID NO: 2362283 - RNA, 19 nt, Artificial Sequence
  Description of Artificial Sequence: Synthetic oligonucleotide
uguggcauagggagcaagu

SEQ ID NO: 2362284 - RNA, 19 nt, Artificial Sequence
  Description of Artificial Sequence: Synthetic oligonucleotide
gauccugccacuccacggc

SEQ ID NO: 2362285 - RNA, 19 nt, Artificial Sequence
  Description of Artificial Sequence: Synthetic oligonucleotide
uccugaggcaugcagggcu

SEQ ID NO: 2362286 - RNA, 19 nt, Artificial Sequence
  Description of Artificial Sequence: Synthetic oligonucleotide
uuuuguggagcuguaugug

SEQ ID NO: 2362287 - RNA, 19 nt, Artificial Sequence
  Description of Artificial Sequence: Synthetic oligonucleotide
cuaaucaugcccuuggcua

SEQ ID NO: 2362288 - RNA, 19 nt, Artificial Sequence
  Description of Artificial Sequence: Synthetic oligonucleotide
gguuagugcaccuuuugug

SEQ ID NO: 2362289 - RNA, 19 nt, Artificial Sequence
  Description of Artificial Sequence: Synthetic oligonucleotide
uuagugcaccuuuugugga

SEQ ID NO: 2362290 - RNA, 19 nt, Artificial Sequence
  Description of Artificial Sequence: Synthetic oligonucleotide
acaggcucuauccccggac

SEQ ID NO: 2362291 - RNA, 19 nt, Artificial Sequence
  Description of Artificial Sequence: Synthetic oligonucleotide
guaggguuuacagaguuca

SEQ ID NO: 2362292 - RNA, 19 nt, Artificial Sequence
  Description of Artificial Sequence: Synthetic oligonucleotide
gugacauaggccaccaugc

SEQ ID NO: 2362293 - RNA, 19 nt, Artificial Sequence
  Description of Artificial Sequence: Synthetic oligonucleotide
cagucagcaccacaguagg

SEQ ID NO: 2362294 - RNA, 19 nt, Artificial Sequence
  Description of Artificial Sequence: Synthetic oligonucleotide
ugguuagugcaccuuuugu

SEQ ID NO: 2362295 - RNA, 19 nt, Artificial Sequence
  Description of Artificial Sequence: Synthetic oligonucleotide
ggugacauaggccaccaug

SEQ ID NO: 2362296 - RNA, 19 nt, Artificial Sequence
  Description of Artificial Sequence: Synthetic oligonucleotide
aggccagguaaccagcguc

SEQ ID NO: 2362297 - RNA, 19 nt, Artificial Sequence
  Description of Artificial Sequence: Synthetic oligonucleotide
accagcguccaccaggaug

SEQ ID NO: 2362298 - RNA, 19 nt, Artificial Sequence
  Description of Artificial Sequence: Synthetic oligonucleotide
cugcaaacuuccucagugg

SEQ ID NO: 2362299 - RNA, 19 nt, Artificial Sequence
  Description of Artificial Sequence: Synthetic oligonucleotide
uauugacaauggauccugc

SEQ ID NO: 2362300 - RNA, 19 nt, Artificial Sequence
  Description of Artificial Sequence: Synthetic oligonucleotide
uaaccagcguccaccagga

SEQ ID NO: 2362301 - RNA, 19 nt, Artificial Sequence
  Description of Artificial Sequence: Synthetic oligonucleotide
aguguaucccugaagcaag

SEQ ID NO: 2362302 - RNA, 19 nt, Artificial Sequence
  Description of Artificial Sequence: Synthetic oligonucleotide
cacggggccaauauugcgc

SEQ ID NO: 2362303 - RNA, 19 nt, Artificial Sequence
  Description of Artificial Sequence: Synthetic oligonucleotide
uggauccugccacuccacg

SEQ ID NO: 2362304 - RNA, 19 nt, Artificial Sequence
  Description of Artificial Sequence: Synthetic oligonucleotide
agugcaccuuuuguggagc

SEQ ID NO: 2362305 - RNA, 19 nt, Artificial Sequence
  Description of Artificial Sequence: Synthetic oligonucleotide
acgcccaaucccuuucccc

SEQ ID NO: 2362306 - RNA, 19 nt, Artificial Sequence
  Description of Artificial Sequence: Synthetic oligonucleotide
uauguggucaggccaggaa

SEQ ID NO: 2362307 - RNA, 19 nt, Artificial Sequence
  Description of Artificial Sequence: Synthetic oligonucleotide
caaaguucgggucugcaga

SEQ ID NO: 2362308 - RNA, 19 nt, Artificial Sequence
  Description of Artificial Sequence: Synthetic oligonucleotide
cacauucacauugaaggac

SEQ ID NO: 2362309 - RNA, 19 nt, Artificial Sequence
  Description of Artificial Sequence: Synthetic oligonucleotide
uccccggacacucuuuggc

SEQ ID NO: 2362310 - RNA, 19 nt, Artificial Sequence
  Description of Artificial Sequence: Synthetic oligonucleotide
ugccaauaccaguguaucc

SEQ ID NO: 2362311 - RNA, 19 nt, Artificial Sequence
  Description of Artificial Sequence: Synthetic oligonucleotide
uugcgcagugccuucucgg

SEQ ID NO: 2362312 - RNA, 19 nt, Artificial Sequence
  Description of Artificial Sequence: Synthetic oligonucleotide
ugucacggccaccacuuug

SEQ ID NO: 2362313 - RNA, 19 nt, Artificial Sequence
  Description of Artificial Sequence: Synthetic oligonucleotide
gccacugaaacucagcuuc

SEQ ID NO: 2362314 - RNA, 19 nt, Artificial Sequence
  Description of Artificial Sequence: Synthetic oligonucleotide
cacagugucacgcccaauc

SEQ ID NO: 2362315 - RNA, 19 nt, Artificial Sequence
  Description of Artificial Sequence: Synthetic oligonucleotide
uagugcaccuuuuguggag

SEQ ID NO: 2362316 - RNA, 19 nt, Artificial Sequence
  Description of Artificial Sequence: Synthetic oligonucleotide
augguuagugcaccuuuug

SEQ ID NO: 2362317 - RNA, 19 nt, Artificial Sequence
  Description of Artificial Sequence: Synthetic oligonucleotide
uauccccggacacucuuug

SEQ ID NO: 2362318 - RNA, 19 nt, Artificial Sequence
  Description of Artificial Sequence: Synthetic oligonucleotide
caugcccuuggcuaccacc

SEQ ID NO: 2362319 - RNA, 19 nt, Artificial Sequence
  Description of Artificial Sequence: Synthetic oligonucleotide
ugcauuggugcgugucacg

SEQ ID NO: 2362320 - RNA, 19 nt, Artificial Sequence
  Description of Artificial Sequence: Synthetic oligonucleotide
cagguaaccagcguccacc

SEQ ID NO: 2362321 - RNA, 19 nt, Artificial Sequence
  Description of Artificial Sequence: Synthetic oligonucleotide
uccacggggccaauauugc

SEQ ID NO: 2362322 - RNA, 19 nt, Artificial Sequence
  Description of Artificial Sequence: Synthetic oligonucleotide
agacucuaugaaaggcugc

SEQ ID NO: 2362323 - RNA, 19 nt, Artificial Sequence
  Description of Artificial Sequence: Synthetic oligonucleotide
gguuuacagaguucacccg

SEQ ID NO: 2362324 - RNA, 19 nt, Artificial Sequence
  Description of Artificial Sequence: Synthetic oligonucleotide
gucgcugagcaggaaaagg

SEQ ID NO: 2362325 - RNA, 19 nt, Artificial Sequence
  Description of Artificial Sequence: Synthetic oligonucleotide
ucuaggaggccagguaacc

SEQ ID NO: 2362326 - RNA, 19 nt, Artificial Sequence
  Description of Artificial Sequence: Synthetic oligonucleotide
ugcaacacagagcgcacau

SEQ ID NO: 2362327 - RNA, 19 nt, Artificial Sequence
  Description of Artificial Sequence: Synthetic oligonucleotide
gguagacucuaugaaaggc

SEQ ID NO: 2362328 - RNA, 19 nt, Artificial Sequence
  Description of Artificial Sequence: Synthetic oligonucleotide
uacagaguucacccggauc

SEQ ID NO: 2362329 - RNA, 19 nt, Artificial Sequence
  Description of Artificial Sequence: Synthetic oligonucleotide
aguuccauggccauggcuu

SEQ ID NO: 2362330 - RNA, 19 nt, Artificial Sequence
  Description of Artificial Sequence: Synthetic oligonucleotide
ucaggccacugaaacucag

SEQ ID NO: 2362331 - RNA, 19 nt, Artificial Sequence
  Description of Artificial Sequence: Synthetic oligonucleotide
ucacccggaucuugugugg

SEQ ID NO: 2362332 - RNA, 19 nt, Artificial Sequence
  Description of Artificial Sequence: Synthetic oligonucleotide
gagccaguggucgaggcgc

SEQ ID NO: 2362333 - RNA, 19 nt, Artificial Sequence
  Description of Artificial Sequence: Synthetic oligonucleotide
auguggucaggccaggaaa

SEQ ID NO: 2362334 - RNA, 19 nt, Artificial Sequence
  Description of Artificial Sequence: Synthetic oligonucleotide
gaaggaccugucaaacacc

SEQ ID NO: 2362335 - RNA, 19 nt, Artificial Sequence
  Description of Artificial Sequence: Synthetic oligonucleotide
gacucuaugaaaggcugca

SEQ ID NO: 2362336 - RNA, 19 nt, Artificial Sequence
  Description of Artificial Sequence: Synthetic oligonucleotide
ucacauugaaggaccuguc

SEQ ID NO: 2362337 - RNA, 19 nt, Artificial Sequence
  Description of Artificial Sequence: Synthetic oligonucleotide
gaagcaagagaugggcuca

SEQ ID NO: 2362338 - RNA, 19 nt, Artificial Sequence
  Description of Artificial Sequence: Synthetic oligonucleotide
cagguccacgcacacaggc

SEQ ID NO: 2362339 - RNA, 19 nt, Artificial Sequence
  Description of Artificial Sequence: Synthetic oligonucleotide
gccaauaccaguguauccc

SEQ ID NO: 2362340 - RNA, 19 nt, Artificial Sequence
  Description of Artificial Sequence: Synthetic oligonucleotide
agacuuucuugcccauguc

SEQ ID NO: 2362341 - RNA, 19 nt, Artificial Sequence
  Description of Artificial Sequence: Synthetic oligonucleotide
aggcucuauccccggacac

SEQ ID NO: 2362342 - RNA, 19 nt, Artificial Sequence
  Description of Artificial Sequence: Synthetic oligonucleotide
ucgguggccucccagucac

SEQ ID NO: 2362343 - RNA, 19 nt, Artificial Sequence
  Description of Artificial Sequence: Synthetic oligonucleotide
guaucccugaagcaagaga

SEQ ID NO: 2362344 - RNA, 19 nt, Artificial Sequence
  Description of Artificial Sequence: Synthetic oligonucleotide
acucuaugaaaggcugcac

SEQ ID NO: 2362345 - RNA, 19 nt, Artificial Sequence
  Description of Artificial Sequence: Synthetic oligonucleotide
acaauggauccugccacuc

SEQ ID NO: 2362346 - RNA, 19 nt, Artificial Sequence
  Description of Artificial Sequence: Synthetic oligonucleotide
gaggucagaggaaguuugg

SEQ ID NO: 2362347 - RNA, 19 nt, Artificial Sequence
  Description of Artificial Sequence: Synthetic oligonucleotide
ucaugaggucagaggaagu

SEQ ID NO: 2362348 - RNA, 19 nt, Artificial Sequence
  Description of Artificial Sequence: Synthetic oligonucleotide
cuugcaacacagagcgcac

SEQ ID NO: 2362349 - RNA, 19 nt, Artificial Sequence
  Description of Artificial Sequence: Synthetic oligonucleotide
aacaccuccuugguagacu

SEQ ID NO: 2362350 - RNA, 19 nt, Artificial Sequence
  Description of Artificial Sequence: Synthetic oligonucleotide
aguaggguuuacagaguuc

SEQ ID NO: 2362351 - RNA, 19 nt, Artificial Sequence
  Description of Artificial Sequence: Synthetic oligonucleotide
gauauugacaauggauccu

SEQ ID NO: 2362352 - RNA, 19 nt, Artificial Sequence
  Description of Artificial Sequence: Synthetic oligonucleotide
gcuguugacaacguccucc

SEQ ID NO: 2362353 - RNA, 19 nt, Artificial Sequence
  Description of Artificial Sequence: Synthetic oligonucleotide
agugucacgcccaaucccu

SEQ ID NO: 2362354 - RNA, 19 nt, Artificial Sequence
  Description of Artificial Sequence: Synthetic oligonucleotide
ggauccugccacuccacgg

SEQ ID NO: 2362355 - RNA, 19 nt, Artificial Sequence
  Description of Artificial Sequence: Synthetic oligonucleotide
uucacagugucacgcccaa

SEQ ID NO: 2362356 - RNA, 19 nt, Artificial Sequence
  Description of Artificial Sequence: Synthetic oligonucleotide
uggguggcgcuccuugagc

SEQ ID NO: 2362357 - RNA, 19 nt, Artificial Sequence
  Description of Artificial Sequence: Synthetic oligonucleotide
cauugaaggaccugucaaa

SEQ ID NO: 2362358 - RNA, 19 nt, Artificial Sequence
  Description of Artificial Sequence: Synthetic oligonucleotide
uucgggucugcagagacuu

SEQ ID NO: 2362359 - RNA, 19 nt, Artificial Sequence
  Description of Artificial Sequence: Synthetic oligonucleotide
accccugcauuguucacca

SEQ ID NO: 2362360 - RNA, 19 nt, Artificial Sequence
  Description of Artificial Sequence: Synthetic oligonucleotide
ucuauccccggacacucuu

SEQ ID NO: 2362361 - RNA, 19 nt, Artificial Sequence
  Description of Artificial Sequence: Synthetic oligonucleotide
uuggcaaaguucgggucug

SEQ ID NO: 2362362 - RNA, 19 nt, Artificial Sequence
  Description of Artificial Sequence: Synthetic oligonucleotide
ugucgcugagcaggaaaag

SEQ ID NO: 2362363 - RNA, 19 nt, Artificial Sequence
  Description of Artificial Sequence: Synthetic oligonucleotide
caauaccaguguaucccug

SEQ ID NO: 2362364 - RNA, 19 nt, Artificial Sequence
  Description of Artificial Sequence: Synthetic oligonucleotide
cagucacccagguccacgc

SEQ ID NO: 2362365 - RNA, 19 nt, Artificial Sequence
  Description of Artificial Sequence: Synthetic oligonucleotide
uuacagaguucacccggau

SEQ ID NO: 2362366 - RNA, 19 nt, Artificial Sequence
  Description of Artificial Sequence: Synthetic oligonucleotide
cauuggugcgugucacggc

SEQ ID NO: 2362367 - RNA, 19 nt, Artificial Sequence
  Description of Artificial Sequence: Synthetic oligonucleotide
aagcaagagaugggcucag

SEQ ID NO: 2362368 - RNA, 19 nt, Artificial Sequence
  Description of Artificial Sequence: Synthetic oligonucleotide
cacauugaaggaccuguca

SEQ ID NO: 2362369 - RNA, 19 nt, Artificial Sequence
  Description of Artificial Sequence: Synthetic oligonucleotide
ccuuuuguggagcuguaug

SEQ ID NO: 2362370 - RNA, 19 nt, Artificial Sequence
  Description of Artificial Sequence: Synthetic oligonucleotide
cauagggagcaagucauga

SEQ ID NO: 2362371 - RNA, 19 nt, Artificial Sequence
  Description of Artificial Sequence: Synthetic oligonucleotide
agggagcaagucaugaggu

SEQ ID NO: 2362372 - RNA, 19 nt, Artificial Sequence
  Description of Artificial Sequence: Synthetic oligonucleotide
auaccaguguaucccugaa

SEQ ID NO: 2362373 - RNA, 19 nt, Artificial Sequence
  Description of Artificial Sequence: Synthetic oligonucleotide
gcauuggugcgugucacgg

SEQ ID NO: 2362374 - RNA, 19 nt, Artificial Sequence
  Description of Artificial Sequence: Synthetic oligonucleotide
ccaugcuggagauauugac

SEQ ID NO: 2362375 - RNA, 19 nt, Artificial Sequence
  Description of Artificial Sequence: Synthetic oligonucleotide
guagacucuaugaaaggcu

SEQ ID NO: 2362376 - RNA, 19 nt, Artificial Sequence
  Description of Artificial Sequence: Synthetic oligonucleotide
ggagcaagucaugagguca

SEQ ID NO: 2362377 - RNA, 19 nt, Artificial Sequence
  Description of Artificial Sequence: Synthetic oligonucleotide
uauugcgcagugccuucuc

SEQ ID NO: 2362378 - RNA, 19 nt, Artificial Sequence
  Description of Artificial Sequence: Synthetic oligonucleotide
cuuuccccgccccugucac

SEQ ID NO: 2362379 - RNA, 19 nt, Artificial Sequence
  Description of Artificial Sequence: Synthetic oligonucleotide
agguccacggggccaauau

SEQ ID NO: 2362380 - RNA, 19 nt, Artificial Sequence
  Description of Artificial Sequence: Synthetic oligonucleotide
uggccccaguuccauggcc

SEQ ID NO: 2362381 - RNA, 19 nt, Artificial Sequence
  Description of Artificial Sequence: Synthetic oligonucleotide
caccccugcauuguucacc

SEQ ID NO: 2362382 - RNA, 19 nt, Artificial Sequence
  Description of Artificial Sequence: Synthetic oligonucleotide
ugcugccaauaccagugua

SEQ ID NO: 2362383 - RNA, 19 nt, Artificial Sequence
  Description of Artificial Sequence: Synthetic oligonucleotide
cacagagcgcacauucaca

SEQ ID NO: 2362384 - RNA, 19 nt, Artificial Sequence
  Description of Artificial Sequence: Synthetic oligonucleotide
ugcgucuggcggucuagga

SEQ ID NO: 2362385 - RNA, 19 nt, Artificial Sequence
  Description of Artificial Sequence: Synthetic oligonucleotide
cuucucgguggccucccag

SEQ ID NO: 2362386 - RNA, 19 nt, Artificial Sequence
  Description of Artificial Sequence: Synthetic oligonucleotide
ucgaggguggggccaggga

SEQ ID NO: 2362387 - RNA, 19 nt, Artificial Sequence
  Description of Artificial Sequence: Synthetic oligonucleotide
agagacuuucuugcccaug

SEQ ID NO: 2362388 - RNA, 19 nt, Artificial Sequence
  Description of Artificial Sequence: Synthetic oligonucleotide
ggucuaggaggccagguaa

SEQ ID NO: 2362389 - RNA, 19 nt, Artificial Sequence
  Description of Artificial Sequence: Synthetic oligonucleotide
uuggugcgugucacggcca

SEQ ID NO: 2362390 - RNA, 19 nt, Artificial Sequence
  Description of Artificial Sequence: Synthetic oligonucleotide
agucagcaccacaguaggg

SEQ ID NO: 2362391 - RNA, 19 nt, Artificial Sequence
  Description of Artificial Sequence: Synthetic oligonucleotide
ggaaaaggaugcuguugac

SEQ ID NO: 2362392 - RNA, 19 nt, Artificial Sequence
  Description of Artificial Sequence: Synthetic oligonucleotide
uggcggucuaggaggccag

SEQ ID NO: 2362393 - RNA, 19 nt, Artificial Sequence
  Description of Artificial Sequence: Synthetic oligonucleotide
uugcaacacagagcgcaca

SEQ ID NO: 2362394 - RNA, 19 nt, Artificial Sequence
  Description of Artificial Sequence: Synthetic oligonucleotide
gcuuuggucagcaugguua

SEQ ID NO: 2362395 - RNA, 19 nt, Artificial Sequence
  Description of Artificial Sequence: Synthetic oligonucleotide
gucgaggcgcugcugucgc

SEQ ID NO: 2362396 - RNA, 19 nt, Artificial Sequence
  Description of Artificial Sequence: Synthetic oligonucleotide
gguccacgcacacaggcuc

SEQ ID NO: 2362397 - RNA, 19 nt, Artificial Sequence
  Description of Artificial Sequence: Synthetic oligonucleotide
uggugcgugucacggccac

SEQ ID NO: 2362398 - RNA, 19 nt, Artificial Sequence
  Description of Artificial Sequence: Synthetic oligonucleotide
acaacguccuccaccucug

SEQ ID NO: 2362399 - RNA, 19 nt, Artificial Sequence
  Description of Artificial Sequence: Synthetic oligonucleotide
caguggguggcgcuccuug

SEQ ID NO: 2362400 - RNA, 19 nt, Artificial Sequence
  Description of Artificial Sequence: Synthetic oligonucleotide
ggguccacugcgucuggcg

SEQ ID NO: 2362401 - RNA, 19 nt, Artificial Sequence
  Description of Artificial Sequence: Synthetic oligonucleotide
aguuuggcucgaggguggg

SEQ ID NO: 2362402 - RNA, 19 nt, Artificial Sequence
  Description of Artificial Sequence: Synthetic oligonucleotide
augaggucagaggaaguuu

SEQ ID NO: 2362403 - RNA, 19 nt, Artificial Sequence
  Description of Artificial Sequence: Synthetic oligonucleotide
ugccacuccacggcuaauc

SEQ ID NO: 2362404 - RNA, 19 nt, Artificial Sequence
  Description of Artificial Sequence: Synthetic oligonucleotide
aggucugcauuggugcgug

SEQ ID NO: 2362405 - RNA, 19 nt, Artificial Sequence
  Description of Artificial Sequence: Synthetic oligonucleotide
ugcccuuggcuaccaccug

SEQ ID NO: 2362406 - RNA, 19 nt, Artificial Sequence
  Description of Artificial Sequence: Synthetic oligonucleotide
cacgcccaaucccuuuccc

SEQ ID NO: 2362407 - RNA, 19 nt, Artificial Sequence
  Description of Artificial Sequence: Synthetic oligonucleotide
aaguucgggucugcagaga

SEQ ID NO: 2362408 - RNA, 19 nt, Artificial Sequence
  Description of Artificial Sequence: Synthetic oligonucleotide
ccucaggccacugaaacuc

SEQ ID NO: 2362409 - RNA, 19 nt, Artificial Sequence
  Description of Artificial Sequence: Synthetic oligonucleotide
gucacgcccaaucccuuuc

SEQ ID NO: 2362410 - RNA, 19 nt, Artificial Sequence
  Description of Artificial Sequence: Synthetic oligonucleotide
ugcuggagccaguggucga

SEQ ID NO: 2362411 - RNA, 19 nt, Artificial Sequence
  Description of Artificial Sequence: Synthetic oligonucleotide
gcaagucaugaggucagag

SEQ ID NO: 2362412 - RNA, 19 nt, Artificial Sequence
  Description of Artificial Sequence: Synthetic oligonucleotide
ggagcuguauguggucagg

SEQ ID NO: 2362413 - RNA, 19 nt, Artificial Sequence
  Description of Artificial Sequence: Synthetic oligonucleotide
agcgcacauucacauugaa

SEQ ID NO: 2362414 - RNA, 19 nt, Artificial Sequence
  Description of Artificial Sequence: Synthetic oligonucleotide
acggcuaaucaugcccuug

SEQ ID NO: 2362415 - RNA, 19 nt, Artificial Sequence
  Description of Artificial Sequence: Synthetic oligonucleotide
ggucagaggaaguuuggcu

SEQ ID NO: 2362416 - RNA, 19 nt, Artificial Sequence
  Description of Artificial Sequence: Synthetic oligonucleotide
auauugcgcagugccuucu

SEQ ID NO: 2362417 - RNA, 19 nt, Artificial Sequence
  Description of Artificial Sequence: Synthetic oligonucleotide
aucccugaagcaagagaug

SEQ ID NO: 2362418 - RNA, 19 nt, Artificial Sequence
  Description of Artificial Sequence: Synthetic oligonucleotide
ccuccagggguccacugcg

SEQ ID NO: 2362419 - RNA, 19 nt, Artificial Sequence
  Description of Artificial Sequence: Synthetic oligonucleotide
ggcuaaucaugcccuuggc

SEQ ID NO: 2362420 - RNA, 19 nt, Artificial Sequence
  Description of Artificial Sequence: Synthetic oligonucleotide
gucuaggaggccagguaac

SEQ ID NO: 2362421 - RNA, 19 nt, Artificial Sequence
  Description of Artificial Sequence: Synthetic oligonucleotide
guggcauagggagcaaguc

SEQ ID NO: 2362422 - RNA, 19 nt, Artificial Sequence
  Description of Artificial Sequence: Synthetic oligonucleotide
agucaugaggucagaggaa

SEQ ID NO: 2362423 - RNA, 19 nt, Artificial Sequence
  Description of Artificial Sequence: Synthetic oligonucleotide
ucccuuuccccgccccugu

SEQ ID NO: 2362424 - RNA, 19 nt, Artificial Sequence
  Description of Artificial Sequence: Synthetic oligonucleotide
cagggguccacugcgucug

SEQ ID NO: 2362425 - RNA, 19 nt, Artificial Sequence
  Description of Artificial Sequence: Synthetic oligonucleotide
cgcccaaucccuuuccccg

SEQ ID NO: 2362426 - RNA, 19 nt, Artificial Sequence
  Description of Artificial Sequence: Synthetic oligonucleotide
cacgcacacaggcucuauc

SEQ ID NO: 2362427 - RNA, 19 nt, Artificial Sequence
  Description of Artificial Sequence: Synthetic oligonucleotide
ugucacgcccaaucccuuu

SEQ ID NO: 2362428 - RNA, 19 nt, Artificial Sequence
  Description of Artificial Sequence: Synthetic oligonucleotide
gggccaauauugcgcagug

SEQ ID NO: 2362429 - RNA, 19 nt, Artificial Sequence
  Description of Artificial Sequence: Synthetic oligonucleotide
uuuggucagcaugguuagu

SEQ ID NO: 2362430 - RNA, 19 nt, Artificial Sequence
  Description of Artificial Sequence: Synthetic oligonucleotide
gcccucaggccacugaaac

SEQ ID NO: 2362431 - RNA, 19 nt, Artificial Sequence
  Description of Artificial Sequence: Synthetic oligonucleotide
cacuugcaacacagagcgc

SEQ ID NO: 2362432 - RNA, 19 nt, Artificial Sequence
  Description of Artificial Sequence: Synthetic oligonucleotide
cuguggcauagggagcaag

SEQ ID NO: 2362433 - RNA, 19 nt, Artificial Sequence
  Description of Artificial Sequence: Synthetic oligonucleotide
agcaccacaguaggguuua

SEQ ID NO: 2362434 - RNA, 19 nt, Artificial Sequence
  Description of Artificial Sequence: Synthetic oligonucleotide
uuuccccgccccugucacc

SEQ ID NO: 2362435 - RNA, 19 nt, Artificial Sequence
  Description of Artificial Sequence: Synthetic oligonucleotide
accuccuugguagacucua

SEQ ID NO: 2362436 - RNA, 19 nt, Artificial Sequence
  Description of Artificial Sequence: Synthetic oligonucleotide
cuaggaggccagguaacca

SEQ ID NO: 2362437 - RNA, 19 nt, Artificial Sequence
  Description of Artificial Sequence: Synthetic oligonucleotide
guuuggcucgagggugggg

SEQ ID NO: 2362438 - RNA, 19 nt, Artificial Sequence
  Description of Artificial Sequence: Synthetic oligonucleotide
ccccggacacucuuuggcg

SEQ ID NO: 2362439 - RNA, 19 nt, Artificial Sequence
  Description of Artificial Sequence: Synthetic oligonucleotide
ggucgaggcgcugcugucg

SEQ ID NO: 2362440 - RNA, 19 nt, Artificial Sequence
  Description of Artificial Sequence: Synthetic oligonucleotide
gcgcacauucacauugaag

SEQ ID NO: 2362441 - RNA, 19 nt, Artificial Sequence
  Description of Artificial Sequence: Synthetic oligonucleotide
caagagaugggcucagcuu

SEQ ID NO: 2362442 - RNA, 19 nt, Artificial Sequence
  Description of Artificial Sequence: Synthetic oligonucleotide
ucaugcccuuggcuaccac

SEQ ID NO: 2362443 - RNA, 19 nt, Artificial Sequence
  Description of Artificial Sequence: Synthetic oligonucleotide
guucacccggaucuugugu

SEQ ID NO: 2362444 - RNA, 19 nt, Artificial Sequence
  Description of Artificial Sequence: Synthetic oligonucleotide
gugcgugucacggccacca

SEQ ID NO: 2362445 - RNA, 19 nt, Artificial Sequence
  Description of Artificial Sequence: Synthetic oligonucleotide
gggcuuucacagugucacg

SEQ ID NO: 2362446 - RNA, 19 nt, Artificial Sequence
  Description of Artificial Sequence: Synthetic oligonucleotide
ccacggggccaauauugcg

SEQ ID NO: 2362447 - RNA, 19 nt, Artificial Sequence
  Description of Artificial Sequence: Synthetic oligonucleotide
cauucacauugaaggaccu

SEQ ID NO: 2362448 - RNA, 19 nt, Artificial Sequence
  Description of Artificial Sequence: Synthetic oligonucleotide
uccucaguggguggcgcuc

SEQ ID NO: 2362449 - RNA, 19 nt, Artificial Sequence
  Description of Artificial Sequence: Synthetic oligonucleotide
caggcucuauccccggaca

SEQ ID NO: 2362450 - RNA, 19 nt, Artificial Sequence
  Description of Artificial Sequence: Synthetic oligonucleotide
cggcuaaucaugcccuugg

SEQ ID NO: 2362451 - RNA, 19 nt, Artificial Sequence
  Description of Artificial Sequence: Synthetic oligonucleotide
aggaccugucaaacaccuc

SEQ ID NO: 2362452 - RNA, 19 nt, Artificial Sequence
  Description of Artificial Sequence: Synthetic oligonucleotide
ccuugguagacucuaugaa

SEQ ID NO: 2362453 - RNA, 19 nt, Artificial Sequence
  Description of Artificial Sequence: Synthetic oligonucleotide
ugcgugucacggccaccac

SEQ ID NO: 2362454 - RNA, 19 nt, Artificial Sequence
  Description of Artificial Sequence: Synthetic oligonucleotide
gggagcaagucaugagguc

SEQ ID NO: 2362455 - RNA, 19 nt, Artificial Sequence
  Description of Artificial Sequence: Synthetic oligonucleotide
cuaccaccugggacacuug

SEQ ID NO: 2362456 - RNA, 19 nt, Artificial Sequence
  Description of Artificial Sequence: Synthetic oligonucleotide
gagcgcacauucacauuga

SEQ ID NO: 2362457 - RNA, 19 nt, Artificial Sequence
  Description of Artificial Sequence: Synthetic oligonucleotide
cucgaggguggggccaggg

SEQ ID NO: 2362458 - RNA, 19 nt, Artificial Sequence
  Description of Artificial Sequence: Synthetic oligonucleotide
agcaugguuagugcaccuu

SEQ ID NO: 2362459 - RNA, 19 nt, Artificial Sequence
  Description of Artificial Sequence: Synthetic oligonucleotide
ugacaacguccuccaccuc

SEQ ID NO: 2362460 - RNA, 19 nt, Artificial Sequence
  Description of Artificial Sequence: Synthetic oligonucleotide
uggucgaggcgcugcuguc

SEQ ID NO: 2362461 - RNA, 19 nt, Artificial Sequence
  Description of Artificial Sequence: Synthetic oligonucleotide
agguccacgcacacaggcu

SEQ ID NO: 2362462 - RNA, 19 nt, Artificial Sequence
  Description of Artificial Sequence: Synthetic oligonucleotide
uggcaaaguucgggucugc

SEQ ID NO: 2362463 - RNA, 19 nt, Artificial Sequence
  Description of Artificial Sequence: Synthetic oligonucleotide
cuggcggucuaggaggcca

SEQ ID NO: 2362464 - RNA, 19 nt, Artificial Sequence
  Description of Artificial Sequence: Synthetic oligonucleotide
uggcuaccaccugggacac

SEQ ID NO: 2362465 - RNA, 19 nt, Artificial Sequence
  Description of Artificial Sequence: Synthetic oligonucleotide
agcaagucaugaggucaga

SEQ ID NO: 2362466 - RNA, 19 nt, Artificial Sequence
  Description of Artificial Sequence: Synthetic oligonucleotide
caauauugcgcagugccuu

SEQ ID NO: 2362467 - RNA, 19 nt, Artificial Sequence
  Description of Artificial Sequence: Synthetic oligonucleotide
ggcgaggcugaccaggucu

SEQ ID NO: 2362468 - RNA, 19 nt, Artificial Sequence
  Description of Artificial Sequence: Synthetic oligonucleotide
ggacacucuuuggcgaggc

SEQ ID NO: 2362469 - RNA, 19 nt, Artificial Sequence
  Description of Artificial Sequence: Synthetic oligonucleotide
guguaucccugaagcaaga

SEQ ID NO: 2362470 - RNA, 19 nt, Artificial Sequence
  Description of Artificial Sequence: Synthetic oligonucleotide
ccacaguaggguuuacaga

SEQ ID NO: 2362471 - RNA, 19 nt, Artificial Sequence
  Description of Artificial Sequence: Synthetic oligonucleotide
gaccugucaaacaccuccu

SEQ ID NO: 2362472 - RNA, 19 nt, Artificial Sequence
  Description of Artificial Sequence: Synthetic oligonucleotide
gcucuauccccggacacuc

SEQ ID NO: 2362473 - RNA, 19 nt, Artificial Sequence
  Description of Artificial Sequence: Synthetic oligonucleotide
aucaugcccuuggcuacca

SEQ ID NO: 2362474 - RNA, 19 nt, Artificial Sequence
  Description of Artificial Sequence: Synthetic oligonucleotide
uggcucgaggguggggcca

SEQ ID NO: 2362475 - RNA, 19 nt, Artificial Sequence
  Description of Artificial Sequence: Synthetic oligonucleotide
ccggacacucuuuggcgag

SEQ ID NO: 2362476 - RNA, 19 nt, Artificial Sequence
  Description of Artificial Sequence: Synthetic oligonucleotide
guauguggucaggccagga

SEQ ID NO: 2362477 - RNA, 19 nt, Artificial Sequence
  Description of Artificial Sequence: Synthetic oligonucleotide
cucgguggccucccaguca

SEQ ID NO: 2362478 - RNA, 19 nt, Artificial Sequence
  Description of Artificial Sequence: Synthetic oligonucleotide
ccagucacccagguccacg

SEQ ID NO: 2362479 - RNA, 19 nt, Artificial Sequence
  Description of Artificial Sequence: Synthetic oligonucleotide
cugggacacuugcaacaca

SEQ ID NO: 2362480 - RNA, 19 nt, Artificial Sequence
  Description of Artificial Sequence: Synthetic oligonucleotide
gaggccagguaaccagcgu

SEQ ID NO: 2362481 - RNA, 19 nt, Artificial Sequence
  Description of Artificial Sequence: Synthetic oligonucleotide
gcccaaucccuuuccccgc

SEQ ID NO: 2362482 - RNA, 19 nt, Artificial Sequence
  Description of Artificial Sequence: Synthetic oligonucleotide
ccugggacacuugcaacac

SEQ ID NO: 2362483 - RNA, 19 nt, Artificial Sequence
  Description of Artificial Sequence: Synthetic oligonucleotide
cgcacacaggcucuauccc

SEQ ID NO: 2362484 - RNA, 19 nt, Artificial Sequence
  Description of Artificial Sequence: Synthetic oligonucleotide
caugguuagugcaccuuuu

SEQ ID NO: 2362485 - RNA, 19 nt, Artificial Sequence
  Description of Artificial Sequence: Synthetic oligonucleotide
caugcagggcuuucacagu

SEQ ID NO: 2362486 - RNA, 19 nt, Artificial Sequence
  Description of Artificial Sequence: Synthetic oligonucleotide
uccacgcacacaggcucua

SEQ ID NO: 2362487 - RNA, 19 nt, Artificial Sequence
  Description of Artificial Sequence: Synthetic oligonucleotide
ucgggucugcagagacuuu

SEQ ID NO: 2362488 - RNA, 19 nt, Artificial Sequence
  Description of Artificial Sequence: Synthetic oligonucleotide
gacacucuuuggcgaggcu

SEQ ID NO: 2362489 - RNA, 19 nt, Artificial Sequence
  Description of Artificial Sequence: Synthetic oligonucleotide
cccaaucccuuuccccgcc

SEQ ID NO: 2362490 - RNA, 19 nt, Artificial Sequence
  Description of Artificial Sequence: Synthetic oligonucleotide
ccaguggucgaggcgcugc

SEQ ID NO: 2362491 - RNA, 19 nt, Artificial Sequence
  Description of Artificial Sequence: Synthetic oligonucleotide
ucgaggcgcugcugucgcu

SEQ ID NO: 2362492 - RNA, 19 nt, Artificial Sequence
  Description of Artificial Sequence: Synthetic oligonucleotide
ggccaauauugcgcagugc

SEQ ID NO: 2362493 - RNA, 19 nt, Artificial Sequence
  Description of Artificial Sequence: Synthetic oligonucleotide
ggcaaaguucgggucugca

SEQ ID NO: 2362494 - RNA, 19 nt, Artificial Sequence
  Description of Artificial Sequence: Synthetic oligonucleotide
gagaugggcucagcuuuua

SEQ ID NO: 2362495 - RNA, 19 nt, Artificial Sequence
  Description of Artificial Sequence: Synthetic oligonucleotide
cagaggaaguuuggcucga

SEQ ID NO: 2362496 - RNA, 19 nt, Artificial Sequence
  Description of Artificial Sequence: Synthetic oligonucleotide
ccaccugggacacuugcaa

SEQ ID NO: 2362497 - RNA, 19 nt, Artificial Sequence
  Description of Artificial Sequence: Synthetic oligonucleotide
ggcgcugcugucgcugagc

SEQ ID NO: 2362498 - RNA, 19 nt, Artificial Sequence
  Description of Artificial Sequence: Synthetic oligonucleotide
gcgaggcugaccaggucug

SEQ ID NO: 2362499 - RNA, 19 nt, Artificial Sequence
  Description of Artificial Sequence: Synthetic oligonucleotide
gcagugccuucucgguggc

SEQ ID NO: 2362500 - RNA, 19 nt, Artificial Sequence
  Description of Artificial Sequence: Synthetic oligonucleotide
gcaugguuagugcaccuuu

SEQ ID NO: 2362501 - RNA, 19 nt, Artificial Sequence
  Description of Artificial Sequence: Synthetic oligonucleotide
ggccccaguuccauggcca

SEQ ID NO: 2362502 - RNA, 19 nt, Artificial Sequence
  Description of Artificial Sequence: Synthetic oligonucleotide
gugcaccuuuuguggagcu

SEQ ID NO: 2362503 - RNA, 19 nt, Artificial Sequence
  Description of Artificial Sequence: Synthetic oligonucleotide
ccaauaccaguguaucccu

SEQ ID NO: 2362504 - RNA, 19 nt, Artificial Sequence
  Description of Artificial Sequence: Synthetic oligonucleotide
ggcggucuaggaggccagg

SEQ ID NO: 2362505 - RNA, 19 nt, Artificial Sequence
  Description of Artificial Sequence: Synthetic oligonucleotide
gcuaccaccugggacacuu

SEQ ID NO: 2362506 - RNA, 19 nt, Artificial Sequence
  Description of Artificial Sequence: Synthetic oligonucleotide
agccaguggucgaggcgcu

SEQ ID NO: 2362507 - RNA, 19 nt, Artificial Sequence
  Description of Artificial Sequence: Synthetic oligonucleotide
gcaggaaaaggaugcuguu

SEQ ID NO: 2362508 - RNA, 19 nt, Artificial Sequence
  Description of Artificial Sequence: Synthetic oligonucleotide
ggggccaauauugcgcagu

SEQ ID NO: 2362509 - RNA, 19 nt, Artificial Sequence
  Description of Artificial Sequence: Synthetic oligonucleotide
ccacggcuaaucaugcccu

SEQ ID NO: 2362510 - RNA, 19 nt, Artificial Sequence
  Description of Artificial Sequence: Synthetic oligonucleotide
ggugcgugucacggccacc

SEQ ID NO: 2362511 - RNA, 19 nt, Artificial Sequence
  Description of Artificial Sequence: Synthetic oligonucleotide
cgggucugcagagacuuuc

SEQ ID NO: 2362512 - RNA, 19 nt, Artificial Sequence
  Description of Artificial Sequence: Synthetic oligonucleotide
cucuauccccggacacucu

SEQ ID NO: 2362513 - RNA, 19 nt, Artificial Sequence
  Description of Artificial Sequence: Synthetic oligonucleotide
cuauccccggacacucuuu

SEQ ID NO: 2362514 - RNA, 19 nt, Artificial Sequence
  Description of Artificial Sequence: Synthetic oligonucleotide
ccuuuccccgccccuguca

SEQ ID NO: 2362515 - RNA, 19 nt, Artificial Sequence
  Description of Artificial Sequence: Synthetic oligonucleotide
ggcucuauccccggacacu

SEQ ID NO: 2362516 - RNA, 19 nt, Artificial Sequence
  Description of Artificial Sequence: Synthetic oligonucleotide
ggccacugaaacucagcuu

SEQ ID NO: 2362517 - RNA, 19 nt, Artificial Sequence
  Description of Artificial Sequence: Synthetic oligonucleotide
guccacgcacacaggcucu

SEQ ID NO: 2362518 - RNA, 19 nt, Artificial Sequence
  Description of Artificial Sequence: Synthetic oligonucleotide
gggguccacugcgucuggc

SEQ ID NO: 2362519 - RNA, 19 nt, Artificial Sequence
  Description of Artificial Sequence: Synthetic oligonucleotide
cagagacuuucuugcccau

SEQ ID NO: 2362520 - RNA, 19 nt, Artificial Sequence
  Description of Artificial Sequence: Synthetic oligonucleotide
ccaccccugcauuguucac

SEQ ID NO: 2362521 - RNA, 19 nt, Artificial Sequence
  Description of Artificial Sequence: Synthetic oligonucleotide
cagagcgcacauucacauu

SEQ ID NO: 2362522 - RNA, 19 nt, Artificial Sequence
  Description of Artificial Sequence: Synthetic oligonucleotide
ggccaggaaaggugacaua

SEQ ID NO: 2362523 - RNA, 19 nt, Artificial Sequence
  Description of Artificial Sequence: Synthetic oligonucleotide
cuccagggguccacugcgu

SEQ ID NO: 2362524 - RNA, 19 nt, Artificial Sequence
  Description of Artificial Sequence: Synthetic oligonucleotide
gcgugucacggccaccacu

SEQ ID NO: 2362525 - RNA, 19 nt, Artificial Sequence
  Description of Artificial Sequence: Synthetic oligonucleotide
gggcggggcuguggcauag

SEQ ID NO: 2362526 - RNA, 19 nt, Artificial Sequence
  Description of Artificial Sequence: Synthetic oligonucleotide
ggccaccccugcauuguuc

SEQ ID NO: 2362527 - RNA, 19 nt, Artificial Sequence
  Description of Artificial Sequence: Synthetic oligonucleotide
cggacacucuuuggcgagg

SEQ ID NO: 2362528 - RNA, 19 nt, Artificial Sequence
  Description of Artificial Sequence: Synthetic oligonucleotide
caguggucgaggcgcugcu

SEQ ID NO: 2362529 - RNA, 19 nt, Artificial Sequence
  Description of Artificial Sequence: Synthetic oligonucleotide
gggucugcagagacuuucu

SEQ ID NO: 2362530 - RNA, 19 nt, Artificial Sequence
  Description of Artificial Sequence: Synthetic oligonucleotide
cacugcgucuggcggucua

SEQ ID NO: 2362531 - RNA, 19 nt, Artificial Sequence
  Description of Artificial Sequence: Synthetic oligonucleotide
ccuuggcuaccaccuggga

SEQ ID NO: 2362532 - RNA, 19 nt, Artificial Sequence
  Description of Artificial Sequence: Synthetic oligonucleotide
cgugucacggccaccacuu

SEQ ID NO: 2362533 - RNA, 19 nt, Artificial Sequence
  Description of Artificial Sequence: Synthetic oligonucleotide
cacggcuaaucaugcccuu

SEQ ID NO: 2362534 - RNA, 19 nt, Artificial Sequence
  Description of Artificial Sequence: Synthetic oligonucleotide
cucaguggguggcgcuccu

SEQ ID NO: 2362535 - RNA, 19 nt, Artificial Sequence
  Description of Artificial Sequence: Synthetic oligonucleotide
cagggcccucaggccacug

SEQ ID NO: 2362536 - RNA, 19 nt, Artificial Sequence
  Description of Artificial Sequence: Synthetic oligonucleotide
ccaccacuuuggcuccuga

SEQ ID NO: 2362537 - RNA, 19 nt, Artificial Sequence
  Description of Artificial Sequence: Synthetic oligonucleotide
gccaguggucgaggcgcug

SEQ ID NO: 2362538 - RNA, 19 nt, Artificial Sequence
  Description of Artificial Sequence: Synthetic oligonucleotide
ccgccccugucaccagggc

SEQ ID NO: 2362539 - RNA, 19 nt, Artificial Sequence
  Description of Artificial Sequence: Synthetic oligonucleotide
gguggcgcuccuugagcuu

SEQ ID NO: 2362540 - RNA, 19 nt, Artificial Sequence
  Description of Artificial Sequence: Synthetic oligonucleotide
gugucacggccaccacuuu

SEQ ID NO: 2362541 - RNA, 19 nt, Artificial Sequence
  Description of Artificial Sequence: Synthetic oligonucleotide
gugucacgcccaaucccuu

SEQ ID NO: 2362542 - RNA, 19 nt, Artificial Sequence
  Description of Artificial Sequence: Synthetic oligonucleotide
gcggucuaggaggccaggu

SEQ ID NO: 2362543 - RNA, 19 nt, Artificial Sequence
  Description of Artificial Sequence: Synthetic oligonucleotide
cggucuaggaggccaggua

SEQ ID NO: 2362544 - RNA, 19 nt, Artificial Sequence
  Description of Artificial Sequence: Synthetic oligonucleotide
ccacuccacggcuaaucau

SEQ ID NO: 2362545 - RNA, 19 nt, Artificial Sequence
  Description of Artificial Sequence: Synthetic oligonucleotide
gccccaguuccauggccau

SEQ ID NO: 2362546 - RNA, 19 nt, Artificial Sequence
  Description of Artificial Sequence: Synthetic oligonucleotide
ggucugcauuggugcgugu

SEQ ID NO: 2362547 - RNA, 19 nt, Artificial Sequence
  Description of Artificial Sequence: Synthetic oligonucleotide
cugccacuccacggcuaau

SEQ ID NO: 2362548 - RNA, 19 nt, Artificial Sequence
  Description of Artificial Sequence: Synthetic oligonucleotide
cagcguccaccaggaugcu

SEQ ID NO: 2362549 - RNA, 19 nt, Artificial Sequence
  Description of Artificial Sequence: Synthetic oligonucleotide
ccaccaugcuggagauauu

SEQ ID NO: 2362550 - RNA, 19 nt, Artificial Sequence
  Description of Artificial Sequence: Synthetic oligonucleotide
ccacgcacacaggcucuau

SEQ ID NO: 2362551 - RNA, 19 nt, Artificial Sequence
  Description of Artificial Sequence: Synthetic oligonucleotide
acaguuauccccuagcacc

SEQ ID NO: 2362552 - RNA, 19 nt, Artificial Sequence
  Description of Artificial Sequence: Synthetic oligonucleotide
aaaucagcaaaacaguuau

SEQ ID NO: 2362553 - RNA, 19 nt, Artificial Sequence
  Description of Artificial Sequence: Synthetic oligonucleotide
aacaguuauccccuagcac

SEQ ID NO: 2362554 - RNA, 19 nt, Artificial Sequence
  Description of Artificial Sequence: Synthetic oligonucleotide
ugguaugccaguuacagcu

SEQ ID NO: 2362555 - RNA, 19 nt, Artificial Sequence
  Description of Artificial Sequence: Synthetic oligonucleotide
augacagccgcuuuccugc

SEQ ID NO: 2362556 - RNA, 19 nt, Artificial Sequence
  Description of Artificial Sequence: Synthetic oligonucleotide
aaagauacacccuugucuu

SEQ ID NO: 2362557 - RNA, 19 nt, Artificial Sequence
  Description of Artificial Sequence: Synthetic oligonucleotide
cuugucuucagcuaccaag

SEQ ID NO: 2362558 - RNA, 19 nt, Artificial Sequence
  Description of Artificial Sequence: Synthetic oligonucleotide
ugugaacuaaaucagcaaa

SEQ ID NO: 2362559 - RNA, 19 nt, Artificial Sequence
  Description of Artificial Sequence: Synthetic oligonucleotide
gaagcugucaaggcgagcg

SEQ ID NO: 2362560 - RNA, 19 nt, Artificial Sequence
  Description of Artificial Sequence: Synthetic oligonucleotide
agaaacgcuggcuaugagg

SEQ ID NO: 2362561 - RNA, 19 nt, Artificial Sequence
  Description of Artificial Sequence: Synthetic oligonucleotide
caauugugaacuaaaucag

SEQ ID NO: 2362562 - RNA, 19 nt, Artificial Sequence
  Description of Artificial Sequence: Synthetic oligonucleotide
uagaugauggguuggcggg

SEQ ID NO: 2362563 - RNA, 19 nt, Artificial Sequence
  Description of Artificial Sequence: Synthetic oligonucleotide
aaacaguuauccccuagca

SEQ ID NO: 2362564 - RNA, 19 nt, Artificial Sequence
  Description of Artificial Sequence: Synthetic oligonucleotide
aacgaggugggcaugacag

SEQ ID NO: 2362565 - RNA, 19 nt, Artificial Sequence
  Description of Artificial Sequence: Synthetic oligonucleotide
aacgcuggcuaugaggugg

SEQ ID NO: 2362566 - RNA, 19 nt, Artificial Sequence
  Description of Artificial Sequence: Synthetic oligonucleotide
ucugaaaagccagaguccc

SEQ ID NO: 2362567 - RNA, 19 nt, Artificial Sequence
  Description of Artificial Sequence: Synthetic oligonucleotide
guagaugauggguuggcgg

SEQ ID NO: 2362568 - RNA, 19 nt, Artificial Sequence
  Description of Artificial Sequence: Synthetic oligonucleotide
aaucgugagauguccgcag

SEQ ID NO: 2362569 - RNA, 19 nt, Artificial Sequence
  Description of Artificial Sequence: Synthetic oligonucleotide
uccaauugugaacuaaauc

SEQ ID NO: 2362570 - RNA, 19 nt, Artificial Sequence
  Description of Artificial Sequence: Synthetic oligonucleotide
ugagauguccgcaggcagg

SEQ ID NO: 2362571 - RNA, 19 nt, Artificial Sequence
  Description of Artificial Sequence: Synthetic oligonucleotide
ccaauugugaacuaaauca

SEQ ID NO: 2362572 - RNA, 19 nt, Artificial Sequence
  Description of Artificial Sequence: Synthetic oligonucleotide
uguucaacagugcugccgu

SEQ ID NO: 2362573 - RNA, 19 nt, Artificial Sequence
  Description of Artificial Sequence: Synthetic oligonucleotide
aguccucugcuuccaaucc

SEQ ID NO: 2362574 - RNA, 19 nt, Artificial Sequence
  Description of Artificial Sequence: Synthetic oligonucleotide
uuauccccuagcaccaggg

SEQ ID NO: 2362575 - RNA, 19 nt, Artificial Sequence
  Description of Artificial Sequence: Synthetic oligonucleotide
uguucagagaggccuagca

SEQ ID NO: 2362576 - RNA, 19 nt, Artificial Sequence
  Description of Artificial Sequence: Synthetic oligonucleotide
aaagccagagucccagucu

SEQ ID NO: 2362577 - RNA, 19 nt, Artificial Sequence
  Description of Artificial Sequence: Synthetic oligonucleotide
guucugaggaugcuuggcg

SEQ ID NO: 2362578 - RNA, 19 nt, Artificial Sequence
  Description of Artificial Sequence: Synthetic oligonucleotide
ugaagcccugaacuggcgg

SEQ ID NO: 2362579 - RNA, 19 nt, Artificial Sequence
  Description of Artificial Sequence: Synthetic oligonucleotide
caggcaagcaucuggagug

SEQ ID NO: 2362580 - RNA, 19 nt, Artificial Sequence
  Description of Artificial Sequence: Synthetic oligonucleotide
agugcugccguccaguccu

SEQ ID NO: 2362581 - RNA, 19 nt, Artificial Sequence
  Description of Artificial Sequence: Synthetic oligonucleotide
aucuggaguggacuugggc

SEQ ID NO: 2362582 - RNA, 19 nt, Artificial Sequence
  Description of Artificial Sequence: Synthetic oligonucleotide
aagauacacccuugucuuc

SEQ ID NO: 2362583 - RNA, 19 nt, Artificial Sequence
  Description of Artificial Sequence: Synthetic oligonucleotide
auugugaacuaaaucagca

SEQ ID NO: 2362584 - RNA, 19 nt, Artificial Sequence
  Description of Artificial Sequence: Synthetic oligonucleotide
aucacuuuuggguuugggu

SEQ ID NO: 2362585 - RNA, 19 nt, Artificial Sequence
  Description of Artificial Sequence: Synthetic oligonucleotide
ucgggguacaccaccauca

SEQ ID NO: 2362586 - RNA, 19 nt, Artificial Sequence
  Description of Artificial Sequence: Synthetic oligonucleotide
ugcaaaucgugagaugucc

SEQ ID NO: 2362587 - RNA, 19 nt, Artificial Sequence
  Description of Artificial Sequence: Synthetic oligonucleotide
ucaaagauacacccuuguc

SEQ ID NO: 2362588 - RNA, 19 nt, Artificial Sequence
  Description of Artificial Sequence: Synthetic oligonucleotide
aagcugucaaggcgagcgc

SEQ ID NO: 2362589 - RNA, 19 nt, Artificial Sequence
  Description of Artificial Sequence: Synthetic oligonucleotide
cuggaguggacuugggccg

SEQ ID NO: 2362590 - RNA, 19 nt, Artificial Sequence
  Description of Artificial Sequence: Synthetic oligonucleotide
ucucaaagauacacccuug

SEQ ID NO: 2362591 - RNA, 19 nt, Artificial Sequence
  Description of Artificial Sequence: Synthetic oligonucleotide
uacacccuugucuucagcu

SEQ ID NO: 2362592 - RNA, 19 nt, Artificial Sequence
  Description of Artificial Sequence: Synthetic oligonucleotide
ugccugacaccucugaaaa

SEQ ID NO: 2362593 - RNA, 19 nt, Artificial Sequence
  Description of Artificial Sequence: Synthetic oligonucleotide
gcugcgacaguucaugagg

SEQ ID NO: 2362594 - RNA, 19 nt, Artificial Sequence
  Description of Artificial Sequence: Synthetic oligonucleotide
uacagcuugcccugcuacg

SEQ ID NO: 2362595 - RNA, 19 nt, Artificial Sequence
  Description of Artificial Sequence: Synthetic oligonucleotide
uucugaggaugcuuggcgc

SEQ ID NO: 2362596 - RNA, 19 nt, Artificial Sequence
  Description of Artificial Sequence: Synthetic oligonucleotide
ucugaggaugcuuggcgcc

SEQ ID NO: 2362597 - RNA, 19 nt, Artificial Sequence
  Description of Artificial Sequence: Synthetic oligonucleotide
ucccuaggaugucucaaag

SEQ ID NO: 2362598 - RNA, 19 nt, Artificial Sequence
  Description of Artificial Sequence: Synthetic oligonucleotide
uaugagguggccguucuga

SEQ ID NO: 2362599 - RNA, 19 nt, Artificial Sequence
  Description of Artificial Sequence: Synthetic oligonucleotide
uugugaacuaaaucagcaa

SEQ ID NO: 2362600 - RNA, 19 nt, Artificial Sequence
  Description of Artificial Sequence: Synthetic oligonucleotide
gacaguuccuccucucgcc

SEQ ID NO: 2362601 - RNA, 19 nt, Artificial Sequence
  Description of Artificial Sequence: Synthetic oligonucleotide
acagcuugcccugcuacgc

SEQ ID NO: 2362602 - RNA, 19 nt, Artificial Sequence
  Description of Artificial Sequence: Synthetic oligonucleotide
ugucucaaagauacacccu

SEQ ID NO: 2362603 - RNA, 19 nt, Artificial Sequence
  Description of Artificial Sequence: Synthetic oligonucleotide
agacagaauccucuuccag

SEQ ID NO: 2362604 - RNA, 19 nt, Artificial Sequence
  Description of Artificial Sequence: Synthetic oligonucleotide
aucugaagcccugaacugg

SEQ ID NO: 2362605 - RNA, 19 nt, Artificial Sequence
  Description of Artificial Sequence: Synthetic oligonucleotide
gagguggccguucugagga

SEQ ID NO: 2362606 - RNA, 19 nt, Artificial Sequence
  Description of Artificial Sequence: Synthetic oligonucleotide
gaggacggugggcaggugg

SEQ ID NO: 2362607 - RNA, 19 nt, Artificial Sequence
  Description of Artificial Sequence: Synthetic oligonucleotide
ucacugacugagaaacgcu

SEQ ID NO: 2362608 - RNA, 19 nt, Artificial Sequence
  Description of Artificial Sequence: Synthetic oligonucleotide
ugggccagacauuggaggc

SEQ ID NO: 2362609 - RNA, 19 nt, Artificial Sequence
  Description of Artificial Sequence: Synthetic oligonucleotide
ugccauagcugcccgacga

SEQ ID NO: 2362610 - RNA, 19 nt, Artificial Sequence
  Description of Artificial Sequence: Synthetic oligonucleotide
uccccuagcaccaggggcu

SEQ ID NO: 2362611 - RNA, 19 nt, Artificial Sequence
  Description of Artificial Sequence: Synthetic oligonucleotide
caaagauacacccuugucu

SEQ ID NO: 2362612 - RNA, 19 nt, Artificial Sequence
  Description of Artificial Sequence: Synthetic oligonucleotide
ggugguaugccaguuacag

SEQ ID NO: 2362613 - RNA, 19 nt, Artificial Sequence
  Description of Artificial Sequence: Synthetic oligonucleotide
agcaaaacaguuauccccu

SEQ ID NO: 2362614 - RNA, 19 nt, Artificial Sequence
  Description of Artificial Sequence: Synthetic oligonucleotide
uauccccuagcaccagggg

SEQ ID NO: 2362615 - RNA, 19 nt, Artificial Sequence
  Description of Artificial Sequence: Synthetic oligonucleotide
aaggcgagcgcugugcaug

SEQ ID NO: 2362616 - RNA, 19 nt, Artificial Sequence
  Description of Artificial Sequence: Synthetic oligonucleotide
cucaggaagcugucaaggc

SEQ ID NO: 2362617 - RNA, 19 nt, Artificial Sequence
  Description of Artificial Sequence: Synthetic oligonucleotide
caaaacaguuauccccuag

SEQ ID NO: 2362618 - RNA, 19 nt, Artificial Sequence
  Description of Artificial Sequence: Synthetic oligonucleotide
cagacauuggaggcgagcc

SEQ ID NO: 2362619 - RNA, 19 nt, Artificial Sequence
  Description of Artificial Sequence: Synthetic oligonucleotide
agcuccauccaauugugaa

SEQ ID NO: 2362620 - RNA, 19 nt, Artificial Sequence
  Description of Artificial Sequence: Synthetic oligonucleotide
cugacaccucugaaaagcc

SEQ ID NO: 2362621 - RNA, 19 nt, Artificial Sequence
  Description of Artificial Sequence: Synthetic oligonucleotide
aucgugagauguccgcagg

SEQ ID NO: 2362622 - RNA, 19 nt, Artificial Sequence
  Description of Artificial Sequence: Synthetic oligonucleotide
cugcgacaguucaugaggg

SEQ ID NO: 2362623 - RNA, 19 nt, Artificial Sequence
  Description of Artificial Sequence: Synthetic oligonucleotide
acuguagaugauggguugg

SEQ ID NO: 2362624 - RNA, 19 nt, Artificial Sequence
  Description of Artificial Sequence: Synthetic oligonucleotide
ugagaaacgcuggcuauga

SEQ ID NO: 2362625 - RNA, 19 nt, Artificial Sequence
  Description of Artificial Sequence: Synthetic oligonucleotide
cugacugagaaacgcuggc

SEQ ID NO: 2362626 - RNA, 19 nt, Artificial Sequence
  Description of Artificial Sequence: Synthetic oligonucleotide
caucacuccccucacuggc

SEQ ID NO: 2362627 - RNA, 19 nt, Artificial Sequence
  Description of Artificial Sequence: Synthetic oligonucleotide
ucuagggcaugcucccuag

SEQ ID NO: 2362628 - RNA, 19 nt, Artificial Sequence
  Description of Artificial Sequence: Synthetic oligonucleotide
ugacaccucugaaaagcca

SEQ ID NO: 2362629 - RNA, 19 nt, Artificial Sequence
  Description of Artificial Sequence: Synthetic oligonucleotide
cugugucccgaccacacag

SEQ ID NO: 2362630 - RNA, 19 nt, Artificial Sequence
  Description of Artificial Sequence: Synthetic oligonucleotide
auacacccuugucuucagc

SEQ ID NO: 2362631 - RNA, 19 nt, Artificial Sequence
  Description of Artificial Sequence: Synthetic oligonucleotide
gaaacgcuggcuaugaggu

SEQ ID NO: 2362632 - RNA, 19 nt, Artificial Sequence
  Description of Artificial Sequence: Synthetic oligonucleotide
caucugaagcccugaacug

SEQ ID NO: 2362633 - RNA, 19 nt, Artificial Sequence
  Description of Artificial Sequence: Synthetic oligonucleotide
cuuccaaucccugccaaug

SEQ ID NO: 2362634 - RNA, 19 nt, Artificial Sequence
  Description of Artificial Sequence: Synthetic oligonucleotide
ugugucccgaccacacagc

SEQ ID NO: 2362635 - RNA, 19 nt, Artificial Sequence
  Description of Artificial Sequence: Synthetic oligonucleotide
cacuuggaucacuuuuggg

SEQ ID NO: 2362636 - RNA, 19 nt, Artificial Sequence
  Description of Artificial Sequence: Synthetic oligonucleotide
ugccaguuacagcuugccc

SEQ ID NO: 2362637 - RNA, 19 nt, Artificial Sequence
  Description of Artificial Sequence: Synthetic oligonucleotide
guggcugacaucacuguag

SEQ ID NO: 2362638 - RNA, 19 nt, Artificial Sequence
  Description of Artificial Sequence: Synthetic oligonucleotide
gauacacccuugucuucag

SEQ ID NO: 2362639 - RNA, 19 nt, Artificial Sequence
  Description of Artificial Sequence: Synthetic oligonucleotide
acgaggugggcaugacagc

SEQ ID NO: 2362640 - RNA, 19 nt, Artificial Sequence
  Description of Artificial Sequence: Synthetic oligonucleotide
ucgugagauguccgcaggc

SEQ ID NO: 2362641 - RNA, 19 nt, Artificial Sequence
  Description of Artificial Sequence: Synthetic oligonucleotide
agaugauggguuggcgggc

SEQ ID NO: 2362642 - RNA, 19 nt, Artificial Sequence
  Description of Artificial Sequence: Synthetic oligonucleotide
uucaugagggcugcaaauc

SEQ ID NO: 2362643 - RNA, 19 nt, Artificial Sequence
  Description of Artificial Sequence: Synthetic oligonucleotide
gugagauguccgcaggcag

SEQ ID NO: 2362644 - RNA, 19 nt, Artificial Sequence
  Description of Artificial Sequence: Synthetic oligonucleotide
ugagggcugcaaaucguga

SEQ ID NO: 2362645 - RNA, 19 nt, Artificial Sequence
  Description of Artificial Sequence: Synthetic oligonucleotide
agauacacccuugucuuca

SEQ ID NO: 2362646 - RNA, 19 nt, Artificial Sequence
  Description of Artificial Sequence: Synthetic oligonucleotide
aagccagagucccagucua

SEQ ID NO: 2362647 - RNA, 19 nt, Artificial Sequence
  Description of Artificial Sequence: Synthetic oligonucleotide
agcaccaggggcugccgac

SEQ ID NO: 2362648 - RNA, 19 nt, Artificial Sequence
  Description of Artificial Sequence: Synthetic oligonucleotide
ucagcuaccaaggcuuccu

SEQ ID NO: 2362649 - RNA, 19 nt, Artificial Sequence
  Description of Artificial Sequence: Synthetic oligonucleotide
guaugccaguuacagcuug

SEQ ID NO: 2362650 - RNA, 19 nt, Artificial Sequence
  Description of Artificial Sequence: Synthetic oligonucleotide
cagucuagggcaugcuccc

SEQ ID NO: 2362651 - RNA, 19 nt, Artificial Sequence
  Description of Artificial Sequence: Synthetic oligonucleotide
aaacgcuggcuaugaggug

SEQ ID NO: 2362652 - RNA, 19 nt, Artificial Sequence
  Description of Artificial Sequence: Synthetic oligonucleotide
gacugagaaacgcuggcua

SEQ ID NO: 2362653 - RNA, 19 nt, Artificial Sequence
  Description of Artificial Sequence: Synthetic oligonucleotide
ucaaggcgagcgcugugca

SEQ ID NO: 2362654 - RNA, 19 nt, Artificial Sequence
  Description of Artificial Sequence: Synthetic oligonucleotide
aucccugccaauguuccag

SEQ ID NO: 2362655 - RNA, 19 nt, Artificial Sequence
  Description of Artificial Sequence: Synthetic oligonucleotide
ugcccgacgagcccuggcc

SEQ ID NO: 2362656 - RNA, 19 nt, Artificial Sequence
  Description of Artificial Sequence: Synthetic oligonucleotide
uuggguugcagugggccag

SEQ ID NO: 2362657 - RNA, 19 nt, Artificial Sequence
  Description of Artificial Sequence: Synthetic oligonucleotide
cauccaauugugaacuaaa

SEQ ID NO: 2362658 - RNA, 19 nt, Artificial Sequence
  Description of Artificial Sequence: Synthetic oligonucleotide
ugucccgaccacacagcag

SEQ ID NO: 2362659 - RNA, 19 nt, Artificial Sequence
  Description of Artificial Sequence: Synthetic oligonucleotide
ccagucuagggcaugcucc

SEQ ID NO: 2362660 - RNA, 19 nt, Artificial Sequence
  Description of Artificial Sequence: Synthetic oligonucleotide
ugccaauguuccaggcaag

SEQ ID NO: 2362661 - RNA, 19 nt, Artificial Sequence
  Description of Artificial Sequence: Synthetic oligonucleotide
uacugccugacaccucuga

SEQ ID NO: 2362662 - RNA, 19 nt, Artificial Sequence
  Description of Artificial Sequence: Synthetic oligonucleotide
augagguggccguucugag

SEQ ID NO: 2362663 - RNA, 19 nt, Artificial Sequence
  Description of Artificial Sequence: Synthetic oligonucleotide
ucacuccccucacuggcug

SEQ ID NO: 2362664 - RNA, 19 nt, Artificial Sequence
  Description of Artificial Sequence: Synthetic oligonucleotide
ucccugccaauguuccagg

SEQ ID NO: 2362665 - RNA, 19 nt, Artificial Sequence
  Description of Artificial Sequence: Synthetic oligonucleotide
acgccguagcuguucagag

SEQ ID NO: 2362666 - RNA, 19 nt, Artificial Sequence
  Description of Artificial Sequence: Synthetic oligonucleotide
gacaguucaugagggcugc

SEQ ID NO: 2362667 - RNA, 19 nt, Artificial Sequence
  Description of Artificial Sequence: Synthetic oligonucleotide
gugaacuaaaucagcaaaa

SEQ ID NO: 2362668 - RNA, 19 nt, Artificial Sequence
  Description of Artificial Sequence: Synthetic oligonucleotide
ugacugagaaacgcuggcu

SEQ ID NO: 2362669 - RNA, 19 nt, Artificial Sequence
  Description of Artificial Sequence: Synthetic oligonucleotide
ugcgacaguucaugagggc

SEQ ID NO: 2362670 - RNA, 19 nt, Artificial Sequence
  Description of Artificial Sequence: Synthetic oligonucleotide
cacccuugucuucagcuac

SEQ ID NO: 2362671 - RNA, 19 nt, Artificial Sequence
  Description of Artificial Sequence: Synthetic oligonucleotide
gagaaacgcuggcuaugag

SEQ ID NO: 2362672 - RNA, 19 nt, Artificial Sequence
  Description of Artificial Sequence: Synthetic oligonucleotide
uggguuggcgggcugcgac

SEQ ID NO: 2362673 - RNA, 19 nt, Artificial Sequence
  Description of Artificial Sequence: Synthetic oligonucleotide
gcucaggaagcugucaagg

SEQ ID NO: 2362674 - RNA, 19 nt, Artificial Sequence
  Description of Artificial Sequence: Synthetic oligonucleotide
gauggguuggcgggcugcg

SEQ ID NO: 2362675 - RNA, 19 nt, Artificial Sequence
  Description of Artificial Sequence: Synthetic oligonucleotide
agacauuggaggcgagccu

SEQ ID NO: 2362676 - RNA, 19 nt, Artificial Sequence
  Description of Artificial Sequence: Synthetic oligonucleotide
auuggaggcgagccugugu

SEQ ID NO: 2362677 - RNA, 19 nt, Artificial Sequence
  Description of Artificial Sequence: Synthetic oligonucleotide
ucucgccauguacugccug

SEQ ID NO: 2362678 - RNA, 19 nt, Artificial Sequence
  Description of Artificial Sequence: Synthetic oligonucleotide
ggcgccgggguacagacag

SEQ ID NO: 2362679 - RNA, 19 nt, Artificial Sequence
  Description of Artificial Sequence: Synthetic oligonucleotide
agcuaccaaggcuuccucu

SEQ ID NO: 2362680 - RNA, 19 nt, Artificial Sequence
  Description of Artificial Sequence: Synthetic oligonucleotide
uccaaucccugccaauguu

SEQ ID NO: 2362681 - RNA, 19 nt, Artificial Sequence
  Description of Artificial Sequence: Synthetic oligonucleotide
uuggcgccgggguacagac

SEQ ID NO: 2362682 - RNA, 19 nt, Artificial Sequence
  Description of Artificial Sequence: Synthetic oligonucleotide
agcuugcccugcuacgcag

SEQ ID NO: 2362683 - RNA, 19 nt, Artificial Sequence
  Description of Artificial Sequence: Synthetic oligonucleotide
acaguuccuccucucgcca

SEQ ID NO: 2362684 - RNA, 19 nt, Artificial Sequence
  Description of Artificial Sequence: Synthetic oligonucleotide
cuaaaucagcaaaacaguu

SEQ ID NO: 2362685 - RNA, 19 nt, Artificial Sequence
  Description of Artificial Sequence: Synthetic oligonucleotide
guacaccaccaucacuccc

SEQ ID NO: 2362686 - RNA, 19 nt, Artificial Sequence
  Description of Artificial Sequence: Synthetic oligonucleotide
gaggugggcaugacagccg

SEQ ID NO: 2362687 - RNA, 19 nt, Artificial Sequence
  Description of Artificial Sequence: Synthetic oligonucleotide
agcgcugugcauguuggug

SEQ ID NO: 2362688 - RNA, 19 nt, Artificial Sequence
  Description of Artificial Sequence: Synthetic oligonucleotide
cugaagcccugaacuggcg

SEQ ID NO: 2362689 - RNA, 19 nt, Artificial Sequence
  Description of Artificial Sequence: Synthetic oligonucleotide
cugcaaaucgugagauguc

SEQ ID NO: 2362690 - RNA, 19 nt, Artificial Sequence
  Description of Artificial Sequence: Synthetic oligonucleotide
ugaggaugcuuggcgccgg

SEQ ID NO: 2362691 - RNA, 19 nt, Artificial Sequence
  Description of Artificial Sequence: Synthetic oligonucleotide
ugucaaggcgagcgcugug

SEQ ID NO: 2362692 - RNA, 19 nt, Artificial Sequence
  Description of Artificial Sequence: Synthetic oligonucleotide
augcuuggcgccgggguac

SEQ ID NO: 2362693 - RNA, 19 nt, Artificial Sequence
  Description of Artificial Sequence: Synthetic oligonucleotide
ccgggguacagacaguucc

SEQ ID NO: 2362694 - RNA, 19 nt, Artificial Sequence
  Description of Artificial Sequence: Synthetic oligonucleotide
caguuauccccuagcacca

SEQ ID NO: 2362695 - RNA, 19 nt, Artificial Sequence
  Description of Artificial Sequence: Synthetic oligonucleotide
cugaggaugcuuggcgccg

SEQ ID NO: 2362696 - RNA, 19 nt, Artificial Sequence
  Description of Artificial Sequence: Synthetic oligonucleotide
gucaaggcgagcgcugugc

SEQ ID NO: 2362697 - RNA, 19 nt, Artificial Sequence
  Description of Artificial Sequence: Synthetic oligonucleotide
gcauguuggugcuggugcg

SEQ ID NO: 2362698 - RNA, 19 nt, Artificial Sequence
  Description of Artificial Sequence: Synthetic oligonucleotide
cugagaaacgcuggcuaug

SEQ ID NO: 2362699 - RNA, 19 nt, Artificial Sequence
  Description of Artificial Sequence: Synthetic oligonucleotide
gaacgaggugggcaugaca

SEQ ID NO: 2362700 - RNA, 19 nt, Artificial Sequence
  Description of Artificial Sequence: Synthetic oligonucleotide
ugauggguuggcgggcugc

SEQ ID NO: 2362701 - RNA, 19 nt, Artificial Sequence
  Description of Artificial Sequence: Synthetic oligonucleotide
gaggcgagccugugucccg

SEQ ID NO: 2362702 - RNA, 19 nt, Artificial Sequence
  Description of Artificial Sequence: Synthetic oligonucleotide
aggucaggcucugaacgag

SEQ ID NO: 2362703 - RNA, 19 nt, Artificial Sequence
  Description of Artificial Sequence: Synthetic oligonucleotide
cugccguccaguccucugc

SEQ ID NO: 2362704 - RNA, 19 nt, Artificial Sequence
  Description of Artificial Sequence: Synthetic oligonucleotide
uggcgguuuggcuguacac

SEQ ID NO: 2362705 - RNA, 19 nt, Artificial Sequence
  Description of Artificial Sequence: Synthetic oligonucleotide
gcuccauccaauugugaac

SEQ ID NO: 2362706 - RNA, 19 nt, Artificial Sequence
  Description of Artificial Sequence: Synthetic oligonucleotide
gcaaaucgugagauguccg

SEQ ID NO: 2362707 - RNA, 19 nt, Artificial Sequence
  Description of Artificial Sequence: Synthetic oligonucleotide
acugccugacaccucugaa

SEQ ID NO: 2362708 - RNA, 19 nt, Artificial Sequence
  Description of Artificial Sequence: Synthetic oligonucleotide
agugggccagacauuggag

SEQ ID NO: 2362709 - RNA, 19 nt, Artificial Sequence
  Description of Artificial Sequence: Synthetic oligonucleotide
cccuguucaacagugcugc

SEQ ID NO: 2362710 - RNA, 19 nt, Artificial Sequence
  Description of Artificial Sequence: Synthetic oligonucleotide
gucccgaccacacagcagu

SEQ ID NO: 2362711 - RNA, 19 nt, Artificial Sequence
  Description of Artificial Sequence: Synthetic oligonucleotide
cuaggaugucucaaagaua

SEQ ID NO: 2362712 - RNA, 19 nt, Artificial Sequence
  Description of Artificial Sequence: Synthetic oligonucleotide
ggggcaggaucagaggugg

SEQ ID NO: 2362713 - RNA, 19 nt, Artificial Sequence
  Description of Artificial Sequence: Synthetic oligonucleotide
ccauguacugccugacacc

SEQ ID NO: 2362714 - RNA, 19 nt, Artificial Sequence
  Description of Artificial Sequence: Synthetic oligonucleotide
guacacuuggaucacuuuu

SEQ ID NO: 2362715 - RNA, 19 nt, Artificial Sequence
  Description of Artificial Sequence: Synthetic oligonucleotide
acuccggccccuguucaac

SEQ ID NO: 2362716 - RNA, 19 nt, Artificial Sequence
  Description of Artificial Sequence: Synthetic oligonucleotide
caucuggaguggacuuggg

SEQ ID NO: 2362717 - RNA, 19 nt, Artificial Sequence
  Description of Artificial Sequence: Synthetic oligonucleotide
uccggccccuguucaacag

SEQ ID NO: 2362718 - RNA, 19 nt, Artificial Sequence
  Description of Artificial Sequence: Synthetic oligonucleotide
ggguacagacaguuccucc

SEQ ID NO: 2362719 - RNA, 19 nt, Artificial Sequence
  Description of Artificial Sequence: Synthetic oligonucleotide
cuuggaucacuuuuggguu

SEQ ID NO: 2362720 - RNA, 19 nt, Artificial Sequence
  Description of Artificial Sequence: Synthetic oligonucleotide
cuccucucgccauguacug

SEQ ID NO: 2362721 - RNA, 19 nt, Artificial Sequence
  Description of Artificial Sequence: Synthetic oligonucleotide
gacgccguagcuguucaga

SEQ ID NO: 2362722 - RNA, 19 nt, Artificial Sequence
  Description of Artificial Sequence: Synthetic oligonucleotide
uggaggcgagccugugucc

SEQ ID NO: 2362723 - RNA, 19 nt, Artificial Sequence
  Description of Artificial Sequence: Synthetic oligonucleotide
ccaguuacagcuugcccug

SEQ ID NO: 2362724 - RNA, 19 nt, Artificial Sequence
  Description of Artificial Sequence: Synthetic oligonucleotide
guagcuguucagagaggcc

SEQ ID NO: 2362725 - RNA, 19 nt, Artificial Sequence
  Description of Artificial Sequence: Synthetic oligonucleotide
ccgaccacacagcaguucc

SEQ ID NO: 2362726 - RNA, 19 nt, Artificial Sequence
  Description of Artificial Sequence: Synthetic oligonucleotide
acagccgcuuuccugccau

SEQ ID NO: 2362727 - RNA, 19 nt, Artificial Sequence
  Description of Artificial Sequence: Synthetic oligonucleotide
auccaauugugaacuaaau

SEQ ID NO: 2362728 - RNA, 19 nt, Artificial Sequence
  Description of Artificial Sequence: Synthetic oligonucleotide
gucgagcacgggcucgggg

SEQ ID NO: 2362729 - RNA, 19 nt, Artificial Sequence
  Description of Artificial Sequence: Synthetic oligonucleotide
ugcucccuaggaugucuca

SEQ ID NO: 2362730 - RNA, 19 nt, Artificial Sequence
  Description of Artificial Sequence: Synthetic oligonucleotide
uugggccgaggacgguggg

SEQ ID NO: 2362731 - RNA, 19 nt, Artificial Sequence
  Description of Artificial Sequence: Synthetic oligonucleotide
cagacagaauccucuucca

SEQ ID NO: 2362732 - RNA, 19 nt, Artificial Sequence
  Description of Artificial Sequence: Synthetic oligonucleotide
acuugggccgaggacggug

SEQ ID NO: 2362733 - RNA, 19 nt, Artificial Sequence
  Description of Artificial Sequence: Synthetic oligonucleotide
ucugaacgaggugggcaug

SEQ ID NO: 2362734 - RNA, 19 nt, Artificial Sequence
  Description of Artificial Sequence: Synthetic oligonucleotide
gccaguuacagcuugcccu

SEQ ID NO: 2362735 - RNA, 19 nt, Artificial Sequence
  Description of Artificial Sequence: Synthetic oligonucleotide
cucgggguacaccaccauc

SEQ ID NO: 2362736 - RNA, 19 nt, Artificial Sequence
  Description of Artificial Sequence: Synthetic oligonucleotide
ggcugcgacaguucaugag

SEQ ID NO: 2362737 - RNA, 19 nt, Artificial Sequence
  Description of Artificial Sequence: Synthetic oligonucleotide
acacccuugucuucagcua

SEQ ID NO: 2362738 - RNA, 19 nt, Artificial Sequence
  Description of Artificial Sequence: Synthetic oligonucleotide
gguacagacaguuccuccu

SEQ ID NO: 2362739 - RNA, 19 nt, Artificial Sequence
  Description of Artificial Sequence: Synthetic oligonucleotide
aggcaagcaucuggagugg

SEQ ID NO: 2362740 - RNA, 19 nt, Artificial Sequence
  Description of Artificial Sequence: Synthetic oligonucleotide
ugacagccgcuuuccugcc

SEQ ID NO: 2362741 - RNA, 19 nt, Artificial Sequence
  Description of Artificial Sequence: Synthetic oligonucleotide
cucgccauguacugccuga

SEQ ID NO: 2362742 - RNA, 19 nt, Artificial Sequence
  Description of Artificial Sequence: Synthetic oligonucleotide
gcugcaaaucgugagaugu

SEQ ID NO: 2362743 - RNA, 19 nt, Artificial Sequence
  Description of Artificial Sequence: Synthetic oligonucleotide
agcugucaaggcgagcgcu

SEQ ID NO: 2362744 - RNA, 19 nt, Artificial Sequence
  Description of Artificial Sequence: Synthetic oligonucleotide
guucaugagggcugcaaau

SEQ ID NO: 2362745 - RNA, 19 nt, Artificial Sequence
  Description of Artificial Sequence: Synthetic oligonucleotide
cagugggccagacauugga

SEQ ID NO: 2362746 - RNA, 19 nt, Artificial Sequence
  Description of Artificial Sequence: Synthetic oligonucleotide
uccucucgccauguacugc

SEQ ID NO: 2362747 - RNA, 19 nt, Artificial Sequence
  Description of Artificial Sequence: Synthetic oligonucleotide
cugccauagcugcccgacg

SEQ ID NO: 2362748 - RNA, 19 nt, Artificial Sequence
  Description of Artificial Sequence: Synthetic oligonucleotide
gcuggcuaugagguggccg

SEQ ID NO: 2362749 - RNA, 19 nt, Artificial Sequence
  Description of Artificial Sequence: Synthetic oligonucleotide
aguuauccccuagcaccag

SEQ ID NO: 2362750 - RNA, 19 nt, Artificial Sequence
  Description of Artificial Sequence: Synthetic oligonucleotide
guggccguucugaggaugc

SEQ ID NO: 2362751 - RNA, 19 nt, Artificial Sequence
  Description of Artificial Sequence: Synthetic oligonucleotide
ggaggucacugacugagaa

SEQ ID NO: 2362752 - RNA, 19 nt, Artificial Sequence
  Description of Artificial Sequence: Synthetic oligonucleotide
agaggccuagcaggaacug

SEQ ID NO: 2362753 - RNA, 19 nt, Artificial Sequence
  Description of Artificial Sequence: Synthetic oligonucleotide
cuccauccaauugugaacu

SEQ ID NO: 2362754 - RNA, 19 nt, Artificial Sequence
  Description of Artificial Sequence: Synthetic oligonucleotide
cuggcuaugagguggccgu

SEQ ID NO: 2362755 - RNA, 19 nt, Artificial Sequence
  Description of Artificial Sequence: Synthetic oligonucleotide
cguagcuguucagagaggc

SEQ ID NO: 2362756 - RNA, 19 nt, Artificial Sequence
  Description of Artificial Sequence: Synthetic oligonucleotide
uugcccugcuacgcagggg

SEQ ID NO: 2362757 - RNA, 19 nt, Artificial Sequence
  Description of Artificial Sequence: Synthetic oligonucleotide
ucccagcggagcuggcuca

SEQ ID NO: 2362758 - RNA, 19 nt, Artificial Sequence
  Description of Artificial Sequence: Synthetic oligonucleotide
gugucccgaccacacagca

SEQ ID NO: 2362759 - RNA, 19 nt, Artificial Sequence
  Description of Artificial Sequence: Synthetic oligonucleotide
acgcuggcuaugagguggc

SEQ ID NO: 2362760 - RNA, 19 nt, Artificial Sequence
  Description of Artificial Sequence: Synthetic oligonucleotide
ggucacugacugagaaacg

SEQ ID NO: 2362761 - RNA, 19 nt, Artificial Sequence
  Description of Artificial Sequence: Synthetic oligonucleotide
caggucaggcucugaacga

SEQ ID NO: 2362762 - RNA, 19 nt, Artificial Sequence
  Description of Artificial Sequence: Synthetic oligonucleotide
acgagcccuggccagccga

SEQ ID NO: 2362763 - RNA, 19 nt, Artificial Sequence
  Description of Artificial Sequence: Synthetic oligonucleotide
cauguacugccugacaccu

SEQ ID NO: 2362764 - RNA, 19 nt, Artificial Sequence
  Description of Artificial Sequence: Synthetic oligonucleotide
gccagagucccagucuagg

SEQ ID NO: 2362765 - RNA, 19 nt, Artificial Sequence
  Description of Artificial Sequence: Synthetic oligonucleotide
uccauccaauugugaacua

SEQ ID NO: 2362766 - RNA, 19 nt, Artificial Sequence
  Description of Artificial Sequence: Synthetic oligonucleotide
caggaucagagguggcuga

SEQ ID NO: 2362767 - RNA, 19 nt, Artificial Sequence
  Description of Artificial Sequence: Synthetic oligonucleotide
auguuccaggcaagcaucu

SEQ ID NO: 2362768 - RNA, 19 nt, Artificial Sequence
  Description of Artificial Sequence: Synthetic oligonucleotide
gacgagcccuggccagccg

SEQ ID NO: 2362769 - RNA, 19 nt, Artificial Sequence
  Description of Artificial Sequence: Synthetic oligonucleotide
augauggguuggcgggcug

SEQ ID NO: 2362770 - RNA, 19 nt, Artificial Sequence
  Description of Artificial Sequence: Synthetic oligonucleotide
uggaguggacuugggccga

SEQ ID NO: 2362771 - RNA, 19 nt, Artificial Sequence
  Description of Artificial Sequence: Synthetic oligonucleotide
ggacuugggccgaggacgg

SEQ ID NO: 2362772 - RNA, 19 nt, Artificial Sequence
  Description of Artificial Sequence: Synthetic oligonucleotide
gaguggacuugggccgagg

SEQ ID NO: 2362773 - RNA, 19 nt, Artificial Sequence
  Description of Artificial Sequence: Synthetic oligonucleotide
uccaguccucugcuuccaa

SEQ ID NO: 2362774 - RNA, 19 nt, Artificial Sequence
  Description of Artificial Sequence: Synthetic oligonucleotide
cuguucagagaggccuagc

SEQ ID NO: 2362775 - RNA, 19 nt, Artificial Sequence
  Description of Artificial Sequence: Synthetic oligonucleotide
cucccuaggaugucucaaa

SEQ ID NO: 2362776 - RNA, 19 nt, Artificial Sequence
  Description of Artificial Sequence: Synthetic oligonucleotide
ucgccauguacugccugac

SEQ ID NO: 2362777 - RNA, 19 nt, Artificial Sequence
  Description of Artificial Sequence: Synthetic oligonucleotide
uuggcgggcugcgacaguu

SEQ ID NO: 2362778 - RNA, 19 nt, Artificial Sequence
  Description of Artificial Sequence: Synthetic oligonucleotide
ugggcaugacagccgcuuu

SEQ ID NO: 2362779 - RNA, 19 nt, Artificial Sequence
  Description of Artificial Sequence: Synthetic oligonucleotide
agcggagcuggcucaggaa

SEQ ID NO: 2362780 - RNA, 19 nt, Artificial Sequence
  Description of Artificial Sequence: Synthetic oligonucleotide
caacagugcugccguccag

SEQ ID NO: 2362781 - RNA, 19 nt, Artificial Sequence
  Description of Artificial Sequence: Synthetic oligonucleotide
gccaauguuccaggcaagc

SEQ ID NO: 2362782 - RNA, 19 nt, Artificial Sequence
  Description of Artificial Sequence: Synthetic oligonucleotide
aggaugcuuggcgccgggg

SEQ ID NO: 2362783 - RNA, 19 nt, Artificial Sequence
  Description of Artificial Sequence: Synthetic oligonucleotide
caugagggcugcaaaucgu

SEQ ID NO: 2362784 - RNA, 19 nt, Artificial Sequence
  Description of Artificial Sequence: Synthetic oligonucleotide
caagcaucuggaguggacu

SEQ ID NO: 2362785 - RNA, 19 nt, Artificial Sequence
  Description of Artificial Sequence: Synthetic oligonucleotide
aggcgagcgcugugcaugu

SEQ ID NO: 2362786 - RNA, 19 nt, Artificial Sequence
  Description of Artificial Sequence: Synthetic oligonucleotide
cgagcgcugugcauguugg

SEQ ID NO: 2362787 - RNA, 19 nt, Artificial Sequence
  Description of Artificial Sequence: Synthetic oligonucleotide
acuggcgguuuggcuguac

SEQ ID NO: 2362788 - RNA, 19 nt, Artificial Sequence
  Description of Artificial Sequence: Synthetic oligonucleotide
aggacggugggcagguggu

SEQ ID NO: 2362789 - RNA, 19 nt, Artificial Sequence
  Description of Artificial Sequence: Synthetic oligonucleotide
aagcccugaacuggcgguu

SEQ ID NO: 2362790 - RNA, 19 nt, Artificial Sequence
  Description of Artificial Sequence: Synthetic oligonucleotide
gggccagacauuggaggcg

SEQ ID NO: 2362791 - RNA, 19 nt, Artificial Sequence
  Description of Artificial Sequence: Synthetic oligonucleotide
cacuccccucacuggcugc

SEQ ID NO: 2362792 - RNA, 19 nt, Artificial Sequence
  Description of Artificial Sequence: Synthetic oligonucleotide
uccugccauagcugcccga

SEQ ID NO: 2362793 - RNA, 19 nt, Artificial Sequence
  Description of Artificial Sequence: Synthetic oligonucleotide
uguuggugcuggugcggua

SEQ ID NO: 2362794 - RNA, 19 nt, Artificial Sequence
  Description of Artificial Sequence: Synthetic oligonucleotide
aucacuccccucacuggcu

SEQ ID NO: 2362795 - RNA, 19 nt, Artificial Sequence
  Description of Artificial Sequence: Synthetic oligonucleotide
ggcugcaaaucgugagaug

SEQ ID NO: 2362796 - RNA, 19 nt, Artificial Sequence
  Description of Artificial Sequence: Synthetic oligonucleotide
auguacugccugacaccuc

SEQ ID NO: 2362797 - RNA, 19 nt, Artificial Sequence
  Description of Artificial Sequence: Synthetic oligonucleotide
gcgagcgcugugcauguug

SEQ ID NO: 2362798 - RNA, 19 nt, Artificial Sequence
  Description of Artificial Sequence: Synthetic oligonucleotide
cgacaguucaugagggcug

SEQ ID NO: 2362799 - RNA, 19 nt, Artificial Sequence
  Description of Artificial Sequence: Synthetic oligonucleotide
cugaacgaggugggcauga

SEQ ID NO: 2362800 - RNA, 19 nt, Artificial Sequence
  Description of Artificial Sequence: Synthetic oligonucleotide
gaugauggguuggcgggcu

SEQ ID NO: 2362801 - RNA, 19 nt, Artificial Sequence
  Description of Artificial Sequence: Synthetic oligonucleotide
guccgcaggcaggucaggc

SEQ ID NO: 2362802 - RNA, 19 nt, Artificial Sequence
  Description of Artificial Sequence: Synthetic oligonucleotide
ugggccgaggacggugggc

SEQ ID NO: 2362803 - RNA, 19 nt, Artificial Sequence
  Description of Artificial Sequence: Synthetic oligonucleotide
cuggcgguuuggcuguaca

SEQ ID NO: 2362804 - RNA, 19 nt, Artificial Sequence
  Description of Artificial Sequence: Synthetic oligonucleotide
cucugaacgaggugggcau

SEQ ID NO: 2362805 - RNA, 19 nt, Artificial Sequence
  Description of Artificial Sequence: Synthetic oligonucleotide
ggccuagcaggaacugagg

SEQ ID NO: 2362806 - RNA, 19 nt, Artificial Sequence
  Description of Artificial Sequence: Synthetic oligonucleotide
ccccuguucaacagugcug

SEQ ID NO: 2362807 - RNA, 19 nt, Artificial Sequence
  Description of Artificial Sequence: Synthetic oligonucleotide
agucccagucuagggcaug

SEQ ID NO: 2362808 - RNA, 19 nt, Artificial Sequence
  Description of Artificial Sequence: Synthetic oligonucleotide
gguuggcgggcugcgacag

SEQ ID NO: 2362809 - RNA, 19 nt, Artificial Sequence
  Description of Artificial Sequence: Synthetic oligonucleotide
ccguucugaggaugcuugg

SEQ ID NO: 2362810 - RNA, 19 nt, Artificial Sequence
  Description of Artificial Sequence: Synthetic oligonucleotide
uggguugcagugggccaga

SEQ ID NO: 2362811 - RNA, 19 nt, Artificial Sequence
  Description of Artificial Sequence: Synthetic oligonucleotide
gggcaugacagccgcuuuc

SEQ ID NO: 2362812 - RNA, 19 nt, Artificial Sequence
  Description of Artificial Sequence: Synthetic oligonucleotide
gggcucgggguacaccacc

SEQ ID NO: 2362813 - RNA, 19 nt, Artificial Sequence
  Description of Artificial Sequence: Synthetic oligonucleotide
ccagacauuggaggcgagc

SEQ ID NO: 2362814 - RNA, 19 nt, Artificial Sequence
  Description of Artificial Sequence: Synthetic oligonucleotide
gccgcuuuccugccauagc

SEQ ID NO: 2362815 - RNA, 19 nt, Artificial Sequence
  Description of Artificial Sequence: Synthetic oligonucleotide
agucuagggcaugcucccu

SEQ ID NO: 2362816 - RNA, 19 nt, Artificial Sequence
  Description of Artificial Sequence: Synthetic oligonucleotide
ccugccauagcugcccgac

SEQ ID NO: 2362817 - RNA, 19 nt, Artificial Sequence
  Description of Artificial Sequence: Synthetic oligonucleotide
guuuggcuguacacuugga

SEQ ID NO: 2362818 - RNA, 19 nt, Artificial Sequence
  Description of Artificial Sequence: Synthetic oligonucleotide
ccauagcugcccgacgagc

SEQ ID NO: 2362819 - RNA, 19 nt, Artificial Sequence
  Description of Artificial Sequence: Synthetic oligonucleotide
cugcccgacgagcccuggc

SEQ ID NO: 2362820 - RNA, 19 nt, Artificial Sequence
  Description of Artificial Sequence: Synthetic oligonucleotide
ccucuuccacacagcagac

SEQ ID NO: 2362821 - RNA, 19 nt, Artificial Sequence
  Description of Artificial Sequence: Synthetic oligonucleotide
cagcggagcuggcucagga

SEQ ID NO: 2362822 - RNA, 19 nt, Artificial Sequence
  Description of Artificial Sequence: Synthetic oligonucleotide
cagccgacgccguagcugu

SEQ ID NO: 2362823 - RNA, 19 nt, Artificial Sequence
  Description of Artificial Sequence: Synthetic oligonucleotide
ucccgaccacacagcaguu

SEQ ID NO: 2362824 - RNA, 19 nt, Artificial Sequence
  Description of Artificial Sequence: Synthetic oligonucleotide
gacuccggccccuguucaa

SEQ ID NO: 2362825 - RNA, 19 nt, Artificial Sequence
  Description of Artificial Sequence: Synthetic oligonucleotide
ccugccaauguuccaggca

SEQ ID NO: 2362826 - RNA, 19 nt, Artificial Sequence
  Description of Artificial Sequence: Synthetic oligonucleotide
gcugccguccaguccucug

SEQ ID NO: 2362827 - RNA, 19 nt, Artificial Sequence
  Description of Artificial Sequence: Synthetic oligonucleotide
uggcgccgggguacagaca

SEQ ID NO: 2362828 - RNA, 19 nt, Artificial Sequence
  Description of Artificial Sequence: Synthetic oligonucleotide
cggagcuggcucaggaagc

SEQ ID NO: 2362829 - RNA, 19 nt, Artificial Sequence
  Description of Artificial Sequence: Synthetic oligonucleotide
gggcugccgacuccggccc

SEQ ID NO: 2362830 - RNA, 19 nt, Artificial Sequence
  Description of Artificial Sequence: Synthetic oligonucleotide
cccuaggaugucucaaaga

SEQ ID NO: 2362831 - RNA, 19 nt, Artificial Sequence
  Description of Artificial Sequence: Synthetic oligonucleotide
gguugcagugggccagaca

SEQ ID NO: 2362832 - RNA, 19 nt, Artificial Sequence
  Description of Artificial Sequence: Synthetic oligonucleotide
ugcuuggcgccgggguaca

SEQ ID NO: 2362833 - RNA, 19 nt, Artificial Sequence
  Description of Artificial Sequence: Synthetic oligonucleotide
cacgggcucgggguacacc

SEQ ID NO: 2362834 - RNA, 19 nt, Artificial Sequence
  Description of Artificial Sequence: Synthetic oligonucleotide
acaguucaugagggcugca

SEQ ID NO: 2362835 - RNA, 19 nt, Artificial Sequence
  Description of Artificial Sequence: Synthetic oligonucleotide
ggcgggcugcgacaguuca

SEQ ID NO: 2362836 - RNA, 19 nt, Artificial Sequence
  Description of Artificial Sequence: Synthetic oligonucleotide
uggccguucugaggaugcu

SEQ ID NO: 2362837 - RNA, 19 nt, Artificial Sequence
  Description of Artificial Sequence: Synthetic oligonucleotide
gagcacgggcucgggguac

SEQ ID NO: 2362838 - RNA, 19 nt, Artificial Sequence
  Description of Artificial Sequence: Synthetic oligonucleotide
gggucgagcacgggcucgg

SEQ ID NO: 2362839 - RNA, 19 nt, Artificial Sequence
  Description of Artificial Sequence: Synthetic oligonucleotide
ccguagcuguucagagagg

SEQ ID NO: 2362840 - RNA, 19 nt, Artificial Sequence
  Description of Artificial Sequence: Synthetic oligonucleotide
gucaggcucugaacgaggu

SEQ ID NO: 2362841 - RNA, 19 nt, Artificial Sequence
  Description of Artificial Sequence: Synthetic oligonucleotide
cuccggccccuguucaaca

SEQ ID NO: 2362842 - RNA, 19 nt, Artificial Sequence
  Description of Artificial Sequence: Synthetic oligonucleotide
ggaugcuuggcgccggggu

SEQ ID NO: 2362843 - RNA, 19 nt, Artificial Sequence
  Description of Artificial Sequence: Synthetic oligonucleotide
gcgacaguucaugagggcu

SEQ ID NO: 2362844 - RNA, 19 nt, Artificial Sequence
  Description of Artificial Sequence: Synthetic oligonucleotide
cuuggcgccgggguacaga

SEQ ID NO: 2362845 - RNA, 19 nt, Artificial Sequence
  Description of Artificial Sequence: Synthetic oligonucleotide
ggggucgagcacgggcucg

SEQ ID NO: 2362846 - RNA, 19 nt, Artificial Sequence
  Description of Artificial Sequence: Synthetic oligonucleotide
cccugccaauguuccaggc

SEQ ID NO: 2362847 - RNA, 19 nt, Artificial Sequence
  Description of Artificial Sequence: Synthetic oligonucleotide
ggcgguuuggcuguacacu

SEQ ID NO: 2362848 - RNA, 19 nt, Artificial Sequence
  Description of Artificial Sequence: Synthetic oligonucleotide
gggguacagacaguuccuc

SEQ ID NO: 2362849 - RNA, 19 nt, Artificial Sequence
  Description of Artificial Sequence: Synthetic oligonucleotide
ggcuguacacuuggaucac

SEQ ID NO: 2362850 - RNA, 19 nt, Artificial Sequence
  Description of Artificial Sequence: Synthetic oligonucleotide
ccagccgacgccguagcug

SEQ ID NO: 2362851 - RNA, 19 nt, Artificial Sequence
  Description of Artificial Sequence: Synthetic oligonucleotide
gccgaggacggugggcagg

SEQ ID NO: 2362852 - RNA, 19 nt, Artificial Sequence
  Description of Artificial Sequence: Synthetic oligonucleotide
ugccgacuccggccccugu

SEQ ID NO: 2362853 - RNA, 19 nt, Artificial Sequence
  Description of Artificial Sequence: Synthetic oligonucleotide
gccugugucccgaccacac

SEQ ID NO: 2362854 - RNA, 19 nt, Artificial Sequence
  Description of Artificial Sequence: Synthetic oligonucleotide
aggcgagccugugucccga

SEQ ID NO: 2362855 - RNA, 19 nt, Artificial Sequence
  Description of Artificial Sequence: Synthetic oligonucleotide
gggccgaggacggugggca

SEQ ID NO: 2362856 - RNA, 19 nt, Artificial Sequence
  Description of Artificial Sequence: Synthetic oligonucleotide
ggugggcaggugguaugcc

SEQ ID NO: 2362857 - RNA, 19 nt, Artificial Sequence
  Description of Artificial Sequence: Synthetic oligonucleotide
gccccuguucaacagugcu

SEQ ID NO: 2362858 - RNA, 19 nt, Artificial Sequence
  Description of Artificial Sequence: Synthetic oligonucleotide
gacggugggcaggugguau

SEQ ID NO: 2362859 - RNA, 19 nt, Artificial Sequence
  Description of Artificial Sequence: Synthetic oligonucleotide
agguggccguucugaggau

SEQ ID NO: 2362860 - RNA, 19 nt, Artificial Sequence
  Description of Artificial Sequence: Synthetic oligonucleotide
ugcugccguccaguccucu

SEQ ID NO: 2362861 - RNA, 19 nt, Artificial Sequence
  Description of Artificial Sequence: Synthetic oligonucleotide
agcacgggcucgggguaca

SEQ ID NO: 2362862 - RNA, 19 nt, Artificial Sequence
  Description of Artificial Sequence: Synthetic oligonucleotide
cccgacgagcccuggccag

SEQ ID NO: 2362863 - RNA, 19 nt, Artificial Sequence
  Description of Artificial Sequence: Synthetic oligonucleotide
ggccagccgacgccguagc

SEQ ID NO: 2362864 - RNA, 19 nt, Artificial Sequence
  Description of Artificial Sequence: Synthetic oligonucleotide
ggcaugcucccuaggaugu

SEQ ID NO: 2362865 - RNA, 19 nt, Artificial Sequence
  Description of Artificial Sequence: Synthetic oligonucleotide
ggguuggcgggcugcgaca

SEQ ID NO: 2362866 - RNA, 19 nt, Artificial Sequence
  Description of Artificial Sequence: Synthetic oligonucleotide
auggguuggcgggcugcga

SEQ ID NO: 2362867 - RNA, 19 nt, Artificial Sequence
  Description of Artificial Sequence: Synthetic oligonucleotide
uggcuaugagguggccguu

SEQ ID NO: 2362868 - RNA, 19 nt, Artificial Sequence
  Description of Artificial Sequence: Synthetic oligonucleotide
agcccugaacuggcgguuu

SEQ ID NO: 2362869 - RNA, 19 nt, Artificial Sequence
  Description of Artificial Sequence: Synthetic oligonucleotide
gcgagccugugucccgacc

SEQ ID NO: 2362870 - RNA, 19 nt, Artificial Sequence
  Description of Artificial Sequence: Synthetic oligonucleotide
gagcgcugugcauguuggu

SEQ ID NO: 2362871 - RNA, 19 nt, Artificial Sequence
  Description of Artificial Sequence: Synthetic oligonucleotide
guucccagcggagcuggcu

SEQ ID NO: 2362872 - RNA, 19 nt, Artificial Sequence
  Description of Artificial Sequence: Synthetic oligonucleotide
gggcugcgacaguucauga

SEQ ID NO: 2362873 - RNA, 19 nt, Artificial Sequence
  Description of Artificial Sequence: Synthetic oligonucleotide
gcgguuuggcuguacacuu

SEQ ID NO: 2362874 - RNA, 19 nt, Artificial Sequence
  Description of Artificial Sequence: Synthetic oligonucleotide
gugggcaugacagccgcuu

SEQ ID NO: 2362875 - RNA, 19 nt, Artificial Sequence
  Description of Artificial Sequence: Synthetic oligonucleotide
cgggcugcgacaguucaug

SEQ ID NO: 2362876 - RNA, 19 nt, Artificial Sequence
  Description of Artificial Sequence: Synthetic oligonucleotide
ccgcuuuccugccauagcu

SEQ ID NO: 2362877 - RNA, 19 nt, Artificial Sequence
  Description of Artificial Sequence: Synthetic oligonucleotide
gcccuggccagccgacgcc

SEQ ID NO: 2362878 - RNA, 19 nt, Artificial Sequence
  Description of Artificial Sequence: Synthetic oligonucleotide
cgguuuggcuguacacuug

SEQ ID NO: 2362879 - RNA, 19 nt, Artificial Sequence
  Description of Artificial Sequence: Synthetic oligonucleotide
gcucccuaggaugucucaa

SEQ ID NO: 2362880 - RNA, 19 nt, Artificial Sequence
  Description of Artificial Sequence: Synthetic oligonucleotide
ggccgaggacggugggcag

SEQ ID NO: 2362881 - RNA, 19 nt, Artificial Sequence
  Description of Artificial Sequence: Synthetic oligonucleotide
cgagccugugucccgacca

SEQ ID NO: 2362882 - RNA, 19 nt, Artificial Sequence
  Description of Artificial Sequence: Synthetic oligonucleotide
ggccccuguucaacagugc

SEQ ID NO: 2362883 - RNA, 19 nt, Artificial Sequence
  Description of Artificial Sequence: Synthetic oligonucleotide
cuuuuggguuuggguugca

SEQ ID NO: 2362884 - RNA, 19 nt, Artificial Sequence
  Description of Artificial Sequence: Synthetic oligonucleotide
ggcaagcaucuggagugga

SEQ ID NO: 2362885 - RNA, 19 nt, Artificial Sequence
  Description of Artificial Sequence: Synthetic oligonucleotide
cugucaaggcgagcgcugu

SEQ ID NO: 2362886 - RNA, 19 nt, Artificial Sequence
  Description of Artificial Sequence: Synthetic oligonucleotide
ccucaggcagcuccaucca

SEQ ID NO: 2362887 - RNA, 19 nt, Artificial Sequence
  Description of Artificial Sequence: Synthetic oligonucleotide
gcccgacgagcccuggcca

SEQ ID NO: 2362888 - RNA, 19 nt, Artificial Sequence
  Description of Artificial Sequence: Synthetic oligonucleotide
aacuggcgguuuggcugua

SEQ ID NO: 2362889 - RNA, 19 nt, Artificial Sequence
  Description of Artificial Sequence: Synthetic oligonucleotide
caaggcgagcgcugugcau

SEQ ID NO: 2362890 - RNA, 19 nt, Artificial Sequence
  Description of Artificial Sequence: Synthetic oligonucleotide
ccugugucccgaccacaca

SEQ ID NO: 2362891 - RNA, 19 nt, Artificial Sequence
  Description of Artificial Sequence: Synthetic oligonucleotide
gccgacgccguagcuguuc

SEQ ID NO: 2362892 - RNA, 19 nt, Artificial Sequence
  Description of Artificial Sequence: Synthetic oligonucleotide
cccgaccacacagcaguuc

SEQ ID NO: 2362893 - RNA, 19 nt, Artificial Sequence
  Description of Artificial Sequence: Synthetic oligonucleotide
ggcgagccugugucccgac

SEQ ID NO: 2362894 - RNA, 19 nt, Artificial Sequence
  Description of Artificial Sequence: Synthetic oligonucleotide
ccgacgagcccuggccagc

SEQ ID NO: 2362895 - RNA, 19 nt, Artificial Sequence
  Description of Artificial Sequence: Synthetic oligonucleotide
cugccgacuccggccccug

SEQ ID NO: 2362896 - RNA, 19 nt, Artificial Sequence
  Description of Artificial Sequence: Synthetic oligonucleotide
gccagacauuggaggcgag

SEQ ID NO: 2362897 - RNA, 19 nt, Artificial Sequence
  Description of Artificial Sequence: Synthetic oligonucleotide
gggcaggaucagagguggc

SEQ ID NO: 2362898 - RNA, 19 nt, Artificial Sequence
  Description of Artificial Sequence: Synthetic oligonucleotide
gcuguacacuuggaucacu

SEQ ID NO: 2362899 - RNA, 19 nt, Artificial Sequence
  Description of Artificial Sequence: Synthetic oligonucleotide
gcaugcucccuaggauguc

SEQ ID NO: 2362900 - RNA, 19 nt, Artificial Sequence
  Description of Artificial Sequence: Synthetic oligonucleotide
guuggcgggcugcgacagu

SEQ ID NO: 2362901 - RNA, 19 nt, Artificial Sequence
  Description of Artificial Sequence: Synthetic oligonucleotide
gguaugccaguuacagcuu

SEQ ID NO: 2362902 - RNA, 19 nt, Artificial Sequence
  Description of Artificial Sequence: Synthetic oligonucleotide
ccgacgccguagcuguuca

SEQ ID NO: 2362903 - RNA, 19 nt, Artificial Sequence
  Description of Artificial Sequence: Synthetic oligonucleotide
gccgggguacagacaguuc

SEQ ID NO: 2362904 - RNA, 19 nt, Artificial Sequence
  Description of Artificial Sequence: Synthetic oligonucleotide
ccagagcaucugaagcccu

SEQ ID NO: 2362905 - RNA, 19 nt, Artificial Sequence
  Description of Artificial Sequence: Synthetic oligonucleotide
cgccguagcuguucagaga

SEQ ID NO: 2362906 - RNA, 19 nt, Artificial Sequence
  Description of Artificial Sequence: Synthetic oligonucleotide
caggcaggucaggcucuga

SEQ ID NO: 2362907 - RNA, 19 nt, Artificial Sequence
  Description of Artificial Sequence: Synthetic oligonucleotide
cgacgagcccuggccagcc

SEQ ID NO: 2362908 - RNA, 19 nt, Artificial Sequence
  Description of Artificial Sequence: Synthetic oligonucleotide
gacuugggccgaggacggu

SEQ ID NO: 2362909 - RNA, 19 nt, Artificial Sequence
  Description of Artificial Sequence: Synthetic oligonucleotide
cgacgccguagcuguucag

SEQ ID NO: 2362910 - RNA, 19 nt, Artificial Sequence
  Description of Artificial Sequence: Synthetic oligonucleotide
cagccgcuuuccugccaua

SEQ ID NO: 2362911 - RNA, 19 nt, Artificial Sequence
  Description of Artificial Sequence: Synthetic oligonucleotide
cgggguacagacaguuccu

SEQ ID NO: 2362912 - RNA, 19 nt, Artificial Sequence
  Description of Artificial Sequence: Synthetic oligonucleotide
cccuagcaccaggggcugc

SEQ ID NO: 2362913 - RNA, 19 nt, Artificial Sequence
  Description of Artificial Sequence: Synthetic oligonucleotide
cgacuccggccccuguuca

SEQ ID NO: 2362914 - RNA, 19 nt, Artificial Sequence
  Description of Artificial Sequence: Synthetic oligonucleotide
ggacggugggcagguggua

SEQ ID NO: 2362915 - RNA, 19 nt, Artificial Sequence
  Description of Artificial Sequence: Synthetic oligonucleotide
ggccguucugaggaugcuu

SEQ ID NO: 2362916 - RNA, 19 nt, Artificial Sequence
  Description of Artificial Sequence: Synthetic oligonucleotide
cgcugugcauguuggugcu

SEQ ID NO: 2362917 - RNA, 19 nt, Artificial Sequence
  Description of Artificial Sequence: Synthetic oligonucleotide
gcacgggcucgggguacac

SEQ ID NO: 2362918 - RNA, 19 nt, Artificial Sequence
  Description of Artificial Sequence: Synthetic oligonucleotide
ggugggcaugacagccgcu

SEQ ID NO: 2362919 - RNA, 19 nt, Artificial Sequence
  Description of Artificial Sequence: Synthetic oligonucleotide
gccgacuccggccccuguu

SEQ ID NO: 2362920 - RNA, 19 nt, Artificial Sequence
  Description of Artificial Sequence: Synthetic oligonucleotide
gccagccgacgccguagcu

SEQ ID NO: 2362921 - RNA, 19 nt, Artificial Sequence
  Description of Artificial Sequence: Synthetic oligonucleotide
agccgacgccguagcuguu

SEQ ID NO: 2362922 - RNA, 19 nt, Artificial Sequence
  Description of Artificial Sequence: Synthetic oligonucleotide
cgcuggcuaugagguggcc

SEQ ID NO: 2362923 - RNA, 19 nt, Artificial Sequence
  Description of Artificial Sequence: Synthetic oligonucleotide
cgagcacgggcucggggua

SEQ ID NO: 2362924 - RNA, 19 nt, Artificial Sequence
  Description of Artificial Sequence: Synthetic oligonucleotide
gccguccaguccucugcuu

SEQ ID NO: 2362925 - RNA, 19 nt, Artificial Sequence
  Description of Artificial Sequence: Synthetic oligonucleotide
gcgggcugcgacaguucau

SEQ ID NO: 2362926 - RNA, 19 nt, Artificial Sequence
  Description of Artificial Sequence: Synthetic oligonucleotide
cgaggacggugggcaggug

SEQ ID NO: 2362927 - RNA, 19 nt, Artificial Sequence
  Description of Artificial Sequence: Synthetic oligonucleotide
cgccgggguacagacaguu

SEQ ID NO: 2362928 - RNA, 19 nt, Artificial Sequence
  Description of Artificial Sequence: Synthetic oligonucleotide
gcgccgggguacagacagu

SEQ ID NO: 2362929 - RNA, 19 nt, Artificial Sequence
  Description of Artificial Sequence: Synthetic oligonucleotide
ggcgagcgcugugcauguu

SEQ ID NO: 2362930 - RNA, 19 nt, Artificial Sequence
  Description of Artificial Sequence: Synthetic oligonucleotide
guucuuguaaccuagugcg

SEQ ID NO: 2362931 - RNA, 19 nt, Artificial Sequence
  Description of Artificial Sequence: Synthetic oligonucleotide
agaaucaugucucuggugu

SEQ ID NO: 2362932 - RNA, 19 nt, Artificial Sequence
  Description of Artificial Sequence: Synthetic oligonucleotide
ugucuugucgucuucgggg

SEQ ID NO: 2362933 - RNA, 19 nt, Artificial Sequence
  Description of Artificial Sequence: Synthetic oligonucleotide
aacauggcgacggagccgc

SEQ ID NO: 2362934 - RNA, 19 nt, Artificial Sequence
  Description of Artificial Sequence: Synthetic oligonucleotide
ugcgugaacacugacagcc

SEQ ID NO: 2362935 - RNA, 19 nt, Artificial Sequence
  Description of Artificial Sequence: Synthetic oligonucleotide
uuuagccacauucucaguc

SEQ ID NO: 2362936 - RNA, 19 nt, Artificial Sequence
  Description of Artificial Sequence: Synthetic oligonucleotide
uuucuugugacucucugua

SEQ ID NO: 2362937 - RNA, 19 nt, Artificial Sequence
  Description of Artificial Sequence: Synthetic oligonucleotide
ucuacgaaguccucuuugc

SEQ ID NO: 2362938 - RNA, 19 nt, Artificial Sequence
  Description of Artificial Sequence: Synthetic oligonucleotide
uuuucucacguucuuguaa

SEQ ID NO: 2362939 - RNA, 19 nt, Artificial Sequence
  Description of Artificial Sequence: Synthetic oligonucleotide
accuagugcggccagcagc

SEQ ID NO: 2362940 - RNA, 19 nt, Artificial Sequence
  Description of Artificial Sequence: Synthetic oligonucleotide
uuucucacguucuuguaac

SEQ ID NO: 2362941 - RNA, 19 nt, Artificial Sequence
  Description of Artificial Sequence: Synthetic oligonucleotide
aguacccgcagcccgagcg

SEQ ID NO: 2362942 - RNA, 19 nt, Artificial Sequence
  Description of Artificial Sequence: Synthetic oligonucleotide
ggugcgugaacacugacag

SEQ ID NO: 2362943 - RNA, 19 nt, Artificial Sequence
  Description of Artificial Sequence: Synthetic oligonucleotide
gaagucagaaucaugucuc

SEQ ID NO: 2362944 - RNA, 19 nt, Artificial Sequence
  Description of Artificial Sequence: Synthetic oligonucleotide
cucuguauccaguucggcc

SEQ ID NO: 2362945 - RNA, 19 nt, Artificial Sequence
  Description of Artificial Sequence: Synthetic oligonucleotide
ugguuuagccacauucuca

SEQ ID NO: 2362946 - RNA, 19 nt, Artificial Sequence
  Description of Artificial Sequence: Synthetic oligonucleotide
uuagccacauucucaguca

SEQ ID NO: 2362947 - RNA, 19 nt, Artificial Sequence
  Description of Artificial Sequence: Synthetic oligonucleotide
uccucuuugcucaggccgg

SEQ ID NO: 2362948 - RNA, 19 nt, Artificial Sequence
  Description of Artificial Sequence: Synthetic oligonucleotide
uucucagucaucagagccu

SEQ ID NO: 2362949 - RNA, 19 nt, Artificial Sequence
  Description of Artificial Sequence: Synthetic oligonucleotide
uucuuguaaccuagugcgg

SEQ ID NO: 2362950 - RNA, 19 nt, Artificial Sequence
  Description of Artificial Sequence: Synthetic oligonucleotide
gacagcccaagcuuggcag

SEQ ID NO: 2362951 - RNA, 19 nt, Artificial Sequence
  Description of Artificial Sequence: Synthetic oligonucleotide
gguuuagccacauucucag

SEQ ID NO: 2362952 - RNA, 19 nt, Artificial Sequence
  Description of Artificial Sequence: Synthetic oligonucleotide
uuccucacggcucgggccg

SEQ ID NO: 2362953 - RNA, 19 nt, Artificial Sequence
  Description of Artificial Sequence: Synthetic oligonucleotide
cagcgaguugccuagguag

SEQ ID NO: 2362954 - RNA, 19 nt, Artificial Sequence
  Description of Artificial Sequence: Synthetic oligonucleotide
uuuguccucaggaucgccu

SEQ ID NO: 2362955 - RNA, 19 nt, Artificial Sequence
  Description of Artificial Sequence: Synthetic oligonucleotide
aacugguccuguccgccac

SEQ ID NO: 2362956 - RNA, 19 nt, Artificial Sequence
  Description of Artificial Sequence: Synthetic oligonucleotide
guaguucucccucugcuug

SEQ ID NO: 2362957 - RNA, 19 nt, Artificial Sequence
  Description of Artificial Sequence: Synthetic oligonucleotide
ucggucuucacauccuccc

SEQ ID NO: 2362958 - RNA, 19 nt, Artificial Sequence
  Description of Artificial Sequence: Synthetic oligonucleotide
uugguuuagccacauucuc

SEQ ID NO: 2362959 - RNA, 19 nt, Artificial Sequence
  Description of Artificial Sequence: Synthetic oligonucleotide
uccuucgcguaccagguga

SEQ ID NO: 2362960 - RNA, 19 nt, Artificial Sequence
  Description of Artificial Sequence: Synthetic oligonucleotide
uacgaaguccucuuugcuc

SEQ ID NO: 2362961 - RNA, 19 nt, Artificial Sequence
  Description of Artificial Sequence: Synthetic oligonucleotide
aagucagaaucaugucucu

SEQ ID NO: 2362962 - RNA, 19 nt, Artificial Sequence
  Description of Artificial Sequence: Synthetic oligonucleotide
augucucuggugucugggc

SEQ ID NO: 2362963 - RNA, 19 nt, Artificial Sequence
  Description of Artificial Sequence: Synthetic oligonucleotide
agcgucagauucccgcagc

SEQ ID NO: 2362964 - RNA, 19 nt, Artificial Sequence
  Description of Artificial Sequence: Synthetic oligonucleotide
uucgcuguccacgcggugg

SEQ ID NO: 2362965 - RNA, 19 nt, Artificial Sequence
  Description of Artificial Sequence: Synthetic oligonucleotide
uguaaccuagugcggccag

SEQ ID NO: 2362966 - RNA, 19 nt, Artificial Sequence
  Description of Artificial Sequence: Synthetic oligonucleotide
ucagauucccgcagcacuc

SEQ ID NO: 2362967 - RNA, 19 nt, Artificial Sequence
  Description of Artificial Sequence: Synthetic oligonucleotide
ugcuugucggucuucacau

SEQ ID NO: 2362968 - RNA, 19 nt, Artificial Sequence
  Description of Artificial Sequence: Synthetic oligonucleotide
aguccucuuugcucaggcc

SEQ ID NO: 2362969 - RNA, 19 nt, Artificial Sequence
  Description of Artificial Sequence: Synthetic oligonucleotide
ucagcacgaggcuucuucc

SEQ ID NO: 2362970 - RNA, 19 nt, Artificial Sequence
  Description of Artificial Sequence: Synthetic oligonucleotide
gagccgaacauggcgacgg

SEQ ID NO: 2362971 - RNA, 19 nt, Artificial Sequence
  Description of Artificial Sequence: Synthetic oligonucleotide
uggugcgugaacacugaca

SEQ ID NO: 2362972 - RNA, 19 nt, Artificial Sequence
  Description of Artificial Sequence: Synthetic oligonucleotide
ugucuucccgggauagugc

SEQ ID NO: 2362973 - RNA, 19 nt, Artificial Sequence
  Description of Artificial Sequence: Synthetic oligonucleotide
ugaacacugacagcccaag

SEQ ID NO: 2362974 - RNA, 19 nt, Artificial Sequence
  Description of Artificial Sequence: Synthetic oligonucleotide
cauccucccaauugaacug

SEQ ID NO: 2362975 - RNA, 19 nt, Artificial Sequence
  Description of Artificial Sequence: Synthetic oligonucleotide
ugggccuucgcuguccacg

SEQ ID NO: 2362976 - RNA, 19 nt, Artificial Sequence
  Description of Artificial Sequence: Synthetic oligonucleotide
uugccuagguaguucuccc

SEQ ID NO: 2362977 - RNA, 19 nt, Artificial Sequence
  Description of Artificial Sequence: Synthetic oligonucleotide
uucgggguggacuccuucc

SEQ ID NO: 2362978 - RNA, 19 nt, Artificial Sequence
  Description of Artificial Sequence: Synthetic oligonucleotide
gucucuggugucugggccg

SEQ ID NO: 2362979 - RNA, 19 nt, Artificial Sequence
  Description of Artificial Sequence: Synthetic oligonucleotide
gaggaugggcagcugucag

SEQ ID NO: 2362980 - RNA, 19 nt, Artificial Sequence
  Description of Artificial Sequence: Synthetic oligonucleotide
cucuacgaaguccucuuug

SEQ ID NO: 2362981 - RNA, 19 nt, Artificial Sequence
  Description of Artificial Sequence: Synthetic oligonucleotide
ccuugguuuagccacauuc

SEQ ID NO: 2362982 - RNA, 19 nt, Artificial Sequence
  Description of Artificial Sequence: Synthetic oligonucleotide
ugaacugguccuguccgcc

SEQ ID NO: 2362983 - RNA, 19 nt, Artificial Sequence
  Description of Artificial Sequence: Synthetic oligonucleotide
ucaugucucuggugucugg

SEQ ID NO: 2362984 - RNA, 19 nt, Artificial Sequence
  Description of Artificial Sequence: Synthetic oligonucleotide
cuugucgucuucggggugg

SEQ ID NO: 2362985 - RNA, 19 nt, Artificial Sequence
  Description of Artificial Sequence: Synthetic oligonucleotide
gaggucgcggcccuucugc

SEQ ID NO: 2362986 - RNA, 19 nt, Artificial Sequence
  Description of Artificial Sequence: Synthetic oligonucleotide
ugacagcccaagcuuggca

SEQ ID NO: 2362987 - RNA, 19 nt, Artificial Sequence
  Description of Artificial Sequence: Synthetic oligonucleotide
uaccaggugaggucgcggc

SEQ ID NO: 2362988 - RNA, 19 nt, Artificial Sequence
  Description of Artificial Sequence: Synthetic oligonucleotide
uucucacguucuuguaacc

SEQ ID NO: 2362989 - RNA, 19 nt, Artificial Sequence
  Description of Artificial Sequence: Synthetic oligonucleotide
gggauagugccacacggcc

SEQ ID NO: 2362990 - RNA, 19 nt, Artificial Sequence
  Description of Artificial Sequence: Synthetic oligonucleotide
ggcgccaucagcgaguugc

SEQ ID NO: 2362991 - RNA, 19 nt, Artificial Sequence
  Description of Artificial Sequence: Synthetic oligonucleotide
uugaacugguccuguccgc

SEQ ID NO: 2362992 - RNA, 19 nt, Artificial Sequence
  Description of Artificial Sequence: Synthetic oligonucleotide
gaaucaugucucugguguc

SEQ ID NO: 2362993 - RNA, 19 nt, Artificial Sequence
  Description of Artificial Sequence: Synthetic oligonucleotide
ccuagugcggccagcagcg

SEQ ID NO: 2362994 - RNA, 19 nt, Artificial Sequence
  Description of Artificial Sequence: Synthetic oligonucleotide
cuuugucuucccgggauag

SEQ ID NO: 2362995 - RNA, 19 nt, Artificial Sequence
  Description of Artificial Sequence: Synthetic oligonucleotide
uguccuugguuuagccaca

SEQ ID NO: 2362996 - RNA, 19 nt, Artificial Sequence
  Description of Artificial Sequence: Synthetic oligonucleotide
gaacauggcgacggagccg

SEQ ID NO: 2362997 - RNA, 19 nt, Artificial Sequence
  Description of Artificial Sequence: Synthetic oligonucleotide
aaccuagugcggccagcag

SEQ ID NO: 2362998 - RNA, 19 nt, Artificial Sequence
  Description of Artificial Sequence: Synthetic oligonucleotide
uccccgcuuccucuuacag

SEQ ID NO: 2362999 - RNA, 19 nt, Artificial Sequence
  Description of Artificial Sequence: Synthetic oligonucleotide
ucgucuucgggguggacuc

SEQ ID NO: 2363000 - RNA, 19 nt, Artificial Sequence
  Description of Artificial Sequence: Synthetic oligonucleotide
ugguguccuugguuuagcc

SEQ ID NO: 2363001 - RNA, 19 nt, Artificial Sequence
  Description of Artificial Sequence: Synthetic oligonucleotide
cacauccucccaauugaac

SEQ ID NO: 2363002 - RNA, 19 nt, Artificial Sequence
  Description of Artificial Sequence: Synthetic oligonucleotide
aucucuacgaaguccucuu

SEQ ID NO: 2363003 - RNA, 19 nt, Artificial Sequence
  Description of Artificial Sequence: Synthetic oligonucleotide
uucgcguaccaggugaggu

SEQ ID NO: 2363004 - RNA, 19 nt, Artificial Sequence
  Description of Artificial Sequence: Synthetic oligonucleotide
uaaccuagugcggccagca

SEQ ID NO: 2363005 - RNA, 19 nt, Artificial Sequence
  Description of Artificial Sequence: Synthetic oligonucleotide
cacugacagcccaagcuug

SEQ ID NO: 2363006 - RNA, 19 nt, Artificial Sequence
  Description of Artificial Sequence: Synthetic oligonucleotide
agccgcucgcugcacaauc

SEQ ID NO: 2363007 - RNA, 19 nt, Artificial Sequence
  Description of Artificial Sequence: Synthetic oligonucleotide
acaaucuccaguacccgca

SEQ ID NO: 2363008 - RNA, 19 nt, Artificial Sequence
  Description of Artificial Sequence: Synthetic oligonucleotide
cagaaucaugucucuggug

SEQ ID NO: 2363009 - RNA, 19 nt, Artificial Sequence
  Description of Artificial Sequence: Synthetic oligonucleotide
ugucagucucccucuugug

SEQ ID NO: 2363010 - RNA, 19 nt, Artificial Sequence
  Description of Artificial Sequence: Synthetic oligonucleotide
uugucggucuucacauccu

SEQ ID NO: 2363011 - RNA, 19 nt, Artificial Sequence
  Description of Artificial Sequence: Synthetic oligonucleotide
aucgccuccuucccguuug

SEQ ID NO: 2363012 - RNA, 19 nt, Artificial Sequence
  Description of Artificial Sequence: Synthetic oligonucleotide
ucuuugucuucccgggaua

SEQ ID NO: 2363013 - RNA, 19 nt, Artificial Sequence
  Description of Artificial Sequence: Synthetic oligonucleotide
cuagguaguucucccucug

SEQ ID NO: 2363014 - RNA, 19 nt, Artificial Sequence
  Description of Artificial Sequence: Synthetic oligonucleotide
ucuuguguucuuugucuuu

SEQ ID NO: 2363015 - RNA, 19 nt, Artificial Sequence
  Description of Artificial Sequence: Synthetic oligonucleotide
cacgccuuuguccucagga

SEQ ID NO: 2363016 - RNA, 19 nt, Artificial Sequence
  Description of Artificial Sequence: Synthetic oligonucleotide
ugacucucuguauccaguu

SEQ ID NO: 2363017 - RNA, 19 nt, Artificial Sequence
  Description of Artificial Sequence: Synthetic oligonucleotide
aggaucgccuccuucccgu

SEQ ID NO: 2363018 - RNA, 19 nt, Artificial Sequence
  Description of Artificial Sequence: Synthetic oligonucleotide
cucgcguuccgccucgcgc

SEQ ID NO: 2363019 - RNA, 19 nt, Artificial Sequence
  Description of Artificial Sequence: Synthetic oligonucleotide
ucgggguggacuccuucca

SEQ ID NO: 2363020 - RNA, 19 nt, Artificial Sequence
  Description of Artificial Sequence: Synthetic oligonucleotide
guuugcagaucucuacgaa

SEQ ID NO: 2363021 - RNA, 19 nt, Artificial Sequence
  Description of Artificial Sequence: Synthetic oligonucleotide
ucuugucgucuucggggug

SEQ ID NO: 2363022 - RNA, 19 nt, Artificial Sequence
  Description of Artificial Sequence: Synthetic oligonucleotide
aggucgcggcccuucugcc

SEQ ID NO: 2363023 - RNA, 19 nt, Artificial Sequence
  Description of Artificial Sequence: Synthetic oligonucleotide
cagcccgagcgucagauuc

SEQ ID NO: 2363024 - RNA, 19 nt, Artificial Sequence
  Description of Artificial Sequence: Synthetic oligonucleotide
gagcgucagauucccgcag

SEQ ID NO: 2363025 - RNA, 19 nt, Artificial Sequence
  Description of Artificial Sequence: Synthetic oligonucleotide
uuguaaccuagugcggcca

SEQ ID NO: 2363026 - RNA, 19 nt, Artificial Sequence
  Description of Artificial Sequence: Synthetic oligonucleotide
cugccagcggcccacuggc

SEQ ID NO: 2363027 - RNA, 19 nt, Artificial Sequence
  Description of Artificial Sequence: Synthetic oligonucleotide
cucgcugcacaaucuccag

SEQ ID NO: 2363028 - RNA, 19 nt, Artificial Sequence
  Description of Artificial Sequence: Synthetic oligonucleotide
aguucggccuuguccucag

SEQ ID NO: 2363029 - RNA, 19 nt, Artificial Sequence
  Description of Artificial Sequence: Synthetic oligonucleotide
guggacuccuuccauuguc

SEQ ID NO: 2363030 - RNA, 19 nt, Artificial Sequence
  Description of Artificial Sequence: Synthetic oligonucleotide
cuguccacgcgguggugcg

SEQ ID NO: 2363031 - RNA, 19 nt, Artificial Sequence
  Description of Artificial Sequence: Synthetic oligonucleotide
cagaucucuacgaaguccu

SEQ ID NO: 2363032 - RNA, 19 nt, Artificial Sequence
  Description of Artificial Sequence: Synthetic oligonucleotide
uaguucucccucugcuugu

SEQ ID NO: 2363033 - RNA, 19 nt, Artificial Sequence
  Description of Artificial Sequence: Synthetic oligonucleotide
aucagcgaguugccuaggu

SEQ ID NO: 2363034 - RNA, 19 nt, Artificial Sequence
  Description of Artificial Sequence: Synthetic oligonucleotide
ucccucuuguguucuuugu

SEQ ID NO: 2363035 - RNA, 19 nt, Artificial Sequence
  Description of Artificial Sequence: Synthetic oligonucleotide
gucgcggcccuucugccag

SEQ ID NO: 2363036 - RNA, 19 nt, Artificial Sequence
  Description of Artificial Sequence: Synthetic oligonucleotide
gucagauucccgcagcacu

SEQ ID NO: 2363037 - RNA, 19 nt, Artificial Sequence
  Description of Artificial Sequence: Synthetic oligonucleotide
cuggagccgaacauggcga

SEQ ID NO: 2363038 - RNA, 19 nt, Artificial Sequence
  Description of Artificial Sequence: Synthetic oligonucleotide
ucuucccgggauagugcca

SEQ ID NO: 2363039 - RNA, 19 nt, Artificial Sequence
  Description of Artificial Sequence: Synthetic oligonucleotide
ccgaacauggcgacggagc

SEQ ID NO: 2363040 - RNA, 19 nt, Artificial Sequence
  Description of Artificial Sequence: Synthetic oligonucleotide
cuucccgggauagugccac

SEQ ID NO: 2363041 - RNA, 19 nt, Artificial Sequence
  Description of Artificial Sequence: Synthetic oligonucleotide
ccguuugcagaucucuacg

SEQ ID NO: 2363042 - RNA, 19 nt, Artificial Sequence
  Description of Artificial Sequence: Synthetic oligonucleotide
ugccuagguaguucucccu

SEQ ID NO: 2363043 - RNA, 19 nt, Artificial Sequence
  Description of Artificial Sequence: Synthetic oligonucleotide
cucgggccggcacacggcg

SEQ ID NO: 2363044 - RNA, 19 nt, Artificial Sequence
  Description of Artificial Sequence: Synthetic oligonucleotide
agcccgagcgucagauucc

SEQ ID NO: 2363045 - RNA, 19 nt, Artificial Sequence
  Description of Artificial Sequence: Synthetic oligonucleotide
aggccggugggcuguuuuc

SEQ ID NO: 2363046 - RNA, 19 nt, Artificial Sequence
  Description of Artificial Sequence: Synthetic oligonucleotide
cugcuugucggucuucaca

SEQ ID NO: 2363047 - RNA, 19 nt, Artificial Sequence
  Description of Artificial Sequence: Synthetic oligonucleotide
ucgcguaccaggugagguc

SEQ ID NO: 2363048 - RNA, 19 nt, Artificial Sequence
  Description of Artificial Sequence: Synthetic oligonucleotide
caggaucgccuccuucccg

SEQ ID NO: 2363049 - RNA, 19 nt, Artificial Sequence
  Description of Artificial Sequence: Synthetic oligonucleotide
uggagccgaacauggcgac

SEQ ID NO: 2363050 - RNA, 19 nt, Artificial Sequence
  Description of Artificial Sequence: Synthetic oligonucleotide
ccgggauagugccacacgg

SEQ ID NO: 2363051 - RNA, 19 nt, Artificial Sequence
  Description of Artificial Sequence: Synthetic oligonucleotide
cacgaggcuucuuccuggc

SEQ ID NO: 2363052 - RNA, 19 nt, Artificial Sequence
  Description of Artificial Sequence: Synthetic oligonucleotide
gaguugccuagguaguucu

SEQ ID NO: 2363053 - RNA, 19 nt, Artificial Sequence
  Description of Artificial Sequence: Synthetic oligonucleotide
aucaugucucuggugucug

SEQ ID NO: 2363054 - RNA, 19 nt, Artificial Sequence
  Description of Artificial Sequence: Synthetic oligonucleotide
ugaggucgcggcccuucug

SEQ ID NO: 2363055 - RNA, 19 nt, Artificial Sequence
  Description of Artificial Sequence: Synthetic oligonucleotide
uccuguccgccacgcacgc

SEQ ID NO: 2363056 - RNA, 19 nt, Artificial Sequence
  Description of Artificial Sequence: Synthetic oligonucleotide
ucucuacgaaguccucuuu

SEQ ID NO: 2363057 - RNA, 19 nt, Artificial Sequence
  Description of Artificial Sequence: Synthetic oligonucleotide
agaggaugggcagcuguca

SEQ ID NO: 2363058 - RNA, 19 nt, Artificial Sequence
  Description of Artificial Sequence: Synthetic oligonucleotide
ggguggacuccuuccauug

SEQ ID NO: 2363059 - RNA, 19 nt, Artificial Sequence
  Description of Artificial Sequence: Synthetic oligonucleotide
ccaucagcgaguugccuag

SEQ ID NO: 2363060 - RNA, 19 nt, Artificial Sequence
  Description of Artificial Sequence: Synthetic oligonucleotide
ugggccgaggagagggaga

SEQ ID NO: 2363061 - RNA, 19 nt, Artificial Sequence
  Description of Artificial Sequence: Synthetic oligonucleotide
uccucccaauugaacuggu

SEQ ID NO: 2363062 - RNA, 19 nt, Artificial Sequence
  Description of Artificial Sequence: Synthetic oligonucleotide
acgccuuuguccucaggau

SEQ ID NO: 2363063 - RNA, 19 nt, Artificial Sequence
  Description of Artificial Sequence: Synthetic oligonucleotide
gguccuguccgccacgcac

SEQ ID NO: 2363064 - RNA, 19 nt, Artificial Sequence
  Description of Artificial Sequence: Synthetic oligonucleotide
ucgcuguccacgcgguggu

SEQ ID NO: 2363065 - RNA, 19 nt, Artificial Sequence
  Description of Artificial Sequence: Synthetic oligonucleotide
ccgagcgucagauucccgc

SEQ ID NO: 2363066 - RNA, 19 nt, Artificial Sequence
  Description of Artificial Sequence: Synthetic oligonucleotide
gcacgaggcuucuuccugg

SEQ ID NO: 2363067 - RNA, 19 nt, Artificial Sequence
  Description of Artificial Sequence: Synthetic oligonucleotide
gagaggaugggcagcuguc

SEQ ID NO: 2363068 - RNA, 19 nt, Artificial Sequence
  Description of Artificial Sequence: Synthetic oligonucleotide
uccgccacgcacgccgccg

SEQ ID NO: 2363069 - RNA, 19 nt, Artificial Sequence
  Description of Artificial Sequence: Synthetic oligonucleotide
guaccaggugaggucgcgg

SEQ ID NO: 2363070 - RNA, 19 nt, Artificial Sequence
  Description of Artificial Sequence: Synthetic oligonucleotide
ggugggcuguuuucucacg

SEQ ID NO: 2363071 - RNA, 19 nt, Artificial Sequence
  Description of Artificial Sequence: Synthetic oligonucleotide
gccuucgcuguccacgcgg

SEQ ID NO: 2363072 - RNA, 19 nt, Artificial Sequence
  Description of Artificial Sequence: Synthetic oligonucleotide
ucugggccgaggagaggga

SEQ ID NO: 2363073 - RNA, 19 nt, Artificial Sequence
  Description of Artificial Sequence: Synthetic oligonucleotide
gucggucuucacauccucc

SEQ ID NO: 2363074 - RNA, 19 nt, Artificial Sequence
  Description of Artificial Sequence: Synthetic oligonucleotide
uauguccccgcuuccucuu

SEQ ID NO: 2363075 - RNA, 19 nt, Artificial Sequence
  Description of Artificial Sequence: Synthetic oligonucleotide
gucagucucccucuugugu

SEQ ID NO: 2363076 - RNA, 19 nt, Artificial Sequence
  Description of Artificial Sequence: Synthetic oligonucleotide
uguauccaguucggccuug

SEQ ID NO: 2363077 - RNA, 19 nt, Artificial Sequence
  Description of Artificial Sequence: Synthetic oligonucleotide
ugggcuguuuucucacguu

SEQ ID NO: 2363078 - RNA, 19 nt, Artificial Sequence
  Description of Artificial Sequence: Synthetic oligonucleotide
cuucgcguaccaggugagg

SEQ ID NO: 2363079 - RNA, 19 nt, Artificial Sequence
  Description of Artificial Sequence: Synthetic oligonucleotide
gacggagccgcucgcugca

SEQ ID NO: 2363080 - RNA, 19 nt, Artificial Sequence
  Description of Artificial Sequence: Synthetic oligonucleotide
uagugccacacggccugcg

SEQ ID NO: 2363081 - RNA, 19 nt, Artificial Sequence
  Description of Artificial Sequence: Synthetic oligonucleotide
guaaccuagugcggccagc

SEQ ID NO: 2363082 - RNA, 19 nt, Artificial Sequence
  Description of Artificial Sequence: Synthetic oligonucleotide
ccugcggaaccacuggcgc

SEQ ID NO: 2363083 - RNA, 19 nt, Artificial Sequence
  Description of Artificial Sequence: Synthetic oligonucleotide
ggugucugggccgaggaga

SEQ ID NO: 2363084 - RNA, 19 nt, Artificial Sequence
  Description of Artificial Sequence: Synthetic oligonucleotide
gacuggagccgaacauggc

SEQ ID NO: 2363085 - RNA, 19 nt, Artificial Sequence
  Description of Artificial Sequence: Synthetic oligonucleotide
agcgaguugccuagguagu

SEQ ID NO: 2363086 - RNA, 19 nt, Artificial Sequence
  Description of Artificial Sequence: Synthetic oligonucleotide
cugguguccuugguuuagc

SEQ ID NO: 2363087 - RNA, 19 nt, Artificial Sequence
  Description of Artificial Sequence: Synthetic oligonucleotide
cccguuugcagaucucuac

SEQ ID NO: 2363088 - RNA, 19 nt, Artificial Sequence
  Description of Artificial Sequence: Synthetic oligonucleotide
ucgcgcacagccgccagcu

SEQ ID NO: 2363089 - RNA, 19 nt, Artificial Sequence
  Description of Artificial Sequence: Synthetic oligonucleotide
agccacauucucagucauc

SEQ ID NO: 2363090 - RNA, 19 nt, Artificial Sequence
  Description of Artificial Sequence: Synthetic oligonucleotide
gugcgugaacacugacagc

SEQ ID NO: 2363091 - RNA, 19 nt, Artificial Sequence
  Description of Artificial Sequence: Synthetic oligonucleotide
cacgccgccgcgacuggag

SEQ ID NO: 2363092 - RNA, 19 nt, Artificial Sequence
  Description of Artificial Sequence: Synthetic oligonucleotide
acuggcgccaucagcgagu

SEQ ID NO: 2363093 - RNA, 19 nt, Artificial Sequence
  Description of Artificial Sequence: Synthetic oligonucleotide
cgaacauggcgacggagcc

SEQ ID NO: 2363094 - RNA, 19 nt, Artificial Sequence
  Description of Artificial Sequence: Synthetic oligonucleotide
agccgguccacgccuuugu

SEQ ID NO: 2363095 - RNA, 19 nt, Artificial Sequence
  Description of Artificial Sequence: Synthetic oligonucleotide
cuuccauuguccuggcuau

SEQ ID NO: 2363096 - RNA, 19 nt, Artificial Sequence
  Description of Artificial Sequence: Synthetic oligonucleotide
gucuugucgucuucggggu

SEQ ID NO: 2363097 - RNA, 19 nt, Artificial Sequence
  Description of Artificial Sequence: Synthetic oligonucleotide
cuucgggguggacuccuuc

SEQ ID NO: 2363098 - RNA, 19 nt, Artificial Sequence
  Description of Artificial Sequence: Synthetic oligonucleotide
ugucugggccgaggagagg

SEQ ID NO: 2363099 - RNA, 19 nt, Artificial Sequence
  Description of Artificial Sequence: Synthetic oligonucleotide
ucccgggauagugccacac

SEQ ID NO: 2363100 - RNA, 19 nt, Artificial Sequence
  Description of Artificial Sequence: Synthetic oligonucleotide
cugucagucucccucuugu

SEQ ID NO: 2363101 - RNA, 19 nt, Artificial Sequence
  Description of Artificial Sequence: Synthetic oligonucleotide
gggagaagucagaaucaug

SEQ ID NO: 2363102 - RNA, 19 nt, Artificial Sequence
  Description of Artificial Sequence: Synthetic oligonucleotide
cuggugucugggccgagga

SEQ ID NO: 2363103 - RNA, 19 nt, Artificial Sequence
  Description of Artificial Sequence: Synthetic oligonucleotide
acgcacgccgccgcgacug

SEQ ID NO: 2363104 - RNA, 19 nt, Artificial Sequence
  Description of Artificial Sequence: Synthetic oligonucleotide
cagcgccucgcguuccgcc

SEQ ID NO: 2363105 - RNA, 19 nt, Artificial Sequence
  Description of Artificial Sequence: Synthetic oligonucleotide
gccuagguaguucucccuc

SEQ ID NO: 2363106 - RNA, 19 nt, Artificial Sequence
  Description of Artificial Sequence: Synthetic oligonucleotide
uccacgccuuuguccucag

SEQ ID NO: 2363107 - RNA, 19 nt, Artificial Sequence
  Description of Artificial Sequence: Synthetic oligonucleotide
guggugcgugaacacugac

SEQ ID NO: 2363108 - RNA, 19 nt, Artificial Sequence
  Description of Artificial Sequence: Synthetic oligonucleotide
ccgguccacgccuuugucc

SEQ ID NO: 2363109 - RNA, 19 nt, Artificial Sequence
  Description of Artificial Sequence: Synthetic oligonucleotide
ucgccuccuucccguuugc

SEQ ID NO: 2363110 - RNA, 19 nt, Artificial Sequence
  Description of Artificial Sequence: Synthetic oligonucleotide
cacagccgccagcucuucc

SEQ ID NO: 2363111 - RNA, 19 nt, Artificial Sequence
  Description of Artificial Sequence: Synthetic oligonucleotide
cacggcgcgcgguccuucg

SEQ ID NO: 2363112 - RNA, 19 nt, Artificial Sequence
  Description of Artificial Sequence: Synthetic oligonucleotide
ccuuccauuguccuggcua

SEQ ID NO: 2363113 - RNA, 19 nt, Artificial Sequence
  Description of Artificial Sequence: Synthetic oligonucleotide
cuacgaaguccucuuugcu

SEQ ID NO: 2363114 - RNA, 19 nt, Artificial Sequence
  Description of Artificial Sequence: Synthetic oligonucleotide
acgcgguggugcgugaaca

SEQ ID NO: 2363115 - RNA, 19 nt, Artificial Sequence
  Description of Artificial Sequence: Synthetic oligonucleotide
caucagcgaguugccuagg

SEQ ID NO: 2363116 - RNA, 19 nt, Artificial Sequence
  Description of Artificial Sequence: Synthetic oligonucleotide
gcugcacaaucuccaguac

SEQ ID NO: 2363117 - RNA, 19 nt, Artificial Sequence
  Description of Artificial Sequence: Synthetic oligonucleotide
gcuauguccccgcuuccuc

SEQ ID NO: 2363118 - RNA, 19 nt, Artificial Sequence
  Description of Artificial Sequence: Synthetic oligonucleotide
cacgcgguggugcgugaac

SEQ ID NO: 2363119 - RNA, 19 nt, Artificial Sequence
  Description of Artificial Sequence: Synthetic oligonucleotide
guccuucgcguaccaggug

SEQ ID NO: 2363120 - RNA, 19 nt, Artificial Sequence
  Description of Artificial Sequence: Synthetic oligonucleotide
cuauguccccgcuuccucu

SEQ ID NO: 2363121 - RNA, 19 nt, Artificial Sequence
  Description of Artificial Sequence: Synthetic oligonucleotide
ugguccuguccgccacgca

SEQ ID NO: 2363122 - RNA, 19 nt, Artificial Sequence
  Description of Artificial Sequence: Synthetic oligonucleotide
ggagccgaacauggcgacg

SEQ ID NO: 2363123 - RNA, 19 nt, Artificial Sequence
  Description of Artificial Sequence: Synthetic oligonucleotide
ccuuguccucagcacgagg

SEQ ID NO: 2363124 - RNA, 19 nt, Artificial Sequence
  Description of Artificial Sequence: Synthetic oligonucleotide
gugggcuguuuucucacgu

SEQ ID NO: 2363125 - RNA, 19 nt, Artificial Sequence
  Description of Artificial Sequence: Synthetic oligonucleotide
uugucgucuucggggugga

SEQ ID NO: 2363126 - RNA, 19 nt, Artificial Sequence
  Description of Artificial Sequence: Synthetic oligonucleotide
gugccacacggccugcgga

SEQ ID NO: 2363127 - RNA, 19 nt, Artificial Sequence
  Description of Artificial Sequence: Synthetic oligonucleotide
gugaacacugacagcccaa

SEQ ID NO: 2363128 - RNA, 19 nt, Artificial Sequence
  Description of Artificial Sequence: Synthetic oligonucleotide
cccaauugaacugguccug

SEQ ID NO: 2363129 - RNA, 19 nt, Artificial Sequence
  Description of Artificial Sequence: Synthetic oligonucleotide
gccagcggcccacuggcgc

SEQ ID NO: 2363130 - RNA, 19 nt, Artificial Sequence
  Description of Artificial Sequence: Synthetic oligonucleotide
cuucgcuguccacgcggug

SEQ ID NO: 2363131 - RNA, 19 nt, Artificial Sequence
  Description of Artificial Sequence: Synthetic oligonucleotide
ccucuuguguucuuugucu

SEQ ID NO: 2363132 - RNA, 19 nt, Artificial Sequence
  Description of Artificial Sequence: Synthetic oligonucleotide
ggccugcggaaccacuggc

SEQ ID NO: 2363133 - RNA, 19 nt, Artificial Sequence
  Description of Artificial Sequence: Synthetic oligonucleotide
ccuucgcguaccaggugag

SEQ ID NO: 2363134 - RNA, 19 nt, Artificial Sequence
  Description of Artificial Sequence: Synthetic oligonucleotide
cccgggauagugccacacg

SEQ ID NO: 2363135 - RNA, 19 nt, Artificial Sequence
  Description of Artificial Sequence: Synthetic oligonucleotide
agccgaacauggcgacgga

SEQ ID NO: 2363136 - RNA, 19 nt, Artificial Sequence
  Description of Artificial Sequence: Synthetic oligonucleotide
ccaggugaggucgcggccc

SEQ ID NO: 2363137 - RNA, 19 nt, Artificial Sequence
  Description of Artificial Sequence: Synthetic oligonucleotide
cucccucugcuugucgguc

SEQ ID NO: 2363138 - RNA, 19 nt, Artificial Sequence
  Description of Artificial Sequence: Synthetic oligonucleotide
cggccuuguccucagcacg

SEQ ID NO: 2363139 - RNA, 19 nt, Artificial Sequence
  Description of Artificial Sequence: Synthetic oligonucleotide
cguuugcagaucucuacga

SEQ ID NO: 2363140 - RNA, 19 nt, Artificial Sequence
  Description of Artificial Sequence: Synthetic oligonucleotide
gccgaacauggcgacggag

SEQ ID NO: 2363141 - RNA, 19 nt, Artificial Sequence
  Description of Artificial Sequence: Synthetic oligonucleotide
cuagugcggccagcagcgc

SEQ ID NO: 2363142 - RNA, 19 nt, Artificial Sequence
  Description of Artificial Sequence: Synthetic oligonucleotide
guggugcuugggccuucgc

SEQ ID NO: 2363143 - RNA, 19 nt, Artificial Sequence
  Description of Artificial Sequence: Synthetic oligonucleotide
guucggccuuguccucagc

SEQ ID NO: 2363144 - RNA, 19 nt, Artificial Sequence
  Description of Artificial Sequence: Synthetic oligonucleotide
cgcucgcugcacaaucucc

SEQ ID NO: 2363145 - RNA, 19 nt, Artificial Sequence
  Description of Artificial Sequence: Synthetic oligonucleotide
cagccgccagcucuuccuc

SEQ ID NO: 2363146 - RNA, 19 nt, Artificial Sequence
  Description of Artificial Sequence: Synthetic oligonucleotide
uguccacgcgguggugcgu

SEQ ID NO: 2363147 - RNA, 19 nt, Artificial Sequence
  Description of Artificial Sequence: Synthetic oligonucleotide
caguacccgcagcccgagc

SEQ ID NO: 2363148 - RNA, 19 nt, Artificial Sequence
  Description of Artificial Sequence: Synthetic oligonucleotide
gcgucagauucccgcagca

SEQ ID NO: 2363149 - RNA, 19 nt, Artificial Sequence
  Description of Artificial Sequence: Synthetic oligonucleotide
gguggugcgugaacacuga

SEQ ID NO: 2363150 - RNA, 19 nt, Artificial Sequence
  Description of Artificial Sequence: Synthetic oligonucleotide
gcuugggccuucgcugucc

SEQ ID NO: 2363151 - RNA, 19 nt, Artificial Sequence
  Description of Artificial Sequence: Synthetic oligonucleotide
ggcccuucugccagcggcc

SEQ ID NO: 2363152 - RNA, 19 nt, Artificial Sequence
  Description of Artificial Sequence: Synthetic oligonucleotide
cacggcucgggccggcaca

SEQ ID NO: 2363153 - RNA, 19 nt, Artificial Sequence
  Description of Artificial Sequence: Synthetic oligonucleotide
ccacacggccugcggaacc

SEQ ID NO: 2363154 - RNA, 19 nt, Artificial Sequence
  Description of Artificial Sequence: Synthetic oligonucleotide
cacacggccugcggaacca

SEQ ID NO: 2363155 - RNA, 19 nt, Artificial Sequence
  Description of Artificial Sequence: Synthetic oligonucleotide
agcccaagcuuggcagccu

SEQ ID NO: 2363156 - RNA, 19 nt, Artificial Sequence
  Description of Artificial Sequence: Synthetic oligonucleotide
gcgugaacacugacagccc

SEQ ID NO: 2363157 - RNA, 19 nt, Artificial Sequence
  Description of Artificial Sequence: Synthetic oligonucleotide
gcuugucggucuucacauc

SEQ ID NO: 2363158 - RNA, 19 nt, Artificial Sequence
  Description of Artificial Sequence: Synthetic oligonucleotide
auguccccgcuuccucuua

SEQ ID NO: 2363159 - RNA, 19 nt, Artificial Sequence
  Description of Artificial Sequence: Synthetic oligonucleotide
ggccuucgcuguccacgcg

SEQ ID NO: 2363160 - RNA, 19 nt, Artificial Sequence
  Description of Artificial Sequence: Synthetic oligonucleotide
uccuucccguuugcagauc

SEQ ID NO: 2363161 - RNA, 19 nt, Artificial Sequence
  Description of Artificial Sequence: Synthetic oligonucleotide
ggugaggucgcggcccuuc

SEQ ID NO: 2363162 - RNA, 19 nt, Artificial Sequence
  Description of Artificial Sequence: Synthetic oligonucleotide
cagcugucagucucccucu

SEQ ID NO: 2363163 - RNA, 19 nt, Artificial Sequence
  Description of Artificial Sequence: Synthetic oligonucleotide
cuccuucccguuugcagau

SEQ ID NO: 2363164 - RNA, 19 nt, Artificial Sequence
  Description of Artificial Sequence: Synthetic oligonucleotide
ucgcggcccuucugccagc

SEQ ID NO: 2363165 - RNA, 19 nt, Artificial Sequence
  Description of Artificial Sequence: Synthetic oligonucleotide
cgugaacacugacagccca

SEQ ID NO: 2363166 - RNA, 19 nt, Artificial Sequence
  Description of Artificial Sequence: Synthetic oligonucleotide
ggagccgcucgcugcacaa

SEQ ID NO: 2363167 - RNA, 19 nt, Artificial Sequence
  Description of Artificial Sequence: Synthetic oligonucleotide
cagcacgaggcuucuuccu

SEQ ID NO: 2363168 - RNA, 19 nt, Artificial Sequence
  Description of Artificial Sequence: Synthetic oligonucleotide
cagccgguccacgccuuug

SEQ ID NO: 2363169 - RNA, 19 nt, Artificial Sequence
  Description of Artificial Sequence: Synthetic oligonucleotide
uggcgccaucagcgaguug

SEQ ID NO: 2363170 - RNA, 19 nt, Artificial Sequence
  Description of Artificial Sequence: Synthetic oligonucleotide
gguccuucgcguaccaggu

SEQ ID NO: 2363171 - RNA, 19 nt, Artificial Sequence
  Description of Artificial Sequence: Synthetic oligonucleotide
guacccgcagcccgagcgu

SEQ ID NO: 2363172 - RNA, 19 nt, Artificial Sequence
  Description of Artificial Sequence: Synthetic oligonucleotide
ccagcagcgccucgcguuc

SEQ ID NO: 2363173 - RNA, 19 nt, Artificial Sequence
  Description of Artificial Sequence: Synthetic oligonucleotide
ggauagugccacacggccu

SEQ ID NO: 2363174 - RNA, 19 nt, Artificial Sequence
  Description of Artificial Sequence: Synthetic oligonucleotide
cgacggagccgcucgcugc

SEQ ID NO: 2363175 - RNA, 19 nt, Artificial Sequence
  Description of Artificial Sequence: Synthetic oligonucleotide
cugcggaaccacuggcgcu

SEQ ID NO: 2363176 - RNA, 19 nt, Artificial Sequence
  Description of Artificial Sequence: Synthetic oligonucleotide
ggucgcggcccuucugcca

SEQ ID NO: 2363177 - RNA, 19 nt, Artificial Sequence
  Description of Artificial Sequence: Synthetic oligonucleotide
gguggacuccuuccauugu

SEQ ID NO: 2363178 - RNA, 19 nt, Artificial Sequence
  Description of Artificial Sequence: Synthetic oligonucleotide
gcccgagcgucagauuccc

SEQ ID NO: 2363179 - RNA, 19 nt, Artificial Sequence
  Description of Artificial Sequence: Synthetic oligonucleotide
gaucgccuccuucccguuu

SEQ ID NO: 2363180 - RNA, 19 nt, Artificial Sequence
  Description of Artificial Sequence: Synthetic oligonucleotide
cagcagcgccucgcguucc

SEQ ID NO: 2363181 - RNA, 19 nt, Artificial Sequence
  Description of Artificial Sequence: Synthetic oligonucleotide
cguaccaggugaggucgcg

SEQ ID NO: 2363182 - RNA, 19 nt, Artificial Sequence
  Description of Artificial Sequence: Synthetic oligonucleotide
cggugggcuguuuucucac

SEQ ID NO: 2363183 - RNA, 19 nt, Artificial Sequence
  Description of Artificial Sequence: Synthetic oligonucleotide
gccggugggcuguuuucuc

SEQ ID NO: 2363184 - RNA, 19 nt, Artificial Sequence
  Description of Artificial Sequence: Synthetic oligonucleotide
ggcacacggcgcgcggucc

SEQ ID NO: 2363185 - RNA, 19 nt, Artificial Sequence
  Description of Artificial Sequence: Synthetic oligonucleotide
cguuccgccucgcgcacag

SEQ ID NO: 2363186 - RNA, 19 nt, Artificial Sequence
  Description of Artificial Sequence: Synthetic oligonucleotide
guauccaguucggccuugu

SEQ ID NO: 2363187 - RNA, 19 nt, Artificial Sequence
  Description of Artificial Sequence: Synthetic oligonucleotide
ccggugggcuguuuucuca

SEQ ID NO: 2363188 - RNA, 19 nt, Artificial Sequence
  Description of Artificial Sequence: Synthetic oligonucleotide
gucuucgggguggacuccu

SEQ ID NO: 2363189 - RNA, 19 nt, Artificial Sequence
  Description of Artificial Sequence: Synthetic oligonucleotide
cggccugcggaaccacugg

SEQ ID NO: 2363190 - RNA, 19 nt, Artificial Sequence
  Description of Artificial Sequence: Synthetic oligonucleotide
ccucgcguuccgccucgcg

SEQ ID NO: 2363191 - RNA, 19 nt, Artificial Sequence
  Description of Artificial Sequence: Synthetic oligonucleotide
ccgcucgcugcacaaucuc

SEQ ID NO: 2363192 - RNA, 19 nt, Artificial Sequence
  Description of Artificial Sequence: Synthetic oligonucleotide
gcgccaucagcgaguugcc

SEQ ID NO: 2363193 - RNA, 19 nt, Artificial Sequence
  Description of Artificial Sequence: Synthetic oligonucleotide
cuguauccaguucggccuu

SEQ ID NO: 2363194 - RNA, 19 nt, Artificial Sequence
  Description of Artificial Sequence: Synthetic oligonucleotide
ggccgaggagagggagagg

SEQ ID NO: 2363195 - RNA, 19 nt, Artificial Sequence
  Description of Artificial Sequence: Synthetic oligonucleotide
cgcgguggugcgugaacac

SEQ ID NO: 2363196 - RNA, 19 nt, Artificial Sequence
  Description of Artificial Sequence: Synthetic oligonucleotide
cgucagauucccgcagcac

SEQ ID NO: 2363197 - RNA, 19 nt, Artificial Sequence
  Description of Artificial Sequence: Synthetic oligonucleotide
gccgguccacgccuuuguc

SEQ ID NO: 2363198 - RNA, 19 nt, Artificial Sequence
  Description of Artificial Sequence: Synthetic oligonucleotide
ccuucccguuugcagaucu

SEQ ID NO: 2363199 - RNA, 19 nt, Artificial Sequence
  Description of Artificial Sequence: Synthetic oligonucleotide
ggccggcacacggcgcgcg

SEQ ID NO: 2363200 - RNA, 19 nt, Artificial Sequence
  Description of Artificial Sequence: Synthetic oligonucleotide
guuccgccucgcgcacagc

SEQ ID NO: 2363201 - RNA, 19 nt, Artificial Sequence
  Description of Artificial Sequence: Synthetic oligonucleotide
ccacgcacgccgccgcgac

SEQ ID NO: 2363202 - RNA, 19 nt, Artificial Sequence
  Description of Artificial Sequence: Synthetic oligonucleotide
cggcgcgcgguccuucgcg

SEQ ID NO: 2363203 - RNA, 19 nt, Artificial Sequence
  Description of Artificial Sequence: Synthetic oligonucleotide
gggguggacuccuuccauu

SEQ ID NO: 2363204 - RNA, 19 nt, Artificial Sequence
  Description of Artificial Sequence: Synthetic oligonucleotide
gccgcgacuggagccgaac

SEQ ID NO: 2363205 - RNA, 19 nt, Artificial Sequence
  Description of Artificial Sequence: Synthetic oligonucleotide
caggugaggucgcggcccu

SEQ ID NO: 2363206 - RNA, 19 nt, Artificial Sequence
  Description of Artificial Sequence: Synthetic oligonucleotide
gccacacggccugcggaac

SEQ ID NO: 2363207 - RNA, 19 nt, Artificial Sequence
  Description of Artificial Sequence: Synthetic oligonucleotide
gcgguccuucgcguaccag

SEQ ID NO: 2363208 - RNA, 19 nt, Artificial Sequence
  Description of Artificial Sequence: Synthetic oligonucleotide
ccacuggcgccaucagcga

SEQ ID NO: 2363209 - RNA, 19 nt, Artificial Sequence
  Description of Artificial Sequence: Synthetic oligonucleotide
gcgcgguccuucgcguacc

SEQ ID NO: 2363210 - RNA, 19 nt, Artificial Sequence
  Description of Artificial Sequence: Synthetic oligonucleotide
cucacggcucgggccggca

SEQ ID NO: 2363211 - RNA, 19 nt, Artificial Sequence
  Description of Artificial Sequence: Synthetic oligonucleotide
ucaggccggugggcuguuu

SEQ ID NO: 2363212 - RNA, 19 nt, Artificial Sequence
  Description of Artificial Sequence: Synthetic oligonucleotide
ccgcgacuggagccgaaca

SEQ ID NO: 2363213 - RNA, 19 nt, Artificial Sequence
  Description of Artificial Sequence: Synthetic oligonucleotide
gcagcgccucgcguuccgc

SEQ ID NO: 2363214 - RNA, 19 nt, Artificial Sequence
  Description of Artificial Sequence: Synthetic oligonucleotide
ccgccacgcacgccgccgc

SEQ ID NO: 2363215 - RNA, 19 nt, Artificial Sequence
  Description of Artificial Sequence: Synthetic oligonucleotide
caggccggugggcuguuuu

SEQ ID NO: 2363216 - RNA, 19 nt, Artificial Sequence
  Description of Artificial Sequence: Synthetic oligonucleotide
gcgguggugcgugaacacu

SEQ ID NO: 2363217 - RNA, 19 nt, Artificial Sequence
  Description of Artificial Sequence: Synthetic oligonucleotide
gcgccucgcguuccgccuc

SEQ ID NO: 2363218 - RNA, 19 nt, Artificial Sequence
  Description of Artificial Sequence: Synthetic oligonucleotide
ggccggugggcuguuuucu

SEQ ID NO: 2363219 - RNA, 19 nt, Artificial Sequence
  Description of Artificial Sequence: Synthetic oligonucleotide
acauggcgacggagccgcu

SEQ ID NO: 2363220 - RNA, 19 nt, Artificial Sequence
  Description of Artificial Sequence: Synthetic oligonucleotide
ccuucgcuguccacgcggu

SEQ ID NO: 2363221 - RNA, 19 nt, Artificial Sequence
  Description of Artificial Sequence: Synthetic oligonucleotide
cgccucgcguuccgccucg

SEQ ID NO: 2363222 - RNA, 19 nt, Artificial Sequence
  Description of Artificial Sequence: Synthetic oligonucleotide
cgucuucgggguggacucc

SEQ ID NO: 2363223 - RNA, 19 nt, Artificial Sequence
  Description of Artificial Sequence: Synthetic oligonucleotide
gagccgcucgcugcacaau

SEQ ID NO: 2363224 - RNA, 19 nt, Artificial Sequence
  Description of Artificial Sequence: Synthetic oligonucleotide
gccgcucgcugcacaaucu

SEQ ID NO: 2363225 - RNA, 19 nt, Artificial Sequence
  Description of Artificial Sequence: Synthetic oligonucleotide
aggugaggucgcggcccuu

SEQ ID NO: 2363226 - RNA, 19 nt, Artificial Sequence
  Description of Artificial Sequence: Synthetic oligonucleotide
gcacacggcgcgcgguccu

SEQ ID NO: 2363227 - RNA, 19 nt, Artificial Sequence
  Description of Artificial Sequence: Synthetic oligonucleotide
cuggcgccaucagcgaguu

SEQ ID NO: 2363228 - RNA, 19 nt, Artificial Sequence
  Description of Artificial Sequence: Synthetic oligonucleotide
gccacgcacgccgccgcga

SEQ ID NO: 2363229 - RNA, 19 nt, Artificial Sequence
  Description of Artificial Sequence: Synthetic oligonucleotide
gcgaguugccuagguaguu

SEQ ID NO: 2363230 - RNA, 19 nt, Artificial Sequence
  Description of Artificial Sequence: Synthetic oligonucleotide
cgcguuccgccucgcgcac

SEQ ID NO: 2363231 - RNA, 19 nt, Artificial Sequence
  Description of Artificial Sequence: Synthetic oligonucleotide
ccucacggcucgggccggc

SEQ ID NO: 2363232 - RNA, 19 nt, Artificial Sequence
  Description of Artificial Sequence: Synthetic oligonucleotide
ggcgacggagccgcucgcu

SEQ ID NO: 2363233 - RNA, 19 nt, Artificial Sequence
  Description of Artificial Sequence: Synthetic oligonucleotide
cacgcacgccgccgcgacu

SEQ ID NO: 2363234 - RNA, 19 nt, Artificial Sequence
  Description of Artificial Sequence: Synthetic oligonucleotide
cgcacgccgccgcgacugg

SEQ ID NO: 2363235 - RNA, 19 nt, Artificial Sequence
  Description of Artificial Sequence: Synthetic oligonucleotide
ggaucgccuccuucccguu

SEQ ID NO: 2363236 - RNA, 19 nt, Artificial Sequence
  Description of Artificial Sequence: Synthetic oligonucleotide
cgcgacuggagccgaacau

SEQ ID NO: 2363237 - RNA, 19 nt, Artificial Sequence
  Description of Artificial Sequence: Synthetic oligonucleotide
ccaagcuuggcagccucuu

SEQ ID NO: 2363238 - RNA, 19 nt, Artificial Sequence
  Description of Artificial Sequence: Synthetic oligonucleotide
ccgaggagagggagaggau

SEQ ID NO: 2363239 - RNA, 19 nt, Artificial Sequence
  Description of Artificial Sequence: Synthetic oligonucleotide
gcagcccgagcgucagauu

SEQ ID NO: 2363240 - RNA, 19 nt, Artificial Sequence
  Description of Artificial Sequence: Synthetic oligonucleotide
gcguuccgccucgcgcaca

SEQ ID NO: 2363241 - RNA, 19 nt, Artificial Sequence
  Description of Artificial Sequence: Synthetic oligonucleotide
gccucgcguuccgccucgc

SEQ ID NO: 2363242 - RNA, 19 nt, Artificial Sequence
  Description of Artificial Sequence: Synthetic oligonucleotide
gggguggugcuugggccuu

SEQ ID NO: 2363243 - RNA, 19 nt, Artificial Sequence
  Description of Artificial Sequence: Synthetic oligonucleotide
cgcgguccuucgcguacca

SEQ ID NO: 2363244 - RNA, 19 nt, Artificial Sequence
  Description of Artificial Sequence: Synthetic oligonucleotide
ccacgcgguggugcgugaa

SEQ ID NO: 2363245 - RNA, 19 nt, Artificial Sequence
  Description of Artificial Sequence: Synthetic oligonucleotide
cgggguggacuccuuccau

SEQ ID NO: 2363246 - RNA, 19 nt, Artificial Sequence
  Description of Artificial Sequence: Synthetic oligonucleotide
cucaggccggugggcuguu

SEQ ID NO: 2363247 - RNA, 19 nt, Artificial Sequence
  Description of Artificial Sequence: Synthetic oligonucleotide
ccgccgcgacuggagccga

SEQ ID NO: 2363248 - RNA, 19 nt, Artificial Sequence
  Description of Artificial Sequence: Synthetic oligonucleotide
ccggcacacggcgcgcggu

SEQ ID NO: 2363249 - RNA, 19 nt, Artificial Sequence
  Description of Artificial Sequence: Synthetic oligonucleotide
uuuucuguggcaaugaucc

SEQ ID NO: 2363250 - RNA, 19 nt, Artificial Sequence
  Description of Artificial Sequence: Synthetic oligonucleotide
aauucaggauuguaucucc

SEQ ID NO: 2363251 - RNA, 19 nt, Artificial Sequence
  Description of Artificial Sequence: Synthetic oligonucleotide
uauaugguuagaauucagg

SEQ ID NO: 2363252 - RNA, 19 nt, Artificial Sequence
  Description of Artificial Sequence: Synthetic oligonucleotide
accuacauggaucauagcg

SEQ ID NO: 2363253 - RNA, 19 nt, Artificial Sequence
  Description of Artificial Sequence: Synthetic oligonucleotide
ucaaucauucuauaguucc

SEQ ID NO: 2363254 - RNA, 19 nt, Artificial Sequence
  Description of Artificial Sequence: Synthetic oligonucleotide
aaagucaaucauucuauag

SEQ ID NO: 2363255 - RNA, 19 nt, Artificial Sequence
  Description of Artificial Sequence: Synthetic oligonucleotide
aaugauccaacguuuccgg

SEQ ID NO: 2363256 - RNA, 19 nt, Artificial Sequence
  Description of Artificial Sequence: Synthetic oligonucleotide
ugccauucugccuauaugg

SEQ ID NO: 2363257 - RNA, 19 nt, Artificial Sequence
  Description of Artificial Sequence: Synthetic oligonucleotide
ugagaaggcaacaccaagg

SEQ ID NO: 2363258 - RNA, 19 nt, Artificial Sequence
  Description of Artificial Sequence: Synthetic oligonucleotide
auagcggacaacgacaacc

SEQ ID NO: 2363259 - RNA, 19 nt, Artificial Sequence
  Description of Artificial Sequence: Synthetic oligonucleotide
auaccauguacucggauac

SEQ ID NO: 2363260 - RNA, 19 nt, Artificial Sequence
  Description of Artificial Sequence: Synthetic oligonucleotide
acuguuaggccucuugccc

SEQ ID NO: 2363261 - RNA, 19 nt, Artificial Sequence
  Description of Artificial Sequence: Synthetic oligonucleotide
ugauauacugggcuccucg

SEQ ID NO: 2363262 - RNA, 19 nt, Artificial Sequence
  Description of Artificial Sequence: Synthetic oligonucleotide
ucucuuagagggcagcugg

SEQ ID NO: 2363263 - RNA, 19 nt, Artificial Sequence
  Description of Artificial Sequence: Synthetic oligonucleotide
ucguugguuaugaucaacg

SEQ ID NO: 2363264 - RNA, 19 nt, Artificial Sequence
  Description of Artificial Sequence: Synthetic oligonucleotide
ucggauacggccuguaugg

SEQ ID NO: 2363265 - RNA, 19 nt, Artificial Sequence
  Description of Artificial Sequence: Synthetic oligonucleotide
uggaucauagcggacaacg

SEQ ID NO: 2363266 - RNA, 19 nt, Artificial Sequence
  Description of Artificial Sequence: Synthetic oligonucleotide
uuuauuagagucaggggaa

SEQ ID NO: 2363267 - RNA, 19 nt, Artificial Sequence
  Description of Artificial Sequence: Synthetic oligonucleotide
auaugguuagaauucagga

SEQ ID NO: 2363268 - RNA, 19 nt, Artificial Sequence
  Description of Artificial Sequence: Synthetic oligonucleotide
ucaguaucugggcaggcgg

SEQ ID NO: 2363269 - RNA, 19 nt, Artificial Sequence
  Description of Artificial Sequence: Synthetic oligonucleotide
uuuaacuguguacuuggug

SEQ ID NO: 2363270 - RNA, 19 nt, Artificial Sequence
  Description of Artificial Sequence: Synthetic oligonucleotide
cuauaguuccucuuguggc

SEQ ID NO: 2363271 - RNA, 19 nt, Artificial Sequence
  Description of Artificial Sequence: Synthetic oligonucleotide
aauaccauguacucggaua

SEQ ID NO: 2363272 - RNA, 19 nt, Artificial Sequence
  Description of Artificial Sequence: Synthetic oligonucleotide
aguggccuaaucuuucggc

SEQ ID NO: 2363273 - RNA, 19 nt, Artificial Sequence
  Description of Artificial Sequence: Synthetic oligonucleotide
auugguuuaacuguguacu

SEQ ID NO: 2363274 - RNA, 19 nt, Artificial Sequence
  Description of Artificial Sequence: Synthetic oligonucleotide
aguugcaaugcaugucucc

SEQ ID NO: 2363275 - RNA, 19 nt, Artificial Sequence
  Description of Artificial Sequence: Synthetic oligonucleotide
uauaguuccucuuguggcc

SEQ ID NO: 2363276 - RNA, 19 nt, Artificial Sequence
  Description of Artificial Sequence: Synthetic oligonucleotide
cacaaacuuggcauuaagg

SEQ ID NO: 2363277 - RNA, 19 nt, Artificial Sequence
  Description of Artificial Sequence: Synthetic oligonucleotide
gauaauggcuguuccauuc

SEQ ID NO: 2363278 - RNA, 19 nt, Artificial Sequence
  Description of Artificial Sequence: Synthetic oligonucleotide
augguuagaauucaggauu

SEQ ID NO: 2363279 - RNA, 19 nt, Artificial Sequence
  Description of Artificial Sequence: Synthetic oligonucleotide
uauacugggcuccucggcc

SEQ ID NO: 2363280 - RNA, 19 nt, Artificial Sequence
  Description of Artificial Sequence: Synthetic oligonucleotide
acaguugcaaugcaugucu

SEQ ID NO: 2363281 - RNA, 19 nt, Artificial Sequence
  Description of Artificial Sequence: Synthetic oligonucleotide
gagaaggcaacaccaaggc

SEQ ID NO: 2363282 - RNA, 19 nt, Artificial Sequence
  Description of Artificial Sequence: Synthetic oligonucleotide
aacgacaaccuucuccuca

SEQ ID NO: 2363283 - RNA, 19 nt, Artificial Sequence
  Description of Artificial Sequence: Synthetic oligonucleotide
agagcuaugucugcagacc

SEQ ID NO: 2363284 - RNA, 19 nt, Artificial Sequence
  Description of Artificial Sequence: Synthetic oligonucleotide
uaugguuagaauucaggau

SEQ ID NO: 2363285 - RNA, 19 nt, Artificial Sequence
  Description of Artificial Sequence: Synthetic oligonucleotide
auauacugggcuccucggc

SEQ ID NO: 2363286 - RNA, 19 nt, Artificial Sequence
  Description of Artificial Sequence: Synthetic oligonucleotide
aagguccccggauguaugc

SEQ ID NO: 2363287 - RNA, 19 nt, Artificial Sequence
  Description of Artificial Sequence: Synthetic oligonucleotide
gguuuaacuguguacuugg

SEQ ID NO: 2363288 - RNA, 19 nt, Artificial Sequence
  Description of Artificial Sequence: Synthetic oligonucleotide
gauauacugggcuccucgg

SEQ ID NO: 2363289 - RNA, 19 nt, Artificial Sequence
  Description of Artificial Sequence: Synthetic oligonucleotide
ucaggauuguaucucccgc

SEQ ID NO: 2363290 - RNA, 19 nt, Artificial Sequence
  Description of Artificial Sequence: Synthetic oligonucleotide
cauguacucggauacggcc

SEQ ID NO: 2363291 - RNA, 19 nt, Artificial Sequence
  Description of Artificial Sequence: Synthetic oligonucleotide
gacucguugguuaugauca

SEQ ID NO: 2363292 - RNA, 19 nt, Artificial Sequence
  Description of Artificial Sequence: Synthetic oligonucleotide
gaucauagcggacaacgac

SEQ ID NO: 2363293 - RNA, 19 nt, Artificial Sequence
  Description of Artificial Sequence: Synthetic oligonucleotide
ugguuaugaucaacguugg

SEQ ID NO: 2363294 - RNA, 19 nt, Artificial Sequence
  Description of Artificial Sequence: Synthetic oligonucleotide
ugguuagaauucaggauug

SEQ ID NO: 2363295 - RNA, 19 nt, Artificial Sequence
  Description of Artificial Sequence: Synthetic oligonucleotide
ugugcauucccuuccugag

SEQ ID NO: 2363296 - RNA, 19 nt, Artificial Sequence
  Description of Artificial Sequence: Synthetic oligonucleotide
uuggcauuaagguccccgg

SEQ ID NO: 2363297 - RNA, 19 nt, Artificial Sequence
  Description of Artificial Sequence: Synthetic oligonucleotide
aaccgcagaaagucaauca

SEQ ID NO: 2363298 - RNA, 19 nt, Artificial Sequence
  Description of Artificial Sequence: Synthetic oligonucleotide
agacucggccuacaguugc

SEQ ID NO: 2363299 - RNA, 19 nt, Artificial Sequence
  Description of Artificial Sequence: Synthetic oligonucleotide
agcauugcucaguaucugg

SEQ ID NO: 2363300 - RNA, 19 nt, Artificial Sequence
  Description of Artificial Sequence: Synthetic oligonucleotide
uggucggaaccgcagaaag

SEQ ID NO: 2363301 - RNA, 19 nt, Artificial Sequence
  Description of Artificial Sequence: Synthetic oligonucleotide
uaugaucaacguuggagac

SEQ ID NO: 2363302 - RNA, 19 nt, Artificial Sequence
  Description of Artificial Sequence: Synthetic oligonucleotide
caaugauccaacguuuccg

SEQ ID NO: 2363303 - RNA, 19 nt, Artificial Sequence
  Description of Artificial Sequence: Synthetic oligonucleotide
aacguuggagacucggccu

SEQ ID NO: 2363304 - RNA, 19 nt, Artificial Sequence
  Description of Artificial Sequence: Synthetic oligonucleotide
ugcaaugcaugucuccagc

SEQ ID NO: 2363305 - RNA, 19 nt, Artificial Sequence
  Description of Artificial Sequence: Synthetic oligonucleotide
cuucacguaacucuucaug

SEQ ID NO: 2363306 - RNA, 19 nt, Artificial Sequence
  Description of Artificial Sequence: Synthetic oligonucleotide
uguuccauucaccuuccga

SEQ ID NO: 2363307 - RNA, 19 nt, Artificial Sequence
  Description of Artificial Sequence: Synthetic oligonucleotide
uguggcaaugauccaacgu

SEQ ID NO: 2363308 - RNA, 19 nt, Artificial Sequence
  Description of Artificial Sequence: Synthetic oligonucleotide
cuucauugguuuaacugug

SEQ ID NO: 2363309 - RNA, 19 nt, Artificial Sequence
  Description of Artificial Sequence: Synthetic oligonucleotide
cauugguuuaacuguguac

SEQ ID NO: 2363310 - RNA, 19 nt, Artificial Sequence
  Description of Artificial Sequence: Synthetic oligonucleotide
uccauucaccuuccgaagc

SEQ ID NO: 2363311 - RNA, 19 nt, Artificial Sequence
  Description of Artificial Sequence: Synthetic oligonucleotide
gcaacaccaaggcagaggg

SEQ ID NO: 2363312 - RNA, 19 nt, Artificial Sequence
  Description of Artificial Sequence: Synthetic oligonucleotide
ugaucaacguuggagacuc

SEQ ID NO: 2363313 - RNA, 19 nt, Artificial Sequence
  Description of Artificial Sequence: Synthetic oligonucleotide
cuugccgaugacucguugg

SEQ ID NO: 2363314 - RNA, 19 nt, Artificial Sequence
  Description of Artificial Sequence: Synthetic oligonucleotide
ugccuauaugguuagaauu

SEQ ID NO: 2363315 - RNA, 19 nt, Artificial Sequence
  Description of Artificial Sequence: Synthetic oligonucleotide
ugauccaacguuuccggcu

SEQ ID NO: 2363316 - RNA, 19 nt, Artificial Sequence
  Description of Artificial Sequence: Synthetic oligonucleotide
ccuacauggaucauagcgg

SEQ ID NO: 2363317 - RNA, 19 nt, Artificial Sequence
  Description of Artificial Sequence: Synthetic oligonucleotide
uacuuggugcaacucuucc

SEQ ID NO: 2363318 - RNA, 19 nt, Artificial Sequence
  Description of Artificial Sequence: Synthetic oligonucleotide
auugcucaguaucugggca

SEQ ID NO: 2363319 - RNA, 19 nt, Artificial Sequence
  Description of Artificial Sequence: Synthetic oligonucleotide
ucaacguuggagacucggc

SEQ ID NO: 2363320 - RNA, 19 nt, Artificial Sequence
  Description of Artificial Sequence: Synthetic oligonucleotide
augauccaacguuuccggc

SEQ ID NO: 2363321 - RNA, 19 nt, Artificial Sequence
  Description of Artificial Sequence: Synthetic oligonucleotide
cuauaugguuagaauucag

SEQ ID NO: 2363322 - RNA, 19 nt, Artificial Sequence
  Description of Artificial Sequence: Synthetic oligonucleotide
ucuguggcaaugauccaac

SEQ ID NO: 2363323 - RNA, 19 nt, Artificial Sequence
  Description of Artificial Sequence: Synthetic oligonucleotide
gauccaacguuuccggcug

SEQ ID NO: 2363324 - RNA, 19 nt, Artificial Sequence
  Description of Artificial Sequence: Synthetic oligonucleotide
ggauguaugcacugggcgg

SEQ ID NO: 2363325 - RNA, 19 nt, Artificial Sequence
  Description of Artificial Sequence: Synthetic oligonucleotide
auuagagucaggggaauca

SEQ ID NO: 2363326 - RNA, 19 nt, Artificial Sequence
  Description of Artificial Sequence: Synthetic oligonucleotide
ucggccuacaguugcaaug

SEQ ID NO: 2363327 - RNA, 19 nt, Artificial Sequence
  Description of Artificial Sequence: Synthetic oligonucleotide
ugcaacucuuccaggacac

SEQ ID NO: 2363328 - RNA, 19 nt, Artificial Sequence
  Description of Artificial Sequence: Synthetic oligonucleotide
uuccauucaccuuccgaag

SEQ ID NO: 2363329 - RNA, 19 nt, Artificial Sequence
  Description of Artificial Sequence: Synthetic oligonucleotide
ucauagcggacaacgacaa

SEQ ID NO: 2363330 - RNA, 19 nt, Artificial Sequence
  Description of Artificial Sequence: Synthetic oligonucleotide
caacguuggagacucggcc

SEQ ID NO: 2363331 - RNA, 19 nt, Artificial Sequence
  Description of Artificial Sequence: Synthetic oligonucleotide
agaggucggaacccgggcg

SEQ ID NO: 2363332 - RNA, 19 nt, Artificial Sequence
  Description of Artificial Sequence: Synthetic oligonucleotide
uugcucaguaucugggcag

SEQ ID NO: 2363333 - RNA, 19 nt, Artificial Sequence
  Description of Artificial Sequence: Synthetic oligonucleotide
agaccuacauggaucauag

SEQ ID NO: 2363334 - RNA, 19 nt, Artificial Sequence
  Description of Artificial Sequence: Synthetic oligonucleotide
aacuuggcauuaagguccc

SEQ ID NO: 2363335 - RNA, 19 nt, Artificial Sequence
  Description of Artificial Sequence: Synthetic oligonucleotide
uuagagucaggggaaucag

SEQ ID NO: 2363336 - RNA, 19 nt, Artificial Sequence
  Description of Artificial Sequence: Synthetic oligonucleotide
ugguuuaacuguguacuug

SEQ ID NO: 2363337 - RNA, 19 nt, Artificial Sequence
  Description of Artificial Sequence: Synthetic oligonucleotide
cauugcucaguaucugggc

SEQ ID NO: 2363338 - RNA, 19 nt, Artificial Sequence
  Description of Artificial Sequence: Synthetic oligonucleotide
ugacucguugguuaugauc

SEQ ID NO: 2363339 - RNA, 19 nt, Artificial Sequence
  Description of Artificial Sequence: Synthetic oligonucleotide
aggguucuggcuugguuuc

SEQ ID NO: 2363340 - RNA, 19 nt, Artificial Sequence
  Description of Artificial Sequence: Synthetic oligonucleotide
aucaacguuggagacucgg

SEQ ID NO: 2363341 - RNA, 19 nt, Artificial Sequence
  Description of Artificial Sequence: Synthetic oligonucleotide
gccuguauggucucgaccc

SEQ ID NO: 2363342 - RNA, 19 nt, Artificial Sequence
  Description of Artificial Sequence: Synthetic oligonucleotide
accugcauuugucucuuag

SEQ ID NO: 2363343 - RNA, 19 nt, Artificial Sequence
  Description of Artificial Sequence: Synthetic oligonucleotide
uggauaauggcuguuccau

SEQ ID NO: 2363344 - RNA, 19 nt, Artificial Sequence
  Description of Artificial Sequence: Synthetic oligonucleotide
caggauuguaucucccgcc

SEQ ID NO: 2363345 - RNA, 19 nt, Artificial Sequence
  Description of Artificial Sequence: Synthetic oligonucleotide
ucugccuauaugguuagaa

SEQ ID NO: 2363346 - RNA, 19 nt, Artificial Sequence
  Description of Artificial Sequence: Synthetic oligonucleotide
uucauugguuuaacugugu

SEQ ID NO: 2363347 - RNA, 19 nt, Artificial Sequence
  Description of Artificial Sequence: Synthetic oligonucleotide
auaauggcuguuccauuca

SEQ ID NO: 2363348 - RNA, 19 nt, Artificial Sequence
  Description of Artificial Sequence: Synthetic oligonucleotide
agucaggggaaucagcuuu

SEQ ID NO: 2363349 - RNA, 19 nt, Artificial Sequence
  Description of Artificial Sequence: Synthetic oligonucleotide
aagaggaugugcauucccu

SEQ ID NO: 2363350 - RNA, 19 nt, Artificial Sequence
  Description of Artificial Sequence: Synthetic oligonucleotide
acauggaucauagcggaca

SEQ ID NO: 2363351 - RNA, 19 nt, Artificial Sequence
  Description of Artificial Sequence: Synthetic oligonucleotide
aaucuuucggccagcccag

SEQ ID NO: 2363352 - RNA, 19 nt, Artificial Sequence
  Description of Artificial Sequence: Synthetic oligonucleotide
guggccuaaucuuucggcc

SEQ ID NO: 2363353 - RNA, 19 nt, Artificial Sequence
  Description of Artificial Sequence: Synthetic oligonucleotide
gaggucggaacccgggcgg

SEQ ID NO: 2363354 - RNA, 19 nt, Artificial Sequence
  Description of Artificial Sequence: Synthetic oligonucleotide
cacuguuaggccucuugcc

SEQ ID NO: 2363355 - RNA, 19 nt, Artificial Sequence
  Description of Artificial Sequence: Synthetic oligonucleotide
uagcggacaacgacaaccu

SEQ ID NO: 2363356 - RNA, 19 nt, Artificial Sequence
  Description of Artificial Sequence: Synthetic oligonucleotide
uugcaaugcaugucuccag

SEQ ID NO: 2363357 - RNA, 19 nt, Artificial Sequence
  Description of Artificial Sequence: Synthetic oligonucleotide
cuuucucuggucggaaccg

SEQ ID NO: 2363358 - RNA, 19 nt, Artificial Sequence
  Description of Artificial Sequence: Synthetic oligonucleotide
uaauggcuguuccauucac

SEQ ID NO: 2363359 - RNA, 19 nt, Artificial Sequence
  Description of Artificial Sequence: Synthetic oligonucleotide
uugccgaugacucguuggu

SEQ ID NO: 2363360 - RNA, 19 nt, Artificial Sequence
  Description of Artificial Sequence: Synthetic oligonucleotide
caagaggaugugcauuccc

SEQ ID NO: 2363361 - RNA, 19 nt, Artificial Sequence
  Description of Artificial Sequence: Synthetic oligonucleotide
uuccgaagcagcacgccac

SEQ ID NO: 2363362 - RNA, 19 nt, Artificial Sequence
  Description of Artificial Sequence: Synthetic oligonucleotide
uguuaggccucuugcccag

SEQ ID NO: 2363363 - RNA, 19 nt, Artificial Sequence
  Description of Artificial Sequence: Synthetic oligonucleotide
cuacauggaucauagcgga

SEQ ID NO: 2363364 - RNA, 19 nt, Artificial Sequence
  Description of Artificial Sequence: Synthetic oligonucleotide
aggauuguaucucccgccu

SEQ ID NO: 2363365 - RNA, 19 nt, Artificial Sequence
  Description of Artificial Sequence: Synthetic oligonucleotide
auucccuuccugagcagcc

SEQ ID NO: 2363366 - RNA, 19 nt, Artificial Sequence
  Description of Artificial Sequence: Synthetic oligonucleotide
gaagcagcacgccacaugu

SEQ ID NO: 2363367 - RNA, 19 nt, Artificial Sequence
  Description of Artificial Sequence: Synthetic oligonucleotide
uccaggacacaaacuuggc

SEQ ID NO: 2363368 - RNA, 19 nt, Artificial Sequence
  Description of Artificial Sequence: Synthetic oligonucleotide
guuccguccugccuugccg

SEQ ID NO: 2363369 - RNA, 19 nt, Artificial Sequence
  Description of Artificial Sequence: Synthetic oligonucleotide
agcaccugcauuugucucu

SEQ ID NO: 2363370 - RNA, 19 nt, Artificial Sequence
  Description of Artificial Sequence: Synthetic oligonucleotide
gaugacucguugguuauga

SEQ ID NO: 2363371 - RNA, 19 nt, Artificial Sequence
  Description of Artificial Sequence: Synthetic oligonucleotide
cucggauacggccuguaug

SEQ ID NO: 2363372 - RNA, 19 nt, Artificial Sequence
  Description of Artificial Sequence: Synthetic oligonucleotide
cucugauauacugggcucc

SEQ ID NO: 2363373 - RNA, 19 nt, Artificial Sequence
  Description of Artificial Sequence: Synthetic oligonucleotide
uggccuaaucuuucggcca

SEQ ID NO: 2363374 - RNA, 19 nt, Artificial Sequence
  Description of Artificial Sequence: Synthetic oligonucleotide
ccuacaguugcaaugcaug

SEQ ID NO: 2363375 - RNA, 19 nt, Artificial Sequence
  Description of Artificial Sequence: Synthetic oligonucleotide
caccuuccgaagcagcacg

SEQ ID NO: 2363376 - RNA, 19 nt, Artificial Sequence
  Description of Artificial Sequence: Synthetic oligonucleotide
caaugcaugucuccagcac

SEQ ID NO: 2363377 - RNA, 19 nt, Artificial Sequence
  Description of Artificial Sequence: Synthetic oligonucleotide
ugcucaguaucugggcagg

SEQ ID NO: 2363378 - RNA, 19 nt, Artificial Sequence
  Description of Artificial Sequence: Synthetic oligonucleotide
ucuuucggccagcccagcc

SEQ ID NO: 2363379 - RNA, 19 nt, Artificial Sequence
  Description of Artificial Sequence: Synthetic oligonucleotide
cuugcguugccacagccca

SEQ ID NO: 2363380 - RNA, 19 nt, Artificial Sequence
  Description of Artificial Sequence: Synthetic oligonucleotide
acagcccacuguuaggccu

SEQ ID NO: 2363381 - RNA, 19 nt, Artificial Sequence
  Description of Artificial Sequence: Synthetic oligonucleotide
gucggaaccgcagaaaguc

SEQ ID NO: 2363382 - RNA, 19 nt, Artificial Sequence
  Description of Artificial Sequence: Synthetic oligonucleotide
agcuggauaauggcuguuc

SEQ ID NO: 2363383 - RNA, 19 nt, Artificial Sequence
  Description of Artificial Sequence: Synthetic oligonucleotide
uuaggccucuugcccagcc

SEQ ID NO: 2363384 - RNA, 19 nt, Artificial Sequence
  Description of Artificial Sequence: Synthetic oligonucleotide
gguuucuuucucuggucgg

SEQ ID NO: 2363385 - RNA, 19 nt, Artificial Sequence
  Description of Artificial Sequence: Synthetic oligonucleotide
ucuggucggaaccgcagaa

SEQ ID NO: 2363386 - RNA, 19 nt, Artificial Sequence
  Description of Artificial Sequence: Synthetic oligonucleotide
ggggaaucagcuuugggca

SEQ ID NO: 2363387 - RNA, 19 nt, Artificial Sequence
  Description of Artificial Sequence: Synthetic oligonucleotide
cuaaucuuucggccagccc

SEQ ID NO: 2363388 - RNA, 19 nt, Artificial Sequence
  Description of Artificial Sequence: Synthetic oligonucleotide
agagggagucuucacguaa

SEQ ID NO: 2363389 - RNA, 19 nt, Artificial Sequence
  Description of Artificial Sequence: Synthetic oligonucleotide
guaucucccgccuucaugu

SEQ ID NO: 2363390 - RNA, 19 nt, Artificial Sequence
  Description of Artificial Sequence: Synthetic oligonucleotide
caguaucugggcaggcggg

SEQ ID NO: 2363391 - RNA, 19 nt, Artificial Sequence
  Description of Artificial Sequence: Synthetic oligonucleotide
cucaguaucugggcaggcg

SEQ ID NO: 2363392 - RNA, 19 nt, Artificial Sequence
  Description of Artificial Sequence: Synthetic oligonucleotide
ucggaaccgcagaaaguca

SEQ ID NO: 2363393 - RNA, 19 nt, Artificial Sequence
  Description of Artificial Sequence: Synthetic oligonucleotide
uuaagguccccggauguau

SEQ ID NO: 2363394 - RNA, 19 nt, Artificial Sequence
  Description of Artificial Sequence: Synthetic oligonucleotide
uacaguugcaaugcauguc

SEQ ID NO: 2363395 - RNA, 19 nt, Artificial Sequence
  Description of Artificial Sequence: Synthetic oligonucleotide
ugggcggugagaaggcaac

SEQ ID NO: 2363396 - RNA, 19 nt, Artificial Sequence
  Description of Artificial Sequence: Synthetic oligonucleotide
uggcauuaagguccccgga

SEQ ID NO: 2363397 - RNA, 19 nt, Artificial Sequence
  Description of Artificial Sequence: Synthetic oligonucleotide
gauacggccuguauggucu

SEQ ID NO: 2363398 - RNA, 19 nt, Artificial Sequence
  Description of Artificial Sequence: Synthetic oligonucleotide
uacauggaucauagcggac

SEQ ID NO: 2363399 - RNA, 19 nt, Artificial Sequence
  Description of Artificial Sequence: Synthetic oligonucleotide
gaugugcauucccuuccug

SEQ ID NO: 2363400 - RNA, 19 nt, Artificial Sequence
  Description of Artificial Sequence: Synthetic oligonucleotide
ucugauauacugggcuccu

SEQ ID NO: 2363401 - RNA, 19 nt, Artificial Sequence
  Description of Artificial Sequence: Synthetic oligonucleotide
aaccagagcuaugucugca

SEQ ID NO: 2363402 - RNA, 19 nt, Artificial Sequence
  Description of Artificial Sequence: Synthetic oligonucleotide
gaaggagcauugcucagua

SEQ ID NO: 2363403 - RNA, 19 nt, Artificial Sequence
  Description of Artificial Sequence: Synthetic oligonucleotide
ucucccgccuucauguuuu

SEQ ID NO: 2363404 - RNA, 19 nt, Artificial Sequence
  Description of Artificial Sequence: Synthetic oligonucleotide
ucaggggaaucagcuuugg

SEQ ID NO: 2363405 - RNA, 19 nt, Artificial Sequence
  Description of Artificial Sequence: Synthetic oligonucleotide
uugguuuaacuguguacuu

SEQ ID NO: 2363406 - RNA, 19 nt, Artificial Sequence
  Description of Artificial Sequence: Synthetic oligonucleotide
uauuagagucaggggaauc

SEQ ID NO: 2363407 - RNA, 19 nt, Artificial Sequence
  Description of Artificial Sequence: Synthetic oligonucleotide
uuauuagagucaggggaau

SEQ ID NO: 2363408 - RNA, 19 nt, Artificial Sequence
  Description of Artificial Sequence: Synthetic oligonucleotide
uccgaagcagcacgccaca

SEQ ID NO: 2363409 - RNA, 19 nt, Artificial Sequence
  Description of Artificial Sequence: Synthetic oligonucleotide
gcuggauaauggcuguucc

SEQ ID NO: 2363410 - RNA, 19 nt, Artificial Sequence
  Description of Artificial Sequence: Synthetic oligonucleotide
cauucccuuccugagcagc

SEQ ID NO: 2363411 - RNA, 19 nt, Artificial Sequence
  Description of Artificial Sequence: Synthetic oligonucleotide
caaccagagcuaugucugc

SEQ ID NO: 2363412 - RNA, 19 nt, Artificial Sequence
  Description of Artificial Sequence: Synthetic oligonucleotide
augaucaacguuggagacu

SEQ ID NO: 2363413 - RNA, 19 nt, Artificial Sequence
  Description of Artificial Sequence: Synthetic oligonucleotide
cuguggcaaugauccaacg

SEQ ID NO: 2363414 - RNA, 19 nt, Artificial Sequence
  Description of Artificial Sequence: Synthetic oligonucleotide
uggcuugguuucuuucucu

SEQ ID NO: 2363415 - RNA, 19 nt, Artificial Sequence
  Description of Artificial Sequence: Synthetic oligonucleotide
cugccauucugccuauaug

SEQ ID NO: 2363416 - RNA, 19 nt, Artificial Sequence
  Description of Artificial Sequence: Synthetic oligonucleotide
ugucucuuagagggcagcu

SEQ ID NO: 2363417 - RNA, 19 nt, Artificial Sequence
  Description of Artificial Sequence: Synthetic oligonucleotide
guaugcacugggcggugag

SEQ ID NO: 2363418 - RNA, 19 nt, Artificial Sequence
  Description of Artificial Sequence: Synthetic oligonucleotide
gccuauaugguuagaauuc

SEQ ID NO: 2363419 - RNA, 19 nt, Artificial Sequence
  Description of Artificial Sequence: Synthetic oligonucleotide
aggacacaaacuuggcauu

SEQ ID NO: 2363420 - RNA, 19 nt, Artificial Sequence
  Description of Artificial Sequence: Synthetic oligonucleotide
auccaacguuuccggcugc

SEQ ID NO: 2363421 - RNA, 19 nt, Artificial Sequence
  Description of Artificial Sequence: Synthetic oligonucleotide
caguggccuaaucuuucgg

SEQ ID NO: 2363422 - RNA, 19 nt, Artificial Sequence
  Description of Artificial Sequence: Synthetic oligonucleotide
uuccguccugccuugccga

SEQ ID NO: 2363423 - RNA, 19 nt, Artificial Sequence
  Description of Artificial Sequence: Synthetic oligonucleotide
gcauugcucaguaucuggg

SEQ ID NO: 2363424 - RNA, 19 nt, Artificial Sequence
  Description of Artificial Sequence: Synthetic oligonucleotide
guggcaaugauccaacguu

SEQ ID NO: 2363425 - RNA, 19 nt, Artificial Sequence
  Description of Artificial Sequence: Synthetic oligonucleotide
agcgguuccguccugccuu

SEQ ID NO: 2363426 - RNA, 19 nt, Artificial Sequence
  Description of Artificial Sequence: Synthetic oligonucleotide
ugucccugcagcucugaua

SEQ ID NO: 2363427 - RNA, 19 nt, Artificial Sequence
  Description of Artificial Sequence: Synthetic oligonucleotide
uuucucuggucggaaccgc

SEQ ID NO: 2363428 - RNA, 19 nt, Artificial Sequence
  Description of Artificial Sequence: Synthetic oligonucleotide
gugcauucccuuccugagc

SEQ ID NO: 2363429 - RNA, 19 nt, Artificial Sequence
  Description of Artificial Sequence: Synthetic oligonucleotide
cuggauaauggcuguucca

SEQ ID NO: 2363430 - RNA, 19 nt, Artificial Sequence
  Description of Artificial Sequence: Synthetic oligonucleotide
agggagucuucacguaacu

SEQ ID NO: 2363431 - RNA, 19 nt, Artificial Sequence
  Description of Artificial Sequence: Synthetic oligonucleotide
cuggcuugguuucuuucuc

SEQ ID NO: 2363432 - RNA, 19 nt, Artificial Sequence
  Description of Artificial Sequence: Synthetic oligonucleotide
gcauuaagguccccggaug

SEQ ID NO: 2363433 - RNA, 19 nt, Artificial Sequence
  Description of Artificial Sequence: Synthetic oligonucleotide
auguacucggauacggccu

SEQ ID NO: 2363434 - RNA, 19 nt, Artificial Sequence
  Description of Artificial Sequence: Synthetic oligonucleotide
caggggaaucagcuuuggg

SEQ ID NO: 2363435 - RNA, 19 nt, Artificial Sequence
  Description of Artificial Sequence: Synthetic oligonucleotide
cgcagaaagucaaucauuc

SEQ ID NO: 2363436 - RNA, 19 nt, Artificial Sequence
  Description of Artificial Sequence: Synthetic oligonucleotide
ggcaacaccaaggcagagg

SEQ ID NO: 2363437 - RNA, 19 nt, Artificial Sequence
  Description of Artificial Sequence: Synthetic oligonucleotide
gagcauugcucaguaucug

SEQ ID NO: 2363438 - RNA, 19 nt, Artificial Sequence
  Description of Artificial Sequence: Synthetic oligonucleotide
gagggagucuucacguaac

SEQ ID NO: 2363439 - RNA, 19 nt, Artificial Sequence
  Description of Artificial Sequence: Synthetic oligonucleotide
guuagaauucaggauugua

SEQ ID NO: 2363440 - RNA, 19 nt, Artificial Sequence
  Description of Artificial Sequence: Synthetic oligonucleotide
agucuucacguaacucuuc

SEQ ID NO: 2363441 - RNA, 19 nt, Artificial Sequence
  Description of Artificial Sequence: Synthetic oligonucleotide
cuguuaggccucuugccca

SEQ ID NO: 2363442 - RNA, 19 nt, Artificial Sequence
  Description of Artificial Sequence: Synthetic oligonucleotide
auuguaucucccgccuuca

SEQ ID NO: 2363443 - RNA, 19 nt, Artificial Sequence
  Description of Artificial Sequence: Synthetic oligonucleotide
gauguaugcacugggcggu

SEQ ID NO: 2363444 - RNA, 19 nt, Artificial Sequence
  Description of Artificial Sequence: Synthetic oligonucleotide
ugccuugccgaugacucgu

SEQ ID NO: 2363445 - RNA, 19 nt, Artificial Sequence
  Description of Artificial Sequence: Synthetic oligonucleotide
cagaggucggaacccgggc

SEQ ID NO: 2363446 - RNA, 19 nt, Artificial Sequence
  Description of Artificial Sequence: Synthetic oligonucleotide
uccccggauguaugcacug

SEQ ID NO: 2363447 - RNA, 19 nt, Artificial Sequence
  Description of Artificial Sequence: Synthetic oligonucleotide
guugguuaugaucaacguu

SEQ ID NO: 2363448 - RNA, 19 nt, Artificial Sequence
  Description of Artificial Sequence: Synthetic oligonucleotide
ugcguugccacagcccacu

SEQ ID NO: 2363449 - RNA, 19 nt, Artificial Sequence
  Description of Artificial Sequence: Synthetic oligonucleotide
ggccuaaucuuucggccag

SEQ ID NO: 2363450 - RNA, 19 nt, Artificial Sequence
  Description of Artificial Sequence: Synthetic oligonucleotide
aaggagcauugcucaguau

SEQ ID NO: 2363451 - RNA, 19 nt, Artificial Sequence
  Description of Artificial Sequence: Synthetic oligonucleotide
ucccuuccugagcagccac

SEQ ID NO: 2363452 - RNA, 19 nt, Artificial Sequence
  Description of Artificial Sequence: Synthetic oligonucleotide
cacugggcggugagaaggc

SEQ ID NO: 2363453 - RNA, 19 nt, Artificial Sequence
  Description of Artificial Sequence: Synthetic oligonucleotide
augcaugucuccagcaccu

SEQ ID NO: 2363454 - RNA, 19 nt, Artificial Sequence
  Description of Artificial Sequence: Synthetic oligonucleotide
auacggccuguauggucuc

SEQ ID NO: 2363455 - RNA, 19 nt, Artificial Sequence
  Description of Artificial Sequence: Synthetic oligonucleotide
gagcuaugucugcagaccu

SEQ ID NO: 2363456 - RNA, 19 nt, Artificial Sequence
  Description of Artificial Sequence: Synthetic oligonucleotide
cucguugguuaugaucaac

SEQ ID NO: 2363457 - RNA, 19 nt, Artificial Sequence
  Description of Artificial Sequence: Synthetic oligonucleotide
cacagcccacuguuaggcc

SEQ ID NO: 2363458 - RNA, 19 nt, Artificial Sequence
  Description of Artificial Sequence: Synthetic oligonucleotide
ggugcaacucuuccaggac

SEQ ID NO: 2363459 - RNA, 19 nt, Artificial Sequence
  Description of Artificial Sequence: Synthetic oligonucleotide
uaggccucuugcccagcca

SEQ ID NO: 2363460 - RNA, 19 nt, Artificial Sequence
  Description of Artificial Sequence: Synthetic oligonucleotide
caacaccaaggcagagggc

SEQ ID NO: 2363461 - RNA, 19 nt, Artificial Sequence
  Description of Artificial Sequence: Synthetic oligonucleotide
cggauguaugcacugggcg

SEQ ID NO: 2363462 - RNA, 19 nt, Artificial Sequence
  Description of Artificial Sequence: Synthetic oligonucleotide
gucucuuagagggcagcug

SEQ ID NO: 2363463 - RNA, 19 nt, Artificial Sequence
  Description of Artificial Sequence: Synthetic oligonucleotide
gagacucggccuacaguug

SEQ ID NO: 2363464 - RNA, 19 nt, Artificial Sequence
  Description of Artificial Sequence: Synthetic oligonucleotide
uccaacguuuccggcugcc

SEQ ID NO: 2363465 - RNA, 19 nt, Artificial Sequence
  Description of Artificial Sequence: Synthetic oligonucleotide
gcggugagaaggcaacacc

SEQ ID NO: 2363466 - RNA, 19 nt, Artificial Sequence
  Description of Artificial Sequence: Synthetic oligonucleotide
cauggaucauagcggacaa

SEQ ID NO: 2363467 - RNA, 19 nt, Artificial Sequence
  Description of Artificial Sequence: Synthetic oligonucleotide
agcccagccucccuugcgu

SEQ ID NO: 2363468 - RNA, 19 nt, Artificial Sequence
  Description of Artificial Sequence: Synthetic oligonucleotide
caaucauucuauaguuccu

SEQ ID NO: 2363469 - RNA, 19 nt, Artificial Sequence
  Description of Artificial Sequence: Synthetic oligonucleotide
gcuaugucugcagaccuac

SEQ ID NO: 2363470 - RNA, 19 nt, Artificial Sequence
  Description of Artificial Sequence: Synthetic oligonucleotide
guugccacagcccacuguu

SEQ ID NO: 2363471 - RNA, 19 nt, Artificial Sequence
  Description of Artificial Sequence: Synthetic oligonucleotide
uguaugcacugggcgguga

SEQ ID NO: 2363472 - RNA, 19 nt, Artificial Sequence
  Description of Artificial Sequence: Synthetic oligonucleotide
caguugcaaugcaugucuc

SEQ ID NO: 2363473 - RNA, 19 nt, Artificial Sequence
  Description of Artificial Sequence: Synthetic oligonucleotide
ggagacucggccuacaguu

SEQ ID NO: 2363474 - RNA, 19 nt, Artificial Sequence
  Description of Artificial Sequence: Synthetic oligonucleotide
gacacaaacuuggcauuaa

SEQ ID NO: 2363475 - RNA, 19 nt, Artificial Sequence
  Description of Artificial Sequence: Synthetic oligonucleotide
gcucugauauacugggcuc

SEQ ID NO: 2363476 - RNA, 19 nt, Artificial Sequence
  Description of Artificial Sequence: Synthetic oligonucleotide
agagggcagcuggauaaug

SEQ ID NO: 2363477 - RNA, 19 nt, Artificial Sequence
  Description of Artificial Sequence: Synthetic oligonucleotide
acguuggagacucggccua

SEQ ID NO: 2363478 - RNA, 19 nt, Artificial Sequence
  Description of Artificial Sequence: Synthetic oligonucleotide
uccugccuugccgaugacu

SEQ ID NO: 2363479 - RNA, 19 nt, Artificial Sequence
  Description of Artificial Sequence: Synthetic oligonucleotide
aaucagcuuugggcagcag

SEQ ID NO: 2363480 - RNA, 19 nt, Artificial Sequence
  Description of Artificial Sequence: Synthetic oligonucleotide
ggaaucagcuuugggcagc

SEQ ID NO: 2363481 - RNA, 19 nt, Artificial Sequence
  Description of Artificial Sequence: Synthetic oligonucleotide
cauuaagguccccggaugu

SEQ ID NO: 2363482 - RNA, 19 nt, Artificial Sequence
  Description of Artificial Sequence: Synthetic oligonucleotide
cauagcggacaacgacaac

SEQ ID NO: 2363483 - RNA, 19 nt, Artificial Sequence
  Description of Artificial Sequence: Synthetic oligonucleotide
ggcuguugaaggagcauug

SEQ ID NO: 2363484 - RNA, 19 nt, Artificial Sequence
  Description of Artificial Sequence: Synthetic oligonucleotide
uacggccuguauggucucg

SEQ ID NO: 2363485 - RNA, 19 nt, Artificial Sequence
  Description of Artificial Sequence: Synthetic oligonucleotide
cccgccuucauguuuucug

SEQ ID NO: 2363486 - RNA, 19 nt, Artificial Sequence
  Description of Artificial Sequence: Synthetic oligonucleotide
acucggauacggccuguau

SEQ ID NO: 2363487 - RNA, 19 nt, Artificial Sequence
  Description of Artificial Sequence: Synthetic oligonucleotide
ggauacggccuguaugguc

SEQ ID NO: 2363488 - RNA, 19 nt, Artificial Sequence
  Description of Artificial Sequence: Synthetic oligonucleotide
aucuuucggccagcccagc

SEQ ID NO: 2363489 - RNA, 19 nt, Artificial Sequence
  Description of Artificial Sequence: Synthetic oligonucleotide
uugcguugccacagcccac

SEQ ID NO: 2363490 - RNA, 19 nt, Artificial Sequence
  Description of Artificial Sequence: Synthetic oligonucleotide
acucguugguuaugaucaa

SEQ ID NO: 2363491 - RNA, 19 nt, Artificial Sequence
  Description of Artificial Sequence: Synthetic oligonucleotide
auuaagguccccggaugua

SEQ ID NO: 2363492 - RNA, 19 nt, Artificial Sequence
  Description of Artificial Sequence: Synthetic oligonucleotide
gaucaacguuggagacucg

SEQ ID NO: 2363493 - RNA, 19 nt, Artificial Sequence
  Description of Artificial Sequence: Synthetic oligonucleotide
cccggauguaugcacuggg

SEQ ID NO: 2363494 - RNA, 19 nt, Artificial Sequence
  Description of Artificial Sequence: Synthetic oligonucleotide
cuguuccauucaccuuccg

SEQ ID NO: 2363495 - RNA, 19 nt, Artificial Sequence
  Description of Artificial Sequence: Synthetic oligonucleotide
cucuuagagggcagcugga

SEQ ID NO: 2363496 - RNA, 19 nt, Artificial Sequence
  Description of Artificial Sequence: Synthetic oligonucleotide
augacucguugguuaugau

SEQ ID NO: 2363497 - RNA, 19 nt, Artificial Sequence
  Description of Artificial Sequence: Synthetic oligonucleotide
aucucccgccuucauguuu

SEQ ID NO: 2363498 - RNA, 19 nt, Artificial Sequence
  Description of Artificial Sequence: Synthetic oligonucleotide
ugcaugucuccagcaccug

SEQ ID NO: 2363499 - RNA, 19 nt, Artificial Sequence
  Description of Artificial Sequence: Synthetic oligonucleotide
ccggauguaugcacugggc

SEQ ID NO: 2363500 - RNA, 19 nt, Artificial Sequence
  Description of Artificial Sequence: Synthetic oligonucleotide
cagcagagggagucuucac

SEQ ID NO: 2363501 - RNA, 19 nt, Artificial Sequence
  Description of Artificial Sequence: Synthetic oligonucleotide
cagcccacuguuaggccuc

SEQ ID NO: 2363502 - RNA, 19 nt, Artificial Sequence
  Description of Artificial Sequence: Synthetic oligonucleotide
gcggacaacgacaaccuuc

SEQ ID NO: 2363503 - RNA, 19 nt, Artificial Sequence
  Description of Artificial Sequence: Synthetic oligonucleotide
cagcccagccucccuugcg

SEQ ID NO: 2363504 - RNA, 19 nt, Artificial Sequence
  Description of Artificial Sequence: Synthetic oligonucleotide
ccacagcccacuguuaggc

SEQ ID NO: 2363505 - RNA, 19 nt, Artificial Sequence
  Description of Artificial Sequence: Synthetic oligonucleotide
gagggcuguugaaggagca

SEQ ID NO: 2363506 - RNA, 19 nt, Artificial Sequence
  Description of Artificial Sequence: Synthetic oligonucleotide
gguuaugaucaacguugga

SEQ ID NO: 2363507 - RNA, 19 nt, Artificial Sequence
  Description of Artificial Sequence: Synthetic oligonucleotide
uggcuguuccauucaccuu

SEQ ID NO: 2363508 - RNA, 19 nt, Artificial Sequence
  Description of Artificial Sequence: Synthetic oligonucleotide
caucuucauugguuuaacu

SEQ ID NO: 2363509 - RNA, 19 nt, Artificial Sequence
  Description of Artificial Sequence: Synthetic oligonucleotide
gguuccguccugccuugcc

SEQ ID NO: 2363510 - RNA, 19 nt, Artificial Sequence
  Description of Artificial Sequence: Synthetic oligonucleotide
ccuaaucuuucggccagcc

SEQ ID NO: 2363511 - RNA, 19 nt, Artificial Sequence
  Description of Artificial Sequence: Synthetic oligonucleotide
caacgacaaccuucuccuc

SEQ ID NO: 2363512 - RNA, 19 nt, Artificial Sequence
  Description of Artificial Sequence: Synthetic oligonucleotide
ccuauaugguuagaauuca

SEQ ID NO: 2363513 - RNA, 19 nt, Artificial Sequence
  Description of Artificial Sequence: Synthetic oligonucleotide
gguccccggauguaugcac

SEQ ID NO: 2363514 - RNA, 19 nt, Artificial Sequence
  Description of Artificial Sequence: Synthetic oligonucleotide
uugccacagcccacuguua

SEQ ID NO: 2363515 - RNA, 19 nt, Artificial Sequence
  Description of Artificial Sequence: Synthetic oligonucleotide
caggcggggagcagagguc

SEQ ID NO: 2363516 - RNA, 19 nt, Artificial Sequence
  Description of Artificial Sequence: Synthetic oligonucleotide
cagaccuacauggaucaua

SEQ ID NO: 2363517 - RNA, 19 nt, Artificial Sequence
  Description of Artificial Sequence: Synthetic oligonucleotide
aggcagcgccccaagagga

SEQ ID NO: 2363518 - RNA, 19 nt, Artificial Sequence
  Description of Artificial Sequence: Synthetic oligonucleotide
cugccuauaugguuagaau

SEQ ID NO: 2363519 - RNA, 19 nt, Artificial Sequence
  Description of Artificial Sequence: Synthetic oligonucleotide
cucuggucggaaccgcaga

SEQ ID NO: 2363520 - RNA, 19 nt, Artificial Sequence
  Description of Artificial Sequence: Synthetic oligonucleotide
auguaugcacugggcggug

SEQ ID NO: 2363521 - RNA, 19 nt, Artificial Sequence
  Description of Artificial Sequence: Synthetic oligonucleotide
gaggguccccacaggcagc

SEQ ID NO: 2363522 - RNA, 19 nt, Artificial Sequence
  Description of Artificial Sequence: Synthetic oligonucleotide
cccacuguuaggccucuug

SEQ ID NO: 2363523 - RNA, 19 nt, Artificial Sequence
  Description of Artificial Sequence: Synthetic oligonucleotide
uaucucccgccuucauguu

SEQ ID NO: 2363524 - RNA, 19 nt, Artificial Sequence
  Description of Artificial Sequence: Synthetic oligonucleotide
uucugccuauaugguuaga

SEQ ID NO: 2363525 - RNA, 19 nt, Artificial Sequence
  Description of Artificial Sequence: Synthetic oligonucleotide
ggaucauagcggacaacga

SEQ ID NO: 2363526 - RNA, 19 nt, Artificial Sequence
  Description of Artificial Sequence: Synthetic oligonucleotide
cugauauacugggcuccuc

SEQ ID NO: 2363527 - RNA, 19 nt, Artificial Sequence
  Description of Artificial Sequence: Synthetic oligonucleotide
cugggcggugagaaggcaa

SEQ ID NO: 2363528 - RNA, 19 nt, Artificial Sequence
  Description of Artificial Sequence: Synthetic oligonucleotide
aggcaacaccaaggcagag

SEQ ID NO: 2363529 - RNA, 19 nt, Artificial Sequence
  Description of Artificial Sequence: Synthetic oligonucleotide
cuguguacuuggugcaacu

SEQ ID NO: 2363530 - RNA, 19 nt, Artificial Sequence
  Description of Artificial Sequence: Synthetic oligonucleotide
ggcggugagaaggcaacac

SEQ ID NO: 2363531 - RNA, 19 nt, Artificial Sequence
  Description of Artificial Sequence: Synthetic oligonucleotide
ccaggacacaaacuuggca

SEQ ID NO: 2363532 - RNA, 19 nt, Artificial Sequence
  Description of Artificial Sequence: Synthetic oligonucleotide
agcggacaacgacaaccuu

SEQ ID NO: 2363533 - RNA, 19 nt, Artificial Sequence
  Description of Artificial Sequence: Synthetic oligonucleotide
ggcauuaagguccccggau

SEQ ID NO: 2363534 - RNA, 19 nt, Artificial Sequence
  Description of Artificial Sequence: Synthetic oligonucleotide
cacgccacaugucccugca

SEQ ID NO: 2363535 - RNA, 19 nt, Artificial Sequence
  Description of Artificial Sequence: Synthetic oligonucleotide
cuugcccagccagcgguuc

SEQ ID NO: 2363536 - RNA, 19 nt, Artificial Sequence
  Description of Artificial Sequence: Synthetic oligonucleotide
agcacgccacaugucccug

SEQ ID NO: 2363537 - RNA, 19 nt, Artificial Sequence
  Description of Artificial Sequence: Synthetic oligonucleotide
gacucggccuacaguugca

SEQ ID NO: 2363538 - RNA, 19 nt, Artificial Sequence
  Description of Artificial Sequence: Synthetic oligonucleotide
guaucugggcaggcgggga

SEQ ID NO: 2363539 - RNA, 19 nt, Artificial Sequence
  Description of Artificial Sequence: Synthetic oligonucleotide
acggccuguauggucucga

SEQ ID NO: 2363540 - RNA, 19 nt, Artificial Sequence
  Description of Artificial Sequence: Synthetic oligonucleotide
agggcuguugaaggagcau

SEQ ID NO: 2363541 - RNA, 19 nt, Artificial Sequence
  Description of Artificial Sequence: Synthetic oligonucleotide
gggagucuucacguaacuc

SEQ ID NO: 2363542 - RNA, 19 nt, Artificial Sequence
  Description of Artificial Sequence: Synthetic oligonucleotide
uacucggauacggccugua

SEQ ID NO: 2363543 - RNA, 19 nt, Artificial Sequence
  Description of Artificial Sequence: Synthetic oligonucleotide
agguccccggauguaugca

SEQ ID NO: 2363544 - RNA, 19 nt, Artificial Sequence
  Description of Artificial Sequence: Synthetic oligonucleotide
gcagcacgccacauguccc

SEQ ID NO: 2363545 - RNA, 19 nt, Artificial Sequence
  Description of Artificial Sequence: Synthetic oligonucleotide
cggccuacaguugcaaugc

SEQ ID NO: 2363546 - RNA, 19 nt, Artificial Sequence
  Description of Artificial Sequence: Synthetic oligonucleotide
agcuaugucugcagaccua

SEQ ID NO: 2363547 - RNA, 19 nt, Artificial Sequence
  Description of Artificial Sequence: Synthetic oligonucleotide
acucggccuacaguugcaa

SEQ ID NO: 2363548 - RNA, 19 nt, Artificial Sequence
  Description of Artificial Sequence: Synthetic oligonucleotide
guuaggccucuugcccagc

SEQ ID NO: 2363549 - RNA, 19 nt, Artificial Sequence
  Description of Artificial Sequence: Synthetic oligonucleotide
cagagggagucuucacgua

SEQ ID NO: 2363550 - RNA, 19 nt, Artificial Sequence
  Description of Artificial Sequence: Synthetic oligonucleotide
ggacacaaacuuggcauua

SEQ ID NO: 2363551 - RNA, 19 nt, Artificial Sequence
  Description of Artificial Sequence: Synthetic oligonucleotide
caauaccauguacucggau

SEQ ID NO: 2363552 - RNA, 19 nt, Artificial Sequence
  Description of Artificial Sequence: Synthetic oligonucleotide
cccuugcguugccacagcc

SEQ ID NO: 2363553 - RNA, 19 nt, Artificial Sequence
  Description of Artificial Sequence: Synthetic oligonucleotide
ggggcaguggccuaaucuu

SEQ ID NO: 2363554 - RNA, 19 nt, Artificial Sequence
  Description of Artificial Sequence: Synthetic oligonucleotide
ccagccucccuugcguugc

SEQ ID NO: 2363555 - RNA, 19 nt, Artificial Sequence
  Description of Artificial Sequence: Synthetic oligonucleotide
ccuuccgaagcagcacgcc

SEQ ID NO: 2363556 - RNA, 19 nt, Artificial Sequence
  Description of Artificial Sequence: Synthetic oligonucleotide
ccagcgguuccguccugcc

SEQ ID NO: 2363557 - RNA, 19 nt, Artificial Sequence
  Description of Artificial Sequence: Synthetic oligonucleotide
gcagcgccccaagaggaug

SEQ ID NO: 2363558 - RNA, 19 nt, Artificial Sequence
  Description of Artificial Sequence: Synthetic oligonucleotide
gcacgccacaugucccugc

SEQ ID NO: 2363559 - RNA, 19 nt, Artificial Sequence
  Description of Artificial Sequence: Synthetic oligonucleotide
gucggaacccgggcgguaa

SEQ ID NO: 2363560 - RNA, 19 nt, Artificial Sequence
  Description of Artificial Sequence: Synthetic oligonucleotide
ccaacguuuccggcugccc

SEQ ID NO: 2363561 - RNA, 19 nt, Artificial Sequence
  Description of Artificial Sequence: Synthetic oligonucleotide
agcgccccaagaggaugug

SEQ ID NO: 2363562 - RNA, 19 nt, Artificial Sequence
  Description of Artificial Sequence: Synthetic oligonucleotide
aggucggaacccgggcggu

SEQ ID NO: 2363563 - RNA, 19 nt, Artificial Sequence
  Description of Artificial Sequence: Synthetic oligonucleotide
ccccaccaauaccauguac

SEQ ID NO: 2363564 - RNA, 19 nt, Artificial Sequence
  Description of Artificial Sequence: Synthetic oligonucleotide
ggaugugcauucccuuccu

SEQ ID NO: 2363565 - RNA, 19 nt, Artificial Sequence
  Description of Artificial Sequence: Synthetic oligonucleotide
ggcuccucggccaggcuca

SEQ ID NO: 2363566 - RNA, 19 nt, Artificial Sequence
  Description of Artificial Sequence: Synthetic oligonucleotide
ccaauaccauguacucgga

SEQ ID NO: 2363567 - RNA, 19 nt, Artificial Sequence
  Description of Artificial Sequence: Synthetic oligonucleotide
cucccgccuucauguuuuc

SEQ ID NO: 2363568 - RNA, 19 nt, Artificial Sequence
  Description of Artificial Sequence: Synthetic oligonucleotide
gcucaguaucugggcaggc

SEQ ID NO: 2363569 - RNA, 19 nt, Artificial Sequence
  Description of Artificial Sequence: Synthetic oligonucleotide
cggacaacgacaaccuucu

SEQ ID NO: 2363570 - RNA, 19 nt, Artificial Sequence
  Description of Artificial Sequence: Synthetic oligonucleotide
gguuagaauucaggauugu

SEQ ID NO: 2363571 - RNA, 19 nt, Artificial Sequence
  Description of Artificial Sequence: Synthetic oligonucleotide
ggccuacaguugcaaugca

SEQ ID NO: 2363572 - RNA, 19 nt, Artificial Sequence
  Description of Artificial Sequence: Synthetic oligonucleotide
ccccggauguaugcacugg

SEQ ID NO: 2363573 - RNA, 19 nt, Artificial Sequence
  Description of Artificial Sequence: Synthetic oligonucleotide
cgccccaagaggaugugca

SEQ ID NO: 2363574 - RNA, 19 nt, Artificial Sequence
  Description of Artificial Sequence: Synthetic oligonucleotide
ccucaaaggguucuggcuu

SEQ ID NO: 2363575 - RNA, 19 nt, Artificial Sequence
  Description of Artificial Sequence: Synthetic oligonucleotide
ccacaugucccugcagcuc

SEQ ID NO: 2363576 - RNA, 19 nt, Artificial Sequence
  Description of Artificial Sequence: Synthetic oligonucleotide
gccuaaucuuucggccagc

SEQ ID NO: 2363577 - RNA, 19 nt, Artificial Sequence
  Description of Artificial Sequence: Synthetic oligonucleotide
cagcgccccaagaggaugu

SEQ ID NO: 2363578 - RNA, 19 nt, Artificial Sequence
  Description of Artificial Sequence: Synthetic oligonucleotide
agccagcgguuccguccug

SEQ ID NO: 2363579 - RNA, 19 nt, Artificial Sequence
  Description of Artificial Sequence: Synthetic oligonucleotide
ccagcaccugcauuugucu

SEQ ID NO: 2363580 - RNA, 19 nt, Artificial Sequence
  Description of Artificial Sequence: Synthetic oligonucleotide
agcccacuguuaggccucu

SEQ ID NO: 2363581 - RNA, 19 nt, Artificial Sequence
  Description of Artificial Sequence: Synthetic oligonucleotide
cagccagcgguuccguccu

SEQ ID NO: 2363582 - RNA, 19 nt, Artificial Sequence
  Description of Artificial Sequence: Synthetic oligonucleotide
guccccggauguaugcacu

SEQ ID NO: 2363583 - RNA, 19 nt, Artificial Sequence
  Description of Artificial Sequence: Synthetic oligonucleotide
gccagcgguuccguccugc

SEQ ID NO: 2363584 - RNA, 19 nt, Artificial Sequence
  Description of Artificial Sequence: Synthetic oligonucleotide
ggacaacgacaaccuucuc

SEQ ID NO: 2363585 - RNA, 19 nt, Artificial Sequence
  Description of Artificial Sequence: Synthetic oligonucleotide
ccacaggcagcgccccaag

SEQ ID NO: 2363586 - RNA, 19 nt, Artificial Sequence
  Description of Artificial Sequence: Synthetic oligonucleotide
cguccugccuugccgauga

SEQ ID NO: 2363587 - RNA, 19 nt, Artificial Sequence
  Description of Artificial Sequence: Synthetic oligonucleotide
cguugguuaugaucaacgu

SEQ ID NO: 2363588 - RNA, 19 nt, Artificial Sequence
  Description of Artificial Sequence: Synthetic oligonucleotide
cucggccuacaguugcaau

SEQ ID NO: 2363589 - RNA, 19 nt, Artificial Sequence
  Description of Artificial Sequence: Synthetic oligonucleotide
ggucggaaccgcagaaagu

SEQ ID NO: 2363590 - RNA, 19 nt, Artificial Sequence
  Description of Artificial Sequence: Synthetic oligonucleotide
ccaaggcagagggcuguug

SEQ ID NO: 2363591 - RNA, 19 nt, Artificial Sequence
  Description of Artificial Sequence: Synthetic oligonucleotide
gcaacucuuccaggacaca

SEQ ID NO: 2363592 - RNA, 19 nt, Artificial Sequence
  Description of Artificial Sequence: Synthetic oligonucleotide
gcguugccacagcccacug

SEQ ID NO: 2363593 - RNA, 19 nt, Artificial Sequence
  Description of Artificial Sequence: Synthetic oligonucleotide
ccgccuucauguuuucugu

SEQ ID NO: 2363594 - RNA, 19 nt, Artificial Sequence
  Description of Artificial Sequence: Synthetic oligonucleotide
ggaaccgcagaaagucaau

SEQ ID NO: 2363595 - RNA, 19 nt, Artificial Sequence
  Description of Artificial Sequence: Synthetic oligonucleotide
gccuacaguugcaaugcau

SEQ ID NO: 2363596 - RNA, 19 nt, Artificial Sequence
  Description of Artificial Sequence: Synthetic oligonucleotide
ccgcagaaagucaaucauu

SEQ ID NO: 2363597 - RNA, 19 nt, Artificial Sequence
  Description of Artificial Sequence: Synthetic oligonucleotide
caaaggguucuggcuuggu

SEQ ID NO: 2363598 - RNA, 19 nt, Artificial Sequence
  Description of Artificial Sequence: Synthetic oligonucleotide
gggcggugagaaggcaaca

SEQ ID NO: 2363599 - RNA, 19 nt, Artificial Sequence
  Description of Artificial Sequence: Synthetic oligonucleotide
cgaugacucguugguuaug

SEQ ID NO: 2363600 - RNA, 19 nt, Artificial Sequence
  Description of Artificial Sequence: Synthetic oligonucleotide
guacucggauacggccugu

SEQ ID NO: 2363601 - RNA, 19 nt, Artificial Sequence
  Description of Artificial Sequence: Synthetic oligonucleotide
cggccuguauggucucgac

SEQ ID NO: 2363602 - RNA, 19 nt, Artificial Sequence
  Description of Artificial Sequence: Synthetic oligonucleotide
gguucuggcuugguuucuu

SEQ ID NO: 2363603 - RNA, 19 nt, Artificial Sequence
  Description of Artificial Sequence: Synthetic oligonucleotide
caccugcauuugucucuua

SEQ ID NO: 2363604 - RNA, 19 nt, Artificial Sequence
  Description of Artificial Sequence: Synthetic oligonucleotide
caggcucacuuuccacauu

SEQ ID NO: 2363605 - RNA, 19 nt, Artificial Sequence
  Description of Artificial Sequence: Synthetic oligonucleotide
ggucggaacccgggcggua

SEQ ID NO: 2363606 - RNA, 19 nt, Artificial Sequence
  Description of Artificial Sequence: Synthetic oligonucleotide
ggccagcccagccucccuu

SEQ ID NO: 2363607 - RNA, 19 nt, Artificial Sequence
  Description of Artificial Sequence: Synthetic oligonucleotide
cagcuggauaauggcuguu

SEQ ID NO: 2363608 - RNA, 19 nt, Artificial Sequence
  Description of Artificial Sequence: Synthetic oligonucleotide
cacugccauucugccuaua

SEQ ID NO: 2363609 - RNA, 19 nt, Artificial Sequence
  Description of Artificial Sequence: Synthetic oligonucleotide
ggcagcgccccaagaggau

SEQ ID NO: 2363610 - RNA, 19 nt, Artificial Sequence
  Description of Artificial Sequence: Synthetic oligonucleotide
gcagaccuacauggaucau

SEQ ID NO: 2363611 - RNA, 19 nt, Artificial Sequence
  Description of Artificial Sequence: Synthetic oligonucleotide
cgguuccguccugccuugc

SEQ ID NO: 2363612 - RNA, 19 nt, Artificial Sequence
  Description of Artificial Sequence: Synthetic oligonucleotide
cuccucggccaggcucacu

SEQ ID NO: 2363613 - RNA, 19 nt, Artificial Sequence
  Description of Artificial Sequence: Synthetic oligonucleotide
ccacugccauucugccuau

SEQ ID NO: 2363614 - RNA, 19 nt, Artificial Sequence
  Description of Artificial Sequence: Synthetic oligonucleotide
gccuugccgaugacucguu

SEQ ID NO: 2363615 - RNA, 19 nt, Artificial Sequence
  Description of Artificial Sequence: Synthetic oligonucleotide
ccgaagcagcacgccacau

SEQ ID NO: 2363616 - RNA, 19 nt, Artificial Sequence
  Description of Artificial Sequence: Synthetic oligonucleotide
cggauacggccuguauggu

SEQ ID NO: 2363617 - RNA, 19 nt, Artificial Sequence
  Description of Artificial Sequence: Synthetic oligonucleotide
ccucggccaggcucacuuu

SEQ ID NO: 2363618 - RNA, 19 nt, Artificial Sequence
  Description of Artificial Sequence: Synthetic oligonucleotide
aauuacagaaaguucagcc

SEQ ID NO: 2363619 - RNA, 19 nt, Artificial Sequence
  Description of Artificial Sequence: Synthetic oligonucleotide
aaguuaaauaaacaguggg

SEQ ID NO: 2363620 - RNA, 19 nt, Artificial Sequence
  Description of Artificial Sequence: Synthetic oligonucleotide
uuuucuauaccguaaguag

SEQ ID NO: 2363621 - RNA, 19 nt, Artificial Sequence
  Description of Artificial Sequence: Synthetic oligonucleotide
agaucuacccaucuggugc

SEQ ID NO: 2363622 - RNA, 19 nt, Artificial Sequence
  Description of Artificial Sequence: Synthetic oligonucleotide
caaacaaguagauaugucc

SEQ ID NO: 2363623 - RNA, 19 nt, Artificial Sequence
  Description of Artificial Sequence: Synthetic oligonucleotide
uucaucgugcaccagauag

SEQ ID NO: 2363624 - RNA, 19 nt, Artificial Sequence
  Description of Artificial Sequence: Synthetic oligonucleotide
uucuauaccguaaguagcg

SEQ ID NO: 2363625 - RNA, 19 nt, Artificial Sequence
  Description of Artificial Sequence: Synthetic oligonucleotide
aaauagacuguucuggcca

SEQ ID NO: 2363626 - RNA, 19 nt, Artificial Sequence
  Description of Artificial Sequence: Synthetic oligonucleotide
aguucagccuuccuaaacc

SEQ ID NO: 2363627 - RNA, 19 nt, Artificial Sequence
  Description of Artificial Sequence: Synthetic oligonucleotide
ugcagaucuacccaucugg

SEQ ID NO: 2363628 - RNA, 19 nt, Artificial Sequence
  Description of Artificial Sequence: Synthetic oligonucleotide
ucgugcaccagauagaucu

SEQ ID NO: 2363629 - RNA, 19 nt, Artificial Sequence
  Description of Artificial Sequence: Synthetic oligonucleotide
cuaaaccuuuucuauaccg

SEQ ID NO: 2363630 - RNA, 19 nt, Artificial Sequence
  Description of Artificial Sequence: Synthetic oligonucleotide
agauauguccacuggaguc

SEQ ID NO: 2363631 - RNA, 19 nt, Artificial Sequence
  Description of Artificial Sequence: Synthetic oligonucleotide
uuucuauaccguaaguagc

SEQ ID NO: 2363632 - RNA, 19 nt, Artificial Sequence
  Description of Artificial Sequence: Synthetic oligonucleotide
aaguagauauguccacugg

SEQ ID NO: 2363633 - RNA, 19 nt, Artificial Sequence
  Description of Artificial Sequence: Synthetic oligonucleotide
aauagacuguucuggccac

SEQ ID NO: 2363634 - RNA, 19 nt, Artificial Sequence
  Description of Artificial Sequence: Synthetic oligonucleotide
aaacgcgcugccucaaggc

SEQ ID NO: 2363635 - RNA, 19 nt, Artificial Sequence
  Description of Artificial Sequence: Synthetic oligonucleotide
gaaguuaaauaaacagugg

SEQ ID NO: 2363636 - RNA, 19 nt, Artificial Sequence
  Description of Artificial Sequence: Synthetic oligonucleotide
uagcccaggacauagucgg

SEQ ID NO: 2363637 - RNA, 19 nt, Artificial Sequence
  Description of Artificial Sequence: Synthetic oligonucleotide
cauacuaggguuugugggg

SEQ ID NO: 2363638 - RNA, 19 nt, Artificial Sequence
  Description of Artificial Sequence: Synthetic oligonucleotide
aaaugcaggaacggacucc

SEQ ID NO: 2363639 - RNA, 19 nt, Artificial Sequence
  Description of Artificial Sequence: Synthetic oligonucleotide
aaugcaggaacggacuccg

SEQ ID NO: 2363640 - RNA, 19 nt, Artificial Sequence
  Description of Artificial Sequence: Synthetic oligonucleotide
auuacagaaaguucagccu

SEQ ID NO: 2363641 - RNA, 19 nt, Artificial Sequence
  Description of Artificial Sequence: Synthetic oligonucleotide
ugugccaggcauuccaugg

SEQ ID NO: 2363642 - RNA, 19 nt, Artificial Sequence
  Description of Artificial Sequence: Synthetic oligonucleotide
cuugucaaguucaucgugc

SEQ ID NO: 2363643 - RNA, 19 nt, Artificial Sequence
  Description of Artificial Sequence: Synthetic oligonucleotide
aaugugucauggcaguugu

SEQ ID NO: 2363644 - RNA, 19 nt, Artificial Sequence
  Description of Artificial Sequence: Synthetic oligonucleotide
agcacugccaugcccacgc

SEQ ID NO: 2363645 - RNA, 19 nt, Artificial Sequence
  Description of Artificial Sequence: Synthetic oligonucleotide
uccuaaaccuuuucuauac

SEQ ID NO: 2363646 - RNA, 19 nt, Artificial Sequence
  Description of Artificial Sequence: Synthetic oligonucleotide
uauaccguaaguagcgcac

SEQ ID NO: 2363647 - RNA, 19 nt, Artificial Sequence
  Description of Artificial Sequence: Synthetic oligonucleotide
ccagaaguuaaauaaacag

SEQ ID NO: 2363648 - RNA, 19 nt, Artificial Sequence
  Description of Artificial Sequence: Synthetic oligonucleotide
caggcagucaaacaaguag

SEQ ID NO: 2363649 - RNA, 19 nt, Artificial Sequence
  Description of Artificial Sequence: Synthetic oligonucleotide
ggagucauaggcccgaugg

SEQ ID NO: 2363650 - RNA, 19 nt, Artificial Sequence
  Description of Artificial Sequence: Synthetic oligonucleotide
gaaaguucagccuuccuaa

SEQ ID NO: 2363651 - RNA, 19 nt, Artificial Sequence
  Description of Artificial Sequence: Synthetic oligonucleotide
aguagcccaggacauaguc

SEQ ID NO: 2363652 - RNA, 19 nt, Artificial Sequence
  Description of Artificial Sequence: Synthetic oligonucleotide
uuacagaaaguucagccuu

SEQ ID NO: 2363653 - RNA, 19 nt, Artificial Sequence
  Description of Artificial Sequence: Synthetic oligonucleotide
guaaguagcgcacggagac

SEQ ID NO: 2363654 - RNA, 19 nt, Artificial Sequence
  Description of Artificial Sequence: Synthetic oligonucleotide
aguagauauguccacugga

SEQ ID NO: 2363655 - RNA, 19 nt, Artificial Sequence
  Description of Artificial Sequence: Synthetic oligonucleotide
caagccaccgcagaaauag

SEQ ID NO: 2363656 - RNA, 19 nt, Artificial Sequence
  Description of Artificial Sequence: Synthetic oligonucleotide
aaacaguggguaccaaugu

SEQ ID NO: 2363657 - RNA, 19 nt, Artificial Sequence
  Description of Artificial Sequence: Synthetic oligonucleotide
aaauaaacaguggguacca

SEQ ID NO: 2363658 - RNA, 19 nt, Artificial Sequence
  Description of Artificial Sequence: Synthetic oligonucleotide
aguuaaauaaacagugggu

SEQ ID NO: 2363659 - RNA, 19 nt, Artificial Sequence
  Description of Artificial Sequence: Synthetic oligonucleotide
gucaaguucaucgugcacc

SEQ ID NO: 2363660 - RNA, 19 nt, Artificial Sequence
  Description of Artificial Sequence: Synthetic oligonucleotide
aaaccuuuucuauaccgua

SEQ ID NO: 2363661 - RNA, 19 nt, Artificial Sequence
  Description of Artificial Sequence: Synthetic oligonucleotide
gauccaacaauggggacag

SEQ ID NO: 2363662 - RNA, 19 nt, Artificial Sequence
  Description of Artificial Sequence: Synthetic oligonucleotide
ucaaacaaguagauauguc

SEQ ID NO: 2363663 - RNA, 19 nt, Artificial Sequence
  Description of Artificial Sequence: Synthetic oligonucleotide
accauacuaggguuugugg

SEQ ID NO: 2363664 - RNA, 19 nt, Artificial Sequence
  Description of Artificial Sequence: Synthetic oligonucleotide
gaaguagcccaggacauag

SEQ ID NO: 2363665 - RNA, 19 nt, Artificial Sequence
  Description of Artificial Sequence: Synthetic oligonucleotide
guagauauguccacuggag

SEQ ID NO: 2363666 - RNA, 19 nt, Artificial Sequence
  Description of Artificial Sequence: Synthetic oligonucleotide
aacggacuccguuguggcc

SEQ ID NO: 2363667 - RNA, 19 nt, Artificial Sequence
  Description of Artificial Sequence: Synthetic oligonucleotide
ugugucauggcaguugugu

SEQ ID NO: 2363668 - RNA, 19 nt, Artificial Sequence
  Description of Artificial Sequence: Synthetic oligonucleotide
ugccucaaggcccaacucc

SEQ ID NO: 2363669 - RNA, 19 nt, Artificial Sequence
  Description of Artificial Sequence: Synthetic oligonucleotide
uccaugguuccccaggcca

SEQ ID NO: 2363670 - RNA, 19 nt, Artificial Sequence
  Description of Artificial Sequence: Synthetic oligonucleotide
uagauauguccacuggagu

SEQ ID NO: 2363671 - RNA, 19 nt, Artificial Sequence
  Description of Artificial Sequence: Synthetic oligonucleotide
ucaaguucaucgugcacca

SEQ ID NO: 2363672 - RNA, 19 nt, Artificial Sequence
  Description of Artificial Sequence: Synthetic oligonucleotide
gaaacgcgcugccucaagg

SEQ ID NO: 2363673 - RNA, 19 nt, Artificial Sequence
  Description of Artificial Sequence: Synthetic oligonucleotide
caacaauggggacaguagc

SEQ ID NO: 2363674 - RNA, 19 nt, Artificial Sequence
  Description of Artificial Sequence: Synthetic oligonucleotide
uuuguggggcgcccgaugc

SEQ ID NO: 2363675 - RNA, 19 nt, Artificial Sequence
  Description of Artificial Sequence: Synthetic oligonucleotide
cauuccaugguuccccagg

SEQ ID NO: 2363676 - RNA, 19 nt, Artificial Sequence
  Description of Artificial Sequence: Synthetic oligonucleotide
ugauccaacaauggggaca

SEQ ID NO: 2363677 - RNA, 19 nt, Artificial Sequence
  Description of Artificial Sequence: Synthetic oligonucleotide
auacuaggguuuguggggc

SEQ ID NO: 2363678 - RNA, 19 nt, Artificial Sequence
  Description of Artificial Sequence: Synthetic oligonucleotide
ucaugaggcgucguggccg

SEQ ID NO: 2363679 - RNA, 19 nt, Artificial Sequence
  Description of Artificial Sequence: Synthetic oligonucleotide
caaguagauauguccacug

SEQ ID NO: 2363680 - RNA, 19 nt, Artificial Sequence
  Description of Artificial Sequence: Synthetic oligonucleotide
ccuucaaucugcaaguggc

SEQ ID NO: 2363681 - RNA, 19 nt, Artificial Sequence
  Description of Artificial Sequence: Synthetic oligonucleotide
ucgagcacggauguggucc

SEQ ID NO: 2363682 - RNA, 19 nt, Artificial Sequence
  Description of Artificial Sequence: Synthetic oligonucleotide
acccagaaguuaaauaaac

SEQ ID NO: 2363683 - RNA, 19 nt, Artificial Sequence
  Description of Artificial Sequence: Synthetic oligonucleotide
aggaucacgagcccagcuc

SEQ ID NO: 2363684 - RNA, 19 nt, Artificial Sequence
  Description of Artificial Sequence: Synthetic oligonucleotide
uggccugauccaacaaugg

SEQ ID NO: 2363685 - RNA, 19 nt, Artificial Sequence
  Description of Artificial Sequence: Synthetic oligonucleotide
acauagucgggcaccauac

SEQ ID NO: 2363686 - RNA, 19 nt, Artificial Sequence
  Description of Artificial Sequence: Synthetic oligonucleotide
acagcaaaugcaggaacgg

SEQ ID NO: 2363687 - RNA, 19 nt, Artificial Sequence
  Description of Artificial Sequence: Synthetic oligonucleotide
cagucaaacaaguagauau

SEQ ID NO: 2363688 - RNA, 19 nt, Artificial Sequence
  Description of Artificial Sequence: Synthetic oligonucleotide
auaaacaguggguaccaau

SEQ ID NO: 2363689 - RNA, 19 nt, Artificial Sequence
  Description of Artificial Sequence: Synthetic oligonucleotide
ucgggcaccauacuagggu

SEQ ID NO: 2363690 - RNA, 19 nt, Artificial Sequence
  Description of Artificial Sequence: Synthetic oligonucleotide
uaccguaaguagcgcacgg

SEQ ID NO: 2363691 - RNA, 19 nt, Artificial Sequence
  Description of Artificial Sequence: Synthetic oligonucleotide
aacagcuuugcagcuuggg

SEQ ID NO: 2363692 - RNA, 19 nt, Artificial Sequence
  Description of Artificial Sequence: Synthetic oligonucleotide
agcaguaccagcugggcau

SEQ ID NO: 2363693 - RNA, 19 nt, Artificial Sequence
  Description of Artificial Sequence: Synthetic oligonucleotide
acggagaccaagccaccgc

SEQ ID NO: 2363694 - RNA, 19 nt, Artificial Sequence
  Description of Artificial Sequence: Synthetic oligonucleotide
uugacguucaugaggcguc

SEQ ID NO: 2363695 - RNA, 19 nt, Artificial Sequence
  Description of Artificial Sequence: Synthetic oligonucleotide
uuucccaggggcuugucaa

SEQ ID NO: 2363696 - RNA, 19 nt, Artificial Sequence
  Description of Artificial Sequence: Synthetic oligonucleotide
gaugccuacccguagccuc

SEQ ID NO: 2363697 - RNA, 19 nt, Artificial Sequence
  Description of Artificial Sequence: Synthetic oligonucleotide
ucaucgugcaccagauaga

SEQ ID NO: 2363698 - RNA, 19 nt, Artificial Sequence
  Description of Artificial Sequence: Synthetic oligonucleotide
aaguagcgcacggagacca

SEQ ID NO: 2363699 - RNA, 19 nt, Artificial Sequence
  Description of Artificial Sequence: Synthetic oligonucleotide
cuggcuucgagcacggaug

SEQ ID NO: 2363700 - RNA, 19 nt, Artificial Sequence
  Description of Artificial Sequence: Synthetic oligonucleotide
ucagccuuccuaaaccuuu

SEQ ID NO: 2363701 - RNA, 19 nt, Artificial Sequence
  Description of Artificial Sequence: Synthetic oligonucleotide
ugguuccuggcuucgagca

SEQ ID NO: 2363702 - RNA, 19 nt, Artificial Sequence
  Description of Artificial Sequence: Synthetic oligonucleotide
ccauacuaggguuuguggg

SEQ ID NO: 2363703 - RNA, 19 nt, Artificial Sequence
  Description of Artificial Sequence: Synthetic oligonucleotide
cagaaguuaaauaaacagu

SEQ ID NO: 2363704 - RNA, 19 nt, Artificial Sequence
  Description of Artificial Sequence: Synthetic oligonucleotide
gaacggacuccguuguggc

SEQ ID NO: 2363705 - RNA, 19 nt, Artificial Sequence
  Description of Artificial Sequence: Synthetic oligonucleotide
uacagaaaguucagccuuc

SEQ ID NO: 2363706 - RNA, 19 nt, Artificial Sequence
  Description of Artificial Sequence: Synthetic oligonucleotide
uucaugaggcgucguggcc

SEQ ID NO: 2363707 - RNA, 19 nt, Artificial Sequence
  Description of Artificial Sequence: Synthetic oligonucleotide
guucaugaggcgucguggc

SEQ ID NO: 2363708 - RNA, 19 nt, Artificial Sequence
  Description of Artificial Sequence: Synthetic oligonucleotide
agcuuugcagcuugggcca

SEQ ID NO: 2363709 - RNA, 19 nt, Artificial Sequence
  Description of Artificial Sequence: Synthetic oligonucleotide
aaaguucagccuuccuaaa

SEQ ID NO: 2363710 - RNA, 19 nt, Artificial Sequence
  Description of Artificial Sequence: Synthetic oligonucleotide
uccguuguggccccuugca

SEQ ID NO: 2363711 - RNA, 19 nt, Artificial Sequence
  Description of Artificial Sequence: Synthetic oligonucleotide
uuccuaaaccuuuucuaua

SEQ ID NO: 2363712 - RNA, 19 nt, Artificial Sequence
  Description of Artificial Sequence: Synthetic oligonucleotide
agucaaacaaguagauaug

SEQ ID NO: 2363713 - RNA, 19 nt, Artificial Sequence
  Description of Artificial Sequence: Synthetic oligonucleotide
agucauaggcccgauggug

SEQ ID NO: 2363714 - RNA, 19 nt, Artificial Sequence
  Description of Artificial Sequence: Synthetic oligonucleotide
guuccuggcuucgagcacg

SEQ ID NO: 2363715 - RNA, 19 nt, Artificial Sequence
  Description of Artificial Sequence: Synthetic oligonucleotide
uugcacuggaguucagaca

SEQ ID NO: 2363716 - RNA, 19 nt, Artificial Sequence
  Description of Artificial Sequence: Synthetic oligonucleotide
ucuauaccguaaguagcgc

SEQ ID NO: 2363717 - RNA, 19 nt, Artificial Sequence
  Description of Artificial Sequence: Synthetic oligonucleotide
ugggcauccccaagcgggg

SEQ ID NO: 2363718 - RNA, 19 nt, Artificial Sequence
  Description of Artificial Sequence: Synthetic oligonucleotide
ucacgagcccagcucuccg

SEQ ID NO: 2363719 - RNA, 19 nt, Artificial Sequence
  Description of Artificial Sequence: Synthetic oligonucleotide
ugcaccagauagaucuccu

SEQ ID NO: 2363720 - RNA, 19 nt, Artificial Sequence
  Description of Artificial Sequence: Synthetic oligonucleotide
acuaggguuuguggggcgc

SEQ ID NO: 2363721 - RNA, 19 nt, Artificial Sequence
  Description of Artificial Sequence: Synthetic oligonucleotide
cuggaguucagacagcaaa

SEQ ID NO: 2363722 - RNA, 19 nt, Artificial Sequence
  Description of Artificial Sequence: Synthetic oligonucleotide
agcugggcauccccaagcg

SEQ ID NO: 2363723 - RNA, 19 nt, Artificial Sequence
  Description of Artificial Sequence: Synthetic oligonucleotide
gccugauccaacaaugggg

SEQ ID NO: 2363724 - RNA, 19 nt, Artificial Sequence
  Description of Artificial Sequence: Synthetic oligonucleotide
ugucaaguucaucgugcac

SEQ ID NO: 2363725 - RNA, 19 nt, Artificial Sequence
  Description of Artificial Sequence: Synthetic oligonucleotide
auagucgggcaccauacua

SEQ ID NO: 2363726 - RNA, 19 nt, Artificial Sequence
  Description of Artificial Sequence: Synthetic oligonucleotide
aucacgagcccagcucucc

SEQ ID NO: 2363727 - RNA, 19 nt, Artificial Sequence
  Description of Artificial Sequence: Synthetic oligonucleotide
acaguggguaccaaugugu

SEQ ID NO: 2363728 - RNA, 19 nt, Artificial Sequence
  Description of Artificial Sequence: Synthetic oligonucleotide
auaccguaaguagcgcacg

SEQ ID NO: 2363729 - RNA, 19 nt, Artificial Sequence
  Description of Artificial Sequence: Synthetic oligonucleotide
gcuucgagcacggaugugg

SEQ ID NO: 2363730 - RNA, 19 nt, Artificial Sequence
  Description of Artificial Sequence: Synthetic oligonucleotide
agccaccgcagaaauagac

SEQ ID NO: 2363731 - RNA, 19 nt, Artificial Sequence
  Description of Artificial Sequence: Synthetic oligonucleotide
uagcgcacggagaccaagc

SEQ ID NO: 2363732 - RNA, 19 nt, Artificial Sequence
  Description of Artificial Sequence: Synthetic oligonucleotide
ugcccgagcacugccaugc

SEQ ID NO: 2363733 - RNA, 19 nt, Artificial Sequence
  Description of Artificial Sequence: Synthetic oligonucleotide
aauggggacaguagcuccu

SEQ ID NO: 2363734 - RNA, 19 nt, Artificial Sequence
  Description of Artificial Sequence: Synthetic oligonucleotide
agguccgcagcgcagcgag

SEQ ID NO: 2363735 - RNA, 19 nt, Artificial Sequence
  Description of Artificial Sequence: Synthetic oligonucleotide
auaggcccgauggugguuc

SEQ ID NO: 2363736 - RNA, 19 nt, Artificial Sequence
  Description of Artificial Sequence: Synthetic oligonucleotide
aaccuuuucuauaccguaa

SEQ ID NO: 2363737 - RNA, 19 nt, Artificial Sequence
  Description of Artificial Sequence: Synthetic oligonucleotide
ccguugacguucaugaggc

SEQ ID NO: 2363738 - RNA, 19 nt, Artificial Sequence
  Description of Artificial Sequence: Synthetic oligonucleotide
cacacugcgcccguugacg

SEQ ID NO: 2363739 - RNA, 19 nt, Artificial Sequence
  Description of Artificial Sequence: Synthetic oligonucleotide
cuauaccguaaguagcgca

SEQ ID NO: 2363740 - RNA, 19 nt, Artificial Sequence
  Description of Artificial Sequence: Synthetic oligonucleotide
gauggugguuccuggcuuc

SEQ ID NO: 2363741 - RNA, 19 nt, Artificial Sequence
  Description of Artificial Sequence: Synthetic oligonucleotide
ggccugauccaacaauggg

SEQ ID NO: 2363742 - RNA, 19 nt, Artificial Sequence
  Description of Artificial Sequence: Synthetic oligonucleotide
guggccugauccaacaaug

SEQ ID NO: 2363743 - RNA, 19 nt, Artificial Sequence
  Description of Artificial Sequence: Synthetic oligonucleotide
ugacguucaugaggcgucg

SEQ ID NO: 2363744 - RNA, 19 nt, Artificial Sequence
  Description of Artificial Sequence: Synthetic oligonucleotide
cucggaaacgcgcugccuc

SEQ ID NO: 2363745 - RNA, 19 nt, Artificial Sequence
  Description of Artificial Sequence: Synthetic oligonucleotide
ugcaggaacggacuccguu

SEQ ID NO: 2363746 - RNA, 19 nt, Artificial Sequence
  Description of Artificial Sequence: Synthetic oligonucleotide
cagaucuacccaucuggug

SEQ ID NO: 2363747 - RNA, 19 nt, Artificial Sequence
  Description of Artificial Sequence: Synthetic oligonucleotide
gacauagucgggcaccaua

SEQ ID NO: 2363748 - RNA, 19 nt, Artificial Sequence
  Description of Artificial Sequence: Synthetic oligonucleotide
uuugcccgagcacugccau

SEQ ID NO: 2363749 - RNA, 19 nt, Artificial Sequence
  Description of Artificial Sequence: Synthetic oligonucleotide
cucuccgccacucccaguc

SEQ ID NO: 2363750 - RNA, 19 nt, Artificial Sequence
  Description of Artificial Sequence: Synthetic oligonucleotide
ucggaaacgcgcugccuca

SEQ ID NO: 2363751 - RNA, 19 nt, Artificial Sequence
  Description of Artificial Sequence: Synthetic oligonucleotide
uguucuggccacagucccu

SEQ ID NO: 2363752 - RNA, 19 nt, Artificial Sequence
  Description of Artificial Sequence: Synthetic oligonucleotide
ggaacggacuccguugugg

SEQ ID NO: 2363753 - RNA, 19 nt, Artificial Sequence
  Description of Artificial Sequence: Synthetic oligonucleotide
gcuugggccacacugcgcc

SEQ ID NO: 2363754 - RNA, 19 nt, Artificial Sequence
  Description of Artificial Sequence: Synthetic oligonucleotide
caugaggcgucguggccgg

SEQ ID NO: 2363755 - RNA, 19 nt, Artificial Sequence
  Description of Artificial Sequence: Synthetic oligonucleotide
acugcgcccguugacguuc

SEQ ID NO: 2363756 - RNA, 19 nt, Artificial Sequence
  Description of Artificial Sequence: Synthetic oligonucleotide
gguaccaaugugucauggc

SEQ ID NO: 2363757 - RNA, 19 nt, Artificial Sequence
  Description of Artificial Sequence: Synthetic oligonucleotide
cccguugacguucaugagg

SEQ ID NO: 2363758 - RNA, 19 nt, Artificial Sequence
  Description of Artificial Sequence: Synthetic oligonucleotide
ggacaguagcuccugcucc

SEQ ID NO: 2363759 - RNA, 19 nt, Artificial Sequence
  Description of Artificial Sequence: Synthetic oligonucleotide
agccuuccuaaaccuuuuc

SEQ ID NO: 2363760 - RNA, 19 nt, Artificial Sequence
  Description of Artificial Sequence: Synthetic oligonucleotide
caggacauagucgggcacc

SEQ ID NO: 2363761 - RNA, 19 nt, Artificial Sequence
  Description of Artificial Sequence: Synthetic oligonucleotide
caguggguaccaauguguc

SEQ ID NO: 2363762 - RNA, 19 nt, Artificial Sequence
  Description of Artificial Sequence: Synthetic oligonucleotide
aauaaacaguggguaccaa

SEQ ID NO: 2363763 - RNA, 19 nt, Artificial Sequence
  Description of Artificial Sequence: Synthetic oligonucleotide
accaagccaccgcagaaau

SEQ ID NO: 2363764 - RNA, 19 nt, Artificial Sequence
  Description of Artificial Sequence: Synthetic oligonucleotide
ucuccgccacucccagucg

SEQ ID NO: 2363765 - RNA, 19 nt, Artificial Sequence
  Description of Artificial Sequence: Synthetic oligonucleotide
uucccaggggcuugucaag

SEQ ID NO: 2363766 - RNA, 19 nt, Artificial Sequence
  Description of Artificial Sequence: Synthetic oligonucleotide
uaaguagcgcacggagacc

SEQ ID NO: 2363767 - RNA, 19 nt, Artificial Sequence
  Description of Artificial Sequence: Synthetic oligonucleotide
agccucggaaacgcgcugc

SEQ ID NO: 2363768 - RNA, 19 nt, Artificial Sequence
  Description of Artificial Sequence: Synthetic oligonucleotide
cuucagggcaccggcaggc

SEQ ID NO: 2363769 - RNA, 19 nt, Artificial Sequence
  Description of Artificial Sequence: Synthetic oligonucleotide
guagccucggcauugcacu

SEQ ID NO: 2363770 - RNA, 19 nt, Artificial Sequence
  Description of Artificial Sequence: Synthetic oligonucleotide
ccaccgcagaaauagacug

SEQ ID NO: 2363771 - RNA, 19 nt, Artificial Sequence
  Description of Artificial Sequence: Synthetic oligonucleotide
uguggccccuugcacugcc

SEQ ID NO: 2363772 - RNA, 19 nt, Artificial Sequence
  Description of Artificial Sequence: Synthetic oligonucleotide
aaacagcuuugcagcuugg

SEQ ID NO: 2363773 - RNA, 19 nt, Artificial Sequence
  Description of Artificial Sequence: Synthetic oligonucleotide
cacuggagucauaggcccg

SEQ ID NO: 2363774 - RNA, 19 nt, Artificial Sequence
  Description of Artificial Sequence: Synthetic oligonucleotide
cuuccuaaaccuuuucuau

SEQ ID NO: 2363775 - RNA, 19 nt, Artificial Sequence
  Description of Artificial Sequence: Synthetic oligonucleotide
caaggcccaacuccgccgc

SEQ ID NO: 2363776 - RNA, 19 nt, Artificial Sequence
  Description of Artificial Sequence: Synthetic oligonucleotide
gcaggaacggacuccguug

SEQ ID NO: 2363777 - RNA, 19 nt, Artificial Sequence
  Description of Artificial Sequence: Synthetic oligonucleotide
guaccagcugggcaucccc

SEQ ID NO: 2363778 - RNA, 19 nt, Artificial Sequence
  Description of Artificial Sequence: Synthetic oligonucleotide
gucgccgcgcuauuugccc

SEQ ID NO: 2363779 - RNA, 19 nt, Artificial Sequence
  Description of Artificial Sequence: Synthetic oligonucleotide
agaccaagccaccgcagaa

SEQ ID NO: 2363780 - RNA, 19 nt, Artificial Sequence
  Description of Artificial Sequence: Synthetic oligonucleotide
gucaaacaaguagauaugu

SEQ ID NO: 2363781 - RNA, 19 nt, Artificial Sequence
  Description of Artificial Sequence: Synthetic oligonucleotide
agucgccgcgcuauuugcc

SEQ ID NO: 2363782 - RNA, 19 nt, Artificial Sequence
  Description of Artificial Sequence: Synthetic oligonucleotide
ucgccgcgcuauuugcccg

SEQ ID NO: 2363783 - RNA, 19 nt, Artificial Sequence
  Description of Artificial Sequence: Synthetic oligonucleotide
cuauuugcccgagcacugc

SEQ ID NO: 2363784 - RNA, 19 nt, Artificial Sequence
  Description of Artificial Sequence: Synthetic oligonucleotide
agcgcagcgaggaucacga

SEQ ID NO: 2363785 - RNA, 19 nt, Artificial Sequence
  Description of Artificial Sequence: Synthetic oligonucleotide
gaccgagccucggaaacgc

SEQ ID NO: 2363786 - RNA, 19 nt, Artificial Sequence
  Description of Artificial Sequence: Synthetic oligonucleotide
caccauacuaggguuugug

SEQ ID NO: 2363787 - RNA, 19 nt, Artificial Sequence
  Description of Artificial Sequence: Synthetic oligonucleotide
aaguggccuggggcaaccc

SEQ ID NO: 2363788 - RNA, 19 nt, Artificial Sequence
  Description of Artificial Sequence: Synthetic oligonucleotide
aguucaucgugcaccagau

SEQ ID NO: 2363789 - RNA, 19 nt, Artificial Sequence
  Description of Artificial Sequence: Synthetic oligonucleotide
guuuguggggcgcccgaug

SEQ ID NO: 2363790 - RNA, 19 nt, Artificial Sequence
  Description of Artificial Sequence: Synthetic oligonucleotide
gaucuacccaucuggugcu

SEQ ID NO: 2363791 - RNA, 19 nt, Artificial Sequence
  Description of Artificial Sequence: Synthetic oligonucleotide
augccuacccguagccucg

SEQ ID NO: 2363792 - RNA, 19 nt, Artificial Sequence
  Description of Artificial Sequence: Synthetic oligonucleotide
uuguggggcgcccgaugcc

SEQ ID NO: 2363793 - RNA, 19 nt, Artificial Sequence
  Description of Artificial Sequence: Synthetic oligonucleotide
cagucgccgcgcuauuugc

SEQ ID NO: 2363794 - RNA, 19 nt, Artificial Sequence
  Description of Artificial Sequence: Synthetic oligonucleotide
agcucuccgccacucccag

SEQ ID NO: 2363795 - RNA, 19 nt, Artificial Sequence
  Description of Artificial Sequence: Synthetic oligonucleotide
uuugcagcuugggccacac

SEQ ID NO: 2363796 - RNA, 19 nt, Artificial Sequence
  Description of Artificial Sequence: Synthetic oligonucleotide
acacugcgcccguugacgu

SEQ ID NO: 2363797 - RNA, 19 nt, Artificial Sequence
  Description of Artificial Sequence: Synthetic oligonucleotide
cacggagaccaagccaccg

SEQ ID NO: 2363798 - RNA, 19 nt, Artificial Sequence
  Description of Artificial Sequence: Synthetic oligonucleotide
ugccaggcauuccaugguu

SEQ ID NO: 2363799 - RNA, 19 nt, Artificial Sequence
  Description of Artificial Sequence: Synthetic oligonucleotide
ccuaaaccuuuucuauacc

SEQ ID NO: 2363800 - RNA, 19 nt, Artificial Sequence
  Description of Artificial Sequence: Synthetic oligonucleotide
uggggcaacccagaaguua

SEQ ID NO: 2363801 - RNA, 19 nt, Artificial Sequence
  Description of Artificial Sequence: Synthetic oligonucleotide
gugcaccagauagaucucc

SEQ ID NO: 2363802 - RNA, 19 nt, Artificial Sequence
  Description of Artificial Sequence: Synthetic oligonucleotide
aggucgguggccugaucca

SEQ ID NO: 2363803 - RNA, 19 nt, Artificial Sequence
  Description of Artificial Sequence: Synthetic oligonucleotide
ccguaaguagcgcacggag

SEQ ID NO: 2363804 - RNA, 19 nt, Artificial Sequence
  Description of Artificial Sequence: Synthetic oligonucleotide
cacggaugugguccagaag

SEQ ID NO: 2363805 - RNA, 19 nt, Artificial Sequence
  Description of Artificial Sequence: Synthetic oligonucleotide
ugaggcgucguggccggag

SEQ ID NO: 2363806 - RNA, 19 nt, Artificial Sequence
  Description of Artificial Sequence: Synthetic oligonucleotide
accgcagaaauagacuguu

SEQ ID NO: 2363807 - RNA, 19 nt, Artificial Sequence
  Description of Artificial Sequence: Synthetic oligonucleotide
accggcaggcagucaaaca

SEQ ID NO: 2363808 - RNA, 19 nt, Artificial Sequence
  Description of Artificial Sequence: Synthetic oligonucleotide
gacaguagcuccugcuccu

SEQ ID NO: 2363809 - RNA, 19 nt, Artificial Sequence
  Description of Artificial Sequence: Synthetic oligonucleotide
ccagauagaucuccuccgc

SEQ ID NO: 2363810 - RNA, 19 nt, Artificial Sequence
  Description of Artificial Sequence: Synthetic oligonucleotide
gccucaaggcccaacuccg

SEQ ID NO: 2363811 - RNA, 19 nt, Artificial Sequence
  Description of Artificial Sequence: Synthetic oligonucleotide
ucuacccaucuggugcuac

SEQ ID NO: 2363812 - RNA, 19 nt, Artificial Sequence
  Description of Artificial Sequence: Synthetic oligonucleotide
auggugguuccuggcuucg

SEQ ID NO: 2363813 - RNA, 19 nt, Artificial Sequence
  Description of Artificial Sequence: Synthetic oligonucleotide
cacgagcccagcucuccgc

SEQ ID NO: 2363814 - RNA, 19 nt, Artificial Sequence
  Description of Artificial Sequence: Synthetic oligonucleotide
guugacguucaugaggcgu

SEQ ID NO: 2363815 - RNA, 19 nt, Artificial Sequence
  Description of Artificial Sequence: Synthetic oligonucleotide
cuaggguuuguggggcgcc

SEQ ID NO: 2363816 - RNA, 19 nt, Artificial Sequence
  Description of Artificial Sequence: Synthetic oligonucleotide
ccgcagucagcccaaacag

SEQ ID NO: 2363817 - RNA, 19 nt, Artificial Sequence
  Description of Artificial Sequence: Synthetic oligonucleotide
cagauagaucuccuccgca

SEQ ID NO: 2363818 - RNA, 19 nt, Artificial Sequence
  Description of Artificial Sequence: Synthetic oligonucleotide
gaggcgucguggccggagc

SEQ ID NO: 2363819 - RNA, 19 nt, Artificial Sequence
  Description of Artificial Sequence: Synthetic oligonucleotide
guagcgcacggagaccaag

SEQ ID NO: 2363820 - RNA, 19 nt, Artificial Sequence
  Description of Artificial Sequence: Synthetic oligonucleotide
cccagaaguuaaauaaaca

SEQ ID NO: 2363821 - RNA, 19 nt, Artificial Sequence
  Description of Artificial Sequence: Synthetic oligonucleotide
cucggcauugcacuggagu

SEQ ID NO: 2363822 - RNA, 19 nt, Artificial Sequence
  Description of Artificial Sequence: Synthetic oligonucleotide
agccucggcauugcacugg

SEQ ID NO: 2363823 - RNA, 19 nt, Artificial Sequence
  Description of Artificial Sequence: Synthetic oligonucleotide
agcuugggccacacugcgc

SEQ ID NO: 2363824 - RNA, 19 nt, Artificial Sequence
  Description of Artificial Sequence: Synthetic oligonucleotide
acuccguuguggccccuug

SEQ ID NO: 2363825 - RNA, 19 nt, Artificial Sequence
  Description of Artificial Sequence: Synthetic oligonucleotide
aggaacggacuccguugug

SEQ ID NO: 2363826 - RNA, 19 nt, Artificial Sequence
  Description of Artificial Sequence: Synthetic oligonucleotide
cuugggccacacugcgccc

SEQ ID NO: 2363827 - RNA, 19 nt, Artificial Sequence
  Description of Artificial Sequence: Synthetic oligonucleotide
gucgggcaccauacuaggg

SEQ ID NO: 2363828 - RNA, 19 nt, Artificial Sequence
  Description of Artificial Sequence: Synthetic oligonucleotide
ucugggcuucagggcaccg

SEQ ID NO: 2363829 - RNA, 19 nt, Artificial Sequence
  Description of Artificial Sequence: Synthetic oligonucleotide
agacuguucuggccacagu

SEQ ID NO: 2363830 - RNA, 19 nt, Artificial Sequence
  Description of Artificial Sequence: Synthetic oligonucleotide
cacuggaguucagacagca

SEQ ID NO: 2363831 - RNA, 19 nt, Artificial Sequence
  Description of Artificial Sequence: Synthetic oligonucleotide
cuugcagaucuacccaucu

SEQ ID NO: 2363832 - RNA, 19 nt, Artificial Sequence
  Description of Artificial Sequence: Synthetic oligonucleotide
agcgaggaucacgagccca

SEQ ID NO: 2363833 - RNA, 19 nt, Artificial Sequence
  Description of Artificial Sequence: Synthetic oligonucleotide
cuccgccacucccagucgc

SEQ ID NO: 2363834 - RNA, 19 nt, Artificial Sequence
  Description of Artificial Sequence: Synthetic oligonucleotide
uucgagcacggaugugguc

SEQ ID NO: 2363835 - RNA, 19 nt, Artificial Sequence
  Description of Artificial Sequence: Synthetic oligonucleotide
cuccguuguggccccuugc

SEQ ID NO: 2363836 - RNA, 19 nt, Artificial Sequence
  Description of Artificial Sequence: Synthetic oligonucleotide
cuuucccaggggcuuguca

SEQ ID NO: 2363837 - RNA, 19 nt, Artificial Sequence
  Description of Artificial Sequence: Synthetic oligonucleotide
uaggguuuguggggcgccc

SEQ ID NO: 2363838 - RNA, 19 nt, Artificial Sequence
  Description of Artificial Sequence: Synthetic oligonucleotide
ucccaggggcuugucaagu

SEQ ID NO: 2363839 - RNA, 19 nt, Artificial Sequence
  Description of Artificial Sequence: Synthetic oligonucleotide
aggguuuguggggcgcccg

SEQ ID NO: 2363840 - RNA, 19 nt, Artificial Sequence
  Description of Artificial Sequence: Synthetic oligonucleotide
gcuauuugcccgagcacug

SEQ ID NO: 2363841 - RNA, 19 nt, Artificial Sequence
  Description of Artificial Sequence: Synthetic oligonucleotide
cagcgcagcgaggaucacg

SEQ ID NO: 2363842 - RNA, 19 nt, Artificial Sequence
  Description of Artificial Sequence: Synthetic oligonucleotide
auauguccacuggagucau

SEQ ID NO: 2363843 - RNA, 19 nt, Artificial Sequence
  Description of Artificial Sequence: Synthetic oligonucleotide
cauugcacuggaguucaga

SEQ ID NO: 2363844 - RNA, 19 nt, Artificial Sequence
  Description of Artificial Sequence: Synthetic oligonucleotide
accguaaguagcgcacgga

SEQ ID NO: 2363845 - RNA, 19 nt, Artificial Sequence
  Description of Artificial Sequence: Synthetic oligonucleotide
gagccucggaaacgcgcug

SEQ ID NO: 2363846 - RNA, 19 nt, Artificial Sequence
  Description of Artificial Sequence: Synthetic oligonucleotide
ggcaccauacuaggguuug

SEQ ID NO: 2363847 - RNA, 19 nt, Artificial Sequence
  Description of Artificial Sequence: Synthetic oligonucleotide
auuugcccgagcacugcca

SEQ ID NO: 2363848 - RNA, 19 nt, Artificial Sequence
  Description of Artificial Sequence: Synthetic oligonucleotide
uccuccgcagucagcccaa

SEQ ID NO: 2363849 - RNA, 19 nt, Artificial Sequence
  Description of Artificial Sequence: Synthetic oligonucleotide
ugcaaguggccuggggcaa

SEQ ID NO: 2363850 - RNA, 19 nt, Artificial Sequence
  Description of Artificial Sequence: Synthetic oligonucleotide
aucgugcaccagauagauc

SEQ ID NO: 2363851 - RNA, 19 nt, Artificial Sequence
  Description of Artificial Sequence: Synthetic oligonucleotide
ccuuccuaaaccuuuucua

SEQ ID NO: 2363852 - RNA, 19 nt, Artificial Sequence
  Description of Artificial Sequence: Synthetic oligonucleotide
caaguggccuggggcaacc

SEQ ID NO: 2363853 - RNA, 19 nt, Artificial Sequence
  Description of Artificial Sequence: Synthetic oligonucleotide
gaggaucacgagcccagcu

SEQ ID NO: 2363854 - RNA, 19 nt, Artificial Sequence
  Description of Artificial Sequence: Synthetic oligonucleotide
acccguagccucggcauug

SEQ ID NO: 2363855 - RNA, 19 nt, Artificial Sequence
  Description of Artificial Sequence: Synthetic oligonucleotide
uugcccgagcacugccaug

SEQ ID NO: 2363856 - RNA, 19 nt, Artificial Sequence
  Description of Artificial Sequence: Synthetic oligonucleotide
gccacucccagucgccgcg

SEQ ID NO: 2363857 - RNA, 19 nt, Artificial Sequence
  Description of Artificial Sequence: Synthetic oligonucleotide
auagacuguucuggccaca

SEQ ID NO: 2363858 - RNA, 19 nt, Artificial Sequence
  Description of Artificial Sequence: Synthetic oligonucleotide
ggaaacgcgcugccucaag

SEQ ID NO: 2363859 - RNA, 19 nt, Artificial Sequence
  Description of Artificial Sequence: Synthetic oligonucleotide
ugccgugugccaggcauuc

SEQ ID NO: 2363860 - RNA, 19 nt, Artificial Sequence
  Description of Artificial Sequence: Synthetic oligonucleotide
ggaccgagccucggaaacg

SEQ ID NO: 2363861 - RNA, 19 nt, Artificial Sequence
  Description of Artificial Sequence: Synthetic oligonucleotide
cugccucaaggcccaacuc

SEQ ID NO: 2363862 - RNA, 19 nt, Artificial Sequence
  Description of Artificial Sequence: Synthetic oligonucleotide
ccaugguuccccaggccag

SEQ ID NO: 2363863 - RNA, 19 nt, Artificial Sequence
  Description of Artificial Sequence: Synthetic oligonucleotide
ggagcaguaccagcugggc

SEQ ID NO: 2363864 - RNA, 19 nt, Artificial Sequence
  Description of Artificial Sequence: Synthetic oligonucleotide
guggccggagcaguaccag

SEQ ID NO: 2363865 - RNA, 19 nt, Artificial Sequence
  Description of Artificial Sequence: Synthetic oligonucleotide
agaaguagcccaggacaua

SEQ ID NO: 2363866 - RNA, 19 nt, Artificial Sequence
  Description of Artificial Sequence: Synthetic oligonucleotide
aagccaccgcagaaauaga

SEQ ID NO: 2363867 - RNA, 19 nt, Artificial Sequence
  Description of Artificial Sequence: Synthetic oligonucleotide
uaggcccgauggugguucc

SEQ ID NO: 2363868 - RNA, 19 nt, Artificial Sequence
  Description of Artificial Sequence: Synthetic oligonucleotide
uacccguagccucggcauu

SEQ ID NO: 2363869 - RNA, 19 nt, Artificial Sequence
  Description of Artificial Sequence: Synthetic oligonucleotide
ggaucacgagcccagcucu

SEQ ID NO: 2363870 - RNA, 19 nt, Artificial Sequence
  Description of Artificial Sequence: Synthetic oligonucleotide
ccgagccucggaaacgcgc

SEQ ID NO: 2363871 - RNA, 19 nt, Artificial Sequence
  Description of Artificial Sequence: Synthetic oligonucleotide
ugccuacccguagccucgg

SEQ ID NO: 2363872 - RNA, 19 nt, Artificial Sequence
  Description of Artificial Sequence: Synthetic oligonucleotide
uucagggcaccggcaggca

SEQ ID NO: 2363873 - RNA, 19 nt, Artificial Sequence
  Description of Artificial Sequence: Synthetic oligonucleotide
uauguccacuggagucaua

SEQ ID NO: 2363874 - RNA, 19 nt, Artificial Sequence
  Description of Artificial Sequence: Synthetic oligonucleotide
gaucacgagcccagcucuc

SEQ ID NO: 2363875 - RNA, 19 nt, Artificial Sequence
  Description of Artificial Sequence: Synthetic oligonucleotide
gcgaggaucacgagcccag

SEQ ID NO: 2363876 - RNA, 19 nt, Artificial Sequence
  Description of Artificial Sequence: Synthetic oligonucleotide
caaguucaucgugcaccag

SEQ ID NO: 2363877 - RNA, 19 nt, Artificial Sequence
  Description of Artificial Sequence: Synthetic oligonucleotide
cgcagcgaggaucacgagc

SEQ ID NO: 2363878 - RNA, 19 nt, Artificial Sequence
  Description of Artificial Sequence: Synthetic oligonucleotide
augcccacgcugugccgug

SEQ ID NO: 2363879 - RNA, 19 nt, Artificial Sequence
  Description of Artificial Sequence: Synthetic oligonucleotide
agcacggaugugguccaga

SEQ ID NO: 2363880 - RNA, 19 nt, Artificial Sequence
  Description of Artificial Sequence: Synthetic oligonucleotide
acgcugugccgugugccag

SEQ ID NO: 2363881 - RNA, 19 nt, Artificial Sequence
  Description of Artificial Sequence: Synthetic oligonucleotide
cacgcugugccgugugcca

SEQ ID NO: 2363882 - RNA, 19 nt, Artificial Sequence
  Description of Artificial Sequence: Synthetic oligonucleotide
ggggcaacccagaaguuaa

SEQ ID NO: 2363883 - RNA, 19 nt, Artificial Sequence
  Description of Artificial Sequence: Synthetic oligonucleotide
guccgcagcgcagcgagga

SEQ ID NO: 2363884 - RNA, 19 nt, Artificial Sequence
  Description of Artificial Sequence: Synthetic oligonucleotide
cuacccguagccucggcau

SEQ ID NO: 2363885 - RNA, 19 nt, Artificial Sequence
  Description of Artificial Sequence: Synthetic oligonucleotide
aggcgucguggccggagca

SEQ ID NO: 2363886 - RNA, 19 nt, Artificial Sequence
  Description of Artificial Sequence: Synthetic oligonucleotide
gcaaaugcaggaacggacu

SEQ ID NO: 2363887 - RNA, 19 nt, Artificial Sequence
  Description of Artificial Sequence: Synthetic oligonucleotide
ccgaugccuacccguagcc

SEQ ID NO: 2363888 - RNA, 19 nt, Artificial Sequence
  Description of Artificial Sequence: Synthetic oligonucleotide
cccgaugccuacccguagc

SEQ ID NO: 2363889 - RNA, 19 nt, Artificial Sequence
  Description of Artificial Sequence: Synthetic oligonucleotide
cguagccucggcauugcac

SEQ ID NO: 2363890 - RNA, 19 nt, Artificial Sequence
  Description of Artificial Sequence: Synthetic oligonucleotide
caccagccaccgcuucccg

SEQ ID NO: 2363891 - RNA, 19 nt, Artificial Sequence
  Description of Artificial Sequence: Synthetic oligonucleotide
ccagucgccgcgcuauuug

SEQ ID NO: 2363892 - RNA, 19 nt, Artificial Sequence
  Description of Artificial Sequence: Synthetic oligonucleotide
ccgagcacugccaugccca

SEQ ID NO: 2363893 - RNA, 19 nt, Artificial Sequence
  Description of Artificial Sequence: Synthetic oligonucleotide
gcaccagauagaucuccuc

SEQ ID NO: 2363894 - RNA, 19 nt, Artificial Sequence
  Description of Artificial Sequence: Synthetic oligonucleotide
ccggcaggcagucaaacaa

SEQ ID NO: 2363895 - RNA, 19 nt, Artificial Sequence
  Description of Artificial Sequence: Synthetic oligonucleotide
cggagcaguaccagcuggg

SEQ ID NO: 2363896 - RNA, 19 nt, Artificial Sequence
  Description of Artificial Sequence: Synthetic oligonucleotide
uccgcagcgcagcgaggau

SEQ ID NO: 2363897 - RNA, 19 nt, Artificial Sequence
  Description of Artificial Sequence: Synthetic oligonucleotide
gcauuccaugguuccccag

SEQ ID NO: 2363898 - RNA, 19 nt, Artificial Sequence
  Description of Artificial Sequence: Synthetic oligonucleotide
caccggcaggcagucaaac

SEQ ID NO: 2363899 - RNA, 19 nt, Artificial Sequence
  Description of Artificial Sequence: Synthetic oligonucleotide
caucgugcaccagauagau

SEQ ID NO: 2363900 - RNA, 19 nt, Artificial Sequence
  Description of Artificial Sequence: Synthetic oligonucleotide
gucgguggccugauccaac

SEQ ID NO: 2363901 - RNA, 19 nt, Artificial Sequence
  Description of Artificial Sequence: Synthetic oligonucleotide
cccgauggugguuccuggc

SEQ ID NO: 2363902 - RNA, 19 nt, Artificial Sequence
  Description of Artificial Sequence: Synthetic oligonucleotide
acuggaguucagacagcaa

SEQ ID NO: 2363903 - RNA, 19 nt, Artificial Sequence
  Description of Artificial Sequence: Synthetic oligonucleotide
cagccaccgcuucccgggg

SEQ ID NO: 2363904 - RNA, 19 nt, Artificial Sequence
  Description of Artificial Sequence: Synthetic oligonucleotide
gucguggccggagcaguac

SEQ ID NO: 2363905 - RNA, 19 nt, Artificial Sequence
  Description of Artificial Sequence: Synthetic oligonucleotide
uuguggccccuugcacugc

SEQ ID NO: 2363906 - RNA, 19 nt, Artificial Sequence
  Description of Artificial Sequence: Synthetic oligonucleotide
ggcuugucaaguucaucgu

SEQ ID NO: 2363907 - RNA, 19 nt, Artificial Sequence
  Description of Artificial Sequence: Synthetic oligonucleotide
ggcauuccaugguucccca

SEQ ID NO: 2363908 - RNA, 19 nt, Artificial Sequence
  Description of Artificial Sequence: Synthetic oligonucleotide
caagcggggccagggcgag

SEQ ID NO: 2363909 - RNA, 19 nt, Artificial Sequence
  Description of Artificial Sequence: Synthetic oligonucleotide
guucaucgugcaccagaua

SEQ ID NO: 2363910 - RNA, 19 nt, Artificial Sequence
  Description of Artificial Sequence: Synthetic oligonucleotide
ccaggacauagucgggcac

SEQ ID NO: 2363911 - RNA, 19 nt, Artificial Sequence
  Description of Artificial Sequence: Synthetic oligonucleotide
caggaacggacuccguugu

SEQ ID NO: 2363912 - RNA, 19 nt, Artificial Sequence
  Description of Artificial Sequence: Synthetic oligonucleotide
cguaaguagcgcacggaga

SEQ ID NO: 2363913 - RNA, 19 nt, Artificial Sequence
  Description of Artificial Sequence: Synthetic oligonucleotide
gcccguugacguucaugag

SEQ ID NO: 2363914 - RNA, 19 nt, Artificial Sequence
  Description of Artificial Sequence: Synthetic oligonucleotide
gccucggaaacgcgcugcc

SEQ ID NO: 2363915 - RNA, 19 nt, Artificial Sequence
  Description of Artificial Sequence: Synthetic oligonucleotide
gagcacggaugugguccag

SEQ ID NO: 2363916 - RNA, 19 nt, Artificial Sequence
  Description of Artificial Sequence: Synthetic oligonucleotide
cgcgcuauuugcccgagca

SEQ ID NO: 2363917 - RNA, 19 nt, Artificial Sequence
  Description of Artificial Sequence: Synthetic oligonucleotide
gcgcuauuugcccgagcac

SEQ ID NO: 2363918 - RNA, 19 nt, Artificial Sequence
  Description of Artificial Sequence: Synthetic oligonucleotide
cggcaggcagucaaacaag

SEQ ID NO: 2363919 - RNA, 19 nt, Artificial Sequence
  Description of Artificial Sequence: Synthetic oligonucleotide
cauagucgggcaccauacu

SEQ ID NO: 2363920 - RNA, 19 nt, Artificial Sequence
  Description of Artificial Sequence: Synthetic oligonucleotide
gcagucaaacaaguagaua

SEQ ID NO: 2363921 - RNA, 19 nt, Artificial Sequence
  Description of Artificial Sequence: Synthetic oligonucleotide
ggcgcccgaugccuacccg

SEQ ID NO: 2363922 - RNA, 19 nt, Artificial Sequence
  Description of Artificial Sequence: Synthetic oligonucleotide
cccgagcacugccaugccc

SEQ ID NO: 2363923 - RNA, 19 nt, Artificial Sequence
  Description of Artificial Sequence: Synthetic oligonucleotide
ggcccgauggugguuccug

SEQ ID NO: 2363924 - RNA, 19 nt, Artificial Sequence
  Description of Artificial Sequence: Synthetic oligonucleotide
gcgcacggagaccaagcca

SEQ ID NO: 2363925 - RNA, 19 nt, Artificial Sequence
  Description of Artificial Sequence: Synthetic oligonucleotide
caguuguguggcugugucu

SEQ ID NO: 2363926 - RNA, 19 nt, Artificial Sequence
  Description of Artificial Sequence: Synthetic oligonucleotide
ggcgucguggccggagcag

SEQ ID NO: 2363927 - RNA, 19 nt, Artificial Sequence
  Description of Artificial Sequence: Synthetic oligonucleotide
ccacgcugugccgugugcc

SEQ ID NO: 2363928 - RNA, 19 nt, Artificial Sequence
  Description of Artificial Sequence: Synthetic oligonucleotide
acucccagucgccgcgcua

SEQ ID NO: 2363929 - RNA, 19 nt, Artificial Sequence
  Description of Artificial Sequence: Synthetic oligonucleotide
ccgugugccaggcauucca

SEQ ID NO: 2363930 - RNA, 19 nt, Artificial Sequence
  Description of Artificial Sequence: Synthetic oligonucleotide
aggggcuugucaaguucau

SEQ ID NO: 2363931 - RNA, 19 nt, Artificial Sequence
  Description of Artificial Sequence: Synthetic oligonucleotide
gcccgaugccuacccguag

SEQ ID NO: 2363932 - RNA, 19 nt, Artificial Sequence
  Description of Artificial Sequence: Synthetic oligonucleotide
ccguuguggccccuugcac

SEQ ID NO: 2363933 - RNA, 19 nt, Artificial Sequence
  Description of Artificial Sequence: Synthetic oligonucleotide
ccgcagaaauagacuguuc

SEQ ID NO: 2363934 - RNA, 19 nt, Artificial Sequence
  Description of Artificial Sequence: Synthetic oligonucleotide
cauccccaagcggggccag

SEQ ID NO: 2363935 - RNA, 19 nt, Artificial Sequence
  Description of Artificial Sequence: Synthetic oligonucleotide
gagguccgcagcgcagcga

SEQ ID NO: 2363936 - RNA, 19 nt, Artificial Sequence
  Description of Artificial Sequence: Synthetic oligonucleotide
ggcagucaaacaaguagau

SEQ ID NO: 2363937 - RNA, 19 nt, Artificial Sequence
  Description of Artificial Sequence: Synthetic oligonucleotide
ccuacccguagccucggca

SEQ ID NO: 2363938 - RNA, 19 nt, Artificial Sequence
  Description of Artificial Sequence: Synthetic oligonucleotide
gcgagguccgcagcgcagc

SEQ ID NO: 2363939 - RNA, 19 nt, Artificial Sequence
  Description of Artificial Sequence: Synthetic oligonucleotide
cuuugcagcuugggccaca

SEQ ID NO: 2363940 - RNA, 19 nt, Artificial Sequence
  Description of Artificial Sequence: Synthetic oligonucleotide
gccacacugcgcccguuga

SEQ ID NO: 2363941 - RNA, 19 nt, Artificial Sequence
  Description of Artificial Sequence: Synthetic oligonucleotide
cguugacguucaugaggcg

SEQ ID NO: 2363942 - RNA, 19 nt, Artificial Sequence
  Description of Artificial Sequence: Synthetic oligonucleotide
caugcccacgcugugccgu

SEQ ID NO: 2363943 - RNA, 19 nt, Artificial Sequence
  Description of Artificial Sequence: Synthetic oligonucleotide
gccaggcauuccaugguuc

SEQ ID NO: 2363944 - RNA, 19 nt, Artificial Sequence
  Description of Artificial Sequence: Synthetic oligonucleotide
ucccagucgccgcgcuauu

SEQ ID NO: 2363945 - RNA, 19 nt, Artificial Sequence
  Description of Artificial Sequence: Synthetic oligonucleotide
gcagaucuacccaucuggu

SEQ ID NO: 2363946 - RNA, 19 nt, Artificial Sequence
  Description of Artificial Sequence: Synthetic oligonucleotide
ggcaggcagucaaacaagu

SEQ ID NO: 2363947 - RNA, 19 nt, Artificial Sequence
  Description of Artificial Sequence: Synthetic oligonucleotide
gggcgcccgaugccuaccc

SEQ ID NO: 2363948 - RNA, 19 nt, Artificial Sequence
  Description of Artificial Sequence: Synthetic oligonucleotide
aguagcgcacggagaccaa

SEQ ID NO: 2363949 - RNA, 19 nt, Artificial Sequence
  Description of Artificial Sequence: Synthetic oligonucleotide
ggguuuguggggcgcccga

SEQ ID NO: 2363950 - RNA, 19 nt, Artificial Sequence
  Description of Artificial Sequence: Synthetic oligonucleotide
ccaagcggggccagggcga

SEQ ID NO: 2363951 - RNA, 19 nt, Artificial Sequence
  Description of Artificial Sequence: Synthetic oligonucleotide
gcugugccgugugccaggc

SEQ ID NO: 2363952 - RNA, 19 nt, Artificial Sequence
  Description of Artificial Sequence: Synthetic oligonucleotide
ggggcuugucaaguucauc

SEQ ID NO: 2363953 - RNA, 19 nt, Artificial Sequence
  Description of Artificial Sequence: Synthetic oligonucleotide
gccaccgcagaaauagacu

SEQ ID NO: 2363954 - RNA, 19 nt, Artificial Sequence
  Description of Artificial Sequence: Synthetic oligonucleotide
ccuuuucuauaccguaagu

SEQ ID NO: 2363955 - RNA, 19 nt, Artificial Sequence
  Description of Artificial Sequence: Synthetic oligonucleotide
uccuggcuucgagcacgga

SEQ ID NO: 2363956 - RNA, 19 nt, Artificial Sequence
  Description of Artificial Sequence: Synthetic oligonucleotide
ggcaacccagaaguuaaau

SEQ ID NO: 2363957 - RNA, 19 nt, Artificial Sequence
  Description of Artificial Sequence: Synthetic oligonucleotide
cccacgcugugccgugugc

SEQ ID NO: 2363958 - RNA, 19 nt, Artificial Sequence
  Description of Artificial Sequence: Synthetic oligonucleotide
gacguucaugaggcgucgu

SEQ ID NO: 2363959 - RNA, 19 nt, Artificial Sequence
  Description of Artificial Sequence: Synthetic oligonucleotide
gcacggagaccaagccacc

SEQ ID NO: 2363960 - RNA, 19 nt, Artificial Sequence
  Description of Artificial Sequence: Synthetic oligonucleotide
cgugcaccagauagaucuc

SEQ ID NO: 2363961 - RNA, 19 nt, Artificial Sequence
  Description of Artificial Sequence: Synthetic oligonucleotide
augcaggaacggacuccgu

SEQ ID NO: 2363962 - RNA, 19 nt, Artificial Sequence
  Description of Artificial Sequence: Synthetic oligonucleotide
gcgcccguugacguucaug

SEQ ID NO: 2363963 - RNA, 19 nt, Artificial Sequence
  Description of Artificial Sequence: Synthetic oligonucleotide
cgagguccgcagcgcagcg

SEQ ID NO: 2363964 - RNA, 19 nt, Artificial Sequence
  Description of Artificial Sequence: Synthetic oligonucleotide
cagccuuccuaaaccuuuu

SEQ ID NO: 2363965 - RNA, 19 nt, Artificial Sequence
  Description of Artificial Sequence: Synthetic oligonucleotide
gggcgagguccgcagcgca

SEQ ID NO: 2363966 - RNA, 19 nt, Artificial Sequence
  Description of Artificial Sequence: Synthetic oligonucleotide
cggagaccaagccaccgca

SEQ ID NO: 2363967 - RNA, 19 nt, Artificial Sequence
  Description of Artificial Sequence: Synthetic oligonucleotide
aggcccgauggugguuccu

SEQ ID NO: 2363968 - RNA, 19 nt, Artificial Sequence
  Description of Artificial Sequence: Synthetic oligonucleotide
ugcgcccguugacguucau

SEQ ID NO: 2363969 - RNA, 19 nt, Artificial Sequence
  Description of Artificial Sequence: Synthetic oligonucleotide
cguuguggccccuugcacu

SEQ ID NO: 2363970 - RNA, 19 nt, Artificial Sequence
  Description of Artificial Sequence: Synthetic oligonucleotide
ggcuucgagcacggaugug

SEQ ID NO: 2363971 - RNA, 19 nt, Artificial Sequence
  Description of Artificial Sequence: Synthetic oligonucleotide
ggucgguggccugauccaa

SEQ ID NO: 2363972 - RNA, 19 nt, Artificial Sequence
  Description of Artificial Sequence: Synthetic oligonucleotide
auccaacaauggggacagu

SEQ ID NO: 2363973 - RNA, 19 nt, Artificial Sequence
  Description of Artificial Sequence: Synthetic oligonucleotide
cugcgcccguugacguuca

SEQ ID NO: 2363974 - RNA, 19 nt, Artificial Sequence
  Description of Artificial Sequence: Synthetic oligonucleotide
cccaaacagcuuugcagcu

SEQ ID NO: 2363975 - RNA, 19 nt, Artificial Sequence
  Description of Artificial Sequence: Synthetic oligonucleotide
cucccagucgccgcgcuau

SEQ ID NO: 2363976 - RNA, 19 nt, Artificial Sequence
  Description of Artificial Sequence: Synthetic oligonucleotide
ccgccacucccagucgccg

SEQ ID NO: 2363977 - RNA, 19 nt, Artificial Sequence
  Description of Artificial Sequence: Synthetic oligonucleotide
ccccaagcggggccagggc

SEQ ID NO: 2363978 - RNA, 19 nt, Artificial Sequence
  Description of Artificial Sequence: Synthetic oligonucleotide
ccucggcauugcacuggag

SEQ ID NO: 2363979 - RNA, 19 nt, Artificial Sequence
  Description of Artificial Sequence: Synthetic oligonucleotide
gcgcagcgaggaucacgag

SEQ ID NO: 2363980 - RNA, 19 nt, Artificial Sequence
  Description of Artificial Sequence: Synthetic oligonucleotide
cgcuauuugcccgagcacu

SEQ ID NO: 2363981 - RNA, 19 nt, Artificial Sequence
  Description of Artificial Sequence: Synthetic oligonucleotide
cccguagccucggcauugc

SEQ ID NO: 2363982 - RNA, 19 nt, Artificial Sequence
  Description of Artificial Sequence: Synthetic oligonucleotide
gcuuugcagcuugggccac

SEQ ID NO: 2363983 - RNA, 19 nt, Artificial Sequence
  Description of Artificial Sequence: Synthetic oligonucleotide
gcccgagcacugccaugcc

SEQ ID NO: 2363984 - RNA, 19 nt, Artificial Sequence
  Description of Artificial Sequence: Synthetic oligonucleotide
cgaggaucacgagcccagc

SEQ ID NO: 2363985 - RNA, 19 nt, Artificial Sequence
  Description of Artificial Sequence: Synthetic oligonucleotide
ccgcagcgcagcgaggauc

SEQ ID NO: 2363986 - RNA, 19 nt, Artificial Sequence
  Description of Artificial Sequence: Synthetic oligonucleotide
cguggccggagcaguacca

SEQ ID NO: 2363987 - RNA, 19 nt, Artificial Sequence
  Description of Artificial Sequence: Synthetic oligonucleotide
gccuacccguagccucggc

SEQ ID NO: 2363988 - RNA, 19 nt, Artificial Sequence
  Description of Artificial Sequence: Synthetic oligonucleotide
gccgcgcuauuugcccgag

SEQ ID NO: 2363989 - RNA, 19 nt, Artificial Sequence
  Description of Artificial Sequence: Synthetic oligonucleotide
gcgcccgaugccuacccgu

SEQ ID NO: 2363990 - RNA, 19 nt, Artificial Sequence
  Description of Artificial Sequence: Synthetic oligonucleotide
ccaagccaccgcagaaaua

SEQ ID NO: 2363991 - RNA, 19 nt, Artificial Sequence
  Description of Artificial Sequence: Synthetic oligonucleotide
gggcaacccagaaguuaaa

SEQ ID NO: 2363992 - RNA, 19 nt, Artificial Sequence
  Description of Artificial Sequence: Synthetic oligonucleotide
cuggggcaacccagaaguu

SEQ ID NO: 2363993 - RNA, 19 nt, Artificial Sequence
  Description of Artificial Sequence: Synthetic oligonucleotide
augaggcgucguggccgga

SEQ ID NO: 2363994 - RNA, 19 nt, Artificial Sequence
  Description of Artificial Sequence: Synthetic oligonucleotide
gcaggucgguggccugauc

SEQ ID NO: 2363995 - RNA, 19 nt, Artificial Sequence
  Description of Artificial Sequence: Synthetic oligonucleotide
cgagccucggaaacgcgcu

SEQ ID NO: 2363996 - RNA, 19 nt, Artificial Sequence
  Description of Artificial Sequence: Synthetic oligonucleotide
ccgcgcuauuugcccgagc

SEQ ID NO: 2363997 - RNA, 19 nt, Artificial Sequence
  Description of Artificial Sequence: Synthetic oligonucleotide
gacuccguuguggccccuu

SEQ ID NO: 2363998 - RNA, 19 nt, Artificial Sequence
  Description of Artificial Sequence: Synthetic oligonucleotide
cacucccagucgccgcgcu

SEQ ID NO: 2363999 - RNA, 19 nt, Artificial Sequence
  Description of Artificial Sequence: Synthetic oligonucleotide
gguuuguggggcgcccgau

SEQ ID NO: 2364000 - RNA, 19 nt, Artificial Sequence
  Description of Artificial Sequence: Synthetic oligonucleotide
gcaccggcaggcagucaaa

SEQ ID NO: 2364001 - RNA, 19 nt, Artificial Sequence
  Description of Artificial Sequence: Synthetic oligonucleotide
gcaccauacuaggguuugu

SEQ ID NO: 2364002 - RNA, 19 nt, Artificial Sequence
  Description of Artificial Sequence: Synthetic oligonucleotide
gugccgugugccaggcauu

SEQ ID NO: 2364003 - RNA, 19 nt, Artificial Sequence
  Description of Artificial Sequence: Synthetic oligonucleotide
gcgucguggccggagcagu

SEQ ID NO: 2364004 - RNA, 19 nt, Artificial Sequence
  Description of Artificial Sequence: Synthetic oligonucleotide
cgccgcgcuauuugcccga

SEQ ID NO: 2364005 - RNA, 19 nt, Artificial Sequence
  Description of Artificial Sequence: Synthetic oligonucleotide
cgcccgaugccuacccgua

SEQ ID NO: 2364006 - RNA, 19 nt, Artificial Sequence
  Description of Artificial Sequence: Synthetic oligonucleotide
cgugugccaggcauuccau

SEQ ID NO: 2364007 - RNA, 19 nt, Artificial Sequence
  Description of Artificial Sequence: Synthetic oligonucleotide
gcucuccgccacucccagu

SEQ ID NO: 2364008 - RNA, 19 nt, Artificial Sequence
  Description of Artificial Sequence: Synthetic oligonucleotide
cgucguggccggagcagua

SEQ ID NO: 2364009 - RNA, 19 nt, Artificial Sequence
  Description of Artificial Sequence: Synthetic oligonucleotide
cgguggccugauccaacaa

SEQ ID NO: 2364010 - RNA, 19 nt, Artificial Sequence
  Description of Artificial Sequence: Synthetic oligonucleotide
cggaaacgcgcugccucaa

SEQ ID NO: 2364011 - RNA, 19 nt, Artificial Sequence
  Description of Artificial Sequence: Synthetic oligonucleotide
ccuccgcagucagcccaaa

SEQ ID NO: 2364012 - RNA, 19 nt, Artificial Sequence
  Description of Artificial Sequence: Synthetic oligonucleotide
cccagucgccgcgcuauuu

SEQ ID NO: 2364013 - RNA, 19 nt, Artificial Sequence
  Description of Artificial Sequence: Synthetic oligonucleotide
ggacuccguuguggccccu

SEQ ID NO: 2364014 - RNA, 19 nt, Artificial Sequence
  Description of Artificial Sequence: Synthetic oligonucleotide
gcgcugccucaaggcccaa

SEQ ID NO: 2364015 - RNA, 19 nt, Artificial Sequence
  Description of Artificial Sequence: Synthetic oligonucleotide
aauauaacaacuuaaaugc

SEQ ID NO: 2364016 - RNA, 19 nt, Artificial Sequence
  Description of Artificial Sequence: Synthetic oligonucleotide
aaauuccaaaccuagcugc

SEQ ID NO: 2364017 - RNA, 19 nt, Artificial Sequence
  Description of Artificial Sequence: Synthetic oligonucleotide
uuaauaagcaaaauaauua

SEQ ID NO: 2364018 - RNA, 19 nt, Artificial Sequence
  Description of Artificial Sequence: Synthetic oligonucleotide
auaagauccuguuuuauuc

SEQ ID NO: 2364019 - RNA, 19 nt, Artificial Sequence
  Description of Artificial Sequence: Synthetic oligonucleotide
auggaagagacauucaaac

SEQ ID NO: 2364020 - RNA, 19 nt, Artificial Sequence
  Description of Artificial Sequence: Synthetic oligonucleotide
aacuuaaaugcagaguagc

SEQ ID NO: 2364021 - RNA, 19 nt, Artificial Sequence
  Description of Artificial Sequence: Synthetic oligonucleotide
uugaacuuuucuauuaugc

SEQ ID NO: 2364022 - RNA, 19 nt, Artificial Sequence
  Description of Artificial Sequence: Synthetic oligonucleotide
agacauucaaaccaaaucu

SEQ ID NO: 2364023 - RNA, 19 nt, Artificial Sequence
  Description of Artificial Sequence: Synthetic oligonucleotide
auccagguuaaccauaggc

SEQ ID NO: 2364024 - RNA, 19 nt, Artificial Sequence
  Description of Artificial Sequence: Synthetic oligonucleotide
agaaauggaagagacauuc

SEQ ID NO: 2364025 - RNA, 19 nt, Artificial Sequence
  Description of Artificial Sequence: Synthetic oligonucleotide
gagccuauugauaagaucc

SEQ ID NO: 2364026 - RNA, 19 nt, Artificial Sequence
  Description of Artificial Sequence: Synthetic oligonucleotide
uauuaugcaaucccaaaac

SEQ ID NO: 2364027 - RNA, 19 nt, Artificial Sequence
  Description of Artificial Sequence: Synthetic oligonucleotide
aaacgcucugcucuuuucc

SEQ ID NO: 2364028 - RNA, 19 nt, Artificial Sequence
  Description of Artificial Sequence: Synthetic oligonucleotide
uuaugcaaucccaaaacgc

SEQ ID NO: 2364029 - RNA, 19 nt, Artificial Sequence
  Description of Artificial Sequence: Synthetic oligonucleotide
uaaaccacgagcaaggcau

SEQ ID NO: 2364030 - RNA, 19 nt, Artificial Sequence
  Description of Artificial Sequence: Synthetic oligonucleotide
cuugcuuuaguucagcaag

SEQ ID NO: 2364031 - RNA, 19 nt, Artificial Sequence
  Description of Artificial Sequence: Synthetic oligonucleotide
auuaugcaaucccaaaacg

SEQ ID NO: 2364032 - RNA, 19 nt, Artificial Sequence
  Description of Artificial Sequence: Synthetic oligonucleotide
cuuacagguacauugaauc

SEQ ID NO: 2364033 - RNA, 19 nt, Artificial Sequence
  Description of Artificial Sequence: Synthetic oligonucleotide
agaaauuccaaaccuagcu

SEQ ID NO: 2364034 - RNA, 19 nt, Artificial Sequence
  Description of Artificial Sequence: Synthetic oligonucleotide
agcaguuaaaucaaacugc

SEQ ID NO: 2364035 - RNA, 19 nt, Artificial Sequence
  Description of Artificial Sequence: Synthetic oligonucleotide
aaagcauugaacuuuucua

SEQ ID NO: 2364036 - RNA, 19 nt, Artificial Sequence
  Description of Artificial Sequence: Synthetic oligonucleotide
uuaaaugcagaguagcagu

SEQ ID NO: 2364037 - RNA, 19 nt, Artificial Sequence
  Description of Artificial Sequence: Synthetic oligonucleotide
ucaagauaugccuggagcc

SEQ ID NO: 2364038 - RNA, 19 nt, Artificial Sequence
  Description of Artificial Sequence: Synthetic oligonucleotide
uuacucuccaagcuuacag

SEQ ID NO: 2364039 - RNA, 19 nt, Artificial Sequence
  Description of Artificial Sequence: Synthetic oligonucleotide
aguuuauccagguuaacca

SEQ ID NO: 2364040 - RNA, 19 nt, Artificial Sequence
  Description of Artificial Sequence: Synthetic oligonucleotide
uucuagaaauggaagagac

SEQ ID NO: 2364041 - RNA, 19 nt, Artificial Sequence
  Description of Artificial Sequence: Synthetic oligonucleotide
augacagaccuuuuguugg

SEQ ID NO: 2364042 - RNA, 19 nt, Artificial Sequence
  Description of Artificial Sequence: Synthetic oligonucleotide
ucagacuuucuagaaaugg

SEQ ID NO: 2364043 - RNA, 19 nt, Artificial Sequence
  Description of Artificial Sequence: Synthetic oligonucleotide
uuacagguacauugaaucg

SEQ ID NO: 2364044 - RNA, 19 nt, Artificial Sequence
  Description of Artificial Sequence: Synthetic oligonucleotide
uacauugaaucguucagcc

SEQ ID NO: 2364045 - RNA, 19 nt, Artificial Sequence
  Description of Artificial Sequence: Synthetic oligonucleotide
aaauggaagagacauucaa

SEQ ID NO: 2364046 - RNA, 19 nt, Artificial Sequence
  Description of Artificial Sequence: Synthetic oligonucleotide
cagaguagcaguuaaauca

SEQ ID NO: 2364047 - RNA, 19 nt, Artificial Sequence
  Description of Artificial Sequence: Synthetic oligonucleotide
gaugacagaccuuuuguug

SEQ ID NO: 2364048 - RNA, 19 nt, Artificial Sequence
  Description of Artificial Sequence: Synthetic oligonucleotide
uuuaccaccuucuuuucug

SEQ ID NO: 2364049 - RNA, 19 nt, Artificial Sequence
  Description of Artificial Sequence: Synthetic oligonucleotide
uuauccagguuaaccauag

SEQ ID NO: 2364050 - RNA, 19 nt, Artificial Sequence
  Description of Artificial Sequence: Synthetic oligonucleotide
ugaacuuuucuauuaugca

SEQ ID NO: 2364051 - RNA, 19 nt, Artificial Sequence
  Description of Artificial Sequence: Synthetic oligonucleotide
uuucuauuaugcaauccca

SEQ ID NO: 2364052 - RNA, 19 nt, Artificial Sequence
  Description of Artificial Sequence: Synthetic oligonucleotide
cucuaaaccacgagcaagg

SEQ ID NO: 2364053 - RNA, 19 nt, Artificial Sequence
  Description of Artificial Sequence: Synthetic oligonucleotide
uaacaggaaguucuauagg

SEQ ID NO: 2364054 - RNA, 19 nt, Artificial Sequence
  Description of Artificial Sequence: Synthetic oligonucleotide
aaucguucagcccucuucu

SEQ ID NO: 2364055 - RNA, 19 nt, Artificial Sequence
  Description of Artificial Sequence: Synthetic oligonucleotide
aagcauugaacuuuucuau

SEQ ID NO: 2364056 - RNA, 19 nt, Artificial Sequence
  Description of Artificial Sequence: Synthetic oligonucleotide
uccagguuaaccauaggcu

SEQ ID NO: 2364057 - RNA, 19 nt, Artificial Sequence
  Description of Artificial Sequence: Synthetic oligonucleotide
aaucccaaaacgcucugcu

SEQ ID NO: 2364058 - RNA, 19 nt, Artificial Sequence
  Description of Artificial Sequence: Synthetic oligonucleotide
uuuaguucagcaagcuuca

SEQ ID NO: 2364059 - RNA, 19 nt, Artificial Sequence
  Description of Artificial Sequence: Synthetic oligonucleotide
aaggaugcacaccuaaggu

SEQ ID NO: 2364060 - RNA, 19 nt, Artificial Sequence
  Description of Artificial Sequence: Synthetic oligonucleotide
ucuccaagcuuacagguac

SEQ ID NO: 2364061 - RNA, 19 nt, Artificial Sequence
  Description of Artificial Sequence: Synthetic oligonucleotide
uugagaaauggaaaccacu

SEQ ID NO: 2364062 - RNA, 19 nt, Artificial Sequence
  Description of Artificial Sequence: Synthetic oligonucleotide
uuuaacaggaaguucuaua

SEQ ID NO: 2364063 - RNA, 19 nt, Artificial Sequence
  Description of Artificial Sequence: Synthetic oligonucleotide
aaugcagaguagcaguuaa

SEQ ID NO: 2364064 - RNA, 19 nt, Artificial Sequence
  Description of Artificial Sequence: Synthetic oligonucleotide
aaaccaaaucucugugcuc

SEQ ID NO: 2364065 - RNA, 19 nt, Artificial Sequence
  Description of Artificial Sequence: Synthetic oligonucleotide
uggucucuaaaccacgagc

SEQ ID NO: 2364066 - RNA, 19 nt, Artificial Sequence
  Description of Artificial Sequence: Synthetic oligonucleotide
aguucuauaggcuuugguu

SEQ ID NO: 2364067 - RNA, 19 nt, Artificial Sequence
  Description of Artificial Sequence: Synthetic oligonucleotide
uuccaaaccuagcugcccg

SEQ ID NO: 2364068 - RNA, 19 nt, Artificial Sequence
  Description of Artificial Sequence: Synthetic oligonucleotide
uaagguacacgcuuccuca

SEQ ID NO: 2364069 - RNA, 19 nt, Artificial Sequence
  Description of Artificial Sequence: Synthetic oligonucleotide
ucccaaaacgcucugcucu

SEQ ID NO: 2364070 - RNA, 19 nt, Artificial Sequence
  Description of Artificial Sequence: Synthetic oligonucleotide
acauugaaucguucagccc

SEQ ID NO: 2364071 - RNA, 19 nt, Artificial Sequence
  Description of Artificial Sequence: Synthetic oligonucleotide
cuuaaaugcagaguagcag

SEQ ID NO: 2364072 - RNA, 19 nt, Artificial Sequence
  Description of Artificial Sequence: Synthetic oligonucleotide
uuugagaaauggaaaccac

SEQ ID NO: 2364073 - RNA, 19 nt, Artificial Sequence
  Description of Artificial Sequence: Synthetic oligonucleotide
aaaccaugaagaauuugag

SEQ ID NO: 2364074 - RNA, 19 nt, Artificial Sequence
  Description of Artificial Sequence: Synthetic oligonucleotide
guucuauaggcuuugguuc

SEQ ID NO: 2364075 - RNA, 19 nt, Artificial Sequence
  Description of Artificial Sequence: Synthetic oligonucleotide
uacucuccaagcuuacagg

SEQ ID NO: 2364076 - RNA, 19 nt, Artificial Sequence
  Description of Artificial Sequence: Synthetic oligonucleotide
uaugccuggagccuauuga

SEQ ID NO: 2364077 - RNA, 19 nt, Artificial Sequence
  Description of Artificial Sequence: Synthetic oligonucleotide
uucccuuggucucuaaacc

SEQ ID NO: 2364078 - RNA, 19 nt, Artificial Sequence
  Description of Artificial Sequence: Synthetic oligonucleotide
aaaucaaacugcugcugga

SEQ ID NO: 2364079 - RNA, 19 nt, Artificial Sequence
  Description of Artificial Sequence: Synthetic oligonucleotide
gaacuuuucuauuaugcaa

SEQ ID NO: 2364080 - RNA, 19 nt, Artificial Sequence
  Description of Artificial Sequence: Synthetic oligonucleotide
aguagcaguuaaaucaaac

SEQ ID NO: 2364081 - RNA, 19 nt, Artificial Sequence
  Description of Artificial Sequence: Synthetic oligonucleotide
ucuauuaugcaaucccaaa

SEQ ID NO: 2364082 - RNA, 19 nt, Artificial Sequence
  Description of Artificial Sequence: Synthetic oligonucleotide
cuugucacaaucccaaauc

SEQ ID NO: 2364083 - RNA, 19 nt, Artificial Sequence
  Description of Artificial Sequence: Synthetic oligonucleotide
uuccucuuuaacaggaagu

SEQ ID NO: 2364084 - RNA, 19 nt, Artificial Sequence
  Description of Artificial Sequence: Synthetic oligonucleotide
ggaagagacauucaaacca

SEQ ID NO: 2364085 - RNA, 19 nt, Artificial Sequence
  Description of Artificial Sequence: Synthetic oligonucleotide
uugucacaaucccaaaucu

SEQ ID NO: 2364086 - RNA, 19 nt, Artificial Sequence
  Description of Artificial Sequence: Synthetic oligonucleotide
agcuccaccgucucggucg

SEQ ID NO: 2364087 - RNA, 19 nt, Artificial Sequence
  Description of Artificial Sequence: Synthetic oligonucleotide
ucucuaaaccacgagcaag

SEQ ID NO: 2364088 - RNA, 19 nt, Artificial Sequence
  Description of Artificial Sequence: Synthetic oligonucleotide
cauucaaaccaaaucucug

SEQ ID NO: 2364089 - RNA, 19 nt, Artificial Sequence
  Description of Artificial Sequence: Synthetic oligonucleotide
uuaaaucaaacugcugcug

SEQ ID NO: 2364090 - RNA, 19 nt, Artificial Sequence
  Description of Artificial Sequence: Synthetic oligonucleotide
cugaacuugucacaauccc

SEQ ID NO: 2364091 - RNA, 19 nt, Artificial Sequence
  Description of Artificial Sequence: Synthetic oligonucleotide
ucggucgccaucuugcugc

SEQ ID NO: 2364092 - RNA, 19 nt, Artificial Sequence
  Description of Artificial Sequence: Synthetic oligonucleotide
aagguacacgcuuccucac

SEQ ID NO: 2364093 - RNA, 19 nt, Artificial Sequence
  Description of Artificial Sequence: Synthetic oligonucleotide
ugcaaucccaaaacgcucu

SEQ ID NO: 2364094 - RNA, 19 nt, Artificial Sequence
  Description of Artificial Sequence: Synthetic oligonucleotide
ugcugaacuugucacaauc

SEQ ID NO: 2364095 - RNA, 19 nt, Artificial Sequence
  Description of Artificial Sequence: Synthetic oligonucleotide
uucuauaggcuuugguucu

SEQ ID NO: 2364096 - RNA, 19 nt, Artificial Sequence
  Description of Artificial Sequence: Synthetic oligonucleotide
cacugugaggcacaugacg

SEQ ID NO: 2364097 - RNA, 19 nt, Artificial Sequence
  Description of Artificial Sequence: Synthetic oligonucleotide
aaguucuauaggcuuuggu

SEQ ID NO: 2364098 - RNA, 19 nt, Artificial Sequence
  Description of Artificial Sequence: Synthetic oligonucleotide
agcauguucuucaagauau

SEQ ID NO: 2364099 - RNA, 19 nt, Artificial Sequence
  Description of Artificial Sequence: Synthetic oligonucleotide
uauugauaagauccuguuu

SEQ ID NO: 2364100 - RNA, 19 nt, Artificial Sequence
  Description of Artificial Sequence: Synthetic oligonucleotide
acagaccuuuuguuggaac

SEQ ID NO: 2364101 - RNA, 19 nt, Artificial Sequence
  Description of Artificial Sequence: Synthetic oligonucleotide
cauucucucaguuugaggu

SEQ ID NO: 2364102 - RNA, 19 nt, Artificial Sequence
  Description of Artificial Sequence: Synthetic oligonucleotide
agguacauugaaucguuca

SEQ ID NO: 2364103 - RNA, 19 nt, Artificial Sequence
  Description of Artificial Sequence: Synthetic oligonucleotide
ugagguauuccagauguaa

SEQ ID NO: 2364104 - RNA, 19 nt, Artificial Sequence
  Description of Artificial Sequence: Synthetic oligonucleotide
uuggugucagaugacagac

SEQ ID NO: 2364105 - RNA, 19 nt, Artificial Sequence
  Description of Artificial Sequence: Synthetic oligonucleotide
uucuuacucuccaagcuua

SEQ ID NO: 2364106 - RNA, 19 nt, Artificial Sequence
  Description of Artificial Sequence: Synthetic oligonucleotide
gaaucguucagcccucuuc

SEQ ID NO: 2364107 - RNA, 19 nt, Artificial Sequence
  Description of Artificial Sequence: Synthetic oligonucleotide
uacagguacauugaaucgu

SEQ ID NO: 2364108 - RNA, 19 nt, Artificial Sequence
  Description of Artificial Sequence: Synthetic oligonucleotide
ugucacaaucccaaaucuc

SEQ ID NO: 2364109 - RNA, 19 nt, Artificial Sequence
  Description of Artificial Sequence: Synthetic oligonucleotide
cuuuucuauuaugcaaucc

SEQ ID NO: 2364110 - RNA, 19 nt, Artificial Sequence
  Description of Artificial Sequence: Synthetic oligonucleotide
gacauucaaaccaaaucuc

SEQ ID NO: 2364111 - RNA, 19 nt, Artificial Sequence
  Description of Artificial Sequence: Synthetic oligonucleotide
uuggucucuaaaccacgag

SEQ ID NO: 2364112 - RNA, 19 nt, Artificial Sequence
  Description of Artificial Sequence: Synthetic oligonucleotide
uuugcuuccucuucagcau

SEQ ID NO: 2364113 - RNA, 19 nt, Artificial Sequence
  Description of Artificial Sequence: Synthetic oligonucleotide
aacgcucugcucuuuuccu

SEQ ID NO: 2364114 - RNA, 19 nt, Artificial Sequence
  Description of Artificial Sequence: Synthetic oligonucleotide
ugucagaugacagaccuuu

SEQ ID NO: 2364115 - RNA, 19 nt, Artificial Sequence
  Description of Artificial Sequence: Synthetic oligonucleotide
  modified_base (14)..(14): a, c, u, g, unknown or other
  modified_base (18)..(18): a, c, u, g, unknown or other
ugugugugugugunugunu

SEQ ID NO: 2364116 - RNA, 19 nt, Artificial Sequence
  Description of Artificial Sequence: Synthetic oligonucleotide
ucguucagcccucuucugc

SEQ ID NO: 2364117 - RNA, 19 nt, Artificial Sequence
  Description of Artificial Sequence: Synthetic oligonucleotide
uccaaggaugcacaccuaa

SEQ ID NO: 2364118 - RNA, 19 nt, Artificial Sequence
  Description of Artificial Sequence: Synthetic oligonucleotide
aguuugagguauuccagau

SEQ ID NO: 2364119 - RNA, 19 nt, Artificial Sequence
  Description of Artificial Sequence: Synthetic oligonucleotide
ugugcucuuuccuuuaguu

SEQ ID NO: 2364120 - RNA, 19 nt, Artificial Sequence
  Description of Artificial Sequence: Synthetic oligonucleotide
uaaaugcagaguagcaguu

SEQ ID NO: 2364121 - RNA, 19 nt, Artificial Sequence
  Description of Artificial Sequence: Synthetic oligonucleotide
guacauugaaucguucagc

SEQ ID NO: 2364122 - RNA, 19 nt, Artificial Sequence
  Description of Artificial Sequence: Synthetic oligonucleotide
ugcagaguagcaguuaaau

SEQ ID NO: 2364123 - RNA, 19 nt, Artificial Sequence
  Description of Artificial Sequence: Synthetic oligonucleotide
cauugaaucguucagcccu

SEQ ID NO: 2364124 - RNA, 19 nt, Artificial Sequence
  Description of Artificial Sequence: Synthetic oligonucleotide
cuaagguacacgcuuccuc

SEQ ID NO: 2364125 - RNA, 19 nt, Artificial Sequence
  Description of Artificial Sequence: Synthetic oligonucleotide
ucuguauccucuguaguuc

SEQ ID NO: 2364126 - RNA, 19 nt, Artificial Sequence
  Description of Artificial Sequence: Synthetic oligonucleotide
ucuugcugcgccucacucc

SEQ ID NO: 2364127 - RNA, 19 nt, Artificial Sequence
  Description of Artificial Sequence: Synthetic oligonucleotide
cuauuaugcaaucccaaaa

SEQ ID NO: 2364128 - RNA, 19 nt, Artificial Sequence
  Description of Artificial Sequence: Synthetic oligonucleotide
agguuaaccauaggcuugg

SEQ ID NO: 2364129 - RNA, 19 nt, Artificial Sequence
  Description of Artificial Sequence: Synthetic oligonucleotide
cagguuaaccauaggcuug

SEQ ID NO: 2364130 - RNA, 19 nt, Artificial Sequence
  Description of Artificial Sequence: Synthetic oligonucleotide
acauucaaaccaaaucucu

SEQ ID NO: 2364131 - RNA, 19 nt, Artificial Sequence
  Description of Artificial Sequence: Synthetic oligonucleotide
cacgcuuccucacugugag

SEQ ID NO: 2364132 - RNA, 19 nt, Artificial Sequence
  Description of Artificial Sequence: Synthetic oligonucleotide
ucugugcucuuuccuuuag

SEQ ID NO: 2364133 - RNA, 19 nt, Artificial Sequence
  Description of Artificial Sequence: Synthetic oligonucleotide
cuuugguucuucuuccuca

SEQ ID NO: 2364134 - RNA, 19 nt, Artificial Sequence
  Description of Artificial Sequence: Synthetic oligonucleotide
cuguauccucuguaguucc

SEQ ID NO: 2364135 - RNA, 19 nt, Artificial Sequence
  Description of Artificial Sequence: Synthetic oligonucleotide
guuaaccauaggcuuggug

SEQ ID NO: 2364136 - RNA, 19 nt, Artificial Sequence
  Description of Artificial Sequence: Synthetic oligonucleotide
  modified_base (16)..(16): a, c, u, g, unknown or other
ugugugugugugugunugu

SEQ ID NO: 2364137 - RNA, 19 nt, Artificial Sequence
  Description of Artificial Sequence: Synthetic oligonucleotide
gaacuugucacaaucccaa

SEQ ID NO: 2364138 - RNA, 19 nt, Artificial Sequence
  Description of Artificial Sequence: Synthetic oligonucleotide
uauccagguuaaccauagg

SEQ ID NO: 2364139 - RNA, 19 nt, Artificial Sequence
  Description of Artificial Sequence: Synthetic oligonucleotide
aucuugcugcgccucacuc

SEQ ID NO: 2364140 - RNA, 19 nt, Artificial Sequence
  Description of Artificial Sequence: Synthetic oligonucleotide
uacacgcuuccucacugug

SEQ ID NO: 2364141 - RNA, 19 nt, Artificial Sequence
  Description of Artificial Sequence: Synthetic oligonucleotide
acugugaggcacaugacgu

SEQ ID NO: 2364142 - RNA, 19 nt, Artificial Sequence
  Description of Artificial Sequence: Synthetic oligonucleotide
aucccaaaacgcucugcuc

SEQ ID NO: 2364143 - RNA, 19 nt, Artificial Sequence
  Description of Artificial Sequence: Synthetic oligonucleotide
acuuaaaugcagaguagca

SEQ ID NO: 2364144 - RNA, 19 nt, Artificial Sequence
  Description of Artificial Sequence: Synthetic oligonucleotide
agaccuuuuguuggaacag

SEQ ID NO: 2364145 - RNA, 19 nt, Artificial Sequence
  Description of Artificial Sequence: Synthetic oligonucleotide
ucucaguuugagguauucc

SEQ ID NO: 2364146 - RNA, 19 nt, Artificial Sequence
  Description of Artificial Sequence: Synthetic oligonucleotide
ucaucauccucagacuuuc

SEQ ID NO: 2364147 - RNA, 19 nt, Artificial Sequence
  Description of Artificial Sequence: Synthetic oligonucleotide
uugauaagauccuguuuua

SEQ ID NO: 2364148 - RNA, 19 nt, Artificial Sequence
  Description of Artificial Sequence: Synthetic oligonucleotide
ugugaggcacaugacgugu

SEQ ID NO: 2364149 - RNA, 19 nt, Artificial Sequence
  Description of Artificial Sequence: Synthetic oligonucleotide
gaagagacauucaaaccaa

SEQ ID NO: 2364150 - RNA, 19 nt, Artificial Sequence
  Description of Artificial Sequence: Synthetic oligonucleotide
gucgccaucuugcugcgcc

SEQ ID NO: 2364151 - RNA, 19 nt, Artificial Sequence
  Description of Artificial Sequence: Synthetic oligonucleotide
aagcuuacagguacauuga

SEQ ID NO: 2364152 - RNA, 19 nt, Artificial Sequence
  Description of Artificial Sequence: Synthetic oligonucleotide
aaccuagcugcccgagcag

SEQ ID NO: 2364153 - RNA, 19 nt, Artificial Sequence
  Description of Artificial Sequence: Synthetic oligonucleotide
uggaaaccacuaugaagca

SEQ ID NO: 2364154 - RNA, 19 nt, Artificial Sequence
  Description of Artificial Sequence: Synthetic oligonucleotide
auaugccuggagccuauug

SEQ ID NO: 2364155 - RNA, 19 nt, Artificial Sequence
  Description of Artificial Sequence: Synthetic oligonucleotide
uuaccaccuucuuuucuga

SEQ ID NO: 2364156 - RNA, 19 nt, Artificial Sequence
  Description of Artificial Sequence: Synthetic oligonucleotide
uccucuuuaacaggaaguu

SEQ ID NO: 2364157 - RNA, 19 nt, Artificial Sequence
  Description of Artificial Sequence: Synthetic oligonucleotide
ucuuacucuccaagcuuac

SEQ ID NO: 2364158 - RNA, 19 nt, Artificial Sequence
  Description of Artificial Sequence: Synthetic oligonucleotide
uauucccuuggucucuaaa

SEQ ID NO: 2364159 - RNA, 19 nt, Artificial Sequence
  Description of Artificial Sequence: Synthetic oligonucleotide
ugacgugugugugugugug

SEQ ID NO: 2364160 - RNA, 19 nt, Artificial Sequence
  Description of Artificial Sequence: Synthetic oligonucleotide
agcagaaagcauugaacuu

SEQ ID NO: 2364161 - RNA, 19 nt, Artificial Sequence
  Description of Artificial Sequence: Synthetic oligonucleotide
ugacagaccuuuuguugga

SEQ ID NO: 2364162 - RNA, 19 nt, Artificial Sequence
  Description of Artificial Sequence: Synthetic oligonucleotide
agaugacagaccuuuuguu

SEQ ID NO: 2364163 - RNA, 19 nt, Artificial Sequence
  Description of Artificial Sequence: Synthetic oligonucleotide
auauaacaacuuaaaugca

SEQ ID NO: 2364164 - RNA, 19 nt, Artificial Sequence
  Description of Artificial Sequence: Synthetic oligonucleotide
ucuaaaccacgagcaaggc

SEQ ID NO: 2364165 - RNA, 19 nt, Artificial Sequence
  Description of Artificial Sequence: Synthetic oligonucleotide
uauaggcuuugguucuucu

SEQ ID NO: 2364166 - RNA, 19 nt, Artificial Sequence
  Description of Artificial Sequence: Synthetic oligonucleotide
aggaugcacaccuaaggua

SEQ ID NO: 2364167 - RNA, 19 nt, Artificial Sequence
  Description of Artificial Sequence: Synthetic oligonucleotide
gauaagauccuguuuuauu

SEQ ID NO: 2364168 - RNA, 19 nt, Artificial Sequence
  Description of Artificial Sequence: Synthetic oligonucleotide
augcaaucccaaaacgcuc

SEQ ID NO: 2364169 - RNA, 19 nt, Artificial Sequence
  Description of Artificial Sequence: Synthetic oligonucleotide
ugcacaccuaagguacacg

SEQ ID NO: 2364170 - RNA, 19 nt, Artificial Sequence
  Description of Artificial Sequence: Synthetic oligonucleotide
ggaugcacaccuaagguac

SEQ ID NO: 2364171 - RNA, 19 nt, Artificial Sequence
  Description of Artificial Sequence: Synthetic oligonucleotide
cucagacuuucuagaaaug

SEQ ID NO: 2364172 - RNA, 19 nt, Artificial Sequence
  Description of Artificial Sequence: Synthetic oligonucleotide
ugaggcacaugacgugugu

SEQ ID NO: 2364173 - RNA, 19 nt, Artificial Sequence
  Description of Artificial Sequence: Synthetic oligonucleotide
uggugucagaugacagacc

SEQ ID NO: 2364174 - RNA, 19 nt, Artificial Sequence
  Description of Artificial Sequence: Synthetic oligonucleotide
ugauaagauccuguuuuau

SEQ ID NO: 2364175 - RNA, 19 nt, Artificial Sequence
  Description of Artificial Sequence: Synthetic oligonucleotide
caugacgugugugugugug

SEQ ID NO: 2364176 - RNA, 19 nt, Artificial Sequence
  Description of Artificial Sequence: Synthetic oligonucleotide
cagaccuuuuguuggaaca

SEQ ID NO: 2364177 - RNA, 19 nt, Artificial Sequence
  Description of Artificial Sequence: Synthetic oligonucleotide
uagaaauggaagagacauu

SEQ ID NO: 2364178 - RNA, 19 nt, Artificial Sequence
  Description of Artificial Sequence: Synthetic oligonucleotide
aaccacgagcaaggcauuc

SEQ ID NO: 2364179 - RNA, 19 nt, Artificial Sequence
  Description of Artificial Sequence: Synthetic oligonucleotide
gccucacuccaccagaucc

SEQ ID NO: 2364180 - RNA, 19 nt, Artificial Sequence
  Description of Artificial Sequence: Synthetic oligonucleotide
accuagcugcccgagcagc

SEQ ID NO: 2364181 - RNA, 19 nt, Artificial Sequence
  Description of Artificial Sequence: Synthetic oligonucleotide
agaagaaauuccaaaccua

SEQ ID NO: 2364182 - RNA, 19 nt, Artificial Sequence
  Description of Artificial Sequence: Synthetic oligonucleotide
uauccucuguaguuccagu

SEQ ID NO: 2364183 - RNA, 19 nt, Artificial Sequence
  Description of Artificial Sequence: Synthetic oligonucleotide
gucacaaucccaaaucucu

SEQ ID NO: 2364184 - RNA, 19 nt, Artificial Sequence
  Description of Artificial Sequence: Synthetic oligonucleotide
gaaauggaagagacauuca

SEQ ID NO: 2364185 - RNA, 19 nt, Artificial Sequence
  Description of Artificial Sequence: Synthetic oligonucleotide
gcacaccuaagguacacgc

SEQ ID NO: 2364186 - RNA, 19 nt, Artificial Sequence
  Description of Artificial Sequence: Synthetic oligonucleotide
acaggaaguucuauaggcu

SEQ ID NO: 2364187 - RNA, 19 nt, Artificial Sequence
  Description of Artificial Sequence: Synthetic oligonucleotide
uggagccuauugauaagau

SEQ ID NO: 2364188 - RNA, 19 nt, Artificial Sequence
  Description of Artificial Sequence: Synthetic oligonucleotide
cacaugacgugugugugug

SEQ ID NO: 2364189 - RNA, 19 nt, Artificial Sequence
  Description of Artificial Sequence: Synthetic oligonucleotide
augccuggagccuauugau

SEQ ID NO: 2364190 - RNA, 19 nt, Artificial Sequence
  Description of Artificial Sequence: Synthetic oligonucleotide
ggcauucuugcuuuaguuc

SEQ ID NO: 2364191 - RNA, 19 nt, Artificial Sequence
  Description of Artificial Sequence: Synthetic oligonucleotide
aaaugcagaguagcaguua

SEQ ID NO: 2364192 - RNA, 19 nt, Artificial Sequence
  Description of Artificial Sequence: Synthetic oligonucleotide
augcacaccuaagguacac

SEQ ID NO: 2364193 - RNA, 19 nt, Artificial Sequence
  Description of Artificial Sequence: Synthetic oligonucleotide
cuugcugcgccucacucca

SEQ ID NO: 2364194 - RNA, 19 nt, Artificial Sequence
  Description of Artificial Sequence: Synthetic oligonucleotide
aaccauaggcuugguguca

SEQ ID NO: 2364195 - RNA, 19 nt, Artificial Sequence
  Description of Artificial Sequence: Synthetic oligonucleotide
ugcugcgccucacuccacc

SEQ ID NO: 2364196 - RNA, 19 nt, Artificial Sequence
  Description of Artificial Sequence: Synthetic oligonucleotide
cuuguggagcuccaccguc

SEQ ID NO: 2364197 - RNA, 19 nt, Artificial Sequence
  Description of Artificial Sequence: Synthetic oligonucleotide
agagacauucaaaccaaau

SEQ ID NO: 2364198 - RNA, 19 nt, Artificial Sequence
  Description of Artificial Sequence: Synthetic oligonucleotide
caguuugagguauuccaga

SEQ ID NO: 2364199 - RNA, 19 nt, Artificial Sequence
  Description of Artificial Sequence: Synthetic oligonucleotide
aagauaugccuggagccua

SEQ ID NO: 2364200 - RNA, 19 nt, Artificial Sequence
  Description of Artificial Sequence: Synthetic oligonucleotide
uuaguuuauccagguuaac

SEQ ID NO: 2364201 - RNA, 19 nt, Artificial Sequence
  Description of Artificial Sequence: Synthetic oligonucleotide
  modified_base (17)..(17): a, c, u, g, unknown or other
gugugugugugugugunug

SEQ ID NO: 2364202 - RNA, 19 nt, Artificial Sequence
  Description of Artificial Sequence: Synthetic oligonucleotide
cuuggucucuaaaccacga

SEQ ID NO: 2364203 - RNA, 19 nt, Artificial Sequence
  Description of Artificial Sequence: Synthetic oligonucleotide
cagcuuguggagcuccacc

SEQ ID NO: 2364204 - RNA, 19 nt, Artificial Sequence
  Description of Artificial Sequence: Synthetic oligonucleotide
ccacuaugaagcagaaagc

SEQ ID NO: 2364205 - RNA, 19 nt, Artificial Sequence
  Description of Artificial Sequence: Synthetic oligonucleotide
gguacacgcuuccucacug

SEQ ID NO: 2364206 - RNA, 19 nt, Artificial Sequence
  Description of Artificial Sequence: Synthetic oligonucleotide
caaaccuagcugcccgagc

SEQ ID NO: 2364207 - RNA, 19 nt, Artificial Sequence
  Description of Artificial Sequence: Synthetic oligonucleotide
aggagguucuuccucuuua

SEQ ID NO: 2364208 - RNA, 19 nt, Artificial Sequence
  Description of Artificial Sequence: Synthetic oligonucleotide
auucucucaguuugaggua

SEQ ID NO: 2364209 - RNA, 19 nt, Artificial Sequence
  Description of Artificial Sequence: Synthetic oligonucleotide
uccaaaccuagcugcccga

SEQ ID NO: 2364210 - RNA, 19 nt, Artificial Sequence
  Description of Artificial Sequence: Synthetic oligonucleotide
agcuuacagguacauugaa

SEQ ID NO: 2364211 - RNA, 19 nt, Artificial Sequence
  Description of Artificial Sequence: Synthetic oligonucleotide
cugugaggcacaugacgug

SEQ ID NO: 2364212 - RNA, 19 nt, Artificial Sequence
  Description of Artificial Sequence: Synthetic oligonucleotide
gagaaauggaaaccacuau

SEQ ID NO: 2364213 - RNA, 19 nt, Artificial Sequence
  Description of Artificial Sequence: Synthetic oligonucleotide
ggugucagaugacagaccu

SEQ ID NO: 2364214 - RNA, 19 nt, Artificial Sequence
  Description of Artificial Sequence: Synthetic oligonucleotide
uuaguucagcaagcuucag

SEQ ID NO: 2364215 - RNA, 19 nt, Artificial Sequence
  Description of Artificial Sequence: Synthetic oligonucleotide
uguggagcuccaccgucuc

SEQ ID NO: 2364216 - RNA, 19 nt, Artificial Sequence
  Description of Artificial Sequence: Synthetic oligonucleotide
cacgagcaaggcauucuug

SEQ ID NO: 2364217 - RNA, 19 nt, Artificial Sequence
  Description of Artificial Sequence: Synthetic oligonucleotide
agguacacgcuuccucacu

SEQ ID NO: 2364218 - RNA, 19 nt, Artificial Sequence
  Description of Artificial Sequence: Synthetic oligonucleotide
aagagacauucaaaccaaa

SEQ ID NO: 2364219 - RNA, 19 nt, Artificial Sequence
  Description of Artificial Sequence: Synthetic oligonucleotide
accauaggcuuggugucag

SEQ ID NO: 2364220 - RNA, 19 nt, Artificial Sequence
  Description of Artificial Sequence: Synthetic oligonucleotide
caaucccaaaacgcucugc

SEQ ID NO: 2364221 - RNA, 19 nt, Artificial Sequence
  Description of Artificial Sequence: Synthetic oligonucleotide
ggagccuauugauaagauc

SEQ ID NO: 2364222 - RNA, 19 nt, Artificial Sequence
  Description of Artificial Sequence: Synthetic oligonucleotide
ccuuggucucuaaaccacg

SEQ ID NO: 2364223 - RNA, 19 nt, Artificial Sequence
  Description of Artificial Sequence: Synthetic oligonucleotide
augacgugugugugugugu

SEQ ID NO: 2364224 - RNA, 19 nt, Artificial Sequence
  Description of Artificial Sequence: Synthetic oligonucleotide
ggaaguucuauaggcuuug

SEQ ID NO: 2364225 - RNA, 19 nt, Artificial Sequence
  Description of Artificial Sequence: Synthetic oligonucleotide
aucguucagcccucuucug

SEQ ID NO: 2364226 - RNA, 19 nt, Artificial Sequence
  Description of Artificial Sequence: Synthetic oligonucleotide
gcauugaacuuuucuauua

SEQ ID NO: 2364227 - RNA, 19 nt, Artificial Sequence
  Description of Artificial Sequence: Synthetic oligonucleotide
agcccucuucugcauucuc

SEQ ID NO: 2364228 - RNA, 19 nt, Artificial Sequence
  Description of Artificial Sequence: Synthetic oligonucleotide
agaaagcauugaacuuuuc

SEQ ID NO: 2364229 - RNA, 19 nt, Artificial Sequence
  Description of Artificial Sequence: Synthetic oligonucleotide
agccuauugauaagauccu

SEQ ID NO: 2364230 - RNA, 19 nt, Artificial Sequence
  Description of Artificial Sequence: Synthetic oligonucleotide
ucucggucgccaucuugcu

SEQ ID NO: 2364231 - RNA, 19 nt, Artificial Sequence
  Description of Artificial Sequence: Synthetic oligonucleotide
uuuauucccuuggucucua

SEQ ID NO: 2364232 - RNA, 19 nt, Artificial Sequence
  Description of Artificial Sequence: Synthetic oligonucleotide
acagguacauugaaucguu

SEQ ID NO: 2364233 - RNA, 19 nt, Artificial Sequence
  Description of Artificial Sequence: Synthetic oligonucleotide
uccaccgucucggucgcca

SEQ ID NO: 2364234 - RNA, 19 nt, Artificial Sequence
  Description of Artificial Sequence: Synthetic oligonucleotide
ggaauccaaggaugcacac

SEQ ID NO: 2364235 - RNA, 19 nt, Artificial Sequence
  Description of Artificial Sequence: Synthetic oligonucleotide
cuggagccuauugauaaga

SEQ ID NO: 2364236 - RNA, 19 nt, Artificial Sequence
  Description of Artificial Sequence: Synthetic oligonucleotide
cagguacauugaaucguuc

SEQ ID NO: 2364237 - RNA, 19 nt, Artificial Sequence
  Description of Artificial Sequence: Synthetic oligonucleotide
guggagcuccaccgucucg

SEQ ID NO: 2364238 - RNA, 19 nt, Artificial Sequence
  Description of Artificial Sequence: Synthetic oligonucleotide
cauugaacuuuucuauuau

SEQ ID NO: 2364239 - RNA, 19 nt, Artificial Sequence
  Description of Artificial Sequence: Synthetic oligonucleotide
gauccuguuuuauucccuu

SEQ ID NO: 2364240 - RNA, 19 nt, Artificial Sequence
  Description of Artificial Sequence: Synthetic oligonucleotide
ggaacagaagaaauuccaa

SEQ ID NO: 2364241 - RNA, 19 nt, Artificial Sequence
  Description of Artificial Sequence: Synthetic oligonucleotide
  modified_base (13)..(13): a, c, u, g, unknown or other
  modified_base (17)..(17): a, c, u, g, unknown or other
gugugugugugunugunua

SEQ ID NO: 2364242 - RNA, 19 nt, Artificial Sequence
  Description of Artificial Sequence: Synthetic oligonucleotide
aaccacuaugaagcagaaa

SEQ ID NO: 2364243 - RNA, 19 nt, Artificial Sequence
  Description of Artificial Sequence: Synthetic oligonucleotide
aggaaguucuauaggcuuu

SEQ ID NO: 2364244 - RNA, 19 nt, Artificial Sequence
  Description of Artificial Sequence: Synthetic oligonucleotide
gccuggagccuauugauaa

SEQ ID NO: 2364245 - RNA, 19 nt, Artificial Sequence
  Description of Artificial Sequence: Synthetic oligonucleotide
gaugcacaccuaagguaca

SEQ ID NO: 2364246 - RNA, 19 nt, Artificial Sequence
  Description of Artificial Sequence: Synthetic oligonucleotide
guauuccagauguaauuuu

SEQ ID NO: 2364247 - RNA, 19 nt, Artificial Sequence
  Description of Artificial Sequence: Synthetic oligonucleotide
cuauaggcuuugguucuuc

SEQ ID NO: 2364248 - RNA, 19 nt, Artificial Sequence
  Description of Artificial Sequence: Synthetic oligonucleotide
ggcacaugacgugugugug

SEQ ID NO: 2364249 - RNA, 19 nt, Artificial Sequence
  Description of Artificial Sequence: Synthetic oligonucleotide
ucucucaguuugagguauu

SEQ ID NO: 2364250 - RNA, 19 nt, Artificial Sequence
  Description of Artificial Sequence: Synthetic oligonucleotide
gagguauuccagauguaau

SEQ ID NO: 2364251 - RNA, 19 nt, Artificial Sequence
  Description of Artificial Sequence: Synthetic oligonucleotide
cucggucgccaucuugcug

SEQ ID NO: 2364252 - RNA, 19 nt, Artificial Sequence
  Description of Artificial Sequence: Synthetic oligonucleotide
cucuguauccucuguaguu

SEQ ID NO: 2364253 - RNA, 19 nt, Artificial Sequence
  Description of Artificial Sequence: Synthetic oligonucleotide
ucuauaggcuuugguucuu

SEQ ID NO: 2364254 - RNA, 19 nt, Artificial Sequence
  Description of Artificial Sequence: Synthetic oligonucleotide
  modified_base (19)..(19): a, c, u, g, unknown or other
acgugugugugugugugun

SEQ ID NO: 2364255 - RNA, 19 nt, Artificial Sequence
  Description of Artificial Sequence: Synthetic oligonucleotide
uuauucccuuggucucuaa

SEQ ID NO: 2364256 - RNA, 19 nt, Artificial Sequence
  Description of Artificial Sequence: Synthetic oligonucleotide
cagcauguucuucaagaua

SEQ ID NO: 2364257 - RNA, 19 nt, Artificial Sequence
  Description of Artificial Sequence: Synthetic oligonucleotide
acaugacgugugugugugu

SEQ ID NO: 2364258 - RNA, 19 nt, Artificial Sequence
  Description of Artificial Sequence: Synthetic oligonucleotide
uugaaucguucagcccucu

SEQ ID NO: 2364259 - RNA, 19 nt, Artificial Sequence
  Description of Artificial Sequence: Synthetic oligonucleotide
caggaaguucuauaggcuu

SEQ ID NO: 2364260 - RNA, 19 nt, Artificial Sequence
  Description of Artificial Sequence: Synthetic oligonucleotide
cuuacucuccaagcuuaca

SEQ ID NO: 2364261 - RNA, 19 nt, Artificial Sequence
  Description of Artificial Sequence: Synthetic oligonucleotide
gugaggcacaugacgugug

SEQ ID NO: 2364262 - RNA, 19 nt, Artificial Sequence
  Description of Artificial Sequence: Synthetic oligonucleotide
caagauaugccuggagccu

SEQ ID NO: 2364263 - RNA, 19 nt, Artificial Sequence
  Description of Artificial Sequence: Synthetic oligonucleotide
ccuagcugcccgagcagcc

SEQ ID NO: 2364264 - RNA, 19 nt, Artificial Sequence
  Description of Artificial Sequence: Synthetic oligonucleotide
gaguagcaguuaaaucaaa

SEQ ID NO: 2364265 - RNA, 19 nt, Artificial Sequence
  Description of Artificial Sequence: Synthetic oligonucleotide
cucuccaagcuuacaggua

SEQ ID NO: 2364266 - RNA, 19 nt, Artificial Sequence
  Description of Artificial Sequence: Synthetic oligonucleotide
cuccaagcuuacagguaca

SEQ ID NO: 2364267 - RNA, 19 nt, Artificial Sequence
  Description of Artificial Sequence: Synthetic oligonucleotide
acgcucugcucuuuuccuu

SEQ ID NO: 2364268 - RNA, 19 nt, Artificial Sequence
  Description of Artificial Sequence: Synthetic oligonucleotide
aaaccacgagcaaggcauu

SEQ ID NO: 2364269 - RNA, 19 nt, Artificial Sequence
  Description of Artificial Sequence: Synthetic oligonucleotide
gguauuccagauguaauuu

SEQ ID NO: 2364270 - RNA, 19 nt, Artificial Sequence
  Description of Artificial Sequence: Synthetic oligonucleotide
gacagaccuuuuguuggaa

SEQ ID NO: 2364271 - RNA, 19 nt, Artificial Sequence
  Description of Artificial Sequence: Synthetic oligonucleotide
gcagaaagcauugaacuuu

SEQ ID NO: 2364272 - RNA, 19 nt, Artificial Sequence
  Description of Artificial Sequence: Synthetic oligonucleotide
gcccgagcagccuucuuac

SEQ ID NO: 2364273 - RNA, 19 nt, Artificial Sequence
  Description of Artificial Sequence: Synthetic oligonucleotide
  modified_base (15)..(15): a, c, u, g, unknown or other
  modified_base (19)..(19): a, c, u, g, unknown or other
gugugugugugugunugun

SEQ ID NO: 2364274 - RNA, 19 nt, Artificial Sequence
  Description of Artificial Sequence: Synthetic oligonucleotide
agauaugccuggagccuau

SEQ ID NO: 2364275 - RNA, 19 nt, Artificial Sequence
  Description of Artificial Sequence: Synthetic oligonucleotide
ggcuuggugucagaugaca

SEQ ID NO: 2364276 - RNA, 19 nt, Artificial Sequence
  Description of Artificial Sequence: Synthetic oligonucleotide
gacgugugugugugugugu

SEQ ID NO: 2364277 - RNA, 19 nt, Artificial Sequence
  Description of Artificial Sequence: Synthetic oligonucleotide
augcagaguagcaguuaaa

SEQ ID NO: 2364278 - RNA, 19 nt, Artificial Sequence
  Description of Artificial Sequence: Synthetic oligonucleotide
gcauguucuucaagauaug

SEQ ID NO: 2364279 - RNA, 19 nt, Artificial Sequence
  Description of Artificial Sequence: Synthetic oligonucleotide
agcugcccgagcagccuuc

SEQ ID NO: 2364280 - RNA, 19 nt, Artificial Sequence
  Description of Artificial Sequence: Synthetic oligonucleotide
guacacgcuuccucacugu

SEQ ID NO: 2364281 - RNA, 19 nt, Artificial Sequence
  Description of Artificial Sequence: Synthetic oligonucleotide
ccaaaccuagcugcccgag

SEQ ID NO: 2364282 - RNA, 19 nt, Artificial Sequence
  Description of Artificial Sequence: Synthetic oligonucleotide
uugcugcgccucacuccac

SEQ ID NO: 2364283 - RNA, 19 nt, Artificial Sequence
  Description of Artificial Sequence: Synthetic oligonucleotide
caccgucucggucgccauc

SEQ ID NO: 2364284 - RNA, 19 nt, Artificial Sequence
  Description of Artificial Sequence: Synthetic oligonucleotide
gcuuacagguacauugaau

SEQ ID NO: 2364285 - RNA, 19 nt, Artificial Sequence
  Description of Artificial Sequence: Synthetic oligonucleotide
gcacaugacgugugugugu

SEQ ID NO: 2364286 - RNA, 19 nt, Artificial Sequence
  Description of Artificial Sequence: Synthetic oligonucleotide
gcugcgccucacuccacca

SEQ ID NO: 2364287 - RNA, 19 nt, Artificial Sequence
  Description of Artificial Sequence: Synthetic oligonucleotide
guucagcccucuucugcau

SEQ ID NO: 2364288 - RNA, 19 nt, Artificial Sequence
  Description of Artificial Sequence: Synthetic oligonucleotide
ggcuuugguucuucuuccu

SEQ ID NO: 2364289 - RNA, 19 nt, Artificial Sequence
  Description of Artificial Sequence: Synthetic oligonucleotide
gcuuguggagcuccaccgu

SEQ ID NO: 2364290 - RNA, 19 nt, Artificial Sequence
  Description of Artificial Sequence: Synthetic oligonucleotide
gauaugccuggagccuauu

SEQ ID NO: 2364291 - RNA, 19 nt, Artificial Sequence
  Description of Artificial Sequence: Synthetic oligonucleotide
gcaaggcauucuugcuuua

SEQ ID NO: 2364292 - RNA, 19 nt, Artificial Sequence
  Description of Artificial Sequence: Synthetic oligonucleotide
cggucgccaucuugcugcg

SEQ ID NO: 2364293 - RNA, 19 nt, Artificial Sequence
  Description of Artificial Sequence: Synthetic oligonucleotide
gugucagaugacagaccuu

SEQ ID NO: 2364294 - RNA, 19 nt, Artificial Sequence
  Description of Artificial Sequence: Synthetic oligonucleotide
cuccaccgucucggucgcc

SEQ ID NO: 2364295 - RNA, 19 nt, Artificial Sequence
  Description of Artificial Sequence: Synthetic oligonucleotide
ccauaggcuuggugucaga

SEQ ID NO: 2364296 - RNA, 19 nt, Artificial Sequence
  Description of Artificial Sequence: Synthetic oligonucleotide
cccaaaacgcucugcucuu

SEQ ID NO: 2364297 - RNA, 19 nt, Artificial Sequence
  Description of Artificial Sequence: Synthetic oligonucleotide
gguuaaccauaggcuuggu

SEQ ID NO: 2364298 - RNA, 19 nt, Artificial Sequence
  Description of Artificial Sequence: Synthetic oligonucleotide
ccacgagcaaggcauucuu

SEQ ID NO: 2364299 - RNA, 19 nt, Artificial Sequence
  Description of Artificial Sequence: Synthetic oligonucleotide
cgccucacuccaccagauc

SEQ ID NO: 2364300 - RNA, 19 nt, Artificial Sequence
  Description of Artificial Sequence: Synthetic oligonucleotide
  modified_base (18)..(18): a, c, u, g, unknown or other
cgugugugugugugugunu

SEQ ID NO: 2364301 - RNA, 19 nt, Artificial Sequence
  Description of Artificial Sequence: Synthetic oligonucleotide
gcugcccgagcagccuucu

SEQ ID NO: 2364302 - RNA, 19 nt, Artificial Sequence
  Description of Artificial Sequence: Synthetic oligonucleotide
ccaaaacgcucugcucuuu

SEQ ID NO: 2364303 - RNA, 19 nt, Artificial Sequence
  Description of Artificial Sequence: Synthetic oligonucleotide
ccaccgucucggucgccau

SEQ ID NO: 2364304 - RNA, 19 nt, Artificial Sequence
  Description of Artificial Sequence: Synthetic oligonucleotide
ccgucucggucgccaucuu

SEQ ID NO: 2364305 - RNA, 19 nt, Artificial Sequence
  Description of Artificial Sequence: Synthetic oligonucleotide
aaagauuccuucuagguuc

SEQ ID NO: 2364306 - RNA, 19 nt, Artificial Sequence
  Description of Artificial Sequence: Synthetic oligonucleotide
aaaugugucaaugaugugc

SEQ ID NO: 2364307 - RNA, 19 nt, Artificial Sequence
  Description of Artificial Sequence: Synthetic oligonucleotide
aaaucagucagcuuuccac

SEQ ID NO: 2364308 - RNA, 19 nt, Artificial Sequence
  Description of Artificial Sequence: Synthetic oligonucleotide
aaucuauccauucaccuuc

SEQ ID NO: 2364309 - RNA, 19 nt, Artificial Sequence
  Description of Artificial Sequence: Synthetic oligonucleotide
aagaauaugguuccuggcg

SEQ ID NO: 2364310 - RNA, 19 nt, Artificial Sequence
  Description of Artificial Sequence: Synthetic oligonucleotide
gaaaauuucacuucuacca

SEQ ID NO: 2364311 - RNA, 19 nt, Artificial Sequence
  Description of Artificial Sequence: Synthetic oligonucleotide
ugaauuuuaaucuccuggg

SEQ ID NO: 2364312 - RNA, 19 nt, Artificial Sequence
  Description of Artificial Sequence: Synthetic oligonucleotide
gaaaucugcugccagaugg

SEQ ID NO: 2364313 - RNA, 19 nt, Artificial Sequence
  Description of Artificial Sequence: Synthetic oligonucleotide
agauguaaugacuucauuc

SEQ ID NO: 2364314 - RNA, 19 nt, Artificial Sequence
  Description of Artificial Sequence: Synthetic oligonucleotide
agaaaauuucacuucuacc

SEQ ID NO: 2364315 - RNA, 19 nt, Artificial Sequence
  Description of Artificial Sequence: Synthetic oligonucleotide
ucacauaaaaccuuguggc

SEQ ID NO: 2364316 - RNA, 19 nt, Artificial Sequence
  Description of Artificial Sequence: Synthetic oligonucleotide
aaagaauaugguuccuggc

SEQ ID NO: 2364317 - RNA, 19 nt, Artificial Sequence
  Description of Artificial Sequence: Synthetic oligonucleotide
uucaauugcaccaugagau

SEQ ID NO: 2364318 - RNA, 19 nt, Artificial Sequence
  Description of Artificial Sequence: Synthetic oligonucleotide
ucuagguucacucuucuag

SEQ ID NO: 2364319 - RNA, 19 nt, Artificial Sequence
  Description of Artificial Sequence: Synthetic oligonucleotide
uuugauaucuuuugguucc

SEQ ID NO: 2364320 - RNA, 19 nt, Artificial Sequence
  Description of Artificial Sequence: Synthetic oligonucleotide
acuucauucaauuugggca

SEQ ID NO: 2364321 - RNA, 19 nt, Artificial Sequence
  Description of Artificial Sequence: Synthetic oligonucleotide
aguauacacagccugaaag

SEQ ID NO: 2364322 - RNA, 19 nt, Artificial Sequence
  Description of Artificial Sequence: Synthetic oligonucleotide
aagucuuuguaacauccgg

SEQ ID NO: 2364323 - RNA, 19 nt, Artificial Sequence
  Description of Artificial Sequence: Synthetic oligonucleotide
aagaaaguugauuucacau

SEQ ID NO: 2364324 - RNA, 19 nt, Artificial Sequence
  Description of Artificial Sequence: Synthetic oligonucleotide
uuucuuauggacacaaaga

SEQ ID NO: 2364325 - RNA, 19 nt, Artificial Sequence
  Description of Artificial Sequence: Synthetic oligonucleotide
aaccugaagucuuuguaac

SEQ ID NO: 2364326 - RNA, 19 nt, Artificial Sequence
  Description of Artificial Sequence: Synthetic oligonucleotide
aauaccugcauguggccac

SEQ ID NO: 2364327 - RNA, 19 nt, Artificial Sequence
  Description of Artificial Sequence: Synthetic oligonucleotide
ugaagucuuuguaacaucc

SEQ ID NO: 2364328 - RNA, 19 nt, Artificial Sequence
  Description of Artificial Sequence: Synthetic oligonucleotide
gauguaaugacuucauuca

SEQ ID NO: 2364329 - RNA, 19 nt, Artificial Sequence
  Description of Artificial Sequence: Synthetic oligonucleotide
ucucgaauuaacacugggg

SEQ ID NO: 2364330 - RNA, 19 nt, Artificial Sequence
  Description of Artificial Sequence: Synthetic oligonucleotide
uauuucucgaauuaacacu

SEQ ID NO: 2364331 - RNA, 19 nt, Artificial Sequence
  Description of Artificial Sequence: Synthetic oligonucleotide
cucgaauuaacacuggggc

SEQ ID NO: 2364332 - RNA, 19 nt, Artificial Sequence
  Description of Artificial Sequence: Synthetic oligonucleotide
uucuuauggacacaaagaa

SEQ ID NO: 2364333 - RNA, 19 nt, Artificial Sequence
  Description of Artificial Sequence: Synthetic oligonucleotide
guuucuuauggacacaaag

SEQ ID NO: 2364334 - RNA, 19 nt, Artificial Sequence
  Description of Artificial Sequence: Synthetic oligonucleotide
cuuaaaucuauccauucac

SEQ ID NO: 2364335 - RNA, 19 nt, Artificial Sequence
  Description of Artificial Sequence: Synthetic oligonucleotide
agaauaugguuccuggcgg

SEQ ID NO: 2364336 - RNA, 19 nt, Artificial Sequence
  Description of Artificial Sequence: Synthetic oligonucleotide
ucaagugagaaaauuucac

SEQ ID NO: 2364337 - RNA, 19 nt, Artificial Sequence
  Description of Artificial Sequence: Synthetic oligonucleotide
ucuuaaaucuauccauuca

SEQ ID NO: 2364338 - RNA, 19 nt, Artificial Sequence
  Description of Artificial Sequence: Synthetic oligonucleotide
caaagaauaugguuccugg

SEQ ID NO: 2364339 - RNA, 19 nt, Artificial Sequence
  Description of Artificial Sequence: Synthetic oligonucleotide
uguaaggucauguuucuac

SEQ ID NO: 2364340 - RNA, 19 nt, Artificial Sequence
  Description of Artificial Sequence: Synthetic oligonucleotide
aaguugauuucacauaaaa

SEQ ID NO: 2364341 - RNA, 19 nt, Artificial Sequence
  Description of Artificial Sequence: Synthetic oligonucleotide
cauaguaucaccacccaug

SEQ ID NO: 2364342 - RNA, 19 nt, Artificial Sequence
  Description of Artificial Sequence: Synthetic oligonucleotide
auaguaucaccacccaugg

SEQ ID NO: 2364343 - RNA, 19 nt, Artificial Sequence
  Description of Artificial Sequence: Synthetic oligonucleotide
uguugauuaguucucggac

SEQ ID NO: 2364344 - RNA, 19 nt, Artificial Sequence
  Description of Artificial Sequence: Synthetic oligonucleotide
uacacagccugaaagauuc

SEQ ID NO: 2364345 - RNA, 19 nt, Artificial Sequence
  Description of Artificial Sequence: Synthetic oligonucleotide
agacugcugaauuuuaauc

SEQ ID NO: 2364346 - RNA, 19 nt, Artificial Sequence
  Description of Artificial Sequence: Synthetic oligonucleotide
ucugaauagggaugguggg

SEQ ID NO: 2364347 - RNA, 19 nt, Artificial Sequence
  Description of Artificial Sequence: Synthetic oligonucleotide
acugcugaauuuuaaucuc

SEQ ID NO: 2364348 - RNA, 19 nt, Artificial Sequence
  Description of Artificial Sequence: Synthetic oligonucleotide
ugcaccaugagauguaaug

SEQ ID NO: 2364349 - RNA, 19 nt, Artificial Sequence
  Description of Artificial Sequence: Synthetic oligonucleotide
aaucagucagcuuuccacu

SEQ ID NO: 2364350 - RNA, 19 nt, Artificial Sequence
  Description of Artificial Sequence: Synthetic oligonucleotide
auuuuaaucuccugggagu

SEQ ID NO: 2364351 - RNA, 19 nt, Artificial Sequence
  Description of Artificial Sequence: Synthetic oligonucleotide
uugauuaguucucggacug

SEQ ID NO: 2364352 - RNA, 19 nt, Artificial Sequence
  Description of Artificial Sequence: Synthetic oligonucleotide
uuuccugggauuuagggau

SEQ ID NO: 2364353 - RNA, 19 nt, Artificial Sequence
  Description of Artificial Sequence: Synthetic oligonucleotide
acacaaagaaaguugauuu

SEQ ID NO: 2364354 - RNA, 19 nt, Artificial Sequence
  Description of Artificial Sequence: Synthetic oligonucleotide
agaugaaacugcuucaagu

SEQ ID NO: 2364355 - RNA, 19 nt, Artificial Sequence
  Description of Artificial Sequence: Synthetic oligonucleotide
uucucgaauuaacacuggg

SEQ ID NO: 2364356 - RNA, 19 nt, Artificial Sequence
  Description of Artificial Sequence: Synthetic oligonucleotide
auucuuaugauacauucuu

SEQ ID NO: 2364357 - RNA, 19 nt, Artificial Sequence
  Description of Artificial Sequence: Synthetic oligonucleotide
acauucuuaaaucuaucca

SEQ ID NO: 2364358 - RNA, 19 nt, Artificial Sequence
  Description of Artificial Sequence: Synthetic oligonucleotide
aguuauuucucgaauuaac

SEQ ID NO: 2364359 - RNA, 19 nt, Artificial Sequence
  Description of Artificial Sequence: Synthetic oligonucleotide
aguugauuucacauaaaac

SEQ ID NO: 2364360 - RNA, 19 nt, Artificial Sequence
  Description of Artificial Sequence: Synthetic oligonucleotide
aauagggauggugggauuc

SEQ ID NO: 2364361 - RNA, 19 nt, Artificial Sequence
  Description of Artificial Sequence: Synthetic oligonucleotide
uggacacaaagaaaguuga

SEQ ID NO: 2364362 - RNA, 19 nt, Artificial Sequence
  Description of Artificial Sequence: Synthetic oligonucleotide
uucuacucaagugagaaaa

SEQ ID NO: 2364363 - RNA, 19 nt, Artificial Sequence
  Description of Artificial Sequence: Synthetic oligonucleotide
cuucauucaauuugggcac

SEQ ID NO: 2364364 - RNA, 19 nt, Artificial Sequence
  Description of Artificial Sequence: Synthetic oligonucleotide
uuaacacuggggcuacccg

SEQ ID NO: 2364365 - RNA, 19 nt, Artificial Sequence
  Description of Artificial Sequence: Synthetic oligonucleotide
agucagacuugguaccucc

SEQ ID NO: 2364366 - RNA, 19 nt, Artificial Sequence
  Description of Artificial Sequence: Synthetic oligonucleotide
uguagcuucugaauaggga

SEQ ID NO: 2364367 - RNA, 19 nt, Artificial Sequence
  Description of Artificial Sequence: Synthetic oligonucleotide
uggagcuagaugaaacugc

SEQ ID NO: 2364368 - RNA, 19 nt, Artificial Sequence
  Description of Artificial Sequence: Synthetic oligonucleotide
aaugugucaaugaugugcu

SEQ ID NO: 2364369 - RNA, 19 nt, Artificial Sequence
  Description of Artificial Sequence: Synthetic oligonucleotide
aaugaugugcucccuggga

SEQ ID NO: 2364370 - RNA, 19 nt, Artificial Sequence
  Description of Artificial Sequence: Synthetic oligonucleotide
ucuuuguaacauccggaag

SEQ ID NO: 2364371 - RNA, 19 nt, Artificial Sequence
  Description of Artificial Sequence: Synthetic oligonucleotide
auuaacacuggggcuaccc

SEQ ID NO: 2364372 - RNA, 19 nt, Artificial Sequence
  Description of Artificial Sequence: Synthetic oligonucleotide
uucaucguucucuguaagg

SEQ ID NO: 2364373 - RNA, 19 nt, Artificial Sequence
  Description of Artificial Sequence: Synthetic oligonucleotide
caucacuggagcuagauga

SEQ ID NO: 2364374 - RNA, 19 nt, Artificial Sequence
  Description of Artificial Sequence: Synthetic oligonucleotide
aaaucuauccauucaccuu

SEQ ID NO: 2364375 - RNA, 19 nt, Artificial Sequence
  Description of Artificial Sequence: Synthetic oligonucleotide
guuccauuggucucaaacc

SEQ ID NO: 2364376 - RNA, 19 nt, Artificial Sequence
  Description of Artificial Sequence: Synthetic oligonucleotide
gauuucacauaaaaccuug

SEQ ID NO: 2364377 - RNA, 19 nt, Artificial Sequence
  Description of Artificial Sequence: Synthetic oligonucleotide
acucaagugagaaaauuuc

SEQ ID NO: 2364378 - RNA, 19 nt, Artificial Sequence
  Description of Artificial Sequence: Synthetic oligonucleotide
uauccauucaccuuccaua

SEQ ID NO: 2364379 - RNA, 19 nt, Artificial Sequence
  Description of Artificial Sequence: Synthetic oligonucleotide
aauguuccuggcuggaccu

SEQ ID NO: 2364380 - RNA, 19 nt, Artificial Sequence
  Description of Artificial Sequence: Synthetic oligonucleotide
auuucucgaauuaacacug

SEQ ID NO: 2364381 - RNA, 19 nt, Artificial Sequence
  Description of Artificial Sequence: Synthetic oligonucleotide
aaccacuccagcaguauac

SEQ ID NO: 2364382 - RNA, 19 nt, Artificial Sequence
  Description of Artificial Sequence: Synthetic oligonucleotide
uuuugaagacugcugaauu

SEQ ID NO: 2364383 - RNA, 19 nt, Artificial Sequence
  Description of Artificial Sequence: Synthetic oligonucleotide
ucuuauggacacaaagaaa

SEQ ID NO: 2364384 - RNA, 19 nt, Artificial Sequence
  Description of Artificial Sequence: Synthetic oligonucleotide
gaaccagugggccacuucc

SEQ ID NO: 2364385 - RNA, 19 nt, Artificial Sequence
  Description of Artificial Sequence: Synthetic oligonucleotide
uucaaguagcuguugauua

SEQ ID NO: 2364386 - RNA, 19 nt, Artificial Sequence
  Description of Artificial Sequence: Synthetic oligonucleotide
ugccaauaccugcaugugg

SEQ ID NO: 2364387 - RNA, 19 nt, Artificial Sequence
  Description of Artificial Sequence: Synthetic oligonucleotide
ugauacauucuuaaaucua

SEQ ID NO: 2364388 - RNA, 19 nt, Artificial Sequence
  Description of Artificial Sequence: Synthetic oligonucleotide
ugggauuuagggaucggug

SEQ ID NO: 2364389 - RNA, 19 nt, Artificial Sequence
  Description of Artificial Sequence: Synthetic oligonucleotide
aguagcuguugauuaguuc

SEQ ID NO: 2364390 - RNA, 19 nt, Artificial Sequence
  Description of Artificial Sequence: Synthetic oligonucleotide
uccggcugaaaucugcugc

SEQ ID NO: 2364391 - RNA, 19 nt, Artificial Sequence
  Description of Artificial Sequence: Synthetic oligonucleotide
gaugaaacugcuucaagua

SEQ ID NO: 2364392 - RNA, 19 nt, Artificial Sequence
  Description of Artificial Sequence: Synthetic oligonucleotide
gaugcagagucagacuugg

SEQ ID NO: 2364393 - RNA, 19 nt, Artificial Sequence
  Description of Artificial Sequence: Synthetic oligonucleotide
auuggucucaaaccugaag

SEQ ID NO: 2364394 - RNA, 19 nt, Artificial Sequence
  Description of Artificial Sequence: Synthetic oligonucleotide
uagaugaaacugcuucaag

SEQ ID NO: 2364395 - RNA, 19 nt, Artificial Sequence
  Description of Artificial Sequence: Synthetic oligonucleotide
aaccuuguggcaaagaaua

SEQ ID NO: 2364396 - RNA, 19 nt, Artificial Sequence
  Description of Artificial Sequence: Synthetic oligonucleotide
cuugguaccuccagaauuc

SEQ ID NO: 2364397 - RNA, 19 nt, Artificial Sequence
  Description of Artificial Sequence: Synthetic oligonucleotide
uucuuaaaucuauccauuc

SEQ ID NO: 2364398 - RNA, 19 nt, Artificial Sequence
  Description of Artificial Sequence: Synthetic oligonucleotide
cuuuguggccucaucaaug

SEQ ID NO: 2364399 - RNA, 19 nt, Artificial Sequence
  Description of Artificial Sequence: Synthetic oligonucleotide
uuuguggccucaucaaugu

SEQ ID NO: 2364400 - RNA, 19 nt, Artificial Sequence
  Description of Artificial Sequence: Synthetic oligonucleotide
augaugugcucccugggag

SEQ ID NO: 2364401 - RNA, 19 nt, Artificial Sequence
  Description of Artificial Sequence: Synthetic oligonucleotide
cuuccauaguaucaccacc

SEQ ID NO: 2364402 - RNA, 19 nt, Artificial Sequence
  Description of Artificial Sequence: Synthetic oligonucleotide
uggcguuguguuuugaaga

SEQ ID NO: 2364403 - RNA, 19 nt, Artificial Sequence
  Description of Artificial Sequence: Synthetic oligonucleotide
ucgaauuaacacuggggcu

SEQ ID NO: 2364404 - RNA, 19 nt, Artificial Sequence
  Description of Artificial Sequence: Synthetic oligonucleotide
ugcagagucagacuuggua

SEQ ID NO: 2364405 - RNA, 19 nt, Artificial Sequence
  Description of Artificial Sequence: Synthetic oligonucleotide
cacuggcuuaggaagaacc

SEQ ID NO: 2364406 - RNA, 19 nt, Artificial Sequence
  Description of Artificial Sequence: Synthetic oligonucleotide
auggcguuguguuuugaag

SEQ ID NO: 2364407 - RNA, 19 nt, Artificial Sequence
  Description of Artificial Sequence: Synthetic oligonucleotide
ugagauguaaugacuucau

SEQ ID NO: 2364408 - RNA, 19 nt, Artificial Sequence
  Description of Artificial Sequence: Synthetic oligonucleotide
uucuaguuauuucucgaau

SEQ ID NO: 2364409 - RNA, 19 nt, Artificial Sequence
  Description of Artificial Sequence: Synthetic oligonucleotide
gaagucuuuguaacauccg

SEQ ID NO: 2364410 - RNA, 19 nt, Artificial Sequence
  Description of Artificial Sequence: Synthetic oligonucleotide
guauacacagccugaaaga

SEQ ID NO: 2364411 - RNA, 19 nt, Artificial Sequence
  Description of Artificial Sequence: Synthetic oligonucleotide
gaauuuuaaucuccuggga

SEQ ID NO: 2364412 - RNA, 19 nt, Artificial Sequence
  Description of Artificial Sequence: Synthetic oligonucleotide
auccggaagucuguaaagc

SEQ ID NO: 2364413 - RNA, 19 nt, Artificial Sequence
  Description of Artificial Sequence: Synthetic oligonucleotide
ugcugaauuuuaaucuccu

SEQ ID NO: 2364414 - RNA, 19 nt, Artificial Sequence
  Description of Artificial Sequence: Synthetic oligonucleotide
uugaucucaguuucuuaug

SEQ ID NO: 2364415 - RNA, 19 nt, Artificial Sequence
  Description of Artificial Sequence: Synthetic oligonucleotide
gacugcugaauuuuaaucu

SEQ ID NO: 2364416 - RNA, 19 nt, Artificial Sequence
  Description of Artificial Sequence: Synthetic oligonucleotide
ggauucuuaugauacauuc

SEQ ID NO: 2364417 - RNA, 19 nt, Artificial Sequence
  Description of Artificial Sequence: Synthetic oligonucleotide
agcuucugaauagggaugg

SEQ ID NO: 2364418 - RNA, 19 nt, Artificial Sequence
  Description of Artificial Sequence: Synthetic oligonucleotide
cugcugaauuuuaaucucc

SEQ ID NO: 2364419 - RNA, 19 nt, Artificial Sequence
  Description of Artificial Sequence: Synthetic oligonucleotide
uuugaagacugcugaauuu

SEQ ID NO: 2364420 - RNA, 19 nt, Artificial Sequence
  Description of Artificial Sequence: Synthetic oligonucleotide
caauguuccuggcuggacc

SEQ ID NO: 2364421 - RNA, 19 nt, Artificial Sequence
  Description of Artificial Sequence: Synthetic oligonucleotide
uccuugucugguucaauug

SEQ ID NO: 2364422 - RNA, 19 nt, Artificial Sequence
  Description of Artificial Sequence: Synthetic oligonucleotide
acuugguaccuccagaauu

SEQ ID NO: 2364423 - RNA, 19 nt, Artificial Sequence
  Description of Artificial Sequence: Synthetic oligonucleotide
uggaccuuggcaugcagac

SEQ ID NO: 2364424 - RNA, 19 nt, Artificial Sequence
  Description of Artificial Sequence: Synthetic oligonucleotide
gguuccauuggucucaaac

SEQ ID NO: 2364425 - RNA, 19 nt, Artificial Sequence
  Description of Artificial Sequence: Synthetic oligonucleotide
guguuuugaagacugcuga

SEQ ID NO: 2364426 - RNA, 19 nt, Artificial Sequence
  Description of Artificial Sequence: Synthetic oligonucleotide
acuggagcuagaugaaacu

SEQ ID NO: 2364427 - RNA, 19 nt, Artificial Sequence
  Description of Artificial Sequence: Synthetic oligonucleotide
ugguucaauugcaccauga

SEQ ID NO: 2364428 - RNA, 19 nt, Artificial Sequence
  Description of Artificial Sequence: Synthetic oligonucleotide
uuuuaaucuccugggaguc

SEQ ID NO: 2364429 - RNA, 19 nt, Artificial Sequence
  Description of Artificial Sequence: Synthetic oligonucleotide
uaugguuccuggcggauau

SEQ ID NO: 2364430 - RNA, 19 nt, Artificial Sequence
  Description of Artificial Sequence: Synthetic oligonucleotide
uguuucuacucaagugaga

SEQ ID NO: 2364431 - RNA, 19 nt, Artificial Sequence
  Description of Artificial Sequence: Synthetic oligonucleotide
uuuguaacauccggaaguc

SEQ ID NO: 2364432 - RNA, 19 nt, Artificial Sequence
  Description of Artificial Sequence: Synthetic oligonucleotide
caucaauguuccuggcugg

SEQ ID NO: 2364433 - RNA, 19 nt, Artificial Sequence
  Description of Artificial Sequence: Synthetic oligonucleotide
gaucggugccaauaccugc

SEQ ID NO: 2364434 - RNA, 19 nt, Artificial Sequence
  Description of Artificial Sequence: Synthetic oligonucleotide
cagacaguagcuccauugc

SEQ ID NO: 2364435 - RNA, 19 nt, Artificial Sequence
  Description of Artificial Sequence: Synthetic oligonucleotide
uccggaagucuguaaagcu

SEQ ID NO: 2364436 - RNA, 19 nt, Artificial Sequence
  Description of Artificial Sequence: Synthetic oligonucleotide
cagagucagacuugguacc

SEQ ID NO: 2364437 - RNA, 19 nt, Artificial Sequence
  Description of Artificial Sequence: Synthetic oligonucleotide
cuguagcuucugaauaggg

SEQ ID NO: 2364438 - RNA, 19 nt, Artificial Sequence
  Description of Artificial Sequence: Synthetic oligonucleotide
uucuuaugauacauucuua

SEQ ID NO: 2364439 - RNA, 19 nt, Artificial Sequence
  Description of Artificial Sequence: Synthetic oligonucleotide
augagauguaaugacuuca

SEQ ID NO: 2364440 - RNA, 19 nt, Artificial Sequence
  Description of Artificial Sequence: Synthetic oligonucleotide
uguuuugaagacugcugaa

SEQ ID NO: 2364441 - RNA, 19 nt, Artificial Sequence
  Description of Artificial Sequence: Synthetic oligonucleotide
gagucagaugcagagucag

SEQ ID NO: 2364442 - RNA, 19 nt, Artificial Sequence
  Description of Artificial Sequence: Synthetic oligonucleotide
cuuggcaugcagacaguag

SEQ ID NO: 2364443 - RNA, 19 nt, Artificial Sequence
  Description of Artificial Sequence: Synthetic oligonucleotide
agggaucggugccaauacc

SEQ ID NO: 2364444 - RNA, 19 nt, Artificial Sequence
  Description of Artificial Sequence: Synthetic oligonucleotide
ugaauagggauggugggau

SEQ ID NO: 2364445 - RNA, 19 nt, Artificial Sequence
  Description of Artificial Sequence: Synthetic oligonucleotide
caugagauguaaugacuuc

SEQ ID NO: 2364446 - RNA, 19 nt, Artificial Sequence
  Description of Artificial Sequence: Synthetic oligonucleotide
uccauaguaucaccaccca

SEQ ID NO: 2364447 - RNA, 19 nt, Artificial Sequence
  Description of Artificial Sequence: Synthetic oligonucleotide
acauaaaaccuuguggcaa

SEQ ID NO: 2364448 - RNA, 19 nt, Artificial Sequence
  Description of Artificial Sequence: Synthetic oligonucleotide
auacauucuuaaaucuauc

SEQ ID NO: 2364449 - RNA, 19 nt, Artificial Sequence
  Description of Artificial Sequence: Synthetic oligonucleotide
aauuucacuucuaccaguu

SEQ ID NO: 2364450 - RNA, 19 nt, Artificial Sequence
  Description of Artificial Sequence: Synthetic oligonucleotide
ugaaaucugcugccagaug

SEQ ID NO: 2364451 - RNA, 19 nt, Artificial Sequence
  Description of Artificial Sequence: Synthetic oligonucleotide
ggugggauucuuaugauac

SEQ ID NO: 2364452 - RNA, 19 nt, Artificial Sequence
  Description of Artificial Sequence: Synthetic oligonucleotide
ugguaccuccagaauucgg

SEQ ID NO: 2364453 - RNA, 19 nt, Artificial Sequence
  Description of Artificial Sequence: Synthetic oligonucleotide
agcuccauugcucucugga

SEQ ID NO: 2364454 - RNA, 19 nt, Artificial Sequence
  Description of Artificial Sequence: Synthetic oligonucleotide
ucaccuuccauaguaucac

SEQ ID NO: 2364455 - RNA, 19 nt, Artificial Sequence
  Description of Artificial Sequence: Synthetic oligonucleotide
aauuaacacuggggcuacc

SEQ ID NO: 2364456 - RNA, 19 nt, Artificial Sequence
  Description of Artificial Sequence: Synthetic oligonucleotide
ugagaaaauuucacuucua

SEQ ID NO: 2364457 - RNA, 19 nt, Artificial Sequence
  Description of Artificial Sequence: Synthetic oligonucleotide
uaacacuggggcuacccgu

SEQ ID NO: 2364458 - RNA, 19 nt, Artificial Sequence
  Description of Artificial Sequence: Synthetic oligonucleotide
agacuugguaccuccagaa

SEQ ID NO: 2364459 - RNA, 19 nt, Artificial Sequence
  Description of Artificial Sequence: Synthetic oligonucleotide
gggauuuagggaucggugc

SEQ ID NO: 2364460 - RNA, 19 nt, Artificial Sequence
  Description of Artificial Sequence: Synthetic oligonucleotide
uagggaucggugccaauac

SEQ ID NO: 2364461 - RNA, 19 nt, Artificial Sequence
  Description of Artificial Sequence: Synthetic oligonucleotide
gucagaugcagagucagac

SEQ ID NO: 2364462 - RNA, 19 nt, Artificial Sequence
  Description of Artificial Sequence: Synthetic oligonucleotide
ucggacugcuuugauaucu

SEQ ID NO: 2364463 - RNA, 19 nt, Artificial Sequence
  Description of Artificial Sequence: Synthetic oligonucleotide
acauccggaagucuguaaa

SEQ ID NO: 2364464 - RNA, 19 nt, Artificial Sequence
  Description of Artificial Sequence: Synthetic oligonucleotide
aaaccuuguggcaaagaau

SEQ ID NO: 2364465 - RNA, 19 nt, Artificial Sequence
  Description of Artificial Sequence: Synthetic oligonucleotide
cagcaguauacacagccug

SEQ ID NO: 2364466 - RNA, 19 nt, Artificial Sequence
  Description of Artificial Sequence: Synthetic oligonucleotide
uugaagacugcugaauuuu

SEQ ID NO: 2364467 - RNA, 19 nt, Artificial Sequence
  Description of Artificial Sequence: Synthetic oligonucleotide
gcagagucagacuugguac

SEQ ID NO: 2364468 - RNA, 19 nt, Artificial Sequence
  Description of Artificial Sequence: Synthetic oligonucleotide
guaucugcgcuuuguggcc

SEQ ID NO: 2364469 - RNA, 19 nt, Artificial Sequence
  Description of Artificial Sequence: Synthetic oligonucleotide
ugaagacugcugaauuuua

SEQ ID NO: 2364470 - RNA, 19 nt, Artificial Sequence
  Description of Artificial Sequence: Synthetic oligonucleotide
ggauuuagggaucggugcc

SEQ ID NO: 2364471 - RNA, 19 nt, Artificial Sequence
  Description of Artificial Sequence: Synthetic oligonucleotide
guagcuucugaauagggau

SEQ ID NO: 2364472 - RNA, 19 nt, Artificial Sequence
  Description of Artificial Sequence: Synthetic oligonucleotide
cuucuaccaguuuccuggg

SEQ ID NO: 2364473 - RNA, 19 nt, Artificial Sequence
  Description of Artificial Sequence: Synthetic oligonucleotide
agcuucaucguucucugua

SEQ ID NO: 2364474 - RNA, 19 nt, Artificial Sequence
  Description of Artificial Sequence: Synthetic oligonucleotide
uuagggaucggugccaaua

SEQ ID NO: 2364475 - RNA, 19 nt, Artificial Sequence
  Description of Artificial Sequence: Synthetic oligonucleotide
cuucugaauagggauggug

SEQ ID NO: 2364476 - RNA, 19 nt, Artificial Sequence
  Description of Artificial Sequence: Synthetic oligonucleotide
gaauaugguuccuggcgga

SEQ ID NO: 2364477 - RNA, 19 nt, Artificial Sequence
  Description of Artificial Sequence: Synthetic oligonucleotide
aggaaaucagucagcuuuc

SEQ ID NO: 2364478 - RNA, 19 nt, Artificial Sequence
  Description of Artificial Sequence: Synthetic oligonucleotide
agcuguugauuaguucucg

SEQ ID NO: 2364479 - RNA, 19 nt, Artificial Sequence
  Description of Artificial Sequence: Synthetic oligonucleotide
guugauuaguucucggacu

SEQ ID NO: 2364480 - RNA, 19 nt, Artificial Sequence
  Description of Artificial Sequence: Synthetic oligonucleotide
uuucuacucaagugagaaa

SEQ ID NO: 2364481 - RNA, 19 nt, Artificial Sequence
  Description of Artificial Sequence: Synthetic oligonucleotide
cacauaaaaccuuguggca

SEQ ID NO: 2364482 - RNA, 19 nt, Artificial Sequence
  Description of Artificial Sequence: Synthetic oligonucleotide
cuucaucguucucuguaag

SEQ ID NO: 2364483 - RNA, 19 nt, Artificial Sequence
  Description of Artificial Sequence: Synthetic oligonucleotide
gguaccuccagaauucggc

SEQ ID NO: 2364484 - RNA, 19 nt, Artificial Sequence
  Description of Artificial Sequence: Synthetic oligonucleotide
uugguaccuccagaauucg

SEQ ID NO: 2364485 - RNA, 19 nt, Artificial Sequence
  Description of Artificial Sequence: Synthetic oligonucleotide
uagcuguugauuaguucuc

SEQ ID NO: 2364486 - RNA, 19 nt, Artificial Sequence
  Description of Artificial Sequence: Synthetic oligonucleotide
aacauccggaagucuguaa

SEQ ID NO: 2364487 - RNA, 19 nt, Artificial Sequence
  Description of Artificial Sequence: Synthetic oligonucleotide
acccguuuugaucucaguu

SEQ ID NO: 2364488 - RNA, 19 nt, Artificial Sequence
  Description of Artificial Sequence: Synthetic oligonucleotide
uuuaaucuccugggaguca

SEQ ID NO: 2364489 - RNA, 19 nt, Artificial Sequence
  Description of Artificial Sequence: Synthetic oligonucleotide
aucuauccauucaccuucc

SEQ ID NO: 2364490 - RNA, 19 nt, Artificial Sequence
  Description of Artificial Sequence: Synthetic oligonucleotide
cauucaauuugggcacugg

SEQ ID NO: 2364491 - RNA, 19 nt, Artificial Sequence
  Description of Artificial Sequence: Synthetic oligonucleotide
agccugaaagauuccuucu

SEQ ID NO: 2364492 - RNA, 19 nt, Artificial Sequence
  Description of Artificial Sequence: Synthetic oligonucleotide
caagugagaaaauuucacu

SEQ ID NO: 2364493 - RNA, 19 nt, Artificial Sequence
  Description of Artificial Sequence: Synthetic oligonucleotide
uuuccacuggggcucucca

SEQ ID NO: 2364494 - RNA, 19 nt, Artificial Sequence
  Description of Artificial Sequence: Synthetic oligonucleotide
cacuccagcaguauacaca

SEQ ID NO: 2364495 - RNA, 19 nt, Artificial Sequence
  Description of Artificial Sequence: Synthetic oligonucleotide
ugccagauggcguuguguu

SEQ ID NO: 2364496 - RNA, 19 nt, Artificial Sequence
  Description of Artificial Sequence: Synthetic oligonucleotide
gauauuguccuugucuggu

SEQ ID NO: 2364497 - RNA, 19 nt, Artificial Sequence
  Description of Artificial Sequence: Synthetic oligonucleotide
cuggagcuagaugaaacug

SEQ ID NO: 2364498 - RNA, 19 nt, Artificial Sequence
  Description of Artificial Sequence: Synthetic oligonucleotide
gaauuaacacuggggcuac

SEQ ID NO: 2364499 - RNA, 19 nt, Artificial Sequence
  Description of Artificial Sequence: Synthetic oligonucleotide
accaugagauguaaugacu

SEQ ID NO: 2364500 - RNA, 19 nt, Artificial Sequence
  Description of Artificial Sequence: Synthetic oligonucleotide
uaguaucaccacccauggc

SEQ ID NO: 2364501 - RNA, 19 nt, Artificial Sequence
  Description of Artificial Sequence: Synthetic oligonucleotide
aauaugguuccuggcggau

SEQ ID NO: 2364502 - RNA, 19 nt, Artificial Sequence
  Description of Artificial Sequence: Synthetic oligonucleotide
gauggcguuguguuuugaa

SEQ ID NO: 2364503 - RNA, 19 nt, Artificial Sequence
  Description of Artificial Sequence: Synthetic oligonucleotide
gggagucagaugcagaguc

SEQ ID NO: 2364504 - RNA, 19 nt, Artificial Sequence
  Description of Artificial Sequence: Synthetic oligonucleotide
gcuguugauuaguucucgg

SEQ ID NO: 2364505 - RNA, 19 nt, Artificial Sequence
  Description of Artificial Sequence: Synthetic oligonucleotide
cuggcuuaggaagaaccac

SEQ ID NO: 2364506 - RNA, 19 nt, Artificial Sequence
  Description of Artificial Sequence: Synthetic oligonucleotide
ugcauguggccacuggcuu

SEQ ID NO: 2364507 - RNA, 19 nt, Artificial Sequence
  Description of Artificial Sequence: Synthetic oligonucleotide
gccaauaccugcauguggc

SEQ ID NO: 2364508 - RNA, 19 nt, Artificial Sequence
  Description of Artificial Sequence: Synthetic oligonucleotide
aagauuccuucuagguuca

SEQ ID NO: 2364509 - RNA, 19 nt, Artificial Sequence
  Description of Artificial Sequence: Synthetic oligonucleotide
ugauuaguucucggacugc

SEQ ID NO: 2364510 - RNA, 19 nt, Artificial Sequence
  Description of Artificial Sequence: Synthetic oligonucleotide
ucauucaauuugggcacug

SEQ ID NO: 2364511 - RNA, 19 nt, Artificial Sequence
  Description of Artificial Sequence: Synthetic oligonucleotide
acuggggcuacccguuuug

SEQ ID NO: 2364512 - RNA, 19 nt, Artificial Sequence
  Description of Artificial Sequence: Synthetic oligonucleotide
ucuauccauucaccuucca

SEQ ID NO: 2364513 - RNA, 19 nt, Artificial Sequence
  Description of Artificial Sequence: Synthetic oligonucleotide
guaucaccacccauggcug

SEQ ID NO: 2364514 - RNA, 19 nt, Artificial Sequence
  Description of Artificial Sequence: Synthetic oligonucleotide
cauugcucucuggaugucc

SEQ ID NO: 2364515 - RNA, 19 nt, Artificial Sequence
  Description of Artificial Sequence: Synthetic oligonucleotide
gauuuagggaucggugcca

SEQ ID NO: 2364516 - RNA, 19 nt, Artificial Sequence
  Description of Artificial Sequence: Synthetic oligonucleotide
accugcauguggccacugg

SEQ ID NO: 2364517 - RNA, 19 nt, Artificial Sequence
  Description of Artificial Sequence: Synthetic oligonucleotide
cuacccguuuugaucucag

SEQ ID NO: 2364518 - RNA, 19 nt, Artificial Sequence
  Description of Artificial Sequence: Synthetic oligonucleotide
cugguaucugcgcuuugug

SEQ ID NO: 2364519 - RNA, 19 nt, Artificial Sequence
  Description of Artificial Sequence: Synthetic oligonucleotide
aggucauguuucuacucaa

SEQ ID NO: 2364520 - RNA, 19 nt, Artificial Sequence
  Description of Artificial Sequence: Synthetic oligonucleotide
gcuagaugaaacugcuuca

SEQ ID NO: 2364521 - RNA, 19 nt, Artificial Sequence
  Description of Artificial Sequence: Synthetic oligonucleotide
ggcguuguguuuugaagac

SEQ ID NO: 2364522 - RNA, 19 nt, Artificial Sequence
  Description of Artificial Sequence: Synthetic oligonucleotide
uccauucaccuuccauagu

SEQ ID NO: 2364523 - RNA, 19 nt, Artificial Sequence
  Description of Artificial Sequence: Synthetic oligonucleotide
auuucacauaaaaccuugu

SEQ ID NO: 2364524 - RNA, 19 nt, Artificial Sequence
  Description of Artificial Sequence: Synthetic oligonucleotide
cacuucuaccaguuuccug

SEQ ID NO: 2364525 - RNA, 19 nt, Artificial Sequence
  Description of Artificial Sequence: Synthetic oligonucleotide
ucaauguuccuggcuggac

SEQ ID NO: 2364526 - RNA, 19 nt, Artificial Sequence
  Description of Artificial Sequence: Synthetic oligonucleotide
agguucacucuucuaguua

SEQ ID NO: 2364527 - RNA, 19 nt, Artificial Sequence
  Description of Artificial Sequence: Synthetic oligonucleotide
guaaggucauguuucuacu

SEQ ID NO: 2364528 - RNA, 19 nt, Artificial Sequence
  Description of Artificial Sequence: Synthetic oligonucleotide
gcugaauuuuaaucuccug

SEQ ID NO: 2364529 - RNA, 19 nt, Artificial Sequence
  Description of Artificial Sequence: Synthetic oligonucleotide
uucuaccaguuuccuggga

SEQ ID NO: 2364530 - RNA, 19 nt, Artificial Sequence
  Description of Artificial Sequence: Synthetic oligonucleotide
agcaguauacacagccuga

SEQ ID NO: 2364531 - RNA, 19 nt, Artificial Sequence
  Description of Artificial Sequence: Synthetic oligonucleotide
gcaaagaauaugguuccug

SEQ ID NO: 2364532 - RNA, 19 nt, Artificial Sequence
  Description of Artificial Sequence: Synthetic oligonucleotide
uccaucacuggagcuagau

SEQ ID NO: 2364533 - RNA, 19 nt, Artificial Sequence
  Description of Artificial Sequence: Synthetic oligonucleotide
agagucagacuugguaccu

SEQ ID NO: 2364534 - RNA, 19 nt, Artificial Sequence
  Description of Artificial Sequence: Synthetic oligonucleotide
uucauucaauuugggcacu

SEQ ID NO: 2364535 - RNA, 19 nt, Artificial Sequence
  Description of Artificial Sequence: Synthetic oligonucleotide
cuagaugaaacugcuucaa

SEQ ID NO: 2364536 - RNA, 19 nt, Artificial Sequence
  Description of Artificial Sequence: Synthetic oligonucleotide
gucuguaaagcuucaucgu

SEQ ID NO: 2364537 - RNA, 19 nt, Artificial Sequence
  Description of Artificial Sequence: Synthetic oligonucleotide
ccuuccauaguaucaccac

SEQ ID NO: 2364538 - RNA, 19 nt, Artificial Sequence
  Description of Artificial Sequence: Synthetic oligonucleotide
ucacuucuaccaguuuccu

SEQ ID NO: 2364539 - RNA, 19 nt, Artificial Sequence
  Description of Artificial Sequence: Synthetic oligonucleotide
uuguaacauccggaagucu

SEQ ID NO: 2364540 - RNA, 19 nt, Artificial Sequence
  Description of Artificial Sequence: Synthetic oligonucleotide
aaguagcuguugauuaguu

SEQ ID NO: 2364541 - RNA, 19 nt, Artificial Sequence
  Description of Artificial Sequence: Synthetic oligonucleotide
ucguucucuguaaggucau

SEQ ID NO: 2364542 - RNA, 19 nt, Artificial Sequence
  Description of Artificial Sequence: Synthetic oligonucleotide
gaugugcucccugggagga

SEQ ID NO: 2364543 - RNA, 19 nt, Artificial Sequence
  Description of Artificial Sequence: Synthetic oligonucleotide
agaugcagagucagacuug

SEQ ID NO: 2364544 - RNA, 19 nt, Artificial Sequence
  Description of Artificial Sequence: Synthetic oligonucleotide
ggcugaaaucugcugccag

SEQ ID NO: 2364545 - RNA, 19 nt, Artificial Sequence
  Description of Artificial Sequence: Synthetic oligonucleotide
auuucacuucuaccaguuu

SEQ ID NO: 2364546 - RNA, 19 nt, Artificial Sequence
  Description of Artificial Sequence: Synthetic oligonucleotide
auugcaccaugagauguaa

SEQ ID NO: 2364547 - RNA, 19 nt, Artificial Sequence
  Description of Artificial Sequence: Synthetic oligonucleotide
cuagguucacucuucuagu

SEQ ID NO: 2364548 - RNA, 19 nt, Artificial Sequence
  Description of Artificial Sequence: Synthetic oligonucleotide
gugggauucuuaugauaca

SEQ ID NO: 2364549 - RNA, 19 nt, Artificial Sequence
  Description of Artificial Sequence: Synthetic oligonucleotide
ggggcuacccguuuugauc

SEQ ID NO: 2364550 - RNA, 19 nt, Artificial Sequence
  Description of Artificial Sequence: Synthetic oligonucleotide
aucaauguuccuggcugga

SEQ ID NO: 2364551 - RNA, 19 nt, Artificial Sequence
  Description of Artificial Sequence: Synthetic oligonucleotide
ugcgcuuuguggccucauc

SEQ ID NO: 2364552 - RNA, 19 nt, Artificial Sequence
  Description of Artificial Sequence: Synthetic oligonucleotide
ccguuuugaucucaguuuc

SEQ ID NO: 2364553 - RNA, 19 nt, Artificial Sequence
  Description of Artificial Sequence: Synthetic oligonucleotide
ucacuggagcuagaugaaa

SEQ ID NO: 2364554 - RNA, 19 nt, Artificial Sequence
  Description of Artificial Sequence: Synthetic oligonucleotide
uaccaguuuccugggauuu

SEQ ID NO: 2364555 - RNA, 19 nt, Artificial Sequence
  Description of Artificial Sequence: Synthetic oligonucleotide
uggcggauauuguccuugu

SEQ ID NO: 2364556 - RNA, 19 nt, Artificial Sequence
  Description of Artificial Sequence: Synthetic oligonucleotide
gaaccacuccagcaguaua

SEQ ID NO: 2364557 - RNA, 19 nt, Artificial Sequence
  Description of Artificial Sequence: Synthetic oligonucleotide
cugaauagggaugguggga

SEQ ID NO: 2364558 - RNA, 19 nt, Artificial Sequence
  Description of Artificial Sequence: Synthetic oligonucleotide
ggucauguuucuacucaag

SEQ ID NO: 2364559 - RNA, 19 nt, Artificial Sequence
  Description of Artificial Sequence: Synthetic oligonucleotide
ggauggugggauucuuaug

SEQ ID NO: 2364560 - RNA, 19 nt, Artificial Sequence
  Description of Artificial Sequence: Synthetic oligonucleotide
uaucugcgcuuuguggccu

SEQ ID NO: 2364561 - RNA, 19 nt, Artificial Sequence
  Description of Artificial Sequence: Synthetic oligonucleotide
accacccauggcugcuccg

SEQ ID NO: 2364562 - RNA, 19 nt, Artificial Sequence
  Description of Artificial Sequence: Synthetic oligonucleotide
aucugcgcuuuguggccuc

SEQ ID NO: 2364563 - RNA, 19 nt, Artificial Sequence
  Description of Artificial Sequence: Synthetic oligonucleotide
uacccguuuugaucucagu

SEQ ID NO: 2364564 - RNA, 19 nt, Artificial Sequence
  Description of Artificial Sequence: Synthetic oligonucleotide
uugcaccaugagauguaau

SEQ ID NO: 2364565 - RNA, 19 nt, Artificial Sequence
  Description of Artificial Sequence: Synthetic oligonucleotide
agaaccacuccagcaguau

SEQ ID NO: 2364566 - RNA, 19 nt, Artificial Sequence
  Description of Artificial Sequence: Synthetic oligonucleotide
ccugcauguggccacuggc

SEQ ID NO: 2364567 - RNA, 19 nt, Artificial Sequence
  Description of Artificial Sequence: Synthetic oligonucleotide
gcggauauuguccuugucu

SEQ ID NO: 2364568 - RNA, 19 nt, Artificial Sequence
  Description of Artificial Sequence: Synthetic oligonucleotide
guuuugaagacugcugaau

SEQ ID NO: 2364569 - RNA, 19 nt, Artificial Sequence
  Description of Artificial Sequence: Synthetic oligonucleotide
ugauaucuuuugguuccau

SEQ ID NO: 2364570 - RNA, 19 nt, Artificial Sequence
  Description of Artificial Sequence: Synthetic oligonucleotide
aaccagugggccacuuccu

SEQ ID NO: 2364571 - RNA, 19 nt, Artificial Sequence
  Description of Artificial Sequence: Synthetic oligonucleotide
ccuuguggcaaagaauaug

SEQ ID NO: 2364572 - RNA, 19 nt, Artificial Sequence
  Description of Artificial Sequence: Synthetic oligonucleotide
uaacauccggaagucugua

SEQ ID NO: 2364573 - RNA, 19 nt, Artificial Sequence
  Description of Artificial Sequence: Synthetic oligonucleotide
uggggcuacccguuuugau

SEQ ID NO: 2364574 - RNA, 19 nt, Artificial Sequence
  Description of Artificial Sequence: Synthetic oligonucleotide
cuccggcugaaaucugcug

SEQ ID NO: 2364575 - RNA, 19 nt, Artificial Sequence
  Description of Artificial Sequence: Synthetic oligonucleotide
cuggaccuuggcaugcaga

SEQ ID NO: 2364576 - RNA, 19 nt, Artificial Sequence
  Description of Artificial Sequence: Synthetic oligonucleotide
gguucacucuucuaguuau

SEQ ID NO: 2364577 - RNA, 19 nt, Artificial Sequence
  Description of Artificial Sequence: Synthetic oligonucleotide
cagauggcguuguguuuug

SEQ ID NO: 2364578 - RNA, 19 nt, Artificial Sequence
  Description of Artificial Sequence: Synthetic oligonucleotide
gcaccaugagauguaauga

SEQ ID NO: 2364579 - RNA, 19 nt, Artificial Sequence
  Description of Artificial Sequence: Synthetic oligonucleotide
ggaaaucagucagcuuucc

SEQ ID NO: 2364580 - RNA, 19 nt, Artificial Sequence
  Description of Artificial Sequence: Synthetic oligonucleotide
ggaggaaccagugggccac

SEQ ID NO: 2364581 - RNA, 19 nt, Artificial Sequence
  Description of Artificial Sequence: Synthetic oligonucleotide
guaccuccagaauucggcu

SEQ ID NO: 2364582 - RNA, 19 nt, Artificial Sequence
  Description of Artificial Sequence: Synthetic oligonucleotide
uuuagggaucggugccaau

SEQ ID NO: 2364583 - RNA, 19 nt, Artificial Sequence
  Description of Artificial Sequence: Synthetic oligonucleotide
ccggcugaaaucugcugcc

SEQ ID NO: 2364584 - RNA, 19 nt, Artificial Sequence
  Description of Artificial Sequence: Synthetic oligonucleotide
ucggugccaauaccugcau

SEQ ID NO: 2364585 - RNA, 19 nt, Artificial Sequence
  Description of Artificial Sequence: Synthetic oligonucleotide
auacacagccugaaagauu

SEQ ID NO: 2364586 - RNA, 19 nt, Artificial Sequence
  Description of Artificial Sequence: Synthetic oligonucleotide
cggaagucuguaaagcuuc

SEQ ID NO: 2364587 - RNA, 19 nt, Artificial Sequence
  Description of Artificial Sequence: Synthetic oligonucleotide
uggcuggaccuuggcaugc

SEQ ID NO: 2364588 - RNA, 19 nt, Artificial Sequence
  Description of Artificial Sequence: Synthetic oligonucleotide
ccauuggucucaaaccuga

SEQ ID NO: 2364589 - RNA, 19 nt, Artificial Sequence
  Description of Artificial Sequence: Synthetic oligonucleotide
aucacuggagcuagaugaa

SEQ ID NO: 2364590 - RNA, 19 nt, Artificial Sequence
  Description of Artificial Sequence: Synthetic oligonucleotide
ccaauaccugcauguggcc

SEQ ID NO: 2364591 - RNA, 19 nt, Artificial Sequence
  Description of Artificial Sequence: Synthetic oligonucleotide
gggcucuccaccacaaaug

SEQ ID NO: 2364592 - RNA, 19 nt, Artificial Sequence
  Description of Artificial Sequence: Synthetic oligonucleotide
ggcacuggcuguguguccc

SEQ ID NO: 2364593 - RNA, 19 nt, Artificial Sequence
  Description of Artificial Sequence: Synthetic oligonucleotide
guaacauccggaagucugu

SEQ ID NO: 2364594 - RNA, 19 nt, Artificial Sequence
  Description of Artificial Sequence: Synthetic oligonucleotide
ccauucaccuuccauagua

SEQ ID NO: 2364595 - RNA, 19 nt, Artificial Sequence
  Description of Artificial Sequence: Synthetic oligonucleotide
gcuucaucguucucuguaa

SEQ ID NO: 2364596 - RNA, 19 nt, Artificial Sequence
  Description of Artificial Sequence: Synthetic oligonucleotide
cuauccauucaccuuccau

SEQ ID NO: 2364597 - RNA, 19 nt, Artificial Sequence
  Description of Artificial Sequence: Synthetic oligonucleotide
gagucagacuugguaccuc

SEQ ID NO: 2364598 - RNA, 19 nt, Artificial Sequence
  Description of Artificial Sequence: Synthetic oligonucleotide
ggcuuaggaagaaccacuc

SEQ ID NO: 2364599 - RNA, 19 nt, Artificial Sequence
  Description of Artificial Sequence: Synthetic oligonucleotide
gcgcuuuguggccucauca

SEQ ID NO: 2364600 - RNA, 19 nt, Artificial Sequence
  Description of Artificial Sequence: Synthetic oligonucleotide
caauuugggcacuggcugu

SEQ ID NO: 2364601 - RNA, 19 nt, Artificial Sequence
  Description of Artificial Sequence: Synthetic oligonucleotide
gggcuacccguuuugaucu

SEQ ID NO: 2364602 - RNA, 19 nt, Artificial Sequence
  Description of Artificial Sequence: Synthetic oligonucleotide
caccacccauggcugcucc

SEQ ID NO: 2364603 - RNA, 19 nt, Artificial Sequence
  Description of Artificial Sequence: Synthetic oligonucleotide
guuuugaucucaguuucuu

SEQ ID NO: 2364604 - RNA, 19 nt, Artificial Sequence
  Description of Artificial Sequence: Synthetic oligonucleotide
cucggacugcuuugauauc

SEQ ID NO: 2364605 - RNA, 19 nt, Artificial Sequence
  Description of Artificial Sequence: Synthetic oligonucleotide
auaugguuccuggcggaua

SEQ ID NO: 2364606 - RNA, 19 nt, Artificial Sequence
  Description of Artificial Sequence: Synthetic oligonucleotide
caaguagcuguugauuagu

SEQ ID NO: 2364607 - RNA, 19 nt, Artificial Sequence
  Description of Artificial Sequence: Synthetic oligonucleotide
cugcauguggccacuggcu

SEQ ID NO: 2364608 - RNA, 19 nt, Artificial Sequence
  Description of Artificial Sequence: Synthetic oligonucleotide
guccuugucugguucaauu

SEQ ID NO: 2364609 - RNA, 19 nt, Artificial Sequence
  Description of Artificial Sequence: Synthetic oligonucleotide
ccagaauucggcuucuccu

SEQ ID NO: 2364610 - RNA, 19 nt, Artificial Sequence
  Description of Artificial Sequence: Synthetic oligonucleotide
auaccugcauguggccacu

SEQ ID NO: 2364611 - RNA, 19 nt, Artificial Sequence
  Description of Artificial Sequence: Synthetic oligonucleotide
ggcugcuccggcugaaauc

SEQ ID NO: 2364612 - RNA, 19 nt, Artificial Sequence
  Description of Artificial Sequence: Synthetic oligonucleotide
guguagaagcucaggaaau

SEQ ID NO: 2364613 - RNA, 19 nt, Artificial Sequence
  Description of Artificial Sequence: Synthetic oligonucleotide
cagaauucggcuucuccuu

SEQ ID NO: 2364614 - RNA, 19 nt, Artificial Sequence
  Description of Artificial Sequence: Synthetic oligonucleotide
cauucaccuuccauaguau

SEQ ID NO: 2364615 - RNA, 19 nt, Artificial Sequence
  Description of Artificial Sequence: Synthetic oligonucleotide
gaauucggcuucuccuuuu

SEQ ID NO: 2364616 - RNA, 19 nt, Artificial Sequence
  Description of Artificial Sequence: Synthetic oligonucleotide
ucugcgcuuuguggccuca

SEQ ID NO: 2364617 - RNA, 19 nt, Artificial Sequence
  Description of Artificial Sequence: Synthetic oligonucleotide
cuacucaagugagaaaauu

SEQ ID NO: 2364618 - RNA, 19 nt, Artificial Sequence
  Description of Artificial Sequence: Synthetic oligonucleotide
ggaaccagugggccacuuc

SEQ ID NO: 2364619 - RNA, 19 nt, Artificial Sequence
  Description of Artificial Sequence: Synthetic oligonucleotide
gccugaaagauuccuucua

SEQ ID NO: 2364620 - RNA, 19 nt, Artificial Sequence
  Description of Artificial Sequence: Synthetic oligonucleotide
ggaagucuguaaagcuuca

SEQ ID NO: 2364621 - RNA, 19 nt, Artificial Sequence
  Description of Artificial Sequence: Synthetic oligonucleotide
gcaguauacacagccugaa

SEQ ID NO: 2364622 - RNA, 19 nt, Artificial Sequence
  Description of Artificial Sequence: Synthetic oligonucleotide
uagggauggugggauucuu

SEQ ID NO: 2364623 - RNA, 19 nt, Artificial Sequence
  Description of Artificial Sequence: Synthetic oligonucleotide
ggcaugcagacaguagcuc

SEQ ID NO: 2364624 - RNA, 19 nt, Artificial Sequence
  Description of Artificial Sequence: Synthetic oligonucleotide
ucaccacccauggcugcuc

SEQ ID NO: 2364625 - RNA, 19 nt, Artificial Sequence
  Description of Artificial Sequence: Synthetic oligonucleotide
cugggauuuagggaucggu

SEQ ID NO: 2364626 - RNA, 19 nt, Artificial Sequence
  Description of Artificial Sequence: Synthetic oligonucleotide
gggaucggugccaauaccu

SEQ ID NO: 2364627 - RNA, 19 nt, Artificial Sequence
  Description of Artificial Sequence: Synthetic oligonucleotide
ccacccauggcugcuccgg

SEQ ID NO: 2364628 - RNA, 19 nt, Artificial Sequence
  Description of Artificial Sequence: Synthetic oligonucleotide
cgaauuaacacuggggcua

SEQ ID NO: 2364629 - RNA, 19 nt, Artificial Sequence
  Description of Artificial Sequence: Synthetic oligonucleotide
uaccugcauguggccacug

SEQ ID NO: 2364630 - RNA, 19 nt, Artificial Sequence
  Description of Artificial Sequence: Synthetic oligonucleotide
cacagccugaaagauuccu

SEQ ID NO: 2364631 - RNA, 19 nt, Artificial Sequence
  Description of Artificial Sequence: Synthetic oligonucleotide
agggauggugggauucuua

SEQ ID NO: 2364632 - RNA, 19 nt, Artificial Sequence
  Description of Artificial Sequence: Synthetic oligonucleotide
ccaugagauguaaugacuu

SEQ ID NO: 2364633 - RNA, 19 nt, Artificial Sequence
  Description of Artificial Sequence: Synthetic oligonucleotide
cuggggcucuccaccacaa

SEQ ID NO: 2364634 - RNA, 19 nt, Artificial Sequence
  Description of Artificial Sequence: Synthetic oligonucleotide
ggggcucuccaccacaaau

SEQ ID NO: 2364635 - RNA, 19 nt, Artificial Sequence
  Description of Artificial Sequence: Synthetic oligonucleotide
gcucuccaccacaaaugug

SEQ ID NO: 2364636 - RNA, 19 nt, Artificial Sequence
  Description of Artificial Sequence: Synthetic oligonucleotide
gugcucccugggaggaacc

SEQ ID NO: 2364637 - RNA, 19 nt, Artificial Sequence
  Description of Artificial Sequence: Synthetic oligonucleotide
ugguuccauuggucucaaa

SEQ ID NO: 2364638 - RNA, 19 nt, Artificial Sequence
  Description of Artificial Sequence: Synthetic oligonucleotide
cccguuuugaucucaguuu

SEQ ID NO: 2364639 - RNA, 19 nt, Artificial Sequence
  Description of Artificial Sequence: Synthetic oligonucleotide
ccugggauuuagggaucgg

SEQ ID NO: 2364640 - RNA, 19 nt, Artificial Sequence
  Description of Artificial Sequence: Synthetic oligonucleotide
gcuacccguuuugaucuca

SEQ ID NO: 2364641 - RNA, 19 nt, Artificial Sequence
  Description of Artificial Sequence: Synthetic oligonucleotide
augcagagucagacuuggu

SEQ ID NO: 2364642 - RNA, 19 nt, Artificial Sequence
  Description of Artificial Sequence: Synthetic oligonucleotide
cuggggcuacccguuuuga

SEQ ID NO: 2364643 - RNA, 19 nt, Artificial Sequence
  Description of Artificial Sequence: Synthetic oligonucleotide
ggaccuuggcaugcagaca

SEQ ID NO: 2364644 - RNA, 19 nt, Artificial Sequence
  Description of Artificial Sequence: Synthetic oligonucleotide
gcuccauugcucucuggau

SEQ ID NO: 2364645 - RNA, 19 nt, Artificial Sequence
  Description of Artificial Sequence: Synthetic oligonucleotide
cugccagauggcguugugu

SEQ ID NO: 2364646 - RNA, 19 nt, Artificial Sequence
  Description of Artificial Sequence: Synthetic oligonucleotide
ggcuacccguuuugaucuc

SEQ ID NO: 2364647 - RNA, 19 nt, Artificial Sequence
  Description of Artificial Sequence: Synthetic oligonucleotide
augugcucccugggaggaa

SEQ ID NO: 2364648 - RNA, 19 nt, Artificial Sequence
  Description of Artificial Sequence: Synthetic oligonucleotide
ggcaaagaauaugguuccu

SEQ ID NO: 2364649 - RNA, 19 nt, Artificial Sequence
  Description of Artificial Sequence: Synthetic oligonucleotide
gggauucuuaugauacauu

SEQ ID NO: 2364650 - RNA, 19 nt, Artificial Sequence
  Description of Artificial Sequence: Synthetic oligonucleotide
ccacuggggcucuccacca

SEQ ID NO: 2364651 - RNA, 19 nt, Artificial Sequence
  Description of Artificial Sequence: Synthetic oligonucleotide
cauggcugcuccggcugaa

SEQ ID NO: 2364652 - RNA, 19 nt, Artificial Sequence
  Description of Artificial Sequence: Synthetic oligonucleotide
ccagugggccacuuccucu

SEQ ID NO: 2364653 - RNA, 19 nt, Artificial Sequence
  Description of Artificial Sequence: Synthetic oligonucleotide
ccauaguaucaccacccau

SEQ ID NO: 2364654 - RNA, 19 nt, Artificial Sequence
  Description of Artificial Sequence: Synthetic oligonucleotide
gcacuggcuguguguccca

SEQ ID NO: 2364655 - RNA, 19 nt, Artificial Sequence
  Description of Artificial Sequence: Synthetic oligonucleotide
gcguuguguuuugaagacu

SEQ ID NO: 2364656 - RNA, 19 nt, Artificial Sequence
  Description of Artificial Sequence: Synthetic oligonucleotide
cguuuugaucucaguuucu

SEQ ID NO: 2364657 - RNA, 19 nt, Artificial Sequence
  Description of Artificial Sequence: Synthetic oligonucleotide
gcuccggcugaaaucugcu

SEQ ID NO: 2364658 - RNA, 19 nt, Artificial Sequence
  Description of Artificial Sequence: Synthetic oligonucleotide
ccauugcucucuggauguc

SEQ ID NO: 2364659 - RNA, 19 nt, Artificial Sequence
  Description of Artificial Sequence: Synthetic oligonucleotide
gccagauggcguuguguuu

SEQ ID NO: 2364660 - RNA, 19 nt, Artificial Sequence
  Description of Artificial Sequence: Synthetic oligonucleotide
cacuggggcuacccguuuu

SEQ ID NO: 2364661 - RNA, 19 nt, Artificial Sequence
  Description of Artificial Sequence: Synthetic oligonucleotide
cugcgcuuuguggccucau

SEQ ID NO: 2364662 - RNA, 19 nt, Artificial Sequence
  Description of Artificial Sequence: Synthetic oligonucleotide
aaaacuacucaagagaacc

SEQ ID NO: 2364663 - RNA, 19 nt, Artificial Sequence
  Description of Artificial Sequence: Synthetic oligonucleotide
ucaauguuggagaagaggg

SEQ ID NO: 2364664 - RNA, 19 nt, Artificial Sequence
  Description of Artificial Sequence: Synthetic oligonucleotide
acucaagagaaccagagcc

SEQ ID NO: 2364665 - RNA, 19 nt, Artificial Sequence
  Description of Artificial Sequence: Synthetic oligonucleotide
uuuaacaaaguacacguug

SEQ ID NO: 2364666 - RNA, 19 nt, Artificial Sequence
  Description of Artificial Sequence: Synthetic oligonucleotide
ucaucgagcgcacagaagg

SEQ ID NO: 2364667 - RNA, 19 nt, Artificial Sequence
  Description of Artificial Sequence: Synthetic oligonucleotide
uaaaaggacagccuuacug

SEQ ID NO: 2364668 - RNA, 19 nt, Artificial Sequence
  Description of Artificial Sequence: Synthetic oligonucleotide
acuaaaacuacucaagaga

SEQ ID NO: 2364669 - RNA, 19 nt, Artificial Sequence
  Description of Artificial Sequence: Synthetic oligonucleotide
acuuuaacaaaguacacgu

SEQ ID NO: 2364670 - RNA, 19 nt, Artificial Sequence
  Description of Artificial Sequence: Synthetic oligonucleotide
gagaucacaacagagagag

SEQ ID NO: 2364671 - RNA, 19 nt, Artificial Sequence
  Description of Artificial Sequence: Synthetic oligonucleotide
acaaaguacacguugagga

SEQ ID NO: 2364672 - RNA, 19 nt, Artificial Sequence
  Description of Artificial Sequence: Synthetic oligonucleotide
ugucugacaggaauggugg

SEQ ID NO: 2364673 - RNA, 19 nt, Artificial Sequence
  Description of Artificial Sequence: Synthetic oligonucleotide
aaagccgugccacgaagcc

SEQ ID NO: 2364674 - RNA, 19 nt, Artificial Sequence
  Description of Artificial Sequence: Synthetic oligonucleotide
acagagagaguccuguagc

SEQ ID NO: 2364675 - RNA, 19 nt, Artificial Sequence
  Description of Artificial Sequence: Synthetic oligonucleotide
uuaacaaaguacacguuga

SEQ ID NO: 2364676 - RNA, 19 nt, Artificial Sequence
  Description of Artificial Sequence: Synthetic oligonucleotide
aaaguacacguugaggacg

SEQ ID NO: 2364677 - RNA, 19 nt, Artificial Sequence
  Description of Artificial Sequence: Synthetic oligonucleotide
agaaauaccagauggcugu

SEQ ID NO: 2364678 - RNA, 19 nt, Artificial Sequence
  Description of Artificial Sequence: Synthetic oligonucleotide
uguguagugcucaauguug

SEQ ID NO: 2364679 - RNA, 19 nt, Artificial Sequence
  Description of Artificial Sequence: Synthetic oligonucleotide
aacagagagaguccuguag

SEQ ID NO: 2364680 - RNA, 19 nt, Artificial Sequence
  Description of Artificial Sequence: Synthetic oligonucleotide
gugcagaaauaccagaugg

SEQ ID NO: 2364681 - RNA, 19 nt, Artificial Sequence
  Description of Artificial Sequence: Synthetic oligonucleotide
ggcaaugaaaggcagaagg

SEQ ID NO: 2364682 - RNA, 19 nt, Artificial Sequence
  Description of Artificial Sequence: Synthetic oligonucleotide
ucugaugagccuuagcucu

SEQ ID NO: 2364683 - RNA, 19 nt, Artificial Sequence
  Description of Artificial Sequence: Synthetic oligonucleotide
aggacguugcgcuuguugc

SEQ ID NO: 2364684 - RNA, 19 nt, Artificial Sequence
  Description of Artificial Sequence: Synthetic oligonucleotide
ucacuaaaacuacucaaga

SEQ ID NO: 2364685 - RNA, 19 nt, Artificial Sequence
  Description of Artificial Sequence: Synthetic oligonucleotide
gacgaguagugucugacag

SEQ ID NO: 2364686 - RNA, 19 nt, Artificial Sequence
  Description of Artificial Sequence: Synthetic oligonucleotide
uggugaggggcaaugaaag

SEQ ID NO: 2364687 - RNA, 19 nt, Artificial Sequence
  Description of Artificial Sequence: Synthetic oligonucleotide
accagcagggugcucaacc

SEQ ID NO: 2364688 - RNA, 19 nt, Artificial Sequence
  Description of Artificial Sequence: Synthetic oligonucleotide
uccuccacgaucaucgagc

SEQ ID NO: 2364689 - RNA, 19 nt, Artificial Sequence
  Description of Artificial Sequence: Synthetic oligonucleotide
cuacucaagagaaccagag

SEQ ID NO: 2364690 - RNA, 19 nt, Artificial Sequence
  Description of Artificial Sequence: Synthetic oligonucleotide
cacuuuaacaaaguacacg

SEQ ID NO: 2364691 - RNA, 19 nt, Artificial Sequence
  Description of Artificial Sequence: Synthetic oligonucleotide
uacacguugaggacguugc

SEQ ID NO: 2364692 - RNA, 19 nt, Artificial Sequence
  Description of Artificial Sequence: Synthetic oligonucleotide
gagaaccagagccagggag

SEQ ID NO: 2364693 - RNA, 19 nt, Artificial Sequence
  Description of Artificial Sequence: Synthetic oligonucleotide
aacuacucaagagaaccag

SEQ ID NO: 2364694 - RNA, 19 nt, Artificial Sequence
  Description of Artificial Sequence: Synthetic oligonucleotide
uccuugaggacagagcccg

SEQ ID NO: 2364695 - RNA, 19 nt, Artificial Sequence
  Description of Artificial Sequence: Synthetic oligonucleotide
aguagugucugacaggaau

SEQ ID NO: 2364696 - RNA, 19 nt, Artificial Sequence
  Description of Artificial Sequence: Synthetic oligonucleotide
cuaaaacuacucaagagaa

SEQ ID NO: 2364697 - RNA, 19 nt, Artificial Sequence
  Description of Artificial Sequence: Synthetic oligonucleotide
augaaaggcagaaggagac

SEQ ID NO: 2364698 - RNA, 19 nt, Artificial Sequence
  Description of Artificial Sequence: Synthetic oligonucleotide
aaauaccagauggcugugc

SEQ ID NO: 2364699 - RNA, 19 nt, Artificial Sequence
  Description of Artificial Sequence: Synthetic oligonucleotide
aagagggccgugcagaaau

SEQ ID NO: 2364700 - RNA, 19 nt, Artificial Sequence
  Description of Artificial Sequence: Synthetic oligonucleotide
gucacuaaaacuacucaag

SEQ ID NO: 2364701 - RNA, 19 nt, Artificial Sequence
  Description of Artificial Sequence: Synthetic oligonucleotide
ugcucaauguuggagaaga

SEQ ID NO: 2364702 - RNA, 19 nt, Artificial Sequence
  Description of Artificial Sequence: Synthetic oligonucleotide
uaaaacuacucaagagaac

SEQ ID NO: 2364703 - RNA, 19 nt, Artificial Sequence
  Description of Artificial Sequence: Synthetic oligonucleotide
cugggaacagcuuagguca

SEQ ID NO: 2364704 - RNA, 19 nt, Artificial Sequence
  Description of Artificial Sequence: Synthetic oligonucleotide
cucaauguuggagaagagg

SEQ ID NO: 2364705 - RNA, 19 nt, Artificial Sequence
  Description of Artificial Sequence: Synthetic oligonucleotide
agacuguccaggcccaggc

SEQ ID NO: 2364706 - RNA, 19 nt, Artificial Sequence
  Description of Artificial Sequence: Synthetic oligonucleotide
ugaggacuaaguguguucc

SEQ ID NO: 2364707 - RNA, 19 nt, Artificial Sequence
  Description of Artificial Sequence: Synthetic oligonucleotide
aggacuaaguguguucccc

SEQ ID NO: 2364708 - RNA, 19 nt, Artificial Sequence
  Description of Artificial Sequence: Synthetic oligonucleotide
aaggaguggccugagaugu

SEQ ID NO: 2364709 - RNA, 19 nt, Artificial Sequence
  Description of Artificial Sequence: Synthetic oligonucleotide
ucaagagaaccagagccag

SEQ ID NO: 2364710 - RNA, 19 nt, Artificial Sequence
  Description of Artificial Sequence: Synthetic oligonucleotide
uccaacacggccaucuccu

SEQ ID NO: 2364711 - RNA, 19 nt, Artificial Sequence
  Description of Artificial Sequence: Synthetic oligonucleotide
uuagcucucccucugggaa

SEQ ID NO: 2364712 - RNA, 19 nt, Artificial Sequence
  Description of Artificial Sequence: Synthetic oligonucleotide
uguuaaaaggacagccuua

SEQ ID NO: 2364713 - RNA, 19 nt, Artificial Sequence
  Description of Artificial Sequence: Synthetic oligonucleotide
uacuguggucacuaaaacu

SEQ ID NO: 2364714 - RNA, 19 nt, Artificial Sequence
  Description of Artificial Sequence: Synthetic oligonucleotide
gaugucaaagccgugccac

SEQ ID NO: 2364715 - RNA, 19 nt, Artificial Sequence
  Description of Artificial Sequence: Synthetic oligonucleotide
cuuacuguggucacuaaaa

SEQ ID NO: 2364716 - RNA, 19 nt, Artificial Sequence
  Description of Artificial Sequence: Synthetic oligonucleotide
cagccuggcuguuaaaagg

SEQ ID NO: 2364717 - RNA, 19 nt, Artificial Sequence
  Description of Artificial Sequence: Synthetic oligonucleotide
cagaaauaccagauggcug

SEQ ID NO: 2364718 - RNA, 19 nt, Artificial Sequence
  Description of Artificial Sequence: Synthetic oligonucleotide
caauguuggagaagagggc

SEQ ID NO: 2364719 - RNA, 19 nt, Artificial Sequence
  Description of Artificial Sequence: Synthetic oligonucleotide
guuaaaaggacagccuuac

SEQ ID NO: 2364720 - RNA, 19 nt, Artificial Sequence
  Description of Artificial Sequence: Synthetic oligonucleotide
caaaguacacguugaggac

SEQ ID NO: 2364721 - RNA, 19 nt, Artificial Sequence
  Description of Artificial Sequence: Synthetic oligonucleotide
acgaucaucgagcgcacag

SEQ ID NO: 2364722 - RNA, 19 nt, Artificial Sequence
  Description of Artificial Sequence: Synthetic oligonucleotide
aaggacagccuuacugugg

SEQ ID NO: 2364723 - RNA, 19 nt, Artificial Sequence
  Description of Artificial Sequence: Synthetic oligonucleotide
uuggugaggggcaaugaaa

SEQ ID NO: 2364724 - RNA, 19 nt, Artificial Sequence
  Description of Artificial Sequence: Synthetic oligonucleotide
guagcacucgggcagcggg

SEQ ID NO: 2364725 - RNA, 19 nt, Artificial Sequence
  Description of Artificial Sequence: Synthetic oligonucleotide
ucucccucugggaacagcu

SEQ ID NO: 2364726 - RNA, 19 nt, Artificial Sequence
  Description of Artificial Sequence: Synthetic oligonucleotide
cagggagaucacaacagag

SEQ ID NO: 2364727 - RNA, 19 nt, Artificial Sequence
  Description of Artificial Sequence: Synthetic oligonucleotide
uuguugcugagguagcacu

SEQ ID NO: 2364728 - RNA, 19 nt, Artificial Sequence
  Description of Artificial Sequence: Synthetic oligonucleotide
uugccagagacgaguagug

SEQ ID NO: 2364729 - RNA, 19 nt, Artificial Sequence
  Description of Artificial Sequence: Synthetic oligonucleotide
ucgagcgcacagaagguca

SEQ ID NO: 2364730 - RNA, 19 nt, Artificial Sequence
  Description of Artificial Sequence: Synthetic oligonucleotide
acgaguagugucugacagg

SEQ ID NO: 2364731 - RNA, 19 nt, Artificial Sequence
  Description of Artificial Sequence: Synthetic oligonucleotide
acagccuuacuguggucac

SEQ ID NO: 2364732 - RNA, 19 nt, Artificial Sequence
  Description of Artificial Sequence: Synthetic oligonucleotide
acguugaggacguugcgcu

SEQ ID NO: 2364733 - RNA, 19 nt, Artificial Sequence
  Description of Artificial Sequence: Synthetic oligonucleotide
uugcgcuuguugcugaggu

SEQ ID NO: 2364734 - RNA, 19 nt, Artificial Sequence
  Description of Artificial Sequence: Synthetic oligonucleotide
guguagugcucaauguugg

SEQ ID NO: 2364735 - RNA, 19 nt, Artificial Sequence
  Description of Artificial Sequence: Synthetic oligonucleotide
aagccgugccacgaagccc

SEQ ID NO: 2364736 - RNA, 19 nt, Artificial Sequence
  Description of Artificial Sequence: Synthetic oligonucleotide
ugaggcugucuacuguccc

SEQ ID NO: 2364737 - RNA, 19 nt, Artificial Sequence
  Description of Artificial Sequence: Synthetic oligonucleotide
  modified_base (11)..(11): a, c, u, g, unknown or other
aguguggaggngguggccg

SEQ ID NO: 2364738 - RNA, 19 nt, Artificial Sequence
  Description of Artificial Sequence: Synthetic oligonucleotide
uuaaaaggacagccuuacu

SEQ ID NO: 2364739 - RNA, 19 nt, Artificial Sequence
  Description of Artificial Sequence: Synthetic oligonucleotide
agccgugccacgaagcccc

SEQ ID NO: 2364740 - RNA, 19 nt, Artificial Sequence
  Description of Artificial Sequence: Synthetic oligonucleotide
guagugcucaauguuggag

SEQ ID NO: 2364741 - RNA, 19 nt, Artificial Sequence
  Description of Artificial Sequence: Synthetic oligonucleotide
ugcugagguagcacucggg

SEQ ID NO: 2364742 - RNA, 19 nt, Artificial Sequence
  Description of Artificial Sequence: Synthetic oligonucleotide
acaacagagagaguccugu

SEQ ID NO: 2364743 - RNA, 19 nt, Artificial Sequence
  Description of Artificial Sequence: Synthetic oligonucleotide
gguggugcuggcaacaggg

SEQ ID NO: 2364744 - RNA, 19 nt, Artificial Sequence
  Description of Artificial Sequence: Synthetic oligonucleotide
aaugguggugcuggcaaca

SEQ ID NO: 2364745 - RNA, 19 nt, Artificial Sequence
  Description of Artificial Sequence: Synthetic oligonucleotide
gaggacguugcgcuuguug

SEQ ID NO: 2364746 - RNA, 19 nt, Artificial Sequence
  Description of Artificial Sequence: Synthetic oligonucleotide
ucuugccagagacgaguag

SEQ ID NO: 2364747 - RNA, 19 nt, Artificial Sequence
  Description of Artificial Sequence: Synthetic oligonucleotide
ugguaguuggugaggggca

SEQ ID NO: 2364748 - RNA, 19 nt, Artificial Sequence
  Description of Artificial Sequence: Synthetic oligonucleotide
auggcggccaccagcaccc

SEQ ID NO: 2364749 - RNA, 19 nt, Artificial Sequence
  Description of Artificial Sequence: Synthetic oligonucleotide
ggcuguuaaaaggacagcc

SEQ ID NO: 2364750 - RNA, 19 nt, Artificial Sequence
  Description of Artificial Sequence: Synthetic oligonucleotide
aggacagccuuacuguggu

SEQ ID NO: 2364751 - RNA, 19 nt, Artificial Sequence
  Description of Artificial Sequence: Synthetic oligonucleotide
cucugaugagccuuagcuc

SEQ ID NO: 2364752 - RNA, 19 nt, Artificial Sequence
  Description of Artificial Sequence: Synthetic oligonucleotide
guugcugagguagcacucg

SEQ ID NO: 2364753 - RNA, 19 nt, Artificial Sequence
  Description of Artificial Sequence: Synthetic oligonucleotide
acugucccucugaugagcc

SEQ ID NO: 2364754 - RNA, 19 nt, Artificial Sequence
  Description of Artificial Sequence: Synthetic oligonucleotide
gugguaguuggugaggggc

SEQ ID NO: 2364755 - RNA, 19 nt, Artificial Sequence
  Description of Artificial Sequence: Synthetic oligonucleotide
ucccggucggcauugcugc

SEQ ID NO: 2364756 - RNA, 19 nt, Artificial Sequence
  Description of Artificial Sequence: Synthetic oligonucleotide
guagugucugacaggaaug

SEQ ID NO: 2364757 - RNA, 19 nt, Artificial Sequence
  Description of Artificial Sequence: Synthetic oligonucleotide
gagcccgccagcauggcgg

SEQ ID NO: 2364758 - RNA, 19 nt, Artificial Sequence
  Description of Artificial Sequence: Synthetic oligonucleotide
gcuuaggucacaucuugcc

SEQ ID NO: 2364759 - RNA, 19 nt, Artificial Sequence
  Description of Artificial Sequence: Synthetic oligonucleotide
agagagaguccuguagcuc

SEQ ID NO: 2364760 - RNA, 19 nt, Artificial Sequence
  Description of Artificial Sequence: Synthetic oligonucleotide
cucaagagaaccagagcca

SEQ ID NO: 2364761 - RNA, 19 nt, Artificial Sequence
  Description of Artificial Sequence: Synthetic oligonucleotide
aaguacacguugaggacgu

SEQ ID NO: 2364762 - RNA, 19 nt, Artificial Sequence
  Description of Artificial Sequence: Synthetic oligonucleotide
acggccaucuccuccacga

SEQ ID NO: 2364763 - RNA, 19 nt, Artificial Sequence
  Description of Artificial Sequence: Synthetic oligonucleotide
gaugcuccugucugaugcc

SEQ ID NO: 2364764 - RNA, 19 nt, Artificial Sequence
  Description of Artificial Sequence: Synthetic oligonucleotide
gacagccuuacugugguca

SEQ ID NO: 2364765 - RNA, 19 nt, Artificial Sequence
  Description of Artificial Sequence: Synthetic oligonucleotide
gagagaguccuguagcucu

SEQ ID NO: 2364766 - RNA, 19 nt, Artificial Sequence
  Description of Artificial Sequence: Synthetic oligonucleotide
agcuuaggucacaucuugc

SEQ ID NO: 2364767 - RNA, 19 nt, Artificial Sequence
  Description of Artificial Sequence: Synthetic oligonucleotide
cacaucuugccagagacga

SEQ ID NO: 2364768 - RNA, 19 nt, Artificial Sequence
  Description of Artificial Sequence: Synthetic oligonucleotide
gagacgaguagugucugac

SEQ ID NO: 2364769 - RNA, 19 nt, Artificial Sequence
  Description of Artificial Sequence: Synthetic oligonucleotide
gaucaucgagcgcacagaa

SEQ ID NO: 2364770 - RNA, 19 nt, Artificial Sequence
  Description of Artificial Sequence: Synthetic oligonucleotide
cagcuuaggucacaucuug

SEQ ID NO: 2364771 - RNA, 19 nt, Artificial Sequence
  Description of Artificial Sequence: Synthetic oligonucleotide
uagcacucgggcagcgggg

SEQ ID NO: 2364772 - RNA, 19 nt, Artificial Sequence
  Description of Artificial Sequence: Synthetic oligonucleotide
ugguggugcuggcaacagg

SEQ ID NO: 2364773 - RNA, 19 nt, Artificial Sequence
  Description of Artificial Sequence: Synthetic oligonucleotide
gaggacuaaguguguuccc

SEQ ID NO: 2364774 - RNA, 19 nt, Artificial Sequence
  Description of Artificial Sequence: Synthetic oligonucleotide
ggaucuguccuucaccuca

SEQ ID NO: 2364775 - RNA, 19 nt, Artificial Sequence
  Description of Artificial Sequence: Synthetic oligonucleotide
uccccaugauggcagugug

SEQ ID NO: 2364776 - RNA, 19 nt, Artificial Sequence
  Description of Artificial Sequence: Synthetic oligonucleotide
guggccugagaugucaaag

SEQ ID NO: 2364777 - RNA, 19 nt, Artificial Sequence
  Description of Artificial Sequence: Synthetic oligonucleotide
augaggcugucuacugucc

SEQ ID NO: 2364778 - RNA, 19 nt, Artificial Sequence
  Description of Artificial Sequence: Synthetic oligonucleotide
ggccuugcccgucaggugg

SEQ ID NO: 2364779 - RNA, 19 nt, Artificial Sequence
  Description of Artificial Sequence: Synthetic oligonucleotide
ggucacuaaaacuacucaa

SEQ ID NO: 2364780 - RNA, 19 nt, Artificial Sequence
  Description of Artificial Sequence: Synthetic oligonucleotide
auguuggagaagagggccg

SEQ ID NO: 2364781 - RNA, 19 nt, Artificial Sequence
  Description of Artificial Sequence: Synthetic oligonucleotide
aucgagcgcacagaagguc

SEQ ID NO: 2364782 - RNA, 19 nt, Artificial Sequence
  Description of Artificial Sequence: Synthetic oligonucleotide
agaugucaaagccgugcca

SEQ ID NO: 2364783 - RNA, 19 nt, Artificial Sequence
  Description of Artificial Sequence: Synthetic oligonucleotide
cacguugaggacguugcgc

SEQ ID NO: 2364784 - RNA, 19 nt, Artificial Sequence
  Description of Artificial Sequence: Synthetic oligonucleotide
cuccuugaggacagagccc

SEQ ID NO: 2364785 - RNA, 19 nt, Artificial Sequence
  Description of Artificial Sequence: Synthetic oligonucleotide
ggugaggggcaaugaaagg

SEQ ID NO: 2364786 - RNA, 19 nt, Artificial Sequence
  Description of Artificial Sequence: Synthetic oligonucleotide
uacugucccucugaugagc

SEQ ID NO: 2364787 - RNA, 19 nt, Artificial Sequence
  Description of Artificial Sequence: Synthetic oligonucleotide
ggcugugcccaccagcagg

SEQ ID NO: 2364788 - RNA, 19 nt, Artificial Sequence
  Description of Artificial Sequence: Synthetic oligonucleotide
ucccucugggaacagcuua

SEQ ID NO: 2364789 - RNA, 19 nt, Artificial Sequence
  Description of Artificial Sequence: Synthetic oligonucleotide
cuugaggacagagcccgcc

SEQ ID NO: 2364790 - RNA, 19 nt, Artificial Sequence
  Description of Artificial Sequence: Synthetic oligonucleotide
caugccaugaggcugucua

SEQ ID NO: 2364791 - RNA, 19 nt, Artificial Sequence
  Description of Artificial Sequence: Synthetic oligonucleotide
ugucuacugucccucugau

SEQ ID NO: 2364792 - RNA, 19 nt, Artificial Sequence
  Description of Artificial Sequence: Synthetic oligonucleotide
gacccaugccaugaggcug

SEQ ID NO: 2364793 - RNA, 19 nt, Artificial Sequence
  Description of Artificial Sequence: Synthetic oligonucleotide
uaguuggugaggggcaaug

SEQ ID NO: 2364794 - RNA, 19 nt, Artificial Sequence
  Description of Artificial Sequence: Synthetic oligonucleotide
gacguugcgcuuguugcug

SEQ ID NO: 2364795 - RNA, 19 nt, Artificial Sequence
  Description of Artificial Sequence: Synthetic oligonucleotide
guggucacuaaaacuacuc

SEQ ID NO: 2364796 - RNA, 19 nt, Artificial Sequence
  Description of Artificial Sequence: Synthetic oligonucleotide
gaaugguggugcuggcaac

SEQ ID NO: 2364797 - RNA, 19 nt, Artificial Sequence
  Description of Artificial Sequence: Synthetic oligonucleotide
  modified_base (9)..(9): a, c, u, g, unknown or other
uguggaggngguggccgcg

SEQ ID NO: 2364798 - RNA, 19 nt, Artificial Sequence
  Description of Artificial Sequence: Synthetic oligonucleotide
cuuguugcugagguagcac

SEQ ID NO: 2364799 - RNA, 19 nt, Artificial Sequence
  Description of Artificial Sequence: Synthetic oligonucleotide
uguuggagaagagggccgu

SEQ ID NO: 2364800 - RNA, 19 nt, Artificial Sequence
  Description of Artificial Sequence: Synthetic oligonucleotide
acuacucaagagaaccaga

SEQ ID NO: 2364801 - RNA, 19 nt, Artificial Sequence
  Description of Artificial Sequence: Synthetic oligonucleotide
agagcccgccagcauggcg

SEQ ID NO: 2364802 - RNA, 19 nt, Artificial Sequence
  Description of Artificial Sequence: Synthetic oligonucleotide
ggccacuuuaacaaaguac

SEQ ID NO: 2364803 - RNA, 19 nt, Artificial Sequence
  Description of Artificial Sequence: Synthetic oligonucleotide
uccccuugacccaugccau

SEQ ID NO: 2364804 - RNA, 19 nt, Artificial Sequence
  Description of Artificial Sequence: Synthetic oligonucleotide
ugaugagccuuagcucucc

SEQ ID NO: 2364805 - RNA, 19 nt, Artificial Sequence
  Description of Artificial Sequence: Synthetic oligonucleotide
guacacguugaggacguug

SEQ ID NO: 2364806 - RNA, 19 nt, Artificial Sequence
  Description of Artificial Sequence: Synthetic oligonucleotide
gaugagccuuagcucuccc

SEQ ID NO: 2364807 - RNA, 19 nt, Artificial Sequence
  Description of Artificial Sequence: Synthetic oligonucleotide
ucugaugcuccugucugau

SEQ ID NO: 2364808 - RNA, 19 nt, Artificial Sequence
  Description of Artificial Sequence: Synthetic oligonucleotide
uuccccaugauggcagugu

SEQ ID NO: 2364809 - RNA, 19 nt, Artificial Sequence
  Description of Artificial Sequence: Synthetic oligonucleotide
ugcucaaccgccgcaggac

SEQ ID NO: 2364810 - RNA, 19 nt, Artificial Sequence
  Description of Artificial Sequence: Synthetic oligonucleotide
guuggugaggggcaaugaa

SEQ ID NO: 2364811 - RNA, 19 nt, Artificial Sequence
  Description of Artificial Sequence: Synthetic oligonucleotide
ucugaggacuaaguguguu

SEQ ID NO: 2364812 - RNA, 19 nt, Artificial Sequence
  Description of Artificial Sequence: Synthetic oligonucleotide
caacaggguggcaucacca

SEQ ID NO: 2364813 - RNA, 19 nt, Artificial Sequence
  Description of Artificial Sequence: Synthetic oligonucleotide
aaccgccgcaggaccaggc

SEQ ID NO: 2364814 - RNA, 19 nt, Artificial Sequence
  Description of Artificial Sequence: Synthetic oligonucleotide
agaagagggccgugcagaa

SEQ ID NO: 2364815 - RNA, 19 nt, Artificial Sequence
  Description of Artificial Sequence: Synthetic oligonucleotide
  modified_base (4)..(4): a, c, u, g, unknown or other
aggngguggccgcggaucu

SEQ ID NO: 2364816 - RNA, 19 nt, Artificial Sequence
  Description of Artificial Sequence: Synthetic oligonucleotide
agccuuagcucucccucug

SEQ ID NO: 2364817 - RNA, 19 nt, Artificial Sequence
  Description of Artificial Sequence: Synthetic oligonucleotide
  modified_base (10)..(10): a, c, u, g, unknown or other
guguggaggngguggccgc

SEQ ID NO: 2364818 - RNA, 19 nt, Artificial Sequence
  Description of Artificial Sequence: Synthetic oligonucleotide
uugcccgucaggugguagu

SEQ ID NO: 2364819 - RNA, 19 nt, Artificial Sequence
  Description of Artificial Sequence: Synthetic oligonucleotide
augagccuuagcucucccu

SEQ ID NO: 2364820 - RNA, 19 nt, Artificial Sequence
  Description of Artificial Sequence: Synthetic oligonucleotide
uggcuguuaaaaggacagc

SEQ ID NO: 2364821 - RNA, 19 nt, Artificial Sequence
  Description of Artificial Sequence: Synthetic oligonucleotide
ucaaccgccgcaggaccag

SEQ ID NO: 2364822 - RNA, 19 nt, Artificial Sequence
  Description of Artificial Sequence: Synthetic oligonucleotide
cuuagcucucccucuggga

SEQ ID NO: 2364823 - RNA, 19 nt, Artificial Sequence
  Description of Artificial Sequence: Synthetic oligonucleotide
agagacgaguagugucuga

SEQ ID NO: 2364824 - RNA, 19 nt, Artificial Sequence
  Description of Artificial Sequence: Synthetic oligonucleotide
accgcagcccucaccagcg

SEQ ID NO: 2364825 - RNA, 19 nt, Artificial Sequence
  Description of Artificial Sequence: Synthetic oligonucleotide
gagccagggagaucacaac

SEQ ID NO: 2364826 - RNA, 19 nt, Artificial Sequence
  Description of Artificial Sequence: Synthetic oligonucleotide
gagaguccuguagcucugg

SEQ ID NO: 2364827 - RNA, 19 nt, Artificial Sequence
  Description of Artificial Sequence: Synthetic oligonucleotide
cuccuccacgaucaucgag

SEQ ID NO: 2364828 - RNA, 19 nt, Artificial Sequence
  Description of Artificial Sequence: Synthetic oligonucleotide
ugggaacagcuuaggucac

SEQ ID NO: 2364829 - RNA, 19 nt, Artificial Sequence
  Description of Artificial Sequence: Synthetic oligonucleotide
ucgggcagcggggacagcu

SEQ ID NO: 2364830 - RNA, 19 nt, Artificial Sequence
  Description of Artificial Sequence: Synthetic oligonucleotide
gucuacugucccucugaug

SEQ ID NO: 2364831 - RNA, 19 nt, Artificial Sequence
  Description of Artificial Sequence: Synthetic oligonucleotide
gccugagaugucaaagccg

SEQ ID NO: 2364832 - RNA, 19 nt, Artificial Sequence
  Description of Artificial Sequence: Synthetic oligonucleotide
cugagguagcacucgggca

SEQ ID NO: 2364833 - RNA, 19 nt, Artificial Sequence
  Description of Artificial Sequence: Synthetic oligonucleotide
ccaggccacuuuaacaaag

SEQ ID NO: 2364834 - RNA, 19 nt, Artificial Sequence
  Description of Artificial Sequence: Synthetic oligonucleotide
  modified_base (7)..(7): a, c, u, g, unknown or other
uggaggngguggccgcgga

SEQ ID NO: 2364835 - RNA, 19 nt, Artificial Sequence
  Description of Artificial Sequence: Synthetic oligonucleotide
ugcccuccagggcugggga

SEQ ID NO: 2364836 - RNA, 19 nt, Artificial Sequence
  Description of Artificial Sequence: Synthetic oligonucleotide
caccgcagcccucaccagc

SEQ ID NO: 2364837 - RNA, 19 nt, Artificial Sequence
  Description of Artificial Sequence: Synthetic oligonucleotide
agaguccuguagcucuggu

SEQ ID NO: 2364838 - RNA, 19 nt, Artificial Sequence
  Description of Artificial Sequence: Synthetic oligonucleotide
cugucuacugucccucuga

SEQ ID NO: 2364839 - RNA, 19 nt, Artificial Sequence
  Description of Artificial Sequence: Synthetic oligonucleotide
cagcagggugcucaaccgc

SEQ ID NO: 2364840 - RNA, 19 nt, Artificial Sequence
  Description of Artificial Sequence: Synthetic oligonucleotide
cccgucaggugguaguugg

SEQ ID NO: 2364841 - RNA, 19 nt, Artificial Sequence
  Description of Artificial Sequence: Synthetic oligonucleotide
gguagcgccgcaccgcagc

SEQ ID NO: 2364842 - RNA, 19 nt, Artificial Sequence
  Description of Artificial Sequence: Synthetic oligonucleotide
aggccacuuuaacaaagua

SEQ ID NO: 2364843 - RNA, 19 nt, Artificial Sequence
  Description of Artificial Sequence: Synthetic oligonucleotide
  modified_base (5)..(5): a, c, u, g, unknown or other
gaggngguggccgcggauc

SEQ ID NO: 2364844 - RNA, 19 nt, Artificial Sequence
  Description of Artificial Sequence: Synthetic oligonucleotide
aaccagagccagggagauc

SEQ ID NO: 2364845 - RNA, 19 nt, Artificial Sequence
  Description of Artificial Sequence: Synthetic oligonucleotide
agcacccagggcagguagc

SEQ ID NO: 2364846 - RNA, 19 nt, Artificial Sequence
  Description of Artificial Sequence: Synthetic oligonucleotide
ccacuuuaacaaaguacac

SEQ ID NO: 2364847 - RNA, 19 nt, Artificial Sequence
  Description of Artificial Sequence: Synthetic oligonucleotide
uguuccccaugauggcagu

SEQ ID NO: 2364848 - RNA, 19 nt, Artificial Sequence
  Description of Artificial Sequence: Synthetic oligonucleotide
ccagcagggugcucaaccg

SEQ ID NO: 2364849 - RNA, 19 nt, Artificial Sequence
  Description of Artificial Sequence: Synthetic oligonucleotide
agugucugacaggaauggu

SEQ ID NO: 2364850 - RNA, 19 nt, Artificial Sequence
  Description of Artificial Sequence: Synthetic oligonucleotide
cagcacccagggcagguag

SEQ ID NO: 2364851 - RNA, 19 nt, Artificial Sequence
  Description of Artificial Sequence: Synthetic oligonucleotide
gcaacaggguggcaucacc

SEQ ID NO: 2364852 - RNA, 19 nt, Artificial Sequence
  Description of Artificial Sequence: Synthetic oligonucleotide
accagcgucccgcggagaa

SEQ ID NO: 2364853 - RNA, 19 nt, Artificial Sequence
  Description of Artificial Sequence: Synthetic oligonucleotide
caccagcggagucugagga

SEQ ID NO: 2364854 - RNA, 19 nt, Artificial Sequence
  Description of Artificial Sequence: Synthetic oligonucleotide
gcuggggacugguagcagc

SEQ ID NO: 2364855 - RNA, 19 nt, Artificial Sequence
  Description of Artificial Sequence: Synthetic oligonucleotide
cuugccagagacgaguagu

SEQ ID NO: 2364856 - RNA, 19 nt, Artificial Sequence
  Description of Artificial Sequence: Synthetic oligonucleotide
gcugugcccaccagcaggg

SEQ ID NO: 2364857 - RNA, 19 nt, Artificial Sequence
  Description of Artificial Sequence: Synthetic oligonucleotide
gagguagcacucgggcagc

SEQ ID NO: 2364858 - RNA, 19 nt, Artificial Sequence
  Description of Artificial Sequence: Synthetic oligonucleotide
guagcgccgcaccgcagcc

SEQ ID NO: 2364859 - RNA, 19 nt, Artificial Sequence
  Description of Artificial Sequence: Synthetic oligonucleotide
uggcaucaccagcggaguc

SEQ ID NO: 2364860 - RNA, 19 nt, Artificial Sequence
  Description of Artificial Sequence: Synthetic oligonucleotide
ggacuaaguguguucccca

SEQ ID NO: 2364861 - RNA, 19 nt, Artificial Sequence
  Description of Artificial Sequence: Synthetic oligonucleotide
gucccgcggagaaaccacg

SEQ ID NO: 2364862 - RNA, 19 nt, Artificial Sequence
  Description of Artificial Sequence: Synthetic oligonucleotide
agggugcucaaccgccgca

SEQ ID NO: 2364863 - RNA, 19 nt, Artificial Sequence
  Description of Artificial Sequence: Synthetic oligonucleotide
agccuuacuguggucacua

SEQ ID NO: 2364864 - RNA, 19 nt, Artificial Sequence
  Description of Artificial Sequence: Synthetic oligonucleotide
ggugcucaaccgccgcagg

SEQ ID NO: 2364865 - RNA, 19 nt, Artificial Sequence
  Description of Artificial Sequence: Synthetic oligonucleotide
uggcaacaggguggcauca

SEQ ID NO: 2364866 - RNA, 19 nt, Artificial Sequence
  Description of Artificial Sequence: Synthetic oligonucleotide
cagagacgaguagugucug

SEQ ID NO: 2364867 - RNA, 19 nt, Artificial Sequence
  Description of Artificial Sequence: Synthetic oligonucleotide
agcucucccucugggaaca

SEQ ID NO: 2364868 - RNA, 19 nt, Artificial Sequence
  Description of Artificial Sequence: Synthetic oligonucleotide
cagggugcucaaccgccgc

SEQ ID NO: 2364869 - RNA, 19 nt, Artificial Sequence
  Description of Artificial Sequence: Synthetic oligonucleotide
cagcgucccgcggagaaac

SEQ ID NO: 2364870 - RNA, 19 nt, Artificial Sequence
  Description of Artificial Sequence: Synthetic oligonucleotide
ccucugaugagccuuagcu

SEQ ID NO: 2364871 - RNA, 19 nt, Artificial Sequence
  Description of Artificial Sequence: Synthetic oligonucleotide
acguugcgcuuguugcuga

SEQ ID NO: 2364872 - RNA, 19 nt, Artificial Sequence
  Description of Artificial Sequence: Synthetic oligonucleotide
gacuaaguguguuccccau

SEQ ID NO: 2364873 - RNA, 19 nt, Artificial Sequence
  Description of Artificial Sequence: Synthetic oligonucleotide
gacagacuguccaggccca

SEQ ID NO: 2364874 - RNA, 19 nt, Artificial Sequence
  Description of Artificial Sequence: Synthetic oligonucleotide
ugcgcuuguugcugaggua

SEQ ID NO: 2364875 - RNA, 19 nt, Artificial Sequence
  Description of Artificial Sequence: Synthetic oligonucleotide
  modified_base (18)..(18): a, c, u, g, unknown or other
ugauggcaguguggaggng

SEQ ID NO: 2364876 - RNA, 19 nt, Artificial Sequence
  Description of Artificial Sequence: Synthetic oligonucleotide
cagagagaguccuguagcu

SEQ ID NO: 2364877 - RNA, 19 nt, Artificial Sequence
  Description of Artificial Sequence: Synthetic oligonucleotide
acccaugccaugaggcugu

SEQ ID NO: 2364878 - RNA, 19 nt, Artificial Sequence
  Description of Artificial Sequence: Synthetic oligonucleotide
gcucaaccgccgcaggacc

SEQ ID NO: 2364879 - RNA, 19 nt, Artificial Sequence
  Description of Artificial Sequence: Synthetic oligonucleotide
ggcccaggccacuuuaaca

SEQ ID NO: 2364880 - RNA, 19 nt, Artificial Sequence
  Description of Artificial Sequence: Synthetic oligonucleotide
gggccgugcagaaauacca

SEQ ID NO: 2364881 - RNA, 19 nt, Artificial Sequence
  Description of Artificial Sequence: Synthetic oligonucleotide
gucaaagccgugccacgaa

SEQ ID NO: 2364882 - RNA, 19 nt, Artificial Sequence
  Description of Artificial Sequence: Synthetic oligonucleotide
cgugcagaaauaccagaug

SEQ ID NO: 2364883 - RNA, 19 nt, Artificial Sequence
  Description of Artificial Sequence: Synthetic oligonucleotide
ggagaucacaacagagaga

SEQ ID NO: 2364884 - RNA, 19 nt, Artificial Sequence
  Description of Artificial Sequence: Synthetic oligonucleotide
cuccacgaucaucgagcgc

SEQ ID NO: 2364885 - RNA, 19 nt, Artificial Sequence
  Description of Artificial Sequence: Synthetic oligonucleotide
cuugcccgucaggugguag

SEQ ID NO: 2364886 - RNA, 19 nt, Artificial Sequence
  Description of Artificial Sequence: Synthetic oligonucleotide
cucaaccgccgcaggacca

SEQ ID NO: 2364887 - RNA, 19 nt, Artificial Sequence
  Description of Artificial Sequence: Synthetic oligonucleotide
gagccuuagcucucccucu

SEQ ID NO: 2364888 - RNA, 19 nt, Artificial Sequence
  Description of Artificial Sequence: Synthetic oligonucleotide
  modified_base (8)..(8): a, c, u, g, unknown or other
guggaggngguggccgcgg

SEQ ID NO: 2364889 - RNA, 19 nt, Artificial Sequence
  Description of Artificial Sequence: Synthetic oligonucleotide
gagcgcacagaaggucagc

SEQ ID NO: 2364890 - RNA, 19 nt, Artificial Sequence
  Description of Artificial Sequence: Synthetic oligonucleotide
gguuccccuugacccaugc

SEQ ID NO: 2364891 - RNA, 19 nt, Artificial Sequence
  Description of Artificial Sequence: Synthetic oligonucleotide
gcgcacagaaggucagcag

SEQ ID NO: 2364892 - RNA, 19 nt, Artificial Sequence
  Description of Artificial Sequence: Synthetic oligonucleotide
guggccgcggaucuguccu

SEQ ID NO: 2364893 - RNA, 19 nt, Artificial Sequence
  Description of Artificial Sequence: Synthetic oligonucleotide
cuguguagugcucaauguu

SEQ ID NO: 2364894 - RNA, 19 nt, Artificial Sequence
  Description of Artificial Sequence: Synthetic oligonucleotide
agcgucccgcggagaaacc

SEQ ID NO: 2364895 - RNA, 19 nt, Artificial Sequence
  Description of Artificial Sequence: Synthetic oligonucleotide
cucucccucugggaacagc

SEQ ID NO: 2364896 - RNA, 19 nt, Artificial Sequence
  Description of Artificial Sequence: Synthetic oligonucleotide
gccgugcagaaauaccaga

SEQ ID NO: 2364897 - RNA, 19 nt, Artificial Sequence
  Description of Artificial Sequence: Synthetic oligonucleotide
aggaguggccugagauguc

SEQ ID NO: 2364898 - RNA, 19 nt, Artificial Sequence
  Description of Artificial Sequence: Synthetic oligonucleotide
caggccacuuuaacaaagu

SEQ ID NO: 2364899 - RNA, 19 nt, Artificial Sequence
  Description of Artificial Sequence: Synthetic oligonucleotide
cagguagcgccgcaccgca

SEQ ID NO: 2364900 - RNA, 19 nt, Artificial Sequence
  Description of Artificial Sequence: Synthetic oligonucleotide
gguggccgcggaucugucc

SEQ ID NO: 2364901 - RNA, 19 nt, Artificial Sequence
  Description of Artificial Sequence: Synthetic oligonucleotide
gguagcacucgggcagcgg

SEQ ID NO: 2364902 - RNA, 19 nt, Artificial Sequence
  Description of Artificial Sequence: Synthetic oligonucleotide
caacagagagaguccugua

SEQ ID NO: 2364903 - RNA, 19 nt, Artificial Sequence
  Description of Artificial Sequence: Synthetic oligonucleotide
cgaguagugucugacagga

SEQ ID NO: 2364904 - RNA, 19 nt, Artificial Sequence
  Description of Artificial Sequence: Synthetic oligonucleotide
gggcaaugaaaggcagaag

SEQ ID NO: 2364905 - RNA, 19 nt, Artificial Sequence
  Description of Artificial Sequence: Synthetic oligonucleotide
cuggggacugguagcagcu

SEQ ID NO: 2364906 - RNA, 19 nt, Artificial Sequence
  Description of Artificial Sequence: Synthetic oligonucleotide
gcaucaccagcggagucug

SEQ ID NO: 2364907 - RNA, 19 nt, Artificial Sequence
  Description of Artificial Sequence: Synthetic oligonucleotide
gcggaucuguccuucaccu

SEQ ID NO: 2364908 - RNA, 19 nt, Artificial Sequence
  Description of Artificial Sequence: Synthetic oligonucleotide
gaagagggccgugcagaaa

SEQ ID NO: 2364909 - RNA, 19 nt, Artificial Sequence
  Description of Artificial Sequence: Synthetic oligonucleotide
caucgagcgcacagaaggu

SEQ ID NO: 2364910 - RNA, 19 nt, Artificial Sequence
  Description of Artificial Sequence: Synthetic oligonucleotide
gcagggugcucaaccgccg

SEQ ID NO: 2364911 - RNA, 19 nt, Artificial Sequence
  Description of Artificial Sequence: Synthetic oligonucleotide
ccaugauggcaguguggag

SEQ ID NO: 2364912 - RNA, 19 nt, Artificial Sequence
  Description of Artificial Sequence: Synthetic oligonucleotide
  modified_base (2)..(2): a, c, u, g, unknown or other
gngguggccgcggaucugu

SEQ ID NO: 2364913 - RNA, 19 nt, Artificial Sequence
  Description of Artificial Sequence: Synthetic oligonucleotide
ugcccgucaggugguaguu

SEQ ID NO: 2364914 - RNA, 19 nt, Artificial Sequence
  Description of Artificial Sequence: Synthetic oligonucleotide
ccuugacccaugccaugag

SEQ ID NO: 2364915 - RNA, 19 nt, Artificial Sequence
  Description of Artificial Sequence: Synthetic oligonucleotide
caaccgccgcaggaccagg

SEQ ID NO: 2364916 - RNA, 19 nt, Artificial Sequence
  Description of Artificial Sequence: Synthetic oligonucleotide
cgcggaucuguccuucacc

SEQ ID NO: 2364917 - RNA, 19 nt, Artificial Sequence
  Description of Artificial Sequence: Synthetic oligonucleotide
gcggagucugaggacuaag

SEQ ID NO: 2364918 - RNA, 19 nt, Artificial Sequence
  Description of Artificial Sequence: Synthetic oligonucleotide
gcuuguugcugagguagca

SEQ ID NO: 2364919 - RNA, 19 nt, Artificial Sequence
  Description of Artificial Sequence: Synthetic oligonucleotide
uagcgccgcaccgcagccc

SEQ ID NO: 2364920 - RNA, 19 nt, Artificial Sequence
  Description of Artificial Sequence: Synthetic oligonucleotide
ccucugggaacagcuuagg

SEQ ID NO: 2364921 - RNA, 19 nt, Artificial Sequence
  Description of Artificial Sequence: Synthetic oligonucleotide
cacccagggcagguagcgc

SEQ ID NO: 2364922 - RNA, 19 nt, Artificial Sequence
  Description of Artificial Sequence: Synthetic oligonucleotide
ccgccgcaggaccaggccg

SEQ ID NO: 2364923 - RNA, 19 nt, Artificial Sequence
  Description of Artificial Sequence: Synthetic oligonucleotide
aggccggccuugcccguca

SEQ ID NO: 2364924 - RNA, 19 nt, Artificial Sequence
  Description of Artificial Sequence: Synthetic oligonucleotide
agcggagucugaggacuaa

SEQ ID NO: 2364925 - RNA, 19 nt, Artificial Sequence
  Description of Artificial Sequence: Synthetic oligonucleotide
ggacguugcgcuuguugcu

SEQ ID NO: 2364926 - RNA, 19 nt, Artificial Sequence
  Description of Artificial Sequence: Synthetic oligonucleotide
gaguggccugagaugucaa

SEQ ID NO: 2364927 - RNA, 19 nt, Artificial Sequence
  Description of Artificial Sequence: Synthetic oligonucleotide
cacucgggcagcggggaca

SEQ ID NO: 2364928 - RNA, 19 nt, Artificial Sequence
  Description of Artificial Sequence: Synthetic oligonucleotide
cgagcgcacagaaggucag

SEQ ID NO: 2364929 - RNA, 19 nt, Artificial Sequence
  Description of Artificial Sequence: Synthetic oligonucleotide
ggcaucaccagcggagucu

SEQ ID NO: 2364930 - RNA, 19 nt, Artificial Sequence
  Description of Artificial Sequence: Synthetic oligonucleotide
gccagccuggcuguuaaaa

SEQ ID NO: 2364931 - RNA, 19 nt, Artificial Sequence
  Description of Artificial Sequence: Synthetic oligonucleotide
cugccuguguagugcucaa

SEQ ID NO: 2364932 - RNA, 19 nt, Artificial Sequence
  Description of Artificial Sequence: Synthetic oligonucleotide
ggcaacaggguggcaucac

SEQ ID NO: 2364933 - RNA, 19 nt, Artificial Sequence
  Description of Artificial Sequence: Synthetic oligonucleotide
cgcaccgcagcccucacca

SEQ ID NO: 2364934 - RNA, 19 nt, Artificial Sequence
  Description of Artificial Sequence: Synthetic oligonucleotide
ccuugaggacagagcccgc

SEQ ID NO: 2364935 - RNA, 19 nt, Artificial Sequence
  Description of Artificial Sequence: Synthetic oligonucleotide
caggcccaggccacuuuaa

SEQ ID NO: 2364936 - RNA, 19 nt, Artificial Sequence
  Description of Artificial Sequence: Synthetic oligonucleotide
cccucaccagcgucccgcg

SEQ ID NO: 2364937 - RNA, 19 nt, Artificial Sequence
  Description of Artificial Sequence: Synthetic oligonucleotide
gcuggcaacaggguggcau

SEQ ID NO: 2364938 - RNA, 19 nt, Artificial Sequence
  Description of Artificial Sequence: Synthetic oligonucleotide
ccacgaucaucgagcgcac

SEQ ID NO: 2364939 - RNA, 19 nt, Artificial Sequence
  Description of Artificial Sequence: Synthetic oligonucleotide
cauugcugcuugcucugau

SEQ ID NO: 2364940 - RNA, 19 nt, Artificial Sequence
  Description of Artificial Sequence: Synthetic oligonucleotide
cgucccgcggagaaaccac

SEQ ID NO: 2364941 - RNA, 19 nt, Artificial Sequence
  Description of Artificial Sequence: Synthetic oligonucleotide
ggguggcaucaccagcgga

SEQ ID NO: 2364942 - RNA, 19 nt, Artificial Sequence
  Description of Artificial Sequence: Synthetic oligonucleotide
cucauccaacacggccauc

SEQ ID NO: 2364943 - RNA, 19 nt, Artificial Sequence
  Description of Artificial Sequence: Synthetic oligonucleotide
gggaacagcuuaggucaca

SEQ ID NO: 2364944 - RNA, 19 nt, Artificial Sequence
  Description of Artificial Sequence: Synthetic oligonucleotide
cagagcccgccagcauggc

SEQ ID NO: 2364945 - RNA, 19 nt, Artificial Sequence
  Description of Artificial Sequence: Synthetic oligonucleotide
ggucggcauugcugcuugc

SEQ ID NO: 2364946 - RNA, 19 nt, Artificial Sequence
  Description of Artificial Sequence: Synthetic oligonucleotide
agguagcgccgcaccgcag

SEQ ID NO: 2364947 - RNA, 19 nt, Artificial Sequence
  Description of Artificial Sequence: Synthetic oligonucleotide
ccgugcagaaauaccagau

SEQ ID NO: 2364948 - RNA, 19 nt, Artificial Sequence
  Description of Artificial Sequence: Synthetic oligonucleotide
ccaacacggccaucuccuc

SEQ ID NO: 2364949 - RNA, 19 nt, Artificial Sequence
  Description of Artificial Sequence: Synthetic oligonucleotide
agagggccgugcagaaaua

SEQ ID NO: 2364950 - RNA, 19 nt, Artificial Sequence
  Description of Artificial Sequence: Synthetic oligonucleotide
uggccgcggaucuguccuu

SEQ ID NO: 2364951 - RNA, 19 nt, Artificial Sequence
  Description of Artificial Sequence: Synthetic oligonucleotide
cacgaucaucgagcgcaca

SEQ ID NO: 2364952 - RNA, 19 nt, Artificial Sequence
  Description of Artificial Sequence: Synthetic oligonucleotide
ccccuugacccaugccaug

SEQ ID NO: 2364953 - RNA, 19 nt, Artificial Sequence
  Description of Artificial Sequence: Synthetic oligonucleotide
cagcggagucugaggacua

SEQ ID NO: 2364954 - RNA, 19 nt, Artificial Sequence
  Description of Artificial Sequence: Synthetic oligonucleotide
  modified_base (3)..(3): a, c, u, g, unknown or other
ggngguggccgcggaucug

SEQ ID NO: 2364955 - RNA, 19 nt, Artificial Sequence
  Description of Artificial Sequence: Synthetic oligonucleotide
ggacagccuuacugugguc

SEQ ID NO: 2364956 - RNA, 19 nt, Artificial Sequence
  Description of Artificial Sequence: Synthetic oligonucleotide
cguugcgcuuguugcugag

SEQ ID NO: 2364957 - RNA, 19 nt, Artificial Sequence
  Description of Artificial Sequence: Synthetic oligonucleotide
aguacacguugaggacguu

SEQ ID NO: 2364958 - RNA, 19 nt, Artificial Sequence
  Description of Artificial Sequence: Synthetic oligonucleotide
caccagcagggugcucaac

SEQ ID NO: 2364959 - RNA, 19 nt, Artificial Sequence
  Description of Artificial Sequence: Synthetic oligonucleotide
ccgcggaucuguccuucac

SEQ ID NO: 2364960 - RNA, 19 nt, Artificial Sequence
  Description of Artificial Sequence: Synthetic oligonucleotide
ugaggacguugcgcuuguu

SEQ ID NO: 2364961 - RNA, 19 nt, Artificial Sequence
  Description of Artificial Sequence: Synthetic oligonucleotide
guaguuggugaggggcaau

SEQ ID NO: 2364962 - RNA, 19 nt, Artificial Sequence
  Description of Artificial Sequence: Synthetic oligonucleotide
cggucggcauugcugcuug

SEQ ID NO: 2364963 - RNA, 19 nt, Artificial Sequence
  Description of Artificial Sequence: Synthetic oligonucleotide
gcgucccgcggagaaacca

SEQ ID NO: 2364964 - RNA, 19 nt, Artificial Sequence
  Description of Artificial Sequence: Synthetic oligonucleotide
ccagcggagucugaggacu

SEQ ID NO: 2364965 - RNA, 19 nt, Artificial Sequence
  Description of Artificial Sequence: Synthetic oligonucleotide
gcccgucaggugguaguug

SEQ ID NO: 2364966 - RNA, 19 nt, Artificial Sequence
  Description of Artificial Sequence: Synthetic oligonucleotide
cccaggccacuuuaacaaa

SEQ ID NO: 2364967 - RNA, 19 nt, Artificial Sequence
  Description of Artificial Sequence: Synthetic oligonucleotide
cgaucaucgagcgcacaga

SEQ ID NO: 2364968 - RNA, 19 nt, Artificial Sequence
  Description of Artificial Sequence: Synthetic oligonucleotide
ggcugucuacugucccucu

SEQ ID NO: 2364969 - RNA, 19 nt, Artificial Sequence
  Description of Artificial Sequence: Synthetic oligonucleotide
gccgcggaucuguccuuca

SEQ ID NO: 2364970 - RNA, 19 nt, Artificial Sequence
  Description of Artificial Sequence: Synthetic oligonucleotide
cccuucccggucggcauug

SEQ ID NO: 2364971 - RNA, 19 nt, Artificial Sequence
  Description of Artificial Sequence: Synthetic oligonucleotide
ggccgcggaucuguccuuc

SEQ ID NO: 2364972 - RNA, 19 nt, Artificial Sequence
  Description of Artificial Sequence: Synthetic oligonucleotide
cagccuuacuguggucacu

SEQ ID NO: 2364973 - RNA, 19 nt, Artificial Sequence
  Description of Artificial Sequence: Synthetic oligonucleotide
  modified_base (6)..(6): a, c, u, g, unknown or other
ggaggngguggccgcggau

SEQ ID NO: 2364974 - RNA, 19 nt, Artificial Sequence
  Description of Artificial Sequence: Synthetic oligonucleotide
ccaggcccaggccacuuua

SEQ ID NO: 2364975 - RNA, 19 nt, Artificial Sequence
  Description of Artificial Sequence: Synthetic oligonucleotide
ggccggccuugcccgucag

SEQ ID NO: 2364976 - RNA, 19 nt, Artificial Sequence
  Description of Artificial Sequence: Synthetic oligonucleotide
gcucucccucugggaacag

SEQ ID NO: 2364977 - RNA, 19 nt, Artificial Sequence
  Description of Artificial Sequence: Synthetic oligonucleotide
ggacagagcccgccagcau

SEQ ID NO: 2364978 - RNA, 19 nt, Artificial Sequence
  Description of Artificial Sequence: Synthetic oligonucleotide
cggccuugcccgucaggug

SEQ ID NO: 2364979 - RNA, 19 nt, Artificial Sequence
  Description of Artificial Sequence: Synthetic oligonucleotide
ccggccuugcccgucaggu

SEQ ID NO: 2364980 - RNA, 19 nt, Artificial Sequence
  Description of Artificial Sequence: Synthetic oligonucleotide
caccagcgucccgcggaga

SEQ ID NO: 2364981 - RNA, 19 nt, Artificial Sequence
  Description of Artificial Sequence: Synthetic oligonucleotide
ccgcaggaccaggccggcc

SEQ ID NO: 2364982 - RNA, 19 nt, Artificial Sequence
  Description of Artificial Sequence: Synthetic oligonucleotide
gccuugcccgucagguggu

SEQ ID NO: 2364983 - RNA, 19 nt, Artificial Sequence
  Description of Artificial Sequence: Synthetic oligonucleotide
ccagcgucccgcggagaaa

SEQ ID NO: 2364984 - RNA, 19 nt, Artificial Sequence
  Description of Artificial Sequence: Synthetic oligonucleotide
gcagcggggacagcuccuu

SEQ ID NO: 2364985 - RNA, 19 nt, Artificial Sequence
  Description of Artificial Sequence: Synthetic oligonucleotide
cguugaggacguugcgcuu

SEQ ID NO: 2364986 - RNA, 19 nt, Artificial Sequence
  Description of Artificial Sequence: Synthetic oligonucleotide
cccggucggcauugcugcu

SEQ ID NO: 2364987 - RNA, 19 nt, Artificial Sequence
  Description of Artificial Sequence: Synthetic oligonucleotide
ccggucggcauugcugcuu

SEQ ID NO: 2364988 - RNA, 19 nt, Artificial Sequence
  Description of Artificial Sequence: Synthetic oligonucleotide
ccaggccggccuugcccgu

SEQ ID NO: 2364989 - RNA, 19 nt, Artificial Sequence
  Description of Artificial Sequence: Synthetic oligonucleotide
ccccuucccggucggcauu

SEQ ID NO: 2364990 - RNA, 19 nt, Artificial Sequence
  Description of Artificial Sequence: Synthetic oligonucleotide
  modified_base (1)..(1): a, c, u, g, unknown or other
ngguggccgcggaucuguc

SEQ ID NO: 2364991 - RNA, 19 nt, Artificial Sequence
  Description of Artificial Sequence: Synthetic oligonucleotide
ucaaccaucagucucauca

SEQ ID NO: 2364992 - RNA, 19 nt, Artificial Sequence
  Description of Artificial Sequence: Synthetic oligonucleotide
aacggaauggggcagcaac

SEQ ID NO: 2364993 - RNA, 19 nt, Artificial Sequence
  Description of Artificial Sequence: Synthetic oligonucleotide
aaugagcugccacagccgc

SEQ ID NO: 2364994 - RNA, 19 nt, Artificial Sequence
  Description of Artificial Sequence: Synthetic oligonucleotide
aaucugaucuucuggauca

SEQ ID NO: 2364995 - RNA, 19 nt, Artificial Sequence
  Description of Artificial Sequence: Synthetic oligonucleotide
uguagcagcaggaggagag

SEQ ID NO: 2364996 - RNA, 19 nt, Artificial Sequence
  Description of Artificial Sequence: Synthetic oligonucleotide
agaaugggaacccucuugg

SEQ ID NO: 2364997 - RNA, 19 nt, Artificial Sequence
  Description of Artificial Sequence: Synthetic oligonucleotide
guugaugcacagcacaggg

SEQ ID NO: 2364998 - RNA, 19 nt, Artificial Sequence
  Description of Artificial Sequence: Synthetic oligonucleotide
ugaugcacagcacagggcu

SEQ ID NO: 2364999 - RNA, 19 nt, Artificial Sequence
  Description of Artificial Sequence: Synthetic oligonucleotide
aaugggaacccucuuggcu

SEQ ID NO: 2365000 - RNA, 19 nt, Artificial Sequence
  Description of Artificial Sequence: Synthetic oligonucleotide
ucuggguaagcccauggag

SEQ ID NO: 2365001 - RNA, 19 nt, Artificial Sequence
  Description of Artificial Sequence: Synthetic oligonucleotide
ugguugcugaaucugaucu

SEQ ID NO: 2365002 - RNA, 19 nt, Artificial Sequence
  Description of Artificial Sequence: Synthetic oligonucleotide
uguucaaugagcugccaca

SEQ ID NO: 2365003 - RNA, 19 nt, Artificial Sequence
  Description of Artificial Sequence: Synthetic oligonucleotide
aaggcguccacgucggccg

SEQ ID NO: 2365004 - RNA, 19 nt, Artificial Sequence
  Description of Artificial Sequence: Synthetic oligonucleotide
acccucuuggcucacacac

SEQ ID NO: 2365005 - RNA, 19 nt, Artificial Sequence
  Description of Artificial Sequence: Synthetic oligonucleotide
agcuguacgccccagcugg

SEQ ID NO: 2365006 - RNA, 19 nt, Artificial Sequence
  Description of Artificial Sequence: Synthetic oligonucleotide
aguucuugggaccugguca

SEQ ID NO: 2365007 - RNA, 19 nt, Artificial Sequence
  Description of Artificial Sequence: Synthetic oligonucleotide
aggaacauccguccgcagc

SEQ ID NO: 2365008 - RNA, 19 nt, Artificial Sequence
  Description of Artificial Sequence: Synthetic oligonucleotide
agucaggaguucuugggac

SEQ ID NO: 2365009 - RNA, 19 nt, Artificial Sequence
  Description of Artificial Sequence: Synthetic oligonucleotide
gaauggggcagcaacagag

SEQ ID NO: 2365010 - RNA, 19 nt, Artificial Sequence
  Description of Artificial Sequence: Synthetic oligonucleotide
gagucaaccacuaccaggc

SEQ ID NO: 2365011 - RNA, 19 nt, Artificial Sequence
  Description of Artificial Sequence: Synthetic oligonucleotide
cuggguaagcccauggagg

SEQ ID NO: 2365012 - RNA, 19 nt, Artificial Sequence
  Description of Artificial Sequence: Synthetic oligonucleotide
ugcucgaugaagauguggu

SEQ ID NO: 2365013 - RNA, 19 nt, Artificial Sequence
  Description of Artificial Sequence: Synthetic oligonucleotide
acucacaacggaauggggc

SEQ ID NO: 2365014 - RNA, 19 nt, Artificial Sequence
  Description of Artificial Sequence: Synthetic oligonucleotide
gacucuugcuccuccaccg

SEQ ID NO: 2365015 - RNA, 19 nt, Artificial Sequence
  Description of Artificial Sequence: Synthetic oligonucleotide
uguguauguaucagaguca

SEQ ID NO: 2365016 - RNA, 19 nt, Artificial Sequence
  Description of Artificial Sequence: Synthetic oligonucleotide
guauguaucagagucagga

SEQ ID NO: 2365017 - RNA, 19 nt, Artificial Sequence
  Description of Artificial Sequence: Synthetic oligonucleotide
guuagcaggacucgguucc

SEQ ID NO: 2365018 - RNA, 19 nt, Artificial Sequence
  Description of Artificial Sequence: Synthetic oligonucleotide
augggaacccucuuggcuc

SEQ ID NO: 2365019 - RNA, 19 nt, Artificial Sequence
  Description of Artificial Sequence: Synthetic oligonucleotide
ugugcagauguagacagcc

SEQ ID NO: 2365020 - RNA, 19 nt, Artificial Sequence
  Description of Artificial Sequence: Synthetic oligonucleotide
agucaagcagagcuguacg

SEQ ID NO: 2365021 - RNA, 19 nt, Artificial Sequence
  Description of Artificial Sequence: Synthetic oligonucleotide
ucauacucacaacggaaug

SEQ ID NO: 2365022 - RNA, 19 nt, Artificial Sequence
  Description of Artificial Sequence: Synthetic oligonucleotide
auguaucagagucaggagu

SEQ ID NO: 2365023 - RNA, 19 nt, Artificial Sequence
  Description of Artificial Sequence: Synthetic oligonucleotide
agacucuugcuccuccacc

SEQ ID NO: 2365024 - RNA, 19 nt, Artificial Sequence
  Description of Artificial Sequence: Synthetic oligonucleotide
cauacucacaacggaaugg

SEQ ID NO: 2365025 - RNA, 19 nt, Artificial Sequence
  Description of Artificial Sequence: Synthetic oligonucleotide
auacucacaacggaauggg

SEQ ID NO: 2365026 - RNA, 19 nt, Artificial Sequence
  Description of Artificial Sequence: Synthetic oligonucleotide
uaauccaccagagcuacug

SEQ ID NO: 2365027 - RNA, 19 nt, Artificial Sequence
  Description of Artificial Sequence: Synthetic oligonucleotide
ucuuggcucacacacucca

SEQ ID NO: 2365028 - RNA, 19 nt, Artificial Sequence
  Description of Artificial Sequence: Synthetic oligonucleotide
ugguugaugcacagcacag

SEQ ID NO: 2365029 - RNA, 19 nt, Artificial Sequence
  Description of Artificial Sequence: Synthetic oligonucleotide
caaggccugagcaucauac

SEQ ID NO: 2365030 - RNA, 19 nt, Artificial Sequence
  Description of Artificial Sequence: Synthetic oligonucleotide
uccaccguuuccaucaccu

SEQ ID NO: 2365031 - RNA, 19 nt, Artificial Sequence
  Description of Artificial Sequence: Synthetic oligonucleotide
uggguaagcccauggaggc

SEQ ID NO: 2365032 - RNA, 19 nt, Artificial Sequence
  Description of Artificial Sequence: Synthetic oligonucleotide
gaaggcauccucugugcag

SEQ ID NO: 2365033 - RNA, 19 nt, Artificial Sequence
  Description of Artificial Sequence: Synthetic oligonucleotide
cagagcuucgaccagccag

SEQ ID NO: 2365034 - RNA, 19 nt, Artificial Sequence
  Description of Artificial Sequence: Synthetic oligonucleotide
uguauguaucagagucagg

SEQ ID NO: 2365035 - RNA, 19 nt, Artificial Sequence
  Description of Artificial Sequence: Synthetic oligonucleotide
auauugucgugggaacugc

SEQ ID NO: 2365036 - RNA, 19 nt, Artificial Sequence
  Description of Artificial Sequence: Synthetic oligonucleotide
ucaagcagagcuguacgcc

SEQ ID NO: 2365037 - RNA, 19 nt, Artificial Sequence
  Description of Artificial Sequence: Synthetic oligonucleotide
gucaaccacuaccaggcgg

SEQ ID NO: 2365038 - RNA, 19 nt, Artificial Sequence
  Description of Artificial Sequence: Synthetic oligonucleotide
agauguagacagccccagc

SEQ ID NO: 2365039 - RNA, 19 nt, Artificial Sequence
  Description of Artificial Sequence: Synthetic oligonucleotide
agagacugcaggugcuugg

SEQ ID NO: 2365040 - RNA, 19 nt, Artificial Sequence
  Description of Artificial Sequence: Synthetic oligonucleotide
cugagcaucauacucacaa

SEQ ID NO: 2365041 - RNA, 19 nt, Artificial Sequence
  Description of Artificial Sequence: Synthetic oligonucleotide
guguauguaucagagucag

SEQ ID NO: 2365042 - RNA, 19 nt, Artificial Sequence
  Description of Artificial Sequence: Synthetic oligonucleotide
uguguguguguguacgugu

SEQ ID NO: 2365043 - RNA, 19 nt, Artificial Sequence
  Description of Artificial Sequence: Synthetic oligonucleotide
gcugaaucugaucuucugg

SEQ ID NO: 2365044 - RNA, 19 nt, Artificial Sequence
  Description of Artificial Sequence: Synthetic oligonucleotide
uacucacaacggaaugggg

SEQ ID NO: 2365045 - RNA, 19 nt, Artificial Sequence
  Description of Artificial Sequence: Synthetic oligonucleotide
guucuugggaccuggucag

SEQ ID NO: 2365046 - RNA, 19 nt, Artificial Sequence
  Description of Artificial Sequence: Synthetic oligonucleotide
cucgaugaagaugugguug

SEQ ID NO: 2365047 - RNA, 19 nt, Artificial Sequence
  Description of Artificial Sequence: Synthetic oligonucleotide
uugucgugggaacugcaca

SEQ ID NO: 2365048 - RNA, 19 nt, Artificial Sequence
  Description of Artificial Sequence: Synthetic oligonucleotide
uccucugugcagauguaga

SEQ ID NO: 2365049 - RNA, 19 nt, Artificial Sequence
  Description of Artificial Sequence: Synthetic oligonucleotide
accguguagcagcaggagg

SEQ ID NO: 2365050 - RNA, 19 nt, Artificial Sequence
  Description of Artificial Sequence: Synthetic oligonucleotide
uccauauugucgugggaac

SEQ ID NO: 2365051 - RNA, 19 nt, Artificial Sequence
  Description of Artificial Sequence: Synthetic oligonucleotide
cugaccguguagcagcagg

SEQ ID NO: 2365052 - RNA, 19 nt, Artificial Sequence
  Description of Artificial Sequence: Synthetic oligonucleotide
cugaaucugaucuucugga

SEQ ID NO: 2365053 - RNA, 19 nt, Artificial Sequence
  Description of Artificial Sequence: Synthetic oligonucleotide
caaugagcugccacagccg

SEQ ID NO: 2365054 - RNA, 19 nt, Artificial Sequence
  Description of Artificial Sequence: Synthetic oligonucleotide
uugaugcacagcacagggc

SEQ ID NO: 2365055 - RNA, 19 nt, Artificial Sequence
  Description of Artificial Sequence: Synthetic oligonucleotide
cccgguaucccucugaugc

SEQ ID NO: 2365056 - RNA, 19 nt, Artificial Sequence
  Description of Artificial Sequence: Synthetic oligonucleotide
agagcuguacgccccagcu

SEQ ID NO: 2365057 - RNA, 19 nt, Artificial Sequence
  Description of Artificial Sequence: Synthetic oligonucleotide
accagagcuacuguuagca

SEQ ID NO: 2365058 - RNA, 19 nt, Artificial Sequence
  Description of Artificial Sequence: Synthetic oligonucleotide
acagagucaaccacuacca

SEQ ID NO: 2365059 - RNA, 19 nt, Artificial Sequence
  Description of Artificial Sequence: Synthetic oligonucleotide
aggcaucguccucaugugc

SEQ ID NO: 2365060 - RNA, 19 nt, Artificial Sequence
  Description of Artificial Sequence: Synthetic oligonucleotide
ugcccggucaaccaucagu

SEQ ID NO: 2365061 - RNA, 19 nt, Artificial Sequence
  Description of Artificial Sequence: Synthetic oligonucleotide
gcuucgaccagccagguca

SEQ ID NO: 2365062 - RNA, 19 nt, Artificial Sequence
  Description of Artificial Sequence: Synthetic oligonucleotide
agagcuucgaccagccagg

SEQ ID NO: 2365063 - RNA, 19 nt, Artificial Sequence
  Description of Artificial Sequence: Synthetic oligonucleotide
cagcaaggcguccacgucg

SEQ ID NO: 2365064 - RNA, 19 nt, Artificial Sequence
  Description of Artificial Sequence: Synthetic oligonucleotide
aaggcauccucugugcaga

SEQ ID NO: 2365065 - RNA, 19 nt, Artificial Sequence
  Description of Artificial Sequence: Synthetic oligonucleotide
agagcacccguaugguccg

SEQ ID NO: 2365066 - RNA, 19 nt, Artificial Sequence
  Description of Artificial Sequence: Synthetic oligonucleotide
ucagagucaggaguucuug

SEQ ID NO: 2365067 - RNA, 19 nt, Artificial Sequence
  Description of Artificial Sequence: Synthetic oligonucleotide
ugagcaucauacucacaac

SEQ ID NO: 2365068 - RNA, 19 nt, Artificial Sequence
  Description of Artificial Sequence: Synthetic oligonucleotide
accacuaccaggcgggcca

SEQ ID NO: 2365069 - RNA, 19 nt, Artificial Sequence
  Description of Artificial Sequence: Synthetic oligonucleotide
uucuggguaagcccaugga

SEQ ID NO: 2365070 - RNA, 19 nt, Artificial Sequence
  Description of Artificial Sequence: Synthetic oligonucleotide
uacuguuagcaggacucgg

SEQ ID NO: 2365071 - RNA, 19 nt, Artificial Sequence
  Description of Artificial Sequence: Synthetic oligonucleotide
acccguaugguccgugccg

SEQ ID NO: 2365072 - RNA, 19 nt, Artificial Sequence
  Description of Artificial Sequence: Synthetic oligonucleotide
aaggccugagcaucauacu

SEQ ID NO: 2365073 - RNA, 19 nt, Artificial Sequence
  Description of Artificial Sequence: Synthetic oligonucleotide
gucaagcagagcuguacgc

SEQ ID NO: 2365074 - RNA, 19 nt, Artificial Sequence
  Description of Artificial Sequence: Synthetic oligonucleotide
agacugcaggugcuuggcc

SEQ ID NO: 2365075 - RNA, 19 nt, Artificial Sequence
  Description of Artificial Sequence: Synthetic oligonucleotide
ugugguugcugaaucugau

SEQ ID NO: 2365076 - RNA, 19 nt, Artificial Sequence
  Description of Artificial Sequence: Synthetic oligonucleotide
guguguguguguguguacg

SEQ ID NO: 2365077 - RNA, 19 nt, Artificial Sequence
  Description of Artificial Sequence: Synthetic oligonucleotide
aaccacuaccaggcgggcc

SEQ ID NO: 2365078 - RNA, 19 nt, Artificial Sequence
  Description of Artificial Sequence: Synthetic oligonucleotide
uccagcaaggcguccacgu

SEQ ID NO: 2365079 - RNA, 19 nt, Artificial Sequence
  Description of Artificial Sequence: Synthetic oligonucleotide
ugaccguguagcagcagga

SEQ ID NO: 2365080 - RNA, 19 nt, Artificial Sequence
  Description of Artificial Sequence: Synthetic oligonucleotide
ugcagagcuucgaccagcc

SEQ ID NO: 2365081 - RNA, 19 nt, Artificial Sequence
  Description of Artificial Sequence: Synthetic oligonucleotide
cucacaacggaauggggca

SEQ ID NO: 2365082 - RNA, 19 nt, Artificial Sequence
  Description of Artificial Sequence: Synthetic oligonucleotide
cacacacuccagcaaggcg

SEQ ID NO: 2365083 - RNA, 19 nt, Artificial Sequence
  Description of Artificial Sequence: Synthetic oligonucleotide
uguguguacgugugugugu

SEQ ID NO: 2365084 - RNA, 19 nt, Artificial Sequence
  Description of Artificial Sequence: Synthetic oligonucleotide
uguguguguacgugugugu

SEQ ID NO: 2365085 - RNA, 19 nt, Artificial Sequence
  Description of Artificial Sequence: Synthetic oligonucleotide
uauugucgugggaacugca

SEQ ID NO: 2365086 - RNA, 19 nt, Artificial Sequence
  Description of Artificial Sequence: Synthetic oligonucleotide
uccccaggaacauccgucc

SEQ ID NO: 2365087 - RNA, 19 nt, Artificial Sequence
  Description of Artificial Sequence: Synthetic oligonucleotide
uguuagcaggacucgguuc

SEQ ID NO: 2365088 - RNA, 19 nt, Artificial Sequence
  Description of Artificial Sequence: Synthetic oligonucleotide
cagaaugggaacccucuug

SEQ ID NO: 2365089 - RNA, 19 nt, Artificial Sequence
  Description of Artificial Sequence: Synthetic oligonucleotide
gaaugggaacccucuuggc

SEQ ID NO: 2365090 - RNA, 19 nt, Artificial Sequence
  Description of Artificial Sequence: Synthetic oligonucleotide
caucagucucaucaggauc

SEQ ID NO: 2365091 - RNA, 19 nt, Artificial Sequence
  Description of Artificial Sequence: Synthetic oligonucleotide
uccaccagagcuacuguua

SEQ ID NO: 2365092 - RNA, 19 nt, Artificial Sequence
  Description of Artificial Sequence: Synthetic oligonucleotide
uacugcucagucugcggag

SEQ ID NO: 2365093 - RNA, 19 nt, Artificial Sequence
  Description of Artificial Sequence: Synthetic oligonucleotide
gacagcagaaugggaaccc

SEQ ID NO: 2365094 - RNA, 19 nt, Artificial Sequence
  Description of Artificial Sequence: Synthetic oligonucleotide
uccgcacugaccguguagc

SEQ ID NO: 2365095 - RNA, 19 nt, Artificial Sequence
  Description of Artificial Sequence: Synthetic oligonucleotide
agagcuacuguuagcagga

SEQ ID NO: 2365096 - RNA, 19 nt, Artificial Sequence
  Description of Artificial Sequence: Synthetic oligonucleotide
agcccauggaggcaucguc

SEQ ID NO: 2365097 - RNA, 19 nt, Artificial Sequence
  Description of Artificial Sequence: Synthetic oligonucleotide
ucaugugcccggucaacca

SEQ ID NO: 2365098 - RNA, 19 nt, Artificial Sequence
  Description of Artificial Sequence: Synthetic oligonucleotide
ggcagcaacagagucaacc

SEQ ID NO: 2365099 - RNA, 19 nt, Artificial Sequence
  Description of Artificial Sequence: Synthetic oligonucleotide
caucauacucacaacggaa

SEQ ID NO: 2365100 - RNA, 19 nt, Artificial Sequence
  Description of Artificial Sequence: Synthetic oligonucleotide
uguacguguguguguguac

SEQ ID NO: 2365101 - RNA, 19 nt, Artificial Sequence
  Description of Artificial Sequence: Synthetic oligonucleotide
gagucaggaguucuuggga

SEQ ID NO: 2365102 - RNA, 19 nt, Artificial Sequence
  Description of Artificial Sequence: Synthetic oligonucleotide
gagagaggugcucauccca

SEQ ID NO: 2365103 - RNA, 19 nt, Artificial Sequence
  Description of Artificial Sequence: Synthetic oligonucleotide
gucaggaguucuugggacc

SEQ ID NO: 2365104 - RNA, 19 nt, Artificial Sequence
  Description of Artificial Sequence: Synthetic oligonucleotide
uaccaggcgggccaucccc

SEQ ID NO: 2365105 - RNA, 19 nt, Artificial Sequence
  Description of Artificial Sequence: Synthetic oligonucleotide
uguguguguguacgugugu

SEQ ID NO: 2365106 - RNA, 19 nt, Artificial Sequence
  Description of Artificial Sequence: Synthetic oligonucleotide
uuccgcacugaccguguag

SEQ ID NO: 2365107 - RNA, 19 nt, Artificial Sequence
  Description of Artificial Sequence: Synthetic oligonucleotide
gggcauagacucuugcucc

SEQ ID NO: 2365108 - RNA, 19 nt, Artificial Sequence
  Description of Artificial Sequence: Synthetic oligonucleotide
cuguucaaugagcugccac

SEQ ID NO: 2365109 - RNA, 19 nt, Artificial Sequence
  Description of Artificial Sequence: Synthetic oligonucleotide
uguguguguguguguacgu

SEQ ID NO: 2365110 - RNA, 19 nt, Artificial Sequence
  Description of Artificial Sequence: Synthetic oligonucleotide
ucggccgcaugcucgauga

SEQ ID NO: 2365111 - RNA, 19 nt, Artificial Sequence
  Description of Artificial Sequence: Synthetic oligonucleotide
accuggucaggcuaaucca

SEQ ID NO: 2365112 - RNA, 19 nt, Artificial Sequence
  Description of Artificial Sequence: Synthetic oligonucleotide
cacgucggccgcaugcucg

SEQ ID NO: 2365113 - RNA, 19 nt, Artificial Sequence
  Description of Artificial Sequence: Synthetic oligonucleotide
ucuucccugcagagcuucg

SEQ ID NO: 2365114 - RNA, 19 nt, Artificial Sequence
  Description of Artificial Sequence: Synthetic oligonucleotide
uagacucuugcuccuccac

SEQ ID NO: 2365115 - RNA, 19 nt, Artificial Sequence
  Description of Artificial Sequence: Synthetic oligonucleotide
augcucgaugaagaugugg

SEQ ID NO: 2365116 - RNA, 19 nt, Artificial Sequence
  Description of Artificial Sequence: Synthetic oligonucleotide
cugguugaugcacagcaca

SEQ ID NO: 2365117 - RNA, 19 nt, Artificial Sequence
  Description of Artificial Sequence: Synthetic oligonucleotide
cuacuguuagcaggacucg

SEQ ID NO: 2365118 - RNA, 19 nt, Artificial Sequence
  Description of Artificial Sequence: Synthetic oligonucleotide
agucaaccacuaccaggcg

SEQ ID NO: 2365119 - RNA, 19 nt, Artificial Sequence
  Description of Artificial Sequence: Synthetic oligonucleotide
uaagcccauggaggcaucg

SEQ ID NO: 2365120 - RNA, 19 nt, Artificial Sequence
  Description of Artificial Sequence: Synthetic oligonucleotide
ugugcccggucaaccauca

SEQ ID NO: 2365121 - RNA, 19 nt, Artificial Sequence
  Description of Artificial Sequence: Synthetic oligonucleotide
gagcgcggcucccagagac

SEQ ID NO: 2365122 - RNA, 19 nt, Artificial Sequence
  Description of Artificial Sequence: Synthetic oligonucleotide
aauggggcagcaacagagu

SEQ ID NO: 2365123 - RNA, 19 nt, Artificial Sequence
  Description of Artificial Sequence: Synthetic oligonucleotide
gaacccucuuggcucacac

SEQ ID NO: 2365124 - RNA, 19 nt, Artificial Sequence
  Description of Artificial Sequence: Synthetic oligonucleotide
aucauacucacaacggaau

SEQ ID NO: 2365125 - RNA, 19 nt, Artificial Sequence
  Description of Artificial Sequence: Synthetic oligonucleotide
caggcuaauccaccagagc

SEQ ID NO: 2365126 - RNA, 19 nt, Artificial Sequence
  Description of Artificial Sequence: Synthetic oligonucleotide
caggugaugccaagggcug

SEQ ID NO: 2365127 - RNA, 19 nt, Artificial Sequence
  Description of Artificial Sequence: Synthetic oligonucleotide
gcuacuguuagcaggacuc

SEQ ID NO: 2365128 - RNA, 19 nt, Artificial Sequence
  Description of Artificial Sequence: Synthetic oligonucleotide
cuuggcucacacacuccag

SEQ ID NO: 2365129 - RNA, 19 nt, Artificial Sequence
  Description of Artificial Sequence: Synthetic oligonucleotide
aggaguucuugggaccugg

SEQ ID NO: 2365130 - RNA, 19 nt, Artificial Sequence
  Description of Artificial Sequence: Synthetic oligonucleotide
uguguguguguguguguac

SEQ ID NO: 2365131 - RNA, 19 nt, Artificial Sequence
  Description of Artificial Sequence: Synthetic oligonucleotide
guguguacgugugugugug

SEQ ID NO: 2365132 - RNA, 19 nt, Artificial Sequence
  Description of Artificial Sequence: Synthetic oligonucleotide
guacugcucagucugcgga

SEQ ID NO: 2365133 - RNA, 19 nt, Artificial Sequence
  Description of Artificial Sequence: Synthetic oligonucleotide
gucaggcuaauccaccaga

SEQ ID NO: 2365134 - RNA, 19 nt, Artificial Sequence
  Description of Artificial Sequence: Synthetic oligonucleotide
ucgaccagccaggucagug

SEQ ID NO: 2365135 - RNA, 19 nt, Artificial Sequence
  Description of Artificial Sequence: Synthetic oligonucleotide
ucgugggaacugcacaguc

SEQ ID NO: 2365136 - RNA, 19 nt, Artificial Sequence
  Description of Artificial Sequence: Synthetic oligonucleotide
uccgugccgggcuucuggg

SEQ ID NO: 2365137 - RNA, 19 nt, Artificial Sequence
  Description of Artificial Sequence: Synthetic oligonucleotide
cuccccaggaacauccguc

SEQ ID NO: 2365138 - RNA, 19 nt, Artificial Sequence
  Description of Artificial Sequence: Synthetic oligonucleotide
cucaugugcccggucaacc

SEQ ID NO: 2365139 - RNA, 19 nt, Artificial Sequence
  Description of Artificial Sequence: Synthetic oligonucleotide
ugugugugugugugugugu

SEQ ID NO: 2365140 - RNA, 19 nt, Artificial Sequence
  Description of Artificial Sequence: Synthetic oligonucleotide
aacccucuuggcucacaca

SEQ ID NO: 2365141 - RNA, 19 nt, Artificial Sequence
  Description of Artificial Sequence: Synthetic oligonucleotide
ucacaacggaauggggcag

SEQ ID NO: 2365142 - RNA, 19 nt, Artificial Sequence
  Description of Artificial Sequence: Synthetic oligonucleotide
gaguucuugggaccugguc

SEQ ID NO: 2365143 - RNA, 19 nt, Artificial Sequence
  Description of Artificial Sequence: Synthetic oligonucleotide
agcagaaugggaacccucu

SEQ ID NO: 2365144 - RNA, 19 nt, Artificial Sequence
  Description of Artificial Sequence: Synthetic oligonucleotide
guguguguguacgugugug

SEQ ID NO: 2365145 - RNA, 19 nt, Artificial Sequence
  Description of Artificial Sequence: Synthetic oligonucleotide
auccucugugcagauguag

SEQ ID NO: 2365146 - RNA, 19 nt, Artificial Sequence
  Description of Artificial Sequence: Synthetic oligonucleotide
gagacugcaggugcuuggc

SEQ ID NO: 2365147 - RNA, 19 nt, Artificial Sequence
  Description of Artificial Sequence: Synthetic oligonucleotide
ucuugcuccuccaccguuu

SEQ ID NO: 2365148 - RNA, 19 nt, Artificial Sequence
  Description of Artificial Sequence: Synthetic oligonucleotide
uaucccucugaugccuucc

SEQ ID NO: 2365149 - RNA, 19 nt, Artificial Sequence
  Description of Artificial Sequence: Synthetic oligonucleotide
ggaggcaucguccucaugu

SEQ ID NO: 2365150 - RNA, 19 nt, Artificial Sequence
  Description of Artificial Sequence: Synthetic oligonucleotide
ccccuugacagcagaaugg

SEQ ID NO: 2365151 - RNA, 19 nt, Artificial Sequence
  Description of Artificial Sequence: Synthetic oligonucleotide
guguguguacgugugugug

SEQ ID NO: 2365152 - RNA, 19 nt, Artificial Sequence
  Description of Artificial Sequence: Synthetic oligonucleotide
gugugugugugugugugug

SEQ ID NO: 2365153 - RNA, 19 nt, Artificial Sequence
  Description of Artificial Sequence: Synthetic oligonucleotide
ugggaacccucuuggcuca

SEQ ID NO: 2365154 - RNA, 19 nt, Artificial Sequence
  Description of Artificial Sequence: Synthetic oligonucleotide
cagucaagcagagcuguac

SEQ ID NO: 2365155 - RNA, 19 nt, Artificial Sequence
  Description of Artificial Sequence: Synthetic oligonucleotide
gacucgguucccgguaucc

SEQ ID NO: 2365156 - RNA, 19 nt, Artificial Sequence
  Description of Artificial Sequence: Synthetic oligonucleotide
gguugaugcacagcacagg

SEQ ID NO: 2365157 - RNA, 19 nt, Artificial Sequence
  Description of Artificial Sequence: Synthetic oligonucleotide
ggaacugcacagucaagca

SEQ ID NO: 2365158 - RNA, 19 nt, Artificial Sequence
  Description of Artificial Sequence: Synthetic oligonucleotide
cagagucaaccacuaccag

SEQ ID NO: 2365159 - RNA, 19 nt, Artificial Sequence
  Description of Artificial Sequence: Synthetic oligonucleotide
caaggcguccacgucggcc

SEQ ID NO: 2365160 - RNA, 19 nt, Artificial Sequence
  Description of Artificial Sequence: Synthetic oligonucleotide
gaccguguagcagcaggag

SEQ ID NO: 2365161 - RNA, 19 nt, Artificial Sequence
  Description of Artificial Sequence: Synthetic oligonucleotide
uucccgguaucccucugau

SEQ ID NO: 2365162 - RNA, 19 nt, Artificial Sequence
  Description of Artificial Sequence: Synthetic oligonucleotide
agcaaggcguccacgucgg

SEQ ID NO: 2365163 - RNA, 19 nt, Artificial Sequence
  Description of Artificial Sequence: Synthetic oligonucleotide
gagcuguacgccccagcug

SEQ ID NO: 2365164 - RNA, 19 nt, Artificial Sequence
  Description of Artificial Sequence: Synthetic oligonucleotide
cuucgaccagccaggucag

SEQ ID NO: 2365165 - RNA, 19 nt, Artificial Sequence
  Description of Artificial Sequence: Synthetic oligonucleotide
caucaccugguugaugcac

SEQ ID NO: 2365166 - RNA, 19 nt, Artificial Sequence
  Description of Artificial Sequence: Synthetic oligonucleotide
ggggaaggcauccucugug

SEQ ID NO: 2365167 - RNA, 19 nt, Artificial Sequence
  Description of Artificial Sequence: Synthetic oligonucleotide
gccuccauauugucguggg

SEQ ID NO: 2365168 - RNA, 19 nt, Artificial Sequence
  Description of Artificial Sequence: Synthetic oligonucleotide
uccucaugugcccggucaa

SEQ ID NO: 2365169 - RNA, 19 nt, Artificial Sequence
  Description of Artificial Sequence: Synthetic oligonucleotide
gaucaccuccccaggaaca

SEQ ID NO: 2365170 - RNA, 19 nt, Artificial Sequence
  Description of Artificial Sequence: Synthetic oligonucleotide
ucaucaggaucugguuggc

SEQ ID NO: 2365171 - RNA, 19 nt, Artificial Sequence
  Description of Artificial Sequence: Synthetic oligonucleotide
ggcaucguccucaugugcc

SEQ ID NO: 2365172 - RNA, 19 nt, Artificial Sequence
  Description of Artificial Sequence: Synthetic oligonucleotide
ucagucugcggagcgcggc

SEQ ID NO: 2365173 - RNA, 19 nt, Artificial Sequence
  Description of Artificial Sequence: Synthetic oligonucleotide
cuccggaagguacugcuca

SEQ ID NO: 2365174 - RNA, 19 nt, Artificial Sequence
  Description of Artificial Sequence: Synthetic oligonucleotide
cugcucagucugcggagcg

SEQ ID NO: 2365175 - RNA, 19 nt, Artificial Sequence
  Description of Artificial Sequence: Synthetic oligonucleotide
accguuuccaucaccuggu

SEQ ID NO: 2365176 - RNA, 19 nt, Artificial Sequence
  Description of Artificial Sequence: Synthetic oligonucleotide
uguacgccccagcuggguu

SEQ ID NO: 2365177 - RNA, 19 nt, Artificial Sequence
  Description of Artificial Sequence: Synthetic oligonucleotide
guacguguguguguguaca

SEQ ID NO: 2365178 - RNA, 19 nt, Artificial Sequence
  Description of Artificial Sequence: Synthetic oligonucleotide
gugguugcugaaucugauc

SEQ ID NO: 2365179 - RNA, 19 nt, Artificial Sequence
  Description of Artificial Sequence: Synthetic oligonucleotide
guguguguguguacgugug

SEQ ID NO: 2365180 - RNA, 19 nt, Artificial Sequence
  Description of Artificial Sequence: Synthetic oligonucleotide
caccagagcuacuguuagc

SEQ ID NO: 2365181 - RNA, 19 nt, Artificial Sequence
  Description of Artificial Sequence: Synthetic oligonucleotide
ugggaccuggucaggcuaa

SEQ ID NO: 2365182 - RNA, 19 nt, Artificial Sequence
  Description of Artificial Sequence: Synthetic oligonucleotide
uuagcaggacucgguuccc

SEQ ID NO: 2365183 - RNA, 19 nt, Artificial Sequence
  Description of Artificial Sequence: Synthetic oligonucleotide
uagcaggacucgguucccg

SEQ ID NO: 2365184 - RNA, 19 nt, Artificial Sequence
  Description of Artificial Sequence: Synthetic oligonucleotide
uguguacgugugugugugu

SEQ ID NO: 2365185 - RNA, 19 nt, Artificial Sequence
  Description of Artificial Sequence: Synthetic oligonucleotide
uacguguguguguguacau

SEQ ID NO: 2365186 - RNA, 19 nt, Artificial Sequence
  Description of Artificial Sequence: Synthetic oligonucleotide
auccaccagagcuacuguu

SEQ ID NO: 2365187 - RNA, 19 nt, Artificial Sequence
  Description of Artificial Sequence: Synthetic oligonucleotide
agcuucgaccagccagguc

SEQ ID NO: 2365188 - RNA, 19 nt, Artificial Sequence
  Description of Artificial Sequence: Synthetic oligonucleotide
guguguguguguguacgug

SEQ ID NO: 2365189 - RNA, 19 nt, Artificial Sequence
  Description of Artificial Sequence: Synthetic oligonucleotide
cagcagaaugggaacccuc

SEQ ID NO: 2365190 - RNA, 19 nt, Artificial Sequence
  Description of Artificial Sequence: Synthetic oligonucleotide
ggagagaggugcucauccc

SEQ ID NO: 2365191 - RNA, 19 nt, Artificial Sequence
  Description of Artificial Sequence: Synthetic oligonucleotide
gcuaauccaccagagcuac

SEQ ID NO: 2365192 - RNA, 19 nt, Artificial Sequence
  Description of Artificial Sequence: Synthetic oligonucleotide
acguguguguguguacaug

SEQ ID NO: 2365193 - RNA, 19 nt, Artificial Sequence
  Description of Artificial Sequence: Synthetic oligonucleotide
ggucaggcuaauccaccag

SEQ ID NO: 2365194 - RNA, 19 nt, Artificial Sequence
  Description of Artificial Sequence: Synthetic oligonucleotide
caucguccucaugugcccg

SEQ ID NO: 2365195 - RNA, 19 nt, Artificial Sequence
  Description of Artificial Sequence: Synthetic oligonucleotide
caggccuccauauugucgu

SEQ ID NO: 2365196 - RNA, 19 nt, Artificial Sequence
  Description of Artificial Sequence: Synthetic oligonucleotide
gaagaugugguugcugaau

SEQ ID NO: 2365197 - RNA, 19 nt, Artificial Sequence
  Description of Artificial Sequence: Synthetic oligonucleotide
cacccguaugguccgugcc

SEQ ID NO: 2365198 - RNA, 19 nt, Artificial Sequence
  Description of Artificial Sequence: Synthetic oligonucleotide
cacaacggaauggggcagc

SEQ ID NO: 2365199 - RNA, 19 nt, Artificial Sequence
  Description of Artificial Sequence: Synthetic oligonucleotide
cucagucugcggagcgcgg

SEQ ID NO: 2365200 - RNA, 19 nt, Artificial Sequence
  Description of Artificial Sequence: Synthetic oligonucleotide
acagcagaaugggaacccu

SEQ ID NO: 2365201 - RNA, 19 nt, Artificial Sequence
  Description of Artificial Sequence: Synthetic oligonucleotide
cagagcuguacgccccagc

SEQ ID NO: 2365202 - RNA, 19 nt, Artificial Sequence
  Description of Artificial Sequence: Synthetic oligonucleotide
uccaggccuccauauuguc

SEQ ID NO: 2365203 - RNA, 19 nt, Artificial Sequence
  Description of Artificial Sequence: Synthetic oligonucleotide
guguguguguguacaugug

SEQ ID NO: 2365204 - RNA, 19 nt, Artificial Sequence
  Description of Artificial Sequence: Synthetic oligonucleotide
ugcucagucugcggagcgc

SEQ ID NO: 2365205 - RNA, 19 nt, Artificial Sequence
  Description of Artificial Sequence: Synthetic oligonucleotide
ggaacauccguccgcagcu

SEQ ID NO: 2365206 - RNA, 19 nt, Artificial Sequence
  Description of Artificial Sequence: Synthetic oligonucleotide
ucccgguaucccucugaug

SEQ ID NO: 2365207 - RNA, 19 nt, Artificial Sequence
  Description of Artificial Sequence: Synthetic oligonucleotide
aagcccauggaggcaucgu

SEQ ID NO: 2365208 - RNA, 19 nt, Artificial Sequence
  Description of Artificial Sequence: Synthetic oligonucleotide
acggaauggggcagcaaca

SEQ ID NO: 2365209 - RNA, 19 nt, Artificial Sequence
  Description of Artificial Sequence: Synthetic oligonucleotide
gcucagucugcggagcgcg

SEQ ID NO: 2365210 - RNA, 19 nt, Artificial Sequence
  Description of Artificial Sequence: Synthetic oligonucleotide
ccaccagagcuacuguuag

SEQ ID NO: 2365211 - RNA, 19 nt, Artificial Sequence
  Description of Artificial Sequence: Synthetic oligonucleotide
uaugguccgugccgggcuu

SEQ ID NO: 2365212 - RNA, 19 nt, Artificial Sequence
  Description of Artificial Sequence: Synthetic oligonucleotide
uccacgucggccgcaugcu

SEQ ID NO: 2365213 - RNA, 19 nt, Artificial Sequence
  Description of Artificial Sequence: Synthetic oligonucleotide
ccucuuggcucacacacuc

SEQ ID NO: 2365214 - RNA, 19 nt, Artificial Sequence
  Description of Artificial Sequence: Synthetic oligonucleotide
aggacucgguucccgguau

SEQ ID NO: 2365215 - RNA, 19 nt, Artificial Sequence
  Description of Artificial Sequence: Synthetic oligonucleotide
guaucagagucaggaguuc

SEQ ID NO: 2365216 - RNA, 19 nt, Artificial Sequence
  Description of Artificial Sequence: Synthetic oligonucleotide
guacgccccagcuggguuc

SEQ ID NO: 2365217 - RNA, 19 nt, Artificial Sequence
  Description of Artificial Sequence: Synthetic oligonucleotide
aggcguccacgucggccgc

SEQ ID NO: 2365218 - RNA, 19 nt, Artificial Sequence
  Description of Artificial Sequence: Synthetic oligonucleotide
guucccgguaucccucuga

SEQ ID NO: 2365219 - RNA, 19 nt, Artificial Sequence
  Description of Artificial Sequence: Synthetic oligonucleotide
cuaccaggcgggccauccc

SEQ ID NO: 2365220 - RNA, 19 nt, Artificial Sequence
  Description of Artificial Sequence: Synthetic oligonucleotide
gaacauccguccgcagcug

SEQ ID NO: 2365221 - RNA, 19 nt, Artificial Sequence
  Description of Artificial Sequence: Synthetic oligonucleotide
acagccgcuugcuggggaa

SEQ ID NO: 2365222 - RNA, 19 nt, Artificial Sequence
  Description of Artificial Sequence: Synthetic oligonucleotide
acaacggaauggggcagca

SEQ ID NO: 2365223 - RNA, 19 nt, Artificial Sequence
  Description of Artificial Sequence: Synthetic oligonucleotide
acacuccagcaaggcgucc

SEQ ID NO: 2365224 - RNA, 19 nt, Artificial Sequence
  Description of Artificial Sequence: Synthetic oligonucleotide
agucugcggagcgcggcuc

SEQ ID NO: 2365225 - RNA, 19 nt, Artificial Sequence
  Description of Artificial Sequence: Synthetic oligonucleotide
cuccaccguuuccaucacc

SEQ ID NO: 2365226 - RNA, 19 nt, Artificial Sequence
  Description of Artificial Sequence: Synthetic oligonucleotide
aucaccuccccaggaacau

SEQ ID NO: 2365227 - RNA, 19 nt, Artificial Sequence
  Description of Artificial Sequence: Synthetic oligonucleotide
cugggcauagacucuugcu

SEQ ID NO: 2365228 - RNA, 19 nt, Artificial Sequence
  Description of Artificial Sequence: Synthetic oligonucleotide
cccaggaacauccguccgc

SEQ ID NO: 2365229 - RNA, 19 nt, Artificial Sequence
  Description of Artificial Sequence: Synthetic oligonucleotide
auccguccgcagcugcugu

SEQ ID NO: 2365230 - RNA, 19 nt, Artificial Sequence
  Description of Artificial Sequence: Synthetic oligonucleotide
ccggucaaccaucagucuc

SEQ ID NO: 2365231 - RNA, 19 nt, Artificial Sequence
  Description of Artificial Sequence: Synthetic oligonucleotide
gucggccgcaugcucgaug

SEQ ID NO: 2365232 - RNA, 19 nt, Artificial Sequence
  Description of Artificial Sequence: Synthetic oligonucleotide
gucugcggagcgcggcucc

SEQ ID NO: 2365233 - RNA, 19 nt, Artificial Sequence
  Description of Artificial Sequence: Synthetic oligonucleotide
ggccgcaugcucgaugaag

SEQ ID NO: 2365234 - RNA, 19 nt, Artificial Sequence
  Description of Artificial Sequence: Synthetic oligonucleotide
ggccuccauauugucgugg

SEQ ID NO: 2365235 - RNA, 19 nt, Artificial Sequence
  Description of Artificial Sequence: Synthetic oligonucleotide
ccagagcuacuguuagcag

SEQ ID NO: 2365236 - RNA, 19 nt, Artificial Sequence
  Description of Artificial Sequence: Synthetic oligonucleotide
caggaacauccguccgcag

SEQ ID NO: 2365237 - RNA, 19 nt, Artificial Sequence
  Description of Artificial Sequence: Synthetic oligonucleotide
cauccguccgcagcugcug

SEQ ID NO: 2365238 - RNA, 19 nt, Artificial Sequence
  Description of Artificial Sequence: Synthetic oligonucleotide
aggccuccauauugucgug

SEQ ID NO: 2365239 - RNA, 19 nt, Artificial Sequence
  Description of Artificial Sequence: Synthetic oligonucleotide
gugugugugugugugugua

SEQ ID NO: 2365240 - RNA, 19 nt, Artificial Sequence
  Description of Artificial Sequence: Synthetic oligonucleotide
guaugguccgugccgggcu

SEQ ID NO: 2365241 - RNA, 19 nt, Artificial Sequence
  Description of Artificial Sequence: Synthetic oligonucleotide
uacgccccagcuggguucu

SEQ ID NO: 2365242 - RNA, 19 nt, Artificial Sequence
  Description of Artificial Sequence: Synthetic oligonucleotide
cugguggccaaggccugag

SEQ ID NO: 2365243 - RNA, 19 nt, Artificial Sequence
  Description of Artificial Sequence: Synthetic oligonucleotide
ccugguugaugcacagcac

SEQ ID NO: 2365244 - RNA, 19 nt, Artificial Sequence
  Description of Artificial Sequence: Synthetic oligonucleotide
gcccauggaggcaucgucc

SEQ ID NO: 2365245 - RNA, 19 nt, Artificial Sequence
  Description of Artificial Sequence: Synthetic oligonucleotide
caccugguugaugcacagc

SEQ ID NO: 2365246 - RNA, 19 nt, Artificial Sequence
  Description of Artificial Sequence: Synthetic oligonucleotide
guguacgugugugugugua

SEQ ID NO: 2365247 - RNA, 19 nt, Artificial Sequence
  Description of Artificial Sequence: Synthetic oligonucleotide
cacugaccguguagcagca

SEQ ID NO: 2365248 - RNA, 19 nt, Artificial Sequence
  Description of Artificial Sequence: Synthetic oligonucleotide
caaccacuaccaggcgggc

SEQ ID NO: 2365249 - RNA, 19 nt, Artificial Sequence
  Description of Artificial Sequence: Synthetic oligonucleotide
gccgcaugcucgaugaaga

SEQ ID NO: 2365250 - RNA, 19 nt, Artificial Sequence
  Description of Artificial Sequence: Synthetic oligonucleotide
acauccguccgcagcugcu

SEQ ID NO: 2365251 - RNA, 19 nt, Artificial Sequence
  Description of Artificial Sequence: Synthetic oligonucleotide
cucgguucccgguaucccu

SEQ ID NO: 2365252 - RNA, 19 nt, Artificial Sequence
  Description of Artificial Sequence: Synthetic oligonucleotide
ucaccuccccaggaacauc

SEQ ID NO: 2365253 - RNA, 19 nt, Artificial Sequence
  Description of Artificial Sequence: Synthetic oligonucleotide
ggguucuucccugcagagc

SEQ ID NO: 2365254 - RNA, 19 nt, Artificial Sequence
  Description of Artificial Sequence: Synthetic oligonucleotide
caggugcggggcagagagc

SEQ ID NO: 2365255 - RNA, 19 nt, Artificial Sequence
  Description of Artificial Sequence: Synthetic oligonucleotide
gagcuacuguuagcaggac

SEQ ID NO: 2365256 - RNA, 19 nt, Artificial Sequence
  Description of Artificial Sequence: Synthetic oligonucleotide
ccgguaucccucugaugcc

SEQ ID NO: 2365257 - RNA, 19 nt, Artificial Sequence
  Description of Artificial Sequence: Synthetic oligonucleotide
agcacccguaugguccgug

SEQ ID NO: 2365258 - RNA, 19 nt, Artificial Sequence
  Description of Artificial Sequence: Synthetic oligonucleotide
accuccccaggaacauccg

SEQ ID NO: 2365259 - RNA, 19 nt, Artificial Sequence
  Description of Artificial Sequence: Synthetic oligonucleotide
cccguaugguccgugccgg

SEQ ID NO: 2365260 - RNA, 19 nt, Artificial Sequence
  Description of Artificial Sequence: Synthetic oligonucleotide
augguccgugccgggcuuc

SEQ ID NO: 2365261 - RNA, 19 nt, Artificial Sequence
  Description of Artificial Sequence: Synthetic oligonucleotide
gcacccguaugguccgugc

SEQ ID NO: 2365262 - RNA, 19 nt, Artificial Sequence
  Description of Artificial Sequence: Synthetic oligonucleotide
ugccuuccgcacugaccgu

SEQ ID NO: 2365263 - RNA, 19 nt, Artificial Sequence
  Description of Artificial Sequence: Synthetic oligonucleotide
cuccaggccuccauauugu

SEQ ID NO: 2365264 - RNA, 19 nt, Artificial Sequence
  Description of Artificial Sequence: Synthetic oligonucleotide
ugccgggcuucuggguaag

SEQ ID NO: 2365265 - RNA, 19 nt, Artificial Sequence
  Description of Artificial Sequence: Synthetic oligonucleotide
ggcuaauccaccagagcua

SEQ ID NO: 2365266 - RNA, 19 nt, Artificial Sequence
  Description of Artificial Sequence: Synthetic oligonucleotide
cggaagguacugcucaguc

SEQ ID NO: 2365267 - RNA, 19 nt, Artificial Sequence
  Description of Artificial Sequence: Synthetic oligonucleotide
cguuuccaucaccugguug

SEQ ID NO: 2365268 - RNA, 19 nt, Artificial Sequence
  Description of Artificial Sequence: Synthetic oligonucleotide
caggacucgguucccggua

SEQ ID NO: 2365269 - RNA, 19 nt, Artificial Sequence
  Description of Artificial Sequence: Synthetic oligonucleotide
uccguccgcagcugcuguu

SEQ ID NO: 2365270 - RNA, 19 nt, Artificial Sequence
  Description of Artificial Sequence: Synthetic oligonucleotide
cggucaaccaucagucuca

SEQ ID NO: 2365271 - RNA, 19 nt, Artificial Sequence
  Description of Artificial Sequence: Synthetic oligonucleotide
ggcauagacucuugcuccu

SEQ ID NO: 2365272 - RNA, 19 nt, Artificial Sequence
  Description of Artificial Sequence: Synthetic oligonucleotide
ccgggcuucuggguaagcc

SEQ ID NO: 2365273 - RNA, 19 nt, Artificial Sequence
  Description of Artificial Sequence: Synthetic oligonucleotide
cuguuagcaggacucgguu

SEQ ID NO: 2365274 - RNA, 19 nt, Artificial Sequence
  Description of Artificial Sequence: Synthetic oligonucleotide
ccccaggaacauccguccg

SEQ ID NO: 2365275 - RNA, 19 nt, Artificial Sequence
  Description of Artificial Sequence: Synthetic oligonucleotide
gguaagcccauggaggcau

SEQ ID NO: 2365276 - RNA, 19 nt, Artificial Sequence
  Description of Artificial Sequence: Synthetic oligonucleotide
ugguccgugccgggcuucu

SEQ ID NO: 2365277 - RNA, 19 nt, Artificial Sequence
  Description of Artificial Sequence: Synthetic oligonucleotide
cucugaugccuuccgcacu

SEQ ID NO: 2365278 - RNA, 19 nt, Artificial Sequence
  Description of Artificial Sequence: Synthetic oligonucleotide
cggaauggggcagcaacag

SEQ ID NO: 2365279 - RNA, 19 nt, Artificial Sequence
  Description of Artificial Sequence: Synthetic oligonucleotide
gugcccggucaaccaucag

SEQ ID NO: 2365280 - RNA, 19 nt, Artificial Sequence
  Description of Artificial Sequence: Synthetic oligonucleotide
cagccgcuugcuggggaag

SEQ ID NO: 2365281 - RNA, 19 nt, Artificial Sequence
  Description of Artificial Sequence: Synthetic oligonucleotide
uucgaccagccaggucagu

SEQ ID NO: 2365282 - RNA, 19 nt, Artificial Sequence
  Description of Artificial Sequence: Synthetic oligonucleotide
gccuuccgcacugaccgug

SEQ ID NO: 2365283 - RNA, 19 nt, Artificial Sequence
  Description of Artificial Sequence: Synthetic oligonucleotide
ccaggaacauccguccgca

SEQ ID NO: 2365284 - RNA, 19 nt, Artificial Sequence
  Description of Artificial Sequence: Synthetic oligonucleotide
ccagcaaggcguccacguc

SEQ ID NO: 2365285 - RNA, 19 nt, Artificial Sequence
  Description of Artificial Sequence: Synthetic oligonucleotide
cguguguguguguacaugu

SEQ ID NO: 2365286 - RNA, 19 nt, Artificial Sequence
  Description of Artificial Sequence: Synthetic oligonucleotide
guaagcccauggaggcauc

SEQ ID NO: 2365287 - RNA, 19 nt, Artificial Sequence
  Description of Artificial Sequence: Synthetic oligonucleotide
cgcaugcucgaugaagaug

SEQ ID NO: 2365288 - RNA, 19 nt, Artificial Sequence
  Description of Artificial Sequence: Synthetic oligonucleotide
cagggcuccggaagguacu

SEQ ID NO: 2365289 - RNA, 19 nt, Artificial Sequence
  Description of Artificial Sequence: Synthetic oligonucleotide
cguaugguccgugccgggc

SEQ ID NO: 2365290 - RNA, 19 nt, Artificial Sequence
  Description of Artificial Sequence: Synthetic oligonucleotide
gcauagacucuugcuccuc

SEQ ID NO: 2365291 - RNA, 19 nt, Artificial Sequence
  Description of Artificial Sequence: Synthetic oligonucleotide
cagagagcacccguauggu

SEQ ID NO: 2365292 - RNA, 19 nt, Artificial Sequence
  Description of Artificial Sequence: Synthetic oligonucleotide
ccguaugguccgugccggg

SEQ ID NO: 2365293 - RNA, 19 nt, Artificial Sequence
  Description of Artificial Sequence: Synthetic oligonucleotide
gcgcggcucccagagacug

SEQ ID NO: 2365294 - RNA, 19 nt, Artificial Sequence
  Description of Artificial Sequence: Synthetic oligonucleotide
agcgcggcucccagagacu

SEQ ID NO: 2365295 - RNA, 19 nt, Artificial Sequence
  Description of Artificial Sequence: Synthetic oligonucleotide
ccccagcuggguucuuccc

SEQ ID NO: 2365296 - RNA, 19 nt, Artificial Sequence
  Description of Artificial Sequence: Synthetic oligonucleotide
ggacucgguucccgguauc

SEQ ID NO: 2365297 - RNA, 19 nt, Artificial Sequence
  Description of Artificial Sequence: Synthetic oligonucleotide
ccucaugugcccggucaac

SEQ ID NO: 2365298 - RNA, 19 nt, Artificial Sequence
  Description of Artificial Sequence: Synthetic oligonucleotide
ggguaagcccauggaggca

SEQ ID NO: 2365299 - RNA, 19 nt, Artificial Sequence
  Description of Artificial Sequence: Synthetic oligonucleotide
gcuccggaagguacugcuc

SEQ ID NO: 2365300 - RNA, 19 nt, Artificial Sequence
  Description of Artificial Sequence: Synthetic oligonucleotide
gcuguucaaugagcugcca

SEQ ID NO: 2365301 - RNA, 19 nt, Artificial Sequence
  Description of Artificial Sequence: Synthetic oligonucleotide
cuuccgcacugaccgugua

SEQ ID NO: 2365302 - RNA, 19 nt, Artificial Sequence
  Description of Artificial Sequence: Synthetic oligonucleotide
ccuccauauugucguggga

SEQ ID NO: 2365303 - RNA, 19 nt, Artificial Sequence
  Description of Artificial Sequence: Synthetic oligonucleotide
ggaccuggucaggcuaauc

SEQ ID NO: 2365304 - RNA, 19 nt, Artificial Sequence
  Description of Artificial Sequence: Synthetic oligonucleotide
cagucugcggagcgcggcu

SEQ ID NO: 2365305 - RNA, 19 nt, Artificial Sequence
  Description of Artificial Sequence: Synthetic oligonucleotide
gagcuucgaccagccaggu

SEQ ID NO: 2365306 - RNA, 19 nt, Artificial Sequence
  Description of Artificial Sequence: Synthetic oligonucleotide
gcaggacucgguucccggu

SEQ ID NO: 2365307 - RNA, 19 nt, Artificial Sequence
  Description of Artificial Sequence: Synthetic oligonucleotide
ccauauugucgugggaacu

SEQ ID NO: 2365308 - RNA, 19 nt, Artificial Sequence
  Description of Artificial Sequence: Synthetic oligonucleotide
cguccgcagcugcuguugc

SEQ ID NO: 2365309 - RNA, 19 nt, Artificial Sequence
  Description of Artificial Sequence: Synthetic oligonucleotide
ccguccgcagcugcuguug

SEQ ID NO: 2365310 - RNA, 19 nt, Artificial Sequence
  Description of Artificial Sequence: Synthetic oligonucleotide
ggggcagagagcacccgua

SEQ ID NO: 2365311 - RNA, 19 nt, Artificial Sequence
  Description of Artificial Sequence: Synthetic oligonucleotide
ggaacccucuuggcucaca

SEQ ID NO: 2365312 - RNA, 19 nt, Artificial Sequence
  Description of Artificial Sequence: Synthetic oligonucleotide
gcaaggcguccacgucggc

SEQ ID NO: 2365313 - RNA, 19 nt, Artificial Sequence
  Description of Artificial Sequence: Synthetic oligonucleotide
gcagaaugggaacccucuu

SEQ ID NO: 2365314 - RNA, 19 nt, Artificial Sequence
  Description of Artificial Sequence: Synthetic oligonucleotide
cacuaccaggcgggccauc

SEQ ID NO: 2365315 - RNA, 19 nt, Artificial Sequence
  Description of Artificial Sequence: Synthetic oligonucleotide
ggugcggggcagagagcac

SEQ ID NO: 2365316 - RNA, 19 nt, Artificial Sequence
  Description of Artificial Sequence: Synthetic oligonucleotide
ggagcgcggcucccagaga

SEQ ID NO: 2365317 - RNA, 19 nt, Artificial Sequence
  Description of Artificial Sequence: Synthetic oligonucleotide
ccgcacugaccguguagca

SEQ ID NO: 2365318 - RNA, 19 nt, Artificial Sequence
  Description of Artificial Sequence: Synthetic oligonucleotide
ggaguucuugggaccuggu

SEQ ID NO: 2365319 - RNA, 19 nt, Artificial Sequence
  Description of Artificial Sequence: Synthetic oligonucleotide
cgcggcucccagagacugc

SEQ ID NO: 2365320 - RNA, 19 nt, Artificial Sequence
  Description of Artificial Sequence: Synthetic oligonucleotide
gguccgugccgggcuucug

SEQ ID NO: 2365321 - RNA, 19 nt, Artificial Sequence
  Description of Artificial Sequence: Synthetic oligonucleotide
ggucaaccaucagucucau

SEQ ID NO: 2365322 - RNA, 19 nt, Artificial Sequence
  Description of Artificial Sequence: Synthetic oligonucleotide
gggaacccucuuggcucac

SEQ ID NO: 2365323 - RNA, 19 nt, Artificial Sequence
  Description of Artificial Sequence: Synthetic oligonucleotide
cccucuuggcucacacacu

SEQ ID NO: 2365324 - RNA, 19 nt, Artificial Sequence
  Description of Artificial Sequence: Synthetic oligonucleotide
ccgcuugcuggggaaggca

SEQ ID NO: 2365325 - RNA, 19 nt, Artificial Sequence
  Description of Artificial Sequence: Synthetic oligonucleotide
gguaucccucugaugccuu

SEQ ID NO: 2365326 - RNA, 19 nt, Artificial Sequence
  Description of Artificial Sequence: Synthetic oligonucleotide
ccuuccgcacugaccgugu

SEQ ID NO: 2365327 - RNA, 19 nt, Artificial Sequence
  Description of Artificial Sequence: Synthetic oligonucleotide
gcggagcgcggcucccaga

SEQ ID NO: 2365328 - RNA, 19 nt, Artificial Sequence
  Description of Artificial Sequence: Synthetic oligonucleotide
cccggucaaccaucagucu

SEQ ID NO: 2365329 - RNA, 19 nt, Artificial Sequence
  Description of Artificial Sequence: Synthetic oligonucleotide
ggccugggcauagacucuu

SEQ ID NO: 2365330 - RNA, 19 nt, Artificial Sequence
  Description of Artificial Sequence: Synthetic oligonucleotide
cguccucaugugcccgguc

SEQ ID NO: 2365331 - RNA, 19 nt, Artificial Sequence
  Description of Artificial Sequence: Synthetic oligonucleotide
cggcucccagagacugcag

SEQ ID NO: 2365332 - RNA, 19 nt, Artificial Sequence
  Description of Artificial Sequence: Synthetic oligonucleotide
ccgcaugcucgaugaagau

SEQ ID NO: 2365333 - RNA, 19 nt, Artificial Sequence
  Description of Artificial Sequence: Synthetic oligonucleotide
ccggaagguacugcucagu

SEQ ID NO: 2365334 - RNA, 19 nt, Artificial Sequence
  Description of Artificial Sequence: Synthetic oligonucleotide
ccgugccgggcuucugggu

SEQ ID NO: 2365335 - RNA, 19 nt, Artificial Sequence
  Description of Artificial Sequence: Synthetic oligonucleotide
ccguuuccaucaccugguu

SEQ ID NO: 2365336 - RNA, 19 nt, Artificial Sequence
  Description of Artificial Sequence: Synthetic oligonucleotide
cgguucccgguaucccucu

SEQ ID NO: 2365337 - RNA, 19 nt, Artificial Sequence
  Description of Artificial Sequence: Synthetic oligonucleotide
ccccaguggccugggcaua

SEQ ID NO: 2365338 - RNA, 19 nt, Artificial Sequence
  Description of Artificial Sequence: Synthetic oligonucleotide
ccacuaccaggcgggccau

SEQ ID NO: 2365339 - RNA, 19 nt, Artificial Sequence
  Description of Artificial Sequence: Synthetic oligonucleotide
cggccgcaugcucgaugaa

SEQ ID NO: 2365340 - RNA, 19 nt, Artificial Sequence
  Description of Artificial Sequence: Synthetic oligonucleotide
cgucggccgcaugcucgau

SEQ ID NO: 2365341 - RNA, 19 nt, Artificial Sequence
  Description of Artificial Sequence: Synthetic oligonucleotide
auuguuaaaacacugggcc

SEQ ID NO: 2365342 - RNA, 19 nt, Artificial Sequence
  Description of Artificial Sequence: Synthetic oligonucleotide
aauaauucgugcuuuaggg

SEQ ID NO: 2365343 - RNA, 19 nt, Artificial Sequence
  Description of Artificial Sequence: Synthetic oligonucleotide
aaugauauuauccggauga

SEQ ID NO: 2365344 - RNA, 19 nt, Artificial Sequence
  Description of Artificial Sequence: Synthetic oligonucleotide
uccauauaaauuauaaagg

SEQ ID NO: 2365345 - RNA, 19 nt, Artificial Sequence
  Description of Artificial Sequence: Synthetic oligonucleotide
caaaagucagcauagaugg

SEQ ID NO: 2365346 - RNA, 19 nt, Artificial Sequence
  Description of Artificial Sequence: Synthetic oligonucleotide
uucaaaaguguuuagauug

SEQ ID NO: 2365347 - RNA, 19 nt, Artificial Sequence
  Description of Artificial Sequence: Synthetic oligonucleotide
aaugacauuauuaucuccc

SEQ ID NO: 2365348 - RNA, 19 nt, Artificial Sequence
  Description of Artificial Sequence: Synthetic oligonucleotide
uuuuguaucaagaaaagaa

SEQ ID NO: 2365349 - RNA, 19 nt, Artificial Sequence
  Description of Artificial Sequence: Synthetic oligonucleotide
uuacauuagaauauaaaca

SEQ ID NO: 2365350 - RNA, 19 nt, Artificial Sequence
  Description of Artificial Sequence: Synthetic oligonucleotide
uuacauaauaaaugcaugg

SEQ ID NO: 2365351 - RNA, 19 nt, Artificial Sequence
  Description of Artificial Sequence: Synthetic oligonucleotide
uuaucucccauuuucaugg

SEQ ID NO: 2365352 - RNA, 19 nt, Artificial Sequence
  Description of Artificial Sequence: Synthetic oligonucleotide
acucuuuugaguuuucucc

SEQ ID NO: 2365353 - RNA, 19 nt, Artificial Sequence
  Description of Artificial Sequence: Synthetic oligonucleotide
uacauuagaauauaaacac

SEQ ID NO: 2365354 - RNA, 19 nt, Artificial Sequence
  Description of Artificial Sequence: Synthetic oligonucleotide
uauaaauuaccacaacaag

SEQ ID NO: 2365355 - RNA, 19 nt, Artificial Sequence
  Description of Artificial Sequence: Synthetic oligonucleotide
uuagauugcagcaagcccc

SEQ ID NO: 2365356 - RNA, 19 nt, Artificial Sequence
  Description of Artificial Sequence: Synthetic oligonucleotide
aaagugaacacauuguuaa

SEQ ID NO: 2365357 - RNA, 19 nt, Artificial Sequence
  Description of Artificial Sequence: Synthetic oligonucleotide
ucuauaaauuaccacaaca

SEQ ID NO: 2365358 - RNA, 19 nt, Artificial Sequence
  Description of Artificial Sequence: Synthetic oligonucleotide
aacaauacacuccauauaa

SEQ ID NO: 2365359 - RNA, 19 nt, Artificial Sequence
  Description of Artificial Sequence: Synthetic oligonucleotide
auauaaauuauaaaggcag

SEQ ID NO: 2365360 - RNA, 19 nt, Artificial Sequence
  Description of Artificial Sequence: Synthetic oligonucleotide
ucugauuucacuuucuaca

SEQ ID NO: 2365361 - RNA, 19 nt, Artificial Sequence
  Description of Artificial Sequence: Synthetic oligonucleotide
augacagccaacuucaaac

SEQ ID NO: 2365362 - RNA, 19 nt, Artificial Sequence
  Description of Artificial Sequence: Synthetic oligonucleotide
aaaacaauacacuccauau

SEQ ID NO: 2365363 - RNA, 19 nt, Artificial Sequence
  Description of Artificial Sequence: Synthetic oligonucleotide
auaaauuaccacaacaagg

SEQ ID NO: 2365364 - RNA, 19 nt, Artificial Sequence
  Description of Artificial Sequence: Synthetic oligonucleotide
auggcuaauauuuuguauc

SEQ ID NO: 2365365 - RNA, 19 nt, Artificial Sequence
  Description of Artificial Sequence: Synthetic oligonucleotide
acauuguuaaaacacuggg

SEQ ID NO: 2365366 - RNA, 19 nt, Artificial Sequence
  Description of Artificial Sequence: Synthetic oligonucleotide
aacuucuuaguucuuaacu

SEQ ID NO: 2365367 - RNA, 19 nt, Artificial Sequence
  Description of Artificial Sequence: Synthetic oligonucleotide
ucaccgauaauuauuggcc

SEQ ID NO: 2365368 - RNA, 19 nt, Artificial Sequence
  Description of Artificial Sequence: Synthetic oligonucleotide
uuuguaucaagaaaagaaa

SEQ ID NO: 2365369 - RNA, 19 nt, Artificial Sequence
  Description of Artificial Sequence: Synthetic oligonucleotide
uaugcuuuugauucaauga

SEQ ID NO: 2365370 - RNA, 19 nt, Artificial Sequence
  Description of Artificial Sequence: Synthetic oligonucleotide
aaagucagcauagaugguc

SEQ ID NO: 2365371 - RNA, 19 nt, Artificial Sequence
  Description of Artificial Sequence: Synthetic oligonucleotide
agaauauaaacacacacua

SEQ ID NO: 2365372 - RNA, 19 nt, Artificial Sequence
  Description of Artificial Sequence: Synthetic oligonucleotide
cauuuugacaacuucuuag

SEQ ID NO: 2365373 - RNA, 19 nt, Artificial Sequence
  Description of Artificial Sequence: Synthetic oligonucleotide
agcauuuaugaugagggcc

SEQ ID NO: 2365374 - RNA, 19 nt, Artificial Sequence
  Description of Artificial Sequence: Synthetic oligonucleotide
uuuagauugcagcaagccc

SEQ ID NO: 2365375 - RNA, 19 nt, Artificial Sequence
  Description of Artificial Sequence: Synthetic oligonucleotide
cuacguaugcuuuugauuc

SEQ ID NO: 2365376 - RNA, 19 nt, Artificial Sequence
  Description of Artificial Sequence: Synthetic oligonucleotide
gauuucacuuucuacacac

SEQ ID NO: 2365377 - RNA, 19 nt, Artificial Sequence
  Description of Artificial Sequence: Synthetic oligonucleotide
aaguguuuagauugcagca

SEQ ID NO: 2365378 - RNA, 19 nt, Artificial Sequence
  Description of Artificial Sequence: Synthetic oligonucleotide
uaauucgugcuuuagggug

SEQ ID NO: 2365379 - RNA, 19 nt, Artificial Sequence
  Description of Artificial Sequence: Synthetic oligonucleotide
cuuucuacacacacaacgg

SEQ ID NO: 2365380 - RNA, 19 nt, Artificial Sequence
  Description of Artificial Sequence: Synthetic oligonucleotide
ugguaauugggcaagauuu

SEQ ID NO: 2365381 - RNA, 19 nt, Artificial Sequence
  Description of Artificial Sequence: Synthetic oligonucleotide
uucuuaguucuuaacuggg

SEQ ID NO: 2365382 - RNA, 19 nt, Artificial Sequence
  Description of Artificial Sequence: Synthetic oligonucleotide
uauaaacacacacuaugac

SEQ ID NO: 2365383 - RNA, 19 nt, Artificial Sequence
  Description of Artificial Sequence: Synthetic oligonucleotide
uggauagucuuuuacauaa

SEQ ID NO: 2365384 - RNA, 19 nt, Artificial Sequence
  Description of Artificial Sequence: Synthetic oligonucleotide
cuucuuaguucuuaacugg

SEQ ID NO: 2365385 - RNA, 19 nt, Artificial Sequence
  Description of Artificial Sequence: Synthetic oligonucleotide
uuagguggugguaauuggg

SEQ ID NO: 2365386 - RNA, 19 nt, Artificial Sequence
  Description of Artificial Sequence: Synthetic oligonucleotide
uucaccgauaauuauuggc

SEQ ID NO: 2365387 - RNA, 19 nt, Artificial Sequence
  Description of Artificial Sequence: Synthetic oligonucleotide
uccaccauagaucacugug

SEQ ID NO: 2365388 - RNA, 19 nt, Artificial Sequence
  Description of Artificial Sequence: Synthetic oligonucleotide
acauaauaaaugcauggcu

SEQ ID NO: 2365389 - RNA, 19 nt, Artificial Sequence
  Description of Artificial Sequence: Synthetic oligonucleotide
aucauggauagucuuuuac

SEQ ID NO: 2365390 - RNA, 19 nt, Artificial Sequence
  Description of Artificial Sequence: Synthetic oligonucleotide
uuguaucaagaaaagaaaa

SEQ ID NO: 2365391 - RNA, 19 nt, Artificial Sequence
  Description of Artificial Sequence: Synthetic oligonucleotide
ugaguuuucuccgccaucg

SEQ ID NO: 2365392 - RNA, 19 nt, Artificial Sequence
  Description of Artificial Sequence: Synthetic oligonucleotide
ugauucaaugacauuauua

SEQ ID NO: 2365393 - RNA, 19 nt, Artificial Sequence
  Description of Artificial Sequence: Synthetic oligonucleotide
ugacaugucaucauggaua

SEQ ID NO: 2365394 - RNA, 19 nt, Artificial Sequence
  Description of Artificial Sequence: Synthetic oligonucleotide
uuuguggucuucuuuaggu

SEQ ID NO: 2365395 - RNA, 19 nt, Artificial Sequence
  Description of Artificial Sequence: Synthetic oligonucleotide
cauuguuaaaacacugggc

SEQ ID NO: 2365396 - RNA, 19 nt, Artificial Sequence
  Description of Artificial Sequence: Synthetic oligonucleotide
gaacacauuguuaaaacac

SEQ ID NO: 2365397 - RNA, 19 nt, Artificial Sequence
  Description of Artificial Sequence: Synthetic oligonucleotide
auacacuccauauaaauua

SEQ ID NO: 2365398 - RNA, 19 nt, Artificial Sequence
  Description of Artificial Sequence: Synthetic oligonucleotide
uuugacaacuucuuaguuc

SEQ ID NO: 2365399 - RNA, 19 nt, Artificial Sequence
  Description of Artificial Sequence: Synthetic oligonucleotide
ucaucaagaaauccagcug

SEQ ID NO: 2365400 - RNA, 19 nt, Artificial Sequence
  Description of Artificial Sequence: Synthetic oligonucleotide
uuuagguggugguaauugg

SEQ ID NO: 2365401 - RNA, 19 nt, Artificial Sequence
  Description of Artificial Sequence: Synthetic oligonucleotide
ucaaaaguguuuagauugc

SEQ ID NO: 2365402 - RNA, 19 nt, Artificial Sequence
  Description of Artificial Sequence: Synthetic oligonucleotide
aaggcaguuaccacguuac

SEQ ID NO: 2365403 - RNA, 19 nt, Artificial Sequence
  Description of Artificial Sequence: Synthetic oligonucleotide
uaugguuacaucuccucug

SEQ ID NO: 2365404 - RNA, 19 nt, Artificial Sequence
  Description of Artificial Sequence: Synthetic oligonucleotide
cuaugacaugucaucaugg

SEQ ID NO: 2365405 - RNA, 19 nt, Artificial Sequence
  Description of Artificial Sequence: Synthetic oligonucleotide
uuucuacacacacaacggc

SEQ ID NO: 2365406 - RNA, 19 nt, Artificial Sequence
  Description of Artificial Sequence: Synthetic oligonucleotide
auuuugacaacuucuuagu

SEQ ID NO: 2365407 - RNA, 19 nt, Artificial Sequence
  Description of Artificial Sequence: Synthetic oligonucleotide
cuaauauuuuguaucaaga

SEQ ID NO: 2365408 - RNA, 19 nt, Artificial Sequence
  Description of Artificial Sequence: Synthetic oligonucleotide
gauucaaugacauuauuau

SEQ ID NO: 2365409 - RNA, 19 nt, Artificial Sequence
  Description of Artificial Sequence: Synthetic oligonucleotide
uacauuucugccuacguau

SEQ ID NO: 2365410 - RNA, 19 nt, Artificial Sequence
  Description of Artificial Sequence: Synthetic oligonucleotide
uuuaggguggaucacuguc

SEQ ID NO: 2365411 - RNA, 19 nt, Artificial Sequence
  Description of Artificial Sequence: Synthetic oligonucleotide
auuaucucccauuuucaug

SEQ ID NO: 2365412 - RNA, 19 nt, Artificial Sequence
  Description of Artificial Sequence: Synthetic oligonucleotide
aauuauuggcccggccucc

SEQ ID NO: 2365413 - RNA, 19 nt, Artificial Sequence
  Description of Artificial Sequence: Synthetic oligonucleotide
aggagcaaucuucacacuc

SEQ ID NO: 2365414 - RNA, 19 nt, Artificial Sequence
  Description of Artificial Sequence: Synthetic oligonucleotide
acuaugacaugucaucaug

SEQ ID NO: 2365415 - RNA, 19 nt, Artificial Sequence
  Description of Artificial Sequence: Synthetic oligonucleotide
aaaaguguuuagauugcag

SEQ ID NO: 2365416 - RNA, 19 nt, Artificial Sequence
  Description of Artificial Sequence: Synthetic oligonucleotide
uaggcagucuccaccauag

SEQ ID NO: 2365417 - RNA, 19 nt, Artificial Sequence
  Description of Artificial Sequence: Synthetic oligonucleotide
uaauugggcaagauuuuca

SEQ ID NO: 2365418 - RNA, 19 nt, Artificial Sequence
  Description of Artificial Sequence: Synthetic oligonucleotide
uuaggguggaucacugucc

SEQ ID NO: 2365419 - RNA, 19 nt, Artificial Sequence
  Description of Artificial Sequence: Synthetic oligonucleotide
augaucauagguuuggguu

SEQ ID NO: 2365420 - RNA, 19 nt, Artificial Sequence
  Description of Artificial Sequence: Synthetic oligonucleotide
ugagucuauaaauuaccac

SEQ ID NO: 2365421 - RNA, 19 nt, Artificial Sequence
  Description of Artificial Sequence: Synthetic oligonucleotide
caugucaucauggauaguc

SEQ ID NO: 2365422 - RNA, 19 nt, Artificial Sequence
  Description of Artificial Sequence: Synthetic oligonucleotide
ugcuuuugauucaaugaca

SEQ ID NO: 2365423 - RNA, 19 nt, Artificial Sequence
  Description of Artificial Sequence: Synthetic oligonucleotide
uccggaugagcauuuauga

SEQ ID NO: 2365424 - RNA, 19 nt, Artificial Sequence
  Description of Artificial Sequence: Synthetic oligonucleotide
auuuucauggcuugggaau

SEQ ID NO: 2365425 - RNA, 19 nt, Artificial Sequence
  Description of Artificial Sequence: Synthetic oligonucleotide
uguuaaaacacugggcccu

SEQ ID NO: 2365426 - RNA, 19 nt, Artificial Sequence
  Description of Artificial Sequence: Synthetic oligonucleotide
uaugacaugucaucaugga

SEQ ID NO: 2365427 - RNA, 19 nt, Artificial Sequence
  Description of Artificial Sequence: Synthetic oligonucleotide
uccaacacaaagugaacac

SEQ ID NO: 2365428 - RNA, 19 nt, Artificial Sequence
  Description of Artificial Sequence: Synthetic oligonucleotide
gcuaauauuuuguaucaag

SEQ ID NO: 2365429 - RNA, 19 nt, Artificial Sequence
  Description of Artificial Sequence: Synthetic oligonucleotide
agauggucaccauuuugac

SEQ ID NO: 2365430 - RNA, 19 nt, Artificial Sequence
  Description of Artificial Sequence: Synthetic oligonucleotide
uggcuaauauuuuguauca

SEQ ID NO: 2365431 - RNA, 19 nt, Artificial Sequence
  Description of Artificial Sequence: Synthetic oligonucleotide
uagauugcagcaagccccg

SEQ ID NO: 2365432 - RNA, 19 nt, Artificial Sequence
  Description of Artificial Sequence: Synthetic oligonucleotide
aacuucaaaaguguuuaga

SEQ ID NO: 2365433 - RNA, 19 nt, Artificial Sequence
  Description of Artificial Sequence: Synthetic oligonucleotide
ugcauggcuaauauuuugu

SEQ ID NO: 2365434 - RNA, 19 nt, Artificial Sequence
  Description of Artificial Sequence: Synthetic oligonucleotide
uggaucacuguccuagggc

SEQ ID NO: 2365435 - RNA, 19 nt, Artificial Sequence
  Description of Artificial Sequence: Synthetic oligonucleotide
accgauaauuauuggcccg

SEQ ID NO: 2365436 - RNA, 19 nt, Artificial Sequence
  Description of Artificial Sequence: Synthetic oligonucleotide
agggauaacuucaaaagug

SEQ ID NO: 2365437 - RNA, 19 nt, Artificial Sequence
  Description of Artificial Sequence: Synthetic oligonucleotide
guaugcuuuugauucaaug

SEQ ID NO: 2365438 - RNA, 19 nt, Artificial Sequence
  Description of Artificial Sequence: Synthetic oligonucleotide
ugaucauagguuuggguuc

SEQ ID NO: 2365439 - RNA, 19 nt, Artificial Sequence
  Description of Artificial Sequence: Synthetic oligonucleotide
gauuacauuucugccuacg

SEQ ID NO: 2365440 - RNA, 19 nt, Artificial Sequence
  Description of Artificial Sequence: Synthetic oligonucleotide
uguuuagauugcagcaagc

SEQ ID NO: 2365441 - RNA, 19 nt, Artificial Sequence
  Description of Artificial Sequence: Synthetic oligonucleotide
gauaauuauuggcccggcc

SEQ ID NO: 2365442 - RNA, 19 nt, Artificial Sequence
  Description of Artificial Sequence: Synthetic oligonucleotide
uaauuauuggcccggccuc

SEQ ID NO: 2365443 - RNA, 19 nt, Artificial Sequence
  Description of Artificial Sequence: Synthetic oligonucleotide
ucuacacacacaacggcuc

SEQ ID NO: 2365444 - RNA, 19 nt, Artificial Sequence
  Description of Artificial Sequence: Synthetic oligonucleotide
uuaccuucaccgauaauua

SEQ ID NO: 2365445 - RNA, 19 nt, Artificial Sequence
  Description of Artificial Sequence: Synthetic oligonucleotide
uagguuuggguucuggauc

SEQ ID NO: 2365446 - RNA, 19 nt, Artificial Sequence
  Description of Artificial Sequence: Synthetic oligonucleotide
auaauucgugcuuuagggu

SEQ ID NO: 2365447 - RNA, 19 nt, Artificial Sequence
  Description of Artificial Sequence: Synthetic oligonucleotide
agggccuaugguuacaucu

SEQ ID NO: 2365448 - RNA, 19 nt, Artificial Sequence
  Description of Artificial Sequence: Synthetic oligonucleotide
guuuagauugcagcaagcc

SEQ ID NO: 2365449 - RNA, 19 nt, Artificial Sequence
  Description of Artificial Sequence: Synthetic oligonucleotide
gaugcaaccacuggucaag

SEQ ID NO: 2365450 - RNA, 19 nt, Artificial Sequence
  Description of Artificial Sequence: Synthetic oligonucleotide
uaccacguuacccaccucu

SEQ ID NO: 2365451 - RNA, 19 nt, Artificial Sequence
  Description of Artificial Sequence: Synthetic oligonucleotide
auuacauuucugccuacgu

SEQ ID NO: 2365452 - RNA, 19 nt, Artificial Sequence
  Description of Artificial Sequence: Synthetic oligonucleotide
acguuacccaccucucucc

SEQ ID NO: 2365453 - RNA, 19 nt, Artificial Sequence
  Description of Artificial Sequence: Synthetic oligonucleotide
uucauugucuggaaugaua

SEQ ID NO: 2365454 - RNA, 19 nt, Artificial Sequence
  Description of Artificial Sequence: Synthetic oligonucleotide
auugucuggaaugauauua

SEQ ID NO: 2365455 - RNA, 19 nt, Artificial Sequence
  Description of Artificial Sequence: Synthetic oligonucleotide
guguuuagauugcagcaag

SEQ ID NO: 2365456 - RNA, 19 nt, Artificial Sequence
  Description of Artificial Sequence: Synthetic oligonucleotide
agauuuucaucaagaaauc

SEQ ID NO: 2365457 - RNA, 19 nt, Artificial Sequence
  Description of Artificial Sequence: Synthetic oligonucleotide
ugauuucacuuucuacaca

SEQ ID NO: 2365458 - RNA, 19 nt, Artificial Sequence
  Description of Artificial Sequence: Synthetic oligonucleotide
ugauauuauccggaugagc

SEQ ID NO: 2365459 - RNA, 19 nt, Artificial Sequence
  Description of Artificial Sequence: Synthetic oligonucleotide
uuaguucuuaacuggggua

SEQ ID NO: 2365460 - RNA, 19 nt, Artificial Sequence
  Description of Artificial Sequence: Synthetic oligonucleotide
uguccuagggccuaugguu

SEQ ID NO: 2365461 - RNA, 19 nt, Artificial Sequence
  Description of Artificial Sequence: Synthetic oligonucleotide
uuuaugaugagggccugcu

SEQ ID NO: 2365462 - RNA, 19 nt, Artificial Sequence
  Description of Artificial Sequence: Synthetic oligonucleotide
cuuuagguggugguaauug

SEQ ID NO: 2365463 - RNA, 19 nt, Artificial Sequence
  Description of Artificial Sequence: Synthetic oligonucleotide
gaugaugcaaccacugguc

SEQ ID NO: 2365464 - RNA, 19 nt, Artificial Sequence
  Description of Artificial Sequence: Synthetic oligonucleotide
uuaacugggguagagccuc

SEQ ID NO: 2365465 - RNA, 19 nt, Artificial Sequence
  Description of Artificial Sequence: Synthetic oligonucleotide
auagguuuggguucuggau

SEQ ID NO: 2365466 - RNA, 19 nt, Artificial Sequence
  Description of Artificial Sequence: Synthetic oligonucleotide
auaaauuauaaaggcaguu

SEQ ID NO: 2365467 - RNA, 19 nt, Artificial Sequence
  Description of Artificial Sequence: Synthetic oligonucleotide
caccgauaauuauuggccc

SEQ ID NO: 2365468 - RNA, 19 nt, Artificial Sequence
  Description of Artificial Sequence: Synthetic oligonucleotide
uuuugacaacuucuuaguu

SEQ ID NO: 2365469 - RNA, 19 nt, Artificial Sequence
  Description of Artificial Sequence: Synthetic oligonucleotide
uacacuccauauaaauuau

SEQ ID NO: 2365470 - RNA, 19 nt, Artificial Sequence
  Description of Artificial Sequence: Synthetic oligonucleotide
ucaccauuuugacaacuuc

SEQ ID NO: 2365471 - RNA, 19 nt, Artificial Sequence
  Description of Artificial Sequence: Synthetic oligonucleotide
uaccacaacaaggacaaaa

SEQ ID NO: 2365472 - RNA, 19 nt, Artificial Sequence
  Description of Artificial Sequence: Synthetic oligonucleotide
uuuucuccgccaucgucag

SEQ ID NO: 2365473 - RNA, 19 nt, Artificial Sequence
  Description of Artificial Sequence: Synthetic oligonucleotide
uccucuaugagguuaccuu

SEQ ID NO: 2365474 - RNA, 19 nt, Artificial Sequence
  Description of Artificial Sequence: Synthetic oligonucleotide
augcauggcuaauauuuug

SEQ ID NO: 2365475 - RNA, 19 nt, Artificial Sequence
  Description of Artificial Sequence: Synthetic oligonucleotide
aaacacugggcccuuucaa

SEQ ID NO: 2365476 - RNA, 19 nt, Artificial Sequence
  Description of Artificial Sequence: Synthetic oligonucleotide
augacauuauuaucuccca

SEQ ID NO: 2365477 - RNA, 19 nt, Artificial Sequence
  Description of Artificial Sequence: Synthetic oligonucleotide
auuuaugaugagggccugc

SEQ ID NO: 2365478 - RNA, 19 nt, Artificial Sequence
  Description of Artificial Sequence: Synthetic oligonucleotide
acuguccuagggccuaugg

SEQ ID NO: 2365479 - RNA, 19 nt, Artificial Sequence
  Description of Artificial Sequence: Synthetic oligonucleotide
cacacaacggcuccaggag

SEQ ID NO: 2365480 - RNA, 19 nt, Artificial Sequence
  Description of Artificial Sequence: Synthetic oligonucleotide
cuggucaagauuacauuuc

SEQ ID NO: 2365481 - RNA, 19 nt, Artificial Sequence
  Description of Artificial Sequence: Synthetic oligonucleotide
uccgcaauaauucgugcuu

SEQ ID NO: 2365482 - RNA, 19 nt, Artificial Sequence
  Description of Artificial Sequence: Synthetic oligonucleotide
gagcauuuaugaugagggc

SEQ ID NO: 2365483 - RNA, 19 nt, Artificial Sequence
  Description of Artificial Sequence: Synthetic oligonucleotide
ucuaugagguuaccuucac

SEQ ID NO: 2365484 - RNA, 19 nt, Artificial Sequence
  Description of Artificial Sequence: Synthetic oligonucleotide
ggaucacuguccuagggcc

SEQ ID NO: 2365485 - RNA, 19 nt, Artificial Sequence
  Description of Artificial Sequence: Synthetic oligonucleotide
uaaaacacugggcccuuuc

SEQ ID NO: 2365486 - RNA, 19 nt, Artificial Sequence
  Description of Artificial Sequence: Synthetic oligonucleotide
ugacauuauuaucucccau

SEQ ID NO: 2365487 - RNA, 19 nt, Artificial Sequence
  Description of Artificial Sequence: Synthetic oligonucleotide
cauuucugccuacguaugc

SEQ ID NO: 2365488 - RNA, 19 nt, Artificial Sequence
  Description of Artificial Sequence: Synthetic oligonucleotide
caaacacauuauuggugcc

SEQ ID NO: 2365489 - RNA, 19 nt, Artificial Sequence
  Description of Artificial Sequence: Synthetic oligonucleotide
ugccaaugaucauagguuu

SEQ ID NO: 2365490 - RNA, 19 nt, Artificial Sequence
  Description of Artificial Sequence: Synthetic oligonucleotide
agucagcauagauggucac

SEQ ID NO: 2365491 - RNA, 19 nt, Artificial Sequence
  Description of Artificial Sequence: Synthetic oligonucleotide
agauuacauuucugccuac

SEQ ID NO: 2365492 - RNA, 19 nt, Artificial Sequence
  Description of Artificial Sequence: Synthetic oligonucleotide
ucauagguuuggguucugg

SEQ ID NO: 2365493 - RNA, 19 nt, Artificial Sequence
  Description of Artificial Sequence: Synthetic oligonucleotide
agucuauaaauuaccacaa

SEQ ID NO: 2365494 - RNA, 19 nt, Artificial Sequence
  Description of Artificial Sequence: Synthetic oligonucleotide
acauuagaauauaaacaca

SEQ ID NO: 2365495 - RNA, 19 nt, Artificial Sequence
  Description of Artificial Sequence: Synthetic oligonucleotide
cuucaccgauaauuauugg

SEQ ID NO: 2365496 - RNA, 19 nt, Artificial Sequence
  Description of Artificial Sequence: Synthetic oligonucleotide
cugagucuauaaauuacca

SEQ ID NO: 2365497 - RNA, 19 nt, Artificial Sequence
  Description of Artificial Sequence: Synthetic oligonucleotide
aacggcuccaggagcaauc

SEQ ID NO: 2365498 - RNA, 19 nt, Artificial Sequence
  Description of Artificial Sequence: Synthetic oligonucleotide
auauuauccggaugagcau

SEQ ID NO: 2365499 - RNA, 19 nt, Artificial Sequence
  Description of Artificial Sequence: Synthetic oligonucleotide
cucagggauaacuucaaaa

SEQ ID NO: 2365500 - RNA, 19 nt, Artificial Sequence
  Description of Artificial Sequence: Synthetic oligonucleotide
agagccucccuuugugguc

SEQ ID NO: 2365501 - RNA, 19 nt, Artificial Sequence
  Description of Artificial Sequence: Synthetic oligonucleotide
aagccccgaugaugcaacc

SEQ ID NO: 2365502 - RNA, 19 nt, Artificial Sequence
  Description of Artificial Sequence: Synthetic oligonucleotide
uaggguggaucacuguccu

SEQ ID NO: 2365503 - RNA, 19 nt, Artificial Sequence
  Description of Artificial Sequence: Synthetic oligonucleotide
augacaugucaucauggau

SEQ ID NO: 2365504 - RNA, 19 nt, Artificial Sequence
  Description of Artificial Sequence: Synthetic oligonucleotide
uacguaugcuuuugauuca

SEQ ID NO: 2365505 - RNA, 19 nt, Artificial Sequence
  Description of Artificial Sequence: Synthetic oligonucleotide
caagauuacauuucugccu

SEQ ID NO: 2365506 - RNA, 19 nt, Artificial Sequence
  Description of Artificial Sequence: Synthetic oligonucleotide
cuacacacacaacggcucc

SEQ ID NO: 2365507 - RNA, 19 nt, Artificial Sequence
  Description of Artificial Sequence: Synthetic oligonucleotide
guuaccuucaccgauaauu

SEQ ID NO: 2365508 - RNA, 19 nt, Artificial Sequence
  Description of Artificial Sequence: Synthetic oligonucleotide
augaugcaaccacugguca

SEQ ID NO: 2365509 - RNA, 19 nt, Artificial Sequence
  Description of Artificial Sequence: Synthetic oligonucleotide
cuaugagguuaccuucacc

SEQ ID NO: 2365510 - RNA, 19 nt, Artificial Sequence
  Description of Artificial Sequence: Synthetic oligonucleotide
aggcaguuaccacguuacc

SEQ ID NO: 2365511 - RNA, 19 nt, Artificial Sequence
  Description of Artificial Sequence: Synthetic oligonucleotide
caucaagaaauccagcugu

SEQ ID NO: 2365512 - RNA, 19 nt, Artificial Sequence
  Description of Artificial Sequence: Synthetic oligonucleotide
uauuauccggaugagcauu

SEQ ID NO: 2365513 - RNA, 19 nt, Artificial Sequence
  Description of Artificial Sequence: Synthetic oligonucleotide
uagagccucccuuuguggu

SEQ ID NO: 2365514 - RNA, 19 nt, Artificial Sequence
  Description of Artificial Sequence: Synthetic oligonucleotide
ucucaggaagagccgagau

SEQ ID NO: 2365515 - RNA, 19 nt, Artificial Sequence
  Description of Artificial Sequence: Synthetic oligonucleotide
gucuauaaauuaccacaac

SEQ ID NO: 2365516 - RNA, 19 nt, Artificial Sequence
  Description of Artificial Sequence: Synthetic oligonucleotide
cuuccaacacaaagugaac

SEQ ID NO: 2365517 - RNA, 19 nt, Artificial Sequence
  Description of Artificial Sequence: Synthetic oligonucleotide
ccuucaccgauaauuauug

SEQ ID NO: 2365518 - RNA, 19 nt, Artificial Sequence
  Description of Artificial Sequence: Synthetic oligonucleotide
auuggugccaaugaucaua

SEQ ID NO: 2365519 - RNA, 19 nt, Artificial Sequence
  Description of Artificial Sequence: Synthetic oligonucleotide
uuacccaccucucuccaua

SEQ ID NO: 2365520 - RNA, 19 nt, Artificial Sequence
  Description of Artificial Sequence: Synthetic oligonucleotide
ugucuggaaugauauuauc

SEQ ID NO: 2365521 - RNA, 19 nt, Artificial Sequence
  Description of Artificial Sequence: Synthetic oligonucleotide
uucucagggauaacuucaa

SEQ ID NO: 2365522 - RNA, 19 nt, Artificial Sequence
  Description of Artificial Sequence: Synthetic oligonucleotide
uaaaugcauggcuaauauu

SEQ ID NO: 2365523 - RNA, 19 nt, Artificial Sequence
  Description of Artificial Sequence: Synthetic oligonucleotide
acacuaugacaugucauca

SEQ ID NO: 2365524 - RNA, 19 nt, Artificial Sequence
  Description of Artificial Sequence: Synthetic oligonucleotide
ggaaugacagccaacuuca

SEQ ID NO: 2365525 - RNA, 19 nt, Artificial Sequence
  Description of Artificial Sequence: Synthetic oligonucleotide
aguguuuagauugcagcaa

SEQ ID NO: 2365526 - RNA, 19 nt, Artificial Sequence
  Description of Artificial Sequence: Synthetic oligonucleotide
augauauuauccggaugag

SEQ ID NO: 2365527 - RNA, 19 nt, Artificial Sequence
  Description of Artificial Sequence: Synthetic oligonucleotide
ugaugcaaccacuggucaa

SEQ ID NO: 2365528 - RNA, 19 nt, Artificial Sequence
  Description of Artificial Sequence: Synthetic oligonucleotide
ugucaucauggauagucuu

SEQ ID NO: 2365529 - RNA, 19 nt, Artificial Sequence
  Description of Artificial Sequence: Synthetic oligonucleotide
aguuaccacguuacccacc

SEQ ID NO: 2365530 - RNA, 19 nt, Artificial Sequence
  Description of Artificial Sequence: Synthetic oligonucleotide
aacugggguagagccuccc

SEQ ID NO: 2365531 - RNA, 19 nt, Artificial Sequence
  Description of Artificial Sequence: Synthetic oligonucleotide
gcaguuaccacguuaccca

SEQ ID NO: 2365532 - RNA, 19 nt, Artificial Sequence
  Description of Artificial Sequence: Synthetic oligonucleotide
auuucugccuacguaugcu

SEQ ID NO: 2365533 - RNA, 19 nt, Artificial Sequence
  Description of Artificial Sequence: Synthetic oligonucleotide
auggauagucuuuuacaua

SEQ ID NO: 2365534 - RNA, 19 nt, Artificial Sequence
  Description of Artificial Sequence: Synthetic oligonucleotide
guucucagggauaacuuca

SEQ ID NO: 2365535 - RNA, 19 nt, Artificial Sequence
  Description of Artificial Sequence: Synthetic oligonucleotide
uauccggaugagcauuuau

SEQ ID NO: 2365536 - RNA, 19 nt, Artificial Sequence
  Description of Artificial Sequence: Synthetic oligonucleotide
acagccaacuucaaacaca

SEQ ID NO: 2365537 - RNA, 19 nt, Artificial Sequence
  Description of Artificial Sequence: Synthetic oligonucleotide
cuugggaaugacagccaac

SEQ ID NO: 2365538 - RNA, 19 nt, Artificial Sequence
  Description of Artificial Sequence: Synthetic oligonucleotide
cuggaucuucauugucugg

SEQ ID NO: 2365539 - RNA, 19 nt, Artificial Sequence
  Description of Artificial Sequence: Synthetic oligonucleotide
ggaugagcauuuaugauga

SEQ ID NO: 2365540 - RNA, 19 nt, Artificial Sequence
  Description of Artificial Sequence: Synthetic oligonucleotide
ugcuuuaggguggaucacu

SEQ ID NO: 2365541 - RNA, 19 nt, Artificial Sequence
  Description of Artificial Sequence: Synthetic oligonucleotide
gaugagcauuuaugaugag

SEQ ID NO: 2365542 - RNA, 19 nt, Artificial Sequence
  Description of Artificial Sequence: Synthetic oligonucleotide
caagccccgaugaugcaac

SEQ ID NO: 2365543 - RNA, 19 nt, Artificial Sequence
  Description of Artificial Sequence: Synthetic oligonucleotide
agcauagauggucaccauu

SEQ ID NO: 2365544 - RNA, 19 nt, Artificial Sequence
  Description of Artificial Sequence: Synthetic oligonucleotide
guucuuaacugggguagag

SEQ ID NO: 2365545 - RNA, 19 nt, Artificial Sequence
  Description of Artificial Sequence: Synthetic oligonucleotide
cauagguuuggguucugga

SEQ ID NO: 2365546 - RNA, 19 nt, Artificial Sequence
  Description of Artificial Sequence: Synthetic oligonucleotide
ucggucugcacccuucgua

SEQ ID NO: 2365547 - RNA, 19 nt, Artificial Sequence
  Description of Artificial Sequence: Synthetic oligonucleotide
acuguguucucagggauaa

SEQ ID NO: 2365548 - RNA, 19 nt, Artificial Sequence
  Description of Artificial Sequence: Synthetic oligonucleotide
ucuucuuuaggugguggua

SEQ ID NO: 2365549 - RNA, 19 nt, Artificial Sequence
  Description of Artificial Sequence: Synthetic oligonucleotide
uauuggcccggccuccgca

SEQ ID NO: 2365550 - RNA, 19 nt, Artificial Sequence
  Description of Artificial Sequence: Synthetic oligonucleotide
cuuaguucuuaacuggggu

SEQ ID NO: 2365551 - RNA, 19 nt, Artificial Sequence
  Description of Artificial Sequence: Synthetic oligonucleotide
uuacaucuccucugauuuc

SEQ ID NO: 2365552 - RNA, 19 nt, Artificial Sequence
  Description of Artificial Sequence: Synthetic oligonucleotide
ggguggaucacuguccuag

SEQ ID NO: 2365553 - RNA, 19 nt, Artificial Sequence
  Description of Artificial Sequence: Synthetic oligonucleotide
cucaggaagagccgagauc

SEQ ID NO: 2365554 - RNA, 19 nt, Artificial Sequence
  Description of Artificial Sequence: Synthetic oligonucleotide
gguagagccucccuuugug

SEQ ID NO: 2365555 - RNA, 19 nt, Artificial Sequence
  Description of Artificial Sequence: Synthetic oligonucleotide
auuauuggcccggccuccg

SEQ ID NO: 2365556 - RNA, 19 nt, Artificial Sequence
  Description of Artificial Sequence: Synthetic oligonucleotide
cacugggcccuuucaaaag

SEQ ID NO: 2365557 - RNA, 19 nt, Artificial Sequence
  Description of Artificial Sequence: Synthetic oligonucleotide
cacguuacccaccucucuc

SEQ ID NO: 2365558 - RNA, 19 nt, Artificial Sequence
  Description of Artificial Sequence: Synthetic oligonucleotide
auagaucacuguguucuca

SEQ ID NO: 2365559 - RNA, 19 nt, Artificial Sequence
  Description of Artificial Sequence: Synthetic oligonucleotide
gcuuccaacacaaagugaa

SEQ ID NO: 2365560 - RNA, 19 nt, Artificial Sequence
  Description of Artificial Sequence: Synthetic oligonucleotide
cacaaagugaacacauugu

SEQ ID NO: 2365561 - RNA, 19 nt, Artificial Sequence
  Description of Artificial Sequence: Synthetic oligonucleotide
ggcaagauuuucaucaaga

SEQ ID NO: 2365562 - RNA, 19 nt, Artificial Sequence
  Description of Artificial Sequence: Synthetic oligonucleotide
ucucagggauaacuucaaa

SEQ ID NO: 2365563 - RNA, 19 nt, Artificial Sequence
  Description of Artificial Sequence: Synthetic oligonucleotide
aaaagucagcauagauggu

SEQ ID NO: 2365564 - RNA, 19 nt, Artificial Sequence
  Description of Artificial Sequence: Synthetic oligonucleotide
cggaugagcauuuaugaug

SEQ ID NO: 2365565 - RNA, 19 nt, Artificial Sequence
  Description of Artificial Sequence: Synthetic oligonucleotide
gguuacauuagaauauaaa

SEQ ID NO: 2365566 - RNA, 19 nt, Artificial Sequence
  Description of Artificial Sequence: Synthetic oligonucleotide
acccuucguaggcagucuc

SEQ ID NO: 2365567 - RNA, 19 nt, Artificial Sequence
  Description of Artificial Sequence: Synthetic oligonucleotide
uucuuuagguggugguaau

SEQ ID NO: 2365568 - RNA, 19 nt, Artificial Sequence
  Description of Artificial Sequence: Synthetic oligonucleotide
uuucugccuacguaugcuu

SEQ ID NO: 2365569 - RNA, 19 nt, Artificial Sequence
  Description of Artificial Sequence: Synthetic oligonucleotide
uucacacucuuuugaguuu

SEQ ID NO: 2365570 - RNA, 19 nt, Artificial Sequence
  Description of Artificial Sequence: Synthetic oligonucleotide
guuaccacguuacccaccu

SEQ ID NO: 2365571 - RNA, 19 nt, Artificial Sequence
  Description of Artificial Sequence: Synthetic oligonucleotide
ucugccuacguaugcuuuu

SEQ ID NO: 2365572 - RNA, 19 nt, Artificial Sequence
  Description of Artificial Sequence: Synthetic oligonucleotide
cucuccauaaagcuuccaa

SEQ ID NO: 2365573 - RNA, 19 nt, Artificial Sequence
  Description of Artificial Sequence: Synthetic oligonucleotide
uucugccuacguaugcuuu

SEQ ID NO: 2365574 - RNA, 19 nt, Artificial Sequence
  Description of Artificial Sequence: Synthetic oligonucleotide
ccaccucucuccauaaagc

SEQ ID NO: 2365575 - RNA, 19 nt, Artificial Sequence
  Description of Artificial Sequence: Synthetic oligonucleotide
uuauuggcccggccuccgc

SEQ ID NO: 2365576 - RNA, 19 nt, Artificial Sequence
  Description of Artificial Sequence: Synthetic oligonucleotide
ucgugcuuuaggguggauc

SEQ ID NO: 2365577 - RNA, 19 nt, Artificial Sequence
  Description of Artificial Sequence: Synthetic oligonucleotide
gcaagauuuucaucaagaa

SEQ ID NO: 2365578 - RNA, 19 nt, Artificial Sequence
  Description of Artificial Sequence: Synthetic oligonucleotide
cucucuccauaaagcuucc

SEQ ID NO: 2365579 - RNA, 19 nt, Artificial Sequence
  Description of Artificial Sequence: Synthetic oligonucleotide
augucaucauggauagucu

SEQ ID NO: 2365580 - RNA, 19 nt, Artificial Sequence
  Description of Artificial Sequence: Synthetic oligonucleotide
cuucuuuagguggugguaa

SEQ ID NO: 2365581 - RNA, 19 nt, Artificial Sequence
  Description of Artificial Sequence: Synthetic oligonucleotide
ugggguagagccucccuuu

SEQ ID NO: 2365582 - RNA, 19 nt, Artificial Sequence
  Description of Artificial Sequence: Synthetic oligonucleotide
uccuagggccuaugguuac

SEQ ID NO: 2365583 - RNA, 19 nt, Artificial Sequence
  Description of Artificial Sequence: Synthetic oligonucleotide
cuucguaggcagucuccac

SEQ ID NO: 2365584 - RNA, 19 nt, Artificial Sequence
  Description of Artificial Sequence: Synthetic oligonucleotide
agguuaccuucaccgauaa

SEQ ID NO: 2365585 - RNA, 19 nt, Artificial Sequence
  Description of Artificial Sequence: Synthetic oligonucleotide
uaacugggguagagccucc

SEQ ID NO: 2365586 - RNA, 19 nt, Artificial Sequence
  Description of Artificial Sequence: Synthetic oligonucleotide
accuucaccgauaauuauu

SEQ ID NO: 2365587 - RNA, 19 nt, Artificial Sequence
  Description of Artificial Sequence: Synthetic oligonucleotide
accacguuacccaccucuc

SEQ ID NO: 2365588 - RNA, 19 nt, Artificial Sequence
  Description of Artificial Sequence: Synthetic oligonucleotide
aucgucagggccgggucuc

SEQ ID NO: 2365589 - RNA, 19 nt, Artificial Sequence
  Description of Artificial Sequence: Synthetic oligonucleotide
uauuggugccaaugaucau

SEQ ID NO: 2365590 - RNA, 19 nt, Artificial Sequence
  Description of Artificial Sequence: Synthetic oligonucleotide
uggugccaaugaucauagg

SEQ ID NO: 2365591 - RNA, 19 nt, Artificial Sequence
  Description of Artificial Sequence: Synthetic oligonucleotide
ccucuaugagguuaccuuc

SEQ ID NO: 2365592 - RNA, 19 nt, Artificial Sequence
  Description of Artificial Sequence: Synthetic oligonucleotide
gggcaagauuuucaucaag

SEQ ID NO: 2365593 - RNA, 19 nt, Artificial Sequence
  Description of Artificial Sequence: Synthetic oligonucleotide
cacacacaacggcuccagg

SEQ ID NO: 2365594 - RNA, 19 nt, Artificial Sequence
  Description of Artificial Sequence: Synthetic oligonucleotide
ugcagcaagccccgaugau

SEQ ID NO: 2365595 - RNA, 19 nt, Artificial Sequence
  Description of Artificial Sequence: Synthetic oligonucleotide
ggccuaugguuacaucucc

SEQ ID NO: 2365596 - RNA, 19 nt, Artificial Sequence
  Description of Artificial Sequence: Synthetic oligonucleotide
acaauacacuccauauaaa

SEQ ID NO: 2365597 - RNA, 19 nt, Artificial Sequence
  Description of Artificial Sequence: Synthetic oligonucleotide
ccuaugguuacaucuccuc

SEQ ID NO: 2365598 - RNA, 19 nt, Artificial Sequence
  Description of Artificial Sequence: Synthetic oligonucleotide
cuaugguuacaucuccucu

SEQ ID NO: 2365599 - RNA, 19 nt, Artificial Sequence
  Description of Artificial Sequence: Synthetic oligonucleotide
cauggcuaauauuuuguau

SEQ ID NO: 2365600 - RNA, 19 nt, Artificial Sequence
  Description of Artificial Sequence: Synthetic oligonucleotide
acacucuuuugaguuuucu

SEQ ID NO: 2365601 - RNA, 19 nt, Artificial Sequence
  Description of Artificial Sequence: Synthetic oligonucleotide
aguucuuaacugggguaga

SEQ ID NO: 2365602 - RNA, 19 nt, Artificial Sequence
  Description of Artificial Sequence: Synthetic oligonucleotide
cauuuaugaugagggccug

SEQ ID NO: 2365603 - RNA, 19 nt, Artificial Sequence
  Description of Artificial Sequence: Synthetic oligonucleotide
gcagucuccaccauagauc

SEQ ID NO: 2365604 - RNA, 19 nt, Artificial Sequence
  Description of Artificial Sequence: Synthetic oligonucleotide
ccgauaauuauuggcccgg

SEQ ID NO: 2365605 - RNA, 19 nt, Artificial Sequence
  Description of Artificial Sequence: Synthetic oligonucleotide
gaucauagguuuggguucu

SEQ ID NO: 2365606 - RNA, 19 nt, Artificial Sequence
  Description of Artificial Sequence: Synthetic oligonucleotide
auuucacuuucuacacaca

SEQ ID NO: 2365607 - RNA, 19 nt, Artificial Sequence
  Description of Artificial Sequence: Synthetic oligonucleotide
cugcacccuucguaggcag

SEQ ID NO: 2365608 - RNA, 19 nt, Artificial Sequence
  Description of Artificial Sequence: Synthetic oligonucleotide
accacuggucaagauuaca

SEQ ID NO: 2365609 - RNA, 19 nt, Artificial Sequence
  Description of Artificial Sequence: Synthetic oligonucleotide
ugguuacaucuccucugau

SEQ ID NO: 2365610 - RNA, 19 nt, Artificial Sequence
  Description of Artificial Sequence: Synthetic oligonucleotide
cuuaacugggguagagccu

SEQ ID NO: 2365611 - RNA, 19 nt, Artificial Sequence
  Description of Artificial Sequence: Synthetic oligonucleotide
ccggccuccgcaauaauuc

SEQ ID NO: 2365612 - RNA, 19 nt, Artificial Sequence
  Description of Artificial Sequence: Synthetic oligonucleotide
ccgaugaugcaaccacugg

SEQ ID NO: 2365613 - RNA, 19 nt, Artificial Sequence
  Description of Artificial Sequence: Synthetic oligonucleotide
cauuauuggugccaaugau

SEQ ID NO: 2365614 - RNA, 19 nt, Artificial Sequence
  Description of Artificial Sequence: Synthetic oligonucleotide
ugcacccuucguaggcagu

SEQ ID NO: 2365615 - RNA, 19 nt, Artificial Sequence
  Description of Artificial Sequence: Synthetic oligonucleotide
ggucaagauuacauuucug

SEQ ID NO: 2365616 - RNA, 19 nt, Artificial Sequence
  Description of Artificial Sequence: Synthetic oligonucleotide
ggucugcacccuucguagg

SEQ ID NO: 2365617 - RNA, 19 nt, Artificial Sequence
  Description of Artificial Sequence: Synthetic oligonucleotide
auuauccggaugagcauuu

SEQ ID NO: 2365618 - RNA, 19 nt, Artificial Sequence
  Description of Artificial Sequence: Synthetic oligonucleotide
uacccaccucucuccauaa

SEQ ID NO: 2365619 - RNA, 19 nt, Artificial Sequence
  Description of Artificial Sequence: Synthetic oligonucleotide
acguaugcuuuugauucaa

SEQ ID NO: 2365620 - RNA, 19 nt, Artificial Sequence
  Description of Artificial Sequence: Synthetic oligonucleotide
gagguuaccuucaccgaua

SEQ ID NO: 2365621 - RNA, 19 nt, Artificial Sequence
  Description of Artificial Sequence: Synthetic oligonucleotide
cccgaugaugcaaccacug

SEQ ID NO: 2365622 - RNA, 19 nt, Artificial Sequence
  Description of Artificial Sequence: Synthetic oligonucleotide
aucaagaaauccagcugua

SEQ ID NO: 2365623 - RNA, 19 nt, Artificial Sequence
  Description of Artificial Sequence: Synthetic oligonucleotide
acacauuauuggugccaau

SEQ ID NO: 2365624 - RNA, 19 nt, Artificial Sequence
  Description of Artificial Sequence: Synthetic oligonucleotide
gugguaauugggcaagauu

SEQ ID NO: 2365625 - RNA, 19 nt, Artificial Sequence
  Description of Artificial Sequence: Synthetic oligonucleotide
gcauuuaugaugagggccu

SEQ ID NO: 2365626 - RNA, 19 nt, Artificial Sequence
  Description of Artificial Sequence: Synthetic oligonucleotide
gcuuuaggguggaucacug

SEQ ID NO: 2365627 - RNA, 19 nt, Artificial Sequence
  Description of Artificial Sequence: Synthetic oligonucleotide
gccccgaugaugcaaccac

SEQ ID NO: 2365628 - RNA, 19 nt, Artificial Sequence
  Description of Artificial Sequence: Synthetic oligonucleotide
gugccaaugaucauagguu

SEQ ID NO: 2365629 - RNA, 19 nt, Artificial Sequence
  Description of Artificial Sequence: Synthetic oligonucleotide
cagccaacuucaaacacau

SEQ ID NO: 2365630 - RNA, 19 nt, Artificial Sequence
  Description of Artificial Sequence: Synthetic oligonucleotide
ugacaacuucuuaguucuu

SEQ ID NO: 2365631 - RNA, 19 nt, Artificial Sequence
  Description of Artificial Sequence: Synthetic oligonucleotide
gccaaugaucauagguuug

SEQ ID NO: 2365632 - RNA, 19 nt, Artificial Sequence
  Description of Artificial Sequence: Synthetic oligonucleotide
uggugguaauugggcaaga

SEQ ID NO: 2365633 - RNA, 19 nt, Artificial Sequence
  Description of Artificial Sequence: Synthetic oligonucleotide
accucucuccauaaagcuu

SEQ ID NO: 2365634 - RNA, 19 nt, Artificial Sequence
  Description of Artificial Sequence: Synthetic oligonucleotide
auucgugcuuuagggugga

SEQ ID NO: 2365635 - RNA, 19 nt, Artificial Sequence
  Description of Artificial Sequence: Synthetic oligonucleotide
uuaaaacacugggcccuuu

SEQ ID NO: 2365636 - RNA, 19 nt, Artificial Sequence
  Description of Artificial Sequence: Synthetic oligonucleotide
agcaagccccgaugaugca

SEQ ID NO: 2365637 - RNA, 19 nt, Artificial Sequence
  Description of Artificial Sequence: Synthetic oligonucleotide
uuauccggaugagcauuua

SEQ ID NO: 2365638 - RNA, 19 nt, Artificial Sequence
  Description of Artificial Sequence: Synthetic oligonucleotide
gguuacaucuccucugauu

SEQ ID NO: 2365639 - RNA, 19 nt, Artificial Sequence
  Description of Artificial Sequence: Synthetic oligonucleotide
uuaccacguuacccaccuc

SEQ ID NO: 2365640 - RNA, 19 nt, Artificial Sequence
  Description of Artificial Sequence: Synthetic oligonucleotide
acacuccauauaaauuaua

SEQ ID NO: 2365641 - RNA, 19 nt, Artificial Sequence
  Description of Artificial Sequence: Synthetic oligonucleotide
cggucugcacccuucguag

SEQ ID NO: 2365642 - RNA, 19 nt, Artificial Sequence
  Description of Artificial Sequence: Synthetic oligonucleotide
gcauggcuaauauuuugua

SEQ ID NO: 2365643 - RNA, 19 nt, Artificial Sequence
  Description of Artificial Sequence: Synthetic oligonucleotide
gggguagagccucccuuug

SEQ ID NO: 2365644 - RNA, 19 nt, Artificial Sequence
  Description of Artificial Sequence: Synthetic oligonucleotide
cccuucguaggcagucucc

SEQ ID NO: 2365645 - RNA, 19 nt, Artificial Sequence
  Description of Artificial Sequence: Synthetic oligonucleotide
gguucuggaucuucauugu

SEQ ID NO: 2365646 - RNA, 19 nt, Artificial Sequence
  Description of Artificial Sequence: Synthetic oligonucleotide
ccaacuucaaacacauuau

SEQ ID NO: 2365647 - RNA, 19 nt, Artificial Sequence
  Description of Artificial Sequence: Synthetic oligonucleotide
caucauggauagucuuuua

SEQ ID NO: 2365648 - RNA, 19 nt, Artificial Sequence
  Description of Artificial Sequence: Synthetic oligonucleotide
cuuuaggguggaucacugu

SEQ ID NO: 2365649 - RNA, 19 nt, Artificial Sequence
  Description of Artificial Sequence: Synthetic oligonucleotide
ggagcaaucuucacacucu

SEQ ID NO: 2365650 - RNA, 19 nt, Artificial Sequence
  Description of Artificial Sequence: Synthetic oligonucleotide
ccaacacaaagugaacaca

SEQ ID NO: 2365651 - RNA, 19 nt, Artificial Sequence
  Description of Artificial Sequence: Synthetic oligonucleotide
gcuugggaaugacagccaa

SEQ ID NO: 2365652 - RNA, 19 nt, Artificial Sequence
  Description of Artificial Sequence: Synthetic oligonucleotide
agccccgaugaugcaacca

SEQ ID NO: 2365653 - RNA, 19 nt, Artificial Sequence
  Description of Artificial Sequence: Synthetic oligonucleotide
guccuagggccuaugguua

SEQ ID NO: 2365654 - RNA, 19 nt, Artificial Sequence
  Description of Artificial Sequence: Synthetic oligonucleotide
gcaaccacuggucaagauu

SEQ ID NO: 2365655 - RNA, 19 nt, Artificial Sequence
  Description of Artificial Sequence: Synthetic oligonucleotide
gaucacuguccuagggccu

SEQ ID NO: 2365656 - RNA, 19 nt, Artificial Sequence
  Description of Artificial Sequence: Synthetic oligonucleotide
cacuggucaagauuacauu

SEQ ID NO: 2365657 - RNA, 19 nt, Artificial Sequence
  Description of Artificial Sequence: Synthetic oligonucleotide
aucauagguuuggguucug

SEQ ID NO: 2365658 - RNA, 19 nt, Artificial Sequence
  Description of Artificial Sequence: Synthetic oligonucleotide
caccauagaucacuguguu

SEQ ID NO: 2365659 - RNA, 19 nt, Artificial Sequence
  Description of Artificial Sequence: Synthetic oligonucleotide
gaguuuucuccgccaucgu

SEQ ID NO: 2365660 - RNA, 19 nt, Artificial Sequence
  Description of Artificial Sequence: Synthetic oligonucleotide
cuguccuagggccuauggu

SEQ ID NO: 2365661 - RNA, 19 nt, Artificial Sequence
  Description of Artificial Sequence: Synthetic oligonucleotide
uuaccacaacaaggacaaa

SEQ ID NO: 2365662 - RNA, 19 nt, Artificial Sequence
  Description of Artificial Sequence: Synthetic oligonucleotide
ggcuaauauuuuguaucaa

SEQ ID NO: 2365663 - RNA, 19 nt, Artificial Sequence
  Description of Artificial Sequence: Synthetic oligonucleotide
gggucucaggaagagccga

SEQ ID NO: 2365664 - RNA, 19 nt, Artificial Sequence
  Description of Artificial Sequence: Synthetic oligonucleotide
cggccuccgcaauaauucg

SEQ ID NO: 2365665 - RNA, 19 nt, Artificial Sequence
  Description of Artificial Sequence: Synthetic oligonucleotide
cuguguucucagggauaac

SEQ ID NO: 2365666 - RNA, 19 nt, Artificial Sequence
  Description of Artificial Sequence: Synthetic oligonucleotide
ccaccauagaucacugugu

SEQ ID NO: 2365667 - RNA, 19 nt, Artificial Sequence
  Description of Artificial Sequence: Synthetic oligonucleotide
ccacuggucaagauuacau

SEQ ID NO: 2365668 - RNA, 19 nt, Artificial Sequence
  Description of Artificial Sequence: Synthetic oligonucleotide
gguaauugggcaagauuuu

SEQ ID NO: 2365669 - RNA, 19 nt, Artificial Sequence
  Description of Artificial Sequence: Synthetic oligonucleotide
acaacggcuccaggagcaa

SEQ ID NO: 2365670 - RNA, 19 nt, Artificial Sequence
  Description of Artificial Sequence: Synthetic oligonucleotide
ccuacguaugcuuuugauu

SEQ ID NO: 2365671 - RNA, 19 nt, Artificial Sequence
  Description of Artificial Sequence: Synthetic oligonucleotide
cugcuccucuaugagguua

SEQ ID NO: 2365672 - RNA, 19 nt, Artificial Sequence
  Description of Artificial Sequence: Synthetic oligonucleotide
aggguggaucacuguccua

SEQ ID NO: 2365673 - RNA, 19 nt, Artificial Sequence
  Description of Artificial Sequence: Synthetic oligonucleotide
cgauaauuauuggcccggc

SEQ ID NO: 2365674 - RNA, 19 nt, Artificial Sequence
  Description of Artificial Sequence: Synthetic oligonucleotide
ucgucagggccgggucuca

SEQ ID NO: 2365675 - RNA, 19 nt, Artificial Sequence
  Description of Artificial Sequence: Synthetic oligonucleotide
gcacccuucguaggcaguc

SEQ ID NO: 2365676 - RNA, 19 nt, Artificial Sequence
  Description of Artificial Sequence: Synthetic oligonucleotide
guuacccaccucucuccau

SEQ ID NO: 2365677 - RNA, 19 nt, Artificial Sequence
  Description of Artificial Sequence: Synthetic oligonucleotide
ggauaacuucaaaaguguu

SEQ ID NO: 2365678 - RNA, 19 nt, Artificial Sequence
  Description of Artificial Sequence: Synthetic oligonucleotide
agauugcagcaagccccga

SEQ ID NO: 2365679 - RNA, 19 nt, Artificial Sequence
  Description of Artificial Sequence: Synthetic oligonucleotide
ccaucgucagggccggguc

SEQ ID NO: 2365680 - RNA, 19 nt, Artificial Sequence
  Description of Artificial Sequence: Synthetic oligonucleotide
cuccucuaugagguuaccu

SEQ ID NO: 2365681 - RNA, 19 nt, Artificial Sequence
  Description of Artificial Sequence: Synthetic oligonucleotide
ggccgggucucaggaagag

SEQ ID NO: 2365682 - RNA, 19 nt, Artificial Sequence
  Description of Artificial Sequence: Synthetic oligonucleotide
guuaaaacacugggcccuu

SEQ ID NO: 2365683 - RNA, 19 nt, Artificial Sequence
  Description of Artificial Sequence: Synthetic oligonucleotide
cacuguccuagggccuaug

SEQ ID NO: 2365684 - RNA, 19 nt, Artificial Sequence
  Description of Artificial Sequence: Synthetic oligonucleotide
caucgucagggccgggucu

SEQ ID NO: 2365685 - RNA, 19 nt, Artificial Sequence
  Description of Artificial Sequence: Synthetic oligonucleotide
ccuucguaggcagucucca

SEQ ID NO: 2365686 - RNA, 19 nt, Artificial Sequence
  Description of Artificial Sequence: Synthetic oligonucleotide
cuucauugucuggaaugau

SEQ ID NO: 2365687 - RNA, 19 nt, Artificial Sequence
  Description of Artificial Sequence: Synthetic oligonucleotide
gccuacguaugcuuuugau

SEQ ID NO: 2365688 - RNA, 19 nt, Artificial Sequence
  Description of Artificial Sequence: Synthetic oligonucleotide
gcaagccccgaugaugcaa

SEQ ID NO: 2365689 - RNA, 19 nt, Artificial Sequence
  Description of Artificial Sequence: Synthetic oligonucleotide
uucgugcuuuaggguggau

SEQ ID NO: 2365690 - RNA, 19 nt, Artificial Sequence
  Description of Artificial Sequence: Synthetic oligonucleotide
cuagggccuaugguuacau

SEQ ID NO: 2365691 - RNA, 19 nt, Artificial Sequence
  Description of Artificial Sequence: Synthetic oligonucleotide
gcuccucuaugagguuacc

SEQ ID NO: 2365692 - RNA, 19 nt, Artificial Sequence
  Description of Artificial Sequence: Synthetic oligonucleotide
ggugguaauugggcaagau

SEQ ID NO: 2365693 - RNA, 19 nt, Artificial Sequence
  Description of Artificial Sequence: Synthetic oligonucleotide
ggguagagccucccuuugu

SEQ ID NO: 2365694 - RNA, 19 nt, Artificial Sequence
  Description of Artificial Sequence: Synthetic oligonucleotide
cuguggccgcucggucugc

SEQ ID NO: 2365695 - RNA, 19 nt, Artificial Sequence
  Description of Artificial Sequence: Synthetic oligonucleotide
cagcauagauggucaccau

SEQ ID NO: 2365696 - RNA, 19 nt, Artificial Sequence
  Description of Artificial Sequence: Synthetic oligonucleotide
ggauagucuuuuacauaau

SEQ ID NO: 2365697 - RNA, 19 nt, Artificial Sequence
  Description of Artificial Sequence: Synthetic oligonucleotide
ccggaugagcauuuaugau

SEQ ID NO: 2365698 - RNA, 19 nt, Artificial Sequence
  Description of Artificial Sequence: Synthetic oligonucleotide
cgcaauaauucgugcuuua

SEQ ID NO: 2365699 - RNA, 19 nt, Artificial Sequence
  Description of Artificial Sequence: Synthetic oligonucleotide
cagggccgggucucaggaa

SEQ ID NO: 2365700 - RNA, 19 nt, Artificial Sequence
  Description of Artificial Sequence: Synthetic oligonucleotide
gccuaugguuacaucuccu

SEQ ID NO: 2365701 - RNA, 19 nt, Artificial Sequence
  Description of Artificial Sequence: Synthetic oligonucleotide
cucggucugcacccuucgu

SEQ ID NO: 2365702 - RNA, 19 nt, Artificial Sequence
  Description of Artificial Sequence: Synthetic oligonucleotide
cguuacccaccucucucca

SEQ ID NO: 2365703 - RNA, 19 nt, Artificial Sequence
  Description of Artificial Sequence: Synthetic oligonucleotide
ccgccaucgucagggccgg

SEQ ID NO: 2365704 - RNA, 19 nt, Artificial Sequence
  Description of Artificial Sequence: Synthetic oligonucleotide
ggccuccgcaauaauucgu

SEQ ID NO: 2365705 - RNA, 19 nt, Artificial Sequence
  Description of Artificial Sequence: Synthetic oligonucleotide
gguuaccuucaccgauaau

SEQ ID NO: 2365706 - RNA, 19 nt, Artificial Sequence
  Description of Artificial Sequence: Synthetic oligonucleotide
cacccuucguaggcagucu

SEQ ID NO: 2365707 - RNA, 19 nt, Artificial Sequence
  Description of Artificial Sequence: Synthetic oligonucleotide
ccuagggccuaugguuaca

SEQ ID NO: 2365708 - RNA, 19 nt, Artificial Sequence
  Description of Artificial Sequence: Synthetic oligonucleotide
gggccgggucucaggaaga

SEQ ID NO: 2365709 - RNA, 19 nt, Artificial Sequence
  Description of Artificial Sequence: Synthetic oligonucleotide
ccacguuacccaccucucu

SEQ ID NO: 2365710 - RNA, 19 nt, Artificial Sequence
  Description of Artificial Sequence: Synthetic oligonucleotide
gccaucgucagggccgggu

SEQ ID NO: 2365711 - RNA, 19 nt, Artificial Sequence
  Description of Artificial Sequence: Synthetic oligonucleotide
cccuuucaaaagucagcau

SEQ ID NO: 2365712 - RNA, 19 nt, Artificial Sequence
  Description of Artificial Sequence: Synthetic oligonucleotide
ccccgaugaugcaaccacu

SEQ ID NO: 2365713 - RNA, 19 nt, Artificial Sequence
  Description of Artificial Sequence: Synthetic oligonucleotide
caacggcuccaggagcaau

SEQ ID NO: 2365714 - RNA, 19 nt, Artificial Sequence
  Description of Artificial Sequence: Synthetic oligonucleotide
cguaugcuuuugauucaau

SEQ ID NO: 2365715 - RNA, 19 nt, Artificial Sequence
  Description of Artificial Sequence: Synthetic oligonucleotide
ccgcaauaauucgugcuuu

SEQ ID NO: 2365716 - RNA, 19 nt, Artificial Sequence
  Description of Artificial Sequence: Synthetic oligonucleotide
cgucagggccgggucucag

SEQ ID NO: 2365717 - RNA, 19 nt, Artificial Sequence
  Description of Artificial Sequence: Synthetic oligonucleotide
cgccaucgucagggccggg

SEQ ID NO: 2365718 - RNA, 19 nt, Artificial Sequence
  Description of Artificial Sequence: Synthetic oligonucleotide
ccgcucggucugcacccuu

SEQ ID NO: 2365719 - RNA, 19 nt, Artificial Sequence
  Description of Artificial Sequence: Synthetic oligonucleotide
aacucaauucuuuagaggc

SEQ ID NO: 2365720 - RNA, 19 nt, Artificial Sequence
  Description of Artificial Sequence: Synthetic oligonucleotide
aauauaaagaacaauacuc

SEQ ID NO: 2365721 - RNA, 19 nt, Artificial Sequence
  Description of Artificial Sequence: Synthetic oligonucleotide
aguauuuauaauuuuguac

SEQ ID NO: 2365722 - RNA, 19 nt, Artificial Sequence
  Description of Artificial Sequence: Synthetic oligonucleotide
aaggcuuugaccgagaacg

SEQ ID NO: 2365723 - RNA, 19 nt, Artificial Sequence
  Description of Artificial Sequence: Synthetic oligonucleotide
accacuacaggcuagaaac

SEQ ID NO: 2365724 - RNA, 19 nt, Artificial Sequence
  Description of Artificial Sequence: Synthetic oligonucleotide
ucuaguuauauaaugaggu

SEQ ID NO: 2365725 - RNA, 19 nt, Artificial Sequence
  Description of Artificial Sequence: Synthetic oligonucleotide
aauacugauauuucgaaaa

SEQ ID NO: 2365726 - RNA, 19 nt, Artificial Sequence
  Description of Artificial Sequence: Synthetic oligonucleotide
ucaaaauacugauauuucg

SEQ ID NO: 2365727 - RNA, 19 nt, Artificial Sequence
  Description of Artificial Sequence: Synthetic oligonucleotide
uaauuuuguacccagaaaa

SEQ ID NO: 2365728 - RNA, 19 nt, Artificial Sequence
  Description of Artificial Sequence: Synthetic oligonucleotide
gauauacucagcaaaauag

SEQ ID NO: 2365729 - RNA, 19 nt, Artificial Sequence
  Description of Artificial Sequence: Synthetic oligonucleotide
uauauaaugaggucuacca

SEQ ID NO: 2365730 - RNA, 19 nt, Artificial Sequence
  Description of Artificial Sequence: Synthetic oligonucleotide
auauaaagaacaauacucc

SEQ ID NO: 2365731 - RNA, 19 nt, Artificial Sequence
  Description of Artificial Sequence: Synthetic oligonucleotide
uagacuaacaacacuaggc

SEQ ID NO: 2365732 - RNA, 19 nt, Artificial Sequence
  Description of Artificial Sequence: Synthetic oligonucleotide
aacaauacucccugagagc

SEQ ID NO: 2365733 - RNA, 19 nt, Artificial Sequence
  Description of Artificial Sequence: Synthetic oligonucleotide
acagcuaagucauucaccg

SEQ ID NO: 2365734 - RNA, 19 nt, Artificial Sequence
  Description of Artificial Sequence: Synthetic oligonucleotide
uuuauaauuuuguacccag

SEQ ID NO: 2365735 - RNA, 19 nt, Artificial Sequence
  Description of Artificial Sequence: Synthetic oligonucleotide
uauaaugaggucuaccagc

SEQ ID NO: 2365736 - RNA, 19 nt, Artificial Sequence
  Description of Artificial Sequence: Synthetic oligonucleotide
acuucauugauauacucag

SEQ ID NO: 2365737 - RNA, 19 nt, Artificial Sequence
  Description of Artificial Sequence: Synthetic oligonucleotide
uaaagaacaauacucccug

SEQ ID NO: 2365738 - RNA, 19 nt, Artificial Sequence
  Description of Artificial Sequence: Synthetic oligonucleotide
uucauugauauacucagca

SEQ ID NO: 2365739 - RNA, 19 nt, Artificial Sequence
  Description of Artificial Sequence: Synthetic oligonucleotide
aacaacacuaggcacagga

SEQ ID NO: 2365740 - RNA, 19 nt, Artificial Sequence
  Description of Artificial Sequence: Synthetic oligonucleotide
gaacaauacucccugagag

SEQ ID NO: 2365741 - RNA, 19 nt, Artificial Sequence
  Description of Artificial Sequence: Synthetic oligonucleotide
aacacgauagaaaugaaca

SEQ ID NO: 2365742 - RNA, 19 nt, Artificial Sequence
  Description of Artificial Sequence: Synthetic oligonucleotide
uauaaagaacaauacuccc

SEQ ID NO: 2365743 - RNA, 19 nt, Artificial Sequence
  Description of Artificial Sequence: Synthetic oligonucleotide
uuuucaguggcauagccca

SEQ ID NO: 2365744 - RNA, 19 nt, Artificial Sequence
  Description of Artificial Sequence: Synthetic oligonucleotide
ugauauuucgaaaacgauc

SEQ ID NO: 2365745 - RNA, 19 nt, Artificial Sequence
  Description of Artificial Sequence: Synthetic oligonucleotide
cauacuauuuuccauggag

SEQ ID NO: 2365746 - RNA, 19 nt, Artificial Sequence
  Description of Artificial Sequence: Synthetic oligonucleotide
uauuuauaauuuuguaccc

SEQ ID NO: 2365747 - RNA, 19 nt, Artificial Sequence
  Description of Artificial Sequence: Synthetic oligonucleotide
uucuguacccacauaauca

SEQ ID NO: 2365748 - RNA, 19 nt, Artificial Sequence
  Description of Artificial Sequence: Synthetic oligonucleotide
augaucauggcguugaaca

SEQ ID NO: 2365749 - RNA, 19 nt, Artificial Sequence
  Description of Artificial Sequence: Synthetic oligonucleotide
aacgaucuccaauucauug

SEQ ID NO: 2365750 - RNA, 19 nt, Artificial Sequence
  Description of Artificial Sequence: Synthetic oligonucleotide
aagucauucaccgaguaug

SEQ ID NO: 2365751 - RNA, 19 nt, Artificial Sequence
  Description of Artificial Sequence: Synthetic oligonucleotide
acugcauucuuuucagacc

SEQ ID NO: 2365752 - RNA, 19 nt, Artificial Sequence
  Description of Artificial Sequence: Synthetic oligonucleotide
gagaaguaggcacagcagg

SEQ ID NO: 2365753 - RNA, 19 nt, Artificial Sequence
  Description of Artificial Sequence: Synthetic oligonucleotide
ugacauacuauuuuccaug

SEQ ID NO: 2365754 - RNA, 19 nt, Artificial Sequence
  Description of Artificial Sequence: Synthetic oligonucleotide
aauucuuuagaggcuuggc

SEQ ID NO: 2365755 - RNA, 19 nt, Artificial Sequence
  Description of Artificial Sequence: Synthetic oligonucleotide
ucugugaugagaagcaugu

SEQ ID NO: 2365756 - RNA, 19 nt, Artificial Sequence
  Description of Artificial Sequence: Synthetic oligonucleotide
acggggaaggcuuugaccg

SEQ ID NO: 2365757 - RNA, 19 nt, Artificial Sequence
  Description of Artificial Sequence: Synthetic oligonucleotide
acaggcuagaaacagaaga

SEQ ID NO: 2365758 - RNA, 19 nt, Artificial Sequence
  Description of Artificial Sequence: Synthetic oligonucleotide
uuauuucucaguguccucg

SEQ ID NO: 2365759 - RNA, 19 nt, Artificial Sequence
  Description of Artificial Sequence: Synthetic oligonucleotide
aagcaugugagaaguaggc

SEQ ID NO: 2365760 - RNA, 19 nt, Artificial Sequence
  Description of Artificial Sequence: Synthetic oligonucleotide
acucuaguuauauaaugag

SEQ ID NO: 2365761 - RNA, 19 nt, Artificial Sequence
  Description of Artificial Sequence: Synthetic oligonucleotide
gacauacuauuuuccaugg

SEQ ID NO: 2365762 - RNA, 19 nt, Artificial Sequence
  Description of Artificial Sequence: Synthetic oligonucleotide
uucuuuagaggcuuggcug

SEQ ID NO: 2365763 - RNA, 19 nt, Artificial Sequence
  Description of Artificial Sequence: Synthetic oligonucleotide
agaccugccccacaggucc

SEQ ID NO: 2365764 - RNA, 19 nt, Artificial Sequence
  Description of Artificial Sequence: Synthetic oligonucleotide
agcuaagucauucaccgag

SEQ ID NO: 2365765 - RNA, 19 nt, Artificial Sequence
  Description of Artificial Sequence: Synthetic oligonucleotide
agccacuucauugauauac

SEQ ID NO: 2365766 - RNA, 19 nt, Artificial Sequence
  Description of Artificial Sequence: Synthetic oligonucleotide
cucuaguuauauaaugagg

SEQ ID NO: 2365767 - RNA, 19 nt, Artificial Sequence
  Description of Artificial Sequence: Synthetic oligonucleotide
aaauagacuaacaacacua

SEQ ID NO: 2365768 - RNA, 19 nt, Artificial Sequence
  Description of Artificial Sequence: Synthetic oligonucleotide
aaccaaacgguucauuuga

SEQ ID NO: 2365769 - RNA, 19 nt, Artificial Sequence
  Description of Artificial Sequence: Synthetic oligonucleotide
acaauacucccugagagcg

SEQ ID NO: 2365770 - RNA, 19 nt, Artificial Sequence
  Description of Artificial Sequence: Synthetic oligonucleotide
gacgacaaguccuaggagc

SEQ ID NO: 2365771 - RNA, 19 nt, Artificial Sequence
  Description of Artificial Sequence: Synthetic oligonucleotide
gaaaugaacaugccccggg

SEQ ID NO: 2365772 - RNA, 19 nt, Artificial Sequence
  Description of Artificial Sequence: Synthetic oligonucleotide
uauaccucugugaugagaa

SEQ ID NO: 2365773 - RNA, 19 nt, Artificial Sequence
  Description of Artificial Sequence: Synthetic oligonucleotide
uagaaaugaacaugccccg

SEQ ID NO: 2365774 - RNA, 19 nt, Artificial Sequence
  Description of Artificial Sequence: Synthetic oligonucleotide
auagacuaacaacacuagg

SEQ ID NO: 2365775 - RNA, 19 nt, Artificial Sequence
  Description of Artificial Sequence: Synthetic oligonucleotide
gaacucuaguuauauaaug

SEQ ID NO: 2365776 - RNA, 19 nt, Artificial Sequence
  Description of Artificial Sequence: Synthetic oligonucleotide
auacuauuuuccauggagc

SEQ ID NO: 2365777 - RNA, 19 nt, Artificial Sequence
  Description of Artificial Sequence: Synthetic oligonucleotide
uauuucgaaaacgaucucc

SEQ ID NO: 2365778 - RNA, 19 nt, Artificial Sequence
  Description of Artificial Sequence: Synthetic oligonucleotide
uaguuauauaaugaggucu

SEQ ID NO: 2365779 - RNA, 19 nt, Artificial Sequence
  Description of Artificial Sequence: Synthetic oligonucleotide
aucaauauaaagaacaaua

SEQ ID NO: 2365780 - RNA, 19 nt, Artificial Sequence
  Description of Artificial Sequence: Synthetic oligonucleotide
gagaacacgauagaaauga

SEQ ID NO: 2365781 - RNA, 19 nt, Artificial Sequence
  Description of Artificial Sequence: Synthetic oligonucleotide
gauauuucgaaaacgaucu

SEQ ID NO: 2365782 - RNA, 19 nt, Artificial Sequence
  Description of Artificial Sequence: Synthetic oligonucleotide
guuuauaccucugugauga

SEQ ID NO: 2365783 - RNA, 19 nt, Artificial Sequence
  Description of Artificial Sequence: Synthetic oligonucleotide
aucacaaugaucauggcgu

SEQ ID NO: 2365784 - RNA, 19 nt, Artificial Sequence
  Description of Artificial Sequence: Synthetic oligonucleotide
auauaaugaggucuaccag

SEQ ID NO: 2365785 - RNA, 19 nt, Artificial Sequence
  Description of Artificial Sequence: Synthetic oligonucleotide
cuagaaacagaagagugag

SEQ ID NO: 2365786 - RNA, 19 nt, Artificial Sequence
  Description of Artificial Sequence: Synthetic oligonucleotide
aauagacuaacaacacuag

SEQ ID NO: 2365787 - RNA, 19 nt, Artificial Sequence
  Description of Artificial Sequence: Synthetic oligonucleotide
agacuaacaacacuaggca

SEQ ID NO: 2365788 - RNA, 19 nt, Artificial Sequence
  Description of Artificial Sequence: Synthetic oligonucleotide
uaguuuauaccucugugau

SEQ ID NO: 2365789 - RNA, 19 nt, Artificial Sequence
  Description of Artificial Sequence: Synthetic oligonucleotide
ugauauacucagcaaaaua

SEQ ID NO: 2365790 - RNA, 19 nt, Artificial Sequence
  Description of Artificial Sequence: Synthetic oligonucleotide
caagaugugacacucagga

SEQ ID NO: 2365791 - RNA, 19 nt, Artificial Sequence
  Description of Artificial Sequence: Synthetic oligonucleotide
uguacccacauaaucacaa

SEQ ID NO: 2365792 - RNA, 19 nt, Artificial Sequence
  Description of Artificial Sequence: Synthetic oligonucleotide
aguggcauagcccaacuca

SEQ ID NO: 2365793 - RNA, 19 nt, Artificial Sequence
  Description of Artificial Sequence: Synthetic oligonucleotide
ugagaaguaggcacagcag

SEQ ID NO: 2365794 - RNA, 19 nt, Artificial Sequence
  Description of Artificial Sequence: Synthetic oligonucleotide
ucuguacuugucacagucg

SEQ ID NO: 2365795 - RNA, 19 nt, Artificial Sequence
  Description of Artificial Sequence: Synthetic oligonucleotide
aacucuaguuauauaauga

SEQ ID NO: 2365796 - RNA, 19 nt, Artificial Sequence
  Description of Artificial Sequence: Synthetic oligonucleotide
aaugaucauggcguugaac

SEQ ID NO: 2365797 - RNA, 19 nt, Artificial Sequence
  Description of Artificial Sequence: Synthetic oligonucleotide
ucagcaaaauagacuaaca

SEQ ID NO: 2365798 - RNA, 19 nt, Artificial Sequence
  Description of Artificial Sequence: Synthetic oligonucleotide
ucuuuagaggcuuggcugc

SEQ ID NO: 2365799 - RNA, 19 nt, Artificial Sequence
  Description of Artificial Sequence: Synthetic oligonucleotide
aaaacgaucuccaauucau

SEQ ID NO: 2365800 - RNA, 19 nt, Artificial Sequence
  Description of Artificial Sequence: Synthetic oligonucleotide
ucuccaauucauugcagcc

SEQ ID NO: 2365801 - RNA, 19 nt, Artificial Sequence
  Description of Artificial Sequence: Synthetic oligonucleotide
uuauauaaugaggucuacc

SEQ ID NO: 2365802 - RNA, 19 nt, Artificial Sequence
  Description of Artificial Sequence: Synthetic oligonucleotide
auuuucaguggcauagccc

SEQ ID NO: 2365803 - RNA, 19 nt, Artificial Sequence
  Description of Artificial Sequence: Synthetic oligonucleotide
acuggucuguacuugucac

SEQ ID NO: 2365804 - RNA, 19 nt, Artificial Sequence
  Description of Artificial Sequence: Synthetic oligonucleotide
gaagcaugugagaaguagg

SEQ ID NO: 2365805 - RNA, 19 nt, Artificial Sequence
  Description of Artificial Sequence: Synthetic oligonucleotide
gaagacgacaaguccuagg

SEQ ID NO: 2365806 - RNA, 19 nt, Artificial Sequence
  Description of Artificial Sequence: Synthetic oligonucleotide
cauuugacauacuauuuuc

SEQ ID NO: 2365807 - RNA, 19 nt, Artificial Sequence
  Description of Artificial Sequence: Synthetic oligonucleotide
ucgaaaacgaucuccaauu

SEQ ID NO: 2365808 - RNA, 19 nt, Artificial Sequence
  Description of Artificial Sequence: Synthetic oligonucleotide
caacucaauucuuuagagg

SEQ ID NO: 2365809 - RNA, 19 nt, Artificial Sequence
  Description of Artificial Sequence: Synthetic oligonucleotide
gagagcgaccacuacaggc

SEQ ID NO: 2365810 - RNA, 19 nt, Artificial Sequence
  Description of Artificial Sequence: Synthetic oligonucleotide
  modified_base (3)..(3): a, c, u, g, unknown or other
acngcugacaucaauauaa

SEQ ID NO: 2365811 - RNA, 19 nt, Artificial Sequence
  Description of Artificial Sequence: Synthetic oligonucleotide
aacggggacggcaucacgc

SEQ ID NO: 2365812 - RNA, 19 nt, Artificial Sequence
  Description of Artificial Sequence: Synthetic oligonucleotide
uacccacauaaucacaaug

SEQ ID NO: 2365813 - RNA, 19 nt, Artificial Sequence
  Description of Artificial Sequence: Synthetic oligonucleotide
acgguugaaaagcuguguc

SEQ ID NO: 2365814 - RNA, 19 nt, Artificial Sequence
  Description of Artificial Sequence: Synthetic oligonucleotide
gaggucuaccagcaaacgg

SEQ ID NO: 2365815 - RNA, 19 nt, Artificial Sequence
  Description of Artificial Sequence: Synthetic oligonucleotide
uuauaauuuuguacccaga

SEQ ID NO: 2365816 - RNA, 19 nt, Artificial Sequence
  Description of Artificial Sequence: Synthetic oligonucleotide
guaguggugccacagcagg

SEQ ID NO: 2365817 - RNA, 19 nt, Artificial Sequence
  Description of Artificial Sequence: Synthetic oligonucleotide
ucuguacccacauaaucac

SEQ ID NO: 2365818 - RNA, 19 nt, Artificial Sequence
  Description of Artificial Sequence: Synthetic oligonucleotide
aauggugccgagaacacga

SEQ ID NO: 2365819 - RNA, 19 nt, Artificial Sequence
  Description of Artificial Sequence: Synthetic oligonucleotide
uucgaaaacgaucuccaau

SEQ ID NO: 2365820 - RNA, 19 nt, Artificial Sequence
  Description of Artificial Sequence: Synthetic oligonucleotide
acugauauuucgaaaacga

SEQ ID NO: 2365821 - RNA, 19 nt, Artificial Sequence
  Description of Artificial Sequence: Synthetic oligonucleotide
cauucaccgaguaugcaag

SEQ ID NO: 2365822 - RNA, 19 nt, Artificial Sequence
  Description of Artificial Sequence: Synthetic oligonucleotide
aguaugcaaguauuuauaa

SEQ ID NO: 2365823 - RNA, 19 nt, Artificial Sequence
  Description of Artificial Sequence: Synthetic oligonucleotide
uugaacagcaauggugccg

SEQ ID NO: 2365824 - RNA, 19 nt, Artificial Sequence
  Description of Artificial Sequence: Synthetic oligonucleotide
auacacugcauucuuuuca

SEQ ID NO: 2365825 - RNA, 19 nt, Artificial Sequence
  Description of Artificial Sequence: Synthetic oligonucleotide
augaucaccgcggggaugc

SEQ ID NO: 2365826 - RNA, 19 nt, Artificial Sequence
  Description of Artificial Sequence: Synthetic oligonucleotide
agaagcaugugagaaguag

SEQ ID NO: 2365827 - RNA, 19 nt, Artificial Sequence
  Description of Artificial Sequence: Synthetic oligonucleotide
cugagagcgaccacuacag

SEQ ID NO: 2365828 - RNA, 19 nt, Artificial Sequence
  Description of Artificial Sequence: Synthetic oligonucleotide
guaguuuauaccucuguga

SEQ ID NO: 2365829 - RNA, 19 nt, Artificial Sequence
  Description of Artificial Sequence: Synthetic oligonucleotide
agaacaauacucccugaga

SEQ ID NO: 2365830 - RNA, 19 nt, Artificial Sequence
  Description of Artificial Sequence: Synthetic oligonucleotide
cuaguuauauaaugagguc

SEQ ID NO: 2365831 - RNA, 19 nt, Artificial Sequence
  Description of Artificial Sequence: Synthetic oligonucleotide
ucauucaccgaguaugcaa

SEQ ID NO: 2365832 - RNA, 19 nt, Artificial Sequence
  Description of Artificial Sequence: Synthetic oligonucleotide
gugaugagaagcaugugag

SEQ ID NO: 2365833 - RNA, 19 nt, Artificial Sequence
  Description of Artificial Sequence: Synthetic oligonucleotide
aaguugagcgaacucuagu

SEQ ID NO: 2365834 - RNA, 19 nt, Artificial Sequence
  Description of Artificial Sequence: Synthetic oligonucleotide
cagucugucuccaugauca

SEQ ID NO: 2365835 - RNA, 19 nt, Artificial Sequence
  Description of Artificial Sequence: Synthetic oligonucleotide
auaauuuuguacccagaaa

SEQ ID NO: 2365836 - RNA, 19 nt, Artificial Sequence
  Description of Artificial Sequence: Synthetic oligonucleotide
aacuggucuguacuuguca

SEQ ID NO: 2365837 - RNA, 19 nt, Artificial Sequence
  Description of Artificial Sequence: Synthetic oligonucleotide
auaaagaacaauacucccu

SEQ ID NO: 2365838 - RNA, 19 nt, Artificial Sequence
  Description of Artificial Sequence: Synthetic oligonucleotide
ugaucauggcguugaacag

SEQ ID NO: 2365839 - RNA, 19 nt, Artificial Sequence
  Description of Artificial Sequence: Synthetic oligonucleotide
uucauuugacauacuauuu

SEQ ID NO: 2365840 - RNA, 19 nt, Artificial Sequence
  Description of Artificial Sequence: Synthetic oligonucleotide
gaaaacgaucuccaauuca

SEQ ID NO: 2365841 - RNA, 19 nt, Artificial Sequence
  Description of Artificial Sequence: Synthetic oligonucleotide
cagaagagugagcagguag

SEQ ID NO: 2365842 - RNA, 19 nt, Artificial Sequence
  Description of Artificial Sequence: Synthetic oligonucleotide
cauuuucaguggcauagcc

SEQ ID NO: 2365843 - RNA, 19 nt, Artificial Sequence
  Description of Artificial Sequence: Synthetic oligonucleotide
gaugagaagcaugugagaa

SEQ ID NO: 2365844 - RNA, 19 nt, Artificial Sequence
  Description of Artificial Sequence: Synthetic oligonucleotide
acgacaaguccuaggagcc

SEQ ID NO: 2365845 - RNA, 19 nt, Artificial Sequence
  Description of Artificial Sequence: Synthetic oligonucleotide
aaagaacaauacucccuga

SEQ ID NO: 2365846 - RNA, 19 nt, Artificial Sequence
  Description of Artificial Sequence: Synthetic oligonucleotide
uuuuccauggagccuugac

SEQ ID NO: 2365847 - RNA, 19 nt, Artificial Sequence
  Description of Artificial Sequence: Synthetic oligonucleotide
uggucuguacuugucacag

SEQ ID NO: 2365848 - RNA, 19 nt, Artificial Sequence
  Description of Artificial Sequence: Synthetic oligonucleotide
ugaaaagcugugucuucag

SEQ ID NO: 2365849 - RNA, 19 nt, Artificial Sequence
  Description of Artificial Sequence: Synthetic oligonucleotide
cacgauagaaaugaacaug

SEQ ID NO: 2365850 - RNA, 19 nt, Artificial Sequence
  Description of Artificial Sequence: Synthetic oligonucleotide
ucagaccugccccacaggu

SEQ ID NO: 2365851 - RNA, 19 nt, Artificial Sequence
  Description of Artificial Sequence: Synthetic oligonucleotide
ugaacagcaauggugccga

SEQ ID NO: 2365852 - RNA, 19 nt, Artificial Sequence
  Description of Artificial Sequence: Synthetic oligonucleotide
agcaauggugccgagaaca

SEQ ID NO: 2365853 - RNA, 19 nt, Artificial Sequence
  Description of Artificial Sequence: Synthetic oligonucleotide
ugucuccaugaucaccgcg

SEQ ID NO: 2365854 - RNA, 19 nt, Artificial Sequence
  Description of Artificial Sequence: Synthetic oligonucleotide
ucauugauauacucagcaa

SEQ ID NO: 2365855 - RNA, 19 nt, Artificial Sequence
  Description of Artificial Sequence: Synthetic oligonucleotide
uccgaucuguaguuuauac

SEQ ID NO: 2365856 - RNA, 19 nt, Artificial Sequence
  Description of Artificial Sequence: Synthetic oligonucleotide
ccucgugcaaaguugagcg

SEQ ID NO: 2365857 - RNA, 19 nt, Artificial Sequence
  Description of Artificial Sequence: Synthetic oligonucleotide
aguuuauaccucugugaug

SEQ ID NO: 2365858 - RNA, 19 nt, Artificial Sequence
  Description of Artificial Sequence: Synthetic oligonucleotide
gaaccgauacacugcauuc

SEQ ID NO: 2365859 - RNA, 19 nt, Artificial Sequence
  Description of Artificial Sequence: Synthetic oligonucleotide
gugagaaguaggcacagca

SEQ ID NO: 2365860 - RNA, 19 nt, Artificial Sequence
  Description of Artificial Sequence: Synthetic oligonucleotide
auauuucgaaaacgaucuc

SEQ ID NO: 2365861 - RNA, 19 nt, Artificial Sequence
  Description of Artificial Sequence: Synthetic oligonucleotide
aguugagcgaacucuaguu

SEQ ID NO: 2365862 - RNA, 19 nt, Artificial Sequence
  Description of Artificial Sequence: Synthetic oligonucleotide
uggcguugaacagcaaugg

SEQ ID NO: 2365863 - RNA, 19 nt, Artificial Sequence
  Description of Artificial Sequence: Synthetic oligonucleotide
cuucuguacccacauaauc

SEQ ID NO: 2365864 - RNA, 19 nt, Artificial Sequence
  Description of Artificial Sequence: Synthetic oligonucleotide
uugagcgaacucuaguuau

SEQ ID NO: 2365865 - RNA, 19 nt, Artificial Sequence
  Description of Artificial Sequence: Synthetic oligonucleotide
auugauauacucagcaaaa

SEQ ID NO: 2365866 - RNA, 19 nt, Artificial Sequence
  Description of Artificial Sequence: Synthetic oligonucleotide
auuucgaaaacgaucucca

SEQ ID NO: 2365867 - RNA, 19 nt, Artificial Sequence
  Description of Artificial Sequence: Synthetic oligonucleotide
uccauucuagcuuaauauu

SEQ ID NO: 2365868 - RNA, 19 nt, Artificial Sequence
  Description of Artificial Sequence: Synthetic oligonucleotide
cuucauugauauacucagc

SEQ ID NO: 2365869 - RNA, 19 nt, Artificial Sequence
  Description of Artificial Sequence: Synthetic oligonucleotide
gaacacgauagaaaugaac

SEQ ID NO: 2365870 - RNA, 19 nt, Artificial Sequence
  Description of Artificial Sequence: Synthetic oligonucleotide
uaccucugugaugagaagc

SEQ ID NO: 2365871 - RNA, 19 nt, Artificial Sequence
  Description of Artificial Sequence: Synthetic oligonucleotide
augggaaccgauacacugc

SEQ ID NO: 2365872 - RNA, 19 nt, Artificial Sequence
  Description of Artificial Sequence: Synthetic oligonucleotide
ugggaaccgauacacugca

SEQ ID NO: 2365873 - RNA, 19 nt, Artificial Sequence
  Description of Artificial Sequence: Synthetic oligonucleotide
uagaggcuuggcugcaugg

SEQ ID NO: 2365874 - RNA, 19 nt, Artificial Sequence
  Description of Artificial Sequence: Synthetic oligonucleotide
gacagcuaagucauucacc

SEQ ID NO: 2365875 - RNA, 19 nt, Artificial Sequence
  Description of Artificial Sequence: Synthetic oligonucleotide
auauacucagcaaaauaga

SEQ ID NO: 2365876 - RNA, 19 nt, Artificial Sequence
  Description of Artificial Sequence: Synthetic oligonucleotide
acauucaaagucuucugua

SEQ ID NO: 2365877 - RNA, 19 nt, Artificial Sequence
  Description of Artificial Sequence: Synthetic oligonucleotide
gucuguacuugucacaguc

SEQ ID NO: 2365878 - RNA, 19 nt, Artificial Sequence
  Description of Artificial Sequence: Synthetic oligonucleotide
gcaaguauuuauaauuuug

SEQ ID NO: 2365879 - RNA, 19 nt, Artificial Sequence
  Description of Artificial Sequence: Synthetic oligonucleotide
cuaacaacacuaggcacag

SEQ ID NO: 2365880 - RNA, 19 nt, Artificial Sequence
  Description of Artificial Sequence: Synthetic oligonucleotide
ugaugagaagcaugugaga

SEQ ID NO: 2365881 - RNA, 19 nt, Artificial Sequence
  Description of Artificial Sequence: Synthetic oligonucleotide
gucuccaugaucaccgcgg

SEQ ID NO: 2365882 - RNA, 19 nt, Artificial Sequence
  Description of Artificial Sequence: Synthetic oligonucleotide
ucaccgaguaugcaaguau

SEQ ID NO: 2365883 - RNA, 19 nt, Artificial Sequence
  Description of Artificial Sequence: Synthetic oligonucleotide
ucgguguagggacagcuaa

SEQ ID NO: 2365884 - RNA, 19 nt, Artificial Sequence
  Description of Artificial Sequence: Synthetic oligonucleotide
  modified_base (9)..(9): a, c, u, g, unknown or other
cuggguacngcugacauca

SEQ ID NO: 2365885 - RNA, 19 nt, Artificial Sequence
  Description of Artificial Sequence: Synthetic oligonucleotide
ugaggucuaccagcaaacg

SEQ ID NO: 2365886 - RNA, 19 nt, Artificial Sequence
  Description of Artificial Sequence: Synthetic oligonucleotide
gacggggaaggcuuugacc

SEQ ID NO: 2365887 - RNA, 19 nt, Artificial Sequence
  Description of Artificial Sequence: Synthetic oligonucleotide
accagcaaacgguugaaaa

SEQ ID NO: 2365888 - RNA, 19 nt, Artificial Sequence
  Description of Artificial Sequence: Synthetic oligonucleotide
auaaugaggucuaccagca

SEQ ID NO: 2365889 - RNA, 19 nt, Artificial Sequence
  Description of Artificial Sequence: Synthetic oligonucleotide
acacgauagaaaugaacau

SEQ ID NO: 2365890 - RNA, 19 nt, Artificial Sequence
  Description of Artificial Sequence: Synthetic oligonucleotide
caggucagacaucacauuc

SEQ ID NO: 2365891 - RNA, 19 nt, Artificial Sequence
  Description of Artificial Sequence: Synthetic oligonucleotide
uuagaggcuuggcugcaug

SEQ ID NO: 2365892 - RNA, 19 nt, Artificial Sequence
  Description of Artificial Sequence: Synthetic oligonucleotide
agggacagcuaagucauuc

SEQ ID NO: 2365893 - RNA, 19 nt, Artificial Sequence
  Description of Artificial Sequence: Synthetic oligonucleotide
agaaaugaacaugccccgg

SEQ ID NO: 2365894 - RNA, 19 nt, Artificial Sequence
  Description of Artificial Sequence: Synthetic oligonucleotide
aacgguugaaaagcugugu

SEQ ID NO: 2365895 - RNA, 19 nt, Artificial Sequence
  Description of Artificial Sequence: Synthetic oligonucleotide
uaagucauucaccgaguau

SEQ ID NO: 2365896 - RNA, 19 nt, Artificial Sequence
  Description of Artificial Sequence: Synthetic oligonucleotide
ugcaaguauuuauaauuuu

SEQ ID NO: 2365897 - RNA, 19 nt, Artificial Sequence
  Description of Artificial Sequence: Synthetic oligonucleotide
uugacuucacagcauccau

SEQ ID NO: 2365898 - RNA, 19 nt, Artificial Sequence
  Description of Artificial Sequence: Synthetic oligonucleotide
gaugugacacucaggagga

SEQ ID NO: 2365899 - RNA, 19 nt, Artificial Sequence
  Description of Artificial Sequence: Synthetic oligonucleotide
ucuucuguacccacauaau

SEQ ID NO: 2365900 - RNA, 19 nt, Artificial Sequence
  Description of Artificial Sequence: Synthetic oligonucleotide
cguugaacagcaauggugc

SEQ ID NO: 2365901 - RNA, 19 nt, Artificial Sequence
  Description of Artificial Sequence: Synthetic oligonucleotide
ugcaaaguugagcgaacuc

SEQ ID NO: 2365902 - RNA, 19 nt, Artificial Sequence
  Description of Artificial Sequence: Synthetic oligonucleotide
aaacauuuucaguggcaua

SEQ ID NO: 2365903 - RNA, 19 nt, Artificial Sequence
  Description of Artificial Sequence: Synthetic oligonucleotide
guucauuugacauacuauu

SEQ ID NO: 2365904 - RNA, 19 nt, Artificial Sequence
  Description of Artificial Sequence: Synthetic oligonucleotide
ggugccgagaacacgauag

SEQ ID NO: 2365905 - RNA, 19 nt, Artificial Sequence
  Description of Artificial Sequence: Synthetic oligonucleotide
acggggacggcaucacgcc

SEQ ID NO: 2365906 - RNA, 19 nt, Artificial Sequence
  Description of Artificial Sequence: Synthetic oligonucleotide
ugagagcgaccacuacagg

SEQ ID NO: 2365907 - RNA, 19 nt, Artificial Sequence
  Description of Artificial Sequence: Synthetic oligonucleotide
aggucuaccagcaaacggu

SEQ ID NO: 2365908 - RNA, 19 nt, Artificial Sequence
  Description of Artificial Sequence: Synthetic oligonucleotide
aaguguccgaucuguaguu

SEQ ID NO: 2365909 - RNA, 19 nt, Artificial Sequence
  Description of Artificial Sequence: Synthetic oligonucleotide
aaacgguugaaaagcugug

SEQ ID NO: 2365910 - RNA, 19 nt, Artificial Sequence
  Description of Artificial Sequence: Synthetic oligonucleotide
aguuauauaaugaggucua

SEQ ID NO: 2365911 - RNA, 19 nt, Artificial Sequence
  Description of Artificial Sequence: Synthetic oligonucleotide
gguggaagacgacaagucc

SEQ ID NO: 2365912 - RNA, 19 nt, Artificial Sequence
  Description of Artificial Sequence: Synthetic oligonucleotide
acccacauaaucacaauga

SEQ ID NO: 2365913 - RNA, 19 nt, Artificial Sequence
  Description of Artificial Sequence: Synthetic oligonucleotide
caauucuuuagaggcuugg

SEQ ID NO: 2365914 - RNA, 19 nt, Artificial Sequence
  Description of Artificial Sequence: Synthetic oligonucleotide
uuauaccucugugaugaga

SEQ ID NO: 2365915 - RNA, 19 nt, Artificial Sequence
  Description of Artificial Sequence: Synthetic oligonucleotide
ugugacacucaggaggaac

SEQ ID NO: 2365916 - RNA, 19 nt, Artificial Sequence
  Description of Artificial Sequence: Synthetic oligonucleotide
agguaguggugccacagca

SEQ ID NO: 2365917 - RNA, 19 nt, Artificial Sequence
  Description of Artificial Sequence: Synthetic oligonucleotide
uguacuugucacagucggu

SEQ ID NO: 2365918 - RNA, 19 nt, Artificial Sequence
  Description of Artificial Sequence: Synthetic oligonucleotide
cuacaggcuagaaacagaa

SEQ ID NO: 2365919 - RNA, 19 nt, Artificial Sequence
  Description of Artificial Sequence: Synthetic oligonucleotide
ugccccgggaaucaaaaua

SEQ ID NO: 2365920 - RNA, 19 nt, Artificial Sequence
  Description of Artificial Sequence: Synthetic oligonucleotide
aaccgauacacugcauucu

SEQ ID NO: 2365921 - RNA, 19 nt, Artificial Sequence
  Description of Artificial Sequence: Synthetic oligonucleotide
ggaaguguccgaucuguag

SEQ ID NO: 2365922 - RNA, 19 nt, Artificial Sequence
  Description of Artificial Sequence: Synthetic oligonucleotide
gaaguaggcacagcaggug

SEQ ID NO: 2365923 - RNA, 19 nt, Artificial Sequence
  Description of Artificial Sequence: Synthetic oligonucleotide
gaaguguccgaucuguagu

SEQ ID NO: 2365924 - RNA, 19 nt, Artificial Sequence
  Description of Artificial Sequence: Synthetic oligonucleotide
uuuauuucucaguguccuc

SEQ ID NO: 2365925 - RNA, 19 nt, Artificial Sequence
  Description of Artificial Sequence: Synthetic oligonucleotide
uaaucacaaugaucauggc

SEQ ID NO: 2365926 - RNA, 19 nt, Artificial Sequence
  Description of Artificial Sequence: Synthetic oligonucleotide
gcgaacucuaguuauauaa

SEQ ID NO: 2365927 - RNA, 19 nt, Artificial Sequence
  Description of Artificial Sequence: Synthetic oligonucleotide
agaagagugagcagguagu

SEQ ID NO: 2365928 - RNA, 19 nt, Artificial Sequence
  Description of Artificial Sequence: Synthetic oligonucleotide
  modified_base (4)..(4): a, c, u, g, unknown or other
uacngcugacaucaauaua

SEQ ID NO: 2365929 - RNA, 19 nt, Artificial Sequence
  Description of Artificial Sequence: Synthetic oligonucleotide
agacgacaaguccuaggag

SEQ ID NO: 2365930 - RNA, 19 nt, Artificial Sequence
  Description of Artificial Sequence: Synthetic oligonucleotide
agguggaagacgacaaguc

SEQ ID NO: 2365931 - RNA, 19 nt, Artificial Sequence
  Description of Artificial Sequence: Synthetic oligonucleotide
uugauauacucagcaaaau

SEQ ID NO: 2365932 - RNA, 19 nt, Artificial Sequence
  Description of Artificial Sequence: Synthetic oligonucleotide
aggagccauggcucugucc

SEQ ID NO: 2365933 - RNA, 19 nt, Artificial Sequence
  Description of Artificial Sequence: Synthetic oligonucleotide
uuuucagaccugccccaca

SEQ ID NO: 2365934 - RNA, 19 nt, Artificial Sequence
  Description of Artificial Sequence: Synthetic oligonucleotide
gacggcaucacgccgggga

SEQ ID NO: 2365935 - RNA, 19 nt, Artificial Sequence
  Description of Artificial Sequence: Synthetic oligonucleotide
auggcguugaacagcaaug

SEQ ID NO: 2365936 - RNA, 19 nt, Artificial Sequence
  Description of Artificial Sequence: Synthetic oligonucleotide
uuuauaccucugugaugag

SEQ ID NO: 2365937 - RNA, 19 nt, Artificial Sequence
  Description of Artificial Sequence: Synthetic oligonucleotide
ggcuagaaacagaagagug

SEQ ID NO: 2365938 - RNA, 19 nt, Artificial Sequence
  Description of Artificial Sequence: Synthetic oligonucleotide
ucgugcaaaguugagcgaa

SEQ ID NO: 2365939 - RNA, 19 nt, Artificial Sequence
  Description of Artificial Sequence: Synthetic oligonucleotide
aguguccucgugcaaaguu

SEQ ID NO: 2365940 - RNA, 19 nt, Artificial Sequence
  Description of Artificial Sequence: Synthetic oligonucleotide
uuugaccgagaacggggac

SEQ ID NO: 2365941 - RNA, 19 nt, Artificial Sequence
  Description of Artificial Sequence: Synthetic oligonucleotide
uacuugucacagucggugu

SEQ ID NO: 2365942 - RNA, 19 nt, Artificial Sequence
  Description of Artificial Sequence: Synthetic oligonucleotide
cuuggcugcaugggaaccg

SEQ ID NO: 2365943 - RNA, 19 nt, Artificial Sequence
  Description of Artificial Sequence: Synthetic oligonucleotide
uguccgaucuguaguuuau

SEQ ID NO: 2365944 - RNA, 19 nt, Artificial Sequence
  Description of Artificial Sequence: Synthetic oligonucleotide
guuuauuucucaguguccu

SEQ ID NO: 2365945 - RNA, 19 nt, Artificial Sequence
  Description of Artificial Sequence: Synthetic oligonucleotide
ugacuucacagcauccauu

SEQ ID NO: 2365946 - RNA, 19 nt, Artificial Sequence
  Description of Artificial Sequence: Synthetic oligonucleotide
gcuuugaccgagaacgggg

SEQ ID NO: 2365947 - RNA, 19 nt, Artificial Sequence
  Description of Artificial Sequence: Synthetic oligonucleotide
agcaggguggcacuguuua

SEQ ID NO: 2365948 - RNA, 19 nt, Artificial Sequence
  Description of Artificial Sequence: Synthetic oligonucleotide
agaggcuuggcugcauggg

SEQ ID NO: 2365949 - RNA, 19 nt, Artificial Sequence
  Description of Artificial Sequence: Synthetic oligonucleotide
gaguaugcaaguauuuaua

SEQ ID NO: 2365950 - RNA, 19 nt, Artificial Sequence
  Description of Artificial Sequence: Synthetic oligonucleotide
ugagcgaacucuaguuaua

SEQ ID NO: 2365951 - RNA, 19 nt, Artificial Sequence
  Description of Artificial Sequence: Synthetic oligonucleotide
uauuuuccauggagccuug

SEQ ID NO: 2365952 - RNA, 19 nt, Artificial Sequence
  Description of Artificial Sequence: Synthetic oligonucleotide
caaacgguucauuugacau

SEQ ID NO: 2365953 - RNA, 19 nt, Artificial Sequence
  Description of Artificial Sequence: Synthetic oligonucleotide
acauacuauuuuccaugga

SEQ ID NO: 2365954 - RNA, 19 nt, Artificial Sequence
  Description of Artificial Sequence: Synthetic oligonucleotide
aggcuagaaacagaagagu

SEQ ID NO: 2365955 - RNA, 19 nt, Artificial Sequence
  Description of Artificial Sequence: Synthetic oligonucleotide
gcugcaugggaaccgauac

SEQ ID NO: 2365956 - RNA, 19 nt, Artificial Sequence
  Description of Artificial Sequence: Synthetic oligonucleotide
uugucacagucgguguagg

SEQ ID NO: 2365957 - RNA, 19 nt, Artificial Sequence
  Description of Artificial Sequence: Synthetic oligonucleotide
guuauauaaugaggucuac

SEQ ID NO: 2365958 - RNA, 19 nt, Artificial Sequence
  Description of Artificial Sequence: Synthetic oligonucleotide
gaucuguaguuuauaccuc

SEQ ID NO: 2365959 - RNA, 19 nt, Artificial Sequence
  Description of Artificial Sequence: Synthetic oligonucleotide
gaacggggacggcaucacg

SEQ ID NO: 2365960 - RNA, 19 nt, Artificial Sequence
  Description of Artificial Sequence: Synthetic oligonucleotide
uagcccaacucaauucuuu

SEQ ID NO: 2365961 - RNA, 19 nt, Artificial Sequence
  Description of Artificial Sequence: Synthetic oligonucleotide
caaaguugagcgaacucua

SEQ ID NO: 2365962 - RNA, 19 nt, Artificial Sequence
  Description of Artificial Sequence: Synthetic oligonucleotide
uggcacuguuuauuucuca

SEQ ID NO: 2365963 - RNA, 19 nt, Artificial Sequence
  Description of Artificial Sequence: Synthetic oligonucleotide
cuugacuucacagcaucca

SEQ ID NO: 2365964 - RNA, 19 nt, Artificial Sequence
  Description of Artificial Sequence: Synthetic oligonucleotide
augugagaaguaggcacag

SEQ ID NO: 2365965 - RNA, 19 nt, Artificial Sequence
  Description of Artificial Sequence: Synthetic oligonucleotide
caauggugccgagaacacg

SEQ ID NO: 2365966 - RNA, 19 nt, Artificial Sequence
  Description of Artificial Sequence: Synthetic oligonucleotide
guugagcgaacucuaguua

SEQ ID NO: 2365967 - RNA, 19 nt, Artificial Sequence
  Description of Artificial Sequence: Synthetic oligonucleotide
accgauacacugcauucuu

SEQ ID NO: 2365968 - RNA, 19 nt, Artificial Sequence
  Description of Artificial Sequence: Synthetic oligonucleotide
cuuugaccgagaacgggga

SEQ ID NO: 2365969 - RNA, 19 nt, Artificial Sequence
  Description of Artificial Sequence: Synthetic oligonucleotide
agaacggggacggcaucac

SEQ ID NO: 2365970 - RNA, 19 nt, Artificial Sequence
  Description of Artificial Sequence: Synthetic oligonucleotide
ccgaucuguaguuuauacc

SEQ ID NO: 2365971 - RNA, 19 nt, Artificial Sequence
  Description of Artificial Sequence: Synthetic oligonucleotide
agcaugugagaaguaggca

SEQ ID NO: 2365972 - RNA, 19 nt, Artificial Sequence
  Description of Artificial Sequence: Synthetic oligonucleotide
gaccacuacaggcuagaaa

SEQ ID NO: 2365973 - RNA, 19 nt, Artificial Sequence
  Description of Artificial Sequence: Synthetic oligonucleotide
guguccucgugcaaaguug

SEQ ID NO: 2365974 - RNA, 19 nt, Artificial Sequence
  Description of Artificial Sequence: Synthetic oligonucleotide
aggaacuggucuguacuug

SEQ ID NO: 2365975 - RNA, 19 nt, Artificial Sequence
  Description of Artificial Sequence: Synthetic oligonucleotide
gaggcuuggcugcauggga

SEQ ID NO: 2365976 - RNA, 19 nt, Artificial Sequence
  Description of Artificial Sequence: Synthetic oligonucleotide
agucgguguagggacagcu

SEQ ID NO: 2365977 - RNA, 19 nt, Artificial Sequence
  Description of Artificial Sequence: Synthetic oligonucleotide
ggacagcuaagucauucac

SEQ ID NO: 2365978 - RNA, 19 nt, Artificial Sequence
  Description of Artificial Sequence: Synthetic oligonucleotide
cauagcccaacucaauucu

SEQ ID NO: 2365979 - RNA, 19 nt, Artificial Sequence
  Description of Artificial Sequence: Synthetic oligonucleotide
ugccgagaacacgauagaa

SEQ ID NO: 2365980 - RNA, 19 nt, Artificial Sequence
  Description of Artificial Sequence: Synthetic oligonucleotide
acagucgguguagggacag

SEQ ID NO: 2365981 - RNA, 19 nt, Artificial Sequence
  Description of Artificial Sequence: Synthetic oligonucleotide
aggguggcacuguuuauuu

SEQ ID NO: 2365982 - RNA, 19 nt, Artificial Sequence
  Description of Artificial Sequence: Synthetic oligonucleotide
ccgggaaucaaaauacuga

SEQ ID NO: 2365983 - RNA, 19 nt, Artificial Sequence
  Description of Artificial Sequence: Synthetic oligonucleotide
gcauagcccaacucaauuc

SEQ ID NO: 2365984 - RNA, 19 nt, Artificial Sequence
  Description of Artificial Sequence: Synthetic oligonucleotide
aaacgaucuccaauucauu

SEQ ID NO: 2365985 - RNA, 19 nt, Artificial Sequence
  Description of Artificial Sequence: Synthetic oligonucleotide
  modified_base (5)..(5): a, c, u, g, unknown or other
guacngcugacaucaauau

SEQ ID NO: 2365986 - RNA, 19 nt, Artificial Sequence
  Description of Artificial Sequence: Synthetic oligonucleotide
agcccaacucaauucuuua

SEQ ID NO: 2365987 - RNA, 19 nt, Artificial Sequence
  Description of Artificial Sequence: Synthetic oligonucleotide
uccagucugucuccaugau

SEQ ID NO: 2365988 - RNA, 19 nt, Artificial Sequence
  Description of Artificial Sequence: Synthetic oligonucleotide
cagguaguggugccacagc

SEQ ID NO: 2365989 - RNA, 19 nt, Artificial Sequence
  Description of Artificial Sequence: Synthetic oligonucleotide
acucccugagagcgaccac

SEQ ID NO: 2365990 - RNA, 19 nt, Artificial Sequence
  Description of Artificial Sequence: Synthetic oligonucleotide
gagugagcagguaguggug

SEQ ID NO: 2365991 - RNA, 19 nt, Artificial Sequence
  Description of Artificial Sequence: Synthetic oligonucleotide
  modified_base (6)..(6): a, c, u, g, unknown or other
gguacngcugacaucaaua

SEQ ID NO: 2365992 - RNA, 19 nt, Artificial Sequence
  Description of Artificial Sequence: Synthetic oligonucleotide
cauggagccuugacuucac

SEQ ID NO: 2365993 - RNA, 19 nt, Artificial Sequence
  Description of Artificial Sequence: Synthetic oligonucleotide
guggaagacgacaaguccu

SEQ ID NO: 2365994 - RNA, 19 nt, Artificial Sequence
  Description of Artificial Sequence: Synthetic oligonucleotide
cuaagucauucaccgagua

SEQ ID NO: 2365995 - RNA, 19 nt, Artificial Sequence
  Description of Artificial Sequence: Synthetic oligonucleotide
ucccugagagcgaccacua

SEQ ID NO: 2365996 - RNA, 19 nt, Artificial Sequence
  Description of Artificial Sequence: Synthetic oligonucleotide
ggcuuugaccgagaacggg

SEQ ID NO: 2365997 - RNA, 19 nt, Artificial Sequence
  Description of Artificial Sequence: Synthetic oligonucleotide
aucaccgcggggaugcuga

SEQ ID NO: 2365998 - RNA, 19 nt, Artificial Sequence
  Description of Artificial Sequence: Synthetic oligonucleotide
cugauauuucgaaaacgau

SEQ ID NO: 2365999 - RNA, 19 nt, Artificial Sequence
  Description of Artificial Sequence: Synthetic oligonucleotide
gcaaaguugagcgaacucu

SEQ ID NO: 2366000 - RNA, 19 nt, Artificial Sequence
  Description of Artificial Sequence: Synthetic oligonucleotide
caugccccgggaaucaaaa

SEQ ID NO: 2366001 - RNA, 19 nt, Artificial Sequence
  Description of Artificial Sequence: Synthetic oligonucleotide
cgaucuguaguuuauaccu

SEQ ID NO: 2366002 - RNA, 19 nt, Artificial Sequence
  Description of Artificial Sequence: Synthetic oligonucleotide
ggucagacaucacauucaa

SEQ ID NO: 2366003 - RNA, 19 nt, Artificial Sequence
  Description of Artificial Sequence: Synthetic oligonucleotide
acaaaaccaaacgguucau

SEQ ID NO: 2366004 - RNA, 19 nt, Artificial Sequence
  Description of Artificial Sequence: Synthetic oligonucleotide
agcgaacucuaguuauaua

SEQ ID NO: 2366005 - RNA, 19 nt, Artificial Sequence
  Description of Artificial Sequence: Synthetic oligonucleotide
aggcuuugaccgagaacgg

SEQ ID NO: 2366006 - RNA, 19 nt, Artificial Sequence
  Description of Artificial Sequence: Synthetic oligonucleotide
guccuaggagccauggcuc

SEQ ID NO: 2366007 - RNA, 19 nt, Artificial Sequence
  Description of Artificial Sequence: Synthetic oligonucleotide
ccuugacuucacagcaucc

SEQ ID NO: 2366008 - RNA, 19 nt, Artificial Sequence
  Description of Artificial Sequence: Synthetic oligonucleotide
gaacuggucuguacuuguc

SEQ ID NO: 2366009 - RNA, 19 nt, Artificial Sequence
  Description of Artificial Sequence: Synthetic oligonucleotide
cagaccugccccacagguc

SEQ ID NO: 2366010 - RNA, 19 nt, Artificial Sequence
  Description of Artificial Sequence: Synthetic oligonucleotide
cccaacucaauucuuuaga

SEQ ID NO: 2366011 - RNA, 19 nt, Artificial Sequence
  Description of Artificial Sequence: Synthetic oligonucleotide
uuuagaggcuuggcugcau

SEQ ID NO: 2366012 - RNA, 19 nt, Artificial Sequence
  Description of Artificial Sequence: Synthetic oligonucleotide
  modified_base (2)..(2): a, c, u, g, unknown or other
cngcugacaucaauauaaa

SEQ ID NO: 2366013 - RNA, 19 nt, Artificial Sequence
  Description of Artificial Sequence: Synthetic oligonucleotide
uggugccgagaacacgaua

SEQ ID NO: 2366014 - RNA, 19 nt, Artificial Sequence
  Description of Artificial Sequence: Synthetic oligonucleotide
gccccgggaaucaaaauac

SEQ ID NO: 2366015 - RNA, 19 nt, Artificial Sequence
  Description of Artificial Sequence: Synthetic oligonucleotide
gggacagcuaagucauuca

SEQ ID NO: 2366016 - RNA, 19 nt, Artificial Sequence
  Description of Artificial Sequence: Synthetic oligonucleotide
gcaaacgguugaaaagcug

SEQ ID NO: 2366017 - RNA, 19 nt, Artificial Sequence
  Description of Artificial Sequence: Synthetic oligonucleotide
caucaauauaaagaacaau

SEQ ID NO: 2366018 - RNA, 19 nt, Artificial Sequence
  Description of Artificial Sequence: Synthetic oligonucleotide
gccuugacuucacagcauc

SEQ ID NO: 2366019 - RNA, 19 nt, Artificial Sequence
  Description of Artificial Sequence: Synthetic oligonucleotide
agaacacgauagaaaugaa

SEQ ID NO: 2366020 - RNA, 19 nt, Artificial Sequence
  Description of Artificial Sequence: Synthetic oligonucleotide
uaccagcaaacgguugaaa

SEQ ID NO: 2366021 - RNA, 19 nt, Artificial Sequence
  Description of Artificial Sequence: Synthetic oligonucleotide
caauacucccugagagcga

SEQ ID NO: 2366022 - RNA, 19 nt, Artificial Sequence
  Description of Artificial Sequence: Synthetic oligonucleotide
cauggcguugaacagcaau

SEQ ID NO: 2366023 - RNA, 19 nt, Artificial Sequence
  Description of Artificial Sequence: Synthetic oligonucleotide
auacucccugagagcgacc

SEQ ID NO: 2366024 - RNA, 19 nt, Artificial Sequence
  Description of Artificial Sequence: Synthetic oligonucleotide
guguccgaucuguaguuua

SEQ ID NO: 2366025 - RNA, 19 nt, Artificial Sequence
  Description of Artificial Sequence: Synthetic oligonucleotide
  modified_base (18)..(18): a, c, u, g, unknown or other
ucccucagccuggguacng

SEQ ID NO: 2366026 - RNA, 19 nt, Artificial Sequence
  Description of Artificial Sequence: Synthetic oligonucleotide
gucuaccagcaaacgguug

SEQ ID NO: 2366027 - RNA, 19 nt, Artificial Sequence
  Description of Artificial Sequence: Synthetic oligonucleotide
gaucaccgcggggaugcug

SEQ ID NO: 2366028 - RNA, 19 nt, Artificial Sequence
  Description of Artificial Sequence: Synthetic oligonucleotide
cugugaugagaagcaugug

SEQ ID NO: 2366029 - RNA, 19 nt, Artificial Sequence
  Description of Artificial Sequence: Synthetic oligonucleotide
ggggacggcaucacgccgg

SEQ ID NO: 2366030 - RNA, 19 nt, Artificial Sequence
  Description of Artificial Sequence: Synthetic oligonucleotide
gugacacucaggaggaacu

SEQ ID NO: 2366031 - RNA, 19 nt, Artificial Sequence
  Description of Artificial Sequence: Synthetic oligonucleotide
accgaguaugcaaguauuu

SEQ ID NO: 2366032 - RNA, 19 nt, Artificial Sequence
  Description of Artificial Sequence: Synthetic oligonucleotide
cucgugcaaaguugagcga

SEQ ID NO: 2366033 - RNA, 19 nt, Artificial Sequence
  Description of Artificial Sequence: Synthetic oligonucleotide
cugcaugggaaccgauaca

SEQ ID NO: 2366034 - RNA, 19 nt, Artificial Sequence
  Description of Artificial Sequence: Synthetic oligonucleotide
cgagaacacgauagaaaug

SEQ ID NO: 2366035 - RNA, 19 nt, Artificial Sequence
  Description of Artificial Sequence: Synthetic oligonucleotide
ggaaccgauacacugcauu

SEQ ID NO: 2366036 - RNA, 19 nt, Artificial Sequence
  Description of Artificial Sequence: Synthetic oligonucleotide
ggggaaggcuuugaccgag

SEQ ID NO: 2366037 - RNA, 19 nt, Artificial Sequence
  Description of Artificial Sequence: Synthetic oligonucleotide
aacaugccccgggaaucaa

SEQ ID NO: 2366038 - RNA, 19 nt, Artificial Sequence
  Description of Artificial Sequence: Synthetic oligonucleotide
gucauucaccgaguaugca

SEQ ID NO: 2366039 - RNA, 19 nt, Artificial Sequence
  Description of Artificial Sequence: Synthetic oligonucleotide
ggaagacgacaaguccuag

SEQ ID NO: 2366040 - RNA, 19 nt, Artificial Sequence
  Description of Artificial Sequence: Synthetic oligonucleotide
ccaaacgguucauuugaca

SEQ ID NO: 2366041 - RNA, 19 nt, Artificial Sequence
  Description of Artificial Sequence: Synthetic oligonucleotide
ggaacuggucuguacuugu

SEQ ID NO: 2366042 - RNA, 19 nt, Artificial Sequence
  Description of Artificial Sequence: Synthetic oligonucleotide
cagcagguggaagacgaca

SEQ ID NO: 2366043 - RNA, 19 nt, Artificial Sequence
  Description of Artificial Sequence: Synthetic oligonucleotide
  modified_base (10)..(10): a, c, u, g, unknown or other
ccuggguacngcugacauc

SEQ ID NO: 2366044 - RNA, 19 nt, Artificial Sequence
  Description of Artificial Sequence: Synthetic oligonucleotide
cuuuagaggcuuggcugca

SEQ ID NO: 2366045 - RNA, 19 nt, Artificial Sequence
  Description of Artificial Sequence: Synthetic oligonucleotide
ccgagaacacgauagaaau

SEQ ID NO: 2366046 - RNA, 19 nt, Artificial Sequence
  Description of Artificial Sequence: Synthetic oligonucleotide
gagcgaacucuaguuauau

SEQ ID NO: 2366047 - RNA, 19 nt, Artificial Sequence
  Description of Artificial Sequence: Synthetic oligonucleotide
gccgagaacacgauagaaa

SEQ ID NO: 2366048 - RNA, 19 nt, Artificial Sequence
  Description of Artificial Sequence: Synthetic oligonucleotide
auagcccaacucaauucuu

SEQ ID NO: 2366049 - RNA, 19 nt, Artificial Sequence
  Description of Artificial Sequence: Synthetic oligonucleotide
gagcgaccacuacaggcua

SEQ ID NO: 2366050 - RNA, 19 nt, Artificial Sequence
  Description of Artificial Sequence: Synthetic oligonucleotide
  modified_base (8)..(8): a, c, u, g, unknown or other
uggguacngcugacaucaa

SEQ ID NO: 2366051 - RNA, 19 nt, Artificial Sequence
  Description of Artificial Sequence: Synthetic oligonucleotide
cacagucgguguagggaca

SEQ ID NO: 2366052 - RNA, 19 nt, Artificial Sequence
  Description of Artificial Sequence: Synthetic oligonucleotide
augccccgggaaucaaaau

SEQ ID NO: 2366053 - RNA, 19 nt, Artificial Sequence
  Description of Artificial Sequence: Synthetic oligonucleotide
cagcuaagucauucaccga

SEQ ID NO: 2366054 - RNA, 19 nt, Artificial Sequence
  Description of Artificial Sequence: Synthetic oligonucleotide
aguguccgaucuguaguuu

SEQ ID NO: 2366055 - RNA, 19 nt, Artificial Sequence
  Description of Artificial Sequence: Synthetic oligonucleotide
ucauggcguugaacagcaa

SEQ ID NO: 2366056 - RNA, 19 nt, Artificial Sequence
  Description of Artificial Sequence: Synthetic oligonucleotide
cgaaaacgaucuccaauuc

SEQ ID NO: 2366057 - RNA, 19 nt, Artificial Sequence
  Description of Artificial Sequence: Synthetic oligonucleotide
ugcugacggggaaggcuuu

SEQ ID NO: 2366058 - RNA, 19 nt, Artificial Sequence
  Description of Artificial Sequence: Synthetic oligonucleotide
gguguagggacagcuaagu

SEQ ID NO: 2366059 - RNA, 19 nt, Artificial Sequence
  Description of Artificial Sequence: Synthetic oligonucleotide
ccagucugucuccaugauc

SEQ ID NO: 2366060 - RNA, 19 nt, Artificial Sequence
  Description of Artificial Sequence: Synthetic oligonucleotide
gcacuguuuauuucucagu

SEQ ID NO: 2366061 - RNA, 19 nt, Artificial Sequence
  Description of Artificial Sequence: Synthetic oligonucleotide
gcuuggcugcaugggaacc

SEQ ID NO: 2366062 - RNA, 19 nt, Artificial Sequence
  Description of Artificial Sequence: Synthetic oligonucleotide
guacccacauaaucacaau

SEQ ID NO: 2366063 - RNA, 19 nt, Artificial Sequence
  Description of Artificial Sequence: Synthetic oligonucleotide
cuaccagcaaacgguugaa

SEQ ID NO: 2366064 - RNA, 19 nt, Artificial Sequence
  Description of Artificial Sequence: Synthetic oligonucleotide
ggcauagcccaacucaauu

SEQ ID NO: 2366065 - RNA, 19 nt, Artificial Sequence
  Description of Artificial Sequence: Synthetic oligonucleotide
caccgaguaugcaaguauu

SEQ ID NO: 2366066 - RNA, 19 nt, Artificial Sequence
  Description of Artificial Sequence: Synthetic oligonucleotide
caaugaucauggcguugaa

SEQ ID NO: 2366067 - RNA, 19 nt, Artificial Sequence
  Description of Artificial Sequence: Synthetic oligonucleotide
gugcaaaguugagcgaacu

SEQ ID NO: 2366068 - RNA, 19 nt, Artificial Sequence
  Description of Artificial Sequence: Synthetic oligonucleotide
agccuugacuucacagcau

SEQ ID NO: 2366069 - RNA, 19 nt, Artificial Sequence
  Description of Artificial Sequence: Synthetic oligonucleotide
cugacggggaaggcuuuga

SEQ ID NO: 2366070 - RNA, 19 nt, Artificial Sequence
  Description of Artificial Sequence: Synthetic oligonucleotide
aggaaguguccgaucugua

SEQ ID NO: 2366071 - RNA, 19 nt, Artificial Sequence
  Description of Artificial Sequence: Synthetic oligonucleotide
acaugccccgggaaucaaa

SEQ ID NO: 2366072 - RNA, 19 nt, Artificial Sequence
  Description of Artificial Sequence: Synthetic oligonucleotide
cagucgguguagggacagc

SEQ ID NO: 2366073 - RNA, 19 nt, Artificial Sequence
  Description of Artificial Sequence: Synthetic oligonucleotide
cgguguagggacagcuaag

SEQ ID NO: 2366074 - RNA, 19 nt, Artificial Sequence
  Description of Artificial Sequence: Synthetic oligonucleotide
cgaguaugcaaguauuuau

SEQ ID NO: 2366075 - RNA, 19 nt, Artificial Sequence
  Description of Artificial Sequence: Synthetic oligonucleotide
  modified_base (7)..(7): a, c, u, g, unknown or other
ggguacngcugacaucaau

SEQ ID NO: 2366076 - RNA, 19 nt, Artificial Sequence
  Description of Artificial Sequence: Synthetic oligonucleotide
gucgguguagggacagcua

SEQ ID NO: 2366077 - RNA, 19 nt, Artificial Sequence
  Description of Artificial Sequence: Synthetic oligonucleotide
ggaugcugacggggaaggc

SEQ ID NO: 2366078 - RNA, 19 nt, Artificial Sequence
  Description of Artificial Sequence: Synthetic oligonucleotide
guccgaucuguaguuuaua

SEQ ID NO: 2366079 - RNA, 19 nt, Artificial Sequence
  Description of Artificial Sequence: Synthetic oligonucleotide
ugaucaccgcggggaugcu

SEQ ID NO: 2366080 - RNA, 19 nt, Artificial Sequence
  Description of Artificial Sequence: Synthetic oligonucleotide
agcauccauucuagcuuaa

SEQ ID NO: 2366081 - RNA, 19 nt, Artificial Sequence
  Description of Artificial Sequence: Synthetic oligonucleotide
cgggaaucaaaauacugau

SEQ ID NO: 2366082 - RNA, 19 nt, Artificial Sequence
  Description of Artificial Sequence: Synthetic oligonucleotide
cgguucauuugacauacua

SEQ ID NO: 2366083 - RNA, 19 nt, Artificial Sequence
  Description of Artificial Sequence: Synthetic oligonucleotide
gcugacggggaaggcuuug

SEQ ID NO: 2366084 - RNA, 19 nt, Artificial Sequence
  Description of Artificial Sequence: Synthetic oligonucleotide
augugacacucaggaggaa

SEQ ID NO: 2366085 - RNA, 19 nt, Artificial Sequence
  Description of Artificial Sequence: Synthetic oligonucleotide
ccgaguaugcaaguauuua

SEQ ID NO: 2366086 - RNA, 19 nt, Artificial Sequence
  Description of Artificial Sequence: Synthetic oligonucleotide
cacuaggcacaggaagugu

SEQ ID NO: 2366087 - RNA, 19 nt, Artificial Sequence
  Description of Artificial Sequence: Synthetic oligonucleotide
gcacaagaugugacacuca

SEQ ID NO: 2366088 - RNA, 19 nt, Artificial Sequence
  Description of Artificial Sequence: Synthetic oligonucleotide
cgaacucuaguuauauaau

SEQ ID NO: 2366089 - RNA, 19 nt, Artificial Sequence
  Description of Artificial Sequence: Synthetic oligonucleotide
ggcacaggaaguguccgau

SEQ ID NO: 2366090 - RNA, 19 nt, Artificial Sequence
  Description of Artificial Sequence: Synthetic oligonucleotide
cgcggggaugcugacgggg

SEQ ID NO: 2366091 - RNA, 19 nt, Artificial Sequence
  Description of Artificial Sequence: Synthetic oligonucleotide
  modified_base (19)..(19): a, c, u, g, unknown or other
gucccucagccuggguacn

SEQ ID NO: 2366092 - RNA, 19 nt, Artificial Sequence
  Description of Artificial Sequence: Synthetic oligonucleotide
ccuaggagccauggcucug

SEQ ID NO: 2366093 - RNA, 19 nt, Artificial Sequence
  Description of Artificial Sequence: Synthetic oligonucleotide
ggcugcaugggaaccgaua

SEQ ID NO: 2366094 - RNA, 19 nt, Artificial Sequence
  Description of Artificial Sequence: Synthetic oligonucleotide
cccugagagcgaccacuac

SEQ ID NO: 2366095 - RNA, 19 nt, Artificial Sequence
  Description of Artificial Sequence: Synthetic oligonucleotide
cgguugaaaagcugugucu

SEQ ID NO: 2366096 - RNA, 19 nt, Artificial Sequence
  Description of Artificial Sequence: Synthetic oligonucleotide
cgauacacugcauucuuuu

SEQ ID NO: 2366097 - RNA, 19 nt, Artificial Sequence
  Description of Artificial Sequence: Synthetic oligonucleotide
ggucuaccagcaaacgguu

SEQ ID NO: 2366098 - RNA, 19 nt, Artificial Sequence
  Description of Artificial Sequence: Synthetic oligonucleotide
gcugugucuucaggucaga

SEQ ID NO: 2366099 - RNA, 19 nt, Artificial Sequence
  Description of Artificial Sequence: Synthetic oligonucleotide
gcauccauucuagcuuaau

SEQ ID NO: 2366100 - RNA, 19 nt, Artificial Sequence
  Description of Artificial Sequence: Synthetic oligonucleotide
ccgcggggaugcugacggg

SEQ ID NO: 2366101 - RNA, 19 nt, Artificial Sequence
  Description of Artificial Sequence: Synthetic oligonucleotide
gcaggguggcacuguuuau

SEQ ID NO: 2366102 - RNA, 19 nt, Artificial Sequence
  Description of Artificial Sequence: Synthetic oligonucleotide
ccgauacacugcauucuuu

SEQ ID NO: 2366103 - RNA, 19 nt, Artificial Sequence
  Description of Artificial Sequence: Synthetic oligonucleotide
cggggaaggcuuugaccga

SEQ ID NO: 2366104 - RNA, 19 nt, Artificial Sequence
  Description of Artificial Sequence: Synthetic oligonucleotide
gggaaccgauacacugcau

SEQ ID NO: 2366105 - RNA, 19 nt, Artificial Sequence
  Description of Artificial Sequence: Synthetic oligonucleotide
cgaccacuacaggcuagaa

SEQ ID NO: 2366106 - RNA, 19 nt, Artificial Sequence
  Description of Artificial Sequence: Synthetic oligonucleotide
aauguaaacaaaauuuacc

SEQ ID NO: 2366107 - RNA, 19 nt, Artificial Sequence
  Description of Artificial Sequence: Synthetic oligonucleotide
aauaaagaaggccaggaug

SEQ ID NO: 2366108 - RNA, 19 nt, Artificial Sequence
  Description of Artificial Sequence: Synthetic oligonucleotide
uuuagagauccucagauag

SEQ ID NO: 2366109 - RNA, 19 nt, Artificial Sequence
  Description of Artificial Sequence: Synthetic oligonucleotide
guaaacaaaauuuaccuag

SEQ ID NO: 2366110 - RNA, 19 nt, Artificial Sequence
  Description of Artificial Sequence: Synthetic oligonucleotide
uaagaugugcuuaugaccc

SEQ ID NO: 2366111 - RNA, 19 nt, Artificial Sequence
  Description of Artificial Sequence: Synthetic oligonucleotide
uuugccuucauucuaaaug

SEQ ID NO: 2366112 - RNA, 19 nt, Artificial Sequence
  Description of Artificial Sequence: Synthetic oligonucleotide
acagauguaaaccacauca

SEQ ID NO: 2366113 - RNA, 19 nt, Artificial Sequence
  Description of Artificial Sequence: Synthetic oligonucleotide
uagcuuauauuuaugaacc

SEQ ID NO: 2366114 - RNA, 19 nt, Artificial Sequence
  Description of Artificial Sequence: Synthetic oligonucleotide
aaagaguuuccuugaagac

SEQ ID NO: 2366115 - RNA, 19 nt, Artificial Sequence
  Description of Artificial Sequence: Synthetic oligonucleotide
aauuuagagauccucagau

SEQ ID NO: 2366116 - RNA, 19 nt, Artificial Sequence
  Description of Artificial Sequence: Synthetic oligonucleotide
guuauuaauuuagagaucc

SEQ ID NO: 2366117 - RNA, 19 nt, Artificial Sequence
  Description of Artificial Sequence: Synthetic oligonucleotide
auguaaacaaaauuuaccu

SEQ ID NO: 2366118 - RNA, 19 nt, Artificial Sequence
  Description of Artificial Sequence: Synthetic oligonucleotide
ugucaacuaauaaacuugg

SEQ ID NO: 2366119 - RNA, 19 nt, Artificial Sequence
  Description of Artificial Sequence: Synthetic oligonucleotide
auuuaugaaccauauuuuc

SEQ ID NO: 2366120 - RNA, 19 nt, Artificial Sequence
  Description of Artificial Sequence: Synthetic oligonucleotide
aacuaauaaacuuggauuu

SEQ ID NO: 2366121 - RNA, 19 nt, Artificial Sequence
  Description of Artificial Sequence: Synthetic oligonucleotide
uaaagaguuuccuugaaga

SEQ ID NO: 2366122 - RNA, 19 nt, Artificial Sequence
  Description of Artificial Sequence: Synthetic oligonucleotide
accaaaacuaccaugacgg

SEQ ID NO: 2366123 - RNA, 19 nt, Artificial Sequence
  Description of Artificial Sequence: Synthetic oligonucleotide
acaaaauuuaccuagcuua

SEQ ID NO: 2366124 - RNA, 19 nt, Artificial Sequence
  Description of Artificial Sequence: Synthetic oligonucleotide
aaauuuaccuagcuuauau

SEQ ID NO: 2366125 - RNA, 19 nt, Artificial Sequence
  Description of Artificial Sequence: Synthetic oligonucleotide
uuaauuuagagauccucag

SEQ ID NO: 2366126 - RNA, 19 nt, Artificial Sequence
  Description of Artificial Sequence: Synthetic oligonucleotide
gagauccucagauagaccc

SEQ ID NO: 2366127 - RNA, 19 nt, Artificial Sequence
  Description of Artificial Sequence: Synthetic oligonucleotide
uucuaaaugagcuucaauu

SEQ ID NO: 2366128 - RNA, 19 nt, Artificial Sequence
  Description of Artificial Sequence: Synthetic oligonucleotide
uuaugacccagugauaucg

SEQ ID NO: 2366129 - RNA, 19 nt, Artificial Sequence
  Description of Artificial Sequence: Synthetic oligonucleotide
ucaacuaauaaacuuggau

SEQ ID NO: 2366130 - RNA, 19 nt, Artificial Sequence
  Description of Artificial Sequence: Synthetic oligonucleotide
guaucauucgauuuaggag

SEQ ID NO: 2366131 - RNA, 19 nt, Artificial Sequence
  Description of Artificial Sequence: Synthetic oligonucleotide
ucgguuauuaauuuagaga

SEQ ID NO: 2366132 - RNA, 19 nt, Artificial Sequence
  Description of Artificial Sequence: Synthetic oligonucleotide
cuauggacagcauugcugg

SEQ ID NO: 2366133 - RNA, 19 nt, Artificial Sequence
  Description of Artificial Sequence: Synthetic oligonucleotide
agugauaucgguuauuaau

SEQ ID NO: 2366134 - RNA, 19 nt, Artificial Sequence
  Description of Artificial Sequence: Synthetic oligonucleotide
gauguugaggacaagggag

SEQ ID NO: 2366135 - RNA, 19 nt, Artificial Sequence
  Description of Artificial Sequence: Synthetic oligonucleotide
ucuauggacagcauugcug

SEQ ID NO: 2366136 - RNA, 19 nt, Artificial Sequence
  Description of Artificial Sequence: Synthetic oligonucleotide
ugaaccauauuuucaagcu

SEQ ID NO: 2366137 - RNA, 19 nt, Artificial Sequence
  Description of Artificial Sequence: Synthetic oligonucleotide
aguaucauucgauuuagga

SEQ ID NO: 2366138 - RNA, 19 nt, Artificial Sequence
  Description of Artificial Sequence: Synthetic oligonucleotide
uuaugaaccauauuuucaa

SEQ ID NO: 2366139 - RNA, 19 nt, Artificial Sequence
  Description of Artificial Sequence: Synthetic oligonucleotide
aagacuccugccaaggacc

SEQ ID NO: 2366140 - RNA, 19 nt, Artificial Sequence
  Description of Artificial Sequence: Synthetic oligonucleotide
gaaggaauaaagaaggcca

SEQ ID NO: 2366141 - RNA, 19 nt, Artificial Sequence
  Description of Artificial Sequence: Synthetic oligonucleotide
auuuacccugaacugacac

SEQ ID NO: 2366142 - RNA, 19 nt, Artificial Sequence
  Description of Artificial Sequence: Synthetic oligonucleotide
uauuuaugaaccauauuuu

SEQ ID NO: 2366143 - RNA, 19 nt, Artificial Sequence
  Description of Artificial Sequence: Synthetic oligonucleotide
aaacuuggauuuccuuggc

SEQ ID NO: 2366144 - RNA, 19 nt, Artificial Sequence
  Description of Artificial Sequence: Synthetic oligonucleotide
uuaauuuacccugaacuga

SEQ ID NO: 2366145 - RNA, 19 nt, Artificial Sequence
  Description of Artificial Sequence: Synthetic oligonucleotide
caaguuaucaaaauguaaa

SEQ ID NO: 2366146 - RNA, 19 nt, Artificial Sequence
  Description of Artificial Sequence: Synthetic oligonucleotide
aagaauaagaugugcuuau

SEQ ID NO: 2366147 - RNA, 19 nt, Artificial Sequence
  Description of Artificial Sequence: Synthetic oligonucleotide
cugucaacuaauaaacuug

SEQ ID NO: 2366148 - RNA, 19 nt, Artificial Sequence
  Description of Artificial Sequence: Synthetic oligonucleotide
caaugcaggccacagaagg

SEQ ID NO: 2366149 - RNA, 19 nt, Artificial Sequence
  Description of Artificial Sequence: Synthetic oligonucleotide
agacccugcaaacagaugu

SEQ ID NO: 2366150 - RNA, 19 nt, Artificial Sequence
  Description of Artificial Sequence: Synthetic oligonucleotide
cauccugagauucggagcg

SEQ ID NO: 2366151 - RNA, 19 nt, Artificial Sequence
  Description of Artificial Sequence: Synthetic oligonucleotide
agauagacccugcaaacag

SEQ ID NO: 2366152 - RNA, 19 nt, Artificial Sequence
  Description of Artificial Sequence: Synthetic oligonucleotide
uaauuuacccugaacugac

SEQ ID NO: 2366153 - RNA, 19 nt, Artificial Sequence
  Description of Artificial Sequence: Synthetic oligonucleotide
aucgguuauuaauuuagag

SEQ ID NO: 2366154 - RNA, 19 nt, Artificial Sequence
  Description of Artificial Sequence: Synthetic oligonucleotide
aacagauguaaaccacauc

SEQ ID NO: 2366155 - RNA, 19 nt, Artificial Sequence
  Description of Artificial Sequence: Synthetic oligonucleotide
uugccuucauucuaaauga

SEQ ID NO: 2366156 - RNA, 19 nt, Artificial Sequence
  Description of Artificial Sequence: Synthetic oligonucleotide
ucuaaaugagcuucaauuu

SEQ ID NO: 2366157 - RNA, 19 nt, Artificial Sequence
  Description of Artificial Sequence: Synthetic oligonucleotide
auuuaccuagcuuauauuu

SEQ ID NO: 2366158 - RNA, 19 nt, Artificial Sequence
  Description of Artificial Sequence: Synthetic oligonucleotide
guaaagaguguucugccag

SEQ ID NO: 2366159 - RNA, 19 nt, Artificial Sequence
  Description of Artificial Sequence: Synthetic oligonucleotide
acugaccagaguuacacug

SEQ ID NO: 2366160 - RNA, 19 nt, Artificial Sequence
  Description of Artificial Sequence: Synthetic oligonucleotide
agguauauggaauccaagu

SEQ ID NO: 2366161 - RNA, 19 nt, Artificial Sequence
  Description of Artificial Sequence: Synthetic oligonucleotide
auaucgguuauuaauuuag

SEQ ID NO: 2366162 - RNA, 19 nt, Artificial Sequence
  Description of Artificial Sequence: Synthetic oligonucleotide
ucugucaacuaauaaacuu

SEQ ID NO: 2366163 - RNA, 19 nt, Artificial Sequence
  Description of Artificial Sequence: Synthetic oligonucleotide
auuaauuuagagauccuca

SEQ ID NO: 2366164 - RNA, 19 nt, Artificial Sequence
  Description of Artificial Sequence: Synthetic oligonucleotide
cuaauaaacuuggauuucc

SEQ ID NO: 2366165 - RNA, 19 nt, Artificial Sequence
  Description of Artificial Sequence: Synthetic oligonucleotide
uauuaauuuagagauccuc

SEQ ID NO: 2366166 - RNA, 19 nt, Artificial Sequence
  Description of Artificial Sequence: Synthetic oligonucleotide
uaaagaguguucugccagg

SEQ ID NO: 2366167 - RNA, 19 nt, Artificial Sequence
  Description of Artificial Sequence: Synthetic oligonucleotide
aucugugcccucuauggac

SEQ ID NO: 2366168 - RNA, 19 nt, Artificial Sequence
  Description of Artificial Sequence: Synthetic oligonucleotide
gaauaagaugugcuuauga

SEQ ID NO: 2366169 - RNA, 19 nt, Artificial Sequence
  Description of Artificial Sequence: Synthetic oligonucleotide
uggaucuuuucuaagccac

SEQ ID NO: 2366170 - RNA, 19 nt, Artificial Sequence
  Description of Artificial Sequence: Synthetic oligonucleotide
uaucccaaagguauaugga

SEQ ID NO: 2366171 - RNA, 19 nt, Artificial Sequence
  Description of Artificial Sequence: Synthetic oligonucleotide
uguaaacaaaauuuaccua

SEQ ID NO: 2366172 - RNA, 19 nt, Artificial Sequence
  Description of Artificial Sequence: Synthetic oligonucleotide
uaugaaccauauuuucaag

SEQ ID NO: 2366173 - RNA, 19 nt, Artificial Sequence
  Description of Artificial Sequence: Synthetic oligonucleotide
aaacuaccaugacgggacc

SEQ ID NO: 2366174 - RNA, 19 nt, Artificial Sequence
  Description of Artificial Sequence: Synthetic oligonucleotide
auuugccacaucugugccc

SEQ ID NO: 2366175 - RNA, 19 nt, Artificial Sequence
  Description of Artificial Sequence: Synthetic oligonucleotide
uguaaaccacaucaguauc

SEQ ID NO: 2366176 - RNA, 19 nt, Artificial Sequence
  Description of Artificial Sequence: Synthetic oligonucleotide
uuuaccuagcuuauauuua

SEQ ID NO: 2366177 - RNA, 19 nt, Artificial Sequence
  Description of Artificial Sequence: Synthetic oligonucleotide
agauguaaaccacaucagu

SEQ ID NO: 2366178 - RNA, 19 nt, Artificial Sequence
  Description of Artificial Sequence: Synthetic oligonucleotide
guaaagaguuuccuugaag

SEQ ID NO: 2366179 - RNA, 19 nt, Artificial Sequence
  Description of Artificial Sequence: Synthetic oligonucleotide
ugcaguaucauucgauuua

SEQ ID NO: 2366180 - RNA, 19 nt, Artificial Sequence
  Description of Artificial Sequence: Synthetic oligonucleotide
auguaaaccacaucaguau

SEQ ID NO: 2366181 - RNA, 19 nt, Artificial Sequence
  Description of Artificial Sequence: Synthetic oligonucleotide
gacaaugcaggccacagaa

SEQ ID NO: 2366182 - RNA, 19 nt, Artificial Sequence
  Description of Artificial Sequence: Synthetic oligonucleotide
aggacuggacaaugcaggc

SEQ ID NO: 2366183 - RNA, 19 nt, Artificial Sequence
  Description of Artificial Sequence: Synthetic oligonucleotide
accaugaagggucucuguc

SEQ ID NO: 2366184 - RNA, 19 nt, Artificial Sequence
  Description of Artificial Sequence: Synthetic oligonucleotide
uuaccuagcuuauauuuau

SEQ ID NO: 2366185 - RNA, 19 nt, Artificial Sequence
  Description of Artificial Sequence: Synthetic oligonucleotide
ugugcuuaugacccaguga

SEQ ID NO: 2366186 - RNA, 19 nt, Artificial Sequence
  Description of Artificial Sequence: Synthetic oligonucleotide
acggacaagguucagggca

SEQ ID NO: 2366187 - RNA, 19 nt, Artificial Sequence
  Description of Artificial Sequence: Synthetic oligonucleotide
aaaccacaucaguauccac

SEQ ID NO: 2366188 - RNA, 19 nt, Artificial Sequence
  Description of Artificial Sequence: Synthetic oligonucleotide
acuaauaaacuuggauuuc

SEQ ID NO: 2366189 - RNA, 19 nt, Artificial Sequence
  Description of Artificial Sequence: Synthetic oligonucleotide
auugcuggaggcuggagcu

SEQ ID NO: 2366190 - RNA, 19 nt, Artificial Sequence
  Description of Artificial Sequence: Synthetic oligonucleotide
aauuuaccuagcuuauauu

SEQ ID NO: 2366191 - RNA, 19 nt, Artificial Sequence
  Description of Artificial Sequence: Synthetic oligonucleotide
guauccacaguccagccac

SEQ ID NO: 2366192 - RNA, 19 nt, Artificial Sequence
  Description of Artificial Sequence: Synthetic oligonucleotide
accuagcuuauauuuauga

SEQ ID NO: 2366193 - RNA, 19 nt, Artificial Sequence
  Description of Artificial Sequence: Synthetic oligonucleotide
gaaaacugaccagaguuac

SEQ ID NO: 2366194 - RNA, 19 nt, Artificial Sequence
  Description of Artificial Sequence: Synthetic oligonucleotide
aacuucuuccugggcaacc

SEQ ID NO: 2366195 - RNA, 19 nt, Artificial Sequence
  Description of Artificial Sequence: Synthetic oligonucleotide
uggaauccaaguuaucaaa

SEQ ID NO: 2366196 - RNA, 19 nt, Artificial Sequence
  Description of Artificial Sequence: Synthetic oligonucleotide
ugggcaaccuguaaagagu

SEQ ID NO: 2366197 - RNA, 19 nt, Artificial Sequence
  Description of Artificial Sequence: Synthetic oligonucleotide
cauucagcaugccauuugc

SEQ ID NO: 2366198 - RNA, 19 nt, Artificial Sequence
  Description of Artificial Sequence: Synthetic oligonucleotide
cuuuuaauuuacccugaac

SEQ ID NO: 2366199 - RNA, 19 nt, Artificial Sequence
  Description of Artificial Sequence: Synthetic oligonucleotide
aaggaaaacugaccagagu

SEQ ID NO: 2366200 - RNA, 19 nt, Artificial Sequence
  Description of Artificial Sequence: Synthetic oligonucleotide
uaucgguuauuaauuuaga

SEQ ID NO: 2366201 - RNA, 19 nt, Artificial Sequence
  Description of Artificial Sequence: Synthetic oligonucleotide
uuugcaguaucauucgauu

SEQ ID NO: 2366202 - RNA, 19 nt, Artificial Sequence
  Description of Artificial Sequence: Synthetic oligonucleotide
auuuaggaggacuggacaa

SEQ ID NO: 2366203 - RNA, 19 nt, Artificial Sequence
  Description of Artificial Sequence: Synthetic oligonucleotide
uuauuaauuuagagauccu

SEQ ID NO: 2366204 - RNA, 19 nt, Artificial Sequence
  Description of Artificial Sequence: Synthetic oligonucleotide
cugaacugacacuccaagg

SEQ ID NO: 2366205 - RNA, 19 nt, Artificial Sequence
  Description of Artificial Sequence: Synthetic oligonucleotide
gaagacuccugccaaggac

SEQ ID NO: 2366206 - RNA, 19 nt, Artificial Sequence
  Description of Artificial Sequence: Synthetic oligonucleotide
acuuggauuuccuuggcau

SEQ ID NO: 2366207 - RNA, 19 nt, Artificial Sequence
  Description of Artificial Sequence: Synthetic oligonucleotide
ugacacuccaaggaaaacu

SEQ ID NO: 2366208 - RNA, 19 nt, Artificial Sequence
  Description of Artificial Sequence: Synthetic oligonucleotide
uucgauuuaggaggacugg

SEQ ID NO: 2366209 - RNA, 19 nt, Artificial Sequence
  Description of Artificial Sequence: Synthetic oligonucleotide
guaaaccacaucaguaucc

SEQ ID NO: 2366210 - RNA, 19 nt, Artificial Sequence
  Description of Artificial Sequence: Synthetic oligonucleotide
uucaagcuuuuaauuuacc

SEQ ID NO: 2366211 - RNA, 19 nt, Artificial Sequence
  Description of Artificial Sequence: Synthetic oligonucleotide
caaggaaaacugaccagag

SEQ ID NO: 2366212 - RNA, 19 nt, Artificial Sequence
  Description of Artificial Sequence: Synthetic oligonucleotide
ugaagggucucugucaacu

SEQ ID NO: 2366213 - RNA, 19 nt, Artificial Sequence
  Description of Artificial Sequence: Synthetic oligonucleotide
guggacuccacggacaagg

SEQ ID NO: 2366214 - RNA, 19 nt, Artificial Sequence
  Description of Artificial Sequence: Synthetic oligonucleotide
aaccuguaaagaguguucu

SEQ ID NO: 2366215 - RNA, 19 nt, Artificial Sequence
  Description of Artificial Sequence: Synthetic oligonucleotide
uuacacugaaacugcaaau

SEQ ID NO: 2366216 - RNA, 19 nt, Artificial Sequence
  Description of Artificial Sequence: Synthetic oligonucleotide
gauguaaaccacaucagua

SEQ ID NO: 2366217 - RNA, 19 nt, Artificial Sequence
  Description of Artificial Sequence: Synthetic oligonucleotide
cagauguaaaccacaucag

SEQ ID NO: 2366218 - RNA, 19 nt, Artificial Sequence
  Description of Artificial Sequence: Synthetic oligonucleotide
uaaaccacaucaguaucca

SEQ ID NO: 2366219 - RNA, 19 nt, Artificial Sequence
  Description of Artificial Sequence: Synthetic oligonucleotide
uguaaagaguuuccuugaa

SEQ ID NO: 2366220 - RNA, 19 nt, Artificial Sequence
  Description of Artificial Sequence: Synthetic oligonucleotide
aggaccaaaacuaccauga

SEQ ID NO: 2366221 - RNA, 19 nt, Artificial Sequence
  Description of Artificial Sequence: Synthetic oligonucleotide
uuuacccugaacugacacu

SEQ ID NO: 2366222 - RNA, 19 nt, Artificial Sequence
  Description of Artificial Sequence: Synthetic oligonucleotide
uaaauaucccaaagguaua

SEQ ID NO: 2366223 - RNA, 19 nt, Artificial Sequence
  Description of Artificial Sequence: Synthetic oligonucleotide
aagguauauggaauccaag

SEQ ID NO: 2366224 - RNA, 19 nt, Artificial Sequence
  Description of Artificial Sequence: Synthetic oligonucleotide
caggauguugaggacaagg

SEQ ID NO: 2366225 - RNA, 19 nt, Artificial Sequence
  Description of Artificial Sequence: Synthetic oligonucleotide
guuacacugaaacugcaaa

SEQ ID NO: 2366226 - RNA, 19 nt, Artificial Sequence
  Description of Artificial Sequence: Synthetic oligonucleotide
aggauguugaggacaaggg

SEQ ID NO: 2366227 - RNA, 19 nt, Artificial Sequence
  Description of Artificial Sequence: Synthetic oligonucleotide
aucccaaagguauauggaa

SEQ ID NO: 2366228 - RNA, 19 nt, Artificial Sequence
  Description of Artificial Sequence: Synthetic oligonucleotide
cacuccaaggaaaacugac

SEQ ID NO: 2366229 - RNA, 19 nt, Artificial Sequence
  Description of Artificial Sequence: Synthetic oligonucleotide
gacuccacggacaagguuc

SEQ ID NO: 2366230 - RNA, 19 nt, Artificial Sequence
  Description of Artificial Sequence: Synthetic oligonucleotide
gugguuugcaguaucauuc

SEQ ID NO: 2366231 - RNA, 19 nt, Artificial Sequence
  Description of Artificial Sequence: Synthetic oligonucleotide
cauugcuggaggcuggagc

SEQ ID NO: 2366232 - RNA, 19 nt, Artificial Sequence
  Description of Artificial Sequence: Synthetic oligonucleotide
agggagaggacacccagug

SEQ ID NO: 2366233 - RNA, 19 nt, Artificial Sequence
  Description of Artificial Sequence: Synthetic oligonucleotide
ggaagaaggaggaagaaga

SEQ ID NO: 2366234 - RNA, 19 nt, Artificial Sequence
  Description of Artificial Sequence: Synthetic oligonucleotide
acaagguucagggcagcgc

SEQ ID NO: 2366235 - RNA, 19 nt, Artificial Sequence
  Description of Artificial Sequence: Synthetic oligonucleotide
gaagaauaagaugugcuua

SEQ ID NO: 2366236 - RNA, 19 nt, Artificial Sequence
  Description of Artificial Sequence: Synthetic oligonucleotide
ugauaucgguuauuaauuu

SEQ ID NO: 2366237 - RNA, 19 nt, Artificial Sequence
  Description of Artificial Sequence: Synthetic oligonucleotide
ucccaaagguauauggaau

SEQ ID NO: 2366238 - RNA, 19 nt, Artificial Sequence
  Description of Artificial Sequence: Synthetic oligonucleotide
guacagagggaagaggaag

SEQ ID NO: 2366239 - RNA, 19 nt, Artificial Sequence
  Description of Artificial Sequence: Synthetic oligonucleotide
aggaauaaagaaggccagg

SEQ ID NO: 2366240 - RNA, 19 nt, Artificial Sequence
  Description of Artificial Sequence: Synthetic oligonucleotide
uguacagagggaagaggaa

SEQ ID NO: 2366241 - RNA, 19 nt, Artificial Sequence
  Description of Artificial Sequence: Synthetic oligonucleotide
aagaguguucugccaggug

SEQ ID NO: 2366242 - RNA, 19 nt, Artificial Sequence
  Description of Artificial Sequence: Synthetic oligonucleotide
cuccaaggaaaacugacca

SEQ ID NO: 2366243 - RNA, 19 nt, Artificial Sequence
  Description of Artificial Sequence: Synthetic oligonucleotide
gauaucgguuauuaauuua

SEQ ID NO: 2366244 - RNA, 19 nt, Artificial Sequence
  Description of Artificial Sequence: Synthetic oligonucleotide
acacccagugcugucaccg

SEQ ID NO: 2366245 - RNA, 19 nt, Artificial Sequence
  Description of Artificial Sequence: Synthetic oligonucleotide
caacuaauaaacuuggauu

SEQ ID NO: 2366246 - RNA, 19 nt, Artificial Sequence
  Description of Artificial Sequence: Synthetic oligonucleotide
uccacggacaagguucagg

SEQ ID NO: 2366247 - RNA, 19 nt, Artificial Sequence
  Description of Artificial Sequence: Synthetic oligonucleotide
uuaggaggacuggacaaug

SEQ ID NO: 2366248 - RNA, 19 nt, Artificial Sequence
  Description of Artificial Sequence: Synthetic oligonucleotide
ugccuucauucuaaaugag

SEQ ID NO: 2366249 - RNA, 19 nt, Artificial Sequence
  Description of Artificial Sequence: Synthetic oligonucleotide
auucgauuuaggaggacug

SEQ ID NO: 2366250 - RNA, 19 nt, Artificial Sequence
  Description of Artificial Sequence: Synthetic oligonucleotide
uaccuagcuuauauuuaug

SEQ ID NO: 2366251 - RNA, 19 nt, Artificial Sequence
  Description of Artificial Sequence: Synthetic oligonucleotide
uggacaaugcaggccacag

SEQ ID NO: 2366252 - RNA, 19 nt, Artificial Sequence
  Description of Artificial Sequence: Synthetic oligonucleotide
agcuuauauuuaugaacca

SEQ ID NO: 2366253 - RNA, 19 nt, Artificial Sequence
  Description of Artificial Sequence: Synthetic oligonucleotide
agaaggccaggauguuccc

SEQ ID NO: 2366254 - RNA, 19 nt, Artificial Sequence
  Description of Artificial Sequence: Synthetic oligonucleotide
aaagaguguucugccaggu

SEQ ID NO: 2366255 - RNA, 19 nt, Artificial Sequence
  Description of Artificial Sequence: Synthetic oligonucleotide
ucgauuuaggaggacugga

SEQ ID NO: 2366256 - RNA, 19 nt, Artificial Sequence
  Description of Artificial Sequence: Synthetic oligonucleotide
uacguuugccuucauucua

SEQ ID NO: 2366257 - RNA, 19 nt, Artificial Sequence
  Description of Artificial Sequence: Synthetic oligonucleotide
aacugaccagaguuacacu

SEQ ID NO: 2366258 - RNA, 19 nt, Artificial Sequence
  Description of Artificial Sequence: Synthetic oligonucleotide
aagaugugcuuaugaccca

SEQ ID NO: 2366259 - RNA, 19 nt, Artificial Sequence
  Description of Artificial Sequence: Synthetic oligonucleotide
cauuugccacaucugugcc

SEQ ID NO: 2366260 - RNA, 19 nt, Artificial Sequence
  Description of Artificial Sequence: Synthetic oligonucleotide
aguauccacaguccagcca

SEQ ID NO: 2366261 - RNA, 19 nt, Artificial Sequence
  Description of Artificial Sequence: Synthetic oligonucleotide
ugaccagaguuacacugaa

SEQ ID NO: 2366262 - RNA, 19 nt, Artificial Sequence
  Description of Artificial Sequence: Synthetic oligonucleotide
augugcuuaugacccagug

SEQ ID NO: 2366263 - RNA, 19 nt, Artificial Sequence
  Description of Artificial Sequence: Synthetic oligonucleotide
auuuagagauccucagaua

SEQ ID NO: 2366264 - RNA, 19 nt, Artificial Sequence
  Description of Artificial Sequence: Synthetic oligonucleotide
gaacugacacuccaaggaa

SEQ ID NO: 2366265 - RNA, 19 nt, Artificial Sequence
  Description of Artificial Sequence: Synthetic oligonucleotide
aaugcaggccacagaagga

SEQ ID NO: 2366266 - RNA, 19 nt, Artificial Sequence
  Description of Artificial Sequence: Synthetic oligonucleotide
gugcuuaugacccagugau

SEQ ID NO: 2366267 - RNA, 19 nt, Artificial Sequence
  Description of Artificial Sequence: Synthetic oligonucleotide
agagauccucagauagacc

SEQ ID NO: 2366268 - RNA, 19 nt, Artificial Sequence
  Description of Artificial Sequence: Synthetic oligonucleotide
auucggagcgggcucggag

SEQ ID NO: 2366269 - RNA, 19 nt, Artificial Sequence
  Description of Artificial Sequence: Synthetic oligonucleotide
gagauucggagcgggcucg

SEQ ID NO: 2366270 - RNA, 19 nt, Artificial Sequence
  Description of Artificial Sequence: Synthetic oligonucleotide
ccacggacaagguucaggg

SEQ ID NO: 2366271 - RNA, 19 nt, Artificial Sequence
  Description of Artificial Sequence: Synthetic oligonucleotide
agaauaagaugugcuuaug

SEQ ID NO: 2366272 - RNA, 19 nt, Artificial Sequence
  Description of Artificial Sequence: Synthetic oligonucleotide
cuguaaagaguuuccuuga

SEQ ID NO: 2366273 - RNA, 19 nt, Artificial Sequence
  Description of Artificial Sequence: Synthetic oligonucleotide
uuuaggaggacuggacaau

SEQ ID NO: 2366274 - RNA, 19 nt, Artificial Sequence
  Description of Artificial Sequence: Synthetic oligonucleotide
uugcaguaucauucgauuu

SEQ ID NO: 2366275 - RNA, 19 nt, Artificial Sequence
  Description of Artificial Sequence: Synthetic oligonucleotide
gaauccaaguuaucaaaau

SEQ ID NO: 2366276 - RNA, 19 nt, Artificial Sequence
  Description of Artificial Sequence: Synthetic oligonucleotide
accuguaaagaguguucug

SEQ ID NO: 2366277 - RNA, 19 nt, Artificial Sequence
  Description of Artificial Sequence: Synthetic oligonucleotide
caguaucauucgauuuagg

SEQ ID NO: 2366278 - RNA, 19 nt, Artificial Sequence
  Description of Artificial Sequence: Synthetic oligonucleotide
cuuaugacccagugauauc

SEQ ID NO: 2366279 - RNA, 19 nt, Artificial Sequence
  Description of Artificial Sequence: Synthetic oligonucleotide
caugacgggaccuaguggu

SEQ ID NO: 2366280 - RNA, 19 nt, Artificial Sequence
  Description of Artificial Sequence: Synthetic oligonucleotide
ugacccagugauaucgguu

SEQ ID NO: 2366281 - RNA, 19 nt, Artificial Sequence
  Description of Artificial Sequence: Synthetic oligonucleotide
cugucaccggcucccaucc

SEQ ID NO: 2366282 - RNA, 19 nt, Artificial Sequence
  Description of Artificial Sequence: Synthetic oligonucleotide
caagguucagggcagcgca

SEQ ID NO: 2366283 - RNA, 19 nt, Artificial Sequence
  Description of Artificial Sequence: Synthetic oligonucleotide
caaaacuaccaugacggga

SEQ ID NO: 2366284 - RNA, 19 nt, Artificial Sequence
  Description of Artificial Sequence: Synthetic oligonucleotide
uucggagcgggcucggagu

SEQ ID NO: 2366285 - RNA, 19 nt, Artificial Sequence
  Description of Artificial Sequence: Synthetic oligonucleotide
ggccacagaaggaauaaag

SEQ ID NO: 2366286 - RNA, 19 nt, Artificial Sequence
  Description of Artificial Sequence: Synthetic oligonucleotide
cuagugguuugcaguauca

SEQ ID NO: 2366287 - RNA, 19 nt, Artificial Sequence
  Description of Artificial Sequence: Synthetic oligonucleotide
gacgggaccuagugguuug

SEQ ID NO: 2366288 - RNA, 19 nt, Artificial Sequence
  Description of Artificial Sequence: Synthetic oligonucleotide
cccucuauggacagcauug

SEQ ID NO: 2366289 - RNA, 19 nt, Artificial Sequence
  Description of Artificial Sequence: Synthetic oligonucleotide
uggcaucuccucagcauac

SEQ ID NO: 2366290 - RNA, 19 nt, Artificial Sequence
  Description of Artificial Sequence: Synthetic oligonucleotide
gaauaaagaaggccaggau

SEQ ID NO: 2366291 - RNA, 19 nt, Artificial Sequence
  Description of Artificial Sequence: Synthetic oligonucleotide
uagacccugcaaacagaug

SEQ ID NO: 2366292 - RNA, 19 nt, Artificial Sequence
  Description of Artificial Sequence: Synthetic oligonucleotide
aauuuacccugaacugaca

SEQ ID NO: 2366293 - RNA, 19 nt, Artificial Sequence
  Description of Artificial Sequence: Synthetic oligonucleotide
gauagacccugcaaacaga

SEQ ID NO: 2366294 - RNA, 19 nt, Artificial Sequence
  Description of Artificial Sequence: Synthetic oligonucleotide
auguugaggacaagggaga

SEQ ID NO: 2366295 - RNA, 19 nt, Artificial Sequence
  Description of Artificial Sequence: Synthetic oligonucleotide
ggauguugaggacaaggga

SEQ ID NO: 2366296 - RNA, 19 nt, Artificial Sequence
  Description of Artificial Sequence: Synthetic oligonucleotide
auauggaauccaaguuauc

SEQ ID NO: 2366297 - RNA, 19 nt, Artificial Sequence
  Description of Artificial Sequence: Synthetic oligonucleotide
gaccuagugguuugcagua

SEQ ID NO: 2366298 - RNA, 19 nt, Artificial Sequence
  Description of Artificial Sequence: Synthetic oligonucleotide
auagacccugcaaacagau

SEQ ID NO: 2366299 - RNA, 19 nt, Artificial Sequence
  Description of Artificial Sequence: Synthetic oligonucleotide
cugauguacagagggaaga

SEQ ID NO: 2366300 - RNA, 19 nt, Artificial Sequence
  Description of Artificial Sequence: Synthetic oligonucleotide
ucaccggcucccauccuga

SEQ ID NO: 2366301 - RNA, 19 nt, Artificial Sequence
  Description of Artificial Sequence: Synthetic oligonucleotide
cucggagugcacuggggug

SEQ ID NO: 2366302 - RNA, 19 nt, Artificial Sequence
  Description of Artificial Sequence: Synthetic oligonucleotide
augacccagugauaucggu

SEQ ID NO: 2366303 - RNA, 19 nt, Artificial Sequence
  Description of Artificial Sequence: Synthetic oligonucleotide
ucggagugcacuggggugu

SEQ ID NO: 2366304 - RNA, 19 nt, Artificial Sequence
  Description of Artificial Sequence: Synthetic oligonucleotide
ucggagcgggcucggagug

SEQ ID NO: 2366305 - RNA, 19 nt, Artificial Sequence
  Description of Artificial Sequence: Synthetic oligonucleotide
acccugaacugacacucca

SEQ ID NO: 2366306 - RNA, 19 nt, Artificial Sequence
  Description of Artificial Sequence: Synthetic oligonucleotide
cugaccagaguuacacuga

SEQ ID NO: 2366307 - RNA, 19 nt, Artificial Sequence
  Description of Artificial Sequence: Synthetic oligonucleotide
cuccuggaucuuuucuaag

SEQ ID NO: 2366308 - RNA, 19 nt, Artificial Sequence
  Description of Artificial Sequence: Synthetic oligonucleotide
acugacacuccaaggaaaa

SEQ ID NO: 2366309 - RNA, 19 nt, Artificial Sequence
  Description of Artificial Sequence: Synthetic oligonucleotide
gucaccggcucccauccug

SEQ ID NO: 2366310 - RNA, 19 nt, Artificial Sequence
  Description of Artificial Sequence: Synthetic oligonucleotide
aucauucgauuuaggagga

SEQ ID NO: 2366311 - RNA, 19 nt, Artificial Sequence
  Description of Artificial Sequence: Synthetic oligonucleotide
cccaaagguauauggaauc

SEQ ID NO: 2366312 - RNA, 19 nt, Artificial Sequence
  Description of Artificial Sequence: Synthetic oligonucleotide
ccaaagguauauggaaucc

SEQ ID NO: 2366313 - RNA, 19 nt, Artificial Sequence
  Description of Artificial Sequence: Synthetic oligonucleotide
cucccauccugagauucgg

SEQ ID NO: 2366314 - RNA, 19 nt, Artificial Sequence
  Description of Artificial Sequence: Synthetic oligonucleotide
uaccaugacgggaccuagu

SEQ ID NO: 2366315 - RNA, 19 nt, Artificial Sequence
  Description of Artificial Sequence: Synthetic oligonucleotide
aguuuccuugaagacuccu

SEQ ID NO: 2366316 - RNA, 19 nt, Artificial Sequence
  Description of Artificial Sequence: Synthetic oligonucleotide
cacaggauguugaggacaa

SEQ ID NO: 2366317 - RNA, 19 nt, Artificial Sequence
  Description of Artificial Sequence: Synthetic oligonucleotide
gagugcacugggguguggc

SEQ ID NO: 2366318 - RNA, 19 nt, Artificial Sequence
  Description of Artificial Sequence: Synthetic oligonucleotide
cacggacaagguucagggc

SEQ ID NO: 2366319 - RNA, 19 nt, Artificial Sequence
  Description of Artificial Sequence: Synthetic oligonucleotide
aguuacacugaaacugcaa

SEQ ID NO: 2366320 - RNA, 19 nt, Artificial Sequence
  Description of Artificial Sequence: Synthetic oligonucleotide
ugcuuaugacccagugaua

SEQ ID NO: 2366321 - RNA, 19 nt, Artificial Sequence
  Description of Artificial Sequence: Synthetic oligonucleotide
aggccaggauguucccaac

SEQ ID NO: 2366322 - RNA, 19 nt, Artificial Sequence
  Description of Artificial Sequence: Synthetic oligonucleotide
ucugccagguggacuccac

SEQ ID NO: 2366323 - RNA, 19 nt, Artificial Sequence
  Description of Artificial Sequence: Synthetic oligonucleotide
ucccaacuucuuccugggc

SEQ ID NO: 2366324 - RNA, 19 nt, Artificial Sequence
  Description of Artificial Sequence: Synthetic oligonucleotide
gguauauggaauccaaguu

SEQ ID NO: 2366325 - RNA, 19 nt, Artificial Sequence
  Description of Artificial Sequence: Synthetic oligonucleotide
gugauaucgguuauuaauu

SEQ ID NO: 2366326 - RNA, 19 nt, Artificial Sequence
  Description of Artificial Sequence: Synthetic oligonucleotide
gaaccauauuuucaagcuu

SEQ ID NO: 2366327 - RNA, 19 nt, Artificial Sequence
  Description of Artificial Sequence: Synthetic oligonucleotide
gccuucauucuaaaugagc

SEQ ID NO: 2366328 - RNA, 19 nt, Artificial Sequence
  Description of Artificial Sequence: Synthetic oligonucleotide
gggaccuagugguuugcag

SEQ ID NO: 2366329 - RNA, 19 nt, Artificial Sequence
  Description of Artificial Sequence: Synthetic oligonucleotide
gguuauuaauuuagagauc

SEQ ID NO: 2366330 - RNA, 19 nt, Artificial Sequence
  Description of Artificial Sequence: Synthetic oligonucleotide
ucccauccugagauucgga

SEQ ID NO: 2366331 - RNA, 19 nt, Artificial Sequence
  Description of Artificial Sequence: Synthetic oligonucleotide
ccaaaacuaccaugacggg

SEQ ID NO: 2366332 - RNA, 19 nt, Artificial Sequence
  Description of Artificial Sequence: Synthetic oligonucleotide
cugccagguggacuccacg

SEQ ID NO: 2366333 - RNA, 19 nt, Artificial Sequence
  Description of Artificial Sequence: Synthetic oligonucleotide
cccauccugagauucggag

SEQ ID NO: 2366334 - RNA, 19 nt, Artificial Sequence
  Description of Artificial Sequence: Synthetic oligonucleotide
cgguuauuaauuuagagau

SEQ ID NO: 2366335 - RNA, 19 nt, Artificial Sequence
  Description of Artificial Sequence: Synthetic oligonucleotide
gcaaauaauuuaaacugua

SEQ ID NO: 2366336 - RNA, 19 nt, Artificial Sequence
  Description of Artificial Sequence: Synthetic oligonucleotide
augcaggccacagaaggaa

SEQ ID NO: 2366337 - RNA, 19 nt, Artificial Sequence
  Description of Artificial Sequence: Synthetic oligonucleotide
gaguuacacugaaacugca

SEQ ID NO: 2366338 - RNA, 19 nt, Artificial Sequence
  Description of Artificial Sequence: Synthetic oligonucleotide
agguggacuccacggacaa

SEQ ID NO: 2366339 - RNA, 19 nt, Artificial Sequence
  Description of Artificial Sequence: Synthetic oligonucleotide
acuccugccaaggaccaaa

SEQ ID NO: 2366340 - RNA, 19 nt, Artificial Sequence
  Description of Artificial Sequence: Synthetic oligonucleotide
ccaaguuaucaaaauguaa

SEQ ID NO: 2366341 - RNA, 19 nt, Artificial Sequence
  Description of Artificial Sequence: Synthetic oligonucleotide
cagcaugccauuugccaca

SEQ ID NO: 2366342 - RNA, 19 nt, Artificial Sequence
  Description of Artificial Sequence: Synthetic oligonucleotide
acuaccaugacgggaccua

SEQ ID NO: 2366343 - RNA, 19 nt, Artificial Sequence
  Description of Artificial Sequence: Synthetic oligonucleotide
agauccucagauagacccu

SEQ ID NO: 2366344 - RNA, 19 nt, Artificial Sequence
  Description of Artificial Sequence: Synthetic oligonucleotide
gucaacuaauaaacuugga

SEQ ID NO: 2366345 - RNA, 19 nt, Artificial Sequence
  Description of Artificial Sequence: Synthetic oligonucleotide
uaaagaaggccaggauguu

SEQ ID NO: 2366346 - RNA, 19 nt, Artificial Sequence
  Description of Artificial Sequence: Synthetic oligonucleotide
agaggacacccagugcugu

SEQ ID NO: 2366347 - RNA, 19 nt, Artificial Sequence
  Description of Artificial Sequence: Synthetic oligonucleotide
cagauagacccugcaaaca

SEQ ID NO: 2366348 - RNA, 19 nt, Artificial Sequence
  Description of Artificial Sequence: Synthetic oligonucleotide
acuggacaaugcaggccac

SEQ ID NO: 2366349 - RNA, 19 nt, Artificial Sequence
  Description of Artificial Sequence: Synthetic oligonucleotide
cagcgcacaggauguugag

SEQ ID NO: 2366350 - RNA, 19 nt, Artificial Sequence
  Description of Artificial Sequence: Synthetic oligonucleotide
gggcaaccuguaaagagug

SEQ ID NO: 2366351 - RNA, 19 nt, Artificial Sequence
  Description of Artificial Sequence: Synthetic oligonucleotide
cacccagugcugucaccgg

SEQ ID NO: 2366352 - RNA, 19 nt, Artificial Sequence
  Description of Artificial Sequence: Synthetic oligonucleotide
gaagggucucugucaacua

SEQ ID NO: 2366353 - RNA, 19 nt, Artificial Sequence
  Description of Artificial Sequence: Synthetic oligonucleotide
cauucgauuuaggaggacu

SEQ ID NO: 2366354 - RNA, 19 nt, Artificial Sequence
  Description of Artificial Sequence: Synthetic oligonucleotide
acgggaccuagugguuugc

SEQ ID NO: 2366355 - RNA, 19 nt, Artificial Sequence
  Description of Artificial Sequence: Synthetic oligonucleotide
acugggguguggccauuca

SEQ ID NO: 2366356 - RNA, 19 nt, Artificial Sequence
  Description of Artificial Sequence: Synthetic oligonucleotide
gaggacacccagugcuguc

SEQ ID NO: 2366357 - RNA, 19 nt, Artificial Sequence
  Description of Artificial Sequence: Synthetic oligonucleotide
ucauucgauuuaggaggac

SEQ ID NO: 2366358 - RNA, 19 nt, Artificial Sequence
  Description of Artificial Sequence: Synthetic oligonucleotide
cucugucaacuaauaaacu

SEQ ID NO: 2366359 - RNA, 19 nt, Artificial Sequence
  Description of Artificial Sequence: Synthetic oligonucleotide
ccuagcuuauauuuaugaa

SEQ ID NO: 2366360 - RNA, 19 nt, Artificial Sequence
  Description of Artificial Sequence: Synthetic oligonucleotide
acguuugccuucauucuaa

SEQ ID NO: 2366361 - RNA, 19 nt, Artificial Sequence
  Description of Artificial Sequence: Synthetic oligonucleotide
cucagcauacguuugccuu

SEQ ID NO: 2366362 - RNA, 19 nt, Artificial Sequence
  Description of Artificial Sequence: Synthetic oligonucleotide
guuugcaguaucauucgau

SEQ ID NO: 2366363 - RNA, 19 nt, Artificial Sequence
  Description of Artificial Sequence: Synthetic oligonucleotide
ccaugacgggaccuagugg

SEQ ID NO: 2366364 - RNA, 19 nt, Artificial Sequence
  Description of Artificial Sequence: Synthetic oligonucleotide
ggaccuagugguuugcagu

SEQ ID NO: 2366365 - RNA, 19 nt, Artificial Sequence
  Description of Artificial Sequence: Synthetic oligonucleotide
acacuccaaggaaaacuga

SEQ ID NO: 2366366 - RNA, 19 nt, Artificial Sequence
  Description of Artificial Sequence: Synthetic oligonucleotide
acaagggagaggacaccca

SEQ ID NO: 2366367 - RNA, 19 nt, Artificial Sequence
  Description of Artificial Sequence: Synthetic oligonucleotide
ugacgggaccuagugguuu

SEQ ID NO: 2366368 - RNA, 19 nt, Artificial Sequence
  Description of Artificial Sequence: Synthetic oligonucleotide
ggacuggacaaugcaggcc

SEQ ID NO: 2366369 - RNA, 19 nt, Artificial Sequence
  Description of Artificial Sequence: Synthetic oligonucleotide
agggucucugucaacuaau

SEQ ID NO: 2366370 - RNA, 19 nt, Artificial Sequence
  Description of Artificial Sequence: Synthetic oligonucleotide
gccauuugccacaucugug

SEQ ID NO: 2366371 - RNA, 19 nt, Artificial Sequence
  Description of Artificial Sequence: Synthetic oligonucleotide
gguuugcaguaucauucga

SEQ ID NO: 2366372 - RNA, 19 nt, Artificial Sequence
  Description of Artificial Sequence: Synthetic oligonucleotide
agauucggagcgggcucgg

SEQ ID NO: 2366373 - RNA, 19 nt, Artificial Sequence
  Description of Artificial Sequence: Synthetic oligonucleotide
acuccacggacaagguuca

SEQ ID NO: 2366374 - RNA, 19 nt, Artificial Sequence
  Description of Artificial Sequence: Synthetic oligonucleotide
accggcucccauccugaga

SEQ ID NO: 2366375 - RNA, 19 nt, Artificial Sequence
  Description of Artificial Sequence: Synthetic oligonucleotide
gcuuaugacccagugauau

SEQ ID NO: 2366376 - RNA, 19 nt, Artificial Sequence
  Description of Artificial Sequence: Synthetic oligonucleotide
acccugcaaacagauguaa

SEQ ID NO: 2366377 - RNA, 19 nt, Artificial Sequence
  Description of Artificial Sequence: Synthetic oligonucleotide
acccagugauaucgguuau

SEQ ID NO: 2366378 - RNA, 19 nt, Artificial Sequence
  Description of Artificial Sequence: Synthetic oligonucleotide
ggcaucuccucagcauacg

SEQ ID NO: 2366379 - RNA, 19 nt, Artificial Sequence
  Description of Artificial Sequence: Synthetic oligonucleotide
ccuagugguuugcaguauc

SEQ ID NO: 2366380 - RNA, 19 nt, Artificial Sequence
  Description of Artificial Sequence: Synthetic oligonucleotide
ccaugaagggucucuguca

SEQ ID NO: 2366381 - RNA, 19 nt, Artificial Sequence
  Description of Artificial Sequence: Synthetic oligonucleotide
agacuccugccaaggacca

SEQ ID NO: 2366382 - RNA, 19 nt, Artificial Sequence
  Description of Artificial Sequence: Synthetic oligonucleotide
cagugauaucgguuauuaa

SEQ ID NO: 2366383 - RNA, 19 nt, Artificial Sequence
  Description of Artificial Sequence: Synthetic oligonucleotide
gggagaggacacccagugc

SEQ ID NO: 2366384 - RNA, 19 nt, Artificial Sequence
  Description of Artificial Sequence: Synthetic oligonucleotide
ccagguggacuccacggac

SEQ ID NO: 2366385 - RNA, 19 nt, Artificial Sequence
  Description of Artificial Sequence: Synthetic oligonucleotide
ccaggauguucccaacuuc

SEQ ID NO: 2366386 - RNA, 19 nt, Artificial Sequence
  Description of Artificial Sequence: Synthetic oligonucleotide
ccucuauggacagcauugc

SEQ ID NO: 2366387 - RNA, 19 nt, Artificial Sequence
  Description of Artificial Sequence: Synthetic oligonucleotide
gcugucaccggcucccauc

SEQ ID NO: 2366388 - RNA, 19 nt, Artificial Sequence
  Description of Artificial Sequence: Synthetic oligonucleotide
gggcucggagugcacuggg

SEQ ID NO: 2366389 - RNA, 19 nt, Artificial Sequence
  Description of Artificial Sequence: Synthetic oligonucleotide
gacccugcaaacagaugua

SEQ ID NO: 2366390 - RNA, 19 nt, Artificial Sequence
  Description of Artificial Sequence: Synthetic oligonucleotide
agcauugcuggaggcugga

SEQ ID NO: 2366391 - RNA, 19 nt, Artificial Sequence
  Description of Artificial Sequence: Synthetic oligonucleotide
guguggccauucagcaugc

SEQ ID NO: 2366392 - RNA, 19 nt, Artificial Sequence
  Description of Artificial Sequence: Synthetic oligonucleotide
cucuauggacagcauugcu

SEQ ID NO: 2366393 - RNA, 19 nt, Artificial Sequence
  Description of Artificial Sequence: Synthetic oligonucleotide
caggccacagaaggaauaa

SEQ ID NO: 2366394 - RNA, 19 nt, Artificial Sequence
  Description of Artificial Sequence: Synthetic oligonucleotide
cagcauacguuugccuuca

SEQ ID NO: 2366395 - RNA, 19 nt, Artificial Sequence
  Description of Artificial Sequence: Synthetic oligonucleotide
ggcucccauccugagauuc

SEQ ID NO: 2366396 - RNA, 19 nt, Artificial Sequence
  Description of Artificial Sequence: Synthetic oligonucleotide
accuagugguuugcaguau

SEQ ID NO: 2366397 - RNA, 19 nt, Artificial Sequence
  Description of Artificial Sequence: Synthetic oligonucleotide
agcaugccauuugccacau

SEQ ID NO: 2366398 - RNA, 19 nt, Artificial Sequence
  Description of Artificial Sequence: Synthetic oligonucleotide
ggcagcgcacaggauguug

SEQ ID NO: 2366399 - RNA, 19 nt, Artificial Sequence
  Description of Artificial Sequence: Synthetic oligonucleotide
guucugccagguggacucc

SEQ ID NO: 2366400 - RNA, 19 nt, Artificial Sequence
  Description of Artificial Sequence: Synthetic oligonucleotide
aggccacagaaggaauaaa

SEQ ID NO: 2366401 - RNA, 19 nt, Artificial Sequence
  Description of Artificial Sequence: Synthetic oligonucleotide
caccggcucccauccugag

SEQ ID NO: 2366402 - RNA, 19 nt, Artificial Sequence
  Description of Artificial Sequence: Synthetic oligonucleotide
ggcucggagugcacugggg

SEQ ID NO: 2366403 - RNA, 19 nt, Artificial Sequence
  Description of Artificial Sequence: Synthetic oligonucleotide
cuggacaaugcaggccaca

SEQ ID NO: 2366404 - RNA, 19 nt, Artificial Sequence
  Description of Artificial Sequence: Synthetic oligonucleotide
gccagguggacuccacgga

SEQ ID NO: 2366405 - RNA, 19 nt, Artificial Sequence
  Description of Artificial Sequence: Synthetic oligonucleotide
gcagcgcacaggauguuga

SEQ ID NO: 2366406 - RNA, 19 nt, Artificial Sequence
  Description of Artificial Sequence: Synthetic oligonucleotide
agccaccaugaagggucuc

SEQ ID NO: 2366407 - RNA, 19 nt, Artificial Sequence
  Description of Artificial Sequence: Synthetic oligonucleotide
gauucggagcgggcucgga

SEQ ID NO: 2366408 - RNA, 19 nt, Artificial Sequence
  Description of Artificial Sequence: Synthetic oligonucleotide
gcucggagugcacuggggu

SEQ ID NO: 2366409 - RNA, 19 nt, Artificial Sequence
  Description of Artificial Sequence: Synthetic oligonucleotide
gcaucuccucagcauacgu

SEQ ID NO: 2366410 - RNA, 19 nt, Artificial Sequence
  Description of Artificial Sequence: Synthetic oligonucleotide
augacgggaccuagugguu

SEQ ID NO: 2366411 - RNA, 19 nt, Artificial Sequence
  Description of Artificial Sequence: Synthetic oligonucleotide
ggagcgggcucggagugca

SEQ ID NO: 2366412 - RNA, 19 nt, Artificial Sequence
  Description of Artificial Sequence: Synthetic oligonucleotide
cuccacggacaagguucag

SEQ ID NO: 2366413 - RNA, 19 nt, Artificial Sequence
  Description of Artificial Sequence: Synthetic oligonucleotide
ccuuggcaucuccucagca

SEQ ID NO: 2366414 - RNA, 19 nt, Artificial Sequence
  Description of Artificial Sequence: Synthetic oligonucleotide
ggagugcacuggggugugg

SEQ ID NO: 2366415 - RNA, 19 nt, Artificial Sequence
  Description of Artificial Sequence: Synthetic oligonucleotide
gggucucugucaacuaaua

SEQ ID NO: 2366416 - RNA, 19 nt, Artificial Sequence
  Description of Artificial Sequence: Synthetic oligonucleotide
gcaggccacagaaggaaua

SEQ ID NO: 2366417 - RNA, 19 nt, Artificial Sequence
  Description of Artificial Sequence: Synthetic oligonucleotide
ccggcucccauccugagau

SEQ ID NO: 2366418 - RNA, 19 nt, Artificial Sequence
  Description of Artificial Sequence: Synthetic oligonucleotide
ccucagcauacguuugccu

SEQ ID NO: 2366419 - RNA, 19 nt, Artificial Sequence
  Description of Artificial Sequence: Synthetic oligonucleotide
ggacuccacggacaagguu

SEQ ID NO: 2366420 - RNA, 19 nt, Artificial Sequence
  Description of Artificial Sequence: Synthetic oligonucleotide
ggcaaccuguaaagagugu

SEQ ID NO: 2366421 - RNA, 19 nt, Artificial Sequence
  Description of Artificial Sequence: Synthetic oligonucleotide
gagcgggcucggagugcac

SEQ ID NO: 2366422 - RNA, 19 nt, Artificial Sequence
  Description of Artificial Sequence: Synthetic oligonucleotide
gcccucuauggacagcauu

SEQ ID NO: 2366423 - RNA, 19 nt, Artificial Sequence
  Description of Artificial Sequence: Synthetic oligonucleotide
gcaugccauuugccacauc

SEQ ID NO: 2366424 - RNA, 19 nt, Artificial Sequence
  Description of Artificial Sequence: Synthetic oligonucleotide
cggagugcacuggggugug

SEQ ID NO: 2366425 - RNA, 19 nt, Artificial Sequence
  Description of Artificial Sequence: Synthetic oligonucleotide
cggagcgggcucggagugc

SEQ ID NO: 2366426 - RNA, 19 nt, Artificial Sequence
  Description of Artificial Sequence: Synthetic oligonucleotide
cgggaccuagugguuugca

SEQ ID NO: 2366427 - RNA, 19 nt, Artificial Sequence
  Description of Artificial Sequence: Synthetic oligonucleotide
cccagugauaucgguuauu

SEQ ID NO: 2366428 - RNA, 19 nt, Artificial Sequence
  Description of Artificial Sequence: Synthetic oligonucleotide
aaugacaauucuuagcagg

SEQ ID NO: 2366429 - RNA, 19 nt, Artificial Sequence
  Description of Artificial Sequence: Synthetic oligonucleotide
aauauuucuguacucauca

SEQ ID NO: 2366430 - RNA, 19 nt, Artificial Sequence
  Description of Artificial Sequence: Synthetic oligonucleotide
ucaaauguuagucucagcu

SEQ ID NO: 2366431 - RNA, 19 nt, Artificial Sequence
  Description of Artificial Sequence: Synthetic oligonucleotide
uguauaauaggccugcgug

SEQ ID NO: 2366432 - RNA, 19 nt, Artificial Sequence
  Description of Artificial Sequence: Synthetic oligonucleotide
agaaguaucugacugaaug

SEQ ID NO: 2366433 - RNA, 19 nt, Artificial Sequence
  Description of Artificial Sequence: Synthetic oligonucleotide
augaacuauagccagcagc

SEQ ID NO: 2366434 - RNA, 19 nt, Artificial Sequence
  Description of Artificial Sequence: Synthetic oligonucleotide
gauaacucuccuuuaaugc

SEQ ID NO: 2366435 - RNA, 19 nt, Artificial Sequence
  Description of Artificial Sequence: Synthetic oligonucleotide
ugaacuauagccagcagca

SEQ ID NO: 2366436 - RNA, 19 nt, Artificial Sequence
  Description of Artificial Sequence: Synthetic oligonucleotide
aaauguuagucucagcuga

SEQ ID NO: 2366437 - RNA, 19 nt, Artificial Sequence
  Description of Artificial Sequence: Synthetic oligonucleotide
aauuugucuucauccgugc

SEQ ID NO: 2366438 - RNA, 19 nt, Artificial Sequence
  Description of Artificial Sequence: Synthetic oligonucleotide
gaaaccauuauucuguuga

SEQ ID NO: 2366439 - RNA, 19 nt, Artificial Sequence
  Description of Artificial Sequence: Synthetic oligonucleotide
aaguaucugacugaauggc

SEQ ID NO: 2366440 - RNA, 19 nt, Artificial Sequence
  Description of Artificial Sequence: Synthetic oligonucleotide
aacuauagccagcagcagg

SEQ ID NO: 2366441 - RNA, 19 nt, Artificial Sequence
  Description of Artificial Sequence: Synthetic oligonucleotide
ugcuuugcaucaaacaggg

SEQ ID NO: 2366442 - RNA, 19 nt, Artificial Sequence
  Description of Artificial Sequence: Synthetic oligonucleotide
uuagcaggcagacagguug

SEQ ID NO: 2366443 - RNA, 19 nt, Artificial Sequence
  Description of Artificial Sequence: Synthetic oligonucleotide
uauacgcuguauaauaggc

SEQ ID NO: 2366444 - RNA, 19 nt, Artificial Sequence
  Description of Artificial Sequence: Synthetic oligonucleotide
gaaguaucugacugaaugg

SEQ ID NO: 2366445 - RNA, 19 nt, Artificial Sequence
  Description of Artificial Sequence: Synthetic oligonucleotide
uguuagucucagcugaggg

SEQ ID NO: 2366446 - RNA, 19 nt, Artificial Sequence
  Description of Artificial Sequence: Synthetic oligonucleotide
cguacaaugaacuauagcc

SEQ ID NO: 2366447 - RNA, 19 nt, Artificial Sequence
  Description of Artificial Sequence: Synthetic oligonucleotide
uuauacgcuguauaauagg

SEQ ID NO: 2366448 - RNA, 19 nt, Artificial Sequence
  Description of Artificial Sequence: Synthetic oligonucleotide
uucaaucaaggcaucuucg

SEQ ID NO: 2366449 - RNA, 19 nt, Artificial Sequence
  Description of Artificial Sequence: Synthetic oligonucleotide
auuauagaggaucugugca

SEQ ID NO: 2366450 - RNA, 19 nt, Artificial Sequence
  Description of Artificial Sequence: Synthetic oligonucleotide
aagauuucaaucaaggcau

SEQ ID NO: 2366451 - RNA, 19 nt, Artificial Sequence
  Description of Artificial Sequence: Synthetic oligonucleotide
uucuguacucaucaaaugu

SEQ ID NO: 2366452 - RNA, 19 nt, Artificial Sequence
  Description of Artificial Sequence: Synthetic oligonucleotide
uuugcuuuugcccuugcac

SEQ ID NO: 2366453 - RNA, 19 nt, Artificial Sequence
  Description of Artificial Sequence: Synthetic oligonucleotide
uuugcuguugccgagaccu

SEQ ID NO: 2366454 - RNA, 19 nt, Artificial Sequence
  Description of Artificial Sequence: Synthetic oligonucleotide
aaugagaugcucuacuaua

SEQ ID NO: 2366455 - RNA, 19 nt, Artificial Sequence
  Description of Artificial Sequence: Synthetic oligonucleotide
cauuauucuguugagagug

SEQ ID NO: 2366456 - RNA, 19 nt, Artificial Sequence
  Description of Artificial Sequence: Synthetic oligonucleotide
uguaggaaagcuguaagca

SEQ ID NO: 2366457 - RNA, 19 nt, Artificial Sequence
  Description of Artificial Sequence: Synthetic oligonucleotide
ucuacuauaaaaucauguu

SEQ ID NO: 2366458 - RNA, 19 nt, Artificial Sequence
  Description of Artificial Sequence: Synthetic oligonucleotide
ucuggaaaccauuauucug

SEQ ID NO: 2366459 - RNA, 19 nt, Artificial Sequence
  Description of Artificial Sequence: Synthetic oligonucleotide
ucuuauacgcuguauaaua

SEQ ID NO: 2366460 - RNA, 19 nt, Artificial Sequence
  Description of Artificial Sequence: Synthetic oligonucleotide
cauuauagaggaucugugc

SEQ ID NO: 2366461 - RNA, 19 nt, Artificial Sequence
  Description of Artificial Sequence: Synthetic oligonucleotide
aagagcacgagucuguaau

SEQ ID NO: 2366462 - RNA, 19 nt, Artificial Sequence
  Description of Artificial Sequence: Synthetic oligonucleotide
agauaacucuccuuuaaug

SEQ ID NO: 2366463 - RNA, 19 nt, Artificial Sequence
  Description of Artificial Sequence: Synthetic oligonucleotide
uguuuccgaacuaauguca

SEQ ID NO: 2366464 - RNA, 19 nt, Artificial Sequence
  Description of Artificial Sequence: Synthetic oligonucleotide
guucucaccagcauuauag

SEQ ID NO: 2366465 - RNA, 19 nt, Artificial Sequence
  Description of Artificial Sequence: Synthetic oligonucleotide
cauagacuucuuuaguugc

SEQ ID NO: 2366466 - RNA, 19 nt, Artificial Sequence
  Description of Artificial Sequence: Synthetic oligonucleotide
ucauguuugcuuuugcccu

SEQ ID NO: 2366467 - RNA, 19 nt, Artificial Sequence
  Description of Artificial Sequence: Synthetic oligonucleotide
uacgcuguauaauaggccu

SEQ ID NO: 2366468 - RNA, 19 nt, Artificial Sequence
  Description of Artificial Sequence: Synthetic oligonucleotide
gaugcucuacuauaaaauc

SEQ ID NO: 2366469 - RNA, 19 nt, Artificial Sequence
  Description of Artificial Sequence: Synthetic oligonucleotide
aaggcaucuucguccgucc

SEQ ID NO: 2366470 - RNA, 19 nt, Artificial Sequence
  Description of Artificial Sequence: Synthetic oligonucleotide
auguuuccgaacuaauguc

SEQ ID NO: 2366471 - RNA, 19 nt, Artificial Sequence
  Description of Artificial Sequence: Synthetic oligonucleotide
gcuucuugaacucaugccg

SEQ ID NO: 2366472 - RNA, 19 nt, Artificial Sequence
  Description of Artificial Sequence: Synthetic oligonucleotide
accagcauuauagaggauc

SEQ ID NO: 2366473 - RNA, 19 nt, Artificial Sequence
  Description of Artificial Sequence: Synthetic oligonucleotide
auaacucuccuuuaaugcu

SEQ ID NO: 2366474 - RNA, 19 nt, Artificial Sequence
  Description of Artificial Sequence: Synthetic oligonucleotide
augacaauucuuagcaggc

SEQ ID NO: 2366475 - RNA, 19 nt, Artificial Sequence
  Description of Artificial Sequence: Synthetic oligonucleotide
ucuucuaccaucugccaga

SEQ ID NO: 2366476 - RNA, 19 nt, Artificial Sequence
  Description of Artificial Sequence: Synthetic oligonucleotide
guaagcagagcuuuugcug

SEQ ID NO: 2366477 - RNA, 19 nt, Artificial Sequence
  Description of Artificial Sequence: Synthetic oligonucleotide
ugcucuacuauaaaaucau

SEQ ID NO: 2366478 - RNA, 19 nt, Artificial Sequence
  Description of Artificial Sequence: Synthetic oligonucleotide
ucuucuuauacgcuguaua

SEQ ID NO: 2366479 - RNA, 19 nt, Artificial Sequence
  Description of Artificial Sequence: Synthetic oligonucleotide
cuucuugaacucaugccgg

SEQ ID NO: 2366480 - RNA, 19 nt, Artificial Sequence
  Description of Artificial Sequence: Synthetic oligonucleotide
agucacaagagccaccaug

SEQ ID NO: 2366481 - RNA, 19 nt, Artificial Sequence
  Description of Artificial Sequence: Synthetic oligonucleotide
gauguuuccgaacuaaugu

SEQ ID NO: 2366482 - RNA, 19 nt, Artificial Sequence
  Description of Artificial Sequence: Synthetic oligonucleotide
aacuaaugucaucucccag

SEQ ID NO: 2366483 - RNA, 19 nt, Artificial Sequence
  Description of Artificial Sequence: Synthetic oligonucleotide
uguaaucuccagaaguauc

SEQ ID NO: 2366484 - RNA, 19 nt, Artificial Sequence
  Description of Artificial Sequence: Synthetic oligonucleotide
uaacucuccuuuaaugcug

SEQ ID NO: 2366485 - RNA, 19 nt, Artificial Sequence
  Description of Artificial Sequence: Synthetic oligonucleotide
caucaaacagggcuggugc

SEQ ID NO: 2366486 - RNA, 19 nt, Artificial Sequence
  Description of Artificial Sequence: Synthetic oligonucleotide
aucuucaagagcacgaguc

SEQ ID NO: 2366487 - RNA, 19 nt, Artificial Sequence
  Description of Artificial Sequence: Synthetic oligonucleotide
acuuuuagacuuucaucuc

SEQ ID NO: 2366488 - RNA, 19 nt, Artificial Sequence
  Description of Artificial Sequence: Synthetic oligonucleotide
ucaucaaauguuagucuca

SEQ ID NO: 2366489 - RNA, 19 nt, Artificial Sequence
  Description of Artificial Sequence: Synthetic oligonucleotide
cacuuugggacacuguagg

SEQ ID NO: 2366490 - RNA, 19 nt, Artificial Sequence
  Description of Artificial Sequence: Synthetic oligonucleotide
cuggcuaauauuucuguac

SEQ ID NO: 2366491 - RNA, 19 nt, Artificial Sequence
  Description of Artificial Sequence: Synthetic oligonucleotide
uggcuaauauuucuguacu

SEQ ID NO: 2366492 - RNA, 19 nt, Artificial Sequence
  Description of Artificial Sequence: Synthetic oligonucleotide
aaucuccagaaguaucuga

SEQ ID NO: 2366493 - RNA, 19 nt, Artificial Sequence
  Description of Artificial Sequence: Synthetic oligonucleotide
uguuccucguacaaugaac

SEQ ID NO: 2366494 - RNA, 19 nt, Artificial Sequence
  Description of Artificial Sequence: Synthetic oligonucleotide
uacucaucaaauguuaguc

SEQ ID NO: 2366495 - RNA, 19 nt, Artificial Sequence
  Description of Artificial Sequence: Synthetic oligonucleotide
uaauauuucuguacucauc

SEQ ID NO: 2366496 - RNA, 19 nt, Artificial Sequence
  Description of Artificial Sequence: Synthetic oligonucleotide
guaggaaagcuguaagcag

SEQ ID NO: 2366497 - RNA, 19 nt, Artificial Sequence
  Description of Artificial Sequence: Synthetic oligonucleotide
uguaagcagagcuuuugcu

SEQ ID NO: 2366498 - RNA, 19 nt, Artificial Sequence
  Description of Artificial Sequence: Synthetic oligonucleotide
uccacagaucuucaagagc

SEQ ID NO: 2366499 - RNA, 19 nt, Artificial Sequence
  Description of Artificial Sequence: Synthetic oligonucleotide
uuaaugcuguccucaaugu

SEQ ID NO: 2366500 - RNA, 19 nt, Artificial Sequence
  Description of Artificial Sequence: Synthetic oligonucleotide
aaugaacuauagccagcag

SEQ ID NO: 2366501 - RNA, 19 nt, Artificial Sequence
  Description of Artificial Sequence: Synthetic oligonucleotide
ucguacaaugaacuauagc

SEQ ID NO: 2366502 - RNA, 19 nt, Artificial Sequence
  Description of Artificial Sequence: Synthetic oligonucleotide
uuccgaacuaaugucaucu

SEQ ID NO: 2366503 - RNA, 19 nt, Artificial Sequence
  Description of Artificial Sequence: Synthetic oligonucleotide
ugaucuggaaaccauuauu

SEQ ID NO: 2366504 - RNA, 19 nt, Artificial Sequence
  Description of Artificial Sequence: Synthetic oligonucleotide
ucaaagugcccagauaacu

SEQ ID NO: 2366505 - RNA, 19 nt, Artificial Sequence
  Description of Artificial Sequence: Synthetic oligonucleotide
cacuuuuagacuuucaucu

SEQ ID NO: 2366506 - RNA, 19 nt, Artificial Sequence
  Description of Artificial Sequence: Synthetic oligonucleotide
ucaaucaaggcaucuucgu

SEQ ID NO: 2366507 - RNA, 19 nt, Artificial Sequence
  Description of Artificial Sequence: Synthetic oligonucleotide
agacucuucuuauacgcug

SEQ ID NO: 2366508 - RNA, 19 nt, Artificial Sequence
  Description of Artificial Sequence: Synthetic oligonucleotide
uuagucucagcugagggaa

SEQ ID NO: 2366509 - RNA, 19 nt, Artificial Sequence
  Description of Artificial Sequence: Synthetic oligonucleotide
cauuugucugcacuuuggg

SEQ ID NO: 2366510 - RNA, 19 nt, Artificial Sequence
  Description of Artificial Sequence: Synthetic oligonucleotide
agagaguagccauaaugcu

SEQ ID NO: 2366511 - RNA, 19 nt, Artificial Sequence
  Description of Artificial Sequence: Synthetic oligonucleotide
auacgcuguauaauaggcc

SEQ ID NO: 2366512 - RNA, 19 nt, Artificial Sequence
  Description of Artificial Sequence: Synthetic oligonucleotide
ugcacuuugggacacugua

SEQ ID NO: 2366513 - RNA, 19 nt, Artificial Sequence
  Description of Artificial Sequence: Synthetic oligonucleotide
cuaaugucaucucccagac

SEQ ID NO: 2366514 - RNA, 19 nt, Artificial Sequence
  Description of Artificial Sequence: Synthetic oligonucleotide
ggugguuaagauuucaauc

SEQ ID NO: 2366515 - RNA, 19 nt, Artificial Sequence
  Description of Artificial Sequence: Synthetic oligonucleotide
uuauagaggaucugugcau

SEQ ID NO: 2366516 - RNA, 19 nt, Artificial Sequence
  Description of Artificial Sequence: Synthetic oligonucleotide
gacugaauggcugagugca

SEQ ID NO: 2366517 - RNA, 19 nt, Artificial Sequence
  Description of Artificial Sequence: Synthetic oligonucleotide
ucauccgugccccauuugu

SEQ ID NO: 2366518 - RNA, 19 nt, Artificial Sequence
  Description of Artificial Sequence: Synthetic oligonucleotide
acucaucaaauguuagucu

SEQ ID NO: 2366519 - RNA, 19 nt, Artificial Sequence
  Description of Artificial Sequence: Synthetic oligonucleotide
gucccagugcccuucauag

SEQ ID NO: 2366520 - RNA, 19 nt, Artificial Sequence
  Description of Artificial Sequence: Synthetic oligonucleotide
ucuucguccgucccagugc

SEQ ID NO: 2366521 - RNA, 19 nt, Artificial Sequence
  Description of Artificial Sequence: Synthetic oligonucleotide
agcauuauagaggaucugu

SEQ ID NO: 2366522 - RNA, 19 nt, Artificial Sequence
  Description of Artificial Sequence: Synthetic oligonucleotide
uucuuagcaggcagacagg

SEQ ID NO: 2366523 - RNA, 19 nt, Artificial Sequence
  Description of Artificial Sequence: Synthetic oligonucleotide
ucccagacucuucuuauac

SEQ ID NO: 2366524 - RNA, 19 nt, Artificial Sequence
  Description of Artificial Sequence: Synthetic oligonucleotide
ugguuaagauuucaaucaa

SEQ ID NO: 2366525 - RNA, 19 nt, Artificial Sequence
  Description of Artificial Sequence: Synthetic oligonucleotide
uccuuuaaugcuguccuca

SEQ ID NO: 2366526 - RNA, 19 nt, Artificial Sequence
  Description of Artificial Sequence: Synthetic oligonucleotide
caccaugauaugcucaaag

SEQ ID NO: 2366527 - RNA, 19 nt, Artificial Sequence
  Description of Artificial Sequence: Synthetic oligonucleotide
uccagaaguaucugacuga

SEQ ID NO: 2366528 - RNA, 19 nt, Artificial Sequence
  Description of Artificial Sequence: Synthetic oligonucleotide
aucuggaaaccauuauucu

SEQ ID NO: 2366529 - RNA, 19 nt, Artificial Sequence
  Description of Artificial Sequence: Synthetic oligonucleotide
gcagagaguagccauaaug

SEQ ID NO: 2366530 - RNA, 19 nt, Artificial Sequence
  Description of Artificial Sequence: Synthetic oligonucleotide
uucuggcuaauauuucugu

SEQ ID NO: 2366531 - RNA, 19 nt, Artificial Sequence
  Description of Artificial Sequence: Synthetic oligonucleotide
agcuggguguuccucguac

SEQ ID NO: 2366532 - RNA, 19 nt, Artificial Sequence
  Description of Artificial Sequence: Synthetic oligonucleotide
uucaaagugcccagauaac

SEQ ID NO: 2366533 - RNA, 19 nt, Artificial Sequence
  Description of Artificial Sequence: Synthetic oligonucleotide
ugaaugagaugcucuacua

SEQ ID NO: 2366534 - RNA, 19 nt, Artificial Sequence
  Description of Artificial Sequence: Synthetic oligonucleotide
agggcaguagccuuugaga

SEQ ID NO: 2366535 - RNA, 19 nt, Artificial Sequence
  Description of Artificial Sequence: Synthetic oligonucleotide
acagaucuucaagagcacg

SEQ ID NO: 2366536 - RNA, 19 nt, Artificial Sequence
  Description of Artificial Sequence: Synthetic oligonucleotide
gaacucaugccggaugucc

SEQ ID NO: 2366537 - RNA, 19 nt, Artificial Sequence
  Description of Artificial Sequence: Synthetic oligonucleotide
gaacuaaugucaucuccca

SEQ ID NO: 2366538 - RNA, 19 nt, Artificial Sequence
  Description of Artificial Sequence: Synthetic oligonucleotide
agccuuugagagcaucuuc

SEQ ID NO: 2366539 - RNA, 19 nt, Artificial Sequence
  Description of Artificial Sequence: Synthetic oligonucleotide
auccgugccccauuuguuc

SEQ ID NO: 2366540 - RNA, 19 nt, Artificial Sequence
  Description of Artificial Sequence: Synthetic oligonucleotide
gagaugcucuacuauaaaa

SEQ ID NO: 2366541 - RNA, 19 nt, Artificial Sequence
  Description of Artificial Sequence: Synthetic oligonucleotide
guauaauaggccugcguga

SEQ ID NO: 2366542 - RNA, 19 nt, Artificial Sequence
  Description of Artificial Sequence: Synthetic oligonucleotide
auuuguucucaccagcauu

SEQ ID NO: 2366543 - RNA, 19 nt, Artificial Sequence
  Description of Artificial Sequence: Synthetic oligonucleotide
agagcacgagucuguaauc

SEQ ID NO: 2366544 - RNA, 19 nt, Artificial Sequence
  Description of Artificial Sequence: Synthetic oligonucleotide
cuugaacucaugccggaug

SEQ ID NO: 2366545 - RNA, 19 nt, Artificial Sequence
  Description of Artificial Sequence: Synthetic oligonucleotide
guaucugacugaauggcug

SEQ ID NO: 2366546 - RNA, 19 nt, Artificial Sequence
  Description of Artificial Sequence: Synthetic oligonucleotide
caucaaauguuagucucag

SEQ ID NO: 2366547 - RNA, 19 nt, Artificial Sequence
  Description of Artificial Sequence: Synthetic oligonucleotide
acugaacaaugacaauucu

SEQ ID NO: 2366548 - RNA, 19 nt, Artificial Sequence
  Description of Artificial Sequence: Synthetic oligonucleotide
caaugacaauucuuagcag

SEQ ID NO: 2366549 - RNA, 19 nt, Artificial Sequence
  Description of Artificial Sequence: Synthetic oligonucleotide
ugagaugcucuacuauaaa

SEQ ID NO: 2366550 - RNA, 19 nt, Artificial Sequence
  Description of Artificial Sequence: Synthetic oligonucleotide
cuccacagaucuucaagag

SEQ ID NO: 2366551 - RNA, 19 nt, Artificial Sequence
  Description of Artificial Sequence: Synthetic oligonucleotide
cuucuuauacgcuguauaa

SEQ ID NO: 2366552 - RNA, 19 nt, Artificial Sequence
  Description of Artificial Sequence: Synthetic oligonucleotide
agaugcucuacuauaaaau

SEQ ID NO: 2366553 - RNA, 19 nt, Artificial Sequence
  Description of Artificial Sequence: Synthetic oligonucleotide
agcacgagucuguaaucuc

SEQ ID NO: 2366554 - RNA, 19 nt, Artificial Sequence
  Description of Artificial Sequence: Synthetic oligonucleotide
aaccauuauucuguugaga

SEQ ID NO: 2366555 - RNA, 19 nt, Artificial Sequence
  Description of Artificial Sequence: Synthetic oligonucleotide
uagccauaaugcuucuuga

SEQ ID NO: 2366556 - RNA, 19 nt, Artificial Sequence
  Description of Artificial Sequence: Synthetic oligonucleotide
ccagacucuucuuauacgc

SEQ ID NO: 2366557 - RNA, 19 nt, Artificial Sequence
  Description of Artificial Sequence: Synthetic oligonucleotide
uauagaggaucugugcauc

SEQ ID NO: 2366558 - RNA, 19 nt, Artificial Sequence
  Description of Artificial Sequence: Synthetic oligonucleotide
ucuuagcaggcagacaggu

SEQ ID NO: 2366559 - RNA, 19 nt, Artificial Sequence
  Description of Artificial Sequence: Synthetic oligonucleotide
agauguuuccgaacuaaug

SEQ ID NO: 2366560 - RNA, 19 nt, Artificial Sequence
  Description of Artificial Sequence: Synthetic oligonucleotide
aaagcuguaagcagagcuu

SEQ ID NO: 2366561 - RNA, 19 nt, Artificial Sequence
  Description of Artificial Sequence: Synthetic oligonucleotide
auaauaggccugcgugauc

SEQ ID NO: 2366562 - RNA, 19 nt, Artificial Sequence
  Description of Artificial Sequence: Synthetic oligonucleotide
ugcggucuugcauuugucu

SEQ ID NO: 2366563 - RNA, 19 nt, Artificial Sequence
  Description of Artificial Sequence: Synthetic oligonucleotide
uaguugcuuugcaucaaac

SEQ ID NO: 2366564 - RNA, 19 nt, Artificial Sequence
  Description of Artificial Sequence: Synthetic oligonucleotide
uuuagacuuucaucucuuc

SEQ ID NO: 2366565 - RNA, 19 nt, Artificial Sequence
  Description of Artificial Sequence: Synthetic oligonucleotide
guuagucucagcugaggga

SEQ ID NO: 2366566 - RNA, 19 nt, Artificial Sequence
  Description of Artificial Sequence: Synthetic oligonucleotide
augcucuacuauaaaauca

SEQ ID NO: 2366567 - RNA, 19 nt, Artificial Sequence
  Description of Artificial Sequence: Synthetic oligonucleotide
ucuggcuaauauuucugua

SEQ ID NO: 2366568 - RNA, 19 nt, Artificial Sequence
  Description of Artificial Sequence: Synthetic oligonucleotide
gucuguaaucuccagaagu

SEQ ID NO: 2366569 - RNA, 19 nt, Artificial Sequence
  Description of Artificial Sequence: Synthetic oligonucleotide
uguccuucuggcuaauauu

SEQ ID NO: 2366570 - RNA, 19 nt, Artificial Sequence
  Description of Artificial Sequence: Synthetic oligonucleotide
caaucaaggcaucuucguc

SEQ ID NO: 2366571 - RNA, 19 nt, Artificial Sequence
  Description of Artificial Sequence: Synthetic oligonucleotide
agacagguugcggucuugc

SEQ ID NO: 2366572 - RNA, 19 nt, Artificial Sequence
  Description of Artificial Sequence: Synthetic oligonucleotide
ugccggauguccaggaggu

SEQ ID NO: 2366573 - RNA, 19 nt, Artificial Sequence
  Description of Artificial Sequence: Synthetic oligonucleotide
auguccuucuggcuaauau

SEQ ID NO: 2366574 - RNA, 19 nt, Artificial Sequence
  Description of Artificial Sequence: Synthetic oligonucleotide
gggcaguagccuuugagag

SEQ ID NO: 2366575 - RNA, 19 nt, Artificial Sequence
  Description of Artificial Sequence: Synthetic oligonucleotide
uccucguacaaugaacuau

SEQ ID NO: 2366576 - RNA, 19 nt, Artificial Sequence
  Description of Artificial Sequence: Synthetic oligonucleotide
agacuuuccggaagucacc

SEQ ID NO: 2366577 - RNA, 19 nt, Artificial Sequence
  Description of Artificial Sequence: Synthetic oligonucleotide
cucguacaaugaacuauag

SEQ ID NO: 2366578 - RNA, 19 nt, Artificial Sequence
  Description of Artificial Sequence: Synthetic oligonucleotide
aucuucguccgucccagug

SEQ ID NO: 2366579 - RNA, 19 nt, Artificial Sequence
  Description of Artificial Sequence: Synthetic oligonucleotide
uaaucuccagaaguaucug

SEQ ID NO: 2366580 - RNA, 19 nt, Artificial Sequence
  Description of Artificial Sequence: Synthetic oligonucleotide
uucuugaacucaugccgga

SEQ ID NO: 2366581 - RNA, 19 nt, Artificial Sequence
  Description of Artificial Sequence: Synthetic oligonucleotide
auagaggaucugugcaucu

SEQ ID NO: 2366582 - RNA, 19 nt, Artificial Sequence
  Description of Artificial Sequence: Synthetic oligonucleotide
gucacaagagccaccauga

SEQ ID NO: 2366583 - RNA, 19 nt, Artificial Sequence
  Description of Artificial Sequence: Synthetic oligonucleotide
gagaccugucgucagggca

SEQ ID NO: 2366584 - RNA, 19 nt, Artificial Sequence
  Description of Artificial Sequence: Synthetic oligonucleotide
aagugcccagauaacucuc

SEQ ID NO: 2366585 - RNA, 19 nt, Artificial Sequence
  Description of Artificial Sequence: Synthetic oligonucleotide
agagccaccaugauaugcu

SEQ ID NO: 2366586 - RNA, 19 nt, Artificial Sequence
  Description of Artificial Sequence: Synthetic oligonucleotide
ccacagaucuucaagagca

SEQ ID NO: 2366587 - RNA, 19 nt, Artificial Sequence
  Description of Artificial Sequence: Synthetic oligonucleotide
acucaugccggauguccag

SEQ ID NO: 2366588 - RNA, 19 nt, Artificial Sequence
  Description of Artificial Sequence: Synthetic oligonucleotide
gguuaagauuucaaucaag

SEQ ID NO: 2366589 - RNA, 19 nt, Artificial Sequence
  Description of Artificial Sequence: Synthetic oligonucleotide
gccauaaugcuucuugaac

SEQ ID NO: 2366590 - RNA, 19 nt, Artificial Sequence
  Description of Artificial Sequence: Synthetic oligonucleotide
ugacaauucuuagcaggca

SEQ ID NO: 2366591 - RNA, 19 nt, Artificial Sequence
  Description of Artificial Sequence: Synthetic oligonucleotide
gcuaauauuucuguacuca

SEQ ID NO: 2366592 - RNA, 19 nt, Artificial Sequence
  Description of Artificial Sequence: Synthetic oligonucleotide
auguuagucucagcugagg

SEQ ID NO: 2366593 - RNA, 19 nt, Artificial Sequence
  Description of Artificial Sequence: Synthetic oligonucleotide
caaugaacuauagccagca

SEQ ID NO: 2366594 - RNA, 19 nt, Artificial Sequence
  Description of Artificial Sequence: Synthetic oligonucleotide
aucaaacagggcuggugca

SEQ ID NO: 2366595 - RNA, 19 nt, Artificial Sequence
  Description of Artificial Sequence: Synthetic oligonucleotide
ugcagucacaagagccacc

SEQ ID NO: 2366596 - RNA, 19 nt, Artificial Sequence
  Description of Artificial Sequence: Synthetic oligonucleotide
uggccagauguucauccac

SEQ ID NO: 2366597 - RNA, 19 nt, Artificial Sequence
  Description of Artificial Sequence: Synthetic oligonucleotide
cuuuccggaagucaccaga

SEQ ID NO: 2366598 - RNA, 19 nt, Artificial Sequence
  Description of Artificial Sequence: Synthetic oligonucleotide
ucucccagacucuucuuau

SEQ ID NO: 2366599 - RNA, 19 nt, Artificial Sequence
  Description of Artificial Sequence: Synthetic oligonucleotide
acuuugggacacuguagga

SEQ ID NO: 2366600 - RNA, 19 nt, Artificial Sequence
  Description of Artificial Sequence: Synthetic oligonucleotide
aguagccuuugagagcauc

SEQ ID NO: 2366601 - RNA, 19 nt, Artificial Sequence
  Description of Artificial Sequence: Synthetic oligonucleotide
aggaaagcuguaagcagag

SEQ ID NO: 2366602 - RNA, 19 nt, Artificial Sequence
  Description of Artificial Sequence: Synthetic oligonucleotide
uguugccgagaccugucgu

SEQ ID NO: 2366603 - RNA, 19 nt, Artificial Sequence
  Description of Artificial Sequence: Synthetic oligonucleotide
agagacuuuccggaaguca

SEQ ID NO: 2366604 - RNA, 19 nt, Artificial Sequence
  Description of Artificial Sequence: Synthetic oligonucleotide
auaaugcuucuugaacuca

SEQ ID NO: 2366605 - RNA, 19 nt, Artificial Sequence
  Description of Artificial Sequence: Synthetic oligonucleotide
cagcagcaggucuucaaag

SEQ ID NO: 2366606 - RNA, 19 nt, Artificial Sequence
  Description of Artificial Sequence: Synthetic oligonucleotide
agccauaaugcuucuugaa

SEQ ID NO: 2366607 - RNA, 19 nt, Artificial Sequence
  Description of Artificial Sequence: Synthetic oligonucleotide
cuuuugcuguugccgagac

SEQ ID NO: 2366608 - RNA, 19 nt, Artificial Sequence
  Description of Artificial Sequence: Synthetic oligonucleotide
cagggcaguagccuuugag

SEQ ID NO: 2366609 - RNA, 19 nt, Artificial Sequence
  Description of Artificial Sequence: Synthetic oligonucleotide
cuuuuagacuuucaucucu

SEQ ID NO: 2366610 - RNA, 19 nt, Artificial Sequence
  Description of Artificial Sequence: Synthetic oligonucleotide
agaccugucgucagggcag

SEQ ID NO: 2366611 - RNA, 19 nt, Artificial Sequence
  Description of Artificial Sequence: Synthetic oligonucleotide
uuguccuggugguuaagau

SEQ ID NO: 2366612 - RNA, 19 nt, Artificial Sequence
  Description of Artificial Sequence: Synthetic oligonucleotide
ugagugcagagaguagcca

SEQ ID NO: 2366613 - RNA, 19 nt, Artificial Sequence
  Description of Artificial Sequence: Synthetic oligonucleotide
aacucaugccggaugucca

SEQ ID NO: 2366614 - RNA, 19 nt, Artificial Sequence
  Description of Artificial Sequence: Synthetic oligonucleotide
uaaugucaucucccagacu

SEQ ID NO: 2366615 - RNA, 19 nt, Artificial Sequence
  Description of Artificial Sequence: Synthetic oligonucleotide
ugccccauuuguucucacc

SEQ ID NO: 2366616 - RNA, 19 nt, Artificial Sequence
  Description of Artificial Sequence: Synthetic oligonucleotide
acaauucuuagcaggcaga

SEQ ID NO: 2366617 - RNA, 19 nt, Artificial Sequence
  Description of Artificial Sequence: Synthetic oligonucleotide
uccgugccccauuuguucu

SEQ ID NO: 2366618 - RNA, 19 nt, Artificial Sequence
  Description of Artificial Sequence: Synthetic oligonucleotide
uagucucagcugagggaag

SEQ ID NO: 2366619 - RNA, 19 nt, Artificial Sequence
  Description of Artificial Sequence: Synthetic oligonucleotide
cagagcuuuugcuguugcc

SEQ ID NO: 2366620 - RNA, 19 nt, Artificial Sequence
  Description of Artificial Sequence: Synthetic oligonucleotide
acgagucuguaaucuccag

SEQ ID NO: 2366621 - RNA, 19 nt, Artificial Sequence
  Description of Artificial Sequence: Synthetic oligonucleotide
guugccgagaccugucguc

SEQ ID NO: 2366622 - RNA, 19 nt, Artificial Sequence
  Description of Artificial Sequence: Synthetic oligonucleotide
ugcccuugcacugaacaau

SEQ ID NO: 2366623 - RNA, 19 nt, Artificial Sequence
  Description of Artificial Sequence: Synthetic oligonucleotide
cuguugccgagaccugucg

SEQ ID NO: 2366624 - RNA, 19 nt, Artificial Sequence
  Description of Artificial Sequence: Synthetic oligonucleotide
guacucaucaaauguuagu

SEQ ID NO: 2366625 - RNA, 19 nt, Artificial Sequence
  Description of Artificial Sequence: Synthetic oligonucleotide
ccacuuuuagacuuucauc

SEQ ID NO: 2366626 - RNA, 19 nt, Artificial Sequence
  Description of Artificial Sequence: Synthetic oligonucleotide
cuguacucaucaaauguua

SEQ ID NO: 2366627 - RNA, 19 nt, Artificial Sequence
  Description of Artificial Sequence: Synthetic oligonucleotide
uccgaacuaaugucaucuc

SEQ ID NO: 2366628 - RNA, 19 nt, Artificial Sequence
  Description of Artificial Sequence: Synthetic oligonucleotide
gacuuuccggaagucacca

SEQ ID NO: 2366629 - RNA, 19 nt, Artificial Sequence
  Description of Artificial Sequence: Synthetic oligonucleotide
augagaugcucuacuauaa

SEQ ID NO: 2366630 - RNA, 19 nt, Artificial Sequence
  Description of Artificial Sequence: Synthetic oligonucleotide
uucauccgugccccauuug

SEQ ID NO: 2366631 - RNA, 19 nt, Artificial Sequence
  Description of Artificial Sequence: Synthetic oligonucleotide
cacagaucuucaagagcac

SEQ ID NO: 2366632 - RNA, 19 nt, Artificial Sequence
  Description of Artificial Sequence: Synthetic oligonucleotide
gcauuauagaggaucugug

SEQ ID NO: 2366633 - RNA, 19 nt, Artificial Sequence
  Description of Artificial Sequence: Synthetic oligonucleotide
uggaaaccauuauucuguu

SEQ ID NO: 2366634 - RNA, 19 nt, Artificial Sequence
  Description of Artificial Sequence: Synthetic oligonucleotide
gcaguagccuuugagagca

SEQ ID NO: 2366635 - RNA, 19 nt, Artificial Sequence
  Description of Artificial Sequence: Synthetic oligonucleotide
uugccgagaccugucguca

SEQ ID NO: 2366636 - RNA, 19 nt, Artificial Sequence
  Description of Artificial Sequence: Synthetic oligonucleotide
cuaccaucugccagaguca

SEQ ID NO: 2366637 - RNA, 19 nt, Artificial Sequence
  Description of Artificial Sequence: Synthetic oligonucleotide
ggcaguagccuuugagagc

SEQ ID NO: 2366638 - RNA, 19 nt, Artificial Sequence
  Description of Artificial Sequence: Synthetic oligonucleotide
uuccucguacaaugaacua

SEQ ID NO: 2366639 - RNA, 19 nt, Artificial Sequence
  Description of Artificial Sequence: Synthetic oligonucleotide
aggaccucggugaauuugu

SEQ ID NO: 2366640 - RNA, 19 nt, Artificial Sequence
  Description of Artificial Sequence: Synthetic oligonucleotide
gauuucaaucaaggcaucu

SEQ ID NO: 2366641 - RNA, 19 nt, Artificial Sequence
  Description of Artificial Sequence: Synthetic oligonucleotide
guuccucguacaaugaacu

SEQ ID NO: 2366642 - RNA, 19 nt, Artificial Sequence
  Description of Artificial Sequence: Synthetic oligonucleotide
gcggucuugcauuugucug

SEQ ID NO: 2366643 - RNA, 19 nt, Artificial Sequence
  Description of Artificial Sequence: Synthetic oligonucleotide
cagauguucauccacuuuu

SEQ ID NO: 2366644 - RNA, 19 nt, Artificial Sequence
  Description of Artificial Sequence: Synthetic oligonucleotide
cacgagucuguaaucucca

SEQ ID NO: 2366645 - RNA, 19 nt, Artificial Sequence
  Description of Artificial Sequence: Synthetic oligonucleotide
cucaugccggauguccagg

SEQ ID NO: 2366646 - RNA, 19 nt, Artificial Sequence
  Description of Artificial Sequence: Synthetic oligonucleotide
ucuugaacucaugccggau

SEQ ID NO: 2366647 - RNA, 19 nt, Artificial Sequence
  Description of Artificial Sequence: Synthetic oligonucleotide
agcuccgcagacacaggac

SEQ ID NO: 2366648 - RNA, 19 nt, Artificial Sequence
  Description of Artificial Sequence: Synthetic oligonucleotide
gcugagggaagcuccgcag

SEQ ID NO: 2366649 - RNA, 19 nt, Artificial Sequence
  Description of Artificial Sequence: Synthetic oligonucleotide
caugccggauguccaggag

SEQ ID NO: 2366650 - RNA, 19 nt, Artificial Sequence
  Description of Artificial Sequence: Synthetic oligonucleotide
acucuccuuuaaugcuguc

SEQ ID NO: 2366651 - RNA, 19 nt, Artificial Sequence
  Description of Artificial Sequence: Synthetic oligonucleotide
cccagacucuucuuauacg

SEQ ID NO: 2366652 - RNA, 19 nt, Artificial Sequence
  Description of Artificial Sequence: Synthetic oligonucleotide
gacagguugcggucuugca

SEQ ID NO: 2366653 - RNA, 19 nt, Artificial Sequence
  Description of Artificial Sequence: Synthetic oligonucleotide
ccuugcacugaacaaugac

SEQ ID NO: 2366654 - RNA, 19 nt, Artificial Sequence
  Description of Artificial Sequence: Synthetic oligonucleotide
cacaagagccaccaugaua

SEQ ID NO: 2366655 - RNA, 19 nt, Artificial Sequence
  Description of Artificial Sequence: Synthetic oligonucleotide
ucaagagcacgagucugua

SEQ ID NO: 2366656 - RNA, 19 nt, Artificial Sequence
  Description of Artificial Sequence: Synthetic oligonucleotide
gcuguaagcagagcuuuug

SEQ ID NO: 2366657 - RNA, 19 nt, Artificial Sequence
  Description of Artificial Sequence: Synthetic oligonucleotide
gagugcagagaguagccau

SEQ ID NO: 2366658 - RNA, 19 nt, Artificial Sequence
  Description of Artificial Sequence: Synthetic oligonucleotide
gcacgagucuguaaucucc

SEQ ID NO: 2366659 - RNA, 19 nt, Artificial Sequence
  Description of Artificial Sequence: Synthetic oligonucleotide
guugcggucuugcauuugu

SEQ ID NO: 2366660 - RNA, 19 nt, Artificial Sequence
  Description of Artificial Sequence: Synthetic oligonucleotide
ugcuuguccuggugguuaa

SEQ ID NO: 2366661 - RNA, 19 nt, Artificial Sequence
  Description of Artificial Sequence: Synthetic oligonucleotide
ucguccgucccagugcccu

SEQ ID NO: 2366662 - RNA, 19 nt, Artificial Sequence
  Description of Artificial Sequence: Synthetic oligonucleotide
uugcggucuugcauuuguc

SEQ ID NO: 2366663 - RNA, 19 nt, Artificial Sequence
  Description of Artificial Sequence: Synthetic oligonucleotide
gaauggcugagugcagaga

SEQ ID NO: 2366664 - RNA, 19 nt, Artificial Sequence
  Description of Artificial Sequence: Synthetic oligonucleotide
ucccagugcccuucauaga

SEQ ID NO: 2366665 - RNA, 19 nt, Artificial Sequence
  Description of Artificial Sequence: Synthetic oligonucleotide
ugcagagaguagccauaau

SEQ ID NO: 2366666 - RNA, 19 nt, Artificial Sequence
  Description of Artificial Sequence: Synthetic oligonucleotide
uugcauuugucugcacuuu

SEQ ID NO: 2366667 - RNA, 19 nt, Artificial Sequence
  Description of Artificial Sequence: Synthetic oligonucleotide
uggguguuccucguacaau

SEQ ID NO: 2366668 - RNA, 19 nt, Artificial Sequence
  Description of Artificial Sequence: Synthetic oligonucleotide
ccuccacagaucuucaaga

SEQ ID NO: 2366669 - RNA, 19 nt, Artificial Sequence
  Description of Artificial Sequence: Synthetic oligonucleotide
cugagggaagcuccgcaga

SEQ ID NO: 2366670 - RNA, 19 nt, Artificial Sequence
  Description of Artificial Sequence: Synthetic oligonucleotide
ugaacucaugccggauguc

SEQ ID NO: 2366671 - RNA, 19 nt, Artificial Sequence
  Description of Artificial Sequence: Synthetic oligonucleotide
cucggugaauuugucuuca

SEQ ID NO: 2366672 - RNA, 19 nt, Artificial Sequence
  Description of Artificial Sequence: Synthetic oligonucleotide
gagcacgagucuguaaucu

SEQ ID NO: 2366673 - RNA, 19 nt, Artificial Sequence
  Description of Artificial Sequence: Synthetic oligonucleotide
ccauuuguucucaccagca

SEQ ID NO: 2366674 - RNA, 19 nt, Artificial Sequence
  Description of Artificial Sequence: Synthetic oligonucleotide
ucaaggcaucuucguccgu

SEQ ID NO: 2366675 - RNA, 19 nt, Artificial Sequence
  Description of Artificial Sequence: Synthetic oligonucleotide
acgcuguauaauaggccug

SEQ ID NO: 2366676 - RNA, 19 nt, Artificial Sequence
  Description of Artificial Sequence: Synthetic oligonucleotide
agugcccuucauagacuuc

SEQ ID NO: 2366677 - RNA, 19 nt, Artificial Sequence
  Description of Artificial Sequence: Synthetic oligonucleotide
agugcagagaguagccaua

SEQ ID NO: 2366678 - RNA, 19 nt, Artificial Sequence
  Description of Artificial Sequence: Synthetic oligonucleotide
cuguauaauaggccugcgu

SEQ ID NO: 2366679 - RNA, 19 nt, Artificial Sequence
  Description of Artificial Sequence: Synthetic oligonucleotide
cagcauuauagaggaucug

SEQ ID NO: 2366680 - RNA, 19 nt, Artificial Sequence
  Description of Artificial Sequence: Synthetic oligonucleotide
guagccuuugagagcaucu

SEQ ID NO: 2366681 - RNA, 19 nt, Artificial Sequence
  Description of Artificial Sequence: Synthetic oligonucleotide
gcucuacuauaaaaucaug

SEQ ID NO: 2366682 - RNA, 19 nt, Artificial Sequence
  Description of Artificial Sequence: Synthetic oligonucleotide
cugcgugaucuccuucauc

SEQ ID NO: 2366683 - RNA, 19 nt, Artificial Sequence
  Description of Artificial Sequence: Synthetic oligonucleotide
uccgucccagugcccuuca

SEQ ID NO: 2366684 - RNA, 19 nt, Artificial Sequence
  Description of Artificial Sequence: Synthetic oligonucleotide
aagcuggguguuccucgua

SEQ ID NO: 2366685 - RNA, 19 nt, Artificial Sequence
  Description of Artificial Sequence: Synthetic oligonucleotide
cuggguguuccucguacaa

SEQ ID NO: 2366686 - RNA, 19 nt, Artificial Sequence
  Description of Artificial Sequence: Synthetic oligonucleotide
ccucguacaaugaacuaua

SEQ ID NO: 2366687 - RNA, 19 nt, Artificial Sequence
  Description of Artificial Sequence: Synthetic oligonucleotide
ccccauuuguucucaccag

SEQ ID NO: 2366688 - RNA, 19 nt, Artificial Sequence
  Description of Artificial Sequence: Synthetic oligonucleotide
gccgagaccugucgucagg

SEQ ID NO: 2366689 - RNA, 19 nt, Artificial Sequence
  Description of Artificial Sequence: Synthetic oligonucleotide
cagacucuucuuauacgcu

SEQ ID NO: 2366690 - RNA, 19 nt, Artificial Sequence
  Description of Artificial Sequence: Synthetic oligonucleotide
cagauaacucuccuuuaau

SEQ ID NO: 2366691 - RNA, 19 nt, Artificial Sequence
  Description of Artificial Sequence: Synthetic oligonucleotide
caagagcacgagucuguaa

SEQ ID NO: 2366692 - RNA, 19 nt, Artificial Sequence
  Description of Artificial Sequence: Synthetic oligonucleotide
ccagauaacucuccuuuaa

SEQ ID NO: 2366693 - RNA, 19 nt, Artificial Sequence
  Description of Artificial Sequence: Synthetic oligonucleotide
gccugcgugaucuccuuca

SEQ ID NO: 2366694 - RNA, 19 nt, Artificial Sequence
  Description of Artificial Sequence: Synthetic oligonucleotide
cugccugcuuguccuggug

SEQ ID NO: 2366695 - RNA, 19 nt, Artificial Sequence
  Description of Artificial Sequence: Synthetic oligonucleotide
guuuccgaacuaaugucau

SEQ ID NO: 2366696 - RNA, 19 nt, Artificial Sequence
  Description of Artificial Sequence: Synthetic oligonucleotide
gcccuugcacugaacaaug

SEQ ID NO: 2366697 - RNA, 19 nt, Artificial Sequence
  Description of Artificial Sequence: Synthetic oligonucleotide
gugcagagaguagccauaa

SEQ ID NO: 2366698 - RNA, 19 nt, Artificial Sequence
  Description of Artificial Sequence: Synthetic oligonucleotide
gcacugaacaaugacaauu

SEQ ID NO: 2366699 - RNA, 19 nt, Artificial Sequence
  Description of Artificial Sequence: Synthetic oligonucleotide
agguugcggucuugcauuu

SEQ ID NO: 2366700 - RNA, 19 nt, Artificial Sequence
  Description of Artificial Sequence: Synthetic oligonucleotide
ggucuugcauuugucugca

SEQ ID NO: 2366701 - RNA, 19 nt, Artificial Sequence
  Description of Artificial Sequence: Synthetic oligonucleotide
cagguugcggucuugcauu

SEQ ID NO: 2366702 - RNA, 19 nt, Artificial Sequence
  Description of Artificial Sequence: Synthetic oligonucleotide
ccagcauuauagaggaucu

SEQ ID NO: 2366703 - RNA, 19 nt, Artificial Sequence
  Description of Artificial Sequence: Synthetic oligonucleotide
cuuuugcccuugcacugaa

SEQ ID NO: 2366704 - RNA, 19 nt, Artificial Sequence
  Description of Artificial Sequence: Synthetic oligonucleotide
gucaucucccagacucuuc

SEQ ID NO: 2366705 - RNA, 19 nt, Artificial Sequence
  Description of Artificial Sequence: Synthetic oligonucleotide
cugaucuggaaaccauuau

SEQ ID NO: 2366706 - RNA, 19 nt, Artificial Sequence
  Description of Artificial Sequence: Synthetic oligonucleotide
ccugucgucagggcaguag

SEQ ID NO: 2366707 - RNA, 19 nt, Artificial Sequence
  Description of Artificial Sequence: Synthetic oligonucleotide
ccucggugaauuugucuuc

SEQ ID NO: 2366708 - RNA, 19 nt, Artificial Sequence
  Description of Artificial Sequence: Synthetic oligonucleotide
ccgagaccugucgucaggg

SEQ ID NO: 2366709 - RNA, 19 nt, Artificial Sequence
  Description of Artificial Sequence: Synthetic oligonucleotide
cagcugagggaagcuccgc

SEQ ID NO: 2366710 - RNA, 19 nt, Artificial Sequence
  Description of Artificial Sequence: Synthetic oligonucleotide
cuguaaucuccagaaguau

SEQ ID NO: 2366711 - RNA, 19 nt, Artificial Sequence
  Description of Artificial Sequence: Synthetic oligonucleotide
gcccagauaacucuccuuu

SEQ ID NO: 2366712 - RNA, 19 nt, Artificial Sequence
  Description of Artificial Sequence: Synthetic oligonucleotide
gcuggguguuccucguaca

SEQ ID NO: 2366713 - RNA, 19 nt, Artificial Sequence
  Description of Artificial Sequence: Synthetic oligonucleotide
ccagaaguaucugacugaa

SEQ ID NO: 2366714 - RNA, 19 nt, Artificial Sequence
  Description of Artificial Sequence: Synthetic oligonucleotide
cucccagacucuucuuaua

SEQ ID NO: 2366715 - RNA, 19 nt, Artificial Sequence
  Description of Artificial Sequence: Synthetic oligonucleotide
ccuuuaaugcuguccucaa

SEQ ID NO: 2366716 - RNA, 19 nt, Artificial Sequence
  Description of Artificial Sequence: Synthetic oligonucleotide
cuccgcagacacaggaccu

SEQ ID NO: 2366717 - RNA, 19 nt, Artificial Sequence
  Description of Artificial Sequence: Synthetic oligonucleotide
cugcuuguccuggugguua

SEQ ID NO: 2366718 - RNA, 19 nt, Artificial Sequence
  Description of Artificial Sequence: Synthetic oligonucleotide
cagacagguugcggucuug

SEQ ID NO: 2366719 - RNA, 19 nt, Artificial Sequence
  Description of Artificial Sequence: Synthetic oligonucleotide
agcuguaagcagagcuuuu

SEQ ID NO: 2366720 - RNA, 19 nt, Artificial Sequence
  Description of Artificial Sequence: Synthetic oligonucleotide
cggugaauuugucuucauc

SEQ ID NO: 2366721 - RNA, 19 nt, Artificial Sequence
  Description of Artificial Sequence: Synthetic oligonucleotide
acacuguaggaaagcugua

SEQ ID NO: 2366722 - RNA, 19 nt, Artificial Sequence
  Description of Artificial Sequence: Synthetic oligonucleotide
gcuuuugcccuugcacuga

SEQ ID NO: 2366723 - RNA, 19 nt, Artificial Sequence
  Description of Artificial Sequence: Synthetic oligonucleotide
cgagucuguaaucuccaga

SEQ ID NO: 2366724 - RNA, 19 nt, Artificial Sequence
  Description of Artificial Sequence: Synthetic oligonucleotide
ccauuauucuguugagagu

SEQ ID NO: 2366725 - RNA, 19 nt, Artificial Sequence
  Description of Artificial Sequence: Synthetic oligonucleotide
cuuagcaggcagacagguu

SEQ ID NO: 2366726 - RNA, 19 nt, Artificial Sequence
  Description of Artificial Sequence: Synthetic oligonucleotide
gugccccauuuguucucac

SEQ ID NO: 2366727 - RNA, 19 nt, Artificial Sequence
  Description of Artificial Sequence: Synthetic oligonucleotide
gcuguugccgagaccuguc

SEQ ID NO: 2366728 - RNA, 19 nt, Artificial Sequence
  Description of Artificial Sequence: Synthetic oligonucleotide
gguugcggucuugcauuug

SEQ ID NO: 2366729 - RNA, 19 nt, Artificial Sequence
  Description of Artificial Sequence: Synthetic oligonucleotide
ccuggugguuaagauuuca

SEQ ID NO: 2366730 - RNA, 19 nt, Artificial Sequence
  Description of Artificial Sequence: Synthetic oligonucleotide
cauccgugccccauuuguu

SEQ ID NO: 2366731 - RNA, 19 nt, Artificial Sequence
  Description of Artificial Sequence: Synthetic oligonucleotide
cugcacuuugggacacugu

SEQ ID NO: 2366732 - RNA, 19 nt, Artificial Sequence
  Description of Artificial Sequence: Synthetic oligonucleotide
cagggcuggugcagucaca

SEQ ID NO: 2366733 - RNA, 19 nt, Artificial Sequence
  Description of Artificial Sequence: Synthetic oligonucleotide
guccgucccagugcccuuc

SEQ ID NO: 2366734 - RNA, 19 nt, Artificial Sequence
  Description of Artificial Sequence: Synthetic oligonucleotide
cgagaccugucgucagggc

SEQ ID NO: 2366735 - RNA, 19 nt, Artificial Sequence
  Description of Artificial Sequence: Synthetic oligonucleotide
gucucagcugagggaagcu

SEQ ID NO: 2366736 - RNA, 19 nt, Artificial Sequence
  Description of Artificial Sequence: Synthetic oligonucleotide
ggaccucggugaauuuguc

SEQ ID NO: 2366737 - RNA, 19 nt, Artificial Sequence
  Description of Artificial Sequence: Synthetic oligonucleotide
cccuugcacugaacaauga

SEQ ID NO: 2366738 - RNA, 19 nt, Artificial Sequence
  Description of Artificial Sequence: Synthetic oligonucleotide
gaccugucgucagggcagu

SEQ ID NO: 2366739 - RNA, 19 nt, Artificial Sequence
  Description of Artificial Sequence: Synthetic oligonucleotide
ggcagacagguugcggucu

SEQ ID NO: 2366740 - RNA, 19 nt, Artificial Sequence
  Description of Artificial Sequence: Synthetic oligonucleotide
ccgugccccauuuguucuc

SEQ ID NO: 2366741 - RNA, 19 nt, Artificial Sequence
  Description of Artificial Sequence: Synthetic oligonucleotide
accugucgucagggcagua

SEQ ID NO: 2366742 - RNA, 19 nt, Artificial Sequence
  Description of Artificial Sequence: Synthetic oligonucleotide
cagucacaagagccaccau

SEQ ID NO: 2366743 - RNA, 19 nt, Artificial Sequence
  Description of Artificial Sequence: Synthetic oligonucleotide
caccagcauuauagaggau

SEQ ID NO: 2366744 - RNA, 19 nt, Artificial Sequence
  Description of Artificial Sequence: Synthetic oligonucleotide
caguagccuuugagagcau

SEQ ID NO: 2366745 - RNA, 19 nt, Artificial Sequence
  Description of Artificial Sequence: Synthetic oligonucleotide
ccugcgugaucuccuucau

SEQ ID NO: 2366746 - RNA, 19 nt, Artificial Sequence
  Description of Artificial Sequence: Synthetic oligonucleotide
ccgucccagugcccuucau

SEQ ID NO: 2366747 - RNA, 19 nt, Artificial Sequence
  Description of Artificial Sequence: Synthetic oligonucleotide
cguccgucccagugcccuu

SEQ ID NO: 2366748 - RNA, 19 nt, Artificial Sequence
  Description of Artificial Sequence: Synthetic oligonucleotide
aaaggcguggcugugaucc

SEQ ID NO: 2366749 - RNA, 19 nt, Artificial Sequence
  Description of Artificial Sequence: Synthetic oligonucleotide
acuauugagggucaugccc

SEQ ID NO: 2366750 - RNA, 19 nt, Artificial Sequence
  Description of Artificial Sequence: Synthetic oligonucleotide
aaagacuccgauucccucc

SEQ ID NO: 2366751 - RNA, 19 nt, Artificial Sequence
  Description of Artificial Sequence: Synthetic oligonucleotide
uauagugucaaaugggugc

SEQ ID NO: 2366752 - RNA, 19 nt, Artificial Sequence
  Description of Artificial Sequence: Synthetic oligonucleotide
cuuuauagugucaaauggg

SEQ ID NO: 2366753 - RNA, 19 nt, Artificial Sequence
  Description of Artificial Sequence: Synthetic oligonucleotide
gacuugaucacaucaaaag

SEQ ID NO: 2366754 - RNA, 19 nt, Artificial Sequence
  Description of Artificial Sequence: Synthetic oligonucleotide
uuuauagugucaaaugggu

SEQ ID NO: 2366755 - RNA, 19 nt, Artificial Sequence
  Description of Artificial Sequence: Synthetic oligonucleotide
ucagcagauauucauagcu

SEQ ID NO: 2366756 - RNA, 19 nt, Artificial Sequence
  Description of Artificial Sequence: Synthetic oligonucleotide
aguacaaccugcuaugaag

SEQ ID NO: 2366757 - RNA, 19 nt, Artificial Sequence
  Description of Artificial Sequence: Synthetic oligonucleotide
uaagucuugaguaugcagu

SEQ ID NO: 2366758 - RNA, 19 nt, Artificial Sequence
  Description of Artificial Sequence: Synthetic oligonucleotide
cuuugaugaggucaaaagg

SEQ ID NO: 2366759 - RNA, 19 nt, Artificial Sequence
  Description of Artificial Sequence: Synthetic oligonucleotide
agcuaaggaagguagcagc

SEQ ID NO: 2366760 - RNA, 19 nt, Artificial Sequence
  Description of Artificial Sequence: Synthetic oligonucleotide
uguagccggacuuugauga

SEQ ID NO: 2366761 - RNA, 19 nt, Artificial Sequence
  Description of Artificial Sequence: Synthetic oligonucleotide
uguacacuccaaaacagga

SEQ ID NO: 2366762 - RNA, 19 nt, Artificial Sequence
  Description of Artificial Sequence: Synthetic oligonucleotide
uguacuggcgacauagccc

SEQ ID NO: 2366763 - RNA, 19 nt, Artificial Sequence
  Description of Artificial Sequence: Synthetic oligonucleotide
uaggugacaaaguacauuc

SEQ ID NO: 2366764 - RNA, 19 nt, Artificial Sequence
  Description of Artificial Sequence: Synthetic oligonucleotide
gaguaugcaguccacaaug

SEQ ID NO: 2366765 - RNA, 19 nt, Artificial Sequence
  Description of Artificial Sequence: Synthetic oligonucleotide
ugcuguacacuccaaaaca

SEQ ID NO: 2366766 - RNA, 19 nt, Artificial Sequence
  Description of Artificial Sequence: Synthetic oligonucleotide
aaaagacuccgauucccuc

SEQ ID NO: 2366767 - RNA, 19 nt, Artificial Sequence
  Description of Artificial Sequence: Synthetic oligonucleotide
uguuuguguagcugggugg

SEQ ID NO: 2366768 - RNA, 19 nt, Artificial Sequence
  Description of Artificial Sequence: Synthetic oligonucleotide
uccgauucccuccugcugg

SEQ ID NO: 2366769 - RNA, 19 nt, Artificial Sequence
  Description of Artificial Sequence: Synthetic oligonucleotide
aggggugucccucagcacc

SEQ ID NO: 2366770 - RNA, 19 nt, Artificial Sequence
  Description of Artificial Sequence: Synthetic oligonucleotide
uugagaacucccuaucugc

SEQ ID NO: 2366771 - RNA, 19 nt, Artificial Sequence
  Description of Artificial Sequence: Synthetic oligonucleotide
gaagguagcagcauuaaca

SEQ ID NO: 2366772 - RNA, 19 nt, Artificial Sequence
  Description of Artificial Sequence: Synthetic oligonucleotide
acaagcucagcagauauuc

SEQ ID NO: 2366773 - RNA, 19 nt, Artificial Sequence
  Description of Artificial Sequence: Synthetic oligonucleotide
aaacaggacggaguugacc

SEQ ID NO: 2366774 - RNA, 19 nt, Artificial Sequence
  Description of Artificial Sequence: Synthetic oligonucleotide
uguucugggucuguaaccg

SEQ ID NO: 2366775 - RNA, 19 nt, Artificial Sequence
  Description of Artificial Sequence: Synthetic oligonucleotide
agauauucauagcuaagga

SEQ ID NO: 2366776 - RNA, 19 nt, Artificial Sequence
  Description of Artificial Sequence: Synthetic oligonucleotide
auagugucaaaugggugcc

SEQ ID NO: 2366777 - RNA, 19 nt, Artificial Sequence
  Description of Artificial Sequence: Synthetic oligonucleotide
aaugcccugguauguguuc

SEQ ID NO: 2366778 - RNA, 19 nt, Artificial Sequence
  Description of Artificial Sequence: Synthetic oligonucleotide
agcccguccaucugcaucc

SEQ ID NO: 2366779 - RNA, 19 nt, Artificial Sequence
  Description of Artificial Sequence: Synthetic oligonucleotide
ugucugguuuuguagccgg

SEQ ID NO: 2366780 - RNA, 19 nt, Artificial Sequence
  Description of Artificial Sequence: Synthetic oligonucleotide
aggcuaugccugcaaagcc

SEQ ID NO: 2366781 - RNA, 19 nt, Artificial Sequence
  Description of Artificial Sequence: Synthetic oligonucleotide
ugccauacaguccagcauc

SEQ ID NO: 2366782 - RNA, 19 nt, Artificial Sequence
  Description of Artificial Sequence: Synthetic oligonucleotide
ccuuuauagugucaaaugg

SEQ ID NO: 2366783 - RNA, 19 nt, Artificial Sequence
  Description of Artificial Sequence: Synthetic oligonucleotide
agggucaugcccuugaaaa

SEQ ID NO: 2366784 - RNA, 19 nt, Artificial Sequence
  Description of Artificial Sequence: Synthetic oligonucleotide
uccacaaugcccugguaug

SEQ ID NO: 2366785 - RNA, 19 nt, Artificial Sequence
  Description of Artificial Sequence: Synthetic oligonucleotide
uugcuguacacuccaaaac

SEQ ID NO: 2366786 - RNA, 19 nt, Artificial Sequence
  Description of Artificial Sequence: Synthetic oligonucleotide
aagcucagcagauauucau

SEQ ID NO: 2366787 - RNA, 19 nt, Artificial Sequence
  Description of Artificial Sequence: Synthetic oligonucleotide
cauacaguccagcaucccc

SEQ ID NO: 2366788 - RNA, 19 nt, Artificial Sequence
  Description of Artificial Sequence: Synthetic oligonucleotide
aguacauucccagcguagg

SEQ ID NO: 2366789 - RNA, 19 nt, Artificial Sequence
  Description of Artificial Sequence: Synthetic oligonucleotide
ugguaagucuugaguaugc

SEQ ID NO: 2366790 - RNA, 19 nt, Artificial Sequence
  Description of Artificial Sequence: Synthetic oligonucleotide
cagagauccagccagccac

SEQ ID NO: 2366791 - RNA, 19 nt, Artificial Sequence
  Description of Artificial Sequence: Synthetic oligonucleotide
ucaaaaggagccaggcagu

SEQ ID NO: 2366792 - RNA, 19 nt, Artificial Sequence
  Description of Artificial Sequence: Synthetic oligonucleotide
auuaacaggaaaggcccgg

SEQ ID NO: 2366793 - RNA, 19 nt, Artificial Sequence
  Description of Artificial Sequence: Synthetic oligonucleotide
aggucaaaaggagccaggc

SEQ ID NO: 2366794 - RNA, 19 nt, Artificial Sequence
  Description of Artificial Sequence: Synthetic oligonucleotide
agugucaaaugggugcccc

SEQ ID NO: 2366795 - RNA, 19 nt, Artificial Sequence
  Description of Artificial Sequence: Synthetic oligonucleotide
aucacaucaaaaggcgugg

SEQ ID NO: 2366796 - RNA, 19 nt, Artificial Sequence
  Description of Artificial Sequence: Synthetic oligonucleotide
guugaccagggcuacacug

SEQ ID NO: 2366797 - RNA, 19 nt, Artificial Sequence
  Description of Artificial Sequence: Synthetic oligonucleotide
agcagauauucauagcuaa

SEQ ID NO: 2366798 - RNA, 19 nt, Artificial Sequence
  Description of Artificial Sequence: Synthetic oligonucleotide
uaaccgcaccuuuauagug

SEQ ID NO: 2366799 - RNA, 19 nt, Artificial Sequence
  Description of Artificial Sequence: Synthetic oligonucleotide
ucuguaaccgcaccuuuau

SEQ ID NO: 2366800 - RNA, 19 nt, Artificial Sequence
  Description of Artificial Sequence: Synthetic oligonucleotide
uggugguaagucuugagua

SEQ ID NO: 2366801 - RNA, 19 nt, Artificial Sequence
  Description of Artificial Sequence: Synthetic oligonucleotide
guguguacuggcgacauag

SEQ ID NO: 2366802 - RNA, 19 nt, Artificial Sequence
  Description of Artificial Sequence: Synthetic oligonucleotide
aguaugcaguccacaaugc

SEQ ID NO: 2366803 - RNA, 19 nt, Artificial Sequence
  Description of Artificial Sequence: Synthetic oligonucleotide
uuuguagccggacuuugau

SEQ ID NO: 2366804 - RNA, 19 nt, Artificial Sequence
  Description of Artificial Sequence: Synthetic oligonucleotide
uuaacaggaaaggcccggg

SEQ ID NO: 2366805 - RNA, 19 nt, Artificial Sequence
  Description of Artificial Sequence: Synthetic oligonucleotide
gaagcucauucccuugaag

SEQ ID NO: 2366806 - RNA, 19 nt, Artificial Sequence
  Description of Artificial Sequence: Synthetic oligonucleotide
cauuaacaggaaaggcccg

SEQ ID NO: 2366807 - RNA, 19 nt, Artificial Sequence
  Description of Artificial Sequence: Synthetic oligonucleotide
aaaguacauucccagcgua

SEQ ID NO: 2366808 - RNA, 19 nt, Artificial Sequence
  Description of Artificial Sequence: Synthetic oligonucleotide
ugaggucaaaaggagccag

SEQ ID NO: 2366809 - RNA, 19 nt, Artificial Sequence
  Description of Artificial Sequence: Synthetic oligonucleotide
auagcuaaggaagguagca

SEQ ID NO: 2366810 - RNA, 19 nt, Artificial Sequence
  Description of Artificial Sequence: Synthetic oligonucleotide
uucugggucuguaaccgca

SEQ ID NO: 2366811 - RNA, 19 nt, Artificial Sequence
  Description of Artificial Sequence: Synthetic oligonucleotide
gaggcuaugccugcaaagc

SEQ ID NO: 2366812 - RNA, 19 nt, Artificial Sequence
  Description of Artificial Sequence: Synthetic oligonucleotide
cacgaacuccuccacaggc

SEQ ID NO: 2366813 - RNA, 19 nt, Artificial Sequence
  Description of Artificial Sequence: Synthetic oligonucleotide
uguugcuguacacuccaaa

SEQ ID NO: 2366814 - RNA, 19 nt, Artificial Sequence
  Description of Artificial Sequence: Synthetic oligonucleotide
ugcuaugaagauguuugug

SEQ ID NO: 2366815 - RNA, 19 nt, Artificial Sequence
  Description of Artificial Sequence: Synthetic oligonucleotide
aaguacauucccagcguag

SEQ ID NO: 2366816 - RNA, 19 nt, Artificial Sequence
  Description of Artificial Sequence: Synthetic oligonucleotide
gcauuaacaggaaaggccc

SEQ ID NO: 2366817 - RNA, 19 nt, Artificial Sequence
  Description of Artificial Sequence: Synthetic oligonucleotide
guacauucccagcguaggg

SEQ ID NO: 2366818 - RNA, 19 nt, Artificial Sequence
  Description of Artificial Sequence: Synthetic oligonucleotide
gcgacauagcccuucauag

SEQ ID NO: 2366819 - RNA, 19 nt, Artificial Sequence
  Description of Artificial Sequence: Synthetic oligonucleotide
auucccuugaagaagccca

SEQ ID NO: 2366820 - RNA, 19 nt, Artificial Sequence
  Description of Artificial Sequence: Synthetic oligonucleotide
guguacuggcgacauagcc

SEQ ID NO: 2366821 - RNA, 19 nt, Artificial Sequence
  Description of Artificial Sequence: Synthetic oligonucleotide
aaaaggcguggcugugauc

SEQ ID NO: 2366822 - RNA, 19 nt, Artificial Sequence
  Description of Artificial Sequence: Synthetic oligonucleotide
gacauagcccuucauaggu

SEQ ID NO: 2366823 - RNA, 19 nt, Artificial Sequence
  Description of Artificial Sequence: Synthetic oligonucleotide
ucccuaucugcauccuugg

SEQ ID NO: 2366824 - RNA, 19 nt, Artificial Sequence
  Description of Artificial Sequence: Synthetic oligonucleotide
uucugguguguacuggcga

SEQ ID NO: 2366825 - RNA, 19 nt, Artificial Sequence
  Description of Artificial Sequence: Synthetic oligonucleotide
ugaguaugcaguccacaau

SEQ ID NO: 2366826 - RNA, 19 nt, Artificial Sequence
  Description of Artificial Sequence: Synthetic oligonucleotide
caauggggaagcucauucc

SEQ ID NO: 2366827 - RNA, 19 nt, Artificial Sequence
  Description of Artificial Sequence: Synthetic oligonucleotide
ugucaaaugggugccccag

SEQ ID NO: 2366828 - RNA, 19 nt, Artificial Sequence
  Description of Artificial Sequence: Synthetic oligonucleotide
guaugcaguccacaaugcc

SEQ ID NO: 2366829 - RNA, 19 nt, Artificial Sequence
  Description of Artificial Sequence: Synthetic oligonucleotide
cuucugguguguacuggcg

SEQ ID NO: 2366830 - RNA, 19 nt, Artificial Sequence
  Description of Artificial Sequence: Synthetic oligonucleotide
uugucugguuuuguagccg

SEQ ID NO: 2366831 - RNA, 19 nt, Artificial Sequence
  Description of Artificial Sequence: Synthetic oligonucleotide
gcucagcagauauucauag

SEQ ID NO: 2366832 - RNA, 19 nt, Artificial Sequence
  Description of Artificial Sequence: Synthetic oligonucleotide
uguguacuggcgacauagc

SEQ ID NO: 2366833 - RNA, 19 nt, Artificial Sequence
  Description of Artificial Sequence: Synthetic oligonucleotide
agcucauucccuugaagaa

SEQ ID NO: 2366834 - RNA, 19 nt, Artificial Sequence
  Description of Artificial Sequence: Synthetic oligonucleotide
aaaacaggacggaguugac

SEQ ID NO: 2366835 - RNA, 19 nt, Artificial Sequence
  Description of Artificial Sequence: Synthetic oligonucleotide
uuguagccggacuuugaug

SEQ ID NO: 2366836 - RNA, 19 nt, Artificial Sequence
  Description of Artificial Sequence: Synthetic oligonucleotide
caaccugcuaugaagaugu

SEQ ID NO: 2366837 - RNA, 19 nt, Artificial Sequence
  Description of Artificial Sequence: Synthetic oligonucleotide
auccuuggcuucuugucug

SEQ ID NO: 2366838 - RNA, 19 nt, Artificial Sequence
  Description of Artificial Sequence: Synthetic oligonucleotide
acauucccagcguaggggu

SEQ ID NO: 2366839 - RNA, 19 nt, Artificial Sequence
  Description of Artificial Sequence: Synthetic oligonucleotide
accgcaccuuuauaguguc

SEQ ID NO: 2366840 - RNA, 19 nt, Artificial Sequence
  Description of Artificial Sequence: Synthetic oligonucleotide
guuuguguagcuggguggc

SEQ ID NO: 2366841 - RNA, 19 nt, Artificial Sequence
  Description of Artificial Sequence: Synthetic oligonucleotide
cauggugguaagucuugag

SEQ ID NO: 2366842 - RNA, 19 nt, Artificial Sequence
  Description of Artificial Sequence: Synthetic oligonucleotide
agauguuuguguagcuggg

SEQ ID NO: 2366843 - RNA, 19 nt, Artificial Sequence
  Description of Artificial Sequence: Synthetic oligonucleotide
uucauagcuaaggaaggua

SEQ ID NO: 2366844 - RNA, 19 nt, Artificial Sequence
  Description of Artificial Sequence: Synthetic oligonucleotide
cagcauuaacaggaaaggc

SEQ ID NO: 2366845 - RNA, 19 nt, Artificial Sequence
  Description of Artificial Sequence: Synthetic oligonucleotide
aggugacaaaguacauucc

SEQ ID NO: 2366846 - RNA, 19 nt, Artificial Sequence
  Description of Artificial Sequence: Synthetic oligonucleotide
cacuauugagggucaugcc

SEQ ID NO: 2366847 - RNA, 19 nt, Artificial Sequence
  Description of Artificial Sequence: Synthetic oligonucleotide
guagcuggguggcugggcc

SEQ ID NO: 2366848 - RNA, 19 nt, Artificial Sequence
  Description of Artificial Sequence: Synthetic oligonucleotide
aaccgcaccuuuauagugu

SEQ ID NO: 2366849 - RNA, 19 nt, Artificial Sequence
  Description of Artificial Sequence: Synthetic oligonucleotide
cuucagcccguccaucugc

SEQ ID NO: 2366850 - RNA, 19 nt, Artificial Sequence
  Description of Artificial Sequence: Synthetic oligonucleotide
agggcuacacuggcaaugg

SEQ ID NO: 2366851 - RNA, 19 nt, Artificial Sequence
  Description of Artificial Sequence: Synthetic oligonucleotide
auucauagcuaaggaaggu

SEQ ID NO: 2366852 - RNA, 19 nt, Artificial Sequence
  Description of Artificial Sequence: Synthetic oligonucleotide
gacuccgauucccuccugc

SEQ ID NO: 2366853 - RNA, 19 nt, Artificial Sequence
  Description of Artificial Sequence: Synthetic oligonucleotide
uagccggacuuugaugagg

SEQ ID NO: 2366854 - RNA, 19 nt, Artificial Sequence
  Description of Artificial Sequence: Synthetic oligonucleotide
caguaggccugcaggaggc

SEQ ID NO: 2366855 - RNA, 19 nt, Artificial Sequence
  Description of Artificial Sequence: Synthetic oligonucleotide
caggcucaucuccacaagc

SEQ ID NO: 2366856 - RNA, 19 nt, Artificial Sequence
  Description of Artificial Sequence: Synthetic oligonucleotide
acaaugcccugguaugugu

SEQ ID NO: 2366857 - RNA, 19 nt, Artificial Sequence
  Description of Artificial Sequence: Synthetic oligonucleotide
accagggcuacacuggcaa

SEQ ID NO: 2366858 - RNA, 19 nt, Artificial Sequence
  Description of Artificial Sequence: Synthetic oligonucleotide
caggaccgacucauggugg

SEQ ID NO: 2366859 - RNA, 19 nt, Artificial Sequence
  Description of Artificial Sequence: Synthetic oligonucleotide
cauagcccuucauagguga

SEQ ID NO: 2366860 - RNA, 19 nt, Artificial Sequence
  Description of Artificial Sequence: Synthetic oligonucleotide
cucucaagauggaggcugc

SEQ ID NO: 2366861 - RNA, 19 nt, Artificial Sequence
  Description of Artificial Sequence: Synthetic oligonucleotide
ucugggucuguaaccgcac

SEQ ID NO: 2366862 - RNA, 19 nt, Artificial Sequence
  Description of Artificial Sequence: Synthetic oligonucleotide
guacaaccugcuaugaaga

SEQ ID NO: 2366863 - RNA, 19 nt, Artificial Sequence
  Description of Artificial Sequence: Synthetic oligonucleotide
gcacuauugagggucaugc

SEQ ID NO: 2366864 - RNA, 19 nt, Artificial Sequence
  Description of Artificial Sequence: Synthetic oligonucleotide
cauucccuugaagaagccc

SEQ ID NO: 2366865 - RNA, 19 nt, Artificial Sequence
  Description of Artificial Sequence: Synthetic oligonucleotide
ggcuacacuggcaaugggg

SEQ ID NO: 2366866 - RNA, 19 nt, Artificial Sequence
  Description of Artificial Sequence: Synthetic oligonucleotide
ucaaaaggcguggcuguga

SEQ ID NO: 2366867 - RNA, 19 nt, Artificial Sequence
  Description of Artificial Sequence: Synthetic oligonucleotide
gugguaagucuugaguaug

SEQ ID NO: 2366868 - RNA, 19 nt, Artificial Sequence
  Description of Artificial Sequence: Synthetic oligonucleotide
auaggugacaaaguacauu

SEQ ID NO: 2366869 - RNA, 19 nt, Artificial Sequence
  Description of Artificial Sequence: Synthetic oligonucleotide
agcaggguguugcuguaca

SEQ ID NO: 2366870 - RNA, 19 nt, Artificial Sequence
  Description of Artificial Sequence: Synthetic oligonucleotide
gcuaugaagauguuugugu

SEQ ID NO: 2366871 - RNA, 19 nt, Artificial Sequence
  Description of Artificial Sequence: Synthetic oligonucleotide
gaguugaccagggcuacac

SEQ ID NO: 2366872 - RNA, 19 nt, Artificial Sequence
  Description of Artificial Sequence: Synthetic oligonucleotide
guacuggcgacauagcccu

SEQ ID NO: 2366873 - RNA, 19 nt, Artificial Sequence
  Description of Artificial Sequence: Synthetic oligonucleotide
guuuuguagccggacuuug

SEQ ID NO: 2366874 - RNA, 19 nt, Artificial Sequence
  Description of Artificial Sequence: Synthetic oligonucleotide
uacaaccugcuaugaagau

SEQ ID NO: 2366875 - RNA, 19 nt, Artificial Sequence
  Description of Artificial Sequence: Synthetic oligonucleotide
ggaggcuaugccugcaaag

SEQ ID NO: 2366876 - RNA, 19 nt, Artificial Sequence
  Description of Artificial Sequence: Synthetic oligonucleotide
aaggaagguagcagcauua

SEQ ID NO: 2366877 - RNA, 19 nt, Artificial Sequence
  Description of Artificial Sequence: Synthetic oligonucleotide
ucacaucaaaaggcguggc

SEQ ID NO: 2366878 - RNA, 19 nt, Artificial Sequence
  Description of Artificial Sequence: Synthetic oligonucleotide
gcaauggggaagcucauuc

SEQ ID NO: 2366879 - RNA, 19 nt, Artificial Sequence
  Description of Artificial Sequence: Synthetic oligonucleotide
agacccacggcuccagaga

SEQ ID NO: 2366880 - RNA, 19 nt, Artificial Sequence
  Description of Artificial Sequence: Synthetic oligonucleotide
cuauugagggucaugcccu

SEQ ID NO: 2366881 - RNA, 19 nt, Artificial Sequence
  Description of Artificial Sequence: Synthetic oligonucleotide
gcaguaggccugcaggagg

SEQ ID NO: 2366882 - RNA, 19 nt, Artificial Sequence
  Description of Artificial Sequence: Synthetic oligonucleotide
acuggcgacauagcccuuc

SEQ ID NO: 2366883 - RNA, 19 nt, Artificial Sequence
  Description of Artificial Sequence: Synthetic oligonucleotide
accgggguugagaacuccc

SEQ ID NO: 2366884 - RNA, 19 nt, Artificial Sequence
  Description of Artificial Sequence: Synthetic oligonucleotide
cccuucauaggugacaaag

SEQ ID NO: 2366885 - RNA, 19 nt, Artificial Sequence
  Description of Artificial Sequence: Synthetic oligonucleotide
aggcaguaggccugcagga

SEQ ID NO: 2366886 - RNA, 19 nt, Artificial Sequence
  Description of Artificial Sequence: Synthetic oligonucleotide
acuccgauucccuccugcu

SEQ ID NO: 2366887 - RNA, 19 nt, Artificial Sequence
  Description of Artificial Sequence: Synthetic oligonucleotide
cagacccacggcuccagag

SEQ ID NO: 2366888 - RNA, 19 nt, Artificial Sequence
  Description of Artificial Sequence: Synthetic oligonucleotide
acaggacggaguugaccag

SEQ ID NO: 2366889 - RNA, 19 nt, Artificial Sequence
  Description of Artificial Sequence: Synthetic oligonucleotide
caaaugggugccccaggac

SEQ ID NO: 2366890 - RNA, 19 nt, Artificial Sequence
  Description of Artificial Sequence: Synthetic oligonucleotide
uuggccuucugguguguac

SEQ ID NO: 2366891 - RNA, 19 nt, Artificial Sequence
  Description of Artificial Sequence: Synthetic oligonucleotide
agagauccagccagccacg

SEQ ID NO: 2366892 - RNA, 19 nt, Artificial Sequence
  Description of Artificial Sequence: Synthetic oligonucleotide
caggacggaguugaccagg

SEQ ID NO: 2366893 - RNA, 19 nt, Artificial Sequence
  Description of Artificial Sequence: Synthetic oligonucleotide
aggaccagacccacggcuc

SEQ ID NO: 2366894 - RNA, 19 nt, Artificial Sequence
  Description of Artificial Sequence: Synthetic oligonucleotide
guagccggacuuugaugag

SEQ ID NO: 2366895 - RNA, 19 nt, Artificial Sequence
  Description of Artificial Sequence: Synthetic oligonucleotide
aggaccgacucaugguggu

SEQ ID NO: 2366896 - RNA, 19 nt, Artificial Sequence
  Description of Artificial Sequence: Synthetic oligonucleotide
accgacucauggugguaag

SEQ ID NO: 2366897 - RNA, 19 nt, Artificial Sequence
  Description of Artificial Sequence: Synthetic oligonucleotide
aguugaccagggcuacacu

SEQ ID NO: 2366898 - RNA, 19 nt, Artificial Sequence
  Description of Artificial Sequence: Synthetic oligonucleotide
auagcccuucauaggugac

SEQ ID NO: 2366899 - RNA, 19 nt, Artificial Sequence
  Description of Artificial Sequence: Synthetic oligonucleotide
gcagauauucauagcuaag

SEQ ID NO: 2366900 - RNA, 19 nt, Artificial Sequence
  Description of Artificial Sequence: Synthetic oligonucleotide
cccaguacaaccugcuaug

SEQ ID NO: 2366901 - RNA, 19 nt, Artificial Sequence
  Description of Artificial Sequence: Synthetic oligonucleotide
cagggcuacacuggcaaug

SEQ ID NO: 2366902 - RNA, 19 nt, Artificial Sequence
  Description of Artificial Sequence: Synthetic oligonucleotide
auguguucugggucuguaa

SEQ ID NO: 2366903 - RNA, 19 nt, Artificial Sequence
  Description of Artificial Sequence: Synthetic oligonucleotide
gggauuuuggccuucuggu

SEQ ID NO: 2366904 - RNA, 19 nt, Artificial Sequence
  Description of Artificial Sequence: Synthetic oligonucleotide
uguagcuggguggcugggc

SEQ ID NO: 2366905 - RNA, 19 nt, Artificial Sequence
  Description of Artificial Sequence: Synthetic oligonucleotide
ugagggucaugcccuugaa

SEQ ID NO: 2366906 - RNA, 19 nt, Artificial Sequence
  Description of Artificial Sequence: Synthetic oligonucleotide
ggcccgucguuccuggugg

SEQ ID NO: 2366907 - RNA, 19 nt, Artificial Sequence
  Description of Artificial Sequence: Synthetic oligonucleotide
aggcccgggcacuauugag

SEQ ID NO: 2366908 - RNA, 19 nt, Artificial Sequence
  Description of Artificial Sequence: Synthetic oligonucleotide
augaggucaaaaggagcca

SEQ ID NO: 2366909 - RNA, 19 nt, Artificial Sequence
  Description of Artificial Sequence: Synthetic oligonucleotide
aggacggaguugaccaggg

SEQ ID NO: 2366910 - RNA, 19 nt, Artificial Sequence
  Description of Artificial Sequence: Synthetic oligonucleotide
guucugggucuguaaccgc

SEQ ID NO: 2366911 - RNA, 19 nt, Artificial Sequence
  Description of Artificial Sequence: Synthetic oligonucleotide
ggcuaugccugcaaagccc

SEQ ID NO: 2366912 - RNA, 19 nt, Artificial Sequence
  Description of Artificial Sequence: Synthetic oligonucleotide
aucaaaaggcguggcugug

SEQ ID NO: 2366913 - RNA, 19 nt, Artificial Sequence
  Description of Artificial Sequence: Synthetic oligonucleotide
cuccagagauccagccagc

SEQ ID NO: 2366914 - RNA, 19 nt, Artificial Sequence
  Description of Artificial Sequence: Synthetic oligonucleotide
ucccugggguccuucuucu

SEQ ID NO: 2366915 - RNA, 19 nt, Artificial Sequence
  Description of Artificial Sequence: Synthetic oligonucleotide
ggugggagguggcugugag

SEQ ID NO: 2366916 - RNA, 19 nt, Artificial Sequence
  Description of Artificial Sequence: Synthetic oligonucleotide
cacaaugcccugguaugug

SEQ ID NO: 2366917 - RNA, 19 nt, Artificial Sequence
  Description of Artificial Sequence: Synthetic oligonucleotide
acauagcccuucauaggug

SEQ ID NO: 2366918 - RNA, 19 nt, Artificial Sequence
  Description of Artificial Sequence: Synthetic oligonucleotide
cuccgauucccuccugcug

SEQ ID NO: 2366919 - RNA, 19 nt, Artificial Sequence
  Description of Artificial Sequence: Synthetic oligonucleotide
gcuacacuggcaaugggga

SEQ ID NO: 2366920 - RNA, 19 nt, Artificial Sequence
  Description of Artificial Sequence: Synthetic oligonucleotide
ccguccaucugcauccggg

SEQ ID NO: 2366921 - RNA, 19 nt, Artificial Sequence
  Description of Artificial Sequence: Synthetic oligonucleotide
ggagguggcugugagugcc

SEQ ID NO: 2366922 - RNA, 19 nt, Artificial Sequence
  Description of Artificial Sequence: Synthetic oligonucleotide
agcuggguggcugggcccg

SEQ ID NO: 2366923 - RNA, 19 nt, Artificial Sequence
  Description of Artificial Sequence: Synthetic oligonucleotide
ugcccugguauguguucug

SEQ ID NO: 2366924 - RNA, 19 nt, Artificial Sequence
  Description of Artificial Sequence: Synthetic oligonucleotide
uagugucaaaugggugccc

SEQ ID NO: 2366925 - RNA, 19 nt, Artificial Sequence
  Description of Artificial Sequence: Synthetic oligonucleotide
caaaguacauucccagcgu

SEQ ID NO: 2366926 - RNA, 19 nt, Artificial Sequence
  Description of Artificial Sequence: Synthetic oligonucleotide
uccuggugggagguggcug

SEQ ID NO: 2366927 - RNA, 19 nt, Artificial Sequence
  Description of Artificial Sequence: Synthetic oligonucleotide
uuuguguagcuggguggcu

SEQ ID NO: 2366928 - RNA, 19 nt, Artificial Sequence
  Description of Artificial Sequence: Synthetic oligonucleotide
cagcagauauucauagcua

SEQ ID NO: 2366929 - RNA, 19 nt, Artificial Sequence
  Description of Artificial Sequence: Synthetic oligonucleotide
agcccuucauaggugacaa

SEQ ID NO: 2366930 - RNA, 19 nt, Artificial Sequence
  Description of Artificial Sequence: Synthetic oligonucleotide
ugcaguccacaaugcccug

SEQ ID NO: 2366931 - RNA, 19 nt, Artificial Sequence
  Description of Artificial Sequence: Synthetic oligonucleotide
ugguguguacuggcgacau

SEQ ID NO: 2366932 - RNA, 19 nt, Artificial Sequence
  Description of Artificial Sequence: Synthetic oligonucleotide
ggguccuucuucucucaag

SEQ ID NO: 2366933 - RNA, 19 nt, Artificial Sequence
  Description of Artificial Sequence: Synthetic oligonucleotide
uauugagggucaugcccuu

SEQ ID NO: 2366934 - RNA, 19 nt, Artificial Sequence
  Description of Artificial Sequence: Synthetic oligonucleotide
gcuaugccugcaaagcccc

SEQ ID NO: 2366935 - RNA, 19 nt, Artificial Sequence
  Description of Artificial Sequence: Synthetic oligonucleotide
agcguaggggugucccuca

SEQ ID NO: 2366936 - RNA, 19 nt, Artificial Sequence
  Description of Artificial Sequence: Synthetic oligonucleotide
aagcugcuugccauacagu

SEQ ID NO: 2366937 - RNA, 19 nt, Artificial Sequence
  Description of Artificial Sequence: Synthetic oligonucleotide
ccaggaccgacucauggug

SEQ ID NO: 2366938 - RNA, 19 nt, Artificial Sequence
  Description of Artificial Sequence: Synthetic oligonucleotide
gguaccgggguugagaacu

SEQ ID NO: 2366939 - RNA, 19 nt, Artificial Sequence
  Description of Artificial Sequence: Synthetic oligonucleotide
aacucccuaucugcauccu

SEQ ID NO: 2366940 - RNA, 19 nt, Artificial Sequence
  Description of Artificial Sequence: Synthetic oligonucleotide
agccggacuuugaugaggu

SEQ ID NO: 2366941 - RNA, 19 nt, Artificial Sequence
  Description of Artificial Sequence: Synthetic oligonucleotide
cuccccuucagcccgucca

SEQ ID NO: 2366942 - RNA, 19 nt, Artificial Sequence
  Description of Artificial Sequence: Synthetic oligonucleotide
cagcccguccaucugcauc

SEQ ID NO: 2366943 - RNA, 19 nt, Artificial Sequence
  Description of Artificial Sequence: Synthetic oligonucleotide
gggacuugaucacaucaaa

SEQ ID NO: 2366944 - RNA, 19 nt, Artificial Sequence
  Description of Artificial Sequence: Synthetic oligonucleotide
agccaggcaguaggccugc

SEQ ID NO: 2366945 - RNA, 19 nt, Artificial Sequence
  Description of Artificial Sequence: Synthetic oligonucleotide
cgacauagcccuucauagg

SEQ ID NO: 2366946 - RNA, 19 nt, Artificial Sequence
  Description of Artificial Sequence: Synthetic oligonucleotide
acggaguugaccagggcua

SEQ ID NO: 2366947 - RNA, 19 nt, Artificial Sequence
  Description of Artificial Sequence: Synthetic oligonucleotide
gaccgacucauggugguaa

SEQ ID NO: 2366948 - RNA, 19 nt, Artificial Sequence
  Description of Artificial Sequence: Synthetic oligonucleotide
cugggcccgucguuccugg

SEQ ID NO: 2366949 - RNA, 19 nt, Artificial Sequence
  Description of Artificial Sequence: Synthetic oligonucleotide
auugagggucaugcccuug

SEQ ID NO: 2366950 - RNA, 19 nt, Artificial Sequence
  Description of Artificial Sequence: Synthetic oligonucleotide
uaggggugucccucagcac

SEQ ID NO: 2366951 - RNA, 19 nt, Artificial Sequence
  Description of Artificial Sequence: Synthetic oligonucleotide
ggcgacauagcccuucaua

SEQ ID NO: 2366952 - RNA, 19 nt, Artificial Sequence
  Description of Artificial Sequence: Synthetic oligonucleotide
uggaggcugcacagugcac

SEQ ID NO: 2366953 - RNA, 19 nt, Artificial Sequence
  Description of Artificial Sequence: Synthetic oligonucleotide
gauguuuguguagcugggu

SEQ ID NO: 2366954 - RNA, 19 nt, Artificial Sequence
  Description of Artificial Sequence: Synthetic oligonucleotide
ggguugagaacucccuauc

SEQ ID NO: 2366955 - RNA, 19 nt, Artificial Sequence
  Description of Artificial Sequence: Synthetic oligonucleotide
ggcucaucuccacaagcuc

SEQ ID NO: 2366956 - RNA, 19 nt, Artificial Sequence
  Description of Artificial Sequence: Synthetic oligonucleotide
caccaguacuguggcagag

SEQ ID NO: 2366957 - RNA, 19 nt, Artificial Sequence
  Description of Artificial Sequence: Synthetic oligonucleotide
accugcuaugaagauguuu

SEQ ID NO: 2366958 - RNA, 19 nt, Artificial Sequence
  Description of Artificial Sequence: Synthetic oligonucleotide
ggaccagacccacggcucc

SEQ ID NO: 2366959 - RNA, 19 nt, Artificial Sequence
  Description of Artificial Sequence: Synthetic oligonucleotide
uggcugggcccgucguucc

SEQ ID NO: 2366960 - RNA, 19 nt, Artificial Sequence
  Description of Artificial Sequence: Synthetic oligonucleotide
uccgggacuugaucacauc

SEQ ID NO: 2366961 - RNA, 19 nt, Artificial Sequence
  Description of Artificial Sequence: Synthetic oligonucleotide
auccagccagccacgaacu

SEQ ID NO: 2366962 - RNA, 19 nt, Artificial Sequence
  Description of Artificial Sequence: Synthetic oligonucleotide
gggaagcucauucccuuga

SEQ ID NO: 2366963 - RNA, 19 nt, Artificial Sequence
  Description of Artificial Sequence: Synthetic oligonucleotide
uaccgggguugagaacucc

SEQ ID NO: 2366964 - RNA, 19 nt, Artificial Sequence
  Description of Artificial Sequence: Synthetic oligonucleotide
caguacaaccugcuaugaa

SEQ ID NO: 2366965 - RNA, 19 nt, Artificial Sequence
  Description of Artificial Sequence: Synthetic oligonucleotide
cuacacuggcaauggggaa

SEQ ID NO: 2366966 - RNA, 19 nt, Artificial Sequence
  Description of Artificial Sequence: Synthetic oligonucleotide
ggacuugaucacaucaaaa

SEQ ID NO: 2366967 - RNA, 19 nt, Artificial Sequence
  Description of Artificial Sequence: Synthetic oligonucleotide
gauccucugaacagucccu

SEQ ID NO: 2366968 - RNA, 19 nt, Artificial Sequence
  Description of Artificial Sequence: Synthetic oligonucleotide
ggggaagcucauucccuug

SEQ ID NO: 2366969 - RNA, 19 nt, Artificial Sequence
  Description of Artificial Sequence: Synthetic oligonucleotide
cugcuggaagcugcuugcc

SEQ ID NO: 2366970 - RNA, 19 nt, Artificial Sequence
  Description of Artificial Sequence: Synthetic oligonucleotide
caccuuuauagugucaaau

SEQ ID NO: 2366971 - RNA, 19 nt, Artificial Sequence
  Description of Artificial Sequence: Synthetic oligonucleotide
ggcacuauugagggucaug

SEQ ID NO: 2366972 - RNA, 19 nt, Artificial Sequence
  Description of Artificial Sequence: Synthetic oligonucleotide
uuuggccuucuggugugua

SEQ ID NO: 2366973 - RNA, 19 nt, Artificial Sequence
  Description of Artificial Sequence: Synthetic oligonucleotide
ccgggcacuauugaggguc

SEQ ID NO: 2366974 - RNA, 19 nt, Artificial Sequence
  Description of Artificial Sequence: Synthetic oligonucleotide
gacccacggcuccagagau

SEQ ID NO: 2366975 - RNA, 19 nt, Artificial Sequence
  Description of Artificial Sequence: Synthetic oligonucleotide
ccggacuuugaugagguca

SEQ ID NO: 2366976 - RNA, 19 nt, Artificial Sequence
  Description of Artificial Sequence: Synthetic oligonucleotide
caggaccagacccacggcu

SEQ ID NO: 2366977 - RNA, 19 nt, Artificial Sequence
  Description of Artificial Sequence: Synthetic oligonucleotide
gggcuacacuggcaauggg

SEQ ID NO: 2366978 - RNA, 19 nt, Artificial Sequence
  Description of Artificial Sequence: Synthetic oligonucleotide
cagcguaggggugucccuc

SEQ ID NO: 2366979 - RNA, 19 nt, Artificial Sequence
  Description of Artificial Sequence: Synthetic oligonucleotide
gccaggcucaucuccacaa

SEQ ID NO: 2366980 - RNA, 19 nt, Artificial Sequence
  Description of Artificial Sequence: Synthetic oligonucleotide
augggugccccaggaccag

SEQ ID NO: 2366981 - RNA, 19 nt, Artificial Sequence
  Description of Artificial Sequence: Synthetic oligonucleotide
agacuccgauucccuccug

SEQ ID NO: 2366982 - RNA, 19 nt, Artificial Sequence
  Description of Artificial Sequence: Synthetic oligonucleotide
uggcgacauagcccuucau

SEQ ID NO: 2366983 - RNA, 19 nt, Artificial Sequence
  Description of Artificial Sequence: Synthetic oligonucleotide
gucuguaaccgcaccuuua

SEQ ID NO: 2366984 - RNA, 19 nt, Artificial Sequence
  Description of Artificial Sequence: Synthetic oligonucleotide
ggaagcucauucccuugaa

SEQ ID NO: 2366985 - RNA, 19 nt, Artificial Sequence
  Description of Artificial Sequence: Synthetic oligonucleotide
caaaaggcguggcugugau

SEQ ID NO: 2366986 - RNA, 19 nt, Artificial Sequence
  Description of Artificial Sequence: Synthetic oligonucleotide
ggacggaguugaccagggc

SEQ ID NO: 2366987 - RNA, 19 nt, Artificial Sequence
  Description of Artificial Sequence: Synthetic oligonucleotide
gggcccgucguuccuggug

SEQ ID NO: 2366988 - RNA, 19 nt, Artificial Sequence
  Description of Artificial Sequence: Synthetic oligonucleotide
cgucguuccuggugggagg

SEQ ID NO: 2366989 - RNA, 19 nt, Artificial Sequence
  Description of Artificial Sequence: Synthetic oligonucleotide
cgacucauggugguaaguc

SEQ ID NO: 2366990 - RNA, 19 nt, Artificial Sequence
  Description of Artificial Sequence: Synthetic oligonucleotide
cuaaggaagguagcagcau

SEQ ID NO: 2366991 - RNA, 19 nt, Artificial Sequence
  Description of Artificial Sequence: Synthetic oligonucleotide
ccaaaacaggacggaguug

SEQ ID NO: 2366992 - RNA, 19 nt, Artificial Sequence
  Description of Artificial Sequence: Synthetic oligonucleotide
acccacggcuccagagauc

SEQ ID NO: 2366993 - RNA, 19 nt, Artificial Sequence
  Description of Artificial Sequence: Synthetic oligonucleotide
cuccacaagcucagcagau

SEQ ID NO: 2366994 - RNA, 19 nt, Artificial Sequence
  Description of Artificial Sequence: Synthetic oligonucleotide
cuguaaccgcaccuuuaua

SEQ ID NO: 2366995 - RNA, 19 nt, Artificial Sequence
  Description of Artificial Sequence: Synthetic oligonucleotide
cccagcguagggguguccc

SEQ ID NO: 2366996 - RNA, 19 nt, Artificial Sequence
  Description of Artificial Sequence: Synthetic oligonucleotide
gucugguuuuguagccgga

SEQ ID NO: 2366997 - RNA, 19 nt, Artificial Sequence
  Description of Artificial Sequence: Synthetic oligonucleotide
ggcccaggauccucugaac

SEQ ID NO: 2366998 - RNA, 19 nt, Artificial Sequence
  Description of Artificial Sequence: Synthetic oligonucleotide
caggguguugcuguacacu

SEQ ID NO: 2366999 - RNA, 19 nt, Artificial Sequence
  Description of Artificial Sequence: Synthetic oligonucleotide
gcaccuuuauagugucaaa

SEQ ID NO: 2367000 - RNA, 19 nt, Artificial Sequence
  Description of Artificial Sequence: Synthetic oligonucleotide
ugggugccccaggaccaga

SEQ ID NO: 2367001 - RNA, 19 nt, Artificial Sequence
  Description of Artificial Sequence: Synthetic oligonucleotide
caggaggcuaugccugcaa

SEQ ID NO: 2367002 - RNA, 19 nt, Artificial Sequence
  Description of Artificial Sequence: Synthetic oligonucleotide
aggaaaggcccgggcacua

SEQ ID NO: 2367003 - RNA, 19 nt, Artificial Sequence
  Description of Artificial Sequence: Synthetic oligonucleotide
ccgucguuccuggugggag

SEQ ID NO: 2367004 - RNA, 19 nt, Artificial Sequence
  Description of Artificial Sequence: Synthetic oligonucleotide
ccauacaguccagcauccc

SEQ ID NO: 2367005 - RNA, 19 nt, Artificial Sequence
  Description of Artificial Sequence: Synthetic oligonucleotide
guaccgggguugagaacuc

SEQ ID NO: 2367006 - RNA, 19 nt, Artificial Sequence
  Description of Artificial Sequence: Synthetic oligonucleotide
ucccagcguaggggugucc

SEQ ID NO: 2367007 - RNA, 19 nt, Artificial Sequence
  Description of Artificial Sequence: Synthetic oligonucleotide
cacaagcucagcagauauu

SEQ ID NO: 2367008 - RNA, 19 nt, Artificial Sequence
  Description of Artificial Sequence: Synthetic oligonucleotide
aacagucccugggguccuu

SEQ ID NO: 2367009 - RNA, 19 nt, Artificial Sequence
  Description of Artificial Sequence: Synthetic oligonucleotide
gcguaggggugucccucag

SEQ ID NO: 2367010 - RNA, 19 nt, Artificial Sequence
  Description of Artificial Sequence: Synthetic oligonucleotide
gugggagguggcugugagu

SEQ ID NO: 2367011 - RNA, 19 nt, Artificial Sequence
  Description of Artificial Sequence: Synthetic oligonucleotide
ccgguaccgggguugagaa

SEQ ID NO: 2367012 - RNA, 19 nt, Artificial Sequence
  Description of Artificial Sequence: Synthetic oligonucleotide
gguuuuguagccggacuuu

SEQ ID NO: 2367013 - RNA, 19 nt, Artificial Sequence
  Description of Artificial Sequence: Synthetic oligonucleotide
ccaguacaaccugcuauga

SEQ ID NO: 2367014 - RNA, 19 nt, Artificial Sequence
  Description of Artificial Sequence: Synthetic oligonucleotide
gcccgucguuccugguggg

SEQ ID NO: 2367015 - RNA, 19 nt, Artificial Sequence
  Description of Artificial Sequence: Synthetic oligonucleotide
ggucuguaaccgcaccuuu

SEQ ID NO: 2367016 - RNA, 19 nt, Artificial Sequence
  Description of Artificial Sequence: Synthetic oligonucleotide
ggaguugaccagggcuaca

SEQ ID NO: 2367017 - RNA, 19 nt, Artificial Sequence
  Description of Artificial Sequence: Synthetic oligonucleotide
gcguggcugugauccagga

SEQ ID NO: 2367018 - RNA, 19 nt, Artificial Sequence
  Description of Artificial Sequence: Synthetic oligonucleotide
ccccaguacaaccugcuau

SEQ ID NO: 2367019 - RNA, 19 nt, Artificial Sequence
  Description of Artificial Sequence: Synthetic oligonucleotide
gagcugggauuuuggccuu

SEQ ID NO: 2367020 - RNA, 19 nt, Artificial Sequence
  Description of Artificial Sequence: Synthetic oligonucleotide
gguguguacuggcgacaua

SEQ ID NO: 2367021 - RNA, 19 nt, Artificial Sequence
  Description of Artificial Sequence: Synthetic oligonucleotide
ccgguacuuucuccccuuc

SEQ ID NO: 2367022 - RNA, 19 nt, Artificial Sequence
  Description of Artificial Sequence: Synthetic oligonucleotide
gccggacuuugaugagguc

SEQ ID NO: 2367023 - RNA, 19 nt, Artificial Sequence
  Description of Artificial Sequence: Synthetic oligonucleotide
cccgguaccgggguugaga

SEQ ID NO: 2367024 - RNA, 19 nt, Artificial Sequence
  Description of Artificial Sequence: Synthetic oligonucleotide
cccaggaccgacucauggu

SEQ ID NO: 2367025 - RNA, 19 nt, Artificial Sequence
  Description of Artificial Sequence: Synthetic oligonucleotide
gcccguccaucugcauccg

SEQ ID NO: 2367026 - RNA, 19 nt, Artificial Sequence
  Description of Artificial Sequence: Synthetic oligonucleotide
gggucuguaaccgcaccuu

SEQ ID NO: 2367027 - RNA, 19 nt, Artificial Sequence
  Description of Artificial Sequence: Synthetic oligonucleotide
ccgauucccuccugcugga

SEQ ID NO: 2367028 - RNA, 19 nt, Artificial Sequence
  Description of Artificial Sequence: Synthetic oligonucleotide
gcugggauuuuggccuucu

SEQ ID NO: 2367029 - RNA, 19 nt, Artificial Sequence
  Description of Artificial Sequence: Synthetic oligonucleotide
gcccuucauaggugacaaa

SEQ ID NO: 2367030 - RNA, 19 nt, Artificial Sequence
  Description of Artificial Sequence: Synthetic oligonucleotide
ggaccgacucaugguggua

SEQ ID NO: 2367031 - RNA, 19 nt, Artificial Sequence
  Description of Artificial Sequence: Synthetic oligonucleotide
ccgcaccuuuauaguguca

SEQ ID NO: 2367032 - RNA, 19 nt, Artificial Sequence
  Description of Artificial Sequence: Synthetic oligonucleotide
cgguaccgggguugagaac

SEQ ID NO: 2367033 - RNA, 19 nt, Artificial Sequence
  Description of Artificial Sequence: Synthetic oligonucleotide
ggcaauggggaagcucauu

SEQ ID NO: 2367034 - RNA, 19 nt, Artificial Sequence
  Description of Artificial Sequence: Synthetic oligonucleotide
gguggcugggcccgucguu

SEQ ID NO: 2367035 - RNA, 19 nt, Artificial Sequence
  Description of Artificial Sequence: Synthetic oligonucleotide
ccagcguaggggugucccu

SEQ ID NO: 2367036 - RNA, 19 nt, Artificial Sequence
  Description of Artificial Sequence: Synthetic oligonucleotide
ccccuucagcccguccauc

SEQ ID NO: 2367037 - RNA, 19 nt, Artificial Sequence
  Description of Artificial Sequence: Synthetic oligonucleotide
cacuggcaauggggaagcu

SEQ ID NO: 2367038 - RNA, 19 nt, Artificial Sequence
  Description of Artificial Sequence: Synthetic oligonucleotide
ccccgguacuuucuccccu

SEQ ID NO: 2367039 - RNA, 19 nt, Artificial Sequence
  Description of Artificial Sequence: Synthetic oligonucleotide
cccgucguuccugguggga

SEQ ID NO: 2367040 - RNA, 19 nt, Artificial Sequence
  Description of Artificial Sequence: Synthetic oligonucleotide
ccgacucauggugguaagu

SEQ ID NO: 2367041 - RNA, 19 nt, Artificial Sequence
  Description of Artificial Sequence: Synthetic oligonucleotide
cccgguacuuucuccccuu

SEQ ID NO: 2367042 - RNA, 19 nt, Artificial Sequence
  Description of Artificial Sequence: Synthetic oligonucleotide
ccagggcuacacuggcaau

SEQ ID NO: 2367043 - RNA, 19 nt, Artificial Sequence
  Description of Artificial Sequence: Synthetic oligonucleotide
ccccgguaccgggguugag

SEQ ID NO: 2367044 - RNA, 19 nt, Artificial Sequence
  Description of Artificial Sequence: Synthetic oligonucleotide
gggcacuauugagggucau

SEQ ID NO: 2367045 - RNA, 19 nt, Artificial Sequence
  Description of Artificial Sequence: Synthetic oligonucleotide
cgauucccuccugcuggaa

SEQ ID NO: 2367046 - RNA, 19 nt, Artificial Sequence
  Description of Artificial Sequence: Synthetic oligonucleotide
aaugucaaaguuuauucac

SEQ ID NO: 2367047 - RNA, 19 nt, Artificial Sequence
  Description of Artificial Sequence: Synthetic oligonucleotide
aauugaacgguuuccgucc

SEQ ID NO: 2367048 - RNA, 19 nt, Artificial Sequence
  Description of Artificial Sequence: Synthetic oligonucleotide
uaaugaaauacacugauga

SEQ ID NO: 2367049 - RNA, 19 nt, Artificial Sequence
  Description of Artificial Sequence: Synthetic oligonucleotide
aauaucaaaaguuuugagu

SEQ ID NO: 2367050 - RNA, 19 nt, Artificial Sequence
  Description of Artificial Sequence: Synthetic oligonucleotide
uuucuugcgaauaauacag

SEQ ID NO: 2367051 - RNA, 19 nt, Artificial Sequence
  Description of Artificial Sequence: Synthetic oligonucleotide
ucacauaaaguuuaaacag

SEQ ID NO: 2367052 - RNA, 19 nt, Artificial Sequence
  Description of Artificial Sequence: Synthetic oligonucleotide
uuaacgaaaauaucaaaag

SEQ ID NO: 2367053 - RNA, 19 nt, Artificial Sequence
  Description of Artificial Sequence: Synthetic oligonucleotide
ugcuuaaugaaauacacug

SEQ ID NO: 2367054 - RNA, 19 nt, Artificial Sequence
  Description of Artificial Sequence: Synthetic oligonucleotide
uguaauagggaaaaggagu

SEQ ID NO: 2367055 - RNA, 19 nt, Artificial Sequence
  Description of Artificial Sequence: Synthetic oligonucleotide
ugaaauacacugaugaugu

SEQ ID NO: 2367056 - RNA, 19 nt, Artificial Sequence
  Description of Artificial Sequence: Synthetic oligonucleotide
uaaacagucaaguuaacga

SEQ ID NO: 2367057 - RNA, 19 nt, Artificial Sequence
  Description of Artificial Sequence: Synthetic oligonucleotide
ucuguaauagggaaaagga

SEQ ID NO: 2367058 - RNA, 19 nt, Artificial Sequence
  Description of Artificial Sequence: Synthetic oligonucleotide
aaaggaguaacacugcgca

SEQ ID NO: 2367059 - RNA, 19 nt, Artificial Sequence
  Description of Artificial Sequence: Synthetic oligonucleotide
uaaaguuuaaacagucaag

SEQ ID NO: 2367060 - RNA, 19 nt, Artificial Sequence
  Description of Artificial Sequence: Synthetic oligonucleotide
aaaguuuaaacagucaagu

SEQ ID NO: 2367061 - RNA, 19 nt, Artificial Sequence
  Description of Artificial Sequence: Synthetic oligonucleotide
ucaacaaacugccagucag

SEQ ID NO: 2367062 - RNA, 19 nt, Artificial Sequence
  Description of Artificial Sequence: Synthetic oligonucleotide
ugauguaacaucuuguccu

SEQ ID NO: 2367063 - RNA, 19 nt, Artificial Sequence
  Description of Artificial Sequence: Synthetic oligonucleotide
uuugcuuaaugaaauacac

SEQ ID NO: 2367064 - RNA, 19 nt, Artificial Sequence
  Description of Artificial Sequence: Synthetic oligonucleotide
ucuguuguuugcaauggcg

SEQ ID NO: 2367065 - RNA, 19 nt, Artificial Sequence
  Description of Artificial Sequence: Synthetic oligonucleotide
aauacacugaugauguaac

SEQ ID NO: 2367066 - RNA, 19 nt, Artificial Sequence
  Description of Artificial Sequence: Synthetic oligonucleotide
uuugcaauggcguggauca

SEQ ID NO: 2367067 - RNA, 19 nt, Artificial Sequence
  Description of Artificial Sequence: Synthetic oligonucleotide
auaucaaaaguuuugaguu

SEQ ID NO: 2367068 - RNA, 19 nt, Artificial Sequence
  Description of Artificial Sequence: Synthetic oligonucleotide
cauguugagaaguucaggc

SEQ ID NO: 2367069 - RNA, 19 nt, Artificial Sequence
  Description of Artificial Sequence: Synthetic oligonucleotide
augauguaacaucuugucc

SEQ ID NO: 2367070 - RNA, 19 nt, Artificial Sequence
  Description of Artificial Sequence: Synthetic oligonucleotide
auaaaguuuaaacagucaa

SEQ ID NO: 2367071 - RNA, 19 nt, Artificial Sequence
  Description of Artificial Sequence: Synthetic oligonucleotide
agaaguucaggcuccauuc

SEQ ID NO: 2367072 - RNA, 19 nt, Artificial Sequence
  Description of Artificial Sequence: Synthetic oligonucleotide
uaacgaaaauaucaaaagu

SEQ ID NO: 2367073 - RNA, 19 nt, Artificial Sequence
  Description of Artificial Sequence: Synthetic oligonucleotide
uuaaacagucaaguuaacg

SEQ ID NO: 2367074 - RNA, 19 nt, Artificial Sequence
  Description of Artificial Sequence: Synthetic oligonucleotide
uacacgucaacaaacugcc

SEQ ID NO: 2367075 - RNA, 19 nt, Artificial Sequence
  Description of Artificial Sequence: Synthetic oligonucleotide
aaaaggaguaacacugcgc

SEQ ID NO: 2367076 - RNA, 19 nt, Artificial Sequence
  Description of Artificial Sequence: Synthetic oligonucleotide
auacuuuucuguaauaggg

SEQ ID NO: 2367077 - RNA, 19 nt, Artificial Sequence
  Description of Artificial Sequence: Synthetic oligonucleotide
uuuucuugcgaauaauaca

SEQ ID NO: 2367078 - RNA, 19 nt, Artificial Sequence
  Description of Artificial Sequence: Synthetic oligonucleotide
gaaaaggaguaacacugcg

SEQ ID NO: 2367079 - RNA, 19 nt, Artificial Sequence
  Description of Artificial Sequence: Synthetic oligonucleotide
aacacuucauacuuuucug

SEQ ID NO: 2367080 - RNA, 19 nt, Artificial Sequence
  Description of Artificial Sequence: Synthetic oligonucleotide
cauacuuuucuguaauagg

SEQ ID NO: 2367081 - RNA, 19 nt, Artificial Sequence
  Description of Artificial Sequence: Synthetic oligonucleotide
aguuuaaacagucaaguua

SEQ ID NO: 2367082 - RNA, 19 nt, Artificial Sequence
  Description of Artificial Sequence: Synthetic oligonucleotide
auacacgucaacaaacugc

SEQ ID NO: 2367083 - RNA, 19 nt, Artificial Sequence
  Description of Artificial Sequence: Synthetic oligonucleotide
caaacugccagucaggaug

SEQ ID NO: 2367084 - RNA, 19 nt, Artificial Sequence
  Description of Artificial Sequence: Synthetic oligonucleotide
guaaugucaaaguuuauuc

SEQ ID NO: 2367085 - RNA, 19 nt, Artificial Sequence
  Description of Artificial Sequence: Synthetic oligonucleotide
aauuguuccacaggcauug

SEQ ID NO: 2367086 - RNA, 19 nt, Artificial Sequence
  Description of Artificial Sequence: Synthetic oligonucleotide
aguaacacugcgcacacug

SEQ ID NO: 2367087 - RNA, 19 nt, Artificial Sequence
  Description of Artificial Sequence: Synthetic oligonucleotide
uucuugcaaacuucuaugg

SEQ ID NO: 2367088 - RNA, 19 nt, Artificial Sequence
  Description of Artificial Sequence: Synthetic oligonucleotide
aaacagucaaguuaacgaa

SEQ ID NO: 2367089 - RNA, 19 nt, Artificial Sequence
  Description of Artificial Sequence: Synthetic oligonucleotide
uuaaugaaauacacugaug

SEQ ID NO: 2367090 - RNA, 19 nt, Artificial Sequence
  Description of Artificial Sequence: Synthetic oligonucleotide
acacugaugauguaacauc

SEQ ID NO: 2367091 - RNA, 19 nt, Artificial Sequence
  Description of Artificial Sequence: Synthetic oligonucleotide
ucauacuuuucuguaauag

SEQ ID NO: 2367092 - RNA, 19 nt, Artificial Sequence
  Description of Artificial Sequence: Synthetic oligonucleotide
gaugauguaacaucuuguc

SEQ ID NO: 2367093 - RNA, 19 nt, Artificial Sequence
  Description of Artificial Sequence: Synthetic oligonucleotide
uaaugucaaaguuuauuca

SEQ ID NO: 2367094 - RNA, 19 nt, Artificial Sequence
  Description of Artificial Sequence: Synthetic oligonucleotide
augaaauacacugaugaug

SEQ ID NO: 2367095 - RNA, 19 nt, Artificial Sequence
  Description of Artificial Sequence: Synthetic oligonucleotide
aaguuuauucacauaaagu

SEQ ID NO: 2367096 - RNA, 19 nt, Artificial Sequence
  Description of Artificial Sequence: Synthetic oligonucleotide
guuaauugaacgguuuccg

SEQ ID NO: 2367097 - RNA, 19 nt, Artificial Sequence
  Description of Artificial Sequence: Synthetic oligonucleotide
ucccaugguuaauugaacg

SEQ ID NO: 2367098 - RNA, 19 nt, Artificial Sequence
  Description of Artificial Sequence: Synthetic oligonucleotide
ugguguuucugucaagaag

SEQ ID NO: 2367099 - RNA, 19 nt, Artificial Sequence
  Description of Artificial Sequence: Synthetic oligonucleotide
ucuaacaacgucucgucac

SEQ ID NO: 2367100 - RNA, 19 nt, Artificial Sequence
  Description of Artificial Sequence: Synthetic oligonucleotide
ugcaucuucucucuguugu

SEQ ID NO: 2367101 - RNA, 19 nt, Artificial Sequence
  Description of Artificial Sequence: Synthetic oligonucleotide
ugaugauguaacaucuugu

SEQ ID NO: 2367102 - RNA, 19 nt, Artificial Sequence
  Description of Artificial Sequence: Synthetic oligonucleotide
aaauacacugaugauguaa

SEQ ID NO: 2367103 - RNA, 19 nt, Artificial Sequence
  Description of Artificial Sequence: Synthetic oligonucleotide
ucagguaaugucaaaguuu

SEQ ID NO: 2367104 - RNA, 19 nt, Artificial Sequence
  Description of Artificial Sequence: Synthetic oligonucleotide
cuguaauagggaaaaggag

SEQ ID NO: 2367105 - RNA, 19 nt, Artificial Sequence
  Description of Artificial Sequence: Synthetic oligonucleotide
uccauacacgucaacaaac

SEQ ID NO: 2367106 - RNA, 19 nt, Artificial Sequence
  Description of Artificial Sequence: Synthetic oligonucleotide
uguccugaacacuucauac

SEQ ID NO: 2367107 - RNA, 19 nt, Artificial Sequence
  Description of Artificial Sequence: Synthetic oligonucleotide
ucuugcaaacuucuauggc

SEQ ID NO: 2367108 - RNA, 19 nt, Artificial Sequence
  Description of Artificial Sequence: Synthetic oligonucleotide
gucacuaguuuucccaugg

SEQ ID NO: 2367109 - RNA, 19 nt, Artificial Sequence
  Description of Artificial Sequence: Synthetic oligonucleotide
ucaaguuaacgaaaauauc

SEQ ID NO: 2367110 - RNA, 19 nt, Artificial Sequence
  Description of Artificial Sequence: Synthetic oligonucleotide
uacuuuucuguaauaggga

SEQ ID NO: 2367111 - RNA, 19 nt, Artificial Sequence
  Description of Artificial Sequence: Synthetic oligonucleotide
aucaaaaguuuugaguuag

SEQ ID NO: 2367112 - RNA, 19 nt, Artificial Sequence
  Description of Artificial Sequence: Synthetic oligonucleotide
aaacugguuggugaccucg

SEQ ID NO: 2367113 - RNA, 19 nt, Artificial Sequence
  Description of Artificial Sequence: Synthetic oligonucleotide
auggcauccucuaacaacg

SEQ ID NO: 2367114 - RNA, 19 nt, Artificial Sequence
  Description of Artificial Sequence: Synthetic oligonucleotide
uaauugaacgguuuccguc

SEQ ID NO: 2367115 - RNA, 19 nt, Artificial Sequence
  Description of Artificial Sequence: Synthetic oligonucleotide
aacaacgucucgucacuag

SEQ ID NO: 2367116 - RNA, 19 nt, Artificial Sequence
  Description of Artificial Sequence: Synthetic oligonucleotide
cugucugagaaacugguug

SEQ ID NO: 2367117 - RNA, 19 nt, Artificial Sequence
  Description of Artificial Sequence: Synthetic oligonucleotide
cuaacugucugagaaacug

SEQ ID NO: 2367118 - RNA, 19 nt, Artificial Sequence
  Description of Artificial Sequence: Synthetic oligonucleotide
cuugcaaacuucuauggca

SEQ ID NO: 2367119 - RNA, 19 nt, Artificial Sequence
  Description of Artificial Sequence: Synthetic oligonucleotide
aaggaguaacacugcgcac

SEQ ID NO: 2367120 - RNA, 19 nt, Artificial Sequence
  Description of Artificial Sequence: Synthetic oligonucleotide
uauuugguguuucugucaa

SEQ ID NO: 2367121 - RNA, 19 nt, Artificial Sequence
  Description of Artificial Sequence: Synthetic oligonucleotide
uuugguguuucugucaaga

SEQ ID NO: 2367122 - RNA, 19 nt, Artificial Sequence
  Description of Artificial Sequence: Synthetic oligonucleotide
aaacugccagucaggaugc

SEQ ID NO: 2367123 - RNA, 19 nt, Artificial Sequence
  Description of Artificial Sequence: Synthetic oligonucleotide
guuaacgaaaauaucaaaa

SEQ ID NO: 2367124 - RNA, 19 nt, Artificial Sequence
  Description of Artificial Sequence: Synthetic oligonucleotide
aguccaauuguuccacagg

SEQ ID NO: 2367125 - RNA, 19 nt, Artificial Sequence
  Description of Artificial Sequence: Synthetic oligonucleotide
guccaauuguuccacaggc

SEQ ID NO: 2367126 - RNA, 19 nt, Artificial Sequence
  Description of Artificial Sequence: Synthetic oligonucleotide
uugucagguaaugucaaag

SEQ ID NO: 2367127 - RNA, 19 nt, Artificial Sequence
  Description of Artificial Sequence: Synthetic oligonucleotide
ugaugguuugcuuaaugaa

SEQ ID NO: 2367128 - RNA, 19 nt, Artificial Sequence
  Description of Artificial Sequence: Synthetic oligonucleotide
cacgucaacaaacugccag

SEQ ID NO: 2367129 - RNA, 19 nt, Artificial Sequence
  Description of Artificial Sequence: Synthetic oligonucleotide
cugaugauguaacaucuug

SEQ ID NO: 2367130 - RNA, 19 nt, Artificial Sequence
  Description of Artificial Sequence: Synthetic oligonucleotide
acuucuugcaaacuucuau

SEQ ID NO: 2367131 - RNA, 19 nt, Artificial Sequence
  Description of Artificial Sequence: Synthetic oligonucleotide
ggcucauugacacagacuc

SEQ ID NO: 2367132 - RNA, 19 nt, Artificial Sequence
  Description of Artificial Sequence: Synthetic oligonucleotide
uugcuuaaugaaauacacu

SEQ ID NO: 2367133 - RNA, 19 nt, Artificial Sequence
  Description of Artificial Sequence: Synthetic oligonucleotide
aaguuuaaacagucaaguu

SEQ ID NO: 2367134 - RNA, 19 nt, Artificial Sequence
  Description of Artificial Sequence: Synthetic oligonucleotide
ugucagguaaugucaaagu

SEQ ID NO: 2367135 - RNA, 19 nt, Artificial Sequence
  Description of Artificial Sequence: Synthetic oligonucleotide
uuaauugaacgguuuccgu

SEQ ID NO: 2367136 - RNA, 19 nt, Artificial Sequence
  Description of Artificial Sequence: Synthetic oligonucleotide
ucgggguuggccuccagcg

SEQ ID NO: 2367137 - RNA, 19 nt, Artificial Sequence
  Description of Artificial Sequence: Synthetic oligonucleotide
ucucuguuguuugcaaugg

SEQ ID NO: 2367138 - RNA, 19 nt, Artificial Sequence
  Description of Artificial Sequence: Synthetic oligonucleotide
ugucaaaguuuauucacau

SEQ ID NO: 2367139 - RNA, 19 nt, Artificial Sequence
  Description of Artificial Sequence: Synthetic oligonucleotide
uuuugucagguaaugucaa

SEQ ID NO: 2367140 - RNA, 19 nt, Artificial Sequence
  Description of Artificial Sequence: Synthetic oligonucleotide
uccaugaacuucuugcaaa

SEQ ID NO: 2367141 - RNA, 19 nt, Artificial Sequence
  Description of Artificial Sequence: Synthetic oligonucleotide
guuguuugcaauggcgugg

SEQ ID NO: 2367142 - RNA, 19 nt, Artificial Sequence
  Description of Artificial Sequence: Synthetic oligonucleotide
guuuccguccaucuaauuc

SEQ ID NO: 2367143 - RNA, 19 nt, Artificial Sequence
  Description of Artificial Sequence: Synthetic oligonucleotide
auugcugaugguuugcuua

SEQ ID NO: 2367144 - RNA, 19 nt, Artificial Sequence
  Description of Artificial Sequence: Synthetic oligonucleotide
auuccauacacgucaacaa

SEQ ID NO: 2367145 - RNA, 19 nt, Artificial Sequence
  Description of Artificial Sequence: Synthetic oligonucleotide
acacugcgcacacuggucg

SEQ ID NO: 2367146 - RNA, 19 nt, Artificial Sequence
  Description of Artificial Sequence: Synthetic oligonucleotide
uccugaacacuucauacuu

SEQ ID NO: 2367147 - RNA, 19 nt, Artificial Sequence
  Description of Artificial Sequence: Synthetic oligonucleotide
ggaucaguccaauuguucc

SEQ ID NO: 2367148 - RNA, 19 nt, Artificial Sequence
  Description of Artificial Sequence: Synthetic oligonucleotide
aguuaacgaaaauaucaaa

SEQ ID NO: 2367149 - RNA, 19 nt, Artificial Sequence
  Description of Artificial Sequence: Synthetic oligonucleotide
uugcaaacuucuauggcau

SEQ ID NO: 2367150 - RNA, 19 nt, Artificial Sequence
  Description of Artificial Sequence: Synthetic oligonucleotide
aacaaacugccagucagga

SEQ ID NO: 2367151 - RNA, 19 nt, Artificial Sequence
  Description of Artificial Sequence: Synthetic oligonucleotide
uugacacagacuccuccag

SEQ ID NO: 2367152 - RNA, 19 nt, Artificial Sequence
  Description of Artificial Sequence: Synthetic oligonucleotide
ucaggaugcaggccuaacu

SEQ ID NO: 2367153 - RNA, 19 nt, Artificial Sequence
  Description of Artificial Sequence: Synthetic oligonucleotide
uuccauacacgucaacaaa

SEQ ID NO: 2367154 - RNA, 19 nt, Artificial Sequence
  Description of Artificial Sequence: Synthetic oligonucleotide
ugguuaauugaacgguuuc

SEQ ID NO: 2367155 - RNA, 19 nt, Artificial Sequence
  Description of Artificial Sequence: Synthetic oligonucleotide
cauugacacagacuccucc

SEQ ID NO: 2367156 - RNA, 19 nt, Artificial Sequence
  Description of Artificial Sequence: Synthetic oligonucleotide
uaacacugcgcacacuggu

SEQ ID NO: 2367157 - RNA, 19 nt, Artificial Sequence
  Description of Artificial Sequence: Synthetic oligonucleotide
gaaguucaggcuccauucc

SEQ ID NO: 2367158 - RNA, 19 nt, Artificial Sequence
  Description of Artificial Sequence: Synthetic oligonucleotide
gaacacuucauacuuuucu

SEQ ID NO: 2367159 - RNA, 19 nt, Artificial Sequence
  Description of Artificial Sequence: Synthetic oligonucleotide
ucaggcuccauuccauaca

SEQ ID NO: 2367160 - RNA, 19 nt, Artificial Sequence
  Description of Artificial Sequence: Synthetic oligonucleotide
cucucuguuguuugcaaug

SEQ ID NO: 2367161 - RNA, 19 nt, Artificial Sequence
  Description of Artificial Sequence: Synthetic oligonucleotide
uaucaaaaguuuugaguua

SEQ ID NO: 2367162 - RNA, 19 nt, Artificial Sequence
  Description of Artificial Sequence: Synthetic oligonucleotide
auguugagaaguucaggcu

SEQ ID NO: 2367163 - RNA, 19 nt, Artificial Sequence
  Description of Artificial Sequence: Synthetic oligonucleotide
uccucuaacaacgucucgu

SEQ ID NO: 2367164 - RNA, 19 nt, Artificial Sequence
  Description of Artificial Sequence: Synthetic oligonucleotide
agucaaguuaacgaaaaua

SEQ ID NO: 2367165 - RNA, 19 nt, Artificial Sequence
  Description of Artificial Sequence: Synthetic oligonucleotide
acacuucauacuuuucugu

SEQ ID NO: 2367166 - RNA, 19 nt, Artificial Sequence
  Description of Artificial Sequence: Synthetic oligonucleotide
aggccuaacugucugagaa

SEQ ID NO: 2367167 - RNA, 19 nt, Artificial Sequence
  Description of Artificial Sequence: Synthetic oligonucleotide
ugguuggugaccucggggu

SEQ ID NO: 2367168 - RNA, 19 nt, Artificial Sequence
  Description of Artificial Sequence: Synthetic oligonucleotide
uccaauuguuccacaggca

SEQ ID NO: 2367169 - RNA, 19 nt, Artificial Sequence
  Description of Artificial Sequence: Synthetic oligonucleotide
cauaaaguuuaaacaguca

SEQ ID NO: 2367170 - RNA, 19 nt, Artificial Sequence
  Description of Artificial Sequence: Synthetic oligonucleotide
uacacugaugauguaacau

SEQ ID NO: 2367171 - RNA, 19 nt, Artificial Sequence
  Description of Artificial Sequence: Synthetic oligonucleotide
uuguccuugagauuuuauu

SEQ ID NO: 2367172 - RNA, 19 nt, Artificial Sequence
  Description of Artificial Sequence: Synthetic oligonucleotide
gacacagacuccuccagga

SEQ ID NO: 2367173 - RNA, 19 nt, Artificial Sequence
  Description of Artificial Sequence: Synthetic oligonucleotide
guuugcuuaaugaaauaca

SEQ ID NO: 2367174 - RNA, 19 nt, Artificial Sequence
  Description of Artificial Sequence: Synthetic oligonucleotide
uggucgugguaccauguug

SEQ ID NO: 2367175 - RNA, 19 nt, Artificial Sequence
  Description of Artificial Sequence: Synthetic oligonucleotide
acgaaaauaucaaaaguuu

SEQ ID NO: 2367176 - RNA, 19 nt, Artificial Sequence
  Description of Artificial Sequence: Synthetic oligonucleotide
aaagugcaucuucucucug

SEQ ID NO: 2367177 - RNA, 19 nt, Artificial Sequence
  Description of Artificial Sequence: Synthetic oligonucleotide
uggaucaguccaauuguuc

SEQ ID NO: 2367178 - RNA, 19 nt, Artificial Sequence
  Description of Artificial Sequence: Synthetic oligonucleotide
uucuguccugaacacuuca

SEQ ID NO: 2367179 - RNA, 19 nt, Artificial Sequence
  Description of Artificial Sequence: Synthetic oligonucleotide
cuuaaugaaauacacugau

SEQ ID NO: 2367180 - RNA, 19 nt, Artificial Sequence
  Description of Artificial Sequence: Synthetic oligonucleotide
aauacaguauuugguguuu

SEQ ID NO: 2367181 - RNA, 19 nt, Artificial Sequence
  Description of Artificial Sequence: Synthetic oligonucleotide
aacacugcgcacacugguc

SEQ ID NO: 2367182 - RNA, 19 nt, Artificial Sequence
  Description of Artificial Sequence: Synthetic oligonucleotide
cauacacgucaacaaacug

SEQ ID NO: 2367183 - RNA, 19 nt, Artificial Sequence
  Description of Artificial Sequence: Synthetic oligonucleotide
aggaguaacacugcgcaca

SEQ ID NO: 2367184 - RNA, 19 nt, Artificial Sequence
  Description of Artificial Sequence: Synthetic oligonucleotide
agcgcugacccuccauggc

SEQ ID NO: 2367185 - RNA, 19 nt, Artificial Sequence
  Description of Artificial Sequence: Synthetic oligonucleotide
aacagucaaguuaacgaaa

SEQ ID NO: 2367186 - RNA, 19 nt, Artificial Sequence
  Description of Artificial Sequence: Synthetic oligonucleotide
aacgucucgucacuaguuu

SEQ ID NO: 2367187 - RNA, 19 nt, Artificial Sequence
  Description of Artificial Sequence: Synthetic oligonucleotide
guugagaaguucaggcucc

SEQ ID NO: 2367188 - RNA, 19 nt, Artificial Sequence
  Description of Artificial Sequence: Synthetic oligonucleotide
acuaguuuucccaugguua

SEQ ID NO: 2367189 - RNA, 19 nt, Artificial Sequence
  Description of Artificial Sequence: Synthetic oligonucleotide
cagguaaugucaaaguuua

SEQ ID NO: 2367190 - RNA, 19 nt, Artificial Sequence
  Description of Artificial Sequence: Synthetic oligonucleotide
ucugagaaacugguuggug

SEQ ID NO: 2367191 - RNA, 19 nt, Artificial Sequence
  Description of Artificial Sequence: Synthetic oligonucleotide
gucaaguuaacgaaaauau

SEQ ID NO: 2367192 - RNA, 19 nt, Artificial Sequence
  Description of Artificial Sequence: Synthetic oligonucleotide
acgucaacaaacugccagu

SEQ ID NO: 2367193 - RNA, 19 nt, Artificial Sequence
  Description of Artificial Sequence: Synthetic oligonucleotide
acgguuuccguccaucuaa

SEQ ID NO: 2367194 - RNA, 19 nt, Artificial Sequence
  Description of Artificial Sequence: Synthetic oligonucleotide
caguccaauuguuccacag

SEQ ID NO: 2367195 - RNA, 19 nt, Artificial Sequence
  Description of Artificial Sequence: Synthetic oligonucleotide
guauuugguguuucuguca

SEQ ID NO: 2367196 - RNA, 19 nt, Artificial Sequence
  Description of Artificial Sequence: Synthetic oligonucleotide
gguuaauugaacgguuucc

SEQ ID NO: 2367197 - RNA, 19 nt, Artificial Sequence
  Description of Artificial Sequence: Synthetic oligonucleotide
uucuugcgaauaauacagu

SEQ ID NO: 2367198 - RNA, 19 nt, Artificial Sequence
  Description of Artificial Sequence: Synthetic oligonucleotide
cauuccauacacgucaaca

SEQ ID NO: 2367199 - RNA, 19 nt, Artificial Sequence
  Description of Artificial Sequence: Synthetic oligonucleotide
acaacgucucgucacuagu

SEQ ID NO: 2367200 - RNA, 19 nt, Artificial Sequence
  Description of Artificial Sequence: Synthetic oligonucleotide
cugguuggugaccucgggg

SEQ ID NO: 2367201 - RNA, 19 nt, Artificial Sequence
  Description of Artificial Sequence: Synthetic oligonucleotide
cauccucuaacaacgucuc

SEQ ID NO: 2367202 - RNA, 19 nt, Artificial Sequence
  Description of Artificial Sequence: Synthetic oligonucleotide
gguuugcuuaaugaaauac

SEQ ID NO: 2367203 - RNA, 19 nt, Artificial Sequence
  Description of Artificial Sequence: Synthetic oligonucleotide
auacacugaugauguaaca

SEQ ID NO: 2367204 - RNA, 19 nt, Artificial Sequence
  Description of Artificial Sequence: Synthetic oligonucleotide
auagggaaaaggaguaaca

SEQ ID NO: 2367205 - RNA, 19 nt, Artificial Sequence
  Description of Artificial Sequence: Synthetic oligonucleotide
cccaugguuaauugaacgg

SEQ ID NO: 2367206 - RNA, 19 nt, Artificial Sequence
  Description of Artificial Sequence: Synthetic oligonucleotide
augguuugcuuaaugaaau

SEQ ID NO: 2367207 - RNA, 19 nt, Artificial Sequence
  Description of Artificial Sequence: Synthetic oligonucleotide
guaauagggaaaaggagua

SEQ ID NO: 2367208 - RNA, 19 nt, Artificial Sequence
  Description of Artificial Sequence: Synthetic oligonucleotide
uauucacauaaaguuuaaa

SEQ ID NO: 2367209 - RNA, 19 nt, Artificial Sequence
  Description of Artificial Sequence: Synthetic oligonucleotide
uuucuguaauagggaaaag

SEQ ID NO: 2367210 - RNA, 19 nt, Artificial Sequence
  Description of Artificial Sequence: Synthetic oligonucleotide
ugguaccauguugagaagu

SEQ ID NO: 2367211 - RNA, 19 nt, Artificial Sequence
  Description of Artificial Sequence: Synthetic oligonucleotide
uuugucagguaaugucaaa

SEQ ID NO: 2367212 - RNA, 19 nt, Artificial Sequence
  Description of Artificial Sequence: Synthetic oligonucleotide
augucaaaguuuauucaca

SEQ ID NO: 2367213 - RNA, 19 nt, Artificial Sequence
  Description of Artificial Sequence: Synthetic oligonucleotide
uugcugaugguuugcuuaa

SEQ ID NO: 2367214 - RNA, 19 nt, Artificial Sequence
  Description of Artificial Sequence: Synthetic oligonucleotide
aacugguuggugaccucgg

SEQ ID NO: 2367215 - RNA, 19 nt, Artificial Sequence
  Description of Artificial Sequence: Synthetic oligonucleotide
auuugguguuucugucaag

SEQ ID NO: 2367216 - RNA, 19 nt, Artificial Sequence
  Description of Artificial Sequence: Synthetic oligonucleotide
gcguggaucaguccaauug

SEQ ID NO: 2367217 - RNA, 19 nt, Artificial Sequence
  Description of Artificial Sequence: Synthetic oligonucleotide
uaauagggaaaaggaguaa

SEQ ID NO: 2367218 - RNA, 19 nt, Artificial Sequence
  Description of Artificial Sequence: Synthetic oligonucleotide
caggcuccauuccauacac

SEQ ID NO: 2367219 - RNA, 19 nt, Artificial Sequence
  Description of Artificial Sequence: Synthetic oligonucleotide
ucucgucacuaguuuuccc

SEQ ID NO: 2367220 - RNA, 19 nt, Artificial Sequence
  Description of Artificial Sequence: Synthetic oligonucleotide
acagucaaguuaacgaaaa

SEQ ID NO: 2367221 - RNA, 19 nt, Artificial Sequence
  Description of Artificial Sequence: Synthetic oligonucleotide
aacgguuuccguccaucua

SEQ ID NO: 2367222 - RNA, 19 nt, Artificial Sequence
  Description of Artificial Sequence: Synthetic oligonucleotide
ucacuaguuuucccauggu

SEQ ID NO: 2367223 - RNA, 19 nt, Artificial Sequence
  Description of Artificial Sequence: Synthetic oligonucleotide
guaacacugcgcacacugg

SEQ ID NO: 2367224 - RNA, 19 nt, Artificial Sequence
  Description of Artificial Sequence: Synthetic oligonucleotide
guuugcaauggcguggauc

SEQ ID NO: 2367225 - RNA, 19 nt, Artificial Sequence
  Description of Artificial Sequence: Synthetic oligonucleotide
gagaaacugguuggugacc

SEQ ID NO: 2367226 - RNA, 19 nt, Artificial Sequence
  Description of Artificial Sequence: Synthetic oligonucleotide
gcaaacuucuauggcaucc

SEQ ID NO: 2367227 - RNA, 19 nt, Artificial Sequence
  Description of Artificial Sequence: Synthetic oligonucleotide
uuggugaccucgggguugg

SEQ ID NO: 2367228 - RNA, 19 nt, Artificial Sequence
  Description of Artificial Sequence: Synthetic oligonucleotide
auugaacgguuuccgucca

SEQ ID NO: 2367229 - RNA, 19 nt, Artificial Sequence
  Description of Artificial Sequence: Synthetic oligonucleotide
ugcaauggcguggaucagu

SEQ ID NO: 2367230 - RNA, 19 nt, Artificial Sequence
  Description of Artificial Sequence: Synthetic oligonucleotide
ucgucacuaguuuucccau

SEQ ID NO: 2367231 - RNA, 19 nt, Artificial Sequence
  Description of Artificial Sequence: Synthetic oligonucleotide
ucauugacacagacuccuc

SEQ ID NO: 2367232 - RNA, 19 nt, Artificial Sequence
  Description of Artificial Sequence: Synthetic oligonucleotide
augcaggccuaacugucug

SEQ ID NO: 2367233 - RNA, 19 nt, Artificial Sequence
  Description of Artificial Sequence: Synthetic oligonucleotide
ugguuugcuuaaugaaaua

SEQ ID NO: 2367234 - RNA, 19 nt, Artificial Sequence
  Description of Artificial Sequence: Synthetic oligonucleotide
cacugaugauguaacaucu

SEQ ID NO: 2367235 - RNA, 19 nt, Artificial Sequence
  Description of Artificial Sequence: Synthetic oligonucleotide
cagcgcugacccuccaugg

SEQ ID NO: 2367236 - RNA, 19 nt, Artificial Sequence
  Description of Artificial Sequence: Synthetic oligonucleotide
ugaacgguuuccguccauc

SEQ ID NO: 2367237 - RNA, 19 nt, Artificial Sequence
  Description of Artificial Sequence: Synthetic oligonucleotide
gcugaugguuugcuuaaug

SEQ ID NO: 2367238 - RNA, 19 nt, Artificial Sequence
  Description of Artificial Sequence: Synthetic oligonucleotide
ggaaaaggaguaacacugc

SEQ ID NO: 2367239 - RNA, 19 nt, Artificial Sequence
  Description of Artificial Sequence: Synthetic oligonucleotide
gucgugguaccauguugag

SEQ ID NO: 2367240 - RNA, 19 nt, Artificial Sequence
  Description of Artificial Sequence: Synthetic oligonucleotide
ugcaaacuucuauggcauc

SEQ ID NO: 2367241 - RNA, 19 nt, Artificial Sequence
  Description of Artificial Sequence: Synthetic oligonucleotide
uuccguccaucuaauucau

SEQ ID NO: 2367242 - RNA, 19 nt, Artificial Sequence
  Description of Artificial Sequence: Synthetic oligonucleotide
cgugguaccauguugagaa

SEQ ID NO: 2367243 - RNA, 19 nt, Artificial Sequence
  Description of Artificial Sequence: Synthetic oligonucleotide
cacuucauacuuuucugua

SEQ ID NO: 2367244 - RNA, 19 nt, Artificial Sequence
  Description of Artificial Sequence: Synthetic oligonucleotide
ccacaggcauugcugaugg

SEQ ID NO: 2367245 - RNA, 19 nt, Artificial Sequence
  Description of Artificial Sequence: Synthetic oligonucleotide
acaaacugccagucaggau

SEQ ID NO: 2367246 - RNA, 19 nt, Artificial Sequence
  Description of Artificial Sequence: Synthetic oligonucleotide
cuguuguuugcaauggcgu

SEQ ID NO: 2367247 - RNA, 19 nt, Artificial Sequence
  Description of Artificial Sequence: Synthetic oligonucleotide
cauggcugcucccgcgccg

SEQ ID NO: 2367248 - RNA, 19 nt, Artificial Sequence
  Description of Artificial Sequence: Synthetic oligonucleotide
gauguaacaucuuguccuu

SEQ ID NO: 2367249 - RNA, 19 nt, Artificial Sequence
  Description of Artificial Sequence: Synthetic oligonucleotide
ucgugguaccauguugaga

SEQ ID NO: 2367250 - RNA, 19 nt, Artificial Sequence
  Description of Artificial Sequence: Synthetic oligonucleotide
gucucgucacuaguuuucc

SEQ ID NO: 2367251 - RNA, 19 nt, Artificial Sequence
  Description of Artificial Sequence: Synthetic oligonucleotide
cucauugacacagacuccu

SEQ ID NO: 2367252 - RNA, 19 nt, Artificial Sequence
  Description of Artificial Sequence: Synthetic oligonucleotide
gagaaguucaggcuccauu

SEQ ID NO: 2367253 - RNA, 19 nt, Artificial Sequence
  Description of Artificial Sequence: Synthetic oligonucleotide
ggaguaacacugcgcacac

SEQ ID NO: 2367254 - RNA, 19 nt, Artificial Sequence
  Description of Artificial Sequence: Synthetic oligonucleotide
caauggcguggaucagucc

SEQ ID NO: 2367255 - RNA, 19 nt, Artificial Sequence
  Description of Artificial Sequence: Synthetic oligonucleotide
caaagugcaucuucucucu

SEQ ID NO: 2367256 - RNA, 19 nt, Artificial Sequence
  Description of Artificial Sequence: Synthetic oligonucleotide
cacuggucgugguaccaug

SEQ ID NO: 2367257 - RNA, 19 nt, Artificial Sequence
  Description of Artificial Sequence: Synthetic oligonucleotide
caucuuguccuugagauuu

SEQ ID NO: 2367258 - RNA, 19 nt, Artificial Sequence
  Description of Artificial Sequence: Synthetic oligonucleotide
gucagguaaugucaaaguu

SEQ ID NO: 2367259 - RNA, 19 nt, Artificial Sequence
  Description of Artificial Sequence: Synthetic oligonucleotide
gaaauacacugaugaugua

SEQ ID NO: 2367260 - RNA, 19 nt, Artificial Sequence
  Description of Artificial Sequence: Synthetic oligonucleotide
cucuaacaacgucucguca

SEQ ID NO: 2367261 - RNA, 19 nt, Artificial Sequence
  Description of Artificial Sequence: Synthetic oligonucleotide
guccugaacacuucauacu

SEQ ID NO: 2367262 - RNA, 19 nt, Artificial Sequence
  Description of Artificial Sequence: Synthetic oligonucleotide
augguuaauugaacgguuu

SEQ ID NO: 2367263 - RNA, 19 nt, Artificial Sequence
  Description of Artificial Sequence: Synthetic oligonucleotide
guccuugagauuuuauuuu

SEQ ID NO: 2367264 - RNA, 19 nt, Artificial Sequence
  Description of Artificial Sequence: Synthetic oligonucleotide
uggcauccucuaacaacgu

SEQ ID NO: 2367265 - RNA, 19 nt, Artificial Sequence
  Description of Artificial Sequence: Synthetic oligonucleotide
acacagacuccuccaggaa

SEQ ID NO: 2367266 - RNA, 19 nt, Artificial Sequence
  Description of Artificial Sequence: Synthetic oligonucleotide
gaacgguuuccguccaucu

SEQ ID NO: 2367267 - RNA, 19 nt, Artificial Sequence
  Description of Artificial Sequence: Synthetic oligonucleotide
gugguaccauguugagaag

SEQ ID NO: 2367268 - RNA, 19 nt, Artificial Sequence
  Description of Artificial Sequence: Synthetic oligonucleotide
ggcuccauuccauacacgu

SEQ ID NO: 2367269 - RNA, 19 nt, Artificial Sequence
  Description of Artificial Sequence: Synthetic oligonucleotide
gggguuggccuccagcggc

SEQ ID NO: 2367270 - RNA, 19 nt, Artificial Sequence
  Description of Artificial Sequence: Synthetic oligonucleotide
ggucgugguaccauguuga

SEQ ID NO: 2367271 - RNA, 19 nt, Artificial Sequence
  Description of Artificial Sequence: Synthetic oligonucleotide
aacuucuugcaaacuucua

SEQ ID NO: 2367272 - RNA, 19 nt, Artificial Sequence
  Description of Artificial Sequence: Synthetic oligonucleotide
cuaacaacgucucgucacu

SEQ ID NO: 2367273 - RNA, 19 nt, Artificial Sequence
  Description of Artificial Sequence: Synthetic oligonucleotide
acgucucgucacuaguuuu

SEQ ID NO: 2367274 - RNA, 19 nt, Artificial Sequence
  Description of Artificial Sequence: Synthetic oligonucleotide
cugaacacuucauacuuuu

SEQ ID NO: 2367275 - RNA, 19 nt, Artificial Sequence
  Description of Artificial Sequence: Synthetic oligonucleotide
gguaaugucaaaguuuauu

SEQ ID NO: 2367276 - RNA, 19 nt, Artificial Sequence
  Description of Artificial Sequence: Synthetic oligonucleotide
ucuuguccuugagauuuua

SEQ ID NO: 2367277 - RNA, 19 nt, Artificial Sequence
  Description of Artificial Sequence: Synthetic oligonucleotide
gugaccucgggguuggccu

SEQ ID NO: 2367278 - RNA, 19 nt, Artificial Sequence
  Description of Artificial Sequence: Synthetic oligonucleotide
ccucuaacaacgucucguc

SEQ ID NO: 2367279 - RNA, 19 nt, Artificial Sequence
  Description of Artificial Sequence: Synthetic oligonucleotide
auggcugcucccgcgccgg

SEQ ID NO: 2367280 - RNA, 19 nt, Artificial Sequence
  Description of Artificial Sequence: Synthetic oligonucleotide
caugguuaauugaacgguu

SEQ ID NO: 2367281 - RNA, 19 nt, Artificial Sequence
  Description of Artificial Sequence: Synthetic oligonucleotide
cuguccugaacacuucaua

SEQ ID NO: 2367282 - RNA, 19 nt, Artificial Sequence
  Description of Artificial Sequence: Synthetic oligonucleotide
cugcgcacacuggucgugg

SEQ ID NO: 2367283 - RNA, 19 nt, Artificial Sequence
  Description of Artificial Sequence: Synthetic oligonucleotide
uugaacgguuuccguccau

SEQ ID NO: 2367284 - RNA, 19 nt, Artificial Sequence
  Description of Artificial Sequence: Synthetic oligonucleotide
acuggucgugguaccaugu

SEQ ID NO: 2367285 - RNA, 19 nt, Artificial Sequence
  Description of Artificial Sequence: Synthetic oligonucleotide
agcggcagccagcgcugac

SEQ ID NO: 2367286 - RNA, 19 nt, Artificial Sequence
  Description of Artificial Sequence: Synthetic oligonucleotide
acccuccauggcugcuccc

SEQ ID NO: 2367287 - RNA, 19 nt, Artificial Sequence
  Description of Artificial Sequence: Synthetic oligonucleotide
cuauggcauccucuaacaa

SEQ ID NO: 2367288 - RNA, 19 nt, Artificial Sequence
  Description of Artificial Sequence: Synthetic oligonucleotide
uaacaacgucucgucacua

SEQ ID NO: 2367289 - RNA, 19 nt, Artificial Sequence
  Description of Artificial Sequence: Synthetic oligonucleotide
ccagauucaaagugcaucu

SEQ ID NO: 2367290 - RNA, 19 nt, Artificial Sequence
  Description of Artificial Sequence: Synthetic oligonucleotide
acugaugauguaacaucuu

SEQ ID NO: 2367291 - RNA, 19 nt, Artificial Sequence
  Description of Artificial Sequence: Synthetic oligonucleotide
uugcaauggcguggaucag

SEQ ID NO: 2367292 - RNA, 19 nt, Artificial Sequence
  Description of Artificial Sequence: Synthetic oligonucleotide
gcaggccuaacugucugag

SEQ ID NO: 2367293 - RNA, 19 nt, Artificial Sequence
  Description of Artificial Sequence: Synthetic oligonucleotide
ugaccucgggguuggccuc

SEQ ID NO: 2367294 - RNA, 19 nt, Artificial Sequence
  Description of Artificial Sequence: Synthetic oligonucleotide
ggaugcaggccuaacuguc

SEQ ID NO: 2367295 - RNA, 19 nt, Artificial Sequence
  Description of Artificial Sequence: Synthetic oligonucleotide
gaugcaggccuaacugucu

SEQ ID NO: 2367296 - RNA, 19 nt, Artificial Sequence
  Description of Artificial Sequence: Synthetic oligonucleotide
acugcgcacacuggucgug

SEQ ID NO: 2367297 - RNA, 19 nt, Artificial Sequence
  Description of Artificial Sequence: Synthetic oligonucleotide
gcauccucuaacaacgucu

SEQ ID NO: 2367298 - RNA, 19 nt, Artificial Sequence
  Description of Artificial Sequence: Synthetic oligonucleotide
cuucuauggcauccucuaa

SEQ ID NO: 2367299 - RNA, 19 nt, Artificial Sequence
  Description of Artificial Sequence: Synthetic oligonucleotide
ugcgcacacuggucguggu

SEQ ID NO: 2367300 - RNA, 19 nt, Artificial Sequence
  Description of Artificial Sequence: Synthetic oligonucleotide
ggcauccucuaacaacguc

SEQ ID NO: 2367301 - RNA, 19 nt, Artificial Sequence
  Description of Artificial Sequence: Synthetic oligonucleotide
ugagaaguucaggcuccau

SEQ ID NO: 2367302 - RNA, 19 nt, Artificial Sequence
  Description of Artificial Sequence: Synthetic oligonucleotide
uguuugcaauggcguggau

SEQ ID NO: 2367303 - RNA, 19 nt, Artificial Sequence
  Description of Artificial Sequence: Synthetic oligonucleotide
uccguccaucuaauucaua

SEQ ID NO: 2367304 - RNA, 19 nt, Artificial Sequence
  Description of Artificial Sequence: Synthetic oligonucleotide
guucaggcuccauuccaua

SEQ ID NO: 2367305 - RNA, 19 nt, Artificial Sequence
  Description of Artificial Sequence: Synthetic oligonucleotide
aggcuccauuccauacacg

SEQ ID NO: 2367306 - RNA, 19 nt, Artificial Sequence
  Description of Artificial Sequence: Synthetic oligonucleotide
ccagcgcugacccuccaug

SEQ ID NO: 2367307 - RNA, 19 nt, Artificial Sequence
  Description of Artificial Sequence: Synthetic oligonucleotide
gcaauggcguggaucaguc

SEQ ID NO: 2367308 - RNA, 19 nt, Artificial Sequence
  Description of Artificial Sequence: Synthetic oligonucleotide
ggugaccucgggguuggcc

SEQ ID NO: 2367309 - RNA, 19 nt, Artificial Sequence
  Description of Artificial Sequence: Synthetic oligonucleotide
cacagacuccuccaggaau

SEQ ID NO: 2367310 - RNA, 19 nt, Artificial Sequence
  Description of Artificial Sequence: Synthetic oligonucleotide
cacuaguuuucccaugguu

SEQ ID NO: 2367311 - RNA, 19 nt, Artificial Sequence
  Description of Artificial Sequence: Synthetic oligonucleotide
ugcugaugguuugcuuaau

SEQ ID NO: 2367312 - RNA, 19 nt, Artificial Sequence
  Description of Artificial Sequence: Synthetic oligonucleotide
acacuggucgugguaccau

SEQ ID NO: 2367313 - RNA, 19 nt, Artificial Sequence
  Description of Artificial Sequence: Synthetic oligonucleotide
cgucucgucacuaguuuuc

SEQ ID NO: 2367314 - RNA, 19 nt, Artificial Sequence
  Description of Artificial Sequence: Synthetic oligonucleotide
cuuguccuugagauuuuau

SEQ ID NO: 2367315 - RNA, 19 nt, Artificial Sequence
  Description of Artificial Sequence: Synthetic oligonucleotide
ccaauuguuccacaggcau

SEQ ID NO: 2367316 - RNA, 19 nt, Artificial Sequence
  Description of Artificial Sequence: Synthetic oligonucleotide
caggccuaacugucugaga

SEQ ID NO: 2367317 - RNA, 19 nt, Artificial Sequence
  Description of Artificial Sequence: Synthetic oligonucleotide
caauuguuccacaggcauu

SEQ ID NO: 2367318 - RNA, 19 nt, Artificial Sequence
  Description of Artificial Sequence: Synthetic oligonucleotide
gcacacuggucgugguacc

SEQ ID NO: 2367319 - RNA, 19 nt, Artificial Sequence
  Description of Artificial Sequence: Synthetic oligonucleotide
ccagucaggaugcaggccu

SEQ ID NO: 2367320 - RNA, 19 nt, Artificial Sequence
  Description of Artificial Sequence: Synthetic oligonucleotide
agguaaugucaaaguuuau

SEQ ID NO: 2367321 - RNA, 19 nt, Artificial Sequence
  Description of Artificial Sequence: Synthetic oligonucleotide
gcugacccuccauggcugc

SEQ ID NO: 2367322 - RNA, 19 nt, Artificial Sequence
  Description of Artificial Sequence: Synthetic oligonucleotide
auggcguggaucaguccaa

SEQ ID NO: 2367323 - RNA, 19 nt, Artificial Sequence
  Description of Artificial Sequence: Synthetic oligonucleotide
cacacuggucgugguacca

SEQ ID NO: 2367324 - RNA, 19 nt, Artificial Sequence
  Description of Artificial Sequence: Synthetic oligonucleotide
ggccuaacugucugagaaa

SEQ ID NO: 2367325 - RNA, 19 nt, Artificial Sequence
  Description of Artificial Sequence: Synthetic oligonucleotide
acacgucaacaaacugcca

SEQ ID NO: 2367326 - RNA, 19 nt, Artificial Sequence
  Description of Artificial Sequence: Synthetic oligonucleotide
caacgucucgucacuaguu

SEQ ID NO: 2367327 - RNA, 19 nt, Artificial Sequence
  Description of Artificial Sequence: Synthetic oligonucleotide
uggcguggaucaguccaau

SEQ ID NO: 2367328 - RNA, 19 nt, Artificial Sequence
  Description of Artificial Sequence: Synthetic oligonucleotide
gcuccauuccauacacguc

SEQ ID NO: 2367329 - RNA, 19 nt, Artificial Sequence
  Description of Artificial Sequence: Synthetic oligonucleotide
ccaugguuaauugaacggu

SEQ ID NO: 2367330 - RNA, 19 nt, Artificial Sequence
  Description of Artificial Sequence: Synthetic oligonucleotide
cgcacacuggucgugguac

SEQ ID NO: 2367331 - RNA, 19 nt, Artificial Sequence
  Description of Artificial Sequence: Synthetic oligonucleotide
cagucaaguuaacgaaaau

SEQ ID NO: 2367332 - RNA, 19 nt, Artificial Sequence
  Description of Artificial Sequence: Synthetic oligonucleotide
cgucacuaguuuucccaug

SEQ ID NO: 2367333 - RNA, 19 nt, Artificial Sequence
  Description of Artificial Sequence: Synthetic oligonucleotide
gguaccauguugagaaguu

SEQ ID NO: 2367334 - RNA, 19 nt, Artificial Sequence
  Description of Artificial Sequence: Synthetic oligonucleotide
ccauuccauacacgucaac

SEQ ID NO: 2367335 - RNA, 19 nt, Artificial Sequence
  Description of Artificial Sequence: Synthetic oligonucleotide
gcgccggccgcucuccagc

SEQ ID NO: 2367336 - RNA, 19 nt, Artificial Sequence
  Description of Artificial Sequence: Synthetic oligonucleotide
guggaucaguccaauuguu

SEQ ID NO: 2367337 - RNA, 19 nt, Artificial Sequence
  Description of Artificial Sequence: Synthetic oligonucleotide
cguggaucaguccaauugu

SEQ ID NO: 2367338 - RNA, 19 nt, Artificial Sequence
  Description of Artificial Sequence: Synthetic oligonucleotide
gccgcucuccagcucugac

SEQ ID NO: 2367339 - RNA, 19 nt, Artificial Sequence
  Description of Artificial Sequence: Synthetic oligonucleotide
cgcugacccuccauggcug

SEQ ID NO: 2367340 - RNA, 19 nt, Artificial Sequence
  Description of Artificial Sequence: Synthetic oligonucleotide
gaguaacacugcgcacacu

SEQ ID NO: 2367341 - RNA, 19 nt, Artificial Sequence
  Description of Artificial Sequence: Synthetic oligonucleotide
gcgcugacccuccauggcu

SEQ ID NO: 2367342 - RNA, 19 nt, Artificial Sequence
  Description of Artificial Sequence: Synthetic oligonucleotide
cacugcgcacacuggucgu

SEQ ID NO: 2367343 - RNA, 19 nt, Artificial Sequence
  Description of Artificial Sequence: Synthetic oligonucleotide
ccuaacugucugagaaacu

SEQ ID NO: 2367344 - RNA, 19 nt, Artificial Sequence
  Description of Artificial Sequence: Synthetic oligonucleotide
cuggucgugguaccauguu

SEQ ID NO: 2367345 - RNA, 19 nt, Artificial Sequence
  Description of Artificial Sequence: Synthetic oligonucleotide
uggugaccucgggguuggc

SEQ ID NO: 2367346 - RNA, 19 nt, Artificial Sequence
  Description of Artificial Sequence: Synthetic oligonucleotide
ccugaacacuucauacuuu

SEQ ID NO: 2367347 - RNA, 19 nt, Artificial Sequence
  Description of Artificial Sequence: Synthetic oligonucleotide
cacaggcauugcugauggu

SEQ ID NO: 2367348 - RNA, 19 nt, Artificial Sequence
  Description of Artificial Sequence: Synthetic oligonucleotide
gcgcacacuggucguggua

SEQ ID NO: 2367349 - RNA, 19 nt, Artificial Sequence
  Description of Artificial Sequence: Synthetic oligonucleotide
ggcguggaucaguccaauu

SEQ ID NO: 2367350 - RNA, 19 nt, Artificial Sequence
  Description of Artificial Sequence: Synthetic oligonucleotide
cagacuccuccaggaauuu

SEQ ID NO: 2367351 - RNA, 19 nt, Artificial Sequence
  Description of Artificial Sequence: Synthetic oligonucleotide
cugacccuccauggcugcu

SEQ ID NO: 2367352 - RNA, 19 nt, Artificial Sequence
  Description of Artificial Sequence: Synthetic oligonucleotide
ccggccgcucuccagcucu

SEQ ID NO: 2367353 - RNA, 19 nt, Artificial Sequence
  Description of Artificial Sequence: Synthetic oligonucleotide
cagcggcagccagcgcuga

SEQ ID NO: 2367354 - RNA, 19 nt, Artificial Sequence
  Description of Artificial Sequence: Synthetic oligonucleotide
cccgcgccggccgcucucc

SEQ ID NO: 2367355 - RNA, 19 nt, Artificial Sequence
  Description of Artificial Sequence: Synthetic oligonucleotide
gccggccgcucuccagcuc

SEQ ID NO: 2367356 - RNA, 19 nt, Artificial Sequence
  Description of Artificial Sequence: Synthetic oligonucleotide
gccagcgcugacccuccau

SEQ ID NO: 2367357 - RNA, 19 nt, Artificial Sequence
  Description of Artificial Sequence: Synthetic oligonucleotide
cggccgcucuccagcucug

SEQ ID NO: 2367358 - RNA, 19 nt, Artificial Sequence
  Description of Artificial Sequence: Synthetic oligonucleotide
ccgcgccggccgcucucca

SEQ ID NO: 2367359 - RNA, 19 nt, Artificial Sequence
  Description of Artificial Sequence: Synthetic oligonucleotide
auaugugggaauuaaaugc

SEQ ID NO: 2367360 - RNA, 19 nt, Artificial Sequence
  Description of Artificial Sequence: Synthetic oligonucleotide
ugugaaauggaaucaaagg

SEQ ID NO: 2367361 - RNA, 19 nt, Artificial Sequence
  Description of Artificial Sequence: Synthetic oligonucleotide
aggacugugauauuggggc

SEQ ID NO: 2367362 - RNA, 19 nt, Artificial Sequence
  Description of Artificial Sequence: Synthetic oligonucleotide
aauuaaaugccuuuccaug

SEQ ID NO: 2367363 - RNA, 19 nt, Artificial Sequence
  Description of Artificial Sequence: Synthetic oligonucleotide
acgguaaaagauuugagag

SEQ ID NO: 2367364 - RNA, 19 nt, Artificial Sequence
  Description of Artificial Sequence: Synthetic oligonucleotide
aaauccacguagcuggugg

SEQ ID NO: 2367365 - RNA, 19 nt, Artificial Sequence
  Description of Artificial Sequence: Synthetic oligonucleotide
cacaaauccacguagcugg

SEQ ID NO: 2367366 - RNA, 19 nt, Artificial Sequence
  Description of Artificial Sequence: Synthetic oligonucleotide
auagcugccacucagugag

SEQ ID NO: 2367367 - RNA, 19 nt, Artificial Sequence
  Description of Artificial Sequence: Synthetic oligonucleotide
aaagauuugagaguggccu

SEQ ID NO: 2367368 - RNA, 19 nt, Artificial Sequence
  Description of Artificial Sequence: Synthetic oligonucleotide
ugaaauggaaucaaagguc

SEQ ID NO: 2367369 - RNA, 19 nt, Artificial Sequence
  Description of Artificial Sequence: Synthetic oligonucleotide
uaugugggaauuaaaugcc

SEQ ID NO: 2367370 - RNA, 19 nt, Artificial Sequence
  Description of Artificial Sequence: Synthetic oligonucleotide
agugaguugauucaaggca

SEQ ID NO: 2367371 - RNA, 19 nt, Artificial Sequence
  Description of Artificial Sequence: Synthetic oligonucleotide
uauugugccugugaaaugg

SEQ ID NO: 2367372 - RNA, 19 nt, Artificial Sequence
  Description of Artificial Sequence: Synthetic oligonucleotide
gaagugaguugauucaagg

SEQ ID NO: 2367373 - RNA, 19 nt, Artificial Sequence
  Description of Artificial Sequence: Synthetic oligonucleotide
uccccaaacaugauaagag

SEQ ID NO: 2367374 - RNA, 19 nt, Artificial Sequence
  Description of Artificial Sequence: Synthetic oligonucleotide
uggcuucgcaucaagaagg

SEQ ID NO: 2367375 - RNA, 19 nt, Artificial Sequence
  Description of Artificial Sequence: Synthetic oligonucleotide
gaaauggaaucaaaggucc

SEQ ID NO: 2367376 - RNA, 19 nt, Artificial Sequence
  Description of Artificial Sequence: Synthetic oligonucleotide
aaaagauuugagaguggcc

SEQ ID NO: 2367377 - RNA, 19 nt, Artificial Sequence
  Description of Artificial Sequence: Synthetic oligonucleotide
uccaguuccccaaacauga

SEQ ID NO: 2367378 - RNA, 19 nt, Artificial Sequence
  Description of Artificial Sequence: Synthetic oligonucleotide
uguuccuucguguaauucc

SEQ ID NO: 2367379 - RNA, 19 nt, Artificial Sequence
  Description of Artificial Sequence: Synthetic oligonucleotide
uguaauuccguguggaggu

SEQ ID NO: 2367380 - RNA, 19 nt, Artificial Sequence
  Description of Artificial Sequence: Synthetic oligonucleotide
uaaaagauuugagaguggc

SEQ ID NO: 2367381 - RNA, 19 nt, Artificial Sequence
  Description of Artificial Sequence: Synthetic oligonucleotide
uuguauagcuucaccacag

SEQ ID NO: 2367382 - RNA, 19 nt, Artificial Sequence
  Description of Artificial Sequence: Synthetic oligonucleotide
caugauaagaguugggguc

SEQ ID NO: 2367383 - RNA, 19 nt, Artificial Sequence
  Description of Artificial Sequence: Synthetic oligonucleotide
aaaaccuggaaggucaaug

SEQ ID NO: 2367384 - RNA, 19 nt, Artificial Sequence
  Description of Artificial Sequence: Synthetic oligonucleotide
aguuggggucuucacagcc

SEQ ID NO: 2367385 - RNA, 19 nt, Artificial Sequence
  Description of Artificial Sequence: Synthetic oligonucleotide
caaacaugauaagaguugg

SEQ ID NO: 2367386 - RNA, 19 nt, Artificial Sequence
  Description of Artificial Sequence: Synthetic oligonucleotide
uucaccacagagugguugg

SEQ ID NO: 2367387 - RNA, 19 nt, Artificial Sequence
  Description of Artificial Sequence: Synthetic oligonucleotide
cugugaaauggaaucaaag

SEQ ID NO: 2367388 - RNA, 19 nt, Artificial Sequence
  Description of Artificial Sequence: Synthetic oligonucleotide
gguaaaagauuugagagug

SEQ ID NO: 2367389 - RNA, 19 nt, Artificial Sequence
  Description of Artificial Sequence: Synthetic oligonucleotide
ugugaaggcgcugaguucc

SEQ ID NO: 2367390 - RNA, 19 nt, Artificial Sequence
  Description of Artificial Sequence: Synthetic oligonucleotide
cugaguucccaaaaccugg

SEQ ID NO: 2367391 - RNA, 19 nt, Artificial Sequence
  Description of Artificial Sequence: Synthetic oligonucleotide
agggcuuucuuuauugugc

SEQ ID NO: 2367392 - RNA, 19 nt, Artificial Sequence
  Description of Artificial Sequence: Synthetic oligonucleotide
acauacaggagaaacauga

SEQ ID NO: 2367393 - RNA, 19 nt, Artificial Sequence
  Description of Artificial Sequence: Synthetic oligonucleotide
aagggcuuucuuuauugug

SEQ ID NO: 2367394 - RNA, 19 nt, Artificial Sequence
  Description of Artificial Sequence: Synthetic oligonucleotide
gauauuggggccucuccag

SEQ ID NO: 2367395 - RNA, 19 nt, Artificial Sequence
  Description of Artificial Sequence: Synthetic oligonucleotide
ugggcacaaauccacguag

SEQ ID NO: 2367396 - RNA, 19 nt, Artificial Sequence
  Description of Artificial Sequence: Synthetic oligonucleotide
aaugggcacaaauccacgu

SEQ ID NO: 2367397 - RNA, 19 nt, Artificial Sequence
  Description of Artificial Sequence: Synthetic oligonucleotide
aagaguuggggucuucaca

SEQ ID NO: 2367398 - RNA, 19 nt, Artificial Sequence
  Description of Artificial Sequence: Synthetic oligonucleotide
cauggugaaaggcuucugg

SEQ ID NO: 2367399 - RNA, 19 nt, Artificial Sequence
  Description of Artificial Sequence: Synthetic oligonucleotide
ugauauuggggccucucca

SEQ ID NO: 2367400 - RNA, 19 nt, Artificial Sequence
  Description of Artificial Sequence: Synthetic oligonucleotide
ucacgguaaaagauuugag

SEQ ID NO: 2367401 - RNA, 19 nt, Artificial Sequence
  Description of Artificial Sequence: Synthetic oligonucleotide
acaugauaagaguuggggu

SEQ ID NO: 2367402 - RNA, 19 nt, Artificial Sequence
  Description of Artificial Sequence: Synthetic oligonucleotide
cuucgcaucaagaagggca

SEQ ID NO: 2367403 - RNA, 19 nt, Artificial Sequence
  Description of Artificial Sequence: Synthetic oligonucleotide
ugcccugugugcuugcugg

SEQ ID NO: 2367404 - RNA, 19 nt, Artificial Sequence
  Description of Artificial Sequence: Synthetic oligonucleotide
auggucaaggaacucaaga

SEQ ID NO: 2367405 - RNA, 19 nt, Artificial Sequence
  Description of Artificial Sequence: Synthetic oligonucleotide
gaacucaagaagggcaugg

SEQ ID NO: 2367406 - RNA, 19 nt, Artificial Sequence
  Description of Artificial Sequence: Synthetic oligonucleotide
uuugagaguggccucgggu

SEQ ID NO: 2367407 - RNA, 19 nt, Artificial Sequence
  Description of Artificial Sequence: Synthetic oligonucleotide
uggucaaggaacucaagaa

SEQ ID NO: 2367408 - RNA, 19 nt, Artificial Sequence
  Description of Artificial Sequence: Synthetic oligonucleotide
gugaaauggaaucaaaggu

SEQ ID NO: 2367409 - RNA, 19 nt, Artificial Sequence
  Description of Artificial Sequence: Synthetic oligonucleotide
ucucuggaagaggagagag

SEQ ID NO: 2367410 - RNA, 19 nt, Artificial Sequence
  Description of Artificial Sequence: Synthetic oligonucleotide
ugccuuuccauggagaaac

SEQ ID NO: 2367411 - RNA, 19 nt, Artificial Sequence
  Description of Artificial Sequence: Synthetic oligonucleotide
aaagggcuuucuuuauugu

SEQ ID NO: 2367412 - RNA, 19 nt, Artificial Sequence
  Description of Artificial Sequence: Synthetic oligonucleotide
uucguguaauuccgugugg

SEQ ID NO: 2367413 - RNA, 19 nt, Artificial Sequence
  Description of Artificial Sequence: Synthetic oligonucleotide
cuucguguaauuccgugug

SEQ ID NO: 2367414 - RNA, 19 nt, Artificial Sequence
  Description of Artificial Sequence: Synthetic oligonucleotide
guguaauuccguguggagg

SEQ ID NO: 2367415 - RNA, 19 nt, Artificial Sequence
  Description of Artificial Sequence: Synthetic oligonucleotide
aauuguuccuucguguaau

SEQ ID NO: 2367416 - RNA, 19 nt, Artificial Sequence
  Description of Artificial Sequence: Synthetic oligonucleotide
ugggaagucugcucaggcg

SEQ ID NO: 2367417 - RNA, 19 nt, Artificial Sequence
  Description of Artificial Sequence: Synthetic oligonucleotide
cugggaagugaguugauuc

SEQ ID NO: 2367418 - RNA, 19 nt, Artificial Sequence
  Description of Artificial Sequence: Synthetic oligonucleotide
aguugauucaaggcaaaug

SEQ ID NO: 2367419 - RNA, 19 nt, Artificial Sequence
  Description of Artificial Sequence: Synthetic oligonucleotide
gucuagaccguucaggguc

SEQ ID NO: 2367420 - RNA, 19 nt, Artificial Sequence
  Description of Artificial Sequence: Synthetic oligonucleotide
agaagggcagggcauagcu

SEQ ID NO: 2367421 - RNA, 19 nt, Artificial Sequence
  Description of Artificial Sequence: Synthetic oligonucleotide
ucaagaagggcauggugaa

SEQ ID NO: 2367422 - RNA, 19 nt, Artificial Sequence
  Description of Artificial Sequence: Synthetic oligonucleotide
guuccuucguguaauuccg

SEQ ID NO: 2367423 - RNA, 19 nt, Artificial Sequence
  Description of Artificial Sequence: Synthetic oligonucleotide
cacgguaaaagauuugaga

SEQ ID NO: 2367424 - RNA, 19 nt, Artificial Sequence
  Description of Artificial Sequence: Synthetic oligonucleotide
agcauucugcaccucuagg

SEQ ID NO: 2367425 - RNA, 19 nt, Artificial Sequence
  Description of Artificial Sequence: Synthetic oligonucleotide
aguucugggaagugaguug

SEQ ID NO: 2367426 - RNA, 19 nt, Artificial Sequence
  Description of Artificial Sequence: Synthetic oligonucleotide
uauuggggccucuccagag

SEQ ID NO: 2367427 - RNA, 19 nt, Artificial Sequence
  Description of Artificial Sequence: Synthetic oligonucleotide
ucgggugagaccagccagg

SEQ ID NO: 2367428 - RNA, 19 nt, Artificial Sequence
  Description of Artificial Sequence: Synthetic oligonucleotide
ugaagugacucucgcgcca

SEQ ID NO: 2367429 - RNA, 19 nt, Artificial Sequence
  Description of Artificial Sequence: Synthetic oligonucleotide
guggcuucgcaucaagaag

SEQ ID NO: 2367430 - RNA, 19 nt, Artificial Sequence
  Description of Artificial Sequence: Synthetic oligonucleotide
uggugaaaggcuucuggac

SEQ ID NO: 2367431 - RNA, 19 nt, Artificial Sequence
  Description of Artificial Sequence: Synthetic oligonucleotide
uuauugugccugugaaaug

SEQ ID NO: 2367432 - RNA, 19 nt, Artificial Sequence
  Description of Artificial Sequence: Synthetic oligonucleotide
agcagggcugccugguacc

SEQ ID NO: 2367433 - RNA, 19 nt, Artificial Sequence
  Description of Artificial Sequence: Synthetic oligonucleotide
uguauagcuucaccacaga

SEQ ID NO: 2367434 - RNA, 19 nt, Artificial Sequence
  Description of Artificial Sequence: Synthetic oligonucleotide
agaauuguuccuucgugua

SEQ ID NO: 2367435 - RNA, 19 nt, Artificial Sequence
  Description of Artificial Sequence: Synthetic oligonucleotide
uguggagguagcaggcaug

SEQ ID NO: 2367436 - RNA, 19 nt, Artificial Sequence
  Description of Artificial Sequence: Synthetic oligonucleotide
gugccugugaaauggaauc

SEQ ID NO: 2367437 - RNA, 19 nt, Artificial Sequence
  Description of Artificial Sequence: Synthetic oligonucleotide
ucuagaccguucaggguca

SEQ ID NO: 2367438 - RNA, 19 nt, Artificial Sequence
  Description of Artificial Sequence: Synthetic oligonucleotide
gggucuagaccguucaggg

SEQ ID NO: 2367439 - RNA, 19 nt, Artificial Sequence
  Description of Artificial Sequence: Synthetic oligonucleotide
uaauuccguguggaggugg

SEQ ID NO: 2367440 - RNA, 19 nt, Artificial Sequence
  Description of Artificial Sequence: Synthetic oligonucleotide
ugacucucgcgccaaggug

SEQ ID NO: 2367441 - RNA, 19 nt, Artificial Sequence
  Description of Artificial Sequence: Synthetic oligonucleotide
aauuccguguggagguggg

SEQ ID NO: 2367442 - RNA, 19 nt, Artificial Sequence
  Description of Artificial Sequence: Synthetic oligonucleotide
guaaaagauuugagagugg

SEQ ID NO: 2367443 - RNA, 19 nt, Artificial Sequence
  Description of Artificial Sequence: Synthetic oligonucleotide
ugagaguggccucggguga

SEQ ID NO: 2367444 - RNA, 19 nt, Artificial Sequence
  Description of Artificial Sequence: Synthetic oligonucleotide
uaagaguuggggucuucac

SEQ ID NO: 2367445 - RNA, 19 nt, Artificial Sequence
  Description of Artificial Sequence: Synthetic oligonucleotide
auucaaggcaaauggucaa

SEQ ID NO: 2367446 - RNA, 19 nt, Artificial Sequence
  Description of Artificial Sequence: Synthetic oligonucleotide
aagucugcucaggcgggcc

SEQ ID NO: 2367447 - RNA, 19 nt, Artificial Sequence
  Description of Artificial Sequence: Synthetic oligonucleotide
ucuuugacaggagcugcag

SEQ ID NO: 2367448 - RNA, 19 nt, Artificial Sequence
  Description of Artificial Sequence: Synthetic oligonucleotide
agggucuagaccguucagg

SEQ ID NO: 2367449 - RNA, 19 nt, Artificial Sequence
  Description of Artificial Sequence: Synthetic oligonucleotide
ggacuguggagguagcagg

SEQ ID NO: 2367450 - RNA, 19 nt, Artificial Sequence
  Description of Artificial Sequence: Synthetic oligonucleotide
augauaagaguuggggucu

SEQ ID NO: 2367451 - RNA, 19 nt, Artificial Sequence
  Description of Artificial Sequence: Synthetic oligonucleotide
accguucagggucaguucu

SEQ ID NO: 2367452 - RNA, 19 nt, Artificial Sequence
  Description of Artificial Sequence: Synthetic oligonucleotide
uggaaucaaagguccuggc

SEQ ID NO: 2367453 - RNA, 19 nt, Artificial Sequence
  Description of Artificial Sequence: Synthetic oligonucleotide
uugcuuccugugaaggcgc

SEQ ID NO: 2367454 - RNA, 19 nt, Artificial Sequence
  Description of Artificial Sequence: Synthetic oligonucleotide
agcguacccagcugcuccc

SEQ ID NO: 2367455 - RNA, 19 nt, Artificial Sequence
  Description of Artificial Sequence: Synthetic oligonucleotide
aauccacguagcugguggu

SEQ ID NO: 2367456 - RNA, 19 nt, Artificial Sequence
  Description of Artificial Sequence: Synthetic oligonucleotide
agaggcagcaccucacggu

SEQ ID NO: 2367457 - RNA, 19 nt, Artificial Sequence
  Description of Artificial Sequence: Synthetic oligonucleotide
gaggagagagggucuagac

SEQ ID NO: 2367458 - RNA, 19 nt, Artificial Sequence
  Description of Artificial Sequence: Synthetic oligonucleotide
accacagagugguugggca

SEQ ID NO: 2367459 - RNA, 19 nt, Artificial Sequence
  Description of Artificial Sequence: Synthetic oligonucleotide
auuugagaguggccucggg

SEQ ID NO: 2367460 - RNA, 19 nt, Artificial Sequence
  Description of Artificial Sequence: Synthetic oligonucleotide
aauggucaaggaacucaag

SEQ ID NO: 2367461 - RNA, 19 nt, Artificial Sequence
  Description of Artificial Sequence: Synthetic oligonucleotide
ucguguaauuccgugugga

SEQ ID NO: 2367462 - RNA, 19 nt, Artificial Sequence
  Description of Artificial Sequence: Synthetic oligonucleotide
gaagggcauggugaaaggc

SEQ ID NO: 2367463 - RNA, 19 nt, Artificial Sequence
  Description of Artificial Sequence: Synthetic oligonucleotide
cugugugcuugcuggagag

SEQ ID NO: 2367464 - RNA, 19 nt, Artificial Sequence
  Description of Artificial Sequence: Synthetic oligonucleotide
aggagaaacaugagcagca

SEQ ID NO: 2367465 - RNA, 19 nt, Artificial Sequence
  Description of Artificial Sequence: Synthetic oligonucleotide
ugguccaguuccccaaaca

SEQ ID NO: 2367466 - RNA, 19 nt, Artificial Sequence
  Description of Artificial Sequence: Synthetic oligonucleotide
gauuugagaguggccucgg

SEQ ID NO: 2367467 - RNA, 19 nt, Artificial Sequence
  Description of Artificial Sequence: Synthetic oligonucleotide
aaggugugguccaguuccc

SEQ ID NO: 2367468 - RNA, 19 nt, Artificial Sequence
  Description of Artificial Sequence: Synthetic oligonucleotide
aguggccucgggugagacc

SEQ ID NO: 2367469 - RNA, 19 nt, Artificial Sequence
  Description of Artificial Sequence: Synthetic oligonucleotide
cccaaucccacacagggcc

SEQ ID NO: 2367470 - RNA, 19 nt, Artificial Sequence
  Description of Artificial Sequence: Synthetic oligonucleotide
caugucccgccuuguauag

SEQ ID NO: 2367471 - RNA, 19 nt, Artificial Sequence
  Description of Artificial Sequence: Synthetic oligonucleotide
cucgggugagaccagccag

SEQ ID NO: 2367472 - RNA, 19 nt, Artificial Sequence
  Description of Artificial Sequence: Synthetic oligonucleotide
cucacgguaaaagauuuga

SEQ ID NO: 2367473 - RNA, 19 nt, Artificial Sequence
  Description of Artificial Sequence: Synthetic oligonucleotide
guagcaggcaugucccgcc

SEQ ID NO: 2367474 - RNA, 19 nt, Artificial Sequence
  Description of Artificial Sequence: Synthetic oligonucleotide
agcccagaauuguuccuuc

SEQ ID NO: 2367475 - RNA, 19 nt, Artificial Sequence
  Description of Artificial Sequence: Synthetic oligonucleotide
auaagaguuggggucuuca

SEQ ID NO: 2367476 - RNA, 19 nt, Artificial Sequence
  Description of Artificial Sequence: Synthetic oligonucleotide
cugggaagucugcucaggc

SEQ ID NO: 2367477 - RNA, 19 nt, Artificial Sequence
  Description of Artificial Sequence: Synthetic oligonucleotide
ggugagaccagccaggacu

SEQ ID NO: 2367478 - RNA, 19 nt, Artificial Sequence
  Description of Artificial Sequence: Synthetic oligonucleotide
cugccacucagugaggggc

SEQ ID NO: 2367479 - RNA, 19 nt, Artificial Sequence
  Description of Artificial Sequence: Synthetic oligonucleotide
aacucaagaagggcauggu

SEQ ID NO: 2367480 - RNA, 19 nt, Artificial Sequence
  Description of Artificial Sequence: Synthetic oligonucleotide
ccuuguauagcuucaccac

SEQ ID NO: 2367481 - RNA, 19 nt, Artificial Sequence
  Description of Artificial Sequence: Synthetic oligonucleotide
auauuggggccucuccaga

SEQ ID NO: 2367482 - RNA, 19 nt, Artificial Sequence
  Description of Artificial Sequence: Synthetic oligonucleotide
agugacucucgcgccaagg

SEQ ID NO: 2367483 - RNA, 19 nt, Artificial Sequence
  Description of Artificial Sequence: Synthetic oligonucleotide
ugccugugaaauggaauca

SEQ ID NO: 2367484 - RNA, 19 nt, Artificial Sequence
  Description of Artificial Sequence: Synthetic oligonucleotide
cagcguacccagcugcucc

SEQ ID NO: 2367485 - RNA, 19 nt, Artificial Sequence
  Description of Artificial Sequence: Synthetic oligonucleotide
aaggcgcugaguucccaaa

SEQ ID NO: 2367486 - RNA, 19 nt, Artificial Sequence
  Description of Artificial Sequence: Synthetic oligonucleotide
ucccauaugugggaauuaa

SEQ ID NO: 2367487 - RNA, 19 nt, Artificial Sequence
  Description of Artificial Sequence: Synthetic oligonucleotide
guuccccaaacaugauaag

SEQ ID NO: 2367488 - RNA, 19 nt, Artificial Sequence
  Description of Artificial Sequence: Synthetic oligonucleotide
acugugauauuggggccuc

SEQ ID NO: 2367489 - RNA, 19 nt, Artificial Sequence
  Description of Artificial Sequence: Synthetic oligonucleotide
cugcagcguacccagcugc

SEQ ID NO: 2367490 - RNA, 19 nt, Artificial Sequence
  Description of Artificial Sequence: Synthetic oligonucleotide
cuggugguggcuucgcauc

SEQ ID NO: 2367491 - RNA, 19 nt, Artificial Sequence
  Description of Artificial Sequence: Synthetic oligonucleotide
ugugauauuggggccucuc

SEQ ID NO: 2367492 - RNA, 19 nt, Artificial Sequence
  Description of Artificial Sequence: Synthetic oligonucleotide
ucuggacuguggagguagc

SEQ ID NO: 2367493 - RNA, 19 nt, Artificial Sequence
  Description of Artificial Sequence: Synthetic oligonucleotide
ugacaggagcugcagcgua

SEQ ID NO: 2367494 - RNA, 19 nt, Artificial Sequence
  Description of Artificial Sequence: Synthetic oligonucleotide
guggccucgggugagacca

SEQ ID NO: 2367495 - RNA, 19 nt, Artificial Sequence
  Description of Artificial Sequence: Synthetic oligonucleotide
cagcauucugcaccucuag

SEQ ID NO: 2367496 - RNA, 19 nt, Artificial Sequence
  Description of Artificial Sequence: Synthetic oligonucleotide
augggcacaaauccacgua

SEQ ID NO: 2367497 - RNA, 19 nt, Artificial Sequence
  Description of Artificial Sequence: Synthetic oligonucleotide
ugcagcguacccagcugcu

SEQ ID NO: 2367498 - RNA, 19 nt, Artificial Sequence
  Description of Artificial Sequence: Synthetic oligonucleotide
ugugguccaguuccccaaa

SEQ ID NO: 2367499 - RNA, 19 nt, Artificial Sequence
  Description of Artificial Sequence: Synthetic oligonucleotide
gguggcuucgcaucaagaa

SEQ ID NO: 2367500 - RNA, 19 nt, Artificial Sequence
  Description of Artificial Sequence: Synthetic oligonucleotide
ggaagugaguugauucaag

SEQ ID NO: 2367501 - RNA, 19 nt, Artificial Sequence
  Description of Artificial Sequence: Synthetic oligonucleotide
uuccuucguguaauuccgu

SEQ ID NO: 2367502 - RNA, 19 nt, Artificial Sequence
  Description of Artificial Sequence: Synthetic oligonucleotide
ugccucugugcuugcuucc

SEQ ID NO: 2367503 - RNA, 19 nt, Artificial Sequence
  Description of Artificial Sequence: Synthetic oligonucleotide
aucaagaagggcagggcau

SEQ ID NO: 2367504 - RNA, 19 nt, Artificial Sequence
  Description of Artificial Sequence: Synthetic oligonucleotide
ggugaaaggcuucuggacu

SEQ ID NO: 2367505 - RNA, 19 nt, Artificial Sequence
  Description of Artificial Sequence: Synthetic oligonucleotide
cagcaccucacgguaaaag

SEQ ID NO: 2367506 - RNA, 19 nt, Artificial Sequence
  Description of Artificial Sequence: Synthetic oligonucleotide
uuguuccuucguguaauuc

SEQ ID NO: 2367507 - RNA, 19 nt, Artificial Sequence
  Description of Artificial Sequence: Synthetic oligonucleotide
cagaauuguuccuucgugu

SEQ ID NO: 2367508 - RNA, 19 nt, Artificial Sequence
  Description of Artificial Sequence: Synthetic oligonucleotide
guuggggucuucacagccc

SEQ ID NO: 2367509 - RNA, 19 nt, Artificial Sequence
  Description of Artificial Sequence: Synthetic oligonucleotide
agaccguucagggucaguu

SEQ ID NO: 2367510 - RNA, 19 nt, Artificial Sequence
  Description of Artificial Sequence: Synthetic oligonucleotide
ucccgccuuguauagcuuc

SEQ ID NO: 2367511 - RNA, 19 nt, Artificial Sequence
  Description of Artificial Sequence: Synthetic oligonucleotide
gcugaguucccaaaaccug

SEQ ID NO: 2367512 - RNA, 19 nt, Artificial Sequence
  Description of Artificial Sequence: Synthetic oligonucleotide
gaccguucagggucaguuc

SEQ ID NO: 2367513 - RNA, 19 nt, Artificial Sequence
  Description of Artificial Sequence: Synthetic oligonucleotide
augugggaauuaaaugccu

SEQ ID NO: 2367514 - RNA, 19 nt, Artificial Sequence
  Description of Artificial Sequence: Synthetic oligonucleotide
gaggugggugcaaugggca

SEQ ID NO: 2367515 - RNA, 19 nt, Artificial Sequence
  Description of Artificial Sequence: Synthetic oligonucleotide
cagggcauagcugccacuc

SEQ ID NO: 2367516 - RNA, 19 nt, Artificial Sequence
  Description of Artificial Sequence: Synthetic oligonucleotide
caccucuaggucccgcagc

SEQ ID NO: 2367517 - RNA, 19 nt, Artificial Sequence
  Description of Artificial Sequence: Synthetic oligonucleotide
uggagcugcugaagugacu

SEQ ID NO: 2367518 - RNA, 19 nt, Artificial Sequence
  Description of Artificial Sequence: Synthetic oligonucleotide
ucugggaagugaguugauu

SEQ ID NO: 2367519 - RNA, 19 nt, Artificial Sequence
  Description of Artificial Sequence: Synthetic oligonucleotide
auuguuccuucguguaauu

SEQ ID NO: 2367520 - RNA, 19 nt, Artificial Sequence
  Description of Artificial Sequence: Synthetic oligonucleotide
gcuugcuuccugugaaggc

SEQ ID NO: 2367521 - RNA, 19 nt, Artificial Sequence
  Description of Artificial Sequence: Synthetic oligonucleotide
ggacugugauauuggggcc

SEQ ID NO: 2367522 - RNA, 19 nt, Artificial Sequence
  Description of Artificial Sequence: Synthetic oligonucleotide
cugugaaggcgcugaguuc

SEQ ID NO: 2367523 - RNA, 19 nt, Artificial Sequence
  Description of Artificial Sequence: Synthetic oligonucleotide
gcacaaauccacguagcug

SEQ ID NO: 2367524 - RNA, 19 nt, Artificial Sequence
  Description of Artificial Sequence: Synthetic oligonucleotide
gaagucugcucaggcgggc

SEQ ID NO: 2367525 - RNA, 19 nt, Artificial Sequence
  Description of Artificial Sequence: Synthetic oligonucleotide
gagaguggccucgggugag

SEQ ID NO: 2367526 - RNA, 19 nt, Artificial Sequence
  Description of Artificial Sequence: Synthetic oligonucleotide
agucugcucaggcgggcca

SEQ ID NO: 2367527 - RNA, 19 nt, Artificial Sequence
  Description of Artificial Sequence: Synthetic oligonucleotide
augucccgccuuguauagc

SEQ ID NO: 2367528 - RNA, 19 nt, Artificial Sequence
  Description of Artificial Sequence: Synthetic oligonucleotide
ugcucaggcgggccaggca

SEQ ID NO: 2367529 - RNA, 19 nt, Artificial Sequence
  Description of Artificial Sequence: Synthetic oligonucleotide
gaaggcgcugaguucccaa

SEQ ID NO: 2367530 - RNA, 19 nt, Artificial Sequence
  Description of Artificial Sequence: Synthetic oligonucleotide
gacucucgcgccaaggugu

SEQ ID NO: 2367531 - RNA, 19 nt, Artificial Sequence
  Description of Artificial Sequence: Synthetic oligonucleotide
cacagggccggccucucug

SEQ ID NO: 2367532 - RNA, 19 nt, Artificial Sequence
  Description of Artificial Sequence: Synthetic oligonucleotide
ggcuugauccucugucccc

SEQ ID NO: 2367533 - RNA, 19 nt, Artificial Sequence
  Description of Artificial Sequence: Synthetic oligonucleotide
caccacagagugguugggc

SEQ ID NO: 2367534 - RNA, 19 nt, Artificial Sequence
  Description of Artificial Sequence: Synthetic oligonucleotide
gggcuugauccucuguccc

SEQ ID NO: 2367535 - RNA, 19 nt, Artificial Sequence
  Description of Artificial Sequence: Synthetic oligonucleotide
cuagacccagcagggcugc

SEQ ID NO: 2367536 - RNA, 19 nt, Artificial Sequence
  Description of Artificial Sequence: Synthetic oligonucleotide
ggaggugggugcaaugggc

SEQ ID NO: 2367537 - RNA, 19 nt, Artificial Sequence
  Description of Artificial Sequence: Synthetic oligonucleotide
ggaaucaaagguccuggcu

SEQ ID NO: 2367538 - RNA, 19 nt, Artificial Sequence
  Description of Artificial Sequence: Synthetic oligonucleotide
gcccagaauuguuccuucg

SEQ ID NO: 2367539 - RNA, 19 nt, Artificial Sequence
  Description of Artificial Sequence: Synthetic oligonucleotide
accucacgguaaaagauuu

SEQ ID NO: 2367540 - RNA, 19 nt, Artificial Sequence
  Description of Artificial Sequence: Synthetic oligonucleotide
aucccacacagggccggcc

SEQ ID NO: 2367541 - RNA, 19 nt, Artificial Sequence
  Description of Artificial Sequence: Synthetic oligonucleotide
uccugugaaggcgcugagu

SEQ ID NO: 2367542 - RNA, 19 nt, Artificial Sequence
  Description of Artificial Sequence: Synthetic oligonucleotide
caaauccacguagcuggug

SEQ ID NO: 2367543 - RNA, 19 nt, Artificial Sequence
  Description of Artificial Sequence: Synthetic oligonucleotide
guaauuccguguggaggug

SEQ ID NO: 2367544 - RNA, 19 nt, Artificial Sequence
  Description of Artificial Sequence: Synthetic oligonucleotide
ggcuucgcaucaagaaggg

SEQ ID NO: 2367545 - RNA, 19 nt, Artificial Sequence
  Description of Artificial Sequence: Synthetic oligonucleotide
auugugccugugaaaugga

SEQ ID NO: 2367546 - RNA, 19 nt, Artificial Sequence
  Description of Artificial Sequence: Synthetic oligonucleotide
auccacguagcugguggug

SEQ ID NO: 2367547 - RNA, 19 nt, Artificial Sequence
  Description of Artificial Sequence: Synthetic oligonucleotide
gguagcaggcaugucccgc

SEQ ID NO: 2367548 - RNA, 19 nt, Artificial Sequence
  Description of Artificial Sequence: Synthetic oligonucleotide
gacugugauauuggggccu

SEQ ID NO: 2367549 - RNA, 19 nt, Artificial Sequence
  Description of Artificial Sequence: Synthetic oligonucleotide
cucaggcgggccaggcagc

SEQ ID NO: 2367550 - RNA, 19 nt, Artificial Sequence
  Description of Artificial Sequence: Synthetic oligonucleotide
ugcucccauaugugggaau

SEQ ID NO: 2367551 - RNA, 19 nt, Artificial Sequence
  Description of Artificial Sequence: Synthetic oligonucleotide
ccauaugugggaauuaaau

SEQ ID NO: 2367552 - RNA, 19 nt, Artificial Sequence
  Description of Artificial Sequence: Synthetic oligonucleotide
cugugcuugcuuccuguga

SEQ ID NO: 2367553 - RNA, 19 nt, Artificial Sequence
  Description of Artificial Sequence: Synthetic oligonucleotide
gugggaauuaaaugccuuu

SEQ ID NO: 2367554 - RNA, 19 nt, Artificial Sequence
  Description of Artificial Sequence: Synthetic oligonucleotide
gugaggggcucaccaguac

SEQ ID NO: 2367555 - RNA, 19 nt, Artificial Sequence
  Description of Artificial Sequence: Synthetic oligonucleotide
gcaucaagaagggcagggc

SEQ ID NO: 2367556 - RNA, 19 nt, Artificial Sequence
  Description of Artificial Sequence: Synthetic oligonucleotide
agggcauggugaaaggcuu

SEQ ID NO: 2367557 - RNA, 19 nt, Artificial Sequence
  Description of Artificial Sequence: Synthetic oligonucleotide
ugaaggcgcugaguuccca

SEQ ID NO: 2367558 - RNA, 19 nt, Artificial Sequence
  Description of Artificial Sequence: Synthetic oligonucleotide
uucugcccugugugcuugc

SEQ ID NO: 2367559 - RNA, 19 nt, Artificial Sequence
  Description of Artificial Sequence: Synthetic oligonucleotide
caaagguccuggcugggcu

SEQ ID NO: 2367560 - RNA, 19 nt, Artificial Sequence
  Description of Artificial Sequence: Synthetic oligonucleotide
gugguccaguuccccaaac

SEQ ID NO: 2367561 - RNA, 19 nt, Artificial Sequence
  Description of Artificial Sequence: Synthetic oligonucleotide
ggaacucaagaagggcaug

SEQ ID NO: 2367562 - RNA, 19 nt, Artificial Sequence
  Description of Artificial Sequence: Synthetic oligonucleotide
acacaacuucugcccugug

SEQ ID NO: 2367563 - RNA, 19 nt, Artificial Sequence
  Description of Artificial Sequence: Synthetic oligonucleotide
gcaggcaugucccgccuug

SEQ ID NO: 2367564 - RNA, 19 nt, Artificial Sequence
  Description of Artificial Sequence: Synthetic oligonucleotide
agccccacauacaggagaa

SEQ ID NO: 2367565 - RNA, 19 nt, Artificial Sequence
  Description of Artificial Sequence: Synthetic oligonucleotide
gugacucucgcgccaaggu

SEQ ID NO: 2367566 - RNA, 19 nt, Artificial Sequence
  Description of Artificial Sequence: Synthetic oligonucleotide
caguuccccaaacaugaua

SEQ ID NO: 2367567 - RNA, 19 nt, Artificial Sequence
  Description of Artificial Sequence: Synthetic oligonucleotide
cuucagcagcuucgcucgc

SEQ ID NO: 2367568 - RNA, 19 nt, Artificial Sequence
  Description of Artificial Sequence: Synthetic oligonucleotide
gccaggcagccccacauac

SEQ ID NO: 2367569 - RNA, 19 nt, Artificial Sequence
  Description of Artificial Sequence: Synthetic oligonucleotide
gcugcucccauauguggga

SEQ ID NO: 2367570 - RNA, 19 nt, Artificial Sequence
  Description of Artificial Sequence: Synthetic oligonucleotide
gguccaguuccccaaacau

SEQ ID NO: 2367571 - RNA, 19 nt, Artificial Sequence
  Description of Artificial Sequence: Synthetic oligonucleotide
gggcacaaauccacguagc

SEQ ID NO: 2367572 - RNA, 19 nt, Artificial Sequence
  Description of Artificial Sequence: Synthetic oligonucleotide
ggcacaaauccacguagcu

SEQ ID NO: 2367573 - RNA, 19 nt, Artificial Sequence
  Description of Artificial Sequence: Synthetic oligonucleotide
ggucaguucugggaaguga

SEQ ID NO: 2367574 - RNA, 19 nt, Artificial Sequence
  Description of Artificial Sequence: Synthetic oligonucleotide
gcuucgcucgcccugccuc

SEQ ID NO: 2367575 - RNA, 19 nt, Artificial Sequence
  Description of Artificial Sequence: Synthetic oligonucleotide
gccccucuuugacaggagc

SEQ ID NO: 2367576 - RNA, 19 nt, Artificial Sequence
  Description of Artificial Sequence: Synthetic oligonucleotide
augccuuuccauggagaaa

SEQ ID NO: 2367577 - RNA, 19 nt, Artificial Sequence
  Description of Artificial Sequence: Synthetic oligonucleotide
gcaccucuaggucccgcag

SEQ ID NO: 2367578 - RNA, 19 nt, Artificial Sequence
  Description of Artificial Sequence: Synthetic oligonucleotide
agcuucgcucgcccugccu

SEQ ID NO: 2367579 - RNA, 19 nt, Artificial Sequence
  Description of Artificial Sequence: Synthetic oligonucleotide
uagcuggugguggcuucgc

SEQ ID NO: 2367580 - RNA, 19 nt, Artificial Sequence
  Description of Artificial Sequence: Synthetic oligonucleotide
agugaggggcucaccagua

SEQ ID NO: 2367581 - RNA, 19 nt, Artificial Sequence
  Description of Artificial Sequence: Synthetic oligonucleotide
gcaugucccgccuuguaua

SEQ ID NO: 2367582 - RNA, 19 nt, Artificial Sequence
  Description of Artificial Sequence: Synthetic oligonucleotide
ggcaaauggucaaggaacu

SEQ ID NO: 2367583 - RNA, 19 nt, Artificial Sequence
  Description of Artificial Sequence: Synthetic oligonucleotide
ccucacgguaaaagauuug

SEQ ID NO: 2367584 - RNA, 19 nt, Artificial Sequence
  Description of Artificial Sequence: Synthetic oligonucleotide
agcccgguagccccucuuu

SEQ ID NO: 2367585 - RNA, 19 nt, Artificial Sequence
  Description of Artificial Sequence: Synthetic oligonucleotide
acucucgcgccaaggugug

SEQ ID NO: 2367586 - RNA, 19 nt, Artificial Sequence
  Description of Artificial Sequence: Synthetic oligonucleotide
gggaagugaguugauucaa

SEQ ID NO: 2367587 - RNA, 19 nt, Artificial Sequence
  Description of Artificial Sequence: Synthetic oligonucleotide
caccucacgguaaaagauu

SEQ ID NO: 2367588 - RNA, 19 nt, Artificial Sequence
  Description of Artificial Sequence: Synthetic oligonucleotide
uggccucgggugagaccag

SEQ ID NO: 2367589 - RNA, 19 nt, Artificial Sequence
  Description of Artificial Sequence: Synthetic oligonucleotide
gaguugauucaaggcaaau

SEQ ID NO: 2367590 - RNA, 19 nt, Artificial Sequence
  Description of Artificial Sequence: Synthetic oligonucleotide
ugagaccagccaggacugu

SEQ ID NO: 2367591 - RNA, 19 nt, Artificial Sequence
  Description of Artificial Sequence: Synthetic oligonucleotide
ccugugaaauggaaucaaa

SEQ ID NO: 2367592 - RNA, 19 nt, Artificial Sequence
  Description of Artificial Sequence: Synthetic oligonucleotide
gugaaggcgcugaguuccc

SEQ ID NO: 2367593 - RNA, 19 nt, Artificial Sequence
  Description of Artificial Sequence: Synthetic oligonucleotide
cucgcgccaaggugugguc

SEQ ID NO: 2367594 - RNA, 19 nt, Artificial Sequence
  Description of Artificial Sequence: Synthetic oligonucleotide
gcuugauccucugucccca

SEQ ID NO: 2367595 - RNA, 19 nt, Artificial Sequence
  Description of Artificial Sequence: Synthetic oligonucleotide
agagagggucuagaccguu

SEQ ID NO: 2367596 - RNA, 19 nt, Artificial Sequence
  Description of Artificial Sequence: Synthetic oligonucleotide
ggugggugcaaugggcaca

SEQ ID NO: 2367597 - RNA, 19 nt, Artificial Sequence
  Description of Artificial Sequence: Synthetic oligonucleotide
cuagaccguucagggucag

SEQ ID NO: 2367598 - RNA, 19 nt, Artificial Sequence
  Description of Artificial Sequence: Synthetic oligonucleotide
acccagcugcucccauaug

SEQ ID NO: 2367599 - RNA, 19 nt, Artificial Sequence
  Description of Artificial Sequence: Synthetic oligonucleotide
aggcaugucccgccuugua

SEQ ID NO: 2367600 - RNA, 19 nt, Artificial Sequence
  Description of Artificial Sequence: Synthetic oligonucleotide
gugggugcaaugggcacaa

SEQ ID NO: 2367601 - RNA, 19 nt, Artificial Sequence
  Description of Artificial Sequence: Synthetic oligonucleotide
uucgcucgcccugccucug

SEQ ID NO: 2367602 - RNA, 19 nt, Artificial Sequence
  Description of Artificial Sequence: Synthetic oligonucleotide
auuccguguggaggugggu

SEQ ID NO: 2367603 - RNA, 19 nt, Artificial Sequence
  Description of Artificial Sequence: Synthetic oligonucleotide
gcaaauggucaaggaacuc

SEQ ID NO: 2367604 - RNA, 19 nt, Artificial Sequence
  Description of Artificial Sequence: Synthetic oligonucleotide
uagaccguucagggucagu

SEQ ID NO: 2367605 - RNA, 19 nt, Artificial Sequence
  Description of Artificial Sequence: Synthetic oligonucleotide
acacagggccggccucucu

SEQ ID NO: 2367606 - RNA, 19 nt, Artificial Sequence
  Description of Artificial Sequence: Synthetic oligonucleotide
cccaaacaugauaagaguu

SEQ ID NO: 2367607 - RNA, 19 nt, Artificial Sequence
  Description of Artificial Sequence: Synthetic oligonucleotide
ccgguagccccucuuugac

SEQ ID NO: 2367608 - RNA, 19 nt, Artificial Sequence
  Description of Artificial Sequence: Synthetic oligonucleotide
cucuguccccaaucccaca

SEQ ID NO: 2367609 - RNA, 19 nt, Artificial Sequence
  Description of Artificial Sequence: Synthetic oligonucleotide
ccugguaccggcucaugaa

SEQ ID NO: 2367610 - RNA, 19 nt, Artificial Sequence
  Description of Artificial Sequence: Synthetic oligonucleotide
ccaaggugugguccaguuc

SEQ ID NO: 2367611 - RNA, 19 nt, Artificial Sequence
  Description of Artificial Sequence: Synthetic oligonucleotide
ggcagcaccucacgguaaa

SEQ ID NO: 2367612 - RNA, 19 nt, Artificial Sequence
  Description of Artificial Sequence: Synthetic oligonucleotide
gcuucgcaucaagaagggc

SEQ ID NO: 2367613 - RNA, 19 nt, Artificial Sequence
  Description of Artificial Sequence: Synthetic oligonucleotide
agaguggccucgggugaga

SEQ ID NO: 2367614 - RNA, 19 nt, Artificial Sequence
  Description of Artificial Sequence: Synthetic oligonucleotide
cuugauccucuguccccaa

SEQ ID NO: 2367615 - RNA, 19 nt, Artificial Sequence
  Description of Artificial Sequence: Synthetic oligonucleotide
uggagguagcaggcauguc

SEQ ID NO: 2367616 - RNA, 19 nt, Artificial Sequence
  Description of Artificial Sequence: Synthetic oligonucleotide
gggugcaaugggcacaaau

SEQ ID NO: 2367617 - RNA, 19 nt, Artificial Sequence
  Description of Artificial Sequence: Synthetic oligonucleotide
gcccgguagccccucuuug

SEQ ID NO: 2367618 - RNA, 19 nt, Artificial Sequence
  Description of Artificial Sequence: Synthetic oligonucleotide
caagaagggcauggugaaa

SEQ ID NO: 2367619 - RNA, 19 nt, Artificial Sequence
  Description of Artificial Sequence: Synthetic oligonucleotide
cucucgcgccaaggugugg

SEQ ID NO: 2367620 - RNA, 19 nt, Artificial Sequence
  Description of Artificial Sequence: Synthetic oligonucleotide
ccguucagggucaguucug

SEQ ID NO: 2367621 - RNA, 19 nt, Artificial Sequence
  Description of Artificial Sequence: Synthetic oligonucleotide
ggucuagaccguucagggu

SEQ ID NO: 2367622 - RNA, 19 nt, Artificial Sequence
  Description of Artificial Sequence: Synthetic oligonucleotide
gcauggugaaaggcuucug

SEQ ID NO: 2367623 - RNA, 19 nt, Artificial Sequence
  Description of Artificial Sequence: Synthetic oligonucleotide
ccuucguguaauuccgugu

SEQ ID NO: 2367624 - RNA, 19 nt, Artificial Sequence
  Description of Artificial Sequence: Synthetic oligonucleotide
cucgcccugccucugugcu

SEQ ID NO: 2367625 - RNA, 19 nt, Artificial Sequence
  Description of Artificial Sequence: Synthetic oligonucleotide
ggcaugucccgccuuguau

SEQ ID NO: 2367626 - RNA, 19 nt, Artificial Sequence
  Description of Artificial Sequence: Synthetic oligonucleotide
ccccaaacaugauaagagu

SEQ ID NO: 2367627 - RNA, 19 nt, Artificial Sequence
  Description of Artificial Sequence: Synthetic oligonucleotide
gagagagggucuagaccgu

SEQ ID NO: 2367628 - RNA, 19 nt, Artificial Sequence
  Description of Artificial Sequence: Synthetic oligonucleotide
cagcuucgcucgcccugcc

SEQ ID NO: 2367629 - RNA, 19 nt, Artificial Sequence
  Description of Artificial Sequence: Synthetic oligonucleotide
ucgcccugccucugugcuu

SEQ ID NO: 2367630 - RNA, 19 nt, Artificial Sequence
  Description of Artificial Sequence: Synthetic oligonucleotide
gccucuccagagcugggaa

SEQ ID NO: 2367631 - RNA, 19 nt, Artificial Sequence
  Description of Artificial Sequence: Synthetic oligonucleotide
cuucgcucgcccugccucu

SEQ ID NO: 2367632 - RNA, 19 nt, Artificial Sequence
  Description of Artificial Sequence: Synthetic oligonucleotide
ggcauggugaaaggcuucu

SEQ ID NO: 2367633 - RNA, 19 nt, Artificial Sequence
  Description of Artificial Sequence: Synthetic oligonucleotide
cccgguagccccucuuuga

SEQ ID NO: 2367634 - RNA, 19 nt, Artificial Sequence
  Description of Artificial Sequence: Synthetic oligonucleotide
cccgccuuguauagcuuca

SEQ ID NO: 2367635 - RNA, 19 nt, Artificial Sequence
  Description of Artificial Sequence: Synthetic oligonucleotide
cgcugaguucccaaaaccu

SEQ ID NO: 2367636 - RNA, 19 nt, Artificial Sequence
  Description of Artificial Sequence: Synthetic oligonucleotide
ggccuagacccagcagggc

SEQ ID NO: 2367637 - RNA, 19 nt, Artificial Sequence
  Description of Artificial Sequence: Synthetic oligonucleotide
ccggccucucuggaagagg

SEQ ID NO: 2367638 - RNA, 19 nt, Artificial Sequence
  Description of Artificial Sequence: Synthetic oligonucleotide
gccucgggugagaccagcc

SEQ ID NO: 2367639 - RNA, 19 nt, Artificial Sequence
  Description of Artificial Sequence: Synthetic oligonucleotide
guacagcauucugcaccuc

SEQ ID NO: 2367640 - RNA, 19 nt, Artificial Sequence
  Description of Artificial Sequence: Synthetic oligonucleotide
cugcucccauaugugggaa

SEQ ID NO: 2367641 - RNA, 19 nt, Artificial Sequence
  Description of Artificial Sequence: Synthetic oligonucleotide
ggcucaccaguacagcauu

SEQ ID NO: 2367642 - RNA, 19 nt, Artificial Sequence
  Description of Artificial Sequence: Synthetic oligonucleotide
cccagaauuguuccuucgu

SEQ ID NO: 2367643 - RNA, 19 nt, Artificial Sequence
  Description of Artificial Sequence: Synthetic oligonucleotide
gccggccucucuggaagag

SEQ ID NO: 2367644 - RNA, 19 nt, Artificial Sequence
  Description of Artificial Sequence: Synthetic oligonucleotide
cggccucucuggaagagga

SEQ ID NO: 2367645 - RNA, 19 nt, Artificial Sequence
  Description of Artificial Sequence: Synthetic oligonucleotide
gcagcguacccagcugcuc

SEQ ID NO: 2367646 - RNA, 19 nt, Artificial Sequence
  Description of Artificial Sequence: Synthetic oligonucleotide
caaaaccuggaaggucaau

SEQ ID NO: 2367647 - RNA, 19 nt, Artificial Sequence
  Description of Artificial Sequence: Synthetic oligonucleotide
cacagcccgguagccccuc

SEQ ID NO: 2367648 - RNA, 19 nt, Artificial Sequence
  Description of Artificial Sequence: Synthetic oligonucleotide
cgcccugccucugugcuug

SEQ ID NO: 2367649 - RNA, 19 nt, Artificial Sequence
  Description of Artificial Sequence: Synthetic oligonucleotide
gcucccauaugugggaauu

SEQ ID NO: 2367650 - RNA, 19 nt, Artificial Sequence
  Description of Artificial Sequence: Synthetic oligonucleotide
ccgccuuguauagcuucac

SEQ ID NO: 2367651 - RNA, 19 nt, Artificial Sequence
  Description of Artificial Sequence: Synthetic oligonucleotide
ugggugcaaugggcacaaa

SEQ ID NO: 2367652 - RNA, 19 nt, Artificial Sequence
  Description of Artificial Sequence: Synthetic oligonucleotide
ggccggccucucuggaaga

SEQ ID NO: 2367653 - RNA, 19 nt, Artificial Sequence
  Description of Artificial Sequence: Synthetic oligonucleotide
cacguagcuggugguggcu

SEQ ID NO: 2367654 - RNA, 19 nt, Artificial Sequence
  Description of Artificial Sequence: Synthetic oligonucleotide
guguggaggugggugcaau

SEQ ID NO: 2367655 - RNA, 19 nt, Artificial Sequence
  Description of Artificial Sequence: Synthetic oligonucleotide
cgcgccaagguguggucca

SEQ ID NO: 2367656 - RNA, 19 nt, Artificial Sequence
  Description of Artificial Sequence: Synthetic oligonucleotide
cgguagccccucuuugaca

SEQ ID NO: 2367657 - RNA, 19 nt, Artificial Sequence
  Description of Artificial Sequence: Synthetic oligonucleotide
gcagcaccucacgguaaaa

SEQ ID NO: 2367658 - RNA, 19 nt, Artificial Sequence
  Description of Artificial Sequence: Synthetic oligonucleotide
caggcaugucccgccuugu

SEQ ID NO: 2367659 - RNA, 19 nt, Artificial Sequence
  Description of Artificial Sequence: Synthetic oligonucleotide
ccguguggaggugggugca

SEQ ID NO: 2367660 - RNA, 19 nt, Artificial Sequence
  Description of Artificial Sequence: Synthetic oligonucleotide
gcguacccagcugcuccca

SEQ ID NO: 2367661 - RNA, 19 nt, Artificial Sequence
  Description of Artificial Sequence: Synthetic oligonucleotide
cgggugagaccagccagga

SEQ ID NO: 2367662 - RNA, 19 nt, Artificial Sequence
  Description of Artificial Sequence: Synthetic oligonucleotide
ccaguuccccaaacaugau

SEQ ID NO: 2367663 - RNA, 19 nt, Artificial Sequence
  Description of Artificial Sequence: Synthetic oligonucleotide
gccccacauacaggagaaa

SEQ ID NO: 2367664 - RNA, 19 nt, Artificial Sequence
  Description of Artificial Sequence: Synthetic oligonucleotide
gucccgccuuguauagcuu

SEQ ID NO: 2367665 - RNA, 19 nt, Artificial Sequence
  Description of Artificial Sequence: Synthetic oligonucleotide
cagcccgguagccccucuu

SEQ ID NO: 2367666 - RNA, 19 nt, Artificial Sequence
  Description of Artificial Sequence: Synthetic oligonucleotide
cguacccagcugcucccau

SEQ ID NO: 2367667 - RNA, 19 nt, Artificial Sequence
  Description of Artificial Sequence: Synthetic oligonucleotide
uuuaguuuaauguacaugc

SEQ ID NO: 2367668 - RNA, 19 nt, Artificial Sequence
  Description of Artificial Sequence: Synthetic oligonucleotide
guuauagaaacacagcugg

SEQ ID NO: 2367669 - RNA, 19 nt, Artificial Sequence
  Description of Artificial Sequence: Synthetic oligonucleotide
aaauagccuaaccuggucc

SEQ ID NO: 2367670 - RNA, 19 nt, Artificial Sequence
  Description of Artificial Sequence: Synthetic oligonucleotide
aauagccuaaccugguccc

SEQ ID NO: 2367671 - RNA, 19 nt, Artificial Sequence
  Description of Artificial Sequence: Synthetic oligonucleotide
uuauaggagacacagugag

SEQ ID NO: 2367672 - RNA, 19 nt, Artificial Sequence
  Description of Artificial Sequence: Synthetic oligonucleotide
aaagaguauggccugguuc

SEQ ID NO: 2367673 - RNA, 19 nt, Artificial Sequence
  Description of Artificial Sequence: Synthetic oligonucleotide
gacauuagaacgcagugcc

SEQ ID NO: 2367674 - RNA, 19 nt, Artificial Sequence
  Description of Artificial Sequence: Synthetic oligonucleotide
ucugagauagaaacaaccc

SEQ ID NO: 2367675 - RNA, 19 nt, Artificial Sequence
  Description of Artificial Sequence: Synthetic oligonucleotide
aacccugucauacacuauc

SEQ ID NO: 2367676 - RNA, 19 nt, Artificial Sequence
  Description of Artificial Sequence: Synthetic oligonucleotide
uucugagauagaaacaacc

SEQ ID NO: 2367677 - RNA, 19 nt, Artificial Sequence
  Description of Artificial Sequence: Synthetic oligonucleotide
uguuauagaaacacagcug

SEQ ID NO: 2367678 - RNA, 19 nt, Artificial Sequence
  Description of Artificial Sequence: Synthetic oligonucleotide
aagaguauggccugguuca

SEQ ID NO: 2367679 - RNA, 19 nt, Artificial Sequence
  Description of Artificial Sequence: Synthetic oligonucleotide
uguaucaagcagaaguuug

SEQ ID NO: 2367680 - RNA, 19 nt, Artificial Sequence
  Description of Artificial Sequence: Synthetic oligonucleotide
cugaaaguugcuaggaugg

SEQ ID NO: 2367681 - RNA, 19 nt, Artificial Sequence
  Description of Artificial Sequence: Synthetic oligonucleotide
agaaacaacccugucauac

SEQ ID NO: 2367682 - RNA, 19 nt, Artificial Sequence
  Description of Artificial Sequence: Synthetic oligonucleotide
aaaccaagcuggcaggagg

SEQ ID NO: 2367683 - RNA, 19 nt, Artificial Sequence
  Description of Artificial Sequence: Synthetic oligonucleotide
uuaguuuaauguacaugcg

SEQ ID NO: 2367684 - RNA, 19 nt, Artificial Sequence
  Description of Artificial Sequence: Synthetic oligonucleotide
  modified_base (2)..(2): a, c, u, g, unknown or other
anaguaugugggcggaggg

SEQ ID NO: 2367685 - RNA, 19 nt, Artificial Sequence
  Description of Artificial Sequence: Synthetic oligonucleotide
ucuguuauagaaacacagc

SEQ ID NO: 2367686 - RNA, 19 nt, Artificial Sequence
  Description of Artificial Sequence: Synthetic oligonucleotide
auagaaacaacccugucau

SEQ ID NO: 2367687 - RNA, 19 nt, Artificial Sequence
  Description of Artificial Sequence: Synthetic oligonucleotide
uuggaagcaccaaauagcc

SEQ ID NO: 2367688 - RNA, 19 nt, Artificial Sequence
  Description of Artificial Sequence: Synthetic oligonucleotide
uguucuguacucuggauug

SEQ ID NO: 2367689 - RNA, 19 nt, Artificial Sequence
  Description of Artificial Sequence: Synthetic oligonucleotide
uguacucggagacaggggc

SEQ ID NO: 2367690 - RNA, 19 nt, Artificial Sequence
  Description of Artificial Sequence: Synthetic oligonucleotide
  modified_base (10)..(10): a, c, u, g, unknown or other
uguagcugcngaaacugug

SEQ ID NO: 2367691 - RNA, 19 nt, Artificial Sequence
  Description of Artificial Sequence: Synthetic oligonucleotide
  modified_base (9)..(9): a, c, u, g, unknown or other
ugcuggganaguauguggg

SEQ ID NO: 2367692 - RNA, 19 nt, Artificial Sequence
  Description of Artificial Sequence: Synthetic oligonucleotide
gguuauaggagacacagug

SEQ ID NO: 2367693 - RNA, 19 nt, Artificial Sequence
  Description of Artificial Sequence: Synthetic oligonucleotide
ucauacacuaucacaggcc

SEQ ID NO: 2367694 - RNA, 19 nt, Artificial Sequence
  Description of Artificial Sequence: Synthetic oligonucleotide
aaguuugcccacccgacuc

SEQ ID NO: 2367695 - RNA, 19 nt, Artificial Sequence
  Description of Artificial Sequence: Synthetic oligonucleotide
uccuguagaaccgagagga

SEQ ID NO: 2367696 - RNA, 19 nt, Artificial Sequence
  Description of Artificial Sequence: Synthetic oligonucleotide
aucaagcagaaguuugccc

SEQ ID NO: 2367697 - RNA, 19 nt, Artificial Sequence
  Description of Artificial Sequence: Synthetic oligonucleotide
gaggcagguacccugaaag

SEQ ID NO: 2367698 - RNA, 19 nt, Artificial Sequence
  Description of Artificial Sequence: Synthetic oligonucleotide
auuggcaggagguuggaag

SEQ ID NO: 2367699 - RNA, 19 nt, Artificial Sequence
  Description of Artificial Sequence: Synthetic oligonucleotide
gaaccuguggcuuugguca

SEQ ID NO: 2367700 - RNA, 19 nt, Artificial Sequence
  Description of Artificial Sequence: Synthetic oligonucleotide
ugaaauguaucaagcagaa

SEQ ID NO: 2367701 - RNA, 19 nt, Artificial Sequence
  Description of Artificial Sequence: Synthetic oligonucleotide
agugccuugaggucagccc

SEQ ID NO: 2367702 - RNA, 19 nt, Artificial Sequence
  Description of Artificial Sequence: Synthetic oligonucleotide
guauucacggguuauagga

SEQ ID NO: 2367703 - RNA, 19 nt, Artificial Sequence
  Description of Artificial Sequence: Synthetic oligonucleotide
uggcucacaguauucacgg

SEQ ID NO: 2367704 - RNA, 19 nt, Artificial Sequence
  Description of Artificial Sequence: Synthetic oligonucleotide
auuugcacagcacacagau

SEQ ID NO: 2367705 - RNA, 19 nt, Artificial Sequence
  Description of Artificial Sequence: Synthetic oligonucleotide
uccgccacggacauguagg

SEQ ID NO: 2367706 - RNA, 19 nt, Artificial Sequence
  Description of Artificial Sequence: Synthetic oligonucleotide
cauacacuaucacaggccc

SEQ ID NO: 2367707 - RNA, 19 nt, Artificial Sequence
  Description of Artificial Sequence: Synthetic oligonucleotide
agcaccaaauagccuaacc

SEQ ID NO: 2367708 - RNA, 19 nt, Artificial Sequence
  Description of Artificial Sequence: Synthetic oligonucleotide
ggugaaauguaucaagcag

SEQ ID NO: 2367709 - RNA, 19 nt, Artificial Sequence
  Description of Artificial Sequence: Synthetic oligonucleotide
agauuugcacagcacacag

SEQ ID NO: 2367710 - RNA, 19 nt, Artificial Sequence
  Description of Artificial Sequence: Synthetic oligonucleotide
uauaggagacacagugagg

SEQ ID NO: 2367711 - RNA, 19 nt, Artificial Sequence
  Description of Artificial Sequence: Synthetic oligonucleotide
acuccuguagaaccgagag

SEQ ID NO: 2367712 - RNA, 19 nt, Artificial Sequence
  Description of Artificial Sequence: Synthetic oligonucleotide
gagggugaaauguaucaag

SEQ ID NO: 2367713 - RNA, 19 nt, Artificial Sequence
  Description of Artificial Sequence: Synthetic oligonucleotide
cucguagugucucaggugc

SEQ ID NO: 2367714 - RNA, 19 nt, Artificial Sequence
  Description of Artificial Sequence: Synthetic oligonucleotide
ugucauacacuaucacagg

SEQ ID NO: 2367715 - RNA, 19 nt, Artificial Sequence
  Description of Artificial Sequence: Synthetic oligonucleotide
guuggaagcaccaaauagc

SEQ ID NO: 2367716 - RNA, 19 nt, Artificial Sequence
  Description of Artificial Sequence: Synthetic oligonucleotide
uauucacggguuauaggag

SEQ ID NO: 2367717 - RNA, 19 nt, Artificial Sequence
  Description of Artificial Sequence: Synthetic oligonucleotide
  modified_base (3)..(3): a, c, u, g, unknown or other
ganaguaugugggcggagg

SEQ ID NO: 2367718 - RNA, 19 nt, Artificial Sequence
  Description of Artificial Sequence: Synthetic oligonucleotide
aacucguagugucucaggu

SEQ ID NO: 2367719 - RNA, 19 nt, Artificial Sequence
  Description of Artificial Sequence: Synthetic oligonucleotide
  modified_base (6)..(6): a, c, u, g, unknown or other
uggganaguaugugggcgg

SEQ ID NO: 2367720 - RNA, 19 nt, Artificial Sequence
  Description of Artificial Sequence: Synthetic oligonucleotide
aaguugcuaggaugggaac

SEQ ID NO: 2367721 - RNA, 19 nt, Artificial Sequence
  Description of Artificial Sequence: Synthetic oligonucleotide
uagaaacacagcuggaccu

SEQ ID NO: 2367722 - RNA, 19 nt, Artificial Sequence
  Description of Artificial Sequence: Synthetic oligonucleotide
agggugaaauguaucaagc

SEQ ID NO: 2367723 - RNA, 19 nt, Artificial Sequence
  Description of Artificial Sequence: Synthetic oligonucleotide
aacgcagugccuugagguc

SEQ ID NO: 2367724 - RNA, 19 nt, Artificial Sequence
  Description of Artificial Sequence: Synthetic oligonucleotide
caccaaauagccuaaccug

SEQ ID NO: 2367725 - RNA, 19 nt, Artificial Sequence
  Description of Artificial Sequence: Synthetic oligonucleotide
  modified_base (10)..(10): a, c, u, g, unknown or other
augcuggganaguaugugg

SEQ ID NO: 2367726 - RNA, 19 nt, Artificial Sequence
  Description of Artificial Sequence: Synthetic oligonucleotide
gaggaguuuuaguuuaaug

SEQ ID NO: 2367727 - RNA, 19 nt, Artificial Sequence
  Description of Artificial Sequence: Synthetic oligonucleotide
uguagaaccgagaggaguu

SEQ ID NO: 2367728 - RNA, 19 nt, Artificial Sequence
  Description of Artificial Sequence: Synthetic oligonucleotide
uuuaauguacaugcguuaa

SEQ ID NO: 2367729 - RNA, 19 nt, Artificial Sequence
  Description of Artificial Sequence: Synthetic oligonucleotide
accaaauagccuaaccugg

SEQ ID NO: 2367730 - RNA, 19 nt, Artificial Sequence
  Description of Artificial Sequence: Synthetic oligonucleotide
gaguuuuaguuuaauguac

SEQ ID NO: 2367731 - RNA, 19 nt, Artificial Sequence
  Description of Artificial Sequence: Synthetic oligonucleotide
acccgacuccuguagaacc

SEQ ID NO: 2367732 - RNA, 19 nt, Artificial Sequence
  Description of Artificial Sequence: Synthetic oligonucleotide
gcagagggacauuagaacg

SEQ ID NO: 2367733 - RNA, 19 nt, Artificial Sequence
  Description of Artificial Sequence: Synthetic oligonucleotide
uauggccugguucauguac

SEQ ID NO: 2367734 - RNA, 19 nt, Artificial Sequence
  Description of Artificial Sequence: Synthetic oligonucleotide
gucauacacuaucacaggc

SEQ ID NO: 2367735 - RNA, 19 nt, Artificial Sequence
  Description of Artificial Sequence: Synthetic oligonucleotide
aguggcacauucucguauc

SEQ ID NO: 2367736 - RNA, 19 nt, Artificial Sequence
  Description of Artificial Sequence: Synthetic oligonucleotide
uuauagaaacacagcugga

SEQ ID NO: 2367737 - RNA, 19 nt, Artificial Sequence
  Description of Artificial Sequence: Synthetic oligonucleotide
agcagaaguuugcccaccc

SEQ ID NO: 2367738 - RNA, 19 nt, Artificial Sequence
  Description of Artificial Sequence: Synthetic oligonucleotide
agaugcagaaagauggcuc

SEQ ID NO: 2367739 - RNA, 19 nt, Artificial Sequence
  Description of Artificial Sequence: Synthetic oligonucleotide
aguuugcccacccgacucc

SEQ ID NO: 2367740 - RNA, 19 nt, Artificial Sequence
  Description of Artificial Sequence: Synthetic oligonucleotide
uacacuaucacaggcccug

SEQ ID NO: 2367741 - RNA, 19 nt, Artificial Sequence
  Description of Artificial Sequence: Synthetic oligonucleotide
agauagaaacaacccuguc

SEQ ID NO: 2367742 - RNA, 19 nt, Artificial Sequence
  Description of Artificial Sequence: Synthetic oligonucleotide
uuaauguacaugcguuaaa

SEQ ID NO: 2367743 - RNA, 19 nt, Artificial Sequence
  Description of Artificial Sequence: Synthetic oligonucleotide
cagagggacauuagaacgc

SEQ ID NO: 2367744 - RNA, 19 nt, Artificial Sequence
  Description of Artificial Sequence: Synthetic oligonucleotide
  modified_base (7)..(7): a, c, u, g, unknown or other
cuggganaguaugugggcg

SEQ ID NO: 2367745 - RNA, 19 nt, Artificial Sequence
  Description of Artificial Sequence: Synthetic oligonucleotide
cacauucucguaucgcggg

SEQ ID NO: 2367746 - RNA, 19 nt, Artificial Sequence
  Description of Artificial Sequence: Synthetic oligonucleotide
accgagaggaguuuuaguu

SEQ ID NO: 2367747 - RNA, 19 nt, Artificial Sequence
  Description of Artificial Sequence: Synthetic oligonucleotide
ggcacauucucguaucgcg

SEQ ID NO: 2367748 - RNA, 19 nt, Artificial Sequence
  Description of Artificial Sequence: Synthetic oligonucleotide
  modified_base (12)..(12): a, c, u, g, unknown or other
ucaugcuggganaguaugu

SEQ ID NO: 2367749 - RNA, 19 nt, Artificial Sequence
  Description of Artificial Sequence: Synthetic oligonucleotide
gccacggacauguaggugg

SEQ ID NO: 2367750 - RNA, 19 nt, Artificial Sequence
  Description of Artificial Sequence: Synthetic oligonucleotide
uaggaugggaacucguagu

SEQ ID NO: 2367751 - RNA, 19 nt, Artificial Sequence
  Description of Artificial Sequence: Synthetic oligonucleotide
ugguucauguacucggaga

SEQ ID NO: 2367752 - RNA, 19 nt, Artificial Sequence
  Description of Artificial Sequence: Synthetic oligonucleotide
auucacggguuauaggaga

SEQ ID NO: 2367753 - RNA, 19 nt, Artificial Sequence
  Description of Artificial Sequence: Synthetic oligonucleotide
acggacauguagguggccc

SEQ ID NO: 2367754 - RNA, 19 nt, Artificial Sequence
  Description of Artificial Sequence: Synthetic oligonucleotide
ucuccuagccagaaccugu

SEQ ID NO: 2367755 - RNA, 19 nt, Artificial Sequence
  Description of Artificial Sequence: Synthetic oligonucleotide
auuagaacgcagugccuug

SEQ ID NO: 2367756 - RNA, 19 nt, Artificial Sequence
  Description of Artificial Sequence: Synthetic oligonucleotide
gugaaauguaucaagcaga

SEQ ID NO: 2367757 - RNA, 19 nt, Artificial Sequence
  Description of Artificial Sequence: Synthetic oligonucleotide
aggaugggaacucguagug

SEQ ID NO: 2367758 - RNA, 19 nt, Artificial Sequence
  Description of Artificial Sequence: Synthetic oligonucleotide
gaacucguagugucucagg

SEQ ID NO: 2367759 - RNA, 19 nt, Artificial Sequence
  Description of Artificial Sequence: Synthetic oligonucleotide
uuucaguuucuguuauaga

SEQ ID NO: 2367760 - RNA, 19 nt, Artificial Sequence
  Description of Artificial Sequence: Synthetic oligonucleotide
ugaaaguugcuaggauggg

SEQ ID NO: 2367761 - RNA, 19 nt, Artificial Sequence
  Description of Artificial Sequence: Synthetic oligonucleotide
ggagcugucagugugauga

SEQ ID NO: 2367762 - RNA, 19 nt, Artificial Sequence
  Description of Artificial Sequence: Synthetic oligonucleotide
ugugaugaugaugaggcuu

SEQ ID NO: 2367763 - RNA, 19 nt, Artificial Sequence
  Description of Artificial Sequence: Synthetic oligonucleotide
  modified_base (7)..(7): a, c, u, g, unknown or other
agcugcngaaacugugcag

SEQ ID NO: 2367764 - RNA, 19 nt, Artificial Sequence
  Description of Artificial Sequence: Synthetic oligonucleotide
acagaugcagaaagauggc

SEQ ID NO: 2367765 - RNA, 19 nt, Artificial Sequence
  Description of Artificial Sequence: Synthetic oligonucleotide
gaaacaacccugucauaca

SEQ ID NO: 2367766 - RNA, 19 nt, Artificial Sequence
  Description of Artificial Sequence: Synthetic oligonucleotide
ugcuuaggugugcaaggcc

SEQ ID NO: 2367767 - RNA, 19 nt, Artificial Sequence
  Description of Artificial Sequence: Synthetic oligonucleotide
guaucaagcagaaguuugc

SEQ ID NO: 2367768 - RNA, 19 nt, Artificial Sequence
  Description of Artificial Sequence: Synthetic oligonucleotide
ucuguacucuggauuggca

SEQ ID NO: 2367769 - RNA, 19 nt, Artificial Sequence
  Description of Artificial Sequence: Synthetic oligonucleotide
  modified_base (3)..(3): a, c, u, g, unknown or other
gcngaaacugugcagcugc

SEQ ID NO: 2367770 - RNA, 19 nt, Artificial Sequence
  Description of Artificial Sequence: Synthetic oligonucleotide
aaacugugcagcugccccu

SEQ ID NO: 2367771 - RNA, 19 nt, Artificial Sequence
  Description of Artificial Sequence: Synthetic oligonucleotide
agaacgcagugccuugagg

SEQ ID NO: 2367772 - RNA, 19 nt, Artificial Sequence
  Description of Artificial Sequence: Synthetic oligonucleotide
uugaggucagcccaagauu

SEQ ID NO: 2367773 - RNA, 19 nt, Artificial Sequence
  Description of Artificial Sequence: Synthetic oligonucleotide
uucacggguuauaggagac

SEQ ID NO: 2367774 - RNA, 19 nt, Artificial Sequence
  Description of Artificial Sequence: Synthetic oligonucleotide
uaucacaggcccugcuuag

SEQ ID NO: 2367775 - RNA, 19 nt, Artificial Sequence
  Description of Artificial Sequence: Synthetic oligonucleotide
cuguuauagaaacacagcu

SEQ ID NO: 2367776 - RNA, 19 nt, Artificial Sequence
  Description of Artificial Sequence: Synthetic oligonucleotide
gguucauguacucggagac

SEQ ID NO: 2367777 - RNA, 19 nt, Artificial Sequence
  Description of Artificial Sequence: Synthetic oligonucleotide
auucucguaucgcggguuc

SEQ ID NO: 2367778 - RNA, 19 nt, Artificial Sequence
  Description of Artificial Sequence: Synthetic oligonucleotide
aguuuaauguacaugcguu

SEQ ID NO: 2367779 - RNA, 19 nt, Artificial Sequence
  Description of Artificial Sequence: Synthetic oligonucleotide
accucucccgaugaguggc

SEQ ID NO: 2367780 - RNA, 19 nt, Artificial Sequence
  Description of Artificial Sequence: Synthetic oligonucleotide
gaacuuuucaguuucuguu

SEQ ID NO: 2367781 - RNA, 19 nt, Artificial Sequence
  Description of Artificial Sequence: Synthetic oligonucleotide
gaaccucucccgaugagug

SEQ ID NO: 2367782 - RNA, 19 nt, Artificial Sequence
  Description of Artificial Sequence: Synthetic oligonucleotide
acaacccugucauacacua

SEQ ID NO: 2367783 - RNA, 19 nt, Artificial Sequence
  Description of Artificial Sequence: Synthetic oligonucleotide
aaccgagaggaguuuuagu

SEQ ID NO: 2367784 - RNA, 19 nt, Artificial Sequence
  Description of Artificial Sequence: Synthetic oligonucleotide
  modified_base (8)..(8): a, c, u, g, unknown or other
uagcugcngaaacugugca

SEQ ID NO: 2367785 - RNA, 19 nt, Artificial Sequence
  Description of Artificial Sequence: Synthetic oligonucleotide
guagguggcccucaugcug

SEQ ID NO: 2367786 - RNA, 19 nt, Artificial Sequence
  Description of Artificial Sequence: Synthetic oligonucleotide
gauggucugggugggaggc

SEQ ID NO: 2367787 - RNA, 19 nt, Artificial Sequence
  Description of Artificial Sequence: Synthetic oligonucleotide
gaacgcagugccuugaggu

SEQ ID NO: 2367788 - RNA, 19 nt, Artificial Sequence
  Description of Artificial Sequence: Synthetic oligonucleotide
  modified_base (9)..(9): a, c, u, g, unknown or other
guagcugcngaaacugugc

SEQ ID NO: 2367789 - RNA, 19 nt, Artificial Sequence
  Description of Artificial Sequence: Synthetic oligonucleotide
uagaacgcagugccuugag

SEQ ID NO: 2367790 - RNA, 19 nt, Artificial Sequence
  Description of Artificial Sequence: Synthetic oligonucleotide
  modified_base (11)..(11): a, c, u, g, unknown or other
caugcuggganaguaugug

SEQ ID NO: 2367791 - RNA, 19 nt, Artificial Sequence
  Description of Artificial Sequence: Synthetic oligonucleotide
agauggucugggugggagg

SEQ ID NO: 2367792 - RNA, 19 nt, Artificial Sequence
  Description of Artificial Sequence: Synthetic oligonucleotide
gaaccgagaggaguuuuag

SEQ ID NO: 2367793 - RNA, 19 nt, Artificial Sequence
  Description of Artificial Sequence: Synthetic oligonucleotide
aaccuguggcuuuggucag

SEQ ID NO: 2367794 - RNA, 19 nt, Artificial Sequence
  Description of Artificial Sequence: Synthetic oligonucleotide
uccuagccagaaccugugg

SEQ ID NO: 2367795 - RNA, 19 nt, Artificial Sequence
  Description of Artificial Sequence: Synthetic oligonucleotide
uugugggcugcgaugcgcc

SEQ ID NO: 2367796 - RNA, 19 nt, Artificial Sequence
  Description of Artificial Sequence: Synthetic oligonucleotide
aguaugugggcggagggga

SEQ ID NO: 2367797 - RNA, 19 nt, Artificial Sequence
  Description of Artificial Sequence: Synthetic oligonucleotide
guuuaauguacaugcguua

SEQ ID NO: 2367798 - RNA, 19 nt, Artificial Sequence
  Description of Artificial Sequence: Synthetic oligonucleotide
aacugugcagcugccccuc

SEQ ID NO: 2367799 - RNA, 19 nt, Artificial Sequence
  Description of Artificial Sequence: Synthetic oligonucleotide
ucacaggcccugcuuaggu

SEQ ID NO: 2367800 - RNA, 19 nt, Artificial Sequence
  Description of Artificial Sequence: Synthetic oligonucleotide
aguugcuaggaugggaacu

SEQ ID NO: 2367801 - RNA, 19 nt, Artificial Sequence
  Description of Artificial Sequence: Synthetic oligonucleotide
gggacauuagaacgcagug

SEQ ID NO: 2367802 - RNA, 19 nt, Artificial Sequence
  Description of Artificial Sequence: Synthetic oligonucleotide
aggugugcaaggccauggg

SEQ ID NO: 2367803 - RNA, 19 nt, Artificial Sequence
  Description of Artificial Sequence: Synthetic oligonucleotide
  modified_base (6)..(6): a, c, u, g, unknown or other
gcugcngaaacugugcagc

SEQ ID NO: 2367804 - RNA, 19 nt, Artificial Sequence
  Description of Artificial Sequence: Synthetic oligonucleotide
cacaggaccuucccagucc

SEQ ID NO: 2367805 - RNA, 19 nt, Artificial Sequence
  Description of Artificial Sequence: Synthetic oligonucleotide
cuccuguagaaccgagagg

SEQ ID NO: 2367806 - RNA, 19 nt, Artificial Sequence
  Description of Artificial Sequence: Synthetic oligonucleotide
gucucaggugcucauccgc

SEQ ID NO: 2367807 - RNA, 19 nt, Artificial Sequence
  Description of Artificial Sequence: Synthetic oligonucleotide
  modified_base (4)..(4): a, c, u, g, unknown or other
ugcngaaacugugcagcug

SEQ ID NO: 2367808 - RNA, 19 nt, Artificial Sequence
  Description of Artificial Sequence: Synthetic oligonucleotide
caaauagccuaaccugguc

SEQ ID NO: 2367809 - RNA, 19 nt, Artificial Sequence
  Description of Artificial Sequence: Synthetic oligonucleotide
aggaccuucccaguccagg

SEQ ID NO: 2367810 - RNA, 19 nt, Artificial Sequence
  Description of Artificial Sequence: Synthetic oligonucleotide
cccaccaaagaguauggcc

SEQ ID NO: 2367811 - RNA, 19 nt, Artificial Sequence
  Description of Artificial Sequence: Synthetic oligonucleotide
guggcacauucucguaucg

SEQ ID NO: 2367812 - RNA, 19 nt, Artificial Sequence
  Description of Artificial Sequence: Synthetic oligonucleotide
uuuggucaggugucccagc

SEQ ID NO: 2367813 - RNA, 19 nt, Artificial Sequence
  Description of Artificial Sequence: Synthetic oligonucleotide
cacggguuauaggagacac

SEQ ID NO: 2367814 - RNA, 19 nt, Artificial Sequence
  Description of Artificial Sequence: Synthetic oligonucleotide
acuaucacaggcccugcuu

SEQ ID NO: 2367815 - RNA, 19 nt, Artificial Sequence
  Description of Artificial Sequence: Synthetic oligonucleotide
ccugcuuaggugugcaagg

SEQ ID NO: 2367816 - RNA, 19 nt, Artificial Sequence
  Description of Artificial Sequence: Synthetic oligonucleotide
ugcuaggaugggaacucgu

SEQ ID NO: 2367817 - RNA, 19 nt, Artificial Sequence
  Description of Artificial Sequence: Synthetic oligonucleotide
uuagaacgcagugccuuga

SEQ ID NO: 2367818 - RNA, 19 nt, Artificial Sequence
  Description of Artificial Sequence: Synthetic oligonucleotide
gucagcccaagauuugcac

SEQ ID NO: 2367819 - RNA, 19 nt, Artificial Sequence
  Description of Artificial Sequence: Synthetic oligonucleotide
guugcuaggaugggaacuc

SEQ ID NO: 2367820 - RNA, 19 nt, Artificial Sequence
  Description of Artificial Sequence: Synthetic oligonucleotide
gcggguucccaccaaagag

SEQ ID NO: 2367821 - RNA, 19 nt, Artificial Sequence
  Description of Artificial Sequence: Synthetic oligonucleotide
aggaacuuuucaguuucug

SEQ ID NO: 2367822 - RNA, 19 nt, Artificial Sequence
  Description of Artificial Sequence: Synthetic oligonucleotide
caguguguucuguacucug

SEQ ID NO: 2367823 - RNA, 19 nt, Artificial Sequence
  Description of Artificial Sequence: Synthetic oligonucleotide
uugcuaggaugggaacucg

SEQ ID NO: 2367824 - RNA, 19 nt, Artificial Sequence
  Description of Artificial Sequence: Synthetic oligonucleotide
aacaacccugucauacacu

SEQ ID NO: 2367825 - RNA, 19 nt, Artificial Sequence
  Description of Artificial Sequence: Synthetic oligonucleotide
uaaccuggucccucagcug

SEQ ID NO: 2367826 - RNA, 19 nt, Artificial Sequence
  Description of Artificial Sequence: Synthetic oligonucleotide
augugggcggaggggaacc

SEQ ID NO: 2367827 - RNA, 19 nt, Artificial Sequence
  Description of Artificial Sequence: Synthetic oligonucleotide
aggggaaccucucccgaug

SEQ ID NO: 2367828 - RNA, 19 nt, Artificial Sequence
  Description of Artificial Sequence: Synthetic oligonucleotide
agagggacauuagaacgca

SEQ ID NO: 2367829 - RNA, 19 nt, Artificial Sequence
  Description of Artificial Sequence: Synthetic oligonucleotide
ggacauuagaacgcagugc

SEQ ID NO: 2367830 - RNA, 19 nt, Artificial Sequence
  Description of Artificial Sequence: Synthetic oligonucleotide
ugggcugcgaugcgccgag

SEQ ID NO: 2367831 - RNA, 19 nt, Artificial Sequence
  Description of Artificial Sequence: Synthetic oligonucleotide
ucucguaucgcggguuccc

SEQ ID NO: 2367832 - RNA, 19 nt, Artificial Sequence
  Description of Artificial Sequence: Synthetic oligonucleotide
gaaaaccaagcuggcagga

SEQ ID NO: 2367833 - RNA, 19 nt, Artificial Sequence
  Description of Artificial Sequence: Synthetic oligonucleotide
  modified_base (2)..(2): a, c, u, g, unknown or other
cngaaacugugcagcugcc

SEQ ID NO: 2367834 - RNA, 19 nt, Artificial Sequence
  Description of Artificial Sequence: Synthetic oligonucleotide
ucacaguauucacggguua

SEQ ID NO: 2367835 - RNA, 19 nt, Artificial Sequence
  Description of Artificial Sequence: Synthetic oligonucleotide
ucgcggguucccaccaaag

SEQ ID NO: 2367836 - RNA, 19 nt, Artificial Sequence
  Description of Artificial Sequence: Synthetic oligonucleotide
cugcagagggacauuagaa

SEQ ID NO: 2367837 - RNA, 19 nt, Artificial Sequence
  Description of Artificial Sequence: Synthetic oligonucleotide
auccgccacggacauguag

SEQ ID NO: 2367838 - RNA, 19 nt, Artificial Sequence
  Description of Artificial Sequence: Synthetic oligonucleotide
ucaggugucccagcugugu

SEQ ID NO: 2367839 - RNA, 19 nt, Artificial Sequence
  Description of Artificial Sequence: Synthetic oligonucleotide
ugugggcugcgaugcgccg

SEQ ID NO: 2367840 - RNA, 19 nt, Artificial Sequence
  Description of Artificial Sequence: Synthetic oligonucleotide
guucuguacucuggauugg

SEQ ID NO: 2367841 - RNA, 19 nt, Artificial Sequence
  Description of Artificial Sequence: Synthetic oligonucleotide
acauucucguaucgcgggu

SEQ ID NO: 2367842 - RNA, 19 nt, Artificial Sequence
  Description of Artificial Sequence: Synthetic oligonucleotide
  modified_base (15)..(15): a, c, u, g, unknown or other
acugcuguagcugcngaaa

SEQ ID NO: 2367843 - RNA, 19 nt, Artificial Sequence
  Description of Artificial Sequence: Synthetic oligonucleotide
ucggagacaggggcauugg

SEQ ID NO: 2367844 - RNA, 19 nt, Artificial Sequence
  Description of Artificial Sequence: Synthetic oligonucleotide
uuaggugugcaaggccaug

SEQ ID NO: 2367845 - RNA, 19 nt, Artificial Sequence
  Description of Artificial Sequence: Synthetic oligonucleotide
gggugaaauguaucaagca

SEQ ID NO: 2367846 - RNA, 19 nt, Artificial Sequence
  Description of Artificial Sequence: Synthetic oligonucleotide
agacaggggcauuggagau

SEQ ID NO: 2367847 - RNA, 19 nt, Artificial Sequence
  Description of Artificial Sequence: Synthetic oligonucleotide
agcuggaccugcaucagcu

SEQ ID NO: 2367848 - RNA, 19 nt, Artificial Sequence
  Description of Artificial Sequence: Synthetic oligonucleotide
aggacaggggucauuauuu

SEQ ID NO: 2367849 - RNA, 19 nt, Artificial Sequence
  Description of Artificial Sequence: Synthetic oligonucleotide
  modified_base (8)..(8): a, c, u, g, unknown or other
gcuggganaguaugugggc

SEQ ID NO: 2367850 - RNA, 19 nt, Artificial Sequence
  Description of Artificial Sequence: Synthetic oligonucleotide
gagauagaaacaacccugu

SEQ ID NO: 2367851 - RNA, 19 nt, Artificial Sequence
  Description of Artificial Sequence: Synthetic oligonucleotide
acacuaucacaggcccugc

SEQ ID NO: 2367852 - RNA, 19 nt, Artificial Sequence
  Description of Artificial Sequence: Synthetic oligonucleotide
uggcacauucucguaucgc

SEQ ID NO: 2367853 - RNA, 19 nt, Artificial Sequence
  Description of Artificial Sequence: Synthetic oligonucleotide
guguguucuguacucugga

SEQ ID NO: 2367854 - RNA, 19 nt, Artificial Sequence
  Description of Artificial Sequence: Synthetic oligonucleotide
cugcuuaggugugcaaggc

SEQ ID NO: 2367855 - RNA, 19 nt, Artificial Sequence
  Description of Artificial Sequence: Synthetic oligonucleotide
aggugucccagcugugucu

SEQ ID NO: 2367856 - RNA, 19 nt, Artificial Sequence
  Description of Artificial Sequence: Synthetic oligonucleotide
cuaaccuggucccucagcu

SEQ ID NO: 2367857 - RNA, 19 nt, Artificial Sequence
  Description of Artificial Sequence: Synthetic oligonucleotide
gcugggagcugucagugug

SEQ ID NO: 2367858 - RNA, 19 nt, Artificial Sequence
  Description of Artificial Sequence: Synthetic oligonucleotide
guuuuaguuuaauguacau

SEQ ID NO: 2367859 - RNA, 19 nt, Artificial Sequence
  Description of Artificial Sequence: Synthetic oligonucleotide
ccuagccagaaccuguggc

SEQ ID NO: 2367860 - RNA, 19 nt, Artificial Sequence
  Description of Artificial Sequence: Synthetic oligonucleotide
gcagguacccugaaaguug

SEQ ID NO: 2367861 - RNA, 19 nt, Artificial Sequence
  Description of Artificial Sequence: Synthetic oligonucleotide
ucguagugucucaggugcu

SEQ ID NO: 2367862 - RNA, 19 nt, Artificial Sequence
  Description of Artificial Sequence: Synthetic oligonucleotide
guugugggcugcgaugcgc

SEQ ID NO: 2367863 - RNA, 19 nt, Artificial Sequence
  Description of Artificial Sequence: Synthetic oligonucleotide
cuugaggucagcccaagau

SEQ ID NO: 2367864 - RNA, 19 nt, Artificial Sequence
  Description of Artificial Sequence: Synthetic oligonucleotide
gcaucagcugaaaaccaag

SEQ ID NO: 2367865 - RNA, 19 nt, Artificial Sequence
  Description of Artificial Sequence: Synthetic oligonucleotide
ucucccgaugaguggcaca

SEQ ID NO: 2367866 - RNA, 19 nt, Artificial Sequence
  Description of Artificial Sequence: Synthetic oligonucleotide
aggugcucauccgccacgg

SEQ ID NO: 2367867 - RNA, 19 nt, Artificial Sequence
  Description of Artificial Sequence: Synthetic oligonucleotide
gcaccaaauagccuaaccu

SEQ ID NO: 2367868 - RNA, 19 nt, Artificial Sequence
  Description of Artificial Sequence: Synthetic oligonucleotide
ugaugaggcuucugagaua

SEQ ID NO: 2367869 - RNA, 19 nt, Artificial Sequence
  Description of Artificial Sequence: Synthetic oligonucleotide
cggguuauaggagacacag

SEQ ID NO: 2367870 - RNA, 19 nt, Artificial Sequence
  Description of Artificial Sequence: Synthetic oligonucleotide
ugaguggcacauucucgua

SEQ ID NO: 2367871 - RNA, 19 nt, Artificial Sequence
  Description of Artificial Sequence: Synthetic oligonucleotide
ucggguugugggcugcgau

SEQ ID NO: 2367872 - RNA, 19 nt, Artificial Sequence
  Description of Artificial Sequence: Synthetic oligonucleotide
acccugaaaguugcuagga

SEQ ID NO: 2367873 - RNA, 19 nt, Artificial Sequence
  Description of Artificial Sequence: Synthetic oligonucleotide
gcacauucucguaucgcgg

SEQ ID NO: 2367874 - RNA, 19 nt, Artificial Sequence
  Description of Artificial Sequence: Synthetic oligonucleotide
ucacggguuauaggagaca

SEQ ID NO: 2367875 - RNA, 19 nt, Artificial Sequence
  Description of Artificial Sequence: Synthetic oligonucleotide
uaugugggcggaggggaac

SEQ ID NO: 2367876 - RNA, 19 nt, Artificial Sequence
  Description of Artificial Sequence: Synthetic oligonucleotide
uucucguaucgcggguucc

SEQ ID NO: 2367877 - RNA, 19 nt, Artificial Sequence
  Description of Artificial Sequence: Synthetic oligonucleotide
cugcaucagcugaaaacca

SEQ ID NO: 2367878 - RNA, 19 nt, Artificial Sequence
  Description of Artificial Sequence: Synthetic oligonucleotide
uuugcccacccgacuccug

SEQ ID NO: 2367879 - RNA, 19 nt, Artificial Sequence
  Description of Artificial Sequence: Synthetic oligonucleotide
gcauuggagauggucuggg

SEQ ID NO: 2367880 - RNA, 19 nt, Artificial Sequence
  Description of Artificial Sequence: Synthetic oligonucleotide
ggaacucguagugucucag

SEQ ID NO: 2367881 - RNA, 19 nt, Artificial Sequence
  Description of Artificial Sequence: Synthetic oligonucleotide
ucccaccaaagaguauggc

SEQ ID NO: 2367882 - RNA, 19 nt, Artificial Sequence
  Description of Artificial Sequence: Synthetic oligonucleotide
uagaaacaacccugucaua

SEQ ID NO: 2367883 - RNA, 19 nt, Artificial Sequence
  Description of Artificial Sequence: Synthetic oligonucleotide
cucggagacaggggcauug

SEQ ID NO: 2367884 - RNA, 19 nt, Artificial Sequence
  Description of Artificial Sequence: Synthetic oligonucleotide
gcuuaggugugcaaggcca

SEQ ID NO: 2367885 - RNA, 19 nt, Artificial Sequence
  Description of Artificial Sequence: Synthetic oligonucleotide
agccuaaccuggucccuca

SEQ ID NO: 2367886 - RNA, 19 nt, Artificial Sequence
  Description of Artificial Sequence: Synthetic oligonucleotide
ucguaucgcggguucccac

SEQ ID NO: 2367887 - RNA, 19 nt, Artificial Sequence
  Description of Artificial Sequence: Synthetic oligonucleotide
ugaugaugaugaggcuucu

SEQ ID NO: 2367888 - RNA, 19 nt, Artificial Sequence
  Description of Artificial Sequence: Synthetic oligonucleotide
acgcagugccuugagguca

SEQ ID NO: 2367889 - RNA, 19 nt, Artificial Sequence
  Description of Artificial Sequence: Synthetic oligonucleotide
uacucggagacaggggcau

SEQ ID NO: 2367890 - RNA, 19 nt, Artificial Sequence
  Description of Artificial Sequence: Synthetic oligonucleotide
acaguauucacggguuaua

SEQ ID NO: 2367891 - RNA, 19 nt, Artificial Sequence
  Description of Artificial Sequence: Synthetic oligonucleotide
cucaucggguugugggcug

SEQ ID NO: 2367892 - RNA, 19 nt, Artificial Sequence
  Description of Artificial Sequence: Synthetic oligonucleotide
  modified_base (19)..(19): a, c, u, g, unknown or other
guggcccucaugcugggan

SEQ ID NO: 2367893 - RNA, 19 nt, Artificial Sequence
  Description of Artificial Sequence: Synthetic oligonucleotide
acauuagaacgcagugccu

SEQ ID NO: 2367894 - RNA, 19 nt, Artificial Sequence
  Description of Artificial Sequence: Synthetic oligonucleotide
gacuccuguagaaccgaga

SEQ ID NO: 2367895 - RNA, 19 nt, Artificial Sequence
  Description of Artificial Sequence: Synthetic oligonucleotide
cccgacuccuguagaaccg

SEQ ID NO: 2367896 - RNA, 19 nt, Artificial Sequence
  Description of Artificial Sequence: Synthetic oligonucleotide
guaucgcggguucccacca

SEQ ID NO: 2367897 - RNA, 19 nt, Artificial Sequence
  Description of Artificial Sequence: Synthetic oligonucleotide
caggugucccagcuguguc

SEQ ID NO: 2367898 - RNA, 19 nt, Artificial Sequence
  Description of Artificial Sequence: Synthetic oligonucleotide
guguucuguacucuggauu

SEQ ID NO: 2367899 - RNA, 19 nt, Artificial Sequence
  Description of Artificial Sequence: Synthetic oligonucleotide
guagugucucaggugcuca

SEQ ID NO: 2367900 - RNA, 19 nt, Artificial Sequence
  Description of Artificial Sequence: Synthetic oligonucleotide
uagaaccgagaggaguuuu

SEQ ID NO: 2367901 - RNA, 19 nt, Artificial Sequence
  Description of Artificial Sequence: Synthetic oligonucleotide
ucaucggguugugggcugc

SEQ ID NO: 2367902 - RNA, 19 nt, Artificial Sequence
  Description of Artificial Sequence: Synthetic oligonucleotide
acccugucauacacuauca

SEQ ID NO: 2367903 - RNA, 19 nt, Artificial Sequence
  Description of Artificial Sequence: Synthetic oligonucleotide
gagguuggaagcaccaaau

SEQ ID NO: 2367904 - RNA, 19 nt, Artificial Sequence
  Description of Artificial Sequence: Synthetic oligonucleotide
  modified_base (16)..(16): a, c, u, g, unknown or other
cacugcuguagcugcngaa

SEQ ID NO: 2367905 - RNA, 19 nt, Artificial Sequence
  Description of Artificial Sequence: Synthetic oligonucleotide
  modified_base (18)..(18): a, c, u, g, unknown or other
uggcccucaugcugggana

SEQ ID NO: 2367906 - RNA, 19 nt, Artificial Sequence
  Description of Artificial Sequence: Synthetic oligonucleotide
acauguagguggcccucau

SEQ ID NO: 2367907 - RNA, 19 nt, Artificial Sequence
  Description of Artificial Sequence: Synthetic oligonucleotide
gacauguagguggcccuca

SEQ ID NO: 2367908 - RNA, 19 nt, Artificial Sequence
  Description of Artificial Sequence: Synthetic oligonucleotide
ggcucacaguauucacggg

SEQ ID NO: 2367909 - RNA, 19 nt, Artificial Sequence
  Description of Artificial Sequence: Synthetic oligonucleotide
auacacuaucacaggcccu

SEQ ID NO: 2367910 - RNA, 19 nt, Artificial Sequence
  Description of Artificial Sequence: Synthetic oligonucleotide
gaguggcacauucucguau

SEQ ID NO: 2367911 - RNA, 19 nt, Artificial Sequence
  Description of Artificial Sequence: Synthetic oligonucleotide
gaccuucccaguccaggaa

SEQ ID NO: 2367912 - RNA, 19 nt, Artificial Sequence
  Description of Artificial Sequence: Synthetic oligonucleotide
aucgcggguucccaccaaa

SEQ ID NO: 2367913 - RNA, 19 nt, Artificial Sequence
  Description of Artificial Sequence: Synthetic oligonucleotide
augggaacucguagugucu

SEQ ID NO: 2367914 - RNA, 19 nt, Artificial Sequence
  Description of Artificial Sequence: Synthetic oligonucleotide
gucccagcugugucucugc

SEQ ID NO: 2367915 - RNA, 19 nt, Artificial Sequence
  Description of Artificial Sequence: Synthetic oligonucleotide
gcucacaguauucacgggu

SEQ ID NO: 2367916 - RNA, 19 nt, Artificial Sequence
  Description of Artificial Sequence: Synthetic oligonucleotide
ggugguuuggcugggagcu

SEQ ID NO: 2367917 - RNA, 19 nt, Artificial Sequence
  Description of Artificial Sequence: Synthetic oligonucleotide
  modified_base (4)..(4): a, c, u, g, unknown or other
gganaguaugugggcggag

SEQ ID NO: 2367918 - RNA, 19 nt, Artificial Sequence
  Description of Artificial Sequence: Synthetic oligonucleotide
gaaagauggcucacaguau

SEQ ID NO: 2367919 - RNA, 19 nt, Artificial Sequence
  Description of Artificial Sequence: Synthetic oligonucleotide
uagccuaaccuggucccuc

SEQ ID NO: 2367920 - RNA, 19 nt, Artificial Sequence
  Description of Artificial Sequence: Synthetic oligonucleotide
cccgaugaguggcacauuc

SEQ ID NO: 2367921 - RNA, 19 nt, Artificial Sequence
  Description of Artificial Sequence: Synthetic oligonucleotide
ggucaggugucccagcugu

SEQ ID NO: 2367922 - RNA, 19 nt, Artificial Sequence
  Description of Artificial Sequence: Synthetic oligonucleotide
gcggaggggaaccucuccc

SEQ ID NO: 2367923 - RNA, 19 nt, Artificial Sequence
  Description of Artificial Sequence: Synthetic oligonucleotide
cacacagaugcagaaagau

SEQ ID NO: 2367924 - RNA, 19 nt, Artificial Sequence
  Description of Artificial Sequence: Synthetic oligonucleotide
ggaccuucccaguccagga

SEQ ID NO: 2367925 - RNA, 19 nt, Artificial Sequence
  Description of Artificial Sequence: Synthetic oligonucleotide
gguugugggcugcgaugcg

SEQ ID NO: 2367926 - RNA, 19 nt, Artificial Sequence
  Description of Artificial Sequence: Synthetic oligonucleotide
uaucgcggguucccaccaa

SEQ ID NO: 2367927 - RNA, 19 nt, Artificial Sequence
  Description of Artificial Sequence: Synthetic oligonucleotide
gaccugcaucagcugaaaa

SEQ ID NO: 2367928 - RNA, 19 nt, Artificial Sequence
  Description of Artificial Sequence: Synthetic oligonucleotide
ccaagcuggcaggaggagg

SEQ ID NO: 2367929 - RNA, 19 nt, Artificial Sequence
  Description of Artificial Sequence: Synthetic oligonucleotide
cauuagaacgcagugccuu

SEQ ID NO: 2367930 - RNA, 19 nt, Artificial Sequence
  Description of Artificial Sequence: Synthetic oligonucleotide
cacccgacuccuguagaac

SEQ ID NO: 2367931 - RNA, 19 nt, Artificial Sequence
  Description of Artificial Sequence: Synthetic oligonucleotide
cucacaguauucacggguu

SEQ ID NO: 2367932 - RNA, 19 nt, Artificial Sequence
  Description of Artificial Sequence: Synthetic oligonucleotide
agaaccgagaggaguuuua

SEQ ID NO: 2367933 - RNA, 19 nt, Artificial Sequence
  Description of Artificial Sequence: Synthetic oligonucleotide
cgaugaguggcacauucuc

SEQ ID NO: 2367934 - RNA, 19 nt, Artificial Sequence
  Description of Artificial Sequence: Synthetic oligonucleotide
ccuaaccuggucccucagc

SEQ ID NO: 2367935 - RNA, 19 nt, Artificial Sequence
  Description of Artificial Sequence: Synthetic oligonucleotide
cuguagaaccgagaggagu

SEQ ID NO: 2367936 - RNA, 19 nt, Artificial Sequence
  Description of Artificial Sequence: Synthetic oligonucleotide
cccucaucggguugugggc

SEQ ID NO: 2367937 - RNA, 19 nt, Artificial Sequence
  Description of Artificial Sequence: Synthetic oligonucleotide
gcgccuggugguuuggcug

SEQ ID NO: 2367938 - RNA, 19 nt, Artificial Sequence
  Description of Artificial Sequence: Synthetic oligonucleotide
guacucggagacaggggca

SEQ ID NO: 2367939 - RNA, 19 nt, Artificial Sequence
  Description of Artificial Sequence: Synthetic oligonucleotide
agugaggccggcgccuggu

SEQ ID NO: 2367940 - RNA, 19 nt, Artificial Sequence
  Description of Artificial Sequence: Synthetic oligonucleotide
cguaucgcggguucccacc

SEQ ID NO: 2367941 - RNA, 19 nt, Artificial Sequence
  Description of Artificial Sequence: Synthetic oligonucleotide
caggaccuucccaguccag

SEQ ID NO: 2367942 - RNA, 19 nt, Artificial Sequence
  Description of Artificial Sequence: Synthetic oligonucleotide
cccugcuuaggugugcaag

SEQ ID NO: 2367943 - RNA, 19 nt, Artificial Sequence
  Description of Artificial Sequence: Synthetic oligonucleotide
gauuggcaggagguuggaa

SEQ ID NO: 2367944 - RNA, 19 nt, Artificial Sequence
  Description of Artificial Sequence: Synthetic oligonucleotide
ccacggacauguagguggc

SEQ ID NO: 2367945 - RNA, 19 nt, Artificial Sequence
  Description of Artificial Sequence: Synthetic oligonucleotide
acggguuauaggagacaca

SEQ ID NO: 2367946 - RNA, 19 nt, Artificial Sequence
  Description of Artificial Sequence: Synthetic oligonucleotide
agaguauggccugguucau

SEQ ID NO: 2367947 - RNA, 19 nt, Artificial Sequence
  Description of Artificial Sequence: Synthetic oligonucleotide
aggagguuggaagcaccaa

SEQ ID NO: 2367948 - RNA, 19 nt, Artificial Sequence
  Description of Artificial Sequence: Synthetic oligonucleotide
ugugggcggaggggaaccu

SEQ ID NO: 2367949 - RNA, 19 nt, Artificial Sequence
  Description of Artificial Sequence: Synthetic oligonucleotide
gguacccugaaaguugcua

SEQ ID NO: 2367950 - RNA, 19 nt, Artificial Sequence
  Description of Artificial Sequence: Synthetic oligonucleotide
caucggguugugggcugcg

SEQ ID NO: 2367951 - RNA, 19 nt, Artificial Sequence
  Description of Artificial Sequence: Synthetic oligonucleotide
ggaggggaaccucucccga

SEQ ID NO: 2367952 - RNA, 19 nt, Artificial Sequence
  Description of Artificial Sequence: Synthetic oligonucleotide
cagaugcagaaagauggcu

SEQ ID NO: 2367953 - RNA, 19 nt, Artificial Sequence
  Description of Artificial Sequence: Synthetic oligonucleotide
  modified_base (5)..(5): a, c, u, g, unknown or other
cugcngaaacugugcagcu

SEQ ID NO: 2367954 - RNA, 19 nt, Artificial Sequence
  Description of Artificial Sequence: Synthetic oligonucleotide
cuuaggugugcaaggccau

SEQ ID NO: 2367955 - RNA, 19 nt, Artificial Sequence
  Description of Artificial Sequence: Synthetic oligonucleotide
  modified_base (5)..(5): a, c, u, g, unknown or other
ggganaguaugugggcgga

SEQ ID NO: 2367956 - RNA, 19 nt, Artificial Sequence
  Description of Artificial Sequence: Synthetic oligonucleotide
  modified_base (17)..(17): a, c, u, g, unknown or other
ggcccucaugcuggganag

SEQ ID NO: 2367957 - RNA, 19 nt, Artificial Sequence
  Description of Artificial Sequence: Synthetic oligonucleotide
gggaacucguagugucuca

SEQ ID NO: 2367958 - RNA, 19 nt, Artificial Sequence
  Description of Artificial Sequence: Synthetic oligonucleotide
ggggaaccucucccgauga

SEQ ID NO: 2367959 - RNA, 19 nt, Artificial Sequence
  Description of Artificial Sequence: Synthetic oligonucleotide
cucucccgaugaguggcac

SEQ ID NO: 2367960 - RNA, 19 nt, Artificial Sequence
  Description of Artificial Sequence: Synthetic oligonucleotide
cagugaggccggcgccugg

SEQ ID NO: 2367961 - RNA, 19 nt, Artificial Sequence
  Description of Artificial Sequence: Synthetic oligonucleotide
cggaggggaaccucucccg

SEQ ID NO: 2367962 - RNA, 19 nt, Artificial Sequence
  Description of Artificial Sequence: Synthetic oligonucleotide
aggaggcagguacccugaa

SEQ ID NO: 2367963 - RNA, 19 nt, Artificial Sequence
  Description of Artificial Sequence: Synthetic oligonucleotide
cauuggagauggucugggu

SEQ ID NO: 2367964 - RNA, 19 nt, Artificial Sequence
  Description of Artificial Sequence: Synthetic oligonucleotide
cacggacauguagguggcc

SEQ ID NO: 2367965 - RNA, 19 nt, Artificial Sequence
  Description of Artificial Sequence: Synthetic oligonucleotide
gaggccggcgccugguggu

SEQ ID NO: 2367966 - RNA, 19 nt, Artificial Sequence
  Description of Artificial Sequence: Synthetic oligonucleotide
gaggggaaccucucccgau

SEQ ID NO: 2367967 - RNA, 19 nt, Artificial Sequence
  Description of Artificial Sequence: Synthetic oligonucleotide
gugaggccggcgccuggug

SEQ ID NO: 2367968 - RNA, 19 nt, Artificial Sequence
  Description of Artificial Sequence: Synthetic oligonucleotide
caggacaggggucauuauu

SEQ ID NO: 2367969 - RNA, 19 nt, Artificial Sequence
  Description of Artificial Sequence: Synthetic oligonucleotide
ggucagcccaagauuugca

SEQ ID NO: 2367970 - RNA, 19 nt, Artificial Sequence
  Description of Artificial Sequence: Synthetic oligonucleotide
ccugguucauguacucgga

SEQ ID NO: 2367971 - RNA, 19 nt, Artificial Sequence
  Description of Artificial Sequence: Synthetic oligonucleotide
aucggguugugggcugcga

SEQ ID NO: 2367972 - RNA, 19 nt, Artificial Sequence
  Description of Artificial Sequence: Synthetic oligonucleotide
ccacaggaccuucccaguc

SEQ ID NO: 2367973 - RNA, 19 nt, Artificial Sequence
  Description of Artificial Sequence: Synthetic oligonucleotide
ccaaauagccuaaccuggu

SEQ ID NO: 2367974 - RNA, 19 nt, Artificial Sequence
  Description of Artificial Sequence: Synthetic oligonucleotide
cucguaucgcggguuccca

SEQ ID NO: 2367975 - RNA, 19 nt, Artificial Sequence
  Description of Artificial Sequence: Synthetic oligonucleotide
ggaaccucucccgaugagu

SEQ ID NO: 2367976 - RNA, 19 nt, Artificial Sequence
  Description of Artificial Sequence: Synthetic oligonucleotide
gcuaggaugggaacucgua

SEQ ID NO: 2367977 - RNA, 19 nt, Artificial Sequence
  Description of Artificial Sequence: Synthetic oligonucleotide
ggguucccaccaaagagua

SEQ ID NO: 2367978 - RNA, 19 nt, Artificial Sequence
  Description of Artificial Sequence: Synthetic oligonucleotide
guaugugggcggaggggaa

SEQ ID NO: 2367979 - RNA, 19 nt, Artificial Sequence
  Description of Artificial Sequence: Synthetic oligonucleotide
gccuaaccuggucccucag

SEQ ID NO: 2367980 - RNA, 19 nt, Artificial Sequence
  Description of Artificial Sequence: Synthetic oligonucleotide
caaagaguauggccugguu

SEQ ID NO: 2367981 - RNA, 19 nt, Artificial Sequence
  Description of Artificial Sequence: Synthetic oligonucleotide
cucccgaugaguggcacau

SEQ ID NO: 2367982 - RNA, 19 nt, Artificial Sequence
  Description of Artificial Sequence: Synthetic oligonucleotide
gugggcugcgaugcgccga

SEQ ID NO: 2367983 - RNA, 19 nt, Artificial Sequence
  Description of Artificial Sequence: Synthetic oligonucleotide
cccaguccaggaacuuuuc

SEQ ID NO: 2367984 - RNA, 19 nt, Artificial Sequence
  Description of Artificial Sequence: Synthetic oligonucleotide
cugucagugugaugaugau

SEQ ID NO: 2367985 - RNA, 19 nt, Artificial Sequence
  Description of Artificial Sequence: Synthetic oligonucleotide
ggcagguacccugaaaguu

SEQ ID NO: 2367986 - RNA, 19 nt, Artificial Sequence
  Description of Artificial Sequence: Synthetic oligonucleotide
gagcugucagugugaugau

SEQ ID NO: 2367987 - RNA, 19 nt, Artificial Sequence
  Description of Artificial Sequence: Synthetic oligonucleotide
cgacuccuguagaaccgag

SEQ ID NO: 2367988 - RNA, 19 nt, Artificial Sequence
  Description of Artificial Sequence: Synthetic oligonucleotide
ggaugggaacucguagugu

SEQ ID NO: 2367989 - RNA, 19 nt, Artificial Sequence
  Description of Artificial Sequence: Synthetic oligonucleotide
guuugcccacccgacuccu

SEQ ID NO: 2367990 - RNA, 19 nt, Artificial Sequence
  Description of Artificial Sequence: Synthetic oligonucleotide
guagaaccgagaggaguuu

SEQ ID NO: 2367991 - RNA, 19 nt, Artificial Sequence
  Description of Artificial Sequence: Synthetic oligonucleotide
gccuugaggucagcccaag

SEQ ID NO: 2367992 - RNA, 19 nt, Artificial Sequence
  Description of Artificial Sequence: Synthetic oligonucleotide
cguagugucucaggugcuc

SEQ ID NO: 2367993 - RNA, 19 nt, Artificial Sequence
  Description of Artificial Sequence: Synthetic oligonucleotide
ggauuggcaggagguugga

SEQ ID NO: 2367994 - RNA, 19 nt, Artificial Sequence
  Description of Artificial Sequence: Synthetic oligonucleotide
cucauccgccacggacaug

SEQ ID NO: 2367995 - RNA, 19 nt, Artificial Sequence
  Description of Artificial Sequence: Synthetic oligonucleotide
caacccugucauacacuau

SEQ ID NO: 2367996 - RNA, 19 nt, Artificial Sequence
  Description of Artificial Sequence: Synthetic oligonucleotide
ucccgaugaguggcacauu

SEQ ID NO: 2367997 - RNA, 19 nt, Artificial Sequence
  Description of Artificial Sequence: Synthetic oligonucleotide
ccacccgacuccuguagaa

SEQ ID NO: 2367998 - RNA, 19 nt, Artificial Sequence
  Description of Artificial Sequence: Synthetic oligonucleotide
ccgagaggaguuuuaguuu

SEQ ID NO: 2367999 - RNA, 19 nt, Artificial Sequence
  Description of Artificial Sequence: Synthetic oligonucleotide
acucggagacaggggcauu

SEQ ID NO: 2368000 - RNA, 19 nt, Artificial Sequence
  Description of Artificial Sequence: Synthetic oligonucleotide
ggcccugcuuaggugugca

SEQ ID NO: 2368001 - RNA, 19 nt, Artificial Sequence
  Description of Artificial Sequence: Synthetic oligonucleotide
cggguucccaccaaagagu

SEQ ID NO: 2368002 - RNA, 19 nt, Artificial Sequence
  Description of Artificial Sequence: Synthetic oligonucleotide
ccuugaggucagcccaaga

SEQ ID NO: 2368003 - RNA, 19 nt, Artificial Sequence
  Description of Artificial Sequence: Synthetic oligonucleotide
ggcgccuggugguuuggcu

SEQ ID NO: 2368004 - RNA, 19 nt, Artificial Sequence
  Description of Artificial Sequence: Synthetic oligonucleotide
ccgaugaguggcacauucu

SEQ ID NO: 2368005 - RNA, 19 nt, Artificial Sequence
  Description of Artificial Sequence: Synthetic oligonucleotide
cgcggguucccaccaaaga

SEQ ID NO: 2368006 - RNA, 19 nt, Artificial Sequence
  Description of Artificial Sequence: Synthetic oligonucleotide
  modified_base (15)..(15): a, c, u, g, unknown or other
cccucaugcuggganagua

SEQ ID NO: 2368007 - RNA, 19 nt, Artificial Sequence
  Description of Artificial Sequence: Synthetic oligonucleotide
cccacccgacuccuguaga

SEQ ID NO: 2368008 - RNA, 19 nt, Artificial Sequence
  Description of Artificial Sequence: Synthetic oligonucleotide
ccgacuccuguagaaccga

SEQ ID NO: 2368009 - RNA, 19 nt, Artificial Sequence
  Description of Artificial Sequence: Synthetic oligonucleotide
gugucccagcugugucucu

SEQ ID NO: 2368010 - RNA, 19 nt, Artificial Sequence
  Description of Artificial Sequence: Synthetic oligonucleotide
cuucccaguccaggaacuu

SEQ ID NO: 2368011 - RNA, 19 nt, Artificial Sequence
  Description of Artificial Sequence: Synthetic oligonucleotide
gcugcgaugcgccgagcuu

SEQ ID NO: 2368012 - RNA, 19 nt, Artificial Sequence
  Description of Artificial Sequence: Synthetic oligonucleotide
ccaaagaguauggccuggu

SEQ ID NO: 2368013 - RNA, 19 nt, Artificial Sequence
  Description of Artificial Sequence: Synthetic oligonucleotide
cccugaaaguugcuaggau

SEQ ID NO: 2368014 - RNA, 19 nt, Artificial Sequence
  Description of Artificial Sequence: Synthetic oligonucleotide
ccucaucggguugugggcu

SEQ ID NO: 2368015 - RNA, 19 nt, Artificial Sequence
  Description of Artificial Sequence: Synthetic oligonucleotide
gcaggacaggggucauuau

SEQ ID NO: 2368016 - RNA, 19 nt, Artificial Sequence
  Description of Artificial Sequence: Synthetic oligonucleotide
aggccggcgccuggugguu

SEQ ID NO: 2368017 - RNA, 19 nt, Artificial Sequence
  Description of Artificial Sequence: Synthetic oligonucleotide
gcccugcuuaggugugcaa

SEQ ID NO: 2368018 - RNA, 19 nt, Artificial Sequence
  Description of Artificial Sequence: Synthetic oligonucleotide
cgccacggacauguaggug

SEQ ID NO: 2368019 - RNA, 19 nt, Artificial Sequence
  Description of Artificial Sequence: Synthetic oligonucleotide
  modified_base (16)..(16): a, c, u, g, unknown or other
gcccucaugcuggganagu

SEQ ID NO: 2368020 - RNA, 19 nt, Artificial Sequence
  Description of Artificial Sequence: Synthetic oligonucleotide
ccgccacggacauguaggu

SEQ ID NO: 2368021 - RNA, 19 nt, Artificial Sequence
  Description of Artificial Sequence: Synthetic oligonucleotide
ccggcgccuggugguuugg

SEQ ID NO: 2368022 - RNA, 19 nt, Artificial Sequence
  Description of Artificial Sequence: Synthetic oligonucleotide
gggcugcgaugcgccgagc

SEQ ID NO: 2368023 - RNA, 19 nt, Artificial Sequence
  Description of Artificial Sequence: Synthetic oligonucleotide
cggcgccuggugguuuggc

SEQ ID NO: 2368024 - RNA, 19 nt, Artificial Sequence
  Description of Artificial Sequence: Synthetic oligonucleotide
ggccggcgccuggugguuu

SEQ ID NO: 2368025 - RNA, 19 nt, Artificial Sequence
  Description of Artificial Sequence: Synthetic oligonucleotide
  modified_base (1)..(1): a, c, u, g, unknown or other
naguaugugggcggagggg

SEQ ID NO: 2368026 - RNA, 19 nt, Artificial Sequence
  Description of Artificial Sequence: Synthetic oligonucleotide
  modified_base (1)..(1): a, c, u, g, unknown or other
ngaaacugugcagcugccc

SEQ ID NO: 2368027 - RNA, 19 nt, Artificial Sequence
  Description of Artificial Sequence: Synthetic oligonucleotide
ugcauugugucguagaugg

SEQ ID NO: 2368028 - RNA, 19 nt, Artificial Sequence
  Description of Artificial Sequence: Synthetic oligonucleotide
ucgaguauaugucauaagc

SEQ ID NO: 2368029 - RNA, 19 nt, Artificial Sequence
  Description of Artificial Sequence: Synthetic oligonucleotide
acugucaucaaucgggccc

SEQ ID NO: 2368030 - RNA, 19 nt, Artificial Sequence
  Description of Artificial Sequence: Synthetic oligonucleotide
agcgagacaagacagcacc

SEQ ID NO: 2368031 - RNA, 19 nt, Artificial Sequence
  Description of Artificial Sequence: Synthetic oligonucleotide
ugagcgaugaccaggcugg

SEQ ID NO: 2368032 - RNA, 19 nt, Artificial Sequence
  Description of Artificial Sequence: Synthetic oligonucleotide
aggaccuuguccaagaugc

SEQ ID NO: 2368033 - RNA, 19 nt, Artificial Sequence
  Description of Artificial Sequence: Synthetic oligonucleotide
gaugccaaauucuugggcc

SEQ ID NO: 2368034 - RNA, 19 nt, Artificial Sequence
  Description of Artificial Sequence: Synthetic oligonucleotide
aagacagcaccguauccgc

SEQ ID NO: 2368035 - RNA, 19 nt, Artificial Sequence
  Description of Artificial Sequence: Synthetic oligonucleotide
caugauucuggaauuaggc

SEQ ID NO: 2368036 - RNA, 19 nt, Artificial Sequence
  Description of Artificial Sequence: Synthetic oligonucleotide
agacuguaagaacagcagc

SEQ ID NO: 2368037 - RNA, 19 nt, Artificial Sequence
  Description of Artificial Sequence: Synthetic oligonucleotide
gaguauaugucauaagcac

SEQ ID NO: 2368038 - RNA, 19 nt, Artificial Sequence
  Description of Artificial Sequence: Synthetic oligonucleotide
uucagaauauacugcauug

SEQ ID NO: 2368039 - RNA, 19 nt, Artificial Sequence
  Description of Artificial Sequence: Synthetic oligonucleotide
ucaugauucuggaauuagg

SEQ ID NO: 2368040 - RNA, 19 nt, Artificial Sequence
  Description of Artificial Sequence: Synthetic oligonucleotide
aaauucuugggccuccaug

SEQ ID NO: 2368041 - RNA, 19 nt, Artificial Sequence
  Description of Artificial Sequence: Synthetic oligonucleotide
accacuauggggaugagcg

SEQ ID NO: 2368042 - RNA, 19 nt, Artificial Sequence
  Description of Artificial Sequence: Synthetic oligonucleotide
aauuaggcagugaauggcg

SEQ ID NO: 2368043 - RNA, 19 nt, Artificial Sequence
  Description of Artificial Sequence: Synthetic oligonucleotide
ugggguucagaauauacug

SEQ ID NO: 2368044 - RNA, 19 nt, Artificial Sequence
  Description of Artificial Sequence: Synthetic oligonucleotide
uguccaacacaccaugugc

SEQ ID NO: 2368045 - RNA, 19 nt, Artificial Sequence
  Description of Artificial Sequence: Synthetic oligonucleotide
ucaaucgggcccaugacgc

SEQ ID NO: 2368046 - RNA, 19 nt, Artificial Sequence
  Description of Artificial Sequence: Synthetic oligonucleotide
aagaaacgcacggcgaagc

SEQ ID NO: 2368047 - RNA, 19 nt, Artificial Sequence
  Description of Artificial Sequence: Synthetic oligonucleotide
ucaucaaucgggcccauga

SEQ ID NO: 2368048 - RNA, 19 nt, Artificial Sequence
  Description of Artificial Sequence: Synthetic oligonucleotide
uuucagacuguaagaacag

SEQ ID NO: 2368049 - RNA, 19 nt, Artificial Sequence
  Description of Artificial Sequence: Synthetic oligonucleotide
guugauguacaugugaaug

SEQ ID NO: 2368050 - RNA, 19 nt, Artificial Sequence
  Description of Artificial Sequence: Synthetic oligonucleotide
aguauaugucauaagcacg

SEQ ID NO: 2368051 - RNA, 19 nt, Artificial Sequence
  Description of Artificial Sequence: Synthetic oligonucleotide
aacuacgauuccccggcgc

SEQ ID NO: 2368052 - RNA, 19 nt, Artificial Sequence
  Description of Artificial Sequence: Synthetic oligonucleotide
aagcucgcguagcaguucc

SEQ ID NO: 2368053 - RNA, 19 nt, Artificial Sequence
  Description of Artificial Sequence: Synthetic oligonucleotide
guauaugucauaagcacgc

SEQ ID NO: 2368054 - RNA, 19 nt, Artificial Sequence
  Description of Artificial Sequence: Synthetic oligonucleotide
aucaaucgggcccaugacg

SEQ ID NO: 2368055 - RNA, 19 nt, Artificial Sequence
  Description of Artificial Sequence: Synthetic oligonucleotide
ucguagauggccaggcccg

SEQ ID NO: 2368056 - RNA, 19 nt, Artificial Sequence
  Description of Artificial Sequence: Synthetic oligonucleotide
aagaacagcagcugagcga

SEQ ID NO: 2368057 - RNA, 19 nt, Artificial Sequence
  Description of Artificial Sequence: Synthetic oligonucleotide
ugaauggguuucuuguugc

SEQ ID NO: 2368058 - RNA, 19 nt, Artificial Sequence
  Description of Artificial Sequence: Synthetic oligonucleotide
cuugccuucccgaacuacg

SEQ ID NO: 2368059 - RNA, 19 nt, Artificial Sequence
  Description of Artificial Sequence: Synthetic oligonucleotide
acaagacagcaccguaucc

SEQ ID NO: 2368060 - RNA, 19 nt, Artificial Sequence
  Description of Artificial Sequence: Synthetic oligonucleotide
gaauuaggcagugaauggc

SEQ ID NO: 2368061 - RNA, 19 nt, Artificial Sequence
  Description of Artificial Sequence: Synthetic oligonucleotide
acuacgauuccccggcgcg

SEQ ID NO: 2368062 - RNA, 19 nt, Artificial Sequence
  Description of Artificial Sequence: Synthetic oligonucleotide
ucgcguagcaguuccaugc

SEQ ID NO: 2368063 - RNA, 19 nt, Artificial Sequence
  Description of Artificial Sequence: Synthetic oligonucleotide
aauggcgcaugccugggcu

SEQ ID NO: 2368064 - RNA, 19 nt, Artificial Sequence
  Description of Artificial Sequence: Synthetic oligonucleotide
acacaccaugugcagaugg

SEQ ID NO: 2368065 - RNA, 19 nt, Artificial Sequence
  Description of Artificial Sequence: Synthetic oligonucleotide
cagaauauacugcauugug

SEQ ID NO: 2368066 - RNA, 19 nt, Artificial Sequence
  Description of Artificial Sequence: Synthetic oligonucleotide
cauugugucguagauggcc

SEQ ID NO: 2368067 - RNA, 19 nt, Artificial Sequence
  Description of Artificial Sequence: Synthetic oligonucleotide
uggcauagauguuguauag

SEQ ID NO: 2368068 - RNA, 19 nt, Artificial Sequence
  Description of Artificial Sequence: Synthetic oligonucleotide
gaagucaccacaccaccug

SEQ ID NO: 2368069 - RNA, 19 nt, Artificial Sequence
  Description of Artificial Sequence: Synthetic oligonucleotide
agcgggaagaaacgcacgg

SEQ ID NO: 2368070 - RNA, 19 nt, Artificial Sequence
  Description of Artificial Sequence: Synthetic oligonucleotide
ggaauuaggcagugaaugg

SEQ ID NO: 2368071 - RNA, 19 nt, Artificial Sequence
  Description of Artificial Sequence: Synthetic oligonucleotide
caagacagcaccguauccg

SEQ ID NO: 2368072 - RNA, 19 nt, Artificial Sequence
  Description of Artificial Sequence: Synthetic oligonucleotide
uggauggcgaugucugugg

SEQ ID NO: 2368073 - RNA, 19 nt, Artificial Sequence
  Description of Artificial Sequence: Synthetic oligonucleotide
aaacgcacggcgaagcgag

SEQ ID NO: 2368074 - RNA, 19 nt, Artificial Sequence
  Description of Artificial Sequence: Synthetic oligonucleotide
auagcgggaagaaacgcac

SEQ ID NO: 2368075 - RNA, 19 nt, Artificial Sequence
  Description of Artificial Sequence: Synthetic oligonucleotide
uagcgaucccucuccaugg

SEQ ID NO: 2368076 - RNA, 19 nt, Artificial Sequence
  Description of Artificial Sequence: Synthetic oligonucleotide
auauacugcauugugucgu

SEQ ID NO: 2368077 - RNA, 19 nt, Artificial Sequence
  Description of Artificial Sequence: Synthetic oligonucleotide
cauagauguuguauagcug

SEQ ID NO: 2368078 - RNA, 19 nt, Artificial Sequence
  Description of Artificial Sequence: Synthetic oligonucleotide
aagcacgcucgccucuacc

SEQ ID NO: 2368079 - RNA, 19 nt, Artificial Sequence
  Description of Artificial Sequence: Synthetic oligonucleotide
accguauccgcucgcaguc

SEQ ID NO: 2368080 - RNA, 19 nt, Artificial Sequence
  Description of Artificial Sequence: Synthetic oligonucleotide
ucuaccagucuguuccacc

SEQ ID NO: 2368081 - RNA, 19 nt, Artificial Sequence
  Description of Artificial Sequence: Synthetic oligonucleotide
uccgcucgcagucacccgg

SEQ ID NO: 2368082 - RNA, 19 nt, Artificial Sequence
  Description of Artificial Sequence: Synthetic oligonucleotide
gccucuaccagucuguucc

SEQ ID NO: 2368083 - RNA, 19 nt, Artificial Sequence
  Description of Artificial Sequence: Synthetic oligonucleotide
uccccaagcagcacucggg

SEQ ID NO: 2368084 - RNA, 19 nt, Artificial Sequence
  Description of Artificial Sequence: Synthetic oligonucleotide
gugaauggguuucuuguug

SEQ ID NO: 2368085 - RNA, 19 nt, Artificial Sequence
  Description of Artificial Sequence: Synthetic oligonucleotide
ucagaauauacugcauugu

SEQ ID NO: 2368086 - RNA, 19 nt, Artificial Sequence
  Description of Artificial Sequence: Synthetic oligonucleotide
guagcgaucccucuccaug

SEQ ID NO: 2368087 - RNA, 19 nt, Artificial Sequence
  Description of Artificial Sequence: Synthetic oligonucleotide
agaaacgcacggcgaagcg

SEQ ID NO: 2368088 - RNA, 19 nt, Artificial Sequence
  Description of Artificial Sequence: Synthetic oligonucleotide
aaucgggcccaugacgcac

SEQ ID NO: 2368089 - RNA, 19 nt, Artificial Sequence
  Description of Artificial Sequence: Synthetic oligonucleotide
gaugggguucagaauauac

SEQ ID NO: 2368090 - RNA, 19 nt, Artificial Sequence
  Description of Artificial Sequence: Synthetic oligonucleotide
ucccgaacuacgauucccc

SEQ ID NO: 2368091 - RNA, 19 nt, Artificial Sequence
  Description of Artificial Sequence: Synthetic oligonucleotide
gucguagauggccaggccc

SEQ ID NO: 2368092 - RNA, 19 nt, Artificial Sequence
  Description of Artificial Sequence: Synthetic oligonucleotide
uguacaugugaauggguuu

SEQ ID NO: 2368093 - RNA, 19 nt, Artificial Sequence
  Description of Artificial Sequence: Synthetic oligonucleotide
uuccaugcaggcuccuccg

SEQ ID NO: 2368094 - RNA, 19 nt, Artificial Sequence
  Description of Artificial Sequence: Synthetic oligonucleotide
auggggaugagcgggaaag

SEQ ID NO: 2368095 - RNA, 19 nt, Artificial Sequence
  Description of Artificial Sequence: Synthetic oligonucleotide
ugcuuucagacuguaagaa

SEQ ID NO: 2368096 - RNA, 19 nt, Artificial Sequence
  Description of Artificial Sequence: Synthetic oligonucleotide
gaagcgagacaagacagca

SEQ ID NO: 2368097 - RNA, 19 nt, Artificial Sequence
  Description of Artificial Sequence: Synthetic oligonucleotide
guaagaacagcagcugagc

SEQ ID NO: 2368098 - RNA, 19 nt, Artificial Sequence
  Description of Artificial Sequence: Synthetic oligonucleotide
uguugauguacaugugaau

SEQ ID NO: 2368099 - RNA, 19 nt, Artificial Sequence
  Description of Artificial Sequence: Synthetic oligonucleotide
uccaccacuauggggauga

SEQ ID NO: 2368100 - RNA, 19 nt, Artificial Sequence
  Description of Artificial Sequence: Synthetic oligonucleotide
agaacagcagcugagcgau

SEQ ID NO: 2368101 - RNA, 19 nt, Artificial Sequence
  Description of Artificial Sequence: Synthetic oligonucleotide
cacaccaugugcagauggg

SEQ ID NO: 2368102 - RNA, 19 nt, Artificial Sequence
  Description of Artificial Sequence: Synthetic oligonucleotide
acugcauugugucguagau

SEQ ID NO: 2368103 - RNA, 19 nt, Artificial Sequence
  Description of Artificial Sequence: Synthetic oligonucleotide
agcugagcgaugaccaggc

SEQ ID NO: 2368104 - RNA, 19 nt, Artificial Sequence
  Description of Artificial Sequence: Synthetic oligonucleotide
aaagcucgcguagcaguuc

SEQ ID NO: 2368105 - RNA, 19 nt, Artificial Sequence
  Description of Artificial Sequence: Synthetic oligonucleotide
uacugcauugugucguaga

SEQ ID NO: 2368106 - RNA, 19 nt, Artificial Sequence
  Description of Artificial Sequence: Synthetic oligonucleotide
auccuccccauccugaggu

SEQ ID NO: 2368107 - RNA, 19 nt, Artificial Sequence
  Description of Artificial Sequence: Synthetic oligonucleotide
ugugucguagauggccagg

SEQ ID NO: 2368108 - RNA, 19 nt, Artificial Sequence
  Description of Artificial Sequence: Synthetic oligonucleotide
agcggcaaguagcaaggag

SEQ ID NO: 2368109 - RNA, 19 nt, Artificial Sequence
  Description of Artificial Sequence: Synthetic oligonucleotide
gaagaaacgcacggcgaag

SEQ ID NO: 2368110 - RNA, 19 nt, Artificial Sequence
  Description of Artificial Sequence: Synthetic oligonucleotide
ugagcgggaaagcucgcgu

SEQ ID NO: 2368111 - RNA, 19 nt, Artificial Sequence
  Description of Artificial Sequence: Synthetic oligonucleotide
cuguuccaccacuaugggg

SEQ ID NO: 2368112 - RNA, 19 nt, Artificial Sequence
  Description of Artificial Sequence: Synthetic oligonucleotide
acagcaccguauccgcucg

SEQ ID NO: 2368113 - RNA, 19 nt, Artificial Sequence
  Description of Artificial Sequence: Synthetic oligonucleotide
ugcuugguguguuuggcau

SEQ ID NO: 2368114 - RNA, 19 nt, Artificial Sequence
  Description of Artificial Sequence: Synthetic oligonucleotide
cugagcgaugaccaggcug

SEQ ID NO: 2368115 - RNA, 19 nt, Artificial Sequence
  Description of Artificial Sequence: Synthetic oligonucleotide
aagcgagacaagacagcac

SEQ ID NO: 2368116 - RNA, 19 nt, Artificial Sequence
  Description of Artificial Sequence: Synthetic oligonucleotide
cucgaguauaugucauaag

SEQ ID NO: 2368117 - RNA, 19 nt, Artificial Sequence
  Description of Artificial Sequence: Synthetic oligonucleotide
uugccuucccgaacuacga

SEQ ID NO: 2368118 - RNA, 19 nt, Artificial Sequence
  Description of Artificial Sequence: Synthetic oligonucleotide
acgcacacgaugcguuccc

SEQ ID NO: 2368119 - RNA, 19 nt, Artificial Sequence
  Description of Artificial Sequence: Synthetic oligonucleotide
agcgggaaagcucgcguag

SEQ ID NO: 2368120 - RNA, 19 nt, Artificial Sequence
  Description of Artificial Sequence: Synthetic oligonucleotide
agcgaucccucuccauggc

SEQ ID NO: 2368121 - RNA, 19 nt, Artificial Sequence
  Description of Artificial Sequence: Synthetic oligonucleotide
cuguccaacacaccaugug

SEQ ID NO: 2368122 - RNA, 19 nt, Artificial Sequence
  Description of Artificial Sequence: Synthetic oligonucleotide
uucagacuguaagaacagc

SEQ ID NO: 2368123 - RNA, 19 nt, Artificial Sequence
  Description of Artificial Sequence: Synthetic oligonucleotide
cauagcgggaagaaacgca

SEQ ID NO: 2368124 - RNA, 19 nt, Artificial Sequence
  Description of Artificial Sequence: Synthetic oligonucleotide
guacaugugaauggguuuc

SEQ ID NO: 2368125 - RNA, 19 nt, Artificial Sequence
  Description of Artificial Sequence: Synthetic oligonucleotide
ugucguagauggccaggcc

SEQ ID NO: 2368126 - RNA, 19 nt, Artificial Sequence
  Description of Artificial Sequence: Synthetic oligonucleotide
gacuguaagaacagcagcu

SEQ ID NO: 2368127 - RNA, 19 nt, Artificial Sequence
  Description of Artificial Sequence: Synthetic oligonucleotide
augccaaauucuugggccu

SEQ ID NO: 2368128 - RNA, 19 nt, Artificial Sequence
  Description of Artificial Sequence: Synthetic oligonucleotide
cuguugauguacaugugaa

SEQ ID NO: 2368129 - RNA, 19 nt, Artificial Sequence
  Description of Artificial Sequence: Synthetic oligonucleotide
ucaccacaccaccugggcu

SEQ ID NO: 2368130 - RNA, 19 nt, Artificial Sequence
  Description of Artificial Sequence: Synthetic oligonucleotide
cuccguaggggugagcugc

SEQ ID NO: 2368131 - RNA, 19 nt, Artificial Sequence
  Description of Artificial Sequence: Synthetic oligonucleotide
uucccgaacuacgauuccc

SEQ ID NO: 2368132 - RNA, 19 nt, Artificial Sequence
  Description of Artificial Sequence: Synthetic oligonucleotide
ugggcuguugauguacaug

SEQ ID NO: 2368133 - RNA, 19 nt, Artificial Sequence
  Description of Artificial Sequence: Synthetic oligonucleotide
cacucggggccacaugucg

SEQ ID NO: 2368134 - RNA, 19 nt, Artificial Sequence
  Description of Artificial Sequence: Synthetic oligonucleotide
agugaauggcgcaugccug

SEQ ID NO: 2368135 - RNA, 19 nt, Artificial Sequence
  Description of Artificial Sequence: Synthetic oligonucleotide
ugaauggcgcaugccuggg

SEQ ID NO: 2368136 - RNA, 19 nt, Artificial Sequence
  Description of Artificial Sequence: Synthetic oligonucleotide
uguugcuuucagacuguaa

SEQ ID NO: 2368137 - RNA, 19 nt, Artificial Sequence
  Description of Artificial Sequence: Synthetic oligonucleotide
aauggguuucuuguugcuu

SEQ ID NO: 2368138 - RNA, 19 nt, Artificial Sequence
  Description of Artificial Sequence: Synthetic oligonucleotide
uccuccguaggggugagcu

SEQ ID NO: 2368139 - RNA, 19 nt, Artificial Sequence
  Description of Artificial Sequence: Synthetic oligonucleotide
ggguucagaauauacugca

SEQ ID NO: 2368140 - RNA, 19 nt, Artificial Sequence
  Description of Artificial Sequence: Synthetic oligonucleotide
ucaggagccucgaguauau

SEQ ID NO: 2368141 - RNA, 19 nt, Artificial Sequence
  Description of Artificial Sequence: Synthetic oligonucleotide
gcgacacugucaucaaucg

SEQ ID NO: 2368142 - RNA, 19 nt, Artificial Sequence
  Description of Artificial Sequence: Synthetic oligonucleotide
uugugucguagauggccag

SEQ ID NO: 2368143 - RNA, 19 nt, Artificial Sequence
  Description of Artificial Sequence: Synthetic oligonucleotide
cuaccagucuguuccacca

SEQ ID NO: 2368144 - RNA, 19 nt, Artificial Sequence
  Description of Artificial Sequence: Synthetic oligonucleotide
gaacuacgauuccccggcg

SEQ ID NO: 2368145 - RNA, 19 nt, Artificial Sequence
  Description of Artificial Sequence: Synthetic oligonucleotide
uauacugcauugugucgua

SEQ ID NO: 2368146 - RNA, 19 nt, Artificial Sequence
  Description of Artificial Sequence: Synthetic oligonucleotide
gauguuguauagcugcuuu

SEQ ID NO: 2368147 - RNA, 19 nt, Artificial Sequence
  Description of Artificial Sequence: Synthetic oligonucleotide
gagccucgaguauauguca

SEQ ID NO: 2368148 - RNA, 19 nt, Artificial Sequence
  Description of Artificial Sequence: Synthetic oligonucleotide
cccaugacgcacacgaugc

SEQ ID NO: 2368149 - RNA, 19 nt, Artificial Sequence
  Description of Artificial Sequence: Synthetic oligonucleotide
gucaccacaccaccugggc

SEQ ID NO: 2368150 - RNA, 19 nt, Artificial Sequence
  Description of Artificial Sequence: Synthetic oligonucleotide
caggaggaucugaggaugc

SEQ ID NO: 2368151 - RNA, 19 nt, Artificial Sequence
  Description of Artificial Sequence: Synthetic oligonucleotide
auggggcucauguagcgau

SEQ ID NO: 2368152 - RNA, 19 nt, Artificial Sequence
  Description of Artificial Sequence: Synthetic oligonucleotide
uucccggcuugccuucccg

SEQ ID NO: 2368153 - RNA, 19 nt, Artificial Sequence
  Description of Artificial Sequence: Synthetic oligonucleotide
gcuguugauguacauguga

SEQ ID NO: 2368154 - RNA, 19 nt, Artificial Sequence
  Description of Artificial Sequence: Synthetic oligonucleotide
gcagaugggguucagaaua

SEQ ID NO: 2368155 - RNA, 19 nt, Artificial Sequence
  Description of Artificial Sequence: Synthetic oligonucleotide
uggcugguggaucaugauu

SEQ ID NO: 2368156 - RNA, 19 nt, Artificial Sequence
  Description of Artificial Sequence: Synthetic oligonucleotide
ugcagaugggguucagaau

SEQ ID NO: 2368157 - RNA, 19 nt, Artificial Sequence
  Description of Artificial Sequence: Synthetic oligonucleotide
ggaucugaggaugcugugg

SEQ ID NO: 2368158 - RNA, 19 nt, Artificial Sequence
  Description of Artificial Sequence: Synthetic oligonucleotide
caucaaucgggcccaugac

SEQ ID NO: 2368159 - RNA, 19 nt, Artificial Sequence
  Description of Artificial Sequence: Synthetic oligonucleotide
cacgaugcguucccucagg

SEQ ID NO: 2368160 - RNA, 19 nt, Artificial Sequence
  Description of Artificial Sequence: Synthetic oligonucleotide
ccagcggcaaguagcaagg

SEQ ID NO: 2368161 - RNA, 19 nt, Artificial Sequence
  Description of Artificial Sequence: Synthetic oligonucleotide
cucggggccacaugucgcc

SEQ ID NO: 2368162 - RNA, 19 nt, Artificial Sequence
  Description of Artificial Sequence: Synthetic oligonucleotide
agauggccaggcccgaagu

SEQ ID NO: 2368163 - RNA, 19 nt, Artificial Sequence
  Description of Artificial Sequence: Synthetic oligonucleotide
gcggcaaguagcaaggagc

SEQ ID NO: 2368164 - RNA, 19 nt, Artificial Sequence
  Description of Artificial Sequence: Synthetic oligonucleotide
uauggggaugagcgggaaa

SEQ ID NO: 2368165 - RNA, 19 nt, Artificial Sequence
  Description of Artificial Sequence: Synthetic oligonucleotide
ggcgaagcgagacaagaca

SEQ ID NO: 2368166 - RNA, 19 nt, Artificial Sequence
  Description of Artificial Sequence: Synthetic oligonucleotide
gccagcggcaaguagcaag

SEQ ID NO: 2368167 - RNA, 19 nt, Artificial Sequence
  Description of Artificial Sequence: Synthetic oligonucleotide
ggcugguggaucaugauuc

SEQ ID NO: 2368168 - RNA, 19 nt, Artificial Sequence
  Description of Artificial Sequence: Synthetic oligonucleotide
cgaacuacgauuccccggc

SEQ ID NO: 2368169 - RNA, 19 nt, Artificial Sequence
  Description of Artificial Sequence: Synthetic oligonucleotide
cagcugagcgaugaccagg

SEQ ID NO: 2368170 - RNA, 19 nt, Artificial Sequence
  Description of Artificial Sequence: Synthetic oligonucleotide
caggaccuuguccaagaug

SEQ ID NO: 2368171 - RNA, 19 nt, Artificial Sequence
  Description of Artificial Sequence: Synthetic oligonucleotide
gcaaguagcaaggagccca

SEQ ID NO: 2368172 - RNA, 19 nt, Artificial Sequence
  Description of Artificial Sequence: Synthetic oligonucleotide
cacugucaucaaucgggcc

SEQ ID NO: 2368173 - RNA, 19 nt, Artificial Sequence
  Description of Artificial Sequence: Synthetic oligonucleotide
gagacaagacagcaccgua

SEQ ID NO: 2368174 - RNA, 19 nt, Artificial Sequence
  Description of Artificial Sequence: Synthetic oligonucleotide
cccauagcgggaagaaacg

SEQ ID NO: 2368175 - RNA, 19 nt, Artificial Sequence
  Description of Artificial Sequence: Synthetic oligonucleotide
auguuguauagcugcuuuu

SEQ ID NO: 2368176 - RNA, 19 nt, Artificial Sequence
  Description of Artificial Sequence: Synthetic oligonucleotide
gggcccaugacgcacacga

SEQ ID NO: 2368177 - RNA, 19 nt, Artificial Sequence
  Description of Artificial Sequence: Synthetic oligonucleotide
gaaacgcacggcgaagcga

SEQ ID NO: 2368178 - RNA, 19 nt, Artificial Sequence
  Description of Artificial Sequence: Synthetic oligonucleotide
aguuccaugcaggcuccuc

SEQ ID NO: 2368179 - RNA, 19 nt, Artificial Sequence
  Description of Artificial Sequence: Synthetic oligonucleotide
gacgcacacgaugcguucc

SEQ ID NO: 2368180 - RNA, 19 nt, Artificial Sequence
  Description of Artificial Sequence: Synthetic oligonucleotide
gaauggcgcaugccugggc

SEQ ID NO: 2368181 - RNA, 19 nt, Artificial Sequence
  Description of Artificial Sequence: Synthetic oligonucleotide
gaucccucuccauggcuga

SEQ ID NO: 2368182 - RNA, 19 nt, Artificial Sequence
  Description of Artificial Sequence: Synthetic oligonucleotide
gugucguagauggccaggc

SEQ ID NO: 2368183 - RNA, 19 nt, Artificial Sequence
  Description of Artificial Sequence: Synthetic oligonucleotide
ugggcugccagcggcaagu

SEQ ID NO: 2368184 - RNA, 19 nt, Artificial Sequence
  Description of Artificial Sequence: Synthetic oligonucleotide
acggcgaagcgagacaaga

SEQ ID NO: 2368185 - RNA, 19 nt, Artificial Sequence
  Description of Artificial Sequence: Synthetic oligonucleotide
cuucccgaacuacgauucc

SEQ ID NO: 2368186 - RNA, 19 nt, Artificial Sequence
  Description of Artificial Sequence: Synthetic oligonucleotide
gggguucagaauauacugc

SEQ ID NO: 2368187 - RNA, 19 nt, Artificial Sequence
  Description of Artificial Sequence: Synthetic oligonucleotide
agacaagacagcaccguau

SEQ ID NO: 2368188 - RNA, 19 nt, Artificial Sequence
  Description of Artificial Sequence: Synthetic oligonucleotide
cauccuccccauccugagg

SEQ ID NO: 2368189 - RNA, 19 nt, Artificial Sequence
  Description of Artificial Sequence: Synthetic oligonucleotide
gcgaagcgagacaagacag

SEQ ID NO: 2368190 - RNA, 19 nt, Artificial Sequence
  Description of Artificial Sequence: Synthetic oligonucleotide
uguagcgaucccucuccau

SEQ ID NO: 2368191 - RNA, 19 nt, Artificial Sequence
  Description of Artificial Sequence: Synthetic oligonucleotide
guagcaaggagcccaugcu

SEQ ID NO: 2368192 - RNA, 19 nt, Artificial Sequence
  Description of Artificial Sequence: Synthetic oligonucleotide
gcuggcgacacugucauca

SEQ ID NO: 2368193 - RNA, 19 nt, Artificial Sequence
  Description of Artificial Sequence: Synthetic oligonucleotide
ggaagaaacgcacggcgaa

SEQ ID NO: 2368194 - RNA, 19 nt, Artificial Sequence
  Description of Artificial Sequence: Synthetic oligonucleotide
gguggaucaugauucugga

SEQ ID NO: 2368195 - RNA, 19 nt, Artificial Sequence
  Description of Artificial Sequence: Synthetic oligonucleotide
gaucaugauucuggaauua

SEQ ID NO: 2368196 - RNA, 19 nt, Artificial Sequence
  Description of Artificial Sequence: Synthetic oligonucleotide
gaugcugugggagucuccu

SEQ ID NO: 2368197 - RNA, 19 nt, Artificial Sequence
  Description of Artificial Sequence: Synthetic oligonucleotide
acgcacggcgaagcgagac

SEQ ID NO: 2368198 - RNA, 19 nt, Artificial Sequence
  Description of Artificial Sequence: Synthetic oligonucleotide
agcccaugcuggcagccug

SEQ ID NO: 2368199 - RNA, 19 nt, Artificial Sequence
  Description of Artificial Sequence: Synthetic oligonucleotide
guuugcuggggcaggagga

SEQ ID NO: 2368200 - RNA, 19 nt, Artificial Sequence
  Description of Artificial Sequence: Synthetic oligonucleotide
augucgccgcgcuucccgg

SEQ ID NO: 2368201 - RNA, 19 nt, Artificial Sequence
  Description of Artificial Sequence: Synthetic oligonucleotide
acgaugcguucccucagga

SEQ ID NO: 2368202 - RNA, 19 nt, Artificial Sequence
  Description of Artificial Sequence: Synthetic oligonucleotide
gcccauagcgggaagaaac

SEQ ID NO: 2368203 - RNA, 19 nt, Artificial Sequence
  Description of Artificial Sequence: Synthetic oligonucleotide
ccuucccgaacuacgauuc

SEQ ID NO: 2368204 - RNA, 19 nt, Artificial Sequence
  Description of Artificial Sequence: Synthetic oligonucleotide
ugacgcacacgaugcguuc

SEQ ID NO: 2368205 - RNA, 19 nt, Artificial Sequence
  Description of Artificial Sequence: Synthetic oligonucleotide
aggcccgaagucaccacac

SEQ ID NO: 2368206 - RNA, 19 nt, Artificial Sequence
  Description of Artificial Sequence: Synthetic oligonucleotide
cgaguauaugucauaagca

SEQ ID NO: 2368207 - RNA, 19 nt, Artificial Sequence
  Description of Artificial Sequence: Synthetic oligonucleotide
cugcauugugucguagaug

SEQ ID NO: 2368208 - RNA, 19 nt, Artificial Sequence
  Description of Artificial Sequence: Synthetic oligonucleotide
ccgaacuacgauuccccgg

SEQ ID NO: 2368209 - RNA, 19 nt, Artificial Sequence
  Description of Artificial Sequence: Synthetic oligonucleotide
gcccaugacgcacacgaug

SEQ ID NO: 2368210 - RNA, 19 nt, Artificial Sequence
  Description of Artificial Sequence: Synthetic oligonucleotide
cuuggccccuggcaccucc

SEQ ID NO: 2368211 - RNA, 19 nt, Artificial Sequence
  Description of Artificial Sequence: Synthetic oligonucleotide
ggcgacacugucaucaauc

SEQ ID NO: 2368212 - RNA, 19 nt, Artificial Sequence
  Description of Artificial Sequence: Synthetic oligonucleotide
uaagcacgcucgccucuac

SEQ ID NO: 2368213 - RNA, 19 nt, Artificial Sequence
  Description of Artificial Sequence: Synthetic oligonucleotide
gcgaugaccaggcuggcga

SEQ ID NO: 2368214 - RNA, 19 nt, Artificial Sequence
  Description of Artificial Sequence: Synthetic oligonucleotide
uggcugacucaaucaccug

SEQ ID NO: 2368215 - RNA, 19 nt, Artificial Sequence
  Description of Artificial Sequence: Synthetic oligonucleotide
ggagccucgaguauauguc

SEQ ID NO: 2368216 - RNA, 19 nt, Artificial Sequence
  Description of Artificial Sequence: Synthetic oligonucleotide
ugccuucccgaacuacgau

SEQ ID NO: 2368217 - RNA, 19 nt, Artificial Sequence
  Description of Artificial Sequence: Synthetic oligonucleotide
ucacccgggccuccccaag

SEQ ID NO: 2368218 - RNA, 19 nt, Artificial Sequence
  Description of Artificial Sequence: Synthetic oligonucleotide
gaauggguuucuuguugcu

SEQ ID NO: 2368219 - RNA, 19 nt, Artificial Sequence
  Description of Artificial Sequence: Synthetic oligonucleotide
cacaugucgccgcgcuucc

SEQ ID NO: 2368220 - RNA, 19 nt, Artificial Sequence
  Description of Artificial Sequence: Synthetic oligonucleotide
caccacuauggggaugagc

SEQ ID NO: 2368221 - RNA, 19 nt, Artificial Sequence
  Description of Artificial Sequence: Synthetic oligonucleotide
gauuccccggcgcgcuuug

SEQ ID NO: 2368222 - RNA, 19 nt, Artificial Sequence
  Description of Artificial Sequence: Synthetic oligonucleotide
ccgaagucaccacaccacc

SEQ ID NO: 2368223 - RNA, 19 nt, Artificial Sequence
  Description of Artificial Sequence: Synthetic oligonucleotide
auccgcucgcagucacccg

SEQ ID NO: 2368224 - RNA, 19 nt, Artificial Sequence
  Description of Artificial Sequence: Synthetic oligonucleotide
cccgaagucaccacaccac

SEQ ID NO: 2368225 - RNA, 19 nt, Artificial Sequence
  Description of Artificial Sequence: Synthetic oligonucleotide
gccuguccaacacaccaug

SEQ ID NO: 2368226 - RNA, 19 nt, Artificial Sequence
  Description of Artificial Sequence: Synthetic oligonucleotide
acuauggggaugagcggga

SEQ ID NO: 2368227 - RNA, 19 nt, Artificial Sequence
  Description of Artificial Sequence: Synthetic oligonucleotide
uccguaggggugagcugcu

SEQ ID NO: 2368228 - RNA, 19 nt, Artificial Sequence
  Description of Artificial Sequence: Synthetic oligonucleotide
ggaaagcucgcguagcagu

SEQ ID NO: 2368229 - RNA, 19 nt, Artificial Sequence
  Description of Artificial Sequence: Synthetic oligonucleotide
gcaggaggaucugaggaug

SEQ ID NO: 2368230 - RNA, 19 nt, Artificial Sequence
  Description of Artificial Sequence: Synthetic oligonucleotide
ccauggggcucauguagcg

SEQ ID NO: 2368231 - RNA, 19 nt, Artificial Sequence
  Description of Artificial Sequence: Synthetic oligonucleotide
aaguagcaaggagcccaug

SEQ ID NO: 2368232 - RNA, 19 nt, Artificial Sequence
  Description of Artificial Sequence: Synthetic oligonucleotide
uguaccaguucuggcucau

SEQ ID NO: 2368233 - RNA, 19 nt, Artificial Sequence
  Description of Artificial Sequence: Synthetic oligonucleotide
uggcgcaugccugggcugc

SEQ ID NO: 2368234 - RNA, 19 nt, Artificial Sequence
  Description of Artificial Sequence: Synthetic oligonucleotide
cccauccugaggugggugg

SEQ ID NO: 2368235 - RNA, 19 nt, Artificial Sequence
  Description of Artificial Sequence: Synthetic oligonucleotide
ggaggaucugaggaugcug

SEQ ID NO: 2368236 - RNA, 19 nt, Artificial Sequence
  Description of Artificial Sequence: Synthetic oligonucleotide
agucacccgggccucccca

SEQ ID NO: 2368237 - RNA, 19 nt, Artificial Sequence
  Description of Artificial Sequence: Synthetic oligonucleotide
uggggcucauguagcgauc

SEQ ID NO: 2368238 - RNA, 19 nt, Artificial Sequence
  Description of Artificial Sequence: Synthetic oligonucleotide
cugcuugguguguuuggca

SEQ ID NO: 2368239 - RNA, 19 nt, Artificial Sequence
  Description of Artificial Sequence: Synthetic oligonucleotide
guggaucaugauucuggaa

SEQ ID NO: 2368240 - RNA, 19 nt, Artificial Sequence
  Description of Artificial Sequence: Synthetic oligonucleotide
acaugucgccgcgcuuccc

SEQ ID NO: 2368241 - RNA, 19 nt, Artificial Sequence
  Description of Artificial Sequence: Synthetic oligonucleotide
acgcucgccucuaccaguc

SEQ ID NO: 2368242 - RNA, 19 nt, Artificial Sequence
  Description of Artificial Sequence: Synthetic oligonucleotide
ucggggccacaugucgccg

SEQ ID NO: 2368243 - RNA, 19 nt, Artificial Sequence
  Description of Artificial Sequence: Synthetic oligonucleotide
ggcgaugucuguggcuugg

SEQ ID NO: 2368244 - RNA, 19 nt, Artificial Sequence
  Description of Artificial Sequence: Synthetic oligonucleotide
uggcgacacugucaucaau

SEQ ID NO: 2368245 - RNA, 19 nt, Artificial Sequence
  Description of Artificial Sequence: Synthetic oligonucleotide
cucgcagucacccgggccu

SEQ ID NO: 2368246 - RNA, 19 nt, Artificial Sequence
  Description of Artificial Sequence: Synthetic oligonucleotide
gagguggguggaccaggac

SEQ ID NO: 2368247 - RNA, 19 nt, Artificial Sequence
  Description of Artificial Sequence: Synthetic oligonucleotide
ucccggcuugccuucccga

SEQ ID NO: 2368248 - RNA, 19 nt, Artificial Sequence
  Description of Artificial Sequence: Synthetic oligonucleotide
cacggcgaagcgagacaag

SEQ ID NO: 2368249 - RNA, 19 nt, Artificial Sequence
  Description of Artificial Sequence: Synthetic oligonucleotide
uggcgaugucuguggcuug

SEQ ID NO: 2368250 - RNA, 19 nt, Artificial Sequence
  Description of Artificial Sequence: Synthetic oligonucleotide
cccgaacuacgauuccccg

SEQ ID NO: 2368251 - RNA, 19 nt, Artificial Sequence
  Description of Artificial Sequence: Synthetic oligonucleotide
gaugaccaggcuggcgaca

SEQ ID NO: 2368252 - RNA, 19 nt, Artificial Sequence
  Description of Artificial Sequence: Synthetic oligonucleotide
aggaggaucugaggaugcu

SEQ ID NO: 2368253 - RNA, 19 nt, Artificial Sequence
  Description of Artificial Sequence: Synthetic oligonucleotide
gagcgggaaagcucgcgua

SEQ ID NO: 2368254 - RNA, 19 nt, Artificial Sequence
  Description of Artificial Sequence: Synthetic oligonucleotide
augacgcacacgaugcguu

SEQ ID NO: 2368255 - RNA, 19 nt, Artificial Sequence
  Description of Artificial Sequence: Synthetic oligonucleotide
gcgagacaagacagcaccg

SEQ ID NO: 2368256 - RNA, 19 nt, Artificial Sequence
  Description of Artificial Sequence: Synthetic oligonucleotide
cgaagcgagacaagacagc

SEQ ID NO: 2368257 - RNA, 19 nt, Artificial Sequence
  Description of Artificial Sequence: Synthetic oligonucleotide
uuguugcuuucagacugua

SEQ ID NO: 2368258 - RNA, 19 nt, Artificial Sequence
  Description of Artificial Sequence: Synthetic oligonucleotide
aucccucuccauggcugac

SEQ ID NO: 2368259 - RNA, 19 nt, Artificial Sequence
  Description of Artificial Sequence: Synthetic oligonucleotide
ccauagcgggaagaaacgc

SEQ ID NO: 2368260 - RNA, 19 nt, Artificial Sequence
  Description of Artificial Sequence: Synthetic oligonucleotide
cuggaauuaggcagugaau

SEQ ID NO: 2368261 - RNA, 19 nt, Artificial Sequence
  Description of Artificial Sequence: Synthetic oligonucleotide
ggggcucauguagcgaucc

SEQ ID NO: 2368262 - RNA, 19 nt, Artificial Sequence
  Description of Artificial Sequence: Synthetic oligonucleotide
cucuaccagucuguuccac

SEQ ID NO: 2368263 - RNA, 19 nt, Artificial Sequence
  Description of Artificial Sequence: Synthetic oligonucleotide
acccgggccuccccaagca

SEQ ID NO: 2368264 - RNA, 19 nt, Artificial Sequence
  Description of Artificial Sequence: Synthetic oligonucleotide
gcguagcaguuccaugcag

SEQ ID NO: 2368265 - RNA, 19 nt, Artificial Sequence
  Description of Artificial Sequence: Synthetic oligonucleotide
ggggccacaugucgccgcg

SEQ ID NO: 2368266 - RNA, 19 nt, Artificial Sequence
  Description of Artificial Sequence: Synthetic oligonucleotide
auaagcacgcucgccucua

SEQ ID NO: 2368267 - RNA, 19 nt, Artificial Sequence
  Description of Artificial Sequence: Synthetic oligonucleotide
cuucccggcuugccuuccc

SEQ ID NO: 2368268 - RNA, 19 nt, Artificial Sequence
  Description of Artificial Sequence: Synthetic oligonucleotide
gcucgccucuaccagucug

SEQ ID NO: 2368269 - RNA, 19 nt, Artificial Sequence
  Description of Artificial Sequence: Synthetic oligonucleotide
auuccccggcgcgcuuugc

SEQ ID NO: 2368270 - RNA, 19 nt, Artificial Sequence
  Description of Artificial Sequence: Synthetic oligonucleotide
cacccgggccuccccaagc

SEQ ID NO: 2368271 - RNA, 19 nt, Artificial Sequence
  Description of Artificial Sequence: Synthetic oligonucleotide
gcucauguagcgaucccuc

SEQ ID NO: 2368272 - RNA, 19 nt, Artificial Sequence
  Description of Artificial Sequence: Synthetic oligonucleotide
caggcccgaagucaccaca

SEQ ID NO: 2368273 - RNA, 19 nt, Artificial Sequence
  Description of Artificial Sequence: Synthetic oligonucleotide
guauccgcucgcagucacc

SEQ ID NO: 2368274 - RNA, 19 nt, Artificial Sequence
  Description of Artificial Sequence: Synthetic oligonucleotide
gggaagaaacgcacggcga

SEQ ID NO: 2368275 - RNA, 19 nt, Artificial Sequence
  Description of Artificial Sequence: Synthetic oligonucleotide
gcccgaagucaccacacca

SEQ ID NO: 2368276 - RNA, 19 nt, Artificial Sequence
  Description of Artificial Sequence: Synthetic oligonucleotide
cugaggaugcugugggagu

SEQ ID NO: 2368277 - RNA, 19 nt, Artificial Sequence
  Description of Artificial Sequence: Synthetic oligonucleotide
ccaugacgcacacgaugcg

SEQ ID NO: 2368278 - RNA, 19 nt, Artificial Sequence
  Description of Artificial Sequence: Synthetic oligonucleotide
caaucgggcccaugacgca

SEQ ID NO: 2368279 - RNA, 19 nt, Artificial Sequence
  Description of Artificial Sequence: Synthetic oligonucleotide
gaaagcucgcguagcaguu

SEQ ID NO: 2368280 - RNA, 19 nt, Artificial Sequence
  Description of Artificial Sequence: Synthetic oligonucleotide
ucgggcccaugacgcacac

SEQ ID NO: 2368281 - RNA, 19 nt, Artificial Sequence
  Description of Artificial Sequence: Synthetic oligonucleotide
cucauguagcgaucccucu

SEQ ID NO: 2368282 - RNA, 19 nt, Artificial Sequence
  Description of Artificial Sequence: Synthetic oligonucleotide
cguaggggugagcugcucc

SEQ ID NO: 2368283 - RNA, 19 nt, Artificial Sequence
  Description of Artificial Sequence: Synthetic oligonucleotide
cgacacugucaucaaucgg

SEQ ID NO: 2368284 - RNA, 19 nt, Artificial Sequence
  Description of Artificial Sequence: Synthetic oligonucleotide
cgaucccucuccauggcug

SEQ ID NO: 2368285 - RNA, 19 nt, Artificial Sequence
  Description of Artificial Sequence: Synthetic oligonucleotide
agaugggguucagaauaua

SEQ ID NO: 2368286 - RNA, 19 nt, Artificial Sequence
  Description of Artificial Sequence: Synthetic oligonucleotide
gguggguggaccaggaccu

SEQ ID NO: 2368287 - RNA, 19 nt, Artificial Sequence
  Description of Artificial Sequence: Synthetic oligonucleotide
cauaagcacgcucgccucu

SEQ ID NO: 2368288 - RNA, 19 nt, Artificial Sequence
  Description of Artificial Sequence: Synthetic oligonucleotide
caagcagcacucggggcca

SEQ ID NO: 2368289 - RNA, 19 nt, Artificial Sequence
  Description of Artificial Sequence: Synthetic oligonucleotide
cucgccucuaccagucugu

SEQ ID NO: 2368290 - RNA, 19 nt, Artificial Sequence
  Description of Artificial Sequence: Synthetic oligonucleotide
caccguauccgcucgcagu

SEQ ID NO: 2368291 - RNA, 19 nt, Artificial Sequence
  Description of Artificial Sequence: Synthetic oligonucleotide
gcaccguauccgcucgcag

SEQ ID NO: 2368292 - RNA, 19 nt, Artificial Sequence
  Description of Artificial Sequence: Synthetic oligonucleotide
cauggggcucauguagcga

SEQ ID NO: 2368293 - RNA, 19 nt, Artificial Sequence
  Description of Artificial Sequence: Synthetic oligonucleotide
ggcccgaagucaccacacc

SEQ ID NO: 2368294 - RNA, 19 nt, Artificial Sequence
  Description of Artificial Sequence: Synthetic oligonucleotide
gcucgcagucacccgggcc

SEQ ID NO: 2368295 - RNA, 19 nt, Artificial Sequence
  Description of Artificial Sequence: Synthetic oligonucleotide
caugacgcacacgaugcgu

SEQ ID NO: 2368296 - RNA, 19 nt, Artificial Sequence
  Description of Artificial Sequence: Synthetic oligonucleotide
cccaagcagcacucggggc

SEQ ID NO: 2368297 - RNA, 19 nt, Artificial Sequence
  Description of Artificial Sequence: Synthetic oligonucleotide
cugggcugccagcggcaag

SEQ ID NO: 2368298 - RNA, 19 nt, Artificial Sequence
  Description of Artificial Sequence: Synthetic oligonucleotide
agcccauagcgggaagaaa

SEQ ID NO: 2368299 - RNA, 19 nt, Artificial Sequence
  Description of Artificial Sequence: Synthetic oligonucleotide
gaacagcagcugagcgaug

SEQ ID NO: 2368300 - RNA, 19 nt, Artificial Sequence
  Description of Artificial Sequence: Synthetic oligonucleotide
ugcguucccucaggagccu

SEQ ID NO: 2368301 - RNA, 19 nt, Artificial Sequence
  Description of Artificial Sequence: Synthetic oligonucleotide
gagcgaugaccaggcuggc

SEQ ID NO: 2368302 - RNA, 19 nt, Artificial Sequence
  Description of Artificial Sequence: Synthetic oligonucleotide
ugcuggcagccuguccaac

SEQ ID NO: 2368303 - RNA, 19 nt, Artificial Sequence
  Description of Artificial Sequence: Synthetic oligonucleotide
ccacaugucgccgcgcuuc

SEQ ID NO: 2368304 - RNA, 19 nt, Artificial Sequence
  Description of Artificial Sequence: Synthetic oligonucleotide
uccccauccugaggugggu

SEQ ID NO: 2368305 - RNA, 19 nt, Artificial Sequence
  Description of Artificial Sequence: Synthetic oligonucleotide
ccucgaguauaugucauaa

SEQ ID NO: 2368306 - RNA, 19 nt, Artificial Sequence
  Description of Artificial Sequence: Synthetic oligonucleotide
aacgcacggcgaagcgaga

SEQ ID NO: 2368307 - RNA, 19 nt, Artificial Sequence
  Description of Artificial Sequence: Synthetic oligonucleotide
gggcucauguagcgauccc

SEQ ID NO: 2368308 - RNA, 19 nt, Artificial Sequence
  Description of Artificial Sequence: Synthetic oligonucleotide
cagaugggguucagaauau

SEQ ID NO: 2368309 - RNA, 19 nt, Artificial Sequence
  Description of Artificial Sequence: Synthetic oligonucleotide
cagcacucggggccacaug

SEQ ID NO: 2368310 - RNA, 19 nt, Artificial Sequence
  Description of Artificial Sequence: Synthetic oligonucleotide
aucgggcccaugacgcaca

SEQ ID NO: 2368311 - RNA, 19 nt, Artificial Sequence
  Description of Artificial Sequence: Synthetic oligonucleotide
cuggcgacacugucaucaa

SEQ ID NO: 2368312 - RNA, 19 nt, Artificial Sequence
  Description of Artificial Sequence: Synthetic oligonucleotide
cagcaccguauccgcucgc

SEQ ID NO: 2368313 - RNA, 19 nt, Artificial Sequence
  Description of Artificial Sequence: Synthetic oligonucleotide
augcugugggagucuccuu

SEQ ID NO: 2368314 - RNA, 19 nt, Artificial Sequence
  Description of Artificial Sequence: Synthetic oligonucleotide
guucccucaggagccucga

SEQ ID NO: 2368315 - RNA, 19 nt, Artificial Sequence
  Description of Artificial Sequence: Synthetic oligonucleotide
gcgggaaagcucgcguagc

SEQ ID NO: 2368316 - RNA, 19 nt, Artificial Sequence
  Description of Artificial Sequence: Synthetic oligonucleotide
ucgccucuaccagucuguu

SEQ ID NO: 2368317 - RNA, 19 nt, Artificial Sequence
  Description of Artificial Sequence: Synthetic oligonucleotide
gcaugccugggcugccagc

SEQ ID NO: 2368318 - RNA, 19 nt, Artificial Sequence
  Description of Artificial Sequence: Synthetic oligonucleotide
gguggaccaggaccuuguc

SEQ ID NO: 2368319 - RNA, 19 nt, Artificial Sequence
  Description of Artificial Sequence: Synthetic oligonucleotide
cagcccauagcgggaagaa

SEQ ID NO: 2368320 - RNA, 19 nt, Artificial Sequence
  Description of Artificial Sequence: Synthetic oligonucleotide
gcuugccuucccgaacuac

SEQ ID NO: 2368321 - RNA, 19 nt, Artificial Sequence
  Description of Artificial Sequence: Synthetic oligonucleotide
ggaugcugugggagucucc

SEQ ID NO: 2368322 - RNA, 19 nt, Artificial Sequence
  Description of Artificial Sequence: Synthetic oligonucleotide
ugucaucaaucgggcccau

SEQ ID NO: 2368323 - RNA, 19 nt, Artificial Sequence
  Description of Artificial Sequence: Synthetic oligonucleotide
guaccaguucuggcucauc

SEQ ID NO: 2368324 - RNA, 19 nt, Artificial Sequence
  Description of Artificial Sequence: Synthetic oligonucleotide
gcauugugucguagauggc

SEQ ID NO: 2368325 - RNA, 19 nt, Artificial Sequence
  Description of Artificial Sequence: Synthetic oligonucleotide
guuccaccacuauggggau

SEQ ID NO: 2368326 - RNA, 19 nt, Artificial Sequence
  Description of Artificial Sequence: Synthetic oligonucleotide
ggcucauguagcgaucccu

SEQ ID NO: 2368327 - RNA, 19 nt, Artificial Sequence
  Description of Artificial Sequence: Synthetic oligonucleotide
cguauccgcucgcagucac

SEQ ID NO: 2368328 - RNA, 19 nt, Artificial Sequence
  Description of Artificial Sequence: Synthetic oligonucleotide
cacgcucgccucuaccagu

SEQ ID NO: 2368329 - RNA, 19 nt, Artificial Sequence
  Description of Artificial Sequence: Synthetic oligonucleotide
cuauggggaugagcgggaa

SEQ ID NO: 2368330 - RNA, 19 nt, Artificial Sequence
  Description of Artificial Sequence: Synthetic oligonucleotide
ccccggcgcgcuuugcggg

SEQ ID NO: 2368331 - RNA, 19 nt, Artificial Sequence
  Description of Artificial Sequence: Synthetic oligonucleotide
gcugguggaucaugauucu

SEQ ID NO: 2368332 - RNA, 19 nt, Artificial Sequence
  Description of Artificial Sequence: Synthetic oligonucleotide
ggcuccuccguagggguga

SEQ ID NO: 2368333 - RNA, 19 nt, Artificial Sequence
  Description of Artificial Sequence: Synthetic oligonucleotide
guagauggccaggcccgaa

SEQ ID NO: 2368334 - RNA, 19 nt, Artificial Sequence
  Description of Artificial Sequence: Synthetic oligonucleotide
caggagccucgaguauaug

SEQ ID NO: 2368335 - RNA, 19 nt, Artificial Sequence
  Description of Artificial Sequence: Synthetic oligonucleotide
ccaacacaccaugugcaga

SEQ ID NO: 2368336 - RNA, 19 nt, Artificial Sequence
  Description of Artificial Sequence: Synthetic oligonucleotide
gcacggcgaagcgagacaa

SEQ ID NO: 2368337 - RNA, 19 nt, Artificial Sequence
  Description of Artificial Sequence: Synthetic oligonucleotide
cggcgaagcgagacaagac

SEQ ID NO: 2368338 - RNA, 19 nt, Artificial Sequence
  Description of Artificial Sequence: Synthetic oligonucleotide
caaauucuugggccuccau

SEQ ID NO: 2368339 - RNA, 19 nt, Artificial Sequence
  Description of Artificial Sequence: Synthetic oligonucleotide
ccgcucgcagucacccggg

SEQ ID NO: 2368340 - RNA, 19 nt, Artificial Sequence
  Description of Artificial Sequence: Synthetic oligonucleotide
gccucgaguauaugucaua

SEQ ID NO: 2368341 - RNA, 19 nt, Artificial Sequence
  Description of Artificial Sequence: Synthetic oligonucleotide
ccggcuugccuucccgaac

SEQ ID NO: 2368342 - RNA, 19 nt, Artificial Sequence
  Description of Artificial Sequence: Synthetic oligonucleotide
ccuccguaggggugagcug

SEQ ID NO: 2368343 - RNA, 19 nt, Artificial Sequence
  Description of Artificial Sequence: Synthetic oligonucleotide
ccuccagauggcuggugga

SEQ ID NO: 2368344 - RNA, 19 nt, Artificial Sequence
  Description of Artificial Sequence: Synthetic oligonucleotide
cagucuguuccaccacuau

SEQ ID NO: 2368345 - RNA, 19 nt, Artificial Sequence
  Description of Artificial Sequence: Synthetic oligonucleotide
cgaugaccaggcuggcgac

SEQ ID NO: 2368346 - RNA, 19 nt, Artificial Sequence
  Description of Artificial Sequence: Synthetic oligonucleotide
agcucgcguagcaguucca

SEQ ID NO: 2368347 - RNA, 19 nt, Artificial Sequence
  Description of Artificial Sequence: Synthetic oligonucleotide
acgauuccccggcgcgcuu

SEQ ID NO: 2368348 - RNA, 19 nt, Artificial Sequence
  Description of Artificial Sequence: Synthetic oligonucleotide
gcgaugucuguggcuuggc

SEQ ID NO: 2368349 - RNA, 19 nt, Artificial Sequence
  Description of Artificial Sequence: Synthetic oligonucleotide
cuccagauggcugguggau

SEQ ID NO: 2368350 - RNA, 19 nt, Artificial Sequence
  Description of Artificial Sequence: Synthetic oligonucleotide
gccuucccgaacuacgauu

SEQ ID NO: 2368351 - RNA, 19 nt, Artificial Sequence
  Description of Artificial Sequence: Synthetic oligonucleotide
gucgccgcgcuucccggcu

SEQ ID NO: 2368352 - RNA, 19 nt, Artificial Sequence
  Description of Artificial Sequence: Synthetic oligonucleotide
ucgccgcgcuucccggcuu

SEQ ID NO: 2368353 - RNA, 19 nt, Artificial Sequence
  Description of Artificial Sequence: Synthetic oligonucleotide
cugggcuguugauguacau

SEQ ID NO: 2368354 - RNA, 19 nt, Artificial Sequence
  Description of Artificial Sequence: Synthetic oligonucleotide
gccuccccaagcagcacuc

SEQ ID NO: 2368355 - RNA, 19 nt, Artificial Sequence
  Description of Artificial Sequence: Synthetic oligonucleotide
cagcggcaaguagcaagga

SEQ ID NO: 2368356 - RNA, 19 nt, Artificial Sequence
  Description of Artificial Sequence: Synthetic oligonucleotide
cgggaaagcucgcguagca

SEQ ID NO: 2368357 - RNA, 19 nt, Artificial Sequence
  Description of Artificial Sequence: Synthetic oligonucleotide
ggguggaccaggaccuugu

SEQ ID NO: 2368358 - RNA, 19 nt, Artificial Sequence
  Description of Artificial Sequence: Synthetic oligonucleotide
caccugggcuguugaugua

SEQ ID NO: 2368359 - RNA, 19 nt, Artificial Sequence
  Description of Artificial Sequence: Synthetic oligonucleotide
gcgaucccucuccauggcu

SEQ ID NO: 2368360 - RNA, 19 nt, Artificial Sequence
  Description of Artificial Sequence: Synthetic oligonucleotide
gcacucggggccacauguc

SEQ ID NO: 2368361 - RNA, 19 nt, Artificial Sequence
  Description of Artificial Sequence: Synthetic oligonucleotide
ggcgcaugccugggcugcc

SEQ ID NO: 2368362 - RNA, 19 nt, Artificial Sequence
  Description of Artificial Sequence: Synthetic oligonucleotide
ccccauccugaggugggug

SEQ ID NO: 2368363 - RNA, 19 nt, Artificial Sequence
  Description of Artificial Sequence: Synthetic oligonucleotide
cgcguagcaguuccaugca

SEQ ID NO: 2368364 - RNA, 19 nt, Artificial Sequence
  Description of Artificial Sequence: Synthetic oligonucleotide
ggcgcgcuuugcgggaguc

SEQ ID NO: 2368365 - RNA, 19 nt, Artificial Sequence
  Description of Artificial Sequence: Synthetic oligonucleotide
ggcuugccuucccgaacua

SEQ ID NO: 2368366 - RNA, 19 nt, Artificial Sequence
  Description of Artificial Sequence: Synthetic oligonucleotide
cgccucuaccagucuguuc

SEQ ID NO: 2368367 - RNA, 19 nt, Artificial Sequence
  Description of Artificial Sequence: Synthetic oligonucleotide
cccggcuugccuucccgaa

SEQ ID NO: 2368368 - RNA, 19 nt, Artificial Sequence
  Description of Artificial Sequence: Synthetic oligonucleotide
gggccacaugucgccgcgc

SEQ ID NO: 2368369 - RNA, 19 nt, Artificial Sequence
  Description of Artificial Sequence: Synthetic oligonucleotide
ggcuggcgacacugucauc

SEQ ID NO: 2368370 - RNA, 19 nt, Artificial Sequence
  Description of Artificial Sequence: Synthetic oligonucleotide
cgagacaagacagcaccgu

SEQ ID NO: 2368371 - RNA, 19 nt, Artificial Sequence
  Description of Artificial Sequence: Synthetic oligonucleotide
gcucgcguagcaguuccau

SEQ ID NO: 2368372 - RNA, 19 nt, Artificial Sequence
  Description of Artificial Sequence: Synthetic oligonucleotide
cgcacggcgaagcgagaca

SEQ ID NO: 2368373 - RNA, 19 nt, Artificial Sequence
  Description of Artificial Sequence: Synthetic oligonucleotide
gcugagcgaugaccaggcu

SEQ ID NO: 2368374 - RNA, 19 nt, Artificial Sequence
  Description of Artificial Sequence: Synthetic oligonucleotide
ccaccacuauggggaugag

SEQ ID NO: 2368375 - RNA, 19 nt, Artificial Sequence
  Description of Artificial Sequence: Synthetic oligonucleotide
cgcucgcagucacccgggc

SEQ ID NO: 2368376 - RNA, 19 nt, Artificial Sequence
  Description of Artificial Sequence: Synthetic oligonucleotide
gcgcuucccggcuugccuu

SEQ ID NO: 2368377 - RNA, 19 nt, Artificial Sequence
  Description of Artificial Sequence: Synthetic oligonucleotide
gcguucccucaggagccuc

SEQ ID NO: 2368378 - RNA, 19 nt, Artificial Sequence
  Description of Artificial Sequence: Synthetic oligonucleotide
cccggcgcgcuuugcggga

SEQ ID NO: 2368379 - RNA, 19 nt, Artificial Sequence
  Description of Artificial Sequence: Synthetic oligonucleotide
ccgcgcuucccggcuugcc

SEQ ID NO: 2368380 - RNA, 19 nt, Artificial Sequence
  Description of Artificial Sequence: Synthetic oligonucleotide
gccgcgcuucccggcuugc

SEQ ID NO: 2368381 - RNA, 19 nt, Artificial Sequence
  Description of Artificial Sequence: Synthetic oligonucleotide
ccguauccgcucgcaguca

SEQ ID NO: 2368382 - RNA, 19 nt, Artificial Sequence
  Description of Artificial Sequence: Synthetic oligonucleotide
ccggcgcgcuuugcgggag

SEQ ID NO: 2368383 - RNA, 19 nt, Artificial Sequence
  Description of Artificial Sequence: Synthetic oligonucleotide
gcgcaugccugggcugcca

SEQ ID NO: 2368384 - RNA, 19 nt, Artificial Sequence
  Description of Artificial Sequence: Synthetic oligonucleotide
ccucaggagccucgaguau

SEQ ID NO: 2368385 - RNA, 19 nt, Artificial Sequence
  Description of Artificial Sequence: Synthetic oligonucleotide
ccguaggggugagcugcuc

SEQ ID NO: 2368386 - RNA, 19 nt, Artificial Sequence
  Description of Artificial Sequence: Synthetic oligonucleotide
gccacaugucgccgcgcuu

SEQ ID NO: 2368387 - RNA, 19 nt, Artificial Sequence
  Description of Artificial Sequence: Synthetic oligonucleotide
cgccgcgcuucccggcuug

SEQ ID NO: 2368388 - RNA, 19 nt, Artificial Sequence
  Description of Artificial Sequence: Synthetic oligonucleotide
cgcgcuucccggcuugccu

SEQ ID NO: 2368389 - RNA, 19 nt, Artificial Sequence
  Description of Artificial Sequence: Synthetic oligonucleotide
ggcccaugacgcacacgau

SEQ ID NO: 2368390 - RNA, 19 nt, Artificial Sequence
  Description of Artificial Sequence: Synthetic oligonucleotide
cgcacacgaugcguucccu

SEQ ID NO: 2368391 - RNA, 19 nt, Artificial Sequence
  Description of Artificial Sequence: Synthetic oligonucleotide
cgcucgccucuaccagucu

SEQ ID NO: 2368392 - RNA, 19 nt, Artificial Sequence
  Description of Artificial Sequence: Synthetic oligonucleotide
cgauuccccggcgcgcuuu

SEQ ID NO: 2368393 - RNA, 19 nt, Artificial Sequence
  Description of Artificial Sequence: Synthetic oligonucleotide
cggcgcgcuuugcgggagu

SEQ ID NO: 2368394 - RNA, 19 nt, Artificial Sequence
  Description of Artificial Sequence: Synthetic oligonucleotide
ccacaccaccugggcuguu

SEQ ID NO: 2368395 - RNA, 19 nt, Artificial Sequence
  Description of Artificial Sequence: Synthetic oligonucleotide
aacaaagcuucgcagaugg

SEQ ID NO: 2368396 - RNA, 19 nt, Artificial Sequence
  Description of Artificial Sequence: Synthetic oligonucleotide
aaauggacuugcuugaaag

SEQ ID NO: 2368397 - RNA, 19 nt, Artificial Sequence
  Description of Artificial Sequence: Synthetic oligonucleotide
ugagcuauagucuuaggag

SEQ ID NO: 2368398 - RNA, 19 nt, Artificial Sequence
  Description of Artificial Sequence: Synthetic oligonucleotide
aaaauccuccucuccacgc

SEQ ID NO: 2368399 - RNA, 19 nt, Artificial Sequence
  Description of Artificial Sequence: Synthetic oligonucleotide
agaugggucggucaaaggc

SEQ ID NO: 2368400 - RNA, 19 nt, Artificial Sequence
  Description of Artificial Sequence: Synthetic oligonucleotide
uuuuguuggaggcuggucc

SEQ ID NO: 2368401 - RNA, 19 nt, Artificial Sequence
  Description of Artificial Sequence: Synthetic oligonucleotide
aaagcggaagacaagggac

SEQ ID NO: 2368402 - RNA, 19 nt, Artificial Sequence
  Description of Artificial Sequence: Synthetic oligonucleotide
cuugcuugaaaguggaagg

SEQ ID NO: 2368403 - RNA, 19 nt, Artificial Sequence
  Description of Artificial Sequence: Synthetic oligonucleotide
aaaacguagaugggcaugg

SEQ ID NO: 2368404 - RNA, 19 nt, Artificial Sequence
  Description of Artificial Sequence: Synthetic oligonucleotide
gagcuauagucuuaggagg

SEQ ID NO: 2368405 - RNA, 19 nt, Artificial Sequence
  Description of Artificial Sequence: Synthetic oligonucleotide
aaugccauugaagaaucuc

SEQ ID NO: 2368406 - RNA, 19 nt, Artificial Sequence
  Description of Artificial Sequence: Synthetic oligonucleotide
gaaggauccagacauacca

SEQ ID NO: 2368407 - RNA, 19 nt, Artificial Sequence
  Description of Artificial Sequence: Synthetic oligonucleotide
auccagacauaccaaagcg

SEQ ID NO: 2368408 - RNA, 19 nt, Artificial Sequence
  Description of Artificial Sequence: Synthetic oligonucleotide
ucugauccaacaaagcuuc

SEQ ID NO: 2368409 - RNA, 19 nt, Artificial Sequence
  Description of Artificial Sequence: Synthetic oligonucleotide
gaugguacggccaugccgg

SEQ ID NO: 2368410 - RNA, 19 nt, Artificial Sequence
  Description of Artificial Sequence: Synthetic oligonucleotide
ucucugauccaacaaagcu

SEQ ID NO: 2368411 - RNA, 19 nt, Artificial Sequence
  Description of Artificial Sequence: Synthetic oligonucleotide
cuggaaauggacuugcuug

SEQ ID NO: 2368412 - RNA, 19 nt, Artificial Sequence
  Description of Artificial Sequence: Synthetic oligonucleotide
uggacuugcuugaaagugg

SEQ ID NO: 2368413 - RNA, 19 nt, Artificial Sequence
  Description of Artificial Sequence: Synthetic oligonucleotide
uccagacauaccaaagcgg

SEQ ID NO: 2368414 - RNA, 19 nt, Artificial Sequence
  Description of Artificial Sequence: Synthetic oligonucleotide
aacguagaugggcaugggg

SEQ ID NO: 2368415 - RNA, 19 nt, Artificial Sequence
  Description of Artificial Sequence: Synthetic oligonucleotide
uccuuuggcaccaagugac

SEQ ID NO: 2368416 - RNA, 19 nt, Artificial Sequence
  Description of Artificial Sequence: Synthetic oligonucleotide
caccaagugacacaguucc

SEQ ID NO: 2368417 - RNA, 19 nt, Artificial Sequence
  Description of Artificial Sequence: Synthetic oligonucleotide
uggaaggucaucuuuucug

SEQ ID NO: 2368418 - RNA, 19 nt, Artificial Sequence
  Description of Artificial Sequence: Synthetic oligonucleotide
aaggcuuugucugauaggu

SEQ ID NO: 2368419 - RNA, 19 nt, Artificial Sequence
  Description of Artificial Sequence: Synthetic oligonucleotide
gauccagacauaccaaagc

SEQ ID NO: 2368420 - RNA, 19 nt, Artificial Sequence
  Description of Artificial Sequence: Synthetic oligonucleotide
aacuguacgggccuucuca

SEQ ID NO: 2368421 - RNA, 19 nt, Artificial Sequence
  Description of Artificial Sequence: Synthetic oligonucleotide
aaggucaucuuuucugucu

SEQ ID NO: 2368422 - RNA, 19 nt, Artificial Sequence
  Description of Artificial Sequence: Synthetic oligonucleotide
gaucucugcccgcagauag

SEQ ID NO: 2368423 - RNA, 19 nt, Artificial Sequence
  Description of Artificial Sequence: Synthetic oligonucleotide
ugguccauagccuuugccc

SEQ ID NO: 2368424 - RNA, 19 nt, Artificial Sequence
  Description of Artificial Sequence: Synthetic oligonucleotide
aagacacaggguccgcggc

SEQ ID NO: 2368425 - RNA, 19 nt, Artificial Sequence
  Description of Artificial Sequence: Synthetic oligonucleotide
aaagcuucgcagauggguc

SEQ ID NO: 2368426 - RNA, 19 nt, Artificial Sequence
  Description of Artificial Sequence: Synthetic oligonucleotide
uuccgaaguacauuguccc

SEQ ID NO: 2368427 - RNA, 19 nt, Artificial Sequence
  Description of Artificial Sequence: Synthetic oligonucleotide
agaugguacggccaugccg

SEQ ID NO: 2368428 - RNA, 19 nt, Artificial Sequence
  Description of Artificial Sequence: Synthetic oligonucleotide
aagaaucucugauccaaca

SEQ ID NO: 2368429 - RNA, 19 nt, Artificial Sequence
  Description of Artificial Sequence: Synthetic oligonucleotide
gguacaagaucucugcccg

SEQ ID NO: 2368430 - RNA, 19 nt, Artificial Sequence
  Description of Artificial Sequence: Synthetic oligonucleotide
gaaccguucauacuccagc

SEQ ID NO: 2368431 - RNA, 19 nt, Artificial Sequence
  Description of Artificial Sequence: Synthetic oligonucleotide
uccccaguggccaaagcgg

SEQ ID NO: 2368432 - RNA, 19 nt, Artificial Sequence
  Description of Artificial Sequence: Synthetic oligonucleotide
acguagaugggcauggggc

SEQ ID NO: 2368433 - RNA, 19 nt, Artificial Sequence
  Description of Artificial Sequence: Synthetic oligonucleotide
ugucugauagguuccgaag

SEQ ID NO: 2368434 - RNA, 19 nt, Artificial Sequence
  Description of Artificial Sequence: Synthetic oligonucleotide
uccaacaaagcuucgcaga

SEQ ID NO: 2368435 - RNA, 19 nt, Artificial Sequence
  Description of Artificial Sequence: Synthetic oligonucleotide
auaguugccaaugccauug

SEQ ID NO: 2368436 - RNA, 19 nt, Artificial Sequence
  Description of Artificial Sequence: Synthetic oligonucleotide
ugauagguuccgaaguaca

SEQ ID NO: 2368437 - RNA, 19 nt, Artificial Sequence
  Description of Artificial Sequence: Synthetic oligonucleotide
agcucaaccacuuccuuug

SEQ ID NO: 2368438 - RNA, 19 nt, Artificial Sequence
  Description of Artificial Sequence: Synthetic oligonucleotide
aagugacacaguuccagca

SEQ ID NO: 2368439 - RNA, 19 nt, Artificial Sequence
  Description of Artificial Sequence: Synthetic oligonucleotide
uauagucuuaggagggugu

SEQ ID NO: 2368440 - RNA, 19 nt, Artificial Sequence
  Description of Artificial Sequence: Synthetic oligonucleotide
ugaagaaucucugauccaa

SEQ ID NO: 2368441 - RNA, 19 nt, Artificial Sequence
  Description of Artificial Sequence: Synthetic oligonucleotide
uggaaauggacuugcuuga

SEQ ID NO: 2368442 - RNA, 19 nt, Artificial Sequence
  Description of Artificial Sequence: Synthetic oligonucleotide
agacauaccaaagcggaag

SEQ ID NO: 2368443 - RNA, 19 nt, Artificial Sequence
  Description of Artificial Sequence: Synthetic oligonucleotide
uguugagcuauagucuuag

SEQ ID NO: 2368444 - RNA, 19 nt, Artificial Sequence
  Description of Artificial Sequence: Synthetic oligonucleotide
ugccauugaagaaucucug

SEQ ID NO: 2368445 - RNA, 19 nt, Artificial Sequence
  Description of Artificial Sequence: Synthetic oligonucleotide
aguggaaggucaucuuuuc

SEQ ID NO: 2368446 - RNA, 19 nt, Artificial Sequence
  Description of Artificial Sequence: Synthetic oligonucleotide
aaagcggcggauguccacg

SEQ ID NO: 2368447 - RNA, 19 nt, Artificial Sequence
  Description of Artificial Sequence: Synthetic oligonucleotide
gauccaacaaagcuucgca

SEQ ID NO: 2368448 - RNA, 19 nt, Artificial Sequence
  Description of Artificial Sequence: Synthetic oligonucleotide
agucuuaggaggguguuuc

SEQ ID NO: 2368449 - RNA, 19 nt, Artificial Sequence
  Description of Artificial Sequence: Synthetic oligonucleotide
ucuggguucugcaguuugg

SEQ ID NO: 2368450 - RNA, 19 nt, Artificial Sequence
  Description of Artificial Sequence: Synthetic oligonucleotide
aaccguucauacuccagca

SEQ ID NO: 2368451 - RNA, 19 nt, Artificial Sequence
  Description of Artificial Sequence: Synthetic oligonucleotide
cuagcuguguccccugugg

SEQ ID NO: 2368452 - RNA, 19 nt, Artificial Sequence
  Description of Artificial Sequence: Synthetic oligonucleotide
gaaucucugauccaacaaa

SEQ ID NO: 2368453 - RNA, 19 nt, Artificial Sequence
  Description of Artificial Sequence: Synthetic oligonucleotide
uacgggccuucucaaaagg

SEQ ID NO: 2368454 - RNA, 19 nt, Artificial Sequence
  Description of Artificial Sequence: Synthetic oligonucleotide
ucugauagguuccgaagua

SEQ ID NO: 2368455 - RNA, 19 nt, Artificial Sequence
  Description of Artificial Sequence: Synthetic oligonucleotide
uguaggaguuuccugguuu

SEQ ID NO: 2368456 - RNA, 19 nt, Artificial Sequence
  Description of Artificial Sequence: Synthetic oligonucleotide
ugaaccguucauacuccag

SEQ ID NO: 2368457 - RNA, 19 nt, Artificial Sequence
  Description of Artificial Sequence: Synthetic oligonucleotide
uuuggcaccaagugacaca

SEQ ID NO: 2368458 - RNA, 19 nt, Artificial Sequence
  Description of Artificial Sequence: Synthetic oligonucleotide
auccaacaaagcuucgcag

SEQ ID NO: 2368459 - RNA, 19 nt, Artificial Sequence
  Description of Artificial Sequence: Synthetic oligonucleotide
agcuauagucuuaggaggg

SEQ ID NO: 2368460 - RNA, 19 nt, Artificial Sequence
  Description of Artificial Sequence: Synthetic oligonucleotide
auggacuugcuugaaagug

SEQ ID NO: 2368461 - RNA, 19 nt, Artificial Sequence
  Description of Artificial Sequence: Synthetic oligonucleotide
agacacaggguccgcggcc

SEQ ID NO: 2368462 - RNA, 19 nt, Artificial Sequence
  Description of Artificial Sequence: Synthetic oligonucleotide
gugacacaguuccagcagg

SEQ ID NO: 2368463 - RNA, 19 nt, Artificial Sequence
  Description of Artificial Sequence: Synthetic oligonucleotide
aagaucucugcccgcagau

SEQ ID NO: 2368464 - RNA, 19 nt, Artificial Sequence
  Description of Artificial Sequence: Synthetic oligonucleotide
ugauccaacaaagcuucgc

SEQ ID NO: 2368465 - RNA, 19 nt, Artificial Sequence
  Description of Artificial Sequence: Synthetic oligonucleotide
cuuaggaggguguuuccug

SEQ ID NO: 2368466 - RNA, 19 nt, Artificial Sequence
  Description of Artificial Sequence: Synthetic oligonucleotide
aucuucagccgguacaaga

SEQ ID NO: 2368467 - RNA, 19 nt, Artificial Sequence
  Description of Artificial Sequence: Synthetic oligonucleotide
agaaucucugauccaacaa

SEQ ID NO: 2368468 - RNA, 19 nt, Artificial Sequence
  Description of Artificial Sequence: Synthetic oligonucleotide
caagugacacaguuccagc

SEQ ID NO: 2368469 - RNA, 19 nt, Artificial Sequence
  Description of Artificial Sequence: Synthetic oligonucleotide
cagauaguugccaaugcca

SEQ ID NO: 2368470 - RNA, 19 nt, Artificial Sequence
  Description of Artificial Sequence: Synthetic oligonucleotide
cauagcaccgcagccaggc

SEQ ID NO: 2368471 - RNA, 19 nt, Artificial Sequence
  Description of Artificial Sequence: Synthetic oligonucleotide
gaacucaugccuggcaugc

SEQ ID NO: 2368472 - RNA, 19 nt, Artificial Sequence
  Description of Artificial Sequence: Synthetic oligonucleotide
gaggcuggucccuucagac

SEQ ID NO: 2368473 - RNA, 19 nt, Artificial Sequence
  Description of Artificial Sequence: Synthetic oligonucleotide
gauguccacgaagcaaagg

SEQ ID NO: 2368474 - RNA, 19 nt, Artificial Sequence
  Description of Artificial Sequence: Synthetic oligonucleotide
uaccaaagcggaagacaag

SEQ ID NO: 2368475 - RNA, 19 nt, Artificial Sequence
  Description of Artificial Sequence: Synthetic oligonucleotide
cuggcaugccauagcaccg

SEQ ID NO: 2368476 - RNA, 19 nt, Artificial Sequence
  Description of Artificial Sequence: Synthetic oligonucleotide
gacauaccaaagcggaaga

SEQ ID NO: 2368477 - RNA, 19 nt, Artificial Sequence
  Description of Artificial Sequence: Synthetic oligonucleotide
aggaggguguuuccuggac

SEQ ID NO: 2368478 - RNA, 19 nt, Artificial Sequence
  Description of Artificial Sequence: Synthetic oligonucleotide
ccuggaaccagaugguacg

SEQ ID NO: 2368479 - RNA, 19 nt, Artificial Sequence
  Description of Artificial Sequence: Synthetic oligonucleotide
augccuggcaugccauagc

SEQ ID NO: 2368480 - RNA, 19 nt, Artificial Sequence
  Description of Artificial Sequence: Synthetic oligonucleotide
uacaagaucucugcccgca

SEQ ID NO: 2368481 - RNA, 19 nt, Artificial Sequence
  Description of Artificial Sequence: Synthetic oligonucleotide
ugacacaguuccagcaggu

SEQ ID NO: 2368482 - RNA, 19 nt, Artificial Sequence
  Description of Artificial Sequence: Synthetic oligonucleotide
auaccaaagcggaagacaa

SEQ ID NO: 2368483 - RNA, 19 nt, Artificial Sequence
  Description of Artificial Sequence: Synthetic oligonucleotide
ucuagcuguguccccugug

SEQ ID NO: 2368484 - RNA, 19 nt, Artificial Sequence
  Description of Artificial Sequence: Synthetic oligonucleotide
aacucaugccuggcaugcc

SEQ ID NO: 2368485 - RNA, 19 nt, Artificial Sequence
  Description of Artificial Sequence: Synthetic oligonucleotide
uucgcagaugggucgguca

SEQ ID NO: 2368486 - RNA, 19 nt, Artificial Sequence
  Description of Artificial Sequence: Synthetic oligonucleotide
ggaaccagaugguacggcc

SEQ ID NO: 2368487 - RNA, 19 nt, Artificial Sequence
  Description of Artificial Sequence: Synthetic oligonucleotide
ucagacuguugagcuauag

SEQ ID NO: 2368488 - RNA, 19 nt, Artificial Sequence
  Description of Artificial Sequence: Synthetic oligonucleotide
acgaagcaaagggcaagcc

SEQ ID NO: 2368489 - RNA, 19 nt, Artificial Sequence
  Description of Artificial Sequence: Synthetic oligonucleotide
aaacguagaugggcauggg

SEQ ID NO: 2368490 - RNA, 19 nt, Artificial Sequence
  Description of Artificial Sequence: Synthetic oligonucleotide
uccacgaagcaaagggcaa

SEQ ID NO: 2368491 - RNA, 19 nt, Artificial Sequence
  Description of Artificial Sequence: Synthetic oligonucleotide
gucccugaaccguucauac

SEQ ID NO: 2368492 - RNA, 19 nt, Artificial Sequence
  Description of Artificial Sequence: Synthetic oligonucleotide
uccgaguccuggaaaugga

SEQ ID NO: 2368493 - RNA, 19 nt, Artificial Sequence
  Description of Artificial Sequence: Synthetic oligonucleotide
ggccucuagaacuguacgg

SEQ ID NO: 2368494 - RNA, 19 nt, Artificial Sequence
  Description of Artificial Sequence: Synthetic oligonucleotide
cuccgaguccuggaaaugg

SEQ ID NO: 2368495 - RNA, 19 nt, Artificial Sequence
  Description of Artificial Sequence: Synthetic oligonucleotide
guugagcuauagucuuagg

SEQ ID NO: 2368496 - RNA, 19 nt, Artificial Sequence
  Description of Artificial Sequence: Synthetic oligonucleotide
gguaucuucagccgguaca

SEQ ID NO: 2368497 - RNA, 19 nt, Artificial Sequence
  Description of Artificial Sequence: Synthetic oligonucleotide
ucuuaggaggguguuuccu

SEQ ID NO: 2368498 - RNA, 19 nt, Artificial Sequence
  Description of Artificial Sequence: Synthetic oligonucleotide
cuauagucuuaggagggug

SEQ ID NO: 2368499 - RNA, 19 nt, Artificial Sequence
  Description of Artificial Sequence: Synthetic oligonucleotide
gcagauaguugccaaugcc

SEQ ID NO: 2368500 - RNA, 19 nt, Artificial Sequence
  Description of Artificial Sequence: Synthetic oligonucleotide
uccacgcucugguccauag

SEQ ID NO: 2368501 - RNA, 19 nt, Artificial Sequence
  Description of Artificial Sequence: Synthetic oligonucleotide
acucaugccuggcaugcca

SEQ ID NO: 2368502 - RNA, 19 nt, Artificial Sequence
  Description of Artificial Sequence: Synthetic oligonucleotide
gaagaaucucugauccaac

SEQ ID NO: 2368503 - RNA, 19 nt, Artificial Sequence
  Description of Artificial Sequence: Synthetic oligonucleotide
gaaggucaucuuuucuguc

SEQ ID NO: 2368504 - RNA, 19 nt, Artificial Sequence
  Description of Artificial Sequence: Synthetic oligonucleotide
uccgaaguacauugucccu

SEQ ID NO: 2368505 - RNA, 19 nt, Artificial Sequence
  Description of Artificial Sequence: Synthetic oligonucleotide
gccucuagaacuguacggg

SEQ ID NO: 2368506 - RNA, 19 nt, Artificial Sequence
  Description of Artificial Sequence: Synthetic oligonucleotide
ugccauagcaccgcagcca

SEQ ID NO: 2368507 - RNA, 19 nt, Artificial Sequence
  Description of Artificial Sequence: Synthetic oligonucleotide
guagaugggcauggggcgg

SEQ ID NO: 2368508 - RNA, 19 nt, Artificial Sequence
  Description of Artificial Sequence: Synthetic oligonucleotide
cugauagguuccgaaguac

SEQ ID NO: 2368509 - RNA, 19 nt, Artificial Sequence
  Description of Artificial Sequence: Synthetic oligonucleotide
auugucccugaaccguuca

SEQ ID NO: 2368510 - RNA, 19 nt, Artificial Sequence
  Description of Artificial Sequence: Synthetic oligonucleotide
agggccucuagaacuguac

SEQ ID NO: 2368511 - RNA, 19 nt, Artificial Sequence
  Description of Artificial Sequence: Synthetic oligonucleotide
cacgaagcaaagggcaagc

SEQ ID NO: 2368512 - RNA, 19 nt, Artificial Sequence
  Description of Artificial Sequence: Synthetic oligonucleotide
ucugguccauagccuuugc

SEQ ID NO: 2368513 - RNA, 19 nt, Artificial Sequence
  Description of Artificial Sequence: Synthetic oligonucleotide
aucacccuggaaccagaug

SEQ ID NO: 2368514 - RNA, 19 nt, Artificial Sequence
  Description of Artificial Sequence: Synthetic oligonucleotide
ucggccgguacuguugcag

SEQ ID NO: 2368515 - RNA, 19 nt, Artificial Sequence
  Description of Artificial Sequence: Synthetic oligonucleotide
ucgcagaugggucggucaa

SEQ ID NO: 2368516 - RNA, 19 nt, Artificial Sequence
  Description of Artificial Sequence: Synthetic oligonucleotide
cugguccauagccuuugcc

SEQ ID NO: 2368517 - RNA, 19 nt, Artificial Sequence
  Description of Artificial Sequence: Synthetic oligonucleotide
agcggaagacaagggacag

SEQ ID NO: 2368518 - RNA, 19 nt, Artificial Sequence
  Description of Artificial Sequence: Synthetic oligonucleotide
gggccucuagaacuguacg

SEQ ID NO: 2368519 - RNA, 19 nt, Artificial Sequence
  Description of Artificial Sequence: Synthetic oligonucleotide
caugccuggcaugccauag

SEQ ID NO: 2368520 - RNA, 19 nt, Artificial Sequence
  Description of Artificial Sequence: Synthetic oligonucleotide
gggacagugccuccugagg

SEQ ID NO: 2368521 - RNA, 19 nt, Artificial Sequence
  Description of Artificial Sequence: Synthetic oligonucleotide
ccagacauaccaaagcgga

SEQ ID NO: 2368522 - RNA, 19 nt, Artificial Sequence
  Description of Artificial Sequence: Synthetic oligonucleotide
gaugggucggucaaaggcu

SEQ ID NO: 2368523 - RNA, 19 nt, Artificial Sequence
  Description of Artificial Sequence: Synthetic oligonucleotide
uggccuugaucuucuggcu

SEQ ID NO: 2368524 - RNA, 19 nt, Artificial Sequence
  Description of Artificial Sequence: Synthetic oligonucleotide
gucugauagguuccgaagu

SEQ ID NO: 2368525 - RNA, 19 nt, Artificial Sequence
  Description of Artificial Sequence: Synthetic oligonucleotide
gaggguguuuccuggaccu

SEQ ID NO: 2368526 - RNA, 19 nt, Artificial Sequence
  Description of Artificial Sequence: Synthetic oligonucleotide
agggaacucaugccuggca

SEQ ID NO: 2368527 - RNA, 19 nt, Artificial Sequence
  Description of Artificial Sequence: Synthetic oligonucleotide
ucagccgguacaagaucuc

SEQ ID NO: 2368528 - RNA, 19 nt, Artificial Sequence
  Description of Artificial Sequence: Synthetic oligonucleotide
cucuuccgggaucugcccc

SEQ ID NO: 2368529 - RNA, 19 nt, Artificial Sequence
  Description of Artificial Sequence: Synthetic oligonucleotide
ccagcaagacacagggucc

SEQ ID NO: 2368530 - RNA, 19 nt, Artificial Sequence
  Description of Artificial Sequence: Synthetic oligonucleotide
uggaaccagaugguacggc

SEQ ID NO: 2368531 - RNA, 19 nt, Artificial Sequence
  Description of Artificial Sequence: Synthetic oligonucleotide
acuguacgggccuucucaa

SEQ ID NO: 2368532 - RNA, 19 nt, Artificial Sequence
  Description of Artificial Sequence: Synthetic oligonucleotide
gguuccgaaguacauuguc

SEQ ID NO: 2368533 - RNA, 19 nt, Artificial Sequence
  Description of Artificial Sequence: Synthetic oligonucleotide
guccacgaagcaaagggca

SEQ ID NO: 2368534 - RNA, 19 nt, Artificial Sequence
  Description of Artificial Sequence: Synthetic oligonucleotide
ccguucauacuccagcaag

SEQ ID NO: 2368535 - RNA, 19 nt, Artificial Sequence
  Description of Artificial Sequence: Synthetic oligonucleotide
agcaagacacaggguccgc

SEQ ID NO: 2368536 - RNA, 19 nt, Artificial Sequence
  Description of Artificial Sequence: Synthetic oligonucleotide
uggaccuccgaguccugga

SEQ ID NO: 2368537 - RNA, 19 nt, Artificial Sequence
  Description of Artificial Sequence: Synthetic oligonucleotide
auagguuccgaaguacauu

SEQ ID NO: 2368538 - RNA, 19 nt, Artificial Sequence
  Description of Artificial Sequence: Synthetic oligonucleotide
cugucuucagccucuagcu

SEQ ID NO: 2368539 - RNA, 19 nt, Artificial Sequence
  Description of Artificial Sequence: Synthetic oligonucleotide
cuggaaccagaugguacgg

SEQ ID NO: 2368540 - RNA, 19 nt, Artificial Sequence
  Description of Artificial Sequence: Synthetic oligonucleotide
cugcaguuuggccuugauc

SEQ ID NO: 2368541 - RNA, 19 nt, Artificial Sequence
  Description of Artificial Sequence: Synthetic oligonucleotide
accuccgaguccuggaaau

SEQ ID NO: 2368542 - RNA, 19 nt, Artificial Sequence
  Description of Artificial Sequence: Synthetic oligonucleotide
acgggccuucucaaaaggg

SEQ ID NO: 2368543 - RNA, 19 nt, Artificial Sequence
  Description of Artificial Sequence: Synthetic oligonucleotide
ccaagugacacaguuccag

SEQ ID NO: 2368544 - RNA, 19 nt, Artificial Sequence
  Description of Artificial Sequence: Synthetic oligonucleotide
gaaccagaugguacggcca

SEQ ID NO: 2368545 - RNA, 19 nt, Artificial Sequence
  Description of Artificial Sequence: Synthetic oligonucleotide
agccucuagcugugucccc

SEQ ID NO: 2368546 - RNA, 19 nt, Artificial Sequence
  Description of Artificial Sequence: Synthetic oligonucleotide
cguagaugggcauggggcg

SEQ ID NO: 2368547 - RNA, 19 nt, Artificial Sequence
  Description of Artificial Sequence: Synthetic oligonucleotide
ggaggguguuuccuggacc

SEQ ID NO: 2368548 - RNA, 19 nt, Artificial Sequence
  Description of Artificial Sequence: Synthetic oligonucleotide
guacaagaucucugcccgc

SEQ ID NO: 2368549 - RNA, 19 nt, Artificial Sequence
  Description of Artificial Sequence: Synthetic oligonucleotide
cagccucuagcuguguccc

SEQ ID NO: 2368550 - RNA, 19 nt, Artificial Sequence
  Description of Artificial Sequence: Synthetic oligonucleotide
ugucccugaaccguucaua

SEQ ID NO: 2368551 - RNA, 19 nt, Artificial Sequence
  Description of Artificial Sequence: Synthetic oligonucleotide
cauacuccagcaagacaca

SEQ ID NO: 2368552 - RNA, 19 nt, Artificial Sequence
  Description of Artificial Sequence: Synthetic oligonucleotide
ggaacucaugccuggcaug

SEQ ID NO: 2368553 - RNA, 19 nt, Artificial Sequence
  Description of Artificial Sequence: Synthetic oligonucleotide
uggcaugccauagcaccgc

SEQ ID NO: 2368554 - RNA, 19 nt, Artificial Sequence
  Description of Artificial Sequence: Synthetic oligonucleotide
guuuccuggaccuccgagu

SEQ ID NO: 2368555 - RNA, 19 nt, Artificial Sequence
  Description of Artificial Sequence: Synthetic oligonucleotide
agcuucgcagaugggucgg

SEQ ID NO: 2368556 - RNA, 19 nt, Artificial Sequence
  Description of Artificial Sequence: Synthetic oligonucleotide
augccggucucgcagggaa

SEQ ID NO: 2368557 - RNA, 19 nt, Artificial Sequence
  Description of Artificial Sequence: Synthetic oligonucleotide
accgcagccaggcucggaa

SEQ ID NO: 2368558 - RNA, 19 nt, Artificial Sequence
  Description of Artificial Sequence: Synthetic oligonucleotide
gccauagcaccgcagccag

SEQ ID NO: 2368559 - RNA, 19 nt, Artificial Sequence
  Description of Artificial Sequence: Synthetic oligonucleotide
agaacuguacgggccuucu

SEQ ID NO: 2368560 - RNA, 19 nt, Artificial Sequence
  Description of Artificial Sequence: Synthetic oligonucleotide
aagcggcggauguccacga

SEQ ID NO: 2368561 - RNA, 19 nt, Artificial Sequence
  Description of Artificial Sequence: Synthetic oligonucleotide
guuuccugguuuuguugga

SEQ ID NO: 2368562 - RNA, 19 nt, Artificial Sequence
  Description of Artificial Sequence: Synthetic oligonucleotide
caaagcggcggauguccac

SEQ ID NO: 2368563 - RNA, 19 nt, Artificial Sequence
  Description of Artificial Sequence: Synthetic oligonucleotide
cauugucccugaaccguuc

SEQ ID NO: 2368564 - RNA, 19 nt, Artificial Sequence
  Description of Artificial Sequence: Synthetic oligonucleotide
caacaaagcuucgcagaug

SEQ ID NO: 2368565 - RNA, 19 nt, Artificial Sequence
  Description of Artificial Sequence: Synthetic oligonucleotide
ccugaaccguucauacucc

SEQ ID NO: 2368566 - RNA, 19 nt, Artificial Sequence
  Description of Artificial Sequence: Synthetic oligonucleotide
uugucccugaaccguucau

SEQ ID NO: 2368567 - RNA, 19 nt, Artificial Sequence
  Description of Artificial Sequence: Synthetic oligonucleotide
caaagcuucgcagaugggu

SEQ ID NO: 2368568 - RNA, 19 nt, Artificial Sequence
  Description of Artificial Sequence: Synthetic oligonucleotide
augggcauggggcggcagu

SEQ ID NO: 2368569 - RNA, 19 nt, Artificial Sequence
  Description of Artificial Sequence: Synthetic oligonucleotide
ccccggaucacccuggaac

SEQ ID NO: 2368570 - RNA, 19 nt, Artificial Sequence
  Description of Artificial Sequence: Synthetic oligonucleotide
ggccaugccggucucgcag

SEQ ID NO: 2368571 - RNA, 19 nt, Artificial Sequence
  Description of Artificial Sequence: Synthetic oligonucleotide
aggcuggucccuucagacu

SEQ ID NO: 2368572 - RNA, 19 nt, Artificial Sequence
  Description of Artificial Sequence: Synthetic oligonucleotide
cagaugguacggccaugcc

SEQ ID NO: 2368573 - RNA, 19 nt, Artificial Sequence
  Description of Artificial Sequence: Synthetic oligonucleotide
cugcccgcagauaguugcc

SEQ ID NO: 2368574 - RNA, 19 nt, Artificial Sequence
  Description of Artificial Sequence: Synthetic oligonucleotide
auagucuuaggaggguguu

SEQ ID NO: 2368575 - RNA, 19 nt, Artificial Sequence
  Description of Artificial Sequence: Synthetic oligonucleotide
ugggcauggggcggcagug

SEQ ID NO: 2368576 - RNA, 19 nt, Artificial Sequence
  Description of Artificial Sequence: Synthetic oligonucleotide
cccggaucacccuggaacc

SEQ ID NO: 2368577 - RNA, 19 nt, Artificial Sequence
  Description of Artificial Sequence: Synthetic oligonucleotide
cucugguccauagccuuug

SEQ ID NO: 2368578 - RNA, 19 nt, Artificial Sequence
  Description of Artificial Sequence: Synthetic oligonucleotide
ggaaggauccagacauacc

SEQ ID NO: 2368579 - RNA, 19 nt, Artificial Sequence
  Description of Artificial Sequence: Synthetic oligonucleotide
gccauugaagaaucucuga

SEQ ID NO: 2368580 - RNA, 19 nt, Artificial Sequence
  Description of Artificial Sequence: Synthetic oligonucleotide
gccaaagcggcggaugucc

SEQ ID NO: 2368581 - RNA, 19 nt, Artificial Sequence
  Description of Artificial Sequence: Synthetic oligonucleotide
cauggggcggcagugcauc

SEQ ID NO: 2368582 - RNA, 19 nt, Artificial Sequence
  Description of Artificial Sequence: Synthetic oligonucleotide
agggccccggaucacccug

SEQ ID NO: 2368583 - RNA, 19 nt, Artificial Sequence
  Description of Artificial Sequence: Synthetic oligonucleotide
gugccaagggccccggauc

SEQ ID NO: 2368584 - RNA, 19 nt, Artificial Sequence
  Description of Artificial Sequence: Synthetic oligonucleotide
aggguccgcggccuggcug

SEQ ID NO: 2368585 - RNA, 19 nt, Artificial Sequence
  Description of Artificial Sequence: Synthetic oligonucleotide
ggccgguacuguugcaggg

SEQ ID NO: 2368586 - RNA, 19 nt, Artificial Sequence
  Description of Artificial Sequence: Synthetic oligonucleotide
uagaacuguacgggccuuc

SEQ ID NO: 2368587 - RNA, 19 nt, Artificial Sequence
  Description of Artificial Sequence: Synthetic oligonucleotide
guggccaaagcggcggaug

SEQ ID NO: 2368588 - RNA, 19 nt, Artificial Sequence
  Description of Artificial Sequence: Synthetic oligonucleotide
cugaaccguucauacucca

SEQ ID NO: 2368589 - RNA, 19 nt, Artificial Sequence
  Description of Artificial Sequence: Synthetic oligonucleotide
agccgguacaagaucucug

SEQ ID NO: 2368590 - RNA, 19 nt, Artificial Sequence
  Description of Artificial Sequence: Synthetic oligonucleotide
gccuugaucuucuggcuca

SEQ ID NO: 2368591 - RNA, 19 nt, Artificial Sequence
  Description of Artificial Sequence: Synthetic oligonucleotide
ccagaugguacggccaugc

SEQ ID NO: 2368592 - RNA, 19 nt, Artificial Sequence
  Description of Artificial Sequence: Synthetic oligonucleotide
cagacauaccaaagcggaa

SEQ ID NO: 2368593 - RNA, 19 nt, Artificial Sequence
  Description of Artificial Sequence: Synthetic oligonucleotide
auagcaccgcagccaggcu

SEQ ID NO: 2368594 - RNA, 19 nt, Artificial Sequence
  Description of Artificial Sequence: Synthetic oligonucleotide
ugcccgcagauaguugcca

SEQ ID NO: 2368595 - RNA, 19 nt, Artificial Sequence
  Description of Artificial Sequence: Synthetic oligonucleotide
cuucagacuguugagcuau

SEQ ID NO: 2368596 - RNA, 19 nt, Artificial Sequence
  Description of Artificial Sequence: Synthetic oligonucleotide
gaaguacauugucccugaa

SEQ ID NO: 2368597 - RNA, 19 nt, Artificial Sequence
  Description of Artificial Sequence: Synthetic oligonucleotide
ggugccagcuggaaggauc

SEQ ID NO: 2368598 - RNA, 19 nt, Artificial Sequence
  Description of Artificial Sequence: Synthetic oligonucleotide
agcagguggggccguguaa

SEQ ID NO: 2368599 - RNA, 19 nt, Artificial Sequence
  Description of Artificial Sequence: Synthetic oligonucleotide
ccgaaguacauugucccug

SEQ ID NO: 2368600 - RNA, 19 nt, Artificial Sequence
  Description of Artificial Sequence: Synthetic oligonucleotide
gcggcggauguccacgaag

SEQ ID NO: 2368601 - RNA, 19 nt, Artificial Sequence
  Description of Artificial Sequence: Synthetic oligonucleotide
gguacuguugcagggccuc

SEQ ID NO: 2368602 - RNA, 19 nt, Artificial Sequence
  Description of Artificial Sequence: Synthetic oligonucleotide
aggguguuuccuggaccuc

SEQ ID NO: 2368603 - RNA, 19 nt, Artificial Sequence
  Description of Artificial Sequence: Synthetic oligonucleotide
ggacuugcuugaaagugga

SEQ ID NO: 2368604 - RNA, 19 nt, Artificial Sequence
  Description of Artificial Sequence: Synthetic oligonucleotide
guuggaggcuggucccuuc

SEQ ID NO: 2368605 - RNA, 19 nt, Artificial Sequence
  Description of Artificial Sequence: Synthetic oligonucleotide
ccaguggccaaagcggcgg

SEQ ID NO: 2368606 - RNA, 19 nt, Artificial Sequence
  Description of Artificial Sequence: Synthetic oligonucleotide
uacggccaugccggucucg

SEQ ID NO: 2368607 - RNA, 19 nt, Artificial Sequence
  Description of Artificial Sequence: Synthetic oligonucleotide
uguguccccuguggcuucc

SEQ ID NO: 2368608 - RNA, 19 nt, Artificial Sequence
  Description of Artificial Sequence: Synthetic oligonucleotide
gaccuccgaguccuggaaa

SEQ ID NO: 2368609 - RNA, 19 nt, Artificial Sequence
  Description of Artificial Sequence: Synthetic oligonucleotide
cccuuugggugccaagggc

SEQ ID NO: 2368610 - RNA, 19 nt, Artificial Sequence
  Description of Artificial Sequence: Synthetic oligonucleotide
ugccggucucgcagggaac

SEQ ID NO: 2368611 - RNA, 19 nt, Artificial Sequence
  Description of Artificial Sequence: Synthetic oligonucleotide
acauugucccugaaccguu

SEQ ID NO: 2368612 - RNA, 19 nt, Artificial Sequence
  Description of Artificial Sequence: Synthetic oligonucleotide
cugggcucggccgguacug

SEQ ID NO: 2368613 - RNA, 19 nt, Artificial Sequence
  Description of Artificial Sequence: Synthetic oligonucleotide
gggcaagccggggagcagg

SEQ ID NO: 2368614 - RNA, 19 nt, Artificial Sequence
  Description of Artificial Sequence: Synthetic oligonucleotide
uacuguugcagggccucua

SEQ ID NO: 2368615 - RNA, 19 nt, Artificial Sequence
  Description of Artificial Sequence: Synthetic oligonucleotide
ccgguacaagaucucugcc

SEQ ID NO: 2368616 - RNA, 19 nt, Artificial Sequence
  Description of Artificial Sequence: Synthetic oligonucleotide
uggggcggcagugcaucug

SEQ ID NO: 2368617 - RNA, 19 nt, Artificial Sequence
  Description of Artificial Sequence: Synthetic oligonucleotide
cgcagauaguugccaaugc

SEQ ID NO: 2368618 - RNA, 19 nt, Artificial Sequence
  Description of Artificial Sequence: Synthetic oligonucleotide
ggcaccaagugacacaguu

SEQ ID NO: 2368619 - RNA, 19 nt, Artificial Sequence
  Description of Artificial Sequence: Synthetic oligonucleotide
ccgaguccuggaaauggac

SEQ ID NO: 2368620 - RNA, 19 nt, Artificial Sequence
  Description of Artificial Sequence: Synthetic oligonucleotide
cuguugagcuauagucuua

SEQ ID NO: 2368621 - RNA, 19 nt, Artificial Sequence
  Description of Artificial Sequence: Synthetic oligonucleotide
accaagugacacaguucca

SEQ ID NO: 2368622 - RNA, 19 nt, Artificial Sequence
  Description of Artificial Sequence: Synthetic oligonucleotide
cuucgcagaugggucgguc

SEQ ID NO: 2368623 - RNA, 19 nt, Artificial Sequence
  Description of Artificial Sequence: Synthetic oligonucleotide
gcucggccgguacuguugc

SEQ ID NO: 2368624 - RNA, 19 nt, Artificial Sequence
  Description of Artificial Sequence: Synthetic oligonucleotide
ugggucggucaaaggcuuu

SEQ ID NO: 2368625 - RNA, 19 nt, Artificial Sequence
  Description of Artificial Sequence: Synthetic oligonucleotide
uguuggaggcuggucccuu

SEQ ID NO: 2368626 - RNA, 19 nt, Artificial Sequence
  Description of Artificial Sequence: Synthetic oligonucleotide
uggcaccaagugacacagu

SEQ ID NO: 2368627 - RNA, 19 nt, Artificial Sequence
  Description of Artificial Sequence: Synthetic oligonucleotide
cccaguggccaaagcggcg

SEQ ID NO: 2368628 - RNA, 19 nt, Artificial Sequence
  Description of Artificial Sequence: Synthetic oligonucleotide
cguucauacuccagcaaga

SEQ ID NO: 2368629 - RNA, 19 nt, Artificial Sequence
  Description of Artificial Sequence: Synthetic oligonucleotide
cuguguccccuguggcuuc

SEQ ID NO: 2368630 - RNA, 19 nt, Artificial Sequence
  Description of Artificial Sequence: Synthetic oligonucleotide
ccacgaagcaaagggcaag

SEQ ID NO: 2368631 - RNA, 19 nt, Artificial Sequence
  Description of Artificial Sequence: Synthetic oligonucleotide
ggguaucuucagccgguac

SEQ ID NO: 2368632 - RNA, 19 nt, Artificial Sequence
  Description of Artificial Sequence: Synthetic oligonucleotide
augggucggucaaaggcuu

SEQ ID NO: 2368633 - RNA, 19 nt, Artificial Sequence
  Description of Artificial Sequence: Synthetic oligonucleotide
augguacggccaugccggu

SEQ ID NO: 2368634 - RNA, 19 nt, Artificial Sequence
  Description of Artificial Sequence: Synthetic oligonucleotide
ccuggcugccauucacccc

SEQ ID NO: 2368635 - RNA, 19 nt, Artificial Sequence
  Description of Artificial Sequence: Synthetic oligonucleotide
acgcucugguccauagccu

SEQ ID NO: 2368636 - RNA, 19 nt, Artificial Sequence
  Description of Artificial Sequence: Synthetic oligonucleotide
gggucggucaaaggcuuug

SEQ ID NO: 2368637 - RNA, 19 nt, Artificial Sequence
  Description of Artificial Sequence: Synthetic oligonucleotide
ccgcagauaguugccaaug

SEQ ID NO: 2368638 - RNA, 19 nt, Artificial Sequence
  Description of Artificial Sequence: Synthetic oligonucleotide
auggggcggcagugcaucu

SEQ ID NO: 2368639 - RNA, 19 nt, Artificial Sequence
  Description of Artificial Sequence: Synthetic oligonucleotide
cucugggcucggccgguac

SEQ ID NO: 2368640 - RNA, 19 nt, Artificial Sequence
  Description of Artificial Sequence: Synthetic oligonucleotide
ccucuuccgggaucugccc

SEQ ID NO: 2368641 - RNA, 19 nt, Artificial Sequence
  Description of Artificial Sequence: Synthetic oligonucleotide
gccgguacuguugcagggc

SEQ ID NO: 2368642 - RNA, 19 nt, Artificial Sequence
  Description of Artificial Sequence: Synthetic oligonucleotide
gggaacucaugccuggcau

SEQ ID NO: 2368643 - RNA, 19 nt, Artificial Sequence
  Description of Artificial Sequence: Synthetic oligonucleotide
gagcagguggggccgugua

SEQ ID NO: 2368644 - RNA, 19 nt, Artificial Sequence
  Description of Artificial Sequence: Synthetic oligonucleotide
ggaaauggacuugcuugaa

SEQ ID NO: 2368645 - RNA, 19 nt, Artificial Sequence
  Description of Artificial Sequence: Synthetic oligonucleotide
cuguacgggccuucucaaa

SEQ ID NO: 2368646 - RNA, 19 nt, Artificial Sequence
  Description of Artificial Sequence: Synthetic oligonucleotide
ugguacggccaugccgguc

SEQ ID NO: 2368647 - RNA, 19 nt, Artificial Sequence
  Description of Artificial Sequence: Synthetic oligonucleotide
ggcucggccgguacuguug

SEQ ID NO: 2368648 - RNA, 19 nt, Artificial Sequence
  Description of Artificial Sequence: Synthetic oligonucleotide
cgaaguacauugucccuga

SEQ ID NO: 2368649 - RNA, 19 nt, Artificial Sequence
  Description of Artificial Sequence: Synthetic oligonucleotide
aguggccaaagcggcggau

SEQ ID NO: 2368650 - RNA, 19 nt, Artificial Sequence
  Description of Artificial Sequence: Synthetic oligonucleotide
ggcggauguccacgaagca

SEQ ID NO: 2368651 - RNA, 19 nt, Artificial Sequence
  Description of Artificial Sequence: Synthetic oligonucleotide
ggaguuuccugguuuuguu

SEQ ID NO: 2368652 - RNA, 19 nt, Artificial Sequence
  Description of Artificial Sequence: Synthetic oligonucleotide
acccuggaaccagauggua

SEQ ID NO: 2368653 - RNA, 19 nt, Artificial Sequence
  Description of Artificial Sequence: Synthetic oligonucleotide
gcggauguccacgaagcaa

SEQ ID NO: 2368654 - RNA, 19 nt, Artificial Sequence
  Description of Artificial Sequence: Synthetic oligonucleotide
ggaccuccgaguccuggaa

SEQ ID NO: 2368655 - RNA, 19 nt, Artificial Sequence
  Description of Artificial Sequence: Synthetic oligonucleotide
agcggcggauguccacgaa

SEQ ID NO: 2368656 - RNA, 19 nt, Artificial Sequence
  Description of Artificial Sequence: Synthetic oligonucleotide
ggcaugccauagcaccgca

SEQ ID NO: 2368657 - RNA, 19 nt, Artificial Sequence
  Description of Artificial Sequence: Synthetic oligonucleotide
ccauagcaccgcagccagg

SEQ ID NO: 2368658 - RNA, 19 nt, Artificial Sequence
  Description of Artificial Sequence: Synthetic oligonucleotide
ccaugccggucucgcaggg

SEQ ID NO: 2368659 - RNA, 19 nt, Artificial Sequence
  Description of Artificial Sequence: Synthetic oligonucleotide
cucaugccuggcaugccau

SEQ ID NO: 2368660 - RNA, 19 nt, Artificial Sequence
  Description of Artificial Sequence: Synthetic oligonucleotide
gcagguggggccguguaaa

SEQ ID NO: 2368661 - RNA, 19 nt, Artificial Sequence
  Description of Artificial Sequence: Synthetic oligonucleotide
aggcuuugucugauagguu

SEQ ID NO: 2368662 - RNA, 19 nt, Artificial Sequence
  Description of Artificial Sequence: Synthetic oligonucleotide
gaucacccuggaaccagau

SEQ ID NO: 2368663 - RNA, 19 nt, Artificial Sequence
  Description of Artificial Sequence: Synthetic oligonucleotide
cagguggggccguguaaaa

SEQ ID NO: 2368664 - RNA, 19 nt, Artificial Sequence
  Description of Artificial Sequence: Synthetic oligonucleotide
ggugccaagggccccggau

SEQ ID NO: 2368665 - RNA, 19 nt, Artificial Sequence
  Description of Artificial Sequence: Synthetic oligonucleotide
cggaucacccuggaaccag

SEQ ID NO: 2368666 - RNA, 19 nt, Artificial Sequence
  Description of Artificial Sequence: Synthetic oligonucleotide
ccuccgaguccuggaaaug

SEQ ID NO: 2368667 - RNA, 19 nt, Artificial Sequence
  Description of Artificial Sequence: Synthetic oligonucleotide
cuccagcaagacacagggu

SEQ ID NO: 2368668 - RNA, 19 nt, Artificial Sequence
  Description of Artificial Sequence: Synthetic oligonucleotide
caugccggucucgcaggga

SEQ ID NO: 2368669 - RNA, 19 nt, Artificial Sequence
  Description of Artificial Sequence: Synthetic oligonucleotide
aggugccagcuggaaggau

SEQ ID NO: 2368670 - RNA, 19 nt, Artificial Sequence
  Description of Artificial Sequence: Synthetic oligonucleotide
cagccgguacaagaucucu

SEQ ID NO: 2368671 - RNA, 19 nt, Artificial Sequence
  Description of Artificial Sequence: Synthetic oligonucleotide
gggccccggaucacccugg

SEQ ID NO: 2368672 - RNA, 19 nt, Artificial Sequence
  Description of Artificial Sequence: Synthetic oligonucleotide
ccgcagccaggcucggaag

SEQ ID NO: 2368673 - RNA, 19 nt, Artificial Sequence
  Description of Artificial Sequence: Synthetic oligonucleotide
ggguccccaguggccaaag

SEQ ID NO: 2368674 - RNA, 19 nt, Artificial Sequence
  Description of Artificial Sequence: Synthetic oligonucleotide
gcccgcagauaguugccaa

SEQ ID NO: 2368675 - RNA, 19 nt, Artificial Sequence
  Description of Artificial Sequence: Synthetic oligonucleotide
cucuagcuguguccccugu

SEQ ID NO: 2368676 - RNA, 19 nt, Artificial Sequence
  Description of Artificial Sequence: Synthetic oligonucleotide
cucggccgguacuguugca

SEQ ID NO: 2368677 - RNA, 19 nt, Artificial Sequence
  Description of Artificial Sequence: Synthetic oligonucleotide
gccuggcaugccauagcac

SEQ ID NO: 2368678 - RNA, 19 nt, Artificial Sequence
  Description of Artificial Sequence: Synthetic oligonucleotide
ggccaaagcggcggauguc

SEQ ID NO: 2368679 - RNA, 19 nt, Artificial Sequence
  Description of Artificial Sequence: Synthetic oligonucleotide
cugcaggugccagcuggaa

SEQ ID NO: 2368680 - RNA, 19 nt, Artificial Sequence
  Description of Artificial Sequence: Synthetic oligonucleotide
gggucagcucugggcucgg

SEQ ID NO: 2368681 - RNA, 19 nt, Artificial Sequence
  Description of Artificial Sequence: Synthetic oligonucleotide
gcuguguccccuguggcuu

SEQ ID NO: 2368682 - RNA, 19 nt, Artificial Sequence
  Description of Artificial Sequence: Synthetic oligonucleotide
gccucuagcuguguccccu

SEQ ID NO: 2368683 - RNA, 19 nt, Artificial Sequence
  Description of Artificial Sequence: Synthetic oligonucleotide
ggucggucaaaggcuuugu

SEQ ID NO: 2368684 - RNA, 19 nt, Artificial Sequence
  Description of Artificial Sequence: Synthetic oligonucleotide
cuagaacuguacgggccuu

SEQ ID NO: 2368685 - RNA, 19 nt, Artificial Sequence
  Description of Artificial Sequence: Synthetic oligonucleotide
caggcucggaaggcagcaa

SEQ ID NO: 2368686 - RNA, 19 nt, Artificial Sequence
  Description of Artificial Sequence: Synthetic oligonucleotide
gccggucucgcagggaacu

SEQ ID NO: 2368687 - RNA, 19 nt, Artificial Sequence
  Description of Artificial Sequence: Synthetic oligonucleotide
gggguaucuucagccggua

SEQ ID NO: 2368688 - RNA, 19 nt, Artificial Sequence
  Description of Artificial Sequence: Synthetic oligonucleotide
gccaagggccccggaucac

SEQ ID NO: 2368689 - RNA, 19 nt, Artificial Sequence
  Description of Artificial Sequence: Synthetic oligonucleotide
ggccccggaucacccugga

SEQ ID NO: 2368690 - RNA, 19 nt, Artificial Sequence
  Description of Artificial Sequence: Synthetic oligonucleotide
ccggaucacccuggaacca

SEQ ID NO: 2368691 - RNA, 19 nt, Artificial Sequence
  Description of Artificial Sequence: Synthetic oligonucleotide
gcaccgcagccaggcucgg

SEQ ID NO: 2368692 - RNA, 19 nt, Artificial Sequence
  Description of Artificial Sequence: Synthetic oligonucleotide
gcggaagacaagggacagu

SEQ ID NO: 2368693 - RNA, 19 nt, Artificial Sequence
  Description of Artificial Sequence: Synthetic oligonucleotide
cccgcagauaguugccaau

SEQ ID NO: 2368694 - RNA, 19 nt, Artificial Sequence
  Description of Artificial Sequence: Synthetic oligonucleotide
cuccacgcucugguccaua

SEQ ID NO: 2368695 - RNA, 19 nt, Artificial Sequence
  Description of Artificial Sequence: Synthetic oligonucleotide
ccggucucgcagggaacuc

SEQ ID NO: 2368696 - RNA, 19 nt, Artificial Sequence
  Description of Artificial Sequence: Synthetic oligonucleotide
cgcggccuggcugccauuc

SEQ ID NO: 2368697 - RNA, 19 nt, Artificial Sequence
  Description of Artificial Sequence: Synthetic oligonucleotide
gguccgcggccuggcugcc

SEQ ID NO: 2368698 - RNA, 19 nt, Artificial Sequence
  Description of Artificial Sequence: Synthetic oligonucleotide
ggcaagccggggagcaggu

SEQ ID NO: 2368699 - RNA, 19 nt, Artificial Sequence
  Description of Artificial Sequence: Synthetic oligonucleotide
gggugccaagggccccgga

SEQ ID NO: 2368700 - RNA, 19 nt, Artificial Sequence
  Description of Artificial Sequence: Synthetic oligonucleotide
gccccggaucacccuggaa

SEQ ID NO: 2368701 - RNA, 19 nt, Artificial Sequence
  Description of Artificial Sequence: Synthetic oligonucleotide
guccgcggccuggcugcca

SEQ ID NO: 2368702 - RNA, 19 nt, Artificial Sequence
  Description of Artificial Sequence: Synthetic oligonucleotide
ccagcucaaccacuuccuu

SEQ ID NO: 2368703 - RNA, 19 nt, Artificial Sequence
  Description of Artificial Sequence: Synthetic oligonucleotide
cuggucccuucagacuguu

SEQ ID NO: 2368704 - RNA, 19 nt, Artificial Sequence
  Description of Artificial Sequence: Synthetic oligonucleotide
gcuucgcagaugggucggu

SEQ ID NO: 2368705 - RNA, 19 nt, Artificial Sequence
  Description of Artificial Sequence: Synthetic oligonucleotide
gggcucggccgguacuguu

SEQ ID NO: 2368706 - RNA, 19 nt, Artificial Sequence
  Description of Artificial Sequence: Synthetic oligonucleotide
ccacuuccuuuggcaccaa

SEQ ID NO: 2368707 - RNA, 19 nt, Artificial Sequence
  Description of Artificial Sequence: Synthetic oligonucleotide
ucugugaucauccacuuca

SEQ ID NO: 2368708 - RNA, 19 nt, Artificial Sequence
  Description of Artificial Sequence: Synthetic oligonucleotide
ugggaauccagccaggucc

SEQ ID NO: 2368709 - RNA, 19 nt, Artificial Sequence
  Description of Artificial Sequence: Synthetic oligonucleotide
uuaugaaacgccuccagca

SEQ ID NO: 2368710 - RNA, 19 nt, Artificial Sequence
  Description of Artificial Sequence: Synthetic oligonucleotide
uguuuccucuugaugacgg

SEQ ID NO: 2368711 - RNA, 19 nt, Artificial Sequence
  Description of Artificial Sequence: Synthetic oligonucleotide
ucgucugacaguuucuccg

SEQ ID NO: 2368712 - RNA, 19 nt, Artificial Sequence
  Description of Artificial Sequence: Synthetic oligonucleotide
acuacugagccaucucugc

SEQ ID NO: 2368713 - RNA, 19 nt, Artificial Sequence
  Description of Artificial Sequence: Synthetic oligonucleotide
uugaggauaggcaccaagc

SEQ ID NO: 2368714 - RNA, 19 nt, Artificial Sequence
  Description of Artificial Sequence: Synthetic oligonucleotide
auauuuguccucuucggug

SEQ ID NO: 2368715 - RNA, 19 nt, Artificial Sequence
  Description of Artificial Sequence: Synthetic oligonucleotide
ucggcaaacacggagcucg

SEQ ID NO: 2368716 - RNA, 19 nt, Artificial Sequence
  Description of Artificial Sequence: Synthetic oligonucleotide
uaugaaacgccuccagcag

SEQ ID NO: 2368717 - RNA, 19 nt, Artificial Sequence
  Description of Artificial Sequence: Synthetic oligonucleotide
uuugaggauaggcaccaag

SEQ ID NO: 2368718 - RNA, 19 nt, Artificial Sequence
  Description of Artificial Sequence: Synthetic oligonucleotide
uguuaugaaacgccuccag

SEQ ID NO: 2368719 - RNA, 19 nt, Artificial Sequence
  Description of Artificial Sequence: Synthetic oligonucleotide
ugaggauaggcaccaagcc

SEQ ID NO: 2368720 - RNA, 19 nt, Artificial Sequence
  Description of Artificial Sequence: Synthetic oligonucleotide
cuggccaguauuuuguugc

SEQ ID NO: 2368721 - RNA, 19 nt, Artificial Sequence
  Description of Artificial Sequence: Synthetic oligonucleotide
auaggcaccaagccgauga

SEQ ID NO: 2368722 - RNA, 19 nt, Artificial Sequence
  Description of Artificial Sequence: Synthetic oligonucleotide
agcucgguacuucucaaac

SEQ ID NO: 2368723 - RNA, 19 nt, Artificial Sequence
  Description of Artificial Sequence: Synthetic oligonucleotide
caucauguugguaaacuug

SEQ ID NO: 2368724 - RNA, 19 nt, Artificial Sequence
  Description of Artificial Sequence: Synthetic oligonucleotide
cucuucacggcuuccaggg

SEQ ID NO: 2368725 - RNA, 19 nt, Artificial Sequence
  Description of Artificial Sequence: Synthetic oligonucleotide
augaaacgccuccagcagc

SEQ ID NO: 2368726 - RNA, 19 nt, Artificial Sequence
  Description of Artificial Sequence: Synthetic oligonucleotide
aguuucuccggcaucagcg

SEQ ID NO: 2368727 - RNA, 19 nt, Artificial Sequence
  Description of Artificial Sequence: Synthetic oligonucleotide
aagagcugcguuuuccuga

SEQ ID NO: 2368728 - RNA, 19 nt, Artificial Sequence
  Description of Artificial Sequence: Synthetic oligonucleotide
cuugcugauggcagggucg

SEQ ID NO: 2368729 - RNA, 19 nt, Artificial Sequence
  Description of Artificial Sequence: Synthetic oligonucleotide
aaacgccuccagcagcucg

SEQ ID NO: 2368730 - RNA, 19 nt, Artificial Sequence
  Description of Artificial Sequence: Synthetic oligonucleotide
accugguagaaauggcccc

SEQ ID NO: 2368731 - RNA, 19 nt, Artificial Sequence
  Description of Artificial Sequence: Synthetic oligonucleotide
aaacugcuuccucuucacg

SEQ ID NO: 2368732 - RNA, 19 nt, Artificial Sequence
  Description of Artificial Sequence: Synthetic oligonucleotide
ucucuguucugcuaccacc

SEQ ID NO: 2368733 - RNA, 19 nt, Artificial Sequence
  Description of Artificial Sequence: Synthetic oligonucleotide
aggcuuauugucccggcac

SEQ ID NO: 2368734 - RNA, 19 nt, Artificial Sequence
  Description of Artificial Sequence: Synthetic oligonucleotide
guuaugaaacgccuccagc

SEQ ID NO: 2368735 - RNA, 19 nt, Artificial Sequence
  Description of Artificial Sequence: Synthetic oligonucleotide
uuuguugccuccuuucauc

SEQ ID NO: 2368736 - RNA, 19 nt, Artificial Sequence
  Description of Artificial Sequence: Synthetic oligonucleotide
guaaacuugcugauggcag

SEQ ID NO: 2368737 - RNA, 19 nt, Artificial Sequence
  Description of Artificial Sequence: Synthetic oligonucleotide
ucugcuaccaccagcggua

SEQ ID NO: 2368738 - RNA, 19 nt, Artificial Sequence
  Description of Artificial Sequence: Synthetic oligonucleotide
ugaaacgccuccagcagcu

SEQ ID NO: 2368739 - RNA, 19 nt, Artificial Sequence
  Description of Artificial Sequence: Synthetic oligonucleotide
guuguguuuccucuugaug

SEQ ID NO: 2368740 - RNA, 19 nt, Artificial Sequence
  Description of Artificial Sequence: Synthetic oligonucleotide
auuuuguugccuccuuuca

SEQ ID NO: 2368741 - RNA, 19 nt, Artificial Sequence
  Description of Artificial Sequence: Synthetic oligonucleotide
uuauugucccggcacucug

SEQ ID NO: 2368742 - RNA, 19 nt, Artificial Sequence
  Description of Artificial Sequence: Synthetic oligonucleotide
acuugcugauggcaggguc

SEQ ID NO: 2368743 - RNA, 19 nt, Artificial Sequence
  Description of Artificial Sequence: Synthetic oligonucleotide
ugcagaggcagcucgguac

SEQ ID NO: 2368744 - RNA, 19 nt, Artificial Sequence
  Description of Artificial Sequence: Synthetic oligonucleotide
ugagcuccuggucauauuu

SEQ ID NO: 2368745 - RNA, 19 nt, Artificial Sequence
  Description of Artificial Sequence: Synthetic oligonucleotide
cagaccgcgagccucacgc

SEQ ID NO: 2368746 - RNA, 19 nt, Artificial Sequence
  Description of Artificial Sequence: Synthetic oligonucleotide
gaaggcugcagaccgcgag

SEQ ID NO: 2368747 - RNA, 19 nt, Artificial Sequence
  Description of Artificial Sequence: Synthetic oligonucleotide
gguggaagauccuguaggg

SEQ ID NO: 2368748 - RNA, 19 nt, Artificial Sequence
  Description of Artificial Sequence: Synthetic oligonucleotide
agggucggcaaacacggag

SEQ ID NO: 2368749 - RNA, 19 nt, Artificial Sequence
  Description of Artificial Sequence: Synthetic oligonucleotide
accccuguuaugaaacgcc

SEQ ID NO: 2368750 - RNA, 19 nt, Artificial Sequence
  Description of Artificial Sequence: Synthetic oligonucleotide
aucaucauguugguaaacu

SEQ ID NO: 2368751 - RNA, 19 nt, Artificial Sequence
  Description of Artificial Sequence: Synthetic oligonucleotide
aagccgaugacaggcucac

SEQ ID NO: 2368752 - RNA, 19 nt, Artificial Sequence
  Description of Artificial Sequence: Synthetic oligonucleotide
agggaccugguagaaaugg

SEQ ID NO: 2368753 - RNA, 19 nt, Artificial Sequence
  Description of Artificial Sequence: Synthetic oligonucleotide
uggccuguugcucugcaga

SEQ ID NO: 2368754 - RNA, 19 nt, Artificial Sequence
  Description of Artificial Sequence: Synthetic oligonucleotide
uuccucuugaugacggcac

SEQ ID NO: 2368755 - RNA, 19 nt, Artificial Sequence
  Description of Artificial Sequence: Synthetic oligonucleotide
cucucugguuucuuguggc

SEQ ID NO: 2368756 - RNA, 19 nt, Artificial Sequence
  Description of Artificial Sequence: Synthetic oligonucleotide
uucuccggcaucagcgucc

SEQ ID NO: 2368757 - RNA, 19 nt, Artificial Sequence
  Description of Artificial Sequence: Synthetic oligonucleotide
ucaccugcguuaucccugg

SEQ ID NO: 2368758 - RNA, 19 nt, Artificial Sequence
  Description of Artificial Sequence: Synthetic oligonucleotide
uuuuccugagcuccugguc

SEQ ID NO: 2368759 - RNA, 19 nt, Artificial Sequence
  Description of Artificial Sequence: Synthetic oligonucleotide
cugcguuaucccuggaagg

SEQ ID NO: 2368760 - RNA, 19 nt, Artificial Sequence
  Description of Artificial Sequence: Synthetic oligonucleotide
cuugucaaccaggggaucc

SEQ ID NO: 2368761 - RNA, 19 nt, Artificial Sequence
  Description of Artificial Sequence: Synthetic oligonucleotide
ucgguacuucucaaacugc

SEQ ID NO: 2368762 - RNA, 19 nt, Artificial Sequence
  Description of Artificial Sequence: Synthetic oligonucleotide
agagcugcguuuuccugag

SEQ ID NO: 2368763 - RNA, 19 nt, Artificial Sequence
  Description of Artificial Sequence: Synthetic oligonucleotide
gaccugguagaaauggccc

SEQ ID NO: 2368764 - RNA, 19 nt, Artificial Sequence
  Description of Artificial Sequence: Synthetic oligonucleotide
ugucccggcacucugugau

SEQ ID NO: 2368765 - RNA, 19 nt, Artificial Sequence
  Description of Artificial Sequence: Synthetic oligonucleotide
aagauccuguagggguucc

SEQ ID NO: 2368766 - RNA, 19 nt, Artificial Sequence
  Description of Artificial Sequence: Synthetic oligonucleotide
aggauaggcaccaagccga

SEQ ID NO: 2368767 - RNA, 19 nt, Artificial Sequence
  Description of Artificial Sequence: Synthetic oligonucleotide
caggggaucccugaauucg

SEQ ID NO: 2368768 - RNA, 19 nt, Artificial Sequence
  Description of Artificial Sequence: Synthetic oligonucleotide
ccuguuaugaaacgccucc

SEQ ID NO: 2368769 - RNA, 19 nt, Artificial Sequence
  Description of Artificial Sequence: Synthetic oligonucleotide
cuugaugacggcaccccug

SEQ ID NO: 2368770 - RNA, 19 nt, Artificial Sequence
  Description of Artificial Sequence: Synthetic oligonucleotide
gugacguggacuuucucca

SEQ ID NO: 2368771 - RNA, 19 nt, Artificial Sequence
  Description of Artificial Sequence: Synthetic oligonucleotide
accucaccugcguuauccc

SEQ ID NO: 2368772 - RNA, 19 nt, Artificial Sequence
  Description of Artificial Sequence: Synthetic oligonucleotide
aggcuugcggugaugcucc

SEQ ID NO: 2368773 - RNA, 19 nt, Artificial Sequence
  Description of Artificial Sequence: Synthetic oligonucleotide
ucuugaugacggcaccccu

SEQ ID NO: 2368774 - RNA, 19 nt, Artificial Sequence
  Description of Artificial Sequence: Synthetic oligonucleotide
cugcguuuuccugagcucc

SEQ ID NO: 2368775 - RNA, 19 nt, Artificial Sequence
  Description of Artificial Sequence: Synthetic oligonucleotide
ccuggaaggcugcagaccg

SEQ ID NO: 2368776 - RNA, 19 nt, Artificial Sequence
  Description of Artificial Sequence: Synthetic oligonucleotide
agcuccuggucauauuugu

SEQ ID NO: 2368777 - RNA, 19 nt, Artificial Sequence
  Description of Artificial Sequence: Synthetic oligonucleotide
uauugucccggcacucugu

SEQ ID NO: 2368778 - RNA, 19 nt, Artificial Sequence
  Description of Artificial Sequence: Synthetic oligonucleotide
agcucgucugggucgcggc

SEQ ID NO: 2368779 - RNA, 19 nt, Artificial Sequence
  Description of Artificial Sequence: Synthetic oligonucleotide
uccgccgaggcuuauuguc

SEQ ID NO: 2368780 - RNA, 19 nt, Artificial Sequence
  Description of Artificial Sequence: Synthetic oligonucleotide
uccucuugaugacggcacc

SEQ ID NO: 2368781 - RNA, 19 nt, Artificial Sequence
  Description of Artificial Sequence: Synthetic oligonucleotide
ugaguuccgccacaggcuu

SEQ ID NO: 2368782 - RNA, 19 nt, Artificial Sequence
  Description of Artificial Sequence: Synthetic oligonucleotide
uccuguagggguuccguuc

SEQ ID NO: 2368783 - RNA, 19 nt, Artificial Sequence
  Description of Artificial Sequence: Synthetic oligonucleotide
auugucccggcacucugug

SEQ ID NO: 2368784 - RNA, 19 nt, Artificial Sequence
  Description of Artificial Sequence: Synthetic oligonucleotide
cucgucugacaguuucucc

SEQ ID NO: 2368785 - RNA, 19 nt, Artificial Sequence
  Description of Artificial Sequence: Synthetic oligonucleotide
gccgaugacaggcucacag

SEQ ID NO: 2368786 - RNA, 19 nt, Artificial Sequence
  Description of Artificial Sequence: Synthetic oligonucleotide
ucucugguuucuuguggca

SEQ ID NO: 2368787 - RNA, 19 nt, Artificial Sequence
  Description of Artificial Sequence: Synthetic oligonucleotide
guuccguucaaugguggcc

SEQ ID NO: 2368788 - RNA, 19 nt, Artificial Sequence
  Description of Artificial Sequence: Synthetic oligonucleotide
uuccgccacaggcuugcgg

SEQ ID NO: 2368789 - RNA, 19 nt, Artificial Sequence
  Description of Artificial Sequence: Synthetic oligonucleotide
augacggcaccccuguuau

SEQ ID NO: 2368790 - RNA, 19 nt, Artificial Sequence
  Description of Artificial Sequence: Synthetic oligonucleotide
caccucaccugcguuaucc

SEQ ID NO: 2368791 - RNA, 19 nt, Artificial Sequence
  Description of Artificial Sequence: Synthetic oligonucleotide
aguauuuuguugccuccuu

SEQ ID NO: 2368792 - RNA, 19 nt, Artificial Sequence
  Description of Artificial Sequence: Synthetic oligonucleotide
guggaagauccuguagggg

SEQ ID NO: 2368793 - RNA, 19 nt, Artificial Sequence
  Description of Artificial Sequence: Synthetic oligonucleotide
gguuucuuguggcagugac

SEQ ID NO: 2368794 - RNA, 19 nt, Artificial Sequence
  Description of Artificial Sequence: Synthetic oligonucleotide
ugugaucauccacuucaua

SEQ ID NO: 2368795 - RNA, 19 nt, Artificial Sequence
  Description of Artificial Sequence: Synthetic oligonucleotide
uggccaguauuuuguugcc

SEQ ID NO: 2368796 - RNA, 19 nt, Artificial Sequence
  Description of Artificial Sequence: Synthetic oligonucleotide
acggcuuccagggucuggg

SEQ ID NO: 2368797 - RNA, 19 nt, Artificial Sequence
  Description of Artificial Sequence: Synthetic oligonucleotide
uugucaaccaggggauccc

SEQ ID NO: 2368798 - RNA, 19 nt, Artificial Sequence
  Description of Artificial Sequence: Synthetic oligonucleotide
ugagggaucuggccaguau

SEQ ID NO: 2368799 - RNA, 19 nt, Artificial Sequence
  Description of Artificial Sequence: Synthetic oligonucleotide
ucuugugcauguuguguuu

SEQ ID NO: 2368800 - RNA, 19 nt, Artificial Sequence
  Description of Artificial Sequence: Synthetic oligonucleotide
ggaucuggccaguauuuug

SEQ ID NO: 2368801 - RNA, 19 nt, Artificial Sequence
  Description of Artificial Sequence: Synthetic oligonucleotide
aaccaggggaucccugaau

SEQ ID NO: 2368802 - RNA, 19 nt, Artificial Sequence
  Description of Artificial Sequence: Synthetic oligonucleotide
cacaggcuugcggugaugc

SEQ ID NO: 2368803 - RNA, 19 nt, Artificial Sequence
  Description of Artificial Sequence: Synthetic oligonucleotide
agcggcuccaccucaccug

SEQ ID NO: 2368804 - RNA, 19 nt, Artificial Sequence
  Description of Artificial Sequence: Synthetic oligonucleotide
ccugcguuaucccuggaag

SEQ ID NO: 2368805 - RNA, 19 nt, Artificial Sequence
  Description of Artificial Sequence: Synthetic oligonucleotide
uuucuccggcaucagcguc

SEQ ID NO: 2368806 - RNA, 19 nt, Artificial Sequence
  Description of Artificial Sequence: Synthetic oligonucleotide
ggcgccgucggucagugag

SEQ ID NO: 2368807 - RNA, 19 nt, Artificial Sequence
  Description of Artificial Sequence: Synthetic oligonucleotide
ucagcguccgccgaggcuu

SEQ ID NO: 2368808 - RNA, 19 nt, Artificial Sequence
  Description of Artificial Sequence: Synthetic oligonucleotide
guguuuccucuugaugacg

SEQ ID NO: 2368809 - RNA, 19 nt, Artificial Sequence
  Description of Artificial Sequence: Synthetic oligonucleotide
ggcgcagccaucuuggcuc

SEQ ID NO: 2368810 - RNA, 19 nt, Artificial Sequence
  Description of Artificial Sequence: Synthetic oligonucleotide
ccgucggucagugagaggc

SEQ ID NO: 2368811 - RNA, 19 nt, Artificial Sequence
  Description of Artificial Sequence: Synthetic oligonucleotide
ggcagggucggcaaacacg

SEQ ID NO: 2368812 - RNA, 19 nt, Artificial Sequence
  Description of Artificial Sequence: Synthetic oligonucleotide
uucggugaguuccgccaca

SEQ ID NO: 2368813 - RNA, 19 nt, Artificial Sequence
  Description of Artificial Sequence: Synthetic oligonucleotide
ggaccugguagaaauggcc

SEQ ID NO: 2368814 - RNA, 19 nt, Artificial Sequence
  Description of Artificial Sequence: Synthetic oligonucleotide
gaccgcgagccucacgcgc

SEQ ID NO: 2368815 - RNA, 19 nt, Artificial Sequence
  Description of Artificial Sequence: Synthetic oligonucleotide
cagcucgucugacaguuuc

SEQ ID NO: 2368816 - RNA, 19 nt, Artificial Sequence
  Description of Artificial Sequence: Synthetic oligonucleotide
ucggucagugagaggcaca

SEQ ID NO: 2368817 - RNA, 19 nt, Artificial Sequence
  Description of Artificial Sequence: Synthetic oligonucleotide
aggggaucccugaauucgg

SEQ ID NO: 2368818 - RNA, 19 nt, Artificial Sequence
  Description of Artificial Sequence: Synthetic oligonucleotide
gaggcuuauugucccggca

SEQ ID NO: 2368819 - RNA, 19 nt, Artificial Sequence
  Description of Artificial Sequence: Synthetic oligonucleotide
cucucuguucugcuaccac

SEQ ID NO: 2368820 - RNA, 19 nt, Artificial Sequence
  Description of Artificial Sequence: Synthetic oligonucleotide
ugcggugaugcuccuuguc

SEQ ID NO: 2368821 - RNA, 19 nt, Artificial Sequence
  Description of Artificial Sequence: Synthetic oligonucleotide
uagcggcuccaccucaccu

SEQ ID NO: 2368822 - RNA, 19 nt, Artificial Sequence
  Description of Artificial Sequence: Synthetic oligonucleotide
ccacuucauagccaggaag

SEQ ID NO: 2368823 - RNA, 19 nt, Artificial Sequence
  Description of Artificial Sequence: Synthetic oligonucleotide
ucggugaguuccgccacag

SEQ ID NO: 2368824 - RNA, 19 nt, Artificial Sequence
  Description of Artificial Sequence: Synthetic oligonucleotide
uaggcaccaagccgaugac

SEQ ID NO: 2368825 - RNA, 19 nt, Artificial Sequence
  Description of Artificial Sequence: Synthetic oligonucleotide
ucuucacggcuuccagggu

SEQ ID NO: 2368826 - RNA, 19 nt, Artificial Sequence
  Description of Artificial Sequence: Synthetic oligonucleotide
caccccuguuaugaaacgc

SEQ ID NO: 2368827 - RNA, 19 nt, Artificial Sequence
  Description of Artificial Sequence: Synthetic oligonucleotide
cuucggugaguuccgccac

SEQ ID NO: 2368828 - RNA, 19 nt, Artificial Sequence
  Description of Artificial Sequence: Synthetic oligonucleotide
acucugugaucauccacuu

SEQ ID NO: 2368829 - RNA, 19 nt, Artificial Sequence
  Description of Artificial Sequence: Synthetic oligonucleotide
cauauuuguccucuucggu

SEQ ID NO: 2368830 - RNA, 19 nt, Artificial Sequence
  Description of Artificial Sequence: Synthetic oligonucleotide
acgguuggccucugccauc

SEQ ID NO: 2368831 - RNA, 19 nt, Artificial Sequence
  Description of Artificial Sequence: Synthetic oligonucleotide
gguuccguucaaugguggc

SEQ ID NO: 2368832 - RNA, 19 nt, Artificial Sequence
  Description of Artificial Sequence: Synthetic oligonucleotide
caucaucauguugguaaac

SEQ ID NO: 2368833 - RNA, 19 nt, Artificial Sequence
  Description of Artificial Sequence: Synthetic oligonucleotide
caagccgaugacaggcuca

SEQ ID NO: 2368834 - RNA, 19 nt, Artificial Sequence
  Description of Artificial Sequence: Synthetic oligonucleotide
guuaucccuggaaggcugc

SEQ ID NO: 2368835 - RNA, 19 nt, Artificial Sequence
  Description of Artificial Sequence: Synthetic oligonucleotide
caggcuugcggugaugcuc

SEQ ID NO: 2368836 - RNA, 19 nt, Artificial Sequence
  Description of Artificial Sequence: Synthetic oligonucleotide
agauccuguagggguuccg

SEQ ID NO: 2368837 - RNA, 19 nt, Artificial Sequence
  Description of Artificial Sequence: Synthetic oligonucleotide
ucacgcgcgggcccagccc

SEQ ID NO: 2368838 - RNA, 19 nt, Artificial Sequence
  Description of Artificial Sequence: Synthetic oligonucleotide
uucuuguggcagugacgug

SEQ ID NO: 2368839 - RNA, 19 nt, Artificial Sequence
  Description of Artificial Sequence: Synthetic oligonucleotide
aucagcguccgccgaggcu

SEQ ID NO: 2368840 - RNA, 19 nt, Artificial Sequence
  Description of Artificial Sequence: Synthetic oligonucleotide
ggcacgguuggccucugcc

SEQ ID NO: 2368841 - RNA, 19 nt, Artificial Sequence
  Description of Artificial Sequence: Synthetic oligonucleotide
ccucucugguuucuugugg

SEQ ID NO: 2368842 - RNA, 19 nt, Artificial Sequence
  Description of Artificial Sequence: Synthetic oligonucleotide
ggcggcuuugaagagcugc

SEQ ID NO: 2368843 - RNA, 19 nt, Artificial Sequence
  Description of Artificial Sequence: Synthetic oligonucleotide
ucugggucgcggcggcggc

SEQ ID NO: 2368844 - RNA, 19 nt, Artificial Sequence
  Description of Artificial Sequence: Synthetic oligonucleotide
cucgucugggucgcggcgg

SEQ ID NO: 2368845 - RNA, 19 nt, Artificial Sequence
  Description of Artificial Sequence: Synthetic oligonucleotide
cccuuugaggauaggcacc

SEQ ID NO: 2368846 - RNA, 19 nt, Artificial Sequence
  Description of Artificial Sequence: Synthetic oligonucleotide
gcgguagugggccagggca

SEQ ID NO: 2368847 - RNA, 19 nt, Artificial Sequence
  Description of Artificial Sequence: Synthetic oligonucleotide
ucgucugggucgcggcggc

SEQ ID NO: 2368848 - RNA, 19 nt, Artificial Sequence
  Description of Artificial Sequence: Synthetic oligonucleotide
uccaccucaccugcguuau

SEQ ID NO: 2368849 - RNA, 19 nt, Artificial Sequence
  Description of Artificial Sequence: Synthetic oligonucleotide
cucugugaucauccacuuc

SEQ ID NO: 2368850 - RNA, 19 nt, Artificial Sequence
  Description of Artificial Sequence: Synthetic oligonucleotide
gcggcggcggcuuugaaga

SEQ ID NO: 2368851 - RNA, 19 nt, Artificial Sequence
  Description of Artificial Sequence: Synthetic oligonucleotide
ugucaaccaggggaucccu

SEQ ID NO: 2368852 - RNA, 19 nt, Artificial Sequence
  Description of Artificial Sequence: Synthetic oligonucleotide
uuuguccucuucggugagu

SEQ ID NO: 2368853 - RNA, 19 nt, Artificial Sequence
  Description of Artificial Sequence: Synthetic oligonucleotide
gccuccuuucaucaucaug

SEQ ID NO: 2368854 - RNA, 19 nt, Artificial Sequence
  Description of Artificial Sequence: Synthetic oligonucleotide
ugacguggacuuucuccau

SEQ ID NO: 2368855 - RNA, 19 nt, Artificial Sequence
  Description of Artificial Sequence: Synthetic oligonucleotide
cagggaccugguagaaaug

SEQ ID NO: 2368856 - RNA, 19 nt, Artificial Sequence
  Description of Artificial Sequence: Synthetic oligonucleotide
gcggcuuugaagagcugcg

SEQ ID NO: 2368857 - RNA, 19 nt, Artificial Sequence
  Description of Artificial Sequence: Synthetic oligonucleotide
ggcaccccuguuaugaaac

SEQ ID NO: 2368858 - RNA, 19 nt, Artificial Sequence
  Description of Artificial Sequence: Synthetic oligonucleotide
accgcgagccucacgcgcg

SEQ ID NO: 2368859 - RNA, 19 nt, Artificial Sequence
  Description of Artificial Sequence: Synthetic oligonucleotide
gcaccccuguuaugaaacg

SEQ ID NO: 2368860 - RNA, 19 nt, Artificial Sequence
  Description of Artificial Sequence: Synthetic oligonucleotide
gauaggcaccaagccgaug

SEQ ID NO: 2368861 - RNA, 19 nt, Artificial Sequence
  Description of Artificial Sequence: Synthetic oligonucleotide
uguagggguuccguucaau

SEQ ID NO: 2368862 - RNA, 19 nt, Artificial Sequence
  Description of Artificial Sequence: Synthetic oligonucleotide
ggcagcucgguacuucuca

SEQ ID NO: 2368863 - RNA, 19 nt, Artificial Sequence
  Description of Artificial Sequence: Synthetic oligonucleotide
acacggagcucgucugggu

SEQ ID NO: 2368864 - RNA, 19 nt, Artificial Sequence
  Description of Artificial Sequence: Synthetic oligonucleotide
gguagugggccagggcacg

SEQ ID NO: 2368865 - RNA, 19 nt, Artificial Sequence
  Description of Artificial Sequence: Synthetic oligonucleotide
gucugggucgcggcggcgg

SEQ ID NO: 2368866 - RNA, 19 nt, Artificial Sequence
  Description of Artificial Sequence: Synthetic oligonucleotide
gcggugaugcuccuuguca

SEQ ID NO: 2368867 - RNA, 19 nt, Artificial Sequence
  Description of Artificial Sequence: Synthetic oligonucleotide
uugucccggcacucuguga

SEQ ID NO: 2368868 - RNA, 19 nt, Artificial Sequence
  Description of Artificial Sequence: Synthetic oligonucleotide
guagugggccagggcacgg

SEQ ID NO: 2368869 - RNA, 19 nt, Artificial Sequence
  Description of Artificial Sequence: Synthetic oligonucleotide
ugguuucuuguggcaguga

SEQ ID NO: 2368870 - RNA, 19 nt, Artificial Sequence
  Description of Artificial Sequence: Synthetic oligonucleotide
accaccgccgagcggccug

SEQ ID NO: 2368871 - RNA, 19 nt, Artificial Sequence
  Description of Artificial Sequence: Synthetic oligonucleotide
cuguuaugaaacgccucca

SEQ ID NO: 2368872 - RNA, 19 nt, Artificial Sequence
  Description of Artificial Sequence: Synthetic oligonucleotide
auccuguagggguuccguu

SEQ ID NO: 2368873 - RNA, 19 nt, Artificial Sequence
  Description of Artificial Sequence: Synthetic oligonucleotide
uugcggugaugcuccuugu

SEQ ID NO: 2368874 - RNA, 19 nt, Artificial Sequence
  Description of Artificial Sequence: Synthetic oligonucleotide
agggaucuggccaguauuu

SEQ ID NO: 2368875 - RNA, 19 nt, Artificial Sequence
  Description of Artificial Sequence: Synthetic oligonucleotide
caucagcguccgccgaggc

SEQ ID NO: 2368876 - RNA, 19 nt, Artificial Sequence
  Description of Artificial Sequence: Synthetic oligonucleotide
ccgaccaccgccgagcggc

SEQ ID NO: 2368877 - RNA, 19 nt, Artificial Sequence
  Description of Artificial Sequence: Synthetic oligonucleotide
gucggucagugagaggcac

SEQ ID NO: 2368878 - RNA, 19 nt, Artificial Sequence
  Description of Artificial Sequence: Synthetic oligonucleotide
guuucuccggcaucagcgu

SEQ ID NO: 2368879 - RNA, 19 nt, Artificial Sequence
  Description of Artificial Sequence: Synthetic oligonucleotide
cucacgcgcgggcccagcc

SEQ ID NO: 2368880 - RNA, 19 nt, Artificial Sequence
  Description of Artificial Sequence: Synthetic oligonucleotide
caucuugugcauguugugu

SEQ ID NO: 2368881 - RNA, 19 nt, Artificial Sequence
  Description of Artificial Sequence: Synthetic oligonucleotide
ugacggcaccccuguuaug

SEQ ID NO: 2368882 - RNA, 19 nt, Artificial Sequence
  Description of Artificial Sequence: Synthetic oligonucleotide
gauccuguagggguuccgu

SEQ ID NO: 2368883 - RNA, 19 nt, Artificial Sequence
  Description of Artificial Sequence: Synthetic oligonucleotide
ggguuccguucaauggugg

SEQ ID NO: 2368884 - RNA, 19 nt, Artificial Sequence
  Description of Artificial Sequence: Synthetic oligonucleotide
agcggccugcagcgcgggc

SEQ ID NO: 2368885 - RNA, 19 nt, Artificial Sequence
  Description of Artificial Sequence: Synthetic oligonucleotide
cugauggcagggucggcaa

SEQ ID NO: 2368886 - RNA, 19 nt, Artificial Sequence
  Description of Artificial Sequence: Synthetic oligonucleotide
gaauccagccagguccucu

SEQ ID NO: 2368887 - RNA, 19 nt, Artificial Sequence
  Description of Artificial Sequence: Synthetic oligonucleotide
aggcaccaagccgaugaca

SEQ ID NO: 2368888 - RNA, 19 nt, Artificial Sequence
  Description of Artificial Sequence: Synthetic oligonucleotide
cguuaucccuggaaggcug

SEQ ID NO: 2368889 - RNA, 19 nt, Artificial Sequence
  Description of Artificial Sequence: Synthetic oligonucleotide
ccgccgaggcuuauugucc

SEQ ID NO: 2368890 - RNA, 19 nt, Artificial Sequence
  Description of Artificial Sequence: Synthetic oligonucleotide
ugcuaccaccagcgguagu

SEQ ID NO: 2368891 - RNA, 19 nt, Artificial Sequence
  Description of Artificial Sequence: Synthetic oligonucleotide
agcgcgggcgcagccaucu

SEQ ID NO: 2368892 - RNA, 19 nt, Artificial Sequence
  Description of Artificial Sequence: Synthetic oligonucleotide
aagcggcgccgucggucag

SEQ ID NO: 2368893 - RNA, 19 nt, Artificial Sequence
  Description of Artificial Sequence: Synthetic oligonucleotide
ggcagugacguggacuuuc

SEQ ID NO: 2368894 - RNA, 19 nt, Artificial Sequence
  Description of Artificial Sequence: Synthetic oligonucleotide
agcucgucugacaguuucu

SEQ ID NO: 2368895 - RNA, 19 nt, Artificial Sequence
  Description of Artificial Sequence: Synthetic oligonucleotide
gcucgucugggucgcggcg

SEQ ID NO: 2368896 - RNA, 19 nt, Artificial Sequence
  Description of Artificial Sequence: Synthetic oligonucleotide
cggcacucugugaucaucc

SEQ ID NO: 2368897 - RNA, 19 nt, Artificial Sequence
  Description of Artificial Sequence: Synthetic oligonucleotide
ccggcaucagcguccgccg

SEQ ID NO: 2368898 - RNA, 19 nt, Artificial Sequence
  Description of Artificial Sequence: Synthetic oligonucleotide
gcgggcgcagccaucuugg

SEQ ID NO: 2368899 - RNA, 19 nt, Artificial Sequence
  Description of Artificial Sequence: Synthetic oligonucleotide
cuuauugucccggcacucu

SEQ ID NO: 2368900 - RNA, 19 nt, Artificial Sequence
  Description of Artificial Sequence: Synthetic oligonucleotide
ccaggaagcggcgccgucg

SEQ ID NO: 2368901 - RNA, 19 nt, Artificial Sequence
  Description of Artificial Sequence: Synthetic oligonucleotide
gcugauggcagggucggca

SEQ ID NO: 2368902 - RNA, 19 nt, Artificial Sequence
  Description of Artificial Sequence: Synthetic oligonucleotide
gcugcguuuuccugagcuc

SEQ ID NO: 2368903 - RNA, 19 nt, Artificial Sequence
  Description of Artificial Sequence: Synthetic oligonucleotide
accaagccgaugacaggcu

SEQ ID NO: 2368904 - RNA, 19 nt, Artificial Sequence
  Description of Artificial Sequence: Synthetic oligonucleotide
cugcagaccgcgagccuca

SEQ ID NO: 2368905 - RNA, 19 nt, Artificial Sequence
  Description of Artificial Sequence: Synthetic oligonucleotide
gcggcuccaccucaccugc

SEQ ID NO: 2368906 - RNA, 19 nt, Artificial Sequence
  Description of Artificial Sequence: Synthetic oligonucleotide
gcaucagcguccgccgagg

SEQ ID NO: 2368907 - RNA, 19 nt, Artificial Sequence
  Description of Artificial Sequence: Synthetic oligonucleotide
cccuguuaugaaacgccuc

SEQ ID NO: 2368908 - RNA, 19 nt, Artificial Sequence
  Description of Artificial Sequence: Synthetic oligonucleotide
gaguuccgccacaggcuug

SEQ ID NO: 2368909 - RNA, 19 nt, Artificial Sequence
  Description of Artificial Sequence: Synthetic oligonucleotide
ccucuugaugacggcaccc

SEQ ID NO: 2368910 - RNA, 19 nt, Artificial Sequence
  Description of Artificial Sequence: Synthetic oligonucleotide
cugcuaccaccagcgguag

SEQ ID NO: 2368911 - RNA, 19 nt, Artificial Sequence
  Description of Artificial Sequence: Synthetic oligonucleotide
cugacaguuucuccggcau

SEQ ID NO: 2368912 - RNA, 19 nt, Artificial Sequence
  Description of Artificial Sequence: Synthetic oligonucleotide
ugaugacggcaccccuguu

SEQ ID NO: 2368913 - RNA, 19 nt, Artificial Sequence
  Description of Artificial Sequence: Synthetic oligonucleotide
acggcaccccuguuaugaa

SEQ ID NO: 2368914 - RNA, 19 nt, Artificial Sequence
  Description of Artificial Sequence: Synthetic oligonucleotide
accgccgagcggccugcag

SEQ ID NO: 2368915 - RNA, 19 nt, Artificial Sequence
  Description of Artificial Sequence: Synthetic oligonucleotide
gccuguugcucugcagagg

SEQ ID NO: 2368916 - RNA, 19 nt, Artificial Sequence
  Description of Artificial Sequence: Synthetic oligonucleotide
agccccgaccaccgccgag

SEQ ID NO: 2368917 - RNA, 19 nt, Artificial Sequence
  Description of Artificial Sequence: Synthetic oligonucleotide
ggucagugagaggcacagg

SEQ ID NO: 2368918 - RNA, 19 nt, Artificial Sequence
  Description of Artificial Sequence: Synthetic oligonucleotide
ccaggggaucccugaauuc

SEQ ID NO: 2368919 - RNA, 19 nt, Artificial Sequence
  Description of Artificial Sequence: Synthetic oligonucleotide
gaaacgccuccagcagcuc

SEQ ID NO: 2368920 - RNA, 19 nt, Artificial Sequence
  Description of Artificial Sequence: Synthetic oligonucleotide
gcugcagaccgcgagccuc

SEQ ID NO: 2368921 - RNA, 19 nt, Artificial Sequence
  Description of Artificial Sequence: Synthetic oligonucleotide
gcuuauugucccggcacuc

SEQ ID NO: 2368922 - RNA, 19 nt, Artificial Sequence
  Description of Artificial Sequence: Synthetic oligonucleotide
gcgcagccaucuuggcucg

SEQ ID NO: 2368923 - RNA, 19 nt, Artificial Sequence
  Description of Artificial Sequence: Synthetic oligonucleotide
ccgaggcuuauugucccgg

SEQ ID NO: 2368924 - RNA, 19 nt, Artificial Sequence
  Description of Artificial Sequence: Synthetic oligonucleotide
ggcuuauugucccggcacu

SEQ ID NO: 2368925 - RNA, 19 nt, Artificial Sequence
  Description of Artificial Sequence: Synthetic oligonucleotide
ugccuccuuucaucaucau

SEQ ID NO: 2368926 - RNA, 19 nt, Artificial Sequence
  Description of Artificial Sequence: Synthetic oligonucleotide
cagcucgguacuucucaaa

SEQ ID NO: 2368927 - RNA, 19 nt, Artificial Sequence
  Description of Artificial Sequence: Synthetic oligonucleotide
ggucggcaaacacggagcu

SEQ ID NO: 2368928 - RNA, 19 nt, Artificial Sequence
  Description of Artificial Sequence: Synthetic oligonucleotide
ggcggcggcuuugaagagc

SEQ ID NO: 2368929 - RNA, 19 nt, Artificial Sequence
  Description of Artificial Sequence: Synthetic oligonucleotide
ccaagccgaugacaggcuc

SEQ ID NO: 2368930 - RNA, 19 nt, Artificial Sequence
  Description of Artificial Sequence: Synthetic oligonucleotide
ggcguagcggcuccaccuc

SEQ ID NO: 2368931 - RNA, 19 nt, Artificial Sequence
  Description of Artificial Sequence: Synthetic oligonucleotide
ggggcguagcggcuccacc

SEQ ID NO: 2368932 - RNA, 19 nt, Artificial Sequence
  Description of Artificial Sequence: Synthetic oligonucleotide
gcucgguacuucucaaacu

SEQ ID NO: 2368933 - RNA, 19 nt, Artificial Sequence
  Description of Artificial Sequence: Synthetic oligonucleotide
gcagaccgcgagccucacg

SEQ ID NO: 2368934 - RNA, 19 nt, Artificial Sequence
  Description of Artificial Sequence: Synthetic oligonucleotide
gagcggccugcagcgcggg

SEQ ID NO: 2368935 - RNA, 19 nt, Artificial Sequence
  Description of Artificial Sequence: Synthetic oligonucleotide
cgaggcuuauugucccggc

SEQ ID NO: 2368936 - RNA, 19 nt, Artificial Sequence
  Description of Artificial Sequence: Synthetic oligonucleotide
gggccaugagggaucuggc

SEQ ID NO: 2368937 - RNA, 19 nt, Artificial Sequence
  Description of Artificial Sequence: Synthetic oligonucleotide
cggucagugagaggcacag

SEQ ID NO: 2368938 - RNA, 19 nt, Artificial Sequence
  Description of Artificial Sequence: Synthetic oligonucleotide
cgccgagcggccugcagcg

SEQ ID NO: 2368939 - RNA, 19 nt, Artificial Sequence
  Description of Artificial Sequence: Synthetic oligonucleotide
cgccgaggcuuauuguccc

SEQ ID NO: 2368940 - RNA, 19 nt, Artificial Sequence
  Description of Artificial Sequence: Synthetic oligonucleotide
guuccgccacaggcuugcg

SEQ ID NO: 2368941 - RNA, 19 nt, Artificial Sequence
  Description of Artificial Sequence: Synthetic oligonucleotide
ggcuuugaagagcugcguu

SEQ ID NO: 2368942 - RNA, 19 nt, Artificial Sequence
  Description of Artificial Sequence: Synthetic oligonucleotide
cguccgccgaggcuuauug

SEQ ID NO: 2368943 - RNA, 19 nt, Artificial Sequence
  Description of Artificial Sequence: Synthetic oligonucleotide
augagggaucuggccagua

SEQ ID NO: 2368944 - RNA, 19 nt, Artificial Sequence
  Description of Artificial Sequence: Synthetic oligonucleotide
ugcagaccgcgagccucac

SEQ ID NO: 2368945 - RNA, 19 nt, Artificial Sequence
  Description of Artificial Sequence: Synthetic oligonucleotide
gcgagccucacgcgcgggc

SEQ ID NO: 2368946 - RNA, 19 nt, Artificial Sequence
  Description of Artificial Sequence: Synthetic oligonucleotide
gccccgaccaccgccgagc

SEQ ID NO: 2368947 - RNA, 19 nt, Artificial Sequence
  Description of Artificial Sequence: Synthetic oligonucleotide
cugcagaggcagcucggua

SEQ ID NO: 2368948 - RNA, 19 nt, Artificial Sequence
  Description of Artificial Sequence: Synthetic oligonucleotide
agccucacgcgcgggccca

SEQ ID NO: 2368949 - RNA, 19 nt, Artificial Sequence
  Description of Artificial Sequence: Synthetic oligonucleotide
gccgucggucagugagagg

SEQ ID NO: 2368950 - RNA, 19 nt, Artificial Sequence
  Description of Artificial Sequence: Synthetic oligonucleotide
ugggucgcggcggcggcuu

SEQ ID NO: 2368951 - RNA, 19 nt, Artificial Sequence
  Description of Artificial Sequence: Synthetic oligonucleotide
cuuugaggauaggcaccaa

SEQ ID NO: 2368952 - RNA, 19 nt, Artificial Sequence
  Description of Artificial Sequence: Synthetic oligonucleotide
cuguagggguuccguucaa

SEQ ID NO: 2368953 - RNA, 19 nt, Artificial Sequence
  Description of Artificial Sequence: Synthetic oligonucleotide
cguagcggcuccaccucac

SEQ ID NO: 2368954 - RNA, 19 nt, Artificial Sequence
  Description of Artificial Sequence: Synthetic oligonucleotide
cagggucggcaaacacgga

SEQ ID NO: 2368955 - RNA, 19 nt, Artificial Sequence
  Description of Artificial Sequence: Synthetic oligonucleotide
cgagcggccugcagcgcgg

SEQ ID NO: 2368956 - RNA, 19 nt, Artificial Sequence
  Description of Artificial Sequence: Synthetic oligonucleotide
ccccgaccaccgccgagcg

SEQ ID NO: 2368957 - RNA, 19 nt, Artificial Sequence
  Description of Artificial Sequence: Synthetic oligonucleotide
gucgcggcggcggcuuuga

SEQ ID NO: 2368958 - RNA, 19 nt, Artificial Sequence
  Description of Artificial Sequence: Synthetic oligonucleotide
gcguagcggcuccaccuca

SEQ ID NO: 2368959 - RNA, 19 nt, Artificial Sequence
  Description of Artificial Sequence: Synthetic oligonucleotide
ccccuguuaugaaacgccu

SEQ ID NO: 2368960 - RNA, 19 nt, Artificial Sequence
  Description of Artificial Sequence: Synthetic oligonucleotide
gcggcggcuuugaagagcu

SEQ ID NO: 2368961 - RNA, 19 nt, Artificial Sequence
  Description of Artificial Sequence: Synthetic oligonucleotide
ggagcucgucugggucgcg

SEQ ID NO: 2368962 - RNA, 19 nt, Artificial Sequence
  Description of Artificial Sequence: Synthetic oligonucleotide
ccggcacucugugaucauc

SEQ ID NO: 2368963 - RNA, 19 nt, Artificial Sequence
  Description of Artificial Sequence: Synthetic oligonucleotide
gcguuaucccuggaaggcu

SEQ ID NO: 2368964 - RNA, 19 nt, Artificial Sequence
  Description of Artificial Sequence: Synthetic oligonucleotide
ccgccacaggcuugcggug

SEQ ID NO: 2368965 - RNA, 19 nt, Artificial Sequence
  Description of Artificial Sequence: Synthetic oligonucleotide
caugagggaucuggccagu

SEQ ID NO: 2368966 - RNA, 19 nt, Artificial Sequence
  Description of Artificial Sequence: Synthetic oligonucleotide
cgcgggcgcagccaucuug

SEQ ID NO: 2368967 - RNA, 19 nt, Artificial Sequence
  Description of Artificial Sequence: Synthetic oligonucleotide
ccgcgagccucacgcgcgg

SEQ ID NO: 2368968 - RNA, 19 nt, Artificial Sequence
  Description of Artificial Sequence: Synthetic oligonucleotide
cagggcacgguuggccucu

SEQ ID NO: 2368969 - RNA, 19 nt, Artificial Sequence
  Description of Artificial Sequence: Synthetic oligonucleotide
cagcgcgggcgcagccauc

SEQ ID NO: 2368970 - RNA, 19 nt, Artificial Sequence
  Description of Artificial Sequence: Synthetic oligonucleotide
cgccgucggucagugagag

SEQ ID NO: 2368971 - RNA, 19 nt, Artificial Sequence
  Description of Artificial Sequence: Synthetic oligonucleotide
cuccggcaucagcguccgc

SEQ ID NO: 2368972 - RNA, 19 nt, Artificial Sequence
  Description of Artificial Sequence: Synthetic oligonucleotide
agggcacgguuggccucug

SEQ ID NO: 2368973 - RNA, 19 nt, Artificial Sequence
  Description of Artificial Sequence: Synthetic oligonucleotide
gggcacgguuggccucugc

SEQ ID NO: 2368974 - RNA, 19 nt, Artificial Sequence
  Description of Artificial Sequence: Synthetic oligonucleotide
cgaugacaggcucacaguu

SEQ ID NO: 2368975 - RNA, 19 nt, Artificial Sequence
  Description of Artificial Sequence: Synthetic oligonucleotide
cccgaccaccgccgagcgg

SEQ ID NO: 2368976 - RNA, 19 nt, Artificial Sequence
  Description of Artificial Sequence: Synthetic oligonucleotide
gcggcgccgucggucagug

SEQ ID NO: 2368977 - RNA, 19 nt, Artificial Sequence
  Description of Artificial Sequence: Synthetic oligonucleotide
caccugcguuaucccugga

SEQ ID NO: 2368978 - RNA, 19 nt, Artificial Sequence
  Description of Artificial Sequence: Synthetic oligonucleotide
gggaucuggccaguauuuu

SEQ ID NO: 2368979 - RNA, 19 nt, Artificial Sequence
  Description of Artificial Sequence: Synthetic oligonucleotide
ggauaggcaccaagccgau

SEQ ID NO: 2368980 - RNA, 19 nt, Artificial Sequence
  Description of Artificial Sequence: Synthetic oligonucleotide
cgucggucagugagaggca

SEQ ID NO: 2368981 - RNA, 19 nt, Artificial Sequence
  Description of Artificial Sequence: Synthetic oligonucleotide
cagcguccgccgaggcuua

SEQ ID NO: 2368982 - RNA, 19 nt, Artificial Sequence
  Description of Artificial Sequence: Synthetic oligonucleotide
gcgccgucggucagugaga

SEQ ID NO: 2368983 - RNA, 19 nt, Artificial Sequence
  Description of Artificial Sequence: Synthetic oligonucleotide
ccaccgccgagcggccugc

SEQ ID NO: 2368984 - RNA, 19 nt, Artificial Sequence
  Description of Artificial Sequence: Synthetic oligonucleotide
agcguccgccgaggcuuau

SEQ ID NO: 2368985 - RNA, 19 nt, Artificial Sequence
  Description of Artificial Sequence: Synthetic oligonucleotide
cgaccaccgccgagcggcc

SEQ ID NO: 2368986 - RNA, 19 nt, Artificial Sequence
  Description of Artificial Sequence: Synthetic oligonucleotide
gcagcgcgggcgcagccau

SEQ ID NO: 2368987 - RNA, 19 nt, Artificial Sequence
  Description of Artificial Sequence: Synthetic oligonucleotide
ccugagcuccuggucauau

SEQ ID NO: 2368988 - RNA, 19 nt, Artificial Sequence
  Description of Artificial Sequence: Synthetic oligonucleotide
gccgagcggccugcagcgc

SEQ ID NO: 2368989 - RNA, 19 nt, Artificial Sequence
  Description of Artificial Sequence: Synthetic oligonucleotide
cggcggcggcuuugaagag

SEQ ID NO: 2368990 - RNA, 19 nt, Artificial Sequence
  Description of Artificial Sequence: Synthetic oligonucleotide
ccucacgcgcgggcccagc

SEQ ID NO: 2368991 - RNA, 19 nt, Artificial Sequence
  Description of Artificial Sequence: Synthetic oligonucleotide
gccucacgcgcgggcccag

SEQ ID NO: 2368992 - RNA, 19 nt, Artificial Sequence
  Description of Artificial Sequence: Synthetic oligonucleotide
cgccacaggcuugcgguga

SEQ ID NO: 2368993 - RNA, 19 nt, Artificial Sequence
  Description of Artificial Sequence: Synthetic oligonucleotide
cgcgagccucacgcgcggg

SEQ ID NO: 2368994 - RNA, 19 nt, Artificial Sequence
  Description of Artificial Sequence: Synthetic oligonucleotide
cugggucgcggcggcggcu

SEQ ID NO: 2368995 - RNA, 19 nt, Artificial Sequence
  Description of Artificial Sequence: Synthetic oligonucleotide
cguucaaugguggccuguu

SEQ ID NO: 2368996 - RNA, 19 nt, Artificial Sequence
  Description of Artificial Sequence: Synthetic oligonucleotide
caccgccgagcggccugca

SEQ ID NO: 2368997 - RNA, 19 nt, Artificial Sequence
  Description of Artificial Sequence: Synthetic oligonucleotide
cggcggcuuugaagagcug

SEQ ID NO: 2368998 - RNA, 19 nt, Artificial Sequence
  Description of Artificial Sequence: Synthetic oligonucleotide
cggcuuugaagagcugcgu

SEQ ID NO: 2368999 - RNA, 19 nt, Artificial Sequence
  Description of Artificial Sequence: Synthetic oligonucleotide
gcagcucgucugacaguuu

SEQ ID NO: 2369000 - RNA, 19 nt, Artificial Sequence
  Description of Artificial Sequence: Synthetic oligonucleotide
cccggcacucugugaucau

SEQ ID NO: 2369001 - RNA, 19 nt, Artificial Sequence
  Description of Artificial Sequence: Synthetic oligonucleotide
gcguccgccgaggcuuauu

SEQ ID NO: 2369002 - RNA, 19 nt, Artificial Sequence
  Description of Artificial Sequence: Synthetic oligonucleotide
gcgcgggcgcagccaucuu

SEQ ID NO: 2369003 - RNA, 19 nt, Artificial Sequence
  Description of Artificial Sequence: Synthetic oligonucleotide
cggcgccgucggucaguga

SEQ ID NO: 2369004 - RNA, 19 nt, Artificial Sequence
  Description of Artificial Sequence: Synthetic oligonucleotide
agaaacuccaagcugaggg

SEQ ID NO: 2369005 - RNA, 19 nt, Artificial Sequence
  Description of Artificial Sequence: Synthetic oligonucleotide
acuaacaucagcuuggaca

SEQ ID NO: 2369006 - RNA, 19 nt, Artificial Sequence
  Description of Artificial Sequence: Synthetic oligonucleotide
agcuuggacauguagagcc

SEQ ID NO: 2369007 - RNA, 19 nt, Artificial Sequence
  Description of Artificial Sequence: Synthetic oligonucleotide
aacuucaucacugcgauuc

SEQ ID NO: 2369008 - RNA, 19 nt, Artificial Sequence
  Description of Artificial Sequence: Synthetic oligonucleotide
ugagaaaauacccgggagg

SEQ ID NO: 2369009 - RNA, 19 nt, Artificial Sequence
  Description of Artificial Sequence: Synthetic oligonucleotide
cuuucauugaguccuaugg

SEQ ID NO: 2369010 - RNA, 19 nt, Artificial Sequence
  Description of Artificial Sequence: Synthetic oligonucleotide
uuucgcaucaugcucuugg

SEQ ID NO: 2369011 - RNA, 19 nt, Artificial Sequence
  Description of Artificial Sequence: Synthetic oligonucleotide
aguccuaugguguacuugg

SEQ ID NO: 2369012 - RNA, 19 nt, Artificial Sequence
  Description of Artificial Sequence: Synthetic oligonucleotide
gacauguagagccucagcc

SEQ ID NO: 2369013 - RNA, 19 nt, Artificial Sequence
  Description of Artificial Sequence: Synthetic oligonucleotide
agagguaagagcuaugaga

SEQ ID NO: 2369014 - RNA, 19 nt, Artificial Sequence
  Description of Artificial Sequence: Synthetic oligonucleotide
aauggccaaccacugggcc

SEQ ID NO: 2369015 - RNA, 19 nt, Artificial Sequence
  Description of Artificial Sequence: Synthetic oligonucleotide
ucugucagaaacuccaagc

SEQ ID NO: 2369016 - RNA, 19 nt, Artificial Sequence
  Description of Artificial Sequence: Synthetic oligonucleotide
ugagacagccuccagcagg

SEQ ID NO: 2369017 - RNA, 19 nt, Artificial Sequence
  Description of Artificial Sequence: Synthetic oligonucleotide
uccgaagugaggaugacac

SEQ ID NO: 2369018 - RNA, 19 nt, Artificial Sequence
  Description of Artificial Sequence: Synthetic oligonucleotide
gacaaacucugucagaaac

SEQ ID NO: 2369019 - RNA, 19 nt, Artificial Sequence
  Description of Artificial Sequence: Synthetic oligonucleotide
gacacuaacaucagcuugg

SEQ ID NO: 2369020 - RNA, 19 nt, Artificial Sequence
  Description of Artificial Sequence: Synthetic oligonucleotide
uugaacuucaucacugcga

SEQ ID NO: 2369021 - RNA, 19 nt, Artificial Sequence
  Description of Artificial Sequence: Synthetic oligonucleotide
gaagcugacgaaauucugg

SEQ ID NO: 2369022 - RNA, 19 nt, Artificial Sequence
  Description of Artificial Sequence: Synthetic oligonucleotide
uugagcuuuuccaaguaca

SEQ ID NO: 2369023 - RNA, 19 nt, Artificial Sequence
  Description of Artificial Sequence: Synthetic oligonucleotide
ugcuugaucagguugucug

SEQ ID NO: 2369024 - RNA, 19 nt, Artificial Sequence
  Description of Artificial Sequence: Synthetic oligonucleotide
aaugggcuggguuccugcc

SEQ ID NO: 2369025 - RNA, 19 nt, Artificial Sequence
  Description of Artificial Sequence: Synthetic oligonucleotide
ugcuuguuagcgaagcgcc

SEQ ID NO: 2369026 - RNA, 19 nt, Artificial Sequence
  Description of Artificial Sequence: Synthetic oligonucleotide
uccaaguacacgugcagag

SEQ ID NO: 2369027 - RNA, 19 nt, Artificial Sequence
  Description of Artificial Sequence: Synthetic oligonucleotide
agcguaaugggcuggguuc

SEQ ID NO: 2369028 - RNA, 19 nt, Artificial Sequence
  Description of Artificial Sequence: Synthetic oligonucleotide
ugggccaucacugagcgag

SEQ ID NO: 2369029 - RNA, 19 nt, Artificial Sequence
  Description of Artificial Sequence: Synthetic oligonucleotide
uguccaaugguguucacaa

SEQ ID NO: 2369030 - RNA, 19 nt, Artificial Sequence
  Description of Artificial Sequence: Synthetic oligonucleotide
ucauugaguccuauggugu

SEQ ID NO: 2369031 - RNA, 19 nt, Artificial Sequence
  Description of Artificial Sequence: Synthetic oligonucleotide
ugagggaguucacuggcgg

SEQ ID NO: 2369032 - RNA, 19 nt, Artificial Sequence
  Description of Artificial Sequence: Synthetic oligonucleotide
ucuggauggagucucgaga

SEQ ID NO: 2369033 - RNA, 19 nt, Artificial Sequence
  Description of Artificial Sequence: Synthetic oligonucleotide
uuucauugaguccuauggu

SEQ ID NO: 2369034 - RNA, 19 nt, Artificial Sequence
  Description of Artificial Sequence: Synthetic oligonucleotide
uuuccaaguacacgugcag

SEQ ID NO: 2369035 - RNA, 19 nt, Artificial Sequence
  Description of Artificial Sequence: Synthetic oligonucleotide
uccuaugguguacuugggg

SEQ ID NO: 2369036 - RNA, 19 nt, Artificial Sequence
  Description of Artificial Sequence: Synthetic oligonucleotide
ggagaggcaccauugaugg

SEQ ID NO: 2369037 - RNA, 19 nt, Artificial Sequence
  Description of Artificial Sequence: Synthetic oligonucleotide
uccacgaccucucugcgcc

SEQ ID NO: 2369038 - RNA, 19 nt, Artificial Sequence
  Description of Artificial Sequence: Synthetic oligonucleotide
agguuagcccuucuuuugc

SEQ ID NO: 2369039 - RNA, 19 nt, Artificial Sequence
  Description of Artificial Sequence: Synthetic oligonucleotide
ucaaguccaggccagcuga

SEQ ID NO: 2369040 - RNA, 19 nt, Artificial Sequence
  Description of Artificial Sequence: Synthetic oligonucleotide
cagaacucagcguaauggg

SEQ ID NO: 2369041 - RNA, 19 nt, Artificial Sequence
  Description of Artificial Sequence: Synthetic oligonucleotide
uugauggcagacacuaaca

SEQ ID NO: 2369042 - RNA, 19 nt, Artificial Sequence
  Description of Artificial Sequence: Synthetic oligonucleotide
gguaagagcuaugagacag

SEQ ID NO: 2369043 - RNA, 19 nt, Artificial Sequence
  Description of Artificial Sequence: Synthetic oligonucleotide
ugagcuuuuccaaguacac

SEQ ID NO: 2369044 - RNA, 19 nt, Artificial Sequence
  Description of Artificial Sequence: Synthetic oligonucleotide
cuugaacuucaucacugcg

SEQ ID NO: 2369045 - RNA, 19 nt, Artificial Sequence
  Description of Artificial Sequence: Synthetic oligonucleotide
gaggaugacaccacggaag

SEQ ID NO: 2369046 - RNA, 19 nt, Artificial Sequence
  Description of Artificial Sequence: Synthetic oligonucleotide
ggaauggccaaccacuggg

SEQ ID NO: 2369047 - RNA, 19 nt, Artificial Sequence
  Description of Artificial Sequence: Synthetic oligonucleotide
cuaugagacagccuccagc

SEQ ID NO: 2369048 - RNA, 19 nt, Artificial Sequence
  Description of Artificial Sequence: Synthetic oligonucleotide
cuggauggagucucgagag

SEQ ID NO: 2369049 - RNA, 19 nt, Artificial Sequence
  Description of Artificial Sequence: Synthetic oligonucleotide
agaacucagcguaaugggc

SEQ ID NO: 2369050 - RNA, 19 nt, Artificial Sequence
  Description of Artificial Sequence: Synthetic oligonucleotide
cagcugagaaaauacccgg

SEQ ID NO: 2369051 - RNA, 19 nt, Artificial Sequence
  Description of Artificial Sequence: Synthetic oligonucleotide
ucuugaacuucaucacugc

SEQ ID NO: 2369052 - RNA, 19 nt, Artificial Sequence
  Description of Artificial Sequence: Synthetic oligonucleotide
ucagagguaagagcuauga

SEQ ID NO: 2369053 - RNA, 19 nt, Artificial Sequence
  Description of Artificial Sequence: Synthetic oligonucleotide
ugaagcugacgaaauucug

SEQ ID NO: 2369054 - RNA, 19 nt, Artificial Sequence
  Description of Artificial Sequence: Synthetic oligonucleotide
ucuagcuuuuccaggcuga

SEQ ID NO: 2369055 - RNA, 19 nt, Artificial Sequence
  Description of Artificial Sequence: Synthetic oligonucleotide
caaguacacgugcagagac

SEQ ID NO: 2369056 - RNA, 19 nt, Artificial Sequence
  Description of Artificial Sequence: Synthetic oligonucleotide
gaucagguugucugcagug

SEQ ID NO: 2369057 - RNA, 19 nt, Artificial Sequence
  Description of Artificial Sequence: Synthetic oligonucleotide
gaugacaccacggaagguc

SEQ ID NO: 2369058 - RNA, 19 nt, Artificial Sequence
  Description of Artificial Sequence: Synthetic oligonucleotide
cauacaucucccucaaguc

SEQ ID NO: 2369059 - RNA, 19 nt, Artificial Sequence
  Description of Artificial Sequence: Synthetic oligonucleotide
cauguagagccucagccac

SEQ ID NO: 2369060 - RNA, 19 nt, Artificial Sequence
  Description of Artificial Sequence: Synthetic oligonucleotide
ugcucgguguccaauggug

SEQ ID NO: 2369061 - RNA, 19 nt, Artificial Sequence
  Description of Artificial Sequence: Synthetic oligonucleotide
uggaauggccaaccacugg

SEQ ID NO: 2369062 - RNA, 19 nt, Artificial Sequence
  Description of Artificial Sequence: Synthetic oligonucleotide
cauaauccuguagucagag

SEQ ID NO: 2369063 - RNA, 19 nt, Artificial Sequence
  Description of Artificial Sequence: Synthetic oligonucleotide
agccuuccagaacucagcg

SEQ ID NO: 2369064 - RNA, 19 nt, Artificial Sequence
  Description of Artificial Sequence: Synthetic oligonucleotide
uggucagcugccgagaaug

SEQ ID NO: 2369065 - RNA, 19 nt, Artificial Sequence
  Description of Artificial Sequence: Synthetic oligonucleotide
uuguuagcgaagcgccgcg

SEQ ID NO: 2369066 - RNA, 19 nt, Artificial Sequence
  Description of Artificial Sequence: Synthetic oligonucleotide
agaggcaccauugauggca

SEQ ID NO: 2369067 - RNA, 19 nt, Artificial Sequence
  Description of Artificial Sequence: Synthetic oligonucleotide
acauguagagccucagcca

SEQ ID NO: 2369068 - RNA, 19 nt, Artificial Sequence
  Description of Artificial Sequence: Synthetic oligonucleotide
ggcaacaaugccaagcagg

SEQ ID NO: 2369069 - RNA, 19 nt, Artificial Sequence
  Description of Artificial Sequence: Synthetic oligonucleotide
auaauccuguagucagagg

SEQ ID NO: 2369070 - RNA, 19 nt, Artificial Sequence
  Description of Artificial Sequence: Synthetic oligonucleotide
aacgcgacucgcagcagcc

SEQ ID NO: 2369071 - RNA, 19 nt, Artificial Sequence
  Description of Artificial Sequence: Synthetic oligonucleotide
aaggucuucucauuuucua

SEQ ID NO: 2369072 - RNA, 19 nt, Artificial Sequence
  Description of Artificial Sequence: Synthetic oligonucleotide
aauggucuggaauggccaa

SEQ ID NO: 2369073 - RNA, 19 nt, Artificial Sequence
  Description of Artificial Sequence: Synthetic oligonucleotide
agcugagggaguucacugg

SEQ ID NO: 2369074 - RNA, 19 nt, Artificial Sequence
  Description of Artificial Sequence: Synthetic oligonucleotide
augacaaacucugucagaa

SEQ ID NO: 2369075 - RNA, 19 nt, Artificial Sequence
  Description of Artificial Sequence: Synthetic oligonucleotide
agcagaacgcgacucgcag

SEQ ID NO: 2369076 - RNA, 19 nt, Artificial Sequence
  Description of Artificial Sequence: Synthetic oligonucleotide
aaaauacccgggagguccg

SEQ ID NO: 2369077 - RNA, 19 nt, Artificial Sequence
  Description of Artificial Sequence: Synthetic oligonucleotide
gagcuuuuccaaguacacg

SEQ ID NO: 2369078 - RNA, 19 nt, Artificial Sequence
  Description of Artificial Sequence: Synthetic oligonucleotide
auugaguccuaugguguac

SEQ ID NO: 2369079 - RNA, 19 nt, Artificial Sequence
  Description of Artificial Sequence: Synthetic oligonucleotide
uacacgugcagagacuucu

SEQ ID NO: 2369080 - RNA, 19 nt, Artificial Sequence
  Description of Artificial Sequence: Synthetic oligonucleotide
guuagcgaagcgccgcgcg

SEQ ID NO: 2369081 - RNA, 19 nt, Artificial Sequence
  Description of Artificial Sequence: Synthetic oligonucleotide
aaccacugggccaucacug

SEQ ID NO: 2369082 - RNA, 19 nt, Artificial Sequence
  Description of Artificial Sequence: Synthetic oligonucleotide
ccagcugagaaaauacccg

SEQ ID NO: 2369083 - RNA, 19 nt, Artificial Sequence
  Description of Artificial Sequence: Synthetic oligonucleotide
ucgcugcuugaucagguug

SEQ ID NO: 2369084 - RNA, 19 nt, Artificial Sequence
  Description of Artificial Sequence: Synthetic oligonucleotide
uugaucagguugucugcag

SEQ ID NO: 2369085 - RNA, 19 nt, Artificial Sequence
  Description of Artificial Sequence: Synthetic oligonucleotide
guagucagagguaagagcu

SEQ ID NO: 2369086 - RNA, 19 nt, Artificial Sequence
  Description of Artificial Sequence: Synthetic oligonucleotide
cuuguuagcgaagcgccgc

SEQ ID NO: 2369087 - RNA, 19 nt, Artificial Sequence
  Description of Artificial Sequence: Synthetic oligonucleotide
agugaggaugacaccacgg

SEQ ID NO: 2369088 - RNA, 19 nt, Artificial Sequence
  Description of Artificial Sequence: Synthetic oligonucleotide
gaugacaaacucugucaga

SEQ ID NO: 2369089 - RNA, 19 nt, Artificial Sequence
  Description of Artificial Sequence: Synthetic oligonucleotide
uaucugguccuccggcacc

SEQ ID NO: 2369090 - RNA, 19 nt, Artificial Sequence
  Description of Artificial Sequence: Synthetic oligonucleotide
uccaagcugagggaguuca

SEQ ID NO: 2369091 - RNA, 19 nt, Artificial Sequence
  Description of Artificial Sequence: Synthetic oligonucleotide
cuggaugucugccucucgc

SEQ ID NO: 2369092 - RNA, 19 nt, Artificial Sequence
  Description of Artificial Sequence: Synthetic oligonucleotide
uuggacauguagagccuca

SEQ ID NO: 2369093 - RNA, 19 nt, Artificial Sequence
  Description of Artificial Sequence: Synthetic oligonucleotide
uuagcgaagcgccgcgcgc

SEQ ID NO: 2369094 - RNA, 19 nt, Artificial Sequence
  Description of Artificial Sequence: Synthetic oligonucleotide
uccggcaccaccucaucca

SEQ ID NO: 2369095 - RNA, 19 nt, Artificial Sequence
  Description of Artificial Sequence: Synthetic oligonucleotide
acugagcgagccuugcugu

SEQ ID NO: 2369096 - RNA, 19 nt, Artificial Sequence
  Description of Artificial Sequence: Synthetic oligonucleotide
cugcuuguuagcgaagcgc

SEQ ID NO: 2369097 - RNA, 19 nt, Artificial Sequence
  Description of Artificial Sequence: Synthetic oligonucleotide
gaacgcgacucgcagcagc

SEQ ID NO: 2369098 - RNA, 19 nt, Artificial Sequence
  Description of Artificial Sequence: Synthetic oligonucleotide
ucucgcugcuugaucaggu

SEQ ID NO: 2369099 - RNA, 19 nt, Artificial Sequence
  Description of Artificial Sequence: Synthetic oligonucleotide
aucacugagcgagccuugc

SEQ ID NO: 2369100 - RNA, 19 nt, Artificial Sequence
  Description of Artificial Sequence: Synthetic oligonucleotide
auggagucucgagagauga

SEQ ID NO: 2369101 - RNA, 19 nt, Artificial Sequence
  Description of Artificial Sequence: Synthetic oligonucleotide
aggagaggcaccauugaug

SEQ ID NO: 2369102 - RNA, 19 nt, Artificial Sequence
  Description of Artificial Sequence: Synthetic oligonucleotide
gaagagcauccccagcuga

SEQ ID NO: 2369103 - RNA, 19 nt, Artificial Sequence
  Description of Artificial Sequence: Synthetic oligonucleotide
cucucugcgcccgaggcgg

SEQ ID NO: 2369104 - RNA, 19 nt, Artificial Sequence
  Description of Artificial Sequence: Synthetic oligonucleotide
uggccuuucgcaucaugcu

SEQ ID NO: 2369105 - RNA, 19 nt, Artificial Sequence
  Description of Artificial Sequence: Synthetic oligonucleotide
ucgagagaugaagcugacg

SEQ ID NO: 2369106 - RNA, 19 nt, Artificial Sequence
  Description of Artificial Sequence: Synthetic oligonucleotide
ccgagaauggucuggaaug

SEQ ID NO: 2369107 - RNA, 19 nt, Artificial Sequence
  Description of Artificial Sequence: Synthetic oligonucleotide
accaccucauccaccacac

SEQ ID NO: 2369108 - RNA, 19 nt, Artificial Sequence
  Description of Artificial Sequence: Synthetic oligonucleotide
uccuguagucagagguaag

SEQ ID NO: 2369109 - RNA, 19 nt, Artificial Sequence
  Description of Artificial Sequence: Synthetic oligonucleotide
cugagggaguucacuggcg

SEQ ID NO: 2369110 - RNA, 19 nt, Artificial Sequence
  Description of Artificial Sequence: Synthetic oligonucleotide
gugcagagacuucuggaug

SEQ ID NO: 2369111 - RNA, 19 nt, Artificial Sequence
  Description of Artificial Sequence: Synthetic oligonucleotide
cagagguaagagcuaugag

SEQ ID NO: 2369112 - RNA, 19 nt, Artificial Sequence
  Description of Artificial Sequence: Synthetic oligonucleotide
cacugagcgagccuugcug

SEQ ID NO: 2369113 - RNA, 19 nt, Artificial Sequence
  Description of Artificial Sequence: Synthetic oligonucleotide
gugaggaugacaccacgga

SEQ ID NO: 2369114 - RNA, 19 nt, Artificial Sequence
  Description of Artificial Sequence: Synthetic oligonucleotide
ggagucucgagagaugaag

SEQ ID NO: 2369115 - RNA, 19 nt, Artificial Sequence
  Description of Artificial Sequence: Synthetic oligonucleotide
uggucuggaauggccaacc

SEQ ID NO: 2369116 - RNA, 19 nt, Artificial Sequence
  Description of Artificial Sequence: Synthetic oligonucleotide
agagacuucuggauggagu

SEQ ID NO: 2369117 - RNA, 19 nt, Artificial Sequence
  Description of Artificial Sequence: Synthetic oligonucleotide
ugcugcucgguguccaaug

SEQ ID NO: 2369118 - RNA, 19 nt, Artificial Sequence
  Description of Artificial Sequence: Synthetic oligonucleotide
gcaacaaugccaagcaggc

SEQ ID NO: 2369119 - RNA, 19 nt, Artificial Sequence
  Description of Artificial Sequence: Synthetic oligonucleotide
cacugggccaucacugagc

SEQ ID NO: 2369120 - RNA, 19 nt, Artificial Sequence
  Description of Artificial Sequence: Synthetic oligonucleotide
uccaggccagcugagaaaa

SEQ ID NO: 2369121 - RNA, 19 nt, Artificial Sequence
  Description of Artificial Sequence: Synthetic oligonucleotide
uucgcaucaugcucuuggu

SEQ ID NO: 2369122 - RNA, 19 nt, Artificial Sequence
  Description of Artificial Sequence: Synthetic oligonucleotide
ggugucuuugaaccagaag

SEQ ID NO: 2369123 - RNA, 19 nt, Artificial Sequence
  Description of Artificial Sequence: Synthetic oligonucleotide
auggccaaccacugggcca

SEQ ID NO: 2369124 - RNA, 19 nt, Artificial Sequence
  Description of Artificial Sequence: Synthetic oligonucleotide
gugggaagagcauccccag

SEQ ID NO: 2369125 - RNA, 19 nt, Artificial Sequence
  Description of Artificial Sequence: Synthetic oligonucleotide
gaagugaggaugacaccac

SEQ ID NO: 2369126 - RNA, 19 nt, Artificial Sequence
  Description of Artificial Sequence: Synthetic oligonucleotide
accuugagggccucugcug

SEQ ID NO: 2369127 - RNA, 19 nt, Artificial Sequence
  Description of Artificial Sequence: Synthetic oligonucleotide
agccauaauccuguaguca

SEQ ID NO: 2369128 - RNA, 19 nt, Artificial Sequence
  Description of Artificial Sequence: Synthetic oligonucleotide
aagggcacgcucugcugcu

SEQ ID NO: 2369129 - RNA, 19 nt, Artificial Sequence
  Description of Artificial Sequence: Synthetic oligonucleotide
uggauggagucucgagaga

SEQ ID NO: 2369130 - RNA, 19 nt, Artificial Sequence
  Description of Artificial Sequence: Synthetic oligonucleotide
gaauggccaaccacugggc

SEQ ID NO: 2369131 - RNA, 19 nt, Artificial Sequence
  Description of Artificial Sequence: Synthetic oligonucleotide
aauccuguagucagaggua

SEQ ID NO: 2369132 - RNA, 19 nt, Artificial Sequence
  Description of Artificial Sequence: Synthetic oligonucleotide
gucuggaauggccaaccac

SEQ ID NO: 2369133 - RNA, 19 nt, Artificial Sequence
  Description of Artificial Sequence: Synthetic oligonucleotide
aguacacgugcagagacuu

SEQ ID NO: 2369134 - RNA, 19 nt, Artificial Sequence
  Description of Artificial Sequence: Synthetic oligonucleotide
ugacaaacucugucagaaa

SEQ ID NO: 2369135 - RNA, 19 nt, Artificial Sequence
  Description of Artificial Sequence: Synthetic oligonucleotide
cugacgaaauucuggaugu

SEQ ID NO: 2369136 - RNA, 19 nt, Artificial Sequence
  Description of Artificial Sequence: Synthetic oligonucleotide
uacccgggagguccgaagu

SEQ ID NO: 2369137 - RNA, 19 nt, Artificial Sequence
  Description of Artificial Sequence: Synthetic oligonucleotide
agcaggagaggcaccauug

SEQ ID NO: 2369138 - RNA, 19 nt, Artificial Sequence
  Description of Artificial Sequence: Synthetic oligonucleotide
gauggagucucgagagaug

SEQ ID NO: 2369139 - RNA, 19 nt, Artificial Sequence
  Description of Artificial Sequence: Synthetic oligonucleotide
auacccgggagguccgaag

SEQ ID NO: 2369140 - RNA, 19 nt, Artificial Sequence
  Description of Artificial Sequence: Synthetic oligonucleotide
agcaccugcuuguuagcga

SEQ ID NO: 2369141 - RNA, 19 nt, Artificial Sequence
  Description of Artificial Sequence: Synthetic oligonucleotide
aaguacacgugcagagacu

SEQ ID NO: 2369142 - RNA, 19 nt, Artificial Sequence
  Description of Artificial Sequence: Synthetic oligonucleotide
guaagagcuaugagacagc

SEQ ID NO: 2369143 - RNA, 19 nt, Artificial Sequence
  Description of Artificial Sequence: Synthetic oligonucleotide
guaucugguccuccggcac

SEQ ID NO: 2369144 - RNA, 19 nt, Artificial Sequence
  Description of Artificial Sequence: Synthetic oligonucleotide
agucagagguaagagcuau

SEQ ID NO: 2369145 - RNA, 19 nt, Artificial Sequence
  Description of Artificial Sequence: Synthetic oligonucleotide
gaacucagcguaaugggcu

SEQ ID NO: 2369146 - RNA, 19 nt, Artificial Sequence
  Description of Artificial Sequence: Synthetic oligonucleotide
cagccauaauccuguaguc

SEQ ID NO: 2369147 - RNA, 19 nt, Artificial Sequence
  Description of Artificial Sequence: Synthetic oligonucleotide
ugcaguggccuuucgcauc

SEQ ID NO: 2369148 - RNA, 19 nt, Artificial Sequence
  Description of Artificial Sequence: Synthetic oligonucleotide
auggucuggaauggccaac

SEQ ID NO: 2369149 - RNA, 19 nt, Artificial Sequence
  Description of Artificial Sequence: Synthetic oligonucleotide
ucgcaucaugcucuugguc

SEQ ID NO: 2369150 - RNA, 19 nt, Artificial Sequence
  Description of Artificial Sequence: Synthetic oligonucleotide
uuccugccauacaucuccc

SEQ ID NO: 2369151 - RNA, 19 nt, Artificial Sequence
  Description of Artificial Sequence: Synthetic oligonucleotide
uagucagagguaagagcua

SEQ ID NO: 2369152 - RNA, 19 nt, Artificial Sequence
  Description of Artificial Sequence: Synthetic oligonucleotide
gacagccuccagcaggaga

SEQ ID NO: 2369153 - RNA, 19 nt, Artificial Sequence
  Description of Artificial Sequence: Synthetic oligonucleotide
agagcauccccagcugaag

SEQ ID NO: 2369154 - RNA, 19 nt, Artificial Sequence
  Description of Artificial Sequence: Synthetic oligonucleotide
ucacugagcgagccuugcu

SEQ ID NO: 2369155 - RNA, 19 nt, Artificial Sequence
  Description of Artificial Sequence: Synthetic oligonucleotide
uggguuccugccauacauc

SEQ ID NO: 2369156 - RNA, 19 nt, Artificial Sequence
  Description of Artificial Sequence: Synthetic oligonucleotide
gcugagaaaauacccggga

SEQ ID NO: 2369157 - RNA, 19 nt, Artificial Sequence
  Description of Artificial Sequence: Synthetic oligonucleotide
cgagagaugaagcugacga

SEQ ID NO: 2369158 - RNA, 19 nt, Artificial Sequence
  Description of Artificial Sequence: Synthetic oligonucleotide
gcaucaugcucuuggucag

SEQ ID NO: 2369159 - RNA, 19 nt, Artificial Sequence
  Description of Artificial Sequence: Synthetic oligonucleotide
aagagcuaugagacagccu

SEQ ID NO: 2369160 - RNA, 19 nt, Artificial Sequence
  Description of Artificial Sequence: Synthetic oligonucleotide
agcugaagggcacgcucug

SEQ ID NO: 2369161 - RNA, 19 nt, Artificial Sequence
  Description of Artificial Sequence: Synthetic oligonucleotide
ggggcaacaaugccaagca

SEQ ID NO: 2369162 - RNA, 19 nt, Artificial Sequence
  Description of Artificial Sequence: Synthetic oligonucleotide
cagcaccugcuuguuagcg

SEQ ID NO: 2369163 - RNA, 19 nt, Artificial Sequence
  Description of Artificial Sequence: Synthetic oligonucleotide
gcuuucauugaguccuaug

SEQ ID NO: 2369164 - RNA, 19 nt, Artificial Sequence
  Description of Artificial Sequence: Synthetic oligonucleotide
auccuguagucagagguaa

SEQ ID NO: 2369165 - RNA, 19 nt, Artificial Sequence
  Description of Artificial Sequence: Synthetic oligonucleotide
ccuugagggccucugcugg

SEQ ID NO: 2369166 - RNA, 19 nt, Artificial Sequence
  Description of Artificial Sequence: Synthetic oligonucleotide
cucagcguaaugggcuggg

SEQ ID NO: 2369167 - RNA, 19 nt, Artificial Sequence
  Description of Artificial Sequence: Synthetic oligonucleotide
ugagcgagccuugcugugu

SEQ ID NO: 2369168 - RNA, 19 nt, Artificial Sequence
  Description of Artificial Sequence: Synthetic oligonucleotide
cuuggacauguagagccuc

SEQ ID NO: 2369169 - RNA, 19 nt, Artificial Sequence
  Description of Artificial Sequence: Synthetic oligonucleotide
uguuagcgaagcgccgcgc

SEQ ID NO: 2369170 - RNA, 19 nt, Artificial Sequence
  Description of Artificial Sequence: Synthetic oligonucleotide
cucgagagaugaagcugac

SEQ ID NO: 2369171 - RNA, 19 nt, Artificial Sequence
  Description of Artificial Sequence: Synthetic oligonucleotide
ucgguguccaaugguguuc

SEQ ID NO: 2369172 - RNA, 19 nt, Artificial Sequence
  Description of Artificial Sequence: Synthetic oligonucleotide
caucacugagcgagccuug

SEQ ID NO: 2369173 - RNA, 19 nt, Artificial Sequence
  Description of Artificial Sequence: Synthetic oligonucleotide
gcugcucgguguccaaugg

SEQ ID NO: 2369174 - RNA, 19 nt, Artificial Sequence
  Description of Artificial Sequence: Synthetic oligonucleotide
uagcgaagcgccgcgcgcc

SEQ ID NO: 2369175 - RNA, 19 nt, Artificial Sequence
  Description of Artificial Sequence: Synthetic oligonucleotide
ucacuggcggguucuugaa

SEQ ID NO: 2369176 - RNA, 19 nt, Artificial Sequence
  Description of Artificial Sequence: Synthetic oligonucleotide
ggacauguagagccucagc

SEQ ID NO: 2369177 - RNA, 19 nt, Artificial Sequence
  Description of Artificial Sequence: Synthetic oligonucleotide
uuuccaggcugaugacaaa

SEQ ID NO: 2369178 - RNA, 19 nt, Artificial Sequence
  Description of Artificial Sequence: Synthetic oligonucleotide
uggagucucgagagaugaa

SEQ ID NO: 2369179 - RNA, 19 nt, Artificial Sequence
  Description of Artificial Sequence: Synthetic oligonucleotide
aaguccaggccagcugaga

SEQ ID NO: 2369180 - RNA, 19 nt, Artificial Sequence
  Description of Artificial Sequence: Synthetic oligonucleotide
agcgaagcgccgcgcgccg

SEQ ID NO: 2369181 - RNA, 19 nt, Artificial Sequence
  Description of Artificial Sequence: Synthetic oligonucleotide
uccuccggcaccaccucau

SEQ ID NO: 2369182 - RNA, 19 nt, Artificial Sequence
  Description of Artificial Sequence: Synthetic oligonucleotide
uuggucagcugccgagaau

SEQ ID NO: 2369183 - RNA, 19 nt, Artificial Sequence
  Description of Artificial Sequence: Synthetic oligonucleotide
ggugggaagagcaucccca

SEQ ID NO: 2369184 - RNA, 19 nt, Artificial Sequence
  Description of Artificial Sequence: Synthetic oligonucleotide
gacaccacggaaggucuuc

SEQ ID NO: 2369185 - RNA, 19 nt, Artificial Sequence
  Description of Artificial Sequence: Synthetic oligonucleotide
uugagggccucugcuggug

SEQ ID NO: 2369186 - RNA, 19 nt, Artificial Sequence
  Description of Artificial Sequence: Synthetic oligonucleotide
caggcugaugacaaacucu

SEQ ID NO: 2369187 - RNA, 19 nt, Artificial Sequence
  Description of Artificial Sequence: Synthetic oligonucleotide
caaugguguucacaaaggu

SEQ ID NO: 2369188 - RNA, 19 nt, Artificial Sequence
  Description of Artificial Sequence: Synthetic oligonucleotide
cauugaguccuauggugua

SEQ ID NO: 2369189 - RNA, 19 nt, Artificial Sequence
  Description of Artificial Sequence: Synthetic oligonucleotide
guccuaugguguacuuggg

SEQ ID NO: 2369190 - RNA, 19 nt, Artificial Sequence
  Description of Artificial Sequence: Synthetic oligonucleotide
uccugccauacaucucccu

SEQ ID NO: 2369191 - RNA, 19 nt, Artificial Sequence
  Description of Artificial Sequence: Synthetic oligonucleotide
aauacccgggagguccgaa

SEQ ID NO: 2369192 - RNA, 19 nt, Artificial Sequence
  Description of Artificial Sequence: Synthetic oligonucleotide
cugagcgagccuugcugug

SEQ ID NO: 2369193 - RNA, 19 nt, Artificial Sequence
  Description of Artificial Sequence: Synthetic oligonucleotide
cacuaacaucagcuuggac

SEQ ID NO: 2369194 - RNA, 19 nt, Artificial Sequence
  Description of Artificial Sequence: Synthetic oligonucleotide
ccuuccagaacucagcgua

SEQ ID NO: 2369195 - RNA, 19 nt, Artificial Sequence
  Description of Artificial Sequence: Synthetic oligonucleotide
ucacugcgauucccgccgc

SEQ ID NO: 2369196 - RNA, 19 nt, Artificial Sequence
  Description of Artificial Sequence: Synthetic oligonucleotide
cuagguuagcccuucuuuu

SEQ ID NO: 2369197 - RNA, 19 nt, Artificial Sequence
  Description of Artificial Sequence: Synthetic oligonucleotide
ugccucucgcugcuugauc

SEQ ID NO: 2369198 - RNA, 19 nt, Artificial Sequence
  Description of Artificial Sequence: Synthetic oligonucleotide
gagaugaagcugacgaaau

SEQ ID NO: 2369199 - RNA, 19 nt, Artificial Sequence
  Description of Artificial Sequence: Synthetic oligonucleotide
ucucugcgcccgaggcggg

SEQ ID NO: 2369200 - RNA, 19 nt, Artificial Sequence
  Description of Artificial Sequence: Synthetic oligonucleotide
uaacaucagcuuggacaug

SEQ ID NO: 2369201 - RNA, 19 nt, Artificial Sequence
  Description of Artificial Sequence: Synthetic oligonucleotide
ugacgaaauucuggauguc

SEQ ID NO: 2369202 - RNA, 19 nt, Artificial Sequence
  Description of Artificial Sequence: Synthetic oligonucleotide
acccgggagguccgaagug

SEQ ID NO: 2369203 - RNA, 19 nt, Artificial Sequence
  Description of Artificial Sequence: Synthetic oligonucleotide
gcugccgagaauggucugg

SEQ ID NO: 2369204 - RNA, 19 nt, Artificial Sequence
  Description of Artificial Sequence: Synthetic oligonucleotide
cagagacuucuggauggag

SEQ ID NO: 2369205 - RNA, 19 nt, Artificial Sequence
  Description of Artificial Sequence: Synthetic oligonucleotide
ccugccauacaucucccuc

SEQ ID NO: 2369206 - RNA, 19 nt, Artificial Sequence
  Description of Artificial Sequence: Synthetic oligonucleotide
acugcgauucccgccgcgu

SEQ ID NO: 2369207 - RNA, 19 nt, Artificial Sequence
  Description of Artificial Sequence: Synthetic oligonucleotide
gcuuguuagcgaagcgccg

SEQ ID NO: 2369208 - RNA, 19 nt, Artificial Sequence
  Description of Artificial Sequence: Synthetic oligonucleotide
caucaugcucuuggucagc

SEQ ID NO: 2369209 - RNA, 19 nt, Artificial Sequence
  Description of Artificial Sequence: Synthetic oligonucleotide
gcuaugagacagccuccag

SEQ ID NO: 2369210 - RNA, 19 nt, Artificial Sequence
  Description of Artificial Sequence: Synthetic oligonucleotide
guaaugggcuggguuccug

SEQ ID NO: 2369211 - RNA, 19 nt, Artificial Sequence
  Description of Artificial Sequence: Synthetic oligonucleotide
cuuccagaacucagcguaa

SEQ ID NO: 2369212 - RNA, 19 nt, Artificial Sequence
  Description of Artificial Sequence: Synthetic oligonucleotide
cacgcucugcugcucggug

SEQ ID NO: 2369213 - RNA, 19 nt, Artificial Sequence
  Description of Artificial Sequence: Synthetic oligonucleotide
gucagagguaagagcuaug

SEQ ID NO: 2369214 - RNA, 19 nt, Artificial Sequence
  Description of Artificial Sequence: Synthetic oligonucleotide
uugucugcaguggccuuuc

SEQ ID NO: 2369215 - RNA, 19 nt, Artificial Sequence
  Description of Artificial Sequence: Synthetic oligonucleotide
ggccagcugagaaaauacc

SEQ ID NO: 2369216 - RNA, 19 nt, Artificial Sequence
  Description of Artificial Sequence: Synthetic oligonucleotide
gggcaacaaugccaagcag

SEQ ID NO: 2369217 - RNA, 19 nt, Artificial Sequence
  Description of Artificial Sequence: Synthetic oligonucleotide
cacuggcggguucuugaac

SEQ ID NO: 2369218 - RNA, 19 nt, Artificial Sequence
  Description of Artificial Sequence: Synthetic oligonucleotide
ccccgcgugcagcagaacg

SEQ ID NO: 2369219 - RNA, 19 nt, Artificial Sequence
  Description of Artificial Sequence: Synthetic oligonucleotide
ucagcguaaugggcugggu

SEQ ID NO: 2369220 - RNA, 19 nt, Artificial Sequence
  Description of Artificial Sequence: Synthetic oligonucleotide
agcugccgagaauggucug

SEQ ID NO: 2369221 - RNA, 19 nt, Artificial Sequence
  Description of Artificial Sequence: Synthetic oligonucleotide
cacugcgauucccgccgcg

SEQ ID NO: 2369222 - RNA, 19 nt, Artificial Sequence
  Description of Artificial Sequence: Synthetic oligonucleotide
ugacaccacggaaggucuu

SEQ ID NO: 2369223 - RNA, 19 nt, Artificial Sequence
  Description of Artificial Sequence: Synthetic oligonucleotide
cccgcgugcagcagaacgc

SEQ ID NO: 2369224 - RNA, 19 nt, Artificial Sequence
  Description of Artificial Sequence: Synthetic oligonucleotide
ccuaugguguacuuggggu

SEQ ID NO: 2369225 - RNA, 19 nt, Artificial Sequence
  Description of Artificial Sequence: Synthetic oligonucleotide
cuaugguguacuugggguu

SEQ ID NO: 2369226 - RNA, 19 nt, Artificial Sequence
  Description of Artificial Sequence: Synthetic oligonucleotide
acaccacggaaggucuucu

SEQ ID NO: 2369227 - RNA, 19 nt, Artificial Sequence
  Description of Artificial Sequence: Synthetic oligonucleotide
gcaccugcuuguuagcgaa

SEQ ID NO: 2369228 - RNA, 19 nt, Artificial Sequence
  Description of Artificial Sequence: Synthetic oligonucleotide
ggguuccugccauacaucu

SEQ ID NO: 2369229 - RNA, 19 nt, Artificial Sequence
  Description of Artificial Sequence: Synthetic oligonucleotide
guccgaagugaggaugaca

SEQ ID NO: 2369230 - RNA, 19 nt, Artificial Sequence
  Description of Artificial Sequence: Synthetic oligonucleotide
uggcggguucuugaacuuc

SEQ ID NO: 2369231 - RNA, 19 nt, Artificial Sequence
  Description of Artificial Sequence: Synthetic oligonucleotide
cagcagaacgcgacucgca

SEQ ID NO: 2369232 - RNA, 19 nt, Artificial Sequence
  Description of Artificial Sequence: Synthetic oligonucleotide
ugccgagaauggucuggaa

SEQ ID NO: 2369233 - RNA, 19 nt, Artificial Sequence
  Description of Artificial Sequence: Synthetic oligonucleotide
ccgaagugaggaugacacc

SEQ ID NO: 2369234 - RNA, 19 nt, Artificial Sequence
  Description of Artificial Sequence: Synthetic oligonucleotide
gcuuuuccaggcugaugac

SEQ ID NO: 2369235 - RNA, 19 nt, Artificial Sequence
  Description of Artificial Sequence: Synthetic oligonucleotide
agaacgcgacucgcagcag

SEQ ID NO: 2369236 - RNA, 19 nt, Artificial Sequence
  Description of Artificial Sequence: Synthetic oligonucleotide
ccuguagucagagguaaga

SEQ ID NO: 2369237 - RNA, 19 nt, Artificial Sequence
  Description of Artificial Sequence: Synthetic oligonucleotide
gcguaaugggcuggguucc

SEQ ID NO: 2369238 - RNA, 19 nt, Artificial Sequence
  Description of Artificial Sequence: Synthetic oligonucleotide
gugcagcagaacgcgacuc

SEQ ID NO: 2369239 - RNA, 19 nt, Artificial Sequence
  Description of Artificial Sequence: Synthetic oligonucleotide
cugcgauucccgccgcguc

SEQ ID NO: 2369240 - RNA, 19 nt, Artificial Sequence
  Description of Artificial Sequence: Synthetic oligonucleotide
acucugucagaaacuccaa

SEQ ID NO: 2369241 - RNA, 19 nt, Artificial Sequence
  Description of Artificial Sequence: Synthetic oligonucleotide
gagcgagccuugcugugua

SEQ ID NO: 2369242 - RNA, 19 nt, Artificial Sequence
  Description of Artificial Sequence: Synthetic oligonucleotide
gcaggagaggcaccauuga

SEQ ID NO: 2369243 - RNA, 19 nt, Artificial Sequence
  Description of Artificial Sequence: Synthetic oligonucleotide
cagacacuaacaucagcuu

SEQ ID NO: 2369244 - RNA, 19 nt, Artificial Sequence
  Description of Artificial Sequence: Synthetic oligonucleotide
caggccagcugagaaaaua

SEQ ID NO: 2369245 - RNA, 19 nt, Artificial Sequence
  Description of Artificial Sequence: Synthetic oligonucleotide
ucugcgcccgaggcgggac

SEQ ID NO: 2369246 - RNA, 19 nt, Artificial Sequence
  Description of Artificial Sequence: Synthetic oligonucleotide
gaagcgccgcgcgccgucc

SEQ ID NO: 2369247 - RNA, 19 nt, Artificial Sequence
  Description of Artificial Sequence: Synthetic oligonucleotide
cagcugccgagaauggucu

SEQ ID NO: 2369248 - RNA, 19 nt, Artificial Sequence
  Description of Artificial Sequence: Synthetic oligonucleotide
guuagcccuucuuuugcuu

SEQ ID NO: 2369249 - RNA, 19 nt, Artificial Sequence
  Description of Artificial Sequence: Synthetic oligonucleotide
ggcggguucuugaacuuca

SEQ ID NO: 2369250 - RNA, 19 nt, Artificial Sequence
  Description of Artificial Sequence: Synthetic oligonucleotide
cagcugaagggcacgcucu

SEQ ID NO: 2369251 - RNA, 19 nt, Artificial Sequence
  Description of Artificial Sequence: Synthetic oligonucleotide
ccaagcaggcuuucauuga

SEQ ID NO: 2369252 - RNA, 19 nt, Artificial Sequence
  Description of Artificial Sequence: Synthetic oligonucleotide
cugccgagaauggucugga

SEQ ID NO: 2369253 - RNA, 19 nt, Artificial Sequence
  Description of Artificial Sequence: Synthetic oligonucleotide
ccauaauccuguagucaga

SEQ ID NO: 2369254 - RNA, 19 nt, Artificial Sequence
  Description of Artificial Sequence: Synthetic oligonucleotide
guacacgugcagagacuuc

SEQ ID NO: 2369255 - RNA, 19 nt, Artificial Sequence
  Description of Artificial Sequence: Synthetic oligonucleotide
ggucuggaauggccaacca

SEQ ID NO: 2369256 - RNA, 19 nt, Artificial Sequence
  Description of Artificial Sequence: Synthetic oligonucleotide
gguuagcccuucuuuugcu

SEQ ID NO: 2369257 - RNA, 19 nt, Artificial Sequence
  Description of Artificial Sequence: Synthetic oligonucleotide
ggauggagucucgagagau

SEQ ID NO: 2369258 - RNA, 19 nt, Artificial Sequence
  Description of Artificial Sequence: Synthetic oligonucleotide
ggccaucacugagcgagcc

SEQ ID NO: 2369259 - RNA, 19 nt, Artificial Sequence
  Description of Artificial Sequence: Synthetic oligonucleotide
ccgggagguccgaagugag

SEQ ID NO: 2369260 - RNA, 19 nt, Artificial Sequence
  Description of Artificial Sequence: Synthetic oligonucleotide
agcgagccuugcuguguau

SEQ ID NO: 2369261 - RNA, 19 nt, Artificial Sequence
  Description of Artificial Sequence: Synthetic oligonucleotide
gccgagaauggucuggaau

SEQ ID NO: 2369262 - RNA, 19 nt, Artificial Sequence
  Description of Artificial Sequence: Synthetic oligonucleotide
gccauacaucucccucaag

SEQ ID NO: 2369263 - RNA, 19 nt, Artificial Sequence
  Description of Artificial Sequence: Synthetic oligonucleotide
caccuugagggccucugcu

SEQ ID NO: 2369264 - RNA, 19 nt, Artificial Sequence
  Description of Artificial Sequence: Synthetic oligonucleotide
ccgcgugcagcagaacgcg

SEQ ID NO: 2369265 - RNA, 19 nt, Artificial Sequence
  Description of Artificial Sequence: Synthetic oligonucleotide
caggagaggcaccauugau

SEQ ID NO: 2369266 - RNA, 19 nt, Artificial Sequence
  Description of Artificial Sequence: Synthetic oligonucleotide
acgaccucucugcgcccga

SEQ ID NO: 2369267 - RNA, 19 nt, Artificial Sequence
  Description of Artificial Sequence: Synthetic oligonucleotide
cugcgcccgaggcgggacc

SEQ ID NO: 2369268 - RNA, 19 nt, Artificial Sequence
  Description of Artificial Sequence: Synthetic oligonucleotide
gguuccugccauacaucuc

SEQ ID NO: 2369269 - RNA, 19 nt, Artificial Sequence
  Description of Artificial Sequence: Synthetic oligonucleotide
gccguccacgaccucucug

SEQ ID NO: 2369270 - RNA, 19 nt, Artificial Sequence
  Description of Artificial Sequence: Synthetic oligonucleotide
cuugagggccucugcuggu

SEQ ID NO: 2369271 - RNA, 19 nt, Artificial Sequence
  Description of Artificial Sequence: Synthetic oligonucleotide
gcucuuggucagcugccga

SEQ ID NO: 2369272 - RNA, 19 nt, Artificial Sequence
  Description of Artificial Sequence: Synthetic oligonucleotide
gccuuucgcaucaugcucu

SEQ ID NO: 2369273 - RNA, 19 nt, Artificial Sequence
  Description of Artificial Sequence: Synthetic oligonucleotide
gcuggguuccugccauaca

SEQ ID NO: 2369274 - RNA, 19 nt, Artificial Sequence
  Description of Artificial Sequence: Synthetic oligonucleotide
cucgguguccaaugguguu

SEQ ID NO: 2369275 - RNA, 19 nt, Artificial Sequence
  Description of Artificial Sequence: Synthetic oligonucleotide
ccgcgcgccguccacgacc

SEQ ID NO: 2369276 - RNA, 19 nt, Artificial Sequence
  Description of Artificial Sequence: Synthetic oligonucleotide
cgacucgcagcagccagcg

SEQ ID NO: 2369277 - RNA, 19 nt, Artificial Sequence
  Description of Artificial Sequence: Synthetic oligonucleotide
ccuagguuagcccuucuuu

SEQ ID NO: 2369278 - RNA, 19 nt, Artificial Sequence
  Description of Artificial Sequence: Synthetic oligonucleotide
cgcgacucgcagcagccag

SEQ ID NO: 2369279 - RNA, 19 nt, Artificial Sequence
  Description of Artificial Sequence: Synthetic oligonucleotide
gaccccgcgugcagcagaa

SEQ ID NO: 2369280 - RNA, 19 nt, Artificial Sequence
  Description of Artificial Sequence: Synthetic oligonucleotide
cugcaguggccuuucgcau

SEQ ID NO: 2369281 - RNA, 19 nt, Artificial Sequence
  Description of Artificial Sequence: Synthetic oligonucleotide
gguguccaaugguguucac

SEQ ID NO: 2369282 - RNA, 19 nt, Artificial Sequence
  Description of Artificial Sequence: Synthetic oligonucleotide
ccugcacagccuuccagaa

SEQ ID NO: 2369283 - RNA, 19 nt, Artificial Sequence
  Description of Artificial Sequence: Synthetic oligonucleotide
cguccacgaccucucugcg

SEQ ID NO: 2369284 - RNA, 19 nt, Artificial Sequence
  Description of Artificial Sequence: Synthetic oligonucleotide
cgggagguccgaagugagg

SEQ ID NO: 2369285 - RNA, 19 nt, Artificial Sequence
  Description of Artificial Sequence: Synthetic oligonucleotide
cagcguaaugggcuggguu

SEQ ID NO: 2369286 - RNA, 19 nt, Artificial Sequence
  Description of Artificial Sequence: Synthetic oligonucleotide
acgcgacucgcagcagcca

SEQ ID NO: 2369287 - RNA, 19 nt, Artificial Sequence
  Description of Artificial Sequence: Synthetic oligonucleotide
ggaccccgcgugcagcaga

SEQ ID NO: 2369288 - RNA, 19 nt, Artificial Sequence
  Description of Artificial Sequence: Synthetic oligonucleotide
gcagagacuucuggaugga

SEQ ID NO: 2369289 - RNA, 19 nt, Artificial Sequence
  Description of Artificial Sequence: Synthetic oligonucleotide
ccggcaccaccucauccac

SEQ ID NO: 2369290 - RNA, 19 nt, Artificial Sequence
  Description of Artificial Sequence: Synthetic oligonucleotide
cacggaaggucuucucauu

SEQ ID NO: 2369291 - RNA, 19 nt, Artificial Sequence
  Description of Artificial Sequence: Synthetic oligonucleotide
accccgcgugcagcagaac

SEQ ID NO: 2369292 - RNA, 19 nt, Artificial Sequence
  Description of Artificial Sequence: Synthetic oligonucleotide
gcgagccuugcuguguauc

SEQ ID NO: 2369293 - RNA, 19 nt, Artificial Sequence
  Description of Artificial Sequence: Synthetic oligonucleotide
gcgacucgcagcagccagc

SEQ ID NO: 2369294 - RNA, 19 nt, Artificial Sequence
  Description of Artificial Sequence: Synthetic oligonucleotide
cccgaggcgggaccccgcg

SEQ ID NO: 2369295 - RNA, 19 nt, Artificial Sequence
  Description of Artificial Sequence: Synthetic oligonucleotide
cgaggcgggaccccgcgug

SEQ ID NO: 2369296 - RNA, 19 nt, Artificial Sequence
  Description of Artificial Sequence: Synthetic oligonucleotide
cgugcagagacuucuggau

SEQ ID NO: 2369297 - RNA, 19 nt, Artificial Sequence
  Description of Artificial Sequence: Synthetic oligonucleotide
cugcuugaucagguugucu

SEQ ID NO: 2369298 - RNA, 19 nt, Artificial Sequence
  Description of Artificial Sequence: Synthetic oligonucleotide
cucgcugcuugaucagguu

SEQ ID NO: 2369299 - RNA, 19 nt, Artificial Sequence
  Description of Artificial Sequence: Synthetic oligonucleotide
gggccaucacugagcgagc

SEQ ID NO: 2369300 - RNA, 19 nt, Artificial Sequence
  Description of Artificial Sequence: Synthetic oligonucleotide
gcuuggacauguagagccu

SEQ ID NO: 2369301 - RNA, 19 nt, Artificial Sequence
  Description of Artificial Sequence: Synthetic oligonucleotide
ccacgaccucucugcgccc

SEQ ID NO: 2369302 - RNA, 19 nt, Artificial Sequence
  Description of Artificial Sequence: Synthetic oligonucleotide
cuggcggguucuugaacuu

SEQ ID NO: 2369303 - RNA, 19 nt, Artificial Sequence
  Description of Artificial Sequence: Synthetic oligonucleotide
gccaucacugagcgagccu

SEQ ID NO: 2369304 - RNA, 19 nt, Artificial Sequence
  Description of Artificial Sequence: Synthetic oligonucleotide
ccacggaaggucuucucau

SEQ ID NO: 2369305 - RNA, 19 nt, Artificial Sequence
  Description of Artificial Sequence: Synthetic oligonucleotide
cccgggagguccgaaguga

SEQ ID NO: 2369306 - RNA, 19 nt, Artificial Sequence
  Description of Artificial Sequence: Synthetic oligonucleotide
ucgcagcagccagcgccau

SEQ ID NO: 2369307 - RNA, 19 nt, Artificial Sequence
  Description of Artificial Sequence: Synthetic oligonucleotide
gccgcguccuccgucucca

SEQ ID NO: 2369308 - RNA, 19 nt, Artificial Sequence
  Description of Artificial Sequence: Synthetic oligonucleotide
cgagccuugcuguguaucu

SEQ ID NO: 2369309 - RNA, 19 nt, Artificial Sequence
  Description of Artificial Sequence: Synthetic oligonucleotide
gggaccccgcgugcagcag

SEQ ID NO: 2369310 - RNA, 19 nt, Artificial Sequence
  Description of Artificial Sequence: Synthetic oligonucleotide
ccaucacugagcgagccuu

SEQ ID NO: 2369311 - RNA, 19 nt, Artificial Sequence
  Description of Artificial Sequence: Synthetic oligonucleotide
cgguguccaaugguguuca

SEQ ID NO: 2369312 - RNA, 19 nt, Artificial Sequence
  Description of Artificial Sequence: Synthetic oligonucleotide
cucugcgcccgaggcggga

SEQ ID NO: 2369313 - RNA, 19 nt, Artificial Sequence
  Description of Artificial Sequence: Synthetic oligonucleotide
gcgccgcgcgccguccacg

SEQ ID NO: 2369314 - RNA, 19 nt, Artificial Sequence
  Description of Artificial Sequence: Synthetic oligonucleotide
gcgauucccgccgcguccu

SEQ ID NO: 2369315 - RNA, 19 nt, Artificial Sequence
  Description of Artificial Sequence: Synthetic oligonucleotide
ccucaaguccaggccagcu

SEQ ID NO: 2369316 - RNA, 19 nt, Artificial Sequence
  Description of Artificial Sequence: Synthetic oligonucleotide
cugccucucgcugcuugau

SEQ ID NO: 2369317 - RNA, 19 nt, Artificial Sequence
  Description of Artificial Sequence: Synthetic oligonucleotide
cgaagcgccgcgcgccguc

SEQ ID NO: 2369318 - RNA, 19 nt, Artificial Sequence
  Description of Artificial Sequence: Synthetic oligonucleotide
cgugcagcagaacgcgacu

SEQ ID NO: 2369319 - RNA, 19 nt, Artificial Sequence
  Description of Artificial Sequence: Synthetic oligonucleotide
cgcgugcagcagaacgcga

SEQ ID NO: 2369320 - RNA, 19 nt, Artificial Sequence
  Description of Artificial Sequence: Synthetic oligonucleotide
ccuuucgcaucaugcucuu

SEQ ID NO: 2369321 - RNA, 19 nt, Artificial Sequence
  Description of Artificial Sequence: Synthetic oligonucleotide
cgggaccccgcgugcagca

SEQ ID NO: 2369322 - RNA, 19 nt, Artificial Sequence
  Description of Artificial Sequence: Synthetic oligonucleotide
gccgcgcgccguccacgac

SEQ ID NO: 2369323 - RNA, 19 nt, Artificial Sequence
  Description of Artificial Sequence: Synthetic oligonucleotide
gggcuggguuccugccaua

SEQ ID NO: 2369324 - RNA, 19 nt, Artificial Sequence
  Description of Artificial Sequence: Synthetic oligonucleotide
gcacgcucugcugcucggu

SEQ ID NO: 2369325 - RNA, 19 nt, Artificial Sequence
  Description of Artificial Sequence: Synthetic oligonucleotide
cgcgccguccacgaccucu

SEQ ID NO: 2369326 - RNA, 19 nt, Artificial Sequence
  Description of Artificial Sequence: Synthetic oligonucleotide
cgauucccgccgcguccuc

SEQ ID NO: 2369327 - RNA, 19 nt, Artificial Sequence
  Description of Artificial Sequence: Synthetic oligonucleotide
cgcgcgccguccacgaccu

SEQ ID NO: 2369328 - RNA, 19 nt, Artificial Sequence
  Description of Artificial Sequence: Synthetic oligonucleotide
cgccgcgcgccguccacga

SEQ ID NO: 2369329 - RNA, 19 nt, Artificial Sequence
  Description of Artificial Sequence: Synthetic oligonucleotide
cguaaugggcuggguuccu

SEQ ID NO: 2369330 - RNA, 19 nt, Artificial Sequence
  Description of Artificial Sequence: Synthetic oligonucleotide
gcgaagcgccgcgcgccgu

SEQ ID NO: 2369331 - RNA, 19 nt, Artificial Sequence
  Description of Artificial Sequence: Synthetic oligonucleotide
ccgaggcgggaccccgcgu

SEQ ID NO: 2369332 - RNA, 19 nt, Artificial Sequence
  Description of Artificial Sequence: Synthetic oligonucleotide
cgccguccacgaccucucu

SEQ ID NO: 2369333 - RNA, 19 nt, Artificial Sequence
  Description of Artificial Sequence: Synthetic oligonucleotide
aauaacaauauauacaccu

SEQ ID NO: 2369334 - RNA, 19 nt, Artificial Sequence
  Description of Artificial Sequence: Synthetic oligonucleotide
aaauauagcauauagacaa

SEQ ID NO: 2369335 - RNA, 19 nt, Artificial Sequence
  Description of Artificial Sequence: Synthetic oligonucleotide
aaaucuuugggcaagaggc

SEQ ID NO: 2369336 - RNA, 19 nt, Artificial Sequence
  Description of Artificial Sequence: Synthetic oligonucleotide
uuuaauaacaauauauaca

SEQ ID NO: 2369337 - RNA, 19 nt, Artificial Sequence
  Description of Artificial Sequence: Synthetic oligonucleotide
aauauuaauagauuaaaau

SEQ ID NO: 2369338 - RNA, 19 nt, Artificial Sequence
  Description of Artificial Sequence: Synthetic oligonucleotide
aaugcugccauauccagcg

SEQ ID NO: 2369339 - RNA, 19 nt, Artificial Sequence
  Description of Artificial Sequence: Synthetic oligonucleotide
uuaauagauuaaaauauag

SEQ ID NO: 2369340 - RNA, 19 nt, Artificial Sequence
  Description of Artificial Sequence: Synthetic oligonucleotide
auauaaggaaacuuguuac

SEQ ID NO: 2369341 - RNA, 19 nt, Artificial Sequence
  Description of Artificial Sequence: Synthetic oligonucleotide
uaaauaauuaagaggacug

SEQ ID NO: 2369342 - RNA, 19 nt, Artificial Sequence
  Description of Artificial Sequence: Synthetic oligonucleotide
aauccuaucaaacugugga

SEQ ID NO: 2369343 - RNA, 19 nt, Artificial Sequence
  Description of Artificial Sequence: Synthetic oligonucleotide
auucuuuucaugaugaacc

SEQ ID NO: 2369344 - RNA, 19 nt, Artificial Sequence
  Description of Artificial Sequence: Synthetic oligonucleotide
uguauuuaugcuucgaugc

SEQ ID NO: 2369345 - RNA, 19 nt, Artificial Sequence
  Description of Artificial Sequence: Synthetic oligonucleotide
aguucuccuaaccaaaucc

SEQ ID NO: 2369346 - RNA, 19 nt, Artificial Sequence
  Description of Artificial Sequence: Synthetic oligonucleotide
acaguugaaaucuuugggc

SEQ ID NO: 2369347 - RNA, 19 nt, Artificial Sequence
  Description of Artificial Sequence: Synthetic oligonucleotide
cuauauaaauaauuaagag

SEQ ID NO: 2369348 - RNA, 19 nt, Artificial Sequence
  Description of Artificial Sequence: Synthetic oligonucleotide
cuuguuacaagucauaaug

SEQ ID NO: 2369349 - RNA, 19 nt, Artificial Sequence
  Description of Artificial Sequence: Synthetic oligonucleotide
uuacaagucauaaugcugc

SEQ ID NO: 2369350 - RNA, 19 nt, Artificial Sequence
  Description of Artificial Sequence: Synthetic oligonucleotide
aaucuugacuucuuccacc

SEQ ID NO: 2369351 - RNA, 19 nt, Artificial Sequence
  Description of Artificial Sequence: Synthetic oligonucleotide
aauuaagaggacuggagug

SEQ ID NO: 2369352 - RNA, 19 nt, Artificial Sequence
  Description of Artificial Sequence: Synthetic oligonucleotide
ugacauauaaggaaacuug

SEQ ID NO: 2369353 - RNA, 19 nt, Artificial Sequence
  Description of Artificial Sequence: Synthetic oligonucleotide
aacagaccuauauacaaag

SEQ ID NO: 2369354 - RNA, 19 nt, Artificial Sequence
  Description of Artificial Sequence: Synthetic oligonucleotide
aaaaucuugacuucuucca

SEQ ID NO: 2369355 - RNA, 19 nt, Artificial Sequence
  Description of Artificial Sequence: Synthetic oligonucleotide
uaaauucuuuucaugauga

SEQ ID NO: 2369356 - RNA, 19 nt, Artificial Sequence
  Description of Artificial Sequence: Synthetic oligonucleotide
aagaccacagcuaagcuac

SEQ ID NO: 2369357 - RNA, 19 nt, Artificial Sequence
  Description of Artificial Sequence: Synthetic oligonucleotide
uacaccuauagaaaagggg

SEQ ID NO: 2369358 - RNA, 19 nt, Artificial Sequence
  Description of Artificial Sequence: Synthetic oligonucleotide
ucauaaugcugccauaucc

SEQ ID NO: 2369359 - RNA, 19 nt, Artificial Sequence
  Description of Artificial Sequence: Synthetic oligonucleotide
aaaucuugacuucuuccac

SEQ ID NO: 2369360 - RNA, 19 nt, Artificial Sequence
  Description of Artificial Sequence: Synthetic oligonucleotide
ucaugaugaaccuauauaa

SEQ ID NO: 2369361 - RNA, 19 nt, Artificial Sequence
  Description of Artificial Sequence: Synthetic oligonucleotide
uagauuaaaauauagcaua

SEQ ID NO: 2369362 - RNA, 19 nt, Artificial Sequence
  Description of Artificial Sequence: Synthetic oligonucleotide
aauguaaauggaugaguag

SEQ ID NO: 2369363 - RNA, 19 nt, Artificial Sequence
  Description of Artificial Sequence: Synthetic oligonucleotide
gcaacaagaauguaaaugg

SEQ ID NO: 2369364 - RNA, 19 nt, Artificial Sequence
  Description of Artificial Sequence: Synthetic oligonucleotide
aguuccagaauucugagca

SEQ ID NO: 2369365 - RNA, 19 nt, Artificial Sequence
  Description of Artificial Sequence: Synthetic oligonucleotide
ugugauagaaagucaaggc

SEQ ID NO: 2369366 - RNA, 19 nt, Artificial Sequence
  Description of Artificial Sequence: Synthetic oligonucleotide
aguacuucugcauucuaac

SEQ ID NO: 2369367 - RNA, 19 nt, Artificial Sequence
  Description of Artificial Sequence: Synthetic oligonucleotide
aguaagucauuuuauacca

SEQ ID NO: 2369368 - RNA, 19 nt, Artificial Sequence
  Description of Artificial Sequence: Synthetic oligonucleotide
uauacaccuauagaaaagg

SEQ ID NO: 2369369 - RNA, 19 nt, Artificial Sequence
  Description of Artificial Sequence: Synthetic oligonucleotide
uuaguaagucauuuuauac

SEQ ID NO: 2369370 - RNA, 19 nt, Artificial Sequence
  Description of Artificial Sequence: Synthetic oligonucleotide
uagcauauagacaaaguac

SEQ ID NO: 2369371 - RNA, 19 nt, Artificial Sequence
  Description of Artificial Sequence: Synthetic oligonucleotide
aauggaugaguaguucucc

SEQ ID NO: 2369372 - RNA, 19 nt, Artificial Sequence
  Description of Artificial Sequence: Synthetic oligonucleotide
ugcauucuaaccuuguuug

SEQ ID NO: 2369373 - RNA, 19 nt, Artificial Sequence
  Description of Artificial Sequence: Synthetic oligonucleotide
auguaaauucuuuucauga

SEQ ID NO: 2369374 - RNA, 19 nt, Artificial Sequence
  Description of Artificial Sequence: Synthetic oligonucleotide
ugaaccuauauaaauaauu

SEQ ID NO: 2369375 - RNA, 19 nt, Artificial Sequence
  Description of Artificial Sequence: Synthetic oligonucleotide
aguaucaucaaaguuggag

SEQ ID NO: 2369376 - RNA, 19 nt, Artificial Sequence
  Description of Artificial Sequence: Synthetic oligonucleotide
uuugccuguagacucauca

SEQ ID NO: 2369377 - RNA, 19 nt, Artificial Sequence
  Description of Artificial Sequence: Synthetic oligonucleotide
caucaguugugauagaaag

SEQ ID NO: 2369378 - RNA, 19 nt, Artificial Sequence
  Description of Artificial Sequence: Synthetic oligonucleotide
uaauuaagaggacuggagu

SEQ ID NO: 2369379 - RNA, 19 nt, Artificial Sequence
  Description of Artificial Sequence: Synthetic oligonucleotide
aaauaucuguauuuaugcu

SEQ ID NO: 2369380 - RNA, 19 nt, Artificial Sequence
  Description of Artificial Sequence: Synthetic oligonucleotide
uugugauagaaagucaagg

SEQ ID NO: 2369381 - RNA, 19 nt, Artificial Sequence
  Description of Artificial Sequence: Synthetic oligonucleotide
auuaagaggacuggagugc

SEQ ID NO: 2369382 - RNA, 19 nt, Artificial Sequence
  Description of Artificial Sequence: Synthetic oligonucleotide
uuccuuagauaaaauaucu

SEQ ID NO: 2369383 - RNA, 19 nt, Artificial Sequence
  Description of Artificial Sequence: Synthetic oligonucleotide
aaguacacaguugaaaucu

SEQ ID NO: 2369384 - RNA, 19 nt, Artificial Sequence
  Description of Artificial Sequence: Synthetic oligonucleotide
uuugagugacauauaagga

SEQ ID NO: 2369385 - RNA, 19 nt, Artificial Sequence
  Description of Artificial Sequence: Synthetic oligonucleotide
aacuguggaucacagcagg

SEQ ID NO: 2369386 - RNA, 19 nt, Artificial Sequence
  Description of Artificial Sequence: Synthetic oligonucleotide
uauccagcgagaaaagacc

SEQ ID NO: 2369387 - RNA, 19 nt, Artificial Sequence
  Description of Artificial Sequence: Synthetic oligonucleotide
uaugcuucgaugcaagccu

SEQ ID NO: 2369388 - RNA, 19 nt, Artificial Sequence
  Description of Artificial Sequence: Synthetic oligonucleotide
gaaaagaccacagcuaagc

SEQ ID NO: 2369389 - RNA, 19 nt, Artificial Sequence
  Description of Artificial Sequence: Synthetic oligonucleotide
aauaauuaagaggacugga

SEQ ID NO: 2369390 - RNA, 19 nt, Artificial Sequence
  Description of Artificial Sequence: Synthetic oligonucleotide
acugauguggucuuauuug

SEQ ID NO: 2369391 - RNA, 19 nt, Artificial Sequence
  Description of Artificial Sequence: Synthetic oligonucleotide
aaccaaauccuaucaaacu

SEQ ID NO: 2369392 - RNA, 19 nt, Artificial Sequence
  Description of Artificial Sequence: Synthetic oligonucleotide
auaaauaauuaagaggacu

SEQ ID NO: 2369393 - RNA, 19 nt, Artificial Sequence
  Description of Artificial Sequence: Synthetic oligonucleotide
agaccuauauacaaaguac

SEQ ID NO: 2369394 - RNA, 19 nt, Artificial Sequence
  Description of Artificial Sequence: Synthetic oligonucleotide
acaaaguacuucugcauuc

SEQ ID NO: 2369395 - RNA, 19 nt, Artificial Sequence
  Description of Artificial Sequence: Synthetic oligonucleotide
uuguuacaagucauaaugc

SEQ ID NO: 2369396 - RNA, 19 nt, Artificial Sequence
  Description of Artificial Sequence: Synthetic oligonucleotide
uugagugacauauaaggaa

SEQ ID NO: 2369397 - RNA, 19 nt, Artificial Sequence
  Description of Artificial Sequence: Synthetic oligonucleotide
ugcuccaacauguaaauuc

SEQ ID NO: 2369398 - RNA, 19 nt, Artificial Sequence
  Description of Artificial Sequence: Synthetic oligonucleotide
ugagugacauauaaggaaa

SEQ ID NO: 2369399 - RNA, 19 nt, Artificial Sequence
  Description of Artificial Sequence: Synthetic oligonucleotide
gaugaaccuauauaaauaa

SEQ ID NO: 2369400 - RNA, 19 nt, Artificial Sequence
  Description of Artificial Sequence: Synthetic oligonucleotide
uaaauggaugaguaguucu

SEQ ID NO: 2369401 - RNA, 19 nt, Artificial Sequence
  Description of Artificial Sequence: Synthetic oligonucleotide
uguuugagugacauauaag

SEQ ID NO: 2369402 - RNA, 19 nt, Artificial Sequence
  Description of Artificial Sequence: Synthetic oligonucleotide
ugaugaaccuauauaaaua

SEQ ID NO: 2369403 - RNA, 19 nt, Artificial Sequence
  Description of Artificial Sequence: Synthetic oligonucleotide
uuuuaguaagucauuuuau

SEQ ID NO: 2369404 - RNA, 19 nt, Artificial Sequence
  Description of Artificial Sequence: Synthetic oligonucleotide
uuuaguaagucauuuuaua

SEQ ID NO: 2369405 - RNA, 19 nt, Artificial Sequence
  Description of Artificial Sequence: Synthetic oligonucleotide
ugaguaguucuccuaacca

SEQ ID NO: 2369406 - RNA, 19 nt, Artificial Sequence
  Description of Artificial Sequence: Synthetic oligonucleotide
caaacuguggaucacagca

SEQ ID NO: 2369407 - RNA, 19 nt, Artificial Sequence
  Description of Artificial Sequence: Synthetic oligonucleotide
auagcauauagacaaagua

SEQ ID NO: 2369408 - RNA, 19 nt, Artificial Sequence
  Description of Artificial Sequence: Synthetic oligonucleotide
uaacaauauauacaccuau

SEQ ID NO: 2369409 - RNA, 19 nt, Artificial Sequence
  Description of Artificial Sequence: Synthetic oligonucleotide
gagaacaugucaccuaagc

SEQ ID NO: 2369410 - RNA, 19 nt, Artificial Sequence
  Description of Artificial Sequence: Synthetic oligonucleotide
auauccagcgagaaaagac

SEQ ID NO: 2369411 - RNA, 19 nt, Artificial Sequence
  Description of Artificial Sequence: Synthetic oligonucleotide
uacaccaucaucucugacu

SEQ ID NO: 2369412 - RNA, 19 nt, Artificial Sequence
  Description of Artificial Sequence: Synthetic oligonucleotide
aaaguuggagaaaaucuug

SEQ ID NO: 2369413 - RNA, 19 nt, Artificial Sequence
  Description of Artificial Sequence: Synthetic oligonucleotide
uaaggaaacuuguuacaag

SEQ ID NO: 2369414 - RNA, 19 nt, Artificial Sequence
  Description of Artificial Sequence: Synthetic oligonucleotide
aaggccaucuccuuugccu

SEQ ID NO: 2369415 - RNA, 19 nt, Artificial Sequence
  Description of Artificial Sequence: Synthetic oligonucleotide
ucgacgggaacacugagcu

SEQ ID NO: 2369416 - RNA, 19 nt, Artificial Sequence
  Description of Artificial Sequence: Synthetic oligonucleotide
ugcaagaccagagugccgg

SEQ ID NO: 2369417 - RNA, 19 nt, Artificial Sequence
  Description of Artificial Sequence: Synthetic oligonucleotide
aaauggaugaguaguucuc

SEQ ID NO: 2369418 - RNA, 19 nt, Artificial Sequence
  Description of Artificial Sequence: Synthetic oligonucleotide
aggacuggagugcaagacc

SEQ ID NO: 2369419 - RNA, 19 nt, Artificial Sequence
  Description of Artificial Sequence: Synthetic oligonucleotide
gaaagucaaggccaucucc

SEQ ID NO: 2369420 - RNA, 19 nt, Artificial Sequence
  Description of Artificial Sequence: Synthetic oligonucleotide
uuguuugagugacauauaa

SEQ ID NO: 2369421 - RNA, 19 nt, Artificial Sequence
  Description of Artificial Sequence: Synthetic oligonucleotide
gaacaugucaccuaagcua

SEQ ID NO: 2369422 - RNA, 19 nt, Artificial Sequence
  Description of Artificial Sequence: Synthetic oligonucleotide
agcgagaaaagaccacagc

SEQ ID NO: 2369423 - RNA, 19 nt, Artificial Sequence
  Description of Artificial Sequence: Synthetic oligonucleotide
cauguaaauucuuuucaug

SEQ ID NO: 2369424 - RNA, 19 nt, Artificial Sequence
  Description of Artificial Sequence: Synthetic oligonucleotide
guaucaucaaaguuggaga

SEQ ID NO: 2369425 - RNA, 19 nt, Artificial Sequence
  Description of Artificial Sequence: Synthetic oligonucleotide
auaauuaagaggacuggag

SEQ ID NO: 2369426 - RNA, 19 nt, Artificial Sequence
  Description of Artificial Sequence: Synthetic oligonucleotide
acaagaauguaaauggaug

SEQ ID NO: 2369427 - RNA, 19 nt, Artificial Sequence
  Description of Artificial Sequence: Synthetic oligonucleotide
agcucaucaguugugauag

SEQ ID NO: 2369428 - RNA, 19 nt, Artificial Sequence
  Description of Artificial Sequence: Synthetic oligonucleotide
uuucucgacgggaacacug

SEQ ID NO: 2369429 - RNA, 19 nt, Artificial Sequence
  Description of Artificial Sequence: Synthetic oligonucleotide
uccuuagauaaaauaucug

SEQ ID NO: 2369430 - RNA, 19 nt, Artificial Sequence
  Description of Artificial Sequence: Synthetic oligonucleotide
agcauauagacaaaguacu

SEQ ID NO: 2369431 - RNA, 19 nt, Artificial Sequence
  Description of Artificial Sequence: Synthetic oligonucleotide
uaucaucaaaguuggagaa

SEQ ID NO: 2369432 - RNA, 19 nt, Artificial Sequence
  Description of Artificial Sequence: Synthetic oligonucleotide
ucaccuaagcuauuuuccc

SEQ ID NO: 2369433 - RNA, 19 nt, Artificial Sequence
  Description of Artificial Sequence: Synthetic oligonucleotide
auagauuaaaauauagcau

SEQ ID NO: 2369434 - RNA, 19 nt, Artificial Sequence
  Description of Artificial Sequence: Synthetic oligonucleotide
uucuaaccuuguuugagug

SEQ ID NO: 2369435 - RNA, 19 nt, Artificial Sequence
  Description of Artificial Sequence: Synthetic oligonucleotide
auguaaauggaugaguagu

SEQ ID NO: 2369436 - RNA, 19 nt, Artificial Sequence
  Description of Artificial Sequence: Synthetic oligonucleotide
uccuaaccaaauccuauca

SEQ ID NO: 2369437 - RNA, 19 nt, Artificial Sequence
  Description of Artificial Sequence: Synthetic oligonucleotide
ucuguauuuaugcuucgau

SEQ ID NO: 2369438 - RNA, 19 nt, Artificial Sequence
  Description of Artificial Sequence: Synthetic oligonucleotide
aagaccagagugccggaag

SEQ ID NO: 2369439 - RNA, 19 nt, Artificial Sequence
  Description of Artificial Sequence: Synthetic oligonucleotide
uguaaauggaugaguaguu

SEQ ID NO: 2369440 - RNA, 19 nt, Artificial Sequence
  Description of Artificial Sequence: Synthetic oligonucleotide
uuaugcuucgaugcaagcc

SEQ ID NO: 2369441 - RNA, 19 nt, Artificial Sequence
  Description of Artificial Sequence: Synthetic oligonucleotide
auaaugcugccauauccag

SEQ ID NO: 2369442 - RNA, 19 nt, Artificial Sequence
  Description of Artificial Sequence: Synthetic oligonucleotide
caagaauguaaauggauga

SEQ ID NO: 2369443 - RNA, 19 nt, Artificial Sequence
  Description of Artificial Sequence: Synthetic oligonucleotide
caacauguaaauucuuuuc

SEQ ID NO: 2369444 - RNA, 19 nt, Artificial Sequence
  Description of Artificial Sequence: Synthetic oligonucleotide
cuguauuuaugcuucgaug

SEQ ID NO: 2369445 - RNA, 19 nt, Artificial Sequence
  Description of Artificial Sequence: Synthetic oligonucleotide
cuaagcuacauuuuaguaa

SEQ ID NO: 2369446 - RNA, 19 nt, Artificial Sequence
  Description of Artificial Sequence: Synthetic oligonucleotide
guaggaaaauauuaauaga

SEQ ID NO: 2369447 - RNA, 19 nt, Artificial Sequence
  Description of Artificial Sequence: Synthetic oligonucleotide
ucuuauuugagcagccuuu

SEQ ID NO: 2369448 - RNA, 19 nt, Artificial Sequence
  Description of Artificial Sequence: Synthetic oligonucleotide
auauagcauauagacaaag

SEQ ID NO: 2369449 - RNA, 19 nt, Artificial Sequence
  Description of Artificial Sequence: Synthetic oligonucleotide
auuugagcagccuuuacuu

SEQ ID NO: 2369450 - RNA, 19 nt, Artificial Sequence
  Description of Artificial Sequence: Synthetic oligonucleotide
aacaagaauguaaauggau

SEQ ID NO: 2369451 - RNA, 19 nt, Artificial Sequence
  Description of Artificial Sequence: Synthetic oligonucleotide
acaccuauagaaaagggga

SEQ ID NO: 2369452 - RNA, 19 nt, Artificial Sequence
  Description of Artificial Sequence: Synthetic oligonucleotide
accuauauacaaaguacac

SEQ ID NO: 2369453 - RNA, 19 nt, Artificial Sequence
  Description of Artificial Sequence: Synthetic oligonucleotide
cagaauucugagcagcccc

SEQ ID NO: 2369454 - RNA, 19 nt, Artificial Sequence
  Description of Artificial Sequence: Synthetic oligonucleotide
agaaccguggcaauggaag

SEQ ID NO: 2369455 - RNA, 19 nt, Artificial Sequence
  Description of Artificial Sequence: Synthetic oligonucleotide
ugauguggucuuauuugag

SEQ ID NO: 2369456 - RNA, 19 nt, Artificial Sequence
  Description of Artificial Sequence: Synthetic oligonucleotide
agaaagucaaggccaucuc

SEQ ID NO: 2369457 - RNA, 19 nt, Artificial Sequence
  Description of Artificial Sequence: Synthetic oligonucleotide
aaauccuaucaaacugugg

SEQ ID NO: 2369458 - RNA, 19 nt, Artificial Sequence
  Description of Artificial Sequence: Synthetic oligonucleotide
gacuacaccaucaucucug

SEQ ID NO: 2369459 - RNA, 19 nt, Artificial Sequence
  Description of Artificial Sequence: Synthetic oligonucleotide
gaaccuauauaaauaauua

SEQ ID NO: 2369460 - RNA, 19 nt, Artificial Sequence
  Description of Artificial Sequence: Synthetic oligonucleotide
cuaaccuuguuugagugac

SEQ ID NO: 2369461 - RNA, 19 nt, Artificial Sequence
  Description of Artificial Sequence: Synthetic oligonucleotide
agcuacauuuuaguaaguc

SEQ ID NO: 2369462 - RNA, 19 nt, Artificial Sequence
  Description of Artificial Sequence: Synthetic oligonucleotide
gaaccguggcaauggaagg

SEQ ID NO: 2369463 - RNA, 19 nt, Artificial Sequence
  Description of Artificial Sequence: Synthetic oligonucleotide
uguagacucaucaccuccu

SEQ ID NO: 2369464 - RNA, 19 nt, Artificial Sequence
  Description of Artificial Sequence: Synthetic oligonucleotide
agugccggaaguuguuugg

SEQ ID NO: 2369465 - RNA, 19 nt, Artificial Sequence
  Description of Artificial Sequence: Synthetic oligonucleotide
aacaugucaccuaagcuau

SEQ ID NO: 2369466 - RNA, 19 nt, Artificial Sequence
  Description of Artificial Sequence: Synthetic oligonucleotide
ugucaccuaagcuauuuuc

SEQ ID NO: 2369467 - RNA, 19 nt, Artificial Sequence
  Description of Artificial Sequence: Synthetic oligonucleotide
agcuaagcuacauuuuagu

SEQ ID NO: 2369468 - RNA, 19 nt, Artificial Sequence
  Description of Artificial Sequence: Synthetic oligonucleotide
acauguaaauucuuuucau

SEQ ID NO: 2369469 - RNA, 19 nt, Artificial Sequence
  Description of Artificial Sequence: Synthetic oligonucleotide
ucagaucccuuuuaauaac

SEQ ID NO: 2369470 - RNA, 19 nt, Artificial Sequence
  Description of Artificial Sequence: Synthetic oligonucleotide
ugacaguuccagaauucug

SEQ ID NO: 2369471 - RNA, 19 nt, Artificial Sequence
  Description of Artificial Sequence: Synthetic oligonucleotide
ucuccuaaccaaauccuau

SEQ ID NO: 2369472 - RNA, 19 nt, Artificial Sequence
  Description of Artificial Sequence: Synthetic oligonucleotide
gcaagaggcaacaagaaug

SEQ ID NO: 2369473 - RNA, 19 nt, Artificial Sequence
  Description of Artificial Sequence: Synthetic oligonucleotide
aacuuguuacaagucauaa

SEQ ID NO: 2369474 - RNA, 19 nt, Artificial Sequence
  Description of Artificial Sequence: Synthetic oligonucleotide
aagaggacuggagugcaag

SEQ ID NO: 2369475 - RNA, 19 nt, Artificial Sequence
  Description of Artificial Sequence: Synthetic oligonucleotide
ucaucaguugugauagaaa

SEQ ID NO: 2369476 - RNA, 19 nt, Artificial Sequence
  Description of Artificial Sequence: Synthetic oligonucleotide
cauucuaaccuuguuugag

SEQ ID NO: 2369477 - RNA, 19 nt, Artificial Sequence
  Description of Artificial Sequence: Synthetic oligonucleotide
aaauucuuuucaugaugaa

SEQ ID NO: 2369478 - RNA, 19 nt, Artificial Sequence
  Description of Artificial Sequence: Synthetic oligonucleotide
ggcaacaagaauguaaaug

SEQ ID NO: 2369479 - RNA, 19 nt, Artificial Sequence
  Description of Artificial Sequence: Synthetic oligonucleotide
uuuaugcuucgaugcaagc

SEQ ID NO: 2369480 - RNA, 19 nt, Artificial Sequence
  Description of Artificial Sequence: Synthetic oligonucleotide
gaccuauauacaaaguaca

SEQ ID NO: 2369481 - RNA, 19 nt, Artificial Sequence
  Description of Artificial Sequence: Synthetic oligonucleotide
uugagcagccuuuacuuaa

SEQ ID NO: 2369482 - RNA, 19 nt, Artificial Sequence
  Description of Artificial Sequence: Synthetic oligonucleotide
accuaagcuauuuucccca

SEQ ID NO: 2369483 - RNA, 19 nt, Artificial Sequence
  Description of Artificial Sequence: Synthetic oligonucleotide
cuguagacucaucaccucc

SEQ ID NO: 2369484 - RNA, 19 nt, Artificial Sequence
  Description of Artificial Sequence: Synthetic oligonucleotide
gaauguaaauggaugagua

SEQ ID NO: 2369485 - RNA, 19 nt, Artificial Sequence
  Description of Artificial Sequence: Synthetic oligonucleotide
gucaccuaagcuauuuucc

SEQ ID NO: 2369486 - RNA, 19 nt, Artificial Sequence
  Description of Artificial Sequence: Synthetic oligonucleotide
ucuaaccuuguuugaguga

SEQ ID NO: 2369487 - RNA, 19 nt, Artificial Sequence
  Description of Artificial Sequence: Synthetic oligonucleotide
caccuauagaaaaggggag

SEQ ID NO: 2369488 - RNA, 19 nt, Artificial Sequence
  Description of Artificial Sequence: Synthetic oligonucleotide
cagccuuuacuuaaacuug

SEQ ID NO: 2369489 - RNA, 19 nt, Artificial Sequence
  Description of Artificial Sequence: Synthetic oligonucleotide
acagcuaagcuacauuuua

SEQ ID NO: 2369490 - RNA, 19 nt, Artificial Sequence
  Description of Artificial Sequence: Synthetic oligonucleotide
auaaggaaacuuguuacaa

SEQ ID NO: 2369491 - RNA, 19 nt, Artificial Sequence
  Description of Artificial Sequence: Synthetic oligonucleotide
ugcuuccuuagauaaaaua

SEQ ID NO: 2369492 - RNA, 19 nt, Artificial Sequence
  Description of Artificial Sequence: Synthetic oligonucleotide
ggaaacuuguuacaaguca

SEQ ID NO: 2369493 - RNA, 19 nt, Artificial Sequence
  Description of Artificial Sequence: Synthetic oligonucleotide
ucaaacuguggaucacagc

SEQ ID NO: 2369494 - RNA, 19 nt, Artificial Sequence
  Description of Artificial Sequence: Synthetic oligonucleotide
auuuaugcuucgaugcaag

SEQ ID NO: 2369495 - RNA, 19 nt, Artificial Sequence
  Description of Artificial Sequence: Synthetic oligonucleotide
ugugggagaaccguggcaa

SEQ ID NO: 2369496 - RNA, 19 nt, Artificial Sequence
  Description of Artificial Sequence: Synthetic oligonucleotide
uacaagucauaaugcugcc

SEQ ID NO: 2369497 - RNA, 19 nt, Artificial Sequence
  Description of Artificial Sequence: Synthetic oligonucleotide
augaccaccugcuccaaca

SEQ ID NO: 2369498 - RNA, 19 nt, Artificial Sequence
  Description of Artificial Sequence: Synthetic oligonucleotide
uuuguccugcacagcaaca

SEQ ID NO: 2369499 - RNA, 19 nt, Artificial Sequence
  Description of Artificial Sequence: Synthetic oligonucleotide
caguugaaaucuuugggca

SEQ ID NO: 2369500 - RNA, 19 nt, Artificial Sequence
  Description of Artificial Sequence: Synthetic oligonucleotide
uuauuugagcagccuuuac

SEQ ID NO: 2369501 - RNA, 19 nt, Artificial Sequence
  Description of Artificial Sequence: Synthetic oligonucleotide
aacacugagcucaucaguu

SEQ ID NO: 2369502 - RNA, 19 nt, Artificial Sequence
  Description of Artificial Sequence: Synthetic oligonucleotide
caccuaagcuauuuucccc

SEQ ID NO: 2369503 - RNA, 19 nt, Artificial Sequence
  Description of Artificial Sequence: Synthetic oligonucleotide
gucaaggccaucuccuuug

SEQ ID NO: 2369504 - RNA, 19 nt, Artificial Sequence
  Description of Artificial Sequence: Synthetic oligonucleotide
uggucuuauuugagcagcc

SEQ ID NO: 2369505 - RNA, 19 nt, Artificial Sequence
  Description of Artificial Sequence: Synthetic oligonucleotide
agaagaacaugaccaccug

SEQ ID NO: 2369506 - RNA, 19 nt, Artificial Sequence
  Description of Artificial Sequence: Synthetic oligonucleotide
cuggugagaacaugucacc

SEQ ID NO: 2369507 - RNA, 19 nt, Artificial Sequence
  Description of Artificial Sequence: Synthetic oligonucleotide
gaggcaacaagaauguaaa

SEQ ID NO: 2369508 - RNA, 19 nt, Artificial Sequence
  Description of Artificial Sequence: Synthetic oligonucleotide
uggagugcaagaccagagu

SEQ ID NO: 2369509 - RNA, 19 nt, Artificial Sequence
  Description of Artificial Sequence: Synthetic oligonucleotide
uuaagaggacuggagugca

SEQ ID NO: 2369510 - RNA, 19 nt, Artificial Sequence
  Description of Artificial Sequence: Synthetic oligonucleotide
acuuguuacaagucauaau

SEQ ID NO: 2369511 - RNA, 19 nt, Artificial Sequence
  Description of Artificial Sequence: Synthetic oligonucleotide
cagcuaagcuacauuuuag

SEQ ID NO: 2369512 - RNA, 19 nt, Artificial Sequence
  Description of Artificial Sequence: Synthetic oligonucleotide
uguugacuacaccaucauc

SEQ ID NO: 2369513 - RNA, 19 nt, Artificial Sequence
  Description of Artificial Sequence: Synthetic oligonucleotide
uccuaucaaacuguggauc

SEQ ID NO: 2369514 - RNA, 19 nt, Artificial Sequence
  Description of Artificial Sequence: Synthetic oligonucleotide
agauuaaaauauagcauau

SEQ ID NO: 2369515 - RNA, 19 nt, Artificial Sequence
  Description of Artificial Sequence: Synthetic oligonucleotide
gaguaguucuccuaaccaa

SEQ ID NO: 2369516 - RNA, 19 nt, Artificial Sequence
  Description of Artificial Sequence: Synthetic oligonucleotide
aguugugauagaaagucaa

SEQ ID NO: 2369517 - RNA, 19 nt, Artificial Sequence
  Description of Artificial Sequence: Synthetic oligonucleotide
aguugaaaucuuugggcaa

SEQ ID NO: 2369518 - RNA, 19 nt, Artificial Sequence
  Description of Artificial Sequence: Synthetic oligonucleotide
uggagaaaaucuugacuuc

SEQ ID NO: 2369519 - RNA, 19 nt, Artificial Sequence
  Description of Artificial Sequence: Synthetic oligonucleotide
aaccuuguuugagugacau

SEQ ID NO: 2369520 - RNA, 19 nt, Artificial Sequence
  Description of Artificial Sequence: Synthetic oligonucleotide
ugggcaacagaccuauaua

SEQ ID NO: 2369521 - RNA, 19 nt, Artificial Sequence
  Description of Artificial Sequence: Synthetic oligonucleotide
agaggcaacaagaauguaa

SEQ ID NO: 2369522 - RNA, 19 nt, Artificial Sequence
  Description of Artificial Sequence: Synthetic oligonucleotide
uucucgacgggaacacuga

SEQ ID NO: 2369523 - RNA, 19 nt, Artificial Sequence
  Description of Artificial Sequence: Synthetic oligonucleotide
ggagugcaagaccagagug

SEQ ID NO: 2369524 - RNA, 19 nt, Artificial Sequence
  Description of Artificial Sequence: Synthetic oligonucleotide
cuuuucaugaugaaccuau

SEQ ID NO: 2369525 - RNA, 19 nt, Artificial Sequence
  Description of Artificial Sequence: Synthetic oligonucleotide
caaaguacacaguugaaau

SEQ ID NO: 2369526 - RNA, 19 nt, Artificial Sequence
  Description of Artificial Sequence: Synthetic oligonucleotide
ugaaaucuuugggcaagag

SEQ ID NO: 2369527 - RNA, 19 nt, Artificial Sequence
  Description of Artificial Sequence: Synthetic oligonucleotide
auagaaaaggggaguagga

SEQ ID NO: 2369528 - RNA, 19 nt, Artificial Sequence
  Description of Artificial Sequence: Synthetic oligonucleotide
ucuuugggcaagaggcaac

SEQ ID NO: 2369529 - RNA, 19 nt, Artificial Sequence
  Description of Artificial Sequence: Synthetic oligonucleotide
agcagccuuuacuuaaacu

SEQ ID NO: 2369530 - RNA, 19 nt, Artificial Sequence
  Description of Artificial Sequence: Synthetic oligonucleotide
aaucuuugggcaagaggca

SEQ ID NO: 2369531 - RNA, 19 nt, Artificial Sequence
  Description of Artificial Sequence: Synthetic oligonucleotide
gggcaacagaccuauauac

SEQ ID NO: 2369532 - RNA, 19 nt, Artificial Sequence
  Description of Artificial Sequence: Synthetic oligonucleotide
uuguugacuacaccaucau

SEQ ID NO: 2369533 - RNA, 19 nt, Artificial Sequence
  Description of Artificial Sequence: Synthetic oligonucleotide
ucucgacgggaacacugag

SEQ ID NO: 2369534 - RNA, 19 nt, Artificial Sequence
  Description of Artificial Sequence: Synthetic oligonucleotide
uucugcauucuaaccuugu

SEQ ID NO: 2369535 - RNA, 19 nt, Artificial Sequence
  Description of Artificial Sequence: Synthetic oligonucleotide
uccccaguaucaucaaagu

SEQ ID NO: 2369536 - RNA, 19 nt, Artificial Sequence
  Description of Artificial Sequence: Synthetic oligonucleotide
gacauauaaggaaacuugu

SEQ ID NO: 2369537 - RNA, 19 nt, Artificial Sequence
  Description of Artificial Sequence: Synthetic oligonucleotide
cugauguggucuuauuuga

SEQ ID NO: 2369538 - RNA, 19 nt, Artificial Sequence
  Description of Artificial Sequence: Synthetic oligonucleotide
aaaguacuucugcauucua

SEQ ID NO: 2369539 - RNA, 19 nt, Artificial Sequence
  Description of Artificial Sequence: Synthetic oligonucleotide
cucgacgggaacacugagc

SEQ ID NO: 2369540 - RNA, 19 nt, Artificial Sequence
  Description of Artificial Sequence: Synthetic oligonucleotide
ucugcauucuaaccuuguu

SEQ ID NO: 2369541 - RNA, 19 nt, Artificial Sequence
  Description of Artificial Sequence: Synthetic oligonucleotide
acuccguuugcucacugau

SEQ ID NO: 2369542 - RNA, 19 nt, Artificial Sequence
  Description of Artificial Sequence: Synthetic oligonucleotide
ccuuuuaauaacaauauau

SEQ ID NO: 2369543 - RNA, 19 nt, Artificial Sequence
  Description of Artificial Sequence: Synthetic oligonucleotide
uuugagcagccuuuacuua

SEQ ID NO: 2369544 - RNA, 19 nt, Artificial Sequence
  Description of Artificial Sequence: Synthetic oligonucleotide
caacaagaauguaaaugga

SEQ ID NO: 2369545 - RNA, 19 nt, Artificial Sequence
  Description of Artificial Sequence: Synthetic oligonucleotide
uuuucaugaugaaccuaua

SEQ ID NO: 2369546 - RNA, 19 nt, Artificial Sequence
  Description of Artificial Sequence: Synthetic oligonucleotide
ucaucucugacuggugaga

SEQ ID NO: 2369547 - RNA, 19 nt, Artificial Sequence
  Description of Artificial Sequence: Synthetic oligonucleotide
gugagaacaugucaccuaa

SEQ ID NO: 2369548 - RNA, 19 nt, Artificial Sequence
  Description of Artificial Sequence: Synthetic oligonucleotide
auccuaucaaacuguggau

SEQ ID NO: 2369549 - RNA, 19 nt, Artificial Sequence
  Description of Artificial Sequence: Synthetic oligonucleotide
cugagcagccccacugccg

SEQ ID NO: 2369550 - RNA, 19 nt, Artificial Sequence
  Description of Artificial Sequence: Synthetic oligonucleotide
guaagucauuuuauaccag

SEQ ID NO: 2369551 - RNA, 19 nt, Artificial Sequence
  Description of Artificial Sequence: Synthetic oligonucleotide
auaacaauauauacaccua

SEQ ID NO: 2369552 - RNA, 19 nt, Artificial Sequence
  Description of Artificial Sequence: Synthetic oligonucleotide
gagugccggaaguuguuug

SEQ ID NO: 2369553 - RNA, 19 nt, Artificial Sequence
  Description of Artificial Sequence: Synthetic oligonucleotide
guaaauggaugaguaguuc

SEQ ID NO: 2369554 - RNA, 19 nt, Artificial Sequence
  Description of Artificial Sequence: Synthetic oligonucleotide
ugagcagccuuuacuuaaa

SEQ ID NO: 2369555 - RNA, 19 nt, Artificial Sequence
  Description of Artificial Sequence: Synthetic oligonucleotide
cagcgagaaaagaccacag

SEQ ID NO: 2369556 - RNA, 19 nt, Artificial Sequence
  Description of Artificial Sequence: Synthetic oligonucleotide
uccuuugccuguagacuca

SEQ ID NO: 2369557 - RNA, 19 nt, Artificial Sequence
  Description of Artificial Sequence: Synthetic oligonucleotide
aaaaggggaguaggaaaau

SEQ ID NO: 2369558 - RNA, 19 nt, Artificial Sequence
  Description of Artificial Sequence: Synthetic oligonucleotide
aaaggggaguaggaaaaua

SEQ ID NO: 2369559 - RNA, 19 nt, Artificial Sequence
  Description of Artificial Sequence: Synthetic oligonucleotide
aauacuccguuugcucacu

SEQ ID NO: 2369560 - RNA, 19 nt, Artificial Sequence
  Description of Artificial Sequence: Synthetic oligonucleotide
gagugacauauaaggaaac

SEQ ID NO: 2369561 - RNA, 19 nt, Artificial Sequence
  Description of Artificial Sequence: Synthetic oligonucleotide
aggccaucuccuuugccug

SEQ ID NO: 2369562 - RNA, 19 nt, Artificial Sequence
  Description of Artificial Sequence: Synthetic oligonucleotide
acuacaccaucaucucuga

SEQ ID NO: 2369563 - RNA, 19 nt, Artificial Sequence
  Description of Artificial Sequence: Synthetic oligonucleotide
ccugcuuuguccugcacag

SEQ ID NO: 2369564 - RNA, 19 nt, Artificial Sequence
  Description of Artificial Sequence: Synthetic oligonucleotide
aagucaaggccaucuccuu

SEQ ID NO: 2369565 - RNA, 19 nt, Artificial Sequence
  Description of Artificial Sequence: Synthetic oligonucleotide
ccuuagauaaaauaucugu

SEQ ID NO: 2369566 - RNA, 19 nt, Artificial Sequence
  Description of Artificial Sequence: Synthetic oligonucleotide
ugcuucgaugcaagccugc

SEQ ID NO: 2369567 - RNA, 19 nt, Artificial Sequence
  Description of Artificial Sequence: Synthetic oligonucleotide
gcuauuuuccccaguauca

SEQ ID NO: 2369568 - RNA, 19 nt, Artificial Sequence
  Description of Artificial Sequence: Synthetic oligonucleotide
aucaguugugauagaaagu

SEQ ID NO: 2369569 - RNA, 19 nt, Artificial Sequence
  Description of Artificial Sequence: Synthetic oligonucleotide
aagucauaaugcugccaua

SEQ ID NO: 2369570 - RNA, 19 nt, Artificial Sequence
  Description of Artificial Sequence: Synthetic oligonucleotide
uaaccuuguuugagugaca

SEQ ID NO: 2369571 - RNA, 19 nt, Artificial Sequence
  Description of Artificial Sequence: Synthetic oligonucleotide
auagaaagucaaggccauc

SEQ ID NO: 2369572 - RNA, 19 nt, Artificial Sequence
  Description of Artificial Sequence: Synthetic oligonucleotide
uuugcucacugaugugguc

SEQ ID NO: 2369573 - RNA, 19 nt, Artificial Sequence
  Description of Artificial Sequence: Synthetic oligonucleotide
uacuccguuugcucacuga

SEQ ID NO: 2369574 - RNA, 19 nt, Artificial Sequence
  Description of Artificial Sequence: Synthetic oligonucleotide
uccucacgggcugugggag

SEQ ID NO: 2369575 - RNA, 19 nt, Artificial Sequence
  Description of Artificial Sequence: Synthetic oligonucleotide
ugccauauccagcgagaaa

SEQ ID NO: 2369576 - RNA, 19 nt, Artificial Sequence
  Description of Artificial Sequence: Synthetic oligonucleotide
cuccuuuguugacuacacc

SEQ ID NO: 2369577 - RNA, 19 nt, Artificial Sequence
  Description of Artificial Sequence: Synthetic oligonucleotide
agaauucugagcagcccca

SEQ ID NO: 2369578 - RNA, 19 nt, Artificial Sequence
  Description of Artificial Sequence: Synthetic oligonucleotide
cuaucaaacuguggaucac

SEQ ID NO: 2369579 - RNA, 19 nt, Artificial Sequence
  Description of Artificial Sequence: Synthetic oligonucleotide
caacagaccuauauacaaa

SEQ ID NO: 2369580 - RNA, 19 nt, Artificial Sequence
  Description of Artificial Sequence: Synthetic oligonucleotide
accuccuuuguugacuaca

SEQ ID NO: 2369581 - RNA, 19 nt, Artificial Sequence
  Description of Artificial Sequence: Synthetic oligonucleotide
ugccgccacucacagaaau

SEQ ID NO: 2369582 - RNA, 19 nt, Artificial Sequence
  Description of Artificial Sequence: Synthetic oligonucleotide
gcgagaaaagaccacagcu

SEQ ID NO: 2369583 - RNA, 19 nt, Artificial Sequence
  Description of Artificial Sequence: Synthetic oligonucleotide
acaagucauaaugcugcca

SEQ ID NO: 2369584 - RNA, 19 nt, Artificial Sequence
  Description of Artificial Sequence: Synthetic oligonucleotide
ggaugaguaguucuccuaa

SEQ ID NO: 2369585 - RNA, 19 nt, Artificial Sequence
  Description of Artificial Sequence: Synthetic oligonucleotide
accacagcuaagcuacauu

SEQ ID NO: 2369586 - RNA, 19 nt, Artificial Sequence
  Description of Artificial Sequence: Synthetic oligonucleotide
caguugugauagaaaguca

SEQ ID NO: 2369587 - RNA, 19 nt, Artificial Sequence
  Description of Artificial Sequence: Synthetic oligonucleotide
agucaaggccaucuccuuu

SEQ ID NO: 2369588 - RNA, 19 nt, Artificial Sequence
  Description of Artificial Sequence: Synthetic oligonucleotide
ccuaucaaacuguggauca

SEQ ID NO: 2369589 - RNA, 19 nt, Artificial Sequence
  Description of Artificial Sequence: Synthetic oligonucleotide
accugcuccaacauguaaa

SEQ ID NO: 2369590 - RNA, 19 nt, Artificial Sequence
  Description of Artificial Sequence: Synthetic oligonucleotide
aucuuugggcaagaggcaa

SEQ ID NO: 2369591 - RNA, 19 nt, Artificial Sequence
  Description of Artificial Sequence: Synthetic oligonucleotide
aagccugcuuuguccugca

SEQ ID NO: 2369592 - RNA, 19 nt, Artificial Sequence
  Description of Artificial Sequence: Synthetic oligonucleotide
augaaccuauauaaauaau

SEQ ID NO: 2369593 - RNA, 19 nt, Artificial Sequence
  Description of Artificial Sequence: Synthetic oligonucleotide
gcuaagcuacauuuuagua

SEQ ID NO: 2369594 - RNA, 19 nt, Artificial Sequence
  Description of Artificial Sequence: Synthetic oligonucleotide
gggaguaggaaaauauuaa

SEQ ID NO: 2369595 - RNA, 19 nt, Artificial Sequence
  Description of Artificial Sequence: Synthetic oligonucleotide
acugagcucaucaguugug

SEQ ID NO: 2369596 - RNA, 19 nt, Artificial Sequence
  Description of Artificial Sequence: Synthetic oligonucleotide
gauagaaagucaaggccau

SEQ ID NO: 2369597 - RNA, 19 nt, Artificial Sequence
  Description of Artificial Sequence: Synthetic oligonucleotide
gaauucugagcagccccac

SEQ ID NO: 2369598 - RNA, 19 nt, Artificial Sequence
  Description of Artificial Sequence: Synthetic oligonucleotide
gccacucacagaaauacuc

SEQ ID NO: 2369599 - RNA, 19 nt, Artificial Sequence
  Description of Artificial Sequence: Synthetic oligonucleotide
gcuuccuuagauaaaauau

SEQ ID NO: 2369600 - RNA, 19 nt, Artificial Sequence
  Description of Artificial Sequence: Synthetic oligonucleotide
auacuccguuugcucacug

SEQ ID NO: 2369601 - RNA, 19 nt, Artificial Sequence
  Description of Artificial Sequence: Synthetic oligonucleotide
cauauccagcgagaaaaga

SEQ ID NO: 2369602 - RNA, 19 nt, Artificial Sequence
  Description of Artificial Sequence: Synthetic oligonucleotide
ggaguaggaaaauauuaau

SEQ ID NO: 2369603 - RNA, 19 nt, Artificial Sequence
  Description of Artificial Sequence: Synthetic oligonucleotide
uuuucucgacgggaacacu

SEQ ID NO: 2369604 - RNA, 19 nt, Artificial Sequence
  Description of Artificial Sequence: Synthetic oligonucleotide
aggcaacaagaauguaaau

SEQ ID NO: 2369605 - RNA, 19 nt, Artificial Sequence
  Description of Artificial Sequence: Synthetic oligonucleotide
ugccggaaguuguuuggau

SEQ ID NO: 2369606 - RNA, 19 nt, Artificial Sequence
  Description of Artificial Sequence: Synthetic oligonucleotide
gacuggagugcaagaccag

SEQ ID NO: 2369607 - RNA, 19 nt, Artificial Sequence
  Description of Artificial Sequence: Synthetic oligonucleotide
augucaccuaagcuauuuu

SEQ ID NO: 2369608 - RNA, 19 nt, Artificial Sequence
  Description of Artificial Sequence: Synthetic oligonucleotide
caucaccuccuuuguugac

SEQ ID NO: 2369609 - RNA, 19 nt, Artificial Sequence
  Description of Artificial Sequence: Synthetic oligonucleotide
cuuugggcaagaggcaaca

SEQ ID NO: 2369610 - RNA, 19 nt, Artificial Sequence
  Description of Artificial Sequence: Synthetic oligonucleotide
cacgggcugugggagaacc

SEQ ID NO: 2369611 - RNA, 19 nt, Artificial Sequence
  Description of Artificial Sequence: Synthetic oligonucleotide
ucacugauguggucuuauu

SEQ ID NO: 2369612 - RNA, 19 nt, Artificial Sequence
  Description of Artificial Sequence: Synthetic oligonucleotide
gugacauauaaggaaacuu

SEQ ID NO: 2369613 - RNA, 19 nt, Artificial Sequence
  Description of Artificial Sequence: Synthetic oligonucleotide
ggacuggagugcaagacca

SEQ ID NO: 2369614 - RNA, 19 nt, Artificial Sequence
  Description of Artificial Sequence: Synthetic oligonucleotide
cuuauuugagcagccuuua

SEQ ID NO: 2369615 - RNA, 19 nt, Artificial Sequence
  Description of Artificial Sequence: Synthetic oligonucleotide
cuuguuugagugacauaua

SEQ ID NO: 2369616 - RNA, 19 nt, Artificial Sequence
  Description of Artificial Sequence: Synthetic oligonucleotide
ccuccuuuguugacuacac

SEQ ID NO: 2369617 - RNA, 19 nt, Artificial Sequence
  Description of Artificial Sequence: Synthetic oligonucleotide
gcaacagcuccucugccca

SEQ ID NO: 2369618 - RNA, 19 nt, Artificial Sequence
  Description of Artificial Sequence: Synthetic oligonucleotide
ccauauccagcgagaaaag

SEQ ID NO: 2369619 - RNA, 19 nt, Artificial Sequence
  Description of Artificial Sequence: Synthetic oligonucleotide
ggggaguaggaaaauauua

SEQ ID NO: 2369620 - RNA, 19 nt, Artificial Sequence
  Description of Artificial Sequence: Synthetic oligonucleotide
ggcaacagaccuauauaca

SEQ ID NO: 2369621 - RNA, 19 nt, Artificial Sequence
  Description of Artificial Sequence: Synthetic oligonucleotide
aggggaguaggaaaauauu

SEQ ID NO: 2369622 - RNA, 19 nt, Artificial Sequence
  Description of Artificial Sequence: Synthetic oligonucleotide
agccugcuuuguccugcac

SEQ ID NO: 2369623 - RNA, 19 nt, Artificial Sequence
  Description of Artificial Sequence: Synthetic oligonucleotide
aaacugggcaacagaccua

SEQ ID NO: 2369624 - RNA, 19 nt, Artificial Sequence
  Description of Artificial Sequence: Synthetic oligonucleotide
ccuaagcuauuuuccccag

SEQ ID NO: 2369625 - RNA, 19 nt, Artificial Sequence
  Description of Artificial Sequence: Synthetic oligonucleotide
cugggcaacagaccuauau

SEQ ID NO: 2369626 - RNA, 19 nt, Artificial Sequence
  Description of Artificial Sequence: Synthetic oligonucleotide
aguacacaguugaaaucuu

SEQ ID NO: 2369627 - RNA, 19 nt, Artificial Sequence
  Description of Artificial Sequence: Synthetic oligonucleotide
gcauucuaaccuuguuuga

SEQ ID NO: 2369628 - RNA, 19 nt, Artificial Sequence
  Description of Artificial Sequence: Synthetic oligonucleotide
augcuucgaugcaagccug

SEQ ID NO: 2369629 - RNA, 19 nt, Artificial Sequence
  Description of Artificial Sequence: Synthetic oligonucleotide
gagaaccguggcaauggaa

SEQ ID NO: 2369630 - RNA, 19 nt, Artificial Sequence
  Description of Artificial Sequence: Synthetic oligonucleotide
cuuugccuguagacucauc

SEQ ID NO: 2369631 - RNA, 19 nt, Artificial Sequence
  Description of Artificial Sequence: Synthetic oligonucleotide
gugcaagaccagagugccg

SEQ ID NO: 2369632 - RNA, 19 nt, Artificial Sequence
  Description of Artificial Sequence: Synthetic oligonucleotide
ccgccacucacagaaauac

SEQ ID NO: 2369633 - RNA, 19 nt, Artificial Sequence
  Description of Artificial Sequence: Synthetic oligonucleotide
cugugggagaaccguggca

SEQ ID NO: 2369634 - RNA, 19 nt, Artificial Sequence
  Description of Artificial Sequence: Synthetic oligonucleotide
caaaguacuucugcauucu

SEQ ID NO: 2369635 - RNA, 19 nt, Artificial Sequence
  Description of Artificial Sequence: Synthetic oligonucleotide
cacugagcucaucaguugu

SEQ ID NO: 2369636 - RNA, 19 nt, Artificial Sequence
  Description of Artificial Sequence: Synthetic oligonucleotide
accuuguuugagugacaua

SEQ ID NO: 2369637 - RNA, 19 nt, Artificial Sequence
  Description of Artificial Sequence: Synthetic oligonucleotide
guuugcucacugauguggu

SEQ ID NO: 2369638 - RNA, 19 nt, Artificial Sequence
  Description of Artificial Sequence: Synthetic oligonucleotide
agagugccggaaguuguuu

SEQ ID NO: 2369639 - RNA, 19 nt, Artificial Sequence
  Description of Artificial Sequence: Synthetic oligonucleotide
gggcacuugcuccucugac

SEQ ID NO: 2369640 - RNA, 19 nt, Artificial Sequence
  Description of Artificial Sequence: Synthetic oligonucleotide
acgggcugugggagaaccg

SEQ ID NO: 2369641 - RNA, 19 nt, Artificial Sequence
  Description of Artificial Sequence: Synthetic oligonucleotide
ccuguagacucaucaccuc

SEQ ID NO: 2369642 - RNA, 19 nt, Artificial Sequence
  Description of Artificial Sequence: Synthetic oligonucleotide
cugcuuuguccugcacagc

SEQ ID NO: 2369643 - RNA, 19 nt, Artificial Sequence
  Description of Artificial Sequence: Synthetic oligonucleotide
ccuaaccaaauccuaucaa

SEQ ID NO: 2369644 - RNA, 19 nt, Artificial Sequence
  Description of Artificial Sequence: Synthetic oligonucleotide
guaguucuccuaaccaaau

SEQ ID NO: 2369645 - RNA, 19 nt, Artificial Sequence
  Description of Artificial Sequence: Synthetic oligonucleotide
ccagcgagaaaagaccaca

SEQ ID NO: 2369646 - RNA, 19 nt, Artificial Sequence
  Description of Artificial Sequence: Synthetic oligonucleotide
cuaagcuauuuuccccagu

SEQ ID NO: 2369647 - RNA, 19 nt, Artificial Sequence
  Description of Artificial Sequence: Synthetic oligonucleotide
gaaggggcacuugcuccuc

SEQ ID NO: 2369648 - RNA, 19 nt, Artificial Sequence
  Description of Artificial Sequence: Synthetic oligonucleotide
ccuauagaaaaggggagua

SEQ ID NO: 2369649 - RNA, 19 nt, Artificial Sequence
  Description of Artificial Sequence: Synthetic oligonucleotide
augcugccauauccagcga

SEQ ID NO: 2369650 - RNA, 19 nt, Artificial Sequence
  Description of Artificial Sequence: Synthetic oligonucleotide
gcugccauauccagcgaga

SEQ ID NO: 2369651 - RNA, 19 nt, Artificial Sequence
  Description of Artificial Sequence: Synthetic oligonucleotide
cacagcuaagcuacauuuu

SEQ ID NO: 2369652 - RNA, 19 nt, Artificial Sequence
  Description of Artificial Sequence: Synthetic oligonucleotide
gugccggaaguuguuugga

SEQ ID NO: 2369653 - RNA, 19 nt, Artificial Sequence
  Description of Artificial Sequence: Synthetic oligonucleotide
ggaaggggcacuugcuccu

SEQ ID NO: 2369654 - RNA, 19 nt, Artificial Sequence
  Description of Artificial Sequence: Synthetic oligonucleotide
caugucaccuaagcuauuu

SEQ ID NO: 2369655 - RNA, 19 nt, Artificial Sequence
  Description of Artificial Sequence: Synthetic oligonucleotide
gcaagccugcuuuguccug

SEQ ID NO: 2369656 - RNA, 19 nt, Artificial Sequence
  Description of Artificial Sequence: Synthetic oligonucleotide
cugccauauccagcgagaa

SEQ ID NO: 2369657 - RNA, 19 nt, Artificial Sequence
  Description of Artificial Sequence: Synthetic oligonucleotide
gccuguagacucaucaccu

SEQ ID NO: 2369658 - RNA, 19 nt, Artificial Sequence
  Description of Artificial Sequence: Synthetic oligonucleotide
ccacagcuaagcuacauuu

SEQ ID NO: 2369659 - RNA, 19 nt, Artificial Sequence
  Description of Artificial Sequence: Synthetic oligonucleotide
caagaccagagugccggaa

SEQ ID NO: 2369660 - RNA, 19 nt, Artificial Sequence
  Description of Artificial Sequence: Synthetic oligonucleotide
cucacgggcugugggagaa

SEQ ID NO: 2369661 - RNA, 19 nt, Artificial Sequence
  Description of Artificial Sequence: Synthetic oligonucleotide
gaccacagcuaagcuacau

SEQ ID NO: 2369662 - RNA, 19 nt, Artificial Sequence
  Description of Artificial Sequence: Synthetic oligonucleotide
ucacgggcugugggagaac

SEQ ID NO: 2369663 - RNA, 19 nt, Artificial Sequence
  Description of Artificial Sequence: Synthetic oligonucleotide
gggcugugggagaaccgug

SEQ ID NO: 2369664 - RNA, 19 nt, Artificial Sequence
  Description of Artificial Sequence: Synthetic oligonucleotide
gcauauagacaaaguacuu

SEQ ID NO: 2369665 - RNA, 19 nt, Artificial Sequence
  Description of Artificial Sequence: Synthetic oligonucleotide
ggucuuauuugagcagccu

SEQ ID NO: 2369666 - RNA, 19 nt, Artificial Sequence
  Description of Artificial Sequence: Synthetic oligonucleotide
ccugcuccaacauguaaau

SEQ ID NO: 2369667 - RNA, 19 nt, Artificial Sequence
  Description of Artificial Sequence: Synthetic oligonucleotide
cuucgaugcaagccugcuu

SEQ ID NO: 2369668 - RNA, 19 nt, Artificial Sequence
  Description of Artificial Sequence: Synthetic oligonucleotide
ccggaaguuguuuggauuu

SEQ ID NO: 2369669 - RNA, 19 nt, Artificial Sequence
  Description of Artificial Sequence: Synthetic oligonucleotide
gcaagaccagagugccgga

SEQ ID NO: 2369670 - RNA, 19 nt, Artificial Sequence
  Description of Artificial Sequence: Synthetic oligonucleotide
acaugucaccuaagcuauu

SEQ ID NO: 2369671 - RNA, 19 nt, Artificial Sequence
  Description of Artificial Sequence: Synthetic oligonucleotide
gccggaaguuguuuggauu

SEQ ID NO: 2369672 - RNA, 19 nt, Artificial Sequence
  Description of Artificial Sequence: Synthetic oligonucleotide
ccagagugccggaaguugu

SEQ ID NO: 2369673 - RNA, 19 nt, Artificial Sequence
  Description of Artificial Sequence: Synthetic oligonucleotide
acgggaacacugagcucau

SEQ ID NO: 2369674 - RNA, 19 nt, Artificial Sequence
  Description of Artificial Sequence: Synthetic oligonucleotide
cagagugccggaaguuguu

SEQ ID NO: 2369675 - RNA, 19 nt, Artificial Sequence
  Description of Artificial Sequence: Synthetic oligonucleotide
cugccgccacucacagaaa

SEQ ID NO: 2369676 - RNA, 19 nt, Artificial Sequence
  Description of Artificial Sequence: Synthetic oligonucleotide
gccgccacucacagaaaua

SEQ ID NO: 2369677 - RNA, 19 nt, Artificial Sequence
  Description of Artificial Sequence: Synthetic oligonucleotide
acugggcaacagaccuaua

SEQ ID NO: 2369678 - RNA, 19 nt, Artificial Sequence
  Description of Artificial Sequence: Synthetic oligonucleotide
ccucacgggcugugggaga

SEQ ID NO: 2369679 - RNA, 19 nt, Artificial Sequence
  Description of Artificial Sequence: Synthetic oligonucleotide
cgacgggaacacugagcuc

SEQ ID NO: 2369680 - RNA, 19 nt, Artificial Sequence
  Description of Artificial Sequence: Synthetic oligonucleotide
cugcuccaacauguaaauu

SEQ ID NO: 2369681 - RNA, 19 nt, Artificial Sequence
  Description of Artificial Sequence: Synthetic oligonucleotide
cgccacucacagaaauacu

SEQ ID NO: 2369682 - RNA, 19 nt, Artificial Sequence
  Description of Artificial Sequence: Synthetic oligonucleotide
cgaugcaagccugcuuugu

SEQ ID NO: 2369683 - RNA, 19 nt, Artificial Sequence
  Description of Artificial Sequence: Synthetic oligonucleotide
cgggcugugggagaaccgu

SEQ ID NO: 2369684 - RNA, 19 nt, Artificial Sequence
  Description of Artificial Sequence: Synthetic oligonucleotide
cggaaguuguuuggauuuu

SEQ ID NO: 2369685 - RNA, 19 nt, Artificial Sequence
  Description of Artificial Sequence: Synthetic oligonucleotide
uaaguuacaagucaguacg

SEQ ID NO: 2369686 - RNA, 19 nt, Artificial Sequence
  Description of Artificial Sequence: Synthetic oligonucleotide
aauuacauacuguacaauc

SEQ ID NO: 2369687 - RNA, 19 nt, Artificial Sequence
  Description of Artificial Sequence: Synthetic oligonucleotide
cauauguuaaauuacauac

SEQ ID NO: 2369688 - RNA, 19 nt, Artificial Sequence
  Description of Artificial Sequence: Synthetic oligonucleotide
uuuaguagcacacuuagca

SEQ ID NO: 2369689 - RNA, 19 nt, Artificial Sequence
  Description of Artificial Sequence: Synthetic oligonucleotide
uuaaauuacauacuguaca

SEQ ID NO: 2369690 - RNA, 19 nt, Artificial Sequence
  Description of Artificial Sequence: Synthetic oligonucleotide
acaugaaugaacuccaggc

SEQ ID NO: 2369691 - RNA, 19 nt, Artificial Sequence
  Description of Artificial Sequence: Synthetic oligonucleotide
uauauugacaucuaacuug

SEQ ID NO: 2369692 - RNA, 19 nt, Artificial Sequence
  Description of Artificial Sequence: Synthetic oligonucleotide
aaugacauuucuuaggagu

SEQ ID NO: 2369693 - RNA, 19 nt, Artificial Sequence
  Description of Artificial Sequence: Synthetic oligonucleotide
uuuauauugacaucuaacu

SEQ ID NO: 2369694 - RNA, 19 nt, Artificial Sequence
  Description of Artificial Sequence: Synthetic oligonucleotide
auugacaucuaacuugucc

SEQ ID NO: 2369695 - RNA, 19 nt, Artificial Sequence
  Description of Artificial Sequence: Synthetic oligonucleotide
cuuuucaucacaauggagc

SEQ ID NO: 2369696 - RNA, 19 nt, Artificial Sequence
  Description of Artificial Sequence: Synthetic oligonucleotide
uuuacaaggagaaagggaa

SEQ ID NO: 2369697 - RNA, 19 nt, Artificial Sequence
  Description of Artificial Sequence: Synthetic oligonucleotide
aagggaauuaaaaugcacc

SEQ ID NO: 2369698 - RNA, 19 nt, Artificial Sequence
  Description of Artificial Sequence: Synthetic oligonucleotide
uuuacuuguuacaugaaug

SEQ ID NO: 2369699 - RNA, 19 nt, Artificial Sequence
  Description of Artificial Sequence: Synthetic oligonucleotide
aaagcugaaaacaauuacg

SEQ ID NO: 2369700 - RNA, 19 nt, Artificial Sequence
  Description of Artificial Sequence: Synthetic oligonucleotide
gucaguacguguuagaagg

SEQ ID NO: 2369701 - RNA, 19 nt, Artificial Sequence
  Description of Artificial Sequence: Synthetic oligonucleotide
uuaggaguuuaaaagaggc

SEQ ID NO: 2369702 - RNA, 19 nt, Artificial Sequence
  Description of Artificial Sequence: Synthetic oligonucleotide
ucuaauguuccaaauguca

SEQ ID NO: 2369703 - RNA, 19 nt, Artificial Sequence
  Description of Artificial Sequence: Synthetic oligonucleotide
aagacuugaguucuuuggg

SEQ ID NO: 2369704 - RNA, 19 nt, Artificial Sequence
  Description of Artificial Sequence: Synthetic oligonucleotide
cugaaaacaauuacgagug

SEQ ID NO: 2369705 - RNA, 19 nt, Artificial Sequence
  Description of Artificial Sequence: Synthetic oligonucleotide
ucuuaggaguuuaaaagag

SEQ ID NO: 2369706 - RNA, 19 nt, Artificial Sequence
  Description of Artificial Sequence: Synthetic oligonucleotide
uguuacaugaaugaacucc

SEQ ID NO: 2369707 - RNA, 19 nt, Artificial Sequence
  Description of Artificial Sequence: Synthetic oligonucleotide
gaagacuugaguucuuugg

SEQ ID NO: 2369708 - RNA, 19 nt, Artificial Sequence
  Description of Artificial Sequence: Synthetic oligonucleotide
auuuuaguagcacacuuag

SEQ ID NO: 2369709 - RNA, 19 nt, Artificial Sequence
  Description of Artificial Sequence: Synthetic oligonucleotide
ugcuauauaguccuggcug

SEQ ID NO: 2369710 - RNA, 19 nt, Artificial Sequence
  Description of Artificial Sequence: Synthetic oligonucleotide
gaagguuuuauagaaaagc

SEQ ID NO: 2369711 - RNA, 19 nt, Artificial Sequence
  Description of Artificial Sequence: Synthetic oligonucleotide
uguuaaauuacauacugua

SEQ ID NO: 2369712 - RNA, 19 nt, Artificial Sequence
  Description of Artificial Sequence: Synthetic oligonucleotide
uguacacuuaaaauuacac

SEQ ID NO: 2369713 - RNA, 19 nt, Artificial Sequence
  Description of Artificial Sequence: Synthetic oligonucleotide
aacaauuacgaguggaaga

SEQ ID NO: 2369714 - RNA, 19 nt, Artificial Sequence
  Description of Artificial Sequence: Synthetic oligonucleotide
aaggcaguuuguuucaguc

SEQ ID NO: 2369715 - RNA, 19 nt, Artificial Sequence
  Description of Artificial Sequence: Synthetic oligonucleotide
ugaaacuaaaauuucuuaa

SEQ ID NO: 2369716 - RNA, 19 nt, Artificial Sequence
  Description of Artificial Sequence: Synthetic oligonucleotide
aaacaauucacaaggucac

SEQ ID NO: 2369717 - RNA, 19 nt, Artificial Sequence
  Description of Artificial Sequence: Synthetic oligonucleotide
ucuagugcugcuaaguuac

SEQ ID NO: 2369718 - RNA, 19 nt, Artificial Sequence
  Description of Artificial Sequence: Synthetic oligonucleotide
ucuaacuuguccacuuugg

SEQ ID NO: 2369719 - RNA, 19 nt, Artificial Sequence
  Description of Artificial Sequence: Synthetic oligonucleotide
uuugaugauaggcucgaag

SEQ ID NO: 2369720 - RNA, 19 nt, Artificial Sequence
  Description of Artificial Sequence: Synthetic oligonucleotide
uugaugauaggcucgaaga

SEQ ID NO: 2369721 - RNA, 19 nt, Artificial Sequence
  Description of Artificial Sequence: Synthetic oligonucleotide
uuuaaaagaggcuuugaau

SEQ ID NO: 2369722 - RNA, 19 nt, Artificial Sequence
  Description of Artificial Sequence: Synthetic oligonucleotide
aguggaagaacauaugggu

SEQ ID NO: 2369723 - RNA, 19 nt, Artificial Sequence
  Description of Artificial Sequence: Synthetic oligonucleotide
aaggauauguucauugguc

SEQ ID NO: 2369724 - RNA, 19 nt, Artificial Sequence
  Description of Artificial Sequence: Synthetic oligonucleotide
ucuauauuguuugaguuga

SEQ ID NO: 2369725 - RNA, 19 nt, Artificial Sequence
  Description of Artificial Sequence: Synthetic oligonucleotide
uuacuuguuacaugaauga

SEQ ID NO: 2369726 - RNA, 19 nt, Artificial Sequence
  Description of Artificial Sequence: Synthetic oligonucleotide
uacaugaaugaacuccagg

SEQ ID NO: 2369727 - RNA, 19 nt, Artificial Sequence
  Description of Artificial Sequence: Synthetic oligonucleotide
uauuguuugaguugagaca

SEQ ID NO: 2369728 - RNA, 19 nt, Artificial Sequence
  Description of Artificial Sequence: Synthetic oligonucleotide
uucuuaggaguuuaaaaga

SEQ ID NO: 2369729 - RNA, 19 nt, Artificial Sequence
  Description of Artificial Sequence: Synthetic oligonucleotide
uguuagccggucaagaaug

SEQ ID NO: 2369730 - RNA, 19 nt, Artificial Sequence
  Description of Artificial Sequence: Synthetic oligonucleotide
cauuccuaaggcuaugucc

SEQ ID NO: 2369731 - RNA, 19 nt, Artificial Sequence
  Description of Artificial Sequence: Synthetic oligonucleotide
uaaauuacauacuguacaa

SEQ ID NO: 2369732 - RNA, 19 nt, Artificial Sequence
  Description of Artificial Sequence: Synthetic oligonucleotide
aucuuggaagguuuuauag

SEQ ID NO: 2369733 - RNA, 19 nt, Artificial Sequence
  Description of Artificial Sequence: Synthetic oligonucleotide
gauauguucauuggucugg

SEQ ID NO: 2369734 - RNA, 19 nt, Artificial Sequence
  Description of Artificial Sequence: Synthetic oligonucleotide
aauguuccaaaugucaccu

SEQ ID NO: 2369735 - RNA, 19 nt, Artificial Sequence
  Description of Artificial Sequence: Synthetic oligonucleotide
aucacaauggagcagaauu

SEQ ID NO: 2369736 - RNA, 19 nt, Artificial Sequence
  Description of Artificial Sequence: Synthetic oligonucleotide
cuuaggaguuuaaaagagg

SEQ ID NO: 2369737 - RNA, 19 nt, Artificial Sequence
  Description of Artificial Sequence: Synthetic oligonucleotide
aaacaauuacgaguggaag

SEQ ID NO: 2369738 - RNA, 19 nt, Artificial Sequence
  Description of Artificial Sequence: Synthetic oligonucleotide
aauuaaaaugcaccacuau

SEQ ID NO: 2369739 - RNA, 19 nt, Artificial Sequence
  Description of Artificial Sequence: Synthetic oligonucleotide
agaggucuuacccaaaugu

SEQ ID NO: 2369740 - RNA, 19 nt, Artificial Sequence
  Description of Artificial Sequence: Synthetic oligonucleotide
ucuuaagacccacauuuga

SEQ ID NO: 2369741 - RNA, 19 nt, Artificial Sequence
  Description of Artificial Sequence: Synthetic oligonucleotide
aacuccaggccucuccuac

SEQ ID NO: 2369742 - RNA, 19 nt, Artificial Sequence
  Description of Artificial Sequence: Synthetic oligonucleotide
ucaauuuccgucugcauuc

SEQ ID NO: 2369743 - RNA, 19 nt, Artificial Sequence
  Description of Artificial Sequence: Synthetic oligonucleotide
agugacacaauguacacuu

SEQ ID NO: 2369744 - RNA, 19 nt, Artificial Sequence
  Description of Artificial Sequence: Synthetic oligonucleotide
uuaagacccacauuugaac

SEQ ID NO: 2369745 - RNA, 19 nt, Artificial Sequence
  Description of Artificial Sequence: Synthetic oligonucleotide
aagguuuuauagaaaagcu

SEQ ID NO: 2369746 - RNA, 19 nt, Artificial Sequence
  Description of Artificial Sequence: Synthetic oligonucleotide
uccgucugcauuccuaagg

SEQ ID NO: 2369747 - RNA, 19 nt, Artificial Sequence
  Description of Artificial Sequence: Synthetic oligonucleotide
agucuugcuauauaguccu

SEQ ID NO: 2369748 - RNA, 19 nt, Artificial Sequence
  Description of Artificial Sequence: Synthetic oligonucleotide
gaggcuuugaaucuuuuca

SEQ ID NO: 2369749 - RNA, 19 nt, Artificial Sequence
  Description of Artificial Sequence: Synthetic oligonucleotide
aauuacgaguggaagaaca

SEQ ID NO: 2369750 - RNA, 19 nt, Artificial Sequence
  Description of Artificial Sequence: Synthetic oligonucleotide
uuggguaaaccucagcagu

SEQ ID NO: 2369751 - RNA, 19 nt, Artificial Sequence
  Description of Artificial Sequence: Synthetic oligonucleotide
uuauuuuaguagcacacuu

SEQ ID NO: 2369752 - RNA, 19 nt, Artificial Sequence
  Description of Artificial Sequence: Synthetic oligonucleotide
uuacacacauuuacaagga

SEQ ID NO: 2369753 - RNA, 19 nt, Artificial Sequence
  Description of Artificial Sequence: Synthetic oligonucleotide
uggguuugucucuauauug

SEQ ID NO: 2369754 - RNA, 19 nt, Artificial Sequence
  Description of Artificial Sequence: Synthetic oligonucleotide
agggaauuaaaaugcacca

SEQ ID NO: 2369755 - RNA, 19 nt, Artificial Sequence
  Description of Artificial Sequence: Synthetic oligonucleotide
uaagacccacauuugaaca

SEQ ID NO: 2369756 - RNA, 19 nt, Artificial Sequence
  Description of Artificial Sequence: Synthetic oligonucleotide
ucuagguuguugucgaucu

SEQ ID NO: 2369757 - RNA, 19 nt, Artificial Sequence
  Description of Artificial Sequence: Synthetic oligonucleotide
aacucacagaggucuuacc

SEQ ID NO: 2369758 - RNA, 19 nt, Artificial Sequence
  Description of Artificial Sequence: Synthetic oligonucleotide
uggucuaauguuccaaaug

SEQ ID NO: 2369759 - RNA, 19 nt, Artificial Sequence
  Description of Artificial Sequence: Synthetic oligonucleotide
acaugucaaggauauguuc

SEQ ID NO: 2369760 - RNA, 19 nt, Artificial Sequence
  Description of Artificial Sequence: Synthetic oligonucleotide
ucuuggaagguuuuauaga

SEQ ID NO: 2369761 - RNA, 19 nt, Artificial Sequence
  Description of Artificial Sequence: Synthetic oligonucleotide
augaaugaacuccaggccu

SEQ ID NO: 2369762 - RNA, 19 nt, Artificial Sequence
  Description of Artificial Sequence: Synthetic oligonucleotide
aagcugaaaacaauuacga

SEQ ID NO: 2369763 - RNA, 19 nt, Artificial Sequence
  Description of Artificial Sequence: Synthetic oligonucleotide
uuucagucugccuugcagc

SEQ ID NO: 2369764 - RNA, 19 nt, Artificial Sequence
  Description of Artificial Sequence: Synthetic oligonucleotide
ugaaaacaauuacgagugg

SEQ ID NO: 2369765 - RNA, 19 nt, Artificial Sequence
  Description of Artificial Sequence: Synthetic oligonucleotide
uacgaguggaagaacauau

SEQ ID NO: 2369766 - RNA, 19 nt, Artificial Sequence
  Description of Artificial Sequence: Synthetic oligonucleotide
agugcugcuaaguuacaag

SEQ ID NO: 2369767 - RNA, 19 nt, Artificial Sequence
  Description of Artificial Sequence: Synthetic oligonucleotide
cucuauauuguuugaguug

SEQ ID NO: 2369768 - RNA, 19 nt, Artificial Sequence
  Description of Artificial Sequence: Synthetic oligonucleotide
agaacauauggguuugucu

SEQ ID NO: 2369769 - RNA, 19 nt, Artificial Sequence
  Description of Artificial Sequence: Synthetic oligonucleotide
ugaugauaggcucgaagac

SEQ ID NO: 2369770 - RNA, 19 nt, Artificial Sequence
  Description of Artificial Sequence: Synthetic oligonucleotide
uugaaacuaaaauuucuua

SEQ ID NO: 2369771 - RNA, 19 nt, Artificial Sequence
  Description of Artificial Sequence: Synthetic oligonucleotide
cauuugaacacauauguua

SEQ ID NO: 2369772 - RNA, 19 nt, Artificial Sequence
  Description of Artificial Sequence: Synthetic oligonucleotide
aagaacauauggguuuguc

SEQ ID NO: 2369773 - RNA, 19 nt, Artificial Sequence
  Description of Artificial Sequence: Synthetic oligonucleotide
uauuuuaguagcacacuua

SEQ ID NO: 2369774 - RNA, 19 nt, Artificial Sequence
  Description of Artificial Sequence: Synthetic oligonucleotide
uugaaucuuuucaucacaa

SEQ ID NO: 2369775 - RNA, 19 nt, Artificial Sequence
  Description of Artificial Sequence: Synthetic oligonucleotide
uuuauuuuaguagcacacu

SEQ ID NO: 2369776 - RNA, 19 nt, Artificial Sequence
  Description of Artificial Sequence: Synthetic oligonucleotide
aaaacaauuacgaguggaa

SEQ ID NO: 2369777 - RNA, 19 nt, Artificial Sequence
  Description of Artificial Sequence: Synthetic oligonucleotide
uguuugaguugagacagag

SEQ ID NO: 2369778 - RNA, 19 nt, Artificial Sequence
  Description of Artificial Sequence: Synthetic oligonucleotide
uuuuaguagcacacuuagc

SEQ ID NO: 2369779 - RNA, 19 nt, Artificial Sequence
  Description of Artificial Sequence: Synthetic oligonucleotide
acaauucacaaggucacuc

SEQ ID NO: 2369780 - RNA, 19 nt, Artificial Sequence
  Description of Artificial Sequence: Synthetic oligonucleotide
uacccaaauguguacacac

SEQ ID NO: 2369781 - RNA, 19 nt, Artificial Sequence
  Description of Artificial Sequence: Synthetic oligonucleotide
guuguugucgaucuuuuga

SEQ ID NO: 2369782 - RNA, 19 nt, Artificial Sequence
  Description of Artificial Sequence: Synthetic oligonucleotide
cauuuacaaggagaaaggg

SEQ ID NO: 2369783 - RNA, 19 nt, Artificial Sequence
  Description of Artificial Sequence: Synthetic oligonucleotide
guacacuuaaaauuacaca

SEQ ID NO: 2369784 - RNA, 19 nt, Artificial Sequence
  Description of Artificial Sequence: Synthetic oligonucleotide
guugucgaucuuuugauga

SEQ ID NO: 2369785 - RNA, 19 nt, Artificial Sequence
  Description of Artificial Sequence: Synthetic oligonucleotide
aggauauguucauuggucu

SEQ ID NO: 2369786 - RNA, 19 nt, Artificial Sequence
  Description of Artificial Sequence: Synthetic oligonucleotide
gguuuuauagaaaagcuga

SEQ ID NO: 2369787 - RNA, 19 nt, Artificial Sequence
  Description of Artificial Sequence: Synthetic oligonucleotide
ucucuauauuguuugaguu

SEQ ID NO: 2369788 - RNA, 19 nt, Artificial Sequence
  Description of Artificial Sequence: Synthetic oligonucleotide
uacaaucaaugacauuucu

SEQ ID NO: 2369789 - RNA, 19 nt, Artificial Sequence
  Description of Artificial Sequence: Synthetic oligonucleotide
uauggguuugucucuauau

SEQ ID NO: 2369790 - RNA, 19 nt, Artificial Sequence
  Description of Artificial Sequence: Synthetic oligonucleotide
ucacaauggagcagaauuc

SEQ ID NO: 2369791 - RNA, 19 nt, Artificial Sequence
  Description of Artificial Sequence: Synthetic oligonucleotide
gaaaacaauuacgagugga

SEQ ID NO: 2369792 - RNA, 19 nt, Artificial Sequence
  Description of Artificial Sequence: Synthetic oligonucleotide
cuuguuacaugaaugaacu

SEQ ID NO: 2369793 - RNA, 19 nt, Artificial Sequence
  Description of Artificial Sequence: Synthetic oligonucleotide
ugacacaauguacacuuaa

SEQ ID NO: 2369794 - RNA, 19 nt, Artificial Sequence
  Description of Artificial Sequence: Synthetic oligonucleotide
cucuccuacagaaugagga

SEQ ID NO: 2369795 - RNA, 19 nt, Artificial Sequence
  Description of Artificial Sequence: Synthetic oligonucleotide
cuaaaagugacacaaugua

SEQ ID NO: 2369796 - RNA, 19 nt, Artificial Sequence
  Description of Artificial Sequence: Synthetic oligonucleotide
agucaguacguguuagaag

SEQ ID NO: 2369797 - RNA, 19 nt, Artificial Sequence
  Description of Artificial Sequence: Synthetic oligonucleotide
uguucauuggucugguguc

SEQ ID NO: 2369798 - RNA, 19 nt, Artificial Sequence
  Description of Artificial Sequence: Synthetic oligonucleotide
acauacuguacaaucaaug

SEQ ID NO: 2369799 - RNA, 19 nt, Artificial Sequence
  Description of Artificial Sequence: Synthetic oligonucleotide
agaggcuuugaaucuuuuc

SEQ ID NO: 2369800 - RNA, 19 nt, Artificial Sequence
  Description of Artificial Sequence: Synthetic oligonucleotide
uucuuaagacccacauuug

SEQ ID NO: 2369801 - RNA, 19 nt, Artificial Sequence
  Description of Artificial Sequence: Synthetic oligonucleotide
ucuuuagagcugccgaacu

SEQ ID NO: 2369802 - RNA, 19 nt, Artificial Sequence
  Description of Artificial Sequence: Synthetic oligonucleotide
cauuuauuuuaguagcaca

SEQ ID NO: 2369803 - RNA, 19 nt, Artificial Sequence
  Description of Artificial Sequence: Synthetic oligonucleotide
cacacuuagcauauagcug

SEQ ID NO: 2369804 - RNA, 19 nt, Artificial Sequence
  Description of Artificial Sequence: Synthetic oligonucleotide
agggaaugcauuuauuuua

SEQ ID NO: 2369805 - RNA, 19 nt, Artificial Sequence
  Description of Artificial Sequence: Synthetic oligonucleotide
uacguguuagaagguaggg

SEQ ID NO: 2369806 - RNA, 19 nt, Artificial Sequence
  Description of Artificial Sequence: Synthetic oligonucleotide
cacuuugguuguuagccgg

SEQ ID NO: 2369807 - RNA, 19 nt, Artificial Sequence
  Description of Artificial Sequence: Synthetic oligonucleotide
uaggaguuuaaaagaggcu

SEQ ID NO: 2369808 - RNA, 19 nt, Artificial Sequence
  Description of Artificial Sequence: Synthetic oligonucleotide
uugaguugagacagagucu

SEQ ID NO: 2369809 - RNA, 19 nt, Artificial Sequence
  Description of Artificial Sequence: Synthetic oligonucleotide
cacauuugaacacauaugu

SEQ ID NO: 2369810 - RNA, 19 nt, Artificial Sequence
  Description of Artificial Sequence: Synthetic oligonucleotide
gagucuugcuauauagucc

SEQ ID NO: 2369811 - RNA, 19 nt, Artificial Sequence
  Description of Artificial Sequence: Synthetic oligonucleotide
aauucacaaggucacucua

SEQ ID NO: 2369812 - RNA, 19 nt, Artificial Sequence
  Description of Artificial Sequence: Synthetic oligonucleotide
acaauuacgaguggaagaa

SEQ ID NO: 2369813 - RNA, 19 nt, Artificial Sequence
  Description of Artificial Sequence: Synthetic oligonucleotide
aguuucuuuagagcugccg

SEQ ID NO: 2369814 - RNA, 19 nt, Artificial Sequence
  Description of Artificial Sequence: Synthetic oligonucleotide
uuaguagcacacuuagcau

SEQ ID NO: 2369815 - RNA, 19 nt, Artificial Sequence
  Description of Artificial Sequence: Synthetic oligonucleotide
uuguugucgaucuuuugau

SEQ ID NO: 2369816 - RNA, 19 nt, Artificial Sequence
  Description of Artificial Sequence: Synthetic oligonucleotide
uuguuagccggucaagaau

SEQ ID NO: 2369817 - RNA, 19 nt, Artificial Sequence
  Description of Artificial Sequence: Synthetic oligonucleotide
cacaauggagcagaauucc

SEQ ID NO: 2369818 - RNA, 19 nt, Artificial Sequence
  Description of Artificial Sequence: Synthetic oligonucleotide
uuagcauauagcuggucua

SEQ ID NO: 2369819 - RNA, 19 nt, Artificial Sequence
  Description of Artificial Sequence: Synthetic oligonucleotide
uguugucgaucuuuugaug

SEQ ID NO: 2369820 - RNA, 19 nt, Artificial Sequence
  Description of Artificial Sequence: Synthetic oligonucleotide
uuugguuguuagccgguca

SEQ ID NO: 2369821 - RNA, 19 nt, Artificial Sequence
  Description of Artificial Sequence: Synthetic oligonucleotide
ugaguugagacagagucuu

SEQ ID NO: 2369822 - RNA, 19 nt, Artificial Sequence
  Description of Artificial Sequence: Synthetic oligonucleotide
uaguagcacacuuagcaua

SEQ ID NO: 2369823 - RNA, 19 nt, Artificial Sequence
  Description of Artificial Sequence: Synthetic oligonucleotide
agguuuuauagaaaagcug

SEQ ID NO: 2369824 - RNA, 19 nt, Artificial Sequence
  Description of Artificial Sequence: Synthetic oligonucleotide
auauguuaaauuacauacu

SEQ ID NO: 2369825 - RNA, 19 nt, Artificial Sequence
  Description of Artificial Sequence: Synthetic oligonucleotide
auuugaacacauauguuaa

SEQ ID NO: 2369826 - RNA, 19 nt, Artificial Sequence
  Description of Artificial Sequence: Synthetic oligonucleotide
ucugcauuccuaaggcuau

SEQ ID NO: 2369827 - RNA, 19 nt, Artificial Sequence
  Description of Artificial Sequence: Synthetic oligonucleotide
uagggaaugcauuuauuuu

SEQ ID NO: 2369828 - RNA, 19 nt, Artificial Sequence
  Description of Artificial Sequence: Synthetic oligonucleotide
aguacguguuagaagguag

SEQ ID NO: 2369829 - RNA, 19 nt, Artificial Sequence
  Description of Artificial Sequence: Synthetic oligonucleotide
ucgaucuuuugaugauagg

SEQ ID NO: 2369830 - RNA, 19 nt, Artificial Sequence
  Description of Artificial Sequence: Synthetic oligonucleotide
agacuugaguucuuugggu

SEQ ID NO: 2369831 - RNA, 19 nt, Artificial Sequence
  Description of Artificial Sequence: Synthetic oligonucleotide
aaauuacauacuguacaau

SEQ ID NO: 2369832 - RNA, 19 nt, Artificial Sequence
  Description of Artificial Sequence: Synthetic oligonucleotide
auugaaacuaaaauuucuu

SEQ ID NO: 2369833 - RNA, 19 nt, Artificial Sequence
  Description of Artificial Sequence: Synthetic oligonucleotide
aagucaguacguguuagaa

SEQ ID NO: 2369834 - RNA, 19 nt, Artificial Sequence
  Description of Artificial Sequence: Synthetic oligonucleotide
ucuuuggguaaaccucagc

SEQ ID NO: 2369835 - RNA, 19 nt, Artificial Sequence
  Description of Artificial Sequence: Synthetic oligonucleotide
gcugaaaacaauuacgagu

SEQ ID NO: 2369836 - RNA, 19 nt, Artificial Sequence
  Description of Artificial Sequence: Synthetic oligonucleotide
uugguuguuagccggucaa

SEQ ID NO: 2369837 - RNA, 19 nt, Artificial Sequence
  Description of Artificial Sequence: Synthetic oligonucleotide
gucgaucuuuugaugauag

SEQ ID NO: 2369838 - RNA, 19 nt, Artificial Sequence
  Description of Artificial Sequence: Synthetic oligonucleotide
uacaugucaaggauauguu

SEQ ID NO: 2369839 - RNA, 19 nt, Artificial Sequence
  Description of Artificial Sequence: Synthetic oligonucleotide
agcccuuacaugucaagga

SEQ ID NO: 2369840 - RNA, 19 nt, Artificial Sequence
  Description of Artificial Sequence: Synthetic oligonucleotide
ugcugcuaaguuacaaguc

SEQ ID NO: 2369841 - RNA, 19 nt, Artificial Sequence
  Description of Artificial Sequence: Synthetic oligonucleotide
uauauaguccuggcuggcc

SEQ ID NO: 2369842 - RNA, 19 nt, Artificial Sequence
  Description of Artificial Sequence: Synthetic oligonucleotide
uguccacuuugguuguuag

SEQ ID NO: 2369843 - RNA, 19 nt, Artificial Sequence
  Description of Artificial Sequence: Synthetic oligonucleotide
cuuaagacccacauuugaa

SEQ ID NO: 2369844 - RNA, 19 nt, Artificial Sequence
  Description of Artificial Sequence: Synthetic oligonucleotide
cauuggucuggugucagcc

SEQ ID NO: 2369845 - RNA, 19 nt, Artificial Sequence
  Description of Artificial Sequence: Synthetic oligonucleotide
uuuccgucugcauuccuaa

SEQ ID NO: 2369846 - RNA, 19 nt, Artificial Sequence
  Description of Artificial Sequence: Synthetic oligonucleotide
uggguaaaccucagcaguc

SEQ ID NO: 2369847 - RNA, 19 nt, Artificial Sequence
  Description of Artificial Sequence: Synthetic oligonucleotide
gaggucuuacccaaaugug

SEQ ID NO: 2369848 - RNA, 19 nt, Artificial Sequence
  Description of Artificial Sequence: Synthetic oligonucleotide
auggacagcucaucuaggu

SEQ ID NO: 2369849 - RNA, 19 nt, Artificial Sequence
  Description of Artificial Sequence: Synthetic oligonucleotide
uuacuaaaagugacacaau

SEQ ID NO: 2369850 - RNA, 19 nt, Artificial Sequence
  Description of Artificial Sequence: Synthetic oligonucleotide
uucuuuggguaaaccucag

SEQ ID NO: 2369851 - RNA, 19 nt, Artificial Sequence
  Description of Artificial Sequence: Synthetic oligonucleotide
guacguguuagaagguagg

SEQ ID NO: 2369852 - RNA, 19 nt, Artificial Sequence
  Description of Artificial Sequence: Synthetic oligonucleotide
auauagcuggucuaauguu

SEQ ID NO: 2369853 - RNA, 19 nt, Artificial Sequence
  Description of Artificial Sequence: Synthetic oligonucleotide
aguuacaagucaguacgug

SEQ ID NO: 2369854 - RNA, 19 nt, Artificial Sequence
  Description of Artificial Sequence: Synthetic oligonucleotide
uauguccuugagucggccc

SEQ ID NO: 2369855 - RNA, 19 nt, Artificial Sequence
  Description of Artificial Sequence: Synthetic oligonucleotide
gaucuuuugaugauaggcu

SEQ ID NO: 2369856 - RNA, 19 nt, Artificial Sequence
  Description of Artificial Sequence: Synthetic oligonucleotide
uuacaaggagaaagggaau

SEQ ID NO: 2369857 - RNA, 19 nt, Artificial Sequence
  Description of Artificial Sequence: Synthetic oligonucleotide
acacuuaaaauuacacaca

SEQ ID NO: 2369858 - RNA, 19 nt, Artificial Sequence
  Description of Artificial Sequence: Synthetic oligonucleotide
cauugaaacuaaaauuucu

SEQ ID NO: 2369859 - RNA, 19 nt, Artificial Sequence
  Description of Artificial Sequence: Synthetic oligonucleotide
ggaauuaaaaugcaccacu

SEQ ID NO: 2369860 - RNA, 19 nt, Artificial Sequence
  Description of Artificial Sequence: Synthetic oligonucleotide
caaugacauuucuuaggag

SEQ ID NO: 2369861 - RNA, 19 nt, Artificial Sequence
  Description of Artificial Sequence: Synthetic oligonucleotide
acaucuaacuuguccacuu

SEQ ID NO: 2369862 - RNA, 19 nt, Artificial Sequence
  Description of Artificial Sequence: Synthetic oligonucleotide
uuuagagcugccgaacuuu

SEQ ID NO: 2369863 - RNA, 19 nt, Artificial Sequence
  Description of Artificial Sequence: Synthetic oligonucleotide
auucacaaggucacucuag

SEQ ID NO: 2369864 - RNA, 19 nt, Artificial Sequence
  Description of Artificial Sequence: Synthetic oligonucleotide
aagugacacaauguacacu

SEQ ID NO: 2369865 - RNA, 19 nt, Artificial Sequence
  Description of Artificial Sequence: Synthetic oligonucleotide
uaggcucgaagacuugagu

SEQ ID NO: 2369866 - RNA, 19 nt, Artificial Sequence
  Description of Artificial Sequence: Synthetic oligonucleotide
cauauagcuggucuaaugu

SEQ ID NO: 2369867 - RNA, 19 nt, Artificial Sequence
  Description of Artificial Sequence: Synthetic oligonucleotide
guuuguuucagucugccuu

SEQ ID NO: 2369868 - RNA, 19 nt, Artificial Sequence
  Description of Artificial Sequence: Synthetic oligonucleotide
cuuagcauauagcuggucu

SEQ ID NO: 2369869 - RNA, 19 nt, Artificial Sequence
  Description of Artificial Sequence: Synthetic oligonucleotide
uuacccaaauguguacaca

SEQ ID NO: 2369870 - RNA, 19 nt, Artificial Sequence
  Description of Artificial Sequence: Synthetic oligonucleotide
ucaguacguguuagaaggu

SEQ ID NO: 2369871 - RNA, 19 nt, Artificial Sequence
  Description of Artificial Sequence: Synthetic oligonucleotide
ggucuaauguuccaaaugu

SEQ ID NO: 2369872 - RNA, 19 nt, Artificial Sequence
  Description of Artificial Sequence: Synthetic oligonucleotide
ggcuauguccuugagucgg

SEQ ID NO: 2369873 - RNA, 19 nt, Artificial Sequence
  Description of Artificial Sequence: Synthetic oligonucleotide
uugagucggcccaauccca

SEQ ID NO: 2369874 - RNA, 19 nt, Artificial Sequence
  Description of Artificial Sequence: Synthetic oligonucleotide
guuacaagucaguacgugu

SEQ ID NO: 2369875 - RNA, 19 nt, Artificial Sequence
  Description of Artificial Sequence: Synthetic oligonucleotide
uugucucuauauuguuuga

SEQ ID NO: 2369876 - RNA, 19 nt, Artificial Sequence
  Description of Artificial Sequence: Synthetic oligonucleotide
uacuuguuacaugaaugaa

SEQ ID NO: 2369877 - RNA, 19 nt, Artificial Sequence
  Description of Artificial Sequence: Synthetic oligonucleotide
gacuugaguucuuugggua

SEQ ID NO: 2369878 - RNA, 19 nt, Artificial Sequence
  Description of Artificial Sequence: Synthetic oligonucleotide
augucaaggauauguucau

SEQ ID NO: 2369879 - RNA, 19 nt, Artificial Sequence
  Description of Artificial Sequence: Synthetic oligonucleotide
uucauuggucuggugucag

SEQ ID NO: 2369880 - RNA, 19 nt, Artificial Sequence
  Description of Artificial Sequence: Synthetic oligonucleotide
aggcucgaagacuugaguu

SEQ ID NO: 2369881 - RNA, 19 nt, Artificial Sequence
  Description of Artificial Sequence: Synthetic oligonucleotide
aggucuuacccaaaugugu

SEQ ID NO: 2369882 - RNA, 19 nt, Artificial Sequence
  Description of Artificial Sequence: Synthetic oligonucleotide
cacaauguacacuuaaaau

SEQ ID NO: 2369883 - RNA, 19 nt, Artificial Sequence
  Description of Artificial Sequence: Synthetic oligonucleotide
aauuuccgucugcauuccu

SEQ ID NO: 2369884 - RNA, 19 nt, Artificial Sequence
  Description of Artificial Sequence: Synthetic oligonucleotide
gaugauaggcucgaagacu

SEQ ID NO: 2369885 - RNA, 19 nt, Artificial Sequence
  Description of Artificial Sequence: Synthetic oligonucleotide
ggauauguucauuggucug

SEQ ID NO: 2369886 - RNA, 19 nt, Artificial Sequence
  Description of Artificial Sequence: Synthetic oligonucleotide
cagcccuuacaugucaagg

SEQ ID NO: 2369887 - RNA, 19 nt, Artificial Sequence
  Description of Artificial Sequence: Synthetic oligonucleotide
gauaggcucgaagacuuga

SEQ ID NO: 2369888 - RNA, 19 nt, Artificial Sequence
  Description of Artificial Sequence: Synthetic oligonucleotide
aggcuauguccuugagucg

SEQ ID NO: 2369889 - RNA, 19 nt, Artificial Sequence
  Description of Artificial Sequence: Synthetic oligonucleotide
gggaaugcauuuauuuuag

SEQ ID NO: 2369890 - RNA, 19 nt, Artificial Sequence
  Description of Artificial Sequence: Synthetic oligonucleotide
uugucgaucuuuugaugau

SEQ ID NO: 2369891 - RNA, 19 nt, Artificial Sequence
  Description of Artificial Sequence: Synthetic oligonucleotide
cgaucuuuugaugauaggc

SEQ ID NO: 2369892 - RNA, 19 nt, Artificial Sequence
  Description of Artificial Sequence: Synthetic oligonucleotide
guagggaaugcauuuauuu

SEQ ID NO: 2369893 - RNA, 19 nt, Artificial Sequence
  Description of Artificial Sequence: Synthetic oligonucleotide
acuguacaaucaaugacau

SEQ ID NO: 2369894 - RNA, 19 nt, Artificial Sequence
  Description of Artificial Sequence: Synthetic oligonucleotide
auuggucuggugucagcca

SEQ ID NO: 2369895 - RNA, 19 nt, Artificial Sequence
  Description of Artificial Sequence: Synthetic oligonucleotide
ccggucaagaaugucaucc

SEQ ID NO: 2369896 - RNA, 19 nt, Artificial Sequence
  Description of Artificial Sequence: Synthetic oligonucleotide
agguagggaaugcauuuau

SEQ ID NO: 2369897 - RNA, 19 nt, Artificial Sequence
  Description of Artificial Sequence: Synthetic oligonucleotide
guuguuagccggucaagaa

SEQ ID NO: 2369898 - RNA, 19 nt, Artificial Sequence
  Description of Artificial Sequence: Synthetic oligonucleotide
gcauauagcuggucuaaug

SEQ ID NO: 2369899 - RNA, 19 nt, Artificial Sequence
  Description of Artificial Sequence: Synthetic oligonucleotide
aguagcacacuuagcauau

SEQ ID NO: 2369900 - RNA, 19 nt, Artificial Sequence
  Description of Artificial Sequence: Synthetic oligonucleotide
uuguuacaugaaugaacuc

SEQ ID NO: 2369901 - RNA, 19 nt, Artificial Sequence
  Description of Artificial Sequence: Synthetic oligonucleotide
ucacucuagugcugcuaag

SEQ ID NO: 2369902 - RNA, 19 nt, Artificial Sequence
  Description of Artificial Sequence: Synthetic oligonucleotide
ugauaggcucgaagacuug

SEQ ID NO: 2369903 - RNA, 19 nt, Artificial Sequence
  Description of Artificial Sequence: Synthetic oligonucleotide
gaagguagggaaugcauuu

SEQ ID NO: 2369904 - RNA, 19 nt, Artificial Sequence
  Description of Artificial Sequence: Synthetic oligonucleotide
cuauauaguccuggcuggc

SEQ ID NO: 2369905 - RNA, 19 nt, Artificial Sequence
  Description of Artificial Sequence: Synthetic oligonucleotide
uguuucagucugccuugca

SEQ ID NO: 2369906 - RNA, 19 nt, Artificial Sequence
  Description of Artificial Sequence: Synthetic oligonucleotide
uuacgaguggaagaacaua

SEQ ID NO: 2369907 - RNA, 19 nt, Artificial Sequence
  Description of Artificial Sequence: Synthetic oligonucleotide
uccuaaggcuauguccuug

SEQ ID NO: 2369908 - RNA, 19 nt, Artificial Sequence
  Description of Artificial Sequence: Synthetic oligonucleotide
ucauuggucuggugucagc

SEQ ID NO: 2369909 - RNA, 19 nt, Artificial Sequence
  Description of Artificial Sequence: Synthetic oligonucleotide
ggagaaagggaauuaaaau

SEQ ID NO: 2369910 - RNA, 19 nt, Artificial Sequence
  Description of Artificial Sequence: Synthetic oligonucleotide
uuguuugaguugagacaga

SEQ ID NO: 2369911 - RNA, 19 nt, Artificial Sequence
  Description of Artificial Sequence: Synthetic oligonucleotide
ugcauuccuaaggcuaugu

SEQ ID NO: 2369912 - RNA, 19 nt, Artificial Sequence
  Description of Artificial Sequence: Synthetic oligonucleotide
ggucaagaaugucauccug

SEQ ID NO: 2369913 - RNA, 19 nt, Artificial Sequence
  Description of Artificial Sequence: Synthetic oligonucleotide
guuuuauagaaaagcugaa

SEQ ID NO: 2369914 - RNA, 19 nt, Artificial Sequence
  Description of Artificial Sequence: Synthetic oligonucleotide
acaaucaaugacauuucuu

SEQ ID NO: 2369915 - RNA, 19 nt, Artificial Sequence
  Description of Artificial Sequence: Synthetic oligonucleotide
augauaggcucgaagacuu

SEQ ID NO: 2369916 - RNA, 19 nt, Artificial Sequence
  Description of Artificial Sequence: Synthetic oligonucleotide
aaucccauggacagcucau

SEQ ID NO: 2369917 - RNA, 19 nt, Artificial Sequence
  Description of Artificial Sequence: Synthetic oligonucleotide
gcacacuuagcauauagcu

SEQ ID NO: 2369918 - RNA, 19 nt, Artificial Sequence
  Description of Artificial Sequence: Synthetic oligonucleotide
auaggcucgaagacuugag

SEQ ID NO: 2369919 - RNA, 19 nt, Artificial Sequence
  Description of Artificial Sequence: Synthetic oligonucleotide
acuuagcauauagcugguc

SEQ ID NO: 2369920 - RNA, 19 nt, Artificial Sequence
  Description of Artificial Sequence: Synthetic oligonucleotide
auuacgaguggaagaacau

SEQ ID NO: 2369921 - RNA, 19 nt, Artificial Sequence
  Description of Artificial Sequence: Synthetic oligonucleotide
acguguuagaagguaggga

SEQ ID NO: 2369922 - RNA, 19 nt, Artificial Sequence
  Description of Artificial Sequence: Synthetic oligonucleotide
ugguuguuagccggucaag

SEQ ID NO: 2369923 - RNA, 19 nt, Artificial Sequence
  Description of Artificial Sequence: Synthetic oligonucleotide
cuaaggcuauguccuugag

SEQ ID NO: 2369924 - RNA, 19 nt, Artificial Sequence
  Description of Artificial Sequence: Synthetic oligonucleotide
ggaagaacauauggguuug

SEQ ID NO: 2369925 - RNA, 19 nt, Artificial Sequence
  Description of Artificial Sequence: Synthetic oligonucleotide
auauggguuugucucuaua

SEQ ID NO: 2369926 - RNA, 19 nt, Artificial Sequence
  Description of Artificial Sequence: Synthetic oligonucleotide
ucaucacaauggagcagaa

SEQ ID NO: 2369927 - RNA, 19 nt, Artificial Sequence
  Description of Artificial Sequence: Synthetic oligonucleotide
ugagucggcccaaucccau

SEQ ID NO: 2369928 - RNA, 19 nt, Artificial Sequence
  Description of Artificial Sequence: Synthetic oligonucleotide
cagaggucuuacccaaaug

SEQ ID NO: 2369929 - RNA, 19 nt, Artificial Sequence
  Description of Artificial Sequence: Synthetic oligonucleotide
aagguagggaaugcauuua

SEQ ID NO: 2369930 - RNA, 19 nt, Artificial Sequence
  Description of Artificial Sequence: Synthetic oligonucleotide
ggcucgaagacuugaguuc

SEQ ID NO: 2369931 - RNA, 19 nt, Artificial Sequence
  Description of Artificial Sequence: Synthetic oligonucleotide
acaaggagaaagggaauua

SEQ ID NO: 2369932 - RNA, 19 nt, Artificial Sequence
  Description of Artificial Sequence: Synthetic oligonucleotide
gugcugcuaaguuacaagu

SEQ ID NO: 2369933 - RNA, 19 nt, Artificial Sequence
  Description of Artificial Sequence: Synthetic oligonucleotide
gucuaauguuccaaauguc

SEQ ID NO: 2369934 - RNA, 19 nt, Artificial Sequence
  Description of Artificial Sequence: Synthetic oligonucleotide
agaagguagggaaugcauu

SEQ ID NO: 2369935 - RNA, 19 nt, Artificial Sequence
  Description of Artificial Sequence: Synthetic oligonucleotide
ugucgaucuuuugaugaua

SEQ ID NO: 2369936 - RNA, 19 nt, Artificial Sequence
  Description of Artificial Sequence: Synthetic oligonucleotide
uagugcugcuaaguuacaa

SEQ ID NO: 2369937 - RNA, 19 nt, Artificial Sequence
  Description of Artificial Sequence: Synthetic oligonucleotide
ggugucagccagcagaucu

SEQ ID NO: 2369938 - RNA, 19 nt, Artificial Sequence
  Description of Artificial Sequence: Synthetic oligonucleotide
gacagagucuugcuauaua

SEQ ID NO: 2369939 - RNA, 19 nt, Artificial Sequence
  Description of Artificial Sequence: Synthetic oligonucleotide
gggaauuaaaaugcaccac

SEQ ID NO: 2369940 - RNA, 19 nt, Artificial Sequence
  Description of Artificial Sequence: Synthetic oligonucleotide
caaggucacucuagugcug

SEQ ID NO: 2369941 - RNA, 19 nt, Artificial Sequence
  Description of Artificial Sequence: Synthetic oligonucleotide
caauuuccgucugcauucc

SEQ ID NO: 2369942 - RNA, 19 nt, Artificial Sequence
  Description of Artificial Sequence: Synthetic oligonucleotide
uuguuucagucugccuugc

SEQ ID NO: 2369943 - RNA, 19 nt, Artificial Sequence
  Description of Artificial Sequence: Synthetic oligonucleotide
caauuacgaguggaagaac

SEQ ID NO: 2369944 - RNA, 19 nt, Artificial Sequence
  Description of Artificial Sequence: Synthetic oligonucleotide
uagcuggucuaauguucca

SEQ ID NO: 2369945 - RNA, 19 nt, Artificial Sequence
  Description of Artificial Sequence: Synthetic oligonucleotide
cucuagugcugcuaaguua

SEQ ID NO: 2369946 - RNA, 19 nt, Artificial Sequence
  Description of Artificial Sequence: Synthetic oligonucleotide
gucugcauuccuaaggcua

SEQ ID NO: 2369947 - RNA, 19 nt, Artificial Sequence
  Description of Artificial Sequence: Synthetic oligonucleotide
ccgucugcauuccuaaggc

SEQ ID NO: 2369948 - RNA, 19 nt, Artificial Sequence
  Description of Artificial Sequence: Synthetic oligonucleotide
cuauguccuugagucggcc

SEQ ID NO: 2369949 - RNA, 19 nt, Artificial Sequence
  Description of Artificial Sequence: Synthetic oligonucleotide
gcagaauuccuuuucaguu

SEQ ID NO: 2369950 - RNA, 19 nt, Artificial Sequence
  Description of Artificial Sequence: Synthetic oligonucleotide
gagucggcccaaucccaug

SEQ ID NO: 2369951 - RNA, 19 nt, Artificial Sequence
  Description of Artificial Sequence: Synthetic oligonucleotide
uuagccggucaagaauguc

SEQ ID NO: 2369952 - RNA, 19 nt, Artificial Sequence
  Description of Artificial Sequence: Synthetic oligonucleotide
cuaacuuguccacuuuggu

SEQ ID NO: 2369953 - RNA, 19 nt, Artificial Sequence
  Description of Artificial Sequence: Synthetic oligonucleotide
ucgaagacuugaguucuuu

SEQ ID NO: 2369954 - RNA, 19 nt, Artificial Sequence
  Description of Artificial Sequence: Synthetic oligonucleotide
cagcucaucuagguuguug

SEQ ID NO: 2369955 - RNA, 19 nt, Artificial Sequence
  Description of Artificial Sequence: Synthetic oligonucleotide
cuuucugaaggcaguuugu

SEQ ID NO: 2369956 - RNA, 19 nt, Artificial Sequence
  Description of Artificial Sequence: Synthetic oligonucleotide
uccuugagucggcccaauc

SEQ ID NO: 2369957 - RNA, 19 nt, Artificial Sequence
  Description of Artificial Sequence: Synthetic oligonucleotide
agcagaucuuggaagguuu

SEQ ID NO: 2369958 - RNA, 19 nt, Artificial Sequence
  Description of Artificial Sequence: Synthetic oligonucleotide
gaaggcaguuuguuucagu

SEQ ID NO: 2369959 - RNA, 19 nt, Artificial Sequence
  Description of Artificial Sequence: Synthetic oligonucleotide
cuuugguuguuagccgguc

SEQ ID NO: 2369960 - RNA, 19 nt, Artificial Sequence
  Description of Artificial Sequence: Synthetic oligonucleotide
uuuugaugauaggcucgaa

SEQ ID NO: 2369961 - RNA, 19 nt, Artificial Sequence
  Description of Artificial Sequence: Synthetic oligonucleotide
auuuccgucugcauuccua

SEQ ID NO: 2369962 - RNA, 19 nt, Artificial Sequence
  Description of Artificial Sequence: Synthetic oligonucleotide
agacagagucuugcuauau

SEQ ID NO: 2369963 - RNA, 19 nt, Artificial Sequence
  Description of Artificial Sequence: Synthetic oligonucleotide
gcuaaguuacaagucagua

SEQ ID NO: 2369964 - RNA, 19 nt, Artificial Sequence
  Description of Artificial Sequence: Synthetic oligonucleotide
guucauuggucugguguca

SEQ ID NO: 2369965 - RNA, 19 nt, Artificial Sequence
  Description of Artificial Sequence: Synthetic oligonucleotide
gguuguuagccggucaaga

SEQ ID NO: 2369966 - RNA, 19 nt, Artificial Sequence
  Description of Artificial Sequence: Synthetic oligonucleotide
gacaucuaacuuguccacu

SEQ ID NO: 2369967 - RNA, 19 nt, Artificial Sequence
  Description of Artificial Sequence: Synthetic oligonucleotide
agcuggucuaauguuccaa

SEQ ID NO: 2369968 - RNA, 19 nt, Artificial Sequence
  Description of Artificial Sequence: Synthetic oligonucleotide
cuccuacagaaugaggaaa

SEQ ID NO: 2369969 - RNA, 19 nt, Artificial Sequence
  Description of Artificial Sequence: Synthetic oligonucleotide
agcauauagcuggucuaau

SEQ ID NO: 2369970 - RNA, 19 nt, Artificial Sequence
  Description of Artificial Sequence: Synthetic oligonucleotide
ccucuccuacagaaugagg

SEQ ID NO: 2369971 - RNA, 19 nt, Artificial Sequence
  Description of Artificial Sequence: Synthetic oligonucleotide
agccggucaagaaugucau

SEQ ID NO: 2369972 - RNA, 19 nt, Artificial Sequence
  Description of Artificial Sequence: Synthetic oligonucleotide
uuccuaaggcuauguccuu

SEQ ID NO: 2369973 - RNA, 19 nt, Artificial Sequence
  Description of Artificial Sequence: Synthetic oligonucleotide
gcuggucuaauguuccaaa

SEQ ID NO: 2369974 - RNA, 19 nt, Artificial Sequence
  Description of Artificial Sequence: Synthetic oligonucleotide
ggucuuacccaaaugugua

SEQ ID NO: 2369975 - RNA, 19 nt, Artificial Sequence
  Description of Artificial Sequence: Synthetic oligonucleotide
uguccuugagucggcccaa

SEQ ID NO: 2369976 - RNA, 19 nt, Artificial Sequence
  Description of Artificial Sequence: Synthetic oligonucleotide
auguuccaaaugucaccuu

SEQ ID NO: 2369977 - RNA, 19 nt, Artificial Sequence
  Description of Artificial Sequence: Synthetic oligonucleotide
aggucacucuagugcugcu

SEQ ID NO: 2369978 - RNA, 19 nt, Artificial Sequence
  Description of Artificial Sequence: Synthetic oligonucleotide
cuagugcugcuaaguuaca

SEQ ID NO: 2369979 - RNA, 19 nt, Artificial Sequence
  Description of Artificial Sequence: Synthetic oligonucleotide
cgaagacuugaguucuuug

SEQ ID NO: 2369980 - RNA, 19 nt, Artificial Sequence
  Description of Artificial Sequence: Synthetic oligonucleotide
cuggucuaauguuccaaau

SEQ ID NO: 2369981 - RNA, 19 nt, Artificial Sequence
  Description of Artificial Sequence: Synthetic oligonucleotide
gcaguuuguuucagucugc

SEQ ID NO: 2369982 - RNA, 19 nt, Artificial Sequence
  Description of Artificial Sequence: Synthetic oligonucleotide
ccuaaggcuauguccuuga

SEQ ID NO: 2369983 - RNA, 19 nt, Artificial Sequence
  Description of Artificial Sequence: Synthetic oligonucleotide
cugcauuccuaaggcuaug

SEQ ID NO: 2369984 - RNA, 19 nt, Artificial Sequence
  Description of Artificial Sequence: Synthetic oligonucleotide
ggguaaaccucagcaguca

SEQ ID NO: 2369985 - RNA, 19 nt, Artificial Sequence
  Description of Artificial Sequence: Synthetic oligonucleotide
guuugaguugagacagagu

SEQ ID NO: 2369986 - RNA, 19 nt, Artificial Sequence
  Description of Artificial Sequence: Synthetic oligonucleotide
ggguuugucucuauauugu

SEQ ID NO: 2369987 - RNA, 19 nt, Artificial Sequence
  Description of Artificial Sequence: Synthetic oligonucleotide
gucuggugucagccagcag

SEQ ID NO: 2369988 - RNA, 19 nt, Artificial Sequence
  Description of Artificial Sequence: Synthetic oligonucleotide
cacucuagugcugcuaagu

SEQ ID NO: 2369989 - RNA, 19 nt, Artificial Sequence
  Description of Artificial Sequence: Synthetic oligonucleotide
caguacguguuagaaggua

SEQ ID NO: 2369990 - RNA, 19 nt, Artificial Sequence
  Description of Artificial Sequence: Synthetic oligonucleotide
gaagaacauauggguuugu

SEQ ID NO: 2369991 - RNA, 19 nt, Artificial Sequence
  Description of Artificial Sequence: Synthetic oligonucleotide
cuuuagagcugccgaacuu

SEQ ID NO: 2369992 - RNA, 19 nt, Artificial Sequence
  Description of Artificial Sequence: Synthetic oligonucleotide
gucggcccaaucccaugga

SEQ ID NO: 2369993 - RNA, 19 nt, Artificial Sequence
  Description of Artificial Sequence: Synthetic oligonucleotide
gcuauguccuugagucggc

SEQ ID NO: 2369994 - RNA, 19 nt, Artificial Sequence
  Description of Artificial Sequence: Synthetic oligonucleotide
guguuagaagguagggaau

SEQ ID NO: 2369995 - RNA, 19 nt, Artificial Sequence
  Description of Artificial Sequence: Synthetic oligonucleotide
cagaucuuggaagguuuua

SEQ ID NO: 2369996 - RNA, 19 nt, Artificial Sequence
  Description of Artificial Sequence: Synthetic oligonucleotide
cacagaggucuuacccaaa

SEQ ID NO: 2369997 - RNA, 19 nt, Artificial Sequence
  Description of Artificial Sequence: Synthetic oligonucleotide
gcucgaagacuugaguucu

SEQ ID NO: 2369998 - RNA, 19 nt, Artificial Sequence
  Description of Artificial Sequence: Synthetic oligonucleotide
cacuuagcauauagcuggu

SEQ ID NO: 2369999 - RNA, 19 nt, Artificial Sequence
  Description of Artificial Sequence: Synthetic oligonucleotide
guuagccggucaagaaugu

SEQ ID NO: 2370000 - RNA, 19 nt, Artificial Sequence
  Description of Artificial Sequence: Synthetic oligonucleotide
gcccuuacaugucaaggau

SEQ ID NO: 2370001 - RNA, 19 nt, Artificial Sequence
  Description of Artificial Sequence: Synthetic oligonucleotide
cccuuacaugucaaggaua

SEQ ID NO: 2370002 - RNA, 19 nt, Artificial Sequence
  Description of Artificial Sequence: Synthetic oligonucleotide
ggccucuccuacagaauga

SEQ ID NO: 2370003 - RNA, 19 nt, Artificial Sequence
  Description of Artificial Sequence: Synthetic oligonucleotide
acccacauuugaacacaua

SEQ ID NO: 2370004 - RNA, 19 nt, Artificial Sequence
  Description of Artificial Sequence: Synthetic oligonucleotide
cccaaucccauggacagcu

SEQ ID NO: 2370005 - RNA, 19 nt, Artificial Sequence
  Description of Artificial Sequence: Synthetic oligonucleotide
ggucacucuagugcugcua

SEQ ID NO: 2370006 - RNA, 19 nt, Artificial Sequence
  Description of Artificial Sequence: Synthetic oligonucleotide
gccggucaagaaugucauc

SEQ ID NO: 2370007 - RNA, 19 nt, Artificial Sequence
  Description of Artificial Sequence: Synthetic oligonucleotide
gguagggaaugcauuuauu

SEQ ID NO: 2370008 - RNA, 19 nt, Artificial Sequence
  Description of Artificial Sequence: Synthetic oligonucleotide
caucuagguuguugucgau

SEQ ID NO: 2370009 - RNA, 19 nt, Artificial Sequence
  Description of Artificial Sequence: Synthetic oligonucleotide
ccaaucccauggacagcuc

SEQ ID NO: 2370010 - RNA, 19 nt, Artificial Sequence
  Description of Artificial Sequence: Synthetic oligonucleotide
cggcccaaucccauggaca

SEQ ID NO: 2370011 - RNA, 19 nt, Artificial Sequence
  Description of Artificial Sequence: Synthetic oligonucleotide
gcagaucuuggaagguuuu

SEQ ID NO: 2370012 - RNA, 19 nt, Artificial Sequence
  Description of Artificial Sequence: Synthetic oligonucleotide
cuuguccacuuugguuguu

SEQ ID NO: 2370013 - RNA, 19 nt, Artificial Sequence
  Description of Artificial Sequence: Synthetic oligonucleotide
aauaucaggaaguucaugg

SEQ ID NO: 2370014 - RNA, 19 nt, Artificial Sequence
  Description of Artificial Sequence: Synthetic oligonucleotide
aauaaucaaaucuaggcuc

SEQ ID NO: 2370015 - RNA, 19 nt, Artificial Sequence
  Description of Artificial Sequence: Synthetic oligonucleotide
aaugcuaaagaacugugac

SEQ ID NO: 2370016 - RNA, 19 nt, Artificial Sequence
  Description of Artificial Sequence: Synthetic oligonucleotide
uaauccaucauugucaugg

SEQ ID NO: 2370017 - RNA, 19 nt, Artificial Sequence
  Description of Artificial Sequence: Synthetic oligonucleotide
guaauaaucaaaucuaggc

SEQ ID NO: 2370018 - RNA, 19 nt, Artificial Sequence
  Description of Artificial Sequence: Synthetic oligonucleotide
aaaucuaggcuccugaaug

SEQ ID NO: 2370019 - RNA, 19 nt, Artificial Sequence
  Description of Artificial Sequence: Synthetic oligonucleotide
uguaauaaucaaaucuagg

SEQ ID NO: 2370020 - RNA, 19 nt, Artificial Sequence
  Description of Artificial Sequence: Synthetic oligonucleotide
uuugcuucgaaccccaagg

SEQ ID NO: 2370021 - RNA, 19 nt, Artificial Sequence
  Description of Artificial Sequence: Synthetic oligonucleotide
caugguaugcuuaauaccc

SEQ ID NO: 2370022 - RNA, 19 nt, Artificial Sequence
  Description of Artificial Sequence: Synthetic oligonucleotide
aaaccuggaacgaagagac

SEQ ID NO: 2370023 - RNA, 19 nt, Artificial Sequence
  Description of Artificial Sequence: Synthetic oligonucleotide
uaauaaucaaaucuaggcu

SEQ ID NO: 2370024 - RNA, 19 nt, Artificial Sequence
  Description of Artificial Sequence: Synthetic oligonucleotide
uuuaaggacuguaugaaga

SEQ ID NO: 2370025 - RNA, 19 nt, Artificial Sequence
  Description of Artificial Sequence: Synthetic oligonucleotide
ucuaccauguucuagacaa

SEQ ID NO: 2370026 - RNA, 19 nt, Artificial Sequence
  Description of Artificial Sequence: Synthetic oligonucleotide
aaggacuguaugaagagcc

SEQ ID NO: 2370027 - RNA, 19 nt, Artificial Sequence
  Description of Artificial Sequence: Synthetic oligonucleotide
ugggaauucacauucacug

SEQ ID NO: 2370028 - RNA, 19 nt, Artificial Sequence
  Description of Artificial Sequence: Synthetic oligonucleotide
aaauagaggaucaagaaaa

SEQ ID NO: 2370029 - RNA, 19 nt, Artificial Sequence
  Description of Artificial Sequence: Synthetic oligonucleotide
ucauaaauuucaaugacau

SEQ ID NO: 2370030 - RNA, 19 nt, Artificial Sequence
  Description of Artificial Sequence: Synthetic oligonucleotide
uccacaacuacgaaggcag

SEQ ID NO: 2370031 - RNA, 19 nt, Artificial Sequence
  Description of Artificial Sequence: Synthetic oligonucleotide
agucauaaauuucaaugac

SEQ ID NO: 2370032 - RNA, 19 nt, Artificial Sequence
  Description of Artificial Sequence: Synthetic oligonucleotide
cuagacaaagcuaauaauc

SEQ ID NO: 2370033 - RNA, 19 nt, Artificial Sequence
  Description of Artificial Sequence: Synthetic oligonucleotide
augcuuaauacccagagca

SEQ ID NO: 2370034 - RNA, 19 nt, Artificial Sequence
  Description of Artificial Sequence: Synthetic oligonucleotide
uagaaauagaggaucaaga

SEQ ID NO: 2370035 - RNA, 19 nt, Artificial Sequence
  Description of Artificial Sequence: Synthetic oligonucleotide
uuaauaucaaauccuuucu

SEQ ID NO: 2370036 - RNA, 19 nt, Artificial Sequence
  Description of Artificial Sequence: Synthetic oligonucleotide
ucauuuaaggacuguauga

SEQ ID NO: 2370037 - RNA, 19 nt, Artificial Sequence
  Description of Artificial Sequence: Synthetic oligonucleotide
accaugguaugcuuaauac

SEQ ID NO: 2370038 - RNA, 19 nt, Artificial Sequence
  Description of Artificial Sequence: Synthetic oligonucleotide
cuaaagaacugugacaggg

SEQ ID NO: 2370039 - RNA, 19 nt, Artificial Sequence
  Description of Artificial Sequence: Synthetic oligonucleotide
gaaaaggccgugcuggugg

SEQ ID NO: 2370040 - RNA, 19 nt, Artificial Sequence
  Description of Artificial Sequence: Synthetic oligonucleotide
uguacgaaauucucgagga

SEQ ID NO: 2370041 - RNA, 19 nt, Artificial Sequence
  Description of Artificial Sequence: Synthetic oligonucleotide
cugauaacuaaccuucugg

SEQ ID NO: 2370042 - RNA, 19 nt, Artificial Sequence
  Description of Artificial Sequence: Synthetic oligonucleotide
uguaugaagagccccauuc

SEQ ID NO: 2370043 - RNA, 19 nt, Artificial Sequence
  Description of Artificial Sequence: Synthetic oligonucleotide
ucaucuacccauuuaauau

SEQ ID NO: 2370044 - RNA, 19 nt, Artificial Sequence
  Description of Artificial Sequence: Synthetic oligonucleotide
ugauaacuaaccuucuggc

SEQ ID NO: 2370045 - RNA, 19 nt, Artificial Sequence
  Description of Artificial Sequence: Synthetic oligonucleotide
auuucaaugacauguggga

SEQ ID NO: 2370046 - RNA, 19 nt, Artificial Sequence
  Description of Artificial Sequence: Synthetic oligonucleotide
auaaucaaaucuaggcucc

SEQ ID NO: 2370047 - RNA, 19 nt, Artificial Sequence
  Description of Artificial Sequence: Synthetic oligonucleotide
acaagcucuggcuuuggcc

SEQ ID NO: 2370048 - RNA, 19 nt, Artificial Sequence
  Description of Artificial Sequence: Synthetic oligonucleotide
cuaauaauccaucauuguc

SEQ ID NO: 2370049 - RNA, 19 nt, Artificial Sequence
  Description of Artificial Sequence: Synthetic oligonucleotide
agaaaauccgcaaaagguc

SEQ ID NO: 2370050 - RNA, 19 nt, Artificial Sequence
  Description of Artificial Sequence: Synthetic oligonucleotide
caugaaaagaggcuucugc

SEQ ID NO: 2370051 - RNA, 19 nt, Artificial Sequence
  Description of Artificial Sequence: Synthetic oligonucleotide
aucauuuaaggacuguaug

SEQ ID NO: 2370052 - RNA, 19 nt, Artificial Sequence
  Description of Artificial Sequence: Synthetic oligonucleotide
uucuguacgaaauucucga

SEQ ID NO: 2370053 - RNA, 19 nt, Artificial Sequence
  Description of Artificial Sequence: Synthetic oligonucleotide
gacuugaguagaaauagag

SEQ ID NO: 2370054 - RNA, 19 nt, Artificial Sequence
  Description of Artificial Sequence: Synthetic oligonucleotide
acagaaaaggccgugcugg

SEQ ID NO: 2370055 - RNA, 19 nt, Artificial Sequence
  Description of Artificial Sequence: Synthetic oligonucleotide
aauagaggaucaagaaaac

SEQ ID NO: 2370056 - RNA, 19 nt, Artificial Sequence
  Description of Artificial Sequence: Synthetic oligonucleotide
uauacacuggauaggguca

SEQ ID NO: 2370057 - RNA, 19 nt, Artificial Sequence
  Description of Artificial Sequence: Synthetic oligonucleotide
agagacaaugcuaaagaac

SEQ ID NO: 2370058 - RNA, 19 nt, Artificial Sequence
  Description of Artificial Sequence: Synthetic oligonucleotide
uggagaauacuccuagggc

SEQ ID NO: 2370059 - RNA, 19 nt, Artificial Sequence
  Description of Artificial Sequence: Synthetic oligonucleotide
guaugcuuaauacccagag

SEQ ID NO: 2370060 - RNA, 19 nt, Artificial Sequence
  Description of Artificial Sequence: Synthetic oligonucleotide
agaaauagaggaucaagaa

SEQ ID NO: 2370061 - RNA, 19 nt, Artificial Sequence
  Description of Artificial Sequence: Synthetic oligonucleotide
ugguauacacuggauaggg

SEQ ID NO: 2370062 - RNA, 19 nt, Artificial Sequence
  Description of Artificial Sequence: Synthetic oligonucleotide
auaacuaaccuucuggcua

SEQ ID NO: 2370063 - RNA, 19 nt, Artificial Sequence
  Description of Artificial Sequence: Synthetic oligonucleotide
uuuucccacauauggaaug

SEQ ID NO: 2370064 - RNA, 19 nt, Artificial Sequence
  Description of Artificial Sequence: Synthetic oligonucleotide
cuggagaauacuccuaggg

SEQ ID NO: 2370065 - RNA, 19 nt, Artificial Sequence
  Description of Artificial Sequence: Synthetic oligonucleotide
aaguucauggcuguaauaa

SEQ ID NO: 2370066 - RNA, 19 nt, Artificial Sequence
  Description of Artificial Sequence: Synthetic oligonucleotide
aaauucucgaggaaaguca

SEQ ID NO: 2370067 - RNA, 19 nt, Artificial Sequence
  Description of Artificial Sequence: Synthetic oligonucleotide
caugugggaauucacauuc

SEQ ID NO: 2370068 - RNA, 19 nt, Artificial Sequence
  Description of Artificial Sequence: Synthetic oligonucleotide
ggugguauacacuggauag

SEQ ID NO: 2370069 - RNA, 19 nt, Artificial Sequence
  Description of Artificial Sequence: Synthetic oligonucleotide
ucaugggcaugaaaagagg

SEQ ID NO: 2370070 - RNA, 19 nt, Artificial Sequence
  Description of Artificial Sequence: Synthetic oligonucleotide
ugugacaagggccguaucu

SEQ ID NO: 2370071 - RNA, 19 nt, Artificial Sequence
  Description of Artificial Sequence: Synthetic oligonucleotide
cuaaccuucuggcuaaggc

SEQ ID NO: 2370072 - RNA, 19 nt, Artificial Sequence
  Description of Artificial Sequence: Synthetic oligonucleotide
agaaaacaauguauuuucc

SEQ ID NO: 2370073 - RNA, 19 nt, Artificial Sequence
  Description of Artificial Sequence: Synthetic oligonucleotide
uaucauuuaaggacuguau

SEQ ID NO: 2370074 - RNA, 19 nt, Artificial Sequence
  Description of Artificial Sequence: Synthetic oligonucleotide
cuguacgaaauucucgagg

SEQ ID NO: 2370075 - RNA, 19 nt, Artificial Sequence
  Description of Artificial Sequence: Synthetic oligonucleotide
uaauacccagagcaucacg

SEQ ID NO: 2370076 - RNA, 19 nt, Artificial Sequence
  Description of Artificial Sequence: Synthetic oligonucleotide
gacuggagaauacuccuag

SEQ ID NO: 2370077 - RNA, 19 nt, Artificial Sequence
  Description of Artificial Sequence: Synthetic oligonucleotide
guauacacuggauaggguc

SEQ ID NO: 2370078 - RNA, 19 nt, Artificial Sequence
  Description of Artificial Sequence: Synthetic oligonucleotide
acugcuuuccacaacuacg

SEQ ID NO: 2370079 - RNA, 19 nt, Artificial Sequence
  Description of Artificial Sequence: Synthetic oligonucleotide
ugacaugugggaauucaca

SEQ ID NO: 2370080 - RNA, 19 nt, Artificial Sequence
  Description of Artificial Sequence: Synthetic oligonucleotide
aauacccagagcaucacga

SEQ ID NO: 2370081 - RNA, 19 nt, Artificial Sequence
  Description of Artificial Sequence: Synthetic oligonucleotide
ugaagucucaggucgcucc

SEQ ID NO: 2370082 - RNA, 19 nt, Artificial Sequence
  Description of Artificial Sequence: Synthetic oligonucleotide
aaucuaggcuccugaaugu

SEQ ID NO: 2370083 - RNA, 19 nt, Artificial Sequence
  Description of Artificial Sequence: Synthetic oligonucleotide
guagaaauagaggaucaag

SEQ ID NO: 2370084 - RNA, 19 nt, Artificial Sequence
  Description of Artificial Sequence: Synthetic oligonucleotide
ugacaggguuccaagacug

SEQ ID NO: 2370085 - RNA, 19 nt, Artificial Sequence
  Description of Artificial Sequence: Synthetic oligonucleotide
aaaaggccgugcugguggc

SEQ ID NO: 2370086 - RNA, 19 nt, Artificial Sequence
  Description of Artificial Sequence: Synthetic oligonucleotide
aagggcacugauaacuaac

SEQ ID NO: 2370087 - RNA, 19 nt, Artificial Sequence
  Description of Artificial Sequence: Synthetic oligonucleotide
acugaggucaauaucagga

SEQ ID NO: 2370088 - RNA, 19 nt, Artificial Sequence
  Description of Artificial Sequence: Synthetic oligonucleotide
aggaaagucauaaauuuca

SEQ ID NO: 2370089 - RNA, 19 nt, Artificial Sequence
  Description of Artificial Sequence: Synthetic oligonucleotide
ugggaaaccuggaacgaag

SEQ ID NO: 2370090 - RNA, 19 nt, Artificial Sequence
  Description of Artificial Sequence: Synthetic oligonucleotide
aaagaacugugacaggguu

SEQ ID NO: 2370091 - RNA, 19 nt, Artificial Sequence
  Description of Artificial Sequence: Synthetic oligonucleotide
uaaccuucuggcuaaggcu

SEQ ID NO: 2370092 - RNA, 19 nt, Artificial Sequence
  Description of Artificial Sequence: Synthetic oligonucleotide
uggaguagcaacagagaca

SEQ ID NO: 2370093 - RNA, 19 nt, Artificial Sequence
  Description of Artificial Sequence: Synthetic oligonucleotide
aacgaagagacaaugcuaa

SEQ ID NO: 2370094 - RNA, 19 nt, Artificial Sequence
  Description of Artificial Sequence: Synthetic oligonucleotide
acuugaguagaaauagagg

SEQ ID NO: 2370095 - RNA, 19 nt, Artificial Sequence
  Description of Artificial Sequence: Synthetic oligonucleotide
ggaguagcaacagagacag

SEQ ID NO: 2370096 - RNA, 19 nt, Artificial Sequence
  Description of Artificial Sequence: Synthetic oligonucleotide
uggaacgaagagacaaugc

SEQ ID NO: 2370097 - RNA, 19 nt, Artificial Sequence
  Description of Artificial Sequence: Synthetic oligonucleotide
ucuagacaaagcuaauaau

SEQ ID NO: 2370098 - RNA, 19 nt, Artificial Sequence
  Description of Artificial Sequence: Synthetic oligonucleotide
ucuuuugguaacugcagaa

SEQ ID NO: 2370099 - RNA, 19 nt, Artificial Sequence
  Description of Artificial Sequence: Synthetic oligonucleotide
uacuccuagggcaugugug

SEQ ID NO: 2370100 - RNA, 19 nt, Artificial Sequence
  Description of Artificial Sequence: Synthetic oligonucleotide
uccgcaaaaggucuucugu

SEQ ID NO: 2370101 - RNA, 19 nt, Artificial Sequence
  Description of Artificial Sequence: Synthetic oligonucleotide
guaacugcagaaaauccgc

SEQ ID NO: 2370102 - RNA, 19 nt, Artificial Sequence
  Description of Artificial Sequence: Synthetic oligonucleotide
uugcuucgaaccccaaggg

SEQ ID NO: 2370103 - RNA, 19 nt, Artificial Sequence
  Description of Artificial Sequence: Synthetic oligonucleotide
cuuaauacccagagcauca

SEQ ID NO: 2370104 - RNA, 19 nt, Artificial Sequence
  Description of Artificial Sequence: Synthetic oligonucleotide
gguaacugcagaaaauccg

SEQ ID NO: 2370105 - RNA, 19 nt, Artificial Sequence
  Description of Artificial Sequence: Synthetic oligonucleotide
cauucuaccauguucuaga

SEQ ID NO: 2370106 - RNA, 19 nt, Artificial Sequence
  Description of Artificial Sequence: Synthetic oligonucleotide
auauggaauggugguauac

SEQ ID NO: 2370107 - RNA, 19 nt, Artificial Sequence
  Description of Artificial Sequence: Synthetic oligonucleotide
gaaauucucgaggaaaguc

SEQ ID NO: 2370108 - RNA, 19 nt, Artificial Sequence
  Description of Artificial Sequence: Synthetic oligonucleotide
gaggaucaagaaaacaaug

SEQ ID NO: 2370109 - RNA, 19 nt, Artificial Sequence
  Description of Artificial Sequence: Synthetic oligonucleotide
ugguaugcuuaauacccag

SEQ ID NO: 2370110 - RNA, 19 nt, Artificial Sequence
  Description of Artificial Sequence: Synthetic oligonucleotide
aaggccaguaucauuuaag

SEQ ID NO: 2370111 - RNA, 19 nt, Artificial Sequence
  Description of Artificial Sequence: Synthetic oligonucleotide
agcuaauaauccaucauug

SEQ ID NO: 2370112 - RNA, 19 nt, Artificial Sequence
  Description of Artificial Sequence: Synthetic oligonucleotide
ugugggaauucacauucac

SEQ ID NO: 2370113 - RNA, 19 nt, Artificial Sequence
  Description of Artificial Sequence: Synthetic oligonucleotide
aagacuggaguagcaacag

SEQ ID NO: 2370114 - RNA, 19 nt, Artificial Sequence
  Description of Artificial Sequence: Synthetic oligonucleotide
caagacucagacccaaggc

SEQ ID NO: 2370115 - RNA, 19 nt, Artificial Sequence
  Description of Artificial Sequence: Synthetic oligonucleotide
uaccauguucuagacaaag

SEQ ID NO: 2370116 - RNA, 19 nt, Artificial Sequence
  Description of Artificial Sequence: Synthetic oligonucleotide
ucccguucaguuuuguucu

SEQ ID NO: 2370117 - RNA, 19 nt, Artificial Sequence
  Description of Artificial Sequence: Synthetic oligonucleotide
ucuguacgaaauucucgag

SEQ ID NO: 2370118 - RNA, 19 nt, Artificial Sequence
  Description of Artificial Sequence: Synthetic oligonucleotide
uauggaauggugguauaca

SEQ ID NO: 2370119 - RNA, 19 nt, Artificial Sequence
  Description of Artificial Sequence: Synthetic oligonucleotide
gucaugggcaugaaaagag

SEQ ID NO: 2370120 - RNA, 19 nt, Artificial Sequence
  Description of Artificial Sequence: Synthetic oligonucleotide
uucucgaggaaagucauaa

SEQ ID NO: 2370121 - RNA, 19 nt, Artificial Sequence
  Description of Artificial Sequence: Synthetic oligonucleotide
cacuuagagacuagcacug

SEQ ID NO: 2370122 - RNA, 19 nt, Artificial Sequence
  Description of Artificial Sequence: Synthetic oligonucleotide
acaaagcuaauaauccauc

SEQ ID NO: 2370123 - RNA, 19 nt, Artificial Sequence
  Description of Artificial Sequence: Synthetic oligonucleotide
uacgaaauucucgaggaaa

SEQ ID NO: 2370124 - RNA, 19 nt, Artificial Sequence
  Description of Artificial Sequence: Synthetic oligonucleotide
gauggcagcacagugugac

SEQ ID NO: 2370125 - RNA, 19 nt, Artificial Sequence
  Description of Artificial Sequence: Synthetic oligonucleotide
cuuguggccugugacaagg

SEQ ID NO: 2370126 - RNA, 19 nt, Artificial Sequence
  Description of Artificial Sequence: Synthetic oligonucleotide
gaaaccuggaacgaagaga

SEQ ID NO: 2370127 - RNA, 19 nt, Artificial Sequence
  Description of Artificial Sequence: Synthetic oligonucleotide
uagagacuagcacugccac

SEQ ID NO: 2370128 - RNA, 19 nt, Artificial Sequence
  Description of Artificial Sequence: Synthetic oligonucleotide
ucucaggucgcuccuuugc

SEQ ID NO: 2370129 - RNA, 19 nt, Artificial Sequence
  Description of Artificial Sequence: Synthetic oligonucleotide
ucccacauauggaauggug

SEQ ID NO: 2370130 - RNA, 19 nt, Artificial Sequence
  Description of Artificial Sequence: Synthetic oligonucleotide
ggagaauacuccuagggca

SEQ ID NO: 2370131 - RNA, 19 nt, Artificial Sequence
  Description of Artificial Sequence: Synthetic oligonucleotide
agggcacugauaacuaacc

SEQ ID NO: 2370132 - RNA, 19 nt, Artificial Sequence
  Description of Artificial Sequence: Synthetic oligonucleotide
acuggagaauacuccuagg

SEQ ID NO: 2370133 - RNA, 19 nt, Artificial Sequence
  Description of Artificial Sequence: Synthetic oligonucleotide
ucuguuugcuucgaacccc

SEQ ID NO: 2370134 - RNA, 19 nt, Artificial Sequence
  Description of Artificial Sequence: Synthetic oligonucleotide
ugucaugggcaugaaaaga

SEQ ID NO: 2370135 - RNA, 19 nt, Artificial Sequence
  Description of Artificial Sequence: Synthetic oligonucleotide
ggagaaacucagcacaagc

SEQ ID NO: 2370136 - RNA, 19 nt, Artificial Sequence
  Description of Artificial Sequence: Synthetic oligonucleotide
aaaggucuucuguacgaaa

SEQ ID NO: 2370137 - RNA, 19 nt, Artificial Sequence
  Description of Artificial Sequence: Synthetic oligonucleotide
caucuacccauuuaauauc

SEQ ID NO: 2370138 - RNA, 19 nt, Artificial Sequence
  Description of Artificial Sequence: Synthetic oligonucleotide
ucuaggcuccugaaugucu

SEQ ID NO: 2370139 - RNA, 19 nt, Artificial Sequence
  Description of Artificial Sequence: Synthetic oligonucleotide
uaacuaaccuucuggcuaa

SEQ ID NO: 2370140 - RNA, 19 nt, Artificial Sequence
  Description of Artificial Sequence: Synthetic oligonucleotide
gacagaaaaggccgugcug

SEQ ID NO: 2370141 - RNA, 19 nt, Artificial Sequence
  Description of Artificial Sequence: Synthetic oligonucleotide
ucugaccuguccuucuuga

SEQ ID NO: 2370142 - RNA, 19 nt, Artificial Sequence
  Description of Artificial Sequence: Synthetic oligonucleotide
caaagcuaauaauccauca

SEQ ID NO: 2370143 - RNA, 19 nt, Artificial Sequence
  Description of Artificial Sequence: Synthetic oligonucleotide
accccaagggcacugauaa

SEQ ID NO: 2370144 - RNA, 19 nt, Artificial Sequence
  Description of Artificial Sequence: Synthetic oligonucleotide
acgaaauucucgaggaaag

SEQ ID NO: 2370145 - RNA, 19 nt, Artificial Sequence
  Description of Artificial Sequence: Synthetic oligonucleotide
uaaggacuguaugaagagc

SEQ ID NO: 2370146 - RNA, 19 nt, Artificial Sequence
  Description of Artificial Sequence: Synthetic oligonucleotide
uagggcaugugugucaucu

SEQ ID NO: 2370147 - RNA, 19 nt, Artificial Sequence
  Description of Artificial Sequence: Synthetic oligonucleotide
ugugucaucuacccauuua

SEQ ID NO: 2370148 - RNA, 19 nt, Artificial Sequence
  Description of Artificial Sequence: Synthetic oligonucleotide
uggugguauacacuggaua

SEQ ID NO: 2370149 - RNA, 19 nt, Artificial Sequence
  Description of Artificial Sequence: Synthetic oligonucleotide
ucaaaucuaggcuccugaa

SEQ ID NO: 2370150 - RNA, 19 nt, Artificial Sequence
  Description of Artificial Sequence: Synthetic oligonucleotide
aaucaaaucuaggcuccug

SEQ ID NO: 2370151 - RNA, 19 nt, Artificial Sequence
  Description of Artificial Sequence: Synthetic oligonucleotide
uggauagggucacugggaa

SEQ ID NO: 2370152 - RNA, 19 nt, Artificial Sequence
  Description of Artificial Sequence: Synthetic oligonucleotide
auguucuagacaaagcuaa

SEQ ID NO: 2370153 - RNA, 19 nt, Artificial Sequence
  Description of Artificial Sequence: Synthetic oligonucleotide
ucagcacuuagagacuagc

SEQ ID NO: 2370154 - RNA, 19 nt, Artificial Sequence
  Description of Artificial Sequence: Synthetic oligonucleotide
uuucaaugacaugugggaa

SEQ ID NO: 2370155 - RNA, 19 nt, Artificial Sequence
  Description of Artificial Sequence: Synthetic oligonucleotide
acuuagagacuagcacugc

SEQ ID NO: 2370156 - RNA, 19 nt, Artificial Sequence
  Description of Artificial Sequence: Synthetic oligonucleotide
auagaggaucaagaaaaca

SEQ ID NO: 2370157 - RNA, 19 nt, Artificial Sequence
  Description of Artificial Sequence: Synthetic oligonucleotide
gaaaagaggcuucugcccu

SEQ ID NO: 2370158 - RNA, 19 nt, Artificial Sequence
  Description of Artificial Sequence: Synthetic oligonucleotide
gauaacuaaccuucuggcu

SEQ ID NO: 2370159 - RNA, 19 nt, Artificial Sequence
  Description of Artificial Sequence: Synthetic oligonucleotide
agacagaaaaggccgugcu

SEQ ID NO: 2370160 - RNA, 19 nt, Artificial Sequence
  Description of Artificial Sequence: Synthetic oligonucleotide
aauucucgaggaaagucau

SEQ ID NO: 2370161 - RNA, 19 nt, Artificial Sequence
  Description of Artificial Sequence: Synthetic oligonucleotide
acaacuacgaaggcagcug

SEQ ID NO: 2370162 - RNA, 19 nt, Artificial Sequence
  Description of Artificial Sequence: Synthetic oligonucleotide
gaucaagaaaacaauguau

SEQ ID NO: 2370163 - RNA, 19 nt, Artificial Sequence
  Description of Artificial Sequence: Synthetic oligonucleotide
guuugcuucgaaccccaag

SEQ ID NO: 2370164 - RNA, 19 nt, Artificial Sequence
  Description of Artificial Sequence: Synthetic oligonucleotide
cccacauauggaauggugg

SEQ ID NO: 2370165 - RNA, 19 nt, Artificial Sequence
  Description of Artificial Sequence: Synthetic oligonucleotide
uuuccacaacuacgaaggc

SEQ ID NO: 2370166 - RNA, 19 nt, Artificial Sequence
  Description of Artificial Sequence: Synthetic oligonucleotide
aucaggaaguucauggcug

SEQ ID NO: 2370167 - RNA, 19 nt, Artificial Sequence
  Description of Artificial Sequence: Synthetic oligonucleotide
caaaaggucuucuguacga

SEQ ID NO: 2370168 - RNA, 19 nt, Artificial Sequence
  Description of Artificial Sequence: Synthetic oligonucleotide
ugauuggacuggagaauac

SEQ ID NO: 2370169 - RNA, 19 nt, Artificial Sequence
  Description of Artificial Sequence: Synthetic oligonucleotide
acauauggaauggugguau

SEQ ID NO: 2370170 - RNA, 19 nt, Artificial Sequence
  Description of Artificial Sequence: Synthetic oligonucleotide
ugcuuaauacccagagcau

SEQ ID NO: 2370171 - RNA, 19 nt, Artificial Sequence
  Description of Artificial Sequence: Synthetic oligonucleotide
aggguuccaagacuggagu

SEQ ID NO: 2370172 - RNA, 19 nt, Artificial Sequence
  Description of Artificial Sequence: Synthetic oligonucleotide
aggacuguaugaagagccc

SEQ ID NO: 2370173 - RNA, 19 nt, Artificial Sequence
  Description of Artificial Sequence: Synthetic oligonucleotide
aagagccccauucuaccau

SEQ ID NO: 2370174 - RNA, 19 nt, Artificial Sequence
  Description of Artificial Sequence: Synthetic oligonucleotide
gaggaaagucauaaauuuc

SEQ ID NO: 2370175 - RNA, 19 nt, Artificial Sequence
  Description of Artificial Sequence: Synthetic oligonucleotide
acgagcugugauuggacug

SEQ ID NO: 2370176 - RNA, 19 nt, Artificial Sequence
  Description of Artificial Sequence: Synthetic oligonucleotide
acaaugcuaaagaacugug

SEQ ID NO: 2370177 - RNA, 19 nt, Artificial Sequence
  Description of Artificial Sequence: Synthetic oligonucleotide
acuccuagggcaugugugu

SEQ ID NO: 2370178 - RNA, 19 nt, Artificial Sequence
  Description of Artificial Sequence: Synthetic oligonucleotide
ugcccuagauggcagcaca

SEQ ID NO: 2370179 - RNA, 19 nt, Artificial Sequence
  Description of Artificial Sequence: Synthetic oligonucleotide
gaaaauccgcaaaaggucu

SEQ ID NO: 2370180 - RNA, 19 nt, Artificial Sequence
  Description of Artificial Sequence: Synthetic oligonucleotide
augacaugugggaauucac

SEQ ID NO: 2370181 - RNA, 19 nt, Artificial Sequence
  Description of Artificial Sequence: Synthetic oligonucleotide
auacacuggauagggucac

SEQ ID NO: 2370182 - RNA, 19 nt, Artificial Sequence
  Description of Artificial Sequence: Synthetic oligonucleotide
uguucuagacaaagcuaau

SEQ ID NO: 2370183 - RNA, 19 nt, Artificial Sequence
  Description of Artificial Sequence: Synthetic oligonucleotide
gugguauacacuggauagg

SEQ ID NO: 2370184 - RNA, 19 nt, Artificial Sequence
  Description of Artificial Sequence: Synthetic oligonucleotide
gaguagaaauagaggauca

SEQ ID NO: 2370185 - RNA, 19 nt, Artificial Sequence
  Description of Artificial Sequence: Synthetic oligonucleotide
aaaaggucuucuguacgaa

SEQ ID NO: 2370186 - RNA, 19 nt, Artificial Sequence
  Description of Artificial Sequence: Synthetic oligonucleotide
aaagaggcuucugcccuag

SEQ ID NO: 2370187 - RNA, 19 nt, Artificial Sequence
  Description of Artificial Sequence: Synthetic oligonucleotide
agaggaucaagaaaacaau

SEQ ID NO: 2370188 - RNA, 19 nt, Artificial Sequence
  Description of Artificial Sequence: Synthetic oligonucleotide
ugugauuggacuggagaau

SEQ ID NO: 2370189 - RNA, 19 nt, Artificial Sequence
  Description of Artificial Sequence: Synthetic oligonucleotide
aguucauggcuguaauaau

SEQ ID NO: 2370190 - RNA, 19 nt, Artificial Sequence
  Description of Artificial Sequence: Synthetic oligonucleotide
auagggucacugggaaacc

SEQ ID NO: 2370191 - RNA, 19 nt, Artificial Sequence
  Description of Artificial Sequence: Synthetic oligonucleotide
cuucgaaccccaagggcac

SEQ ID NO: 2370192 - RNA, 19 nt, Artificial Sequence
  Description of Artificial Sequence: Synthetic oligonucleotide
accuggaacgaagagacaa

SEQ ID NO: 2370193 - RNA, 19 nt, Artificial Sequence
  Description of Artificial Sequence: Synthetic oligonucleotide
gcaugugugucaucuaccc

SEQ ID NO: 2370194 - RNA, 19 nt, Artificial Sequence
  Description of Artificial Sequence: Synthetic oligonucleotide
gacaaugcuaaagaacugu

SEQ ID NO: 2370195 - RNA, 19 nt, Artificial Sequence
  Description of Artificial Sequence: Synthetic oligonucleotide
aaggccgugcugguggcuc

SEQ ID NO: 2370196 - RNA, 19 nt, Artificial Sequence
  Description of Artificial Sequence: Synthetic oligonucleotide
cauuuaaggacuguaugaa

SEQ ID NO: 2370197 - RNA, 19 nt, Artificial Sequence
  Description of Artificial Sequence: Synthetic oligonucleotide
cuacgaaggcagcugugag

SEQ ID NO: 2370198 - RNA, 19 nt, Artificial Sequence
  Description of Artificial Sequence: Synthetic oligonucleotide
cugugauuggacuggagaa

SEQ ID NO: 2370199 - RNA, 19 nt, Artificial Sequence
  Description of Artificial Sequence: Synthetic oligonucleotide
gaaagucauaaauuucaau

SEQ ID NO: 2370200 - RNA, 19 nt, Artificial Sequence
  Description of Artificial Sequence: Synthetic oligonucleotide
uuccaagacuggaguagca

SEQ ID NO: 2370201 - RNA, 19 nt, Artificial Sequence
  Description of Artificial Sequence: Synthetic oligonucleotide
aucuacccauuuaauauca

SEQ ID NO: 2370202 - RNA, 19 nt, Artificial Sequence
  Description of Artificial Sequence: Synthetic oligonucleotide
acagaacugcuuuccacaa

SEQ ID NO: 2370203 - RNA, 19 nt, Artificial Sequence
  Description of Artificial Sequence: Synthetic oligonucleotide
guauuuucccacauaugga

SEQ ID NO: 2370204 - RNA, 19 nt, Artificial Sequence
  Description of Artificial Sequence: Synthetic oligonucleotide
cauguucuagacaaagcua

SEQ ID NO: 2370205 - RNA, 19 nt, Artificial Sequence
  Description of Artificial Sequence: Synthetic oligonucleotide
aaaagaggcuucugcccua

SEQ ID NO: 2370206 - RNA, 19 nt, Artificial Sequence
  Description of Artificial Sequence: Synthetic oligonucleotide
acuacgaaggcagcuguga

SEQ ID NO: 2370207 - RNA, 19 nt, Artificial Sequence
  Description of Artificial Sequence: Synthetic oligonucleotide
ugggcaugaaaagaggcuu

SEQ ID NO: 2370208 - RNA, 19 nt, Artificial Sequence
  Description of Artificial Sequence: Synthetic oligonucleotide
ucacgagcugugauuggac

SEQ ID NO: 2370209 - RNA, 19 nt, Artificial Sequence
  Description of Artificial Sequence: Synthetic oligonucleotide
cauggcuguaauaaucaaa

SEQ ID NO: 2370210 - RNA, 19 nt, Artificial Sequence
  Description of Artificial Sequence: Synthetic oligonucleotide
ugcugaagucucaggucgc

SEQ ID NO: 2370211 - RNA, 19 nt, Artificial Sequence
  Description of Artificial Sequence: Synthetic oligonucleotide
ccaugguaugcuuaauacc

SEQ ID NO: 2370212 - RNA, 19 nt, Artificial Sequence
  Description of Artificial Sequence: Synthetic oligonucleotide
cuggaacgaagagacaaug

SEQ ID NO: 2370213 - RNA, 19 nt, Artificial Sequence
  Description of Artificial Sequence: Synthetic oligonucleotide
ggaaaccuggaacgaagag

SEQ ID NO: 2370214 - RNA, 19 nt, Artificial Sequence
  Description of Artificial Sequence: Synthetic oligonucleotide
auacuccuagggcaugugu

SEQ ID NO: 2370215 - RNA, 19 nt, Artificial Sequence
  Description of Artificial Sequence: Synthetic oligonucleotide
ucuacccauuuaauaucaa

SEQ ID NO: 2370216 - RNA, 19 nt, Artificial Sequence
  Description of Artificial Sequence: Synthetic oligonucleotide
gguuccaagacuggaguag

SEQ ID NO: 2370217 - RNA, 19 nt, Artificial Sequence
  Description of Artificial Sequence: Synthetic oligonucleotide
gaaacucagcacaagcucu

SEQ ID NO: 2370218 - RNA, 19 nt, Artificial Sequence
  Description of Artificial Sequence: Synthetic oligonucleotide
cauuuaauaucaaauccuu

SEQ ID NO: 2370219 - RNA, 19 nt, Artificial Sequence
  Description of Artificial Sequence: Synthetic oligonucleotide
ugacaagggccguaucuuc

SEQ ID NO: 2370220 - RNA, 19 nt, Artificial Sequence
  Description of Artificial Sequence: Synthetic oligonucleotide
agcaucacgagcugugauu

SEQ ID NO: 2370221 - RNA, 19 nt, Artificial Sequence
  Description of Artificial Sequence: Synthetic oligonucleotide
aauccgcaaaaggucuucu

SEQ ID NO: 2370222 - RNA, 19 nt, Artificial Sequence
  Description of Artificial Sequence: Synthetic oligonucleotide
guuccaagacuggaguagc

SEQ ID NO: 2370223 - RNA, 19 nt, Artificial Sequence
  Description of Artificial Sequence: Synthetic oligonucleotide
uccuagggcauguguguca

SEQ ID NO: 2370224 - RNA, 19 nt, Artificial Sequence
  Description of Artificial Sequence: Synthetic oligonucleotide
caguaucauuuaaggacug

SEQ ID NO: 2370225 - RNA, 19 nt, Artificial Sequence
  Description of Artificial Sequence: Synthetic oligonucleotide
ccaagacucagacccaagg

SEQ ID NO: 2370226 - RNA, 19 nt, Artificial Sequence
  Description of Artificial Sequence: Synthetic oligonucleotide
cuacccauuuaauaucaaa

SEQ ID NO: 2370227 - RNA, 19 nt, Artificial Sequence
  Description of Artificial Sequence: Synthetic oligonucleotide
acaugugggaauucacauu

SEQ ID NO: 2370228 - RNA, 19 nt, Artificial Sequence
  Description of Artificial Sequence: Synthetic oligonucleotide
gaacgaagagacaaugcua

SEQ ID NO: 2370229 - RNA, 19 nt, Artificial Sequence
  Description of Artificial Sequence: Synthetic oligonucleotide
ggaacgaagagacaaugcu

SEQ ID NO: 2370230 - RNA, 19 nt, Artificial Sequence
  Description of Artificial Sequence: Synthetic oligonucleotide
aguaucauuuaaggacugu

SEQ ID NO: 2370231 - RNA, 19 nt, Artificial Sequence
  Description of Artificial Sequence: Synthetic oligonucleotide
ggccguaucuucaccaugg

SEQ ID NO: 2370232 - RNA, 19 nt, Artificial Sequence
  Description of Artificial Sequence: Synthetic oligonucleotide
gacuguaugaagagcccca

SEQ ID NO: 2370233 - RNA, 19 nt, Artificial Sequence
  Description of Artificial Sequence: Synthetic oligonucleotide
aucuaggcuccugaauguc

SEQ ID NO: 2370234 - RNA, 19 nt, Artificial Sequence
  Description of Artificial Sequence: Synthetic oligonucleotide
gugugacuccacuuccugc

SEQ ID NO: 2370235 - RNA, 19 nt, Artificial Sequence
  Description of Artificial Sequence: Synthetic oligonucleotide
gagaaacucagcacaagcu

SEQ ID NO: 2370236 - RNA, 19 nt, Artificial Sequence
  Description of Artificial Sequence: Synthetic oligonucleotide
uccaagacuggaguagcaa

SEQ ID NO: 2370237 - RNA, 19 nt, Artificial Sequence
  Description of Artificial Sequence: Synthetic oligonucleotide
auaauccaucauugucaug

SEQ ID NO: 2370238 - RNA, 19 nt, Artificial Sequence
  Description of Artificial Sequence: Synthetic oligonucleotide
agagacuagcacugccacu

SEQ ID NO: 2370239 - RNA, 19 nt, Artificial Sequence
  Description of Artificial Sequence: Synthetic oligonucleotide
auccgcaaaaggucuucug

SEQ ID NO: 2370240 - RNA, 19 nt, Artificial Sequence
  Description of Artificial Sequence: Synthetic oligonucleotide
gacaggguuccaagacugg

SEQ ID NO: 2370241 - RNA, 19 nt, Artificial Sequence
  Description of Artificial Sequence: Synthetic oligonucleotide
gcugugauuggacuggaga

SEQ ID NO: 2370242 - RNA, 19 nt, Artificial Sequence
  Description of Artificial Sequence: Synthetic oligonucleotide
acuaaccuucuggcuaagg

SEQ ID NO: 2370243 - RNA, 19 nt, Artificial Sequence
  Description of Artificial Sequence: Synthetic oligonucleotide
cagcugugagacagaaaag

SEQ ID NO: 2370244 - RNA, 19 nt, Artificial Sequence
  Description of Artificial Sequence: Synthetic oligonucleotide
ugugugucaucuacccauu

SEQ ID NO: 2370245 - RNA, 19 nt, Artificial Sequence
  Description of Artificial Sequence: Synthetic oligonucleotide
guaucauuuaaggacugua

SEQ ID NO: 2370246 - RNA, 19 nt, Artificial Sequence
  Description of Artificial Sequence: Synthetic oligonucleotide
cuggauagggucacuggga

SEQ ID NO: 2370247 - RNA, 19 nt, Artificial Sequence
  Description of Artificial Sequence: Synthetic oligonucleotide
aucacgagcugugauugga

SEQ ID NO: 2370248 - RNA, 19 nt, Artificial Sequence
  Description of Artificial Sequence: Synthetic oligonucleotide
agacuagcacugccacuuc

SEQ ID NO: 2370249 - RNA, 19 nt, Artificial Sequence
  Description of Artificial Sequence: Synthetic oligonucleotide
augggcaugaaaagaggcu

SEQ ID NO: 2370250 - RNA, 19 nt, Artificial Sequence
  Description of Artificial Sequence: Synthetic oligonucleotide
ucugcccuagauggcagca

SEQ ID NO: 2370251 - RNA, 19 nt, Artificial Sequence
  Description of Artificial Sequence: Synthetic oligonucleotide
ucuggcuaaggcugcugaa

SEQ ID NO: 2370252 - RNA, 19 nt, Artificial Sequence
  Description of Artificial Sequence: Synthetic oligonucleotide
caucacgagcugugauugg

SEQ ID NO: 2370253 - RNA, 19 nt, Artificial Sequence
  Description of Artificial Sequence: Synthetic oligonucleotide
aacuacgaaggcagcugug

SEQ ID NO: 2370254 - RNA, 19 nt, Artificial Sequence
  Description of Artificial Sequence: Synthetic oligonucleotide
ucucgaggaaagucauaaa

SEQ ID NO: 2370255 - RNA, 19 nt, Artificial Sequence
  Description of Artificial Sequence: Synthetic oligonucleotide
aaaauccgcaaaaggucuu

SEQ ID NO: 2370256 - RNA, 19 nt, Artificial Sequence
  Description of Artificial Sequence: Synthetic oligonucleotide
cucagcacuuagagacuag

SEQ ID NO: 2370257 - RNA, 19 nt, Artificial Sequence
  Description of Artificial Sequence: Synthetic oligonucleotide
cuagauggcagcacagugu

SEQ ID NO: 2370258 - RNA, 19 nt, Artificial Sequence
  Description of Artificial Sequence: Synthetic oligonucleotide
cuccuuugcaggcuggaga

SEQ ID NO: 2370259 - RNA, 19 nt, Artificial Sequence
  Description of Artificial Sequence: Synthetic oligonucleotide
ccauuuaauaucaaauccu

SEQ ID NO: 2370260 - RNA, 19 nt, Artificial Sequence
  Description of Artificial Sequence: Synthetic oligonucleotide
uggcagcacagugugacuc

SEQ ID NO: 2370261 - RNA, 19 nt, Artificial Sequence
  Description of Artificial Sequence: Synthetic oligonucleotide
aggucuucuguacgaaauu

SEQ ID NO: 2370262 - RNA, 19 nt, Artificial Sequence
  Description of Artificial Sequence: Synthetic oligonucleotide
ccaagacuggaguagcaac

SEQ ID NO: 2370263 - RNA, 19 nt, Artificial Sequence
  Description of Artificial Sequence: Synthetic oligonucleotide
acauucacugaggucaaua

SEQ ID NO: 2370264 - RNA, 19 nt, Artificial Sequence
  Description of Artificial Sequence: Synthetic oligonucleotide
cuuuugguaacugcagaaa

SEQ ID NO: 2370265 - RNA, 19 nt, Artificial Sequence
  Description of Artificial Sequence: Synthetic oligonucleotide
cugcagaaaauccgcaaaa

SEQ ID NO: 2370266 - RNA, 19 nt, Artificial Sequence
  Description of Artificial Sequence: Synthetic oligonucleotide
gcaucacgagcugugauug

SEQ ID NO: 2370267 - RNA, 19 nt, Artificial Sequence
  Description of Artificial Sequence: Synthetic oligonucleotide
agacuugaguagaaauaga

SEQ ID NO: 2370268 - RNA, 19 nt, Artificial Sequence
  Description of Artificial Sequence: Synthetic oligonucleotide
cagcacuuagagacuagca

SEQ ID NO: 2370269 - RNA, 19 nt, Artificial Sequence
  Description of Artificial Sequence: Synthetic oligonucleotide
caagggccguaucuucacc

SEQ ID NO: 2370270 - RNA, 19 nt, Artificial Sequence
  Description of Artificial Sequence: Synthetic oligonucleotide
gcuucgaaccccaagggca

SEQ ID NO: 2370271 - RNA, 19 nt, Artificial Sequence
  Description of Artificial Sequence: Synthetic oligonucleotide
gggaauucacauucacuga

SEQ ID NO: 2370272 - RNA, 19 nt, Artificial Sequence
  Description of Artificial Sequence: Synthetic oligonucleotide
agaauacuccuagggcaug

SEQ ID NO: 2370273 - RNA, 19 nt, Artificial Sequence
  Description of Artificial Sequence: Synthetic oligonucleotide
gagacuagcacugccacuu

SEQ ID NO: 2370274 - RNA, 19 nt, Artificial Sequence
  Description of Artificial Sequence: Synthetic oligonucleotide
gauuggacuggagaauacu

SEQ ID NO: 2370275 - RNA, 19 nt, Artificial Sequence
  Description of Artificial Sequence: Synthetic oligonucleotide
cagaacugcuuuccacaac

SEQ ID NO: 2370276 - RNA, 19 nt, Artificial Sequence
  Description of Artificial Sequence: Synthetic oligonucleotide
aacuaaccuucuggcuaag

SEQ ID NO: 2370277 - RNA, 19 nt, Artificial Sequence
  Description of Artificial Sequence: Synthetic oligonucleotide
augguaugcuuaauaccca

SEQ ID NO: 2370278 - RNA, 19 nt, Artificial Sequence
  Description of Artificial Sequence: Synthetic oligonucleotide
gggcaugugugucaucuac

SEQ ID NO: 2370279 - RNA, 19 nt, Artificial Sequence
  Description of Artificial Sequence: Synthetic oligonucleotide
aggucaauaucaggaaguu

SEQ ID NO: 2370280 - RNA, 19 nt, Artificial Sequence
  Description of Artificial Sequence: Synthetic oligonucleotide
ggacuguaugaagagcccc

SEQ ID NO: 2370281 - RNA, 19 nt, Artificial Sequence
  Description of Artificial Sequence: Synthetic oligonucleotide
gucgcuccuuugcaggcug

SEQ ID NO: 2370282 - RNA, 19 nt, Artificial Sequence
  Description of Artificial Sequence: Synthetic oligonucleotide
cuggagaaacucagcacaa

SEQ ID NO: 2370283 - RNA, 19 nt, Artificial Sequence
  Description of Artificial Sequence: Synthetic oligonucleotide
ggucuucuguacgaaauuc

SEQ ID NO: 2370284 - RNA, 19 nt, Artificial Sequence
  Description of Artificial Sequence: Synthetic oligonucleotide
gggucacugggaaaccugg

SEQ ID NO: 2370285 - RNA, 19 nt, Artificial Sequence
  Description of Artificial Sequence: Synthetic oligonucleotide
acgaagagacaaugcuaaa

SEQ ID NO: 2370286 - RNA, 19 nt, Artificial Sequence
  Description of Artificial Sequence: Synthetic oligonucleotide
cgaagagacaaugcuaaag

SEQ ID NO: 2370287 - RNA, 19 nt, Artificial Sequence
  Description of Artificial Sequence: Synthetic oligonucleotide
gugauuggacuggagaaua

SEQ ID NO: 2370288 - RNA, 19 nt, Artificial Sequence
  Description of Artificial Sequence: Synthetic oligonucleotide
ggccaguaucauuuaagga

SEQ ID NO: 2370289 - RNA, 19 nt, Artificial Sequence
  Description of Artificial Sequence: Synthetic oligonucleotide
gcuaauaauccaucauugu

SEQ ID NO: 2370290 - RNA, 19 nt, Artificial Sequence
  Description of Artificial Sequence: Synthetic oligonucleotide
caugugugucaucuaccca

SEQ ID NO: 2370291 - RNA, 19 nt, Artificial Sequence
  Description of Artificial Sequence: Synthetic oligonucleotide
agagcaucacgagcuguga

SEQ ID NO: 2370292 - RNA, 19 nt, Artificial Sequence
  Description of Artificial Sequence: Synthetic oligonucleotide
ucgaaccccaagggcacug

SEQ ID NO: 2370293 - RNA, 19 nt, Artificial Sequence
  Description of Artificial Sequence: Synthetic oligonucleotide
gcugcugaagucucagguc

SEQ ID NO: 2370294 - RNA, 19 nt, Artificial Sequence
  Description of Artificial Sequence: Synthetic oligonucleotide
gagaauacuccuagggcau

SEQ ID NO: 2370295 - RNA, 19 nt, Artificial Sequence
  Description of Artificial Sequence: Synthetic oligonucleotide
agucucaggucgcuccuuu

SEQ ID NO: 2370296 - RNA, 19 nt, Artificial Sequence
  Description of Artificial Sequence: Synthetic oligonucleotide
uucccacauauggaauggu

SEQ ID NO: 2370297 - RNA, 19 nt, Artificial Sequence
  Description of Artificial Sequence: Synthetic oligonucleotide
guacgaaauucucgaggaa

SEQ ID NO: 2370298 - RNA, 19 nt, Artificial Sequence
  Description of Artificial Sequence: Synthetic oligonucleotide
aagcucuggcuuuggccuu

SEQ ID NO: 2370299 - RNA, 19 nt, Artificial Sequence
  Description of Artificial Sequence: Synthetic oligonucleotide
gcaacagagacaggccaag

SEQ ID NO: 2370300 - RNA, 19 nt, Artificial Sequence
  Description of Artificial Sequence: Synthetic oligonucleotide
cucaggucgcuccuuugca

SEQ ID NO: 2370301 - RNA, 19 nt, Artificial Sequence
  Description of Artificial Sequence: Synthetic oligonucleotide
uguuugcuucgaaccccaa

SEQ ID NO: 2370302 - RNA, 19 nt, Artificial Sequence
  Description of Artificial Sequence: Synthetic oligonucleotide
cugugacaggguuccaaga

SEQ ID NO: 2370303 - RNA, 19 nt, Artificial Sequence
  Description of Artificial Sequence: Synthetic oligonucleotide
ccaguaucauuuaaggacu

SEQ ID NO: 2370304 - RNA, 19 nt, Artificial Sequence
  Description of Artificial Sequence: Synthetic oligonucleotide
gaagucucaggucgcuccu

SEQ ID NO: 2370305 - RNA, 19 nt, Artificial Sequence
  Description of Artificial Sequence: Synthetic oligonucleotide
caccaugguaugcuuaaua

SEQ ID NO: 2370306 - RNA, 19 nt, Artificial Sequence
  Description of Artificial Sequence: Synthetic oligonucleotide
agggccguaucuucaccau

SEQ ID NO: 2370307 - RNA, 19 nt, Artificial Sequence
  Description of Artificial Sequence: Synthetic oligonucleotide
ggaaagucauaaauuucaa

SEQ ID NO: 2370308 - RNA, 19 nt, Artificial Sequence
  Description of Artificial Sequence: Synthetic oligonucleotide
gucucaggucgcuccuuug

SEQ ID NO: 2370309 - RNA, 19 nt, Artificial Sequence
  Description of Artificial Sequence: Synthetic oligonucleotide
aaccccaagggcacugaua

SEQ ID NO: 2370310 - RNA, 19 nt, Artificial Sequence
  Description of Artificial Sequence: Synthetic oligonucleotide
gaauacuccuagggcaugu

SEQ ID NO: 2370311 - RNA, 19 nt, Artificial Sequence
  Description of Artificial Sequence: Synthetic oligonucleotide
ggcacugauaacuaaccuu

SEQ ID NO: 2370312 - RNA, 19 nt, Artificial Sequence
  Description of Artificial Sequence: Synthetic oligonucleotide
cauauggaauggugguaua

SEQ ID NO: 2370313 - RNA, 19 nt, Artificial Sequence
  Description of Artificial Sequence: Synthetic oligonucleotide
ggucaauaucaggaaguuc

SEQ ID NO: 2370314 - RNA, 19 nt, Artificial Sequence
  Description of Artificial Sequence: Synthetic oligonucleotide
gaguagcaacagagacagg

SEQ ID NO: 2370315 - RNA, 19 nt, Artificial Sequence
  Description of Artificial Sequence: Synthetic oligonucleotide
gguaugcuuaauacccaga

SEQ ID NO: 2370316 - RNA, 19 nt, Artificial Sequence
  Description of Artificial Sequence: Synthetic oligonucleotide
ggcuaaggcugcugaaguc

SEQ ID NO: 2370317 - RNA, 19 nt, Artificial Sequence
  Description of Artificial Sequence: Synthetic oligonucleotide
cuucuggcuaaggcugcug

SEQ ID NO: 2370318 - RNA, 19 nt, Artificial Sequence
  Description of Artificial Sequence: Synthetic oligonucleotide
acccaaggccaguaucauu

SEQ ID NO: 2370319 - RNA, 19 nt, Artificial Sequence
  Description of Artificial Sequence: Synthetic oligonucleotide
augugggaauucacauuca

SEQ ID NO: 2370320 - RNA, 19 nt, Artificial Sequence
  Description of Artificial Sequence: Synthetic oligonucleotide
gcuucugcccuagauggca

SEQ ID NO: 2370321 - RNA, 19 nt, Artificial Sequence
  Description of Artificial Sequence: Synthetic oligonucleotide
uucgaaccccaagggcacu

SEQ ID NO: 2370322 - RNA, 19 nt, Artificial Sequence
  Description of Artificial Sequence: Synthetic oligonucleotide
cacauauggaaugguggua

SEQ ID NO: 2370323 - RNA, 19 nt, Artificial Sequence
  Description of Artificial Sequence: Synthetic oligonucleotide
caacuacgaaggcagcugu

SEQ ID NO: 2370324 - RNA, 19 nt, Artificial Sequence
  Description of Artificial Sequence: Synthetic oligonucleotide
agcugugauuggacuggag

SEQ ID NO: 2370325 - RNA, 19 nt, Artificial Sequence
  Description of Artificial Sequence: Synthetic oligonucleotide
gcuaaggcugcugaagucu

SEQ ID NO: 2370326 - RNA, 19 nt, Artificial Sequence
  Description of Artificial Sequence: Synthetic oligonucleotide
cacgagcugugauuggacu

SEQ ID NO: 2370327 - RNA, 19 nt, Artificial Sequence
  Description of Artificial Sequence: Synthetic oligonucleotide
ccccauucuaccauguucu

SEQ ID NO: 2370328 - RNA, 19 nt, Artificial Sequence
  Description of Artificial Sequence: Synthetic oligonucleotide
aagucucaggucgcuccuu

SEQ ID NO: 2370329 - RNA, 19 nt, Artificial Sequence
  Description of Artificial Sequence: Synthetic oligonucleotide
cacugauaacuaaccuucu

SEQ ID NO: 2370330 - RNA, 19 nt, Artificial Sequence
  Description of Artificial Sequence: Synthetic oligonucleotide
gggccguaucuucaccaug

SEQ ID NO: 2370331 - RNA, 19 nt, Artificial Sequence
  Description of Artificial Sequence: Synthetic oligonucleotide
gggaaaccuggaacgaaga

SEQ ID NO: 2370332 - RNA, 19 nt, Artificial Sequence
  Description of Artificial Sequence: Synthetic oligonucleotide
cacaacuacgaaggcagcu

SEQ ID NO: 2370333 - RNA, 19 nt, Artificial Sequence
  Description of Artificial Sequence: Synthetic oligonucleotide
gagcaucacgagcugugau

SEQ ID NO: 2370334 - RNA, 19 nt, Artificial Sequence
  Description of Artificial Sequence: Synthetic oligonucleotide
cuaggcuccugaaugucuu

SEQ ID NO: 2370335 - RNA, 19 nt, Artificial Sequence
  Description of Artificial Sequence: Synthetic oligonucleotide
agccccauucuaccauguu

SEQ ID NO: 2370336 - RNA, 19 nt, Artificial Sequence
  Description of Artificial Sequence: Synthetic oligonucleotide
ccacauauggaaugguggu

SEQ ID NO: 2370337 - RNA, 19 nt, Artificial Sequence
  Description of Artificial Sequence: Synthetic oligonucleotide
gggcaugaaaagaggcuuc

SEQ ID NO: 2370338 - RNA, 19 nt, Artificial Sequence
  Description of Artificial Sequence: Synthetic oligonucleotide
ccacaacuacgaaggcagc

SEQ ID NO: 2370339 - RNA, 19 nt, Artificial Sequence
  Description of Artificial Sequence: Synthetic oligonucleotide
gagcugugauuggacugga

SEQ ID NO: 2370340 - RNA, 19 nt, Artificial Sequence
  Description of Artificial Sequence: Synthetic oligonucleotide
cuagggcaugugugucauc

SEQ ID NO: 2370341 - RNA, 19 nt, Artificial Sequence
  Description of Artificial Sequence: Synthetic oligonucleotide
cgaggaaagucauaaauuu

SEQ ID NO: 2370342 - RNA, 19 nt, Artificial Sequence
  Description of Artificial Sequence: Synthetic oligonucleotide
aggccgugcugguggcucu

SEQ ID NO: 2370343 - RNA, 19 nt, Artificial Sequence
  Description of Artificial Sequence: Synthetic oligonucleotide
cccaaggccaguaucauuu

SEQ ID NO: 2370344 - RNA, 19 nt, Artificial Sequence
  Description of Artificial Sequence: Synthetic oligonucleotide
auucucgaggaaagucaua

SEQ ID NO: 2370345 - RNA, 19 nt, Artificial Sequence
  Description of Artificial Sequence: Synthetic oligonucleotide
ggauagggucacugggaaa

SEQ ID NO: 2370346 - RNA, 19 nt, Artificial Sequence
  Description of Artificial Sequence: Synthetic oligonucleotide
cccaagggcacugauaacu

SEQ ID NO: 2370347 - RNA, 19 nt, Artificial Sequence
  Description of Artificial Sequence: Synthetic oligonucleotide
gggcacugauaacuaaccu

SEQ ID NO: 2370348 - RNA, 19 nt, Artificial Sequence
  Description of Artificial Sequence: Synthetic oligonucleotide
cagugugacuccacuuccu

SEQ ID NO: 2370349 - RNA, 19 nt, Artificial Sequence
  Description of Artificial Sequence: Synthetic oligonucleotide
gcccuagauggcagcacag

SEQ ID NO: 2370350 - RNA, 19 nt, Artificial Sequence
  Description of Artificial Sequence: Synthetic oligonucleotide
ggcaugaaaagaggcuucu

SEQ ID NO: 2370351 - RNA, 19 nt, Artificial Sequence
  Description of Artificial Sequence: Synthetic oligonucleotide
gccaagacucagacccaag

SEQ ID NO: 2370352 - RNA, 19 nt, Artificial Sequence
  Description of Artificial Sequence: Synthetic oligonucleotide
ccgcaaaaggucuucugua

SEQ ID NO: 2370353 - RNA, 19 nt, Artificial Sequence
  Description of Artificial Sequence: Synthetic oligonucleotide
ccaagggcacugauaacua

SEQ ID NO: 2370354 - RNA, 19 nt, Artificial Sequence
  Description of Artificial Sequence: Synthetic oligonucleotide
gguauacacuggauagggu

SEQ ID NO: 2370355 - RNA, 19 nt, Artificial Sequence
  Description of Artificial Sequence: Synthetic oligonucleotide
cuucccguucaguuuuguu

SEQ ID NO: 2370356 - RNA, 19 nt, Artificial Sequence
  Description of Artificial Sequence: Synthetic oligonucleotide
ggacuggagaauacuccua

SEQ ID NO: 2370357 - RNA, 19 nt, Artificial Sequence
  Description of Artificial Sequence: Synthetic oligonucleotide
cccguucaguuuuguucug

SEQ ID NO: 2370358 - RNA, 19 nt, Artificial Sequence
  Description of Artificial Sequence: Synthetic oligonucleotide
gagccccauucuaccaugu

SEQ ID NO: 2370359 - RNA, 19 nt, Artificial Sequence
  Description of Artificial Sequence: Synthetic oligonucleotide
gugugucaucuacccauuu

SEQ ID NO: 2370360 - RNA, 19 nt, Artificial Sequence
  Description of Artificial Sequence: Synthetic oligonucleotide
ccguaucuucaccauggua

SEQ ID NO: 2370361 - RNA, 19 nt, Artificial Sequence
  Description of Artificial Sequence: Synthetic oligonucleotide
ccuggaacgaagagacaau

SEQ ID NO: 2370362 - RNA, 19 nt, Artificial Sequence
  Description of Artificial Sequence: Synthetic oligonucleotide
gccguaucuucaccauggu

SEQ ID NO: 2370363 - RNA, 19 nt, Artificial Sequence
  Description of Artificial Sequence: Synthetic oligonucleotide
cccauucuaccauguucua

SEQ ID NO: 2370364 - RNA, 19 nt, Artificial Sequence
  Description of Artificial Sequence: Synthetic oligonucleotide
ccuguccuucuugagcucu

SEQ ID NO: 2370365 - RNA, 19 nt, Artificial Sequence
  Description of Artificial Sequence: Synthetic oligonucleotide
cgaaauucucgaggaaagu

SEQ ID NO: 2370366 - RNA, 19 nt, Artificial Sequence
  Description of Artificial Sequence: Synthetic oligonucleotide
ccugugacaagggccguau

SEQ ID NO: 2370367 - RNA, 19 nt, Artificial Sequence
  Description of Artificial Sequence: Synthetic oligonucleotide
ccuagggcaugugugucau

SEQ ID NO: 2370368 - RNA, 19 nt, Artificial Sequence
  Description of Artificial Sequence: Synthetic oligonucleotide
cccuagauggcagcacagu

SEQ ID NO: 2370369 - RNA, 19 nt, Artificial Sequence
  Description of Artificial Sequence: Synthetic oligonucleotide
cacauucacugaggucaau

SEQ ID NO: 2370370 - RNA, 19 nt, Artificial Sequence
  Description of Artificial Sequence: Synthetic oligonucleotide
gccgugcugguggcucuga

SEQ ID NO: 2370371 - RNA, 19 nt, Artificial Sequence
  Description of Artificial Sequence: Synthetic oligonucleotide
ggccugugacaagggccgu

SEQ ID NO: 2370372 - RNA, 19 nt, Artificial Sequence
  Description of Artificial Sequence: Synthetic oligonucleotide
aaacacgaagcacaaaagc

SEQ ID NO: 2370373 - RNA, 19 nt, Artificial Sequence
  Description of Artificial Sequence: Synthetic oligonucleotide
aaagcauaauaacuguggc

SEQ ID NO: 2370374 - RNA, 19 nt, Artificial Sequence
  Description of Artificial Sequence: Synthetic oligonucleotide
aguaauuuuaagcuuaaag

SEQ ID NO: 2370375 - RNA, 19 nt, Artificial Sequence
  Description of Artificial Sequence: Synthetic oligonucleotide
aaaguuuuaugccauuggg

SEQ ID NO: 2370376 - RNA, 19 nt, Artificial Sequence
  Description of Artificial Sequence: Synthetic oligonucleotide
gaaacuuucagcugaagag

SEQ ID NO: 2370377 - RNA, 19 nt, Artificial Sequence
  Description of Artificial Sequence: Synthetic oligonucleotide
aaaguauauauaaaguuuc

SEQ ID NO: 2370378 - RNA, 19 nt, Artificial Sequence
  Description of Artificial Sequence: Synthetic oligonucleotide
aaaagcauaauaacugugg

SEQ ID NO: 2370379 - RNA, 19 nt, Artificial Sequence
  Description of Artificial Sequence: Synthetic oligonucleotide
uuguaaguaauuuuaagcu

SEQ ID NO: 2370380 - RNA, 19 nt, Artificial Sequence
  Description of Artificial Sequence: Synthetic oligonucleotide
aaacuuucagcugaagagc

SEQ ID NO: 2370381 - RNA, 19 nt, Artificial Sequence
  Description of Artificial Sequence: Synthetic oligonucleotide
aaaugagcuggauauaucu

SEQ ID NO: 2370382 - RNA, 19 nt, Artificial Sequence
  Description of Artificial Sequence: Synthetic oligonucleotide
ugaaacuaagggaugaggc

SEQ ID NO: 2370383 - RNA, 19 nt, Artificial Sequence
  Description of Artificial Sequence: Synthetic oligonucleotide
uauaucuuacaacacaggu

SEQ ID NO: 2370384 - RNA, 19 nt, Artificial Sequence
  Description of Artificial Sequence: Synthetic oligonucleotide
uuaaaguauauauaaaguu

SEQ ID NO: 2370385 - RNA, 19 nt, Artificial Sequence
  Description of Artificial Sequence: Synthetic oligonucleotide
uguagauacauauauuacu

SEQ ID NO: 2370386 - RNA, 19 nt, Artificial Sequence
  Description of Artificial Sequence: Synthetic oligonucleotide
aaacuguagauacauauau

SEQ ID NO: 2370387 - RNA, 19 nt, Artificial Sequence
  Description of Artificial Sequence: Synthetic oligonucleotide
uaaaguauauauaaaguuu

SEQ ID NO: 2370388 - RNA, 19 nt, Artificial Sequence
  Description of Artificial Sequence: Synthetic oligonucleotide
ugaugaaccacuucaaucu

SEQ ID NO: 2370389 - RNA, 19 nt, Artificial Sequence
  Description of Artificial Sequence: Synthetic oligonucleotide
gaaacuaagggaugaggcg

SEQ ID NO: 2370390 - RNA, 19 nt, Artificial Sequence
  Description of Artificial Sequence: Synthetic oligonucleotide
aaauuauuuacaaguggcg

SEQ ID NO: 2370391 - RNA, 19 nt, Artificial Sequence
  Description of Artificial Sequence: Synthetic oligonucleotide
agaacccgcacuuucacgc

SEQ ID NO: 2370392 - RNA, 19 nt, Artificial Sequence
  Description of Artificial Sequence: Synthetic oligonucleotide
cacaaaagcauaauaacug

SEQ ID NO: 2370393 - RNA, 19 nt, Artificial Sequence
  Description of Artificial Sequence: Synthetic oligonucleotide
agauacauauauuacuuug

SEQ ID NO: 2370394 - RNA, 19 nt, Artificial Sequence
  Description of Artificial Sequence: Synthetic oligonucleotide
accuuaaauauucacaugu

SEQ ID NO: 2370395 - RNA, 19 nt, Artificial Sequence
  Description of Artificial Sequence: Synthetic oligonucleotide
ugcaauaugcagaagagua

SEQ ID NO: 2370396 - RNA, 19 nt, Artificial Sequence
  Description of Artificial Sequence: Synthetic oligonucleotide
uacaccuuaaauauucaca

SEQ ID NO: 2370397 - RNA, 19 nt, Artificial Sequence
  Description of Artificial Sequence: Synthetic oligonucleotide
auaugcagaagaguaaggc

SEQ ID NO: 2370398 - RNA, 19 nt, Artificial Sequence
  Description of Artificial Sequence: Synthetic oligonucleotide
augaugaaccacuucaauc

SEQ ID NO: 2370399 - RNA, 19 nt, Artificial Sequence
  Description of Artificial Sequence: Synthetic oligonucleotide
auguaggacagacuguacc

SEQ ID NO: 2370400 - RNA, 19 nt, Artificial Sequence
  Description of Artificial Sequence: Synthetic oligonucleotide
aaggauugaacagaaaaca

SEQ ID NO: 2370401 - RNA, 19 nt, Artificial Sequence
  Description of Artificial Sequence: Synthetic oligonucleotide
aacaaagcauaugaugaac

SEQ ID NO: 2370402 - RNA, 19 nt, Artificial Sequence
  Description of Artificial Sequence: Synthetic oligonucleotide
uguuguaaguaauuuuaag

SEQ ID NO: 2370403 - RNA, 19 nt, Artificial Sequence
  Description of Artificial Sequence: Synthetic oligonucleotide
aaggccagccccuucuucc

SEQ ID NO: 2370404 - RNA, 19 nt, Artificial Sequence
  Description of Artificial Sequence: Synthetic oligonucleotide
aauuauuuacaaguggcga

SEQ ID NO: 2370405 - RNA, 19 nt, Artificial Sequence
  Description of Artificial Sequence: Synthetic oligonucleotide
aaaagcaaguacuggccag

SEQ ID NO: 2370406 - RNA, 19 nt, Artificial Sequence
  Description of Artificial Sequence: Synthetic oligonucleotide
ucagaagcuguaaagauua

SEQ ID NO: 2370407 - RNA, 19 nt, Artificial Sequence
  Description of Artificial Sequence: Synthetic oligonucleotide
uacuuuguauuacauguug

SEQ ID NO: 2370408 - RNA, 19 nt, Artificial Sequence
  Description of Artificial Sequence: Synthetic oligonucleotide
uguauuacauguuguaagu

SEQ ID NO: 2370409 - RNA, 19 nt, Artificial Sequence
  Description of Artificial Sequence: Synthetic oligonucleotide
agcaacaaagcauaugaug

SEQ ID NO: 2370410 - RNA, 19 nt, Artificial Sequence
  Description of Artificial Sequence: Synthetic oligonucleotide
uguaccaggucaucgacag

SEQ ID NO: 2370411 - RNA, 19 nt, Artificial Sequence
  Description of Artificial Sequence: Synthetic oligonucleotide
aguuuuaugccauugggaa

SEQ ID NO: 2370412 - RNA, 19 nt, Artificial Sequence
  Description of Artificial Sequence: Synthetic oligonucleotide
agaagaguaaggccagccc

SEQ ID NO: 2370413 - RNA, 19 nt, Artificial Sequence
  Description of Artificial Sequence: Synthetic oligonucleotide
uucaaucugguguugaaac

SEQ ID NO: 2370414 - RNA, 19 nt, Artificial Sequence
  Description of Artificial Sequence: Synthetic oligonucleotide
uauuacauguuguaaguaa

SEQ ID NO: 2370415 - RNA, 19 nt, Artificial Sequence
  Description of Artificial Sequence: Synthetic oligonucleotide
cauaugaugaaccacuuca

SEQ ID NO: 2370416 - RNA, 19 nt, Artificial Sequence
  Description of Artificial Sequence: Synthetic oligonucleotide
acaaagcauaugaugaacc

SEQ ID NO: 2370417 - RNA, 19 nt, Artificial Sequence
  Description of Artificial Sequence: Synthetic oligonucleotide
gaagaguaaggccagcccc

SEQ ID NO: 2370418 - RNA, 19 nt, Artificial Sequence
  Description of Artificial Sequence: Synthetic oligonucleotide
uaagcuuaaaguauauaua

SEQ ID NO: 2370419 - RNA, 19 nt, Artificial Sequence
  Description of Artificial Sequence: Synthetic oligonucleotide
uuacaaguggcgaugauuu

SEQ ID NO: 2370420 - RNA, 19 nt, Artificial Sequence
  Description of Artificial Sequence: Synthetic oligonucleotide
acaaguggcgaugauuucc

SEQ ID NO: 2370421 - RNA, 19 nt, Artificial Sequence
  Description of Artificial Sequence: Synthetic oligonucleotide
cacaggguaaacacgaagc

SEQ ID NO: 2370422 - RNA, 19 nt, Artificial Sequence
  Description of Artificial Sequence: Synthetic oligonucleotide
aaauauucacaugucagaa

SEQ ID NO: 2370423 - RNA, 19 nt, Artificial Sequence
  Description of Artificial Sequence: Synthetic oligonucleotide
caaggauugaacagaaaac

SEQ ID NO: 2370424 - RNA, 19 nt, Artificial Sequence
  Description of Artificial Sequence: Synthetic oligonucleotide
aacacgaagcacaaaagca

SEQ ID NO: 2370425 - RNA, 19 nt, Artificial Sequence
  Description of Artificial Sequence: Synthetic oligonucleotide
cagcaaaccaguuccaagg

SEQ ID NO: 2370426 - RNA, 19 nt, Artificial Sequence
  Description of Artificial Sequence: Synthetic oligonucleotide
guaaacacgaagcacaaaa

SEQ ID NO: 2370427 - RNA, 19 nt, Artificial Sequence
  Description of Artificial Sequence: Synthetic oligonucleotide
acaccuuaaauauucacau

SEQ ID NO: 2370428 - RNA, 19 nt, Artificial Sequence
  Description of Artificial Sequence: Synthetic oligonucleotide
aacuuucagcugaagagcg

SEQ ID NO: 2370429 - RNA, 19 nt, Artificial Sequence
  Description of Artificial Sequence: Synthetic oligonucleotide
uguaggacagacuguacca

SEQ ID NO: 2370430 - RNA, 19 nt, Artificial Sequence
  Description of Artificial Sequence: Synthetic oligonucleotide
aaacuaagggaugaggcgu

SEQ ID NO: 2370431 - RNA, 19 nt, Artificial Sequence
  Description of Artificial Sequence: Synthetic oligonucleotide
cuugcauaugggauguagg

SEQ ID NO: 2370432 - RNA, 19 nt, Artificial Sequence
  Description of Artificial Sequence: Synthetic oligonucleotide
agcacuugagcacugcauc

SEQ ID NO: 2370433 - RNA, 19 nt, Artificial Sequence
  Description of Artificial Sequence: Synthetic oligonucleotide
aauaugcagaagaguaagg

SEQ ID NO: 2370434 - RNA, 19 nt, Artificial Sequence
  Description of Artificial Sequence: Synthetic oligonucleotide
agcagacgaaacuuucagc

SEQ ID NO: 2370435 - RNA, 19 nt, Artificial Sequence
  Description of Artificial Sequence: Synthetic oligonucleotide
agcauaauaacuguggcaa

SEQ ID NO: 2370436 - RNA, 19 nt, Artificial Sequence
  Description of Artificial Sequence: Synthetic oligonucleotide
uguaaguaauuuuaagcuu

SEQ ID NO: 2370437 - RNA, 19 nt, Artificial Sequence
  Description of Artificial Sequence: Synthetic oligonucleotide
aagcauaugaugaaccacu

SEQ ID NO: 2370438 - RNA, 19 nt, Artificial Sequence
  Description of Artificial Sequence: Synthetic oligonucleotide
uuauuuacaaguggcgaug

SEQ ID NO: 2370439 - RNA, 19 nt, Artificial Sequence
  Description of Artificial Sequence: Synthetic oligonucleotide
agccaaaugagcuggauau

SEQ ID NO: 2370440 - RNA, 19 nt, Artificial Sequence
  Description of Artificial Sequence: Synthetic oligonucleotide
ugaagagcgaugagcagca

SEQ ID NO: 2370441 - RNA, 19 nt, Artificial Sequence
  Description of Artificial Sequence: Synthetic oligonucleotide
uugcauaugggauguagga

SEQ ID NO: 2370442 - RNA, 19 nt, Artificial Sequence
  Description of Artificial Sequence: Synthetic oligonucleotide
cauaauaacuguggcaagc

SEQ ID NO: 2370443 - RNA, 19 nt, Artificial Sequence
  Description of Artificial Sequence: Synthetic oligonucleotide
aagaacccgcacuuucacg

SEQ ID NO: 2370444 - RNA, 19 nt, Artificial Sequence
  Description of Artificial Sequence: Synthetic oligonucleotide
guggcaagcaaucuuguug

SEQ ID NO: 2370445 - RNA, 19 nt, Artificial Sequence
  Description of Artificial Sequence: Synthetic oligonucleotide
agacgaaacuuucagcuga

SEQ ID NO: 2370446 - RNA, 19 nt, Artificial Sequence
  Description of Artificial Sequence: Synthetic oligonucleotide
uuuacaccuuaaauauuca

SEQ ID NO: 2370447 - RNA, 19 nt, Artificial Sequence
  Description of Artificial Sequence: Synthetic oligonucleotide
caauaugcagaagaguaag

SEQ ID NO: 2370448 - RNA, 19 nt, Artificial Sequence
  Description of Artificial Sequence: Synthetic oligonucleotide
aggauugaacagaaaacac

SEQ ID NO: 2370449 - RNA, 19 nt, Artificial Sequence
  Description of Artificial Sequence: Synthetic oligonucleotide
ugauuucccaagcaccucu

SEQ ID NO: 2370450 - RNA, 19 nt, Artificial Sequence
  Description of Artificial Sequence: Synthetic oligonucleotide
uggcaagcaaucuuguugu

SEQ ID NO: 2370451 - RNA, 19 nt, Artificial Sequence
  Description of Artificial Sequence: Synthetic oligonucleotide
uguugaaacuaagggauga

SEQ ID NO: 2370452 - RNA, 19 nt, Artificial Sequence
  Description of Artificial Sequence: Synthetic oligonucleotide
uucacgcucuaucucgcgg

SEQ ID NO: 2370453 - RNA, 19 nt, Artificial Sequence
  Description of Artificial Sequence: Synthetic oligonucleotide
ugaaccacuucaaucuggu

SEQ ID NO: 2370454 - RNA, 19 nt, Artificial Sequence
  Description of Artificial Sequence: Synthetic oligonucleotide
acagaaaacaccagcaaca

SEQ ID NO: 2370455 - RNA, 19 nt, Artificial Sequence
  Description of Artificial Sequence: Synthetic oligonucleotide
gagcagacgaaacuuucag

SEQ ID NO: 2370456 - RNA, 19 nt, Artificial Sequence
  Description of Artificial Sequence: Synthetic oligonucleotide
uaucucgcgggaauuccgg

SEQ ID NO: 2370457 - RNA, 19 nt, Artificial Sequence
  Description of Artificial Sequence: Synthetic oligonucleotide
aucuuguuguuucaaacau

SEQ ID NO: 2370458 - RNA, 19 nt, Artificial Sequence
  Description of Artificial Sequence: Synthetic oligonucleotide
uuacaccuuaaauauucac

SEQ ID NO: 2370459 - RNA, 19 nt, Artificial Sequence
  Description of Artificial Sequence: Synthetic oligonucleotide
acugaguagaaauuauuua

SEQ ID NO: 2370460 - RNA, 19 nt, Artificial Sequence
  Description of Artificial Sequence: Synthetic oligonucleotide
ugagcuggauauaucuuac

SEQ ID NO: 2370461 - RNA, 19 nt, Artificial Sequence
  Description of Artificial Sequence: Synthetic oligonucleotide
ucuuccgccaccacagagc

SEQ ID NO: 2370462 - RNA, 19 nt, Artificial Sequence
  Description of Artificial Sequence: Synthetic oligonucleotide
guuuuaugccauugggaag

SEQ ID NO: 2370463 - RNA, 19 nt, Artificial Sequence
  Description of Artificial Sequence: Synthetic oligonucleotide
uaugaugaaccacuucaau

SEQ ID NO: 2370464 - RNA, 19 nt, Artificial Sequence
  Description of Artificial Sequence: Synthetic oligonucleotide
auuucccaagcaccucucc

SEQ ID NO: 2370465 - RNA, 19 nt, Artificial Sequence
  Description of Artificial Sequence: Synthetic oligonucleotide
ugccgcaagguuuccaagg

SEQ ID NO: 2370466 - RNA, 19 nt, Artificial Sequence
  Description of Artificial Sequence: Synthetic oligonucleotide
uaugggauguaggacagac

SEQ ID NO: 2370467 - RNA, 19 nt, Artificial Sequence
  Description of Artificial Sequence: Synthetic oligonucleotide
aaguuuuaugccauuggga

SEQ ID NO: 2370468 - RNA, 19 nt, Artificial Sequence
  Description of Artificial Sequence: Synthetic oligonucleotide
cauaugggauguaggacag

SEQ ID NO: 2370469 - RNA, 19 nt, Artificial Sequence
  Description of Artificial Sequence: Synthetic oligonucleotide
uaagggaugaggcguccag

SEQ ID NO: 2370470 - RNA, 19 nt, Artificial Sequence
  Description of Artificial Sequence: Synthetic oligonucleotide
uucacaggucccauuaaaa

SEQ ID NO: 2370471 - RNA, 19 nt, Artificial Sequence
  Description of Artificial Sequence: Synthetic oligonucleotide
ugagcagacgaaacuuuca

SEQ ID NO: 2370472 - RNA, 19 nt, Artificial Sequence
  Description of Artificial Sequence: Synthetic oligonucleotide
ucacgcucuaucucgcggg

SEQ ID NO: 2370473 - RNA, 19 nt, Artificial Sequence
  Description of Artificial Sequence: Synthetic oligonucleotide
auacauauauuacuuugua

SEQ ID NO: 2370474 - RNA, 19 nt, Artificial Sequence
  Description of Artificial Sequence: Synthetic oligonucleotide
auauaucuuacaacacagg

SEQ ID NO: 2370475 - RNA, 19 nt, Artificial Sequence
  Description of Artificial Sequence: Synthetic oligonucleotide
cugaagagcgaugagcagc

SEQ ID NO: 2370476 - RNA, 19 nt, Artificial Sequence
  Description of Artificial Sequence: Synthetic oligonucleotide
acacaggguaaacacgaag

SEQ ID NO: 2370477 - RNA, 19 nt, Artificial Sequence
  Description of Artificial Sequence: Synthetic oligonucleotide
acugcaauaugcagaagag

SEQ ID NO: 2370478 - RNA, 19 nt, Artificial Sequence
  Description of Artificial Sequence: Synthetic oligonucleotide
aggaccugcgccgucaggc

SEQ ID NO: 2370479 - RNA, 19 nt, Artificial Sequence
  Description of Artificial Sequence: Synthetic oligonucleotide
ucaaucugguguugaaacu

SEQ ID NO: 2370480 - RNA, 19 nt, Artificial Sequence
  Description of Artificial Sequence: Synthetic oligonucleotide
guggcgaugauuucccaag

SEQ ID NO: 2370481 - RNA, 19 nt, Artificial Sequence
  Description of Artificial Sequence: Synthetic oligonucleotide
uauucacaugucagaagcu

SEQ ID NO: 2370482 - RNA, 19 nt, Artificial Sequence
  Description of Artificial Sequence: Synthetic oligonucleotide
uucagcugaagagcgauga

SEQ ID NO: 2370483 - RNA, 19 nt, Artificial Sequence
  Description of Artificial Sequence: Synthetic oligonucleotide
ggauauaucuuacaacaca

SEQ ID NO: 2370484 - RNA, 19 nt, Artificial Sequence
  Description of Artificial Sequence: Synthetic oligonucleotide
agcaaguacuggccagugc

SEQ ID NO: 2370485 - RNA, 19 nt, Artificial Sequence
  Description of Artificial Sequence: Synthetic oligonucleotide
agcuggauauaucuuacaa

SEQ ID NO: 2370486 - RNA, 19 nt, Artificial Sequence
  Description of Artificial Sequence: Synthetic oligonucleotide
auugggaagccacagcaaa

SEQ ID NO: 2370487 - RNA, 19 nt, Artificial Sequence
  Description of Artificial Sequence: Synthetic oligonucleotide
cacccggaagcgaagaacc

SEQ ID NO: 2370488 - RNA, 19 nt, Artificial Sequence
  Description of Artificial Sequence: Synthetic oligonucleotide
gcaaguacuggccagugcc

SEQ ID NO: 2370489 - RNA, 19 nt, Artificial Sequence
  Description of Artificial Sequence: Synthetic oligonucleotide
aggguaaacacgaagcaca

SEQ ID NO: 2370490 - RNA, 19 nt, Artificial Sequence
  Description of Artificial Sequence: Synthetic oligonucleotide
auaauaacuguggcaagca

SEQ ID NO: 2370491 - RNA, 19 nt, Artificial Sequence
  Description of Artificial Sequence: Synthetic oligonucleotide
guaaguaauuuuaagcuua

SEQ ID NO: 2370492 - RNA, 19 nt, Artificial Sequence
  Description of Artificial Sequence: Synthetic oligonucleotide
uuuacaaguggcgaugauu

SEQ ID NO: 2370493 - RNA, 19 nt, Artificial Sequence
  Description of Artificial Sequence: Synthetic oligonucleotide
uugagcacugcaucucuug

SEQ ID NO: 2370494 - RNA, 19 nt, Artificial Sequence
  Description of Artificial Sequence: Synthetic oligonucleotide
acauguuguaaguaauuuu

SEQ ID NO: 2370495 - RNA, 19 nt, Artificial Sequence
  Description of Artificial Sequence: Synthetic oligonucleotide
gcaacaaagcauaugauga

SEQ ID NO: 2370496 - RNA, 19 nt, Artificial Sequence
  Description of Artificial Sequence: Synthetic oligonucleotide
ugggaagccacagcaaacc

SEQ ID NO: 2370497 - RNA, 19 nt, Artificial Sequence
  Description of Artificial Sequence: Synthetic oligonucleotide
aaagcaaguacuggccagu

SEQ ID NO: 2370498 - RNA, 19 nt, Artificial Sequence
  Description of Artificial Sequence: Synthetic oligonucleotide
aacuguggcaagcaaucuu

SEQ ID NO: 2370499 - RNA, 19 nt, Artificial Sequence
  Description of Artificial Sequence: Synthetic oligonucleotide
augagcuggauauaucuua

SEQ ID NO: 2370500 - RNA, 19 nt, Artificial Sequence
  Description of Artificial Sequence: Synthetic oligonucleotide
cuaucucgcgggaauuccg

SEQ ID NO: 2370501 - RNA, 19 nt, Artificial Sequence
  Description of Artificial Sequence: Synthetic oligonucleotide
aacuaagggaugaggcguc

SEQ ID NO: 2370502 - RNA, 19 nt, Artificial Sequence
  Description of Artificial Sequence: Synthetic oligonucleotide
uauuuacaaguggcgauga

SEQ ID NO: 2370503 - RNA, 19 nt, Artificial Sequence
  Description of Artificial Sequence: Synthetic oligonucleotide
ucuccugagcagacgaaac

SEQ ID NO: 2370504 - RNA, 19 nt, Artificial Sequence
  Description of Artificial Sequence: Synthetic oligonucleotide
aagccaaaugagcuggaua

SEQ ID NO: 2370505 - RNA, 19 nt, Artificial Sequence
  Description of Artificial Sequence: Synthetic oligonucleotide
uacauguuguaaguaauuu

SEQ ID NO: 2370506 - RNA, 19 nt, Artificial Sequence
  Description of Artificial Sequence: Synthetic oligonucleotide
uucaaacauuuucuucagu

SEQ ID NO: 2370507 - RNA, 19 nt, Artificial Sequence
  Description of Artificial Sequence: Synthetic oligonucleotide
caaguacuggccagugccg

SEQ ID NO: 2370508 - RNA, 19 nt, Artificial Sequence
  Description of Artificial Sequence: Synthetic oligonucleotide
acuguggcaagcaaucuug

SEQ ID NO: 2370509 - RNA, 19 nt, Artificial Sequence
  Description of Artificial Sequence: Synthetic oligonucleotide
gaagaacccgcacuuucac

SEQ ID NO: 2370510 - RNA, 19 nt, Artificial Sequence
  Description of Artificial Sequence: Synthetic oligonucleotide
uuacuuuguauuacauguu

SEQ ID NO: 2370511 - RNA, 19 nt, Artificial Sequence
  Description of Artificial Sequence: Synthetic oligonucleotide
uuucacgcucuaucucgcg

SEQ ID NO: 2370512 - RNA, 19 nt, Artificial Sequence
  Description of Artificial Sequence: Synthetic oligonucleotide
ucuaucucgcgggaauucc

SEQ ID NO: 2370513 - RNA, 19 nt, Artificial Sequence
  Description of Artificial Sequence: Synthetic oligonucleotide
aacccgcacuuucacgcuc

SEQ ID NO: 2370514 - RNA, 19 nt, Artificial Sequence
  Description of Artificial Sequence: Synthetic oligonucleotide
ucuccauagccccgucccg

SEQ ID NO: 2370515 - RNA, 19 nt, Artificial Sequence
  Description of Artificial Sequence: Synthetic oligonucleotide
aagcgaagaacccgcacuu

SEQ ID NO: 2370516 - RNA, 19 nt, Artificial Sequence
  Description of Artificial Sequence: Synthetic oligonucleotide
agacuguaccaggucaucg

SEQ ID NO: 2370517 - RNA, 19 nt, Artificial Sequence
  Description of Artificial Sequence: Synthetic oligonucleotide
gauacauauauuacuuugu

SEQ ID NO: 2370518 - RNA, 19 nt, Artificial Sequence
  Description of Artificial Sequence: Synthetic oligonucleotide
aggaacugcaauaugcaga

SEQ ID NO: 2370519 - RNA, 19 nt, Artificial Sequence
  Description of Artificial Sequence: Synthetic oligonucleotide
caggaacugcaauaugcag

SEQ ID NO: 2370520 - RNA, 19 nt, Artificial Sequence
  Description of Artificial Sequence: Synthetic oligonucleotide
auuacauguuguaaguaau

SEQ ID NO: 2370521 - RNA, 19 nt, Artificial Sequence
  Description of Artificial Sequence: Synthetic oligonucleotide
ugcauaugggauguaggac

SEQ ID NO: 2370522 - RNA, 19 nt, Artificial Sequence
  Description of Artificial Sequence: Synthetic oligonucleotide
ucaucgacaggaacugcaa

SEQ ID NO: 2370523 - RNA, 19 nt, Artificial Sequence
  Description of Artificial Sequence: Synthetic oligonucleotide
caggccuugcuccucgucg

SEQ ID NO: 2370524 - RNA, 19 nt, Artificial Sequence
  Description of Artificial Sequence: Synthetic oligonucleotide
cuuucacgcucuaucucgc

SEQ ID NO: 2370525 - RNA, 19 nt, Artificial Sequence
  Description of Artificial Sequence: Synthetic oligonucleotide
ucacaugucagaagcugua

SEQ ID NO: 2370526 - RNA, 19 nt, Artificial Sequence
  Description of Artificial Sequence: Synthetic oligonucleotide
aaacugaguagaaauuauu

SEQ ID NO: 2370527 - RNA, 19 nt, Artificial Sequence
  Description of Artificial Sequence: Synthetic oligonucleotide
gcauaugggauguaggaca

SEQ ID NO: 2370528 - RNA, 19 nt, Artificial Sequence
  Description of Artificial Sequence: Synthetic oligonucleotide
agcaaaccaguuccaagga

SEQ ID NO: 2370529 - RNA, 19 nt, Artificial Sequence
  Description of Artificial Sequence: Synthetic oligonucleotide
aagaguaaggccagccccu

SEQ ID NO: 2370530 - RNA, 19 nt, Artificial Sequence
  Description of Artificial Sequence: Synthetic oligonucleotide
ggaugaggcguccaggacc

SEQ ID NO: 2370531 - RNA, 19 nt, Artificial Sequence
  Description of Artificial Sequence: Synthetic oligonucleotide
agcucgcucaccccgcacg

SEQ ID NO: 2370532 - RNA, 19 nt, Artificial Sequence
  Description of Artificial Sequence: Synthetic oligonucleotide
uucaguugcuucacagguc

SEQ ID NO: 2370533 - RNA, 19 nt, Artificial Sequence
  Description of Artificial Sequence: Synthetic oligonucleotide
caaaugagcuggauauauc

SEQ ID NO: 2370534 - RNA, 19 nt, Artificial Sequence
  Description of Artificial Sequence: Synthetic oligonucleotide
guugaaacuaagggaugag

SEQ ID NO: 2370535 - RNA, 19 nt, Artificial Sequence
  Description of Artificial Sequence: Synthetic oligonucleotide
gaagcgaagaacccgcacu

SEQ ID NO: 2370536 - RNA, 19 nt, Artificial Sequence
  Description of Artificial Sequence: Synthetic oligonucleotide
acuugagcacugcaucucu

SEQ ID NO: 2370537 - RNA, 19 nt, Artificial Sequence
  Description of Artificial Sequence: Synthetic oligonucleotide
ucgacaggaacugcaauau

SEQ ID NO: 2370538 - RNA, 19 nt, Artificial Sequence
  Description of Artificial Sequence: Synthetic oligonucleotide
gacuguaccaggucaucga

SEQ ID NO: 2370539 - RNA, 19 nt, Artificial Sequence
  Description of Artificial Sequence: Synthetic oligonucleotide
acuuuguauuacauguugu

SEQ ID NO: 2370540 - RNA, 19 nt, Artificial Sequence
  Description of Artificial Sequence: Synthetic oligonucleotide
cagacgaaacuuucagcug

SEQ ID NO: 2370541 - RNA, 19 nt, Artificial Sequence
  Description of Artificial Sequence: Synthetic oligonucleotide
gcuggauauaucuuacaac

SEQ ID NO: 2370542 - RNA, 19 nt, Artificial Sequence
  Description of Artificial Sequence: Synthetic oligonucleotide
acuaagggaugaggcgucc

SEQ ID NO: 2370543 - RNA, 19 nt, Artificial Sequence
  Description of Artificial Sequence: Synthetic oligonucleotide
cugagcagacgaaacuuuc

SEQ ID NO: 2370544 - RNA, 19 nt, Artificial Sequence
  Description of Artificial Sequence: Synthetic oligonucleotide
acaugucagaagcuguaaa

SEQ ID NO: 2370545 - RNA, 19 nt, Artificial Sequence
  Description of Artificial Sequence: Synthetic oligonucleotide
caccuuaaauauucacaug

SEQ ID NO: 2370546 - RNA, 19 nt, Artificial Sequence
  Description of Artificial Sequence: Synthetic oligonucleotide
agggaugaggcguccagga

SEQ ID NO: 2370547 - RNA, 19 nt, Artificial Sequence
  Description of Artificial Sequence: Synthetic oligonucleotide
uggcgaugauuucccaagc

SEQ ID NO: 2370548 - RNA, 19 nt, Artificial Sequence
  Description of Artificial Sequence: Synthetic oligonucleotide
agcgaugagcagcacuuga

SEQ ID NO: 2370549 - RNA, 19 nt, Artificial Sequence
  Description of Artificial Sequence: Synthetic oligonucleotide
aaucugguguugaaacuaa

SEQ ID NO: 2370550 - RNA, 19 nt, Artificial Sequence
  Description of Artificial Sequence: Synthetic oligonucleotide
aaugagcuggauauaucuu

SEQ ID NO: 2370551 - RNA, 19 nt, Artificial Sequence
  Description of Artificial Sequence: Synthetic oligonucleotide
guaggacagacuguaccag

SEQ ID NO: 2370552 - RNA, 19 nt, Artificial Sequence
  Description of Artificial Sequence: Synthetic oligonucleotide
guagauacauauauuacuu

SEQ ID NO: 2370553 - RNA, 19 nt, Artificial Sequence
  Description of Artificial Sequence: Synthetic oligonucleotide
ggguguaaaauacugcaaa

SEQ ID NO: 2370554 - RNA, 19 nt, Artificial Sequence
  Description of Artificial Sequence: Synthetic oligonucleotide
agaagcuguaaagauuaaa

SEQ ID NO: 2370555 - RNA, 19 nt, Artificial Sequence
  Description of Artificial Sequence: Synthetic oligonucleotide
aggucaucgacaggaacug

SEQ ID NO: 2370556 - RNA, 19 nt, Artificial Sequence
  Description of Artificial Sequence: Synthetic oligonucleotide
auagccccgucccggcccc

SEQ ID NO: 2370557 - RNA, 19 nt, Artificial Sequence
  Description of Artificial Sequence: Synthetic oligonucleotide
ugccauugggaagccacag

SEQ ID NO: 2370558 - RNA, 19 nt, Artificial Sequence
  Description of Artificial Sequence: Synthetic oligonucleotide
gguguaaaauacugcaaaa

SEQ ID NO: 2370559 - RNA, 19 nt, Artificial Sequence
  Description of Artificial Sequence: Synthetic oligonucleotide
gcagacgaaacuuucagcu

SEQ ID NO: 2370560 - RNA, 19 nt, Artificial Sequence
  Description of Artificial Sequence: Synthetic oligonucleotide
aaagccaaaugagcuggau

SEQ ID NO: 2370561 - RNA, 19 nt, Artificial Sequence
  Description of Artificial Sequence: Synthetic oligonucleotide
caggguaaacacgaagcac

SEQ ID NO: 2370562 - RNA, 19 nt, Artificial Sequence
  Description of Artificial Sequence: Synthetic oligonucleotide
ucgcucaccccgcacgccc

SEQ ID NO: 2370563 - RNA, 19 nt, Artificial Sequence
  Description of Artificial Sequence: Synthetic oligonucleotide
ucucgcgggaauuccggac

SEQ ID NO: 2370564 - RNA, 19 nt, Artificial Sequence
  Description of Artificial Sequence: Synthetic oligonucleotide
ucguccuggccgcucagga

SEQ ID NO: 2370565 - RNA, 19 nt, Artificial Sequence
  Description of Artificial Sequence: Synthetic oligonucleotide
gaaccacuucaaucuggug

SEQ ID NO: 2370566 - RNA, 19 nt, Artificial Sequence
  Description of Artificial Sequence: Synthetic oligonucleotide
caacaaagcauaugaugaa

SEQ ID NO: 2370567 - RNA, 19 nt, Artificial Sequence
  Description of Artificial Sequence: Synthetic oligonucleotide
gguguugaaacuaagggau

SEQ ID NO: 2370568 - RNA, 19 nt, Artificial Sequence
  Description of Artificial Sequence: Synthetic oligonucleotide
ccuuaaauauucacauguc

SEQ ID NO: 2370569 - RNA, 19 nt, Artificial Sequence
  Description of Artificial Sequence: Synthetic oligonucleotide
auaugaugaaccacuucaa

SEQ ID NO: 2370570 - RNA, 19 nt, Artificial Sequence
  Description of Artificial Sequence: Synthetic oligonucleotide
cauagccccgucccggccc

SEQ ID NO: 2370571 - RNA, 19 nt, Artificial Sequence
  Description of Artificial Sequence: Synthetic oligonucleotide
ugaggcguccaggaccugc

SEQ ID NO: 2370572 - RNA, 19 nt, Artificial Sequence
  Description of Artificial Sequence: Synthetic oligonucleotide
gaggcguccaggaccugcg

SEQ ID NO: 2370573 - RNA, 19 nt, Artificial Sequence
  Description of Artificial Sequence: Synthetic oligonucleotide
gcgaugauuucccaagcac

SEQ ID NO: 2370574 - RNA, 19 nt, Artificial Sequence
  Description of Artificial Sequence: Synthetic oligonucleotide
gucaucgacaggaacugca

SEQ ID NO: 2370575 - RNA, 19 nt, Artificial Sequence
  Description of Artificial Sequence: Synthetic oligonucleotide
gccgcaagguuuccaaggg

SEQ ID NO: 2370576 - RNA, 19 nt, Artificial Sequence
  Description of Artificial Sequence: Synthetic oligonucleotide
uaacuguggcaagcaaucu

SEQ ID NO: 2370577 - RNA, 19 nt, Artificial Sequence
  Description of Artificial Sequence: Synthetic oligonucleotide
aaaagccaaaugagcugga

SEQ ID NO: 2370578 - RNA, 19 nt, Artificial Sequence
  Description of Artificial Sequence: Synthetic oligonucleotide
auuuacaaguggcgaugau

SEQ ID NO: 2370579 - RNA, 19 nt, Artificial Sequence
  Description of Artificial Sequence: Synthetic oligonucleotide
uccaaggauugaacagaaa

SEQ ID NO: 2370580 - RNA, 19 nt, Artificial Sequence
  Description of Artificial Sequence: Synthetic oligonucleotide
gauguaggacagacuguac

SEQ ID NO: 2370581 - RNA, 19 nt, Artificial Sequence
  Description of Artificial Sequence: Synthetic oligonucleotide
gcauaauaacuguggcaag

SEQ ID NO: 2370582 - RNA, 19 nt, Artificial Sequence
  Description of Artificial Sequence: Synthetic oligonucleotide
auguuguaaguaauuuuaa

SEQ ID NO: 2370583 - RNA, 19 nt, Artificial Sequence
  Description of Artificial Sequence: Synthetic oligonucleotide
uccauagccccgucccggc

SEQ ID NO: 2370584 - RNA, 19 nt, Artificial Sequence
  Description of Artificial Sequence: Synthetic oligonucleotide
caggucaucgacaggaacu

SEQ ID NO: 2370585 - RNA, 19 nt, Artificial Sequence
  Description of Artificial Sequence: Synthetic oligonucleotide
cacuuucacgcucuaucuc

SEQ ID NO: 2370586 - RNA, 19 nt, Artificial Sequence
  Description of Artificial Sequence: Synthetic oligonucleotide
caagcaccucuccugagca

SEQ ID NO: 2370587 - RNA, 19 nt, Artificial Sequence
  Description of Artificial Sequence: Synthetic oligonucleotide
uacaaguggcgaugauuuc

SEQ ID NO: 2370588 - RNA, 19 nt, Artificial Sequence
  Description of Artificial Sequence: Synthetic oligonucleotide
aaguggcgaugauuuccca

SEQ ID NO: 2370589 - RNA, 19 nt, Artificial Sequence
  Description of Artificial Sequence: Synthetic oligonucleotide
guguugaaacuaagggaug

SEQ ID NO: 2370590 - RNA, 19 nt, Artificial Sequence
  Description of Artificial Sequence: Synthetic oligonucleotide
ucaccccgcacgcccaccc

SEQ ID NO: 2370591 - RNA, 19 nt, Artificial Sequence
  Description of Artificial Sequence: Synthetic oligonucleotide
gagcuggauauaucuuaca

SEQ ID NO: 2370592 - RNA, 19 nt, Artificial Sequence
  Description of Artificial Sequence: Synthetic oligonucleotide
cuuccgccaccacagagca

SEQ ID NO: 2370593 - RNA, 19 nt, Artificial Sequence
  Description of Artificial Sequence: Synthetic oligonucleotide
aggacagacuguaccaggu

SEQ ID NO: 2370594 - RNA, 19 nt, Artificial Sequence
  Description of Artificial Sequence: Synthetic oligonucleotide
acccggaagcgaagaaccc

SEQ ID NO: 2370595 - RNA, 19 nt, Artificial Sequence
  Description of Artificial Sequence: Synthetic oligonucleotide
aucugguguugaaacuaag

SEQ ID NO: 2370596 - RNA, 19 nt, Artificial Sequence
  Description of Artificial Sequence: Synthetic oligonucleotide
ucgucguccuggccgcuca

SEQ ID NO: 2370597 - RNA, 19 nt, Artificial Sequence
  Description of Artificial Sequence: Synthetic oligonucleotide
gaugaggcguccaggaccu

SEQ ID NO: 2370598 - RNA, 19 nt, Artificial Sequence
  Description of Artificial Sequence: Synthetic oligonucleotide
gcguccaggaccugcgccg

SEQ ID NO: 2370599 - RNA, 19 nt, Artificial Sequence
  Description of Artificial Sequence: Synthetic oligonucleotide
gauuucccaagcaccucuc

SEQ ID NO: 2370600 - RNA, 19 nt, Artificial Sequence
  Description of Artificial Sequence: Synthetic oligonucleotide
ccggaagcgaagaacccgc

SEQ ID NO: 2370601 - RNA, 19 nt, Artificial Sequence
  Description of Artificial Sequence: Synthetic oligonucleotide
aggccuugcuccucgucgu

SEQ ID NO: 2370602 - RNA, 19 nt, Artificial Sequence
  Description of Artificial Sequence: Synthetic oligonucleotide
ccauugggaagccacagca

SEQ ID NO: 2370603 - RNA, 19 nt, Artificial Sequence
  Description of Artificial Sequence: Synthetic oligonucleotide
agcagcucgcucaccccgc

SEQ ID NO: 2370604 - RNA, 19 nt, Artificial Sequence
  Description of Artificial Sequence: Synthetic oligonucleotide
aggguguaaaauacugcaa

SEQ ID NO: 2370605 - RNA, 19 nt, Artificial Sequence
  Description of Artificial Sequence: Synthetic oligonucleotide
acgaagcacaaaagcauaa

SEQ ID NO: 2370606 - RNA, 19 nt, Artificial Sequence
  Description of Artificial Sequence: Synthetic oligonucleotide
cgcaagguuuccaagggug

SEQ ID NO: 2370607 - RNA, 19 nt, Artificial Sequence
  Description of Artificial Sequence: Synthetic oligonucleotide
aucucgcgggaauuccgga

SEQ ID NO: 2370608 - RNA, 19 nt, Artificial Sequence
  Description of Artificial Sequence: Synthetic oligonucleotide
gcacacaggguaaacacga

SEQ ID NO: 2370609 - RNA, 19 nt, Artificial Sequence
  Description of Artificial Sequence: Synthetic oligonucleotide
cucuaucucgcgggaauuc

SEQ ID NO: 2370610 - RNA, 19 nt, Artificial Sequence
  Description of Artificial Sequence: Synthetic oligonucleotide
acgaaacuuucagcugaag

SEQ ID NO: 2370611 - RNA, 19 nt, Artificial Sequence
  Description of Artificial Sequence: Synthetic oligonucleotide
cacagguuuacaccuuaaa

SEQ ID NO: 2370612 - RNA, 19 nt, Artificial Sequence
  Description of Artificial Sequence: Synthetic oligonucleotide
cacuugagcacugcaucuc

SEQ ID NO: 2370613 - RNA, 19 nt, Artificial Sequence
  Description of Artificial Sequence: Synthetic oligonucleotide
ccaagcaccucuccugagc

SEQ ID NO: 2370614 - RNA, 19 nt, Artificial Sequence
  Description of Artificial Sequence: Synthetic oligonucleotide
gugccgcaagguuuccaag

SEQ ID NO: 2370615 - RNA, 19 nt, Artificial Sequence
  Description of Artificial Sequence: Synthetic oligonucleotide
ggauguaggacagacugua

SEQ ID NO: 2370616 - RNA, 19 nt, Artificial Sequence
  Description of Artificial Sequence: Synthetic oligonucleotide
caggacgcgccgcagcuuc

SEQ ID NO: 2370617 - RNA, 19 nt, Artificial Sequence
  Description of Artificial Sequence: Synthetic oligonucleotide
uuaugccauugggaagcca

SEQ ID NO: 2370618 - RNA, 19 nt, Artificial Sequence
  Description of Artificial Sequence: Synthetic oligonucleotide
cauugggaagccacagcaa

SEQ ID NO: 2370619 - RNA, 19 nt, Artificial Sequence
  Description of Artificial Sequence: Synthetic oligonucleotide
gcaaucuuguuguuucaaa

SEQ ID NO: 2370620 - RNA, 19 nt, Artificial Sequence
  Description of Artificial Sequence: Synthetic oligonucleotide
gcauaugaugaaccacuuc

SEQ ID NO: 2370621 - RNA, 19 nt, Artificial Sequence
  Description of Artificial Sequence: Synthetic oligonucleotide
gcgaagaacccgcacuuuc

SEQ ID NO: 2370622 - RNA, 19 nt, Artificial Sequence
  Description of Artificial Sequence: Synthetic oligonucleotide
ggcgaugauuucccaagca

SEQ ID NO: 2370623 - RNA, 19 nt, Artificial Sequence
  Description of Artificial Sequence: Synthetic oligonucleotide
agcauaugaugaaccacuu

SEQ ID NO: 2370624 - RNA, 19 nt, Artificial Sequence
  Description of Artificial Sequence: Synthetic oligonucleotide
acuuucagcugaagagcga

SEQ ID NO: 2370625 - RNA, 19 nt, Artificial Sequence
  Description of Artificial Sequence: Synthetic oligonucleotide
gcgaugagcagcacuugag

SEQ ID NO: 2370626 - RNA, 19 nt, Artificial Sequence
  Description of Artificial Sequence: Synthetic oligonucleotide
gacgaaacuuucagcugaa

SEQ ID NO: 2370627 - RNA, 19 nt, Artificial Sequence
  Description of Artificial Sequence: Synthetic oligonucleotide
agguuuccaaggguguaaa

SEQ ID NO: 2370628 - RNA, 19 nt, Artificial Sequence
  Description of Artificial Sequence: Synthetic oligonucleotide
gaguaaggccagccccuuc

SEQ ID NO: 2370629 - RNA, 19 nt, Artificial Sequence
  Description of Artificial Sequence: Synthetic oligonucleotide
gcaauaugcagaagaguaa

SEQ ID NO: 2370630 - RNA, 19 nt, Artificial Sequence
  Description of Artificial Sequence: Synthetic oligonucleotide
uuccgccaccacagagcag

SEQ ID NO: 2370631 - RNA, 19 nt, Artificial Sequence
  Description of Artificial Sequence: Synthetic oligonucleotide
augggauguaggacagacu

SEQ ID NO: 2370632 - RNA, 19 nt, Artificial Sequence
  Description of Artificial Sequence: Synthetic oligonucleotide
cacuucaaucugguguuga

SEQ ID NO: 2370633 - RNA, 19 nt, Artificial Sequence
  Description of Artificial Sequence: Synthetic oligonucleotide
ggcguccaggaccugcgcc

SEQ ID NO: 2370634 - RNA, 19 nt, Artificial Sequence
  Description of Artificial Sequence: Synthetic oligonucleotide
cccggaagcgaagaacccg

SEQ ID NO: 2370635 - RNA, 19 nt, Artificial Sequence
  Description of Artificial Sequence: Synthetic oligonucleotide
ggacagacuguaccagguc

SEQ ID NO: 2370636 - RNA, 19 nt, Artificial Sequence
  Description of Artificial Sequence: Synthetic oligonucleotide
gucagaagcuguaaagauu

SEQ ID NO: 2370637 - RNA, 19 nt, Artificial Sequence
  Description of Artificial Sequence: Synthetic oligonucleotide
cuuucagcugaagagcgau

SEQ ID NO: 2370638 - RNA, 19 nt, Artificial Sequence
  Description of Artificial Sequence: Synthetic oligonucleotide
cucuccugagcagacgaaa

SEQ ID NO: 2370639 - RNA, 19 nt, Artificial Sequence
  Description of Artificial Sequence: Synthetic oligonucleotide
gaacccgcacuuucacgcu

SEQ ID NO: 2370640 - RNA, 19 nt, Artificial Sequence
  Description of Artificial Sequence: Synthetic oligonucleotide
ccaggucaucgacaggaac

SEQ ID NO: 2370641 - RNA, 19 nt, Artificial Sequence
  Description of Artificial Sequence: Synthetic oligonucleotide
gggaugaggcguccaggac

SEQ ID NO: 2370642 - RNA, 19 nt, Artificial Sequence
  Description of Artificial Sequence: Synthetic oligonucleotide
cacagcaaaccaguuccaa

SEQ ID NO: 2370643 - RNA, 19 nt, Artificial Sequence
  Description of Artificial Sequence: Synthetic oligonucleotide
caggaccugcgccgucagg

SEQ ID NO: 2370644 - RNA, 19 nt, Artificial Sequence
  Description of Artificial Sequence: Synthetic oligonucleotide
aagccacagcaaaccaguu

SEQ ID NO: 2370645 - RNA, 19 nt, Artificial Sequence
  Description of Artificial Sequence: Synthetic oligonucleotide
cuaagggaugaggcgucca

SEQ ID NO: 2370646 - RNA, 19 nt, Artificial Sequence
  Description of Artificial Sequence: Synthetic oligonucleotide
cugcaauaugcagaagagu

SEQ ID NO: 2370647 - RNA, 19 nt, Artificial Sequence
  Description of Artificial Sequence: Synthetic oligonucleotide
agaguaaggccagccccuu

SEQ ID NO: 2370648 - RNA, 19 nt, Artificial Sequence
  Description of Artificial Sequence: Synthetic oligonucleotide
cuggccgcucaggacgcgc

SEQ ID NO: 2370649 - RNA, 19 nt, Artificial Sequence
  Description of Artificial Sequence: Synthetic oligonucleotide
gcucaggacgcgccgcagc

SEQ ID NO: 2370650 - RNA, 19 nt, Artificial Sequence
  Description of Artificial Sequence: Synthetic oligonucleotide
cacgcucuaucucgcggga

SEQ ID NO: 2370651 - RNA, 19 nt, Artificial Sequence
  Description of Artificial Sequence: Synthetic oligonucleotide
gcucgcucaccccgcacgc

SEQ ID NO: 2370652 - RNA, 19 nt, Artificial Sequence
  Description of Artificial Sequence: Synthetic oligonucleotide
ggucaucgacaggaacugc

SEQ ID NO: 2370653 - RNA, 19 nt, Artificial Sequence
  Description of Artificial Sequence: Synthetic oligonucleotide
gguuuccaaggguguaaaa

SEQ ID NO: 2370654 - RNA, 19 nt, Artificial Sequence
  Description of Artificial Sequence: Synthetic oligonucleotide
gcacuugagcacugcaucu

SEQ ID NO: 2370655 - RNA, 19 nt, Artificial Sequence
  Description of Artificial Sequence: Synthetic oligonucleotide
acccgcacuuucacgcucu

SEQ ID NO: 2370656 - RNA, 19 nt, Artificial Sequence
  Description of Artificial Sequence: Synthetic oligonucleotide
agcgaagaacccgcacuuu

SEQ ID NO: 2370657 - RNA, 19 nt, Artificial Sequence
  Description of Artificial Sequence: Synthetic oligonucleotide
caccccgcacgcccacccg

SEQ ID NO: 2370658 - RNA, 19 nt, Artificial Sequence
  Description of Artificial Sequence: Synthetic oligonucleotide
guacuggccagugccgcaa

SEQ ID NO: 2370659 - RNA, 19 nt, Artificial Sequence
  Description of Artificial Sequence: Synthetic oligonucleotide
gccagccccuucuuccgcc

SEQ ID NO: 2370660 - RNA, 19 nt, Artificial Sequence
  Description of Artificial Sequence: Synthetic oligonucleotide
cgcacgcccacccggaagc

SEQ ID NO: 2370661 - RNA, 19 nt, Artificial Sequence
  Description of Artificial Sequence: Synthetic oligonucleotide
cuguggcaagcaaucuugu

SEQ ID NO: 2370662 - RNA, 19 nt, Artificial Sequence
  Description of Artificial Sequence: Synthetic oligonucleotide
cgaagaacccgcacuuuca

SEQ ID NO: 2370663 - RNA, 19 nt, Artificial Sequence
  Description of Artificial Sequence: Synthetic oligonucleotide
cucaggacgcgccgcagcu

SEQ ID NO: 2370664 - RNA, 19 nt, Artificial Sequence
  Description of Artificial Sequence: Synthetic oligonucleotide
cgccgucaggccuugcucc

SEQ ID NO: 2370665 - RNA, 19 nt, Artificial Sequence
  Description of Artificial Sequence: Synthetic oligonucleotide
ccacccggaagcgaagaac

SEQ ID NO: 2370666 - RNA, 19 nt, Artificial Sequence
  Description of Artificial Sequence: Synthetic oligonucleotide
ggccgcucaggacgcgccg

SEQ ID NO: 2370667 - RNA, 19 nt, Artificial Sequence
  Description of Artificial Sequence: Synthetic oligonucleotide
uuccaggagcagguuuauu

SEQ ID NO: 2370668 - RNA, 19 nt, Artificial Sequence
  Description of Artificial Sequence: Synthetic oligonucleotide
agccccgucccggccccgc

SEQ ID NO: 2370669 - RNA, 19 nt, Artificial Sequence
  Description of Artificial Sequence: Synthetic oligonucleotide
gaccugcgccgucaggccu

SEQ ID NO: 2370670 - RNA, 19 nt, Artificial Sequence
  Description of Artificial Sequence: Synthetic oligonucleotide
acgcccacccggaagcgaa

SEQ ID NO: 2370671 - RNA, 19 nt, Artificial Sequence
  Description of Artificial Sequence: Synthetic oligonucleotide
caucgacaggaacugcaau

SEQ ID NO: 2370672 - RNA, 19 nt, Artificial Sequence
  Description of Artificial Sequence: Synthetic oligonucleotide
ccaaaugagcuggauauau

SEQ ID NO: 2370673 - RNA, 19 nt, Artificial Sequence
  Description of Artificial Sequence: Synthetic oligonucleotide
ucaggacgcgccgcagcuu

SEQ ID NO: 2370674 - RNA, 19 nt, Artificial Sequence
  Description of Artificial Sequence: Synthetic oligonucleotide
cucaccccgcacgcccacc

SEQ ID NO: 2370675 - RNA, 19 nt, Artificial Sequence
  Description of Artificial Sequence: Synthetic oligonucleotide
cagcucgcucaccccgcac

SEQ ID NO: 2370676 - RNA, 19 nt, Artificial Sequence
  Description of Artificial Sequence: Synthetic oligonucleotide
cucgucguccuggccgcuc

SEQ ID NO: 2370677 - RNA, 19 nt, Artificial Sequence
  Description of Artificial Sequence: Synthetic oligonucleotide
acgcucuaucucgcgggaa

SEQ ID NO: 2370678 - RNA, 19 nt, Artificial Sequence
  Description of Artificial Sequence: Synthetic oligonucleotide
gcgccgucaggccuugcuc

SEQ ID NO: 2370679 - RNA, 19 nt, Artificial Sequence
  Description of Artificial Sequence: Synthetic oligonucleotide
gcaagcaaucuuguuguuu

SEQ ID NO: 2370680 - RNA, 19 nt, Artificial Sequence
  Description of Artificial Sequence: Synthetic oligonucleotide
cagugccgcaagguuucca

SEQ ID NO: 2370681 - RNA, 19 nt, Artificial Sequence
  Description of Artificial Sequence: Synthetic oligonucleotide
ccacuucaaucugguguug

SEQ ID NO: 2370682 - RNA, 19 nt, Artificial Sequence
  Description of Artificial Sequence: Synthetic oligonucleotide
guccaggaccugcgccguc

SEQ ID NO: 2370683 - RNA, 19 nt, Artificial Sequence
  Description of Artificial Sequence: Synthetic oligonucleotide
ggccuugcuccucgucguc

SEQ ID NO: 2370684 - RNA, 19 nt, Artificial Sequence
  Description of Artificial Sequence: Synthetic oligonucleotide
ccgccggccagcagcucgc

SEQ ID NO: 2370685 - RNA, 19 nt, Artificial Sequence
  Description of Artificial Sequence: Synthetic oligonucleotide
ccugagcagacgaaacuuu

SEQ ID NO: 2370686 - RNA, 19 nt, Artificial Sequence
  Description of Artificial Sequence: Synthetic oligonucleotide
aggacgcgccgcagcuucu

SEQ ID NO: 2370687 - RNA, 19 nt, Artificial Sequence
  Description of Artificial Sequence: Synthetic oligonucleotide
augaggcguccaggaccug

SEQ ID NO: 2370688 - RNA, 19 nt, Artificial Sequence
  Description of Artificial Sequence: Synthetic oligonucleotide
ccagugccgcaagguuucc

SEQ ID NO: 2370689 - RNA, 19 nt, Artificial Sequence
  Description of Artificial Sequence: Synthetic oligonucleotide
ggccagugccgcaagguuu

SEQ ID NO: 2370690 - RNA, 19 nt, Artificial Sequence
  Description of Artificial Sequence: Synthetic oligonucleotide
gccgucaggccuugcuccu

SEQ ID NO: 2370691 - RNA, 19 nt, Artificial Sequence
  Description of Artificial Sequence: Synthetic oligonucleotide
gcccacccggaagcgaaga

SEQ ID NO: 2370692 - RNA, 19 nt, Artificial Sequence
  Description of Artificial Sequence: Synthetic oligonucleotide
cggaagcgaagaacccgca

SEQ ID NO: 2370693 - RNA, 19 nt, Artificial Sequence
  Description of Artificial Sequence: Synthetic oligonucleotide
gcucuaucucgcgggaauu

SEQ ID NO: 2370694 - RNA, 19 nt, Artificial Sequence
  Description of Artificial Sequence: Synthetic oligonucleotide
cgaagcacaaaagcauaau

SEQ ID NO: 2370695 - RNA, 19 nt, Artificial Sequence
  Description of Artificial Sequence: Synthetic oligonucleotide
ccgcaagguuuccaagggu

SEQ ID NO: 2370696 - RNA, 19 nt, Artificial Sequence
  Description of Artificial Sequence: Synthetic oligonucleotide
ccgcucaggacgcgccgca

SEQ ID NO: 2370697 - RNA, 19 nt, Artificial Sequence
  Description of Artificial Sequence: Synthetic oligonucleotide
cgucguccuggccgcucag

SEQ ID NO: 2370698 - RNA, 19 nt, Artificial Sequence
  Description of Artificial Sequence: Synthetic oligonucleotide
cugcgccgucaggccuugc

SEQ ID NO: 2370699 - RNA, 19 nt, Artificial Sequence
  Description of Artificial Sequence: Synthetic oligonucleotide
cgcucuaucucgcgggaau

SEQ ID NO: 2370700 - RNA, 19 nt, Artificial Sequence
  Description of Artificial Sequence: Synthetic oligonucleotide
ccgucaggccuugcuccuc

SEQ ID NO: 2370701 - RNA, 19 nt, Artificial Sequence
  Description of Artificial Sequence: Synthetic oligonucleotide
cgcucaccccgcacgccca

SEQ ID NO: 2370702 - RNA, 19 nt, Artificial Sequence
  Description of Artificial Sequence: Synthetic oligonucleotide
cccgcacuuucacgcucua

SEQ ID NO: 2370703 - RNA, 19 nt, Artificial Sequence
  Description of Artificial Sequence: Synthetic oligonucleotide
ccgcacuuucacgcucuau

SEQ ID NO: 2370704 - RNA, 19 nt, Artificial Sequence
  Description of Artificial Sequence: Synthetic oligonucleotide
ccucgucguccuggccgcu

SEQ ID NO: 2370705 - RNA, 19 nt, Artificial Sequence
  Description of Artificial Sequence: Synthetic oligonucleotide
cgccgccggccagcagcuc

SEQ ID NO: 2370706 - RNA, 19 nt, Artificial Sequence
  Description of Artificial Sequence: Synthetic oligonucleotide
cgccggccagcagcucgcu

SEQ ID NO: 2370707 - RNA, 19 nt, Artificial Sequence
  Description of Artificial Sequence: Synthetic oligonucleotide
auaauuuacaaacaguucc

SEQ ID NO: 2370708 - RNA, 19 nt, Artificial Sequence
  Description of Artificial Sequence: Synthetic oligonucleotide
uauaaguugagucuaaggg

SEQ ID NO: 2370709 - RNA, 19 nt, Artificial Sequence
  Description of Artificial Sequence: Synthetic oligonucleotide
aauaacagauguuauuuac

SEQ ID NO: 2370710 - RNA, 19 nt, Artificial Sequence
  Description of Artificial Sequence: Synthetic oligonucleotide
cucacuuaaauacagaggg

SEQ ID NO: 2370711 - RNA, 19 nt, Artificial Sequence
  Description of Artificial Sequence: Synthetic oligonucleotide
aaaugauguaaacacgagg

SEQ ID NO: 2370712 - RNA, 19 nt, Artificial Sequence
  Description of Artificial Sequence: Synthetic oligonucleotide
uuauauaggagccagagua

SEQ ID NO: 2370713 - RNA, 19 nt, Artificial Sequence
  Description of Artificial Sequence: Synthetic oligonucleotide
uacagauugaaauaaaagu

SEQ ID NO: 2370714 - RNA, 19 nt, Artificial Sequence
  Description of Artificial Sequence: Synthetic oligonucleotide
ggagaaaugaauuacaggc

SEQ ID NO: 2370715 - RNA, 19 nt, Artificial Sequence
  Description of Artificial Sequence: Synthetic oligonucleotide
uuggcuauauuccucaggg

SEQ ID NO: 2370716 - RNA, 19 nt, Artificial Sequence
  Description of Artificial Sequence: Synthetic oligonucleotide
aaacuaacaucacaauuuc

SEQ ID NO: 2370717 - RNA, 19 nt, Artificial Sequence
  Description of Artificial Sequence: Synthetic oligonucleotide
aagugcuauaaguugaguc

SEQ ID NO: 2370718 - RNA, 19 nt, Artificial Sequence
  Description of Artificial Sequence: Synthetic oligonucleotide
uauaaagugcuauaaguug

SEQ ID NO: 2370719 - RNA, 19 nt, Artificial Sequence
  Description of Artificial Sequence: Synthetic oligonucleotide
uauacugagaacaccaaug

SEQ ID NO: 2370720 - RNA, 19 nt, Artificial Sequence
  Description of Artificial Sequence: Synthetic oligonucleotide
uaaguugagucuaagggag

SEQ ID NO: 2370721 - RNA, 19 nt, Artificial Sequence
  Description of Artificial Sequence: Synthetic oligonucleotide
uugaacauagaaaaugaug

SEQ ID NO: 2370722 - RNA, 19 nt, Artificial Sequence
  Description of Artificial Sequence: Synthetic oligonucleotide
aucacaauuucuuugaaca

SEQ ID NO: 2370723 - RNA, 19 nt, Artificial Sequence
  Description of Artificial Sequence: Synthetic oligonucleotide
augaauuacaggcaugcac

SEQ ID NO: 2370724 - RNA, 19 nt, Artificial Sequence
  Description of Artificial Sequence: Synthetic oligonucleotide
aacaucuauacugagaaca

SEQ ID NO: 2370725 - RNA, 19 nt, Artificial Sequence
  Description of Artificial Sequence: Synthetic oligonucleotide
uguucuuuccauuaagggc

SEQ ID NO: 2370726 - RNA, 19 nt, Artificial Sequence
  Description of Artificial Sequence: Synthetic oligonucleotide
uuuacacuauuccucaacc

SEQ ID NO: 2370727 - RNA, 19 nt, Artificial Sequence
  Description of Artificial Sequence: Synthetic oligonucleotide
uuuuaugggaacaggacac

SEQ ID NO: 2370728 - RNA, 19 nt, Artificial Sequence
  Description of Artificial Sequence: Synthetic oligonucleotide
ucucacuuaaauacagagg

SEQ ID NO: 2370729 - RNA, 19 nt, Artificial Sequence
  Description of Artificial Sequence: Synthetic oligonucleotide
acgaggaacaucuauacug

SEQ ID NO: 2370730 - RNA, 19 nt, Artificial Sequence
  Description of Artificial Sequence: Synthetic oligonucleotide
uuauuuacacuauuccuca

SEQ ID NO: 2370731 - RNA, 19 nt, Artificial Sequence
  Description of Artificial Sequence: Synthetic oligonucleotide
ugugaaugaaaucuugggu

SEQ ID NO: 2370732 - RNA, 19 nt, Artificial Sequence
  Description of Artificial Sequence: Synthetic oligonucleotide
ucaggaacaggcaaggugu

SEQ ID NO: 2370733 - RNA, 19 nt, Artificial Sequence
  Description of Artificial Sequence: Synthetic oligonucleotide
acagauugaaauaaaagug

SEQ ID NO: 2370734 - RNA, 19 nt, Artificial Sequence
  Description of Artificial Sequence: Synthetic oligonucleotide
agugcuauaaguugagucu

SEQ ID NO: 2370735 - RNA, 19 nt, Artificial Sequence
  Description of Artificial Sequence: Synthetic oligonucleotide
ugaaugaaaucuugggugc

SEQ ID NO: 2370736 - RNA, 19 nt, Artificial Sequence
  Description of Artificial Sequence: Synthetic oligonucleotide
uaauuuacaaacaguuccu

SEQ ID NO: 2370737 - RNA, 19 nt, Artificial Sequence
  Description of Artificial Sequence: Synthetic oligonucleotide
aucugaugcgcuuguaugc

SEQ ID NO: 2370738 - RNA, 19 nt, Artificial Sequence
  Description of Artificial Sequence: Synthetic oligonucleotide
auaaguugagucuaaggga

SEQ ID NO: 2370739 - RNA, 19 nt, Artificial Sequence
  Description of Artificial Sequence: Synthetic oligonucleotide
agaguagaagcucugcauc

SEQ ID NO: 2370740 - RNA, 19 nt, Artificial Sequence
  Description of Artificial Sequence: Synthetic oligonucleotide
cuauaaguugagucuaagg

SEQ ID NO: 2370741 - RNA, 19 nt, Artificial Sequence
  Description of Artificial Sequence: Synthetic oligonucleotide
agcauguggaccuuagggg

SEQ ID NO: 2370742 - RNA, 19 nt, Artificial Sequence
  Description of Artificial Sequence: Synthetic oligonucleotide
uccugaugccccaacaagg

SEQ ID NO: 2370743 - RNA, 19 nt, Artificial Sequence
  Description of Artificial Sequence: Synthetic oligonucleotide
agucuaagggaguuuuagc

SEQ ID NO: 2370744 - RNA, 19 nt, Artificial Sequence
  Description of Artificial Sequence: Synthetic oligonucleotide
gaaaaugauguaaacacga

SEQ ID NO: 2370745 - RNA, 19 nt, Artificial Sequence
  Description of Artificial Sequence: Synthetic oligonucleotide
gucuaagggaguuuuagcc

SEQ ID NO: 2370746 - RNA, 19 nt, Artificial Sequence
  Description of Artificial Sequence: Synthetic oligonucleotide
aggagaaaugaauuacagg

SEQ ID NO: 2370747 - RNA, 19 nt, Artificial Sequence
  Description of Artificial Sequence: Synthetic oligonucleotide
augcacuuuuggcagaagc

SEQ ID NO: 2370748 - RNA, 19 nt, Artificial Sequence
  Description of Artificial Sequence: Synthetic oligonucleotide
gucucacuuaaauacagag

SEQ ID NO: 2370749 - RNA, 19 nt, Artificial Sequence
  Description of Artificial Sequence: Synthetic oligonucleotide
uguauauaaagugcuauaa

SEQ ID NO: 2370750 - RNA, 19 nt, Artificial Sequence
  Description of Artificial Sequence: Synthetic oligonucleotide
acacgaggaacaucuauac

SEQ ID NO: 2370751 - RNA, 19 nt, Artificial Sequence
  Description of Artificial Sequence: Synthetic oligonucleotide
uacacugaccauaauuuac

SEQ ID NO: 2370752 - RNA, 19 nt, Artificial Sequence
  Description of Artificial Sequence: Synthetic oligonucleotide
guugagauccuucaucuug

SEQ ID NO: 2370753 - RNA, 19 nt, Artificial Sequence
  Description of Artificial Sequence: Synthetic oligonucleotide
guaucccugauguugacag

SEQ ID NO: 2370754 - RNA, 19 nt, Artificial Sequence
  Description of Artificial Sequence: Synthetic oligonucleotide
agaaaugaauuacaggcau

SEQ ID NO: 2370755 - RNA, 19 nt, Artificial Sequence
  Description of Artificial Sequence: Synthetic oligonucleotide
cuauuccucaaccagguac

SEQ ID NO: 2370756 - RNA, 19 nt, Artificial Sequence
  Description of Artificial Sequence: Synthetic oligonucleotide
aaaaugauguaaacacgag

SEQ ID NO: 2370757 - RNA, 19 nt, Artificial Sequence
  Description of Artificial Sequence: Synthetic oligonucleotide
ucuaagggaguuuuagcca

SEQ ID NO: 2370758 - RNA, 19 nt, Artificial Sequence
  Description of Artificial Sequence: Synthetic oligonucleotide
acacacuccacaaagggac

SEQ ID NO: 2370759 - RNA, 19 nt, Artificial Sequence
  Description of Artificial Sequence: Synthetic oligonucleotide
uaucugaugcgcuuguaug

SEQ ID NO: 2370760 - RNA, 19 nt, Artificial Sequence
  Description of Artificial Sequence: Synthetic oligonucleotide
uccacaauaacagauguua

SEQ ID NO: 2370761 - RNA, 19 nt, Artificial Sequence
  Description of Artificial Sequence: Synthetic oligonucleotide
agaaaaugauguaaacacg

SEQ ID NO: 2370762 - RNA, 19 nt, Artificial Sequence
  Description of Artificial Sequence: Synthetic oligonucleotide
acagcuuugucucauucug

SEQ ID NO: 2370763 - RNA, 19 nt, Artificial Sequence
  Description of Artificial Sequence: Synthetic oligonucleotide
uccucaaccagguaccacc

SEQ ID NO: 2370764 - RNA, 19 nt, Artificial Sequence
  Description of Artificial Sequence: Synthetic oligonucleotide
cuuguaugcacuuuuggca

SEQ ID NO: 2370765 - RNA, 19 nt, Artificial Sequence
  Description of Artificial Sequence: Synthetic oligonucleotide
ugcacuuuuggcagaagca

SEQ ID NO: 2370766 - RNA, 19 nt, Artificial Sequence
  Description of Artificial Sequence: Synthetic oligonucleotide
aacagauguuauuuacacu

SEQ ID NO: 2370767 - RNA, 19 nt, Artificial Sequence
  Description of Artificial Sequence: Synthetic oligonucleotide
ugauguaaacacgaggaac

SEQ ID NO: 2370768 - RNA, 19 nt, Artificial Sequence
  Description of Artificial Sequence: Synthetic oligonucleotide
aucccugauguugacagcc

SEQ ID NO: 2370769 - RNA, 19 nt, Artificial Sequence
  Description of Artificial Sequence: Synthetic oligonucleotide
ugaccauaauuuacaaaca

SEQ ID NO: 2370770 - RNA, 19 nt, Artificial Sequence
  Description of Artificial Sequence: Synthetic oligonucleotide
uuugaacauagaaaaugau

SEQ ID NO: 2370771 - RNA, 19 nt, Artificial Sequence
  Description of Artificial Sequence: Synthetic oligonucleotide
caaggccugaccaucagag

SEQ ID NO: 2370772 - RNA, 19 nt, Artificial Sequence
  Description of Artificial Sequence: Synthetic oligonucleotide
aaggccugaccaucagagc

SEQ ID NO: 2370773 - RNA, 19 nt, Artificial Sequence
  Description of Artificial Sequence: Synthetic oligonucleotide
ugguugagauccuucaucu

SEQ ID NO: 2370774 - RNA, 19 nt, Artificial Sequence
  Description of Artificial Sequence: Synthetic oligonucleotide
uugagauccuucaucuuga

SEQ ID NO: 2370775 - RNA, 19 nt, Artificial Sequence
  Description of Artificial Sequence: Synthetic oligonucleotide
gaguagaagcucugcaucc

SEQ ID NO: 2370776 - RNA, 19 nt, Artificial Sequence
  Description of Artificial Sequence: Synthetic oligonucleotide
cuaagggaguuuuagccac

SEQ ID NO: 2370777 - RNA, 19 nt, Artificial Sequence
  Description of Artificial Sequence: Synthetic oligonucleotide
ucacuuaaauacagagggc

SEQ ID NO: 2370778 - RNA, 19 nt, Artificial Sequence
  Description of Artificial Sequence: Synthetic oligonucleotide
aaacacgaggaacaucuau

SEQ ID NO: 2370779 - RNA, 19 nt, Artificial Sequence
  Description of Artificial Sequence: Synthetic oligonucleotide
aaauacagagggcaugcua

SEQ ID NO: 2370780 - RNA, 19 nt, Artificial Sequence
  Description of Artificial Sequence: Synthetic oligonucleotide
ugaugccccaacaaggccu

SEQ ID NO: 2370781 - RNA, 19 nt, Artificial Sequence
  Description of Artificial Sequence: Synthetic oligonucleotide
uuaggugcccacuccaggc

SEQ ID NO: 2370782 - RNA, 19 nt, Artificial Sequence
  Description of Artificial Sequence: Synthetic oligonucleotide
cuuaggggcaguagcagag

SEQ ID NO: 2370783 - RNA, 19 nt, Artificial Sequence
  Description of Artificial Sequence: Synthetic oligonucleotide
uuagccacuccacaauaac

SEQ ID NO: 2370784 - RNA, 19 nt, Artificial Sequence
  Description of Artificial Sequence: Synthetic oligonucleotide
auaaagugcuauaaguuga

SEQ ID NO: 2370785 - RNA, 19 nt, Artificial Sequence
  Description of Artificial Sequence: Synthetic oligonucleotide
ugcuacacugaccauaauu

SEQ ID NO: 2370786 - RNA, 19 nt, Artificial Sequence
  Description of Artificial Sequence: Synthetic oligonucleotide
ccuugguuuauauaggagc

SEQ ID NO: 2370787 - RNA, 19 nt, Artificial Sequence
  Description of Artificial Sequence: Synthetic oligonucleotide
aagguguccacucggguau

SEQ ID NO: 2370788 - RNA, 19 nt, Artificial Sequence
  Description of Artificial Sequence: Synthetic oligonucleotide
uuccauuaagggcugcucu

SEQ ID NO: 2370789 - RNA, 19 nt, Artificial Sequence
  Description of Artificial Sequence: Synthetic oligonucleotide
acaucuauacugagaacac

SEQ ID NO: 2370790 - RNA, 19 nt, Artificial Sequence
  Description of Artificial Sequence: Synthetic oligonucleotide
uacugagaacaccaauggc

SEQ ID NO: 2370791 - RNA, 19 nt, Artificial Sequence
  Description of Artificial Sequence: Synthetic oligonucleotide
ucucauucugugauccuga

SEQ ID NO: 2370792 - RNA, 19 nt, Artificial Sequence
  Description of Artificial Sequence: Synthetic oligonucleotide
uuacacuauuccucaacca

SEQ ID NO: 2370793 - RNA, 19 nt, Artificial Sequence
  Description of Artificial Sequence: Synthetic oligonucleotide
acuccacaauaacagaugu

SEQ ID NO: 2370794 - RNA, 19 nt, Artificial Sequence
  Description of Artificial Sequence: Synthetic oligonucleotide
gagucuaagggaguuuuag

SEQ ID NO: 2370795 - RNA, 19 nt, Artificial Sequence
  Description of Artificial Sequence: Synthetic oligonucleotide
ucggguaucccugauguug

SEQ ID NO: 2370796 - RNA, 19 nt, Artificial Sequence
  Description of Artificial Sequence: Synthetic oligonucleotide
aucuauacugagaacacca

SEQ ID NO: 2370797 - RNA, 19 nt, Artificial Sequence
  Description of Artificial Sequence: Synthetic oligonucleotide
cacuuuuggcagaagcagg

SEQ ID NO: 2370798 - RNA, 19 nt, Artificial Sequence
  Description of Artificial Sequence: Synthetic oligonucleotide
auuaagggcugcucucagg

SEQ ID NO: 2370799 - RNA, 19 nt, Artificial Sequence
  Description of Artificial Sequence: Synthetic oligonucleotide
guaaacacgaggaacaucu

SEQ ID NO: 2370800 - RNA, 19 nt, Artificial Sequence
  Description of Artificial Sequence: Synthetic oligonucleotide
uugucucauucugugaucc

SEQ ID NO: 2370801 - RNA, 19 nt, Artificial Sequence
  Description of Artificial Sequence: Synthetic oligonucleotide
auauaaagugcuauaaguu

SEQ ID NO: 2370802 - RNA, 19 nt, Artificial Sequence
  Description of Artificial Sequence: Synthetic oligonucleotide
cauggaaaagacagcuuug

SEQ ID NO: 2370803 - RNA, 19 nt, Artificial Sequence
  Description of Artificial Sequence: Synthetic oligonucleotide
cagucucacuuaaauacag

SEQ ID NO: 2370804 - RNA, 19 nt, Artificial Sequence
  Description of Artificial Sequence: Synthetic oligonucleotide
uaugggaacaggacacacu

SEQ ID NO: 2370805 - RNA, 19 nt, Artificial Sequence
  Description of Artificial Sequence: Synthetic oligonucleotide
ucuauacugagaacaccaa

SEQ ID NO: 2370806 - RNA, 19 nt, Artificial Sequence
  Description of Artificial Sequence: Synthetic oligonucleotide
aaagggacagucucacuua

SEQ ID NO: 2370807 - RNA, 19 nt, Artificial Sequence
  Description of Artificial Sequence: Synthetic oligonucleotide
auccugaugccccaacaag

SEQ ID NO: 2370808 - RNA, 19 nt, Artificial Sequence
  Description of Artificial Sequence: Synthetic oligonucleotide
acacugagggccuaaggcu

SEQ ID NO: 2370809 - RNA, 19 nt, Artificial Sequence
  Description of Artificial Sequence: Synthetic oligonucleotide
auaggagccagaguagaag

SEQ ID NO: 2370810 - RNA, 19 nt, Artificial Sequence
  Description of Artificial Sequence: Synthetic oligonucleotide
acacuauuccucaaccagg

SEQ ID NO: 2370811 - RNA, 19 nt, Artificial Sequence
  Description of Artificial Sequence: Synthetic oligonucleotide
ugccuugguuuauauagga

SEQ ID NO: 2370812 - RNA, 19 nt, Artificial Sequence
  Description of Artificial Sequence: Synthetic oligonucleotide
ugaucaugucgcccugggg

SEQ ID NO: 2370813 - RNA, 19 nt, Artificial Sequence
  Description of Artificial Sequence: Synthetic oligonucleotide
caucuugacuguucuuucc

SEQ ID NO: 2370814 - RNA, 19 nt, Artificial Sequence
  Description of Artificial Sequence: Synthetic oligonucleotide
gcuuguaugcacuuuuggc

SEQ ID NO: 2370815 - RNA, 19 nt, Artificial Sequence
  Description of Artificial Sequence: Synthetic oligonucleotide
uauaggagccagaguagaa

SEQ ID NO: 2370816 - RNA, 19 nt, Artificial Sequence
  Description of Artificial Sequence: Synthetic oligonucleotide
aaugaauuacaggcaugca

SEQ ID NO: 2370817 - RNA, 19 nt, Artificial Sequence
  Description of Artificial Sequence: Synthetic oligonucleotide
ucacaauuucuuugaacau

SEQ ID NO: 2370818 - RNA, 19 nt, Artificial Sequence
  Description of Artificial Sequence: Synthetic oligonucleotide
accauaauuuacaaacagu

SEQ ID NO: 2370819 - RNA, 19 nt, Artificial Sequence
  Description of Artificial Sequence: Synthetic oligonucleotide
uggcuauauuccucagggg

SEQ ID NO: 2370820 - RNA, 19 nt, Artificial Sequence
  Description of Artificial Sequence: Synthetic oligonucleotide
agggaguuuuagccacucc

SEQ ID NO: 2370821 - RNA, 19 nt, Artificial Sequence
  Description of Artificial Sequence: Synthetic oligonucleotide
uguugacagccuuccuggg

SEQ ID NO: 2370822 - RNA, 19 nt, Artificial Sequence
  Description of Artificial Sequence: Synthetic oligonucleotide
cuccaggcugagaagagac

SEQ ID NO: 2370823 - RNA, 19 nt, Artificial Sequence
  Description of Artificial Sequence: Synthetic oligonucleotide
ucugaugcgcuuguaugca

SEQ ID NO: 2370824 - RNA, 19 nt, Artificial Sequence
  Description of Artificial Sequence: Synthetic oligonucleotide
uccauuaagggcugcucuc

SEQ ID NO: 2370825 - RNA, 19 nt, Artificial Sequence
  Description of Artificial Sequence: Synthetic oligonucleotide
uuuaugggaacaggacaca

SEQ ID NO: 2370826 - RNA, 19 nt, Artificial Sequence
  Description of Artificial Sequence: Synthetic oligonucleotide
gaguuuuagccacuccaca

SEQ ID NO: 2370827 - RNA, 19 nt, Artificial Sequence
  Description of Artificial Sequence: Synthetic oligonucleotide
uauuccucaggggucugag

SEQ ID NO: 2370828 - RNA, 19 nt, Artificial Sequence
  Description of Artificial Sequence: Synthetic oligonucleotide
acugaccauaauuuacaaa

SEQ ID NO: 2370829 - RNA, 19 nt, Artificial Sequence
  Description of Artificial Sequence: Synthetic oligonucleotide
caucuauacugagaacacc

SEQ ID NO: 2370830 - RNA, 19 nt, Artificial Sequence
  Description of Artificial Sequence: Synthetic oligonucleotide
aaagugcuauaaguugagu

SEQ ID NO: 2370831 - RNA, 19 nt, Artificial Sequence
  Description of Artificial Sequence: Synthetic oligonucleotide
aacuaacaucacaauuucu

SEQ ID NO: 2370832 - RNA, 19 nt, Artificial Sequence
  Description of Artificial Sequence: Synthetic oligonucleotide
uucuuuccauuaagggcug

SEQ ID NO: 2370833 - RNA, 19 nt, Artificial Sequence
  Description of Artificial Sequence: Synthetic oligonucleotide
uuaugggaacaggacacac

SEQ ID NO: 2370834 - RNA, 19 nt, Artificial Sequence
  Description of Artificial Sequence: Synthetic oligonucleotide
cauuaggugcccacuccag

SEQ ID NO: 2370835 - RNA, 19 nt, Artificial Sequence
  Description of Artificial Sequence: Synthetic oligonucleotide
aagggacagucucacuuaa

SEQ ID NO: 2370836 - RNA, 19 nt, Artificial Sequence
  Description of Artificial Sequence: Synthetic oligonucleotide
gaacaucuauacugagaac

SEQ ID NO: 2370837 - RNA, 19 nt, Artificial Sequence
  Description of Artificial Sequence: Synthetic oligonucleotide
uguaugcacuuuuggcaga

SEQ ID NO: 2370838 - RNA, 19 nt, Artificial Sequence
  Description of Artificial Sequence: Synthetic oligonucleotide
gcauguggaccuuaggggc

SEQ ID NO: 2370839 - RNA, 19 nt, Artificial Sequence
  Description of Artificial Sequence: Synthetic oligonucleotide
agauguuauuuacacuauu

SEQ ID NO: 2370840 - RNA, 19 nt, Artificial Sequence
  Description of Artificial Sequence: Synthetic oligonucleotide
aggcaagguguccacucgg

SEQ ID NO: 2370841 - RNA, 19 nt, Artificial Sequence
  Description of Artificial Sequence: Synthetic oligonucleotide
uugguuuauauaggagcca

SEQ ID NO: 2370842 - RNA, 19 nt, Artificial Sequence
  Description of Artificial Sequence: Synthetic oligonucleotide
aauggcuaucugaugcgcu

SEQ ID NO: 2370843 - RNA, 19 nt, Artificial Sequence
  Description of Artificial Sequence: Synthetic oligonucleotide
ucugaucucuucugggcau

SEQ ID NO: 2370844 - RNA, 19 nt, Artificial Sequence
  Description of Artificial Sequence: Synthetic oligonucleotide
ugcuauaaguugagucuaa

SEQ ID NO: 2370845 - RNA, 19 nt, Artificial Sequence
  Description of Artificial Sequence: Synthetic oligonucleotide
uugagucuaagggaguuuu

SEQ ID NO: 2370846 - RNA, 19 nt, Artificial Sequence
  Description of Artificial Sequence: Synthetic oligonucleotide
agaacaccaauggcuaucu

SEQ ID NO: 2370847 - RNA, 19 nt, Artificial Sequence
  Description of Artificial Sequence: Synthetic oligonucleotide
cucagcauguggaccuuag

SEQ ID NO: 2370848 - RNA, 19 nt, Artificial Sequence
  Description of Artificial Sequence: Synthetic oligonucleotide
auacagagggcaugcuaca

SEQ ID NO: 2370849 - RNA, 19 nt, Artificial Sequence
  Description of Artificial Sequence: Synthetic oligonucleotide
uguaaacacgaggaacauc

SEQ ID NO: 2370850 - RNA, 19 nt, Artificial Sequence
  Description of Artificial Sequence: Synthetic oligonucleotide
ucuugacuguucuuuccau

SEQ ID NO: 2370851 - RNA, 19 nt, Artificial Sequence
  Description of Artificial Sequence: Synthetic oligonucleotide
gauccugaugccccaacaa

SEQ ID NO: 2370852 - RNA, 19 nt, Artificial Sequence
  Description of Artificial Sequence: Synthetic oligonucleotide
caaccagguaccaccuggc

SEQ ID NO: 2370853 - RNA, 19 nt, Artificial Sequence
  Description of Artificial Sequence: Synthetic oligonucleotide
gaaaucuugggugcaugga

SEQ ID NO: 2370854 - RNA, 19 nt, Artificial Sequence
  Description of Artificial Sequence: Synthetic oligonucleotide
uguccacucggguaucccu

SEQ ID NO: 2370855 - RNA, 19 nt, Artificial Sequence
  Description of Artificial Sequence: Synthetic oligonucleotide
cauuaagggcugcucucag

SEQ ID NO: 2370856 - RNA, 19 nt, Artificial Sequence
  Description of Artificial Sequence: Synthetic oligonucleotide
gucucauucugugauccug

SEQ ID NO: 2370857 - RNA, 19 nt, Artificial Sequence
  Description of Artificial Sequence: Synthetic oligonucleotide
gagaacaccaauggcuauc

SEQ ID NO: 2370858 - RNA, 19 nt, Artificial Sequence
  Description of Artificial Sequence: Synthetic oligonucleotide
ugggugcauggaaaagaca

SEQ ID NO: 2370859 - RNA, 19 nt, Artificial Sequence
  Description of Artificial Sequence: Synthetic oligonucleotide
uaagggaguuuuagccacu

SEQ ID NO: 2370860 - RNA, 19 nt, Artificial Sequence
  Description of Artificial Sequence: Synthetic oligonucleotide
gcugcucucaggaacaggc

SEQ ID NO: 2370861 - RNA, 19 nt, Artificial Sequence
  Description of Artificial Sequence: Synthetic oligonucleotide
cugagaacaccaauggcua

SEQ ID NO: 2370862 - RNA, 19 nt, Artificial Sequence
  Description of Artificial Sequence: Synthetic oligonucleotide
ggaccuuaggggcaguagc

SEQ ID NO: 2370863 - RNA, 19 nt, Artificial Sequence
  Description of Artificial Sequence: Synthetic oligonucleotide
acagucucacuuaaauaca

SEQ ID NO: 2370864 - RNA, 19 nt, Artificial Sequence
  Description of Artificial Sequence: Synthetic oligonucleotide
gggcaugcuacacugacca

SEQ ID NO: 2370865 - RNA, 19 nt, Artificial Sequence
  Description of Artificial Sequence: Synthetic oligonucleotide
aggaacaucuauacugaga

SEQ ID NO: 2370866 - RNA, 19 nt, Artificial Sequence
  Description of Artificial Sequence: Synthetic oligonucleotide
caggcaagguguccacucg

SEQ ID NO: 2370867 - RNA, 19 nt, Artificial Sequence
  Description of Artificial Sequence: Synthetic oligonucleotide
cugaugccccaacaaggcc

SEQ ID NO: 2370868 - RNA, 19 nt, Artificial Sequence
  Description of Artificial Sequence: Synthetic oligonucleotide
gaccaucagagcugccuug

SEQ ID NO: 2370869 - RNA, 19 nt, Artificial Sequence
  Description of Artificial Sequence: Synthetic oligonucleotide
uaucccugauguugacagc

SEQ ID NO: 2370870 - RNA, 19 nt, Artificial Sequence
  Description of Artificial Sequence: Synthetic oligonucleotide
agggcaugcuacacugacc

SEQ ID NO: 2370871 - RNA, 19 nt, Artificial Sequence
  Description of Artificial Sequence: Synthetic oligonucleotide
ugcauccacagggagggcu

SEQ ID NO: 2370872 - RNA, 19 nt, Artificial Sequence
  Description of Artificial Sequence: Synthetic oligonucleotide
ugcauggaaaagacagcuu

SEQ ID NO: 2370873 - RNA, 19 nt, Artificial Sequence
  Description of Artificial Sequence: Synthetic oligonucleotide
ugagauccuucaucuugac

SEQ ID NO: 2370874 - RNA, 19 nt, Artificial Sequence
  Description of Artificial Sequence: Synthetic oligonucleotide
gaaugaaaucuugggugca

SEQ ID NO: 2370875 - RNA, 19 nt, Artificial Sequence
  Description of Artificial Sequence: Synthetic oligonucleotide
cugaggugugaaugaaauc

SEQ ID NO: 2370876 - RNA, 19 nt, Artificial Sequence
  Description of Artificial Sequence: Synthetic oligonucleotide
uaaauacagagggcaugcu

SEQ ID NO: 2370877 - RNA, 19 nt, Artificial Sequence
  Description of Artificial Sequence: Synthetic oligonucleotide
aguagaagcucugcaucca

SEQ ID NO: 2370878 - RNA, 19 nt, Artificial Sequence
  Description of Artificial Sequence: Synthetic oligonucleotide
ugagaacaccaauggcuau

SEQ ID NO: 2370879 - RNA, 19 nt, Artificial Sequence
  Description of Artificial Sequence: Synthetic oligonucleotide
ccugaugccccaacaaggc

SEQ ID NO: 2370880 - RNA, 19 nt, Artificial Sequence
  Description of Artificial Sequence: Synthetic oligonucleotide
ggcuauauuccucaggggu

SEQ ID NO: 2370881 - RNA, 19 nt, Artificial Sequence
  Description of Artificial Sequence: Synthetic oligonucleotide
caauaacagauguuauuua

SEQ ID NO: 2370882 - RNA, 19 nt, Artificial Sequence
  Description of Artificial Sequence: Synthetic oligonucleotide
aggugugaaugaaaucuug

SEQ ID NO: 2370883 - RNA, 19 nt, Artificial Sequence
  Description of Artificial Sequence: Synthetic oligonucleotide
gaacaggcaagguguccac

SEQ ID NO: 2370884 - RNA, 19 nt, Artificial Sequence
  Description of Artificial Sequence: Synthetic oligonucleotide
gaugccccaacaaggccug

SEQ ID NO: 2370885 - RNA, 19 nt, Artificial Sequence
  Description of Artificial Sequence: Synthetic oligonucleotide
ugagucuaagggaguuuua

SEQ ID NO: 2370886 - RNA, 19 nt, Artificial Sequence
  Description of Artificial Sequence: Synthetic oligonucleotide
gcaguagcagagaugauca

SEQ ID NO: 2370887 - RNA, 19 nt, Artificial Sequence
  Description of Artificial Sequence: Synthetic oligonucleotide
auggcuaucugaugcgcuu

SEQ ID NO: 2370888 - RNA, 19 nt, Artificial Sequence
  Description of Artificial Sequence: Synthetic oligonucleotide
ugucucauucugugauccu

SEQ ID NO: 2370889 - RNA, 19 nt, Artificial Sequence
  Description of Artificial Sequence: Synthetic oligonucleotide
gacagcuuugucucauucu

SEQ ID NO: 2370890 - RNA, 19 nt, Artificial Sequence
  Description of Artificial Sequence: Synthetic oligonucleotide
gaccuuaggggcaguagca

SEQ ID NO: 2370891 - RNA, 19 nt, Artificial Sequence
  Description of Artificial Sequence: Synthetic oligonucleotide
aaguugagucuaagggagu

SEQ ID NO: 2370892 - RNA, 19 nt, Artificial Sequence
  Description of Artificial Sequence: Synthetic oligonucleotide
accuuaggggcaguagcag

SEQ ID NO: 2370893 - RNA, 19 nt, Artificial Sequence
  Description of Artificial Sequence: Synthetic oligonucleotide
uacagagggcaugcuacac

SEQ ID NO: 2370894 - RNA, 19 nt, Artificial Sequence
  Description of Artificial Sequence: Synthetic oligonucleotide
uccacucggguaucccuga

SEQ ID NO: 2370895 - RNA, 19 nt, Artificial Sequence
  Description of Artificial Sequence: Synthetic oligonucleotide
aguugagucuaagggaguu

SEQ ID NO: 2370896 - RNA, 19 nt, Artificial Sequence
  Description of Artificial Sequence: Synthetic oligonucleotide
ucccugauguugacagccu

SEQ ID NO: 2370897 - RNA, 19 nt, Artificial Sequence
  Description of Artificial Sequence: Synthetic oligonucleotide
cacaauuucuuugaacaua

SEQ ID NO: 2370898 - RNA, 19 nt, Artificial Sequence
  Description of Artificial Sequence: Synthetic oligonucleotide
ccauaauuuacaaacaguu

SEQ ID NO: 2370899 - RNA, 19 nt, Artificial Sequence
  Description of Artificial Sequence: Synthetic oligonucleotide
cauguggaccuuaggggca

SEQ ID NO: 2370900 - RNA, 19 nt, Artificial Sequence
  Description of Artificial Sequence: Synthetic oligonucleotide
ggaguuuuagccacuccac

SEQ ID NO: 2370901 - RNA, 19 nt, Artificial Sequence
  Description of Artificial Sequence: Synthetic oligonucleotide
ggcauuaggugcccacucc

SEQ ID NO: 2370902 - RNA, 19 nt, Artificial Sequence
  Description of Artificial Sequence: Synthetic oligonucleotide
uggcuaucugaugcgcuug

SEQ ID NO: 2370903 - RNA, 19 nt, Artificial Sequence
  Description of Artificial Sequence: Synthetic oligonucleotide
uaugcacuuuuggcagaag

SEQ ID NO: 2370904 - RNA, 19 nt, Artificial Sequence
  Description of Artificial Sequence: Synthetic oligonucleotide
cuacacugaccauaauuua

SEQ ID NO: 2370905 - RNA, 19 nt, Artificial Sequence
  Description of Artificial Sequence: Synthetic oligonucleotide
gcuauaaguugagucuaag

SEQ ID NO: 2370906 - RNA, 19 nt, Artificial Sequence
  Description of Artificial Sequence: Synthetic oligonucleotide
cugggcauuaggugcccac

SEQ ID NO: 2370907 - RNA, 19 nt, Artificial Sequence
  Description of Artificial Sequence: Synthetic oligonucleotide
gagacacugagggccuaag

SEQ ID NO: 2370908 - RNA, 19 nt, Artificial Sequence
  Description of Artificial Sequence: Synthetic oligonucleotide
agucucacuuaaauacaga

SEQ ID NO: 2370909 - RNA, 19 nt, Artificial Sequence
  Description of Artificial Sequence: Synthetic oligonucleotide
cugaugcgcuuguaugcac

SEQ ID NO: 2370910 - RNA, 19 nt, Artificial Sequence
  Description of Artificial Sequence: Synthetic oligonucleotide
gaacaccaauggcuaucug

SEQ ID NO: 2370911 - RNA, 19 nt, Artificial Sequence
  Description of Artificial Sequence: Synthetic oligonucleotide
caaagggacagucucacuu

SEQ ID NO: 2370912 - RNA, 19 nt, Artificial Sequence
  Description of Artificial Sequence: Synthetic oligonucleotide
gugcauggaaaagacagcu

SEQ ID NO: 2370913 - RNA, 19 nt, Artificial Sequence
  Description of Artificial Sequence: Synthetic oligonucleotide
ugggcauuaggugcccacu

SEQ ID NO: 2370914 - RNA, 19 nt, Artificial Sequence
  Description of Artificial Sequence: Synthetic oligonucleotide
caccaauggcuaucugaug

SEQ ID NO: 2370915 - RNA, 19 nt, Artificial Sequence
  Description of Artificial Sequence: Synthetic oligonucleotide
cacuauuccucaaccaggu

SEQ ID NO: 2370916 - RNA, 19 nt, Artificial Sequence
  Description of Artificial Sequence: Synthetic oligonucleotide
auguggaccuuaggggcag

SEQ ID NO: 2370917 - RNA, 19 nt, Artificial Sequence
  Description of Artificial Sequence: Synthetic oligonucleotide
gcuauauuccucagggguc

SEQ ID NO: 2370918 - RNA, 19 nt, Artificial Sequence
  Description of Artificial Sequence: Synthetic oligonucleotide
uggcccuauucugaucucu

SEQ ID NO: 2370919 - RNA, 19 nt, Artificial Sequence
  Description of Artificial Sequence: Synthetic oligonucleotide
ggaacaggcaaggugucca

SEQ ID NO: 2370920 - RNA, 19 nt, Artificial Sequence
  Description of Artificial Sequence: Synthetic oligonucleotide
accuggcccuauucugauc

SEQ ID NO: 2370921 - RNA, 19 nt, Artificial Sequence
  Description of Artificial Sequence: Synthetic oligonucleotide
caauuucuuugaacauaga

SEQ ID NO: 2370922 - RNA, 19 nt, Artificial Sequence
  Description of Artificial Sequence: Synthetic oligonucleotide
cacucggguaucccugaug

SEQ ID NO: 2370923 - RNA, 19 nt, Artificial Sequence
  Description of Artificial Sequence: Synthetic oligonucleotide
acuauuccucaaccaggua

SEQ ID NO: 2370924 - RNA, 19 nt, Artificial Sequence
  Description of Artificial Sequence: Synthetic oligonucleotide
ggcaagguguccacucggg

SEQ ID NO: 2370925 - RNA, 19 nt, Artificial Sequence
  Description of Artificial Sequence: Synthetic oligonucleotide
guaccaccuggcccuauuc

SEQ ID NO: 2370926 - RNA, 19 nt, Artificial Sequence
  Description of Artificial Sequence: Synthetic oligonucleotide
guccacucggguaucccug

SEQ ID NO: 2370927 - RNA, 19 nt, Artificial Sequence
  Description of Artificial Sequence: Synthetic oligonucleotide
cagaguagaagcucugcau

SEQ ID NO: 2370928 - RNA, 19 nt, Artificial Sequence
  Description of Artificial Sequence: Synthetic oligonucleotide
gcauggaaaagacagcuuu

SEQ ID NO: 2370929 - RNA, 19 nt, Artificial Sequence
  Description of Artificial Sequence: Synthetic oligonucleotide
gcauuaggugcccacucca

SEQ ID NO: 2370930 - RNA, 19 nt, Artificial Sequence
  Description of Artificial Sequence: Synthetic oligonucleotide
auuccucaaccagguacca

SEQ ID NO: 2370931 - RNA, 19 nt, Artificial Sequence
  Description of Artificial Sequence: Synthetic oligonucleotide
cucaaccagguaccaccug

SEQ ID NO: 2370932 - RNA, 19 nt, Artificial Sequence
  Description of Artificial Sequence: Synthetic oligonucleotide
cuauauuccucaggggucu

SEQ ID NO: 2370933 - RNA, 19 nt, Artificial Sequence
  Description of Artificial Sequence: Synthetic oligonucleotide
gggucugaggugugaauga

SEQ ID NO: 2370934 - RNA, 19 nt, Artificial Sequence
  Description of Artificial Sequence: Synthetic oligonucleotide
ggacagucucacuuaaaua

SEQ ID NO: 2370935 - RNA, 19 nt, Artificial Sequence
  Description of Artificial Sequence: Synthetic oligonucleotide
gcuacacugaccauaauuu

SEQ ID NO: 2370936 - RNA, 19 nt, Artificial Sequence
  Description of Artificial Sequence: Synthetic oligonucleotide
cuaucugaugcgcuuguau

SEQ ID NO: 2370937 - RNA, 19 nt, Artificial Sequence
  Description of Artificial Sequence: Synthetic oligonucleotide
cacacuccacaaagggaca

SEQ ID NO: 2370938 - RNA, 19 nt, Artificial Sequence
  Description of Artificial Sequence: Synthetic oligonucleotide
auauuccucaggggucuga

SEQ ID NO: 2370939 - RNA, 19 nt, Artificial Sequence
  Description of Artificial Sequence: Synthetic oligonucleotide
gggacagucucacuuaaau

SEQ ID NO: 2370940 - RNA, 19 nt, Artificial Sequence
  Description of Artificial Sequence: Synthetic oligonucleotide
gaagagacacugagggccu

SEQ ID NO: 2370941 - RNA, 19 nt, Artificial Sequence
  Description of Artificial Sequence: Synthetic oligonucleotide
ugugauccugaugccccaa

SEQ ID NO: 2370942 - RNA, 19 nt, Artificial Sequence
  Description of Artificial Sequence: Synthetic oligonucleotide
uucugggcauuaggugccc

SEQ ID NO: 2370943 - RNA, 19 nt, Artificial Sequence
  Description of Artificial Sequence: Synthetic oligonucleotide
aggggucugaggugugaau

SEQ ID NO: 2370944 - RNA, 19 nt, Artificial Sequence
  Description of Artificial Sequence: Synthetic oligonucleotide
agcugccuugguuuauaua

SEQ ID NO: 2370945 - RNA, 19 nt, Artificial Sequence
  Description of Artificial Sequence: Synthetic oligonucleotide
gcuuugucucauucuguga

SEQ ID NO: 2370946 - RNA, 19 nt, Artificial Sequence
  Description of Artificial Sequence: Synthetic oligonucleotide
ugccccaacaaggccugac

SEQ ID NO: 2370947 - RNA, 19 nt, Artificial Sequence
  Description of Artificial Sequence: Synthetic oligonucleotide
guaugcacuuuuggcagaa

SEQ ID NO: 2370948 - RNA, 19 nt, Artificial Sequence
  Description of Artificial Sequence: Synthetic oligonucleotide
ugaucucuucugggcauua

SEQ ID NO: 2370949 - RNA, 19 nt, Artificial Sequence
  Description of Artificial Sequence: Synthetic oligonucleotide
ccaacaaggccugaccauc

SEQ ID NO: 2370950 - RNA, 19 nt, Artificial Sequence
  Description of Artificial Sequence: Synthetic oligonucleotide
gaugcgcuuguaugcacuu

SEQ ID NO: 2370951 - RNA, 19 nt, Artificial Sequence
  Description of Artificial Sequence: Synthetic oligonucleotide
agagcugccuugguuuaua

SEQ ID NO: 2370952 - RNA, 19 nt, Artificial Sequence
  Description of Artificial Sequence: Synthetic oligonucleotide
gguuuauauaggagccaga

SEQ ID NO: 2370953 - RNA, 19 nt, Artificial Sequence
  Description of Artificial Sequence: Synthetic oligonucleotide
cuugacuguucuuuccauu

SEQ ID NO: 2370954 - RNA, 19 nt, Artificial Sequence
  Description of Artificial Sequence: Synthetic oligonucleotide
gccagaguagaagcucugc

SEQ ID NO: 2370955 - RNA, 19 nt, Artificial Sequence
  Description of Artificial Sequence: Synthetic oligonucleotide
gggcauuaggugcccacuc

SEQ ID NO: 2370956 - RNA, 19 nt, Artificial Sequence
  Description of Artificial Sequence: Synthetic oligonucleotide
cucaggggucugaggugug

SEQ ID NO: 2370957 - RNA, 19 nt, Artificial Sequence
  Description of Artificial Sequence: Synthetic oligonucleotide
gguaucccugauguugaca

SEQ ID NO: 2370958 - RNA, 19 nt, Artificial Sequence
  Description of Artificial Sequence: Synthetic oligonucleotide
gaggugugaaugaaaucuu

SEQ ID NO: 2370959 - RNA, 19 nt, Artificial Sequence
  Description of Artificial Sequence: Synthetic oligonucleotide
ggccugaccaucagagcug

SEQ ID NO: 2370960 - RNA, 19 nt, Artificial Sequence
  Description of Artificial Sequence: Synthetic oligonucleotide
gcaugcuacacugaccaua

SEQ ID NO: 2370961 - RNA, 19 nt, Artificial Sequence
  Description of Artificial Sequence: Synthetic oligonucleotide
agguguccacucggguauc

SEQ ID NO: 2370962 - RNA, 19 nt, Artificial Sequence
  Description of Artificial Sequence: Synthetic oligonucleotide
cuggcccuauucugaucuc

SEQ ID NO: 2370963 - RNA, 19 nt, Artificial Sequence
  Description of Artificial Sequence: Synthetic oligonucleotide
cuccacaaagggacagucu

SEQ ID NO: 2370964 - RNA, 19 nt, Artificial Sequence
  Description of Artificial Sequence: Synthetic oligonucleotide
cacgaggaacaucuauacu

SEQ ID NO: 2370965 - RNA, 19 nt, Artificial Sequence
  Description of Artificial Sequence: Synthetic oligonucleotide
aagagacacugagggccua

SEQ ID NO: 2370966 - RNA, 19 nt, Artificial Sequence
  Description of Artificial Sequence: Synthetic oligonucleotide
agagggcaugcuacacuga

SEQ ID NO: 2370967 - RNA, 19 nt, Artificial Sequence
  Description of Artificial Sequence: Synthetic oligonucleotide
ugagggccuaaggcugggu

SEQ ID NO: 2370968 - RNA, 19 nt, Artificial Sequence
  Description of Artificial Sequence: Synthetic oligonucleotide
ccagguaccaccuggcccu

SEQ ID NO: 2370969 - RNA, 19 nt, Artificial Sequence
  Description of Artificial Sequence: Synthetic oligonucleotide
accaccaggcuuggcuaga

SEQ ID NO: 2370970 - RNA, 19 nt, Artificial Sequence
  Description of Artificial Sequence: Synthetic oligonucleotide
gccugaccaucagagcugc

SEQ ID NO: 2370971 - RNA, 19 nt, Artificial Sequence
  Description of Artificial Sequence: Synthetic oligonucleotide
ccuggcccuauucugaucu

SEQ ID NO: 2370972 - RNA, 19 nt, Artificial Sequence
  Description of Artificial Sequence: Synthetic oligonucleotide
gguguccacucggguaucc

SEQ ID NO: 2370973 - RNA, 19 nt, Artificial Sequence
  Description of Artificial Sequence: Synthetic oligonucleotide
gccuaaggcugggugguug

SEQ ID NO: 2370974 - RNA, 19 nt, Artificial Sequence
  Description of Artificial Sequence: Synthetic oligonucleotide
augcuacacugaccauaau

SEQ ID NO: 2370975 - RNA, 19 nt, Artificial Sequence
  Description of Artificial Sequence: Synthetic oligonucleotide
gcuggcaaacagcauguau

SEQ ID NO: 2370976 - RNA, 19 nt, Artificial Sequence
  Description of Artificial Sequence: Synthetic oligonucleotide
ggucugaggugugaaugaa

SEQ ID NO: 2370977 - RNA, 19 nt, Artificial Sequence
  Description of Artificial Sequence: Synthetic oligonucleotide
ccuaaggcugggugguuga

SEQ ID NO: 2370978 - RNA, 19 nt, Artificial Sequence
  Description of Artificial Sequence: Synthetic oligonucleotide
ccauuaagggcugcucuca

SEQ ID NO: 2370979 - RNA, 19 nt, Artificial Sequence
  Description of Artificial Sequence: Synthetic oligonucleotide
ccccaacaaggccugacca

SEQ ID NO: 2370980 - RNA, 19 nt, Artificial Sequence
  Description of Artificial Sequence: Synthetic oligonucleotide
gucgcccuggggccugaac

SEQ ID NO: 2370981 - RNA, 19 nt, Artificial Sequence
  Description of Artificial Sequence: Synthetic oligonucleotide
ccacuccacaauaacagau

SEQ ID NO: 2370982 - RNA, 19 nt, Artificial Sequence
  Description of Artificial Sequence: Synthetic oligonucleotide
agggacagucucacuuaaa

SEQ ID NO: 2370983 - RNA, 19 nt, Artificial Sequence
  Description of Artificial Sequence: Synthetic oligonucleotide
gcgcuuguaugcacuuuug

SEQ ID NO: 2370984 - RNA, 19 nt, Artificial Sequence
  Description of Artificial Sequence: Synthetic oligonucleotide
gagcugccuugguuuauau

SEQ ID NO: 2370985 - RNA, 19 nt, Artificial Sequence
  Description of Artificial Sequence: Synthetic oligonucleotide
guugagucuaagggaguuu

SEQ ID NO: 2370986 - RNA, 19 nt, Artificial Sequence
  Description of Artificial Sequence: Synthetic oligonucleotide
augcgcuuguaugcacuuu

SEQ ID NO: 2370987 - RNA, 19 nt, Artificial Sequence
  Description of Artificial Sequence: Synthetic oligonucleotide
ugcccacuccaggcugaga

SEQ ID NO: 2370988 - RNA, 19 nt, Artificial Sequence
  Description of Artificial Sequence: Synthetic oligonucleotide
ggcugagaagagacacuga

SEQ ID NO: 2370989 - RNA, 19 nt, Artificial Sequence
  Description of Artificial Sequence: Synthetic oligonucleotide
gcaagguguccacucgggu

SEQ ID NO: 2370990 - RNA, 19 nt, Artificial Sequence
  Description of Artificial Sequence: Synthetic oligonucleotide
caggggucugaggugugaa

SEQ ID NO: 2370991 - RNA, 19 nt, Artificial Sequence
  Description of Artificial Sequence: Synthetic oligonucleotide
guggaccuuaggggcagua

SEQ ID NO: 2370992 - RNA, 19 nt, Artificial Sequence
  Description of Artificial Sequence: Synthetic oligonucleotide
cacuccacaaagggacagu

SEQ ID NO: 2370993 - RNA, 19 nt, Artificial Sequence
  Description of Artificial Sequence: Synthetic oligonucleotide
gggccuaaggcuggguggu

SEQ ID NO: 2370994 - RNA, 19 nt, Artificial Sequence
  Description of Artificial Sequence: Synthetic oligonucleotide
gguaccaccuggcccuauu

SEQ ID NO: 2370995 - RNA, 19 nt, Artificial Sequence
  Description of Artificial Sequence: Synthetic oligonucleotide
gcuaucugaugcgcuugua

SEQ ID NO: 2370996 - RNA, 19 nt, Artificial Sequence
  Description of Artificial Sequence: Synthetic oligonucleotide
cccaacaaggccugaccau

SEQ ID NO: 2370997 - RNA, 19 nt, Artificial Sequence
  Description of Artificial Sequence: Synthetic oligonucleotide
augccccaacaaggccuga

SEQ ID NO: 2370998 - RNA, 19 nt, Artificial Sequence
  Description of Artificial Sequence: Synthetic oligonucleotide
agguaccaccuggcccuau

SEQ ID NO: 2370999 - RNA, 19 nt, Artificial Sequence
  Description of Artificial Sequence: Synthetic oligonucleotide
cucggguaucccugauguu

SEQ ID NO: 2371000 - RNA, 19 nt, Artificial Sequence
  Description of Artificial Sequence: Synthetic oligonucleotide
cugaucucuucugggcauu

SEQ ID NO: 2371001 - RNA, 19 nt, Artificial Sequence
  Description of Artificial Sequence: Synthetic oligonucleotide
augucgcccuggggccuga

SEQ ID NO: 2371002 - RNA, 19 nt, Artificial Sequence
  Description of Artificial Sequence: Synthetic oligonucleotide
ggcaugcuacacugaccau

SEQ ID NO: 2371003 - RNA, 19 nt, Artificial Sequence
  Description of Artificial Sequence: Synthetic oligonucleotide
gcuuggcuagacagcuugu

SEQ ID NO: 2371004 - RNA, 19 nt, Artificial Sequence
  Description of Artificial Sequence: Synthetic oligonucleotide
ggcccuauucugaucucuu

SEQ ID NO: 2371005 - RNA, 19 nt, Artificial Sequence
  Description of Artificial Sequence: Synthetic oligonucleotide
gcccuggggccugaaccca

SEQ ID NO: 2371006 - RNA, 19 nt, Artificial Sequence
  Description of Artificial Sequence: Synthetic oligonucleotide
ggcuggcaaacagcaugua

SEQ ID NO: 2371007 - RNA, 19 nt, Artificial Sequence
  Description of Artificial Sequence: Synthetic oligonucleotide
cagagcugccuugguuuau

SEQ ID NO: 2371008 - RNA, 19 nt, Artificial Sequence
  Description of Artificial Sequence: Synthetic oligonucleotide
ccucagcauguggaccuua

SEQ ID NO: 2371009 - RNA, 19 nt, Artificial Sequence
  Description of Artificial Sequence: Synthetic oligonucleotide
gggcaguagcagagaugau

SEQ ID NO: 2371010 - RNA, 19 nt, Artificial Sequence
  Description of Artificial Sequence: Synthetic oligonucleotide
ccacucggguaucccugau

SEQ ID NO: 2371011 - RNA, 19 nt, Artificial Sequence
  Description of Artificial Sequence: Synthetic oligonucleotide
ggccuaaggcugggugguu

SEQ ID NO: 2371012 - RNA, 19 nt, Artificial Sequence
  Description of Artificial Sequence: Synthetic oligonucleotide
auauuaaacagaugaaucc

SEQ ID NO: 2371013 - RNA, 19 nt, Artificial Sequence
  Description of Artificial Sequence: Synthetic oligonucleotide
aacaaagccacucuuaauc

SEQ ID NO: 2371014 - RNA, 19 nt, Artificial Sequence
  Description of Artificial Sequence: Synthetic oligonucleotide
uaugaugugcuuaacaggg

SEQ ID NO: 2371015 - RNA, 19 nt, Artificial Sequence
  Description of Artificial Sequence: Synthetic oligonucleotide
gaugucauaaaccacauug

SEQ ID NO: 2371016 - RNA, 19 nt, Artificial Sequence
  Description of Artificial Sequence: Synthetic oligonucleotide
aacaguauaaaaccccacc

SEQ ID NO: 2371017 - RNA, 19 nt, Artificial Sequence
  Description of Artificial Sequence: Synthetic oligonucleotide
auaaauagaauguaaaugu

SEQ ID NO: 2371018 - RNA, 19 nt, Artificial Sequence
  Description of Artificial Sequence: Synthetic oligonucleotide
agaauuaccugauugaccg

SEQ ID NO: 2371019 - RNA, 19 nt, Artificial Sequence
  Description of Artificial Sequence: Synthetic oligonucleotide
uaauguuugcauauaaggg

SEQ ID NO: 2371020 - RNA, 19 nt, Artificial Sequence
  Description of Artificial Sequence: Synthetic oligonucleotide
uuaguaauacuucuaacag

SEQ ID NO: 2371021 - RNA, 19 nt, Artificial Sequence
  Description of Artificial Sequence: Synthetic oligonucleotide
aauguuugcauauaaggga

SEQ ID NO: 2371022 - RNA, 19 nt, Artificial Sequence
  Description of Artificial Sequence: Synthetic oligonucleotide
aauucuuuuagucaucacu

SEQ ID NO: 2371023 - RNA, 19 nt, Artificial Sequence
  Description of Artificial Sequence: Synthetic oligonucleotide
uuaaauuugaugugaaagc

SEQ ID NO: 2371024 - RNA, 19 nt, Artificial Sequence
  Description of Artificial Sequence: Synthetic oligonucleotide
aauguuuaaucauauaaau

SEQ ID NO: 2371025 - RNA, 19 nt, Artificial Sequence
  Description of Artificial Sequence: Synthetic oligonucleotide
aaggagauaaaccuggaug

SEQ ID NO: 2371026 - RNA, 19 nt, Artificial Sequence
  Description of Artificial Sequence: Synthetic oligonucleotide
uucacauuaagaauuaccu

SEQ ID NO: 2371027 - RNA, 19 nt, Artificial Sequence
  Description of Artificial Sequence: Synthetic oligonucleotide
auaaaccacauugagaagc

SEQ ID NO: 2371028 - RNA, 19 nt, Artificial Sequence
  Description of Artificial Sequence: Synthetic oligonucleotide
ugcugauuaaauuugaugu

SEQ ID NO: 2371029 - RNA, 19 nt, Artificial Sequence
  Description of Artificial Sequence: Synthetic oligonucleotide
aauagaauguaaauguauc

SEQ ID NO: 2371030 - RNA, 19 nt, Artificial Sequence
  Description of Artificial Sequence: Synthetic oligonucleotide
acaguauaaaaccccaccc

SEQ ID NO: 2371031 - RNA, 19 nt, Artificial Sequence
  Description of Artificial Sequence: Synthetic oligonucleotide
auagugcuaauauuaagac

SEQ ID NO: 2371032 - RNA, 19 nt, Artificial Sequence
  Description of Artificial Sequence: Synthetic oligonucleotide
agugaaaggagauaaaccu

SEQ ID NO: 2371033 - RNA, 19 nt, Artificial Sequence
  Description of Artificial Sequence: Synthetic oligonucleotide
ucuaacaguauaaaacccc

SEQ ID NO: 2371034 - RNA, 19 nt, Artificial Sequence
  Description of Artificial Sequence: Synthetic oligonucleotide
aauuugaugugaaagcagg

SEQ ID NO: 2371035 - RNA, 19 nt, Artificial Sequence
  Description of Artificial Sequence: Synthetic oligonucleotide
guuaugaugugcuuaacag

SEQ ID NO: 2371036 - RNA, 19 nt, Artificial Sequence
  Description of Artificial Sequence: Synthetic oligonucleotide
uuuaugacaguaauugugu

SEQ ID NO: 2371037 - RNA, 19 nt, Artificial Sequence
  Description of Artificial Sequence: Synthetic oligonucleotide
uuuguucacauuaagaauu

SEQ ID NO: 2371038 - RNA, 19 nt, Artificial Sequence
  Description of Artificial Sequence: Synthetic oligonucleotide
ugagaaaccaucuucugug

SEQ ID NO: 2371039 - RNA, 19 nt, Artificial Sequence
  Description of Artificial Sequence: Synthetic oligonucleotide
uuacuguacaacuuaaugu

SEQ ID NO: 2371040 - RNA, 19 nt, Artificial Sequence
  Description of Artificial Sequence: Synthetic oligonucleotide
cagaguugcauccagaacc

SEQ ID NO: 2371041 - RNA, 19 nt, Artificial Sequence
  Description of Artificial Sequence: Synthetic oligonucleotide
aacuaaaacaaagccacuc

SEQ ID NO: 2371042 - RNA, 19 nt, Artificial Sequence
  Description of Artificial Sequence: Synthetic oligonucleotide
uuaugaugugcuuaacagg

SEQ ID NO: 2371043 - RNA, 19 nt, Artificial Sequence
  Description of Artificial Sequence: Synthetic oligonucleotide
cacucuuaauccuugaagg

SEQ ID NO: 2371044 - RNA, 19 nt, Artificial Sequence
  Description of Artificial Sequence: Synthetic oligonucleotide
uuuacucauguacauaugu

SEQ ID NO: 2371045 - RNA, 19 nt, Artificial Sequence
  Description of Artificial Sequence: Synthetic oligonucleotide
uguguuuacauuuuauggu

SEQ ID NO: 2371046 - RNA, 19 nt, Artificial Sequence
  Description of Artificial Sequence: Synthetic oligonucleotide
acaaagccacucuuaaucc

SEQ ID NO: 2371047 - RNA, 19 nt, Artificial Sequence
  Description of Artificial Sequence: Synthetic oligonucleotide
guuaguaauacuucuaaca

SEQ ID NO: 2371048 - RNA, 19 nt, Artificial Sequence
  Description of Artificial Sequence: Synthetic oligonucleotide
uaucauguuaguaauacuu

SEQ ID NO: 2371049 - RNA, 19 nt, Artificial Sequence
  Description of Artificial Sequence: Synthetic oligonucleotide
ugucauaaaccacauugag

SEQ ID NO: 2371050 - RNA, 19 nt, Artificial Sequence
  Description of Artificial Sequence: Synthetic oligonucleotide
uguggaagugaaaagcugc

SEQ ID NO: 2371051 - RNA, 19 nt, Artificial Sequence
  Description of Artificial Sequence: Synthetic oligonucleotide
uaucaaauucuuuuaguca

SEQ ID NO: 2371052 - RNA, 19 nt, Artificial Sequence
  Description of Artificial Sequence: Synthetic oligonucleotide
aagaauuaccugauugacc

SEQ ID NO: 2371053 - RNA, 19 nt, Artificial Sequence
  Description of Artificial Sequence: Synthetic oligonucleotide
uuucuaguguaucaaauuc

SEQ ID NO: 2371054 - RNA, 19 nt, Artificial Sequence
  Description of Artificial Sequence: Synthetic oligonucleotide
ugcuuaacagggaacgugg

SEQ ID NO: 2371055 - RNA, 19 nt, Artificial Sequence
  Description of Artificial Sequence: Synthetic oligonucleotide
ucucuuguaauuuggaccu

SEQ ID NO: 2371056 - RNA, 19 nt, Artificial Sequence
  Description of Artificial Sequence: Synthetic oligonucleotide
aguuaacucgcauaaucgg

SEQ ID NO: 2371057 - RNA, 19 nt, Artificial Sequence
  Description of Artificial Sequence: Synthetic oligonucleotide
aacuuaauguuucaagaau

SEQ ID NO: 2371058 - RNA, 19 nt, Artificial Sequence
  Description of Artificial Sequence: Synthetic oligonucleotide
uuuauggugccuaguauug

SEQ ID NO: 2371059 - RNA, 19 nt, Artificial Sequence
  Description of Artificial Sequence: Synthetic oligonucleotide
uguuauuucccuauauuaa

SEQ ID NO: 2371060 - RNA, 19 nt, Artificial Sequence
  Description of Artificial Sequence: Synthetic oligonucleotide
auuucccuauauuaaacag

SEQ ID NO: 2371061 - RNA, 19 nt, Artificial Sequence
  Description of Artificial Sequence: Synthetic oligonucleotide
agguuuaugacaguaauug

SEQ ID NO: 2371062 - RNA, 19 nt, Artificial Sequence
  Description of Artificial Sequence: Synthetic oligonucleotide
ugacaaaauguuauuuccc

SEQ ID NO: 2371063 - RNA, 19 nt, Artificial Sequence
  Description of Artificial Sequence: Synthetic oligonucleotide
aaacagaugaauccacaca

SEQ ID NO: 2371064 - RNA, 19 nt, Artificial Sequence
  Description of Artificial Sequence: Synthetic oligonucleotide
uguuaugaugugcuuaaca

SEQ ID NO: 2371065 - RNA, 19 nt, Artificial Sequence
  Description of Artificial Sequence: Synthetic oligonucleotide
uguuuacucauguacauau

SEQ ID NO: 2371066 - RNA, 19 nt, Artificial Sequence
  Description of Artificial Sequence: Synthetic oligonucleotide
aaauuagccaguaauccug

SEQ ID NO: 2371067 - RNA, 19 nt, Artificial Sequence
  Description of Artificial Sequence: Synthetic oligonucleotide
auagaauguaaauguauca

SEQ ID NO: 2371068 - RNA, 19 nt, Artificial Sequence
  Description of Artificial Sequence: Synthetic oligonucleotide
cacauuaagaauuaccuga

SEQ ID NO: 2371069 - RNA, 19 nt, Artificial Sequence
  Description of Artificial Sequence: Synthetic oligonucleotide
uguaugaucaaauguuuaa

SEQ ID NO: 2371070 - RNA, 19 nt, Artificial Sequence
  Description of Artificial Sequence: Synthetic oligonucleotide
aucaaauucuuuuagucau

SEQ ID NO: 2371071 - RNA, 19 nt, Artificial Sequence
  Description of Artificial Sequence: Synthetic oligonucleotide
aauacuucuaacaguauaa

SEQ ID NO: 2371072 - RNA, 19 nt, Artificial Sequence
  Description of Artificial Sequence: Synthetic oligonucleotide
uaugaucaaauguuuaauc

SEQ ID NO: 2371073 - RNA, 19 nt, Artificial Sequence
  Description of Artificial Sequence: Synthetic oligonucleotide
aggagauaaaccuggaugu

SEQ ID NO: 2371074 - RNA, 19 nt, Artificial Sequence
  Description of Artificial Sequence: Synthetic oligonucleotide
agaauguaaauguaucacu

SEQ ID NO: 2371075 - RNA, 19 nt, Artificial Sequence
  Description of Artificial Sequence: Synthetic oligonucleotide
aaauucuuuuagucaucac

SEQ ID NO: 2371076 - RNA, 19 nt, Artificial Sequence
  Description of Artificial Sequence: Synthetic oligonucleotide
uucucauguacauagugcu

SEQ ID NO: 2371077 - RNA, 19 nt, Artificial Sequence
  Description of Artificial Sequence: Synthetic oligonucleotide
uacuguaugaucaaauguu

SEQ ID NO: 2371078 - RNA, 19 nt, Artificial Sequence
  Description of Artificial Sequence: Synthetic oligonucleotide
uugcauauaagggaaguag

SEQ ID NO: 2371079 - RNA, 19 nt, Artificial Sequence
  Description of Artificial Sequence: Synthetic oligonucleotide
ugcacuauaugcacacagg

SEQ ID NO: 2371080 - RNA, 19 nt, Artificial Sequence
  Description of Artificial Sequence: Synthetic oligonucleotide
caguuaacucgcauaaucg

SEQ ID NO: 2371081 - RNA, 19 nt, Artificial Sequence
  Description of Artificial Sequence: Synthetic oligonucleotide
ugaagguauauccagguuu

SEQ ID NO: 2371082 - RNA, 19 nt, Artificial Sequence
  Description of Artificial Sequence: Synthetic oligonucleotide
uucccuauauuaaacagau

SEQ ID NO: 2371083 - RNA, 19 nt, Artificial Sequence
  Description of Artificial Sequence: Synthetic oligonucleotide
uuucccuauauuaaacaga

SEQ ID NO: 2371084 - RNA, 19 nt, Artificial Sequence
  Description of Artificial Sequence: Synthetic oligonucleotide
uuaaacagaugaauccaca

SEQ ID NO: 2371085 - RNA, 19 nt, Artificial Sequence
  Description of Artificial Sequence: Synthetic oligonucleotide
uaauccuguaggaagguac

SEQ ID NO: 2371086 - RNA, 19 nt, Artificial Sequence
  Description of Artificial Sequence: Synthetic oligonucleotide
gaaaccaucuucuguggag

SEQ ID NO: 2371087 - RNA, 19 nt, Artificial Sequence
  Description of Artificial Sequence: Synthetic oligonucleotide
caggguaacuaaaacaaag

SEQ ID NO: 2371088 - RNA, 19 nt, Artificial Sequence
  Description of Artificial Sequence: Synthetic oligonucleotide
aauguaucacugaacacug

SEQ ID NO: 2371089 - RNA, 19 nt, Artificial Sequence
  Description of Artificial Sequence: Synthetic oligonucleotide
cauagugcuaauauuaaga

SEQ ID NO: 2371090 - RNA, 19 nt, Artificial Sequence
  Description of Artificial Sequence: Synthetic oligonucleotide
auauaagggaaguaguuau

SEQ ID NO: 2371091 - RNA, 19 nt, Artificial Sequence
  Description of Artificial Sequence: Synthetic oligonucleotide
uuagugaaaggagauaaac

SEQ ID NO: 2371092 - RNA, 19 nt, Artificial Sequence
  Description of Artificial Sequence: Synthetic oligonucleotide
guuuaugacaguaauugug

SEQ ID NO: 2371093 - RNA, 19 nt, Artificial Sequence
  Description of Artificial Sequence: Synthetic oligonucleotide
ucuuaauccuugaagguau

SEQ ID NO: 2371094 - RNA, 19 nt, Artificial Sequence
  Description of Artificial Sequence: Synthetic oligonucleotide
cuucucauguacauagugc

SEQ ID NO: 2371095 - RNA, 19 nt, Artificial Sequence
  Description of Artificial Sequence: Synthetic oligonucleotide
uauauccagguuuaugaca

SEQ ID NO: 2371096 - RNA, 19 nt, Artificial Sequence
  Description of Artificial Sequence: Synthetic oligonucleotide
aacaccugacauuccucgc

SEQ ID NO: 2371097 - RNA, 19 nt, Artificial Sequence
  Description of Artificial Sequence: Synthetic oligonucleotide
ugagaagcugcucaguuaa

SEQ ID NO: 2371098 - RNA, 19 nt, Artificial Sequence
  Description of Artificial Sequence: Synthetic oligonucleotide
uucuaguguaucaaauucu

SEQ ID NO: 2371099 - RNA, 19 nt, Artificial Sequence
  Description of Artificial Sequence: Synthetic oligonucleotide
uaauacuucuaacaguaua

SEQ ID NO: 2371100 - RNA, 19 nt, Artificial Sequence
  Description of Artificial Sequence: Synthetic oligonucleotide
ucauguuaguaauacuucu

SEQ ID NO: 2371101 - RNA, 19 nt, Artificial Sequence
  Description of Artificial Sequence: Synthetic oligonucleotide
uuuuguucacauuaagaau

SEQ ID NO: 2371102 - RNA, 19 nt, Artificial Sequence
  Description of Artificial Sequence: Synthetic oligonucleotide
aaaccaucuucuguggagg

SEQ ID NO: 2371103 - RNA, 19 nt, Artificial Sequence
  Description of Artificial Sequence: Synthetic oligonucleotide
aucgguuuuauucucaaaa

SEQ ID NO: 2371104 - RNA, 19 nt, Artificial Sequence
  Description of Artificial Sequence: Synthetic oligonucleotide
guguuuacauuuuauggug

SEQ ID NO: 2371105 - RNA, 19 nt, Artificial Sequence
  Description of Artificial Sequence: Synthetic oligonucleotide
ugaucaaauguuuaaucau

SEQ ID NO: 2371106 - RNA, 19 nt, Artificial Sequence
  Description of Artificial Sequence: Synthetic oligonucleotide
ucccaugaugucauaaacc

SEQ ID NO: 2371107 - RNA, 19 nt, Artificial Sequence
  Description of Artificial Sequence: Synthetic oligonucleotide
guuaucauguuaguaauac

SEQ ID NO: 2371108 - RNA, 19 nt, Artificial Sequence
  Description of Artificial Sequence: Synthetic oligonucleotide
aauuaccugauugaccgug

SEQ ID NO: 2371109 - RNA, 19 nt, Artificial Sequence
  Description of Artificial Sequence: Synthetic oligonucleotide
ugcauauaagggaaguagu

SEQ ID NO: 2371110 - RNA, 19 nt, Artificial Sequence
  Description of Artificial Sequence: Synthetic oligonucleotide
uagaauguaaauguaucac

SEQ ID NO: 2371111 - RNA, 19 nt, Artificial Sequence
  Description of Artificial Sequence: Synthetic oligonucleotide
uccuugaagguauauccag

SEQ ID NO: 2371112 - RNA, 19 nt, Artificial Sequence
  Description of Artificial Sequence: Synthetic oligonucleotide
ucuuuuagucaucacucac

SEQ ID NO: 2371113 - RNA, 19 nt, Artificial Sequence
  Description of Artificial Sequence: Synthetic oligonucleotide
ugaugugaaagcagguuga

SEQ ID NO: 2371114 - RNA, 19 nt, Artificial Sequence
  Description of Artificial Sequence: Synthetic oligonucleotide
aacgugguuagugaaagga

SEQ ID NO: 2371115 - RNA, 19 nt, Artificial Sequence
  Description of Artificial Sequence: Synthetic oligonucleotide
uugagaaaccaucuucugu

SEQ ID NO: 2371116 - RNA, 19 nt, Artificial Sequence
  Description of Artificial Sequence: Synthetic oligonucleotide
agcucaucggggcagacuc

SEQ ID NO: 2371117 - RNA, 19 nt, Artificial Sequence
  Description of Artificial Sequence: Synthetic oligonucleotide
uuuuauggugccuaguauu

SEQ ID NO: 2371118 - RNA, 19 nt, Artificial Sequence
  Description of Artificial Sequence: Synthetic oligonucleotide
uggauguuacuguacaacu

SEQ ID NO: 2371119 - RNA, 19 nt, Artificial Sequence
  Description of Artificial Sequence: Synthetic oligonucleotide
agauaaaccuggauguuac

SEQ ID NO: 2371120 - RNA, 19 nt, Artificial Sequence
  Description of Artificial Sequence: Synthetic oligonucleotide
aguauugacaaaauguuau

SEQ ID NO: 2371121 - RNA, 19 nt, Artificial Sequence
  Description of Artificial Sequence: Synthetic oligonucleotide
accugauugaccguguugg

SEQ ID NO: 2371122 - RNA, 19 nt, Artificial Sequence
  Description of Artificial Sequence: Synthetic oligonucleotide
uagugcuaauauuaagacc

SEQ ID NO: 2371123 - RNA, 19 nt, Artificial Sequence
  Description of Artificial Sequence: Synthetic oligonucleotide
uaagaauuaccugauugac

SEQ ID NO: 2371124 - RNA, 19 nt, Artificial Sequence
  Description of Artificial Sequence: Synthetic oligonucleotide
ugaacacuguuuucuagug

SEQ ID NO: 2371125 - RNA, 19 nt, Artificial Sequence
  Description of Artificial Sequence: Synthetic oligonucleotide
uacucauguacauauguau

SEQ ID NO: 2371126 - RNA, 19 nt, Artificial Sequence
  Description of Artificial Sequence: Synthetic oligonucleotide
gguauauccagguuuauga

SEQ ID NO: 2371127 - RNA, 19 nt, Artificial Sequence
  Description of Artificial Sequence: Synthetic oligonucleotide
auguuauuucccuauauua

SEQ ID NO: 2371128 - RNA, 19 nt, Artificial Sequence
  Description of Artificial Sequence: Synthetic oligonucleotide
uuuuagucaucacucacuu

SEQ ID NO: 2371129 - RNA, 19 nt, Artificial Sequence
  Description of Artificial Sequence: Synthetic oligonucleotide
ucuaguguaucaaauucuu

SEQ ID NO: 2371130 - RNA, 19 nt, Artificial Sequence
  Description of Artificial Sequence: Synthetic oligonucleotide
uguuaguaauacuucuaac

SEQ ID NO: 2371131 - RNA, 19 nt, Artificial Sequence
  Description of Artificial Sequence: Synthetic oligonucleotide
uaguaauacuucuaacagu

SEQ ID NO: 2371132 - RNA, 19 nt, Artificial Sequence
  Description of Artificial Sequence: Synthetic oligonucleotide
guuuacauuuuauggugcc

SEQ ID NO: 2371133 - RNA, 19 nt, Artificial Sequence
  Description of Artificial Sequence: Synthetic oligonucleotide
uguacaacuuaauguuuca

SEQ ID NO: 2371134 - RNA, 19 nt, Artificial Sequence
  Description of Artificial Sequence: Synthetic oligonucleotide
augugcuuaacagggaacg

SEQ ID NO: 2371135 - RNA, 19 nt, Artificial Sequence
  Description of Artificial Sequence: Synthetic oligonucleotide
caacaccugacauuccucg

SEQ ID NO: 2371136 - RNA, 19 nt, Artificial Sequence
  Description of Artificial Sequence: Synthetic oligonucleotide
caguauaaaaccccacccc

SEQ ID NO: 2371137 - RNA, 19 nt, Artificial Sequence
  Description of Artificial Sequence: Synthetic oligonucleotide
uauagcucuaauguuugca

SEQ ID NO: 2371138 - RNA, 19 nt, Artificial Sequence
  Description of Artificial Sequence: Synthetic oligonucleotide
aggaagguacuguaugauc

SEQ ID NO: 2371139 - RNA, 19 nt, Artificial Sequence
  Description of Artificial Sequence: Synthetic oligonucleotide
uacauagugcuaauauuaa

SEQ ID NO: 2371140 - RNA, 19 nt, Artificial Sequence
  Description of Artificial Sequence: Synthetic oligonucleotide
uuaacagggaacgugguua

SEQ ID NO: 2371141 - RNA, 19 nt, Artificial Sequence
  Description of Artificial Sequence: Synthetic oligonucleotide
gagaaaccaucuucugugg

SEQ ID NO: 2371142 - RNA, 19 nt, Artificial Sequence
  Description of Artificial Sequence: Synthetic oligonucleotide
acaacuguggaagugaaaa

SEQ ID NO: 2371143 - RNA, 19 nt, Artificial Sequence
  Description of Artificial Sequence: Synthetic oligonucleotide
uugcucauauuucccauga

SEQ ID NO: 2371144 - RNA, 19 nt, Artificial Sequence
  Description of Artificial Sequence: Synthetic oligonucleotide
ucuggaagcucaucggggc

SEQ ID NO: 2371145 - RNA, 19 nt, Artificial Sequence
  Description of Artificial Sequence: Synthetic oligonucleotide
ggguaacuaaaacaaagcc

SEQ ID NO: 2371146 - RNA, 19 nt, Artificial Sequence
  Description of Artificial Sequence: Synthetic oligonucleotide
aaaggagauaaaccuggau

SEQ ID NO: 2371147 - RNA, 19 nt, Artificial Sequence
  Description of Artificial Sequence: Synthetic oligonucleotide
uucccaugaugucauaaac

SEQ ID NO: 2371148 - RNA, 19 nt, Artificial Sequence
  Description of Artificial Sequence: Synthetic oligonucleotide
acucugagcacacaacugu

SEQ ID NO: 2371149 - RNA, 19 nt, Artificial Sequence
  Description of Artificial Sequence: Synthetic oligonucleotide
ugaugugcuuaacagggaa

SEQ ID NO: 2371150 - RNA, 19 nt, Artificial Sequence
  Description of Artificial Sequence: Synthetic oligonucleotide
uacauuuuauggugccuag

SEQ ID NO: 2371151 - RNA, 19 nt, Artificial Sequence
  Description of Artificial Sequence: Synthetic oligonucleotide
uguuugcauauaagggaag

SEQ ID NO: 2371152 - RNA, 19 nt, Artificial Sequence
  Description of Artificial Sequence: Synthetic oligonucleotide
uguacauagugcuaauauu

SEQ ID NO: 2371153 - RNA, 19 nt, Artificial Sequence
  Description of Artificial Sequence: Synthetic oligonucleotide
aauuuggaccucuucucau

SEQ ID NO: 2371154 - RNA, 19 nt, Artificial Sequence
  Description of Artificial Sequence: Synthetic oligonucleotide
uaguuaucauguuaguaau

SEQ ID NO: 2371155 - RNA, 19 nt, Artificial Sequence
  Description of Artificial Sequence: Synthetic oligonucleotide
uaguauugacaaaauguua

SEQ ID NO: 2371156 - RNA, 19 nt, Artificial Sequence
  Description of Artificial Sequence: Synthetic oligonucleotide
gugcugauuaaauuugaug

SEQ ID NO: 2371157 - RNA, 19 nt, Artificial Sequence
  Description of Artificial Sequence: Synthetic oligonucleotide
uuaacucgcauaaucgguu

SEQ ID NO: 2371158 - RNA, 19 nt, Artificial Sequence
  Description of Artificial Sequence: Synthetic oligonucleotide
cacaggguaacuaaaacaa

SEQ ID NO: 2371159 - RNA, 19 nt, Artificial Sequence
  Description of Artificial Sequence: Synthetic oligonucleotide
uguacauauguauuuucuu

SEQ ID NO: 2371160 - RNA, 19 nt, Artificial Sequence
  Description of Artificial Sequence: Synthetic oligonucleotide
auaagggaaguaguuauca

SEQ ID NO: 2371161 - RNA, 19 nt, Artificial Sequence
  Description of Artificial Sequence: Synthetic oligonucleotide
guaauuuggaccucuucuc

SEQ ID NO: 2371162 - RNA, 19 nt, Artificial Sequence
  Description of Artificial Sequence: Synthetic oligonucleotide
ugucucuuguaauuuggac

SEQ ID NO: 2371163 - RNA, 19 nt, Artificial Sequence
  Description of Artificial Sequence: Synthetic oligonucleotide
cccuauauuaaacagauga

SEQ ID NO: 2371164 - RNA, 19 nt, Artificial Sequence
  Description of Artificial Sequence: Synthetic oligonucleotide
uuaucauguuaguaauacu

SEQ ID NO: 2371165 - RNA, 19 nt, Artificial Sequence
  Description of Artificial Sequence: Synthetic oligonucleotide
aguguaucaaauucuuuua

SEQ ID NO: 2371166 - RNA, 19 nt, Artificial Sequence
  Description of Artificial Sequence: Synthetic oligonucleotide
uguuggucugugcugauua

SEQ ID NO: 2371167 - RNA, 19 nt, Artificial Sequence
  Description of Artificial Sequence: Synthetic oligonucleotide
cuguacaacuuaauguuuc

SEQ ID NO: 2371168 - RNA, 19 nt, Artificial Sequence
  Description of Artificial Sequence: Synthetic oligonucleotide
uauaagggaaguaguuauc

SEQ ID NO: 2371169 - RNA, 19 nt, Artificial Sequence
  Description of Artificial Sequence: Synthetic oligonucleotide
uucuuuuagucaucacuca

SEQ ID NO: 2371170 - RNA, 19 nt, Artificial Sequence
  Description of Artificial Sequence: Synthetic oligonucleotide
uauggugccuaguauugac

SEQ ID NO: 2371171 - RNA, 19 nt, Artificial Sequence
  Description of Artificial Sequence: Synthetic oligonucleotide
uuuggaccucuucucaugu

SEQ ID NO: 2371172 - RNA, 19 nt, Artificial Sequence
  Description of Artificial Sequence: Synthetic oligonucleotide
uggaccucuucucauguac

SEQ ID NO: 2371173 - RNA, 19 nt, Artificial Sequence
  Description of Artificial Sequence: Synthetic oligonucleotide
gcacuauaugcacacaggg

SEQ ID NO: 2371174 - RNA, 19 nt, Artificial Sequence
  Description of Artificial Sequence: Synthetic oligonucleotide
uguuuucuaguguaucaaa

SEQ ID NO: 2371175 - RNA, 19 nt, Artificial Sequence
  Description of Artificial Sequence: Synthetic oligonucleotide
uaugacaguaauuguguuu

SEQ ID NO: 2371176 - RNA, 19 nt, Artificial Sequence
  Description of Artificial Sequence: Synthetic oligonucleotide
uuaauguuucaagaauuuc

SEQ ID NO: 2371177 - RNA, 19 nt, Artificial Sequence
  Description of Artificial Sequence: Synthetic oligonucleotide
uuacucauguacauaugua

SEQ ID NO: 2371178 - RNA, 19 nt, Artificial Sequence
  Description of Artificial Sequence: Synthetic oligonucleotide
acucuuaauccuugaaggu

SEQ ID NO: 2371179 - RNA, 19 nt, Artificial Sequence
  Description of Artificial Sequence: Synthetic oligonucleotide
acauugagaagcugcucag

SEQ ID NO: 2371180 - RNA, 19 nt, Artificial Sequence
  Description of Artificial Sequence: Synthetic oligonucleotide
auagcucuaauguuugcau

SEQ ID NO: 2371181 - RNA, 19 nt, Artificial Sequence
  Description of Artificial Sequence: Synthetic oligonucleotide
uauugacaaaauguuauuu

SEQ ID NO: 2371182 - RNA, 19 nt, Artificial Sequence
  Description of Artificial Sequence: Synthetic oligonucleotide
aauuguguuuacauuuuau

SEQ ID NO: 2371183 - RNA, 19 nt, Artificial Sequence
  Description of Artificial Sequence: Synthetic oligonucleotide
uaacagggaacgugguuag

SEQ ID NO: 2371184 - RNA, 19 nt, Artificial Sequence
  Description of Artificial Sequence: Synthetic oligonucleotide
gguacuguaugaucaaaug

SEQ ID NO: 2371185 - RNA, 19 nt, Artificial Sequence
  Description of Artificial Sequence: Synthetic oligonucleotide
uggucuggaagcucaucgg

SEQ ID NO: 2371186 - RNA, 19 nt, Artificial Sequence
  Description of Artificial Sequence: Synthetic oligonucleotide
agcagguugagaaaccauc

SEQ ID NO: 2371187 - RNA, 19 nt, Artificial Sequence
  Description of Artificial Sequence: Synthetic oligonucleotide
agggaaguaguuaucaugu

SEQ ID NO: 2371188 - RNA, 19 nt, Artificial Sequence
  Description of Artificial Sequence: Synthetic oligonucleotide
agcucuaauguuugcauau

SEQ ID NO: 2371189 - RNA, 19 nt, Artificial Sequence
  Description of Artificial Sequence: Synthetic oligonucleotide
cugcacuauaugcacacag

SEQ ID NO: 2371190 - RNA, 19 nt, Artificial Sequence
  Description of Artificial Sequence: Synthetic oligonucleotide
ucauauuucccaugauguc

SEQ ID NO: 2371191 - RNA, 19 nt, Artificial Sequence
  Description of Artificial Sequence: Synthetic oligonucleotide
guuguuaugaugugcuuaa

SEQ ID NO: 2371192 - RNA, 19 nt, Artificial Sequence
  Description of Artificial Sequence: Synthetic oligonucleotide
ucgguuuuauucucaaaau

SEQ ID NO: 2371193 - RNA, 19 nt, Artificial Sequence
  Description of Artificial Sequence: Synthetic oligonucleotide
ucaaauucuuuuagucauc

SEQ ID NO: 2371194 - RNA, 19 nt, Artificial Sequence
  Description of Artificial Sequence: Synthetic oligonucleotide
auuuuauggugccuaguau

SEQ ID NO: 2371195 - RNA, 19 nt, Artificial Sequence
  Description of Artificial Sequence: Synthetic oligonucleotide
auuuggaccucuucucaug

SEQ ID NO: 2371196 - RNA, 19 nt, Artificial Sequence
  Description of Artificial Sequence: Synthetic oligonucleotide
ucacucacuucacugugcu

SEQ ID NO: 2371197 - RNA, 19 nt, Artificial Sequence
  Description of Artificial Sequence: Synthetic oligonucleotide
cauaaucgguuuuauucuc

SEQ ID NO: 2371198 - RNA, 19 nt, Artificial Sequence
  Description of Artificial Sequence: Synthetic oligonucleotide
uuucccaugaugucauaaa

SEQ ID NO: 2371199 - RNA, 19 nt, Artificial Sequence
  Description of Artificial Sequence: Synthetic oligonucleotide
uuucugcacuauaugcaca

SEQ ID NO: 2371200 - RNA, 19 nt, Artificial Sequence
  Description of Artificial Sequence: Synthetic oligonucleotide
augacaguaauuguguuua

SEQ ID NO: 2371201 - RNA, 19 nt, Artificial Sequence
  Description of Artificial Sequence: Synthetic oligonucleotide
ccaguaauccuguaggaag

SEQ ID NO: 2371202 - RNA, 19 nt, Artificial Sequence
  Description of Artificial Sequence: Synthetic oligonucleotide
guauauccagguuuaugac

SEQ ID NO: 2371203 - RNA, 19 nt, Artificial Sequence
  Description of Artificial Sequence: Synthetic oligonucleotide
uuacauuuuauggugccua

SEQ ID NO: 2371204 - RNA, 19 nt, Artificial Sequence
  Description of Artificial Sequence: Synthetic oligonucleotide
ugugcugauuaaauuugau

SEQ ID NO: 2371205 - RNA, 19 nt, Artificial Sequence
  Description of Artificial Sequence: Synthetic oligonucleotide
guacauagugcuaauauua

SEQ ID NO: 2371206 - RNA, 19 nt, Artificial Sequence
  Description of Artificial Sequence: Synthetic oligonucleotide
uuuacauuuuauggugccu

SEQ ID NO: 2371207 - RNA, 19 nt, Artificial Sequence
  Description of Artificial Sequence: Synthetic oligonucleotide
guugagaaaccaucuucug

SEQ ID NO: 2371208 - RNA, 19 nt, Artificial Sequence
  Description of Artificial Sequence: Synthetic oligonucleotide
uuauagcucuaauguuugc

SEQ ID NO: 2371209 - RNA, 19 nt, Artificial Sequence
  Description of Artificial Sequence: Synthetic oligonucleotide
agcugcucaguuaacucgc

SEQ ID NO: 2371210 - RNA, 19 nt, Artificial Sequence
  Description of Artificial Sequence: Synthetic oligonucleotide
uguuguuaugaugugcuua

SEQ ID NO: 2371211 - RNA, 19 nt, Artificial Sequence
  Description of Artificial Sequence: Synthetic oligonucleotide
cugauuaaauuugauguga

SEQ ID NO: 2371212 - RNA, 19 nt, Artificial Sequence
  Description of Artificial Sequence: Synthetic oligonucleotide
uguuacuguacaacuuaau

SEQ ID NO: 2371213 - RNA, 19 nt, Artificial Sequence
  Description of Artificial Sequence: Synthetic oligonucleotide
cacauugagaagcugcuca

SEQ ID NO: 2371214 - RNA, 19 nt, Artificial Sequence
  Description of Artificial Sequence: Synthetic oligonucleotide
uggucugugcugauuaaau

SEQ ID NO: 2371215 - RNA, 19 nt, Artificial Sequence
  Description of Artificial Sequence: Synthetic oligonucleotide
ucuuguaauuuggaccucu

SEQ ID NO: 2371216 - RNA, 19 nt, Artificial Sequence
  Description of Artificial Sequence: Synthetic oligonucleotide
aauccuguaggaagguacu

SEQ ID NO: 2371217 - RNA, 19 nt, Artificial Sequence
  Description of Artificial Sequence: Synthetic oligonucleotide
agcuuugcucauauuuccc

SEQ ID NO: 2371218 - RNA, 19 nt, Artificial Sequence
  Description of Artificial Sequence: Synthetic oligonucleotide
acuuaauguuucaagaauu

SEQ ID NO: 2371219 - RNA, 19 nt, Artificial Sequence
  Description of Artificial Sequence: Synthetic oligonucleotide
gaacgugguuagugaaagg

SEQ ID NO: 2371220 - RNA, 19 nt, Artificial Sequence
  Description of Artificial Sequence: Synthetic oligonucleotide
cacacaggguaacuaaaac

SEQ ID NO: 2371221 - RNA, 19 nt, Artificial Sequence
  Description of Artificial Sequence: Synthetic oligonucleotide
uaccugauugaccguguug

SEQ ID NO: 2371222 - RNA, 19 nt, Artificial Sequence
  Description of Artificial Sequence: Synthetic oligonucleotide
guugcauccagaaccaaca

SEQ ID NO: 2371223 - RNA, 19 nt, Artificial Sequence
  Description of Artificial Sequence: Synthetic oligonucleotide
uggugccuaguauugacaa

SEQ ID NO: 2371224 - RNA, 19 nt, Artificial Sequence
  Description of Artificial Sequence: Synthetic oligonucleotide
cuggauguuacuguacaac

SEQ ID NO: 2371225 - RNA, 19 nt, Artificial Sequence
  Description of Artificial Sequence: Synthetic oligonucleotide
cgcauaaucgguuuuauuc

SEQ ID NO: 2371226 - RNA, 19 nt, Artificial Sequence
  Description of Artificial Sequence: Synthetic oligonucleotide
auguacauauguauuuucu

SEQ ID NO: 2371227 - RNA, 19 nt, Artificial Sequence
  Description of Artificial Sequence: Synthetic oligonucleotide
uuuugcugucucuuguaau

SEQ ID NO: 2371228 - RNA, 19 nt, Artificial Sequence
  Description of Artificial Sequence: Synthetic oligonucleotide
cuguggaagugaaaagcug

SEQ ID NO: 2371229 - RNA, 19 nt, Artificial Sequence
  Description of Artificial Sequence: Synthetic oligonucleotide
ugcuguuguuaugaugugc

SEQ ID NO: 2371230 - RNA, 19 nt, Artificial Sequence
  Description of Artificial Sequence: Synthetic oligonucleotide
aaucgguuuuauucucaaa

SEQ ID NO: 2371231 - RNA, 19 nt, Artificial Sequence
  Description of Artificial Sequence: Synthetic oligonucleotide
aaccuggauguuacuguac

SEQ ID NO: 2371232 - RNA, 19 nt, Artificial Sequence
  Description of Artificial Sequence: Synthetic oligonucleotide
ugcucaguuaacucgcaua

SEQ ID NO: 2371233 - RNA, 19 nt, Artificial Sequence
  Description of Artificial Sequence: Synthetic oligonucleotide
cuaguauugacaaaauguu

SEQ ID NO: 2371234 - RNA, 19 nt, Artificial Sequence
  Description of Artificial Sequence: Synthetic oligonucleotide
aucacucacuucacugugc

SEQ ID NO: 2371235 - RNA, 19 nt, Artificial Sequence
  Description of Artificial Sequence: Synthetic oligonucleotide
ccuaguauugacaaaaugu

SEQ ID NO: 2371236 - RNA, 19 nt, Artificial Sequence
  Description of Artificial Sequence: Synthetic oligonucleotide
gucauaaaccacauugaga

SEQ ID NO: 2371237 - RNA, 19 nt, Artificial Sequence
  Description of Artificial Sequence: Synthetic oligonucleotide
uaagggaaguaguuaucau

SEQ ID NO: 2371238 - RNA, 19 nt, Artificial Sequence
  Description of Artificial Sequence: Synthetic oligonucleotide
guacuguaugaucaaaugu

SEQ ID NO: 2371239 - RNA, 19 nt, Artificial Sequence
  Description of Artificial Sequence: Synthetic oligonucleotide
uuugcauauaagggaagua

SEQ ID NO: 2371240 - RNA, 19 nt, Artificial Sequence
  Description of Artificial Sequence: Synthetic oligonucleotide
acaccugacauuccucgcu

SEQ ID NO: 2371241 - RNA, 19 nt, Artificial Sequence
  Description of Artificial Sequence: Synthetic oligonucleotide
ucauguacauauguauuuu

SEQ ID NO: 2371242 - RNA, 19 nt, Artificial Sequence
  Description of Artificial Sequence: Synthetic oligonucleotide
ggaagguacuguaugauca

SEQ ID NO: 2371243 - RNA, 19 nt, Artificial Sequence
  Description of Artificial Sequence: Synthetic oligonucleotide
auguuuaaucauauaaaua

SEQ ID NO: 2371244 - RNA, 19 nt, Artificial Sequence
  Description of Artificial Sequence: Synthetic oligonucleotide
uauaugcacacaggguaac

SEQ ID NO: 2371245 - RNA, 19 nt, Artificial Sequence
  Description of Artificial Sequence: Synthetic oligonucleotide
ucucauguacauagugcua

SEQ ID NO: 2371246 - RNA, 19 nt, Artificial Sequence
  Description of Artificial Sequence: Synthetic oligonucleotide
auguuugcauauaagggaa

SEQ ID NO: 2371247 - RNA, 19 nt, Artificial Sequence
  Description of Artificial Sequence: Synthetic oligonucleotide
gaugugcuuaacagggaac

SEQ ID NO: 2371248 - RNA, 19 nt, Artificial Sequence
  Description of Artificial Sequence: Synthetic oligonucleotide
ggaacgugguuagugaaag

SEQ ID NO: 2371249 - RNA, 19 nt, Artificial Sequence
  Description of Artificial Sequence: Synthetic oligonucleotide
cucugagcacacaacugug

SEQ ID NO: 2371250 - RNA, 19 nt, Artificial Sequence
  Description of Artificial Sequence: Synthetic oligonucleotide
gaagguauauccagguuua

SEQ ID NO: 2371251 - RNA, 19 nt, Artificial Sequence
  Description of Artificial Sequence: Synthetic oligonucleotide
augucauaaaccacauuga

SEQ ID NO: 2371252 - RNA, 19 nt, Artificial Sequence
  Description of Artificial Sequence: Synthetic oligonucleotide
uugaagguauauccagguu

SEQ ID NO: 2371253 - RNA, 19 nt, Artificial Sequence
  Description of Artificial Sequence: Synthetic oligonucleotide
gacaguaauuguguuuaca

SEQ ID NO: 2371254 - RNA, 19 nt, Artificial Sequence
  Description of Artificial Sequence: Synthetic oligonucleotide
uuuagucaucacucacuuc

SEQ ID NO: 2371255 - RNA, 19 nt, Artificial Sequence
  Description of Artificial Sequence: Synthetic oligonucleotide
uccuguaggaagguacugu

SEQ ID NO: 2371256 - RNA, 19 nt, Artificial Sequence
  Description of Artificial Sequence: Synthetic oligonucleotide
uugcauccagaaccaacac

SEQ ID NO: 2371257 - RNA, 19 nt, Artificial Sequence
  Description of Artificial Sequence: Synthetic oligonucleotide
gguuagugaaaggagauaa

SEQ ID NO: 2371258 - RNA, 19 nt, Artificial Sequence
  Description of Artificial Sequence: Synthetic oligonucleotide
ucccuauauuaaacagaug

SEQ ID NO: 2371259 - RNA, 19 nt, Artificial Sequence
  Description of Artificial Sequence: Synthetic oligonucleotide
cuuuuagucaucacucacu

SEQ ID NO: 2371260 - RNA, 19 nt, Artificial Sequence
  Description of Artificial Sequence: Synthetic oligonucleotide
acauuaagaauuaccugau

SEQ ID NO: 2371261 - RNA, 19 nt, Artificial Sequence
  Description of Artificial Sequence: Synthetic oligonucleotide
uaugcacacaggguaacua

SEQ ID NO: 2371262 - RNA, 19 nt, Artificial Sequence
  Description of Artificial Sequence: Synthetic oligonucleotide
cauguuaguaauacuucua

SEQ ID NO: 2371263 - RNA, 19 nt, Artificial Sequence
  Description of Artificial Sequence: Synthetic oligonucleotide
caaauuagccaguaauccu

SEQ ID NO: 2371264 - RNA, 19 nt, Artificial Sequence
  Description of Artificial Sequence: Synthetic oligonucleotide
cuauaugcacacaggguaa

SEQ ID NO: 2371265 - RNA, 19 nt, Artificial Sequence
  Description of Artificial Sequence: Synthetic oligonucleotide
auaaucgguuuuauucuca

SEQ ID NO: 2371266 - RNA, 19 nt, Artificial Sequence
  Description of Artificial Sequence: Synthetic oligonucleotide
uuauggugccuaguauuga

SEQ ID NO: 2371267 - RNA, 19 nt, Artificial Sequence
  Description of Artificial Sequence: Synthetic oligonucleotide
gugcuuaacagggaacgug

SEQ ID NO: 2371268 - RNA, 19 nt, Artificial Sequence
  Description of Artificial Sequence: Synthetic oligonucleotide
ccacucuuaauccuugaag

SEQ ID NO: 2371269 - RNA, 19 nt, Artificial Sequence
  Description of Artificial Sequence: Synthetic oligonucleotide
uuaauccuugaagguauau

SEQ ID NO: 2371270 - RNA, 19 nt, Artificial Sequence
  Description of Artificial Sequence: Synthetic oligonucleotide
uguucacauuaagaauuac

SEQ ID NO: 2371271 - RNA, 19 nt, Artificial Sequence
  Description of Artificial Sequence: Synthetic oligonucleotide
cugugcuguuguuaugaug

SEQ ID NO: 2371272 - RNA, 19 nt, Artificial Sequence
  Description of Artificial Sequence: Synthetic oligonucleotide
accguguuggucugugcug

SEQ ID NO: 2371273 - RNA, 19 nt, Artificial Sequence
  Description of Artificial Sequence: Synthetic oligonucleotide
acgugguuagugaaaggag

SEQ ID NO: 2371274 - RNA, 19 nt, Artificial Sequence
  Description of Artificial Sequence: Synthetic oligonucleotide
acuguaugaucaaauguuu

SEQ ID NO: 2371275 - RNA, 19 nt, Artificial Sequence
  Description of Artificial Sequence: Synthetic oligonucleotide
ucauguacauagugcuaau

SEQ ID NO: 2371276 - RNA, 19 nt, Artificial Sequence
  Description of Artificial Sequence: Synthetic oligonucleotide
uagcucuaauguuugcaua

SEQ ID NO: 2371277 - RNA, 19 nt, Artificial Sequence
  Description of Artificial Sequence: Synthetic oligonucleotide
auacuucuaacaguauaaa

SEQ ID NO: 2371278 - RNA, 19 nt, Artificial Sequence
  Description of Artificial Sequence: Synthetic oligonucleotide
cccaaauuagccaguaauc

SEQ ID NO: 2371279 - RNA, 19 nt, Artificial Sequence
  Description of Artificial Sequence: Synthetic oligonucleotide
agccaguaauccuguagga

SEQ ID NO: 2371280 - RNA, 19 nt, Artificial Sequence
  Description of Artificial Sequence: Synthetic oligonucleotide
gaaaagcugcagcagaguu

SEQ ID NO: 2371281 - RNA, 19 nt, Artificial Sequence
  Description of Artificial Sequence: Synthetic oligonucleotide
aacucgcauaaucgguuuu

SEQ ID NO: 2371282 - RNA, 19 nt, Artificial Sequence
  Description of Artificial Sequence: Synthetic oligonucleotide
ggaaguaguuaucauguua

SEQ ID NO: 2371283 - RNA, 19 nt, Artificial Sequence
  Description of Artificial Sequence: Synthetic oligonucleotide
ugugcuuaacagggaacgu

SEQ ID NO: 2371284 - RNA, 19 nt, Artificial Sequence
  Description of Artificial Sequence: Synthetic oligonucleotide
agaguugcauccagaacca

SEQ ID NO: 2371285 - RNA, 19 nt, Artificial Sequence
  Description of Artificial Sequence: Synthetic oligonucleotide
gagauaaaccuggauguua

SEQ ID NO: 2371286 - RNA, 19 nt, Artificial Sequence
  Description of Artificial Sequence: Synthetic oligonucleotide
cuuaauguuucaagaauuu

SEQ ID NO: 2371287 - RNA, 19 nt, Artificial Sequence
  Description of Artificial Sequence: Synthetic oligonucleotide
guuuacucauguacauaug

SEQ ID NO: 2371288 - RNA, 19 nt, Artificial Sequence
  Description of Artificial Sequence: Synthetic oligonucleotide
ugccuaguauugacaaaau

SEQ ID NO: 2371289 - RNA, 19 nt, Artificial Sequence
  Description of Artificial Sequence: Synthetic oligonucleotide
gcugucucuuguaauuugg

SEQ ID NO: 2371290 - RNA, 19 nt, Artificial Sequence
  Description of Artificial Sequence: Synthetic oligonucleotide
aagguacuguaugaucaaa

SEQ ID NO: 2371291 - RNA, 19 nt, Artificial Sequence
  Description of Artificial Sequence: Synthetic oligonucleotide
ugacaguaauuguguuuac

SEQ ID NO: 2371292 - RNA, 19 nt, Artificial Sequence
  Description of Artificial Sequence: Synthetic oligonucleotide
uaacucgcauaaucgguuu

SEQ ID NO: 2371293 - RNA, 19 nt, Artificial Sequence
  Description of Artificial Sequence: Synthetic oligonucleotide
acucauguacauauguauu

SEQ ID NO: 2371294 - RNA, 19 nt, Artificial Sequence
  Description of Artificial Sequence: Synthetic oligonucleotide
uaguuccuguuuacucaug

SEQ ID NO: 2371295 - RNA, 19 nt, Artificial Sequence
  Description of Artificial Sequence: Synthetic oligonucleotide
ccuuuuguucacauuaaga

SEQ ID NO: 2371296 - RNA, 19 nt, Artificial Sequence
  Description of Artificial Sequence: Synthetic oligonucleotide
cugagcacacaacugugga

SEQ ID NO: 2371297 - RNA, 19 nt, Artificial Sequence
  Description of Artificial Sequence: Synthetic oligonucleotide
gccuaguauugacaaaaug

SEQ ID NO: 2371298 - RNA, 19 nt, Artificial Sequence
  Description of Artificial Sequence: Synthetic oligonucleotide
gaaaggagauaaaccugga

SEQ ID NO: 2371299 - RNA, 19 nt, Artificial Sequence
  Description of Artificial Sequence: Synthetic oligonucleotide
agcacaacagcaggguggu

SEQ ID NO: 2371300 - RNA, 19 nt, Artificial Sequence
  Description of Artificial Sequence: Synthetic oligonucleotide
agggaacgugguuagugaa

SEQ ID NO: 2371301 - RNA, 19 nt, Artificial Sequence
  Description of Artificial Sequence: Synthetic oligonucleotide
ugaugucauaaaccacauu

SEQ ID NO: 2371302 - RNA, 19 nt, Artificial Sequence
  Description of Artificial Sequence: Synthetic oligonucleotide
ugcuaauauuaagaccuuu

SEQ ID NO: 2371303 - RNA, 19 nt, Artificial Sequence
  Description of Artificial Sequence: Synthetic oligonucleotide
guuaacucgcauaaucggu

SEQ ID NO: 2371304 - RNA, 19 nt, Artificial Sequence
  Description of Artificial Sequence: Synthetic oligonucleotide
cugauugaccguguugguc

SEQ ID NO: 2371305 - RNA, 19 nt, Artificial Sequence
  Description of Artificial Sequence: Synthetic oligonucleotide
gcucaguuaacucgcauaa

SEQ ID NO: 2371306 - RNA, 19 nt, Artificial Sequence
  Description of Artificial Sequence: Synthetic oligonucleotide
cugaacacuguuuucuagu

SEQ ID NO: 2371307 - RNA, 19 nt, Artificial Sequence
  Description of Artificial Sequence: Synthetic oligonucleotide
uuggucugugcugauuaaa

SEQ ID NO: 2371308 - RNA, 19 nt, Artificial Sequence
  Description of Artificial Sequence: Synthetic oligonucleotide
uuaccugauugaccguguu

SEQ ID NO: 2371309 - RNA, 19 nt, Artificial Sequence
  Description of Artificial Sequence: Synthetic oligonucleotide
cacuguuuucuaguguauc

SEQ ID NO: 2371310 - RNA, 19 nt, Artificial Sequence
  Description of Artificial Sequence: Synthetic oligonucleotide
cauccagaaccaacaccug

SEQ ID NO: 2371311 - RNA, 19 nt, Artificial Sequence
  Description of Artificial Sequence: Synthetic oligonucleotide
acauuuuauggugccuagu

SEQ ID NO: 2371312 - RNA, 19 nt, Artificial Sequence
  Description of Artificial Sequence: Synthetic oligonucleotide
gugaaagcagguugagaaa

SEQ ID NO: 2371313 - RNA, 19 nt, Artificial Sequence
  Description of Artificial Sequence: Synthetic oligonucleotide
cucauguacauauguauuu

SEQ ID NO: 2371314 - RNA, 19 nt, Artificial Sequence
  Description of Artificial Sequence: Synthetic oligonucleotide
ugcucauauuucccaugau

SEQ ID NO: 2371315 - RNA, 19 nt, Artificial Sequence
  Description of Artificial Sequence: Synthetic oligonucleotide
agguacuguaugaucaaau

SEQ ID NO: 2371316 - RNA, 19 nt, Artificial Sequence
  Description of Artificial Sequence: Synthetic oligonucleotide
cucuuaauccuugaaggua

SEQ ID NO: 2371317 - RNA, 19 nt, Artificial Sequence
  Description of Artificial Sequence: Synthetic oligonucleotide
gaacacuguuuucuagugu

SEQ ID NO: 2371318 - RNA, 19 nt, Artificial Sequence
  Description of Artificial Sequence: Synthetic oligonucleotide
gcuuugcucauauuuccca

SEQ ID NO: 2371319 - RNA, 19 nt, Artificial Sequence
  Description of Artificial Sequence: Synthetic oligonucleotide
ugcagcagaguugcaucca

SEQ ID NO: 2371320 - RNA, 19 nt, Artificial Sequence
  Description of Artificial Sequence: Synthetic oligonucleotide
guuugcauauaagggaagu

SEQ ID NO: 2371321 - RNA, 19 nt, Artificial Sequence
  Description of Artificial Sequence: Synthetic oligonucleotide
cagggaacgugguuaguga

SEQ ID NO: 2371322 - RNA, 19 nt, Artificial Sequence
  Description of Artificial Sequence: Synthetic oligonucleotide
uauccagguuuaugacagu

SEQ ID NO: 2371323 - RNA, 19 nt, Artificial Sequence
  Description of Artificial Sequence: Synthetic oligonucleotide
gaccguguuggucugugcu

SEQ ID NO: 2371324 - RNA, 19 nt, Artificial Sequence
  Description of Artificial Sequence: Synthetic oligonucleotide
auuaccugauugaccgugu

SEQ ID NO: 2371325 - RNA, 19 nt, Artificial Sequence
  Description of Artificial Sequence: Synthetic oligonucleotide
acuguacaacuuaauguuu

SEQ ID NO: 2371326 - RNA, 19 nt, Artificial Sequence
  Description of Artificial Sequence: Synthetic oligonucleotide
ucgcauaaucgguuuuauu

SEQ ID NO: 2371327 - RNA, 19 nt, Artificial Sequence
  Description of Artificial Sequence: Synthetic oligonucleotide
acugugcuguuguuaugau

SEQ ID NO: 2371328 - RNA, 19 nt, Artificial Sequence
  Description of Artificial Sequence: Synthetic oligonucleotide
cacuauaugcacacagggu

SEQ ID NO: 2371329 - RNA, 19 nt, Artificial Sequence
  Description of Artificial Sequence: Synthetic oligonucleotide
uuguuaugaugugcuuaac

SEQ ID NO: 2371330 - RNA, 19 nt, Artificial Sequence
  Description of Artificial Sequence: Synthetic oligonucleotide
guuagugaaaggagauaaa

SEQ ID NO: 2371331 - RNA, 19 nt, Artificial Sequence
  Description of Artificial Sequence: Synthetic oligonucleotide
ugaccguguuggucugugc

SEQ ID NO: 2371332 - RNA, 19 nt, Artificial Sequence
  Description of Artificial Sequence: Synthetic oligonucleotide
guauugacaaaauguuauu

SEQ ID NO: 2371333 - RNA, 19 nt, Artificial Sequence
  Description of Artificial Sequence: Synthetic oligonucleotide
cucaucggggcagacucug

SEQ ID NO: 2371334 - RNA, 19 nt, Artificial Sequence
  Description of Artificial Sequence: Synthetic oligonucleotide
auguuacuguacaacuuaa

SEQ ID NO: 2371335 - RNA, 19 nt, Artificial Sequence
  Description of Artificial Sequence: Synthetic oligonucleotide
auccagguuuaugacagua

SEQ ID NO: 2371336 - RNA, 19 nt, Artificial Sequence
  Description of Artificial Sequence: Synthetic oligonucleotide
aagguauauccagguuuau

SEQ ID NO: 2371337 - RNA, 19 nt, Artificial Sequence
  Description of Artificial Sequence: Synthetic oligonucleotide
gcugcagcagaguugcauc

SEQ ID NO: 2371338 - RNA, 19 nt, Artificial Sequence
  Description of Artificial Sequence: Synthetic oligonucleotide
aggguggucuggaagcuca

SEQ ID NO: 2371339 - RNA, 19 nt, Artificial Sequence
  Description of Artificial Sequence: Synthetic oligonucleotide
gugcuguuguuaugaugug

SEQ ID NO: 2371340 - RNA, 19 nt, Artificial Sequence
  Description of Artificial Sequence: Synthetic oligonucleotide
acaggguaacuaaaacaaa

SEQ ID NO: 2371341 - RNA, 19 nt, Artificial Sequence
  Description of Artificial Sequence: Synthetic oligonucleotide
gcagcuuugcucauauuuc

SEQ ID NO: 2371342 - RNA, 19 nt, Artificial Sequence
  Description of Artificial Sequence: Synthetic oligonucleotide
guacaacuuaauguuucaa

SEQ ID NO: 2371343 - RNA, 19 nt, Artificial Sequence
  Description of Artificial Sequence: Synthetic oligonucleotide
cuguuuucuaguguaucaa

SEQ ID NO: 2371344 - RNA, 19 nt, Artificial Sequence
  Description of Artificial Sequence: Synthetic oligonucleotide
ccaugaugucauaaaccac

SEQ ID NO: 2371345 - RNA, 19 nt, Artificial Sequence
  Description of Artificial Sequence: Synthetic oligonucleotide
gguuuaugacaguaauugu

SEQ ID NO: 2371346 - RNA, 19 nt, Artificial Sequence
  Description of Artificial Sequence: Synthetic oligonucleotide
acucgcauaaucgguuuua

SEQ ID NO: 2371347 - RNA, 19 nt, Artificial Sequence
  Description of Artificial Sequence: Synthetic oligonucleotide
auuagccaguaauccugua

SEQ ID NO: 2371348 - RNA, 19 nt, Artificial Sequence
  Description of Artificial Sequence: Synthetic oligonucleotide
aggcaucuaguuccuguuu

SEQ ID NO: 2371349 - RNA, 19 nt, Artificial Sequence
  Description of Artificial Sequence: Synthetic oligonucleotide
caaagccacucuuaauccu

SEQ ID NO: 2371350 - RNA, 19 nt, Artificial Sequence
  Description of Artificial Sequence: Synthetic oligonucleotide
uuggaccucuucucaugua

SEQ ID NO: 2371351 - RNA, 19 nt, Artificial Sequence
  Description of Artificial Sequence: Synthetic oligonucleotide
ggcaucuaguuccuguuua

SEQ ID NO: 2371352 - RNA, 19 nt, Artificial Sequence
  Description of Artificial Sequence: Synthetic oligonucleotide
gaccucuucucauguacau

SEQ ID NO: 2371353 - RNA, 19 nt, Artificial Sequence
  Description of Artificial Sequence: Synthetic oligonucleotide
cacucacuucacugugcug

SEQ ID NO: 2371354 - RNA, 19 nt, Artificial Sequence
  Description of Artificial Sequence: Synthetic oligonucleotide
cuuaauccuugaagguaua

SEQ ID NO: 2371355 - RNA, 19 nt, Artificial Sequence
  Description of Artificial Sequence: Synthetic oligonucleotide
uauuucccaugaugucaua

SEQ ID NO: 2371356 - RNA, 19 nt, Artificial Sequence
  Description of Artificial Sequence: Synthetic oligonucleotide
guuggucugugcugauuaa

SEQ ID NO: 2371357 - RNA, 19 nt, Artificial Sequence
  Description of Artificial Sequence: Synthetic oligonucleotide
cuaguuccuguuuacucau

SEQ ID NO: 2371358 - RNA, 19 nt, Artificial Sequence
  Description of Artificial Sequence: Synthetic oligonucleotide
cgugguuagugaaaggaga

SEQ ID NO: 2371359 - RNA, 19 nt, Artificial Sequence
  Description of Artificial Sequence: Synthetic oligonucleotide
gagaagcugcucaguuaac

SEQ ID NO: 2371360 - RNA, 19 nt, Artificial Sequence
  Description of Artificial Sequence: Synthetic oligonucleotide
acacaacuguggaagugaa

SEQ ID NO: 2371361 - RNA, 19 nt, Artificial Sequence
  Description of Artificial Sequence: Synthetic oligonucleotide
accugacauuccucgcuaa

SEQ ID NO: 2371362 - RNA, 19 nt, Artificial Sequence
  Description of Artificial Sequence: Synthetic oligonucleotide
cauguacauagugcuaaua

SEQ ID NO: 2371363 - RNA, 19 nt, Artificial Sequence
  Description of Artificial Sequence: Synthetic oligonucleotide
auguaucacugaacacugu

SEQ ID NO: 2371364 - RNA, 19 nt, Artificial Sequence
  Description of Artificial Sequence: Synthetic oligonucleotide
cuaguguaucaaauucuuu

SEQ ID NO: 2371365 - RNA, 19 nt, Artificial Sequence
  Description of Artificial Sequence: Synthetic oligonucleotide
gcuaauauuaagaccuuuu

SEQ ID NO: 2371366 - RNA, 19 nt, Artificial Sequence
  Description of Artificial Sequence: Synthetic oligonucleotide
ccaacaccugacauuccuc

SEQ ID NO: 2371367 - RNA, 19 nt, Artificial Sequence
  Description of Artificial Sequence: Synthetic oligonucleotide
gcacacaacuguggaagug

SEQ ID NO: 2371368 - RNA, 19 nt, Artificial Sequence
  Description of Artificial Sequence: Synthetic oligonucleotide
cuuaacagggaacgugguu

SEQ ID NO: 2371369 - RNA, 19 nt, Artificial Sequence
  Description of Artificial Sequence: Synthetic oligonucleotide
guaauccuguaggaaggua

SEQ ID NO: 2371370 - RNA, 19 nt, Artificial Sequence
  Description of Artificial Sequence: Synthetic oligonucleotide
cuguuuacucauguacaua

SEQ ID NO: 2371371 - RNA, 19 nt, Artificial Sequence
  Description of Artificial Sequence: Synthetic oligonucleotide
cagguuuaugacaguaauu

SEQ ID NO: 2371372 - RNA, 19 nt, Artificial Sequence
  Description of Artificial Sequence: Synthetic oligonucleotide
cucuuguaauuuggaccuc

SEQ ID NO: 2371373 - RNA, 19 nt, Artificial Sequence
  Description of Artificial Sequence: Synthetic oligonucleotide
ggugccuaguauugacaaa

SEQ ID NO: 2371374 - RNA, 19 nt, Artificial Sequence
  Description of Artificial Sequence: Synthetic oligonucleotide
cauuaagaauuaccugauu

SEQ ID NO: 2371375 - RNA, 19 nt, Artificial Sequence
  Description of Artificial Sequence: Synthetic oligonucleotide
cuuguaauuuggaccucuu

SEQ ID NO: 2371376 - RNA, 19 nt, Artificial Sequence
  Description of Artificial Sequence: Synthetic oligonucleotide
ggaccucuucucauguaca

SEQ ID NO: 2371377 - RNA, 19 nt, Artificial Sequence
  Description of Artificial Sequence: Synthetic oligonucleotide
gcagguugagaaaccaucu

SEQ ID NO: 2371378 - RNA, 19 nt, Artificial Sequence
  Description of Artificial Sequence: Synthetic oligonucleotide
caccugacauuccucgcua

SEQ ID NO: 2371379 - RNA, 19 nt, Artificial Sequence
  Description of Artificial Sequence: Synthetic oligonucleotide
gccacucuuaauccuugaa

SEQ ID NO: 2371380 - RNA, 19 nt, Artificial Sequence
  Description of Artificial Sequence: Synthetic oligonucleotide
guaauacuucuaacaguau

SEQ ID NO: 2371381 - RNA, 19 nt, Artificial Sequence
  Description of Artificial Sequence: Synthetic oligonucleotide
caucuaguuccuguuuacu

SEQ ID NO: 2371382 - RNA, 19 nt, Artificial Sequence
  Description of Artificial Sequence: Synthetic oligonucleotide
gccaguaauccuguaggaa

SEQ ID NO: 2371383 - RNA, 19 nt, Artificial Sequence
  Description of Artificial Sequence: Synthetic oligonucleotide
ccccaaauuagccaguaau

SEQ ID NO: 2371384 - RNA, 19 nt, Artificial Sequence
  Description of Artificial Sequence: Synthetic oligonucleotide
ggucugugcugauuaaauu

SEQ ID NO: 2371385 - RNA, 19 nt, Artificial Sequence
  Description of Artificial Sequence: Synthetic oligonucleotide
cauugagaagcugcucagu

SEQ ID NO: 2371386 - RNA, 19 nt, Artificial Sequence
  Description of Artificial Sequence: Synthetic oligonucleotide
ccagguuuaugacaguaau

SEQ ID NO: 2371387 - RNA, 19 nt, Artificial Sequence
  Description of Artificial Sequence: Synthetic oligonucleotide
gggaacgugguuagugaaa

SEQ ID NO: 2371388 - RNA, 19 nt, Artificial Sequence
  Description of Artificial Sequence: Synthetic oligonucleotide
ccuguuuacucauguacau

SEQ ID NO: 2371389 - RNA, 19 nt, Artificial Sequence
  Description of Artificial Sequence: Synthetic oligonucleotide
caggguggucuggaagcuc

SEQ ID NO: 2371390 - RNA, 19 nt, Artificial Sequence
  Description of Artificial Sequence: Synthetic oligonucleotide
gaguugcauccagaaccaa

SEQ ID NO: 2371391 - RNA, 19 nt, Artificial Sequence
  Description of Artificial Sequence: Synthetic oligonucleotide
ggauguuacuguacaacuu

SEQ ID NO: 2371392 - RNA, 19 nt, Artificial Sequence
  Description of Artificial Sequence: Synthetic oligonucleotide
ccuggauguuacuguacaa

SEQ ID NO: 2371393 - RNA, 19 nt, Artificial Sequence
  Description of Artificial Sequence: Synthetic oligonucleotide
cuguuguuaugaugugcuu

SEQ ID NO: 2371394 - RNA, 19 nt, Artificial Sequence
  Description of Artificial Sequence: Synthetic oligonucleotide
gcucuaauguuugcauaua

SEQ ID NO: 2371395 - RNA, 19 nt, Artificial Sequence
  Description of Artificial Sequence: Synthetic oligonucleotide
cucgcauaaucgguuuuau

SEQ ID NO: 2371396 - RNA, 19 nt, Artificial Sequence
  Description of Artificial Sequence: Synthetic oligonucleotide
ccugacauuccucgcuaaa

SEQ ID NO: 2371397 - RNA, 19 nt, Artificial Sequence
  Description of Artificial Sequence: Synthetic oligonucleotide
ggaagcucaucggggcaga

SEQ ID NO: 2371398 - RNA, 19 nt, Artificial Sequence
  Description of Artificial Sequence: Synthetic oligonucleotide
cucaguuaacucgcauaau

SEQ ID NO: 2371399 - RNA, 19 nt, Artificial Sequence
  Description of Artificial Sequence: Synthetic oligonucleotide
ggagauaaaccuggauguu

SEQ ID NO: 2371400 - RNA, 19 nt, Artificial Sequence
  Description of Artificial Sequence: Synthetic oligonucleotide
ccguguuggucugugcuga

SEQ ID NO: 2371401 - RNA, 19 nt, Artificial Sequence
  Description of Artificial Sequence: Synthetic oligonucleotide
cugcucaguuaacucgcau

SEQ ID NO: 2371402 - RNA, 19 nt, Artificial Sequence
  Description of Artificial Sequence: Synthetic oligonucleotide
gcuuaacagggaacguggu

SEQ ID NO: 2371403 - RNA, 19 nt, Artificial Sequence
  Description of Artificial Sequence: Synthetic oligonucleotide
ccugauugaccguguuggu

SEQ ID NO: 2371404 - RNA, 19 nt, Artificial Sequence
  Description of Artificial Sequence: Synthetic oligonucleotide
gcacaacagcagggugguc

SEQ ID NO: 2371405 - RNA, 19 nt, Artificial Sequence
  Description of Artificial Sequence: Synthetic oligonucleotide
ggguggucuggaagcucau

SEQ ID NO: 2371406 - RNA, 19 nt, Artificial Sequence
  Description of Artificial Sequence: Synthetic oligonucleotide
aauaaagaccugcaaaggc

SEQ ID NO: 2371407 - RNA, 19 nt, Artificial Sequence
  Description of Artificial Sequence: Synthetic oligonucleotide
uauacuagaagaaugaaac

SEQ ID NO: 2371408 - RNA, 19 nt, Artificial Sequence
  Description of Artificial Sequence: Synthetic oligonucleotide
auagauuaacuucugaccc

SEQ ID NO: 2371409 - RNA, 19 nt, Artificial Sequence
  Description of Artificial Sequence: Synthetic oligonucleotide
aauugaagcagacaugcac

SEQ ID NO: 2371410 - RNA, 19 nt, Artificial Sequence
  Description of Artificial Sequence: Synthetic oligonucleotide
aauguuaagucaaagaaag

SEQ ID NO: 2371411 - RNA, 19 nt, Artificial Sequence
  Description of Artificial Sequence: Synthetic oligonucleotide
aagucaaagaaagagaaag

SEQ ID NO: 2371412 - RNA, 19 nt, Artificial Sequence
  Description of Artificial Sequence: Synthetic oligonucleotide
aauaguuuggcauuucugu

SEQ ID NO: 2371413 - RNA, 19 nt, Artificial Sequence
  Description of Artificial Sequence: Synthetic oligonucleotide
aucaauuucauauuuacgu

SEQ ID NO: 2371414 - RNA, 19 nt, Artificial Sequence
  Description of Artificial Sequence: Synthetic oligonucleotide
uguauaguauuuuacacug

SEQ ID NO: 2371415 - RNA, 19 nt, Artificial Sequence
  Description of Artificial Sequence: Synthetic oligonucleotide
guugccauaaaacagacug

SEQ ID NO: 2371416 - RNA, 19 nt, Artificial Sequence
  Description of Artificial Sequence: Synthetic oligonucleotide
ucgaugucgaucuugaagg

SEQ ID NO: 2371417 - RNA, 19 nt, Artificial Sequence
  Description of Artificial Sequence: Synthetic oligonucleotide
uguuaagucaaagaaagag

SEQ ID NO: 2371418 - RNA, 19 nt, Artificial Sequence
  Description of Artificial Sequence: Synthetic oligonucleotide
agaauaaagaccugcaaag

SEQ ID NO: 2371419 - RNA, 19 nt, Artificial Sequence
  Description of Artificial Sequence: Synthetic oligonucleotide
auuuacgugaagcagcaac

SEQ ID NO: 2371420 - RNA, 19 nt, Artificial Sequence
  Description of Artificial Sequence: Synthetic oligonucleotide
aauguuaucuacugccuag

SEQ ID NO: 2371421 - RNA, 19 nt, Artificial Sequence
  Description of Artificial Sequence: Synthetic oligonucleotide
uucagagugaccugcaugg

SEQ ID NO: 2371422 - RNA, 19 nt, Artificial Sequence
  Description of Artificial Sequence: Synthetic oligonucleotide
cuuucagugccuuuuaccg

SEQ ID NO: 2371423 - RNA, 19 nt, Artificial Sequence
  Description of Artificial Sequence: Synthetic oligonucleotide
uucuagguagcaaagauuc

SEQ ID NO: 2371424 - RNA, 19 nt, Artificial Sequence
  Description of Artificial Sequence: Synthetic oligonucleotide
cauauuuacgugaagcagc

SEQ ID NO: 2371425 - RNA, 19 nt, Artificial Sequence
  Description of Artificial Sequence: Synthetic oligonucleotide
uuucauauuuacgugaagc

SEQ ID NO: 2371426 - RNA, 19 nt, Artificial Sequence
  Description of Artificial Sequence: Synthetic oligonucleotide
aaagccauuauccaguguu

SEQ ID NO: 2371427 - RNA, 19 nt, Artificial Sequence
  Description of Artificial Sequence: Synthetic oligonucleotide
uacuagaagaaugaaaccc

SEQ ID NO: 2371428 - RNA, 19 nt, Artificial Sequence
  Description of Artificial Sequence: Synthetic oligonucleotide
ugcuaauugaagcagacau

SEQ ID NO: 2371429 - RNA, 19 nt, Artificial Sequence
  Description of Artificial Sequence: Synthetic oligonucleotide
uaaagaccugcaaaggcgg

SEQ ID NO: 2371430 - RNA, 19 nt, Artificial Sequence
  Description of Artificial Sequence: Synthetic oligonucleotide
cuaauugaagcagacaugc

SEQ ID NO: 2371431 - RNA, 19 nt, Artificial Sequence
  Description of Artificial Sequence: Synthetic oligonucleotide
auacuagaagaaugaaacc

SEQ ID NO: 2371432 - RNA, 19 nt, Artificial Sequence
  Description of Artificial Sequence: Synthetic oligonucleotide
agaagaaugaaacccagga

SEQ ID NO: 2371433 - RNA, 19 nt, Artificial Sequence
  Description of Artificial Sequence: Synthetic oligonucleotide
gaucuaguauacuagaaga

SEQ ID NO: 2371434 - RNA, 19 nt, Artificial Sequence
  Description of Artificial Sequence: Synthetic oligonucleotide
ucuggaucuaguauacuag

SEQ ID NO: 2371435 - RNA, 19 nt, Artificial Sequence
  Description of Artificial Sequence: Synthetic oligonucleotide
cagaacaugaagaaugggc

SEQ ID NO: 2371436 - RNA, 19 nt, Artificial Sequence
  Description of Artificial Sequence: Synthetic oligonucleotide
aaaggacuccccgacagcc

SEQ ID NO: 2371437 - RNA, 19 nt, Artificial Sequence
  Description of Artificial Sequence: Synthetic oligonucleotide
cuaguauacuagaagaaug

SEQ ID NO: 2371438 - RNA, 19 nt, Artificial Sequence
  Description of Artificial Sequence: Synthetic oligonucleotide
uaguauacuagaagaauga

SEQ ID NO: 2371439 - RNA, 19 nt, Artificial Sequence
  Description of Artificial Sequence: Synthetic oligonucleotide
uauuuuacacuguggaucu

SEQ ID NO: 2371440 - RNA, 19 nt, Artificial Sequence
  Description of Artificial Sequence: Synthetic oligonucleotide
ggaaauguuaucuacugcc

SEQ ID NO: 2371441 - RNA, 19 nt, Artificial Sequence
  Description of Artificial Sequence: Synthetic oligonucleotide
uuuacgugaagcagcaaca

SEQ ID NO: 2371442 - RNA, 19 nt, Artificial Sequence
  Description of Artificial Sequence: Synthetic oligonucleotide
uuguauaguauuuuacacu

SEQ ID NO: 2371443 - RNA, 19 nt, Artificial Sequence
  Description of Artificial Sequence: Synthetic oligonucleotide
acaguauguacuccugccc

SEQ ID NO: 2371444 - RNA, 19 nt, Artificial Sequence
  Description of Artificial Sequence: Synthetic oligonucleotide
guuguauaguauuuuacac

SEQ ID NO: 2371445 - RNA, 19 nt, Artificial Sequence
  Description of Artificial Sequence: Synthetic oligonucleotide
auaaagaccugcaaaggcg

SEQ ID NO: 2371446 - RNA, 19 nt, Artificial Sequence
  Description of Artificial Sequence: Synthetic oligonucleotide
ucuacugccuagaagaaua

SEQ ID NO: 2371447 - RNA, 19 nt, Artificial Sequence
  Description of Artificial Sequence: Synthetic oligonucleotide
aggaaauguuaucuacugc

SEQ ID NO: 2371448 - RNA, 19 nt, Artificial Sequence
  Description of Artificial Sequence: Synthetic oligonucleotide
guacagaacaugaagaaug

SEQ ID NO: 2371449 - RNA, 19 nt, Artificial Sequence
  Description of Artificial Sequence: Synthetic oligonucleotide
aggauuuuguccugcauag

SEQ ID NO: 2371450 - RNA, 19 nt, Artificial Sequence
  Description of Artificial Sequence: Synthetic oligonucleotide
uucuguuuacagaugcucc

SEQ ID NO: 2371451 - RNA, 19 nt, Artificial Sequence
  Description of Artificial Sequence: Synthetic oligonucleotide
uagauuaacuucugacccg

SEQ ID NO: 2371452 - RNA, 19 nt, Artificial Sequence
  Description of Artificial Sequence: Synthetic oligonucleotide
uuaacuucugacccgcuac

SEQ ID NO: 2371453 - RNA, 19 nt, Artificial Sequence
  Description of Artificial Sequence: Synthetic oligonucleotide
uagaagaauaaagaccugc

SEQ ID NO: 2371454 - RNA, 19 nt, Artificial Sequence
  Description of Artificial Sequence: Synthetic oligonucleotide
aguaucaucacugaggauu

SEQ ID NO: 2371455 - RNA, 19 nt, Artificial Sequence
  Description of Artificial Sequence: Synthetic oligonucleotide
uuuuguccugcauagauua

SEQ ID NO: 2371456 - RNA, 19 nt, Artificial Sequence
  Description of Artificial Sequence: Synthetic oligonucleotide
agacaugcacaguauguac

SEQ ID NO: 2371457 - RNA, 19 nt, Artificial Sequence
  Description of Artificial Sequence: Synthetic oligonucleotide
agauuaacuucugacccgc

SEQ ID NO: 2371458 - RNA, 19 nt, Artificial Sequence
  Description of Artificial Sequence: Synthetic oligonucleotide
ucuuucagugccuuuuacc

SEQ ID NO: 2371459 - RNA, 19 nt, Artificial Sequence
  Description of Artificial Sequence: Synthetic oligonucleotide
agucaaagaaagagaaagc

SEQ ID NO: 2371460 - RNA, 19 nt, Artificial Sequence
  Description of Artificial Sequence: Synthetic oligonucleotide
ugaagaaugggcuucuuuu

SEQ ID NO: 2371461 - RNA, 19 nt, Artificial Sequence
  Description of Artificial Sequence: Synthetic oligonucleotide
agcaguaucaucacugagg

SEQ ID NO: 2371462 - RNA, 19 nt, Artificial Sequence
  Description of Artificial Sequence: Synthetic oligonucleotide
ucaauaguuuggcauuucu

SEQ ID NO: 2371463 - RNA, 19 nt, Artificial Sequence
  Description of Artificial Sequence: Synthetic oligonucleotide
guauuuuacacuguggauc

SEQ ID NO: 2371464 - RNA, 19 nt, Artificial Sequence
  Description of Artificial Sequence: Synthetic oligonucleotide
accaauguuaagucaaaga

SEQ ID NO: 2371465 - RNA, 19 nt, Artificial Sequence
  Description of Artificial Sequence: Synthetic oligonucleotide
ugcccuauacccuagcaga

SEQ ID NO: 2371466 - RNA, 19 nt, Artificial Sequence
  Description of Artificial Sequence: Synthetic oligonucleotide
gucgaugucgaucuugaag

SEQ ID NO: 2371467 - RNA, 19 nt, Artificial Sequence
  Description of Artificial Sequence: Synthetic oligonucleotide
accaucaauaguuuggcau

SEQ ID NO: 2371468 - RNA, 19 nt, Artificial Sequence
  Description of Artificial Sequence: Synthetic oligonucleotide
guuaucuacugccuagaag

SEQ ID NO: 2371469 - RNA, 19 nt, Artificial Sequence
  Description of Artificial Sequence: Synthetic oligonucleotide
acaaugaccaucaauaguu

SEQ ID NO: 2371470 - RNA, 19 nt, Artificial Sequence
  Description of Artificial Sequence: Synthetic oligonucleotide
uucuuucagaaaccaaugu

SEQ ID NO: 2371471 - RNA, 19 nt, Artificial Sequence
  Description of Artificial Sequence: Synthetic oligonucleotide
uccugcauagauuaacuuc

SEQ ID NO: 2371472 - RNA, 19 nt, Artificial Sequence
  Description of Artificial Sequence: Synthetic oligonucleotide
cacacuaaauuucuggauc

SEQ ID NO: 2371473 - RNA, 19 nt, Artificial Sequence
  Description of Artificial Sequence: Synthetic oligonucleotide
cuagaagaaugaaacccag

SEQ ID NO: 2371474 - RNA, 19 nt, Artificial Sequence
  Description of Artificial Sequence: Synthetic oligonucleotide
aaagcagggcaucacacua

SEQ ID NO: 2371475 - RNA, 19 nt, Artificial Sequence
  Description of Artificial Sequence: Synthetic oligonucleotide
ucuaguauacuagaagaau

SEQ ID NO: 2371476 - RNA, 19 nt, Artificial Sequence
  Description of Artificial Sequence: Synthetic oligonucleotide
agaacaugaagaaugggcu

SEQ ID NO: 2371477 - RNA, 19 nt, Artificial Sequence
  Description of Artificial Sequence: Synthetic oligonucleotide
caaguacagaacaugaaga

SEQ ID NO: 2371478 - RNA, 19 nt, Artificial Sequence
  Description of Artificial Sequence: Synthetic oligonucleotide
ucugcuaauugaagcagac

SEQ ID NO: 2371479 - RNA, 19 nt, Artificial Sequence
  Description of Artificial Sequence: Synthetic oligonucleotide
acacuaaauuucuggaucu

SEQ ID NO: 2371480 - RNA, 19 nt, Artificial Sequence
  Description of Artificial Sequence: Synthetic oligonucleotide
aacccaggaaauguuaucu

SEQ ID NO: 2371481 - RNA, 19 nt, Artificial Sequence
  Description of Artificial Sequence: Synthetic oligonucleotide
cagagcaguaucaucacug

SEQ ID NO: 2371482 - RNA, 19 nt, Artificial Sequence
  Description of Artificial Sequence: Synthetic oligonucleotide
uuuuacacuguggaucugc

SEQ ID NO: 2371483 - RNA, 19 nt, Artificial Sequence
  Description of Artificial Sequence: Synthetic oligonucleotide
auguacuccugcccuauac

SEQ ID NO: 2371484 - RNA, 19 nt, Artificial Sequence
  Description of Artificial Sequence: Synthetic oligonucleotide
ggaucuaguauacuagaag

SEQ ID NO: 2371485 - RNA, 19 nt, Artificial Sequence
  Description of Artificial Sequence: Synthetic oligonucleotide
aaauguuaucuacugccua

SEQ ID NO: 2371486 - RNA, 19 nt, Artificial Sequence
  Description of Artificial Sequence: Synthetic oligonucleotide
uucagaaaccaauguuaag

SEQ ID NO: 2371487 - RNA, 19 nt, Artificial Sequence
  Description of Artificial Sequence: Synthetic oligonucleotide
ucacauuucgccccgccga

SEQ ID NO: 2371488 - RNA, 19 nt, Artificial Sequence
  Description of Artificial Sequence: Synthetic oligonucleotide
auaguauuuuacacugugg

SEQ ID NO: 2371489 - RNA, 19 nt, Artificial Sequence
  Description of Artificial Sequence: Synthetic oligonucleotide
cacaguauguacuccugcc

SEQ ID NO: 2371490 - RNA, 19 nt, Artificial Sequence
  Description of Artificial Sequence: Synthetic oligonucleotide
uguuugguuguauaguauu

SEQ ID NO: 2371491 - RNA, 19 nt, Artificial Sequence
  Description of Artificial Sequence: Synthetic oligonucleotide
aguauuuuacacuguggau

SEQ ID NO: 2371492 - RNA, 19 nt, Artificial Sequence
  Description of Artificial Sequence: Synthetic oligonucleotide
uucuggaucuaguauacua

SEQ ID NO: 2371493 - RNA, 19 nt, Artificial Sequence
  Description of Artificial Sequence: Synthetic oligonucleotide
guagauucuagguagcaaa

SEQ ID NO: 2371494 - RNA, 19 nt, Artificial Sequence
  Description of Artificial Sequence: Synthetic oligonucleotide
ugcaaaggcggauguuugg

SEQ ID NO: 2371495 - RNA, 19 nt, Artificial Sequence
  Description of Artificial Sequence: Synthetic oligonucleotide
ugcauagauuaacuucuga

SEQ ID NO: 2371496 - RNA, 19 nt, Artificial Sequence
  Description of Artificial Sequence: Synthetic oligonucleotide
agaaagcagggcaucacac

SEQ ID NO: 2371497 - RNA, 19 nt, Artificial Sequence
  Description of Artificial Sequence: Synthetic oligonucleotide
aaccaauguuaagucaaag

SEQ ID NO: 2371498 - RNA, 19 nt, Artificial Sequence
  Description of Artificial Sequence: Synthetic oligonucleotide
uuuaccgucuccuccgggu

SEQ ID NO: 2371499 - RNA, 19 nt, Artificial Sequence
  Description of Artificial Sequence: Synthetic oligonucleotide
auuucauauuuacgugaag

SEQ ID NO: 2371500 - RNA, 19 nt, Artificial Sequence
  Description of Artificial Sequence: Synthetic oligonucleotide
acuagaagaaugaaaccca

SEQ ID NO: 2371501 - RNA, 19 nt, Artificial Sequence
  Description of Artificial Sequence: Synthetic oligonucleotide
uccgcuaccucaccacagg

SEQ ID NO: 2371502 - RNA, 19 nt, Artificial Sequence
  Description of Artificial Sequence: Synthetic oligonucleotide
gaagaauaaagaccugcaa

SEQ ID NO: 2371503 - RNA, 19 nt, Artificial Sequence
  Description of Artificial Sequence: Synthetic oligonucleotide
cugaagggucuucagagug

SEQ ID NO: 2371504 - RNA, 19 nt, Artificial Sequence
  Description of Artificial Sequence: Synthetic oligonucleotide
ugaaacccaggaaauguua

SEQ ID NO: 2371505 - RNA, 19 nt, Artificial Sequence
  Description of Artificial Sequence: Synthetic oligonucleotide
agccauuauccaguguugc

SEQ ID NO: 2371506 - RNA, 19 nt, Artificial Sequence
  Description of Artificial Sequence: Synthetic oligonucleotide
gcauagauuaacuucugac

SEQ ID NO: 2371507 - RNA, 19 nt, Artificial Sequence
  Description of Artificial Sequence: Synthetic oligonucleotide
cuaccucaccacaggaugg

SEQ ID NO: 2371508 - RNA, 19 nt, Artificial Sequence
  Description of Artificial Sequence: Synthetic oligonucleotide
uggaucuaguauacuagaa

SEQ ID NO: 2371509 - RNA, 19 nt, Artificial Sequence
  Description of Artificial Sequence: Synthetic oligonucleotide
ucugacccgcuacuggaag

SEQ ID NO: 2371510 - RNA, 19 nt, Artificial Sequence
  Description of Artificial Sequence: Synthetic oligonucleotide
uauacccuagcagagcagu

SEQ ID NO: 2371511 - RNA, 19 nt, Artificial Sequence
  Description of Artificial Sequence: Synthetic oligonucleotide
agcaacaaugaccaucaau

SEQ ID NO: 2371512 - RNA, 19 nt, Artificial Sequence
  Description of Artificial Sequence: Synthetic oligonucleotide
uccgggucgaugucgaucu

SEQ ID NO: 2371513 - RNA, 19 nt, Artificial Sequence
  Description of Artificial Sequence: Synthetic oligonucleotide
aauccgcuaccucaccaca

SEQ ID NO: 2371514 - RNA, 19 nt, Artificial Sequence
  Description of Artificial Sequence: Synthetic oligonucleotide
agagaauccgcuaccucac

SEQ ID NO: 2371515 - RNA, 19 nt, Artificial Sequence
  Description of Artificial Sequence: Synthetic oligonucleotide
uuuuaccgucuccuccggg

SEQ ID NO: 2371516 - RNA, 19 nt, Artificial Sequence
  Description of Artificial Sequence: Synthetic oligonucleotide
cucaccacaggaugguggc

SEQ ID NO: 2371517 - RNA, 19 nt, Artificial Sequence
  Description of Artificial Sequence: Synthetic oligonucleotide
acuguagauucuagguagc

SEQ ID NO: 2371518 - RNA, 19 nt, Artificial Sequence
  Description of Artificial Sequence: Synthetic oligonucleotide
ugcacaguauguacuccug

SEQ ID NO: 2371519 - RNA, 19 nt, Artificial Sequence
  Description of Artificial Sequence: Synthetic oligonucleotide
uccucgcgcucucaggagg

SEQ ID NO: 2371520 - RNA, 19 nt, Artificial Sequence
  Description of Artificial Sequence: Synthetic oligonucleotide
uguuaucuacugccuagaa

SEQ ID NO: 2371521 - RNA, 19 nt, Artificial Sequence
  Description of Artificial Sequence: Synthetic oligonucleotide
agagcaguaucaucacuga

SEQ ID NO: 2371522 - RNA, 19 nt, Artificial Sequence
  Description of Artificial Sequence: Synthetic oligonucleotide
cuugucacauuucgccccg

SEQ ID NO: 2371523 - RNA, 19 nt, Artificial Sequence
  Description of Artificial Sequence: Synthetic oligonucleotide
ucuagguagcaaagauucu

SEQ ID NO: 2371524 - RNA, 19 nt, Artificial Sequence
  Description of Artificial Sequence: Synthetic oligonucleotide
ugccauaaaacagacugua

SEQ ID NO: 2371525 - RNA, 19 nt, Artificial Sequence
  Description of Artificial Sequence: Synthetic oligonucleotide
auauuuacgugaagcagca

SEQ ID NO: 2371526 - RNA, 19 nt, Artificial Sequence
  Description of Artificial Sequence: Synthetic oligonucleotide
aaaagccauuauccagugu

SEQ ID NO: 2371527 - RNA, 19 nt, Artificial Sequence
  Description of Artificial Sequence: Synthetic oligonucleotide
agagaaagcagggcaucac

SEQ ID NO: 2371528 - RNA, 19 nt, Artificial Sequence
  Description of Artificial Sequence: Synthetic oligonucleotide
gaggauuuuguccugcaua

SEQ ID NO: 2371529 - RNA, 19 nt, Artificial Sequence
  Description of Artificial Sequence: Synthetic oligonucleotide
uagguagcaaagauucuuu

SEQ ID NO: 2371530 - RNA, 19 nt, Artificial Sequence
  Description of Artificial Sequence: Synthetic oligonucleotide
agcagacaugcacaguaug

SEQ ID NO: 2371531 - RNA, 19 nt, Artificial Sequence
  Description of Artificial Sequence: Synthetic oligonucleotide
uuacacuguggaucugcag

SEQ ID NO: 2371532 - RNA, 19 nt, Artificial Sequence
  Description of Artificial Sequence: Synthetic oligonucleotide
uaacuucugacccgcuacu

SEQ ID NO: 2371533 - RNA, 19 nt, Artificial Sequence
  Description of Artificial Sequence: Synthetic oligonucleotide
uaguuuggcauuucuguuu

SEQ ID NO: 2371534 - RNA, 19 nt, Artificial Sequence
  Description of Artificial Sequence: Synthetic oligonucleotide
aagagaaagcagggcauca

SEQ ID NO: 2371535 - RNA, 19 nt, Artificial Sequence
  Description of Artificial Sequence: Synthetic oligonucleotide
augucgaucuugaaggucu

SEQ ID NO: 2371536 - RNA, 19 nt, Artificial Sequence
  Description of Artificial Sequence: Synthetic oligonucleotide
uucgccgcaagcucggcca

SEQ ID NO: 2371537 - RNA, 19 nt, Artificial Sequence
  Description of Artificial Sequence: Synthetic oligonucleotide
agacuguagauucuaggua

SEQ ID NO: 2371538 - RNA, 19 nt, Artificial Sequence
  Description of Artificial Sequence: Synthetic oligonucleotide
gagcaguaucaucacugag

SEQ ID NO: 2371539 - RNA, 19 nt, Artificial Sequence
  Description of Artificial Sequence: Synthetic oligonucleotide
gaauccgcuaccucaccac

SEQ ID NO: 2371540 - RNA, 19 nt, Artificial Sequence
  Description of Artificial Sequence: Synthetic oligonucleotide
gagaaagcagggcaucaca

SEQ ID NO: 2371541 - RNA, 19 nt, Artificial Sequence
  Description of Artificial Sequence: Synthetic oligonucleotide
uuauccaguguugccauaa

SEQ ID NO: 2371542 - RNA, 19 nt, Artificial Sequence
  Description of Artificial Sequence: Synthetic oligonucleotide
acagaacaugaagaauggg

SEQ ID NO: 2371543 - RNA, 19 nt, Artificial Sequence
  Description of Artificial Sequence: Synthetic oligonucleotide
auaaaacagacuguagauu

SEQ ID NO: 2371544 - RNA, 19 nt, Artificial Sequence
  Description of Artificial Sequence: Synthetic oligonucleotide
uaucuacugccuagaagaa

SEQ ID NO: 2371545 - RNA, 19 nt, Artificial Sequence
  Description of Artificial Sequence: Synthetic oligonucleotide
gucacauuucgccccgccg

SEQ ID NO: 2371546 - RNA, 19 nt, Artificial Sequence
  Description of Artificial Sequence: Synthetic oligonucleotide
guauacuagaagaaugaaa

SEQ ID NO: 2371547 - RNA, 19 nt, Artificial Sequence
  Description of Artificial Sequence: Synthetic oligonucleotide
agaauccgcuaccucacca

SEQ ID NO: 2371548 - RNA, 19 nt, Artificial Sequence
  Description of Artificial Sequence: Synthetic oligonucleotide
gauccucgcgcucucagga

SEQ ID NO: 2371549 - RNA, 19 nt, Artificial Sequence
  Description of Artificial Sequence: Synthetic oligonucleotide
aucaucacugaggauuuug

SEQ ID NO: 2371550 - RNA, 19 nt, Artificial Sequence
  Description of Artificial Sequence: Synthetic oligonucleotide
ucgaucuugaaggucugcu

SEQ ID NO: 2371551 - RNA, 19 nt, Artificial Sequence
  Description of Artificial Sequence: Synthetic oligonucleotide
acagccgcagagaauccgc

SEQ ID NO: 2371552 - RNA, 19 nt, Artificial Sequence
  Description of Artificial Sequence: Synthetic oligonucleotide
ugucacauuucgccccgcc

SEQ ID NO: 2371553 - RNA, 19 nt, Artificial Sequence
  Description of Artificial Sequence: Synthetic oligonucleotide
ccuuuuaccgucuccuccg

SEQ ID NO: 2371554 - RNA, 19 nt, Artificial Sequence
  Description of Artificial Sequence: Synthetic oligonucleotide
gaaaggacuccccgacagc

SEQ ID NO: 2371555 - RNA, 19 nt, Artificial Sequence
  Description of Artificial Sequence: Synthetic oligonucleotide
cuagcagagcaguaucauc

SEQ ID NO: 2371556 - RNA, 19 nt, Artificial Sequence
  Description of Artificial Sequence: Synthetic oligonucleotide
auuaacuucugacccgcua

SEQ ID NO: 2371557 - RNA, 19 nt, Artificial Sequence
  Description of Artificial Sequence: Synthetic oligonucleotide
uguugccauaaaacagacu

SEQ ID NO: 2371558 - RNA, 19 nt, Artificial Sequence
  Description of Artificial Sequence: Synthetic oligonucleotide
gcuaccucaccacaggaug

SEQ ID NO: 2371559 - RNA, 19 nt, Artificial Sequence
  Description of Artificial Sequence: Synthetic oligonucleotide
aguauacuagaagaaugaa

SEQ ID NO: 2371560 - RNA, 19 nt, Artificial Sequence
  Description of Artificial Sequence: Synthetic oligonucleotide
gguagcaaagauucuuuca

SEQ ID NO: 2371561 - RNA, 19 nt, Artificial Sequence
  Description of Artificial Sequence: Synthetic oligonucleotide
aaacagacuguagauucua

SEQ ID NO: 2371562 - RNA, 19 nt, Artificial Sequence
  Description of Artificial Sequence: Synthetic oligonucleotide
aagccauuauccaguguug

SEQ ID NO: 2371563 - RNA, 19 nt, Artificial Sequence
  Description of Artificial Sequence: Synthetic oligonucleotide
cugcccuauacccuagcag

SEQ ID NO: 2371564 - RNA, 19 nt, Artificial Sequence
  Description of Artificial Sequence: Synthetic oligonucleotide
cuggaucuaguauacuaga

SEQ ID NO: 2371565 - RNA, 19 nt, Artificial Sequence
  Description of Artificial Sequence: Synthetic oligonucleotide
uacgugaagcagcaacaau

SEQ ID NO: 2371566 - RNA, 19 nt, Artificial Sequence
  Description of Artificial Sequence: Synthetic oligonucleotide
gaagggucuucagagugac

SEQ ID NO: 2371567 - RNA, 19 nt, Artificial Sequence
  Description of Artificial Sequence: Synthetic oligonucleotide
aacuucugacccgcuacug

SEQ ID NO: 2371568 - RNA, 19 nt, Artificial Sequence
  Description of Artificial Sequence: Synthetic oligonucleotide
gacagccgcagagaauccg

SEQ ID NO: 2371569 - RNA, 19 nt, Artificial Sequence
  Description of Artificial Sequence: Synthetic oligonucleotide
cugacccgcuacuggaagg

SEQ ID NO: 2371570 - RNA, 19 nt, Artificial Sequence
  Description of Artificial Sequence: Synthetic oligonucleotide
aucaauaguuuggcauuuc

SEQ ID NO: 2371571 - RNA, 19 nt, Artificial Sequence
  Description of Artificial Sequence: Synthetic oligonucleotide
agcggugccuccucacgcg

SEQ ID NO: 2371572 - RNA, 19 nt, Artificial Sequence
  Description of Artificial Sequence: Synthetic oligonucleotide
ugucgaucuugaaggucug

SEQ ID NO: 2371573 - RNA, 19 nt, Artificial Sequence
  Description of Artificial Sequence: Synthetic oligonucleotide
uuacgugaagcagcaacaa

SEQ ID NO: 2371574 - RNA, 19 nt, Artificial Sequence
  Description of Artificial Sequence: Synthetic oligonucleotide
aucuaguauacuagaagaa

SEQ ID NO: 2371575 - RNA, 19 nt, Artificial Sequence
  Description of Artificial Sequence: Synthetic oligonucleotide
augaagaaugggcuucuuu

SEQ ID NO: 2371576 - RNA, 19 nt, Artificial Sequence
  Description of Artificial Sequence: Synthetic oligonucleotide
cuauacccuagcagagcag

SEQ ID NO: 2371577 - RNA, 19 nt, Artificial Sequence
  Description of Artificial Sequence: Synthetic oligonucleotide
aaaccaauguuaagucaaa

SEQ ID NO: 2371578 - RNA, 19 nt, Artificial Sequence
  Description of Artificial Sequence: Synthetic oligonucleotide
cuuuuaccgucuccuccgg

SEQ ID NO: 2371579 - RNA, 19 nt, Artificial Sequence
  Description of Artificial Sequence: Synthetic oligonucleotide
cagacuguagauucuaggu

SEQ ID NO: 2371580 - RNA, 19 nt, Artificial Sequence
  Description of Artificial Sequence: Synthetic oligonucleotide
uuuguccugcauagauuaa

SEQ ID NO: 2371581 - RNA, 19 nt, Artificial Sequence
  Description of Artificial Sequence: Synthetic oligonucleotide
cagcaucugcuaauugaag

SEQ ID NO: 2371582 - RNA, 19 nt, Artificial Sequence
  Description of Artificial Sequence: Synthetic oligonucleotide
cagagugaccugcauggug

SEQ ID NO: 2371583 - RNA, 19 nt, Artificial Sequence
  Description of Artificial Sequence: Synthetic oligonucleotide
gaugucgaucuugaagguc

SEQ ID NO: 2371584 - RNA, 19 nt, Artificial Sequence
  Description of Artificial Sequence: Synthetic oligonucleotide
aaggacuccccgacagccg

SEQ ID NO: 2371585 - RNA, 19 nt, Artificial Sequence
  Description of Artificial Sequence: Synthetic oligonucleotide
uucccuuuucagauucaau

SEQ ID NO: 2371586 - RNA, 19 nt, Artificial Sequence
  Description of Artificial Sequence: Synthetic oligonucleotide
guggccgcgauccucgcgc

SEQ ID NO: 2371587 - RNA, 19 nt, Artificial Sequence
  Description of Artificial Sequence: Synthetic oligonucleotide
gaaggcgucuucccuuuuc

SEQ ID NO: 2371588 - RNA, 19 nt, Artificial Sequence
  Description of Artificial Sequence: Synthetic oligonucleotide
uuaccgucuccuccggguc

SEQ ID NO: 2371589 - RNA, 19 nt, Artificial Sequence
  Description of Artificial Sequence: Synthetic oligonucleotide
aagggucuucagagugacc

SEQ ID NO: 2371590 - RNA, 19 nt, Artificial Sequence
  Description of Artificial Sequence: Synthetic oligonucleotide
gagaauccgcuaccucacc

SEQ ID NO: 2371591 - RNA, 19 nt, Artificial Sequence
  Description of Artificial Sequence: Synthetic oligonucleotide
gaaagcagggcaucacacu

SEQ ID NO: 2371592 - RNA, 19 nt, Artificial Sequence
  Description of Artificial Sequence: Synthetic oligonucleotide
ggcgcgaaaggacuccccg

SEQ ID NO: 2371593 - RNA, 19 nt, Artificial Sequence
  Description of Artificial Sequence: Synthetic oligonucleotide
uauccaguguugccauaaa

SEQ ID NO: 2371594 - RNA, 19 nt, Artificial Sequence
  Description of Artificial Sequence: Synthetic oligonucleotide
ucucgcucgccccggggcc

SEQ ID NO: 2371595 - RNA, 19 nt, Artificial Sequence
  Description of Artificial Sequence: Synthetic oligonucleotide
aguauguacuccugcccua

SEQ ID NO: 2371596 - RNA, 19 nt, Artificial Sequence
  Description of Artificial Sequence: Synthetic oligonucleotide
gcuaauugaagcagacaug

SEQ ID NO: 2371597 - RNA, 19 nt, Artificial Sequence
  Description of Artificial Sequence: Synthetic oligonucleotide
auguuaucuacugccuaga

SEQ ID NO: 2371598 - RNA, 19 nt, Artificial Sequence
  Description of Artificial Sequence: Synthetic oligonucleotide
aagaccugcaaaggcggau

SEQ ID NO: 2371599 - RNA, 19 nt, Artificial Sequence
  Description of Artificial Sequence: Synthetic oligonucleotide
cacauuucgccccgccgag

SEQ ID NO: 2371600 - RNA, 19 nt, Artificial Sequence
  Description of Artificial Sequence: Synthetic oligonucleotide
cucgucguccccuggccgc

SEQ ID NO: 2371601 - RNA, 19 nt, Artificial Sequence
  Description of Artificial Sequence: Synthetic oligonucleotide
cauuucgccccgccgaguc

SEQ ID NO: 2371602 - RNA, 19 nt, Artificial Sequence
  Description of Artificial Sequence: Synthetic oligonucleotide
gaccaucaauaguuuggca

SEQ ID NO: 2371603 - RNA, 19 nt, Artificial Sequence
  Description of Artificial Sequence: Synthetic oligonucleotide
uucugacccgcuacuggaa

SEQ ID NO: 2371604 - RNA, 19 nt, Artificial Sequence
  Description of Artificial Sequence: Synthetic oligonucleotide
ucagugccuuuuaccgucu

SEQ ID NO: 2371605 - RNA, 19 nt, Artificial Sequence
  Description of Artificial Sequence: Synthetic oligonucleotide
gugaccugcauggugccug

SEQ ID NO: 2371606 - RNA, 19 nt, Artificial Sequence
  Description of Artificial Sequence: Synthetic oligonucleotide
cuccucacgcgccagccac

SEQ ID NO: 2371607 - RNA, 19 nt, Artificial Sequence
  Description of Artificial Sequence: Synthetic oligonucleotide
uccuccgggucgaugucga

SEQ ID NO: 2371608 - RNA, 19 nt, Artificial Sequence
  Description of Artificial Sequence: Synthetic oligonucleotide
gccauuauccaguguugcc

SEQ ID NO: 2371609 - RNA, 19 nt, Artificial Sequence
  Description of Artificial Sequence: Synthetic oligonucleotide
agcagggcaucacacuaaa

SEQ ID NO: 2371610 - RNA, 19 nt, Artificial Sequence
  Description of Artificial Sequence: Synthetic oligonucleotide
gccuuuuaccgucuccucc

SEQ ID NO: 2371611 - RNA, 19 nt, Artificial Sequence
  Description of Artificial Sequence: Synthetic oligonucleotide
acuccugcccuauacccua

SEQ ID NO: 2371612 - RNA, 19 nt, Artificial Sequence
  Description of Artificial Sequence: Synthetic oligonucleotide
cuccccgacagccgcagag

SEQ ID NO: 2371613 - RNA, 19 nt, Artificial Sequence
  Description of Artificial Sequence: Synthetic oligonucleotide
gacaugcacaguauguacu

SEQ ID NO: 2371614 - RNA, 19 nt, Artificial Sequence
  Description of Artificial Sequence: Synthetic oligonucleotide
uacccuagcagagcaguau

SEQ ID NO: 2371615 - RNA, 19 nt, Artificial Sequence
  Description of Artificial Sequence: Synthetic oligonucleotide
aucugcuaauugaagcaga

SEQ ID NO: 2371616 - RNA, 19 nt, Artificial Sequence
  Description of Artificial Sequence: Synthetic oligonucleotide
aggcgucuucccuuuucag

SEQ ID NO: 2371617 - RNA, 19 nt, Artificial Sequence
  Description of Artificial Sequence: Synthetic oligonucleotide
auuuuguccugcauagauu

SEQ ID NO: 2371618 - RNA, 19 nt, Artificial Sequence
  Description of Artificial Sequence: Synthetic oligonucleotide
gaacaugaagaaugggcuu

SEQ ID NO: 2371619 - RNA, 19 nt, Artificial Sequence
  Description of Artificial Sequence: Synthetic oligonucleotide
ccugcauagauuaacuucu

SEQ ID NO: 2371620 - RNA, 19 nt, Artificial Sequence
  Description of Artificial Sequence: Synthetic oligonucleotide
cuggccgcgccgccgaucc

SEQ ID NO: 2371621 - RNA, 19 nt, Artificial Sequence
  Description of Artificial Sequence: Synthetic oligonucleotide
cuucgccgcaagcucggcc

SEQ ID NO: 2371622 - RNA, 19 nt, Artificial Sequence
  Description of Artificial Sequence: Synthetic oligonucleotide
cagggcaucacacuaaauu

SEQ ID NO: 2371623 - RNA, 19 nt, Artificial Sequence
  Description of Artificial Sequence: Synthetic oligonucleotide
auccucgcgcucucaggag

SEQ ID NO: 2371624 - RNA, 19 nt, Artificial Sequence
  Description of Artificial Sequence: Synthetic oligonucleotide
aagcagacaugcacaguau

SEQ ID NO: 2371625 - RNA, 19 nt, Artificial Sequence
  Description of Artificial Sequence: Synthetic oligonucleotide
agauucuuucagaaaccaa

SEQ ID NO: 2371626 - RNA, 19 nt, Artificial Sequence
  Description of Artificial Sequence: Synthetic oligonucleotide
ugccuuuuaccgucuccuc

SEQ ID NO: 2371627 - RNA, 19 nt, Artificial Sequence
  Description of Artificial Sequence: Synthetic oligonucleotide
uacugccuagaagaauaaa

SEQ ID NO: 2371628 - RNA, 19 nt, Artificial Sequence
  Description of Artificial Sequence: Synthetic oligonucleotide
gaaacccaggaaauguuau

SEQ ID NO: 2371629 - RNA, 19 nt, Artificial Sequence
  Description of Artificial Sequence: Synthetic oligonucleotide
uggaaggcgucuucccuuu

SEQ ID NO: 2371630 - RNA, 19 nt, Artificial Sequence
  Description of Artificial Sequence: Synthetic oligonucleotide
cagcggugccuccucacgc

SEQ ID NO: 2371631 - RNA, 19 nt, Artificial Sequence
  Description of Artificial Sequence: Synthetic oligonucleotide
uccugcccuauacccuagc

SEQ ID NO: 2371632 - RNA, 19 nt, Artificial Sequence
  Description of Artificial Sequence: Synthetic oligonucleotide
gccauaaaacagacuguag

SEQ ID NO: 2371633 - RNA, 19 nt, Artificial Sequence
  Description of Artificial Sequence: Synthetic oligonucleotide
aucuacugccuagaagaau

SEQ ID NO: 2371634 - RNA, 19 nt, Artificial Sequence
  Description of Artificial Sequence: Synthetic oligonucleotide
ucagagugaccugcauggu

SEQ ID NO: 2371635 - RNA, 19 nt, Artificial Sequence
  Description of Artificial Sequence: Synthetic oligonucleotide
augaaacccaggaaauguu

SEQ ID NO: 2371636 - RNA, 19 nt, Artificial Sequence
  Description of Artificial Sequence: Synthetic oligonucleotide
aagcagggcaucacacuaa

SEQ ID NO: 2371637 - RNA, 19 nt, Artificial Sequence
  Description of Artificial Sequence: Synthetic oligonucleotide
ggcgucuucccuuuucaga

SEQ ID NO: 2371638 - RNA, 19 nt, Artificial Sequence
  Description of Artificial Sequence: Synthetic oligonucleotide
caguauguacuccugcccu

SEQ ID NO: 2371639 - RNA, 19 nt, Artificial Sequence
  Description of Artificial Sequence: Synthetic oligonucleotide
gccgcagagaauccgcuac

SEQ ID NO: 2371640 - RNA, 19 nt, Artificial Sequence
  Description of Artificial Sequence: Synthetic oligonucleotide
gacccgcuacuggaaggcg

SEQ ID NO: 2371641 - RNA, 19 nt, Artificial Sequence
  Description of Artificial Sequence: Synthetic oligonucleotide
ccuauacccuagcagagca

SEQ ID NO: 2371642 - RNA, 19 nt, Artificial Sequence
  Description of Artificial Sequence: Synthetic oligonucleotide
uucgccccgccgagucucg

SEQ ID NO: 2371643 - RNA, 19 nt, Artificial Sequence
  Description of Artificial Sequence: Synthetic oligonucleotide
uuucgccccgccgagucuc

SEQ ID NO: 2371644 - RNA, 19 nt, Artificial Sequence
  Description of Artificial Sequence: Synthetic oligonucleotide
auuauccaguguugccaua

SEQ ID NO: 2371645 - RNA, 19 nt, Artificial Sequence
  Description of Artificial Sequence: Synthetic oligonucleotide
ccgacagccgcagagaauc

SEQ ID NO: 2371646 - RNA, 19 nt, Artificial Sequence
  Description of Artificial Sequence: Synthetic oligonucleotide
cuguagauucuagguagca

SEQ ID NO: 2371647 - RNA, 19 nt, Artificial Sequence
  Description of Artificial Sequence: Synthetic oligonucleotide
auccgcuaccucaccacag

SEQ ID NO: 2371648 - RNA, 19 nt, Artificial Sequence
  Description of Artificial Sequence: Synthetic oligonucleotide
cugcgccagggccuggccg

SEQ ID NO: 2371649 - RNA, 19 nt, Artificial Sequence
  Description of Artificial Sequence: Synthetic oligonucleotide
auuuuacacuguggaucug

SEQ ID NO: 2371650 - RNA, 19 nt, Artificial Sequence
  Description of Artificial Sequence: Synthetic oligonucleotide
gggcaucacacuaaauuuc

SEQ ID NO: 2371651 - RNA, 19 nt, Artificial Sequence
  Description of Artificial Sequence: Synthetic oligonucleotide
auuucgccccgccgagucu

SEQ ID NO: 2371652 - RNA, 19 nt, Artificial Sequence
  Description of Artificial Sequence: Synthetic oligonucleotide
cuccuccgggucgaugucg

SEQ ID NO: 2371653 - RNA, 19 nt, Artificial Sequence
  Description of Artificial Sequence: Synthetic oligonucleotide
ucgcgcucucaggaggaag

SEQ ID NO: 2371654 - RNA, 19 nt, Artificial Sequence
  Description of Artificial Sequence: Synthetic oligonucleotide
gaggcgcgaaaggacuccc

SEQ ID NO: 2371655 - RNA, 19 nt, Artificial Sequence
  Description of Artificial Sequence: Synthetic oligonucleotide
ucgucguccccuggccgcg

SEQ ID NO: 2371656 - RNA, 19 nt, Artificial Sequence
  Description of Artificial Sequence: Synthetic oligonucleotide
ucgccgcaagcucggccag

SEQ ID NO: 2371657 - RNA, 19 nt, Artificial Sequence
  Description of Artificial Sequence: Synthetic oligonucleotide
cagacaugcacaguaugua

SEQ ID NO: 2371658 - RNA, 19 nt, Artificial Sequence
  Description of Artificial Sequence: Synthetic oligonucleotide
cuacugccuagaagaauaa

SEQ ID NO: 2371659 - RNA, 19 nt, Artificial Sequence
  Description of Artificial Sequence: Synthetic oligonucleotide
gagucucgcucgccccggg

SEQ ID NO: 2371660 - RNA, 19 nt, Artificial Sequence
  Description of Artificial Sequence: Synthetic oligonucleotide
gacuccccgacagccgcag

SEQ ID NO: 2371661 - RNA, 19 nt, Artificial Sequence
  Description of Artificial Sequence: Synthetic oligonucleotide
aggcgcgaaaggacucccc

SEQ ID NO: 2371662 - RNA, 19 nt, Artificial Sequence
  Description of Artificial Sequence: Synthetic oligonucleotide
ccauuauccaguguugcca

SEQ ID NO: 2371663 - RNA, 19 nt, Artificial Sequence
  Description of Artificial Sequence: Synthetic oligonucleotide
cgugaagcagcaacaauga

SEQ ID NO: 2371664 - RNA, 19 nt, Artificial Sequence
  Description of Artificial Sequence: Synthetic oligonucleotide
cgcgcucucaggaggaagg

SEQ ID NO: 2371665 - RNA, 19 nt, Artificial Sequence
  Description of Artificial Sequence: Synthetic oligonucleotide
gugccuuuuaccgucuccu

SEQ ID NO: 2371666 - RNA, 19 nt, Artificial Sequence
  Description of Artificial Sequence: Synthetic oligonucleotide
cuccgggucgaugucgauc

SEQ ID NO: 2371667 - RNA, 19 nt, Artificial Sequence
  Description of Artificial Sequence: Synthetic oligonucleotide
cuccugcccuauacccuag

SEQ ID NO: 2371668 - RNA, 19 nt, Artificial Sequence
  Description of Artificial Sequence: Synthetic oligonucleotide
ggcaucacacuaaauuucu

SEQ ID NO: 2371669 - RNA, 19 nt, Artificial Sequence
  Description of Artificial Sequence: Synthetic oligonucleotide
gcccuauacccuagcagag

SEQ ID NO: 2371670 - RNA, 19 nt, Artificial Sequence
  Description of Artificial Sequence: Synthetic oligonucleotide
agugaccugcauggugccu

SEQ ID NO: 2371671 - RNA, 19 nt, Artificial Sequence
  Description of Artificial Sequence: Synthetic oligonucleotide
accucaccacaggauggug

SEQ ID NO: 2371672 - RNA, 19 nt, Artificial Sequence
  Description of Artificial Sequence: Synthetic oligonucleotide
agccgcagagaauccgcua

SEQ ID NO: 2371673 - RNA, 19 nt, Artificial Sequence
  Description of Artificial Sequence: Synthetic oligonucleotide
uugucacauuucgccccgc

SEQ ID NO: 2371674 - RNA, 19 nt, Artificial Sequence
  Description of Artificial Sequence: Synthetic oligonucleotide
gcgucuucccuuuucagau

SEQ ID NO: 2371675 - RNA, 19 nt, Artificial Sequence
  Description of Artificial Sequence: Synthetic oligonucleotide
gcgauccucgcgcucucag

SEQ ID NO: 2371676 - RNA, 19 nt, Artificial Sequence
  Description of Artificial Sequence: Synthetic oligonucleotide
ggaggcgcgaaaggacucc

SEQ ID NO: 2371677 - RNA, 19 nt, Artificial Sequence
  Description of Artificial Sequence: Synthetic oligonucleotide
gggucgaugucgaucuuga

SEQ ID NO: 2371678 - RNA, 19 nt, Artificial Sequence
  Description of Artificial Sequence: Synthetic oligonucleotide
acccgcuacuggaaggcgu

SEQ ID NO: 2371679 - RNA, 19 nt, Artificial Sequence
  Description of Artificial Sequence: Synthetic oligonucleotide
gccgcaagcucggccagcg

SEQ ID NO: 2371680 - RNA, 19 nt, Artificial Sequence
  Description of Artificial Sequence: Synthetic oligonucleotide
uaucaucacugaggauuuu

SEQ ID NO: 2371681 - RNA, 19 nt, Artificial Sequence
  Description of Artificial Sequence: Synthetic oligonucleotide
cccuauacccuagcagagc

SEQ ID NO: 2371682 - RNA, 19 nt, Artificial Sequence
  Description of Artificial Sequence: Synthetic oligonucleotide
caaugaccaucaauaguuu

SEQ ID NO: 2371683 - RNA, 19 nt, Artificial Sequence
  Description of Artificial Sequence: Synthetic oligonucleotide
cgcgaaaggacuccccgac

SEQ ID NO: 2371684 - RNA, 19 nt, Artificial Sequence
  Description of Artificial Sequence: Synthetic oligonucleotide
cccgggguggccgcgaucc

SEQ ID NO: 2371685 - RNA, 19 nt, Artificial Sequence
  Description of Artificial Sequence: Synthetic oligonucleotide
acauuucgccccgccgagu

SEQ ID NO: 2371686 - RNA, 19 nt, Artificial Sequence
  Description of Artificial Sequence: Synthetic oligonucleotide
guccugcauagauuaacuu

SEQ ID NO: 2371687 - RNA, 19 nt, Artificial Sequence
  Description of Artificial Sequence: Synthetic oligonucleotide
ccgcagagaauccgcuacc

SEQ ID NO: 2371688 - RNA, 19 nt, Artificial Sequence
  Description of Artificial Sequence: Synthetic oligonucleotide
cccaccccaaguacagaac

SEQ ID NO: 2371689 - RNA, 19 nt, Artificial Sequence
  Description of Artificial Sequence: Synthetic oligonucleotide
auacccuagcagagcagua

SEQ ID NO: 2371690 - RNA, 19 nt, Artificial Sequence
  Description of Artificial Sequence: Synthetic oligonucleotide
ccucgucguccccuggccg

SEQ ID NO: 2371691 - RNA, 19 nt, Artificial Sequence
  Description of Artificial Sequence: Synthetic oligonucleotide
cccgcuacuggaaggcguc

SEQ ID NO: 2371692 - RNA, 19 nt, Artificial Sequence
  Description of Artificial Sequence: Synthetic oligonucleotide
ggugccuccucacgcgcca

SEQ ID NO: 2371693 - RNA, 19 nt, Artificial Sequence
  Description of Artificial Sequence: Synthetic oligonucleotide
gcggauguuugguuguaua

SEQ ID NO: 2371694 - RNA, 19 nt, Artificial Sequence
  Description of Artificial Sequence: Synthetic oligonucleotide
ccgagucucgcucgccccg

SEQ ID NO: 2371695 - RNA, 19 nt, Artificial Sequence
  Description of Artificial Sequence: Synthetic oligonucleotide
accgucuccuccgggucga

SEQ ID NO: 2371696 - RNA, 19 nt, Artificial Sequence
  Description of Artificial Sequence: Synthetic oligonucleotide
gccgagucucgcucgcccc

SEQ ID NO: 2371697 - RNA, 19 nt, Artificial Sequence
  Description of Artificial Sequence: Synthetic oligonucleotide
cucacgcgccagccaccgg

SEQ ID NO: 2371698 - RNA, 19 nt, Artificial Sequence
  Description of Artificial Sequence: Synthetic oligonucleotide
uggccgcgauccucgcgcu

SEQ ID NO: 2371699 - RNA, 19 nt, Artificial Sequence
  Description of Artificial Sequence: Synthetic oligonucleotide
cgauccucgcgcucucagg

SEQ ID NO: 2371700 - RNA, 19 nt, Artificial Sequence
  Description of Artificial Sequence: Synthetic oligonucleotide
cccuagcagagcaguauca

SEQ ID NO: 2371701 - RNA, 19 nt, Artificial Sequence
  Description of Artificial Sequence: Synthetic oligonucleotide
ccaucaauaguuuggcauu

SEQ ID NO: 2371702 - RNA, 19 nt, Artificial Sequence
  Description of Artificial Sequence: Synthetic oligonucleotide
ggucugcugcugaaggguc

SEQ ID NO: 2371703 - RNA, 19 nt, Artificial Sequence
  Description of Artificial Sequence: Synthetic oligonucleotide
cuggaaggcgucuucccuu

SEQ ID NO: 2371704 - RNA, 19 nt, Artificial Sequence
  Description of Artificial Sequence: Synthetic oligonucleotide
caucaauaguuuggcauuu

SEQ ID NO: 2371705 - RNA, 19 nt, Artificial Sequence
  Description of Artificial Sequence: Synthetic oligonucleotide
gcgaaaggacuccccgaca

SEQ ID NO: 2371706 - RNA, 19 nt, Artificial Sequence
  Description of Artificial Sequence: Synthetic oligonucleotide
cucgcucgccccggggccc

SEQ ID NO: 2371707 - RNA, 19 nt, Artificial Sequence
  Description of Artificial Sequence: Synthetic oligonucleotide
gccgaucccgccgccuucg

SEQ ID NO: 2371708 - RNA, 19 nt, Artificial Sequence
  Description of Artificial Sequence: Synthetic oligonucleotide
gucguccccuggccgcgcc

SEQ ID NO: 2371709 - RNA, 19 nt, Artificial Sequence
  Description of Artificial Sequence: Synthetic oligonucleotide
cccgcaggaggcgcgaaag

SEQ ID NO: 2371710 - RNA, 19 nt, Artificial Sequence
  Description of Artificial Sequence: Synthetic oligonucleotide
ccucacgcgccagccaccg

SEQ ID NO: 2371711 - RNA, 19 nt, Artificial Sequence
  Description of Artificial Sequence: Synthetic oligonucleotide
gccuucgccgcaagcucgg

SEQ ID NO: 2371712 - RNA, 19 nt, Artificial Sequence
  Description of Artificial Sequence: Synthetic oligonucleotide
accugcaaaggcggauguu

SEQ ID NO: 2371713 - RNA, 19 nt, Artificial Sequence
  Description of Artificial Sequence: Synthetic oligonucleotide
gcccucgucguccccuggc

SEQ ID NO: 2371714 - RNA, 19 nt, Artificial Sequence
  Description of Artificial Sequence: Synthetic oligonucleotide
gcgcgaaaggacuccccga

SEQ ID NO: 2371715 - RNA, 19 nt, Artificial Sequence
  Description of Artificial Sequence: Synthetic oligonucleotide
gcggugccuccucacgcgc

SEQ ID NO: 2371716 - RNA, 19 nt, Artificial Sequence
  Description of Artificial Sequence: Synthetic oligonucleotide
cgcucucaggaggaaggcg

SEQ ID NO: 2371717 - RNA, 19 nt, Artificial Sequence
  Description of Artificial Sequence: Synthetic oligonucleotide
aggcggauguuugguugua

SEQ ID NO: 2371718 - RNA, 19 nt, Artificial Sequence
  Description of Artificial Sequence: Synthetic oligonucleotide
cagccgcagagaauccgcu

SEQ ID NO: 2371719 - RNA, 19 nt, Artificial Sequence
  Description of Artificial Sequence: Synthetic oligonucleotide
guccccuggccgcgccgcc

SEQ ID NO: 2371720 - RNA, 19 nt, Artificial Sequence
  Description of Artificial Sequence: Synthetic oligonucleotide
ccgccuucgccgcaagcuc

SEQ ID NO: 2371721 - RNA, 19 nt, Artificial Sequence
  Description of Artificial Sequence: Synthetic oligonucleotide
ccccgccgagucucgcucg

SEQ ID NO: 2371722 - RNA, 19 nt, Artificial Sequence
  Description of Artificial Sequence: Synthetic oligonucleotide
caguaucaucacugaggau

SEQ ID NO: 2371723 - RNA, 19 nt, Artificial Sequence
  Description of Artificial Sequence: Synthetic oligonucleotide
cgccgagucucgcucgccc

SEQ ID NO: 2371724 - RNA, 19 nt, Artificial Sequence
  Description of Artificial Sequence: Synthetic oligonucleotide
ccucgcgcucucaggagga

SEQ ID NO: 2371725 - RNA, 19 nt, Artificial Sequence
  Description of Artificial Sequence: Synthetic oligonucleotide
cgggucgaugucgaucuug

SEQ ID NO: 2371726 - RNA, 19 nt, Artificial Sequence
  Description of Artificial Sequence: Synthetic oligonucleotide
cagcaacaaugaccaucaa

SEQ ID NO: 2371727 - RNA, 19 nt, Artificial Sequence
  Description of Artificial Sequence: Synthetic oligonucleotide
gggcccucgucguccccug

SEQ ID NO: 2371728 - RNA, 19 nt, Artificial Sequence
  Description of Artificial Sequence: Synthetic oligonucleotide
gccccgccgagucucgcuc

SEQ ID NO: 2371729 - RNA, 19 nt, Artificial Sequence
  Description of Artificial Sequence: Synthetic oligonucleotide
cccgccgagucucgcucgc

SEQ ID NO: 2371730 - RNA, 19 nt, Artificial Sequence
  Description of Artificial Sequence: Synthetic oligonucleotide
ccgcuaccucaccacagga

SEQ ID NO: 2371731 - RNA, 19 nt, Artificial Sequence
  Description of Artificial Sequence: Synthetic oligonucleotide
cggugccuccucacgcgcc

SEQ ID NO: 2371732 - RNA, 19 nt, Artificial Sequence
  Description of Artificial Sequence: Synthetic oligonucleotide
ggguggccgcgauccucgc

SEQ ID NO: 2371733 - RNA, 19 nt, Artificial Sequence
  Description of Artificial Sequence: Synthetic oligonucleotide
cgagucucgcucgccccgg

SEQ ID NO: 2371734 - RNA, 19 nt, Artificial Sequence
  Description of Artificial Sequence: Synthetic oligonucleotide
ccgcaagcucggccagcgg

SEQ ID NO: 2371735 - RNA, 19 nt, Artificial Sequence
  Description of Artificial Sequence: Synthetic oligonucleotide
gccgcgauccucgcgcucu

SEQ ID NO: 2371736 - RNA, 19 nt, Artificial Sequence
  Description of Artificial Sequence: Synthetic oligonucleotide
cucgcgcucucaggaggaa

SEQ ID NO: 2371737 - RNA, 19 nt, Artificial Sequence
  Description of Artificial Sequence: Synthetic oligonucleotide
ccccgacagccgcagagaa

SEQ ID NO: 2371738 - RNA, 19 nt, Artificial Sequence
  Description of Artificial Sequence: Synthetic oligonucleotide
ggacuccccgacagccgca

SEQ ID NO: 2371739 - RNA, 19 nt, Artificial Sequence
  Description of Artificial Sequence: Synthetic oligonucleotide
cgaugucgaucuugaaggu

SEQ ID NO: 2371740 - RNA, 19 nt, Artificial Sequence
  Description of Artificial Sequence: Synthetic oligonucleotide
ggccgcgauccucgcgcuc

SEQ ID NO: 2371741 - RNA, 19 nt, Artificial Sequence
  Description of Artificial Sequence: Synthetic oligonucleotide
ccgaucccgccgccuucgc

SEQ ID NO: 2371742 - RNA, 19 nt, Artificial Sequence
  Description of Artificial Sequence: Synthetic oligonucleotide
uggccgccccgggguggcc

SEQ ID NO: 2371743 - RNA, 19 nt, Artificial Sequence
  Description of Artificial Sequence: Synthetic oligonucleotide
gcucgccccggggcccucg

SEQ ID NO: 2371744 - RNA, 19 nt, Artificial Sequence
  Description of Artificial Sequence: Synthetic oligonucleotide
gcccgcaggaggcgcgaaa

SEQ ID NO: 2371745 - RNA, 19 nt, Artificial Sequence
  Description of Artificial Sequence: Synthetic oligonucleotide
ggcggauguuugguuguau

SEQ ID NO: 2371746 - RNA, 19 nt, Artificial Sequence
  Description of Artificial Sequence: Synthetic oligonucleotide
cguccccuggccgcgccgc

SEQ ID NO: 2371747 - RNA, 19 nt, Artificial Sequence
  Description of Artificial Sequence: Synthetic oligonucleotide
ccgccgagucucgcucgcc

SEQ ID NO: 2371748 - RNA, 19 nt, Artificial Sequence
  Description of Artificial Sequence: Synthetic oligonucleotide
cgcuaccucaccacaggau

SEQ ID NO: 2371749 - RNA, 19 nt, Artificial Sequence
  Description of Artificial Sequence: Synthetic oligonucleotide
gcgccagggccuggccgcc

SEQ ID NO: 2371750 - RNA, 19 nt, Artificial Sequence
  Description of Artificial Sequence: Synthetic oligonucleotide
cgggguggccgcgauccuc

SEQ ID NO: 2371751 - RNA, 19 nt, Artificial Sequence
  Description of Artificial Sequence: Synthetic oligonucleotide
ccuggccgcgccgccgauc

SEQ ID NO: 2371752 - RNA, 19 nt, Artificial Sequence
  Description of Artificial Sequence: Synthetic oligonucleotide
cccgacagccgcagagaau

SEQ ID NO: 2371753 - RNA, 19 nt, Artificial Sequence
  Description of Artificial Sequence: Synthetic oligonucleotide
cgccgaucccgccgccuuc

SEQ ID NO: 2371754 - RNA, 19 nt, Artificial Sequence
  Description of Artificial Sequence: Synthetic oligonucleotide
ccccuggccgcgccgccga

SEQ ID NO: 2371755 - RNA, 19 nt, Artificial Sequence
  Description of Artificial Sequence: Synthetic oligonucleotide
cgccgcaagcucggccagc

SEQ ID NO: 2371756 - RNA, 19 nt, Artificial Sequence
  Description of Artificial Sequence: Synthetic oligonucleotide
cucgccccggggcccucgu

SEQ ID NO: 2371757 - RNA, 19 nt, Artificial Sequence
  Description of Artificial Sequence: Synthetic oligonucleotide
ccccgggguggccgcgauc

SEQ ID NO: 2371758 - RNA, 19 nt, Artificial Sequence
  Description of Artificial Sequence: Synthetic oligonucleotide
cgucguccccuggccgcgc

SEQ ID NO: 2371759 - RNA, 19 nt, Artificial Sequence
  Description of Artificial Sequence: Synthetic oligonucleotide
ggcccgcaggaggcgcgaa

SEQ ID NO: 2371760 - RNA, 19 nt, Artificial Sequence
  Description of Artificial Sequence: Synthetic oligonucleotide
ccgccccgggguggccgcg

SEQ ID NO: 2371761 - RNA, 19 nt, Artificial Sequence
  Description of Artificial Sequence: Synthetic oligonucleotide
ccgcuacuggaaggcgucu

SEQ ID NO: 2371762 - RNA, 19 nt, Artificial Sequence
  Description of Artificial Sequence: Synthetic oligonucleotide
cgcgauccucgcgcucuca

SEQ ID NO: 2371763 - RNA, 19 nt, Artificial Sequence
  Description of Artificial Sequence: Synthetic oligonucleotide
ccuccgggucgaugucgau

SEQ ID NO: 2371764 - RNA, 19 nt, Artificial Sequence
  Description of Artificial Sequence: Synthetic oligonucleotide
cgccccgccgagucucgcu

SEQ ID NO: 2371765 - RNA, 19 nt, Artificial Sequence
  Description of Artificial Sequence: Synthetic oligonucleotide
ccgggucgaugucgaucuu

SEQ ID NO: 2371766 - RNA, 19 nt, Artificial Sequence
  Description of Artificial Sequence: Synthetic oligonucleotide
cccuggccgcgccgccgau

SEQ ID NO: 2371767 - RNA, 19 nt, Artificial Sequence
  Description of Artificial Sequence: Synthetic oligonucleotide
aauaagaucgauugcaagc

SEQ ID NO: 2371768 - RNA, 19 nt, Artificial Sequence
  Description of Artificial Sequence: Synthetic oligonucleotide
uuauacuuaaugaaaaugg

SEQ ID NO: 2371769 - RNA, 19 nt, Artificial Sequence
  Description of Artificial Sequence: Synthetic oligonucleotide
gaaauaauaagaucgauug

SEQ ID NO: 2371770 - RNA, 19 nt, Artificial Sequence
  Description of Artificial Sequence: Synthetic oligonucleotide
aauggaucuuaacugaagc

SEQ ID NO: 2371771 - RNA, 19 nt, Artificial Sequence
  Description of Artificial Sequence: Synthetic oligonucleotide
auuuugaacacucuuuugc

SEQ ID NO: 2371772 - RNA, 19 nt, Artificial Sequence
  Description of Artificial Sequence: Synthetic oligonucleotide
cuugaaagaacaauaaucc

SEQ ID NO: 2371773 - RNA, 19 nt, Artificial Sequence
  Description of Artificial Sequence: Synthetic oligonucleotide
uuuagaacagcuuucauca

SEQ ID NO: 2371774 - RNA, 19 nt, Artificial Sequence
  Description of Artificial Sequence: Synthetic oligonucleotide
gaaauaaccaaucuuagac

SEQ ID NO: 2371775 - RNA, 19 nt, Artificial Sequence
  Description of Artificial Sequence: Synthetic oligonucleotide
uacucaacaaggcugaugg

SEQ ID NO: 2371776 - RNA, 19 nt, Artificial Sequence
  Description of Artificial Sequence: Synthetic oligonucleotide
aaauaauaagaucgauugc

SEQ ID NO: 2371777 - RNA, 19 nt, Artificial Sequence
  Description of Artificial Sequence: Synthetic oligonucleotide
auaaggauuguuuccaacc

SEQ ID NO: 2371778 - RNA, 19 nt, Artificial Sequence
  Description of Artificial Sequence: Synthetic oligonucleotide
auuucuagccaguuaaggc

SEQ ID NO: 2371779 - RNA, 19 nt, Artificial Sequence
  Description of Artificial Sequence: Synthetic oligonucleotide
uaugucugucacuagaugg

SEQ ID NO: 2371780 - RNA, 19 nt, Artificial Sequence
  Description of Artificial Sequence: Synthetic oligonucleotide
aaucgguauagaaauaacc

SEQ ID NO: 2371781 - RNA, 19 nt, Artificial Sequence
  Description of Artificial Sequence: Synthetic oligonucleotide
aaugaaaauggaucuuaac

SEQ ID NO: 2371782 - RNA, 19 nt, Artificial Sequence
  Description of Artificial Sequence: Synthetic oligonucleotide
auuaagauacucaacaagg

SEQ ID NO: 2371783 - RNA, 19 nt, Artificial Sequence
  Description of Artificial Sequence: Synthetic oligonucleotide
gaaagaacaauaauccugg

SEQ ID NO: 2371784 - RNA, 19 nt, Artificial Sequence
  Description of Artificial Sequence: Synthetic oligonucleotide
auuuggaucucuuuagaac

SEQ ID NO: 2371785 - RNA, 19 nt, Artificial Sequence
  Description of Artificial Sequence: Synthetic oligonucleotide
uacuuaaugaaaauggauc

SEQ ID NO: 2371786 - RNA, 19 nt, Artificial Sequence
  Description of Artificial Sequence: Synthetic oligonucleotide
accaaucuuagacaugucc

SEQ ID NO: 2371787 - RNA, 19 nt, Artificial Sequence
  Description of Artificial Sequence: Synthetic oligonucleotide
uuuggaucucuuuagaaca

SEQ ID NO: 2371788 - RNA, 19 nt, Artificial Sequence
  Description of Artificial Sequence: Synthetic oligonucleotide
uuggauuuauacuuaauga

SEQ ID NO: 2371789 - RNA, 19 nt, Artificial Sequence
  Description of Artificial Sequence: Synthetic oligonucleotide
aaacccaucaaaacagugc

SEQ ID NO: 2371790 - RNA, 19 nt, Artificial Sequence
  Description of Artificial Sequence: Synthetic oligonucleotide
uugaugguaaugcauauac

SEQ ID NO: 2371791 - RNA, 19 nt, Artificial Sequence
  Description of Artificial Sequence: Synthetic oligonucleotide
ugaaacaaacuuuagcaga

SEQ ID NO: 2371792 - RNA, 19 nt, Artificial Sequence
  Description of Artificial Sequence: Synthetic oligonucleotide
aaauaaccaaucuuagaca

SEQ ID NO: 2371793 - RNA, 19 nt, Artificial Sequence
  Description of Artificial Sequence: Synthetic oligonucleotide
ucaguauuuauacugaguu

SEQ ID NO: 2371794 - RNA, 19 nt, Artificial Sequence
  Description of Artificial Sequence: Synthetic oligonucleotide
uauacuuaaugaaaaugga

SEQ ID NO: 2371795 - RNA, 19 nt, Artificial Sequence
  Description of Artificial Sequence: Synthetic oligonucleotide
auuacgcugauaugaaugg

SEQ ID NO: 2371796 - RNA, 19 nt, Artificial Sequence
  Description of Artificial Sequence: Synthetic oligonucleotide
acuuaaugaaaauggaucu

SEQ ID NO: 2371797 - RNA, 19 nt, Artificial Sequence
  Description of Artificial Sequence: Synthetic oligonucleotide
uuaagauacucaacaaggc

SEQ ID NO: 2371798 - RNA, 19 nt, Artificial Sequence
  Description of Artificial Sequence: Synthetic oligonucleotide
ugugauuccaccuccagga

SEQ ID NO: 2371799 - RNA, 19 nt, Artificial Sequence
  Description of Artificial Sequence: Synthetic oligonucleotide
cauuuugugaucucuuugg

SEQ ID NO: 2371800 - RNA, 19 nt, Artificial Sequence
  Description of Artificial Sequence: Synthetic oligonucleotide
agaagguguaagcagguac

SEQ ID NO: 2371801 - RNA, 19 nt, Artificial Sequence
  Description of Artificial Sequence: Synthetic oligonucleotide
aguauuuauacugaguucu

SEQ ID NO: 2371802 - RNA, 19 nt, Artificial Sequence
  Description of Artificial Sequence: Synthetic oligonucleotide
uaucauuacgcugauauga

SEQ ID NO: 2371803 - RNA, 19 nt, Artificial Sequence
  Description of Artificial Sequence: Synthetic oligonucleotide
gaagggaguacuucgaagc

SEQ ID NO: 2371804 - RNA, 19 nt, Artificial Sequence
  Description of Artificial Sequence: Synthetic oligonucleotide
uagaaauaaccaaucuuag

SEQ ID NO: 2371805 - RNA, 19 nt, Artificial Sequence
  Description of Artificial Sequence: Synthetic oligonucleotide
aacccaucaaaacagugca

SEQ ID NO: 2371806 - RNA, 19 nt, Artificial Sequence
  Description of Artificial Sequence: Synthetic oligonucleotide
aacaaacuuuagcagaacu

SEQ ID NO: 2371807 - RNA, 19 nt, Artificial Sequence
  Description of Artificial Sequence: Synthetic oligonucleotide
uuugugaucucuuugggau

SEQ ID NO: 2371808 - RNA, 19 nt, Artificial Sequence
  Description of Artificial Sequence: Synthetic oligonucleotide
uaagauacucaacaaggcu

SEQ ID NO: 2371809 - RNA, 19 nt, Artificial Sequence
  Description of Artificial Sequence: Synthetic oligonucleotide
uccaguguagaaauaauaa

SEQ ID NO: 2371810 - RNA, 19 nt, Artificial Sequence
  Description of Artificial Sequence: Synthetic oligonucleotide
uuagacauguccaguguag

SEQ ID NO: 2371811 - RNA, 19 nt, Artificial Sequence
  Description of Artificial Sequence: Synthetic oligonucleotide
uuucuagccaguuaaggcu

SEQ ID NO: 2371812 - RNA, 19 nt, Artificial Sequence
  Description of Artificial Sequence: Synthetic oligonucleotide
aaaacagugcaggaggaag

SEQ ID NO: 2371813 - RNA, 19 nt, Artificial Sequence
  Description of Artificial Sequence: Synthetic oligonucleotide
cauuaagauacucaacaag

SEQ ID NO: 2371814 - RNA, 19 nt, Artificial Sequence
  Description of Artificial Sequence: Synthetic oligonucleotide
uggauuuauacuuaaugaa

SEQ ID NO: 2371815 - RNA, 19 nt, Artificial Sequence
  Description of Artificial Sequence: Synthetic oligonucleotide
aaacuuuagcagaacugcc

SEQ ID NO: 2371816 - RNA, 19 nt, Artificial Sequence
  Description of Artificial Sequence: Synthetic oligonucleotide
augacuuggauuuauacuu

SEQ ID NO: 2371817 - RNA, 19 nt, Artificial Sequence
  Description of Artificial Sequence: Synthetic oligonucleotide
ugguaaugcauauacuuca

SEQ ID NO: 2371818 - RNA, 19 nt, Artificial Sequence
  Description of Artificial Sequence: Synthetic oligonucleotide
ucuuuugcauagaaggugu

SEQ ID NO: 2371819 - RNA, 19 nt, Artificial Sequence
  Description of Artificial Sequence: Synthetic oligonucleotide
uuuugaacacucuuuugca

SEQ ID NO: 2371820 - RNA, 19 nt, Artificial Sequence
  Description of Artificial Sequence: Synthetic oligonucleotide
uaauaagaucgauugcaag

SEQ ID NO: 2371821 - RNA, 19 nt, Artificial Sequence
  Description of Artificial Sequence: Synthetic oligonucleotide
cauuacgcugauaugaaug

SEQ ID NO: 2371822 - RNA, 19 nt, Artificial Sequence
  Description of Artificial Sequence: Synthetic oligonucleotide
ugauuucaggaaugcaugg

SEQ ID NO: 2371823 - RNA, 19 nt, Artificial Sequence
  Description of Artificial Sequence: Synthetic oligonucleotide
uuccaacagauacugcugg

SEQ ID NO: 2371824 - RNA, 19 nt, Artificial Sequence
  Description of Artificial Sequence: Synthetic oligonucleotide
ucauuuugugaucucuuug

SEQ ID NO: 2371825 - RNA, 19 nt, Artificial Sequence
  Description of Artificial Sequence: Synthetic oligonucleotide
uaaggauuguuuccaacca

SEQ ID NO: 2371826 - RNA, 19 nt, Artificial Sequence
  Description of Artificial Sequence: Synthetic oligonucleotide
uauuugaauccauucauua

SEQ ID NO: 2371827 - RNA, 19 nt, Artificial Sequence
  Description of Artificial Sequence: Synthetic oligonucleotide
agggaaugaacaugacugc

SEQ ID NO: 2371828 - RNA, 19 nt, Artificial Sequence
  Description of Artificial Sequence: Synthetic oligonucleotide
uaaccaaucuuagacaugu

SEQ ID NO: 2371829 - RNA, 19 nt, Artificial Sequence
  Description of Artificial Sequence: Synthetic oligonucleotide
auuuugugaucucuuuggg

SEQ ID NO: 2371830 - RNA, 19 nt, Artificial Sequence
  Description of Artificial Sequence: Synthetic oligonucleotide
ucuuugaugguaaugcaua

SEQ ID NO: 2371831 - RNA, 19 nt, Artificial Sequence
  Description of Artificial Sequence: Synthetic oligonucleotide
cuacuuuucacccaggcca

SEQ ID NO: 2371832 - RNA, 19 nt, Artificial Sequence
  Description of Artificial Sequence: Synthetic oligonucleotide
acugccaaagaggagcugc

SEQ ID NO: 2371833 - RNA, 19 nt, Artificial Sequence
  Description of Artificial Sequence: Synthetic oligonucleotide
aaucacugauuucaggaau

SEQ ID NO: 2371834 - RNA, 19 nt, Artificial Sequence
  Description of Artificial Sequence: Synthetic oligonucleotide
ugauaugaauggcugcuug

SEQ ID NO: 2371835 - RNA, 19 nt, Artificial Sequence
  Description of Artificial Sequence: Synthetic oligonucleotide
uuuccaacagauacugcug

SEQ ID NO: 2371836 - RNA, 19 nt, Artificial Sequence
  Description of Artificial Sequence: Synthetic oligonucleotide
aaguccacugccaaagagg

SEQ ID NO: 2371837 - RNA, 19 nt, Artificial Sequence
  Description of Artificial Sequence: Synthetic oligonucleotide
ugaagcaccacuagcuucu

SEQ ID NO: 2371838 - RNA, 19 nt, Artificial Sequence
  Description of Artificial Sequence: Synthetic oligonucleotide
aagaucgauugcaagcugg

SEQ ID NO: 2371839 - RNA, 19 nt, Artificial Sequence
  Description of Artificial Sequence: Synthetic oligonucleotide
agcuacuuuucacccaggc

SEQ ID NO: 2371840 - RNA, 19 nt, Artificial Sequence
  Description of Artificial Sequence: Synthetic oligonucleotide
agaaauaaccaaucuuaga

SEQ ID NO: 2371841 - RNA, 19 nt, Artificial Sequence
  Description of Artificial Sequence: Synthetic oligonucleotide
gaguauuugaauccauuca

SEQ ID NO: 2371842 - RNA, 19 nt, Artificial Sequence
  Description of Artificial Sequence: Synthetic oligonucleotide
acuucgaagcugcauauca

SEQ ID NO: 2371843 - RNA, 19 nt, Artificial Sequence
  Description of Artificial Sequence: Synthetic oligonucleotide
cugauuucaggaaugcaug

SEQ ID NO: 2371844 - RNA, 19 nt, Artificial Sequence
  Description of Artificial Sequence: Synthetic oligonucleotide
uggaucuuaacugaagcac

SEQ ID NO: 2371845 - RNA, 19 nt, Artificial Sequence
  Description of Artificial Sequence: Synthetic oligonucleotide
guugcauaaggauuguuuc

SEQ ID NO: 2371846 - RNA, 19 nt, Artificial Sequence
  Description of Artificial Sequence: Synthetic oligonucleotide
uacgcugauaugaauggcu

SEQ ID NO: 2371847 - RNA, 19 nt, Artificial Sequence
  Description of Artificial Sequence: Synthetic oligonucleotide
uuuugugaucucuuuggga

SEQ ID NO: 2371848 - RNA, 19 nt, Artificial Sequence
  Description of Artificial Sequence: Synthetic oligonucleotide
aagcugcauaucauuacgc

SEQ ID NO: 2371849 - RNA, 19 nt, Artificial Sequence
  Description of Artificial Sequence: Synthetic oligonucleotide
uguuguccccuucugaaac

SEQ ID NO: 2371850 - RNA, 19 nt, Artificial Sequence
  Description of Artificial Sequence: Synthetic oligonucleotide
caaucuuagacauguccag

SEQ ID NO: 2371851 - RNA, 19 nt, Artificial Sequence
  Description of Artificial Sequence: Synthetic oligonucleotide
ucuuccauggcaaggcaga

SEQ ID NO: 2371852 - RNA, 19 nt, Artificial Sequence
  Description of Artificial Sequence: Synthetic oligonucleotide
auaagaucgauugcaagcu

SEQ ID NO: 2371853 - RNA, 19 nt, Artificial Sequence
  Description of Artificial Sequence: Synthetic oligonucleotide
aucgauugcaagcuggcca

SEQ ID NO: 2371854 - RNA, 19 nt, Artificial Sequence
  Description of Artificial Sequence: Synthetic oligonucleotide
aucuuagacauguccagug

SEQ ID NO: 2371855 - RNA, 19 nt, Artificial Sequence
  Description of Artificial Sequence: Synthetic oligonucleotide
aaauggaucuuaacugaag

SEQ ID NO: 2371856 - RNA, 19 nt, Artificial Sequence
  Description of Artificial Sequence: Synthetic oligonucleotide
cauucauuaagauacucaa

SEQ ID NO: 2371857 - RNA, 19 nt, Artificial Sequence
  Description of Artificial Sequence: Synthetic oligonucleotide
gaaguccacugccaaagag

SEQ ID NO: 2371858 - RNA, 19 nt, Artificial Sequence
  Description of Artificial Sequence: Synthetic oligonucleotide
accacuagcuucuuugaug

SEQ ID NO: 2371859 - RNA, 19 nt, Artificial Sequence
  Description of Artificial Sequence: Synthetic oligonucleotide
uuuccaaccauuggcacca

SEQ ID NO: 2371860 - RNA, 19 nt, Artificial Sequence
  Description of Artificial Sequence: Synthetic oligonucleotide
aggcaaucgguauagaaau

SEQ ID NO: 2371861 - RNA, 19 nt, Artificial Sequence
  Description of Artificial Sequence: Synthetic oligonucleotide
ucaaaacagugcaggagga

SEQ ID NO: 2371862 - RNA, 19 nt, Artificial Sequence
  Description of Artificial Sequence: Synthetic oligonucleotide
ugcauagaagguguaagca

SEQ ID NO: 2371863 - RNA, 19 nt, Artificial Sequence
  Description of Artificial Sequence: Synthetic oligonucleotide
ucacuagaugguuugagua

SEQ ID NO: 2371864 - RNA, 19 nt, Artificial Sequence
  Description of Artificial Sequence: Synthetic oligonucleotide
uguaagcagguaccggaag

SEQ ID NO: 2371865 - RNA, 19 nt, Artificial Sequence
  Description of Artificial Sequence: Synthetic oligonucleotide
aguguagaaauaauaagau

SEQ ID NO: 2371866 - RNA, 19 nt, Artificial Sequence
  Description of Artificial Sequence: Synthetic oligonucleotide
gaugguaaugcauauacuu

SEQ ID NO: 2371867 - RNA, 19 nt, Artificial Sequence
  Description of Artificial Sequence: Synthetic oligonucleotide
cauuucuagccaguuaagg

SEQ ID NO: 2371868 - RNA, 19 nt, Artificial Sequence
  Description of Artificial Sequence: Synthetic oligonucleotide
aagguguaagcagguaccg

SEQ ID NO: 2371869 - RNA, 19 nt, Artificial Sequence
  Description of Artificial Sequence: Synthetic oligonucleotide
augguaaugcauauacuuc

SEQ ID NO: 2371870 - RNA, 19 nt, Artificial Sequence
  Description of Artificial Sequence: Synthetic oligonucleotide
uucguuaggucggggaucg

SEQ ID NO: 2371871 - RNA, 19 nt, Artificial Sequence
  Description of Artificial Sequence: Synthetic oligonucleotide
agcacaaauuucuguguag

SEQ ID NO: 2371872 - RNA, 19 nt, Artificial Sequence
  Description of Artificial Sequence: Synthetic oligonucleotide
uuuagcagaacugccauuu

SEQ ID NO: 2371873 - RNA, 19 nt, Artificial Sequence
  Description of Artificial Sequence: Synthetic oligonucleotide
cauaucauuacgcugauau

SEQ ID NO: 2371874 - RNA, 19 nt, Artificial Sequence
  Description of Artificial Sequence: Synthetic oligonucleotide
agcuagggaucuuccaugg

SEQ ID NO: 2371875 - RNA, 19 nt, Artificial Sequence
  Description of Artificial Sequence: Synthetic oligonucleotide
aaguucguuaggucgggga

SEQ ID NO: 2371876 - RNA, 19 nt, Artificial Sequence
  Description of Artificial Sequence: Synthetic oligonucleotide
uacuuuucacccaggccag

SEQ ID NO: 2371877 - RNA, 19 nt, Artificial Sequence
  Description of Artificial Sequence: Synthetic oligonucleotide
aagggaguacuucgaagcu

SEQ ID NO: 2371878 - RNA, 19 nt, Artificial Sequence
  Description of Artificial Sequence: Synthetic oligonucleotide
aaccauuggcaccaggcaa

SEQ ID NO: 2371879 - RNA, 19 nt, Artificial Sequence
  Description of Artificial Sequence: Synthetic oligonucleotide
auguaugucugucacuaga

SEQ ID NO: 2371880 - RNA, 19 nt, Artificial Sequence
  Description of Artificial Sequence: Synthetic oligonucleotide
acaaacuuuagcagaacug

SEQ ID NO: 2371881 - RNA, 19 nt, Artificial Sequence
  Description of Artificial Sequence: Synthetic oligonucleotide
auggaucuuaacugaagca

SEQ ID NO: 2371882 - RNA, 19 nt, Artificial Sequence
  Description of Artificial Sequence: Synthetic oligonucleotide
aacuuuagcagaacugcca

SEQ ID NO: 2371883 - RNA, 19 nt, Artificial Sequence
  Description of Artificial Sequence: Synthetic oligonucleotide
uuuuccauuucuagccagu

SEQ ID NO: 2371884 - RNA, 19 nt, Artificial Sequence
  Description of Artificial Sequence: Synthetic oligonucleotide
uguguagcauacauucuau

SEQ ID NO: 2371885 - RNA, 19 nt, Artificial Sequence
  Description of Artificial Sequence: Synthetic oligonucleotide
augcauauacuucaguauu

SEQ ID NO: 2371886 - RNA, 19 nt, Artificial Sequence
  Description of Artificial Sequence: Synthetic oligonucleotide
cuggaaacccaucaaaaca

SEQ ID NO: 2371887 - RNA, 19 nt, Artificial Sequence
  Description of Artificial Sequence: Synthetic oligonucleotide
gauguuguccccuucugaa

SEQ ID NO: 2371888 - RNA, 19 nt, Artificial Sequence
  Description of Artificial Sequence: Synthetic oligonucleotide
ugcaggaggaaguccacug

SEQ ID NO: 2371889 - RNA, 19 nt, Artificial Sequence
  Description of Artificial Sequence: Synthetic oligonucleotide
gauaugaauggcugcuuga

SEQ ID NO: 2371890 - RNA, 19 nt, Artificial Sequence
  Description of Artificial Sequence: Synthetic oligonucleotide
guuuccaaccauuggcacc

SEQ ID NO: 2371891 - RNA, 19 nt, Artificial Sequence
  Description of Artificial Sequence: Synthetic oligonucleotide
uugaacacucuuuugcaua

SEQ ID NO: 2371892 - RNA, 19 nt, Artificial Sequence
  Description of Artificial Sequence: Synthetic oligonucleotide
gaaggcuggaaacccauca

SEQ ID NO: 2371893 - RNA, 19 nt, Artificial Sequence
  Description of Artificial Sequence: Synthetic oligonucleotide
ggcucuuuauuuuauuuug

SEQ ID NO: 2371894 - RNA, 19 nt, Artificial Sequence
  Description of Artificial Sequence: Synthetic oligonucleotide
gcuugaaagaacaauaauc

SEQ ID NO: 2371895 - RNA, 19 nt, Artificial Sequence
  Description of Artificial Sequence: Synthetic oligonucleotide
auaucauuacgcugauaug

SEQ ID NO: 2371896 - RNA, 19 nt, Artificial Sequence
  Description of Artificial Sequence: Synthetic oligonucleotide
agauacugcuggcaucagg

SEQ ID NO: 2371897 - RNA, 19 nt, Artificial Sequence
  Description of Artificial Sequence: Synthetic oligonucleotide
acugauuucaggaaugcau

SEQ ID NO: 2371898 - RNA, 19 nt, Artificial Sequence
  Description of Artificial Sequence: Synthetic oligonucleotide
aaggcugauggcaucuggg

SEQ ID NO: 2371899 - RNA, 19 nt, Artificial Sequence
  Description of Artificial Sequence: Synthetic oligonucleotide
aaucuuagacauguccagu

SEQ ID NO: 2371900 - RNA, 19 nt, Artificial Sequence
  Description of Artificial Sequence: Synthetic oligonucleotide
ugaugguaaugcauauacu

SEQ ID NO: 2371901 - RNA, 19 nt, Artificial Sequence
  Description of Artificial Sequence: Synthetic oligonucleotide
cauaaggauuguuuccaac

SEQ ID NO: 2371902 - RNA, 19 nt, Artificial Sequence
  Description of Artificial Sequence: Synthetic oligonucleotide
uaagaucgauugcaagcug

SEQ ID NO: 2371903 - RNA, 19 nt, Artificial Sequence
  Description of Artificial Sequence: Synthetic oligonucleotide
guguagaaauaauaagauc

SEQ ID NO: 2371904 - RNA, 19 nt, Artificial Sequence
  Description of Artificial Sequence: Synthetic oligonucleotide
auucgaauacaaauuucag

SEQ ID NO: 2371905 - RNA, 19 nt, Artificial Sequence
  Description of Artificial Sequence: Synthetic oligonucleotide
agaggagcugccaagagcu

SEQ ID NO: 2371906 - RNA, 19 nt, Artificial Sequence
  Description of Artificial Sequence: Synthetic oligonucleotide
uucuagccaguuaaggcuc

SEQ ID NO: 2371907 - RNA, 19 nt, Artificial Sequence
  Description of Artificial Sequence: Synthetic oligonucleotide
ugccauuuggaucucuuua

SEQ ID NO: 2371908 - RNA, 19 nt, Artificial Sequence
  Description of Artificial Sequence: Synthetic oligonucleotide
cuauaguucauuuugugau

SEQ ID NO: 2371909 - RNA, 19 nt, Artificial Sequence
  Description of Artificial Sequence: Synthetic oligonucleotide
caucaaaacagugcaggag

SEQ ID NO: 2371910 - RNA, 19 nt, Artificial Sequence
  Description of Artificial Sequence: Synthetic oligonucleotide
gaaacccaucaaaacagug

SEQ ID NO: 2371911 - RNA, 19 nt, Artificial Sequence
  Description of Artificial Sequence: Synthetic oligonucleotide
aggagugugaaguucguua

SEQ ID NO: 2371912 - RNA, 19 nt, Artificial Sequence
  Description of Artificial Sequence: Synthetic oligonucleotide
agaucgauugcaagcuggc

SEQ ID NO: 2371913 - RNA, 19 nt, Artificial Sequence
  Description of Artificial Sequence: Synthetic oligonucleotide
ugaauccauucauuaagau

SEQ ID NO: 2371914 - RNA, 19 nt, Artificial Sequence
  Description of Artificial Sequence: Synthetic oligonucleotide
aagagcuagggaucuucca

SEQ ID NO: 2371915 - RNA, 19 nt, Artificial Sequence
  Description of Artificial Sequence: Synthetic oligonucleotide
ugucacuagaugguuugag

SEQ ID NO: 2371916 - RNA, 19 nt, Artificial Sequence
  Description of Artificial Sequence: Synthetic oligonucleotide
agugugaaguucguuaggu

SEQ ID NO: 2371917 - RNA, 19 nt, Artificial Sequence
  Description of Artificial Sequence: Synthetic oligonucleotide
agagcuagggaucuuccau

SEQ ID NO: 2371918 - RNA, 19 nt, Artificial Sequence
  Description of Artificial Sequence: Synthetic oligonucleotide
uguuuccaaccauuggcac

SEQ ID NO: 2371919 - RNA, 19 nt, Artificial Sequence
  Description of Artificial Sequence: Synthetic oligonucleotide
acagauacugcuggcauca

SEQ ID NO: 2371920 - RNA, 19 nt, Artificial Sequence
  Description of Artificial Sequence: Synthetic oligonucleotide
ccacuagcuucuuugaugg

SEQ ID NO: 2371921 - RNA, 19 nt, Artificial Sequence
  Description of Artificial Sequence: Synthetic oligonucleotide
gagggagaaggcuggaaac

SEQ ID NO: 2371922 - RNA, 19 nt, Artificial Sequence
  Description of Artificial Sequence: Synthetic oligonucleotide
caaucgguauagaaauaac

SEQ ID NO: 2371923 - RNA, 19 nt, Artificial Sequence
  Description of Artificial Sequence: Synthetic oligonucleotide
aguucauuuugugaucucu

SEQ ID NO: 2371924 - RNA, 19 nt, Artificial Sequence
  Description of Artificial Sequence: Synthetic oligonucleotide
gaacaauaauccuggcaca

SEQ ID NO: 2371925 - RNA, 19 nt, Artificial Sequence
  Description of Artificial Sequence: Synthetic oligonucleotide
agauguaugucugucacua

SEQ ID NO: 2371926 - RNA, 19 nt, Artificial Sequence
  Description of Artificial Sequence: Synthetic oligonucleotide
gaauucgaauacaaauuuc

SEQ ID NO: 2371927 - RNA, 19 nt, Artificial Sequence
  Description of Artificial Sequence: Synthetic oligonucleotide
gauguaugucugucacuag

SEQ ID NO: 2371928 - RNA, 19 nt, Artificial Sequence
  Description of Artificial Sequence: Synthetic oligonucleotide
aguuaaggcucuuuauuuu

SEQ ID NO: 2371929 - RNA, 19 nt, Artificial Sequence
  Description of Artificial Sequence: Synthetic oligonucleotide
ggagugugaaguucguuag

SEQ ID NO: 2371930 - RNA, 19 nt, Artificial Sequence
  Description of Artificial Sequence: Synthetic oligonucleotide
gagcuagggaucuuccaug

SEQ ID NO: 2371931 - RNA, 19 nt, Artificial Sequence
  Description of Artificial Sequence: Synthetic oligonucleotide
aaacagugcaggaggaagu

SEQ ID NO: 2371932 - RNA, 19 nt, Artificial Sequence
  Description of Artificial Sequence: Synthetic oligonucleotide
caguauuuauacugaguuc

SEQ ID NO: 2371933 - RNA, 19 nt, Artificial Sequence
  Description of Artificial Sequence: Synthetic oligonucleotide
uaauccuggcacagcagcu

SEQ ID NO: 2371934 - RNA, 19 nt, Artificial Sequence
  Description of Artificial Sequence: Synthetic oligonucleotide
ucgauugcaagcuggccaa

SEQ ID NO: 2371935 - RNA, 19 nt, Artificial Sequence
  Description of Artificial Sequence: Synthetic oligonucleotide
cuagggaucuuccauggca

SEQ ID NO: 2371936 - RNA, 19 nt, Artificial Sequence
  Description of Artificial Sequence: Synthetic oligonucleotide
caagagcuagggaucuucc

SEQ ID NO: 2371937 - RNA, 19 nt, Artificial Sequence
  Description of Artificial Sequence: Synthetic oligonucleotide
ugaaguucguuaggucggg

SEQ ID NO: 2371938 - RNA, 19 nt, Artificial Sequence
  Description of Artificial Sequence: Synthetic oligonucleotide
cacagaaugacuuggauuu

SEQ ID NO: 2371939 - RNA, 19 nt, Artificial Sequence
  Description of Artificial Sequence: Synthetic oligonucleotide
ucacugauuucaggaaugc

SEQ ID NO: 2371940 - RNA, 19 nt, Artificial Sequence
  Description of Artificial Sequence: Synthetic oligonucleotide
guagcauacauucuauagu

SEQ ID NO: 2371941 - RNA, 19 nt, Artificial Sequence
  Description of Artificial Sequence: Synthetic oligonucleotide
uccccuucugaaacaaacu

SEQ ID NO: 2371942 - RNA, 19 nt, Artificial Sequence
  Description of Artificial Sequence: Synthetic oligonucleotide
guaugucugucacuagaug

SEQ ID NO: 2371943 - RNA, 19 nt, Artificial Sequence
  Description of Artificial Sequence: Synthetic oligonucleotide
uccaacagauacugcuggc

SEQ ID NO: 2371944 - RNA, 19 nt, Artificial Sequence
  Description of Artificial Sequence: Synthetic oligonucleotide
aaggcuggaaacccaucaa

SEQ ID NO: 2371945 - RNA, 19 nt, Artificial Sequence
  Description of Artificial Sequence: Synthetic oligonucleotide
uguccaguguagaaauaau

SEQ ID NO: 2371946 - RNA, 19 nt, Artificial Sequence
  Description of Artificial Sequence: Synthetic oligonucleotide
ugggauguuguccccuucu

SEQ ID NO: 2371947 - RNA, 19 nt, Artificial Sequence
  Description of Artificial Sequence: Synthetic oligonucleotide
aggaauucgaauacaaauu

SEQ ID NO: 2371948 - RNA, 19 nt, Artificial Sequence
  Description of Artificial Sequence: Synthetic oligonucleotide
uucgaagcugcauaucauu

SEQ ID NO: 2371949 - RNA, 19 nt, Artificial Sequence
  Description of Artificial Sequence: Synthetic oligonucleotide
agauacucaacaaggcuga

SEQ ID NO: 2371950 - RNA, 19 nt, Artificial Sequence
  Description of Artificial Sequence: Synthetic oligonucleotide
aguucguuaggucggggau

SEQ ID NO: 2371951 - RNA, 19 nt, Artificial Sequence
  Description of Artificial Sequence: Synthetic oligonucleotide
ugauuccaccuccaggaau

SEQ ID NO: 2371952 - RNA, 19 nt, Artificial Sequence
  Description of Artificial Sequence: Synthetic oligonucleotide
auggcugcuugaaagaaca

SEQ ID NO: 2371953 - RNA, 19 nt, Artificial Sequence
  Description of Artificial Sequence: Synthetic oligonucleotide
aggucggggaucgacuccc

SEQ ID NO: 2371954 - RNA, 19 nt, Artificial Sequence
  Description of Artificial Sequence: Synthetic oligonucleotide
auaauaagaucgauugcaa

SEQ ID NO: 2371955 - RNA, 19 nt, Artificial Sequence
  Description of Artificial Sequence: Synthetic oligonucleotide
uuaggucggggaucgacuc

SEQ ID NO: 2371956 - RNA, 19 nt, Artificial Sequence
  Description of Artificial Sequence: Synthetic oligonucleotide
cagcagcuacuuuucaccc

SEQ ID NO: 2371957 - RNA, 19 nt, Artificial Sequence
  Description of Artificial Sequence: Synthetic oligonucleotide
aguugcauaaggauuguuu

SEQ ID NO: 2371958 - RNA, 19 nt, Artificial Sequence
  Description of Artificial Sequence: Synthetic oligonucleotide
caggaauucgaauacaaau

SEQ ID NO: 2371959 - RNA, 19 nt, Artificial Sequence
  Description of Artificial Sequence: Synthetic oligonucleotide
ccaaccauuggcaccaggc

SEQ ID NO: 2371960 - RNA, 19 nt, Artificial Sequence
  Description of Artificial Sequence: Synthetic oligonucleotide
aggcucuuuauuuuauuuu

SEQ ID NO: 2371961 - RNA, 19 nt, Artificial Sequence
  Description of Artificial Sequence: Synthetic oligonucleotide
gguguaagcagguaccgga

SEQ ID NO: 2371962 - RNA, 19 nt, Artificial Sequence
  Description of Artificial Sequence: Synthetic oligonucleotide
aguccacugccaaagagga

SEQ ID NO: 2371963 - RNA, 19 nt, Artificial Sequence
  Description of Artificial Sequence: Synthetic oligonucleotide
uccaaccauuggcaccagg

SEQ ID NO: 2371964 - RNA, 19 nt, Artificial Sequence
  Description of Artificial Sequence: Synthetic oligonucleotide
ggaucuuaacugaagcacc

SEQ ID NO: 2371965 - RNA, 19 nt, Artificial Sequence
  Description of Artificial Sequence: Synthetic oligonucleotide
uuacgcugauaugaauggc

SEQ ID NO: 2371966 - RNA, 19 nt, Artificial Sequence
  Description of Artificial Sequence: Synthetic oligonucleotide
gcugcauaucauuacgcug

SEQ ID NO: 2371967 - RNA, 19 nt, Artificial Sequence
  Description of Artificial Sequence: Synthetic oligonucleotide
uccccgcagggaaugaaca

SEQ ID NO: 2371968 - RNA, 19 nt, Artificial Sequence
  Description of Artificial Sequence: Synthetic oligonucleotide
guuugaguauuugaaucca

SEQ ID NO: 2371969 - RNA, 19 nt, Artificial Sequence
  Description of Artificial Sequence: Synthetic oligonucleotide
uuggcaccaggcaaucggu

SEQ ID NO: 2371970 - RNA, 19 nt, Artificial Sequence
  Description of Artificial Sequence: Synthetic oligonucleotide
ucauuacgcugauaugaau

SEQ ID NO: 2371971 - RNA, 19 nt, Artificial Sequence
  Description of Artificial Sequence: Synthetic oligonucleotide
cauuuggaucucuuuagaa

SEQ ID NO: 2371972 - RNA, 19 nt, Artificial Sequence
  Description of Artificial Sequence: Synthetic oligonucleotide
ucggggaucgacuccccgc

SEQ ID NO: 2371973 - RNA, 19 nt, Artificial Sequence
  Description of Artificial Sequence: Synthetic oligonucleotide
auaugaauggcugcuugaa

SEQ ID NO: 2371974 - RNA, 19 nt, Artificial Sequence
  Description of Artificial Sequence: Synthetic oligonucleotide
agacauguccaguguagaa

SEQ ID NO: 2371975 - RNA, 19 nt, Artificial Sequence
  Description of Artificial Sequence: Synthetic oligonucleotide
cacaaauuucuguguagca

SEQ ID NO: 2371976 - RNA, 19 nt, Artificial Sequence
  Description of Artificial Sequence: Synthetic oligonucleotide
auguccaguguagaaauaa

SEQ ID NO: 2371977 - RNA, 19 nt, Artificial Sequence
  Description of Artificial Sequence: Synthetic oligonucleotide
uccauucauuaagauacuc

SEQ ID NO: 2371978 - RNA, 19 nt, Artificial Sequence
  Description of Artificial Sequence: Synthetic oligonucleotide
acucuuuugcauagaaggu

SEQ ID NO: 2371979 - RNA, 19 nt, Artificial Sequence
  Description of Artificial Sequence: Synthetic oligonucleotide
uuugaugguaaugcauaua

SEQ ID NO: 2371980 - RNA, 19 nt, Artificial Sequence
  Description of Artificial Sequence: Synthetic oligonucleotide
ucuagccaguuaaggcucu

SEQ ID NO: 2371981 - RNA, 19 nt, Artificial Sequence
  Description of Artificial Sequence: Synthetic oligonucleotide
cuucuuugaugguaaugca

SEQ ID NO: 2371982 - RNA, 19 nt, Artificial Sequence
  Description of Artificial Sequence: Synthetic oligonucleotide
gcuacuuuucacccaggcc

SEQ ID NO: 2371983 - RNA, 19 nt, Artificial Sequence
  Description of Artificial Sequence: Synthetic oligonucleotide
cugcuugaaagaacaauaa

SEQ ID NO: 2371984 - RNA, 19 nt, Artificial Sequence
  Description of Artificial Sequence: Synthetic oligonucleotide
auacucaacaaggcugaug

SEQ ID NO: 2371985 - RNA, 19 nt, Artificial Sequence
  Description of Artificial Sequence: Synthetic oligonucleotide
gaucgauugcaagcuggcc

SEQ ID NO: 2371986 - RNA, 19 nt, Artificial Sequence
  Description of Artificial Sequence: Synthetic oligonucleotide
cugccaaagaggagcugcc

SEQ ID NO: 2371987 - RNA, 19 nt, Artificial Sequence
  Description of Artificial Sequence: Synthetic oligonucleotide
gguaaugcauauacuucag

SEQ ID NO: 2371988 - RNA, 19 nt, Artificial Sequence
  Description of Artificial Sequence: Synthetic oligonucleotide
aucgacuccccgcagggaa

SEQ ID NO: 2371989 - RNA, 19 nt, Artificial Sequence
  Description of Artificial Sequence: Synthetic oligonucleotide
uaaggcucuuuauuuuauu

SEQ ID NO: 2371990 - RNA, 19 nt, Artificial Sequence
  Description of Artificial Sequence: Synthetic oligonucleotide
auacauucuauaguucauu

SEQ ID NO: 2371991 - RNA, 19 nt, Artificial Sequence
  Description of Artificial Sequence: Synthetic oligonucleotide
ggaucuuccauggcaaggc

SEQ ID NO: 2371992 - RNA, 19 nt, Artificial Sequence
  Description of Artificial Sequence: Synthetic oligonucleotide
acuagaugguuugaguauu

SEQ ID NO: 2371993 - RNA, 19 nt, Artificial Sequence
  Description of Artificial Sequence: Synthetic oligonucleotide
auaaccaaucuuagacaug

SEQ ID NO: 2371994 - RNA, 19 nt, Artificial Sequence
  Description of Artificial Sequence: Synthetic oligonucleotide
ugcauaucauuacgcugau

SEQ ID NO: 2371995 - RNA, 19 nt, Artificial Sequence
  Description of Artificial Sequence: Synthetic oligonucleotide
guccccuucugaaacaaac

SEQ ID NO: 2371996 - RNA, 19 nt, Artificial Sequence
  Description of Artificial Sequence: Synthetic oligonucleotide
aggcuggaaacccaucaaa

SEQ ID NO: 2371997 - RNA, 19 nt, Artificial Sequence
  Description of Artificial Sequence: Synthetic oligonucleotide
uaggucggggaucgacucc

SEQ ID NO: 2371998 - RNA, 19 nt, Artificial Sequence
  Description of Artificial Sequence: Synthetic oligonucleotide
ggaucgacuccccgcaggg

SEQ ID NO: 2371999 - RNA, 19 nt, Artificial Sequence
  Description of Artificial Sequence: Synthetic oligonucleotide
gcacaaauuucuguguagc

SEQ ID NO: 2372000 - RNA, 19 nt, Artificial Sequence
  Description of Artificial Sequence: Synthetic oligonucleotide
uuagaacagcuuucaucau

SEQ ID NO: 2372001 - RNA, 19 nt, Artificial Sequence
  Description of Artificial Sequence: Synthetic oligonucleotide
agguguaagcagguaccgg

SEQ ID NO: 2372002 - RNA, 19 nt, Artificial Sequence
  Description of Artificial Sequence: Synthetic oligonucleotide
gggaguacuucgaagcugc

SEQ ID NO: 2372003 - RNA, 19 nt, Artificial Sequence
  Description of Artificial Sequence: Synthetic oligonucleotide
agcagcuacuuuucaccca

SEQ ID NO: 2372004 - RNA, 19 nt, Artificial Sequence
  Description of Artificial Sequence: Synthetic oligonucleotide
gaaguucguuaggucgggg

SEQ ID NO: 2372005 - RNA, 19 nt, Artificial Sequence
  Description of Artificial Sequence: Synthetic oligonucleotide
gaucuuccauggcaaggca

SEQ ID NO: 2372006 - RNA, 19 nt, Artificial Sequence
  Description of Artificial Sequence: Synthetic oligonucleotide
aucuuccauggcaaggcag

SEQ ID NO: 2372007 - RNA, 19 nt, Artificial Sequence
  Description of Artificial Sequence: Synthetic oligonucleotide
aauccuggcacagcagcua

SEQ ID NO: 2372008 - RNA, 19 nt, Artificial Sequence
  Description of Artificial Sequence: Synthetic oligonucleotide
acgcugauaugaauggcug

SEQ ID NO: 2372009 - RNA, 19 nt, Artificial Sequence
  Description of Artificial Sequence: Synthetic oligonucleotide
ccauucauuaagauacuca

SEQ ID NO: 2372010 - RNA, 19 nt, Artificial Sequence
  Description of Artificial Sequence: Synthetic oligonucleotide
agggaguacuucgaagcug

SEQ ID NO: 2372011 - RNA, 19 nt, Artificial Sequence
  Description of Artificial Sequence: Synthetic oligonucleotide
agccaguuaaggcucuuua

SEQ ID NO: 2372012 - RNA, 19 nt, Artificial Sequence
  Description of Artificial Sequence: Synthetic oligonucleotide
ggaauucgaauacaaauuu

SEQ ID NO: 2372013 - RNA, 19 nt, Artificial Sequence
  Description of Artificial Sequence: Synthetic oligonucleotide
cuuagacauguccagugua

SEQ ID NO: 2372014 - RNA, 19 nt, Artificial Sequence
  Description of Artificial Sequence: Synthetic oligonucleotide
caccaggcaaucgguauag

SEQ ID NO: 2372015 - RNA, 19 nt, Artificial Sequence
  Description of Artificial Sequence: Synthetic oligonucleotide
gugugaaguucguuagguc

SEQ ID NO: 2372016 - RNA, 19 nt, Artificial Sequence
  Description of Artificial Sequence: Synthetic oligonucleotide
auguuguccccuucugaaa

SEQ ID NO: 2372017 - RNA, 19 nt, Artificial Sequence
  Description of Artificial Sequence: Synthetic oligonucleotide
uuccauggcaaggcagaug

SEQ ID NO: 2372018 - RNA, 19 nt, Artificial Sequence
  Description of Artificial Sequence: Synthetic oligonucleotide
gucacuagaugguuugagu

SEQ ID NO: 2372019 - RNA, 19 nt, Artificial Sequence
  Description of Artificial Sequence: Synthetic oligonucleotide
aggauuguuuccaaccauu

SEQ ID NO: 2372020 - RNA, 19 nt, Artificial Sequence
  Description of Artificial Sequence: Synthetic oligonucleotide
guuguccccuucugaaaca

SEQ ID NO: 2372021 - RNA, 19 nt, Artificial Sequence
  Description of Artificial Sequence: Synthetic oligonucleotide
gcaaucgguauagaaauaa

SEQ ID NO: 2372022 - RNA, 19 nt, Artificial Sequence
  Description of Artificial Sequence: Synthetic oligonucleotide
gcugcuugaaagaacaaua

SEQ ID NO: 2372023 - RNA, 19 nt, Artificial Sequence
  Description of Artificial Sequence: Synthetic oligonucleotide
agaaggcuggaaacccauc

SEQ ID NO: 2372024 - RNA, 19 nt, Artificial Sequence
  Description of Artificial Sequence: Synthetic oligonucleotide
cuccccgcagggaaugaac

SEQ ID NO: 2372025 - RNA, 19 nt, Artificial Sequence
  Description of Artificial Sequence: Synthetic oligonucleotide
gggaucgacuccccgcagg

SEQ ID NO: 2372026 - RNA, 19 nt, Artificial Sequence
  Description of Artificial Sequence: Synthetic oligonucleotide
caacaaggcugauggcauc

SEQ ID NO: 2372027 - RNA, 19 nt, Artificial Sequence
  Description of Artificial Sequence: Synthetic oligonucleotide
accauuggcaccaggcaau

SEQ ID NO: 2372028 - RNA, 19 nt, Artificial Sequence
  Description of Artificial Sequence: Synthetic oligonucleotide
guccaguguagaaauaaua

SEQ ID NO: 2372029 - RNA, 19 nt, Artificial Sequence
  Description of Artificial Sequence: Synthetic oligonucleotide
ugccaaagaggagcugcca

SEQ ID NO: 2372030 - RNA, 19 nt, Artificial Sequence
  Description of Artificial Sequence: Synthetic oligonucleotide
caguuaaggcucuuuauuu

SEQ ID NO: 2372031 - RNA, 19 nt, Artificial Sequence
  Description of Artificial Sequence: Synthetic oligonucleotide
gucggggaucgacuccccg

SEQ ID NO: 2372032 - RNA, 19 nt, Artificial Sequence
  Description of Artificial Sequence: Synthetic oligonucleotide
uaccggaagggaguacuuc

SEQ ID NO: 2372033 - RNA, 19 nt, Artificial Sequence
  Description of Artificial Sequence: Synthetic oligonucleotide
uacuucgaagcugcauauc

SEQ ID NO: 2372034 - RNA, 19 nt, Artificial Sequence
  Description of Artificial Sequence: Synthetic oligonucleotide
guucguuaggucggggauc

SEQ ID NO: 2372035 - RNA, 19 nt, Artificial Sequence
  Description of Artificial Sequence: Synthetic oligonucleotide
uggcugcuugaaagaacaa

SEQ ID NO: 2372036 - RNA, 19 nt, Artificial Sequence
  Description of Artificial Sequence: Synthetic oligonucleotide
agaaugacuuggauuuaua

SEQ ID NO: 2372037 - RNA, 19 nt, Artificial Sequence
  Description of Artificial Sequence: Synthetic oligonucleotide
cacuagaugguuugaguau

SEQ ID NO: 2372038 - RNA, 19 nt, Artificial Sequence
  Description of Artificial Sequence: Synthetic oligonucleotide
ucgacuccccgcagggaau

SEQ ID NO: 2372039 - RNA, 19 nt, Artificial Sequence
  Description of Artificial Sequence: Synthetic oligonucleotide
aacugccauuuggaucucu

SEQ ID NO: 2372040 - RNA, 19 nt, Artificial Sequence
  Description of Artificial Sequence: Synthetic oligonucleotide
auccauucauuaagauacu

SEQ ID NO: 2372041 - RNA, 19 nt, Artificial Sequence
  Description of Artificial Sequence: Synthetic oligonucleotide
aagcaccacuagcuucuuu

SEQ ID NO: 2372042 - RNA, 19 nt, Artificial Sequence
  Description of Artificial Sequence: Synthetic oligonucleotide
agcugccaagagcuaggga

SEQ ID NO: 2372043 - RNA, 19 nt, Artificial Sequence
  Description of Artificial Sequence: Synthetic oligonucleotide
gcuuucaucauagaguguu

SEQ ID NO: 2372044 - RNA, 19 nt, Artificial Sequence
  Description of Artificial Sequence: Synthetic oligonucleotide
guacuucgaagcugcauau

SEQ ID NO: 2372045 - RNA, 19 nt, Artificial Sequence
  Description of Artificial Sequence: Synthetic oligonucleotide
cuuuugcauagaaggugua

SEQ ID NO: 2372046 - RNA, 19 nt, Artificial Sequence
  Description of Artificial Sequence: Synthetic oligonucleotide
ggaggaaguccacugccaa

SEQ ID NO: 2372047 - RNA, 19 nt, Artificial Sequence
  Description of Artificial Sequence: Synthetic oligonucleotide
cuuaaugaaaauggaucuu

SEQ ID NO: 2372048 - RNA, 19 nt, Artificial Sequence
  Description of Artificial Sequence: Synthetic oligonucleotide
gaacacucuuuugcauaga

SEQ ID NO: 2372049 - RNA, 19 nt, Artificial Sequence
  Description of Artificial Sequence: Synthetic oligonucleotide
agguaccggaagggaguac

SEQ ID NO: 2372050 - RNA, 19 nt, Artificial Sequence
  Description of Artificial Sequence: Synthetic oligonucleotide
guuaggucggggaucgacu

SEQ ID NO: 2372051 - RNA, 19 nt, Artificial Sequence
  Description of Artificial Sequence: Synthetic oligonucleotide
caacagauacugcuggcau

SEQ ID NO: 2372052 - RNA, 19 nt, Artificial Sequence
  Description of Artificial Sequence: Synthetic oligonucleotide
cuggcaucaggagugugaa

SEQ ID NO: 2372053 - RNA, 19 nt, Artificial Sequence
  Description of Artificial Sequence: Synthetic oligonucleotide
acugccauuuggaucucuu

SEQ ID NO: 2372054 - RNA, 19 nt, Artificial Sequence
  Description of Artificial Sequence: Synthetic oligonucleotide
gaucucuuuagaacagcuu

SEQ ID NO: 2372055 - RNA, 19 nt, Artificial Sequence
  Description of Artificial Sequence: Synthetic oligonucleotide
gcuagggaucuuccauggc

SEQ ID NO: 2372056 - RNA, 19 nt, Artificial Sequence
  Description of Artificial Sequence: Synthetic oligonucleotide
gugauuccaccuccaggaa

SEQ ID NO: 2372057 - RNA, 19 nt, Artificial Sequence
  Description of Artificial Sequence: Synthetic oligonucleotide
acagaaugacuuggauuua

SEQ ID NO: 2372058 - RNA, 19 nt, Artificial Sequence
  Description of Artificial Sequence: Synthetic oligonucleotide
guguaagcagguaccggaa

SEQ ID NO: 2372059 - RNA, 19 nt, Artificial Sequence
  Description of Artificial Sequence: Synthetic oligonucleotide
gcauauacuucaguauuua

SEQ ID NO: 2372060 - RNA, 19 nt, Artificial Sequence
  Description of Artificial Sequence: Synthetic oligonucleotide
cuucgaagcugcauaucau

SEQ ID NO: 2372061 - RNA, 19 nt, Artificial Sequence
  Description of Artificial Sequence: Synthetic oligonucleotide
cugggauguuguccccuuc

SEQ ID NO: 2372062 - RNA, 19 nt, Artificial Sequence
  Description of Artificial Sequence: Synthetic oligonucleotide
cgcugauaugaauggcugc

SEQ ID NO: 2372063 - RNA, 19 nt, Artificial Sequence
  Description of Artificial Sequence: Synthetic oligonucleotide
ccaagagcuagggaucuuc

SEQ ID NO: 2372064 - RNA, 19 nt, Artificial Sequence
  Description of Artificial Sequence: Synthetic oligonucleotide
ccgcagggaaugaacauga

SEQ ID NO: 2372065 - RNA, 19 nt, Artificial Sequence
  Description of Artificial Sequence: Synthetic oligonucleotide
uagccaguuaaggcucuuu

SEQ ID NO: 2372066 - RNA, 19 nt, Artificial Sequence
  Description of Artificial Sequence: Synthetic oligonucleotide
ccaggcaaucgguauagaa

SEQ ID NO: 2372067 - RNA, 19 nt, Artificial Sequence
  Description of Artificial Sequence: Synthetic oligonucleotide
gguaccggaagggaguacu

SEQ ID NO: 2372068 - RNA, 19 nt, Artificial Sequence
  Description of Artificial Sequence: Synthetic oligonucleotide
gaguacuucgaagcugcau

SEQ ID NO: 2372069 - RNA, 19 nt, Artificial Sequence
  Description of Artificial Sequence: Synthetic oligonucleotide
gaucgacuccccgcaggga

SEQ ID NO: 2372070 - RNA, 19 nt, Artificial Sequence
  Description of Artificial Sequence: Synthetic oligonucleotide
ccaacagauacugcuggca

SEQ ID NO: 2372071 - RNA, 19 nt, Artificial Sequence
  Description of Artificial Sequence: Synthetic oligonucleotide
cagauacugcuggcaucag

SEQ ID NO: 2372072 - RNA, 19 nt, Artificial Sequence
  Description of Artificial Sequence: Synthetic oligonucleotide
uuccaaccauuggcaccag

SEQ ID NO: 2372073 - RNA, 19 nt, Artificial Sequence
  Description of Artificial Sequence: Synthetic oligonucleotide
cccgcagggaaugaacaug

SEQ ID NO: 2372074 - RNA, 19 nt, Artificial Sequence
  Description of Artificial Sequence: Synthetic oligonucleotide
cugucacuagaugguuuga

SEQ ID NO: 2372075 - RNA, 19 nt, Artificial Sequence
  Description of Artificial Sequence: Synthetic oligonucleotide
cuuuagcagaacugccauu

SEQ ID NO: 2372076 - RNA, 19 nt, Artificial Sequence
  Description of Artificial Sequence: Synthetic oligonucleotide
gcagaacugccauuuggau

SEQ ID NO: 2372077 - RNA, 19 nt, Artificial Sequence
  Description of Artificial Sequence: Synthetic oligonucleotide
ccaguuaaggcucuuuauu

SEQ ID NO: 2372078 - RNA, 19 nt, Artificial Sequence
  Description of Artificial Sequence: Synthetic oligonucleotide
cacugccaaagaggagcug

SEQ ID NO: 2372079 - RNA, 19 nt, Artificial Sequence
  Description of Artificial Sequence: Synthetic oligonucleotide
ggaaacccaucaaaacagu

SEQ ID NO: 2372080 - RNA, 19 nt, Artificial Sequence
  Description of Artificial Sequence: Synthetic oligonucleotide
gccaguuaaggcucuuuau

SEQ ID NO: 2372081 - RNA, 19 nt, Artificial Sequence
  Description of Artificial Sequence: Synthetic oligonucleotide
ggggaucgacuccccgcag

SEQ ID NO: 2372082 - RNA, 19 nt, Artificial Sequence
  Description of Artificial Sequence: Synthetic oligonucleotide
ggcaccaggcaaucgguau

SEQ ID NO: 2372083 - RNA, 19 nt, Artificial Sequence
  Description of Artificial Sequence: Synthetic oligonucleotide
acuccccgcagggaaugaa

SEQ ID NO: 2372084 - RNA, 19 nt, Artificial Sequence
  Description of Artificial Sequence: Synthetic oligonucleotide
ggcugcuugaaagaacaau

SEQ ID NO: 2372085 - RNA, 19 nt, Artificial Sequence
  Description of Artificial Sequence: Synthetic oligonucleotide
gcaccaggcaaucgguaua

SEQ ID NO: 2372086 - RNA, 19 nt, Artificial Sequence
  Description of Artificial Sequence: Synthetic oligonucleotide
cguuaggucggggaucgac

SEQ ID NO: 2372087 - RNA, 19 nt, Artificial Sequence
  Description of Artificial Sequence: Synthetic oligonucleotide
gaacugccauuuggaucuc

SEQ ID NO: 2372088 - RNA, 19 nt, Artificial Sequence
  Description of Artificial Sequence: Synthetic oligonucleotide
gcagguaccggaagggagu

SEQ ID NO: 2372089 - RNA, 19 nt, Artificial Sequence
  Description of Artificial Sequence: Synthetic oligonucleotide
gcaagcuggccaacauuuc

SEQ ID NO: 2372090 - RNA, 19 nt, Artificial Sequence
  Description of Artificial Sequence: Synthetic oligonucleotide
ccggaagggaguacuucga

SEQ ID NO: 2372091 - RNA, 19 nt, Artificial Sequence
  Description of Artificial Sequence: Synthetic oligonucleotide
gacuccccgcagggaauga

SEQ ID NO: 2372092 - RNA, 19 nt, Artificial Sequence
  Description of Artificial Sequence: Synthetic oligonucleotide
cugccauuuggaucucuuu

SEQ ID NO: 2372093 - RNA, 19 nt, Artificial Sequence
  Description of Artificial Sequence: Synthetic oligonucleotide
ggcaaucgguauagaaaua

SEQ ID NO: 2372094 - RNA, 19 nt, Artificial Sequence
  Description of Artificial Sequence: Synthetic oligonucleotide
ucguuaggucggggaucga

SEQ ID NO: 2372095 - RNA, 19 nt, Artificial Sequence
  Description of Artificial Sequence: Synthetic oligonucleotide
cagguaccggaagggagua

SEQ ID NO: 2372096 - RNA, 19 nt, Artificial Sequence
  Description of Artificial Sequence: Synthetic oligonucleotide
ccauuggcaccaggcaauc

SEQ ID NO: 2372097 - RNA, 19 nt, Artificial Sequence
  Description of Artificial Sequence: Synthetic oligonucleotide
caccuccaggaauucgaau

SEQ ID NO: 2372098 - RNA, 19 nt, Artificial Sequence
  Description of Artificial Sequence: Synthetic oligonucleotide
cacuagcuucuuugauggu

SEQ ID NO: 2372099 - RNA, 19 nt, Artificial Sequence
  Description of Artificial Sequence: Synthetic oligonucleotide
ggaguacuucgaagcugca

SEQ ID NO: 2372100 - RNA, 19 nt, Artificial Sequence
  Description of Artificial Sequence: Synthetic oligonucleotide
ggucggggaucgacucccc

SEQ ID NO: 2372101 - RNA, 19 nt, Artificial Sequence
  Description of Artificial Sequence: Synthetic oligonucleotide
guaccggaagggaguacuu

SEQ ID NO: 2372102 - RNA, 19 nt, Artificial Sequence
  Description of Artificial Sequence: Synthetic oligonucleotide
gcauaucauuacgcugaua

SEQ ID NO: 2372103 - RNA, 19 nt, Artificial Sequence
  Description of Artificial Sequence: Synthetic oligonucleotide
cacccaggccagcaauuuu

SEQ ID NO: 2372104 - RNA, 19 nt, Artificial Sequence
  Description of Artificial Sequence: Synthetic oligonucleotide
caguugcauaaggauuguu

SEQ ID NO: 2372105 - RNA, 19 nt, Artificial Sequence
  Description of Artificial Sequence: Synthetic oligonucleotide
cgacuccccgcagggaaug

SEQ ID NO: 2372106 - RNA, 19 nt, Artificial Sequence
  Description of Artificial Sequence: Synthetic oligonucleotide
cgauugcaagcuggccaac

SEQ ID NO: 2372107 - RNA, 19 nt, Artificial Sequence
  Description of Artificial Sequence: Synthetic oligonucleotide
cuagccaguuaaggcucuu

SEQ ID NO: 2372108 - RNA, 19 nt, Artificial Sequence
  Description of Artificial Sequence: Synthetic oligonucleotide
ccauggcaaggcagaugua

SEQ ID NO: 2372109 - RNA, 19 nt, Artificial Sequence
  Description of Artificial Sequence: Synthetic oligonucleotide
ccccgcagggaaugaacau

SEQ ID NO: 2372110 - RNA, 19 nt, Artificial Sequence
  Description of Artificial Sequence: Synthetic oligonucleotide
gccaagagcuagggaucuu

SEQ ID NO: 2372111 - RNA, 19 nt, Artificial Sequence
  Description of Artificial Sequence: Synthetic oligonucleotide
uuuaauuacagccaaaagg

SEQ ID NO: 2372112 - RNA, 19 nt, Artificial Sequence
  Description of Artificial Sequence: Synthetic oligonucleotide
aauacgaguauucaaaggc

SEQ ID NO: 2372113 - RNA, 19 nt, Artificial Sequence
  Description of Artificial Sequence: Synthetic oligonucleotide
uuaauuacagccaaaaggg

SEQ ID NO: 2372114 - RNA, 19 nt, Artificial Sequence
  Description of Artificial Sequence: Synthetic oligonucleotide
uucaaauuuaauuacagcc

SEQ ID NO: 2372115 - RNA, 19 nt, Artificial Sequence
  Description of Artificial Sequence: Synthetic oligonucleotide
aguaagugaauccaaauuc

SEQ ID NO: 2372116 - RNA, 19 nt, Artificial Sequence
  Description of Artificial Sequence: Synthetic oligonucleotide
uagaaguugagaaagagga

SEQ ID NO: 2372117 - RNA, 19 nt, Artificial Sequence
  Description of Artificial Sequence: Synthetic oligonucleotide
aaggaaagaaaccugguug

SEQ ID NO: 2372118 - RNA, 19 nt, Artificial Sequence
  Description of Artificial Sequence: Synthetic oligonucleotide
ucaucaucaaucaucaagc

SEQ ID NO: 2372119 - RNA, 19 nt, Artificial Sequence
  Description of Artificial Sequence: Synthetic oligonucleotide
uugagaaagaggaauauga

SEQ ID NO: 2372120 - RNA, 19 nt, Artificial Sequence
  Description of Artificial Sequence: Synthetic oligonucleotide
ucaaauuuaauuacagcca

SEQ ID NO: 2372121 - RNA, 19 nt, Artificial Sequence
  Description of Artificial Sequence: Synthetic oligonucleotide
uauccaaauacucaacucc

SEQ ID NO: 2372122 - RNA, 19 nt, Artificial Sequence
  Description of Artificial Sequence: Synthetic oligonucleotide
ucaucaaucaucaagccuc

SEQ ID NO: 2372123 - RNA, 19 nt, Artificial Sequence
  Description of Artificial Sequence: Synthetic oligonucleotide
gagagauuugaccacaagg

SEQ ID NO: 2372124 - RNA, 19 nt, Artificial Sequence
  Description of Artificial Sequence: Synthetic oligonucleotide
gaaagaauucaucugggcc

SEQ ID NO: 2372125 - RNA, 19 nt, Artificial Sequence
  Description of Artificial Sequence: Synthetic oligonucleotide
caaaguaccaccacaaggc

SEQ ID NO: 2372126 - RNA, 19 nt, Artificial Sequence
  Description of Artificial Sequence: Synthetic oligonucleotide
uauuucuggauccaggggc

SEQ ID NO: 2372127 - RNA, 19 nt, Artificial Sequence
  Description of Artificial Sequence: Synthetic oligonucleotide
ucuacagagauuagcagag

SEQ ID NO: 2372128 - RNA, 19 nt, Artificial Sequence
  Description of Artificial Sequence: Synthetic oligonucleotide
ucuaagauucuacagagau

SEQ ID NO: 2372129 - RNA, 19 nt, Artificial Sequence
  Description of Artificial Sequence: Synthetic oligonucleotide
acaaaguaccaccacaagg

SEQ ID NO: 2372130 - RNA, 19 nt, Artificial Sequence
  Description of Artificial Sequence: Synthetic oligonucleotide
acaagaaaaugucagccgg

SEQ ID NO: 2372131 - RNA, 19 nt, Artificial Sequence
  Description of Artificial Sequence: Synthetic oligonucleotide
uaagguaucgcuuccacca

SEQ ID NO: 2372132 - RNA, 19 nt, Artificial Sequence
  Description of Artificial Sequence: Synthetic oligonucleotide
aaauacucaacuccuuuug

SEQ ID NO: 2372133 - RNA, 19 nt, Artificial Sequence
  Description of Artificial Sequence: Synthetic oligonucleotide
aauaauacgaguauucaaa

SEQ ID NO: 2372134 - RNA, 19 nt, Artificial Sequence
  Description of Artificial Sequence: Synthetic oligonucleotide
ucugcuaauaauacgagua

SEQ ID NO: 2372135 - RNA, 19 nt, Artificial Sequence
  Description of Artificial Sequence: Synthetic oligonucleotide
agagauuugaccacaaggg

SEQ ID NO: 2372136 - RNA, 19 nt, Artificial Sequence
  Description of Artificial Sequence: Synthetic oligonucleotide
agugaauccaaauucaaau

SEQ ID NO: 2372137 - RNA, 19 nt, Artificial Sequence
  Description of Artificial Sequence: Synthetic oligonucleotide
aacuccuuuugacacaaag

SEQ ID NO: 2372138 - RNA, 19 nt, Artificial Sequence
  Description of Artificial Sequence: Synthetic oligonucleotide
auuccaauccaccacagug

SEQ ID NO: 2372139 - RNA, 19 nt, Artificial Sequence
  Description of Artificial Sequence: Synthetic oligonucleotide
auucaaauguauccacagc

SEQ ID NO: 2372140 - RNA, 19 nt, Artificial Sequence
  Description of Artificial Sequence: Synthetic oligonucleotide
uaauucugcuaauaauacg

SEQ ID NO: 2372141 - RNA, 19 nt, Artificial Sequence
  Description of Artificial Sequence: Synthetic oligonucleotide
uaauacgaguauucaaagg

SEQ ID NO: 2372142 - RNA, 19 nt, Artificial Sequence
  Description of Artificial Sequence: Synthetic oligonucleotide
acucaacuccuuuugacac

SEQ ID NO: 2372143 - RNA, 19 nt, Artificial Sequence
  Description of Artificial Sequence: Synthetic oligonucleotide
aauuuaauuacagccaaaa

SEQ ID NO: 2372144 - RNA, 19 nt, Artificial Sequence
  Description of Artificial Sequence: Synthetic oligonucleotide
auaauacgaguauucaaag

SEQ ID NO: 2372145 - RNA, 19 nt, Artificial Sequence
  Description of Artificial Sequence: Synthetic oligonucleotide
  modified_base (17)..(17): a, c, u, g, unknown or other
aaggcuaccuccucaunac

SEQ ID NO: 2372146 - RNA, 19 nt, Artificial Sequence
  Description of Artificial Sequence: Synthetic oligonucleotide
uguauccaaauacucaacu

SEQ ID NO: 2372147 - RNA, 19 nt, Artificial Sequence
  Description of Artificial Sequence: Synthetic oligonucleotide
uuuacuguuauucuuucuu

SEQ ID NO: 2372148 - RNA, 19 nt, Artificial Sequence
  Description of Artificial Sequence: Synthetic oligonucleotide
agccaaaagggacuauucc

SEQ ID NO: 2372149 - RNA, 19 nt, Artificial Sequence
  Description of Artificial Sequence: Synthetic oligonucleotide
aaugcagucaguccauagu

SEQ ID NO: 2372150 - RNA, 19 nt, Artificial Sequence
  Description of Artificial Sequence: Synthetic oligonucleotide
ucucuggacaagaaaaugu

SEQ ID NO: 2372151 - RNA, 19 nt, Artificial Sequence
  Description of Artificial Sequence: Synthetic oligonucleotide
auacucaacuccuuuugac

SEQ ID NO: 2372152 - RNA, 19 nt, Artificial Sequence
  Description of Artificial Sequence: Synthetic oligonucleotide
caucaagccucuaagauuc

SEQ ID NO: 2372153 - RNA, 19 nt, Artificial Sequence
  Description of Artificial Sequence: Synthetic oligonucleotide
cuggacaagaaaaugucag

SEQ ID NO: 2372154 - RNA, 19 nt, Artificial Sequence
  Description of Artificial Sequence: Synthetic oligonucleotide
uguagaaguugagaaagag

SEQ ID NO: 2372155 - RNA, 19 nt, Artificial Sequence
  Description of Artificial Sequence: Synthetic oligonucleotide
aaagggacuauuccgacua

SEQ ID NO: 2372156 - RNA, 19 nt, Artificial Sequence
  Description of Artificial Sequence: Synthetic oligonucleotide
aauacucaacuccuuuuga

SEQ ID NO: 2372157 - RNA, 19 nt, Artificial Sequence
  Description of Artificial Sequence: Synthetic oligonucleotide
auuuuacuguuauucuuuc

SEQ ID NO: 2372158 - RNA, 19 nt, Artificial Sequence
  Description of Artificial Sequence: Synthetic oligonucleotide
  modified_base (18)..(18): a, c, u, g, unknown or other
aaaggcuaccuccucauna

SEQ ID NO: 2372159 - RNA, 19 nt, Artificial Sequence
  Description of Artificial Sequence: Synthetic oligonucleotide
agggucaguaagugaaucc

SEQ ID NO: 2372160 - RNA, 19 nt, Artificial Sequence
  Description of Artificial Sequence: Synthetic oligonucleotide
gacuauuccgacuagaggu

SEQ ID NO: 2372161 - RNA, 19 nt, Artificial Sequence
  Description of Artificial Sequence: Synthetic oligonucleotide
gauucuacagagauuagca

SEQ ID NO: 2372162 - RNA, 19 nt, Artificial Sequence
  Description of Artificial Sequence: Synthetic oligonucleotide
agagacagggcugugugcc

SEQ ID NO: 2372163 - RNA, 19 nt, Artificial Sequence
  Description of Artificial Sequence: Synthetic oligonucleotide
uugauuccaauccaccaca

SEQ ID NO: 2372164 - RNA, 19 nt, Artificial Sequence
  Description of Artificial Sequence: Synthetic oligonucleotide
aagcugauugcguaggcga

SEQ ID NO: 2372165 - RNA, 19 nt, Artificial Sequence
  Description of Artificial Sequence: Synthetic oligonucleotide
uaugaagcugauugcguag

SEQ ID NO: 2372166 - RNA, 19 nt, Artificial Sequence
  Description of Artificial Sequence: Synthetic oligonucleotide
uguauccacagcucuaucu

SEQ ID NO: 2372167 - RNA, 19 nt, Artificial Sequence
  Description of Artificial Sequence: Synthetic oligonucleotide
ccuuuugacacaaaguacc

SEQ ID NO: 2372168 - RNA, 19 nt, Artificial Sequence
  Description of Artificial Sequence: Synthetic oligonucleotide
caaucaucaagccucuaag

SEQ ID NO: 2372169 - RNA, 19 nt, Artificial Sequence
  Description of Artificial Sequence: Synthetic oligonucleotide
agauuugaccacaaggguc

SEQ ID NO: 2372170 - RNA, 19 nt, Artificial Sequence
  Description of Artificial Sequence: Synthetic oligonucleotide
guagaaguugagaaagagg

SEQ ID NO: 2372171 - RNA, 19 nt, Artificial Sequence
  Description of Artificial Sequence: Synthetic oligonucleotide
uugacacaaaguaccacca

SEQ ID NO: 2372172 - RNA, 19 nt, Artificial Sequence
  Description of Artificial Sequence: Synthetic oligonucleotide
caggauuuuacuguuauuc

SEQ ID NO: 2372173 - RNA, 19 nt, Artificial Sequence
  Description of Artificial Sequence: Synthetic oligonucleotide
auucuacagagauuagcag

SEQ ID NO: 2372174 - RNA, 19 nt, Artificial Sequence
  Description of Artificial Sequence: Synthetic oligonucleotide
aaaagggacuauuccgacu

SEQ ID NO: 2372175 - RNA, 19 nt, Artificial Sequence
  Description of Artificial Sequence: Synthetic oligonucleotide
uccuuuugacacaaaguac

SEQ ID NO: 2372176 - RNA, 19 nt, Artificial Sequence
  Description of Artificial Sequence: Synthetic oligonucleotide
ucuaucucuggacaagaaa

SEQ ID NO: 2372177 - RNA, 19 nt, Artificial Sequence
  Description of Artificial Sequence: Synthetic oligonucleotide
guuaauucugcuaauaaua

SEQ ID NO: 2372178 - RNA, 19 nt, Artificial Sequence
  Description of Artificial Sequence: Synthetic oligonucleotide
ggugacguggaacugaacc

SEQ ID NO: 2372179 - RNA, 19 nt, Artificial Sequence
  Description of Artificial Sequence: Synthetic oligonucleotide
ugguacacgugaaggaaag

SEQ ID NO: 2372180 - RNA, 19 nt, Artificial Sequence
  Description of Artificial Sequence: Synthetic oligonucleotide
uaauuacagccaaaaggga

SEQ ID NO: 2372181 - RNA, 19 nt, Artificial Sequence
  Description of Artificial Sequence: Synthetic oligonucleotide
uccgacuagagguggagag

SEQ ID NO: 2372182 - RNA, 19 nt, Artificial Sequence
  Description of Artificial Sequence: Synthetic oligonucleotide
aucaucaagccucuaagau

SEQ ID NO: 2372183 - RNA, 19 nt, Artificial Sequence
  Description of Artificial Sequence: Synthetic oligonucleotide
cucauuguauguccgagug

SEQ ID NO: 2372184 - RNA, 19 nt, Artificial Sequence
  Description of Artificial Sequence: Synthetic oligonucleotide
uuuuggauugcuugggcuc

SEQ ID NO: 2372185 - RNA, 19 nt, Artificial Sequence
  Description of Artificial Sequence: Synthetic oligonucleotide
uaagugaauccaaauucaa

SEQ ID NO: 2372186 - RNA, 19 nt, Artificial Sequence
  Description of Artificial Sequence: Synthetic oligonucleotide
cuugauuccaauccaccac

SEQ ID NO: 2372187 - RNA, 19 nt, Artificial Sequence
  Description of Artificial Sequence: Synthetic oligonucleotide
augguaagguaucgcuucc

SEQ ID NO: 2372188 - RNA, 19 nt, Artificial Sequence
  Description of Artificial Sequence: Synthetic oligonucleotide
gaucacauggaugaaagaa

SEQ ID NO: 2372189 - RNA, 19 nt, Artificial Sequence
  Description of Artificial Sequence: Synthetic oligonucleotide
aucaucaaucaucaagccu

SEQ ID NO: 2372190 - RNA, 19 nt, Artificial Sequence
  Description of Artificial Sequence: Synthetic oligonucleotide
uucaaaggcuaccuccuca

SEQ ID NO: 2372191 - RNA, 19 nt, Artificial Sequence
  Description of Artificial Sequence: Synthetic oligonucleotide
cuuugggucacaagacagg

SEQ ID NO: 2372192 - RNA, 19 nt, Artificial Sequence
  Description of Artificial Sequence: Synthetic oligonucleotide
aggauuuuacuguuauucu

SEQ ID NO: 2372193 - RNA, 19 nt, Artificial Sequence
  Description of Artificial Sequence: Synthetic oligonucleotide
uauguccgaguguagaagu

SEQ ID NO: 2372194 - RNA, 19 nt, Artificial Sequence
  Description of Artificial Sequence: Synthetic oligonucleotide
acauggaugaaagaauuca

SEQ ID NO: 2372195 - RNA, 19 nt, Artificial Sequence
  Description of Artificial Sequence: Synthetic oligonucleotide
aauaugaagcugauugcgu

SEQ ID NO: 2372196 - RNA, 19 nt, Artificial Sequence
  Description of Artificial Sequence: Synthetic oligonucleotide
aagccucuaagauucuaca

SEQ ID NO: 2372197 - RNA, 19 nt, Artificial Sequence
  Description of Artificial Sequence: Synthetic oligonucleotide
ucacauggaugaaagaauu

SEQ ID NO: 2372198 - RNA, 19 nt, Artificial Sequence
  Description of Artificial Sequence: Synthetic oligonucleotide
acuugauuccaauccacca

SEQ ID NO: 2372199 - RNA, 19 nt, Artificial Sequence
  Description of Artificial Sequence: Synthetic oligonucleotide
aaugucagccgguuuugga

SEQ ID NO: 2372200 - RNA, 19 nt, Artificial Sequence
  Description of Artificial Sequence: Synthetic oligonucleotide
cauggugcagugaugguac

SEQ ID NO: 2372201 - RNA, 19 nt, Artificial Sequence
  Description of Artificial Sequence: Synthetic oligonucleotide
uccaauccaccacagugug

SEQ ID NO: 2372202 - RNA, 19 nt, Artificial Sequence
  Description of Artificial Sequence: Synthetic oligonucleotide
agcaugguaagguaucgcu

SEQ ID NO: 2372203 - RNA, 19 nt, Artificial Sequence
  Description of Artificial Sequence: Synthetic oligonucleotide
ugggucacaagacaggauu

SEQ ID NO: 2372204 - RNA, 19 nt, Artificial Sequence
  Description of Artificial Sequence: Synthetic oligonucleotide
ugauuugcgccguuaaguc

SEQ ID NO: 2372205 - RNA, 19 nt, Artificial Sequence
  Description of Artificial Sequence: Synthetic oligonucleotide
agugaugguacacgugaag

SEQ ID NO: 2372206 - RNA, 19 nt, Artificial Sequence
  Description of Artificial Sequence: Synthetic oligonucleotide
agagagacagggcugugug

SEQ ID NO: 2372207 - RNA, 19 nt, Artificial Sequence
  Description of Artificial Sequence: Synthetic oligonucleotide
auggaugaaagaauucauc

SEQ ID NO: 2372208 - RNA, 19 nt, Artificial Sequence
  Description of Artificial Sequence: Synthetic oligonucleotide
gagauuagcagaguuuuca

SEQ ID NO: 2372209 - RNA, 19 nt, Artificial Sequence
  Description of Artificial Sequence: Synthetic oligonucleotide
gaaugcagucaguccauag

SEQ ID NO: 2372210 - RNA, 19 nt, Artificial Sequence
  Description of Artificial Sequence: Synthetic oligonucleotide
aauggugacguggaacuga

SEQ ID NO: 2372211 - RNA, 19 nt, Artificial Sequence
  Description of Artificial Sequence: Synthetic oligonucleotide
augaaagaauucaucuggg

SEQ ID NO: 2372212 - RNA, 19 nt, Artificial Sequence
  Description of Artificial Sequence: Synthetic oligonucleotide
uuugggucacaagacagga

SEQ ID NO: 2372213 - RNA, 19 nt, Artificial Sequence
  Description of Artificial Sequence: Synthetic oligonucleotide
uucugcuaauaauacgagu

SEQ ID NO: 2372214 - RNA, 19 nt, Artificial Sequence
  Description of Artificial Sequence: Synthetic oligonucleotide
uacagagauuagcagaguu

SEQ ID NO: 2372215 - RNA, 19 nt, Artificial Sequence
  Description of Artificial Sequence: Synthetic oligonucleotide
auugcguaggcgaucagag

SEQ ID NO: 2372216 - RNA, 19 nt, Artificial Sequence
  Description of Artificial Sequence: Synthetic oligonucleotide
agucaugguggccuuuggg

SEQ ID NO: 2372217 - RNA, 19 nt, Artificial Sequence
  Description of Artificial Sequence: Synthetic oligonucleotide
ucaucaagccucuaagauu

SEQ ID NO: 2372218 - RNA, 19 nt, Artificial Sequence
  Description of Artificial Sequence: Synthetic oligonucleotide
uguauguccgaguguagaa

SEQ ID NO: 2372219 - RNA, 19 nt, Artificial Sequence
  Description of Artificial Sequence: Synthetic oligonucleotide
agugauuugcgccguuaag

SEQ ID NO: 2372220 - RNA, 19 nt, Artificial Sequence
  Description of Artificial Sequence: Synthetic oligonucleotide
caaauuuaauuacagccaa

SEQ ID NO: 2372221 - RNA, 19 nt, Artificial Sequence
  Description of Artificial Sequence: Synthetic oligonucleotide
auugcuugggcucauugua

SEQ ID NO: 2372222 - RNA, 19 nt, Artificial Sequence
  Description of Artificial Sequence: Synthetic oligonucleotide
ugauuccaauccaccacag

SEQ ID NO: 2372223 - RNA, 19 nt, Artificial Sequence
  Description of Artificial Sequence: Synthetic oligonucleotide
guauccaaauacucaacuc

SEQ ID NO: 2372224 - RNA, 19 nt, Artificial Sequence
  Description of Artificial Sequence: Synthetic oligonucleotide
uacgaguauucaaaggcua

SEQ ID NO: 2372225 - RNA, 19 nt, Artificial Sequence
  Description of Artificial Sequence: Synthetic oligonucleotide
agccucuaagauucuacag

SEQ ID NO: 2372226 - RNA, 19 nt, Artificial Sequence
  Description of Artificial Sequence: Synthetic oligonucleotide
uuacuguuauucuuucuua

SEQ ID NO: 2372227 - RNA, 19 nt, Artificial Sequence
  Description of Artificial Sequence: Synthetic oligonucleotide
caagccucuaagauucuac

SEQ ID NO: 2372228 - RNA, 19 nt, Artificial Sequence
  Description of Artificial Sequence: Synthetic oligonucleotide
ggaauaugaagcugauugc

SEQ ID NO: 2372229 - RNA, 19 nt, Artificial Sequence
  Description of Artificial Sequence: Synthetic oligonucleotide
guaagugaauccaaauuca

SEQ ID NO: 2372230 - RNA, 19 nt, Artificial Sequence
  Description of Artificial Sequence: Synthetic oligonucleotide
uggaacugaaccagcugca

SEQ ID NO: 2372231 - RNA, 19 nt, Artificial Sequence
  Description of Artificial Sequence: Synthetic oligonucleotide
agucaguccauaguaggag

SEQ ID NO: 2372232 - RNA, 19 nt, Artificial Sequence
  Description of Artificial Sequence: Synthetic oligonucleotide
aaaugucagccgguuuugg

SEQ ID NO: 2372233 - RNA, 19 nt, Artificial Sequence
  Description of Artificial Sequence: Synthetic oligonucleotide
ggacaagaaaaugucagcc

SEQ ID NO: 2372234 - RNA, 19 nt, Artificial Sequence
  Description of Artificial Sequence: Synthetic oligonucleotide
uacuguuauucuuucuuau

SEQ ID NO: 2372235 - RNA, 19 nt, Artificial Sequence
  Description of Artificial Sequence: Synthetic oligonucleotide
auaugaagcugauugcgua

SEQ ID NO: 2372236 - RNA, 19 nt, Artificial Sequence
  Description of Artificial Sequence: Synthetic oligonucleotide
ugaagcugauugcguaggc

SEQ ID NO: 2372237 - RNA, 19 nt, Artificial Sequence
  Description of Artificial Sequence: Synthetic oligonucleotide
guaagguaucgcuuccacc

SEQ ID NO: 2372238 - RNA, 19 nt, Artificial Sequence
  Description of Artificial Sequence: Synthetic oligonucleotide
uccacagcucuaucucugg

SEQ ID NO: 2372239 - RNA, 19 nt, Artificial Sequence
  Description of Artificial Sequence: Synthetic oligonucleotide
guugagaaagaggaauaug

SEQ ID NO: 2372240 - RNA, 19 nt, Artificial Sequence
  Description of Artificial Sequence: Synthetic oligonucleotide
ugcagcaugguaagguauc

SEQ ID NO: 2372241 - RNA, 19 nt, Artificial Sequence
  Description of Artificial Sequence: Synthetic oligonucleotide
uccauaguaggaguacaug

SEQ ID NO: 2372242 - RNA, 19 nt, Artificial Sequence
  Description of Artificial Sequence: Synthetic oligonucleotide
uaguuucccacagugauuu

SEQ ID NO: 2372243 - RNA, 19 nt, Artificial Sequence
  Description of Artificial Sequence: Synthetic oligonucleotide
acgaguauucaaaggcuac

SEQ ID NO: 2372244 - RNA, 19 nt, Artificial Sequence
  Description of Artificial Sequence: Synthetic oligonucleotide
uuuggauugcuugggcuca

SEQ ID NO: 2372245 - RNA, 19 nt, Artificial Sequence
  Description of Artificial Sequence: Synthetic oligonucleotide
ucauuguauguccgagugu

SEQ ID NO: 2372246 - RNA, 19 nt, Artificial Sequence
  Description of Artificial Sequence: Synthetic oligonucleotide
uuguauguccgaguguaga

SEQ ID NO: 2372247 - RNA, 19 nt, Artificial Sequence
  Description of Artificial Sequence: Synthetic oligonucleotide
ucgcuuccaccaaagauau

SEQ ID NO: 2372248 - RNA, 19 nt, Artificial Sequence
  Description of Artificial Sequence: Synthetic oligonucleotide
gcagucaguccauaguagg

SEQ ID NO: 2372249 - RNA, 19 nt, Artificial Sequence
  Description of Artificial Sequence: Synthetic oligonucleotide
cacuguauccaaauacuca

SEQ ID NO: 2372250 - RNA, 19 nt, Artificial Sequence
  Description of Artificial Sequence: Synthetic oligonucleotide
cuauccugacuucauuaac

SEQ ID NO: 2372251 - RNA, 19 nt, Artificial Sequence
  Description of Artificial Sequence: Synthetic oligonucleotide
aagugaauccaaauucaaa

SEQ ID NO: 2372252 - RNA, 19 nt, Artificial Sequence
  Description of Artificial Sequence: Synthetic oligonucleotide
uugaccacaagggucagua

SEQ ID NO: 2372253 - RNA, 19 nt, Artificial Sequence
  Description of Artificial Sequence: Synthetic oligonucleotide
uagagguggagagauuuga

SEQ ID NO: 2372254 - RNA, 19 nt, Artificial Sequence
  Description of Artificial Sequence: Synthetic oligonucleotide
gaaguugagaaagaggaau

SEQ ID NO: 2372255 - RNA, 19 nt, Artificial Sequence
  Description of Artificial Sequence: Synthetic oligonucleotide
aaggcagcagcuauccuga

SEQ ID NO: 2372256 - RNA, 19 nt, Artificial Sequence
  Description of Artificial Sequence: Synthetic oligonucleotide
ggacuauuccgacuagagg

SEQ ID NO: 2372257 - RNA, 19 nt, Artificial Sequence
  Description of Artificial Sequence: Synthetic oligonucleotide
cuuuugacacaaaguacca

SEQ ID NO: 2372258 - RNA, 19 nt, Artificial Sequence
  Description of Artificial Sequence: Synthetic oligonucleotide
aggaguacaugaucacaug

SEQ ID NO: 2372259 - RNA, 19 nt, Artificial Sequence
  Description of Artificial Sequence: Synthetic oligonucleotide
uguccgaguguagaaguug

SEQ ID NO: 2372260 - RNA, 19 nt, Artificial Sequence
  Description of Artificial Sequence: Synthetic oligonucleotide
ugcagugaugguacacgug

SEQ ID NO: 2372261 - RNA, 19 nt, Artificial Sequence
  Description of Artificial Sequence: Synthetic oligonucleotide
agauuagcagaguuuucaa

SEQ ID NO: 2372262 - RNA, 19 nt, Artificial Sequence
  Description of Artificial Sequence: Synthetic oligonucleotide
ucaguccauaguaggagua

SEQ ID NO: 2372263 - RNA, 19 nt, Artificial Sequence
  Description of Artificial Sequence: Synthetic oligonucleotide
aaauuuaauuacagccaaa

SEQ ID NO: 2372264 - RNA, 19 nt, Artificial Sequence
  Description of Artificial Sequence: Synthetic oligonucleotide
auucugcuaauaauacgag

SEQ ID NO: 2372265 - RNA, 19 nt, Artificial Sequence
  Description of Artificial Sequence: Synthetic oligonucleotide
gauuugcgccguuaaguca

SEQ ID NO: 2372266 - RNA, 19 nt, Artificial Sequence
  Description of Artificial Sequence: Synthetic oligonucleotide
aaguugagaaagaggaaua

SEQ ID NO: 2372267 - RNA, 19 nt, Artificial Sequence
  Description of Artificial Sequence: Synthetic oligonucleotide
aagggacuauuccgacuag

SEQ ID NO: 2372268 - RNA, 19 nt, Artificial Sequence
  Description of Artificial Sequence: Synthetic oligonucleotide
cuguauccaaauacucaac

SEQ ID NO: 2372269 - RNA, 19 nt, Artificial Sequence
  Description of Artificial Sequence: Synthetic oligonucleotide
augucagccgguuuuggau

SEQ ID NO: 2372270 - RNA, 19 nt, Artificial Sequence
  Description of Artificial Sequence: Synthetic oligonucleotide
cacaaaguaccaccacaag

SEQ ID NO: 2372271 - RNA, 19 nt, Artificial Sequence
  Description of Artificial Sequence: Synthetic oligonucleotide
guauguccgaguguagaag

SEQ ID NO: 2372272 - RNA, 19 nt, Artificial Sequence
  Description of Artificial Sequence: Synthetic oligonucleotide
auacgaguauucaaaggcu

SEQ ID NO: 2372273 - RNA, 19 nt, Artificial Sequence
  Description of Artificial Sequence: Synthetic oligonucleotide
agcuauccugacuucauua

SEQ ID NO: 2372274 - RNA, 19 nt, Artificial Sequence
  Description of Artificial Sequence: Synthetic oligonucleotide
aauucaucugggccccaaa

SEQ ID NO: 2372275 - RNA, 19 nt, Artificial Sequence
  Description of Artificial Sequence: Synthetic oligonucleotide
cacauggaugaaagaauuc

SEQ ID NO: 2372276 - RNA, 19 nt, Artificial Sequence
  Description of Artificial Sequence: Synthetic oligonucleotide
gugacguggaacugaacca

SEQ ID NO: 2372277 - RNA, 19 nt, Artificial Sequence
  Description of Artificial Sequence: Synthetic oligonucleotide
cuauuccgacuagaggugg

SEQ ID NO: 2372278 - RNA, 19 nt, Artificial Sequence
  Description of Artificial Sequence: Synthetic oligonucleotide
ggugcagugaugguacacg

SEQ ID NO: 2372279 - RNA, 19 nt, Artificial Sequence
  Description of Artificial Sequence: Synthetic oligonucleotide
gagauuugaccacaagggu

SEQ ID NO: 2372280 - RNA, 19 nt, Artificial Sequence
  Description of Artificial Sequence: Synthetic oligonucleotide
aucacauggaugaaagaau

SEQ ID NO: 2372281 - RNA, 19 nt, Artificial Sequence
  Description of Artificial Sequence: Synthetic oligonucleotide
acuccuuuugacacaaagu

SEQ ID NO: 2372282 - RNA, 19 nt, Artificial Sequence
  Description of Artificial Sequence: Synthetic oligonucleotide
acuauuccgacuagaggug

SEQ ID NO: 2372283 - RNA, 19 nt, Artificial Sequence
  Description of Artificial Sequence: Synthetic oligonucleotide
aguugagaaagaggaauau

SEQ ID NO: 2372284 - RNA, 19 nt, Artificial Sequence
  Description of Artificial Sequence: Synthetic oligonucleotide
cagugcauccacuugggga

SEQ ID NO: 2372285 - RNA, 19 nt, Artificial Sequence
  Description of Artificial Sequence: Synthetic oligonucleotide
aagauucuacagagauuag

SEQ ID NO: 2372286 - RNA, 19 nt, Artificial Sequence
  Description of Artificial Sequence: Synthetic oligonucleotide
gauugcguaggcgaucaga

SEQ ID NO: 2372287 - RNA, 19 nt, Artificial Sequence
  Description of Artificial Sequence: Synthetic oligonucleotide
auuugcgccguuaagucau

SEQ ID NO: 2372288 - RNA, 19 nt, Artificial Sequence
  Description of Artificial Sequence: Synthetic oligonucleotide
gagagacagggcugugugc

SEQ ID NO: 2372289 - RNA, 19 nt, Artificial Sequence
  Description of Artificial Sequence: Synthetic oligonucleotide
gugcccaauggugacgugg

SEQ ID NO: 2372290 - RNA, 19 nt, Artificial Sequence
  Description of Artificial Sequence: Synthetic oligonucleotide
cauuguauguccgagugua

SEQ ID NO: 2372291 - RNA, 19 nt, Artificial Sequence
  Description of Artificial Sequence: Synthetic oligonucleotide
agagauuagcagaguuuuc

SEQ ID NO: 2372292 - RNA, 19 nt, Artificial Sequence
  Description of Artificial Sequence: Synthetic oligonucleotide
aagguaucgcuuccaccaa

SEQ ID NO: 2372293 - RNA, 19 nt, Artificial Sequence
  Description of Artificial Sequence: Synthetic oligonucleotide
cccacagugauuugcgccg

SEQ ID NO: 2372294 - RNA, 19 nt, Artificial Sequence
  Description of Artificial Sequence: Synthetic oligonucleotide
ccuuugggucacaagacag

SEQ ID NO: 2372295 - RNA, 19 nt, Artificial Sequence
  Description of Artificial Sequence: Synthetic oligonucleotide
uggauccaggggccgaaug

SEQ ID NO: 2372296 - RNA, 19 nt, Artificial Sequence
  Description of Artificial Sequence: Synthetic oligonucleotide
uugcuugggcucauuguau

SEQ ID NO: 2372297 - RNA, 19 nt, Artificial Sequence
  Description of Artificial Sequence: Synthetic oligonucleotide
gacaggauuuuacuguuau

SEQ ID NO: 2372298 - RNA, 19 nt, Artificial Sequence
  Description of Artificial Sequence: Synthetic oligonucleotide
gugugaacauggugcagug

SEQ ID NO: 2372299 - RNA, 19 nt, Artificial Sequence
  Description of Artificial Sequence: Synthetic oligonucleotide
agcucuaucucuggacaag

SEQ ID NO: 2372300 - RNA, 19 nt, Artificial Sequence
  Description of Artificial Sequence: Synthetic oligonucleotide
gccgguuuuggauugcuug

SEQ ID NO: 2372301 - RNA, 19 nt, Artificial Sequence
  Description of Artificial Sequence: Synthetic oligonucleotide
gaaggaaagaaaccugguu

SEQ ID NO: 2372302 - RNA, 19 nt, Artificial Sequence
  Description of Artificial Sequence: Synthetic oligonucleotide
gccucuaagauucuacaga

SEQ ID NO: 2372303 - RNA, 19 nt, Artificial Sequence
  Description of Artificial Sequence: Synthetic oligonucleotide
uugcguaggcgaucagagc

SEQ ID NO: 2372304 - RNA, 19 nt, Artificial Sequence
  Description of Artificial Sequence: Synthetic oligonucleotide
aguccauaguaggaguaca

SEQ ID NO: 2372305 - RNA, 19 nt, Artificial Sequence
  Description of Artificial Sequence: Synthetic oligonucleotide
  modified_base (16)..(16): a, c, u, g, unknown or other
aggcuaccuccucaunaca

SEQ ID NO: 2372306 - RNA, 19 nt, Artificial Sequence
  Description of Artificial Sequence: Synthetic oligonucleotide
guaggaguacaugaucaca

SEQ ID NO: 2372307 - RNA, 19 nt, Artificial Sequence
  Description of Artificial Sequence: Synthetic oligonucleotide
auuccgacuagagguggag

SEQ ID NO: 2372308 - RNA, 19 nt, Artificial Sequence
  Description of Artificial Sequence: Synthetic oligonucleotide
accacaagggucaguaagu

SEQ ID NO: 2372309 - RNA, 19 nt, Artificial Sequence
  Description of Artificial Sequence: Synthetic oligonucleotide
uggagagauuugaccacaa

SEQ ID NO: 2372310 - RNA, 19 nt, Artificial Sequence
  Description of Artificial Sequence: Synthetic oligonucleotide
gguuuuggauugcuugggc

SEQ ID NO: 2372311 - RNA, 19 nt, Artificial Sequence
  Description of Artificial Sequence: Synthetic oligonucleotide
ggauccaggggccgaaugc

SEQ ID NO: 2372312 - RNA, 19 nt, Artificial Sequence
  Description of Artificial Sequence: Synthetic oligonucleotide
gggacuauuccgacuagag

SEQ ID NO: 2372313 - RNA, 19 nt, Artificial Sequence
  Description of Artificial Sequence: Synthetic oligonucleotide
gaucagagcccagugcauc

SEQ ID NO: 2372314 - RNA, 19 nt, Artificial Sequence
  Description of Artificial Sequence: Synthetic oligonucleotide
gcagucaguguagagagac

SEQ ID NO: 2372315 - RNA, 19 nt, Artificial Sequence
  Description of Artificial Sequence: Synthetic oligonucleotide
guuuuggauugcuugggcu

SEQ ID NO: 2372316 - RNA, 19 nt, Artificial Sequence
  Description of Artificial Sequence: Synthetic oligonucleotide
gguaagguaucgcuuccac

SEQ ID NO: 2372317 - RNA, 19 nt, Artificial Sequence
  Description of Artificial Sequence: Synthetic oligonucleotide
gccgaaugcagucagucca

SEQ ID NO: 2372318 - RNA, 19 nt, Artificial Sequence
  Description of Artificial Sequence: Synthetic oligonucleotide
gucagccgguuuuggauug

SEQ ID NO: 2372319 - RNA, 19 nt, Artificial Sequence
  Description of Artificial Sequence: Synthetic oligonucleotide
uaggcgaucagagcccagu

SEQ ID NO: 2372320 - RNA, 19 nt, Artificial Sequence
  Description of Artificial Sequence: Synthetic oligonucleotide
ccgguuuuggauugcuugg

SEQ ID NO: 2372321 - RNA, 19 nt, Artificial Sequence
  Description of Artificial Sequence: Synthetic oligonucleotide
acagagauuagcagaguuu

SEQ ID NO: 2372322 - RNA, 19 nt, Artificial Sequence
  Description of Artificial Sequence: Synthetic oligonucleotide
aggggccgaaugcagucag

SEQ ID NO: 2372323 - RNA, 19 nt, Artificial Sequence
  Description of Artificial Sequence: Synthetic oligonucleotide
ggagagauuugaccacaag

SEQ ID NO: 2372324 - RNA, 19 nt, Artificial Sequence
  Description of Artificial Sequence: Synthetic oligonucleotide
ugcgccguuaagucauggu

SEQ ID NO: 2372325 - RNA, 19 nt, Artificial Sequence
  Description of Artificial Sequence: Synthetic oligonucleotide
cuugggcucauuguauguc

SEQ ID NO: 2372326 - RNA, 19 nt, Artificial Sequence
  Description of Artificial Sequence: Synthetic oligonucleotide
  modified_base (13)..(13): a, c, u, g, unknown or other
cuaccuccucaunacaaaa

SEQ ID NO: 2372327 - RNA, 19 nt, Artificial Sequence
  Description of Artificial Sequence: Synthetic oligonucleotide
gguggagagauuugaccac

SEQ ID NO: 2372328 - RNA, 19 nt, Artificial Sequence
  Description of Artificial Sequence: Synthetic oligonucleotide
auuguauguccgaguguag

SEQ ID NO: 2372329 - RNA, 19 nt, Artificial Sequence
  Description of Artificial Sequence: Synthetic oligonucleotide
cuguuauucuuucuuauuu

SEQ ID NO: 2372330 - RNA, 19 nt, Artificial Sequence
  Description of Artificial Sequence: Synthetic oligonucleotide
gguaucgcuuccaccaaag

SEQ ID NO: 2372331 - RNA, 19 nt, Artificial Sequence
  Description of Artificial Sequence: Synthetic oligonucleotide
cugugugcccaauggugac

SEQ ID NO: 2372332 - RNA, 19 nt, Artificial Sequence
  Description of Artificial Sequence: Synthetic oligonucleotide
gcgccguuaagucauggug

SEQ ID NO: 2372333 - RNA, 19 nt, Artificial Sequence
  Description of Artificial Sequence: Synthetic oligonucleotide
ggauugcuugggcucauug

SEQ ID NO: 2372334 - RNA, 19 nt, Artificial Sequence
  Description of Artificial Sequence: Synthetic oligonucleotide
agcagcuauccugacuuca

SEQ ID NO: 2372335 - RNA, 19 nt, Artificial Sequence
  Description of Artificial Sequence: Synthetic oligonucleotide
gugauuugcgccguuaagu

SEQ ID NO: 2372336 - RNA, 19 nt, Artificial Sequence
  Description of Artificial Sequence: Synthetic oligonucleotide
acauggugcagugauggua

SEQ ID NO: 2372337 - RNA, 19 nt, Artificial Sequence
  Description of Artificial Sequence: Synthetic oligonucleotide
aggcgaucagagcccagug

SEQ ID NO: 2372338 - RNA, 19 nt, Artificial Sequence
  Description of Artificial Sequence: Synthetic oligonucleotide
gcgaucagagcccagugca

SEQ ID NO: 2372339 - RNA, 19 nt, Artificial Sequence
  Description of Artificial Sequence: Synthetic oligonucleotide
cgccguuaagucauggugg

SEQ ID NO: 2372340 - RNA, 19 nt, Artificial Sequence
  Description of Artificial Sequence: Synthetic oligonucleotide
gccguuaagucaugguggc

SEQ ID NO: 2372341 - RNA, 19 nt, Artificial Sequence
  Description of Artificial Sequence: Synthetic oligonucleotide
cucuaagauucuacagaga

SEQ ID NO: 2372342 - RNA, 19 nt, Artificial Sequence
  Description of Artificial Sequence: Synthetic oligonucleotide
acaggauuuuacuguuauu

SEQ ID NO: 2372343 - RNA, 19 nt, Artificial Sequence
  Description of Artificial Sequence: Synthetic oligonucleotide
caguccauaguaggaguac

SEQ ID NO: 2372344 - RNA, 19 nt, Artificial Sequence
  Description of Artificial Sequence: Synthetic oligonucleotide
ugguaagguaucgcuucca

SEQ ID NO: 2372345 - RNA, 19 nt, Artificial Sequence
  Description of Artificial Sequence: Synthetic oligonucleotide
cugaaccagcugcagcaug

SEQ ID NO: 2372346 - RNA, 19 nt, Artificial Sequence
  Description of Artificial Sequence: Synthetic oligonucleotide
gucaguaagugaauccaaa

SEQ ID NO: 2372347 - RNA, 19 nt, Artificial Sequence
  Description of Artificial Sequence: Synthetic oligonucleotide
ugauugcguaggcgaucag

SEQ ID NO: 2372348 - RNA, 19 nt, Artificial Sequence
  Description of Artificial Sequence: Synthetic oligonucleotide
cauggaugaaagaauucau

SEQ ID NO: 2372349 - RNA, 19 nt, Artificial Sequence
  Description of Artificial Sequence: Synthetic oligonucleotide
  modified_base (14)..(14): a, c, u, g, unknown or other
gcuaccuccucaunacaaa

SEQ ID NO: 2372350 - RNA, 19 nt, Artificial Sequence
  Description of Artificial Sequence: Synthetic oligonucleotide
cacaagggucaguaaguga

SEQ ID NO: 2372351 - RNA, 19 nt, Artificial Sequence
  Description of Artificial Sequence: Synthetic oligonucleotide
guggccuuugggucacaag

SEQ ID NO: 2372352 - RNA, 19 nt, Artificial Sequence
  Description of Artificial Sequence: Synthetic oligonucleotide
gcagcaugguaagguaucg

SEQ ID NO: 2372353 - RNA, 19 nt, Artificial Sequence
  Description of Artificial Sequence: Synthetic oligonucleotide
uuccgacuagagguggaga

SEQ ID NO: 2372354 - RNA, 19 nt, Artificial Sequence
  Description of Artificial Sequence: Synthetic oligonucleotide
ggcucauuguauguccgag

SEQ ID NO: 2372355 - RNA, 19 nt, Artificial Sequence
  Description of Artificial Sequence: Synthetic oligonucleotide
cugauugcguaggcgauca

SEQ ID NO: 2372356 - RNA, 19 nt, Artificial Sequence
  Description of Artificial Sequence: Synthetic oligonucleotide
ucaagccucuaagauucua

SEQ ID NO: 2372357 - RNA, 19 nt, Artificial Sequence
  Description of Artificial Sequence: Synthetic oligonucleotide
gggucaguaagugaaucca

SEQ ID NO: 2372358 - RNA, 19 nt, Artificial Sequence
  Description of Artificial Sequence: Synthetic oligonucleotide
uggugcagugaugguacac

SEQ ID NO: 2372359 - RNA, 19 nt, Artificial Sequence
  Description of Artificial Sequence: Synthetic oligonucleotide
gauuccaauccaccacagu

SEQ ID NO: 2372360 - RNA, 19 nt, Artificial Sequence
  Description of Artificial Sequence: Synthetic oligonucleotide
ggaacugaaccagcugcag

SEQ ID NO: 2372361 - RNA, 19 nt, Artificial Sequence
  Description of Artificial Sequence: Synthetic oligonucleotide
guaucgcuuccaccaaaga

SEQ ID NO: 2372362 - RNA, 19 nt, Artificial Sequence
  Description of Artificial Sequence: Synthetic oligonucleotide
ggcgaucagagcccagugc

SEQ ID NO: 2372363 - RNA, 19 nt, Artificial Sequence
  Description of Artificial Sequence: Synthetic oligonucleotide
caguaagugaauccaaauu

SEQ ID NO: 2372364 - RNA, 19 nt, Artificial Sequence
  Description of Artificial Sequence: Synthetic oligonucleotide
cagcaugguaagguaucgc

SEQ ID NO: 2372365 - RNA, 19 nt, Artificial Sequence
  Description of Artificial Sequence: Synthetic oligonucleotide
ugaccacaagggucaguaa

SEQ ID NO: 2372366 - RNA, 19 nt, Artificial Sequence
  Description of Artificial Sequence: Synthetic oligonucleotide
agaggaauaugaagcugau

SEQ ID NO: 2372367 - RNA, 19 nt, Artificial Sequence
  Description of Artificial Sequence: Synthetic oligonucleotide
agggacuauuccgacuaga

SEQ ID NO: 2372368 - RNA, 19 nt, Artificial Sequence
  Description of Artificial Sequence: Synthetic oligonucleotide
cgaguguagaaguugagaa

SEQ ID NO: 2372369 - RNA, 19 nt, Artificial Sequence
  Description of Artificial Sequence: Synthetic oligonucleotide
ggccgaaugcagucagucc

SEQ ID NO: 2372370 - RNA, 19 nt, Artificial Sequence
  Description of Artificial Sequence: Synthetic oligonucleotide
caccaacaccaucaucauc

SEQ ID NO: 2372371 - RNA, 19 nt, Artificial Sequence
  Description of Artificial Sequence: Synthetic oligonucleotide
ggauuuuacuguuauucuu

SEQ ID NO: 2372372 - RNA, 19 nt, Artificial Sequence
  Description of Artificial Sequence: Synthetic oligonucleotide
cuaagauucuacagagauu

SEQ ID NO: 2372373 - RNA, 19 nt, Artificial Sequence
  Description of Artificial Sequence: Synthetic oligonucleotide
cucuaucucuggacaagaa

SEQ ID NO: 2372374 - RNA, 19 nt, Artificial Sequence
  Description of Artificial Sequence: Synthetic oligonucleotide
cugcuaauaauacgaguau

SEQ ID NO: 2372375 - RNA, 19 nt, Artificial Sequence
  Description of Artificial Sequence: Synthetic oligonucleotide
cagagauuagcagaguuuu

SEQ ID NO: 2372376 - RNA, 19 nt, Artificial Sequence
  Description of Artificial Sequence: Synthetic oligonucleotide
ucagccgguuuuggauugc

SEQ ID NO: 2372377 - RNA, 19 nt, Artificial Sequence
  Description of Artificial Sequence: Synthetic oligonucleotide
ugugcccaauggugacgug

SEQ ID NO: 2372378 - RNA, 19 nt, Artificial Sequence
  Description of Artificial Sequence: Synthetic oligonucleotide
ggggcagucaguguagaga

SEQ ID NO: 2372379 - RNA, 19 nt, Artificial Sequence
  Description of Artificial Sequence: Synthetic oligonucleotide
auggugcagugaugguaca

SEQ ID NO: 2372380 - RNA, 19 nt, Artificial Sequence
  Description of Artificial Sequence: Synthetic oligonucleotide
cagugugaacauggugcag

SEQ ID NO: 2372381 - RNA, 19 nt, Artificial Sequence
  Description of Artificial Sequence: Synthetic oligonucleotide
uuaagucaugguggccuuu

SEQ ID NO: 2372382 - RNA, 19 nt, Artificial Sequence
  Description of Artificial Sequence: Synthetic oligonucleotide
cagugauuugcgccguuaa

SEQ ID NO: 2372383 - RNA, 19 nt, Artificial Sequence
  Description of Artificial Sequence: Synthetic oligonucleotide
acagugauuugcgccguua

SEQ ID NO: 2372384 - RNA, 19 nt, Artificial Sequence
  Description of Artificial Sequence: Synthetic oligonucleotide
gcugugugcccaaugguga

SEQ ID NO: 2372385 - RNA, 19 nt, Artificial Sequence
  Description of Artificial Sequence: Synthetic oligonucleotide
cccaauggugacguggaac

SEQ ID NO: 2372386 - RNA, 19 nt, Artificial Sequence
  Description of Artificial Sequence: Synthetic oligonucleotide
cagugaugguacacgugaa

SEQ ID NO: 2372387 - RNA, 19 nt, Artificial Sequence
  Description of Artificial Sequence: Synthetic oligonucleotide
ggccuuugggucacaagac

SEQ ID NO: 2372388 - RNA, 19 nt, Artificial Sequence
  Description of Artificial Sequence: Synthetic oligonucleotide
agcugauugcguaggcgau

SEQ ID NO: 2372389 - RNA, 19 nt, Artificial Sequence
  Description of Artificial Sequence: Synthetic oligonucleotide
cagcucuaucucuggacaa

SEQ ID NO: 2372390 - RNA, 19 nt, Artificial Sequence
  Description of Artificial Sequence: Synthetic oligonucleotide
ccaccacuugauuccaauc

SEQ ID NO: 2372391 - RNA, 19 nt, Artificial Sequence
  Description of Artificial Sequence: Synthetic oligonucleotide
cccugccaccacuugauuc

SEQ ID NO: 2372392 - RNA, 19 nt, Artificial Sequence
  Description of Artificial Sequence: Synthetic oligonucleotide
ccacaagggucaguaagug

SEQ ID NO: 2372393 - RNA, 19 nt, Artificial Sequence
  Description of Artificial Sequence: Synthetic oligonucleotide
agagcccagugcauccacu

SEQ ID NO: 2372394 - RNA, 19 nt, Artificial Sequence
  Description of Artificial Sequence: Synthetic oligonucleotide
ggucaguaagugaauccaa

SEQ ID NO: 2372395 - RNA, 19 nt, Artificial Sequence
  Description of Artificial Sequence: Synthetic oligonucleotide
guuaagucaugguggccuu

SEQ ID NO: 2372396 - RNA, 19 nt, Artificial Sequence
  Description of Artificial Sequence: Synthetic oligonucleotide
cagcagcuauccugacuuc

SEQ ID NO: 2372397 - RNA, 19 nt, Artificial Sequence
  Description of Artificial Sequence: Synthetic oligonucleotide
gcucuaucucuggacaaga

SEQ ID NO: 2372398 - RNA, 19 nt, Artificial Sequence
  Description of Artificial Sequence: Synthetic oligonucleotide
agacaggauuuuacuguua

SEQ ID NO: 2372399 - RNA, 19 nt, Artificial Sequence
  Description of Artificial Sequence: Synthetic oligonucleotide
uuggauugcuugggcucau

SEQ ID NO: 2372400 - RNA, 19 nt, Artificial Sequence
  Description of Artificial Sequence: Synthetic oligonucleotide
gggccgaaugcagucaguc

SEQ ID NO: 2372401 - RNA, 19 nt, Artificial Sequence
  Description of Artificial Sequence: Synthetic oligonucleotide
auguccgaguguagaaguu

SEQ ID NO: 2372402 - RNA, 19 nt, Artificial Sequence
  Description of Artificial Sequence: Synthetic oligonucleotide
gagcccagugcauccacuu

SEQ ID NO: 2372403 - RNA, 19 nt, Artificial Sequence
  Description of Artificial Sequence: Synthetic oligonucleotide
gcguaggcgaucagagccc

SEQ ID NO: 2372404 - RNA, 19 nt, Artificial Sequence
  Description of Artificial Sequence: Synthetic oligonucleotide
cgguuuuggauugcuuggg

SEQ ID NO: 2372405 - RNA, 19 nt, Artificial Sequence
  Description of Artificial Sequence: Synthetic oligonucleotide
  modified_base (15)..(15): a, c, u, g, unknown or other
ggcuaccuccucaunacaa

SEQ ID NO: 2372406 - RNA, 19 nt, Artificial Sequence
  Description of Artificial Sequence: Synthetic oligonucleotide
aucaagccucuaagauucu

SEQ ID NO: 2372407 - RNA, 19 nt, Artificial Sequence
  Description of Artificial Sequence: Synthetic oligonucleotide
cugcagcaugguaagguau

SEQ ID NO: 2372408 - RNA, 19 nt, Artificial Sequence
  Description of Artificial Sequence: Synthetic oligonucleotide
ccacaaggcagcagcuauc

SEQ ID NO: 2372409 - RNA, 19 nt, Artificial Sequence
  Description of Artificial Sequence: Synthetic oligonucleotide
agaauucaucugggcccca

SEQ ID NO: 2372410 - RNA, 19 nt, Artificial Sequence
  Description of Artificial Sequence: Synthetic oligonucleotide
gggcucauuguauguccga

SEQ ID NO: 2372411 - RNA, 19 nt, Artificial Sequence
  Description of Artificial Sequence: Synthetic oligonucleotide
  modified_base (19)..(19): a, c, u, g, unknown or other
caaaggcuaccuccucaun

SEQ ID NO: 2372412 - RNA, 19 nt, Artificial Sequence
  Description of Artificial Sequence: Synthetic oligonucleotide
caagggucaguaagugaau

SEQ ID NO: 2372413 - RNA, 19 nt, Artificial Sequence
  Description of Artificial Sequence: Synthetic oligonucleotide
gguacacgugaaggaaaga

SEQ ID NO: 2372414 - RNA, 19 nt, Artificial Sequence
  Description of Artificial Sequence: Synthetic oligonucleotide
gcugauugcguaggcgauc

SEQ ID NO: 2372415 - RNA, 19 nt, Artificial Sequence
  Description of Artificial Sequence: Synthetic oligonucleotide
gugugcccaauggugacgu

SEQ ID NO: 2372416 - RNA, 19 nt, Artificial Sequence
  Description of Artificial Sequence: Synthetic oligonucleotide
gcucauuguauguccgagu

SEQ ID NO: 2372417 - RNA, 19 nt, Artificial Sequence
  Description of Artificial Sequence: Synthetic oligonucleotide
guaccaccacaaggcagca

SEQ ID NO: 2372418 - RNA, 19 nt, Artificial Sequence
  Description of Artificial Sequence: Synthetic oligonucleotide
gaaccagcugcagcauggu

SEQ ID NO: 2372419 - RNA, 19 nt, Artificial Sequence
  Description of Artificial Sequence: Synthetic oligonucleotide
gcuugggcucauuguaugu

SEQ ID NO: 2372420 - RNA, 19 nt, Artificial Sequence
  Description of Artificial Sequence: Synthetic oligonucleotide
cguuaagucaugguggccu

SEQ ID NO: 2372421 - RNA, 19 nt, Artificial Sequence
  Description of Artificial Sequence: Synthetic oligonucleotide
ccguuaagucaugguggcc

SEQ ID NO: 2372422 - RNA, 19 nt, Artificial Sequence
  Description of Artificial Sequence: Synthetic oligonucleotide
cuacagagauuagcagagu

SEQ ID NO: 2372423 - RNA, 19 nt, Artificial Sequence
  Description of Artificial Sequence: Synthetic oligonucleotide
caggggccgaaugcaguca

SEQ ID NO: 2372424 - RNA, 19 nt, Artificial Sequence
  Description of Artificial Sequence: Synthetic oligonucleotide
ccaauccaccacaguguga

SEQ ID NO: 2372425 - RNA, 19 nt, Artificial Sequence
  Description of Artificial Sequence: Synthetic oligonucleotide
gccaccacuugauuccaau

SEQ ID NO: 2372426 - RNA, 19 nt, Artificial Sequence
  Description of Artificial Sequence: Synthetic oligonucleotide
caacuccuuuugacacaaa

SEQ ID NO: 2372427 - RNA, 19 nt, Artificial Sequence
  Description of Artificial Sequence: Synthetic oligonucleotide
ccacagcucuaucucugga

SEQ ID NO: 2372428 - RNA, 19 nt, Artificial Sequence
  Description of Artificial Sequence: Synthetic oligonucleotide
gggcugugugcccaauggu

SEQ ID NO: 2372429 - RNA, 19 nt, Artificial Sequence
  Description of Artificial Sequence: Synthetic oligonucleotide
ccgacuagagguggagaga

SEQ ID NO: 2372430 - RNA, 19 nt, Artificial Sequence
  Description of Artificial Sequence: Synthetic oligonucleotide
gcaugguaagguaucgcuu

SEQ ID NO: 2372431 - RNA, 19 nt, Artificial Sequence
  Description of Artificial Sequence: Synthetic oligonucleotide
cagcuauccugacuucauu

SEQ ID NO: 2372432 - RNA, 19 nt, Artificial Sequence
  Description of Artificial Sequence: Synthetic oligonucleotide
gguggccuuugggucacaa

SEQ ID NO: 2372433 - RNA, 19 nt, Artificial Sequence
  Description of Artificial Sequence: Synthetic oligonucleotide
gggucacaagacaggauuu

SEQ ID NO: 2372434 - RNA, 19 nt, Artificial Sequence
  Description of Artificial Sequence: Synthetic oligonucleotide
ugguggccuuugggucaca

SEQ ID NO: 2372435 - RNA, 19 nt, Artificial Sequence
  Description of Artificial Sequence: Synthetic oligonucleotide
ccgaaugcagucaguccau

SEQ ID NO: 2372436 - RNA, 19 nt, Artificial Sequence
  Description of Artificial Sequence: Synthetic oligonucleotide
cagccgguuuuggauugcu

SEQ ID NO: 2372437 - RNA, 19 nt, Artificial Sequence
  Description of Artificial Sequence: Synthetic oligonucleotide
cgacuagagguggagagau

SEQ ID NO: 2372438 - RNA, 19 nt, Artificial Sequence
  Description of Artificial Sequence: Synthetic oligonucleotide
cacagugauuugcgccguu

SEQ ID NO: 2372439 - RNA, 19 nt, Artificial Sequence
  Description of Artificial Sequence: Synthetic oligonucleotide
cuggauccaggggccgaau

SEQ ID NO: 2372440 - RNA, 19 nt, Artificial Sequence
  Description of Artificial Sequence: Synthetic oligonucleotide
ggggccgaaugcagucagu

SEQ ID NO: 2372441 - RNA, 19 nt, Artificial Sequence
  Description of Artificial Sequence: Synthetic oligonucleotide
ccacagugauuugcgccgu

SEQ ID NO: 2372442 - RNA, 19 nt, Artificial Sequence
  Description of Artificial Sequence: Synthetic oligonucleotide
aaaacuacaaccuaaauag

SEQ ID NO: 2372443 - RNA, 19 nt, Artificial Sequence
  Description of Artificial Sequence: Synthetic oligonucleotide
auuuauuuuguauacaguc

SEQ ID NO: 2372444 - RNA, 19 nt, Artificial Sequence
  Description of Artificial Sequence: Synthetic oligonucleotide
auaacuuugccacauaaac

SEQ ID NO: 2372445 - RNA, 19 nt, Artificial Sequence
  Description of Artificial Sequence: Synthetic oligonucleotide
ugaagaguuagcuauauug

SEQ ID NO: 2372446 - RNA, 19 nt, Artificial Sequence
  Description of Artificial Sequence: Synthetic oligonucleotide
aacuuugccacauaaaccu

SEQ ID NO: 2372447 - RNA, 19 nt, Artificial Sequence
  Description of Artificial Sequence: Synthetic oligonucleotide
gacauaauaacuuugccac

SEQ ID NO: 2372448 - RNA, 19 nt, Artificial Sequence
  Description of Artificial Sequence: Synthetic oligonucleotide
uauacagucuacuacagug

SEQ ID NO: 2372449 - RNA, 19 nt, Artificial Sequence
  Description of Artificial Sequence: Synthetic oligonucleotide
aauacuucgggaaagaacu

SEQ ID NO: 2372450 - RNA, 19 nt, Artificial Sequence
  Description of Artificial Sequence: Synthetic oligonucleotide
aaauaugcggaugucuugc

SEQ ID NO: 2372451 - RNA, 19 nt, Artificial Sequence
  Description of Artificial Sequence: Synthetic oligonucleotide
ucuccuuucgggaaaauag

SEQ ID NO: 2372452 - RNA, 19 nt, Artificial Sequence
  Description of Artificial Sequence: Synthetic oligonucleotide
uuuguauacagucuacuac

SEQ ID NO: 2372453 - RNA, 19 nt, Artificial Sequence
  Description of Artificial Sequence: Synthetic oligonucleotide
ugccacauaaaccugagga

SEQ ID NO: 2372454 - RNA, 19 nt, Artificial Sequence
  Description of Artificial Sequence: Synthetic oligonucleotide
uuuauuuuguauacagucu

SEQ ID NO: 2372455 - RNA, 19 nt, Artificial Sequence
  Description of Artificial Sequence: Synthetic oligonucleotide
aaucuuaauaccaaaauua

SEQ ID NO: 2372456 - RNA, 19 nt, Artificial Sequence
  Description of Artificial Sequence: Synthetic oligonucleotide
cuuaauaccaaaauuaucu

SEQ ID NO: 2372457 - RNA, 19 nt, Artificial Sequence
  Description of Artificial Sequence: Synthetic oligonucleotide
uuagacacacaccaggccc

SEQ ID NO: 2372458 - RNA, 19 nt, Artificial Sequence
  Description of Artificial Sequence: Synthetic oligonucleotide
uuuuauacuucacaagccu

SEQ ID NO: 2372459 - RNA, 19 nt, Artificial Sequence
  Description of Artificial Sequence: Synthetic oligonucleotide
gaguuagcuauauuggagg

SEQ ID NO: 2372460 - RNA, 19 nt, Artificial Sequence
  Description of Artificial Sequence: Synthetic oligonucleotide
guuuuagacacacaccagg

SEQ ID NO: 2372461 - RNA, 19 nt, Artificial Sequence
  Description of Artificial Sequence: Synthetic oligonucleotide
uuagcuauauuggagguag

SEQ ID NO: 2372462 - RNA, 19 nt, Artificial Sequence
  Description of Artificial Sequence: Synthetic oligonucleotide
aacucuaaggccugcuugg

SEQ ID NO: 2372463 - RNA, 19 nt, Artificial Sequence
  Description of Artificial Sequence: Synthetic oligonucleotide
ugacauaauaacuuugcca

SEQ ID NO: 2372464 - RNA, 19 nt, Artificial Sequence
  Description of Artificial Sequence: Synthetic oligonucleotide
aaauacuucgggaaagaac

SEQ ID NO: 2372465 - RNA, 19 nt, Artificial Sequence
  Description of Artificial Sequence: Synthetic oligonucleotide
cuuucgggaaaauaggcgg

SEQ ID NO: 2372466 - RNA, 19 nt, Artificial Sequence
  Description of Artificial Sequence: Synthetic oligonucleotide
cuugacauaauaacuuugc

SEQ ID NO: 2372467 - RNA, 19 nt, Artificial Sequence
  Description of Artificial Sequence: Synthetic oligonucleotide
gaagaguuagcuauauugg

SEQ ID NO: 2372468 - RNA, 19 nt, Artificial Sequence
  Description of Artificial Sequence: Synthetic oligonucleotide
agguaagaaucuuaauacc

SEQ ID NO: 2372469 - RNA, 19 nt, Artificial Sequence
  Description of Artificial Sequence: Synthetic oligonucleotide
ucuucugcacaccagaaga

SEQ ID NO: 2372470 - RNA, 19 nt, Artificial Sequence
  Description of Artificial Sequence: Synthetic oligonucleotide
ucgggaaagaacucuaagg

SEQ ID NO: 2372471 - RNA, 19 nt, Artificial Sequence
  Description of Artificial Sequence: Synthetic oligonucleotide
uuuaaugcuuucucauugg

SEQ ID NO: 2372472 - RNA, 19 nt, Artificial Sequence
  Description of Artificial Sequence: Synthetic oligonucleotide
auuugcaagagcuggaucu

SEQ ID NO: 2372473 - RNA, 19 nt, Artificial Sequence
  Description of Artificial Sequence: Synthetic oligonucleotide
cagguaagaaucuuaauac

SEQ ID NO: 2372474 - RNA, 19 nt, Artificial Sequence
  Description of Artificial Sequence: Synthetic oligonucleotide
uacauugucugacucgagg

SEQ ID NO: 2372475 - RNA, 19 nt, Artificial Sequence
  Description of Artificial Sequence: Synthetic oligonucleotide
uuguauacagucuacuaca

SEQ ID NO: 2372476 - RNA, 19 nt, Artificial Sequence
  Description of Artificial Sequence: Synthetic oligonucleotide
uucuauagaaaacuacaac

SEQ ID NO: 2372477 - RNA, 19 nt, Artificial Sequence
  Description of Artificial Sequence: Synthetic oligonucleotide
uuuuagacacacaccaggc

SEQ ID NO: 2372478 - RNA, 19 nt, Artificial Sequence
  Description of Artificial Sequence: Synthetic oligonucleotide
uuucucauuggccauuugc

SEQ ID NO: 2372479 - RNA, 19 nt, Artificial Sequence
  Description of Artificial Sequence: Synthetic oligonucleotide
uaacuuugccacauaaacc

SEQ ID NO: 2372480 - RNA, 19 nt, Artificial Sequence
  Description of Artificial Sequence: Synthetic oligonucleotide
ugguguuuuagacacacac

SEQ ID NO: 2372481 - RNA, 19 nt, Artificial Sequence
  Description of Artificial Sequence: Synthetic oligonucleotide
uugacaaauaugcggaugu

SEQ ID NO: 2372482 - RNA, 19 nt, Artificial Sequence
  Description of Artificial Sequence: Synthetic oligonucleotide
uuauuuuguauacagucua

SEQ ID NO: 2372483 - RNA, 19 nt, Artificial Sequence
  Description of Artificial Sequence: Synthetic oligonucleotide
uucucuaguaguuucucag

SEQ ID NO: 2372484 - RNA, 19 nt, Artificial Sequence
  Description of Artificial Sequence: Synthetic oligonucleotide
uuggccauuugcaagagcu

SEQ ID NO: 2372485 - RNA, 19 nt, Artificial Sequence
  Description of Artificial Sequence: Synthetic oligonucleotide
ucaugcuugacauaauaac

SEQ ID NO: 2372486 - RNA, 19 nt, Artificial Sequence
  Description of Artificial Sequence: Synthetic oligonucleotide
uccuugacaaauaugcgga

SEQ ID NO: 2372487 - RNA, 19 nt, Artificial Sequence
  Description of Artificial Sequence: Synthetic oligonucleotide
ucugaccugauguaaauac

SEQ ID NO: 2372488 - RNA, 19 nt, Artificial Sequence
  Description of Artificial Sequence: Synthetic oligonucleotide
aagaguuagcuauauugga

SEQ ID NO: 2372489 - RNA, 19 nt, Artificial Sequence
  Description of Artificial Sequence: Synthetic oligonucleotide
aacuacaaccuaaauagug

SEQ ID NO: 2372490 - RNA, 19 nt, Artificial Sequence
  Description of Artificial Sequence: Synthetic oligonucleotide
acauugucugacucgaggg

SEQ ID NO: 2372491 - RNA, 19 nt, Artificial Sequence
  Description of Artificial Sequence: Synthetic oligonucleotide
ugauguaaauacuucggga

SEQ ID NO: 2372492 - RNA, 19 nt, Artificial Sequence
  Description of Artificial Sequence: Synthetic oligonucleotide
accugauguaaauacuucg

SEQ ID NO: 2372493 - RNA, 19 nt, Artificial Sequence
  Description of Artificial Sequence: Synthetic oligonucleotide
cuuuacauugucugacucg

SEQ ID NO: 2372494 - RNA, 19 nt, Artificial Sequence
  Description of Artificial Sequence: Synthetic oligonucleotide
cuuuaaugcuuucucauug

SEQ ID NO: 2372495 - RNA, 19 nt, Artificial Sequence
  Description of Artificial Sequence: Synthetic oligonucleotide
uguuguuguuuugagacag

SEQ ID NO: 2372496 - RNA, 19 nt, Artificial Sequence
  Description of Artificial Sequence: Synthetic oligonucleotide
ucuaguaguuucucagggg

SEQ ID NO: 2372497 - RNA, 19 nt, Artificial Sequence
  Description of Artificial Sequence: Synthetic oligonucleotide
acuacaaccuaaauagugg

SEQ ID NO: 2372498 - RNA, 19 nt, Artificial Sequence
  Description of Artificial Sequence: Synthetic oligonucleotide
guccuugacaaauaugcgg

SEQ ID NO: 2372499 - RNA, 19 nt, Artificial Sequence
  Description of Artificial Sequence: Synthetic oligonucleotide
gacaguaaugcccuucugc

SEQ ID NO: 2372500 - RNA, 19 nt, Artificial Sequence
  Description of Artificial Sequence: Synthetic oligonucleotide
uugacauaauaacuuugcc

SEQ ID NO: 2372501 - RNA, 19 nt, Artificial Sequence
  Description of Artificial Sequence: Synthetic oligonucleotide
aagagcuggaucuccuuuc

SEQ ID NO: 2372502 - RNA, 19 nt, Artificial Sequence
  Description of Artificial Sequence: Synthetic oligonucleotide
uucucauuggccauuugca

SEQ ID NO: 2372503 - RNA, 19 nt, Artificial Sequence
  Description of Artificial Sequence: Synthetic oligonucleotide
uguauacagucuacuacag

SEQ ID NO: 2372504 - RNA, 19 nt, Artificial Sequence
  Description of Artificial Sequence: Synthetic oligonucleotide
ucuaccuuccacgugcugg

SEQ ID NO: 2372505 - RNA, 19 nt, Artificial Sequence
  Description of Artificial Sequence: Synthetic oligonucleotide
agaaucuuaauaccaaaau

SEQ ID NO: 2372506 - RNA, 19 nt, Artificial Sequence
  Description of Artificial Sequence: Synthetic oligonucleotide
uuuacauugucugacucga

SEQ ID NO: 2372507 - RNA, 19 nt, Artificial Sequence
  Description of Artificial Sequence: Synthetic oligonucleotide
ucuuaauaccaaaauuauc

SEQ ID NO: 2372508 - RNA, 19 nt, Artificial Sequence
  Description of Artificial Sequence: Synthetic oligonucleotide
uguccuugacaaauaugcg

SEQ ID NO: 2372509 - RNA, 19 nt, Artificial Sequence
  Description of Artificial Sequence: Synthetic oligonucleotide
uuuagacacacaccaggcc

SEQ ID NO: 2372510 - RNA, 19 nt, Artificial Sequence
  Description of Artificial Sequence: Synthetic oligonucleotide
uaauaacuuugccacauaa

SEQ ID NO: 2372511 - RNA, 19 nt, Artificial Sequence
  Description of Artificial Sequence: Synthetic oligonucleotide
cugauguaaauacuucggg

SEQ ID NO: 2372512 - RNA, 19 nt, Artificial Sequence
  Description of Artificial Sequence: Synthetic oligonucleotide
ugcccuucugcuuuaaugc

SEQ ID NO: 2372513 - RNA, 19 nt, Artificial Sequence
  Description of Artificial Sequence: Synthetic oligonucleotide
uauagaaaacuacaaccua

SEQ ID NO: 2372514 - RNA, 19 nt, Artificial Sequence
  Description of Artificial Sequence: Synthetic oligonucleotide
uaaugcuuucucauuggcc

SEQ ID NO: 2372515 - RNA, 19 nt, Artificial Sequence
  Description of Artificial Sequence: Synthetic oligonucleotide
uuauacuucacaagccuuc

SEQ ID NO: 2372516 - RNA, 19 nt, Artificial Sequence
  Description of Artificial Sequence: Synthetic oligonucleotide
uuaaugcuuucucauuggc

SEQ ID NO: 2372517 - RNA, 19 nt, Artificial Sequence
  Description of Artificial Sequence: Synthetic oligonucleotide
ucucuaguaguuucucagg

SEQ ID NO: 2372518 - RNA, 19 nt, Artificial Sequence
  Description of Artificial Sequence: Synthetic oligonucleotide
ucuacuacaguguucuguc

SEQ ID NO: 2372519 - RNA, 19 nt, Artificial Sequence
  Description of Artificial Sequence: Synthetic oligonucleotide
uaguucuauagaaaacuac

SEQ ID NO: 2372520 - RNA, 19 nt, Artificial Sequence
  Description of Artificial Sequence: Synthetic oligonucleotide
cuacaaccuaaauaguggc

SEQ ID NO: 2372521 - RNA, 19 nt, Artificial Sequence
  Description of Artificial Sequence: Synthetic oligonucleotide
aguucuauagaaaacuaca

SEQ ID NO: 2372522 - RNA, 19 nt, Artificial Sequence
  Description of Artificial Sequence: Synthetic oligonucleotide
auugucugacucgaggggc

SEQ ID NO: 2372523 - RNA, 19 nt, Artificial Sequence
  Description of Artificial Sequence: Synthetic oligonucleotide
auaggcggauggcaaaggc

SEQ ID NO: 2372524 - RNA, 19 nt, Artificial Sequence
  Description of Artificial Sequence: Synthetic oligonucleotide
uguuuguuguuguuguugu

SEQ ID NO: 2372525 - RNA, 19 nt, Artificial Sequence
  Description of Artificial Sequence: Synthetic oligonucleotide
uauuuuguauacagucuac

SEQ ID NO: 2372526 - RNA, 19 nt, Artificial Sequence
  Description of Artificial Sequence: Synthetic oligonucleotide
uucgggaaagaacucuaag

SEQ ID NO: 2372527 - RNA, 19 nt, Artificial Sequence
  Description of Artificial Sequence: Synthetic oligonucleotide
ucauuggccauuugcaaga

SEQ ID NO: 2372528 - RNA, 19 nt, Artificial Sequence
  Description of Artificial Sequence: Synthetic oligonucleotide
uccuuucgggaaaauaggc

SEQ ID NO: 2372529 - RNA, 19 nt, Artificial Sequence
  Description of Artificial Sequence: Synthetic oligonucleotide
uuuuguauacagucuacua

SEQ ID NO: 2372530 - RNA, 19 nt, Artificial Sequence
  Description of Artificial Sequence: Synthetic oligonucleotide
acuacaguguucugucuuc

SEQ ID NO: 2372531 - RNA, 19 nt, Artificial Sequence
  Description of Artificial Sequence: Synthetic oligonucleotide
agcuggaucuccuuucggg

SEQ ID NO: 2372532 - RNA, 19 nt, Artificial Sequence
  Description of Artificial Sequence: Synthetic oligonucleotide
ucuaaggccugcuuggcac

SEQ ID NO: 2372533 - RNA, 19 nt, Artificial Sequence
  Description of Artificial Sequence: Synthetic oligonucleotide
uaagaaucuuaauaccaaa

SEQ ID NO: 2372534 - RNA, 19 nt, Artificial Sequence
  Description of Artificial Sequence: Synthetic oligonucleotide
cacauaaaccugaggagag

SEQ ID NO: 2372535 - RNA, 19 nt, Artificial Sequence
  Description of Artificial Sequence: Synthetic oligonucleotide
uguucugucuucugcacac

SEQ ID NO: 2372536 - RNA, 19 nt, Artificial Sequence
  Description of Artificial Sequence: Synthetic oligonucleotide
gaacucuaaggccugcuug

SEQ ID NO: 2372537 - RNA, 19 nt, Artificial Sequence
  Description of Artificial Sequence: Synthetic oligonucleotide
ucaggggacacugucuugg

SEQ ID NO: 2372538 - RNA, 19 nt, Artificial Sequence
  Description of Artificial Sequence: Synthetic oligonucleotide
gagguaguucuauagaaaa

SEQ ID NO: 2372539 - RNA, 19 nt, Artificial Sequence
  Description of Artificial Sequence: Synthetic oligonucleotide
aaaauaggcggauggcaaa

SEQ ID NO: 2372540 - RNA, 19 nt, Artificial Sequence
  Description of Artificial Sequence: Synthetic oligonucleotide
aaauaggcggauggcaaag

SEQ ID NO: 2372541 - RNA, 19 nt, Artificial Sequence
  Description of Artificial Sequence: Synthetic oligonucleotide
aaaacugccucuucugcuu

SEQ ID NO: 2372542 - RNA, 19 nt, Artificial Sequence
  Description of Artificial Sequence: Synthetic oligonucleotide
uuaauaccaaaauuaucuu

SEQ ID NO: 2372543 - RNA, 19 nt, Artificial Sequence
  Description of Artificial Sequence: Synthetic oligonucleotide
uuuauacuucacaagccuu

SEQ ID NO: 2372544 - RNA, 19 nt, Artificial Sequence
  Description of Artificial Sequence: Synthetic oligonucleotide
uuggagguaguucuauaga

SEQ ID NO: 2372545 - RNA, 19 nt, Artificial Sequence
  Description of Artificial Sequence: Synthetic oligonucleotide
uugacaguaaugcccuucu

SEQ ID NO: 2372546 - RNA, 19 nt, Artificial Sequence
  Description of Artificial Sequence: Synthetic oligonucleotide
uggagguaguucuauagaa

SEQ ID NO: 2372547 - RNA, 19 nt, Artificial Sequence
  Description of Artificial Sequence: Synthetic oligonucleotide
cuccuuucgggaaaauagg

SEQ ID NO: 2372548 - RNA, 19 nt, Artificial Sequence
  Description of Artificial Sequence: Synthetic oligonucleotide
agaguuagcuauauuggag

SEQ ID NO: 2372549 - RNA, 19 nt, Artificial Sequence
  Description of Artificial Sequence: Synthetic oligonucleotide
uuguuuguuguuguuguug

SEQ ID NO: 2372550 - RNA, 19 nt, Artificial Sequence
  Description of Artificial Sequence: Synthetic oligonucleotide
aagaaucuuaauaccaaaa

SEQ ID NO: 2372551 - RNA, 19 nt, Artificial Sequence
  Description of Artificial Sequence: Synthetic oligonucleotide
ugaccugauguaaauacuu

SEQ ID NO: 2372552 - RNA, 19 nt, Artificial Sequence
  Description of Artificial Sequence: Synthetic oligonucleotide
uacaaccuaaauaguggcu

SEQ ID NO: 2372553 - RNA, 19 nt, Artificial Sequence
  Description of Artificial Sequence: Synthetic oligonucleotide
cuauagaaaacuacaaccu

SEQ ID NO: 2372554 - RNA, 19 nt, Artificial Sequence
  Description of Artificial Sequence: Synthetic oligonucleotide
agagcuggaucuccuuucg

SEQ ID NO: 2372555 - RNA, 19 nt, Artificial Sequence
  Description of Artificial Sequence: Synthetic oligonucleotide
uuucgggaaaauaggcgga

SEQ ID NO: 2372556 - RNA, 19 nt, Artificial Sequence
  Description of Artificial Sequence: Synthetic oligonucleotide
agagcugcugaagaguuag

SEQ ID NO: 2372557 - RNA, 19 nt, Artificial Sequence
  Description of Artificial Sequence: Synthetic oligonucleotide
cauugucugacucgagggg

SEQ ID NO: 2372558 - RNA, 19 nt, Artificial Sequence
  Description of Artificial Sequence: Synthetic oligonucleotide
aguuagcuauauuggaggu

SEQ ID NO: 2372559 - RNA, 19 nt, Artificial Sequence
  Description of Artificial Sequence: Synthetic oligonucleotide
aauaggcggauggcaaagg

SEQ ID NO: 2372560 - RNA, 19 nt, Artificial Sequence
  Description of Artificial Sequence: Synthetic oligonucleotide
aauguccuugacaaauaug

SEQ ID NO: 2372561 - RNA, 19 nt, Artificial Sequence
  Description of Artificial Sequence: Synthetic oligonucleotide
aauaacuuugccacauaaa

SEQ ID NO: 2372562 - RNA, 19 nt, Artificial Sequence
  Description of Artificial Sequence: Synthetic oligonucleotide
cuaguaguuucucagggga

SEQ ID NO: 2372563 - RNA, 19 nt, Artificial Sequence
  Description of Artificial Sequence: Synthetic oligonucleotide
ucuucugcuugacaguaau

SEQ ID NO: 2372564 - RNA, 19 nt, Artificial Sequence
  Description of Artificial Sequence: Synthetic oligonucleotide
cuauauuggagguaguucu

SEQ ID NO: 2372565 - RNA, 19 nt, Artificial Sequence
  Description of Artificial Sequence: Synthetic oligonucleotide
augcccuucugcuuuaaug

SEQ ID NO: 2372566 - RNA, 19 nt, Artificial Sequence
  Description of Artificial Sequence: Synthetic oligonucleotide
ccugauguaaauacuucgg

SEQ ID NO: 2372567 - RNA, 19 nt, Artificial Sequence
  Description of Artificial Sequence: Synthetic oligonucleotide
uuggcacucaugcuugaca

SEQ ID NO: 2372568 - RNA, 19 nt, Artificial Sequence
  Description of Artificial Sequence: Synthetic oligonucleotide
uuuguuguuguuguuguuu

SEQ ID NO: 2372569 - RNA, 19 nt, Artificial Sequence
  Description of Artificial Sequence: Synthetic oligonucleotide
acauaaaccugaggagagc

SEQ ID NO: 2372570 - RNA, 19 nt, Artificial Sequence
  Description of Artificial Sequence: Synthetic oligonucleotide
cacugucuuggcaaugucc

SEQ ID NO: 2372571 - RNA, 19 nt, Artificial Sequence
  Description of Artificial Sequence: Synthetic oligonucleotide
auuggccauuugcaagagc

SEQ ID NO: 2372572 - RNA, 19 nt, Artificial Sequence
  Description of Artificial Sequence: Synthetic oligonucleotide
uuucucaggggacacuguc

SEQ ID NO: 2372573 - RNA, 19 nt, Artificial Sequence
  Description of Artificial Sequence: Synthetic oligonucleotide
gaggagagcugcugaagag

SEQ ID NO: 2372574 - RNA, 19 nt, Artificial Sequence
  Description of Artificial Sequence: Synthetic oligonucleotide
ugcuuggcacucaugcuug

SEQ ID NO: 2372575 - RNA, 19 nt, Artificial Sequence
  Description of Artificial Sequence: Synthetic oligonucleotide
auguaaauacuucgggaaa

SEQ ID NO: 2372576 - RNA, 19 nt, Artificial Sequence
  Description of Artificial Sequence: Synthetic oligonucleotide
auuuuguauacagucuacu

SEQ ID NO: 2372577 - RNA, 19 nt, Artificial Sequence
  Description of Artificial Sequence: Synthetic oligonucleotide
caaauaugcggaugucuug

SEQ ID NO: 2372578 - RNA, 19 nt, Artificial Sequence
  Description of Artificial Sequence: Synthetic oligonucleotide
uagacacacaccaggccca

SEQ ID NO: 2372579 - RNA, 19 nt, Artificial Sequence
  Description of Artificial Sequence: Synthetic oligonucleotide
gguaagaaucuuaauacca

SEQ ID NO: 2372580 - RNA, 19 nt, Artificial Sequence
  Description of Artificial Sequence: Synthetic oligonucleotide
agguaguucuauagaaaac

SEQ ID NO: 2372581 - RNA, 19 nt, Artificial Sequence
  Description of Artificial Sequence: Synthetic oligonucleotide
uaugcggaugucuugcuuu

SEQ ID NO: 2372582 - RNA, 19 nt, Artificial Sequence
  Description of Artificial Sequence: Synthetic oligonucleotide
gggaaagaacucuaaggcc

SEQ ID NO: 2372583 - RNA, 19 nt, Artificial Sequence
  Description of Artificial Sequence: Synthetic oligonucleotide
ucucauuggccauuugcaa

SEQ ID NO: 2372584 - RNA, 19 nt, Artificial Sequence
  Description of Artificial Sequence: Synthetic oligonucleotide
aaacugccucuucugcuug

SEQ ID NO: 2372585 - RNA, 19 nt, Artificial Sequence
  Description of Artificial Sequence: Synthetic oligonucleotide
aucuuaauaccaaaauuau

SEQ ID NO: 2372586 - RNA, 19 nt, Artificial Sequence
  Description of Artificial Sequence: Synthetic oligonucleotide
uauauuggagguaguucua

SEQ ID NO: 2372587 - RNA, 19 nt, Artificial Sequence
  Description of Artificial Sequence: Synthetic oligonucleotide
agaaaacuacaaccuaaau

SEQ ID NO: 2372588 - RNA, 19 nt, Artificial Sequence
  Description of Artificial Sequence: Synthetic oligonucleotide
acauaauaacuuugccaca

SEQ ID NO: 2372589 - RNA, 19 nt, Artificial Sequence
  Description of Artificial Sequence: Synthetic oligonucleotide
gaaaauaggcggauggcaa

SEQ ID NO: 2372590 - RNA, 19 nt, Artificial Sequence
  Description of Artificial Sequence: Synthetic oligonucleotide
uauacuucacaagccuucu

SEQ ID NO: 2372591 - RNA, 19 nt, Artificial Sequence
  Description of Artificial Sequence: Synthetic oligonucleotide
uacuacaguguucugucuu

SEQ ID NO: 2372592 - RNA, 19 nt, Artificial Sequence
  Description of Artificial Sequence: Synthetic oligonucleotide
caugcuugacauaauaacu

SEQ ID NO: 2372593 - RNA, 19 nt, Artificial Sequence
  Description of Artificial Sequence: Synthetic oligonucleotide
ugucuugcuuuacauuguc

SEQ ID NO: 2372594 - RNA, 19 nt, Artificial Sequence
  Description of Artificial Sequence: Synthetic oligonucleotide
acugucuuggcaauguccu

SEQ ID NO: 2372595 - RNA, 19 nt, Artificial Sequence
  Description of Artificial Sequence: Synthetic oligonucleotide
uaguaguuucucaggggac

SEQ ID NO: 2372596 - RNA, 19 nt, Artificial Sequence
  Description of Artificial Sequence: Synthetic oligonucleotide
uacagucuacuacaguguu

SEQ ID NO: 2372597 - RNA, 19 nt, Artificial Sequence
  Description of Artificial Sequence: Synthetic oligonucleotide
cuugacaaauaugcggaug

SEQ ID NO: 2372598 - RNA, 19 nt, Artificial Sequence
  Description of Artificial Sequence: Synthetic oligonucleotide
aguaguuucucaggggaca

SEQ ID NO: 2372599 - RNA, 19 nt, Artificial Sequence
  Description of Artificial Sequence: Synthetic oligonucleotide
ugcuuuacauugucugacu

SEQ ID NO: 2372600 - RNA, 19 nt, Artificial Sequence
  Description of Artificial Sequence: Synthetic oligonucleotide
acaaccuaaauaguggcuu

SEQ ID NO: 2372601 - RNA, 19 nt, Artificial Sequence
  Description of Artificial Sequence: Synthetic oligonucleotide
uaaauacuucgggaaagaa

SEQ ID NO: 2372602 - RNA, 19 nt, Artificial Sequence
  Description of Artificial Sequence: Synthetic oligonucleotide
uuguuguuguuguuguuuu

SEQ ID NO: 2372603 - RNA, 19 nt, Artificial Sequence
  Description of Artificial Sequence: Synthetic oligonucleotide
uggcuuucugccucuaccu

SEQ ID NO: 2372604 - RNA, 19 nt, Artificial Sequence
  Description of Artificial Sequence: Synthetic oligonucleotide
uggcaaaggccuucucuag

SEQ ID NO: 2372605 - RNA, 19 nt, Artificial Sequence
  Description of Artificial Sequence: Synthetic oligonucleotide
guaagaaucuuaauaccaa

SEQ ID NO: 2372606 - RNA, 19 nt, Artificial Sequence
  Description of Artificial Sequence: Synthetic oligonucleotide
auggcaaaggccuucucua

SEQ ID NO: 2372607 - RNA, 19 nt, Artificial Sequence
  Description of Artificial Sequence: Synthetic oligonucleotide
ccuuucgggaaaauaggcg

SEQ ID NO: 2372608 - RNA, 19 nt, Artificial Sequence
  Description of Artificial Sequence: Synthetic oligonucleotide
aaacuacaaccuaaauagu

SEQ ID NO: 2372609 - RNA, 19 nt, Artificial Sequence
  Description of Artificial Sequence: Synthetic oligonucleotide
uggcacucaugcuugacau

SEQ ID NO: 2372610 - RNA, 19 nt, Artificial Sequence
  Description of Artificial Sequence: Synthetic oligonucleotide
uacuucgggaaagaacucu

SEQ ID NO: 2372611 - RNA, 19 nt, Artificial Sequence
  Description of Artificial Sequence: Synthetic oligonucleotide
cuuugccacauaaaccuga

SEQ ID NO: 2372612 - RNA, 19 nt, Artificial Sequence
  Description of Artificial Sequence: Synthetic oligonucleotide
ucucaggggacacugucuu

SEQ ID NO: 2372613 - RNA, 19 nt, Artificial Sequence
  Description of Artificial Sequence: Synthetic oligonucleotide
gccacauaaaccugaggag

SEQ ID NO: 2372614 - RNA, 19 nt, Artificial Sequence
  Description of Artificial Sequence: Synthetic oligonucleotide
ugucuucugcacaccagaa

SEQ ID NO: 2372615 - RNA, 19 nt, Artificial Sequence
  Description of Artificial Sequence: Synthetic oligonucleotide
acaaauaugcggaugucuu

SEQ ID NO: 2372616 - RNA, 19 nt, Artificial Sequence
  Description of Artificial Sequence: Synthetic oligonucleotide
cgggaaagaacucuaaggc

SEQ ID NO: 2372617 - RNA, 19 nt, Artificial Sequence
  Description of Artificial Sequence: Synthetic oligonucleotide
guucuauagaaaacuacaa

SEQ ID NO: 2372618 - RNA, 19 nt, Artificial Sequence
  Description of Artificial Sequence: Synthetic oligonucleotide
uugucugacucgaggggcu

SEQ ID NO: 2372619 - RNA, 19 nt, Artificial Sequence
  Description of Artificial Sequence: Synthetic oligonucleotide
caucgccuggcuuucugcc

SEQ ID NO: 2372620 - RNA, 19 nt, Artificial Sequence
  Description of Artificial Sequence: Synthetic oligonucleotide
uggaucuccuuucgggaaa

SEQ ID NO: 2372621 - RNA, 19 nt, Artificial Sequence
  Description of Artificial Sequence: Synthetic oligonucleotide
ugacaguaaugcccuucug

SEQ ID NO: 2372622 - RNA, 19 nt, Artificial Sequence
  Description of Artificial Sequence: Synthetic oligonucleotide
cucaugcuugacauaauaa

SEQ ID NO: 2372623 - RNA, 19 nt, Artificial Sequence
  Description of Artificial Sequence: Synthetic oligonucleotide
uggccauuugcaagagcug

SEQ ID NO: 2372624 - RNA, 19 nt, Artificial Sequence
  Description of Artificial Sequence: Synthetic oligonucleotide
uauuggagguaguucuaua

SEQ ID NO: 2372625 - RNA, 19 nt, Artificial Sequence
  Description of Artificial Sequence: Synthetic oligonucleotide
ggccauuugcaagagcugg

SEQ ID NO: 2372626 - RNA, 19 nt, Artificial Sequence
  Description of Artificial Sequence: Synthetic oligonucleotide
aagaacucuaaggccugcu

SEQ ID NO: 2372627 - RNA, 19 nt, Artificial Sequence
  Description of Artificial Sequence: Synthetic oligonucleotide
gguaguucuauagaaaacu

SEQ ID NO: 2372628 - RNA, 19 nt, Artificial Sequence
  Description of Artificial Sequence: Synthetic oligonucleotide
guaaauacuucgggaaaga

SEQ ID NO: 2372629 - RNA, 19 nt, Artificial Sequence
  Description of Artificial Sequence: Synthetic oligonucleotide
augcuugacauaauaacuu

SEQ ID NO: 2372630 - RNA, 19 nt, Artificial Sequence
  Description of Artificial Sequence: Synthetic oligonucleotide
aaccuaaauaguggcuuaa

SEQ ID NO: 2372631 - RNA, 19 nt, Artificial Sequence
  Description of Artificial Sequence: Synthetic oligonucleotide
auacuucacaagccuucug

SEQ ID NO: 2372632 - RNA, 19 nt, Artificial Sequence
  Description of Artificial Sequence: Synthetic oligonucleotide
cuugacaguaaugcccuuc

SEQ ID NO: 2372633 - RNA, 19 nt, Artificial Sequence
  Description of Artificial Sequence: Synthetic oligonucleotide
acagucuacuacaguguuc

SEQ ID NO: 2372634 - RNA, 19 nt, Artificial Sequence
  Description of Artificial Sequence: Synthetic oligonucleotide
gaccugauguaaauacuuc

SEQ ID NO: 2372635 - RNA, 19 nt, Artificial Sequence
  Description of Artificial Sequence: Synthetic oligonucleotide
cuucugcuugacaguaaug

SEQ ID NO: 2372636 - RNA, 19 nt, Artificial Sequence
  Description of Artificial Sequence: Synthetic oligonucleotide
gacaaauaugcggaugucu

SEQ ID NO: 2372637 - RNA, 19 nt, Artificial Sequence
  Description of Artificial Sequence: Synthetic oligonucleotide
gagcuggaucuccuuucgg

SEQ ID NO: 2372638 - RNA, 19 nt, Artificial Sequence
  Description of Artificial Sequence: Synthetic oligonucleotide
auaauaacuuugccacaua

SEQ ID NO: 2372639 - RNA, 19 nt, Artificial Sequence
  Description of Artificial Sequence: Synthetic oligonucleotide
ucacaagccuucugaccug

SEQ ID NO: 2372640 - RNA, 19 nt, Artificial Sequence
  Description of Artificial Sequence: Synthetic oligonucleotide
ugacucgaggggcugcccu

SEQ ID NO: 2372641 - RNA, 19 nt, Artificial Sequence
  Description of Artificial Sequence: Synthetic oligonucleotide
aaugcccuucugcuuuaau

SEQ ID NO: 2372642 - RNA, 19 nt, Artificial Sequence
  Description of Artificial Sequence: Synthetic oligonucleotide
ggaaaauaggcggauggca

SEQ ID NO: 2372643 - RNA, 19 nt, Artificial Sequence
  Description of Artificial Sequence: Synthetic oligonucleotide
caagccuucugaccugaug

SEQ ID NO: 2372644 - RNA, 19 nt, Artificial Sequence
  Description of Artificial Sequence: Synthetic oligonucleotide
agaacucuaaggccugcuu

SEQ ID NO: 2372645 - RNA, 19 nt, Artificial Sequence
  Description of Artificial Sequence: Synthetic oligonucleotide
cuucucuaguaguuucuca

SEQ ID NO: 2372646 - RNA, 19 nt, Artificial Sequence
  Description of Artificial Sequence: Synthetic oligonucleotide
ugcugaagaguuagcuaua

SEQ ID NO: 2372647 - RNA, 19 nt, Artificial Sequence
  Description of Artificial Sequence: Synthetic oligonucleotide
auauuggagguaguucuau

SEQ ID NO: 2372648 - RNA, 19 nt, Artificial Sequence
  Description of Artificial Sequence: Synthetic oligonucleotide
auacuucgggaaagaacuc

SEQ ID NO: 2372649 - RNA, 19 nt, Artificial Sequence
  Description of Artificial Sequence: Synthetic oligonucleotide
auaaaccugaggagagcug

SEQ ID NO: 2372650 - RNA, 19 nt, Artificial Sequence
  Description of Artificial Sequence: Synthetic oligonucleotide
ucugacucgaggggcugcc

SEQ ID NO: 2372651 - RNA, 19 nt, Artificial Sequence
  Description of Artificial Sequence: Synthetic oligonucleotide
agcuauauuggagguaguu

SEQ ID NO: 2372652 - RNA, 19 nt, Artificial Sequence
  Description of Artificial Sequence: Synthetic oligonucleotide
gcuugacauaauaacuuug

SEQ ID NO: 2372653 - RNA, 19 nt, Artificial Sequence
  Description of Artificial Sequence: Synthetic oligonucleotide
guaguucuauagaaaacua

SEQ ID NO: 2372654 - RNA, 19 nt, Artificial Sequence
  Description of Artificial Sequence: Synthetic oligonucleotide
ugacaaauaugcggauguc

SEQ ID NO: 2372655 - RNA, 19 nt, Artificial Sequence
  Description of Artificial Sequence: Synthetic oligonucleotide
gcuauauuggagguaguuc

SEQ ID NO: 2372656 - RNA, 19 nt, Artificial Sequence
  Description of Artificial Sequence: Synthetic oligonucleotide
acugccucuucugcuugac

SEQ ID NO: 2372657 - RNA, 19 nt, Artificial Sequence
  Description of Artificial Sequence: Synthetic oligonucleotide
cgggaaaauaggcggaugg

SEQ ID NO: 2372658 - RNA, 19 nt, Artificial Sequence
  Description of Artificial Sequence: Synthetic oligonucleotide
ucgggaaaauaggcggaug

SEQ ID NO: 2372659 - RNA, 19 nt, Artificial Sequence
  Description of Artificial Sequence: Synthetic oligonucleotide
acucgaggggcugcccugc

SEQ ID NO: 2372660 - RNA, 19 nt, Artificial Sequence
  Description of Artificial Sequence: Synthetic oligonucleotide
cugaggagagcugcugaag

SEQ ID NO: 2372661 - RNA, 19 nt, Artificial Sequence
  Description of Artificial Sequence: Synthetic oligonucleotide
guaguuucucaggggacac

SEQ ID NO: 2372662 - RNA, 19 nt, Artificial Sequence
  Description of Artificial Sequence: Synthetic oligonucleotide
aaaccugaggagagcugcu

SEQ ID NO: 2372663 - RNA, 19 nt, Artificial Sequence
  Description of Artificial Sequence: Synthetic oligonucleotide
cauaauaacuuugccacau

SEQ ID NO: 2372664 - RNA, 19 nt, Artificial Sequence
  Description of Artificial Sequence: Synthetic oligonucleotide
gacucgaggggcugcccug

SEQ ID NO: 2372665 - RNA, 19 nt, Artificial Sequence
  Description of Artificial Sequence: Synthetic oligonucleotide
accuuccacgugcuggugu

SEQ ID NO: 2372666 - RNA, 19 nt, Artificial Sequence
  Description of Artificial Sequence: Synthetic oligonucleotide
uucgggaaaauaggcggau

SEQ ID NO: 2372667 - RNA, 19 nt, Artificial Sequence
  Description of Artificial Sequence: Synthetic oligonucleotide
gcuuuacauugucugacuc

SEQ ID NO: 2372668 - RNA, 19 nt, Artificial Sequence
  Description of Artificial Sequence: Synthetic oligonucleotide
cagucuacuacaguguucu

SEQ ID NO: 2372669 - RNA, 19 nt, Artificial Sequence
  Description of Artificial Sequence: Synthetic oligonucleotide
accaggcccagguaagaau

SEQ ID NO: 2372670 - RNA, 19 nt, Artificial Sequence
  Description of Artificial Sequence: Synthetic oligonucleotide
uucugaccugauguaaaua

SEQ ID NO: 2372671 - RNA, 19 nt, Artificial Sequence
  Description of Artificial Sequence: Synthetic oligonucleotide
uagcuauauuggagguagu

SEQ ID NO: 2372672 - RNA, 19 nt, Artificial Sequence
  Description of Artificial Sequence: Synthetic oligonucleotide
accaucgccuggcuuucug

SEQ ID NO: 2372673 - RNA, 19 nt, Artificial Sequence
  Description of Artificial Sequence: Synthetic oligonucleotide
guguucugucuucugcaca

SEQ ID NO: 2372674 - RNA, 19 nt, Artificial Sequence
  Description of Artificial Sequence: Synthetic oligonucleotide
cauaaaccugaggagagcu

SEQ ID NO: 2372675 - RNA, 19 nt, Artificial Sequence
  Description of Artificial Sequence: Synthetic oligonucleotide
aucgccuggcuuucugccu

SEQ ID NO: 2372676 - RNA, 19 nt, Artificial Sequence
  Description of Artificial Sequence: Synthetic oligonucleotide
gugugcgaccaucgccugg

SEQ ID NO: 2372677 - RNA, 19 nt, Artificial Sequence
  Description of Artificial Sequence: Synthetic oligonucleotide
agucuacuacaguguucug

SEQ ID NO: 2372678 - RNA, 19 nt, Artificial Sequence
  Description of Artificial Sequence: Synthetic oligonucleotide
ccugcucucaccuuaugga

SEQ ID NO: 2372679 - RNA, 19 nt, Artificial Sequence
  Description of Artificial Sequence: Synthetic oligonucleotide
ggggacacugucuuggcaa

SEQ ID NO: 2372680 - RNA, 19 nt, Artificial Sequence
  Description of Artificial Sequence: Synthetic oligonucleotide
cauuggccauuugcaagag

SEQ ID NO: 2372681 - RNA, 19 nt, Artificial Sequence
  Description of Artificial Sequence: Synthetic oligonucleotide
guauacagucuacuacagu

SEQ ID NO: 2372682 - RNA, 19 nt, Artificial Sequence
  Description of Artificial Sequence: Synthetic oligonucleotide
ccaggcccagguaagaauc

SEQ ID NO: 2372683 - RNA, 19 nt, Artificial Sequence
  Description of Artificial Sequence: Synthetic oligonucleotide
accuaaauaguggcuuaaa

SEQ ID NO: 2372684 - RNA, 19 nt, Artificial Sequence
  Description of Artificial Sequence: Synthetic oligonucleotide
caaccuaaauaguggcuua

SEQ ID NO: 2372685 - RNA, 19 nt, Artificial Sequence
  Description of Artificial Sequence: Synthetic oligonucleotide
ugucugacucgaggggcug

SEQ ID NO: 2372686 - RNA, 19 nt, Artificial Sequence
  Description of Artificial Sequence: Synthetic oligonucleotide
gucuacuacaguguucugu

SEQ ID NO: 2372687 - RNA, 19 nt, Artificial Sequence
  Description of Artificial Sequence: Synthetic oligonucleotide
cuucgggaaagaacucuaa

SEQ ID NO: 2372688 - RNA, 19 nt, Artificial Sequence
  Description of Artificial Sequence: Synthetic oligonucleotide
ccuaaauaguggcuuaaaa

SEQ ID NO: 2372689 - RNA, 19 nt, Artificial Sequence
  Description of Artificial Sequence: Synthetic oligonucleotide
cuggaucuccuuucgggaa

SEQ ID NO: 2372690 - RNA, 19 nt, Artificial Sequence
  Description of Artificial Sequence: Synthetic oligonucleotide
cucaggggacacugucuug

SEQ ID NO: 2372691 - RNA, 19 nt, Artificial Sequence
  Description of Artificial Sequence: Synthetic oligonucleotide
cuuucucauuggccauuug

SEQ ID NO: 2372692 - RNA, 19 nt, Artificial Sequence
  Description of Artificial Sequence: Synthetic oligonucleotide
guuagcuauauuggaggua

SEQ ID NO: 2372693 - RNA, 19 nt, Artificial Sequence
  Description of Artificial Sequence: Synthetic oligonucleotide
aucuccuuucgggaaaaua

SEQ ID NO: 2372694 - RNA, 19 nt, Artificial Sequence
  Description of Artificial Sequence: Synthetic oligonucleotide
cugaccugauguaaauacu

SEQ ID NO: 2372695 - RNA, 19 nt, Artificial Sequence
  Description of Artificial Sequence: Synthetic oligonucleotide
cuuggcacucaugcuugac

SEQ ID NO: 2372696 - RNA, 19 nt, Artificial Sequence
  Description of Artificial Sequence: Synthetic oligonucleotide
acuucgggaaagaacucua

SEQ ID NO: 2372697 - RNA, 19 nt, Artificial Sequence
  Description of Artificial Sequence: Synthetic oligonucleotide
augcggaugucuugcuuua

SEQ ID NO: 2372698 - RNA, 19 nt, Artificial Sequence
  Description of Artificial Sequence: Synthetic oligonucleotide
uaguuucucaggggacacu

SEQ ID NO: 2372699 - RNA, 19 nt, Artificial Sequence
  Description of Artificial Sequence: Synthetic oligonucleotide
agacacacaccaggcccag

SEQ ID NO: 2372700 - RNA, 19 nt, Artificial Sequence
  Description of Artificial Sequence: Synthetic oligonucleotide
ggccuucucuaguaguuuc

SEQ ID NO: 2372701 - RNA, 19 nt, Artificial Sequence
  Description of Artificial Sequence: Synthetic oligonucleotide
uggcaauguccuugacaaa

SEQ ID NO: 2372702 - RNA, 19 nt, Artificial Sequence
  Description of Artificial Sequence: Synthetic oligonucleotide
ugcgaccaucgccuggcuu

SEQ ID NO: 2372703 - RNA, 19 nt, Artificial Sequence
  Description of Artificial Sequence: Synthetic oligonucleotide
caauguccuugacaaauau

SEQ ID NO: 2372704 - RNA, 19 nt, Artificial Sequence
  Description of Artificial Sequence: Synthetic oligonucleotide
uuccacgugcugguguuuu

SEQ ID NO: 2372705 - RNA, 19 nt, Artificial Sequence
  Description of Artificial Sequence: Synthetic oligonucleotide
cuaccuuccacgugcuggu

SEQ ID NO: 2372706 - RNA, 19 nt, Artificial Sequence
  Description of Artificial Sequence: Synthetic oligonucleotide
aaggccugcuuggcacuca

SEQ ID NO: 2372707 - RNA, 19 nt, Artificial Sequence
  Description of Artificial Sequence: Synthetic oligonucleotide
cuucugaccugauguaaau

SEQ ID NO: 2372708 - RNA, 19 nt, Artificial Sequence
  Description of Artificial Sequence: Synthetic oligonucleotide
cacgugcugguguuuuaga

SEQ ID NO: 2372709 - RNA, 19 nt, Artificial Sequence
  Description of Artificial Sequence: Synthetic oligonucleotide
gagcugcugaagaguuagc

SEQ ID NO: 2372710 - RNA, 19 nt, Artificial Sequence
  Description of Artificial Sequence: Synthetic oligonucleotide
ugcggaugucuugcuuuac

SEQ ID NO: 2372711 - RNA, 19 nt, Artificial Sequence
  Description of Artificial Sequence: Synthetic oligonucleotide
uccacgugcugguguuuua

SEQ ID NO: 2372712 - RNA, 19 nt, Artificial Sequence
  Description of Artificial Sequence: Synthetic oligonucleotide
gcggaugucuugcuuuaca

SEQ ID NO: 2372713 - RNA, 19 nt, Artificial Sequence
  Description of Artificial Sequence: Synthetic oligonucleotide
ccaucgccuggcuuucugc

SEQ ID NO: 2372714 - RNA, 19 nt, Artificial Sequence
  Description of Artificial Sequence: Synthetic oligonucleotide
cucuaccuuccacgugcug

SEQ ID NO: 2372715 - RNA, 19 nt, Artificial Sequence
  Description of Artificial Sequence: Synthetic oligonucleotide
guaaugcccuucugcuuua

SEQ ID NO: 2372716 - RNA, 19 nt, Artificial Sequence
  Description of Artificial Sequence: Synthetic oligonucleotide
uaccuuccacgugcuggug

SEQ ID NO: 2372717 - RNA, 19 nt, Artificial Sequence
  Description of Artificial Sequence: Synthetic oligonucleotide
gucugacucgaggggcugc

SEQ ID NO: 2372718 - RNA, 19 nt, Artificial Sequence
  Description of Artificial Sequence: Synthetic oligonucleotide
uaaugcccuucugcuuuaa

SEQ ID NO: 2372719 - RNA, 19 nt, Artificial Sequence
  Description of Artificial Sequence: Synthetic oligonucleotide
aggccugcuuggcacucau

SEQ ID NO: 2372720 - RNA, 19 nt, Artificial Sequence
  Description of Artificial Sequence: Synthetic oligonucleotide
ccuucugaccugauguaaa

SEQ ID NO: 2372721 - RNA, 19 nt, Artificial Sequence
  Description of Artificial Sequence: Synthetic oligonucleotide
cacaagccuucugaccuga

SEQ ID NO: 2372722 - RNA, 19 nt, Artificial Sequence
  Description of Artificial Sequence: Synthetic oligonucleotide
cuacuacaguguucugucu

SEQ ID NO: 2372723 - RNA, 19 nt, Artificial Sequence
  Description of Artificial Sequence: Synthetic oligonucleotide
cugacucgaggggcugccc

SEQ ID NO: 2372724 - RNA, 19 nt, Artificial Sequence
  Description of Artificial Sequence: Synthetic oligonucleotide
cuaaggccugcuuggcacu

SEQ ID NO: 2372725 - RNA, 19 nt, Artificial Sequence
  Description of Artificial Sequence: Synthetic oligonucleotide
guuuguuguuguuguuguu

SEQ ID NO: 2372726 - RNA, 19 nt, Artificial Sequence
  Description of Artificial Sequence: Synthetic oligonucleotide
ccacgugcugguguuuuag

SEQ ID NO: 2372727 - RNA, 19 nt, Artificial Sequence
  Description of Artificial Sequence: Synthetic oligonucleotide
gagagcugcugaagaguua

SEQ ID NO: 2372728 - RNA, 19 nt, Artificial Sequence
  Description of Artificial Sequence: Synthetic oligonucleotide
ggaugucuugcuuuacauu

SEQ ID NO: 2372729 - RNA, 19 nt, Artificial Sequence
  Description of Artificial Sequence: Synthetic oligonucleotide
gcccagguaagaaucuuaa

SEQ ID NO: 2372730 - RNA, 19 nt, Artificial Sequence
  Description of Artificial Sequence: Synthetic oligonucleotide
gaggggcugcccugcucuc

SEQ ID NO: 2372731 - RNA, 19 nt, Artificial Sequence
  Description of Artificial Sequence: Synthetic oligonucleotide
cuacaguguucugucuucu

SEQ ID NO: 2372732 - RNA, 19 nt, Artificial Sequence
  Description of Artificial Sequence: Synthetic oligonucleotide
aggcccagguaagaaucuu

SEQ ID NO: 2372733 - RNA, 19 nt, Artificial Sequence
  Description of Artificial Sequence: Synthetic oligonucleotide
gcaauguccuugacaaaua

SEQ ID NO: 2372734 - RNA, 19 nt, Artificial Sequence
  Description of Artificial Sequence: Synthetic oligonucleotide
caggcccagguaagaaucu

SEQ ID NO: 2372735 - RNA, 19 nt, Artificial Sequence
  Description of Artificial Sequence: Synthetic oligonucleotide
gcgaccaucgccuggcuuu

SEQ ID NO: 2372736 - RNA, 19 nt, Artificial Sequence
  Description of Artificial Sequence: Synthetic oligonucleotide
ccugaggagagcugcugaa

SEQ ID NO: 2372737 - RNA, 19 nt, Artificial Sequence
  Description of Artificial Sequence: Synthetic oligonucleotide
cugaagaguuagcuauauu

SEQ ID NO: 2372738 - RNA, 19 nt, Artificial Sequence
  Description of Artificial Sequence: Synthetic oligonucleotide
gccuucugaccugauguaa

SEQ ID NO: 2372739 - RNA, 19 nt, Artificial Sequence
  Description of Artificial Sequence: Synthetic oligonucleotide
gcgugugcgaccaucgccu

SEQ ID NO: 2372740 - RNA, 19 nt, Artificial Sequence
  Description of Artificial Sequence: Synthetic oligonucleotide
gcccuucugcuuuaaugcu

SEQ ID NO: 2372741 - RNA, 19 nt, Artificial Sequence
  Description of Artificial Sequence: Synthetic oligonucleotide
ggcacucaugcuugacaua

SEQ ID NO: 2372742 - RNA, 19 nt, Artificial Sequence
  Description of Artificial Sequence: Synthetic oligonucleotide
caccaggcccagguaagaa

SEQ ID NO: 2372743 - RNA, 19 nt, Artificial Sequence
  Description of Artificial Sequence: Synthetic oligonucleotide
gcggauggcaaaggccuuc

SEQ ID NO: 2372744 - RNA, 19 nt, Artificial Sequence
  Description of Artificial Sequence: Synthetic oligonucleotide
acaagccuucugaccugau

SEQ ID NO: 2372745 - RNA, 19 nt, Artificial Sequence
  Description of Artificial Sequence: Synthetic oligonucleotide
gggacacugucuuggcaau

SEQ ID NO: 2372746 - RNA, 19 nt, Artificial Sequence
  Description of Artificial Sequence: Synthetic oligonucleotide
cacucaugcuugacauaau

SEQ ID NO: 2372747 - RNA, 19 nt, Artificial Sequence
  Description of Artificial Sequence: Synthetic oligonucleotide
gaucuccuuucgggaaaau

SEQ ID NO: 2372748 - RNA, 19 nt, Artificial Sequence
  Description of Artificial Sequence: Synthetic oligonucleotide
gggcugcccugcucucacc

SEQ ID NO: 2372749 - RNA, 19 nt, Artificial Sequence
  Description of Artificial Sequence: Synthetic oligonucleotide
ccuugacaaauaugcggau

SEQ ID NO: 2372750 - RNA, 19 nt, Artificial Sequence
  Description of Artificial Sequence: Synthetic oligonucleotide
cgugugcgaccaucgccug

SEQ ID NO: 2372751 - RNA, 19 nt, Artificial Sequence
  Description of Artificial Sequence: Synthetic oligonucleotide
cggaugucuugcuuuacau

SEQ ID NO: 2372752 - RNA, 19 nt, Artificial Sequence
  Description of Artificial Sequence: Synthetic oligonucleotide
ccagccccuaauuucuuuu

SEQ ID NO: 2372753 - RNA, 19 nt, Artificial Sequence
  Description of Artificial Sequence: Synthetic oligonucleotide
cccuucugcuuuaaugcuu

SEQ ID NO: 2372754 - RNA, 19 nt, Artificial Sequence
  Description of Artificial Sequence: Synthetic oligonucleotide
cccagguaagaaucuuaau

SEQ ID NO: 2372755 - RNA, 19 nt, Artificial Sequence
  Description of Artificial Sequence: Synthetic oligonucleotide
cuccagccccuaauuucuu

SEQ ID NO: 2372756 - RNA, 19 nt, Artificial Sequence
  Description of Artificial Sequence: Synthetic oligonucleotide
gaccaucgccuggcuuucu

SEQ ID NO: 2372757 - RNA, 19 nt, Artificial Sequence
  Description of Artificial Sequence: Synthetic oligonucleotide
ccuuccacgugcugguguu

SEQ ID NO: 2372758 - RNA, 19 nt, Artificial Sequence
  Description of Artificial Sequence: Synthetic oligonucleotide
gugcgaccaucgccuggcu

SEQ ID NO: 2372759 - RNA, 19 nt, Artificial Sequence
  Description of Artificial Sequence: Synthetic oligonucleotide
cucgaggggcugcccugcu

SEQ ID NO: 2372760 - RNA, 19 nt, Artificial Sequence
  Description of Artificial Sequence: Synthetic oligonucleotide
cgaccaucgccuggcuuuc

SEQ ID NO: 2372761 - RNA, 19 nt, Artificial Sequence
  Description of Artificial Sequence: Synthetic oligonucleotide
gcuugacaguaaugcccuu

SEQ ID NO: 2372762 - RNA, 19 nt, Artificial Sequence
  Description of Artificial Sequence: Synthetic oligonucleotide
cuuccacgugcugguguuu

SEQ ID NO: 2372763 - RNA, 19 nt, Artificial Sequence
  Description of Artificial Sequence: Synthetic oligonucleotide
ggcggauggcaaaggccuu

SEQ ID NO: 2372764 - RNA, 19 nt, Artificial Sequence
  Description of Artificial Sequence: Synthetic oligonucleotide
aaaguguucauacuggagc

SEQ ID NO: 2372765 - RNA, 19 nt, Artificial Sequence
  Description of Artificial Sequence: Synthetic oligonucleotide
aauacauuauauuacaugu

SEQ ID NO: 2372766 - RNA, 19 nt, Artificial Sequence
  Description of Artificial Sequence: Synthetic oligonucleotide
uauauuacaugucccaacg

SEQ ID NO: 2372767 - RNA, 19 nt, Artificial Sequence
  Description of Artificial Sequence: Synthetic oligonucleotide
uguucaucaaugaauuucg

SEQ ID NO: 2372768 - RNA, 19 nt, Artificial Sequence
  Description of Artificial Sequence: Synthetic oligonucleotide
uacauuauauuacaugucc

SEQ ID NO: 2372769 - RNA, 19 nt, Artificial Sequence
  Description of Artificial Sequence: Synthetic oligonucleotide
ugugacgugacacagagca

SEQ ID NO: 2372770 - RNA, 19 nt, Artificial Sequence
  Description of Artificial Sequence: Synthetic oligonucleotide
agaaaauuaagguaauuug

SEQ ID NO: 2372771 - RNA, 19 nt, Artificial Sequence
  Description of Artificial Sequence: Synthetic oligonucleotide
cauguguaaacacugaggg

SEQ ID NO: 2372772 - RNA, 19 nt, Artificial Sequence
  Description of Artificial Sequence: Synthetic oligonucleotide
agagcaugagucuugggcc

SEQ ID NO: 2372773 - RNA, 19 nt, Artificial Sequence
  Description of Artificial Sequence: Synthetic oligonucleotide
auuaagguaauuuggguug

SEQ ID NO: 2372774 - RNA, 19 nt, Artificial Sequence
  Description of Artificial Sequence: Synthetic oligonucleotide
aaagcaaguacuuaagaua

SEQ ID NO: 2372775 - RNA, 19 nt, Artificial Sequence
  Description of Artificial Sequence: Synthetic oligonucleotide
aggaguaaauccuucgccc

SEQ ID NO: 2372776 - RNA, 19 nt, Artificial Sequence
  Description of Artificial Sequence: Synthetic oligonucleotide
uucgaaaguguucauacug

SEQ ID NO: 2372777 - RNA, 19 nt, Artificial Sequence
  Description of Artificial Sequence: Synthetic oligonucleotide
augaauuucgcacacugag

SEQ ID NO: 2372778 - RNA, 19 nt, Artificial Sequence
  Description of Artificial Sequence: Synthetic oligonucleotide
aaauuaagguaauuugggu

SEQ ID NO: 2372779 - RNA, 19 nt, Artificial Sequence
  Description of Artificial Sequence: Synthetic oligonucleotide
aacauguguaaacacugag

SEQ ID NO: 2372780 - RNA, 19 nt, Artificial Sequence
  Description of Artificial Sequence: Synthetic oligonucleotide
ugaaguaaccucuuugggc

SEQ ID NO: 2372781 - RNA, 19 nt, Artificial Sequence
  Description of Artificial Sequence: Synthetic oligonucleotide
ugugugacgugacacagag

SEQ ID NO: 2372782 - RNA, 19 nt, Artificial Sequence
  Description of Artificial Sequence: Synthetic oligonucleotide
uuacaugucccaacgagcc

SEQ ID NO: 2372783 - RNA, 19 nt, Artificial Sequence
  Description of Artificial Sequence: Synthetic oligonucleotide
ucgaaaguguucauacugg

SEQ ID NO: 2372784 - RNA, 19 nt, Artificial Sequence
  Description of Artificial Sequence: Synthetic oligonucleotide
uagcucaucacccugacgu

SEQ ID NO: 2372785 - RNA, 19 nt, Artificial Sequence
  Description of Artificial Sequence: Synthetic oligonucleotide
aaaggaaacgucgacuauc

SEQ ID NO: 2372786 - RNA, 19 nt, Artificial Sequence
  Description of Artificial Sequence: Synthetic oligonucleotide
uuagauacuuggcauauuc

SEQ ID NO: 2372787 - RNA, 19 nt, Artificial Sequence
  Description of Artificial Sequence: Synthetic oligonucleotide
gaaacgucgacuauccgcg

SEQ ID NO: 2372788 - RNA, 19 nt, Artificial Sequence
  Description of Artificial Sequence: Synthetic oligonucleotide
aaguacuuaagauaauuua

SEQ ID NO: 2372789 - RNA, 19 nt, Artificial Sequence
  Description of Artificial Sequence: Synthetic oligonucleotide
gaaguaaccucuuugggca

SEQ ID NO: 2372790 - RNA, 19 nt, Artificial Sequence
  Description of Artificial Sequence: Synthetic oligonucleotide
uugaaguaaccucuuuggg

SEQ ID NO: 2372791 - RNA, 19 nt, Artificial Sequence
  Description of Artificial Sequence: Synthetic oligonucleotide
aaauccuucgccccgcgag

SEQ ID NO: 2372792 - RNA, 19 nt, Artificial Sequence
  Description of Artificial Sequence: Synthetic oligonucleotide
aaggaaacgucgacuaucc

SEQ ID NO: 2372793 - RNA, 19 nt, Artificial Sequence
  Description of Artificial Sequence: Synthetic oligonucleotide
cuuucgaaaguguucauac

SEQ ID NO: 2372794 - RNA, 19 nt, Artificial Sequence
  Description of Artificial Sequence: Synthetic oligonucleotide
aagaaaauuaagguaauuu

SEQ ID NO: 2372795 - RNA, 19 nt, Artificial Sequence
  Description of Artificial Sequence: Synthetic oligonucleotide
gaagcgacucccuagauuc

SEQ ID NO: 2372796 - RNA, 19 nt, Artificial Sequence
  Description of Artificial Sequence: Synthetic oligonucleotide
gaaacgucaucccaccgcg

SEQ ID NO: 2372797 - RNA, 19 nt, Artificial Sequence
  Description of Artificial Sequence: Synthetic oligonucleotide
uguguaaacacugagggua

SEQ ID NO: 2372798 - RNA, 19 nt, Artificial Sequence
  Description of Artificial Sequence: Synthetic oligonucleotide
cugaggguacuuuagauac

SEQ ID NO: 2372799 - RNA, 19 nt, Artificial Sequence
  Description of Artificial Sequence: Synthetic oligonucleotide
uuaggaguaaauccuucgc

SEQ ID NO: 2372800 - RNA, 19 nt, Artificial Sequence
  Description of Artificial Sequence: Synthetic oligonucleotide
gaauuucgcacacugagca

SEQ ID NO: 2372801 - RNA, 19 nt, Artificial Sequence
  Description of Artificial Sequence: Synthetic oligonucleotide
gagguauccucccagcacg

SEQ ID NO: 2372802 - RNA, 19 nt, Artificial Sequence
  Description of Artificial Sequence: Synthetic oligonucleotide
uaggaguaaauccuucgcc

SEQ ID NO: 2372803 - RNA, 19 nt, Artificial Sequence
  Description of Artificial Sequence: Synthetic oligonucleotide
aacacaaccagccccuaca

SEQ ID NO: 2372804 - RNA, 19 nt, Artificial Sequence
  Description of Artificial Sequence: Synthetic oligonucleotide
uuauauuacaugucccaac

SEQ ID NO: 2372805 - RNA, 19 nt, Artificial Sequence
  Description of Artificial Sequence: Synthetic oligonucleotide
ugcacaaauuccaacucca

SEQ ID NO: 2372806 - RNA, 19 nt, Artificial Sequence
  Description of Artificial Sequence: Synthetic oligonucleotide
ugaauuucgcacacugagc

SEQ ID NO: 2372807 - RNA, 19 nt, Artificial Sequence
  Description of Artificial Sequence: Synthetic oligonucleotide
cagagcaugagucuugggc

SEQ ID NO: 2372808 - RNA, 19 nt, Artificial Sequence
  Description of Artificial Sequence: Synthetic oligonucleotide
acauugcacaaauuccaac

SEQ ID NO: 2372809 - RNA, 19 nt, Artificial Sequence
  Description of Artificial Sequence: Synthetic oligonucleotide
uugcacaaauuccaacucc

SEQ ID NO: 2372810 - RNA, 19 nt, Artificial Sequence
  Description of Artificial Sequence: Synthetic oligonucleotide
caaugaauuucgcacacug

SEQ ID NO: 2372811 - RNA, 19 nt, Artificial Sequence
  Description of Artificial Sequence: Synthetic oligonucleotide
uuugucuuugaaguaaccu

SEQ ID NO: 2372812 - RNA, 19 nt, Artificial Sequence
  Description of Artificial Sequence: Synthetic oligonucleotide
cucagcgccaccgagaggg

SEQ ID NO: 2372813 - RNA, 19 nt, Artificial Sequence
  Description of Artificial Sequence: Synthetic oligonucleotide
gaaaccgaagucgauuucc

SEQ ID NO: 2372814 - RNA, 19 nt, Artificial Sequence
  Description of Artificial Sequence: Synthetic oligonucleotide
guuggcuaaacauugcaca

SEQ ID NO: 2372815 - RNA, 19 nt, Artificial Sequence
  Description of Artificial Sequence: Synthetic oligonucleotide
guuauucugcuguugcugc

SEQ ID NO: 2372816 - RNA, 19 nt, Artificial Sequence
  Description of Artificial Sequence: Synthetic oligonucleotide
uguuauucugcuguugcug

SEQ ID NO: 2372817 - RNA, 19 nt, Artificial Sequence
  Description of Artificial Sequence: Synthetic oligonucleotide
uacuuuagauacuuggcau

SEQ ID NO: 2372818 - RNA, 19 nt, Artificial Sequence
  Description of Artificial Sequence: Synthetic oligonucleotide
aauagugcugccaguguag

SEQ ID NO: 2372819 - RNA, 19 nt, Artificial Sequence
  Description of Artificial Sequence: Synthetic oligonucleotide
ggguacuuuagauacuugg

SEQ ID NO: 2372820 - RNA, 19 nt, Artificial Sequence
  Description of Artificial Sequence: Synthetic oligonucleotide
cauuauauuacauguccca

SEQ ID NO: 2372821 - RNA, 19 nt, Artificial Sequence
  Description of Artificial Sequence: Synthetic oligonucleotide
uuaagguaauuuggguugg

SEQ ID NO: 2372822 - RNA, 19 nt, Artificial Sequence
  Description of Artificial Sequence: Synthetic oligonucleotide
gaguaaauccuucgccccg

SEQ ID NO: 2372823 - RNA, 19 nt, Artificial Sequence
  Description of Artificial Sequence: Synthetic oligonucleotide
cugacguagcucaucaccc

SEQ ID NO: 2372824 - RNA, 19 nt, Artificial Sequence
  Description of Artificial Sequence: Synthetic oligonucleotide
ucugguucuuuccaguaaa

SEQ ID NO: 2372825 - RNA, 19 nt, Artificial Sequence
  Description of Artificial Sequence: Synthetic oligonucleotide
agguggagaccucucagcg

SEQ ID NO: 2372826 - RNA, 19 nt, Artificial Sequence
  Description of Artificial Sequence: Synthetic oligonucleotide
ugcuguucaucaaugaauu

SEQ ID NO: 2372827 - RNA, 19 nt, Artificial Sequence
  Description of Artificial Sequence: Synthetic oligonucleotide
aggagagagacgcgaacac

SEQ ID NO: 2372828 - RNA, 19 nt, Artificial Sequence
  Description of Artificial Sequence: Synthetic oligonucleotide
gacgcgaacacaaccagcc

SEQ ID NO: 2372829 - RNA, 19 nt, Artificial Sequence
  Description of Artificial Sequence: Synthetic oligonucleotide
guacuuuagauacuuggca

SEQ ID NO: 2372830 - RNA, 19 nt, Artificial Sequence
  Description of Artificial Sequence: Synthetic oligonucleotide
auauucugguucuuuccag

SEQ ID NO: 2372831 - RNA, 19 nt, Artificial Sequence
  Description of Artificial Sequence: Synthetic oligonucleotide
gagacgucgucccaccgcg

SEQ ID NO: 2372832 - RNA, 19 nt, Artificial Sequence
  Description of Artificial Sequence: Synthetic oligonucleotide
ugacgugacacagagcaug

SEQ ID NO: 2372833 - RNA, 19 nt, Artificial Sequence
  Description of Artificial Sequence: Synthetic oligonucleotide
aauuccaacuccaacugaa

SEQ ID NO: 2372834 - RNA, 19 nt, Artificial Sequence
  Description of Artificial Sequence: Synthetic oligonucleotide
uucuaacauguguaaacac

SEQ ID NO: 2372835 - RNA, 19 nt, Artificial Sequence
  Description of Artificial Sequence: Synthetic oligonucleotide
uaacauguguaaacacuga

SEQ ID NO: 2372836 - RNA, 19 nt, Artificial Sequence
  Description of Artificial Sequence: Synthetic oligonucleotide
ggaaacgucgacuauccgc

SEQ ID NO: 2372837 - RNA, 19 nt, Artificial Sequence
  Description of Artificial Sequence: Synthetic oligonucleotide
gauuccucgagguauccuc

SEQ ID NO: 2372838 - RNA, 19 nt, Artificial Sequence
  Description of Artificial Sequence: Synthetic oligonucleotide
guuguuguuauucugcugu

SEQ ID NO: 2372839 - RNA, 19 nt, Artificial Sequence
  Description of Artificial Sequence: Synthetic oligonucleotide
aacacugaggguacuuuag

SEQ ID NO: 2372840 - RNA, 19 nt, Artificial Sequence
  Description of Artificial Sequence: Synthetic oligonucleotide
agauaauuuacaaaagcuu

SEQ ID NO: 2372841 - RNA, 19 nt, Artificial Sequence
  Description of Artificial Sequence: Synthetic oligonucleotide
agaggagagagacgcgaac

SEQ ID NO: 2372842 - RNA, 19 nt, Artificial Sequence
  Description of Artificial Sequence: Synthetic oligonucleotide
uagauacuuggcauauucu

SEQ ID NO: 2372843 - RNA, 19 nt, Artificial Sequence
  Description of Artificial Sequence: Synthetic oligonucleotide
aguaaauccuucgccccgc

SEQ ID NO: 2372844 - RNA, 19 nt, Artificial Sequence
  Description of Artificial Sequence: Synthetic oligonucleotide
ucgacuauccgcguggaga

SEQ ID NO: 2372845 - RNA, 19 nt, Artificial Sequence
  Description of Artificial Sequence: Synthetic oligonucleotide
cuucucgucagguggagac

SEQ ID NO: 2372846 - RNA, 19 nt, Artificial Sequence
  Description of Artificial Sequence: Synthetic oligonucleotide
ccaacugaaaccgaagucg

SEQ ID NO: 2372847 - RNA, 19 nt, Artificial Sequence
  Description of Artificial Sequence: Synthetic oligonucleotide
agacgcauccgcuuccggg

SEQ ID NO: 2372848 - RNA, 19 nt, Artificial Sequence
  Description of Artificial Sequence: Synthetic oligonucleotide
ucgaacgucuucucgucag

SEQ ID NO: 2372849 - RNA, 19 nt, Artificial Sequence
  Description of Artificial Sequence: Synthetic oligonucleotide
aacgucuucucgucaggug

SEQ ID NO: 2372850 - RNA, 19 nt, Artificial Sequence
  Description of Artificial Sequence: Synthetic oligonucleotide
aaccgaagucgauuuccag

SEQ ID NO: 2372851 - RNA, 19 nt, Artificial Sequence
  Description of Artificial Sequence: Synthetic oligonucleotide
guaaagcaaguacuuaaga

SEQ ID NO: 2372852 - RNA, 19 nt, Artificial Sequence
  Description of Artificial Sequence: Synthetic oligonucleotide
gaggaaacgucaucccacc

SEQ ID NO: 2372853 - RNA, 19 nt, Artificial Sequence
  Description of Artificial Sequence: Synthetic oligonucleotide
uguuguuguuauucugcug

SEQ ID NO: 2372854 - RNA, 19 nt, Artificial Sequence
  Description of Artificial Sequence: Synthetic oligonucleotide
aaugaauuucgcacacuga

SEQ ID NO: 2372855 - RNA, 19 nt, Artificial Sequence
  Description of Artificial Sequence: Synthetic oligonucleotide
aaacacugaggguacuuua

SEQ ID NO: 2372856 - RNA, 19 nt, Artificial Sequence
  Description of Artificial Sequence: Synthetic oligonucleotide
uuucgaaaguguucauacu

SEQ ID NO: 2372857 - RNA, 19 nt, Artificial Sequence
  Description of Artificial Sequence: Synthetic oligonucleotide
auuauauuacaugucccaa

SEQ ID NO: 2372858 - RNA, 19 nt, Artificial Sequence
  Description of Artificial Sequence: Synthetic oligonucleotide
gagacgcgaacacaaccag

SEQ ID NO: 2372859 - RNA, 19 nt, Artificial Sequence
  Description of Artificial Sequence: Synthetic oligonucleotide
auacuggagcaguucuaac

SEQ ID NO: 2372860 - RNA, 19 nt, Artificial Sequence
  Description of Artificial Sequence: Synthetic oligonucleotide
aagucgauuuccagcauca

SEQ ID NO: 2372861 - RNA, 19 nt, Artificial Sequence
  Description of Artificial Sequence: Synthetic oligonucleotide
agguucgaacgucuucucg

SEQ ID NO: 2372862 - RNA, 19 nt, Artificial Sequence
  Description of Artificial Sequence: Synthetic oligonucleotide
acgucgacuauccgcgugg

SEQ ID NO: 2372863 - RNA, 19 nt, Artificial Sequence
  Description of Artificial Sequence: Synthetic oligonucleotide
acacugacguagcucauca

SEQ ID NO: 2372864 - RNA, 19 nt, Artificial Sequence
  Description of Artificial Sequence: Synthetic oligonucleotide
cuugugugacgugacacag

SEQ ID NO: 2372865 - RNA, 19 nt, Artificial Sequence
  Description of Artificial Sequence: Synthetic oligonucleotide
acuuuagauacuuggcaua

SEQ ID NO: 2372866 - RNA, 19 nt, Artificial Sequence
  Description of Artificial Sequence: Synthetic oligonucleotide
gguacuuuagauacuuggc

SEQ ID NO: 2372867 - RNA, 19 nt, Artificial Sequence
  Description of Artificial Sequence: Synthetic oligonucleotide
auuccucgagguauccucc

SEQ ID NO: 2372868 - RNA, 19 nt, Artificial Sequence
  Description of Artificial Sequence: Synthetic oligonucleotide
cucccggcagguucgaacg

SEQ ID NO: 2372869 - RNA, 19 nt, Artificial Sequence
  Description of Artificial Sequence: Synthetic oligonucleotide
aagguaauuuggguuggcu

SEQ ID NO: 2372870 - RNA, 19 nt, Artificial Sequence
  Description of Artificial Sequence: Synthetic oligonucleotide
auauuacaugucccaacga

SEQ ID NO: 2372871 - RNA, 19 nt, Artificial Sequence
  Description of Artificial Sequence: Synthetic oligonucleotide
guucuuuccaguaaagcaa

SEQ ID NO: 2372872 - RNA, 19 nt, Artificial Sequence
  Description of Artificial Sequence: Synthetic oligonucleotide
uguuguuauucugcuguug

SEQ ID NO: 2372873 - RNA, 19 nt, Artificial Sequence
  Description of Artificial Sequence: Synthetic oligonucleotide
aauccuucgccccgcgagu

SEQ ID NO: 2372874 - RNA, 19 nt, Artificial Sequence
  Description of Artificial Sequence: Synthetic oligonucleotide
gagacguccucccggcagg

SEQ ID NO: 2372875 - RNA, 19 nt, Artificial Sequence
  Description of Artificial Sequence: Synthetic oligonucleotide
gugacacagagcaugaguc

SEQ ID NO: 2372876 - RNA, 19 nt, Artificial Sequence
  Description of Artificial Sequence: Synthetic oligonucleotide
agccccuacacugacguag

SEQ ID NO: 2372877 - RNA, 19 nt, Artificial Sequence
  Description of Artificial Sequence: Synthetic oligonucleotide
aaccucuuugggcaagaaa

SEQ ID NO: 2372878 - RNA, 19 nt, Artificial Sequence
  Description of Artificial Sequence: Synthetic oligonucleotide
uggaaagcacccgccaaag

SEQ ID NO: 2372879 - RNA, 19 nt, Artificial Sequence
  Description of Artificial Sequence: Synthetic oligonucleotide
auguguaaacacugagggu

SEQ ID NO: 2372880 - RNA, 19 nt, Artificial Sequence
  Description of Artificial Sequence: Synthetic oligonucleotide
ucgagguauccucccagca

SEQ ID NO: 2372881 - RNA, 19 nt, Artificial Sequence
  Description of Artificial Sequence: Synthetic oligonucleotide
gauggccucgccccuuagg

SEQ ID NO: 2372882 - RNA, 19 nt, Artificial Sequence
  Description of Artificial Sequence: Synthetic oligonucleotide
ggaguaaauccuucgcccc

SEQ ID NO: 2372883 - RNA, 19 nt, Artificial Sequence
  Description of Artificial Sequence: Synthetic oligonucleotide
acccugacgucaccguccc

SEQ ID NO: 2372884 - RNA, 19 nt, Artificial Sequence
  Description of Artificial Sequence: Synthetic oligonucleotide
cugccaguguagaaucugc

SEQ ID NO: 2372885 - RNA, 19 nt, Artificial Sequence
  Description of Artificial Sequence: Synthetic oligonucleotide
cuuccgggaauagugcugc

SEQ ID NO: 2372886 - RNA, 19 nt, Artificial Sequence
  Description of Artificial Sequence: Synthetic oligonucleotide
ggaaacgucaucccaccgc

SEQ ID NO: 2372887 - RNA, 19 nt, Artificial Sequence
  Description of Artificial Sequence: Synthetic oligonucleotide
aggaaacgucaucccaccg

SEQ ID NO: 2372888 - RNA, 19 nt, Artificial Sequence
  Description of Artificial Sequence: Synthetic oligonucleotide
acgcgaacacaaccagccc

SEQ ID NO: 2372889 - RNA, 19 nt, Artificial Sequence
  Description of Artificial Sequence: Synthetic oligonucleotide
gccccuuaggaguaaaucc

SEQ ID NO: 2372890 - RNA, 19 nt, Artificial Sequence
  Description of Artificial Sequence: Synthetic oligonucleotide
aagacgcauccgcuuccgg

SEQ ID NO: 2372891 - RNA, 19 nt, Artificial Sequence
  Description of Artificial Sequence: Synthetic oligonucleotide
cuagauuccucgagguauc

SEQ ID NO: 2372892 - RNA, 19 nt, Artificial Sequence
  Description of Artificial Sequence: Synthetic oligonucleotide
gaauagugcugccagugua

SEQ ID NO: 2372893 - RNA, 19 nt, Artificial Sequence
  Description of Artificial Sequence: Synthetic oligonucleotide
agagacgcgaacacaacca

SEQ ID NO: 2372894 - RNA, 19 nt, Artificial Sequence
  Description of Artificial Sequence: Synthetic oligonucleotide
uuucgcacacugagcauuc

SEQ ID NO: 2372895 - RNA, 19 nt, Artificial Sequence
  Description of Artificial Sequence: Synthetic oligonucleotide
ucccuagauuccucgaggu

SEQ ID NO: 2372896 - RNA, 19 nt, Artificial Sequence
  Description of Artificial Sequence: Synthetic oligonucleotide
cucucagcgccaccgagag

SEQ ID NO: 2372897 - RNA, 19 nt, Artificial Sequence
  Description of Artificial Sequence: Synthetic oligonucleotide
cacacugagcauucaccag

SEQ ID NO: 2372898 - RNA, 19 nt, Artificial Sequence
  Description of Artificial Sequence: Synthetic oligonucleotide
ugccaguguagaaucugcu

SEQ ID NO: 2372899 - RNA, 19 nt, Artificial Sequence
  Description of Artificial Sequence: Synthetic oligonucleotide
uccauagcgacggccgcgg

SEQ ID NO: 2372900 - RNA, 19 nt, Artificial Sequence
  Description of Artificial Sequence: Synthetic oligonucleotide
aaaccgaagucgauuucca

SEQ ID NO: 2372901 - RNA, 19 nt, Artificial Sequence
  Description of Artificial Sequence: Synthetic oligonucleotide
agugcugccaguguagaau

SEQ ID NO: 2372902 - RNA, 19 nt, Artificial Sequence
  Description of Artificial Sequence: Synthetic oligonucleotide
uguucauacuggagcaguu

SEQ ID NO: 2372903 - RNA, 19 nt, Artificial Sequence
  Description of Artificial Sequence: Synthetic oligonucleotide
gacgucaccgucccuugug

SEQ ID NO: 2372904 - RNA, 19 nt, Artificial Sequence
  Description of Artificial Sequence: Synthetic oligonucleotide
cugguucuuuccaguaaag

SEQ ID NO: 2372905 - RNA, 19 nt, Artificial Sequence
  Description of Artificial Sequence: Synthetic oligonucleotide
aacuccaacugaaaccgaa

SEQ ID NO: 2372906 - RNA, 19 nt, Artificial Sequence
  Description of Artificial Sequence: Synthetic oligonucleotide
gagagagacgcgaacacaa

SEQ ID NO: 2372907 - RNA, 19 nt, Artificial Sequence
  Description of Artificial Sequence: Synthetic oligonucleotide
ugaggguacuuuagauacu

SEQ ID NO: 2372908 - RNA, 19 nt, Artificial Sequence
  Description of Artificial Sequence: Synthetic oligonucleotide
gucccaacgagccaggucu

SEQ ID NO: 2372909 - RNA, 19 nt, Artificial Sequence
  Description of Artificial Sequence: Synthetic oligonucleotide
acacugaggguacuuuaga

SEQ ID NO: 2372910 - RNA, 19 nt, Artificial Sequence
  Description of Artificial Sequence: Synthetic oligonucleotide
agcucaucacccugacguc

SEQ ID NO: 2372911 - RNA, 19 nt, Artificial Sequence
  Description of Artificial Sequence: Synthetic oligonucleotide
agacgcgaacacaaccagc

SEQ ID NO: 2372912 - RNA, 19 nt, Artificial Sequence
  Description of Artificial Sequence: Synthetic oligonucleotide
agcuuugucuuugaaguaa

SEQ ID NO: 2372913 - RNA, 19 nt, Artificial Sequence
  Description of Artificial Sequence: Synthetic oligonucleotide
cagguggagaccucucagc

SEQ ID NO: 2372914 - RNA, 19 nt, Artificial Sequence
  Description of Artificial Sequence: Synthetic oligonucleotide
cccgccaaaggaaacgucg

SEQ ID NO: 2372915 - RNA, 19 nt, Artificial Sequence
  Description of Artificial Sequence: Synthetic oligonucleotide
gacgcauccgcuuccggga

SEQ ID NO: 2372916 - RNA, 19 nt, Artificial Sequence
  Description of Artificial Sequence: Synthetic oligonucleotide
acugaaaccgaagucgauu

SEQ ID NO: 2372917 - RNA, 19 nt, Artificial Sequence
  Description of Artificial Sequence: Synthetic oligonucleotide
gacggccgcggccauaacc

SEQ ID NO: 2372918 - RNA, 19 nt, Artificial Sequence
  Description of Artificial Sequence: Synthetic oligonucleotide
accgcgaggaaacgucauc

SEQ ID NO: 2372919 - RNA, 19 nt, Artificial Sequence
  Description of Artificial Sequence: Synthetic oligonucleotide
ucucgucagguggagaccu

SEQ ID NO: 2372920 - RNA, 19 nt, Artificial Sequence
  Description of Artificial Sequence: Synthetic oligonucleotide
gacgucgucccaccgcgag

SEQ ID NO: 2372921 - RNA, 19 nt, Artificial Sequence
  Description of Artificial Sequence: Synthetic oligonucleotide
agcaguucuaacaugugua

SEQ ID NO: 2372922 - RNA, 19 nt, Artificial Sequence
  Description of Artificial Sequence: Synthetic oligonucleotide
cugaagacgcauccgcuuc

SEQ ID NO: 2372923 - RNA, 19 nt, Artificial Sequence
  Description of Artificial Sequence: Synthetic oligonucleotide
gaagacgcauccgcuuccg

SEQ ID NO: 2372924 - RNA, 19 nt, Artificial Sequence
  Description of Artificial Sequence: Synthetic oligonucleotide
aagcgacucccuagauucc

SEQ ID NO: 2372925 - RNA, 19 nt, Artificial Sequence
  Description of Artificial Sequence: Synthetic oligonucleotide
ugacguagcucaucacccu

SEQ ID NO: 2372926 - RNA, 19 nt, Artificial Sequence
  Description of Artificial Sequence: Synthetic oligonucleotide
uugugugacgugacacaga

SEQ ID NO: 2372927 - RNA, 19 nt, Artificial Sequence
  Description of Artificial Sequence: Synthetic oligonucleotide
caacugaaaccgaagucga

SEQ ID NO: 2372928 - RNA, 19 nt, Artificial Sequence
  Description of Artificial Sequence: Synthetic oligonucleotide
aguggaaagcacccgccaa

SEQ ID NO: 2372929 - RNA, 19 nt, Artificial Sequence
  Description of Artificial Sequence: Synthetic oligonucleotide
cacccugacgucaccgucc

SEQ ID NO: 2372930 - RNA, 19 nt, Artificial Sequence
  Description of Artificial Sequence: Synthetic oligonucleotide
cucgagguauccucccagc

SEQ ID NO: 2372931 - RNA, 19 nt, Artificial Sequence
  Description of Artificial Sequence: Synthetic oligonucleotide
aggaaacgucgacuauccg

SEQ ID NO: 2372932 - RNA, 19 nt, Artificial Sequence
  Description of Artificial Sequence: Synthetic oligonucleotide
uggagacgucgucccaccg

SEQ ID NO: 2372933 - RNA, 19 nt, Artificial Sequence
  Description of Artificial Sequence: Synthetic oligonucleotide
cugaccuccuccgcgaagc

SEQ ID NO: 2372934 - RNA, 19 nt, Artificial Sequence
  Description of Artificial Sequence: Synthetic oligonucleotide
ucgcacacugagcauucac

SEQ ID NO: 2372935 - RNA, 19 nt, Artificial Sequence
  Description of Artificial Sequence: Synthetic oligonucleotide
uaauuuggguuggcuaaac

SEQ ID NO: 2372936 - RNA, 19 nt, Artificial Sequence
  Description of Artificial Sequence: Synthetic oligonucleotide
agagagacgcgaacacaac

SEQ ID NO: 2372937 - RNA, 19 nt, Artificial Sequence
  Description of Artificial Sequence: Synthetic oligonucleotide
aaguaaccucuuugggcaa

SEQ ID NO: 2372938 - RNA, 19 nt, Artificial Sequence
  Description of Artificial Sequence: Synthetic oligonucleotide
guguagaaucugcuguuca

SEQ ID NO: 2372939 - RNA, 19 nt, Artificial Sequence
  Description of Artificial Sequence: Synthetic oligonucleotide
auuucgcacacugagcauu

SEQ ID NO: 2372940 - RNA, 19 nt, Artificial Sequence
  Description of Artificial Sequence: Synthetic oligonucleotide
agcgccaccgagagggacc

SEQ ID NO: 2372941 - RNA, 19 nt, Artificial Sequence
  Description of Artificial Sequence: Synthetic oligonucleotide
ccuacacugacguagcuca

SEQ ID NO: 2372942 - RNA, 19 nt, Artificial Sequence
  Description of Artificial Sequence: Synthetic oligonucleotide
gccauaaccagagaggaga

SEQ ID NO: 2372943 - RNA, 19 nt, Artificial Sequence
  Description of Artificial Sequence: Synthetic oligonucleotide
cauagcgacggccgcggcc

SEQ ID NO: 2372944 - RNA, 19 nt, Artificial Sequence
  Description of Artificial Sequence: Synthetic oligonucleotide
acuauccgcguggagacgu

SEQ ID NO: 2372945 - RNA, 19 nt, Artificial Sequence
  Description of Artificial Sequence: Synthetic oligonucleotide
uaagguaauuuggguuggc

SEQ ID NO: 2372946 - RNA, 19 nt, Artificial Sequence
  Description of Artificial Sequence: Synthetic oligonucleotide
gaacacaaccagccccuac

SEQ ID NO: 2372947 - RNA, 19 nt, Artificial Sequence
  Description of Artificial Sequence: Synthetic oligonucleotide
cuucugaccugggugugcc

SEQ ID NO: 2372948 - RNA, 19 nt, Artificial Sequence
  Description of Artificial Sequence: Synthetic oligonucleotide
aguaaccucuuugggcaag

SEQ ID NO: 2372949 - RNA, 19 nt, Artificial Sequence
  Description of Artificial Sequence: Synthetic oligonucleotide
gagcaguucuaacaugugu

SEQ ID NO: 2372950 - RNA, 19 nt, Artificial Sequence
  Description of Artificial Sequence: Synthetic oligonucleotide
ugucccaacgagccagguc

SEQ ID NO: 2372951 - RNA, 19 nt, Artificial Sequence
  Description of Artificial Sequence: Synthetic oligonucleotide
guucgaacgucuucucguc

SEQ ID NO: 2372952 - RNA, 19 nt, Artificial Sequence
  Description of Artificial Sequence: Synthetic oligonucleotide
aaacgucgacuauccgcgu

SEQ ID NO: 2372953 - RNA, 19 nt, Artificial Sequence
  Description of Artificial Sequence: Synthetic oligonucleotide
uccuucgccccgcgagugg

SEQ ID NO: 2372954 - RNA, 19 nt, Artificial Sequence
  Description of Artificial Sequence: Synthetic oligonucleotide
uguccccacgcucuucuau

SEQ ID NO: 2372955 - RNA, 19 nt, Artificial Sequence
  Description of Artificial Sequence: Synthetic oligonucleotide
uggcuaaacauugcacaaa

SEQ ID NO: 2372956 - RNA, 19 nt, Artificial Sequence
  Description of Artificial Sequence: Synthetic oligonucleotide
uccucgagguauccuccca

SEQ ID NO: 2372957 - RNA, 19 nt, Artificial Sequence
  Description of Artificial Sequence: Synthetic oligonucleotide
ucccuugugugacgugaca

SEQ ID NO: 2372958 - RNA, 19 nt, Artificial Sequence
  Description of Artificial Sequence: Synthetic oligonucleotide
ucacccugacgucaccguc

SEQ ID NO: 2372959 - RNA, 19 nt, Artificial Sequence
  Description of Artificial Sequence: Synthetic oligonucleotide
uagauuccucgagguaucc

SEQ ID NO: 2372960 - RNA, 19 nt, Artificial Sequence
  Description of Artificial Sequence: Synthetic oligonucleotide
uguaaacacugaggguacu

SEQ ID NO: 2372961 - RNA, 19 nt, Artificial Sequence
  Description of Artificial Sequence: Synthetic oligonucleotide
guggagacguccucccggc

SEQ ID NO: 2372962 - RNA, 19 nt, Artificial Sequence
  Description of Artificial Sequence: Synthetic oligonucleotide
gggaauagugcugccagug

SEQ ID NO: 2372963 - RNA, 19 nt, Artificial Sequence
  Description of Artificial Sequence: Synthetic oligonucleotide
accucucagcgccaccgag

SEQ ID NO: 2372964 - RNA, 19 nt, Artificial Sequence
  Description of Artificial Sequence: Synthetic oligonucleotide
aucacccugacgucaccgu

SEQ ID NO: 2372965 - RNA, 19 nt, Artificial Sequence
  Description of Artificial Sequence: Synthetic oligonucleotide
guguaaacacugaggguac

SEQ ID NO: 2372966 - RNA, 19 nt, Artificial Sequence
  Description of Artificial Sequence: Synthetic oligonucleotide
ucaccgucccuugugugac

SEQ ID NO: 2372967 - RNA, 19 nt, Artificial Sequence
  Description of Artificial Sequence: Synthetic oligonucleotide
uucucgucagguggagacc

SEQ ID NO: 2372968 - RNA, 19 nt, Artificial Sequence
  Description of Artificial Sequence: Synthetic oligonucleotide
gucaccgucccuuguguga

SEQ ID NO: 2372969 - RNA, 19 nt, Artificial Sequence
  Description of Artificial Sequence: Synthetic oligonucleotide
ggagacguccucccggcag

SEQ ID NO: 2372970 - RNA, 19 nt, Artificial Sequence
  Description of Artificial Sequence: Synthetic oligonucleotide
uuguuguuauucugcuguu

SEQ ID NO: 2372971 - RNA, 19 nt, Artificial Sequence
  Description of Artificial Sequence: Synthetic oligonucleotide
gcacacugagcauucacca

SEQ ID NO: 2372972 - RNA, 19 nt, Artificial Sequence
  Description of Artificial Sequence: Synthetic oligonucleotide
uacacugacguagcucauc

SEQ ID NO: 2372973 - RNA, 19 nt, Artificial Sequence
  Description of Artificial Sequence: Synthetic oligonucleotide
guucauacuggagcaguuc

SEQ ID NO: 2372974 - RNA, 19 nt, Artificial Sequence
  Description of Artificial Sequence: Synthetic oligonucleotide
gcggccauaaccagagagg

SEQ ID NO: 2372975 - RNA, 19 nt, Artificial Sequence
  Description of Artificial Sequence: Synthetic oligonucleotide
auucaccagcuccuuucga

SEQ ID NO: 2372976 - RNA, 19 nt, Artificial Sequence
  Description of Artificial Sequence: Synthetic oligonucleotide
ucucagcgccaccgagagg

SEQ ID NO: 2372977 - RNA, 19 nt, Artificial Sequence
  Description of Artificial Sequence: Synthetic oligonucleotide
accgcguggagacguccuc

SEQ ID NO: 2372978 - RNA, 19 nt, Artificial Sequence
  Description of Artificial Sequence: Synthetic oligonucleotide
gguuggcuaaacauugcac

SEQ ID NO: 2372979 - RNA, 19 nt, Artificial Sequence
  Description of Artificial Sequence: Synthetic oligonucleotide
guggagacgucgucccacc

SEQ ID NO: 2372980 - RNA, 19 nt, Artificial Sequence
  Description of Artificial Sequence: Synthetic oligonucleotide
acgucgucccaccgcgagg

SEQ ID NO: 2372981 - RNA, 19 nt, Artificial Sequence
  Description of Artificial Sequence: Synthetic oligonucleotide
uuuagauacuuggcauauu

SEQ ID NO: 2372982 - RNA, 19 nt, Artificial Sequence
  Description of Artificial Sequence: Synthetic oligonucleotide
guggaaagcacccgccaaa

SEQ ID NO: 2372983 - RNA, 19 nt, Artificial Sequence
  Description of Artificial Sequence: Synthetic oligonucleotide
acgucaccgucccuugugu

SEQ ID NO: 2372984 - RNA, 19 nt, Artificial Sequence
  Description of Artificial Sequence: Synthetic oligonucleotide
aacugaaaccgaagucgau

SEQ ID NO: 2372985 - RNA, 19 nt, Artificial Sequence
  Description of Artificial Sequence: Synthetic oligonucleotide
cugacgucaccgucccuug

SEQ ID NO: 2372986 - RNA, 19 nt, Artificial Sequence
  Description of Artificial Sequence: Synthetic oligonucleotide
gcgaguggaaagcacccgc

SEQ ID NO: 2372987 - RNA, 19 nt, Artificial Sequence
  Description of Artificial Sequence: Synthetic oligonucleotide
cuuuccaguaaagcaagua

SEQ ID NO: 2372988 - RNA, 19 nt, Artificial Sequence
  Description of Artificial Sequence: Synthetic oligonucleotide
gagagggacccucccugac

SEQ ID NO: 2372989 - RNA, 19 nt, Artificial Sequence
  Description of Artificial Sequence: Synthetic oligonucleotide
gguggagaccucucagcgc

SEQ ID NO: 2372990 - RNA, 19 nt, Artificial Sequence
  Description of Artificial Sequence: Synthetic oligonucleotide
gacuauccgcguggagacg

SEQ ID NO: 2372991 - RNA, 19 nt, Artificial Sequence
  Description of Artificial Sequence: Synthetic oligonucleotide
ucgucagguggagaccucu

SEQ ID NO: 2372992 - RNA, 19 nt, Artificial Sequence
  Description of Artificial Sequence: Synthetic oligonucleotide
agcaugagucuugggccuc

SEQ ID NO: 2372993 - RNA, 19 nt, Artificial Sequence
  Description of Artificial Sequence: Synthetic oligonucleotide
ucaucccaccgcguggaga

SEQ ID NO: 2372994 - RNA, 19 nt, Artificial Sequence
  Description of Artificial Sequence: Synthetic oligonucleotide
ccgaagucgauuuccagca

SEQ ID NO: 2372995 - RNA, 19 nt, Artificial Sequence
  Description of Artificial Sequence: Synthetic oligonucleotide
uccgcgaagcgacucccua

SEQ ID NO: 2372996 - RNA, 19 nt, Artificial Sequence
  Description of Artificial Sequence: Synthetic oligonucleotide
ucuucucgucagguggaga

SEQ ID NO: 2372997 - RNA, 19 nt, Artificial Sequence
  Description of Artificial Sequence: Synthetic oligonucleotide
ggagacgucgucccaccgc

SEQ ID NO: 2372998 - RNA, 19 nt, Artificial Sequence
  Description of Artificial Sequence: Synthetic oligonucleotide
gguucgaacgucuucucgu

SEQ ID NO: 2372999 - RNA, 19 nt, Artificial Sequence
  Description of Artificial Sequence: Synthetic oligonucleotide
ccgggaauagugcugccag

SEQ ID NO: 2373000 - RNA, 19 nt, Artificial Sequence
  Description of Artificial Sequence: Synthetic oligonucleotide
agcgacucccuagauuccu

SEQ ID NO: 2373001 - RNA, 19 nt, Artificial Sequence
  Description of Artificial Sequence: Synthetic oligonucleotide
gagcaugagucuugggccu

SEQ ID NO: 2373002 - RNA, 19 nt, Artificial Sequence
  Description of Artificial Sequence: Synthetic oligonucleotide
cccgcgaguggaaagcacc

SEQ ID NO: 2373003 - RNA, 19 nt, Artificial Sequence
  Description of Artificial Sequence: Synthetic oligonucleotide
cuuuagauacuuggcauau

SEQ ID NO: 2373004 - RNA, 19 nt, Artificial Sequence
  Description of Artificial Sequence: Synthetic oligonucleotide
gagaccucucagcgccacc

SEQ ID NO: 2373005 - RNA, 19 nt, Artificial Sequence
  Description of Artificial Sequence: Synthetic oligonucleotide
cugaaaccgaagucgauuu

SEQ ID NO: 2373006 - RNA, 19 nt, Artificial Sequence
  Description of Artificial Sequence: Synthetic oligonucleotide
uccgcguggagacgucguc

SEQ ID NO: 2373007 - RNA, 19 nt, Artificial Sequence
  Description of Artificial Sequence: Synthetic oligonucleotide
uccuuucgaaaguguucau

SEQ ID NO: 2373008 - RNA, 19 nt, Artificial Sequence
  Description of Artificial Sequence: Synthetic oligonucleotide
gucgacuauccgcguggag

SEQ ID NO: 2373009 - RNA, 19 nt, Artificial Sequence
  Description of Artificial Sequence: Synthetic oligonucleotide
gaggguacuuuagauacuu

SEQ ID NO: 2373010 - RNA, 19 nt, Artificial Sequence
  Description of Artificial Sequence: Synthetic oligonucleotide
ucgccccgcgaguggaaag

SEQ ID NO: 2373011 - RNA, 19 nt, Artificial Sequence
  Description of Artificial Sequence: Synthetic oligonucleotide
gcacccgccaaaggaaacg

SEQ ID NO: 2373012 - RNA, 19 nt, Artificial Sequence
  Description of Artificial Sequence: Synthetic oligonucleotide
uggagacguccucccggca

SEQ ID NO: 2373013 - RNA, 19 nt, Artificial Sequence
  Description of Artificial Sequence: Synthetic oligonucleotide
cagguucgaacgucuucuc

SEQ ID NO: 2373014 - RNA, 19 nt, Artificial Sequence
  Description of Artificial Sequence: Synthetic oligonucleotide
aaacgucaucccaccgcgu

SEQ ID NO: 2373015 - RNA, 19 nt, Artificial Sequence
  Description of Artificial Sequence: Synthetic oligonucleotide
gagaggagagagacgcgaa

SEQ ID NO: 2373016 - RNA, 19 nt, Artificial Sequence
  Description of Artificial Sequence: Synthetic oligonucleotide
gucuucucgucagguggag

SEQ ID NO: 2373017 - RNA, 19 nt, Artificial Sequence
  Description of Artificial Sequence: Synthetic oligonucleotide
gacacagagcaugagucuu

SEQ ID NO: 2373018 - RNA, 19 nt, Artificial Sequence
  Description of Artificial Sequence: Synthetic oligonucleotide
ucccaccgcguggagacgu

SEQ ID NO: 2373019 - RNA, 19 nt, Artificial Sequence
  Description of Artificial Sequence: Synthetic oligonucleotide
guaaccucuuugggcaaga

SEQ ID NO: 2373020 - RNA, 19 nt, Artificial Sequence
  Description of Artificial Sequence: Synthetic oligonucleotide
gcgaggaaacgucauccca

SEQ ID NO: 2373021 - RNA, 19 nt, Artificial Sequence
  Description of Artificial Sequence: Synthetic oligonucleotide
gccaggucuguccccacgc

SEQ ID NO: 2373022 - RNA, 19 nt, Artificial Sequence
  Description of Artificial Sequence: Synthetic oligonucleotide
uccccacgcucuucuauuu

SEQ ID NO: 2373023 - RNA, 19 nt, Artificial Sequence
  Description of Artificial Sequence: Synthetic oligonucleotide
uaaccucuuugggcaagaa

SEQ ID NO: 2373024 - RNA, 19 nt, Artificial Sequence
  Description of Artificial Sequence: Synthetic oligonucleotide
ucccggcagguucgaacgu

SEQ ID NO: 2373025 - RNA, 19 nt, Artificial Sequence
  Description of Artificial Sequence: Synthetic oligonucleotide
uucgcacacugagcauuca

SEQ ID NO: 2373026 - RNA, 19 nt, Artificial Sequence
  Description of Artificial Sequence: Synthetic oligonucleotide
acgugacacagagcaugag

SEQ ID NO: 2373027 - RNA, 19 nt, Artificial Sequence
  Description of Artificial Sequence: Synthetic oligonucleotide
ccgcgaggaaacgucaucc

SEQ ID NO: 2373028 - RNA, 19 nt, Artificial Sequence
  Description of Artificial Sequence: Synthetic oligonucleotide
gccgcggccauaaccagag

SEQ ID NO: 2373029 - RNA, 19 nt, Artificial Sequence
  Description of Artificial Sequence: Synthetic oligonucleotide
caccgagagggacccuccc

SEQ ID NO: 2373030 - RNA, 19 nt, Artificial Sequence
  Description of Artificial Sequence: Synthetic oligonucleotide
guguucauacuggagcagu

SEQ ID NO: 2373031 - RNA, 19 nt, Artificial Sequence
  Description of Artificial Sequence: Synthetic oligonucleotide
ccaguguagaaucugcugu

SEQ ID NO: 2373032 - RNA, 19 nt, Artificial Sequence
  Description of Artificial Sequence: Synthetic oligonucleotide
agcaaguacuuaagauaau

SEQ ID NO: 2373033 - RNA, 19 nt, Artificial Sequence
  Description of Artificial Sequence: Synthetic oligonucleotide
ggagcaguucuaacaugug

SEQ ID NO: 2373034 - RNA, 19 nt, Artificial Sequence
  Description of Artificial Sequence: Synthetic oligonucleotide
caguucuaacauguguaaa

SEQ ID NO: 2373035 - RNA, 19 nt, Artificial Sequence
  Description of Artificial Sequence: Synthetic oligonucleotide
gaacgucuucucgucaggu

SEQ ID NO: 2373036 - RNA, 19 nt, Artificial Sequence
  Description of Artificial Sequence: Synthetic oligonucleotide
auccuucgccccgcgagug

SEQ ID NO: 2373037 - RNA, 19 nt, Artificial Sequence
  Description of Artificial Sequence: Synthetic oligonucleotide
ggagagagacgcgaacaca

SEQ ID NO: 2373038 - RNA, 19 nt, Artificial Sequence
  Description of Artificial Sequence: Synthetic oligonucleotide
accgucccuugugugacgu

SEQ ID NO: 2373039 - RNA, 19 nt, Artificial Sequence
  Description of Artificial Sequence: Synthetic oligonucleotide
ccucgagguauccucccag

SEQ ID NO: 2373040 - RNA, 19 nt, Artificial Sequence
  Description of Artificial Sequence: Synthetic oligonucleotide
caccgucccuugugugacg

SEQ ID NO: 2373041 - RNA, 19 nt, Artificial Sequence
  Description of Artificial Sequence: Synthetic oligonucleotide
cacugagcauucaccagcu

SEQ ID NO: 2373042 - RNA, 19 nt, Artificial Sequence
  Description of Artificial Sequence: Synthetic oligonucleotide
ucccaccgcgaggaaacgu

SEQ ID NO: 2373043 - RNA, 19 nt, Artificial Sequence
  Description of Artificial Sequence: Synthetic oligonucleotide
cuauccgcguggagacguc

SEQ ID NO: 2373044 - RNA, 19 nt, Artificial Sequence
  Description of Artificial Sequence: Synthetic oligonucleotide
ucgucccaccgcgaggaaa

SEQ ID NO: 2373045 - RNA, 19 nt, Artificial Sequence
  Description of Artificial Sequence: Synthetic oligonucleotide
ccgcgaguggaaagcaccc

SEQ ID NO: 2373046 - RNA, 19 nt, Artificial Sequence
  Description of Artificial Sequence: Synthetic oligonucleotide
gcuuccgggaauagugcug

SEQ ID NO: 2373047 - RNA, 19 nt, Artificial Sequence
  Description of Artificial Sequence: Synthetic oligonucleotide
gaccucucagcgccaccga

SEQ ID NO: 2373048 - RNA, 19 nt, Artificial Sequence
  Description of Artificial Sequence: Synthetic oligonucleotide
ccgagagggacccucccug

SEQ ID NO: 2373049 - RNA, 19 nt, Artificial Sequence
  Description of Artificial Sequence: Synthetic oligonucleotide
cccuugugugacgugacac

SEQ ID NO: 2373050 - RNA, 19 nt, Artificial Sequence
  Description of Artificial Sequence: Synthetic oligonucleotide
caacuccaacugaaaccga

SEQ ID NO: 2373051 - RNA, 19 nt, Artificial Sequence
  Description of Artificial Sequence: Synthetic oligonucleotide
ggccauaaccagagaggag

SEQ ID NO: 2373052 - RNA, 19 nt, Artificial Sequence
  Description of Artificial Sequence: Synthetic oligonucleotide
cccaccgcgaggaaacguc

SEQ ID NO: 2373053 - RNA, 19 nt, Artificial Sequence
  Description of Artificial Sequence: Synthetic oligonucleotide
auccgcuuccgggaauagu

SEQ ID NO: 2373054 - RNA, 19 nt, Artificial Sequence
  Description of Artificial Sequence: Synthetic oligonucleotide
gcagguucgaacgucuucu

SEQ ID NO: 2373055 - RNA, 19 nt, Artificial Sequence
  Description of Artificial Sequence: Synthetic oligonucleotide
cgaaaguguucauacugga

SEQ ID NO: 2373056 - RNA, 19 nt, Artificial Sequence
  Description of Artificial Sequence: Synthetic oligonucleotide
cgucccaccgcgaggaaac

SEQ ID NO: 2373057 - RNA, 19 nt, Artificial Sequence
  Description of Artificial Sequence: Synthetic oligonucleotide
gucccuugugugacgugac

SEQ ID NO: 2373058 - RNA, 19 nt, Artificial Sequence
  Description of Artificial Sequence: Synthetic oligonucleotide
uucgccccgcgaguggaaa

SEQ ID NO: 2373059 - RNA, 19 nt, Artificial Sequence
  Description of Artificial Sequence: Synthetic oligonucleotide
ccucccggcagguucgaac

SEQ ID NO: 2373060 - RNA, 19 nt, Artificial Sequence
  Description of Artificial Sequence: Synthetic oligonucleotide
cucgucagguggagaccuc

SEQ ID NO: 2373061 - RNA, 19 nt, Artificial Sequence
  Description of Artificial Sequence: Synthetic oligonucleotide
ccgcuuccgggaauagugc

SEQ ID NO: 2373062 - RNA, 19 nt, Artificial Sequence
  Description of Artificial Sequence: Synthetic oligonucleotide
acgcauccgcuuccgggaa

SEQ ID NO: 2373063 - RNA, 19 nt, Artificial Sequence
  Description of Artificial Sequence: Synthetic oligonucleotide
cauccgcuuccgggaauag

SEQ ID NO: 2373064 - RNA, 19 nt, Artificial Sequence
  Description of Artificial Sequence: Synthetic oligonucleotide
caguguagaaucugcuguu

SEQ ID NO: 2373065 - RNA, 19 nt, Artificial Sequence
  Description of Artificial Sequence: Synthetic oligonucleotide
guaaacacugaggguacuu

SEQ ID NO: 2373066 - RNA, 19 nt, Artificial Sequence
  Description of Artificial Sequence: Synthetic oligonucleotide
gugugacgugacacagagc

SEQ ID NO: 2373067 - RNA, 19 nt, Artificial Sequence
  Description of Artificial Sequence: Synthetic oligonucleotide
caaaggaaacgucgacuau

SEQ ID NO: 2373068 - RNA, 19 nt, Artificial Sequence
  Description of Artificial Sequence: Synthetic oligonucleotide
gucccaccgcgaggaaacg

SEQ ID NO: 2373069 - RNA, 19 nt, Artificial Sequence
  Description of Artificial Sequence: Synthetic oligonucleotide
aggauggccucgccccuua

SEQ ID NO: 2373070 - RNA, 19 nt, Artificial Sequence
  Description of Artificial Sequence: Synthetic oligonucleotide
cgaacgucuucucgucagg

SEQ ID NO: 2373071 - RNA, 19 nt, Artificial Sequence
  Description of Artificial Sequence: Synthetic oligonucleotide
gcguggagacguccucccg

SEQ ID NO: 2373072 - RNA, 19 nt, Artificial Sequence
  Description of Artificial Sequence: Synthetic oligonucleotide
ccgcgaagcgacucccuag

SEQ ID NO: 2373073 - RNA, 19 nt, Artificial Sequence
  Description of Artificial Sequence: Synthetic oligonucleotide
cgcgaggaaacgucauccc

SEQ ID NO: 2373074 - RNA, 19 nt, Artificial Sequence
  Description of Artificial Sequence: Synthetic oligonucleotide
ccuagauuccucgagguau

SEQ ID NO: 2373075 - RNA, 19 nt, Artificial Sequence
  Description of Artificial Sequence: Synthetic oligonucleotide
aucccaccgcguggagacg

SEQ ID NO: 2373076 - RNA, 19 nt, Artificial Sequence
  Description of Artificial Sequence: Synthetic oligonucleotide
augucccaacgagccaggu

SEQ ID NO: 2373077 - RNA, 19 nt, Artificial Sequence
  Description of Artificial Sequence: Synthetic oligonucleotide
ccaccgagagggacccucc

SEQ ID NO: 2373078 - RNA, 19 nt, Artificial Sequence
  Description of Artificial Sequence: Synthetic oligonucleotide
cucuuugggcaagaaaauu

SEQ ID NO: 2373079 - RNA, 19 nt, Artificial Sequence
  Description of Artificial Sequence: Synthetic oligonucleotide
auccgcguggagacgucgu

SEQ ID NO: 2373080 - RNA, 19 nt, Artificial Sequence
  Description of Artificial Sequence: Synthetic oligonucleotide
cccuacacugacguagcuc

SEQ ID NO: 2373081 - RNA, 19 nt, Artificial Sequence
  Description of Artificial Sequence: Synthetic oligonucleotide
agacguccucccggcaggu

SEQ ID NO: 2373082 - RNA, 19 nt, Artificial Sequence
  Description of Artificial Sequence: Synthetic oligonucleotide
ccuucugaccugggugugc

SEQ ID NO: 2373083 - RNA, 19 nt, Artificial Sequence
  Description of Artificial Sequence: Synthetic oligonucleotide
cuccuccgcgaagcgacuc

SEQ ID NO: 2373084 - RNA, 19 nt, Artificial Sequence
  Description of Artificial Sequence: Synthetic oligonucleotide
gccccuacacugacguagc

SEQ ID NO: 2373085 - RNA, 19 nt, Artificial Sequence
  Description of Artificial Sequence: Synthetic oligonucleotide
cacaaccagccccuacacu

SEQ ID NO: 2373086 - RNA, 19 nt, Artificial Sequence
  Description of Artificial Sequence: Synthetic oligonucleotide
ccugaccuccuccgcgaag

SEQ ID NO: 2373087 - RNA, 19 nt, Artificial Sequence
  Description of Artificial Sequence: Synthetic oligonucleotide
gcugaagacgcauccgcuu

SEQ ID NO: 2373088 - RNA, 19 nt, Artificial Sequence
  Description of Artificial Sequence: Synthetic oligonucleotide
guccccacgcucuucuauu

SEQ ID NO: 2373089 - RNA, 19 nt, Artificial Sequence
  Description of Artificial Sequence: Synthetic oligonucleotide
cgccaaaggaaacgucgac

SEQ ID NO: 2373090 - RNA, 19 nt, Artificial Sequence
  Description of Artificial Sequence: Synthetic oligonucleotide
ggauggccucgccccuuag

SEQ ID NO: 2373091 - RNA, 19 nt, Artificial Sequence
  Description of Artificial Sequence: Synthetic oligonucleotide
cgcguggagacguccuccc

SEQ ID NO: 2373092 - RNA, 19 nt, Artificial Sequence
  Description of Artificial Sequence: Synthetic oligonucleotide
ccaguaaagcaaguacuua

SEQ ID NO: 2373093 - RNA, 19 nt, Artificial Sequence
  Description of Artificial Sequence: Synthetic oligonucleotide
ggcuugcugaagacgcauc

SEQ ID NO: 2373094 - RNA, 19 nt, Artificial Sequence
  Description of Artificial Sequence: Synthetic oligonucleotide
ccgcguggagacgucgucc

SEQ ID NO: 2373095 - RNA, 19 nt, Artificial Sequence
  Description of Artificial Sequence: Synthetic oligonucleotide
gcgaacacaaccagccccu

SEQ ID NO: 2373096 - RNA, 19 nt, Artificial Sequence
  Description of Artificial Sequence: Synthetic oligonucleotide
ggugugccagcaggauggc

SEQ ID NO: 2373097 - RNA, 19 nt, Artificial Sequence
  Description of Artificial Sequence: Synthetic oligonucleotide
cguggagacgucgucccac

SEQ ID NO: 2373098 - RNA, 19 nt, Artificial Sequence
  Description of Artificial Sequence: Synthetic oligonucleotide
ccuccgcgaagcgacuccc

SEQ ID NO: 2373099 - RNA, 19 nt, Artificial Sequence
  Description of Artificial Sequence: Synthetic oligonucleotide
ccgcguggagacguccucc

SEQ ID NO: 2373100 - RNA, 19 nt, Artificial Sequence
  Description of Artificial Sequence: Synthetic oligonucleotide
cgcgaguggaaagcacccg

SEQ ID NO: 2373101 - RNA, 19 nt, Artificial Sequence
  Description of Artificial Sequence: Synthetic oligonucleotide
cgccccuuaggaguaaauc

SEQ ID NO: 2373102 - RNA, 19 nt, Artificial Sequence
  Description of Artificial Sequence: Synthetic oligonucleotide
ccaccgcgaggaaacguca

SEQ ID NO: 2373103 - RNA, 19 nt, Artificial Sequence
  Description of Artificial Sequence: Synthetic oligonucleotide
cuacacugacguagcucau

SEQ ID NO: 2373104 - RNA, 19 nt, Artificial Sequence
  Description of Artificial Sequence: Synthetic oligonucleotide
cacccgccaaaggaaacgu

SEQ ID NO: 2373105 - RNA, 19 nt, Artificial Sequence
  Description of Artificial Sequence: Synthetic oligonucleotide
agacgucgucccaccgcga

SEQ ID NO: 2373106 - RNA, 19 nt, Artificial Sequence
  Description of Artificial Sequence: Synthetic oligonucleotide
cgucaccgucccuugugug

SEQ ID NO: 2373107 - RNA, 19 nt, Artificial Sequence
  Description of Artificial Sequence: Synthetic oligonucleotide
cuucgccccgcgaguggaa

SEQ ID NO: 2373108 - RNA, 19 nt, Artificial Sequence
  Description of Artificial Sequence: Synthetic oligonucleotide
caccgcguggagacguccu

SEQ ID NO: 2373109 - RNA, 19 nt, Artificial Sequence
  Description of Artificial Sequence: Synthetic oligonucleotide
ccaccgcguggagacgucc

SEQ ID NO: 2373110 - RNA, 19 nt, Artificial Sequence
  Description of Artificial Sequence: Synthetic oligonucleotide
gcgacucccuagauuccuc

SEQ ID NO: 2373111 - RNA, 19 nt, Artificial Sequence
  Description of Artificial Sequence: Synthetic oligonucleotide
cucgccccuuaggaguaaa

SEQ ID NO: 2373112 - RNA, 19 nt, Artificial Sequence
  Description of Artificial Sequence: Synthetic oligonucleotide
cccggcagguucgaacguc

SEQ ID NO: 2373113 - RNA, 19 nt, Artificial Sequence
  Description of Artificial Sequence: Synthetic oligonucleotide
gcauccgcuuccgggaaua

SEQ ID NO: 2373114 - RNA, 19 nt, Artificial Sequence
  Description of Artificial Sequence: Synthetic oligonucleotide
caccgcgaggaaacgucau

SEQ ID NO: 2373115 - RNA, 19 nt, Artificial Sequence
  Description of Artificial Sequence: Synthetic oligonucleotide
cccuagauuccucgaggua

SEQ ID NO: 2373116 - RNA, 19 nt, Artificial Sequence
  Description of Artificial Sequence: Synthetic oligonucleotide
cuguccccacgcucuucua

SEQ ID NO: 2373117 - RNA, 19 nt, Artificial Sequence
  Description of Artificial Sequence: Synthetic oligonucleotide
gcguggagacgucguccca

SEQ ID NO: 2373118 - RNA, 19 nt, Artificial Sequence
  Description of Artificial Sequence: Synthetic oligonucleotide
cgucgucccaccgcgagga

SEQ ID NO: 2373119 - RNA, 19 nt, Artificial Sequence
  Description of Artificial Sequence: Synthetic oligonucleotide
cuccgcgaagcgacucccu

SEQ ID NO: 2373120 - RNA, 19 nt, Artificial Sequence
  Description of Artificial Sequence: Synthetic oligonucleotide
gucgucccaccgcgaggaa

SEQ ID NO: 2373121 - RNA, 19 nt, Artificial Sequence
  Description of Artificial Sequence: Synthetic oligonucleotide
gcgacggccgcggccauaa

SEQ ID NO: 2373122 - RNA, 19 nt, Artificial Sequence
  Description of Artificial Sequence: Synthetic oligonucleotide
cgccccgcgaguggaaagc

SEQ ID NO: 2373123 - RNA, 19 nt, Artificial Sequence
  Description of Artificial Sequence: Synthetic oligonucleotide
cgagagggacccucccuga

SEQ ID NO: 2373124 - RNA, 19 nt, Artificial Sequence
  Description of Artificial Sequence: Synthetic oligonucleotide
ccugacgucaccgucccuu

SEQ ID NO: 2373125 - RNA, 19 nt, Artificial Sequence
  Description of Artificial Sequence: Synthetic oligonucleotide
gcaggauggccucgccccu

SEQ ID NO: 2373126 - RNA, 19 nt, Artificial Sequence
  Description of Artificial Sequence: Synthetic oligonucleotide
ccgucccuugugugacgug

SEQ ID NO: 2373127 - RNA, 19 nt, Artificial Sequence
  Description of Artificial Sequence: Synthetic oligonucleotide
cagccccuacacugacgua

SEQ ID NO: 2373128 - RNA, 19 nt, Artificial Sequence
  Description of Artificial Sequence: Synthetic oligonucleotide
ccggcagguucgaacgucu

SEQ ID NO: 2373129 - RNA, 19 nt, Artificial Sequence
  Description of Artificial Sequence: Synthetic oligonucleotide
gccccgcgaguggaaagca

SEQ ID NO: 2373130 - RNA, 19 nt, Artificial Sequence
  Description of Artificial Sequence: Synthetic oligonucleotide
cccaccgcguggagacguc

SEQ ID NO: 2373131 - RNA, 19 nt, Artificial Sequence
  Description of Artificial Sequence: Synthetic oligonucleotide
guccucccggcagguucga

SEQ ID NO: 2373132 - RNA, 19 nt, Artificial Sequence
  Description of Artificial Sequence: Synthetic oligonucleotide
gcaugagucuugggccucu

SEQ ID NO: 2373133 - RNA, 19 nt, Artificial Sequence
  Description of Artificial Sequence: Synthetic oligonucleotide
gcgaagcgacucccuagau

SEQ ID NO: 2373134 - RNA, 19 nt, Artificial Sequence
  Description of Artificial Sequence: Synthetic oligonucleotide
cgcuuccgggaauagugcu

SEQ ID NO: 2373135 - RNA, 19 nt, Artificial Sequence
  Description of Artificial Sequence: Synthetic oligonucleotide
gccucgccccuuaggagua

SEQ ID NO: 2373136 - RNA, 19 nt, Artificial Sequence
  Description of Artificial Sequence: Synthetic oligonucleotide
cgaagcgacucccuagauu

SEQ ID NO: 2373137 - RNA, 19 nt, Artificial Sequence
  Description of Artificial Sequence: Synthetic oligonucleotide
ggacccucccugaccuccu

SEQ ID NO: 2373138 - RNA, 19 nt, Artificial Sequence
  Description of Artificial Sequence: Synthetic oligonucleotide
cgggaauagugcugccagu

SEQ ID NO: 2373139 - RNA, 19 nt, Artificial Sequence
  Description of Artificial Sequence: Synthetic oligonucleotide
cgucgacuauccgcgugga

SEQ ID NO: 2373140 - RNA, 19 nt, Artificial Sequence
  Description of Artificial Sequence: Synthetic oligonucleotide
caggauggccucgccccuu

SEQ ID NO: 2373141 - RNA, 19 nt, Artificial Sequence
  Description of Artificial Sequence: Synthetic oligonucleotide
ccccuacacugacguagcu

SEQ ID NO: 2373142 - RNA, 19 nt, Artificial Sequence
  Description of Artificial Sequence: Synthetic oligonucleotide
ccuccuccgcgaagcgacu

SEQ ID NO: 2373143 - RNA, 19 nt, Artificial Sequence
  Description of Artificial Sequence: Synthetic oligonucleotide
ccccacgcucuucuauuuu

SEQ ID NO: 2373144 - RNA, 19 nt, Artificial Sequence
  Description of Artificial Sequence: Synthetic oligonucleotide
cgaacacaaccagccccua

SEQ ID NO: 2373145 - RNA, 19 nt, Artificial Sequence
  Description of Artificial Sequence: Synthetic oligonucleotide
ccgcggccauaaccagaga

SEQ ID NO: 2373146 - RNA, 19 nt, Artificial Sequence
  Description of Artificial Sequence: Synthetic oligonucleotide
cgacggccgcggccauaac

SEQ ID NO: 2373147 - RNA, 19 nt, Artificial Sequence
  Description of Artificial Sequence: Synthetic oligonucleotide
ccucgccccuuaggaguaa

SEQ ID NO: 2373148 - RNA, 19 nt, Artificial Sequence
  Description of Artificial Sequence: Synthetic oligonucleotide
cgcauccgcuuccgggaau

SEQ ID NO: 2373149 - RNA, 19 nt, Artificial Sequence
  Description of Artificial Sequence: Synthetic oligonucleotide
cggcagguucgaacgucuu

SEQ ID NO: 2373150 - RNA, 19 nt, Artificial Sequence
  Description of Artificial Sequence: Synthetic oligonucleotide
cccugacgucaccgucccu

SEQ ID NO: 2373151 - RNA, 19 nt, Artificial Sequence
  Description of Artificial Sequence: Synthetic oligonucleotide
aaugguuagacccaaguuc

SEQ ID NO: 2373152 - RNA, 19 nt, Artificial Sequence
  Description of Artificial Sequence: Synthetic oligonucleotide
gaugaagcaagauacaucc

SEQ ID NO: 2373153 - RNA, 19 nt, Artificial Sequence
  Description of Artificial Sequence: Synthetic oligonucleotide
aagauuaaggagcaggacu

SEQ ID NO: 2373154 - RNA, 19 nt, Artificial Sequence
  Description of Artificial Sequence: Synthetic oligonucleotide
ugaagcaagauacauccag

SEQ ID NO: 2373155 - RNA, 19 nt, Artificial Sequence
  Description of Artificial Sequence: Synthetic oligonucleotide
aaaugggguugccagaaac

SEQ ID NO: 2373156 - RNA, 19 nt, Artificial Sequence
  Description of Artificial Sequence: Synthetic oligonucleotide
aaaagaauggggccucaac

SEQ ID NO: 2373157 - RNA, 19 nt, Artificial Sequence
  Description of Artificial Sequence: Synthetic oligonucleotide
gauucuggaacaaaugggg

SEQ ID NO: 2373158 - RNA, 19 nt, Artificial Sequence
  Description of Artificial Sequence: Synthetic oligonucleotide
aaagaauggggccucaacu

SEQ ID NO: 2373159 - RNA, 19 nt, Artificial Sequence
  Description of Artificial Sequence: Synthetic oligonucleotide
aagaacaaaucucuuagaa

SEQ ID NO: 2373160 - RNA, 19 nt, Artificial Sequence
  Description of Artificial Sequence: Synthetic oligonucleotide
gauggaaguaccugggagg

SEQ ID NO: 2373161 - RNA, 19 nt, Artificial Sequence
  Description of Artificial Sequence: Synthetic oligonucleotide
ucucuuagaacgcuugucc

SEQ ID NO: 2373162 - RNA, 19 nt, Artificial Sequence
  Description of Artificial Sequence: Synthetic oligonucleotide
agauacauccagaagacac

SEQ ID NO: 2373163 - RNA, 19 nt, Artificial Sequence
  Description of Artificial Sequence: Synthetic oligonucleotide
aacuaaggcaucucauuuc

SEQ ID NO: 2373164 - RNA, 19 nt, Artificial Sequence
  Description of Artificial Sequence: Synthetic oligonucleotide
ugagauuugaguacccaug

SEQ ID NO: 2373165 - RNA, 19 nt, Artificial Sequence
  Description of Artificial Sequence: Synthetic oligonucleotide
cugggaugaagcaagauac

SEQ ID NO: 2373166 - RNA, 19 nt, Artificial Sequence
  Description of Artificial Sequence: Synthetic oligonucleotide
aacaaaucucuuagaacgc

SEQ ID NO: 2373167 - RNA, 19 nt, Artificial Sequence
  Description of Artificial Sequence: Synthetic oligonucleotide
augguuagacccaaguucc

SEQ ID NO: 2373168 - RNA, 19 nt, Artificial Sequence
  Description of Artificial Sequence: Synthetic oligonucleotide
ugcuuauggaguuuucucc

SEQ ID NO: 2373169 - RNA, 19 nt, Artificial Sequence
  Description of Artificial Sequence: Synthetic oligonucleotide
ugaaguuaggagaagggua

SEQ ID NO: 2373170 - RNA, 19 nt, Artificial Sequence
  Description of Artificial Sequence: Synthetic oligonucleotide
uccuacagccaauaugggg

SEQ ID NO: 2373171 - RNA, 19 nt, Artificial Sequence
  Description of Artificial Sequence: Synthetic oligonucleotide
aaagaacaaaucucuuaga

SEQ ID NO: 2373172 - RNA, 19 nt, Artificial Sequence
  Description of Artificial Sequence: Synthetic oligonucleotide
auuugaguacccauguugg

SEQ ID NO: 2373173 - RNA, 19 nt, Artificial Sequence
  Description of Artificial Sequence: Synthetic oligonucleotide
aaauccuugcugaaaacug

SEQ ID NO: 2373174 - RNA, 19 nt, Artificial Sequence
  Description of Artificial Sequence: Synthetic oligonucleotide
gaaggguaaggauaccaag

SEQ ID NO: 2373175 - RNA, 19 nt, Artificial Sequence
  Description of Artificial Sequence: Synthetic oligonucleotide
gucuccuauauuuccaggg

SEQ ID NO: 2373176 - RNA, 19 nt, Artificial Sequence
  Description of Artificial Sequence: Synthetic oligonucleotide
uggccaaagagaaggggcg

SEQ ID NO: 2373177 - RNA, 19 nt, Artificial Sequence
  Description of Artificial Sequence: Synthetic oligonucleotide
auuggaugauggaagauuc

SEQ ID NO: 2373178 - RNA, 19 nt, Artificial Sequence
  Description of Artificial Sequence: Synthetic oligonucleotide
ucuccuauauuuccagggc

SEQ ID NO: 2373179 - RNA, 19 nt, Artificial Sequence
  Description of Artificial Sequence: Synthetic oligonucleotide
gaugauggaagauucugga

SEQ ID NO: 2373180 - RNA, 19 nt, Artificial Sequence
  Description of Artificial Sequence: Synthetic oligonucleotide
uugaguacccauguugggg

SEQ ID NO: 2373181 - RNA, 19 nt, Artificial Sequence
  Description of Artificial Sequence: Synthetic oligonucleotide
ccuccuacagccaauaugg

SEQ ID NO: 2373182 - RNA, 19 nt, Artificial Sequence
  Description of Artificial Sequence: Synthetic oligonucleotide
aaggugguggcacccaaag

SEQ ID NO: 2373183 - RNA, 19 nt, Artificial Sequence
  Description of Artificial Sequence: Synthetic oligonucleotide
uaaccuauggcucuaugua

SEQ ID NO: 2373184 - RNA, 19 nt, Artificial Sequence
  Description of Artificial Sequence: Synthetic oligonucleotide
uccuauauuuccagggcug

SEQ ID NO: 2373185 - RNA, 19 nt, Artificial Sequence
  Description of Artificial Sequence: Synthetic oligonucleotide
ucuggaacaaaugggguug

SEQ ID NO: 2373186 - RNA, 19 nt, Artificial Sequence
  Description of Artificial Sequence: Synthetic oligonucleotide
uuagacccaaguuccagug

SEQ ID NO: 2373187 - RNA, 19 nt, Artificial Sequence
  Description of Artificial Sequence: Synthetic oligonucleotide
acuaaggcaucucauuucu

SEQ ID NO: 2373188 - RNA, 19 nt, Artificial Sequence
  Description of Artificial Sequence: Synthetic oligonucleotide
cauuucuguggccaaagag

SEQ ID NO: 2373189 - RNA, 19 nt, Artificial Sequence
  Description of Artificial Sequence: Synthetic oligonucleotide
uaaggauaccaagaaagcu

SEQ ID NO: 2373190 - RNA, 19 nt, Artificial Sequence
  Description of Artificial Sequence: Synthetic oligonucleotide
aaggcaucucauuucugug

SEQ ID NO: 2373191 - RNA, 19 nt, Artificial Sequence
  Description of Artificial Sequence: Synthetic oligonucleotide
auggaguuuucucccaagg

SEQ ID NO: 2373192 - RNA, 19 nt, Artificial Sequence
  Description of Artificial Sequence: Synthetic oligonucleotide
ccagaaaccuccuacagcc

SEQ ID NO: 2373193 - RNA, 19 nt, Artificial Sequence
  Description of Artificial Sequence: Synthetic oligonucleotide
ucuuagaacgcuuguccug

SEQ ID NO: 2373194 - RNA, 19 nt, Artificial Sequence
  Description of Artificial Sequence: Synthetic oligonucleotide
ucucccaagguccugggac

SEQ ID NO: 2373195 - RNA, 19 nt, Artificial Sequence
  Description of Artificial Sequence: Synthetic oligonucleotide
accaaccagaaccugaagu

SEQ ID NO: 2373196 - RNA, 19 nt, Artificial Sequence
  Description of Artificial Sequence: Synthetic oligonucleotide
agcaagauacauccagaag

SEQ ID NO: 2373197 - RNA, 19 nt, Artificial Sequence
  Description of Artificial Sequence: Synthetic oligonucleotide
agacauaccccucaauggu

SEQ ID NO: 2373198 - RNA, 19 nt, Artificial Sequence
  Description of Artificial Sequence: Synthetic oligonucleotide
aaaucucuuagaacgcuug

SEQ ID NO: 2373199 - RNA, 19 nt, Artificial Sequence
  Description of Artificial Sequence: Synthetic oligonucleotide
agauuaaggagcaggacug

SEQ ID NO: 2373200 - RNA, 19 nt, Artificial Sequence
  Description of Artificial Sequence: Synthetic oligonucleotide
aaucucuuagaacgcuugu

SEQ ID NO: 2373201 - RNA, 19 nt, Artificial Sequence
  Description of Artificial Sequence: Synthetic oligonucleotide
ugagaggccaggcggaaug

SEQ ID NO: 2373202 - RNA, 19 nt, Artificial Sequence
  Description of Artificial Sequence: Synthetic oligonucleotide
gacaccugagauuugagua

SEQ ID NO: 2373203 - RNA, 19 nt, Artificial Sequence
  Description of Artificial Sequence: Synthetic oligonucleotide
ugugucccaaccuggagga

SEQ ID NO: 2373204 - RNA, 19 nt, Artificial Sequence
  Description of Artificial Sequence: Synthetic oligonucleotide
aaggguaaggauaccaaga

SEQ ID NO: 2373205 - RNA, 19 nt, Artificial Sequence
  Description of Artificial Sequence: Synthetic oligonucleotide
cauccagaagacacaaaag

SEQ ID NO: 2373206 - RNA, 19 nt, Artificial Sequence
  Description of Artificial Sequence: Synthetic oligonucleotide
auggagaggggugaccucc

SEQ ID NO: 2373207 - RNA, 19 nt, Artificial Sequence
  Description of Artificial Sequence: Synthetic oligonucleotide
uccccuguuugcaggaagg

SEQ ID NO: 2373208 - RNA, 19 nt, Artificial Sequence
  Description of Artificial Sequence: Synthetic oligonucleotide
aauggagaggggugaccuc

SEQ ID NO: 2373209 - RNA, 19 nt, Artificial Sequence
  Description of Artificial Sequence: Synthetic oligonucleotide
ugcagcgucuccuauauuu

SEQ ID NO: 2373210 - RNA, 19 nt, Artificial Sequence
  Description of Artificial Sequence: Synthetic oligonucleotide
auaccaagaaagcucugcu

SEQ ID NO: 2373211 - RNA, 19 nt, Artificial Sequence
  Description of Artificial Sequence: Synthetic oligonucleotide
cuuagaacgcuuguccugc

SEQ ID NO: 2373212 - RNA, 19 nt, Artificial Sequence
  Description of Artificial Sequence: Synthetic oligonucleotide
uguaccugugucccaaccu

SEQ ID NO: 2373213 - RNA, 19 nt, Artificial Sequence
  Description of Artificial Sequence: Synthetic oligonucleotide
uguggcuucgugcccaaug

SEQ ID NO: 2373214 - RNA, 19 nt, Artificial Sequence
  Description of Artificial Sequence: Synthetic oligonucleotide
ugagccgcagacauacccc

SEQ ID NO: 2373215 - RNA, 19 nt, Artificial Sequence
  Description of Artificial Sequence: Synthetic oligonucleotide
aauauggggcagcccaacu

SEQ ID NO: 2373216 - RNA, 19 nt, Artificial Sequence
  Description of Artificial Sequence: Synthetic oligonucleotide
cccaaugccacccaggagg

SEQ ID NO: 2373217 - RNA, 19 nt, Artificial Sequence
  Description of Artificial Sequence: Synthetic oligonucleotide
uggaguuuucucccaaggu

SEQ ID NO: 2373218 - RNA, 19 nt, Artificial Sequence
  Description of Artificial Sequence: Synthetic oligonucleotide
acuuuccccuguuugcagg

SEQ ID NO: 2373219 - RNA, 19 nt, Artificial Sequence
  Description of Artificial Sequence: Synthetic oligonucleotide
ccuuauugagggcagaacc

SEQ ID NO: 2373220 - RNA, 19 nt, Artificial Sequence
  Description of Artificial Sequence: Synthetic oligonucleotide
uuaggagaaggguaaggau

SEQ ID NO: 2373221 - RNA, 19 nt, Artificial Sequence
  Description of Artificial Sequence: Synthetic oligonucleotide
accuccuacagccaauaug

SEQ ID NO: 2373222 - RNA, 19 nt, Artificial Sequence
  Description of Artificial Sequence: Synthetic oligonucleotide
aggggcugaagauuaagga

SEQ ID NO: 2373223 - RNA, 19 nt, Artificial Sequence
  Description of Artificial Sequence: Synthetic oligonucleotide
aagccucccucauuggaug

SEQ ID NO: 2373224 - RNA, 19 nt, Artificial Sequence
  Description of Artificial Sequence: Synthetic oligonucleotide
uugcuuauggaguuuucuc

SEQ ID NO: 2373225 - RNA, 19 nt, Artificial Sequence
  Description of Artificial Sequence: Synthetic oligonucleotide
cucuauguaccuguguccc

SEQ ID NO: 2373226 - RNA, 19 nt, Artificial Sequence
  Description of Artificial Sequence: Synthetic oligonucleotide
aguuaggagaaggguaagg

SEQ ID NO: 2373227 - RNA, 19 nt, Artificial Sequence
  Description of Artificial Sequence: Synthetic oligonucleotide
gaaguuaggagaaggguaa

SEQ ID NO: 2373228 - RNA, 19 nt, Artificial Sequence
  Description of Artificial Sequence: Synthetic oligonucleotide
gaucagccaagcugcaccc

SEQ ID NO: 2373229 - RNA, 19 nt, Artificial Sequence
  Description of Artificial Sequence: Synthetic oligonucleotide
ugaccaaccagaaccugaa

SEQ ID NO: 2373230 - RNA, 19 nt, Artificial Sequence
  Description of Artificial Sequence: Synthetic oligonucleotide
ugcugaaaacugcagcguc

SEQ ID NO: 2373231 - RNA, 19 nt, Artificial Sequence
  Description of Artificial Sequence: Synthetic oligonucleotide
aggguaaggauaccaagaa

SEQ ID NO: 2373232 - RNA, 19 nt, Artificial Sequence
  Description of Artificial Sequence: Synthetic oligonucleotide
gauacauccagaagacaca

SEQ ID NO: 2373233 - RNA, 19 nt, Artificial Sequence
  Description of Artificial Sequence: Synthetic oligonucleotide
ugggaccucagacuuuccc

SEQ ID NO: 2373234 - RNA, 19 nt, Artificial Sequence
  Description of Artificial Sequence: Synthetic oligonucleotide
agaaccuguggacaccuga

SEQ ID NO: 2373235 - RNA, 19 nt, Artificial Sequence
  Description of Artificial Sequence: Synthetic oligonucleotide
ggggcugaagauuaaggag

SEQ ID NO: 2373236 - RNA, 19 nt, Artificial Sequence
  Description of Artificial Sequence: Synthetic oligonucleotide
cugagccgcagacauaccc

SEQ ID NO: 2373237 - RNA, 19 nt, Artificial Sequence
  Description of Artificial Sequence: Synthetic oligonucleotide
aucucuuagaacgcuuguc

SEQ ID NO: 2373238 - RNA, 19 nt, Artificial Sequence
  Description of Artificial Sequence: Synthetic oligonucleotide
agaacgcuuguccugccug

SEQ ID NO: 2373239 - RNA, 19 nt, Artificial Sequence
  Description of Artificial Sequence: Synthetic oligonucleotide
ugcccaaugccacccagga

SEQ ID NO: 2373240 - RNA, 19 nt, Artificial Sequence
  Description of Artificial Sequence: Synthetic oligonucleotide
cucagguaaaggugguggc

SEQ ID NO: 2373241 - RNA, 19 nt, Artificial Sequence
  Description of Artificial Sequence: Synthetic oligonucleotide
guaccugugucccaaccug

SEQ ID NO: 2373242 - RNA, 19 nt, Artificial Sequence
  Description of Artificial Sequence: Synthetic oligonucleotide
gaagauuaaggagcaggac

SEQ ID NO: 2373243 - RNA, 19 nt, Artificial Sequence
  Description of Artificial Sequence: Synthetic oligonucleotide
guuaggagaaggguaagga

SEQ ID NO: 2373244 - RNA, 19 nt, Artificial Sequence
  Description of Artificial Sequence: Synthetic oligonucleotide
uauggggcagcccaacuuu

SEQ ID NO: 2373245 - RNA, 19 nt, Artificial Sequence
  Description of Artificial Sequence: Synthetic oligonucleotide
ugggaugaagcaagauaca

SEQ ID NO: 2373246 - RNA, 19 nt, Artificial Sequence
  Description of Artificial Sequence: Synthetic oligonucleotide
cucaacucccaccccaccc

SEQ ID NO: 2373247 - RNA, 19 nt, Artificial Sequence
  Description of Artificial Sequence: Synthetic oligonucleotide
agccccgguaaccuauggc

SEQ ID NO: 2373248 - RNA, 19 nt, Artificial Sequence
  Description of Artificial Sequence: Synthetic oligonucleotide
uugccagaaaccuccuaca

SEQ ID NO: 2373249 - RNA, 19 nt, Artificial Sequence
  Description of Artificial Sequence: Synthetic oligonucleotide
guaggcucagguaaaggug

SEQ ID NO: 2373250 - RNA, 19 nt, Artificial Sequence
  Description of Artificial Sequence: Synthetic oligonucleotide
aaccuguggacaccugaga

SEQ ID NO: 2373251 - RNA, 19 nt, Artificial Sequence
  Description of Artificial Sequence: Synthetic oligonucleotide
uuggaugauggaagauucu

SEQ ID NO: 2373252 - RNA, 19 nt, Artificial Sequence
  Description of Artificial Sequence: Synthetic oligonucleotide
ggcggauggaaguaccugg

SEQ ID NO: 2373253 - RNA, 19 nt, Artificial Sequence
  Description of Artificial Sequence: Synthetic oligonucleotide
guuccagugaccaaccaga

SEQ ID NO: 2373254 - RNA, 19 nt, Artificial Sequence
  Description of Artificial Sequence: Synthetic oligonucleotide
accuggaggagugacuagg

SEQ ID NO: 2373255 - RNA, 19 nt, Artificial Sequence
  Description of Artificial Sequence: Synthetic oligonucleotide
acccuccgagcccagcucc

SEQ ID NO: 2373256 - RNA, 19 nt, Artificial Sequence
  Description of Artificial Sequence: Synthetic oligonucleotide
uuccccuguuugcaggaag

SEQ ID NO: 2373257 - RNA, 19 nt, Artificial Sequence
  Description of Artificial Sequence: Synthetic oligonucleotide
ucagguaaaggugguggca

SEQ ID NO: 2373258 - RNA, 19 nt, Artificial Sequence
  Description of Artificial Sequence: Synthetic oligonucleotide
ccugaaguuaggagaaggg

SEQ ID NO: 2373259 - RNA, 19 nt, Artificial Sequence
  Description of Artificial Sequence: Synthetic oligonucleotide
gagauuugaguacccaugu

SEQ ID NO: 2373260 - RNA, 19 nt, Artificial Sequence
  Description of Artificial Sequence: Synthetic oligonucleotide
caggacuguggcuucgugc

SEQ ID NO: 2373261 - RNA, 19 nt, Artificial Sequence
  Description of Artificial Sequence: Synthetic oligonucleotide
aaguuaggagaaggguaag

SEQ ID NO: 2373262 - RNA, 19 nt, Artificial Sequence
  Description of Artificial Sequence: Synthetic oligonucleotide
acugcagcgucuccuauau

SEQ ID NO: 2373263 - RNA, 19 nt, Artificial Sequence
  Description of Artificial Sequence: Synthetic oligonucleotide
gagaaggguaaggauacca

SEQ ID NO: 2373264 - RNA, 19 nt, Artificial Sequence
  Description of Artificial Sequence: Synthetic oligonucleotide
caccccaccaacuaaggca

SEQ ID NO: 2373265 - RNA, 19 nt, Artificial Sequence
  Description of Artificial Sequence: Synthetic oligonucleotide
aaggggcggauggaaguac

SEQ ID NO: 2373266 - RNA, 19 nt, Artificial Sequence
  Description of Artificial Sequence: Synthetic oligonucleotide
gagggcagaaccuguggac

SEQ ID NO: 2373267 - RNA, 19 nt, Artificial Sequence
  Description of Artificial Sequence: Synthetic oligonucleotide
ccucauuggaugauggaag

SEQ ID NO: 2373268 - RNA, 19 nt, Artificial Sequence
  Description of Artificial Sequence: Synthetic oligonucleotide
gggcugaagauuaaggagc

SEQ ID NO: 2373269 - RNA, 19 nt, Artificial Sequence
  Description of Artificial Sequence: Synthetic oligonucleotide
ccccucaaugguuagaccc

SEQ ID NO: 2373270 - RNA, 19 nt, Artificial Sequence
  Description of Artificial Sequence: Synthetic oligonucleotide
guggcuucgugcccaaugc

SEQ ID NO: 2373271 - RNA, 19 nt, Artificial Sequence
  Description of Artificial Sequence: Synthetic oligonucleotide
gaaccugaaguuaggagaa

SEQ ID NO: 2373272 - RNA, 19 nt, Artificial Sequence
  Description of Artificial Sequence: Synthetic oligonucleotide
aaagccucccucauuggau

SEQ ID NO: 2373273 - RNA, 19 nt, Artificial Sequence
  Description of Artificial Sequence: Synthetic oligonucleotide
ucuauguaccuguguccca

SEQ ID NO: 2373274 - RNA, 19 nt, Artificial Sequence
  Description of Artificial Sequence: Synthetic oligonucleotide
aaccuggaggagugacuag

SEQ ID NO: 2373275 - RNA, 19 nt, Artificial Sequence
  Description of Artificial Sequence: Synthetic oligonucleotide
augauggaagauucuggaa

SEQ ID NO: 2373276 - RNA, 19 nt, Artificial Sequence
  Description of Artificial Sequence: Synthetic oligonucleotide
accccucaaugguuagacc

SEQ ID NO: 2373277 - RNA, 19 nt, Artificial Sequence
  Description of Artificial Sequence: Synthetic oligonucleotide
auuaaggagcaggacugug

SEQ ID NO: 2373278 - RNA, 19 nt, Artificial Sequence
  Description of Artificial Sequence: Synthetic oligonucleotide
aagccccgguaaccuaugg

SEQ ID NO: 2373279 - RNA, 19 nt, Artificial Sequence
  Description of Artificial Sequence: Synthetic oligonucleotide
cuauauuuccagggcuggg

SEQ ID NO: 2373280 - RNA, 19 nt, Artificial Sequence
  Description of Artificial Sequence: Synthetic oligonucleotide
ggagcugggaugaagcaag

SEQ ID NO: 2373281 - RNA, 19 nt, Artificial Sequence
  Description of Artificial Sequence: Synthetic oligonucleotide
uaccccucaaugguuagac

SEQ ID NO: 2373282 - RNA, 19 nt, Artificial Sequence
  Description of Artificial Sequence: Synthetic oligonucleotide
cagcgucuccuauauuucc

SEQ ID NO: 2373283 - RNA, 19 nt, Artificial Sequence
  Description of Artificial Sequence: Synthetic oligonucleotide
gcucagguaaagguggugg

SEQ ID NO: 2373284 - RNA, 19 nt, Artificial Sequence
  Description of Artificial Sequence: Synthetic oligonucleotide
ggcaucucauuucuguggc

SEQ ID NO: 2373285 - RNA, 19 nt, Artificial Sequence
  Description of Artificial Sequence: Synthetic oligonucleotide
cagcccaacuuucucuggg

SEQ ID NO: 2373286 - RNA, 19 nt, Artificial Sequence
  Description of Artificial Sequence: Synthetic oligonucleotide
cucccaagguccugggacc

SEQ ID NO: 2373287 - RNA, 19 nt, Artificial Sequence
  Description of Artificial Sequence: Synthetic oligonucleotide
aaagcucugcuugcuuaug

SEQ ID NO: 2373288 - RNA, 19 nt, Artificial Sequence
  Description of Artificial Sequence: Synthetic oligonucleotide
gccaauggcuuuucagugg

SEQ ID NO: 2373289 - RNA, 19 nt, Artificial Sequence
  Description of Artificial Sequence: Synthetic oligonucleotide
acgcuuguccugccugagc

SEQ ID NO: 2373290 - RNA, 19 nt, Artificial Sequence
  Description of Artificial Sequence: Synthetic oligonucleotide
gccaauauggggcagccca

SEQ ID NO: 2373291 - RNA, 19 nt, Artificial Sequence
  Description of Artificial Sequence: Synthetic oligonucleotide
ggcucuauguaccuguguc

SEQ ID NO: 2373292 - RNA, 19 nt, Artificial Sequence
  Description of Artificial Sequence: Synthetic oligonucleotide
ccaauggcuuuucaguggg

SEQ ID NO: 2373293 - RNA, 19 nt, Artificial Sequence
  Description of Artificial Sequence: Synthetic oligonucleotide
augggguugccagaaaccu

SEQ ID NO: 2373294 - RNA, 19 nt, Artificial Sequence
  Description of Artificial Sequence: Synthetic oligonucleotide
acgggaagccccgguaacc

SEQ ID NO: 2373295 - RNA, 19 nt, Artificial Sequence
  Description of Artificial Sequence: Synthetic oligonucleotide
cagguaaaggugguggcac

SEQ ID NO: 2373296 - RNA, 19 nt, Artificial Sequence
  Description of Artificial Sequence: Synthetic oligonucleotide
aacugcagcgucuccuaua

SEQ ID NO: 2373297 - RNA, 19 nt, Artificial Sequence
  Description of Artificial Sequence: Synthetic oligonucleotide
caccugagauuugaguacc

SEQ ID NO: 2373298 - RNA, 19 nt, Artificial Sequence
  Description of Artificial Sequence: Synthetic oligonucleotide
cuuauggaguuuucuccca

SEQ ID NO: 2373299 - RNA, 19 nt, Artificial Sequence
  Description of Artificial Sequence: Synthetic oligonucleotide
gagaaggggcggauggaag

SEQ ID NO: 2373300 - RNA, 19 nt, Artificial Sequence
  Description of Artificial Sequence: Synthetic oligonucleotide
auauggggcagcccaacuu

SEQ ID NO: 2373301 - RNA, 19 nt, Artificial Sequence
  Description of Artificial Sequence: Synthetic oligonucleotide
aagggaggccucccuccag

SEQ ID NO: 2373302 - RNA, 19 nt, Artificial Sequence
  Description of Artificial Sequence: Synthetic oligonucleotide
aaccugaaguuaggagaag

SEQ ID NO: 2373303 - RNA, 19 nt, Artificial Sequence
  Description of Artificial Sequence: Synthetic oligonucleotide
ugguuagacccaaguucca

SEQ ID NO: 2373304 - RNA, 19 nt, Artificial Sequence
  Description of Artificial Sequence: Synthetic oligonucleotide
cuccuacagccaauauggg

SEQ ID NO: 2373305 - RNA, 19 nt, Artificial Sequence
  Description of Artificial Sequence: Synthetic oligonucleotide
uggcuucgugcccaaugcc

SEQ ID NO: 2373306 - RNA, 19 nt, Artificial Sequence
  Description of Artificial Sequence: Synthetic oligonucleotide
uagaacgcuuguccugccu

SEQ ID NO: 2373307 - RNA, 19 nt, Artificial Sequence
  Description of Artificial Sequence: Synthetic oligonucleotide
cauaccccucaaugguuag

SEQ ID NO: 2373308 - RNA, 19 nt, Artificial Sequence
  Description of Artificial Sequence: Synthetic oligonucleotide
gggguugccagaaaccucc

SEQ ID NO: 2373309 - RNA, 19 nt, Artificial Sequence
  Description of Artificial Sequence: Synthetic oligonucleotide
uggcccuuauugagggcag

SEQ ID NO: 2373310 - RNA, 19 nt, Artificial Sequence
  Description of Artificial Sequence: Synthetic oligonucleotide
gcucuauguaccugugucc

SEQ ID NO: 2373311 - RNA, 19 nt, Artificial Sequence
  Description of Artificial Sequence: Synthetic oligonucleotide
cuaaggcaucucauuucug

SEQ ID NO: 2373312 - RNA, 19 nt, Artificial Sequence
  Description of Artificial Sequence: Synthetic oligonucleotide
aacgcuuguccugccugag

SEQ ID NO: 2373313 - RNA, 19 nt, Artificial Sequence
  Description of Artificial Sequence: Synthetic oligonucleotide
caucucauuucuguggcca

SEQ ID NO: 2373314 - RNA, 19 nt, Artificial Sequence
  Description of Artificial Sequence: Synthetic oligonucleotide
cuucgugcccaaugccacc

SEQ ID NO: 2373315 - RNA, 19 nt, Artificial Sequence
  Description of Artificial Sequence: Synthetic oligonucleotide
cucaaugguuagacccaag

SEQ ID NO: 2373316 - RNA, 19 nt, Artificial Sequence
  Description of Artificial Sequence: Synthetic oligonucleotide
agaaggguaaggauaccaa

SEQ ID NO: 2373317 - RNA, 19 nt, Artificial Sequence
  Description of Artificial Sequence: Synthetic oligonucleotide
uacauccagaagacacaaa

SEQ ID NO: 2373318 - RNA, 19 nt, Artificial Sequence
  Description of Artificial Sequence: Synthetic oligonucleotide
agguaggcucagguaaagg

SEQ ID NO: 2373319 - RNA, 19 nt, Artificial Sequence
  Description of Artificial Sequence: Synthetic oligonucleotide
ucccucauuggaugaugga

SEQ ID NO: 2373320 - RNA, 19 nt, Artificial Sequence
  Description of Artificial Sequence: Synthetic oligonucleotide
aggagcaggacuguggcuu

SEQ ID NO: 2373321 - RNA, 19 nt, Artificial Sequence
  Description of Artificial Sequence: Synthetic oligonucleotide
agauuugaguacccauguu

SEQ ID NO: 2373322 - RNA, 19 nt, Artificial Sequence
  Description of Artificial Sequence: Synthetic oligonucleotide
ugggguugccagaaaccuc

SEQ ID NO: 2373323 - RNA, 19 nt, Artificial Sequence
  Description of Artificial Sequence: Synthetic oligonucleotide
gaauggagaggggugaccu

SEQ ID NO: 2373324 - RNA, 19 nt, Artificial Sequence
  Description of Artificial Sequence: Synthetic oligonucleotide
ucauuggaugauggaagau

SEQ ID NO: 2373325 - RNA, 19 nt, Artificial Sequence
  Description of Artificial Sequence: Synthetic oligonucleotide
gaacgcuuguccugccuga

SEQ ID NO: 2373326 - RNA, 19 nt, Artificial Sequence
  Description of Artificial Sequence: Synthetic oligonucleotide
uauguaccugugucccaac

SEQ ID NO: 2373327 - RNA, 19 nt, Artificial Sequence
  Description of Artificial Sequence: Synthetic oligonucleotide
agggcagaaccuguggaca

SEQ ID NO: 2373328 - RNA, 19 nt, Artificial Sequence
  Description of Artificial Sequence: Synthetic oligonucleotide
uucucccaagguccuggga

SEQ ID NO: 2373329 - RNA, 19 nt, Artificial Sequence
  Description of Artificial Sequence: Synthetic oligonucleotide
gguuagacccaaguuccag

SEQ ID NO: 2373330 - RNA, 19 nt, Artificial Sequence
  Description of Artificial Sequence: Synthetic oligonucleotide
gguaggcucagguaaaggu

SEQ ID NO: 2373331 - RNA, 19 nt, Artificial Sequence
  Description of Artificial Sequence: Synthetic oligonucleotide
uguggacaccugagauuug

SEQ ID NO: 2373332 - RNA, 19 nt, Artificial Sequence
  Description of Artificial Sequence: Synthetic oligonucleotide
ggaaguaccugggagggca

SEQ ID NO: 2373333 - RNA, 19 nt, Artificial Sequence
  Description of Artificial Sequence: Synthetic oligonucleotide
gacuaggggcugaagauua

SEQ ID NO: 2373334 - RNA, 19 nt, Artificial Sequence
  Description of Artificial Sequence: Synthetic oligonucleotide
ccaggcggaauggagaggg

SEQ ID NO: 2373335 - RNA, 19 nt, Artificial Sequence
  Description of Artificial Sequence: Synthetic oligonucleotide
uggggcagcccaacuuucu

SEQ ID NO: 2373336 - RNA, 19 nt, Artificial Sequence
  Description of Artificial Sequence: Synthetic oligonucleotide
caaagccucccucauugga

SEQ ID NO: 2373337 - RNA, 19 nt, Artificial Sequence
  Description of Artificial Sequence: Synthetic oligonucleotide
guuagacccaaguuccagu

SEQ ID NO: 2373338 - RNA, 19 nt, Artificial Sequence
  Description of Artificial Sequence: Synthetic oligonucleotide
aauggggccucaacuccca

SEQ ID NO: 2373339 - RNA, 19 nt, Artificial Sequence
  Description of Artificial Sequence: Synthetic oligonucleotide
gacaggccggggcccacgg

SEQ ID NO: 2373340 - RNA, 19 nt, Artificial Sequence
  Description of Artificial Sequence: Synthetic oligonucleotide
ggaugaagcaagauacauc

SEQ ID NO: 2373341 - RNA, 19 nt, Artificial Sequence
  Description of Artificial Sequence: Synthetic oligonucleotide
gugaccaaccagaaccuga

SEQ ID NO: 2373342 - RNA, 19 nt, Artificial Sequence
  Description of Artificial Sequence: Synthetic oligonucleotide
ccuauauuuccagggcugg

SEQ ID NO: 2373343 - RNA, 19 nt, Artificial Sequence
  Description of Artificial Sequence: Synthetic oligonucleotide
gguaaaggugguggcaccc

SEQ ID NO: 2373344 - RNA, 19 nt, Artificial Sequence
  Description of Artificial Sequence: Synthetic oligonucleotide
gaagggaggccucccucca

SEQ ID NO: 2373345 - RNA, 19 nt, Artificial Sequence
  Description of Artificial Sequence: Synthetic oligonucleotide
cuggaacaaaugggguugc

SEQ ID NO: 2373346 - RNA, 19 nt, Artificial Sequence
  Description of Artificial Sequence: Synthetic oligonucleotide
gaaagcucugcuugcuuau

SEQ ID NO: 2373347 - RNA, 19 nt, Artificial Sequence
  Description of Artificial Sequence: Synthetic oligonucleotide
gcugggaugaagcaagaua

SEQ ID NO: 2373348 - RNA, 19 nt, Artificial Sequence
  Description of Artificial Sequence: Synthetic oligonucleotide
accaacuaaggcaucucau

SEQ ID NO: 2373349 - RNA, 19 nt, Artificial Sequence
  Description of Artificial Sequence: Synthetic oligonucleotide
ugguggcacccaaagccuc

SEQ ID NO: 2373350 - RNA, 19 nt, Artificial Sequence
  Description of Artificial Sequence: Synthetic oligonucleotide
agugaccaaccagaaccug

SEQ ID NO: 2373351 - RNA, 19 nt, Artificial Sequence
  Description of Artificial Sequence: Synthetic oligonucleotide
aguuuucucccaagguccu

SEQ ID NO: 2373352 - RNA, 19 nt, Artificial Sequence
  Description of Artificial Sequence: Synthetic oligonucleotide
caauauggggcagcccaac

SEQ ID NO: 2373353 - RNA, 19 nt, Artificial Sequence
  Description of Artificial Sequence: Synthetic oligonucleotide
gacccaaguuccagugacc

SEQ ID NO: 2373354 - RNA, 19 nt, Artificial Sequence
  Description of Artificial Sequence: Synthetic oligonucleotide
uccagaagggaggccuccc

SEQ ID NO: 2373355 - RNA, 19 nt, Artificial Sequence
  Description of Artificial Sequence: Synthetic oligonucleotide
uguccugccugagccgcag

SEQ ID NO: 2373356 - RNA, 19 nt, Artificial Sequence
  Description of Artificial Sequence: Synthetic oligonucleotide
gguaaccuauggcucuaug

SEQ ID NO: 2373357 - RNA, 19 nt, Artificial Sequence
  Description of Artificial Sequence: Synthetic oligonucleotide
agcgucuccuauauuucca

SEQ ID NO: 2373358 - RNA, 19 nt, Artificial Sequence
  Description of Artificial Sequence: Synthetic oligonucleotide
ccaacuuucucugggcccc

SEQ ID NO: 2373359 - RNA, 19 nt, Artificial Sequence
  Description of Artificial Sequence: Synthetic oligonucleotide
gccuaggacccuccgagcc

SEQ ID NO: 2373360 - RNA, 19 nt, Artificial Sequence
  Description of Artificial Sequence: Synthetic oligonucleotide
aaaggugguggcacccaaa

SEQ ID NO: 2373361 - RNA, 19 nt, Artificial Sequence
  Description of Artificial Sequence: Synthetic oligonucleotide
gucccaaccuggaggagug

SEQ ID NO: 2373362 - RNA, 19 nt, Artificial Sequence
  Description of Artificial Sequence: Synthetic oligonucleotide
cccaacuuucucugggccc

SEQ ID NO: 2373363 - RNA, 19 nt, Artificial Sequence
  Description of Artificial Sequence: Synthetic oligonucleotide
cucuuagaacgcuuguccu

SEQ ID NO: 2373364 - RNA, 19 nt, Artificial Sequence
  Description of Artificial Sequence: Synthetic oligonucleotide
ggaacaaaugggguugcca

SEQ ID NO: 2373365 - RNA, 19 nt, Artificial Sequence
  Description of Artificial Sequence: Synthetic oligonucleotide
gacuguggcuucgugccca

SEQ ID NO: 2373366 - RNA, 19 nt, Artificial Sequence
  Description of Artificial Sequence: Synthetic oligonucleotide
cuauguaccugugucccaa

SEQ ID NO: 2373367 - RNA, 19 nt, Artificial Sequence
  Description of Artificial Sequence: Synthetic oligonucleotide
auggggccucaacucccac

SEQ ID NO: 2373368 - RNA, 19 nt, Artificial Sequence
  Description of Artificial Sequence: Synthetic oligonucleotide
ccucccuccagguaggcuc

SEQ ID NO: 2373369 - RNA, 19 nt, Artificial Sequence
  Description of Artificial Sequence: Synthetic oligonucleotide
aggcggaauggagaggggu

SEQ ID NO: 2373370 - RNA, 19 nt, Artificial Sequence
  Description of Artificial Sequence: Synthetic oligonucleotide
acaaaagaauggggccuca

SEQ ID NO: 2373371 - RNA, 19 nt, Artificial Sequence
  Description of Artificial Sequence: Synthetic oligonucleotide
cugaaguuaggagaagggu

SEQ ID NO: 2373372 - RNA, 19 nt, Artificial Sequence
  Description of Artificial Sequence: Synthetic oligonucleotide
gugcccaaugccacccagg

SEQ ID NO: 2373373 - RNA, 19 nt, Artificial Sequence
  Description of Artificial Sequence: Synthetic oligonucleotide
caacuaaggcaucucauuu

SEQ ID NO: 2373374 - RNA, 19 nt, Artificial Sequence
  Description of Artificial Sequence: Synthetic oligonucleotide
aacuuccgccaauggcuuu

SEQ ID NO: 2373375 - RNA, 19 nt, Artificial Sequence
  Description of Artificial Sequence: Synthetic oligonucleotide
cuccuauauuuccagggcu

SEQ ID NO: 2373376 - RNA, 19 nt, Artificial Sequence
  Description of Artificial Sequence: Synthetic oligonucleotide
gugggguggcccuuauuga

SEQ ID NO: 2373377 - RNA, 19 nt, Artificial Sequence
  Description of Artificial Sequence: Synthetic oligonucleotide
cagguaggcucagguaaag

SEQ ID NO: 2373378 - RNA, 19 nt, Artificial Sequence
  Description of Artificial Sequence: Synthetic oligonucleotide
gagcaggacuguggcuucg

SEQ ID NO: 2373379 - RNA, 19 nt, Artificial Sequence
  Description of Artificial Sequence: Synthetic oligonucleotide
cacgggaagccccgguaac

SEQ ID NO: 2373380 - RNA, 19 nt, Artificial Sequence
  Description of Artificial Sequence: Synthetic oligonucleotide
cugagauuugaguacccau

SEQ ID NO: 2373381 - RNA, 19 nt, Artificial Sequence
  Description of Artificial Sequence: Synthetic oligonucleotide
agccucccucauuggauga

SEQ ID NO: 2373382 - RNA, 19 nt, Artificial Sequence
  Description of Artificial Sequence: Synthetic oligonucleotide
acauaccccucaaugguua

SEQ ID NO: 2373383 - RNA, 19 nt, Artificial Sequence
  Description of Artificial Sequence: Synthetic oligonucleotide
gcggauggaaguaccuggg

SEQ ID NO: 2373384 - RNA, 19 nt, Artificial Sequence
  Description of Artificial Sequence: Synthetic oligonucleotide
uuccgccaauggcuuuuca

SEQ ID NO: 2373385 - RNA, 19 nt, Artificial Sequence
  Description of Artificial Sequence: Synthetic oligonucleotide
augaagcaagauacaucca

SEQ ID NO: 2373386 - RNA, 19 nt, Artificial Sequence
  Description of Artificial Sequence: Synthetic oligonucleotide
gaagccccgguaaccuaug

SEQ ID NO: 2373387 - RNA, 19 nt, Artificial Sequence
  Description of Artificial Sequence: Synthetic oligonucleotide
caggcggaauggagagggg

SEQ ID NO: 2373388 - RNA, 19 nt, Artificial Sequence
  Description of Artificial Sequence: Synthetic oligonucleotide
ggccaaagagaaggggcgg

SEQ ID NO: 2373389 - RNA, 19 nt, Artificial Sequence
  Description of Artificial Sequence: Synthetic oligonucleotide
guaaaggugguggcaccca

SEQ ID NO: 2373390 - RNA, 19 nt, Artificial Sequence
  Description of Artificial Sequence: Synthetic oligonucleotide
cgcuuguccugccugagcc

SEQ ID NO: 2373391 - RNA, 19 nt, Artificial Sequence
  Description of Artificial Sequence: Synthetic oligonucleotide
cuccagaagggaggccucc

SEQ ID NO: 2373392 - RNA, 19 nt, Artificial Sequence
  Description of Artificial Sequence: Synthetic oligonucleotide
gauuaaggagcaggacugu

SEQ ID NO: 2373393 - RNA, 19 nt, Artificial Sequence
  Description of Artificial Sequence: Synthetic oligonucleotide
ccagaagacacaaaagaau

SEQ ID NO: 2373394 - RNA, 19 nt, Artificial Sequence
  Description of Artificial Sequence: Synthetic oligonucleotide
caagguccugggaccucag

SEQ ID NO: 2373395 - RNA, 19 nt, Artificial Sequence
  Description of Artificial Sequence: Synthetic oligonucleotide
caaccuggaggagugacua

SEQ ID NO: 2373396 - RNA, 19 nt, Artificial Sequence
  Description of Artificial Sequence: Synthetic oligonucleotide
cauuggaugauggaagauu

SEQ ID NO: 2373397 - RNA, 19 nt, Artificial Sequence
  Description of Artificial Sequence: Synthetic oligonucleotide
ucccugaacuuccgccaau

SEQ ID NO: 2373398 - RNA, 19 nt, Artificial Sequence
  Description of Artificial Sequence: Synthetic oligonucleotide
gagugacuaggggcugaag

SEQ ID NO: 2373399 - RNA, 19 nt, Artificial Sequence
  Description of Artificial Sequence: Synthetic oligonucleotide
auaccccucaaugguuaga

SEQ ID NO: 2373400 - RNA, 19 nt, Artificial Sequence
  Description of Artificial Sequence: Synthetic oligonucleotide
ggaauggagaggggugacc

SEQ ID NO: 2373401 - RNA, 19 nt, Artificial Sequence
  Description of Artificial Sequence: Synthetic oligonucleotide
ggcggaauggagaggggug

SEQ ID NO: 2373402 - RNA, 19 nt, Artificial Sequence
  Description of Artificial Sequence: Synthetic oligonucleotide
ggguaaggauaccaagaaa

SEQ ID NO: 2373403 - RNA, 19 nt, Artificial Sequence
  Description of Artificial Sequence: Synthetic oligonucleotide
caaugguuagacccaaguu

SEQ ID NO: 2373404 - RNA, 19 nt, Artificial Sequence
  Description of Artificial Sequence: Synthetic oligonucleotide
acuuccgccaauggcuuuu

SEQ ID NO: 2373405 - RNA, 19 nt, Artificial Sequence
  Description of Artificial Sequence: Synthetic oligonucleotide
gacccuccgagcccagcuc

SEQ ID NO: 2373406 - RNA, 19 nt, Artificial Sequence
  Description of Artificial Sequence: Synthetic oligonucleotide
acaggccggggcccacggg

SEQ ID NO: 2373407 - RNA, 19 nt, Artificial Sequence
  Description of Artificial Sequence: Synthetic oligonucleotide
cagaaaccuccuacagcca

SEQ ID NO: 2373408 - RNA, 19 nt, Artificial Sequence
  Description of Artificial Sequence: Synthetic oligonucleotide
gcaucucauuucuguggcc

SEQ ID NO: 2373409 - RNA, 19 nt, Artificial Sequence
  Description of Artificial Sequence: Synthetic oligonucleotide
gaaggggcggauggaagua

SEQ ID NO: 2373410 - RNA, 19 nt, Artificial Sequence
  Description of Artificial Sequence: Synthetic oligonucleotide
cuaggacccuccgagccca

SEQ ID NO: 2373411 - RNA, 19 nt, Artificial Sequence
  Description of Artificial Sequence: Synthetic oligonucleotide
ccuaggacccuccgagccc

SEQ ID NO: 2373412 - RNA, 19 nt, Artificial Sequence
  Description of Artificial Sequence: Synthetic oligonucleotide
aggacccuccgagcccagc

SEQ ID NO: 2373413 - RNA, 19 nt, Artificial Sequence
  Description of Artificial Sequence: Synthetic oligonucleotide
cuguggacaccugagauuu

SEQ ID NO: 2373414 - RNA, 19 nt, Artificial Sequence
  Description of Artificial Sequence: Synthetic oligonucleotide
uuuccccuguuugcaggaa

SEQ ID NO: 2373415 - RNA, 19 nt, Artificial Sequence
  Description of Artificial Sequence: Synthetic oligonucleotide
cugggaccucagacuuucc

SEQ ID NO: 2373416 - RNA, 19 nt, Artificial Sequence
  Description of Artificial Sequence: Synthetic oligonucleotide
cgccaauggcuuuucagug

SEQ ID NO: 2373417 - RNA, 19 nt, Artificial Sequence
  Description of Artificial Sequence: Synthetic oligonucleotide
gguggcacccaaagccucc

SEQ ID NO: 2373418 - RNA, 19 nt, Artificial Sequence
  Description of Artificial Sequence: Synthetic oligonucleotide
cgucuccuauauuuccagg

SEQ ID NO: 2373419 - RNA, 19 nt, Artificial Sequence
  Description of Artificial Sequence: Synthetic oligonucleotide
ggacaccugagauuugagu

SEQ ID NO: 2373420 - RNA, 19 nt, Artificial Sequence
  Description of Artificial Sequence: Synthetic oligonucleotide
ggaccucagacuuuccccu

SEQ ID NO: 2373421 - RNA, 19 nt, Artificial Sequence
  Description of Artificial Sequence: Synthetic oligonucleotide
ggcuucgugcccaaugcca

SEQ ID NO: 2373422 - RNA, 19 nt, Artificial Sequence
  Description of Artificial Sequence: Synthetic oligonucleotide
gcuucgugcccaaugccac

SEQ ID NO: 2373423 - RNA, 19 nt, Artificial Sequence
  Description of Artificial Sequence: Synthetic oligonucleotide
uccugggaccucagacuuu

SEQ ID NO: 2373424 - RNA, 19 nt, Artificial Sequence
  Description of Artificial Sequence: Synthetic oligonucleotide
gccccgguaaccuauggcu

SEQ ID NO: 2373425 - RNA, 19 nt, Artificial Sequence
  Description of Artificial Sequence: Synthetic oligonucleotide
cccucaaugguuagaccca

SEQ ID NO: 2373426 - RNA, 19 nt, Artificial Sequence
  Description of Artificial Sequence: Synthetic oligonucleotide
gaaaccuccuacagccaau

SEQ ID NO: 2373427 - RNA, 19 nt, Artificial Sequence
  Description of Artificial Sequence: Synthetic oligonucleotide
caaaagaauggggccucaa

SEQ ID NO: 2373428 - RNA, 19 nt, Artificial Sequence
  Description of Artificial Sequence: Synthetic oligonucleotide
aggccucccuccagguagg

SEQ ID NO: 2373429 - RNA, 19 nt, Artificial Sequence
  Description of Artificial Sequence: Synthetic oligonucleotide
cuggccuaggacccuccga

SEQ ID NO: 2373430 - RNA, 19 nt, Artificial Sequence
  Description of Artificial Sequence: Synthetic oligonucleotide
ccugggaccucagacuuuc

SEQ ID NO: 2373431 - RNA, 19 nt, Artificial Sequence
  Description of Artificial Sequence: Synthetic oligonucleotide
ggagaaggguaaggauacc

SEQ ID NO: 2373432 - RNA, 19 nt, Artificial Sequence
  Description of Artificial Sequence: Synthetic oligonucleotide
agccgcagacauaccccuc

SEQ ID NO: 2373433 - RNA, 19 nt, Artificial Sequence
  Description of Artificial Sequence: Synthetic oligonucleotide
ggagcaggacuguggcuuc

SEQ ID NO: 2373434 - RNA, 19 nt, Artificial Sequence
  Description of Artificial Sequence: Synthetic oligonucleotide
gcagcgucuccuauauuuc

SEQ ID NO: 2373435 - RNA, 19 nt, Artificial Sequence
  Description of Artificial Sequence: Synthetic oligonucleotide
ggagaggggugaccucccc

SEQ ID NO: 2373436 - RNA, 19 nt, Artificial Sequence
  Description of Artificial Sequence: Synthetic oligonucleotide
caaaugggguugccagaaa

SEQ ID NO: 2373437 - RNA, 19 nt, Artificial Sequence
  Description of Artificial Sequence: Synthetic oligonucleotide
gggcggauggaaguaccug

SEQ ID NO: 2373438 - RNA, 19 nt, Artificial Sequence
  Description of Artificial Sequence: Synthetic oligonucleotide
gagcugggaugaagcaaga

SEQ ID NO: 2373439 - RNA, 19 nt, Artificial Sequence
  Description of Artificial Sequence: Synthetic oligonucleotide
acuaggggcugaagauuaa

SEQ ID NO: 2373440 - RNA, 19 nt, Artificial Sequence
  Description of Artificial Sequence: Synthetic oligonucleotide
ggauaccaagaaagcucug

SEQ ID NO: 2373441 - RNA, 19 nt, Artificial Sequence
  Description of Artificial Sequence: Synthetic oligonucleotide
cccuuauugagggcagaac

SEQ ID NO: 2373442 - RNA, 19 nt, Artificial Sequence
  Description of Artificial Sequence: Synthetic oligonucleotide
gcaggacuguggcuucgug

SEQ ID NO: 2373443 - RNA, 19 nt, Artificial Sequence
  Description of Artificial Sequence: Synthetic oligonucleotide
ccccgguaaccuauggcuc

SEQ ID NO: 2373444 - RNA, 19 nt, Artificial Sequence
  Description of Artificial Sequence: Synthetic oligonucleotide
cuuccgccaauggcuuuuc

SEQ ID NO: 2373445 - RNA, 19 nt, Artificial Sequence
  Description of Artificial Sequence: Synthetic oligonucleotide
ggcucagguaaagguggug

SEQ ID NO: 2373446 - RNA, 19 nt, Artificial Sequence
  Description of Artificial Sequence: Synthetic oligonucleotide
gcugaaaacugcagcgucu

SEQ ID NO: 2373447 - RNA, 19 nt, Artificial Sequence
  Description of Artificial Sequence: Synthetic oligonucleotide
cccucauuggaugauggaa

SEQ ID NO: 2373448 - RNA, 19 nt, Artificial Sequence
  Description of Artificial Sequence: Synthetic oligonucleotide
ccccuguuugcaggaaggg

SEQ ID NO: 2373449 - RNA, 19 nt, Artificial Sequence
  Description of Artificial Sequence: Synthetic oligonucleotide
ucccaaccuggaggaguga

SEQ ID NO: 2373450 - RNA, 19 nt, Artificial Sequence
  Description of Artificial Sequence: Synthetic oligonucleotide
ccguuucccugaacuuccg

SEQ ID NO: 2373451 - RNA, 19 nt, Artificial Sequence
  Description of Artificial Sequence: Synthetic oligonucleotide
gcggaauggagagggguga

SEQ ID NO: 2373452 - RNA, 19 nt, Artificial Sequence
  Description of Artificial Sequence: Synthetic oligonucleotide
gugucccaaccuggaggag

SEQ ID NO: 2373453 - RNA, 19 nt, Artificial Sequence
  Description of Artificial Sequence: Synthetic oligonucleotide
ccucaacucccaccccacc

SEQ ID NO: 2373454 - RNA, 19 nt, Artificial Sequence
  Description of Artificial Sequence: Synthetic oligonucleotide
gggagggcagcuggccuag

SEQ ID NO: 2373455 - RNA, 19 nt, Artificial Sequence
  Description of Artificial Sequence: Synthetic oligonucleotide
cguuucccugaacuuccgc

SEQ ID NO: 2373456 - RNA, 19 nt, Artificial Sequence
  Description of Artificial Sequence: Synthetic oligonucleotide
ccgccaauggcuuuucagu

SEQ ID NO: 2373457 - RNA, 19 nt, Artificial Sequence
  Description of Artificial Sequence: Synthetic oligonucleotide
ccagguaggcucagguaaa

SEQ ID NO: 2373458 - RNA, 19 nt, Artificial Sequence
  Description of Artificial Sequence: Synthetic oligonucleotide
ccucccucauuggaugaug

SEQ ID NO: 2373459 - RNA, 19 nt, Artificial Sequence
  Description of Artificial Sequence: Synthetic oligonucleotide
ccaauauggggcagcccaa

SEQ ID NO: 2373460 - RNA, 19 nt, Artificial Sequence
  Description of Artificial Sequence: Synthetic oligonucleotide
gcuugcuuauggaguuuuc

SEQ ID NO: 2373461 - RNA, 19 nt, Artificial Sequence
  Description of Artificial Sequence: Synthetic oligonucleotide
gggcccacgggaagccccg

SEQ ID NO: 2373462 - RNA, 19 nt, Artificial Sequence
  Description of Artificial Sequence: Synthetic oligonucleotide
ccugagccgcagacauacc

SEQ ID NO: 2373463 - RNA, 19 nt, Artificial Sequence
  Description of Artificial Sequence: Synthetic oligonucleotide
gguugccagaaaccuccua

SEQ ID NO: 2373464 - RNA, 19 nt, Artificial Sequence
  Description of Artificial Sequence: Synthetic oligonucleotide
ggacccuccgagcccagcu

SEQ ID NO: 2373465 - RNA, 19 nt, Artificial Sequence
  Description of Artificial Sequence: Synthetic oligonucleotide
cgugcccaaugccacccag

SEQ ID NO: 2373466 - RNA, 19 nt, Artificial Sequence
  Description of Artificial Sequence: Synthetic oligonucleotide
ggaagccccgguaaccuau

SEQ ID NO: 2373467 - RNA, 19 nt, Artificial Sequence
  Description of Artificial Sequence: Synthetic oligonucleotide
cccgguaaccuauggcucu

SEQ ID NO: 2373468 - RNA, 19 nt, Artificial Sequence
  Description of Artificial Sequence: Synthetic oligonucleotide
cucagacuuuccccuguuu

SEQ ID NO: 2373469 - RNA, 19 nt, Artificial Sequence
  Description of Artificial Sequence: Synthetic oligonucleotide
ggaggccucccuccaggua

SEQ ID NO: 2373470 - RNA, 19 nt, Artificial Sequence
  Description of Artificial Sequence: Synthetic oligonucleotide
ccacgggaagccccgguaa

SEQ ID NO: 2373471 - RNA, 19 nt, Artificial Sequence
  Description of Artificial Sequence: Synthetic oligonucleotide
aggccggggcccacgggaa

SEQ ID NO: 2373472 - RNA, 19 nt, Artificial Sequence
  Description of Artificial Sequence: Synthetic oligonucleotide
ggcccuuauugagggcaga

SEQ ID NO: 2373473 - RNA, 19 nt, Artificial Sequence
  Description of Artificial Sequence: Synthetic oligonucleotide
ggggaucagccaagcugca

SEQ ID NO: 2373474 - RNA, 19 nt, Artificial Sequence
  Description of Artificial Sequence: Synthetic oligonucleotide
cggaauggagaggggugac

SEQ ID NO: 2373475 - RNA, 19 nt, Artificial Sequence
  Description of Artificial Sequence: Synthetic oligonucleotide
cccaccaacuaaggcaucu

SEQ ID NO: 2373476 - RNA, 19 nt, Artificial Sequence
  Description of Artificial Sequence: Synthetic oligonucleotide
ccccaccaacuaaggcauc

SEQ ID NO: 2373477 - RNA, 19 nt, Artificial Sequence
  Description of Artificial Sequence: Synthetic oligonucleotide
ccagaagggaggccucccu

SEQ ID NO: 2373478 - RNA, 19 nt, Artificial Sequence
  Description of Artificial Sequence: Synthetic oligonucleotide
cccacgggaagccccggua

SEQ ID NO: 2373479 - RNA, 19 nt, Artificial Sequence
  Description of Artificial Sequence: Synthetic oligonucleotide
ccgcagacauaccccucaa

SEQ ID NO: 2373480 - RNA, 19 nt, Artificial Sequence
  Description of Artificial Sequence: Synthetic oligonucleotide
ggguugccagaaaccuccu

SEQ ID NO: 2373481 - RNA, 19 nt, Artificial Sequence
  Description of Artificial Sequence: Synthetic oligonucleotide
ccgguaaccuauggcucua

SEQ ID NO: 2373482 - RNA, 19 nt, Artificial Sequence
  Description of Artificial Sequence: Synthetic oligonucleotide
gcugugggguggcccuuau

SEQ ID NO: 2373483 - RNA, 19 nt, Artificial Sequence
  Description of Artificial Sequence: Synthetic oligonucleotide
cugcagcgucuccuauauu

SEQ ID NO: 2373484 - RNA, 19 nt, Artificial Sequence
  Description of Artificial Sequence: Synthetic oligonucleotide
cgguaaccuauggcucuau

SEQ ID NO: 2373485 - RNA, 19 nt, Artificial Sequence
  Description of Artificial Sequence: Synthetic oligonucleotide
uuaauauccauuuaacacu

SEQ ID NO: 2373486 - RNA, 19 nt, Artificial Sequence
  Description of Artificial Sequence: Synthetic oligonucleotide
aauaguaucuuuucaaaau

SEQ ID NO: 2373487 - RNA, 19 nt, Artificial Sequence
  Description of Artificial Sequence: Synthetic oligonucleotide
uccaaaguagguaaggaag

SEQ ID NO: 2373488 - RNA, 19 nt, Artificial Sequence
  Description of Artificial Sequence: Synthetic oligonucleotide
aaauuccccaaucuggcgg

SEQ ID NO: 2373489 - RNA, 19 nt, Artificial Sequence
  Description of Artificial Sequence: Synthetic oligonucleotide
gagaguacggauccgaagg

SEQ ID NO: 2373490 - RNA, 19 nt, Artificial Sequence
  Description of Artificial Sequence: Synthetic oligonucleotide
uuaagaugagcccagggga

SEQ ID NO: 2373491 - RNA, 19 nt, Artificial Sequence
  Description of Artificial Sequence: Synthetic oligonucleotide
ucaaaauccacagggaucc

SEQ ID NO: 2373492 - RNA, 19 nt, Artificial Sequence
  Description of Artificial Sequence: Synthetic oligonucleotide
agucaguaaacacaguguc

SEQ ID NO: 2373493 - RNA, 19 nt, Artificial Sequence
  Description of Artificial Sequence: Synthetic oligonucleotide
aacagggauauuucugugg

SEQ ID NO: 2373494 - RNA, 19 nt, Artificial Sequence
  Description of Artificial Sequence: Synthetic oligonucleotide
auaaguggggcuuugggag

SEQ ID NO: 2373495 - RNA, 19 nt, Artificial Sequence
  Description of Artificial Sequence: Synthetic oligonucleotide
cuuaagaugagcccagggg

SEQ ID NO: 2373496 - RNA, 19 nt, Artificial Sequence
  Description of Artificial Sequence: Synthetic oligonucleotide
uugggagcuaguaagucgg

SEQ ID NO: 2373497 - RNA, 19 nt, Artificial Sequence
  Description of Artificial Sequence: Synthetic oligonucleotide
aaauaguaucuuuucaaaa

SEQ ID NO: 2373498 - RNA, 19 nt, Artificial Sequence
  Description of Artificial Sequence: Synthetic oligonucleotide
uuugggagcuaguaagucg

SEQ ID NO: 2373499 - RNA, 19 nt, Artificial Sequence
  Description of Artificial Sequence: Synthetic oligonucleotide
uccacagggauccagggag

SEQ ID NO: 2373500 - RNA, 19 nt, Artificial Sequence
  Description of Artificial Sequence: Synthetic oligonucleotide
acagucaguaaacacagug

SEQ ID NO: 2373501 - RNA, 19 nt, Artificial Sequence
  Description of Artificial Sequence: Synthetic oligonucleotide
cugucuaaggcucuuaccc

SEQ ID NO: 2373502 - RNA, 19 nt, Artificial Sequence
  Description of Artificial Sequence: Synthetic oligonucleotide
ucacauuugggaaugucug

SEQ ID NO: 2373503 - RNA, 19 nt, Artificial Sequence
  Description of Artificial Sequence: Synthetic oligonucleotide
acagggauauuucuguggg

SEQ ID NO: 2373504 - RNA, 19 nt, Artificial Sequence
  Description of Artificial Sequence: Synthetic oligonucleotide
gaaugucuggccuaguccc

SEQ ID NO: 2373505 - RNA, 19 nt, Artificial Sequence
  Description of Artificial Sequence: Synthetic oligonucleotide
uuuagagagacagggcugg

SEQ ID NO: 2373506 - RNA, 19 nt, Artificial Sequence
  Description of Artificial Sequence: Synthetic oligonucleotide
aagaguccaaaguagguaa

SEQ ID NO: 2373507 - RNA, 19 nt, Artificial Sequence
  Description of Artificial Sequence: Synthetic oligonucleotide
gagcuaguaagucggacgg

SEQ ID NO: 2373508 - RNA, 19 nt, Artificial Sequence
  Description of Artificial Sequence: Synthetic oligonucleotide
ugccuuuagagagacaggg

SEQ ID NO: 2373509 - RNA, 19 nt, Artificial Sequence
  Description of Artificial Sequence: Synthetic oligonucleotide
uucucuuuaauauccauuu

SEQ ID NO: 2373510 - RNA, 19 nt, Artificial Sequence
  Description of Artificial Sequence: Synthetic oligonucleotide
aaagcagggccccucagug

SEQ ID NO: 2373511 - RNA, 19 nt, Artificial Sequence
  Description of Artificial Sequence: Synthetic oligonucleotide
aauccacagggauccaggg

SEQ ID NO: 2373512 - RNA, 19 nt, Artificial Sequence
  Description of Artificial Sequence: Synthetic oligonucleotide
uaguaagucggacgguugg

SEQ ID NO: 2373513 - RNA, 19 nt, Artificial Sequence
  Description of Artificial Sequence: Synthetic oligonucleotide
aagaagaacagggauauuu

SEQ ID NO: 2373514 - RNA, 19 nt, Artificial Sequence
  Description of Artificial Sequence: Synthetic oligonucleotide
agaacagggauauuucugu

SEQ ID NO: 2373515 - RNA, 19 nt, Artificial Sequence
  Description of Artificial Sequence: Synthetic oligonucleotide
uucaaaauccacagggauc

SEQ ID NO: 2373516 - RNA, 19 nt, Artificial Sequence
  Description of Artificial Sequence: Synthetic oligonucleotide
uaagaugagcccaggggag

SEQ ID NO: 2373517 - RNA, 19 nt, Artificial Sequence
  Description of Artificial Sequence: Synthetic oligonucleotide
acauuugggaaugucuggc

SEQ ID NO: 2373518 - RNA, 19 nt, Artificial Sequence
  Description of Artificial Sequence: Synthetic oligonucleotide
uauccauuuaacacuuugu

SEQ ID NO: 2373519 - RNA, 19 nt, Artificial Sequence
  Description of Artificial Sequence: Synthetic oligonucleotide
ucuuaccccucacauuugg

SEQ ID NO: 2373520 - RNA, 19 nt, Artificial Sequence
  Description of Artificial Sequence: Synthetic oligonucleotide
uaaauuccccaaucuggcg

SEQ ID NO: 2373521 - RNA, 19 nt, Artificial Sequence
  Description of Artificial Sequence: Synthetic oligonucleotide
ccauuuaacacuuugucac

SEQ ID NO: 2373522 - RNA, 19 nt, Artificial Sequence
  Description of Artificial Sequence: Synthetic oligonucleotide
uuaacacuuugucacaaua

SEQ ID NO: 2373523 - RNA, 19 nt, Artificial Sequence
  Description of Artificial Sequence: Synthetic oligonucleotide
ugaagaagaacagggauau

SEQ ID NO: 2373524 - RNA, 19 nt, Artificial Sequence
  Description of Artificial Sequence: Synthetic oligonucleotide
cuuccccucaucaaagugc

SEQ ID NO: 2373525 - RNA, 19 nt, Artificial Sequence
  Description of Artificial Sequence: Synthetic oligonucleotide
acuguaaauuccccaaucu

SEQ ID NO: 2373526 - RNA, 19 nt, Artificial Sequence
  Description of Artificial Sequence: Synthetic oligonucleotide
guaaacacaguguccuggg

SEQ ID NO: 2373527 - RNA, 19 nt, Artificial Sequence
  Description of Artificial Sequence: Synthetic oligonucleotide
aaauccacagggauccagg

SEQ ID NO: 2373528 - RNA, 19 nt, Artificial Sequence
  Description of Artificial Sequence: Synthetic oligonucleotide
uugaccuccugccaccagg

SEQ ID NO: 2373529 - RNA, 19 nt, Artificial Sequence
  Description of Artificial Sequence: Synthetic oligonucleotide
gauaaguggggcuuuggga

SEQ ID NO: 2373530 - RNA, 19 nt, Artificial Sequence
  Description of Artificial Sequence: Synthetic oligonucleotide
ucagugaacuugaaagagu

SEQ ID NO: 2373531 - RNA, 19 nt, Artificial Sequence
  Description of Artificial Sequence: Synthetic oligonucleotide
aguuuagggagucugggaa

SEQ ID NO: 2373532 - RNA, 19 nt, Artificial Sequence
  Description of Artificial Sequence: Synthetic oligonucleotide
aagaacagggauauuucug

SEQ ID NO: 2373533 - RNA, 19 nt, Artificial Sequence
  Description of Artificial Sequence: Synthetic oligonucleotide
uaaacacaguguccugggg

SEQ ID NO: 2373534 - RNA, 19 nt, Artificial Sequence
  Description of Artificial Sequence: Synthetic oligonucleotide
agggauauuucugugggag

SEQ ID NO: 2373535 - RNA, 19 nt, Artificial Sequence
  Description of Artificial Sequence: Synthetic oligonucleotide
aaaauccacagggauccag

SEQ ID NO: 2373536 - RNA, 19 nt, Artificial Sequence
  Description of Artificial Sequence: Synthetic oligonucleotide
aaguuuagggagucuggga

SEQ ID NO: 2373537 - RNA, 19 nt, Artificial Sequence
  Description of Artificial Sequence: Synthetic oligonucleotide
cacacagucaguaaacaca

SEQ ID NO: 2373538 - RNA, 19 nt, Artificial Sequence
  Description of Artificial Sequence: Synthetic oligonucleotide
ugucuaaggcucuuacccc

SEQ ID NO: 2373539 - RNA, 19 nt, Artificial Sequence
  Description of Artificial Sequence: Synthetic oligonucleotide
agaguacggauccgaaggg

SEQ ID NO: 2373540 - RNA, 19 nt, Artificial Sequence
  Description of Artificial Sequence: Synthetic oligonucleotide
uuaccccucacauuuggga

SEQ ID NO: 2373541 - RNA, 19 nt, Artificial Sequence
  Description of Artificial Sequence: Synthetic oligonucleotide
aauuccccaaucuggcggu

SEQ ID NO: 2373542 - RNA, 19 nt, Artificial Sequence
  Description of Artificial Sequence: Synthetic oligonucleotide
ggagcuaguaagucggacg

SEQ ID NO: 2373543 - RNA, 19 nt, Artificial Sequence
  Description of Artificial Sequence: Synthetic oligonucleotide
cuuuagagagacagggcug

SEQ ID NO: 2373544 - RNA, 19 nt, Artificial Sequence
  Description of Artificial Sequence: Synthetic oligonucleotide
aaagaguccaaaguaggua

SEQ ID NO: 2373545 - RNA, 19 nt, Artificial Sequence
  Description of Artificial Sequence: Synthetic oligonucleotide
cacauuugggaaugucugg

SEQ ID NO: 2373546 - RNA, 19 nt, Artificial Sequence
  Description of Artificial Sequence: Synthetic oligonucleotide
uuccccucaucaaagugca

SEQ ID NO: 2373547 - RNA, 19 nt, Artificial Sequence
  Description of Artificial Sequence: Synthetic oligonucleotide
ugguucauucucuuuaaua

SEQ ID NO: 2373548 - RNA, 19 nt, Artificial Sequence
  Description of Artificial Sequence: Synthetic oligonucleotide
aucucagugccugaugcac

SEQ ID NO: 2373549 - RNA, 19 nt, Artificial Sequence
  Description of Artificial Sequence: Synthetic oligonucleotide
aagucggacgguuggggug

SEQ ID NO: 2373550 - RNA, 19 nt, Artificial Sequence
  Description of Artificial Sequence: Synthetic oligonucleotide
ggcuuugggagcuaguaag

SEQ ID NO: 2373551 - RNA, 19 nt, Artificial Sequence
  Description of Artificial Sequence: Synthetic oligonucleotide
gaguccaaaguagguaagg

SEQ ID NO: 2373552 - RNA, 19 nt, Artificial Sequence
  Description of Artificial Sequence: Synthetic oligonucleotide
caaguuuagggagucuggg

SEQ ID NO: 2373553 - RNA, 19 nt, Artificial Sequence
  Description of Artificial Sequence: Synthetic oligonucleotide
ggagucagggauaaguggg

SEQ ID NO: 2373554 - RNA, 19 nt, Artificial Sequence
  Description of Artificial Sequence: Synthetic oligonucleotide
agugaacuugaaagagucc

SEQ ID NO: 2373555 - RNA, 19 nt, Artificial Sequence
  Description of Artificial Sequence: Synthetic oligonucleotide
gcugccuuuagagagacag

SEQ ID NO: 2373556 - RNA, 19 nt, Artificial Sequence
  Description of Artificial Sequence: Synthetic oligonucleotide
aguaucuuuucaaaaucca

SEQ ID NO: 2373557 - RNA, 19 nt, Artificial Sequence
  Description of Artificial Sequence: Synthetic oligonucleotide
cauuugggaaugucuggcc

SEQ ID NO: 2373558 - RNA, 19 nt, Artificial Sequence
  Description of Artificial Sequence: Synthetic oligonucleotide
gacgguuggggugggaugg

SEQ ID NO: 2373559 - RNA, 19 nt, Artificial Sequence
  Description of Artificial Sequence: Synthetic oligonucleotide
uccgaagggaagccccugg

SEQ ID NO: 2373560 - RNA, 19 nt, Artificial Sequence
  Description of Artificial Sequence: Synthetic oligonucleotide
gauggggugcugaagaaga

SEQ ID NO: 2373561 - RNA, 19 nt, Artificial Sequence
  Description of Artificial Sequence: Synthetic oligonucleotide
aaggcucuuaccccucaca

SEQ ID NO: 2373562 - RNA, 19 nt, Artificial Sequence
  Description of Artificial Sequence: Synthetic oligonucleotide
ggauaaguggggcuuuggg

SEQ ID NO: 2373563 - RNA, 19 nt, Artificial Sequence
  Description of Artificial Sequence: Synthetic oligonucleotide
agguagacggccuuccccu

SEQ ID NO: 2373564 - RNA, 19 nt, Artificial Sequence
  Description of Artificial Sequence: Synthetic oligonucleotide
uuuaacacuuugucacaau

SEQ ID NO: 2373565 - RNA, 19 nt, Artificial Sequence
  Description of Artificial Sequence: Synthetic oligonucleotide
ggaaugucuggccuagucc

SEQ ID NO: 2373566 - RNA, 19 nt, Artificial Sequence
  Description of Artificial Sequence: Synthetic oligonucleotide
uuggccucuucccagccac

SEQ ID NO: 2373567 - RNA, 19 nt, Artificial Sequence
  Description of Artificial Sequence: Synthetic oligonucleotide
uaaguggggcuuugggagc

SEQ ID NO: 2373568 - RNA, 19 nt, Artificial Sequence
  Description of Artificial Sequence: Synthetic oligonucleotide
uacggauccgaagggaagc

SEQ ID NO: 2373569 - RNA, 19 nt, Artificial Sequence
  Description of Artificial Sequence: Synthetic oligonucleotide
augcacacagucaguaaac

SEQ ID NO: 2373570 - RNA, 19 nt, Artificial Sequence
  Description of Artificial Sequence: Synthetic oligonucleotide
cagcagcaaguuuagggag

SEQ ID NO: 2373571 - RNA, 19 nt, Artificial Sequence
  Description of Artificial Sequence: Synthetic oligonucleotide
aguaagucggacgguuggg

SEQ ID NO: 2373572 - RNA, 19 nt, Artificial Sequence
  Description of Artificial Sequence: Synthetic oligonucleotide
cuaguaagucggacgguug

SEQ ID NO: 2373573 - RNA, 19 nt, Artificial Sequence
  Description of Artificial Sequence: Synthetic oligonucleotide
ggcucuuugaccuccugcc

SEQ ID NO: 2373574 - RNA, 19 nt, Artificial Sequence
  Description of Artificial Sequence: Synthetic oligonucleotide
aagggaagccccuggccgu

SEQ ID NO: 2373575 - RNA, 19 nt, Artificial Sequence
  Description of Artificial Sequence: Synthetic oligonucleotide
guaagucggacgguugggg

SEQ ID NO: 2373576 - RNA, 19 nt, Artificial Sequence
  Description of Artificial Sequence: Synthetic oligonucleotide
uuuuggccucuucccagcc

SEQ ID NO: 2373577 - RNA, 19 nt, Artificial Sequence
  Description of Artificial Sequence: Synthetic oligonucleotide
cucuuugaccuccugccac

SEQ ID NO: 2373578 - RNA, 19 nt, Artificial Sequence
  Description of Artificial Sequence: Synthetic oligonucleotide
gugaacaagccccggcugc

SEQ ID NO: 2373579 - RNA, 19 nt, Artificial Sequence
  Description of Artificial Sequence: Synthetic oligonucleotide
uaagucggacgguuggggu

SEQ ID NO: 2373580 - RNA, 19 nt, Artificial Sequence
  Description of Artificial Sequence: Synthetic oligonucleotide
uuugggaaugucuggccua

SEQ ID NO: 2373581 - RNA, 19 nt, Artificial Sequence
  Description of Artificial Sequence: Synthetic oligonucleotide
uagggagucugggaaagca

SEQ ID NO: 2373582 - RNA, 19 nt, Artificial Sequence
  Description of Artificial Sequence: Synthetic oligonucleotide
uugggaaugucuggccuag

SEQ ID NO: 2373583 - RNA, 19 nt, Artificial Sequence
  Description of Artificial Sequence: Synthetic oligonucleotide
cauuuaacacuuugucaca

SEQ ID NO: 2373584 - RNA, 19 nt, Artificial Sequence
  Description of Artificial Sequence: Synthetic oligonucleotide
aguccaaaguagguaagga

SEQ ID NO: 2373585 - RNA, 19 nt, Artificial Sequence
  Description of Artificial Sequence: Synthetic oligonucleotide
acgugaacaagccccggcu

SEQ ID NO: 2373586 - RNA, 19 nt, Artificial Sequence
  Description of Artificial Sequence: Synthetic oligonucleotide
aggggagucagggauaagu

SEQ ID NO: 2373587 - RNA, 19 nt, Artificial Sequence
  Description of Artificial Sequence: Synthetic oligonucleotide
auuuaacacuuugucacaa

SEQ ID NO: 2373588 - RNA, 19 nt, Artificial Sequence
  Description of Artificial Sequence: Synthetic oligonucleotide
ggacaccuggcacaggcgg

SEQ ID NO: 2373589 - RNA, 19 nt, Artificial Sequence
  Description of Artificial Sequence: Synthetic oligonucleotide
ucagguagacggccuuccc

SEQ ID NO: 2373590 - RNA, 19 nt, Artificial Sequence
  Description of Artificial Sequence: Synthetic oligonucleotide
gaagccccuggccguaggg

SEQ ID NO: 2373591 - RNA, 19 nt, Artificial Sequence
  Description of Artificial Sequence: Synthetic oligonucleotide
cugccuuuagagagacagg

SEQ ID NO: 2373592 - RNA, 19 nt, Artificial Sequence
  Description of Artificial Sequence: Synthetic oligonucleotide
gugccugaugcacacaguc

SEQ ID NO: 2373593 - RNA, 19 nt, Artificial Sequence
  Description of Artificial Sequence: Synthetic oligonucleotide
agucggacgguuggggugg

SEQ ID NO: 2373594 - RNA, 19 nt, Artificial Sequence
  Description of Artificial Sequence: Synthetic oligonucleotide
cagguagacggccuucccc

SEQ ID NO: 2373595 - RNA, 19 nt, Artificial Sequence
  Description of Artificial Sequence: Synthetic oligonucleotide
gggauauuucugugggagg

SEQ ID NO: 2373596 - RNA, 19 nt, Artificial Sequence
  Description of Artificial Sequence: Synthetic oligonucleotide
ugaugcacacagucaguaa

SEQ ID NO: 2373597 - RNA, 19 nt, Artificial Sequence
  Description of Artificial Sequence: Synthetic oligonucleotide
ugaacaagccccggcugcc

SEQ ID NO: 2373598 - RNA, 19 nt, Artificial Sequence
  Description of Artificial Sequence: Synthetic oligonucleotide
acggauccgaagggaagcc

SEQ ID NO: 2373599 - RNA, 19 nt, Artificial Sequence
  Description of Artificial Sequence: Synthetic oligonucleotide
uuugaccuccugccaccag

SEQ ID NO: 2373600 - RNA, 19 nt, Artificial Sequence
  Description of Artificial Sequence: Synthetic oligonucleotide
uggccguaggggcagcagc

SEQ ID NO: 2373601 - RNA, 19 nt, Artificial Sequence
  Description of Artificial Sequence: Synthetic oligonucleotide
ucagggauaaguggggcuu

SEQ ID NO: 2373602 - RNA, 19 nt, Artificial Sequence
  Description of Artificial Sequence: Synthetic oligonucleotide
ucuaaggcucuuaccccuc

SEQ ID NO: 2373603 - RNA, 19 nt, Artificial Sequence
  Description of Artificial Sequence: Synthetic oligonucleotide
aagaugagcccaggggaga

SEQ ID NO: 2373604 - RNA, 19 nt, Artificial Sequence
  Description of Artificial Sequence: Synthetic oligonucleotide
ugaccuccugccaccaggu

SEQ ID NO: 2373605 - RNA, 19 nt, Artificial Sequence
  Description of Artificial Sequence: Synthetic oligonucleotide
ggagaguacggauccgaag

SEQ ID NO: 2373606 - RNA, 19 nt, Artificial Sequence
  Description of Artificial Sequence: Synthetic oligonucleotide
cuggccuagucccaggcuc

SEQ ID NO: 2373607 - RNA, 19 nt, Artificial Sequence
  Description of Artificial Sequence: Synthetic oligonucleotide
cacgugaacaagccccggc

SEQ ID NO: 2373608 - RNA, 19 nt, Artificial Sequence
  Description of Artificial Sequence: Synthetic oligonucleotide
uagucccaggcucuuugac

SEQ ID NO: 2373609 - RNA, 19 nt, Artificial Sequence
  Description of Artificial Sequence: Synthetic oligonucleotide
gcagccuuaagaugagccc

SEQ ID NO: 2373610 - RNA, 19 nt, Artificial Sequence
  Description of Artificial Sequence: Synthetic oligonucleotide
gagacagggcuggagcaag

SEQ ID NO: 2373611 - RNA, 19 nt, Artificial Sequence
  Description of Artificial Sequence: Synthetic oligonucleotide
aggcucuuaccccucacau

SEQ ID NO: 2373612 - RNA, 19 nt, Artificial Sequence
  Description of Artificial Sequence: Synthetic oligonucleotide
ccaucucagugccugaugc

SEQ ID NO: 2373613 - RNA, 19 nt, Artificial Sequence
  Description of Artificial Sequence: Synthetic oligonucleotide
gguccagcccaucucagug

SEQ ID NO: 2373614 - RNA, 19 nt, Artificial Sequence
  Description of Artificial Sequence: Synthetic oligonucleotide
gggagucugggaaagcagg

SEQ ID NO: 2373615 - RNA, 19 nt, Artificial Sequence
  Description of Artificial Sequence: Synthetic oligonucleotide
ucuggccuagucccaggcu

SEQ ID NO: 2373616 - RNA, 19 nt, Artificial Sequence
  Description of Artificial Sequence: Synthetic oligonucleotide
gaaagaguccaaaguaggu

SEQ ID NO: 2373617 - RNA, 19 nt, Artificial Sequence
  Description of Artificial Sequence: Synthetic oligonucleotide
agcagggccccucagugaa

SEQ ID NO: 2373618 - RNA, 19 nt, Artificial Sequence
  Description of Artificial Sequence: Synthetic oligonucleotide
cuuugggagcuaguaaguc

SEQ ID NO: 2373619 - RNA, 19 nt, Artificial Sequence
  Description of Artificial Sequence: Synthetic oligonucleotide
caguuucagguagacggcc

SEQ ID NO: 2373620 - RNA, 19 nt, Artificial Sequence
  Description of Artificial Sequence: Synthetic oligonucleotide
aagcagggccccucaguga

SEQ ID NO: 2373621 - RNA, 19 nt, Artificial Sequence
  Description of Artificial Sequence: Synthetic oligonucleotide
ggauauuucugugggagga

SEQ ID NO: 2373622 - RNA, 19 nt, Artificial Sequence
  Description of Artificial Sequence: Synthetic oligonucleotide
ggcagccuuaagaugagcc

SEQ ID NO: 2373623 - RNA, 19 nt, Artificial Sequence
  Description of Artificial Sequence: Synthetic oligonucleotide
guuuagggagucugggaaa

SEQ ID NO: 2373624 - RNA, 19 nt, Artificial Sequence
  Description of Artificial Sequence: Synthetic oligonucleotide
aaugucuggccuaguccca

SEQ ID NO: 2373625 - RNA, 19 nt, Artificial Sequence
  Description of Artificial Sequence: Synthetic oligonucleotide
uggggugcugaagaagaac

SEQ ID NO: 2373626 - RNA, 19 nt, Artificial Sequence
  Description of Artificial Sequence: Synthetic oligonucleotide
auccacagggauccaggga

SEQ ID NO: 2373627 - RNA, 19 nt, Artificial Sequence
  Description of Artificial Sequence: Synthetic oligonucleotide
guacggauccgaagggaag

SEQ ID NO: 2373628 - RNA, 19 nt, Artificial Sequence
  Description of Artificial Sequence: Synthetic oligonucleotide
gcaaguuuagggagucugg

SEQ ID NO: 2373629 - RNA, 19 nt, Artificial Sequence
  Description of Artificial Sequence: Synthetic oligonucleotide
ccuuaagaugagcccaggg

SEQ ID NO: 2373630 - RNA, 19 nt, Artificial Sequence
  Description of Artificial Sequence: Synthetic oligonucleotide
uggccuagucccaggcucu

SEQ ID NO: 2373631 - RNA, 19 nt, Artificial Sequence
  Description of Artificial Sequence: Synthetic oligonucleotide
agaugagcccaggggagag

SEQ ID NO: 2373632 - RNA, 19 nt, Artificial Sequence
  Description of Artificial Sequence: Synthetic oligonucleotide
ggagucugggaaagcaggg

SEQ ID NO: 2373633 - RNA, 19 nt, Artificial Sequence
  Description of Artificial Sequence: Synthetic oligonucleotide
cccggcugccuuuagagag

SEQ ID NO: 2373634 - RNA, 19 nt, Artificial Sequence
  Description of Artificial Sequence: Synthetic oligonucleotide
aguacggauccgaagggaa

SEQ ID NO: 2373635 - RNA, 19 nt, Artificial Sequence
  Description of Artificial Sequence: Synthetic oligonucleotide
cuggcacaggcggagcugg

SEQ ID NO: 2373636 - RNA, 19 nt, Artificial Sequence
  Description of Artificial Sequence: Synthetic oligonucleotide
guccagcccaucucagugc

SEQ ID NO: 2373637 - RNA, 19 nt, Artificial Sequence
  Description of Artificial Sequence: Synthetic oligonucleotide
agcccggacaccuggcaca

SEQ ID NO: 2373638 - RNA, 19 nt, Artificial Sequence
  Description of Artificial Sequence: Synthetic oligonucleotide
cagucaguaaacacagugu

SEQ ID NO: 2373639 - RNA, 19 nt, Artificial Sequence
  Description of Artificial Sequence: Synthetic oligonucleotide
agccuuaagaugagcccag

SEQ ID NO: 2373640 - RNA, 19 nt, Artificial Sequence
  Description of Artificial Sequence: Synthetic oligonucleotide
augguucauucucuuuaau

SEQ ID NO: 2373641 - RNA, 19 nt, Artificial Sequence
  Description of Artificial Sequence: Synthetic oligonucleotide
agggagucugggaaagcag

SEQ ID NO: 2373642 - RNA, 19 nt, Artificial Sequence
  Description of Artificial Sequence: Synthetic oligonucleotide
ugggagcuaguaagucgga

SEQ ID NO: 2373643 - RNA, 19 nt, Artificial Sequence
  Description of Artificial Sequence: Synthetic oligonucleotide
agcagcaaguuuagggagu

SEQ ID NO: 2373644 - RNA, 19 nt, Artificial Sequence
  Description of Artificial Sequence: Synthetic oligonucleotide
gucccaggcucuuugaccu

SEQ ID NO: 2373645 - RNA, 19 nt, Artificial Sequence
  Description of Artificial Sequence: Synthetic oligonucleotide
cagccuuaagaugagccca

SEQ ID NO: 2373646 - RNA, 19 nt, Artificial Sequence
  Description of Artificial Sequence: Synthetic oligonucleotide
gcaagcagcagcaaguuua

SEQ ID NO: 2373647 - RNA, 19 nt, Artificial Sequence
  Description of Artificial Sequence: Synthetic oligonucleotide
ccugucuaaggcucuuacc

SEQ ID NO: 2373648 - RNA, 19 nt, Artificial Sequence
  Description of Artificial Sequence: Synthetic oligonucleotide
gucuggccuagucccaggc

SEQ ID NO: 2373649 - RNA, 19 nt, Artificial Sequence
  Description of Artificial Sequence: Synthetic oligonucleotide
ggauccgaagggaagcccc

SEQ ID NO: 2373650 - RNA, 19 nt, Artificial Sequence
  Description of Artificial Sequence: Synthetic oligonucleotide
gucuaaggcucuuaccccu

SEQ ID NO: 2373651 - RNA, 19 nt, Artificial Sequence
  Description of Artificial Sequence: Synthetic oligonucleotide
agacagggcuggagcaagc

SEQ ID NO: 2373652 - RNA, 19 nt, Artificial Sequence
  Description of Artificial Sequence: Synthetic oligonucleotide
acaccuggcacaggcggag

SEQ ID NO: 2373653 - RNA, 19 nt, Artificial Sequence
  Description of Artificial Sequence: Synthetic oligonucleotide
aacaagccccggcugccuu

SEQ ID NO: 2373654 - RNA, 19 nt, Artificial Sequence
  Description of Artificial Sequence: Synthetic oligonucleotide
cucuuaccccucacauuug

SEQ ID NO: 2373655 - RNA, 19 nt, Artificial Sequence
  Description of Artificial Sequence: Synthetic oligonucleotide
aauauccauuuaacacuuu

SEQ ID NO: 2373656 - RNA, 19 nt, Artificial Sequence
  Description of Artificial Sequence: Synthetic oligonucleotide
cagcagcccggacaccugg

SEQ ID NO: 2373657 - RNA, 19 nt, Artificial Sequence
  Description of Artificial Sequence: Synthetic oligonucleotide
ugagcccaggggagaguac

SEQ ID NO: 2373658 - RNA, 19 nt, Artificial Sequence
  Description of Artificial Sequence: Synthetic oligonucleotide
ggggagucagggauaagug

SEQ ID NO: 2373659 - RNA, 19 nt, Artificial Sequence
  Description of Artificial Sequence: Synthetic oligonucleotide
ggauccagggaggagccug

SEQ ID NO: 2373660 - RNA, 19 nt, Artificial Sequence
  Description of Artificial Sequence: Synthetic oligonucleotide
ccuuuagagagacagggcu

SEQ ID NO: 2373661 - RNA, 19 nt, Artificial Sequence
  Description of Artificial Sequence: Synthetic oligonucleotide
gcucuuaccccucacauuu

SEQ ID NO: 2373662 - RNA, 19 nt, Artificial Sequence
  Description of Artificial Sequence: Synthetic oligonucleotide
gccccggcugccuuuagag

SEQ ID NO: 2373663 - RNA, 19 nt, Artificial Sequence
  Description of Artificial Sequence: Synthetic oligonucleotide
ccggacaccuggcacaggc

SEQ ID NO: 2373664 - RNA, 19 nt, Artificial Sequence
  Description of Artificial Sequence: Synthetic oligonucleotide
guagacggccuuccccuca

SEQ ID NO: 2373665 - RNA, 19 nt, Artificial Sequence
  Description of Artificial Sequence: Synthetic oligonucleotide
gggugcugaagaagaacag

SEQ ID NO: 2373666 - RNA, 19 nt, Artificial Sequence
  Description of Artificial Sequence: Synthetic oligonucleotide
agggauaaguggggcuuug

SEQ ID NO: 2373667 - RNA, 19 nt, Artificial Sequence
  Description of Artificial Sequence: Synthetic oligonucleotide
ccuagucccaggcucuuug

SEQ ID NO: 2373668 - RNA, 19 nt, Artificial Sequence
  Description of Artificial Sequence: Synthetic oligonucleotide
cugaugcacacagucagua

SEQ ID NO: 2373669 - RNA, 19 nt, Artificial Sequence
  Description of Artificial Sequence: Synthetic oligonucleotide
agcagcccggacaccuggc

SEQ ID NO: 2373670 - RNA, 19 nt, Artificial Sequence
  Description of Artificial Sequence: Synthetic oligonucleotide
cuagucccaggcucuuuga

SEQ ID NO: 2373671 - RNA, 19 nt, Artificial Sequence
  Description of Artificial Sequence: Synthetic oligonucleotide
uggggcuuugggagcuagu

SEQ ID NO: 2373672 - RNA, 19 nt, Artificial Sequence
  Description of Artificial Sequence: Synthetic oligonucleotide
cacaggcggagcugggguc

SEQ ID NO: 2373673 - RNA, 19 nt, Artificial Sequence
  Description of Artificial Sequence: Synthetic oligonucleotide
cuaaggcucuuaccccuca

SEQ ID NO: 2373674 - RNA, 19 nt, Artificial Sequence
  Description of Artificial Sequence: Synthetic oligonucleotide
ugggaaagcagggccccuc

SEQ ID NO: 2373675 - RNA, 19 nt, Artificial Sequence
  Description of Artificial Sequence: Synthetic oligonucleotide
gggauaaguggggcuuugg

SEQ ID NO: 2373676 - RNA, 19 nt, Artificial Sequence
  Description of Artificial Sequence: Synthetic oligonucleotide
gguccaggggagcuugcug

SEQ ID NO: 2373677 - RNA, 19 nt, Artificial Sequence
  Description of Artificial Sequence: Synthetic oligonucleotide
gucagggauaaguggggcu

SEQ ID NO: 2373678 - RNA, 19 nt, Artificial Sequence
  Description of Artificial Sequence: Synthetic oligonucleotide
aggggagaguacggauccg

SEQ ID NO: 2373679 - RNA, 19 nt, Artificial Sequence
  Description of Artificial Sequence: Synthetic oligonucleotide
ggacgguuggggugggaug

SEQ ID NO: 2373680 - RNA, 19 nt, Artificial Sequence
  Description of Artificial Sequence: Synthetic oligonucleotide
cagggauauuucuguggga

SEQ ID NO: 2373681 - RNA, 19 nt, Artificial Sequence
  Description of Artificial Sequence: Synthetic oligonucleotide
agcuaguaagucggacggu

SEQ ID NO: 2373682 - RNA, 19 nt, Artificial Sequence
  Description of Artificial Sequence: Synthetic oligonucleotide
augagcccaggggagagua

SEQ ID NO: 2373683 - RNA, 19 nt, Artificial Sequence
  Description of Artificial Sequence: Synthetic oligonucleotide
gcuggagcaagcagcagca

SEQ ID NO: 2373684 - RNA, 19 nt, Artificial Sequence
  Description of Artificial Sequence: Synthetic oligonucleotide
ccuuccccucaucaaagug

SEQ ID NO: 2373685 - RNA, 19 nt, Artificial Sequence
  Description of Artificial Sequence: Synthetic oligonucleotide
gccugucuaaggcucuuac

SEQ ID NO: 2373686 - RNA, 19 nt, Artificial Sequence
  Description of Artificial Sequence: Synthetic oligonucleotide
gagcugggguccaggggag

SEQ ID NO: 2373687 - RNA, 19 nt, Artificial Sequence
  Description of Artificial Sequence: Synthetic oligonucleotide
cagcccggacaccuggcac

SEQ ID NO: 2373688 - RNA, 19 nt, Artificial Sequence
  Description of Artificial Sequence: Synthetic oligonucleotide
auuccccaaucuggcgguc

SEQ ID NO: 2373689 - RNA, 19 nt, Artificial Sequence
  Description of Artificial Sequence: Synthetic oligonucleotide
gccuuuagagagacagggc

SEQ ID NO: 2373690 - RNA, 19 nt, Artificial Sequence
  Description of Artificial Sequence: Synthetic oligonucleotide
aagccccggcugccuuuag

SEQ ID NO: 2373691 - RNA, 19 nt, Artificial Sequence
  Description of Artificial Sequence: Synthetic oligonucleotide
auccgaagggaagccccug

SEQ ID NO: 2373692 - RNA, 19 nt, Artificial Sequence
  Description of Artificial Sequence: Synthetic oligonucleotide
acgguuggggugggauggg

SEQ ID NO: 2373693 - RNA, 19 nt, Artificial Sequence
  Description of Artificial Sequence: Synthetic oligonucleotide
agccccggcugccuuuaga

SEQ ID NO: 2373694 - RNA, 19 nt, Artificial Sequence
  Description of Artificial Sequence: Synthetic oligonucleotide
ggcacaggcggagcugggg

SEQ ID NO: 2373695 - RNA, 19 nt, Artificial Sequence
  Description of Artificial Sequence: Synthetic oligonucleotide
gcagcaaguuuagggaguc

SEQ ID NO: 2373696 - RNA, 19 nt, Artificial Sequence
  Description of Artificial Sequence: Synthetic oligonucleotide
agcccaucucagugccuga

SEQ ID NO: 2373697 - RNA, 19 nt, Artificial Sequence
  Description of Artificial Sequence: Synthetic oligonucleotide
ggccguaggggcagcagcc

SEQ ID NO: 2373698 - RNA, 19 nt, Artificial Sequence
  Description of Artificial Sequence: Synthetic oligonucleotide
acaagccccggcugccuuu

SEQ ID NO: 2373699 - RNA, 19 nt, Artificial Sequence
  Description of Artificial Sequence: Synthetic oligonucleotide
gcucuuugaccuccugcca

SEQ ID NO: 2373700 - RNA, 19 nt, Artificial Sequence
  Description of Artificial Sequence: Synthetic oligonucleotide
gggagcuaguaagucggac

SEQ ID NO: 2373701 - RNA, 19 nt, Artificial Sequence
  Description of Artificial Sequence: Synthetic oligonucleotide
caggcucuuugaccuccug

SEQ ID NO: 2373702 - RNA, 19 nt, Artificial Sequence
  Description of Artificial Sequence: Synthetic oligonucleotide
cuggccguaggggcagcag

SEQ ID NO: 2373703 - RNA, 19 nt, Artificial Sequence
  Description of Artificial Sequence: Synthetic oligonucleotide
gccuuaagaugagcccagg

SEQ ID NO: 2373704 - RNA, 19 nt, Artificial Sequence
  Description of Artificial Sequence: Synthetic oligonucleotide
ccgaagggaagccccuggc

SEQ ID NO: 2373705 - RNA, 19 nt, Artificial Sequence
  Description of Artificial Sequence: Synthetic oligonucleotide
gauccgaagggaagccccu

SEQ ID NO: 2373706 - RNA, 19 nt, Artificial Sequence
  Description of Artificial Sequence: Synthetic oligonucleotide
cuucccagccacucacugu

SEQ ID NO: 2373707 - RNA, 19 nt, Artificial Sequence
  Description of Artificial Sequence: Synthetic oligonucleotide
cguaggggcagcagcccgg

SEQ ID NO: 2373708 - RNA, 19 nt, Artificial Sequence
  Description of Artificial Sequence: Synthetic oligonucleotide
gaccuccugccaccagguc

SEQ ID NO: 2373709 - RNA, 19 nt, Artificial Sequence
  Description of Artificial Sequence: Synthetic oligonucleotide
ucccaggcucuuugaccuc

SEQ ID NO: 2373710 - RNA, 19 nt, Artificial Sequence
  Description of Artificial Sequence: Synthetic oligonucleotide
gggccccucagugaacuug

SEQ ID NO: 2373711 - RNA, 19 nt, Artificial Sequence
  Description of Artificial Sequence: Synthetic oligonucleotide
cagggaggagccugucuaa

SEQ ID NO: 2373712 - RNA, 19 nt, Artificial Sequence
  Description of Artificial Sequence: Synthetic oligonucleotide
cacagggauccagggagga

SEQ ID NO: 2373713 - RNA, 19 nt, Artificial Sequence
  Description of Artificial Sequence: Synthetic oligonucleotide
gggcuuugggagcuaguaa

SEQ ID NO: 2373714 - RNA, 19 nt, Artificial Sequence
  Description of Artificial Sequence: Synthetic oligonucleotide
ggggagaguacggauccga

SEQ ID NO: 2373715 - RNA, 19 nt, Artificial Sequence
  Description of Artificial Sequence: Synthetic oligonucleotide
ugggaaugucuggccuagu

SEQ ID NO: 2373716 - RNA, 19 nt, Artificial Sequence
  Description of Artificial Sequence: Synthetic oligonucleotide
gauccagggaggagccugu

SEQ ID NO: 2373717 - RNA, 19 nt, Artificial Sequence
  Description of Artificial Sequence: Synthetic oligonucleotide
cccaggcucuuugaccucc

SEQ ID NO: 2373718 - RNA, 19 nt, Artificial Sequence
  Description of Artificial Sequence: Synthetic oligonucleotide
cccaucucagugccugaug

SEQ ID NO: 2373719 - RNA, 19 nt, Artificial Sequence
  Description of Artificial Sequence: Synthetic oligonucleotide
ggggagcuugcugcuguag

SEQ ID NO: 2373720 - RNA, 19 nt, Artificial Sequence
  Description of Artificial Sequence: Synthetic oligonucleotide
guaggggcagcagcccgga

SEQ ID NO: 2373721 - RNA, 19 nt, Artificial Sequence
  Description of Artificial Sequence: Synthetic oligonucleotide
gggauggggugcugaagaa

SEQ ID NO: 2373722 - RNA, 19 nt, Artificial Sequence
  Description of Artificial Sequence: Synthetic oligonucleotide
ggggcuuugggagcuagua

SEQ ID NO: 2373723 - RNA, 19 nt, Artificial Sequence
  Description of Artificial Sequence: Synthetic oligonucleotide
ccccucacauuugggaaug

SEQ ID NO: 2373724 - RNA, 19 nt, Artificial Sequence
  Description of Artificial Sequence: Synthetic oligonucleotide
caggggagcuugcugcugu

SEQ ID NO: 2373725 - RNA, 19 nt, Artificial Sequence
  Description of Artificial Sequence: Synthetic oligonucleotide
ggccccucagugaacuuga

SEQ ID NO: 2373726 - RNA, 19 nt, Artificial Sequence
  Description of Artificial Sequence: Synthetic oligonucleotide
gcuaguaagucggacgguu

SEQ ID NO: 2373727 - RNA, 19 nt, Artificial Sequence
  Description of Artificial Sequence: Synthetic oligonucleotide
cacagucaguaaacacagu

SEQ ID NO: 2373728 - RNA, 19 nt, Artificial Sequence
  Description of Artificial Sequence: Synthetic oligonucleotide
gaugagcccaggggagagu

SEQ ID NO: 2373729 - RNA, 19 nt, Artificial Sequence
  Description of Artificial Sequence: Synthetic oligonucleotide
gcuuugggagcuaguaagu

SEQ ID NO: 2373730 - RNA, 19 nt, Artificial Sequence
  Description of Artificial Sequence: Synthetic oligonucleotide
cggacaccuggcacaggcg

SEQ ID NO: 2373731 - RNA, 19 nt, Artificial Sequence
  Description of Artificial Sequence: Synthetic oligonucleotide
gucggacgguugggguggg

SEQ ID NO: 2373732 - RNA, 19 nt, Artificial Sequence
  Description of Artificial Sequence: Synthetic oligonucleotide
gcagcccggacaccuggca

SEQ ID NO: 2373733 - RNA, 19 nt, Artificial Sequence
  Description of Artificial Sequence: Synthetic oligonucleotide
agccugucuaaggcucuua

SEQ ID NO: 2373734 - RNA, 19 nt, Artificial Sequence
  Description of Artificial Sequence: Synthetic oligonucleotide
gggagaguacggauccgaa

SEQ ID NO: 2373735 - RNA, 19 nt, Artificial Sequence
  Description of Artificial Sequence: Synthetic oligonucleotide
gaagaagaacagggauauu

SEQ ID NO: 2373736 - RNA, 19 nt, Artificial Sequence
  Description of Artificial Sequence: Synthetic oligonucleotide
gcccggacaccuggcacag

SEQ ID NO: 2373737 - RNA, 19 nt, Artificial Sequence
  Description of Artificial Sequence: Synthetic oligonucleotide
gcacaggcggagcuggggu

SEQ ID NO: 2373738 - RNA, 19 nt, Artificial Sequence
  Description of Artificial Sequence: Synthetic oligonucleotide
gccguaggggcagcagccc

SEQ ID NO: 2373739 - RNA, 19 nt, Artificial Sequence
  Description of Artificial Sequence: Synthetic oligonucleotide
ccuggcacaggcggagcug

SEQ ID NO: 2373740 - RNA, 19 nt, Artificial Sequence
  Description of Artificial Sequence: Synthetic oligonucleotide
agggccccucagugaacuu

SEQ ID NO: 2373741 - RNA, 19 nt, Artificial Sequence
  Description of Artificial Sequence: Synthetic oligonucleotide
gggcagccuuaagaugagc

SEQ ID NO: 2373742 - RNA, 19 nt, Artificial Sequence
  Description of Artificial Sequence: Synthetic oligonucleotide
ucggacgguugggguggga

SEQ ID NO: 2373743 - RNA, 19 nt, Artificial Sequence
  Description of Artificial Sequence: Synthetic oligonucleotide
cagggccccucagugaacu

SEQ ID NO: 2373744 - RNA, 19 nt, Artificial Sequence
  Description of Artificial Sequence: Synthetic oligonucleotide
ggcucuuaccccucacauu

SEQ ID NO: 2373745 - RNA, 19 nt, Artificial Sequence
  Description of Artificial Sequence: Synthetic oligonucleotide
ccggcugccuuuagagaga

SEQ ID NO: 2373746 - RNA, 19 nt, Artificial Sequence
  Description of Artificial Sequence: Synthetic oligonucleotide
cggauccgaagggaagccc

SEQ ID NO: 2373747 - RNA, 19 nt, Artificial Sequence
  Description of Artificial Sequence: Synthetic oligonucleotide
gggugggauggggugcuga

SEQ ID NO: 2373748 - RNA, 19 nt, Artificial Sequence
  Description of Artificial Sequence: Synthetic oligonucleotide
cuggagcaagcagcagcaa

SEQ ID NO: 2373749 - RNA, 19 nt, Artificial Sequence
  Description of Artificial Sequence: Synthetic oligonucleotide
ccugaugcacacagucagu

SEQ ID NO: 2373750 - RNA, 19 nt, Artificial Sequence
  Description of Artificial Sequence: Synthetic oligonucleotide
gggaagccccuggccguag

SEQ ID NO: 2373751 - RNA, 19 nt, Artificial Sequence
  Description of Artificial Sequence: Synthetic oligonucleotide
aguggggcuuugggagcua

SEQ ID NO: 2373752 - RNA, 19 nt, Artificial Sequence
  Description of Artificial Sequence: Synthetic oligonucleotide
cuccugccaccagguccag

SEQ ID NO: 2373753 - RNA, 19 nt, Artificial Sequence
  Description of Artificial Sequence: Synthetic oligonucleotide
caagccccggcugccuuua

SEQ ID NO: 2373754 - RNA, 19 nt, Artificial Sequence
  Description of Artificial Sequence: Synthetic oligonucleotide
ccaggggagucagggauaa

SEQ ID NO: 2373755 - RNA, 19 nt, Artificial Sequence
  Description of Artificial Sequence: Synthetic oligonucleotide
gagccugucuaaggcucuu

SEQ ID NO: 2373756 - RNA, 19 nt, Artificial Sequence
  Description of Artificial Sequence: Synthetic oligonucleotide
gcugggguccaggggagcu

SEQ ID NO: 2373757 - RNA, 19 nt, Artificial Sequence
  Description of Artificial Sequence: Synthetic oligonucleotide
cagcaaguuuagggagucu

SEQ ID NO: 2373758 - RNA, 19 nt, Artificial Sequence
  Description of Artificial Sequence: Synthetic oligonucleotide
ccccggcugccuuuagaga

SEQ ID NO: 2373759 - RNA, 19 nt, Artificial Sequence
  Description of Artificial Sequence: Synthetic oligonucleotide
cggcugccuuuagagagac

SEQ ID NO: 2373760 - RNA, 19 nt, Artificial Sequence
  Description of Artificial Sequence: Synthetic oligonucleotide
cggccuuccccucaucaaa

SEQ ID NO: 2373761 - RNA, 19 nt, Artificial Sequence
  Description of Artificial Sequence: Synthetic oligonucleotide
gccaggggagucagggaua

SEQ ID NO: 2373762 - RNA, 19 nt, Artificial Sequence
  Description of Artificial Sequence: Synthetic oligonucleotide
ccccuggccguaggggcag

SEQ ID NO: 2373763 - RNA, 19 nt, Artificial Sequence
  Description of Artificial Sequence: Synthetic oligonucleotide
cagggauaaguggggcuuu

SEQ ID NO: 2373764 - RNA, 19 nt, Artificial Sequence
  Description of Artificial Sequence: Synthetic oligonucleotide
cccaggggagaguacggau

SEQ ID NO: 2373765 - RNA, 19 nt, Artificial Sequence
  Description of Artificial Sequence: Synthetic oligonucleotide
gccccuggccguaggggca

SEQ ID NO: 2373766 - RNA, 19 nt, Artificial Sequence
  Description of Artificial Sequence: Synthetic oligonucleotide
ggguccaggggagcuugcu

SEQ ID NO: 2373767 - RNA, 19 nt, Artificial Sequence
  Description of Artificial Sequence: Synthetic oligonucleotide
ggcugccuuuagagagaca

SEQ ID NO: 2373768 - RNA, 19 nt, Artificial Sequence
  Description of Artificial Sequence: Synthetic oligonucleotide
gcccaucucagugccugau

SEQ ID NO: 2373769 - RNA, 19 nt, Artificial Sequence
  Description of Artificial Sequence: Synthetic oligonucleotide
gggauccagggaggagccu

SEQ ID NO: 2373770 - RNA, 19 nt, Artificial Sequence
  Description of Artificial Sequence: Synthetic oligonucleotide
gccccucagugaacuugaa

SEQ ID NO: 2373771 - RNA, 19 nt, Artificial Sequence
  Description of Artificial Sequence: Synthetic oligonucleotide
ccagcccaucucagugccu

SEQ ID NO: 2373772 - RNA, 19 nt, Artificial Sequence
  Description of Artificial Sequence: Synthetic oligonucleotide
cccuggccguaggggcagc

SEQ ID NO: 2373773 - RNA, 19 nt, Artificial Sequence
  Description of Artificial Sequence: Synthetic oligonucleotide
ggccuagucccaggcucuu

SEQ ID NO: 2373774 - RNA, 19 nt, Artificial Sequence
  Description of Artificial Sequence: Synthetic oligonucleotide
cggacgguuggggugggau

SEQ ID NO: 2373775 - RNA, 19 nt, Artificial Sequence
  Description of Artificial Sequence: Synthetic oligonucleotide
gccuagucccaggcucuuu

SEQ ID NO: 2373776 - RNA, 19 nt, Artificial Sequence
  Description of Artificial Sequence: Synthetic oligonucleotide
cccucacauuugggaaugu

SEQ ID NO: 2373777 - RNA, 19 nt, Artificial Sequence
  Description of Artificial Sequence: Synthetic oligonucleotide
ucguacaucaucaugaaca

SEQ ID NO: 2373778 - RNA, 19 nt, Artificial Sequence
  Description of Artificial Sequence: Synthetic oligonucleotide
aaucguagaagcuaugaug

SEQ ID NO: 2373779 - RNA, 19 nt, Artificial Sequence
  Description of Artificial Sequence: Synthetic oligonucleotide
acgaugaaaucguagaagc

SEQ ID NO: 2373780 - RNA, 19 nt, Artificial Sequence
  Description of Artificial Sequence: Synthetic oligonucleotide
ugaacaucgaaguugaaga

SEQ ID NO: 2373781 - RNA, 19 nt, Artificial Sequence
  Description of Artificial Sequence: Synthetic oligonucleotide
aaugauuaaguccuccuug

SEQ ID NO: 2373782 - RNA, 19 nt, Artificial Sequence
  Description of Artificial Sequence: Synthetic oligonucleotide
uuuucaucuuaacugugcg

SEQ ID NO: 2373783 - RNA, 19 nt, Artificial Sequence
  Description of Artificial Sequence: Synthetic oligonucleotide
acuaaaggugauuucaauc

SEQ ID NO: 2373784 - RNA, 19 nt, Artificial Sequence
  Description of Artificial Sequence: Synthetic oligonucleotide
ggugauuucaaucucuucg

SEQ ID NO: 2373785 - RNA, 19 nt, Artificial Sequence
  Description of Artificial Sequence: Synthetic oligonucleotide
auuaaguccuccuugauau

SEQ ID NO: 2373786 - RNA, 19 nt, Artificial Sequence
  Description of Artificial Sequence: Synthetic oligonucleotide
uggggaaugauuaaguccu

SEQ ID NO: 2373787 - RNA, 19 nt, Artificial Sequence
  Description of Artificial Sequence: Synthetic oligonucleotide
cuugauauacaugagcugc

SEQ ID NO: 2373788 - RNA, 19 nt, Artificial Sequence
  Description of Artificial Sequence: Synthetic oligonucleotide
guagaagcuaugaugaugg

SEQ ID NO: 2373789 - RNA, 19 nt, Artificial Sequence
  Description of Artificial Sequence: Synthetic oligonucleotide
uccuugauauacaugagcu

SEQ ID NO: 2373790 - RNA, 19 nt, Artificial Sequence
  Description of Artificial Sequence: Synthetic oligonucleotide
cuuggugacgaugaaaucg

SEQ ID NO: 2373791 - RNA, 19 nt, Artificial Sequence
  Description of Artificial Sequence: Synthetic oligonucleotide
ucaucaugaacaucgaagu

SEQ ID NO: 2373792 - RNA, 19 nt, Artificial Sequence
  Description of Artificial Sequence: Synthetic oligonucleotide
uucaucuuaacugugcgcc

SEQ ID NO: 2373793 - RNA, 19 nt, Artificial Sequence
  Description of Artificial Sequence: Synthetic oligonucleotide
cucaacaccacuuugccug

SEQ ID NO: 2373794 - RNA, 19 nt, Artificial Sequence
  Description of Artificial Sequence: Synthetic oligonucleotide
ucaugaacaucgaaguuga

SEQ ID NO: 2373795 - RNA, 19 nt, Artificial Sequence
  Description of Artificial Sequence: Synthetic oligonucleotide
aagccgauucuccuccucc

SEQ ID NO: 2373796 - RNA, 19 nt, Artificial Sequence
  Description of Artificial Sequence: Synthetic oligonucleotide
gaagcuaugaugaugggga

SEQ ID NO: 2373797 - RNA, 19 nt, Artificial Sequence
  Description of Artificial Sequence: Synthetic oligonucleotide
gaagcuuguguccacauca

SEQ ID NO: 2373798 - RNA, 19 nt, Artificial Sequence
  Description of Artificial Sequence: Synthetic oligonucleotide
aguaacuaaaggugauuuc

SEQ ID NO: 2373799 - RNA, 19 nt, Artificial Sequence
  Description of Artificial Sequence: Synthetic oligonucleotide
aucaucaugaacaucgaag

SEQ ID NO: 2373800 - RNA, 19 nt, Artificial Sequence
  Description of Artificial Sequence: Synthetic oligonucleotide
aucgaaguugaagaguggc

SEQ ID NO: 2373801 - RNA, 19 nt, Artificial Sequence
  Description of Artificial Sequence: Synthetic oligonucleotide
uuuguggugaucucuuccc

SEQ ID NO: 2373802 - RNA, 19 nt, Artificial Sequence
  Description of Artificial Sequence: Synthetic oligonucleotide
ugaugauggggaaugauua

SEQ ID NO: 2373803 - RNA, 19 nt, Artificial Sequence
  Description of Artificial Sequence: Synthetic oligonucleotide
aucaugaacaucgaaguug

SEQ ID NO: 2373804 - RNA, 19 nt, Artificial Sequence
  Description of Artificial Sequence: Synthetic oligonucleotide
agagaucuuccguuuggcc

SEQ ID NO: 2373805 - RNA, 19 nt, Artificial Sequence
  Description of Artificial Sequence: Synthetic oligonucleotide
ucccugucaggcaagaagc

SEQ ID NO: 2373806 - RNA, 19 nt, Artificial Sequence
  Description of Artificial Sequence: Synthetic oligonucleotide
cucacugaagucuuugcgc

SEQ ID NO: 2373807 - RNA, 19 nt, Artificial Sequence
  Description of Artificial Sequence: Synthetic oligonucleotide
ugcaggaacugcugcaucg

SEQ ID NO: 2373808 - RNA, 19 nt, Artificial Sequence
  Description of Artificial Sequence: Synthetic oligonucleotide
aggagagccaaggucaugc

SEQ ID NO: 2373809 - RNA, 19 nt, Artificial Sequence
  Description of Artificial Sequence: Synthetic oligonucleotide
aaaucguagaagcuaugau

SEQ ID NO: 2373810 - RNA, 19 nt, Artificial Sequence
  Description of Artificial Sequence: Synthetic oligonucleotide
gauauacaugagcugcucc

SEQ ID NO: 2373811 - RNA, 19 nt, Artificial Sequence
  Description of Artificial Sequence: Synthetic oligonucleotide
uaagcagucguacaucauc

SEQ ID NO: 2373812 - RNA, 19 nt, Artificial Sequence
  Description of Artificial Sequence: Synthetic oligonucleotide
uugcgcaagaucucgagug

SEQ ID NO: 2373813 - RNA, 19 nt, Artificial Sequence
  Description of Artificial Sequence: Synthetic oligonucleotide
uuguucuucucauaccagc

SEQ ID NO: 2373814 - RNA, 19 nt, Artificial Sequence
  Description of Artificial Sequence: Synthetic oligonucleotide
agaucuuccguuuggccuc

SEQ ID NO: 2373815 - RNA, 19 nt, Artificial Sequence
  Description of Artificial Sequence: Synthetic oligonucleotide
aaggacaggcuagagaucu

SEQ ID NO: 2373816 - RNA, 19 nt, Artificial Sequence
  Description of Artificial Sequence: Synthetic oligonucleotide
gacgaugaaaucguagaag

SEQ ID NO: 2373817 - RNA, 19 nt, Artificial Sequence
  Description of Artificial Sequence: Synthetic oligonucleotide
gaacaucgaaguugaagag

SEQ ID NO: 2373818 - RNA, 19 nt, Artificial Sequence
  Description of Artificial Sequence: Synthetic oligonucleotide
ugucccauuucuucucugg

SEQ ID NO: 2373819 - RNA, 19 nt, Artificial Sequence
  Description of Artificial Sequence: Synthetic oligonucleotide
ugauggggaaugauuaagu

SEQ ID NO: 2373820 - RNA, 19 nt, Artificial Sequence
  Description of Artificial Sequence: Synthetic oligonucleotide
cacaguggcaucacuaagc

SEQ ID NO: 2373821 - RNA, 19 nt, Artificial Sequence
  Description of Artificial Sequence: Synthetic oligonucleotide
augaacaucgaaguugaag

SEQ ID NO: 2373822 - RNA, 19 nt, Artificial Sequence
  Description of Artificial Sequence: Synthetic oligonucleotide
guaacuaaaggugauuuca

SEQ ID NO: 2373823 - RNA, 19 nt, Artificial Sequence
  Description of Artificial Sequence: Synthetic oligonucleotide
uucucucucuccuucacca

SEQ ID NO: 2373824 - RNA, 19 nt, Artificial Sequence
  Description of Artificial Sequence: Synthetic oligonucleotide
agaagcuaugaugaugggg

SEQ ID NO: 2373825 - RNA, 19 nt, Artificial Sequence
  Description of Artificial Sequence: Synthetic oligonucleotide
aggcaagaagcuugugucc

SEQ ID NO: 2373826 - RNA, 19 nt, Artificial Sequence
  Description of Artificial Sequence: Synthetic oligonucleotide
cacaucaggauucuucccc

SEQ ID NO: 2373827 - RNA, 19 nt, Artificial Sequence
  Description of Artificial Sequence: Synthetic oligonucleotide
ucgaaguugaagaguggcc

SEQ ID NO: 2373828 - RNA, 19 nt, Artificial Sequence
  Description of Artificial Sequence: Synthetic oligonucleotide
uuggugacgaugaaaucgu

SEQ ID NO: 2373829 - RNA, 19 nt, Artificial Sequence
  Description of Artificial Sequence: Synthetic oligonucleotide
acguagcucuucucgaagc

SEQ ID NO: 2373830 - RNA, 19 nt, Artificial Sequence
  Description of Artificial Sequence: Synthetic oligonucleotide
aacuaaaggugauuucaau

SEQ ID NO: 2373831 - RNA, 19 nt, Artificial Sequence
  Description of Artificial Sequence: Synthetic oligonucleotide
aggaaagaugugcuuguuc

SEQ ID NO: 2373832 - RNA, 19 nt, Artificial Sequence
  Description of Artificial Sequence: Synthetic oligonucleotide
uucgcucuugauuuucucc

SEQ ID NO: 2373833 - RNA, 19 nt, Artificial Sequence
  Description of Artificial Sequence: Synthetic oligonucleotide
uuucaucuuaacugugcgc

SEQ ID NO: 2373834 - RNA, 19 nt, Artificial Sequence
  Description of Artificial Sequence: Synthetic oligonucleotide
aucucuucgcucuugauuu

SEQ ID NO: 2373835 - RNA, 19 nt, Artificial Sequence
  Description of Artificial Sequence: Synthetic oligonucleotide
uccucaacaccacuuugcc

SEQ ID NO: 2373836 - RNA, 19 nt, Artificial Sequence
  Description of Artificial Sequence: Synthetic oligonucleotide
cuagagaucuuccguuugg

SEQ ID NO: 2373837 - RNA, 19 nt, Artificial Sequence
  Description of Artificial Sequence: Synthetic oligonucleotide
uguguccacaucaggauuc

SEQ ID NO: 2373838 - RNA, 19 nt, Artificial Sequence
  Description of Artificial Sequence: Synthetic oligonucleotide
gauuucaaucucuucgcuc

SEQ ID NO: 2373839 - RNA, 19 nt, Artificial Sequence
  Description of Artificial Sequence: Synthetic oligonucleotide
ugugacucauccuucucca

SEQ ID NO: 2373840 - RNA, 19 nt, Artificial Sequence
  Description of Artificial Sequence: Synthetic oligonucleotide
uuuccucgagccuugguga

SEQ ID NO: 2373841 - RNA, 19 nt, Artificial Sequence
  Description of Artificial Sequence: Synthetic oligonucleotide
cuaaaggugauuucaaucu

SEQ ID NO: 2373842 - RNA, 19 nt, Artificial Sequence
  Description of Artificial Sequence: Synthetic oligonucleotide
aacaucgaaguugaagagu

SEQ ID NO: 2373843 - RNA, 19 nt, Artificial Sequence
  Description of Artificial Sequence: Synthetic oligonucleotide
uacaugagcugcuccaccc

SEQ ID NO: 2373844 - RNA, 19 nt, Artificial Sequence
  Description of Artificial Sequence: Synthetic oligonucleotide
augauuaaguccuccuuga

SEQ ID NO: 2373845 - RNA, 19 nt, Artificial Sequence
  Description of Artificial Sequence: Synthetic oligonucleotide
ucaucuuaacugugcgccg

SEQ ID NO: 2373846 - RNA, 19 nt, Artificial Sequence
  Description of Artificial Sequence: Synthetic oligonucleotide
acaggcuagagaucuuccg

SEQ ID NO: 2373847 - RNA, 19 nt, Artificial Sequence
  Description of Artificial Sequence: Synthetic oligonucleotide
cuuuguggugaucucuucc

SEQ ID NO: 2373848 - RNA, 19 nt, Artificial Sequence
  Description of Artificial Sequence: Synthetic oligonucleotide
aaaggugauuucaaucucu

SEQ ID NO: 2373849 - RNA, 19 nt, Artificial Sequence
  Description of Artificial Sequence: Synthetic oligonucleotide
ugacucauccuucuccaca

SEQ ID NO: 2373850 - RNA, 19 nt, Artificial Sequence
  Description of Artificial Sequence: Synthetic oligonucleotide
uugauauacaugagcugcu

SEQ ID NO: 2373851 - RNA, 19 nt, Artificial Sequence
  Description of Artificial Sequence: Synthetic oligonucleotide
aagaugugcuuguucuucu

SEQ ID NO: 2373852 - RNA, 19 nt, Artificial Sequence
  Description of Artificial Sequence: Synthetic oligonucleotide
agaguggcccacucuuucc

SEQ ID NO: 2373853 - RNA, 19 nt, Artificial Sequence
  Description of Artificial Sequence: Synthetic oligonucleotide
ugaagaguggcccacucuu

SEQ ID NO: 2373854 - RNA, 19 nt, Artificial Sequence
  Description of Artificial Sequence: Synthetic oligonucleotide
gauggggaaugauuaaguc

SEQ ID NO: 2373855 - RNA, 19 nt, Artificial Sequence
  Description of Artificial Sequence: Synthetic oligonucleotide
aaguugaagaguggcccac

SEQ ID NO: 2373856 - RNA, 19 nt, Artificial Sequence
  Description of Artificial Sequence: Synthetic oligonucleotide
cuuuccucgagccuuggug

SEQ ID NO: 2373857 - RNA, 19 nt, Artificial Sequence
  Description of Artificial Sequence: Synthetic oligonucleotide
gaugaaaucguagaagcua

SEQ ID NO: 2373858 - RNA, 19 nt, Artificial Sequence
  Description of Artificial Sequence: Synthetic oligonucleotide
caggcaagaagcuuguguc

SEQ ID NO: 2373859 - RNA, 19 nt, Artificial Sequence
  Description of Artificial Sequence: Synthetic oligonucleotide
ggucauagggcucccaacg

SEQ ID NO: 2373860 - RNA, 19 nt, Artificial Sequence
  Description of Artificial Sequence: Synthetic oligonucleotide
ucucauaccagcuccucaa

SEQ ID NO: 2373861 - RNA, 19 nt, Artificial Sequence
  Description of Artificial Sequence: Synthetic oligonucleotide
gaagucuuugcgcaagauc

SEQ ID NO: 2373862 - RNA, 19 nt, Artificial Sequence
  Description of Artificial Sequence: Synthetic oligonucleotide
ugacgaugaaaucguagaa

SEQ ID NO: 2373863 - RNA, 19 nt, Artificial Sequence
  Description of Artificial Sequence: Synthetic oligonucleotide
gugacgaugaaaucguaga

SEQ ID NO: 2373864 - RNA, 19 nt, Artificial Sequence
  Description of Artificial Sequence: Synthetic oligonucleotide
cagucguacaucaucauga

SEQ ID NO: 2373865 - RNA, 19 nt, Artificial Sequence
  Description of Artificial Sequence: Synthetic oligonucleotide
ugauuucaaucucuucgcu

SEQ ID NO: 2373866 - RNA, 19 nt, Artificial Sequence
  Description of Artificial Sequence: Synthetic oligonucleotide
gaaaucguagaagcuauga

SEQ ID NO: 2373867 - RNA, 19 nt, Artificial Sequence
  Description of Artificial Sequence: Synthetic oligonucleotide
aucccaguaacuaaaggug

SEQ ID NO: 2373868 - RNA, 19 nt, Artificial Sequence
  Description of Artificial Sequence: Synthetic oligonucleotide
acugcugcaucguguugcc

SEQ ID NO: 2373869 - RNA, 19 nt, Artificial Sequence
  Description of Artificial Sequence: Synthetic oligonucleotide
cuccucaacaccacuuugc

SEQ ID NO: 2373870 - RNA, 19 nt, Artificial Sequence
  Description of Artificial Sequence: Synthetic oligonucleotide
ucgcucuugauuuucuccu

SEQ ID NO: 2373871 - RNA, 19 nt, Artificial Sequence
  Description of Artificial Sequence: Synthetic oligonucleotide
uuaacugugcgccgguguc

SEQ ID NO: 2373872 - RNA, 19 nt, Artificial Sequence
  Description of Artificial Sequence: Synthetic oligonucleotide
acaguggcaucacuaagca

SEQ ID NO: 2373873 - RNA, 19 nt, Artificial Sequence
  Description of Artificial Sequence: Synthetic oligonucleotide
aaggugaaggacaggcuag

SEQ ID NO: 2373874 - RNA, 19 nt, Artificial Sequence
  Description of Artificial Sequence: Synthetic oligonucleotide
aucacuaagcagucguaca

SEQ ID NO: 2373875 - RNA, 19 nt, Artificial Sequence
  Description of Artificial Sequence: Synthetic oligonucleotide
uacuugucccauuucuucu

SEQ ID NO: 2373876 - RNA, 19 nt, Artificial Sequence
  Description of Artificial Sequence: Synthetic oligonucleotide
agcuguagcuccuuugacu

SEQ ID NO: 2373877 - RNA, 19 nt, Artificial Sequence
  Description of Artificial Sequence: Synthetic oligonucleotide
ugcugcaucguguugcccu

SEQ ID NO: 2373878 - RNA, 19 nt, Artificial Sequence
  Description of Artificial Sequence: Synthetic oligonucleotide
uucucauaccagcuccuca

SEQ ID NO: 2373879 - RNA, 19 nt, Artificial Sequence
  Description of Artificial Sequence: Synthetic oligonucleotide
aggucaugccaacuucugg

SEQ ID NO: 2373880 - RNA, 19 nt, Artificial Sequence
  Description of Artificial Sequence: Synthetic oligonucleotide
gucccugucaggcaagaag

SEQ ID NO: 2373881 - RNA, 19 nt, Artificial Sequence
  Description of Artificial Sequence: Synthetic oligonucleotide
agugccuccugcuuggccu

SEQ ID NO: 2373882 - RNA, 19 nt, Artificial Sequence
  Description of Artificial Sequence: Synthetic oligonucleotide
uuugcgcaagaucucgagu

SEQ ID NO: 2373883 - RNA, 19 nt, Artificial Sequence
  Description of Artificial Sequence: Synthetic oligonucleotide
ugaaaucguagaagcuaug

SEQ ID NO: 2373884 - RNA, 19 nt, Artificial Sequence
  Description of Artificial Sequence: Synthetic oligonucleotide
gauuaaguccuccuugaua

SEQ ID NO: 2373885 - RNA, 19 nt, Artificial Sequence
  Description of Artificial Sequence: Synthetic oligonucleotide
cuuguucuucucauaccag

SEQ ID NO: 2373886 - RNA, 19 nt, Artificial Sequence
  Description of Artificial Sequence: Synthetic oligonucleotide
uuugccugcaugugacuca

SEQ ID NO: 2373887 - RNA, 19 nt, Artificial Sequence
  Description of Artificial Sequence: Synthetic oligonucleotide
augauggggaaugauuaag

SEQ ID NO: 2373888 - RNA, 19 nt, Artificial Sequence
  Description of Artificial Sequence: Synthetic oligonucleotide
uuucuuuguggugaucucu

SEQ ID NO: 2373889 - RNA, 19 nt, Artificial Sequence
  Description of Artificial Sequence: Synthetic oligonucleotide
ucauagggcucccaacgac

SEQ ID NO: 2373890 - RNA, 19 nt, Artificial Sequence
  Description of Artificial Sequence: Synthetic oligonucleotide
aagaucucgagugcuuucu

SEQ ID NO: 2373891 - RNA, 19 nt, Artificial Sequence
  Description of Artificial Sequence: Synthetic oligonucleotide
ucaugccaacuucuggaug

SEQ ID NO: 2373892 - RNA, 19 nt, Artificial Sequence
  Description of Artificial Sequence: Synthetic oligonucleotide
cucgagugcuuucugcagg

SEQ ID NO: 2373893 - RNA, 19 nt, Artificial Sequence
  Description of Artificial Sequence: Synthetic oligonucleotide
agugcuuucugcaggaacu

SEQ ID NO: 2373894 - RNA, 19 nt, Artificial Sequence
  Description of Artificial Sequence: Synthetic oligonucleotide
gacguagcucuucucgaag

SEQ ID NO: 2373895 - RNA, 19 nt, Artificial Sequence
  Description of Artificial Sequence: Synthetic oligonucleotide
uagcucuucucgaagccga

SEQ ID NO: 2373896 - RNA, 19 nt, Artificial Sequence
  Description of Artificial Sequence: Synthetic oligonucleotide
ucaggauucuuccccaauu

SEQ ID NO: 2373897 - RNA, 19 nt, Artificial Sequence
  Description of Artificial Sequence: Synthetic oligonucleotide
cuuugcgcaagaucucgag

SEQ ID NO: 2373898 - RNA, 19 nt, Artificial Sequence
  Description of Artificial Sequence: Synthetic oligonucleotide
ucauacauggccaccucuu

SEQ ID NO: 2373899 - RNA, 19 nt, Artificial Sequence
  Description of Artificial Sequence: Synthetic oligonucleotide
ugcgcaagaucucgagugc

SEQ ID NO: 2373900 - RNA, 19 nt, Artificial Sequence
  Description of Artificial Sequence: Synthetic oligonucleotide
ucucgagugcuuucugcag

SEQ ID NO: 2373901 - RNA, 19 nt, Artificial Sequence
  Description of Artificial Sequence: Synthetic oligonucleotide
ugaccugagcucacugaag

SEQ ID NO: 2373902 - RNA, 19 nt, Artificial Sequence
  Description of Artificial Sequence: Synthetic oligonucleotide
ugcuuguucuucucauacc

SEQ ID NO: 2373903 - RNA, 19 nt, Artificial Sequence
  Description of Artificial Sequence: Synthetic oligonucleotide
aucucgagugcuuucugca

SEQ ID NO: 2373904 - RNA, 19 nt, Artificial Sequence
  Description of Artificial Sequence: Synthetic oligonucleotide
gugcuuguucuucucauac

SEQ ID NO: 2373905 - RNA, 19 nt, Artificial Sequence
  Description of Artificial Sequence: Synthetic oligonucleotide
cacuuugccugcaugugac

SEQ ID NO: 2373906 - RNA, 19 nt, Artificial Sequence
  Description of Artificial Sequence: Synthetic oligonucleotide
uuccguuuggccuccuucu

SEQ ID NO: 2373907 - RNA, 19 nt, Artificial Sequence
  Description of Artificial Sequence: Synthetic oligonucleotide
uugaagaguggcccacucu

SEQ ID NO: 2373908 - RNA, 19 nt, Artificial Sequence
  Description of Artificial Sequence: Synthetic oligonucleotide
uccacaguggcaucacuaa

SEQ ID NO: 2373909 - RNA, 19 nt, Artificial Sequence
  Description of Artificial Sequence: Synthetic oligonucleotide
gagaucuuccguuuggccu

SEQ ID NO: 2373910 - RNA, 19 nt, Artificial Sequence
  Description of Artificial Sequence: Synthetic oligonucleotide
agggcucccaacgacuggc

SEQ ID NO: 2373911 - RNA, 19 nt, Artificial Sequence
  Description of Artificial Sequence: Synthetic oligonucleotide
gucuuugcgcaagaucucg

SEQ ID NO: 2373912 - RNA, 19 nt, Artificial Sequence
  Description of Artificial Sequence: Synthetic oligonucleotide
uuuucuuuguggugaucuc

SEQ ID NO: 2373913 - RNA, 19 nt, Artificial Sequence
  Description of Artificial Sequence: Synthetic oligonucleotide
aagaagcuuguguccacau

SEQ ID NO: 2373914 - RNA, 19 nt, Artificial Sequence
  Description of Artificial Sequence: Synthetic oligonucleotide
cuagcuucagcuguagcuc

SEQ ID NO: 2373915 - RNA, 19 nt, Artificial Sequence
  Description of Artificial Sequence: Synthetic oligonucleotide
caucccaguaacuaaaggu

SEQ ID NO: 2373916 - RNA, 19 nt, Artificial Sequence
  Description of Artificial Sequence: Synthetic oligonucleotide
caucuuaacugugcgccgg

SEQ ID NO: 2373917 - RNA, 19 nt, Artificial Sequence
  Description of Artificial Sequence: Synthetic oligonucleotide
acaucaggauucuucccca

SEQ ID NO: 2373918 - RNA, 19 nt, Artificial Sequence
  Description of Artificial Sequence: Synthetic oligonucleotide
gagugcuuucugcaggaac

SEQ ID NO: 2373919 - RNA, 19 nt, Artificial Sequence
  Description of Artificial Sequence: Synthetic oligonucleotide
ucuuugcgcaagaucucga

SEQ ID NO: 2373920 - RNA, 19 nt, Artificial Sequence
  Description of Artificial Sequence: Synthetic oligonucleotide
ugcaugugacucauccuuc

SEQ ID NO: 2373921 - RNA, 19 nt, Artificial Sequence
  Description of Artificial Sequence: Synthetic oligonucleotide
caucgaaguugaagagugg

SEQ ID NO: 2373922 - RNA, 19 nt, Artificial Sequence
  Description of Artificial Sequence: Synthetic oligonucleotide
gcuaugaugauggggaaug

SEQ ID NO: 2373923 - RNA, 19 nt, Artificial Sequence
  Description of Artificial Sequence: Synthetic oligonucleotide
gaugauggggaaugauuaa

SEQ ID NO: 2373924 - RNA, 19 nt, Artificial Sequence
  Description of Artificial Sequence: Synthetic oligonucleotide
ucaacaccacuuugccugc

SEQ ID NO: 2373925 - RNA, 19 nt, Artificial Sequence
  Description of Artificial Sequence: Synthetic oligonucleotide
ucucgaagccgauucuccu

SEQ ID NO: 2373926 - RNA, 19 nt, Artificial Sequence
  Description of Artificial Sequence: Synthetic oligonucleotide
ugauuaaguccuccuugau

SEQ ID NO: 2373927 - RNA, 19 nt, Artificial Sequence
  Description of Artificial Sequence: Synthetic oligonucleotide
ucgagugcuuucugcagga

SEQ ID NO: 2373928 - RNA, 19 nt, Artificial Sequence
  Description of Artificial Sequence: Synthetic oligonucleotide
uguucaccggaucguguac

SEQ ID NO: 2373929 - RNA, 19 nt, Artificial Sequence
  Description of Artificial Sequence: Synthetic oligonucleotide
caucacuaagcagucguac

SEQ ID NO: 2373930 - RNA, 19 nt, Artificial Sequence
  Description of Artificial Sequence: Synthetic oligonucleotide
ugagcugcuccaccccugc

SEQ ID NO: 2373931 - RNA, 19 nt, Artificial Sequence
  Description of Artificial Sequence: Synthetic oligonucleotide
augaaaucguagaagcuau

SEQ ID NO: 2373932 - RNA, 19 nt, Artificial Sequence
  Description of Artificial Sequence: Synthetic oligonucleotide
cuucccacuccugacguag

SEQ ID NO: 2373933 - RNA, 19 nt, Artificial Sequence
  Description of Artificial Sequence: Synthetic oligonucleotide
ugauuuucuccugcuuggc

SEQ ID NO: 2373934 - RNA, 19 nt, Artificial Sequence
  Description of Artificial Sequence: Synthetic oligonucleotide
uaugaugauggggaaugau

SEQ ID NO: 2373935 - RNA, 19 nt, Artificial Sequence
  Description of Artificial Sequence: Synthetic oligonucleotide
ggucaugccaacuucugga

SEQ ID NO: 2373936 - RNA, 19 nt, Artificial Sequence
  Description of Artificial Sequence: Synthetic oligonucleotide
ugauauacaugagcugcuc

SEQ ID NO: 2373937 - RNA, 19 nt, Artificial Sequence
  Description of Artificial Sequence: Synthetic oligonucleotide
cucucggucccugucaggc

SEQ ID NO: 2373938 - RNA, 19 nt, Artificial Sequence
  Description of Artificial Sequence: Synthetic oligonucleotide
ucguguacuugucccauuu

SEQ ID NO: 2373939 - RNA, 19 nt, Artificial Sequence
  Description of Artificial Sequence: Synthetic oligonucleotide
aagcuaugaugauggggaa

SEQ ID NO: 2373940 - RNA, 19 nt, Artificial Sequence
  Description of Artificial Sequence: Synthetic oligonucleotide
aagcuuguguccacaucag

SEQ ID NO: 2373941 - RNA, 19 nt, Artificial Sequence
  Description of Artificial Sequence: Synthetic oligonucleotide
aucucuucccucuccaguu

SEQ ID NO: 2373942 - RNA, 19 nt, Artificial Sequence
  Description of Artificial Sequence: Synthetic oligonucleotide
ugggucauagggcucccaa

SEQ ID NO: 2373943 - RNA, 19 nt, Artificial Sequence
  Description of Artificial Sequence: Synthetic oligonucleotide
aguccuccuugauauacau

SEQ ID NO: 2373944 - RNA, 19 nt, Artificial Sequence
  Description of Artificial Sequence: Synthetic oligonucleotide
ugugcgccgguguccagag

SEQ ID NO: 2373945 - RNA, 19 nt, Artificial Sequence
  Description of Artificial Sequence: Synthetic oligonucleotide
uagggcucccaacgacugg

SEQ ID NO: 2373946 - RNA, 19 nt, Artificial Sequence
  Description of Artificial Sequence: Synthetic oligonucleotide
acgacuggcaggaaagaug

SEQ ID NO: 2373947 - RNA, 19 nt, Artificial Sequence
  Description of Artificial Sequence: Synthetic oligonucleotide
guggcccacucuuuccucg

SEQ ID NO: 2373948 - RNA, 19 nt, Artificial Sequence
  Description of Artificial Sequence: Synthetic oligonucleotide
agucguacaucaucaugaa

SEQ ID NO: 2373949 - RNA, 19 nt, Artificial Sequence
  Description of Artificial Sequence: Synthetic oligonucleotide
ccaacgacuggcaggaaag

SEQ ID NO: 2373950 - RNA, 19 nt, Artificial Sequence
  Description of Artificial Sequence: Synthetic oligonucleotide
gugaaggacaggcuagaga

SEQ ID NO: 2373951 - RNA, 19 nt, Artificial Sequence
  Description of Artificial Sequence: Synthetic oligonucleotide
cauggccaccucuuccucc

SEQ ID NO: 2373952 - RNA, 19 nt, Artificial Sequence
  Description of Artificial Sequence: Synthetic oligonucleotide
aacgacuggcaggaaagau

SEQ ID NO: 2373953 - RNA, 19 nt, Artificial Sequence
  Description of Artificial Sequence: Synthetic oligonucleotide
uccugcuuggcuucccacu

SEQ ID NO: 2373954 - RNA, 19 nt, Artificial Sequence
  Description of Artificial Sequence: Synthetic oligonucleotide
ugacguagcucuucucgaa

SEQ ID NO: 2373955 - RNA, 19 nt, Artificial Sequence
  Description of Artificial Sequence: Synthetic oligonucleotide
agagccaucccaguaacua

SEQ ID NO: 2373956 - RNA, 19 nt, Artificial Sequence
  Description of Artificial Sequence: Synthetic oligonucleotide
uagcuccuuugacugcucc

SEQ ID NO: 2373957 - RNA, 19 nt, Artificial Sequence
  Description of Artificial Sequence: Synthetic oligonucleotide
aacaccacuuugccugcau

SEQ ID NO: 2373958 - RNA, 19 nt, Artificial Sequence
  Description of Artificial Sequence: Synthetic oligonucleotide
ggugacgaugaaaucguag

SEQ ID NO: 2373959 - RNA, 19 nt, Artificial Sequence
  Description of Artificial Sequence: Synthetic oligonucleotide
cuugcgcuccuucucucgc

SEQ ID NO: 2373960 - RNA, 19 nt, Artificial Sequence
  Description of Artificial Sequence: Synthetic oligonucleotide
gacaggcuagagaucuucc

SEQ ID NO: 2373961 - RNA, 19 nt, Artificial Sequence
  Description of Artificial Sequence: Synthetic oligonucleotide
agagccaaggucaugccaa

SEQ ID NO: 2373962 - RNA, 19 nt, Artificial Sequence
  Description of Artificial Sequence: Synthetic oligonucleotide
cauacauggccaccucuuc

SEQ ID NO: 2373963 - RNA, 19 nt, Artificial Sequence
  Description of Artificial Sequence: Synthetic oligonucleotide
agaucucgagugcuuucug

SEQ ID NO: 2373964 - RNA, 19 nt, Artificial Sequence
  Description of Artificial Sequence: Synthetic oligonucleotide
uucucucgcagcuucucua

SEQ ID NO: 2373965 - RNA, 19 nt, Artificial Sequence
  Description of Artificial Sequence: Synthetic oligonucleotide
aaggugauuucaaucucuu

SEQ ID NO: 2373966 - RNA, 19 nt, Artificial Sequence
  Description of Artificial Sequence: Synthetic oligonucleotide
cuuugccugcaugugacuc

SEQ ID NO: 2373967 - RNA, 19 nt, Artificial Sequence
  Description of Artificial Sequence: Synthetic oligonucleotide
augaugauggggaaugauu

SEQ ID NO: 2373968 - RNA, 19 nt, Artificial Sequence
  Description of Artificial Sequence: Synthetic oligonucleotide
caaggugaaggacaggcua

SEQ ID NO: 2373969 - RNA, 19 nt, Artificial Sequence
  Description of Artificial Sequence: Synthetic oligonucleotide
aggauucuuccccaauuuu

SEQ ID NO: 2373970 - RNA, 19 nt, Artificial Sequence
  Description of Artificial Sequence: Synthetic oligonucleotide
caagaucucgagugcuuuc

SEQ ID NO: 2373971 - RNA, 19 nt, Artificial Sequence
  Description of Artificial Sequence: Synthetic oligonucleotide
auguucaccggaucgugua

SEQ ID NO: 2373972 - RNA, 19 nt, Artificial Sequence
  Description of Artificial Sequence: Synthetic oligonucleotide
gaaugauuaaguccuccuu

SEQ ID NO: 2373973 - RNA, 19 nt, Artificial Sequence
  Description of Artificial Sequence: Synthetic oligonucleotide
cucgaagccgauucuccuc

SEQ ID NO: 2373974 - RNA, 19 nt, Artificial Sequence
  Description of Artificial Sequence: Synthetic oligonucleotide
acaccacuuugccugcaug

SEQ ID NO: 2373975 - RNA, 19 nt, Artificial Sequence
  Description of Artificial Sequence: Synthetic oligonucleotide
aacugugcgccggugucca

SEQ ID NO: 2373976 - RNA, 19 nt, Artificial Sequence
  Description of Artificial Sequence: Synthetic oligonucleotide
guugaagaguggcccacuc

SEQ ID NO: 2373977 - RNA, 19 nt, Artificial Sequence
  Description of Artificial Sequence: Synthetic oligonucleotide
gcucccaacgacuggcagg

SEQ ID NO: 2373978 - RNA, 19 nt, Artificial Sequence
  Description of Artificial Sequence: Synthetic oligonucleotide
acuccugacguagcucuuc

SEQ ID NO: 2373979 - RNA, 19 nt, Artificial Sequence
  Description of Artificial Sequence: Synthetic oligonucleotide
uaacugugcgccggugucc

SEQ ID NO: 2373980 - RNA, 19 nt, Artificial Sequence
  Description of Artificial Sequence: Synthetic oligonucleotide
gcagucguacaucaucaug

SEQ ID NO: 2373981 - RNA, 19 nt, Artificial Sequence
  Description of Artificial Sequence: Synthetic oligonucleotide
gaucucuucccucuccagu

SEQ ID NO: 2373982 - RNA, 19 nt, Artificial Sequence
  Description of Artificial Sequence: Synthetic oligonucleotide
ucuuuccucgagccuuggu

SEQ ID NO: 2373983 - RNA, 19 nt, Artificial Sequence
  Description of Artificial Sequence: Synthetic oligonucleotide
gucguacaucaucaugaac

SEQ ID NO: 2373984 - RNA, 19 nt, Artificial Sequence
  Description of Artificial Sequence: Synthetic oligonucleotide
accacuuugccugcaugug

SEQ ID NO: 2373985 - RNA, 19 nt, Artificial Sequence
  Description of Artificial Sequence: Synthetic oligonucleotide
uguccagagccaucccagu

SEQ ID NO: 2373986 - RNA, 19 nt, Artificial Sequence
  Description of Artificial Sequence: Synthetic oligonucleotide
ucuuaacugugcgccggug

SEQ ID NO: 2373987 - RNA, 19 nt, Artificial Sequence
  Description of Artificial Sequence: Synthetic oligonucleotide
gcuucucuagcuucagcug

SEQ ID NO: 2373988 - RNA, 19 nt, Artificial Sequence
  Description of Artificial Sequence: Synthetic oligonucleotide
uccucgagccuuggugacg

SEQ ID NO: 2373989 - RNA, 19 nt, Artificial Sequence
  Description of Artificial Sequence: Synthetic oligonucleotide
aucuuaacugugcgccggu

SEQ ID NO: 2373990 - RNA, 19 nt, Artificial Sequence
  Description of Artificial Sequence: Synthetic oligonucleotide
ccuugauauacaugagcug

SEQ ID NO: 2373991 - RNA, 19 nt, Artificial Sequence
  Description of Artificial Sequence: Synthetic oligonucleotide
ucuccacaguggcaucacu

SEQ ID NO: 2373992 - RNA, 19 nt, Artificial Sequence
  Description of Artificial Sequence: Synthetic oligonucleotide
uuucaaucucuucgcucuu

SEQ ID NO: 2373993 - RNA, 19 nt, Artificial Sequence
  Description of Artificial Sequence: Synthetic oligonucleotide
cucauaccagcuccucaac

SEQ ID NO: 2373994 - RNA, 19 nt, Artificial Sequence
  Description of Artificial Sequence: Synthetic oligonucleotide
cucuagcuucagcuguagc

SEQ ID NO: 2373995 - RNA, 19 nt, Artificial Sequence
  Description of Artificial Sequence: Synthetic oligonucleotide
auagggcucccaacgacug

SEQ ID NO: 2373996 - RNA, 19 nt, Artificial Sequence
  Description of Artificial Sequence: Synthetic oligonucleotide
cugacguagcucuucucga

SEQ ID NO: 2373997 - RNA, 19 nt, Artificial Sequence
  Description of Artificial Sequence: Synthetic oligonucleotide
cccacucuuuccucgagcc

SEQ ID NO: 2373998 - RNA, 19 nt, Artificial Sequence
  Description of Artificial Sequence: Synthetic oligonucleotide
caugugacucauccuucuc

SEQ ID NO: 2373999 - RNA, 19 nt, Artificial Sequence
  Description of Artificial Sequence: Synthetic oligonucleotide
uuaaguccuccuugauaua

SEQ ID NO: 2374000 - RNA, 19 nt, Artificial Sequence
  Description of Artificial Sequence: Synthetic oligonucleotide
gagccaucccaguaacuaa

SEQ ID NO: 2374001 - RNA, 19 nt, Artificial Sequence
  Description of Artificial Sequence: Synthetic oligonucleotide
gcuagagaucuuccguuug

SEQ ID NO: 2374002 - RNA, 19 nt, Artificial Sequence
  Description of Artificial Sequence: Synthetic oligonucleotide
gucauagggcucccaacga

SEQ ID NO: 2374003 - RNA, 19 nt, Artificial Sequence
  Description of Artificial Sequence: Synthetic oligonucleotide
uucccacuccugacguagc

SEQ ID NO: 2374004 - RNA, 19 nt, Artificial Sequence
  Description of Artificial Sequence: Synthetic oligonucleotide
uggcaucacuaagcagucg

SEQ ID NO: 2374005 - RNA, 19 nt, Artificial Sequence
  Description of Artificial Sequence: Synthetic oligonucleotide
ucgagccuuggugacgaug

SEQ ID NO: 2374006 - RNA, 19 nt, Artificial Sequence
  Description of Artificial Sequence: Synthetic oligonucleotide
uuccucgagccuuggugac

SEQ ID NO: 2374007 - RNA, 19 nt, Artificial Sequence
  Description of Artificial Sequence: Synthetic oligonucleotide
agccgauucuccuccuccu

SEQ ID NO: 2374008 - RNA, 19 nt, Artificial Sequence
  Description of Artificial Sequence: Synthetic oligonucleotide
cugaccugagcucacugaa

SEQ ID NO: 2374009 - RNA, 19 nt, Artificial Sequence
  Description of Artificial Sequence: Synthetic oligonucleotide
cacuaagcagucguacauc

SEQ ID NO: 2374010 - RNA, 19 nt, Artificial Sequence
  Description of Artificial Sequence: Synthetic oligonucleotide
gaagccgauucuccuccuc

SEQ ID NO: 2374011 - RNA, 19 nt, Artificial Sequence
  Description of Artificial Sequence: Synthetic oligonucleotide
ggaaugauuaaguccuccu

SEQ ID NO: 2374012 - RNA, 19 nt, Artificial Sequence
  Description of Artificial Sequence: Synthetic oligonucleotide
cuuguguccacaucaggau

SEQ ID NO: 2374013 - RNA, 19 nt, Artificial Sequence
  Description of Artificial Sequence: Synthetic oligonucleotide
ccaucccaguaacuaaagg

SEQ ID NO: 2374014 - RNA, 19 nt, Artificial Sequence
  Description of Artificial Sequence: Synthetic oligonucleotide
ucucggucccugucaggca

SEQ ID NO: 2374015 - RNA, 19 nt, Artificial Sequence
  Description of Artificial Sequence: Synthetic oligonucleotide
ucggucccugucaggcaag

SEQ ID NO: 2374016 - RNA, 19 nt, Artificial Sequence
  Description of Artificial Sequence: Synthetic oligonucleotide
uccaccccugcugaccuga

SEQ ID NO: 2374017 - RNA, 19 nt, Artificial Sequence
  Description of Artificial Sequence: Synthetic oligonucleotide
uucaccggaucguguacuu

SEQ ID NO: 2374018 - RNA, 19 nt, Artificial Sequence
  Description of Artificial Sequence: Synthetic oligonucleotide
cucccaacgacuggcagga

SEQ ID NO: 2374019 - RNA, 19 nt, Artificial Sequence
  Description of Artificial Sequence: Synthetic oligonucleotide
uugcgcuccuucucucgca

SEQ ID NO: 2374020 - RNA, 19 nt, Artificial Sequence
  Description of Artificial Sequence: Synthetic oligonucleotide
ucaccggaucguguacuug

SEQ ID NO: 2374021 - RNA, 19 nt, Artificial Sequence
  Description of Artificial Sequence: Synthetic oligonucleotide
ggcaucacuaagcagucgu

SEQ ID NO: 2374022 - RNA, 19 nt, Artificial Sequence
  Description of Artificial Sequence: Synthetic oligonucleotide
gaaggacaggcuagagauc

SEQ ID NO: 2374023 - RNA, 19 nt, Artificial Sequence
  Description of Artificial Sequence: Synthetic oligonucleotide
aguugaagaguggcccacu

SEQ ID NO: 2374024 - RNA, 19 nt, Artificial Sequence
  Description of Artificial Sequence: Synthetic oligonucleotide
caaggucaugccaacuucu

SEQ ID NO: 2374025 - RNA, 19 nt, Artificial Sequence
  Description of Artificial Sequence: Synthetic oligonucleotide
cggaucguguacuuguccc

SEQ ID NO: 2374026 - RNA, 19 nt, Artificial Sequence
  Description of Artificial Sequence: Synthetic oligonucleotide
acaucaucaugaacaucga

SEQ ID NO: 2374027 - RNA, 19 nt, Artificial Sequence
  Description of Artificial Sequence: Synthetic oligonucleotide
agcuaugaugauggggaau

SEQ ID NO: 2374028 - RNA, 19 nt, Artificial Sequence
  Description of Artificial Sequence: Synthetic oligonucleotide
ugcaucguguugcccuuuu

SEQ ID NO: 2374029 - RNA, 19 nt, Artificial Sequence
  Description of Artificial Sequence: Synthetic oligonucleotide
cauagggcucccaacgacu

SEQ ID NO: 2374030 - RNA, 19 nt, Artificial Sequence
  Description of Artificial Sequence: Synthetic oligonucleotide
cuccacaguggcaucacua

SEQ ID NO: 2374031 - RNA, 19 nt, Artificial Sequence
  Description of Artificial Sequence: Synthetic oligonucleotide
gguguccagagccauccca

SEQ ID NO: 2374032 - RNA, 19 nt, Artificial Sequence
  Description of Artificial Sequence: Synthetic oligonucleotide
ugagcucacugaagucuuu

SEQ ID NO: 2374033 - RNA, 19 nt, Artificial Sequence
  Description of Artificial Sequence: Synthetic oligonucleotide
ggcaagaagcuugugucca

SEQ ID NO: 2374034 - RNA, 19 nt, Artificial Sequence
  Description of Artificial Sequence: Synthetic oligonucleotide
gugacucauccuucuccac

SEQ ID NO: 2374035 - RNA, 19 nt, Artificial Sequence
  Description of Artificial Sequence: Synthetic oligonucleotide
cuucucauaccagcuccuc

SEQ ID NO: 2374036 - RNA, 19 nt, Artificial Sequence
  Description of Artificial Sequence: Synthetic oligonucleotide
ccaacuucuggauguucac

SEQ ID NO: 2374037 - RNA, 19 nt, Artificial Sequence
  Description of Artificial Sequence: Synthetic oligonucleotide
cucuucgcucuugauuuuc

SEQ ID NO: 2374038 - RNA, 19 nt, Artificial Sequence
  Description of Artificial Sequence: Synthetic oligonucleotide
uggugacgaugaaaucgua

SEQ ID NO: 2374039 - RNA, 19 nt, Artificial Sequence
  Description of Artificial Sequence: Synthetic oligonucleotide
aggugaaggacaggcuaga

SEQ ID NO: 2374040 - RNA, 19 nt, Artificial Sequence
  Description of Artificial Sequence: Synthetic oligonucleotide
cguuuggccuccuucuugc

SEQ ID NO: 2374041 - RNA, 19 nt, Artificial Sequence
  Description of Artificial Sequence: Synthetic oligonucleotide
agccaucccaguaacuaaa

SEQ ID NO: 2374042 - RNA, 19 nt, Artificial Sequence
  Description of Artificial Sequence: Synthetic oligonucleotide
ggaucguguacuuguccca

SEQ ID NO: 2374043 - RNA, 19 nt, Artificial Sequence
  Description of Artificial Sequence: Synthetic oligonucleotide
ggauguucaccggaucgug

SEQ ID NO: 2374044 - RNA, 19 nt, Artificial Sequence
  Description of Artificial Sequence: Synthetic oligonucleotide
cuuaacugugcgccggugu

SEQ ID NO: 2374045 - RNA, 19 nt, Artificial Sequence
  Description of Artificial Sequence: Synthetic oligonucleotide
uggcccacucuuuccucga

SEQ ID NO: 2374046 - RNA, 19 nt, Artificial Sequence
  Description of Artificial Sequence: Synthetic oligonucleotide
accggaucguguacuuguc

SEQ ID NO: 2374047 - RNA, 19 nt, Artificial Sequence
  Description of Artificial Sequence: Synthetic oligonucleotide
cguagaagcuaugaugaug

SEQ ID NO: 2374048 - RNA, 19 nt, Artificial Sequence
  Description of Artificial Sequence: Synthetic oligonucleotide
gcuccucaacaccacuuug

SEQ ID NO: 2374049 - RNA, 19 nt, Artificial Sequence
  Description of Artificial Sequence: Synthetic oligonucleotide
cugcaugugacucauccuu

SEQ ID NO: 2374050 - RNA, 19 nt, Artificial Sequence
  Description of Artificial Sequence: Synthetic oligonucleotide
ggugaaggacaggcuagag

SEQ ID NO: 2374051 - RNA, 19 nt, Artificial Sequence
  Description of Artificial Sequence: Synthetic oligonucleotide
caagaagcuuguguccaca

SEQ ID NO: 2374052 - RNA, 19 nt, Artificial Sequence
  Description of Artificial Sequence: Synthetic oligonucleotide
ccuccuugauauacaugag

SEQ ID NO: 2374053 - RNA, 19 nt, Artificial Sequence
  Description of Artificial Sequence: Synthetic oligonucleotide
acucuuuccucgagccuug

SEQ ID NO: 2374054 - RNA, 19 nt, Artificial Sequence
  Description of Artificial Sequence: Synthetic oligonucleotide
caggcuagagaucuuccgu

SEQ ID NO: 2374055 - RNA, 19 nt, Artificial Sequence
  Description of Artificial Sequence: Synthetic oligonucleotide
ucucuucgcucuugauuuu

SEQ ID NO: 2374056 - RNA, 19 nt, Artificial Sequence
  Description of Artificial Sequence: Synthetic oligonucleotide
gccaacuucuggauguuca

SEQ ID NO: 2374057 - RNA, 19 nt, Artificial Sequence
  Description of Artificial Sequence: Synthetic oligonucleotide
uccugacguagcucuucuc

SEQ ID NO: 2374058 - RNA, 19 nt, Artificial Sequence
  Description of Artificial Sequence: Synthetic oligonucleotide
cugcaggaacugcugcauc

SEQ ID NO: 2374059 - RNA, 19 nt, Artificial Sequence
  Description of Artificial Sequence: Synthetic oligonucleotide
gauguucaccggaucgugu

SEQ ID NO: 2374060 - RNA, 19 nt, Artificial Sequence
  Description of Artificial Sequence: Synthetic oligonucleotide
caccggaucguguacuugu

SEQ ID NO: 2374061 - RNA, 19 nt, Artificial Sequence
  Description of Artificial Sequence: Synthetic oligonucleotide
gggucauagggcucccaac

SEQ ID NO: 2374062 - RNA, 19 nt, Artificial Sequence
  Description of Artificial Sequence: Synthetic oligonucleotide
cuaugaugauggggaauga

SEQ ID NO: 2374063 - RNA, 19 nt, Artificial Sequence
  Description of Artificial Sequence: Synthetic oligonucleotide
caguaacuaaaggugauuu

SEQ ID NO: 2374064 - RNA, 19 nt, Artificial Sequence
  Description of Artificial Sequence: Synthetic oligonucleotide
ucuuccguuuggccuccuu

SEQ ID NO: 2374065 - RNA, 19 nt, Artificial Sequence
  Description of Artificial Sequence: Synthetic oligonucleotide
ccacaguggcaucacuaag

SEQ ID NO: 2374066 - RNA, 19 nt, Artificial Sequence
  Description of Artificial Sequence: Synthetic oligonucleotide
gcaagaagcuuguguccac

SEQ ID NO: 2374067 - RNA, 19 nt, Artificial Sequence
  Description of Artificial Sequence: Synthetic oligonucleotide
cucauacauggccaccucu

SEQ ID NO: 2374068 - RNA, 19 nt, Artificial Sequence
  Description of Artificial Sequence: Synthetic oligonucleotide
aucguguacuugucccauu

SEQ ID NO: 2374069 - RNA, 19 nt, Artificial Sequence
  Description of Artificial Sequence: Synthetic oligonucleotide
cucggucccugucaggcaa

SEQ ID NO: 2374070 - RNA, 19 nt, Artificial Sequence
  Description of Artificial Sequence: Synthetic oligonucleotide
ccagagccaucccaguaac

SEQ ID NO: 2374071 - RNA, 19 nt, Artificial Sequence
  Description of Artificial Sequence: Synthetic oligonucleotide
gucaugccaacuucuggau

SEQ ID NO: 2374072 - RNA, 19 nt, Artificial Sequence
  Description of Artificial Sequence: Synthetic oligonucleotide
ggcucccaacgacuggcag

SEQ ID NO: 2374073 - RNA, 19 nt, Artificial Sequence
  Description of Artificial Sequence: Synthetic oligonucleotide
gcgcugaggagagccaagg

SEQ ID NO: 2374074 - RNA, 19 nt, Artificial Sequence
  Description of Artificial Sequence: Synthetic oligonucleotide
gaucguguacuugucccau

SEQ ID NO: 2374075 - RNA, 19 nt, Artificial Sequence
  Description of Artificial Sequence: Synthetic oligonucleotide
augagcugcuccaccccug

SEQ ID NO: 2374076 - RNA, 19 nt, Artificial Sequence
  Description of Artificial Sequence: Synthetic oligonucleotide
gccaucccaguaacuaaag

SEQ ID NO: 2374077 - RNA, 19 nt, Artificial Sequence
  Description of Artificial Sequence: Synthetic oligonucleotide
cucuuuccucgagccuugg

SEQ ID NO: 2374078 - RNA, 19 nt, Artificial Sequence
  Description of Artificial Sequence: Synthetic oligonucleotide
agccaaggucaugccaacu

SEQ ID NO: 2374079 - RNA, 19 nt, Artificial Sequence
  Description of Artificial Sequence: Synthetic oligonucleotide
ccggaucguguacuugucc

SEQ ID NO: 2374080 - RNA, 19 nt, Artificial Sequence
  Description of Artificial Sequence: Synthetic oligonucleotide
gacuggcaggaaagaugug

SEQ ID NO: 2374081 - RNA, 19 nt, Artificial Sequence
  Description of Artificial Sequence: Synthetic oligonucleotide
cgagccuuggugacgauga

SEQ ID NO: 2374082 - RNA, 19 nt, Artificial Sequence
  Description of Artificial Sequence: Synthetic oligonucleotide
caccccugcugaccugagc

SEQ ID NO: 2374083 - RNA, 19 nt, Artificial Sequence
  Description of Artificial Sequence: Synthetic oligonucleotide
caucaggauucuuccccaa

SEQ ID NO: 2374084 - RNA, 19 nt, Artificial Sequence
  Description of Artificial Sequence: Synthetic oligonucleotide
cacugaagucuuugcgcaa

SEQ ID NO: 2374085 - RNA, 19 nt, Artificial Sequence
  Description of Artificial Sequence: Synthetic oligonucleotide
caucaugaacaucgaaguu

SEQ ID NO: 2374086 - RNA, 19 nt, Artificial Sequence
  Description of Artificial Sequence: Synthetic oligonucleotide
gcccacucuuuccucgagc

SEQ ID NO: 2374087 - RNA, 19 nt, Artificial Sequence
  Description of Artificial Sequence: Synthetic oligonucleotide
ccuuggugacgaugaaauc

SEQ ID NO: 2374088 - RNA, 19 nt, Artificial Sequence
  Description of Artificial Sequence: Synthetic oligonucleotide
caugagcugcuccaccccu

SEQ ID NO: 2374089 - RNA, 19 nt, Artificial Sequence
  Description of Artificial Sequence: Synthetic oligonucleotide
gagcgcugaggagagccaa

SEQ ID NO: 2374090 - RNA, 19 nt, Artificial Sequence
  Description of Artificial Sequence: Synthetic oligonucleotide
acugugcgccgguguccag

SEQ ID NO: 2374091 - RNA, 19 nt, Artificial Sequence
  Description of Artificial Sequence: Synthetic oligonucleotide
cuucuuccuccaaggugaa

SEQ ID NO: 2374092 - RNA, 19 nt, Artificial Sequence
  Description of Artificial Sequence: Synthetic oligonucleotide
caggauucuuccccaauuu

SEQ ID NO: 2374093 - RNA, 19 nt, Artificial Sequence
  Description of Artificial Sequence: Synthetic oligonucleotide
gccuuggugacgaugaaau

SEQ ID NO: 2374094 - RNA, 19 nt, Artificial Sequence
  Description of Artificial Sequence: Synthetic oligonucleotide
gucaggcaagaagcuugug

SEQ ID NO: 2374095 - RNA, 19 nt, Artificial Sequence
  Description of Artificial Sequence: Synthetic oligonucleotide
caacgacuggcaggaaaga

SEQ ID NO: 2374096 - RNA, 19 nt, Artificial Sequence
  Description of Artificial Sequence: Synthetic oligonucleotide
guucaccggaucguguacu

SEQ ID NO: 2374097 - RNA, 19 nt, Artificial Sequence
  Description of Artificial Sequence: Synthetic oligonucleotide
caugaacaucgaaguugaa

SEQ ID NO: 2374098 - RNA, 19 nt, Artificial Sequence
  Description of Artificial Sequence: Synthetic oligonucleotide
cuucucucgcagcuucucu

SEQ ID NO: 2374099 - RNA, 19 nt, Artificial Sequence
  Description of Artificial Sequence: Synthetic oligonucleotide
gcaugugacucauccuucu

SEQ ID NO: 2374100 - RNA, 19 nt, Artificial Sequence
  Description of Artificial Sequence: Synthetic oligonucleotide
cuaagcagucguacaucau

SEQ ID NO: 2374101 - RNA, 19 nt, Artificial Sequence
  Description of Artificial Sequence: Synthetic oligonucleotide
cugcugcaucguguugccc

SEQ ID NO: 2374102 - RNA, 19 nt, Artificial Sequence
  Description of Artificial Sequence: Synthetic oligonucleotide
ggcccacucuuuccucgag

SEQ ID NO: 2374103 - RNA, 19 nt, Artificial Sequence
  Description of Artificial Sequence: Synthetic oligonucleotide
cauuucuucucugggucau

SEQ ID NO: 2374104 - RNA, 19 nt, Artificial Sequence
  Description of Artificial Sequence: Synthetic oligonucleotide
gaagaguggcccacucuuu

SEQ ID NO: 2374105 - RNA, 19 nt, Artificial Sequence
  Description of Artificial Sequence: Synthetic oligonucleotide
cuccugacguagcucuucu

SEQ ID NO: 2374106 - RNA, 19 nt, Artificial Sequence
  Description of Artificial Sequence: Synthetic oligonucleotide
ccugcugaccugagcucac

SEQ ID NO: 2374107 - RNA, 19 nt, Artificial Sequence
  Description of Artificial Sequence: Synthetic oligonucleotide
ugccugcaugugacucauc

SEQ ID NO: 2374108 - RNA, 19 nt, Artificial Sequence
  Description of Artificial Sequence: Synthetic oligonucleotide
gccgauucuccuccuccuc

SEQ ID NO: 2374109 - RNA, 19 nt, Artificial Sequence
  Description of Artificial Sequence: Synthetic oligonucleotide
cugugcgccgguguccaga

SEQ ID NO: 2374110 - RNA, 19 nt, Artificial Sequence
  Description of Artificial Sequence: Synthetic oligonucleotide
augccaacuucuggauguu

SEQ ID NO: 2374111 - RNA, 19 nt, Artificial Sequence
  Description of Artificial Sequence: Synthetic oligonucleotide
cuccaccccugcugaccug

SEQ ID NO: 2374112 - RNA, 19 nt, Artificial Sequence
  Description of Artificial Sequence: Synthetic oligonucleotide
agcucuucucgaagccgau

SEQ ID NO: 2374113 - RNA, 19 nt, Artificial Sequence
  Description of Artificial Sequence: Synthetic oligonucleotide
cccaacgacuggcaggaaa

SEQ ID NO: 2374114 - RNA, 19 nt, Artificial Sequence
  Description of Artificial Sequence: Synthetic oligonucleotide
ccucucggucccugucagg

SEQ ID NO: 2374115 - RNA, 19 nt, Artificial Sequence
  Description of Artificial Sequence: Synthetic oligonucleotide
ggcuagagaucuuccguuu

SEQ ID NO: 2374116 - RNA, 19 nt, Artificial Sequence
  Description of Artificial Sequence: Synthetic oligonucleotide
cguguacuugucccauuuc

SEQ ID NO: 2374117 - RNA, 19 nt, Artificial Sequence
  Description of Artificial Sequence: Synthetic oligonucleotide
cagcuccucaacaccacuu

SEQ ID NO: 2374118 - RNA, 19 nt, Artificial Sequence
  Description of Artificial Sequence: Synthetic oligonucleotide
ggggaaugauuaaguccuc

SEQ ID NO: 2374119 - RNA, 19 nt, Artificial Sequence
  Description of Artificial Sequence: Synthetic oligonucleotide
cguacaucaucaugaacau

SEQ ID NO: 2374120 - RNA, 19 nt, Artificial Sequence
  Description of Artificial Sequence: Synthetic oligonucleotide
cagagccaucccaguaacu

SEQ ID NO: 2374121 - RNA, 19 nt, Artificial Sequence
  Description of Artificial Sequence: Synthetic oligonucleotide
cgaugaaaucguagaagcu

SEQ ID NO: 2374122 - RNA, 19 nt, Artificial Sequence
  Description of Artificial Sequence: Synthetic oligonucleotide
gcaucacuaagcagucgua

SEQ ID NO: 2374123 - RNA, 19 nt, Artificial Sequence
  Description of Artificial Sequence: Synthetic oligonucleotide
caacaccacuuugccugca

SEQ ID NO: 2374124 - RNA, 19 nt, Artificial Sequence
  Description of Artificial Sequence: Synthetic oligonucleotide
cccaguaacuaaaggugau

SEQ ID NO: 2374125 - RNA, 19 nt, Artificial Sequence
  Description of Artificial Sequence: Synthetic oligonucleotide
gugcgccgguguccagagc

SEQ ID NO: 2374126 - RNA, 19 nt, Artificial Sequence
  Description of Artificial Sequence: Synthetic oligonucleotide
ccaaggugaaggacaggcu

SEQ ID NO: 2374127 - RNA, 19 nt, Artificial Sequence
  Description of Artificial Sequence: Synthetic oligonucleotide
cccugcugaccugagcuca

SEQ ID NO: 2374128 - RNA, 19 nt, Artificial Sequence
  Description of Artificial Sequence: Synthetic oligonucleotide
ccccugcugaccugagcuc

SEQ ID NO: 2374129 - RNA, 19 nt, Artificial Sequence
  Description of Artificial Sequence: Synthetic oligonucleotide
ccugcaugugacucauccu

SEQ ID NO: 2374130 - RNA, 19 nt, Artificial Sequence
  Description of Artificial Sequence: Synthetic oligonucleotide
ccucaacaccacuuugccu

SEQ ID NO: 2374131 - RNA, 19 nt, Artificial Sequence
  Description of Artificial Sequence: Synthetic oligonucleotide
gcaagaucucgagugcuuu

SEQ ID NO: 2374132 - RNA, 19 nt, Artificial Sequence
  Description of Artificial Sequence: Synthetic oligonucleotide
cugggucauagggcuccca

SEQ ID NO: 2374133 - RNA, 19 nt, Artificial Sequence
  Description of Artificial Sequence: Synthetic oligonucleotide
ucccaacgacuggcaggaa

SEQ ID NO: 2374134 - RNA, 19 nt, Artificial Sequence
  Description of Artificial Sequence: Synthetic oligonucleotide
ccaccccugcugaccugag

SEQ ID NO: 2374135 - RNA, 19 nt, Artificial Sequence
  Description of Artificial Sequence: Synthetic oligonucleotide
gcgcaagaucucgagugcu

SEQ ID NO: 2374136 - RNA, 19 nt, Artificial Sequence
  Description of Artificial Sequence: Synthetic oligonucleotide
gcuucccacuccugacgua

SEQ ID NO: 2374137 - RNA, 19 nt, Artificial Sequence
  Description of Artificial Sequence: Synthetic oligonucleotide
gcugcaucguguugcccuu

SEQ ID NO: 2374138 - RNA, 19 nt, Artificial Sequence
  Description of Artificial Sequence: Synthetic oligonucleotide
cccugucaggcaagaagcu

SEQ ID NO: 2374139 - RNA, 19 nt, Artificial Sequence
  Description of Artificial Sequence: Synthetic oligonucleotide
ggucccugucaggcaagaa

SEQ ID NO: 2374140 - RNA, 19 nt, Artificial Sequence
  Description of Artificial Sequence: Synthetic oligonucleotide
gggcucccaacgacuggca

SEQ ID NO: 2374141 - RNA, 19 nt, Artificial Sequence
  Description of Artificial Sequence: Synthetic oligonucleotide
ccaguaacuaaaggugauu

SEQ ID NO: 2374142 - RNA, 19 nt, Artificial Sequence
  Description of Artificial Sequence: Synthetic oligonucleotide
cgguguccagagccauccc

SEQ ID NO: 2374143 - RNA, 19 nt, Artificial Sequence
  Description of Artificial Sequence: Synthetic oligonucleotide
gccgguguccagagccauc

SEQ ID NO: 2374144 - RNA, 19 nt, Artificial Sequence
  Description of Artificial Sequence: Synthetic oligonucleotide
gcgccgguguccagagcca

SEQ ID NO: 2374145 - RNA, 19 nt, Artificial Sequence
  Description of Artificial Sequence: Synthetic oligonucleotide
gcucuucucgaagccgauu

SEQ ID NO: 2374146 - RNA, 19 nt, Artificial Sequence
  Description of Artificial Sequence: Synthetic oligonucleotide
cucgagccuuggugacgau

SEQ ID NO: 2374147 - RNA, 19 nt, Artificial Sequence
  Description of Artificial Sequence: Synthetic oligonucleotide
cugcaucguguugcccuuu

SEQ ID NO: 2374148 - RNA, 19 nt, Artificial Sequence
  Description of Artificial Sequence: Synthetic oligonucleotide
cgagugcuuucugcaggaa

SEQ ID NO: 2374149 - RNA, 19 nt, Artificial Sequence
  Description of Artificial Sequence: Synthetic oligonucleotide
cgaagccgauucuccuccu

SEQ ID NO: 2374150 - RNA, 19 nt, Artificial Sequence
  Description of Artificial Sequence: Synthetic oligonucleotide
uguaauacgaugaacagca

SEQ ID NO: 2374151 - RNA, 19 nt, Artificial Sequence
  Description of Artificial Sequence: Synthetic oligonucleotide
uuuaauugagcacaguugc

SEQ ID NO: 2374152 - RNA, 19 nt, Artificial Sequence
  Description of Artificial Sequence: Synthetic oligonucleotide
aaaauaaucagaggcagac

SEQ ID NO: 2374153 - RNA, 19 nt, Artificial Sequence
  Description of Artificial Sequence: Synthetic oligonucleotide
ucaaucuuaauaaagcgcu

SEQ ID NO: 2374154 - RNA, 19 nt, Artificial Sequence
  Description of Artificial Sequence: Synthetic oligonucleotide
aaucuuaauaaagcgcugc

SEQ ID NO: 2374155 - RNA, 19 nt, Artificial Sequence
  Description of Artificial Sequence: Synthetic oligonucleotide
aauacgaugaacagcaaag

SEQ ID NO: 2374156 - RNA, 19 nt, Artificial Sequence
  Description of Artificial Sequence: Synthetic oligonucleotide
aauguuuuggagcggcuac

SEQ ID NO: 2374157 - RNA, 19 nt, Artificial Sequence
  Description of Artificial Sequence: Synthetic oligonucleotide
uuugccaucaaucuuaaua

SEQ ID NO: 2374158 - RNA, 19 nt, Artificial Sequence
  Description of Artificial Sequence: Synthetic oligonucleotide
uuugugcccacaaagaucu

SEQ ID NO: 2374159 - RNA, 19 nt, Artificial Sequence
  Description of Artificial Sequence: Synthetic oligonucleotide
agaguacagacauuucucc

SEQ ID NO: 2374160 - RNA, 19 nt, Artificial Sequence
  Description of Artificial Sequence: Synthetic oligonucleotide
uuaauaaagcgcugcaugc

SEQ ID NO: 2374161 - RNA, 19 nt, Artificial Sequence
  Description of Artificial Sequence: Synthetic oligonucleotide
uacgaugaacagcaaagcg

SEQ ID NO: 2374162 - RNA, 19 nt, Artificial Sequence
  Description of Artificial Sequence: Synthetic oligonucleotide
uuucuugggaccacgagcc

SEQ ID NO: 2374163 - RNA, 19 nt, Artificial Sequence
  Description of Artificial Sequence: Synthetic oligonucleotide
caucaaucuuaauaaagcg

SEQ ID NO: 2374164 - RNA, 19 nt, Artificial Sequence
  Description of Artificial Sequence: Synthetic oligonucleotide
gauguaauacgaugaacag

SEQ ID NO: 2374165 - RNA, 19 nt, Artificial Sequence
  Description of Artificial Sequence: Synthetic oligonucleotide
cauaaauccagcaggguag

SEQ ID NO: 2374166 - RNA, 19 nt, Artificial Sequence
  Description of Artificial Sequence: Synthetic oligonucleotide
uuuuggagcggcuacacgc

SEQ ID NO: 2374167 - RNA, 19 nt, Artificial Sequence
  Description of Artificial Sequence: Synthetic oligonucleotide
aucaaucuuaauaaagcgc

SEQ ID NO: 2374168 - RNA, 19 nt, Artificial Sequence
  Description of Artificial Sequence: Synthetic oligonucleotide
cauccaauguuuuggagcg

SEQ ID NO: 2374169 - RNA, 19 nt, Artificial Sequence
  Description of Artificial Sequence: Synthetic oligonucleotide
cuuaauaaagcgcugcaug

SEQ ID NO: 2374170 - RNA, 19 nt, Artificial Sequence
  Description of Artificial Sequence: Synthetic oligonucleotide
uggacgaggagcaaacacg

SEQ ID NO: 2374171 - RNA, 19 nt, Artificial Sequence
  Description of Artificial Sequence: Synthetic oligonucleotide
augaacagcaaagcgaccc

SEQ ID NO: 2374172 - RNA, 19 nt, Artificial Sequence
  Description of Artificial Sequence: Synthetic oligonucleotide
ucucucuucagcaauggug

SEQ ID NO: 2374173 - RNA, 19 nt, Artificial Sequence
  Description of Artificial Sequence: Synthetic oligonucleotide
uccuuuugugcccacaaag

SEQ ID NO: 2374174 - RNA, 19 nt, Artificial Sequence
  Description of Artificial Sequence: Synthetic oligonucleotide
ggugucauagaucaggcgg

SEQ ID NO: 2374175 - RNA, 19 nt, Artificial Sequence
  Description of Artificial Sequence: Synthetic oligonucleotide
uguuuaauugagcacaguu

SEQ ID NO: 2374176 - RNA, 19 nt, Artificial Sequence
  Description of Artificial Sequence: Synthetic oligonucleotide
ucauagaucaggcggaagu

SEQ ID NO: 2374177 - RNA, 19 nt, Artificial Sequence
  Description of Artificial Sequence: Synthetic oligonucleotide
aagaguacagacauuucuc

SEQ ID NO: 2374178 - RNA, 19 nt, Artificial Sequence
  Description of Artificial Sequence: Synthetic oligonucleotide
acaacuuguacuuggccuc

SEQ ID NO: 2374179 - RNA, 19 nt, Artificial Sequence
  Description of Artificial Sequence: Synthetic oligonucleotide
aagucuguuccuuaggaaa

SEQ ID NO: 2374180 - RNA, 19 nt, Artificial Sequence
  Description of Artificial Sequence: Synthetic oligonucleotide
acauccauaaauccagcag

SEQ ID NO: 2374181 - RNA, 19 nt, Artificial Sequence
  Description of Artificial Sequence: Synthetic oligonucleotide
ucuccuagagaccauuuca

SEQ ID NO: 2374182 - RNA, 19 nt, Artificial Sequence
  Description of Artificial Sequence: Synthetic oligonucleotide
agcaggguagguuauauca

SEQ ID NO: 2374183 - RNA, 19 nt, Artificial Sequence
  Description of Artificial Sequence: Synthetic oligonucleotide
auguaauacgaugaacagc

SEQ ID NO: 2374184 - RNA, 19 nt, Artificial Sequence
  Description of Artificial Sequence: Synthetic oligonucleotide
uugccaucaaucuuaauaa

SEQ ID NO: 2374185 - RNA, 19 nt, Artificial Sequence
  Description of Artificial Sequence: Synthetic oligonucleotide
agauguaauacgaugaaca

SEQ ID NO: 2374186 - RNA, 19 nt, Artificial Sequence
  Description of Artificial Sequence: Synthetic oligonucleotide
ugcuguuuaauugagcaca

SEQ ID NO: 2374187 - RNA, 19 nt, Artificial Sequence
  Description of Artificial Sequence: Synthetic oligonucleotide
acgaggagcaaacacgccg

SEQ ID NO: 2374188 - RNA, 19 nt, Artificial Sequence
  Description of Artificial Sequence: Synthetic oligonucleotide
cuuggugucauagaucagg

SEQ ID NO: 2374189 - RNA, 19 nt, Artificial Sequence
  Description of Artificial Sequence: Synthetic oligonucleotide
aauaaagcgcugcaugcaa

SEQ ID NO: 2374190 - RNA, 19 nt, Artificial Sequence
  Description of Artificial Sequence: Synthetic oligonucleotide
ucaaggcauacuuaagucu

SEQ ID NO: 2374191 - RNA, 19 nt, Artificial Sequence
  Description of Artificial Sequence: Synthetic oligonucleotide
caaggcauacuuaagucug

SEQ ID NO: 2374192 - RNA, 19 nt, Artificial Sequence
  Description of Artificial Sequence: Synthetic oligonucleotide
auggacgaggagcaaacac

SEQ ID NO: 2374193 - RNA, 19 nt, Artificial Sequence
  Description of Artificial Sequence: Synthetic oligonucleotide
agucaaggcauacuuaagu

SEQ ID NO: 2374194 - RNA, 19 nt, Artificial Sequence
  Description of Artificial Sequence: Synthetic oligonucleotide
uuaauugagcacaguugcc

SEQ ID NO: 2374195 - RNA, 19 nt, Artificial Sequence
  Description of Artificial Sequence: Synthetic oligonucleotide
agcaaagcgacccuuggug

SEQ ID NO: 2374196 - RNA, 19 nt, Artificial Sequence
  Description of Artificial Sequence: Synthetic oligonucleotide
uugcacaacuuguacuugg

SEQ ID NO: 2374197 - RNA, 19 nt, Artificial Sequence
  Description of Artificial Sequence: Synthetic oligonucleotide
caugcuguuuaauugagca

SEQ ID NO: 2374198 - RNA, 19 nt, Artificial Sequence
  Description of Artificial Sequence: Synthetic oligonucleotide
auacgaugaacagcaaagc

SEQ ID NO: 2374199 - RNA, 19 nt, Artificial Sequence
  Description of Artificial Sequence: Synthetic oligonucleotide
auuuauccagcauccaaug

SEQ ID NO: 2374200 - RNA, 19 nt, Artificial Sequence
  Description of Artificial Sequence: Synthetic oligonucleotide
uuauccagcauccaauguu

SEQ ID NO: 2374201 - RNA, 19 nt, Artificial Sequence
  Description of Artificial Sequence: Synthetic oligonucleotide
guuuaauugagcacaguug

SEQ ID NO: 2374202 - RNA, 19 nt, Artificial Sequence
  Description of Artificial Sequence: Synthetic oligonucleotide
uaauacgaugaacagcaaa

SEQ ID NO: 2374203 - RNA, 19 nt, Artificial Sequence
  Description of Artificial Sequence: Synthetic oligonucleotide
aagcgcugcaugcaaaucu

SEQ ID NO: 2374204 - RNA, 19 nt, Artificial Sequence
  Description of Artificial Sequence: Synthetic oligonucleotide
guuucuugggaccacgagc

SEQ ID NO: 2374205 - RNA, 19 nt, Artificial Sequence
  Description of Artificial Sequence: Synthetic oligonucleotide
gcauacuuaagucuguucc

SEQ ID NO: 2374206 - RNA, 19 nt, Artificial Sequence
  Description of Artificial Sequence: Synthetic oligonucleotide
aauuuauccagcauccaau

SEQ ID NO: 2374207 - RNA, 19 nt, Artificial Sequence
  Description of Artificial Sequence: Synthetic oligonucleotide
uaaucagaggcagacauuc

SEQ ID NO: 2374208 - RNA, 19 nt, Artificial Sequence
  Description of Artificial Sequence: Synthetic oligonucleotide
ucacccacugcucuguuug

SEQ ID NO: 2374209 - RNA, 19 nt, Artificial Sequence
  Description of Artificial Sequence: Synthetic oligonucleotide
acuuaagucuguuccuuag

SEQ ID NO: 2374210 - RNA, 19 nt, Artificial Sequence
  Description of Artificial Sequence: Synthetic oligonucleotide
cugaugacauccauaaauc

SEQ ID NO: 2374211 - RNA, 19 nt, Artificial Sequence
  Description of Artificial Sequence: Synthetic oligonucleotide
aauccagcaggguagguua

SEQ ID NO: 2374212 - RNA, 19 nt, Artificial Sequence
  Description of Artificial Sequence: Synthetic oligonucleotide
cauucccucagcuugugag

SEQ ID NO: 2374213 - RNA, 19 nt, Artificial Sequence
  Description of Artificial Sequence: Synthetic oligonucleotide
augacauccauaaauccag

SEQ ID NO: 2374214 - RNA, 19 nt, Artificial Sequence
  Description of Artificial Sequence: Synthetic oligonucleotide
ucagauguaauacgaugaa

SEQ ID NO: 2374215 - RNA, 19 nt, Artificial Sequence
  Description of Artificial Sequence: Synthetic oligonucleotide
ccaucaaucuuaauaaagc

SEQ ID NO: 2374216 - RNA, 19 nt, Artificial Sequence
  Description of Artificial Sequence: Synthetic oligonucleotide
uauaucaguccugacuuug

SEQ ID NO: 2374217 - RNA, 19 nt, Artificial Sequence
  Description of Artificial Sequence: Synthetic oligonucleotide
cuuaagucuguuccuuagg

SEQ ID NO: 2374218 - RNA, 19 nt, Artificial Sequence
  Description of Artificial Sequence: Synthetic oligonucleotide
uguuucuugggaccacgag

SEQ ID NO: 2374219 - RNA, 19 nt, Artificial Sequence
  Description of Artificial Sequence: Synthetic oligonucleotide
acuuugcacaacuuguacu

SEQ ID NO: 2374220 - RNA, 19 nt, Artificial Sequence
  Description of Artificial Sequence: Synthetic oligonucleotide
augcuguuuaauugagcac

SEQ ID NO: 2374221 - RNA, 19 nt, Artificial Sequence
  Description of Artificial Sequence: Synthetic oligonucleotide
uccagucuugucaaugcug

SEQ ID NO: 2374222 - RNA, 19 nt, Artificial Sequence
  Description of Artificial Sequence: Synthetic oligonucleotide
cucagauguaauacgauga

SEQ ID NO: 2374223 - RNA, 19 nt, Artificial Sequence
  Description of Artificial Sequence: Synthetic oligonucleotide
uuuauccagcauccaaugu

SEQ ID NO: 2374224 - RNA, 19 nt, Artificial Sequence
  Description of Artificial Sequence: Synthetic oligonucleotide
ucagcaauggugaggcgga

SEQ ID NO: 2374225 - RNA, 19 nt, Artificial Sequence
  Description of Artificial Sequence: Synthetic oligonucleotide
agaccauuucacccacugc

SEQ ID NO: 2374226 - RNA, 19 nt, Artificial Sequence
  Description of Artificial Sequence: Synthetic oligonucleotide
uagaucaggcggaaguucu

SEQ ID NO: 2374227 - RNA, 19 nt, Artificial Sequence
  Description of Artificial Sequence: Synthetic oligonucleotide
ucuccagucuugucaaugc

SEQ ID NO: 2374228 - RNA, 19 nt, Artificial Sequence
  Description of Artificial Sequence: Synthetic oligonucleotide
uaucaguccugacuuugcc

SEQ ID NO: 2374229 - RNA, 19 nt, Artificial Sequence
  Description of Artificial Sequence: Synthetic oligonucleotide
auucccucagcuugugagg

SEQ ID NO: 2374230 - RNA, 19 nt, Artificial Sequence
  Description of Artificial Sequence: Synthetic oligonucleotide
gagaccauuucacccacug

SEQ ID NO: 2374231 - RNA, 19 nt, Artificial Sequence
  Description of Artificial Sequence: Synthetic oligonucleotide
guuccuuaggaaaauaauc

SEQ ID NO: 2374232 - RNA, 19 nt, Artificial Sequence
  Description of Artificial Sequence: Synthetic oligonucleotide
ugcucuguuuggcugcuag

SEQ ID NO: 2374233 - RNA, 19 nt, Artificial Sequence
  Description of Artificial Sequence: Synthetic oligonucleotide
uagguuauaucaguccuga

SEQ ID NO: 2374234 - RNA, 19 nt, Artificial Sequence
  Description of Artificial Sequence: Synthetic oligonucleotide
aucuuaauaaagcgcugca

SEQ ID NO: 2374235 - RNA, 19 nt, Artificial Sequence
  Description of Artificial Sequence: Synthetic oligonucleotide
ucaguccugacuuugccau

SEQ ID NO: 2374236 - RNA, 19 nt, Artificial Sequence
  Description of Artificial Sequence: Synthetic oligonucleotide
aaacacgccggucaauuua

SEQ ID NO: 2374237 - RNA, 19 nt, Artificial Sequence
  Description of Artificial Sequence: Synthetic oligonucleotide
uaauaaagcgcugcaugca

SEQ ID NO: 2374238 - RNA, 19 nt, Artificial Sequence
  Description of Artificial Sequence: Synthetic oligonucleotide
ggucaauuuauccagcauc

SEQ ID NO: 2374239 - RNA, 19 nt, Artificial Sequence
  Description of Artificial Sequence: Synthetic oligonucleotide
ugcacaacuuguacuuggc

SEQ ID NO: 2374240 - RNA, 19 nt, Artificial Sequence
  Description of Artificial Sequence: Synthetic oligonucleotide
uauccagcauccaauguuu

SEQ ID NO: 2374241 - RNA, 19 nt, Artificial Sequence
  Description of Artificial Sequence: Synthetic oligonucleotide
aauggugaggcggauuccu

SEQ ID NO: 2374242 - RNA, 19 nt, Artificial Sequence
  Description of Artificial Sequence: Synthetic oligonucleotide
auccauaaauccagcaggg

SEQ ID NO: 2374243 - RNA, 19 nt, Artificial Sequence
  Description of Artificial Sequence: Synthetic oligonucleotide
aaauaaucagaggcagaca

SEQ ID NO: 2374244 - RNA, 19 nt, Artificial Sequence
  Description of Artificial Sequence: Synthetic oligonucleotide
auagaucaggcggaaguuc

SEQ ID NO: 2374245 - RNA, 19 nt, Artificial Sequence
  Description of Artificial Sequence: Synthetic oligonucleotide
guuauaucaguccugacuu

SEQ ID NO: 2374246 - RNA, 19 nt, Artificial Sequence
  Description of Artificial Sequence: Synthetic oligonucleotide
gucaaggcauacuuaaguc

SEQ ID NO: 2374247 - RNA, 19 nt, Artificial Sequence
  Description of Artificial Sequence: Synthetic oligonucleotide
uccaauguuuuggagcggc

SEQ ID NO: 2374248 - RNA, 19 nt, Artificial Sequence
  Description of Artificial Sequence: Synthetic oligonucleotide
gcauccaauguuuuggagc

SEQ ID NO: 2374249 - RNA, 19 nt, Artificial Sequence
  Description of Artificial Sequence: Synthetic oligonucleotide
cucuguuuggcugcuagcc

SEQ ID NO: 2374250 - RNA, 19 nt, Artificial Sequence
  Description of Artificial Sequence: Synthetic oligonucleotide
uuuggagcggcuacacgcu

SEQ ID NO: 2374251 - RNA, 19 nt, Artificial Sequence
  Description of Artificial Sequence: Synthetic oligonucleotide
gaggcagacauucccucag

SEQ ID NO: 2374252 - RNA, 19 nt, Artificial Sequence
  Description of Artificial Sequence: Synthetic oligonucleotide
auaucaguccugacuuugc

SEQ ID NO: 2374253 - RNA, 19 nt, Artificial Sequence
  Description of Artificial Sequence: Synthetic oligonucleotide
cuagagaccauuucaccca

SEQ ID NO: 2374254 - RNA, 19 nt, Artificial Sequence
  Description of Artificial Sequence: Synthetic oligonucleotide
auaaauccagcaggguagg

SEQ ID NO: 2374255 - RNA, 19 nt, Artificial Sequence
  Description of Artificial Sequence: Synthetic oligonucleotide
ucuguuuggcugcuagccu

SEQ ID NO: 2374256 - RNA, 19 nt, Artificial Sequence
  Description of Artificial Sequence: Synthetic oligonucleotide
acgaugaacagcaaagcga

SEQ ID NO: 2374257 - RNA, 19 nt, Artificial Sequence
  Description of Artificial Sequence: Synthetic oligonucleotide
ucaggcggaaguucucucc

SEQ ID NO: 2374258 - RNA, 19 nt, Artificial Sequence
  Description of Artificial Sequence: Synthetic oligonucleotide
cuccuagagaccauuucac

SEQ ID NO: 2374259 - RNA, 19 nt, Artificial Sequence
  Description of Artificial Sequence: Synthetic oligonucleotide
ugaggcggauuccuuuucc

SEQ ID NO: 2374260 - RNA, 19 nt, Artificial Sequence
  Description of Artificial Sequence: Synthetic oligonucleotide
caguggauggacgaggagc

SEQ ID NO: 2374261 - RNA, 19 nt, Artificial Sequence
  Description of Artificial Sequence: Synthetic oligonucleotide
uggugucauagaucaggcg

SEQ ID NO: 2374262 - RNA, 19 nt, Artificial Sequence
  Description of Artificial Sequence: Synthetic oligonucleotide
uucccucagcuugugaggg

SEQ ID NO: 2374263 - RNA, 19 nt, Artificial Sequence
  Description of Artificial Sequence: Synthetic oligonucleotide
aaagcgcugcaugcaaauc

SEQ ID NO: 2374264 - RNA, 19 nt, Artificial Sequence
  Description of Artificial Sequence: Synthetic oligonucleotide
ugacauccauaaauccagc

SEQ ID NO: 2374265 - RNA, 19 nt, Artificial Sequence
  Description of Artificial Sequence: Synthetic oligonucleotide
caaucuuaauaaagcgcug

SEQ ID NO: 2374266 - RNA, 19 nt, Artificial Sequence
  Description of Artificial Sequence: Synthetic oligonucleotide
ggcggauuccuuuuccucg

SEQ ID NO: 2374267 - RNA, 19 nt, Artificial Sequence
  Description of Artificial Sequence: Synthetic oligonucleotide
ucucucucuucagcaaugg

SEQ ID NO: 2374268 - RNA, 19 nt, Artificial Sequence
  Description of Artificial Sequence: Synthetic oligonucleotide
ucuuaauaaagcgcugcau

SEQ ID NO: 2374269 - RNA, 19 nt, Artificial Sequence
  Description of Artificial Sequence: Synthetic oligonucleotide
agcauccaauguuuuggag

SEQ ID NO: 2374270 - RNA, 19 nt, Artificial Sequence
  Description of Artificial Sequence: Synthetic oligonucleotide
cacgccggucaauuuaucc

SEQ ID NO: 2374271 - RNA, 19 nt, Artificial Sequence
  Description of Artificial Sequence: Synthetic oligonucleotide
uaaagcgcugcaugcaaau

SEQ ID NO: 2374272 - RNA, 19 nt, Artificial Sequence
  Description of Artificial Sequence: Synthetic oligonucleotide
gaaaauaaucagaggcaga

SEQ ID NO: 2374273 - RNA, 19 nt, Artificial Sequence
  Description of Artificial Sequence: Synthetic oligonucleotide
cuucagauguuucuuggga

SEQ ID NO: 2374274 - RNA, 19 nt, Artificial Sequence
  Description of Artificial Sequence: Synthetic oligonucleotide
ugucucucucuucagcaau

SEQ ID NO: 2374275 - RNA, 19 nt, Artificial Sequence
  Description of Artificial Sequence: Synthetic oligonucleotide
gacuuugccaucaaucuua

SEQ ID NO: 2374276 - RNA, 19 nt, Artificial Sequence
  Description of Artificial Sequence: Synthetic oligonucleotide
agacauuucuccagcaugu

SEQ ID NO: 2374277 - RNA, 19 nt, Artificial Sequence
  Description of Artificial Sequence: Synthetic oligonucleotide
guuuuggagcggcuacacg

SEQ ID NO: 2374278 - RNA, 19 nt, Artificial Sequence
  Description of Artificial Sequence: Synthetic oligonucleotide
aucaguccugacuuugcca

SEQ ID NO: 2374279 - RNA, 19 nt, Artificial Sequence
  Description of Artificial Sequence: Synthetic oligonucleotide
aggcggauuccuuuuccuc

SEQ ID NO: 2374280 - RNA, 19 nt, Artificial Sequence
  Description of Artificial Sequence: Synthetic oligonucleotide
aggcagacauucccucagc

SEQ ID NO: 2374281 - RNA, 19 nt, Artificial Sequence
  Description of Artificial Sequence: Synthetic oligonucleotide
uuugcacaacuuguacuug

SEQ ID NO: 2374282 - RNA, 19 nt, Artificial Sequence
  Description of Artificial Sequence: Synthetic oligonucleotide
acgccggucaauuuaucca

SEQ ID NO: 2374283 - RNA, 19 nt, Artificial Sequence
  Description of Artificial Sequence: Synthetic oligonucleotide
uguuuggcugcuagccucu

SEQ ID NO: 2374284 - RNA, 19 nt, Artificial Sequence
  Description of Artificial Sequence: Synthetic oligonucleotide
ugacuuugccaucaaucuu

SEQ ID NO: 2374285 - RNA, 19 nt, Artificial Sequence
  Description of Artificial Sequence: Synthetic oligonucleotide
uagagaccauuucacccac

SEQ ID NO: 2374286 - RNA, 19 nt, Artificial Sequence
  Description of Artificial Sequence: Synthetic oligonucleotide
agguuauaucaguccugac

SEQ ID NO: 2374287 - RNA, 19 nt, Artificial Sequence
  Description of Artificial Sequence: Synthetic oligonucleotide
gguuauaucaguccugacu

SEQ ID NO: 2374288 - RNA, 19 nt, Artificial Sequence
  Description of Artificial Sequence: Synthetic oligonucleotide
caauuuauccagcauccaa

SEQ ID NO: 2374289 - RNA, 19 nt, Artificial Sequence
  Description of Artificial Sequence: Synthetic oligonucleotide
cucuucagcaauggugagg

SEQ ID NO: 2374290 - RNA, 19 nt, Artificial Sequence
  Description of Artificial Sequence: Synthetic oligonucleotide
aguggauggacgaggagca

SEQ ID NO: 2374291 - RNA, 19 nt, Artificial Sequence
  Description of Artificial Sequence: Synthetic oligonucleotide
aggguagguuauaucaguc

SEQ ID NO: 2374292 - RNA, 19 nt, Artificial Sequence
  Description of Artificial Sequence: Synthetic oligonucleotide
ggagcaaacacgccgguca

SEQ ID NO: 2374293 - RNA, 19 nt, Artificial Sequence
  Description of Artificial Sequence: Synthetic oligonucleotide
uccucagauguaauacgau

SEQ ID NO: 2374294 - RNA, 19 nt, Artificial Sequence
  Description of Artificial Sequence: Synthetic oligonucleotide
cuugggaccacgagccaug

SEQ ID NO: 2374295 - RNA, 19 nt, Artificial Sequence
  Description of Artificial Sequence: Synthetic oligonucleotide
uguuuuggagcggcuacac

SEQ ID NO: 2374296 - RNA, 19 nt, Artificial Sequence
  Description of Artificial Sequence: Synthetic oligonucleotide
guagguuauaucaguccug

SEQ ID NO: 2374297 - RNA, 19 nt, Artificial Sequence
  Description of Artificial Sequence: Synthetic oligonucleotide
ggguagguuauaucagucc

SEQ ID NO: 2374298 - RNA, 19 nt, Artificial Sequence
  Description of Artificial Sequence: Synthetic oligonucleotide
cagauguaauacgaugaac

SEQ ID NO: 2374299 - RNA, 19 nt, Artificial Sequence
  Description of Artificial Sequence: Synthetic oligonucleotide
cuccucagauguaauacga

SEQ ID NO: 2374300 - RNA, 19 nt, Artificial Sequence
  Description of Artificial Sequence: Synthetic oligonucleotide
cauuucacccacugcucug

SEQ ID NO: 2374301 - RNA, 19 nt, Artificial Sequence
  Description of Artificial Sequence: Synthetic oligonucleotide
gcuucagauguuucuuggg

SEQ ID NO: 2374302 - RNA, 19 nt, Artificial Sequence
  Description of Artificial Sequence: Synthetic oligonucleotide
cagucaaggcauacuuaag

SEQ ID NO: 2374303 - RNA, 19 nt, Artificial Sequence
  Description of Artificial Sequence: Synthetic oligonucleotide
ugccaucaaucuuaauaaa

SEQ ID NO: 2374304 - RNA, 19 nt, Artificial Sequence
  Description of Artificial Sequence: Synthetic oligonucleotide
uacuuggccuccucagaug

SEQ ID NO: 2374305 - RNA, 19 nt, Artificial Sequence
  Description of Artificial Sequence: Synthetic oligonucleotide
uccagucaaggcauacuua

SEQ ID NO: 2374306 - RNA, 19 nt, Artificial Sequence
  Description of Artificial Sequence: Synthetic oligonucleotide
agaggcagacauucccuca

SEQ ID NO: 2374307 - RNA, 19 nt, Artificial Sequence
  Description of Artificial Sequence: Synthetic oligonucleotide
ccucagauguaauacgaug

SEQ ID NO: 2374308 - RNA, 19 nt, Artificial Sequence
  Description of Artificial Sequence: Synthetic oligonucleotide
accauuucacccacugcuc

SEQ ID NO: 2374309 - RNA, 19 nt, Artificial Sequence
  Description of Artificial Sequence: Synthetic oligonucleotide
gaaguucucuccagucuug

SEQ ID NO: 2374310 - RNA, 19 nt, Artificial Sequence
  Description of Artificial Sequence: Synthetic oligonucleotide
cacaacuuguacuuggccu

SEQ ID NO: 2374311 - RNA, 19 nt, Artificial Sequence
  Description of Artificial Sequence: Synthetic oligonucleotide
acgcuucagauguuucuug

SEQ ID NO: 2374312 - RNA, 19 nt, Artificial Sequence
  Description of Artificial Sequence: Synthetic oligonucleotide
uacacgcuucagauguuuc

SEQ ID NO: 2374313 - RNA, 19 nt, Artificial Sequence
  Description of Artificial Sequence: Synthetic oligonucleotide
aucuccagucaaggcauac

SEQ ID NO: 2374314 - RNA, 19 nt, Artificial Sequence
  Description of Artificial Sequence: Synthetic oligonucleotide
agauguuucuugggaccac

SEQ ID NO: 2374315 - RNA, 19 nt, Artificial Sequence
  Description of Artificial Sequence: Synthetic oligonucleotide
agcggcuacacgcuucaga

SEQ ID NO: 2374316 - RNA, 19 nt, Artificial Sequence
  Description of Artificial Sequence: Synthetic oligonucleotide
caaagcgacccuugguguc

SEQ ID NO: 2374317 - RNA, 19 nt, Artificial Sequence
  Description of Artificial Sequence: Synthetic oligonucleotide
cuguuccuuaggaaaauaa

SEQ ID NO: 2374318 - RNA, 19 nt, Artificial Sequence
  Description of Artificial Sequence: Synthetic oligonucleotide
uccuuuuccucggggaaga

SEQ ID NO: 2374319 - RNA, 19 nt, Artificial Sequence
  Description of Artificial Sequence: Synthetic oligonucleotide
uuauaucaguccugacuuu

SEQ ID NO: 2374320 - RNA, 19 nt, Artificial Sequence
  Description of Artificial Sequence: Synthetic oligonucleotide
aguccugacuuugccauca

SEQ ID NO: 2374321 - RNA, 19 nt, Artificial Sequence
  Description of Artificial Sequence: Synthetic oligonucleotide
gcaauggugaggcggauuc

SEQ ID NO: 2374322 - RNA, 19 nt, Artificial Sequence
  Description of Artificial Sequence: Synthetic oligonucleotide
gguagguuauaucaguccu

SEQ ID NO: 2374323 - RNA, 19 nt, Artificial Sequence
  Description of Artificial Sequence: Synthetic oligonucleotide
aacacgccggucaauuuau

SEQ ID NO: 2374324 - RNA, 19 nt, Artificial Sequence
  Description of Artificial Sequence: Synthetic oligonucleotide
aaggcauacuuaagucugu

SEQ ID NO: 2374325 - RNA, 19 nt, Artificial Sequence
  Description of Artificial Sequence: Synthetic oligonucleotide
uuggccuccucagauguaa

SEQ ID NO: 2374326 - RNA, 19 nt, Artificial Sequence
  Description of Artificial Sequence: Synthetic oligonucleotide
ccuccucagauguaauacg

SEQ ID NO: 2374327 - RNA, 19 nt, Artificial Sequence
  Description of Artificial Sequence: Synthetic oligonucleotide
cauacuuaagucuguuccu

SEQ ID NO: 2374328 - RNA, 19 nt, Artificial Sequence
  Description of Artificial Sequence: Synthetic oligonucleotide
auacuuaagucuguuccuu

SEQ ID NO: 2374329 - RNA, 19 nt, Artificial Sequence
  Description of Artificial Sequence: Synthetic oligonucleotide
cuuugcacaacuuguacuu

SEQ ID NO: 2374330 - RNA, 19 nt, Artificial Sequence
  Description of Artificial Sequence: Synthetic oligonucleotide
ggcuacacgcuucagaugu

SEQ ID NO: 2374331 - RNA, 19 nt, Artificial Sequence
  Description of Artificial Sequence: Synthetic oligonucleotide
gcugcuagccucuugucuc

SEQ ID NO: 2374332 - RNA, 19 nt, Artificial Sequence
  Description of Artificial Sequence: Synthetic oligonucleotide
ugagcacaguugccuaaaa

SEQ ID NO: 2374333 - RNA, 19 nt, Artificial Sequence
  Description of Artificial Sequence: Synthetic oligonucleotide
ggacgaggagcaaacacgc

SEQ ID NO: 2374334 - RNA, 19 nt, Artificial Sequence
  Description of Artificial Sequence: Synthetic oligonucleotide
uggauggacgaggagcaaa

SEQ ID NO: 2374335 - RNA, 19 nt, Artificial Sequence
  Description of Artificial Sequence: Synthetic oligonucleotide
cccuuggugucauagauca

SEQ ID NO: 2374336 - RNA, 19 nt, Artificial Sequence
  Description of Artificial Sequence: Synthetic oligonucleotide
agucuguuccuuaggaaaa

SEQ ID NO: 2374337 - RNA, 19 nt, Artificial Sequence
  Description of Artificial Sequence: Synthetic oligonucleotide
ugucuccuagagaccauuu

SEQ ID NO: 2374338 - RNA, 19 nt, Artificial Sequence
  Description of Artificial Sequence: Synthetic oligonucleotide
gucuccuagagaccauuuc

SEQ ID NO: 2374339 - RNA, 19 nt, Artificial Sequence
  Description of Artificial Sequence: Synthetic oligonucleotide
caacuuguacuuggccucc

SEQ ID NO: 2374340 - RNA, 19 nt, Artificial Sequence
  Description of Artificial Sequence: Synthetic oligonucleotide
ucuguuccuuaggaaaaua

SEQ ID NO: 2374341 - RNA, 19 nt, Artificial Sequence
  Description of Artificial Sequence: Synthetic oligonucleotide
ucuugggaccacgagccau

SEQ ID NO: 2374342 - RNA, 19 nt, Artificial Sequence
  Description of Artificial Sequence: Synthetic oligonucleotide
uugggaccacgagccaugg

SEQ ID NO: 2374343 - RNA, 19 nt, Artificial Sequence
  Description of Artificial Sequence: Synthetic oligonucleotide
uugagcacaguugccuaaa

SEQ ID NO: 2374344 - RNA, 19 nt, Artificial Sequence
  Description of Artificial Sequence: Synthetic oligonucleotide
ugucauagaucaggcggaa

SEQ ID NO: 2374345 - RNA, 19 nt, Artificial Sequence
  Description of Artificial Sequence: Synthetic oligonucleotide
uucuugggaccacgagcca

SEQ ID NO: 2374346 - RNA, 19 nt, Artificial Sequence
  Description of Artificial Sequence: Synthetic oligonucleotide
uagccucuugucucucucu

SEQ ID NO: 2374347 - RNA, 19 nt, Artificial Sequence
  Description of Artificial Sequence: Synthetic oligonucleotide
aggagcaaacacgccgguc

SEQ ID NO: 2374348 - RNA, 19 nt, Artificial Sequence
  Description of Artificial Sequence: Synthetic oligonucleotide
acccuuggugucauagauc

SEQ ID NO: 2374349 - RNA, 19 nt, Artificial Sequence
  Description of Artificial Sequence: Synthetic oligonucleotide
cuuuugugcccacaaagau

SEQ ID NO: 2374350 - RNA, 19 nt, Artificial Sequence
  Description of Artificial Sequence: Synthetic oligonucleotide
gcuguuuaauugagcacag

SEQ ID NO: 2374351 - RNA, 19 nt, Artificial Sequence
  Description of Artificial Sequence: Synthetic oligonucleotide
uggagcggcuacacgcuuc

SEQ ID NO: 2374352 - RNA, 19 nt, Artificial Sequence
  Description of Artificial Sequence: Synthetic oligonucleotide
uccugacuuugccaucaau

SEQ ID NO: 2374353 - RNA, 19 nt, Artificial Sequence
  Description of Artificial Sequence: Synthetic oligonucleotide
aggcggaaguucucuccag

SEQ ID NO: 2374354 - RNA, 19 nt, Artificial Sequence
  Description of Artificial Sequence: Synthetic oligonucleotide
uggugaggcggauuccuuu

SEQ ID NO: 2374355 - RNA, 19 nt, Artificial Sequence
  Description of Artificial Sequence: Synthetic oligonucleotide
gcacaacuuguacuuggcc

SEQ ID NO: 2374356 - RNA, 19 nt, Artificial Sequence
  Description of Artificial Sequence: Synthetic oligonucleotide
auguuuuggagcggcuaca

SEQ ID NO: 2374357 - RNA, 19 nt, Artificial Sequence
  Description of Artificial Sequence: Synthetic oligonucleotide
gauuccuuuugugcccaca

SEQ ID NO: 2374358 - RNA, 19 nt, Artificial Sequence
  Description of Artificial Sequence: Synthetic oligonucleotide
gacauuucuccagcauguc

SEQ ID NO: 2374359 - RNA, 19 nt, Artificial Sequence
  Description of Artificial Sequence: Synthetic oligonucleotide
gcaggguagguuauaucag

SEQ ID NO: 2374360 - RNA, 19 nt, Artificial Sequence
  Description of Artificial Sequence: Synthetic oligonucleotide
gacgaggagcaaacacgcc

SEQ ID NO: 2374361 - RNA, 19 nt, Artificial Sequence
  Description of Artificial Sequence: Synthetic oligonucleotide
cagcuugugagggccagug

SEQ ID NO: 2374362 - RNA, 19 nt, Artificial Sequence
  Description of Artificial Sequence: Synthetic oligonucleotide
ccagucaaggcauacuuaa

SEQ ID NO: 2374363 - RNA, 19 nt, Artificial Sequence
  Description of Artificial Sequence: Synthetic oligonucleotide
auccaauguuuuggagcgg

SEQ ID NO: 2374364 - RNA, 19 nt, Artificial Sequence
  Description of Artificial Sequence: Synthetic oligonucleotide
ccuuuugugcccacaaaga

SEQ ID NO: 2374365 - RNA, 19 nt, Artificial Sequence
  Description of Artificial Sequence: Synthetic oligonucleotide
cacccacugcucuguuugg

SEQ ID NO: 2374366 - RNA, 19 nt, Artificial Sequence
  Description of Artificial Sequence: Synthetic oligonucleotide
acauucccucagcuuguga

SEQ ID NO: 2374367 - RNA, 19 nt, Artificial Sequence
  Description of Artificial Sequence: Synthetic oligonucleotide
uaaauccagcaggguaggu

SEQ ID NO: 2374368 - RNA, 19 nt, Artificial Sequence
  Description of Artificial Sequence: Synthetic oligonucleotide
aacuuguacuuggccuccu

SEQ ID NO: 2374369 - RNA, 19 nt, Artificial Sequence
  Description of Artificial Sequence: Synthetic oligonucleotide
cagauguuucuugggacca

SEQ ID NO: 2374370 - RNA, 19 nt, Artificial Sequence
  Description of Artificial Sequence: Synthetic oligonucleotide
caauggugaggcggauucc

SEQ ID NO: 2374371 - RNA, 19 nt, Artificial Sequence
  Description of Artificial Sequence: Synthetic oligonucleotide
gggaccacgagccauggcu

SEQ ID NO: 2374372 - RNA, 19 nt, Artificial Sequence
  Description of Artificial Sequence: Synthetic oligonucleotide
auaaagcgcugcaugcaaa

SEQ ID NO: 2374373 - RNA, 19 nt, Artificial Sequence
  Description of Artificial Sequence: Synthetic oligonucleotide
gauggacgaggagcaaaca

SEQ ID NO: 2374374 - RNA, 19 nt, Artificial Sequence
  Description of Artificial Sequence: Synthetic oligonucleotide
cagcauccaauguuuugga

SEQ ID NO: 2374375 - RNA, 19 nt, Artificial Sequence
  Description of Artificial Sequence: Synthetic oligonucleotide
auaaucagaggcagacauu

SEQ ID NO: 2374376 - RNA, 19 nt, Artificial Sequence
  Description of Artificial Sequence: Synthetic oligonucleotide
agccucuugucucucucuu

SEQ ID NO: 2374377 - RNA, 19 nt, Artificial Sequence
  Description of Artificial Sequence: Synthetic oligonucleotide
agacauucccucagcuugu

SEQ ID NO: 2374378 - RNA, 19 nt, Artificial Sequence
  Description of Artificial Sequence: Synthetic oligonucleotide
ggauggacgaggagcaaac

SEQ ID NO: 2374379 - RNA, 19 nt, Artificial Sequence
  Description of Artificial Sequence: Synthetic oligonucleotide
gcaugucuccuagagacca

SEQ ID NO: 2374380 - RNA, 19 nt, Artificial Sequence
  Description of Artificial Sequence: Synthetic oligonucleotide
ccauaaauccagcagggua

SEQ ID NO: 2374381 - RNA, 19 nt, Artificial Sequence
  Description of Artificial Sequence: Synthetic oligonucleotide
cucagcuugugagggccag

SEQ ID NO: 2374382 - RNA, 19 nt, Artificial Sequence
  Description of Artificial Sequence: Synthetic oligonucleotide
gagcaaacacgccggucaa

SEQ ID NO: 2374383 - RNA, 19 nt, Artificial Sequence
  Description of Artificial Sequence: Synthetic oligonucleotide
caggguagguuauaucagu

SEQ ID NO: 2374384 - RNA, 19 nt, Artificial Sequence
  Description of Artificial Sequence: Synthetic oligonucleotide
uucacccacugcucuguuu

SEQ ID NO: 2374385 - RNA, 19 nt, Artificial Sequence
  Description of Artificial Sequence: Synthetic oligonucleotide
ugagggccaguggauggac

SEQ ID NO: 2374386 - RNA, 19 nt, Artificial Sequence
  Description of Artificial Sequence: Synthetic oligonucleotide
ugggaccacgagccauggc

SEQ ID NO: 2374387 - RNA, 19 nt, Artificial Sequence
  Description of Artificial Sequence: Synthetic oligonucleotide
cagcaggguagguuauauc

SEQ ID NO: 2374388 - RNA, 19 nt, Artificial Sequence
  Description of Artificial Sequence: Synthetic oligonucleotide
guacuuggccuccucagau

SEQ ID NO: 2374389 - RNA, 19 nt, Artificial Sequence
  Description of Artificial Sequence: Synthetic oligonucleotide
caggcggaaguucucucca

SEQ ID NO: 2374390 - RNA, 19 nt, Artificial Sequence
  Description of Artificial Sequence: Synthetic oligonucleotide
gaucaggcggaaguucucu

SEQ ID NO: 2374391 - RNA, 19 nt, Artificial Sequence
  Description of Artificial Sequence: Synthetic oligonucleotide
auguuucuugggaccacga

SEQ ID NO: 2374392 - RNA, 19 nt, Artificial Sequence
  Description of Artificial Sequence: Synthetic oligonucleotide
gaggcggauuccuuuuccu

SEQ ID NO: 2374393 - RNA, 19 nt, Artificial Sequence
  Description of Artificial Sequence: Synthetic oligonucleotide
uuucacccacugcucuguu

SEQ ID NO: 2374394 - RNA, 19 nt, Artificial Sequence
  Description of Artificial Sequence: Synthetic oligonucleotide
uuggagcggcuacacgcuu

SEQ ID NO: 2374395 - RNA, 19 nt, Artificial Sequence
  Description of Artificial Sequence: Synthetic oligonucleotide
ggcaagaguacagacauuu

SEQ ID NO: 2374396 - RNA, 19 nt, Artificial Sequence
  Description of Artificial Sequence: Synthetic oligonucleotide
gcgacccuuggugucauag

SEQ ID NO: 2374397 - RNA, 19 nt, Artificial Sequence
  Description of Artificial Sequence: Synthetic oligonucleotide
ccucuugucucucucuuca

SEQ ID NO: 2374398 - RNA, 19 nt, Artificial Sequence
  Description of Artificial Sequence: Synthetic oligonucleotide
acuuugccaucaaucuuaa

SEQ ID NO: 2374399 - RNA, 19 nt, Artificial Sequence
  Description of Artificial Sequence: Synthetic oligonucleotide
gugaggcggauuccuuuuc

SEQ ID NO: 2374400 - RNA, 19 nt, Artificial Sequence
  Description of Artificial Sequence: Synthetic oligonucleotide
gcucuguuuggcugcuagc

SEQ ID NO: 2374401 - RNA, 19 nt, Artificial Sequence
  Description of Artificial Sequence: Synthetic oligonucleotide
caauguuuuggagcggcua

SEQ ID NO: 2374402 - RNA, 19 nt, Artificial Sequence
  Description of Artificial Sequence: Synthetic oligonucleotide
gcggaaguucucuccaguc

SEQ ID NO: 2374403 - RNA, 19 nt, Artificial Sequence
  Description of Artificial Sequence: Synthetic oligonucleotide
ucagcuugugagggccagu

SEQ ID NO: 2374404 - RNA, 19 nt, Artificial Sequence
  Description of Artificial Sequence: Synthetic oligonucleotide
cgccggucaauuuauccag

SEQ ID NO: 2374405 - RNA, 19 nt, Artificial Sequence
  Description of Artificial Sequence: Synthetic oligonucleotide
uggcugcuagccucuuguc

SEQ ID NO: 2374406 - RNA, 19 nt, Artificial Sequence
  Description of Artificial Sequence: Synthetic oligonucleotide
augucuccuagagaccauu

SEQ ID NO: 2374407 - RNA, 19 nt, Artificial Sequence
  Description of Artificial Sequence: Synthetic oligonucleotide
acugcucuguuuggcugcu

SEQ ID NO: 2374408 - RNA, 19 nt, Artificial Sequence
  Description of Artificial Sequence: Synthetic oligonucleotide
caguccugacuuugccauc

SEQ ID NO: 2374409 - RNA, 19 nt, Artificial Sequence
  Description of Artificial Sequence: Synthetic oligonucleotide
aggcauacuuaagucuguu

SEQ ID NO: 2374410 - RNA, 19 nt, Artificial Sequence
  Description of Artificial Sequence: Synthetic oligonucleotide
agcgcugcaugcaaaucuu

SEQ ID NO: 2374411 - RNA, 19 nt, Artificial Sequence
  Description of Artificial Sequence: Synthetic oligonucleotide
ggaccacgagccauggcug

SEQ ID NO: 2374412 - RNA, 19 nt, Artificial Sequence
  Description of Artificial Sequence: Synthetic oligonucleotide
ggagcggcuacacgcuuca

SEQ ID NO: 2374413 - RNA, 19 nt, Artificial Sequence
  Description of Artificial Sequence: Synthetic oligonucleotide
agcaauggugaggcggauu

SEQ ID NO: 2374414 - RNA, 19 nt, Artificial Sequence
  Description of Artificial Sequence: Synthetic oligonucleotide
cccucagcuugugagggcc

SEQ ID NO: 2374415 - RNA, 19 nt, Artificial Sequence
  Description of Artificial Sequence: Synthetic oligonucleotide
acacgccggucaauuuauc

SEQ ID NO: 2374416 - RNA, 19 nt, Artificial Sequence
  Description of Artificial Sequence: Synthetic oligonucleotide
guaauacgaugaacagcaa

SEQ ID NO: 2374417 - RNA, 19 nt, Artificial Sequence
  Description of Artificial Sequence: Synthetic oligonucleotide
gcaaagcgacccuuggugu

SEQ ID NO: 2374418 - RNA, 19 nt, Artificial Sequence
  Description of Artificial Sequence: Synthetic oligonucleotide
gcggcuacacgcuucagau

SEQ ID NO: 2374419 - RNA, 19 nt, Artificial Sequence
  Description of Artificial Sequence: Synthetic oligonucleotide
gcaagaguacagacauuuc

SEQ ID NO: 2374420 - RNA, 19 nt, Artificial Sequence
  Description of Artificial Sequence: Synthetic oligonucleotide
gaggagcaaacacgccggu

SEQ ID NO: 2374421 - RNA, 19 nt, Artificial Sequence
  Description of Artificial Sequence: Synthetic oligonucleotide
agcaaacacgccggucaau

SEQ ID NO: 2374422 - RNA, 19 nt, Artificial Sequence
  Description of Artificial Sequence: Synthetic oligonucleotide
aagcgacccuuggugucau

SEQ ID NO: 2374423 - RNA, 19 nt, Artificial Sequence
  Description of Artificial Sequence: Synthetic oligonucleotide
ccggucaauuuauccagca

SEQ ID NO: 2374424 - RNA, 19 nt, Artificial Sequence
  Description of Artificial Sequence: Synthetic oligonucleotide
cauagaucaggcggaaguu

SEQ ID NO: 2374425 - RNA, 19 nt, Artificial Sequence
  Description of Artificial Sequence: Synthetic oligonucleotide
agagaccauuucacccacu

SEQ ID NO: 2374426 - RNA, 19 nt, Artificial Sequence
  Description of Artificial Sequence: Synthetic oligonucleotide
cuccagucuugucaaugcu

SEQ ID NO: 2374427 - RNA, 19 nt, Artificial Sequence
  Description of Artificial Sequence: Synthetic oligonucleotide
ggcagacauucccucagcu

SEQ ID NO: 2374428 - RNA, 19 nt, Artificial Sequence
  Description of Artificial Sequence: Synthetic oligonucleotide
ggcugcuagccucuugucu

SEQ ID NO: 2374429 - RNA, 19 nt, Artificial Sequence
  Description of Artificial Sequence: Synthetic oligonucleotide
ugcuagccucuugucucuc

SEQ ID NO: 2374430 - RNA, 19 nt, Artificial Sequence
  Description of Artificial Sequence: Synthetic oligonucleotide
ccaguggauggacgaggag

SEQ ID NO: 2374431 - RNA, 19 nt, Artificial Sequence
  Description of Artificial Sequence: Synthetic oligonucleotide
gggauuccuuuugugccca

SEQ ID NO: 2374432 - RNA, 19 nt, Artificial Sequence
  Description of Artificial Sequence: Synthetic oligonucleotide
gccggucaauuuauccagc

SEQ ID NO: 2374433 - RNA, 19 nt, Artificial Sequence
  Description of Artificial Sequence: Synthetic oligonucleotide
cucucucuucagcaauggu

SEQ ID NO: 2374434 - RNA, 19 nt, Artificial Sequence
  Description of Artificial Sequence: Synthetic oligonucleotide
gagcggcuacacgcuucag

SEQ ID NO: 2374435 - RNA, 19 nt, Artificial Sequence
  Description of Artificial Sequence: Synthetic oligonucleotide
gucuguuccuuaggaaaau

SEQ ID NO: 2374436 - RNA, 19 nt, Artificial Sequence
  Description of Artificial Sequence: Synthetic oligonucleotide
auccagcaggguagguuau

SEQ ID NO: 2374437 - RNA, 19 nt, Artificial Sequence
  Description of Artificial Sequence: Synthetic oligonucleotide
cuuggccuccucagaugua

SEQ ID NO: 2374438 - RNA, 19 nt, Artificial Sequence
  Description of Artificial Sequence: Synthetic oligonucleotide
caaacacgccggucaauuu

SEQ ID NO: 2374439 - RNA, 19 nt, Artificial Sequence
  Description of Artificial Sequence: Synthetic oligonucleotide
cacgcuucagauguuucuu

SEQ ID NO: 2374440 - RNA, 19 nt, Artificial Sequence
  Description of Artificial Sequence: Synthetic oligonucleotide
cuguuuaauugagcacagu

SEQ ID NO: 2374441 - RNA, 19 nt, Artificial Sequence
  Description of Artificial Sequence: Synthetic oligonucleotide
caucuccagucaaggcaua

SEQ ID NO: 2374442 - RNA, 19 nt, Artificial Sequence
  Description of Artificial Sequence: Synthetic oligonucleotide
gcagacauucccucagcuu

SEQ ID NO: 2374443 - RNA, 19 nt, Artificial Sequence
  Description of Artificial Sequence: Synthetic oligonucleotide
guccugacuuugccaucaa

SEQ ID NO: 2374444 - RNA, 19 nt, Artificial Sequence
  Description of Artificial Sequence: Synthetic oligonucleotide
gcaaacacgccggucaauu

SEQ ID NO: 2374445 - RNA, 19 nt, Artificial Sequence
  Description of Artificial Sequence: Synthetic oligonucleotide
caugucuccuagagaccau

SEQ ID NO: 2374446 - RNA, 19 nt, Artificial Sequence
  Description of Artificial Sequence: Synthetic oligonucleotide
cggauuccuuuuccucggg

SEQ ID NO: 2374447 - RNA, 19 nt, Artificial Sequence
  Description of Artificial Sequence: Synthetic oligonucleotide
guggauggacgaggagcaa

SEQ ID NO: 2374448 - RNA, 19 nt, Artificial Sequence
  Description of Artificial Sequence: Synthetic oligonucleotide
gcuagccucuugucucucu

SEQ ID NO: 2374449 - RNA, 19 nt, Artificial Sequence
  Description of Artificial Sequence: Synthetic oligonucleotide
cggcuacacgcuucagaug

SEQ ID NO: 2374450 - RNA, 19 nt, Artificial Sequence
  Description of Artificial Sequence: Synthetic oligonucleotide
agcgacccuuggugucaua

SEQ ID NO: 2374451 - RNA, 19 nt, Artificial Sequence
  Description of Artificial Sequence: Synthetic oligonucleotide
ccucagcuugugagggcca

SEQ ID NO: 2374452 - RNA, 19 nt, Artificial Sequence
  Description of Artificial Sequence: Synthetic oligonucleotide
cggaaguucucuccagucu

SEQ ID NO: 2374453 - RNA, 19 nt, Artificial Sequence
  Description of Artificial Sequence: Synthetic oligonucleotide
cgacccuuggugucauaga

SEQ ID NO: 2374454 - RNA, 19 nt, Artificial Sequence
  Description of Artificial Sequence: Synthetic oligonucleotide
ccagcaggguagguuauau

SEQ ID NO: 2374455 - RNA, 19 nt, Artificial Sequence
  Description of Artificial Sequence: Synthetic oligonucleotide
cagcaauggugaggcggau

SEQ ID NO: 2374456 - RNA, 19 nt, Artificial Sequence
  Description of Artificial Sequence: Synthetic oligonucleotide
cugcucuguuuggcugcua

SEQ ID NO: 2374457 - RNA, 19 nt, Artificial Sequence
  Description of Artificial Sequence: Synthetic oligonucleotide
gcuacacgcuucagauguu

SEQ ID NO: 2374458 - RNA, 19 nt, Artificial Sequence
  Description of Artificial Sequence: Synthetic oligonucleotide
gcgcugcaugcaaaucuuu

SEQ ID NO: 2374459 - RNA, 19 nt, Artificial Sequence
  Description of Artificial Sequence: Synthetic oligonucleotide
gaaucuaaaagccugaugg

SEQ ID NO: 2374460 - RNA, 19 nt, Artificial Sequence
  Description of Artificial Sequence: Synthetic oligonucleotide
uuuauaagcauuaauaucu

SEQ ID NO: 2374461 - RNA, 19 nt, Artificial Sequence
  Description of Artificial Sequence: Synthetic oligonucleotide
aaugcaguacuuuauacag

SEQ ID NO: 2374462 - RNA, 19 nt, Artificial Sequence
  Description of Artificial Sequence: Synthetic oligonucleotide
uuuauuauggcauaaugca

SEQ ID NO: 2374463 - RNA, 19 nt, Artificial Sequence
  Description of Artificial Sequence: Synthetic oligonucleotide
aaugcucucgcccagcugc

SEQ ID NO: 2374464 - RNA, 19 nt, Artificial Sequence
  Description of Artificial Sequence: Synthetic oligonucleotide
ugaaaugugggccagugcg

SEQ ID NO: 2374465 - RNA, 19 nt, Artificial Sequence
  Description of Artificial Sequence: Synthetic oligonucleotide
aauguugugcauuucaaug

SEQ ID NO: 2374466 - RNA, 19 nt, Artificial Sequence
  Description of Artificial Sequence: Synthetic oligonucleotide
aaucuaaaagccugauggc

SEQ ID NO: 2374467 - RNA, 19 nt, Artificial Sequence
  Description of Artificial Sequence: Synthetic oligonucleotide
uuauuucugcugcagaugg

SEQ ID NO: 2374468 - RNA, 19 nt, Artificial Sequence
  Description of Artificial Sequence: Synthetic oligonucleotide
ugugaguugaucaaugagc

SEQ ID NO: 2374469 - RNA, 19 nt, Artificial Sequence
  Description of Artificial Sequence: Synthetic oligonucleotide
aaugcuuuacugaaacucc

SEQ ID NO: 2374470 - RNA, 19 nt, Artificial Sequence
  Description of Artificial Sequence: Synthetic oligonucleotide
ugcugauaaaagcagaugc

SEQ ID NO: 2374471 - RNA, 19 nt, Artificial Sequence
  Description of Artificial Sequence: Synthetic oligonucleotide
uccguuuaaacuuaauucc

SEQ ID NO: 2374472 - RNA, 19 nt, Artificial Sequence
  Description of Artificial Sequence: Synthetic oligonucleotide
ugcuaauugguauucaucc

SEQ ID NO: 2374473 - RNA, 19 nt, Artificial Sequence
  Description of Artificial Sequence: Synthetic oligonucleotide
aaaacaaacucccaguuuu

SEQ ID NO: 2374474 - RNA, 19 nt, Artificial Sequence
  Description of Artificial Sequence: Synthetic oligonucleotide
uuaaaguuguucaauggca

SEQ ID NO: 2374475 - RNA, 19 nt, Artificial Sequence
  Description of Artificial Sequence: Synthetic oligonucleotide
uuuguugucaccucugaag

SEQ ID NO: 2374476 - RNA, 19 nt, Artificial Sequence
  Description of Artificial Sequence: Synthetic oligonucleotide
aacaccuauccguuuaaac

SEQ ID NO: 2374477 - RNA, 19 nt, Artificial Sequence
  Description of Artificial Sequence: Synthetic oligonucleotide
uauggcauaaugcaguacu

SEQ ID NO: 2374478 - RNA, 19 nt, Artificial Sequence
  Description of Artificial Sequence: Synthetic oligonucleotide
uucaauggcaguaggaggc

SEQ ID NO: 2374479 - RNA, 19 nt, Artificial Sequence
  Description of Artificial Sequence: Synthetic oligonucleotide
uauuauggcauaaugcagu

SEQ ID NO: 2374480 - RNA, 19 nt, Artificial Sequence
  Description of Artificial Sequence: Synthetic oligonucleotide
agcauaacuaauguugugc

SEQ ID NO: 2374481 - RNA, 19 nt, Artificial Sequence
  Description of Artificial Sequence: Synthetic oligonucleotide
auaaugcaguacuuuauac

SEQ ID NO: 2374482 - RNA, 19 nt, Artificial Sequence
  Description of Artificial Sequence: Synthetic oligonucleotide
uuauuauggcauaaugcag

SEQ ID NO: 2374483 - RNA, 19 nt, Artificial Sequence
  Description of Artificial Sequence: Synthetic oligonucleotide
uaaaguuguucaauggcag

SEQ ID NO: 2374484 - RNA, 19 nt, Artificial Sequence
  Description of Artificial Sequence: Synthetic oligonucleotide
aauaucuuuauuauggcau

SEQ ID NO: 2374485 - RNA, 19 nt, Artificial Sequence
  Description of Artificial Sequence: Synthetic oligonucleotide
uuuacugaaacuccgcuuc

SEQ ID NO: 2374486 - RNA, 19 nt, Artificial Sequence
  Description of Artificial Sequence: Synthetic oligonucleotide
uuuccaagcauaacuaaug

SEQ ID NO: 2374487 - RNA, 19 nt, Artificial Sequence
  Description of Artificial Sequence: Synthetic oligonucleotide
aaaagcagaugcaaacccc

SEQ ID NO: 2374488 - RNA, 19 nt, Artificial Sequence
  Description of Artificial Sequence: Synthetic oligonucleotide
ugugaauaguuucuucuag

SEQ ID NO: 2374489 - RNA, 19 nt, Artificial Sequence
  Description of Artificial Sequence: Synthetic oligonucleotide
ugcaguacuuuauacagug

SEQ ID NO: 2374490 - RNA, 19 nt, Artificial Sequence
  Description of Artificial Sequence: Synthetic oligonucleotide
gaucaaugagcgcuggucg

SEQ ID NO: 2374491 - RNA, 19 nt, Artificial Sequence
  Description of Artificial Sequence: Synthetic oligonucleotide
uuuugcaucaaugcucucg

SEQ ID NO: 2374492 - RNA, 19 nt, Artificial Sequence
  Description of Artificial Sequence: Synthetic oligonucleotide
auguugugcauuucaaugg

SEQ ID NO: 2374493 - RNA, 19 nt, Artificial Sequence
  Description of Artificial Sequence: Synthetic oligonucleotide
cucacuuuugcaucaaugc

SEQ ID NO: 2374494 - RNA, 19 nt, Artificial Sequence
  Description of Artificial Sequence: Synthetic oligonucleotide
uucuagucucuacucaugg

SEQ ID NO: 2374495 - RNA, 19 nt, Artificial Sequence
  Description of Artificial Sequence: Synthetic oligonucleotide
gauugcuuaaaguuguuca

SEQ ID NO: 2374496 - RNA, 19 nt, Artificial Sequence
  Description of Artificial Sequence: Synthetic oligonucleotide
uuugcaucaaugcucucgc

SEQ ID NO: 2374497 - RNA, 19 nt, Artificial Sequence
  Description of Artificial Sequence: Synthetic oligonucleotide
caguacuuuauacaguggg

SEQ ID NO: 2374498 - RNA, 19 nt, Artificial Sequence
  Description of Artificial Sequence: Synthetic oligonucleotide
uuuauuauuucugcugcag

SEQ ID NO: 2374499 - RNA, 19 nt, Artificial Sequence
  Description of Artificial Sequence: Synthetic oligonucleotide
uucaauggagcaccguagg

SEQ ID NO: 2374500 - RNA, 19 nt, Artificial Sequence
  Description of Artificial Sequence: Synthetic oligonucleotide
uuucaauggagcaccguag

SEQ ID NO: 2374501 - RNA, 19 nt, Artificial Sequence
  Description of Artificial Sequence: Synthetic oligonucleotide
uaaugcaguacuuuauaca

SEQ ID NO: 2374502 - RNA, 19 nt, Artificial Sequence
  Description of Artificial Sequence: Synthetic oligonucleotide
ugaaucacgccacuucucc

SEQ ID NO: 2374503 - RNA, 19 nt, Artificial Sequence
  Description of Artificial Sequence: Synthetic oligonucleotide
acuuuauacagugggcucc

SEQ ID NO: 2374504 - RNA, 19 nt, Artificial Sequence
  Description of Artificial Sequence: Synthetic oligonucleotide
acaccuauccguuuaaacu

SEQ ID NO: 2374505 - RNA, 19 nt, Artificial Sequence
  Description of Artificial Sequence: Synthetic oligonucleotide
acuaauguugugcauuuca

SEQ ID NO: 2374506 - RNA, 19 nt, Artificial Sequence
  Description of Artificial Sequence: Synthetic oligonucleotide
agauggaacaccuauccgu

SEQ ID NO: 2374507 - RNA, 19 nt, Artificial Sequence
  Description of Artificial Sequence: Synthetic oligonucleotide
uugugaguugaucaaugag

SEQ ID NO: 2374508 - RNA, 19 nt, Artificial Sequence
  Description of Artificial Sequence: Synthetic oligonucleotide
caucaaaacaaacucccag

SEQ ID NO: 2374509 - RNA, 19 nt, Artificial Sequence
  Description of Artificial Sequence: Synthetic oligonucleotide
uugugcauuucaauggagc

SEQ ID NO: 2374510 - RNA, 19 nt, Artificial Sequence
  Description of Artificial Sequence: Synthetic oligonucleotide
uacucauggaccaaaugcu

SEQ ID NO: 2374511 - RNA, 19 nt, Artificial Sequence
  Description of Artificial Sequence: Synthetic oligonucleotide
uuuaaacuuaauucccgcu

SEQ ID NO: 2374512 - RNA, 19 nt, Artificial Sequence
  Description of Artificial Sequence: Synthetic oligonucleotide
uaggaucauggucacaaag

SEQ ID NO: 2374513 - RNA, 19 nt, Artificial Sequence
  Description of Artificial Sequence: Synthetic oligonucleotide
ucuaaaggcaccgcgacug

SEQ ID NO: 2374514 - RNA, 19 nt, Artificial Sequence
  Description of Artificial Sequence: Synthetic oligonucleotide
uuaaacuuaauucccgcuu

SEQ ID NO: 2374515 - RNA, 19 nt, Artificial Sequence
  Description of Artificial Sequence: Synthetic oligonucleotide
gugaguugaucaaugagcg

SEQ ID NO: 2374516 - RNA, 19 nt, Artificial Sequence
  Description of Artificial Sequence: Synthetic oligonucleotide
uggaccaaaugcuuuacug

SEQ ID NO: 2374517 - RNA, 19 nt, Artificial Sequence
  Description of Artificial Sequence: Synthetic oligonucleotide
aauucccgcuuucuguuuc

SEQ ID NO: 2374518 - RNA, 19 nt, Artificial Sequence
  Description of Artificial Sequence: Synthetic oligonucleotide
ugugcauuucaauggagca

SEQ ID NO: 2374519 - RNA, 19 nt, Artificial Sequence
  Description of Artificial Sequence: Synthetic oligonucleotide
ugcuuaaaguuguucaaug

SEQ ID NO: 2374520 - RNA, 19 nt, Artificial Sequence
  Description of Artificial Sequence: Synthetic oligonucleotide
ugaaacuccgcuucuggcc

SEQ ID NO: 2374521 - RNA, 19 nt, Artificial Sequence
  Description of Artificial Sequence: Synthetic oligonucleotide
aguacuuuauacagugggc

SEQ ID NO: 2374522 - RNA, 19 nt, Artificial Sequence
  Description of Artificial Sequence: Synthetic oligonucleotide
uaagcauuaauaucuuuau

SEQ ID NO: 2374523 - RNA, 19 nt, Artificial Sequence
  Description of Artificial Sequence: Synthetic oligonucleotide
uuauuauuucugcugcaga

SEQ ID NO: 2374524 - RNA, 19 nt, Artificial Sequence
  Description of Artificial Sequence: Synthetic oligonucleotide
uauuauuucugcugcagau

SEQ ID NO: 2374525 - RNA, 19 nt, Artificial Sequence
  Description of Artificial Sequence: Synthetic oligonucleotide
uucagugcggacaucaaaa

SEQ ID NO: 2374526 - RNA, 19 nt, Artificial Sequence
  Description of Artificial Sequence: Synthetic oligonucleotide
cuugugcugauaaaagcag

SEQ ID NO: 2374527 - RNA, 19 nt, Artificial Sequence
  Description of Artificial Sequence: Synthetic oligonucleotide
ugaauaguuucuucuaguc

SEQ ID NO: 2374528 - RNA, 19 nt, Artificial Sequence
  Description of Artificial Sequence: Synthetic oligonucleotide
uuguugucaccucugaagu

SEQ ID NO: 2374529 - RNA, 19 nt, Artificial Sequence
  Description of Artificial Sequence: Synthetic oligonucleotide
guuuaaacuuaauucccgc

SEQ ID NO: 2374530 - RNA, 19 nt, Artificial Sequence
  Description of Artificial Sequence: Synthetic oligonucleotide
ccaagcauaacuaauguug

SEQ ID NO: 2374531 - RNA, 19 nt, Artificial Sequence
  Description of Artificial Sequence: Synthetic oligonucleotide
uauccguuuaaacuuaauu

SEQ ID NO: 2374532 - RNA, 19 nt, Artificial Sequence
  Description of Artificial Sequence: Synthetic oligonucleotide
aaucacgccacuucuccug

SEQ ID NO: 2374533 - RNA, 19 nt, Artificial Sequence
  Description of Artificial Sequence: Synthetic oligonucleotide
ugauaaaagcagaugcaaa

SEQ ID NO: 2374534 - RNA, 19 nt, Artificial Sequence
  Description of Artificial Sequence: Synthetic oligonucleotide
cuagucucuacucauggac

SEQ ID NO: 2374535 - RNA, 19 nt, Artificial Sequence
  Description of Artificial Sequence: Synthetic oligonucleotide
uguugugcauuucaaugga

SEQ ID NO: 2374536 - RNA, 19 nt, Artificial Sequence
  Description of Artificial Sequence: Synthetic oligonucleotide
uuccacuuugugcuaauug

SEQ ID NO: 2374537 - RNA, 19 nt, Artificial Sequence
  Description of Artificial Sequence: Synthetic oligonucleotide
aagaccauuccccucacuu

SEQ ID NO: 2374538 - RNA, 19 nt, Artificial Sequence
  Description of Artificial Sequence: Synthetic oligonucleotide
ugcuccuuaaguucuuucc

SEQ ID NO: 2374539 - RNA, 19 nt, Artificial Sequence
  Description of Artificial Sequence: Synthetic oligonucleotide
ugguauucauccuugugcu

SEQ ID NO: 2374540 - RNA, 19 nt, Artificial Sequence
  Description of Artificial Sequence: Synthetic oligonucleotide
ucuugaaucacgccacuuc

SEQ ID NO: 2374541 - RNA, 19 nt, Artificial Sequence
  Description of Artificial Sequence: Synthetic oligonucleotide
uagucucuacucauggacc

SEQ ID NO: 2374542 - RNA, 19 nt, Artificial Sequence
  Description of Artificial Sequence: Synthetic oligonucleotide
agcgucuugaaucacgcca

SEQ ID NO: 2374543 - RNA, 19 nt, Artificial Sequence
  Description of Artificial Sequence: Synthetic oligonucleotide
cacuuuugcaucaaugcuc

SEQ ID NO: 2374544 - RNA, 19 nt, Artificial Sequence
  Description of Artificial Sequence: Synthetic oligonucleotide
uccuugugcugauaaaagc

SEQ ID NO: 2374545 - RNA, 19 nt, Artificial Sequence
  Description of Artificial Sequence: Synthetic oligonucleotide
ugugcugauaaaagcagau

SEQ ID NO: 2374546 - RNA, 19 nt, Artificial Sequence
  Description of Artificial Sequence: Synthetic oligonucleotide
cucugaaguuucuauuucc

SEQ ID NO: 2374547 - RNA, 19 nt, Artificial Sequence
  Description of Artificial Sequence: Synthetic oligonucleotide
aagcauaacuaauguugug

SEQ ID NO: 2374548 - RNA, 19 nt, Artificial Sequence
  Description of Artificial Sequence: Synthetic oligonucleotide
acagugagcugccagcguc

SEQ ID NO: 2374549 - RNA, 19 nt, Artificial Sequence
  Description of Artificial Sequence: Synthetic oligonucleotide
uccuuaaguucuuuccaag

SEQ ID NO: 2374550 - RNA, 19 nt, Artificial Sequence
  Description of Artificial Sequence: Synthetic oligonucleotide
ucagcagauugcuuaaagu

SEQ ID NO: 2374551 - RNA, 19 nt, Artificial Sequence
  Description of Artificial Sequence: Synthetic oligonucleotide
agaaucuaaaagccugaug

SEQ ID NO: 2374552 - RNA, 19 nt, Artificial Sequence
  Description of Artificial Sequence: Synthetic oligonucleotide
gauauccuuccuugggucc

SEQ ID NO: 2374553 - RNA, 19 nt, Artificial Sequence
  Description of Artificial Sequence: Synthetic oligonucleotide
ucuacucauggaccaaaug

SEQ ID NO: 2374554 - RNA, 19 nt, Artificial Sequence
  Description of Artificial Sequence: Synthetic oligonucleotide
auuucaauggagcaccgua

SEQ ID NO: 2374555 - RNA, 19 nt, Artificial Sequence
  Description of Artificial Sequence: Synthetic oligonucleotide
aguuccugcuuccaccccg

SEQ ID NO: 2374556 - RNA, 19 nt, Artificial Sequence
  Description of Artificial Sequence: Synthetic oligonucleotide
gcuuaaaguuguucaaugg

SEQ ID NO: 2374557 - RNA, 19 nt, Artificial Sequence
  Description of Artificial Sequence: Synthetic oligonucleotide
cucgauauccuuccuuggg

SEQ ID NO: 2374558 - RNA, 19 nt, Artificial Sequence
  Description of Artificial Sequence: Synthetic oligonucleotide
auugcuuaaaguuguucaa

SEQ ID NO: 2374559 - RNA, 19 nt, Artificial Sequence
  Description of Artificial Sequence: Synthetic oligonucleotide
uaaguucuuuccaagcaua

SEQ ID NO: 2374560 - RNA, 19 nt, Artificial Sequence
  Description of Artificial Sequence: Synthetic oligonucleotide
ucgauauccuuccuugggu

SEQ ID NO: 2374561 - RNA, 19 nt, Artificial Sequence
  Description of Artificial Sequence: Synthetic oligonucleotide
ucuacagcuccuuucuccu

SEQ ID NO: 2374562 - RNA, 19 nt, Artificial Sequence
  Description of Artificial Sequence: Synthetic oligonucleotide
aaagcagaugcaaaccccu

SEQ ID NO: 2374563 - RNA, 19 nt, Artificial Sequence
  Description of Artificial Sequence: Synthetic oligonucleotide
cacaaagcccgcuugugag

SEQ ID NO: 2374564 - RNA, 19 nt, Artificial Sequence
  Description of Artificial Sequence: Synthetic oligonucleotide
ugcuuuacugaaacuccgc

SEQ ID NO: 2374565 - RNA, 19 nt, Artificial Sequence
  Description of Artificial Sequence: Synthetic oligonucleotide
agaugcaaaccccuguccu

SEQ ID NO: 2374566 - RNA, 19 nt, Artificial Sequence
  Description of Artificial Sequence: Synthetic oligonucleotide
uugugcugauaaaagcaga

SEQ ID NO: 2374567 - RNA, 19 nt, Artificial Sequence
  Description of Artificial Sequence: Synthetic oligonucleotide
auauccuuccuuggguccc

SEQ ID NO: 2374568 - RNA, 19 nt, Artificial Sequence
  Description of Artificial Sequence: Synthetic oligonucleotide
acuuugugcuaauugguau

SEQ ID NO: 2374569 - RNA, 19 nt, Artificial Sequence
  Description of Artificial Sequence: Synthetic oligonucleotide
agcagauugcuuaaaguug

SEQ ID NO: 2374570 - RNA, 19 nt, Artificial Sequence
  Description of Artificial Sequence: Synthetic oligonucleotide
ucaauggagcaccguagga

SEQ ID NO: 2374571 - RNA, 19 nt, Artificial Sequence
  Description of Artificial Sequence: Synthetic oligonucleotide
uccucuaaaggcaccgcga

SEQ ID NO: 2374572 - RNA, 19 nt, Artificial Sequence
  Description of Artificial Sequence: Synthetic oligonucleotide
ucuccuguauuuccgugac

SEQ ID NO: 2374573 - RNA, 19 nt, Artificial Sequence
  Description of Artificial Sequence: Synthetic oligonucleotide
ucuuuccaagcauaacuaa

SEQ ID NO: 2374574 - RNA, 19 nt, Artificial Sequence
  Description of Artificial Sequence: Synthetic oligonucleotide
aucuaaaagccugauggca

SEQ ID NO: 2374575 - RNA, 19 nt, Artificial Sequence
  Description of Artificial Sequence: Synthetic oligonucleotide
uacuuuauacagugggcuc

SEQ ID NO: 2374576 - RNA, 19 nt, Artificial Sequence
  Description of Artificial Sequence: Synthetic oligonucleotide
gcagauggaacaccuaucc

SEQ ID NO: 2374577 - RNA, 19 nt, Artificial Sequence
  Description of Artificial Sequence: Synthetic oligonucleotide
ugaucaaugagcgcugguc

SEQ ID NO: 2374578 - RNA, 19 nt, Artificial Sequence
  Description of Artificial Sequence: Synthetic oligonucleotide
agugcggacaucaaaacaa

SEQ ID NO: 2374579 - RNA, 19 nt, Artificial Sequence
  Description of Artificial Sequence: Synthetic oligonucleotide
agucucuacucauggacca

SEQ ID NO: 2374580 - RNA, 19 nt, Artificial Sequence
  Description of Artificial Sequence: Synthetic oligonucleotide
ugagcugccagcgucuuga

SEQ ID NO: 2374581 - RNA, 19 nt, Artificial Sequence
  Description of Artificial Sequence: Synthetic oligonucleotide
ggcacagaaucuaaaagcc

SEQ ID NO: 2374582 - RNA, 19 nt, Artificial Sequence
  Description of Artificial Sequence: Synthetic oligonucleotide
uuugugcuaauugguauuc

SEQ ID NO: 2374583 - RNA, 19 nt, Artificial Sequence
  Description of Artificial Sequence: Synthetic oligonucleotide
acuuuugcaucaaugcucu

SEQ ID NO: 2374584 - RNA, 19 nt, Artificial Sequence
  Description of Artificial Sequence: Synthetic oligonucleotide
gaauaguuucuucuagucu

SEQ ID NO: 2374585 - RNA, 19 nt, Artificial Sequence
  Description of Artificial Sequence: Synthetic oligonucleotide
gaguugaucaaugagcgcu

SEQ ID NO: 2374586 - RNA, 19 nt, Artificial Sequence
  Description of Artificial Sequence: Synthetic oligonucleotide
ugccugucccgcccgaacg

SEQ ID NO: 2374587 - RNA, 19 nt, Artificial Sequence
  Description of Artificial Sequence: Synthetic oligonucleotide
ucuagucucuacucaugga

SEQ ID NO: 2374588 - RNA, 19 nt, Artificial Sequence
  Description of Artificial Sequence: Synthetic oligonucleotide
guccucuaaaggcaccgcg

SEQ ID NO: 2374589 - RNA, 19 nt, Artificial Sequence
  Description of Artificial Sequence: Synthetic oligonucleotide
auuuccgugacugcuucag

SEQ ID NO: 2374590 - RNA, 19 nt, Artificial Sequence
  Description of Artificial Sequence: Synthetic oligonucleotide
aaguuguucaauggcagua

SEQ ID NO: 2374591 - RNA, 19 nt, Artificial Sequence
  Description of Artificial Sequence: Synthetic oligonucleotide
auuccccucacuuuugcau

SEQ ID NO: 2374592 - RNA, 19 nt, Artificial Sequence
  Description of Artificial Sequence: Synthetic oligonucleotide
ugaguugaucaaugagcgc

SEQ ID NO: 2374593 - RNA, 19 nt, Artificial Sequence
  Description of Artificial Sequence: Synthetic oligonucleotide
ucagugcggacaucaaaac

SEQ ID NO: 2374594 - RNA, 19 nt, Artificial Sequence
  Description of Artificial Sequence: Synthetic oligonucleotide
ucauggaccaaaugcuuua

SEQ ID NO: 2374595 - RNA, 19 nt, Artificial Sequence
  Description of Artificial Sequence: Synthetic oligonucleotide
aacuaauguugugcauuuc

SEQ ID NO: 2374596 - RNA, 19 nt, Artificial Sequence
  Description of Artificial Sequence: Synthetic oligonucleotide
auuauggcauaaugcagua

SEQ ID NO: 2374597 - RNA, 19 nt, Artificial Sequence
  Description of Artificial Sequence: Synthetic oligonucleotide
augcuuuacugaaacuccg

SEQ ID NO: 2374598 - RNA, 19 nt, Artificial Sequence
  Description of Artificial Sequence: Synthetic oligonucleotide
uggucacaaagcccgcuug

SEQ ID NO: 2374599 - RNA, 19 nt, Artificial Sequence
  Description of Artificial Sequence: Synthetic oligonucleotide
cuucuagucucuacucaug

SEQ ID NO: 2374600 - RNA, 19 nt, Artificial Sequence
  Description of Artificial Sequence: Synthetic oligonucleotide
ugcggacaucaaaacaaac

SEQ ID NO: 2374601 - RNA, 19 nt, Artificial Sequence
  Description of Artificial Sequence: Synthetic oligonucleotide
ucaccucugaaguuucuau

SEQ ID NO: 2374602 - RNA, 19 nt, Artificial Sequence
  Description of Artificial Sequence: Synthetic oligonucleotide
ucaaugcucucgcccagcu

SEQ ID NO: 2374603 - RNA, 19 nt, Artificial Sequence
  Description of Artificial Sequence: Synthetic oligonucleotide
uggucgacugaaguggccc

SEQ ID NO: 2374604 - RNA, 19 nt, Artificial Sequence
  Description of Artificial Sequence: Synthetic oligonucleotide
gcugccagcgucuugaauc

SEQ ID NO: 2374605 - RNA, 19 nt, Artificial Sequence
  Description of Artificial Sequence: Synthetic oligonucleotide
agcagaugcaaaccccugu

SEQ ID NO: 2374606 - RNA, 19 nt, Artificial Sequence
  Description of Artificial Sequence: Synthetic oligonucleotide
aaacucccaguuuuccuuu

SEQ ID NO: 2374607 - RNA, 19 nt, Artificial Sequence
  Description of Artificial Sequence: Synthetic oligonucleotide
accguaggaucauggucac

SEQ ID NO: 2374608 - RNA, 19 nt, Artificial Sequence
  Description of Artificial Sequence: Synthetic oligonucleotide
uccaagcauaacuaauguu

SEQ ID NO: 2374609 - RNA, 19 nt, Artificial Sequence
  Description of Artificial Sequence: Synthetic oligonucleotide
ccuuaaguucuuuccaagc

SEQ ID NO: 2374610 - RNA, 19 nt, Artificial Sequence
  Description of Artificial Sequence: Synthetic oligonucleotide
cagaugcaaaccccugucc

SEQ ID NO: 2374611 - RNA, 19 nt, Artificial Sequence
  Description of Artificial Sequence: Synthetic oligonucleotide
cuugugaguugaucaauga

SEQ ID NO: 2374612 - RNA, 19 nt, Artificial Sequence
  Description of Artificial Sequence: Synthetic oligonucleotide
aaccccuguccuuccagcu

SEQ ID NO: 2374613 - RNA, 19 nt, Artificial Sequence
  Description of Artificial Sequence: Synthetic oligonucleotide
aacucccaguuuuccuuug

SEQ ID NO: 2374614 - RNA, 19 nt, Artificial Sequence
  Description of Artificial Sequence: Synthetic oligonucleotide
cccgcuguccucuaaaggc

SEQ ID NO: 2374615 - RNA, 19 nt, Artificial Sequence
  Description of Artificial Sequence: Synthetic oligonucleotide
caaucagcuucucagcaga

SEQ ID NO: 2374616 - RNA, 19 nt, Artificial Sequence
  Description of Artificial Sequence: Synthetic oligonucleotide
uugaucaaugagcgcuggu

SEQ ID NO: 2374617 - RNA, 19 nt, Artificial Sequence
  Description of Artificial Sequence: Synthetic oligonucleotide
cugauaaaagcagaugcaa

SEQ ID NO: 2374618 - RNA, 19 nt, Artificial Sequence
  Description of Artificial Sequence: Synthetic oligonucleotide
guugaucaaugagcgcugg

SEQ ID NO: 2374619 - RNA, 19 nt, Artificial Sequence
  Description of Artificial Sequence: Synthetic oligonucleotide
uuccccucacuuuugcauc

SEQ ID NO: 2374620 - RNA, 19 nt, Artificial Sequence
  Description of Artificial Sequence: Synthetic oligonucleotide
cugaaguuccugcuuccac

SEQ ID NO: 2374621 - RNA, 19 nt, Artificial Sequence
  Description of Artificial Sequence: Synthetic oligonucleotide
cugaaaugugggccagugc

SEQ ID NO: 2374622 - RNA, 19 nt, Artificial Sequence
  Description of Artificial Sequence: Synthetic oligonucleotide
accgcgacugccaucccgc

SEQ ID NO: 2374623 - RNA, 19 nt, Artificial Sequence
  Description of Artificial Sequence: Synthetic oligonucleotide
aaaggcaccgcgacugcca

SEQ ID NO: 2374624 - RNA, 19 nt, Artificial Sequence
  Description of Artificial Sequence: Synthetic oligonucleotide
guauuuccgugacugcuuc

SEQ ID NO: 2374625 - RNA, 19 nt, Artificial Sequence
  Description of Artificial Sequence: Synthetic oligonucleotide
caagcauaacuaauguugu

SEQ ID NO: 2374626 - RNA, 19 nt, Artificial Sequence
  Description of Artificial Sequence: Synthetic oligonucleotide
gagcaccguaggaucaugg

SEQ ID NO: 2374627 - RNA, 19 nt, Artificial Sequence
  Description of Artificial Sequence: Synthetic oligonucleotide
guugugcauuucaauggag

SEQ ID NO: 2374628 - RNA, 19 nt, Artificial Sequence
  Description of Artificial Sequence: Synthetic oligonucleotide
acagaaucuaaaagccuga

SEQ ID NO: 2374629 - RNA, 19 nt, Artificial Sequence
  Description of Artificial Sequence: Synthetic oligonucleotide
ucauccuugugcugauaaa

SEQ ID NO: 2374630 - RNA, 19 nt, Artificial Sequence
  Description of Artificial Sequence: Synthetic oligonucleotide
acaaagcccgcuugugagu

SEQ ID NO: 2374631 - RNA, 19 nt, Artificial Sequence
  Description of Artificial Sequence: Synthetic oligonucleotide
agcaccguaggaucauggu

SEQ ID NO: 2374632 - RNA, 19 nt, Artificial Sequence
  Description of Artificial Sequence: Synthetic oligonucleotide
ucaaugagcgcuggucgac

SEQ ID NO: 2374633 - RNA, 19 nt, Artificial Sequence
  Description of Artificial Sequence: Synthetic oligonucleotide
guacuuuauacagugggcu

SEQ ID NO: 2374634 - RNA, 19 nt, Artificial Sequence
  Description of Artificial Sequence: Synthetic oligonucleotide
aucccgcugaccccugccg

SEQ ID NO: 2374635 - RNA, 19 nt, Artificial Sequence
  Description of Artificial Sequence: Synthetic oligonucleotide
cccaguuuuccuuugagga

SEQ ID NO: 2374636 - RNA, 19 nt, Artificial Sequence
  Description of Artificial Sequence: Synthetic oligonucleotide
ggcuccacagugugaauag

SEQ ID NO: 2374637 - RNA, 19 nt, Artificial Sequence
  Description of Artificial Sequence: Synthetic oligonucleotide
aguugaucaaugagcgcug

SEQ ID NO: 2374638 - RNA, 19 nt, Artificial Sequence
  Description of Artificial Sequence: Synthetic oligonucleotide
cucccaguuuuccuuugag

SEQ ID NO: 2374639 - RNA, 19 nt, Artificial Sequence
  Description of Artificial Sequence: Synthetic oligonucleotide
gaaguggccccugaaaugu

SEQ ID NO: 2374640 - RNA, 19 nt, Artificial Sequence
  Description of Artificial Sequence: Synthetic oligonucleotide
aaagcccgcuugugaguug

SEQ ID NO: 2374641 - RNA, 19 nt, Artificial Sequence
  Description of Artificial Sequence: Synthetic oligonucleotide
ucaauggcaguaggaggca

SEQ ID NO: 2374642 - RNA, 19 nt, Artificial Sequence
  Description of Artificial Sequence: Synthetic oligonucleotide
ugucccgcccgaacgguga

SEQ ID NO: 2374643 - RNA, 19 nt, Artificial Sequence
  Description of Artificial Sequence: Synthetic oligonucleotide
cuaaaggcaccgcgacugc

SEQ ID NO: 2374644 - RNA, 19 nt, Artificial Sequence
  Description of Artificial Sequence: Synthetic oligonucleotide
gugaauaguuucuucuagu

SEQ ID NO: 2374645 - RNA, 19 nt, Artificial Sequence
  Description of Artificial Sequence: Synthetic oligonucleotide
uccccucacuuuugcauca

SEQ ID NO: 2374646 - RNA, 19 nt, Artificial Sequence
  Description of Artificial Sequence: Synthetic oligonucleotide
uaaaggcaccgcgacugcc

SEQ ID NO: 2374647 - RNA, 19 nt, Artificial Sequence
  Description of Artificial Sequence: Synthetic oligonucleotide
uuauggcauaaugcaguac

SEQ ID NO: 2374648 - RNA, 19 nt, Artificial Sequence
  Description of Artificial Sequence: Synthetic oligonucleotide
ucucuacucauggaccaaa

SEQ ID NO: 2374649 - RNA, 19 nt, Artificial Sequence
  Description of Artificial Sequence: Synthetic oligonucleotide
cuugaaucacgccacuucu

SEQ ID NO: 2374650 - RNA, 19 nt, Artificial Sequence
  Description of Artificial Sequence: Synthetic oligonucleotide
ugcaaaccccuguccuucc

SEQ ID NO: 2374651 - RNA, 19 nt, Artificial Sequence
  Description of Artificial Sequence: Synthetic oligonucleotide
ccuuugaggaagaccauuc

SEQ ID NO: 2374652 - RNA, 19 nt, Artificial Sequence
  Description of Artificial Sequence: Synthetic oligonucleotide
aagcagaugcaaaccccug

SEQ ID NO: 2374653 - RNA, 19 nt, Artificial Sequence
  Description of Artificial Sequence: Synthetic oligonucleotide
acaucaaaacaaacuccca

SEQ ID NO: 2374654 - RNA, 19 nt, Artificial Sequence
  Description of Artificial Sequence: Synthetic oligonucleotide
uggcauccuugcuggaggc

SEQ ID NO: 2374655 - RNA, 19 nt, Artificial Sequence
  Description of Artificial Sequence: Synthetic oligonucleotide
gugugaauaguuucuucua

SEQ ID NO: 2374656 - RNA, 19 nt, Artificial Sequence
  Description of Artificial Sequence: Synthetic oligonucleotide
cacagugugaauaguuucu

SEQ ID NO: 2374657 - RNA, 19 nt, Artificial Sequence
  Description of Artificial Sequence: Synthetic oligonucleotide
caucaaugcucucgcccag

SEQ ID NO: 2374658 - RNA, 19 nt, Artificial Sequence
  Description of Artificial Sequence: Synthetic oligonucleotide
uugugcuaauugguauuca

SEQ ID NO: 2374659 - RNA, 19 nt, Artificial Sequence
  Description of Artificial Sequence: Synthetic oligonucleotide
cuccuuaaguucuuuccaa

SEQ ID NO: 2374660 - RNA, 19 nt, Artificial Sequence
  Description of Artificial Sequence: Synthetic oligonucleotide
cuaauugguauucauccuu

SEQ ID NO: 2374661 - RNA, 19 nt, Artificial Sequence
  Description of Artificial Sequence: Synthetic oligonucleotide
aagcccgcuugugaguuga

SEQ ID NO: 2374662 - RNA, 19 nt, Artificial Sequence
  Description of Artificial Sequence: Synthetic oligonucleotide
uggcauaaugcaguacuuu

SEQ ID NO: 2374663 - RNA, 19 nt, Artificial Sequence
  Description of Artificial Sequence: Synthetic oligonucleotide
aucacgccacuucuccugu

SEQ ID NO: 2374664 - RNA, 19 nt, Artificial Sequence
  Description of Artificial Sequence: Synthetic oligonucleotide
ugucaccucugaaguuucu

SEQ ID NO: 2374665 - RNA, 19 nt, Artificial Sequence
  Description of Artificial Sequence: Synthetic oligonucleotide
cagcagauugcuuaaaguu

SEQ ID NO: 2374666 - RNA, 19 nt, Artificial Sequence
  Description of Artificial Sequence: Synthetic oligonucleotide
cauggaccaaaugcuuuac

SEQ ID NO: 2374667 - RNA, 19 nt, Artificial Sequence
  Description of Artificial Sequence: Synthetic oligonucleotide
uccuuugaggaagaccauu

SEQ ID NO: 2374668 - RNA, 19 nt, Artificial Sequence
  Description of Artificial Sequence: Synthetic oligonucleotide
uguccucuaaaggcaccgc

SEQ ID NO: 2374669 - RNA, 19 nt, Artificial Sequence
  Description of Artificial Sequence: Synthetic oligonucleotide
cacuuugugcuaauuggua

SEQ ID NO: 2374670 - RNA, 19 nt, Artificial Sequence
  Description of Artificial Sequence: Synthetic oligonucleotide
gucacaaagcccgcuugug

SEQ ID NO: 2374671 - RNA, 19 nt, Artificial Sequence
  Description of Artificial Sequence: Synthetic oligonucleotide
cuggucgacugaaguggcc

SEQ ID NO: 2374672 - RNA, 19 nt, Artificial Sequence
  Description of Artificial Sequence: Synthetic oligonucleotide
gcuugugaguugaucaaug

SEQ ID NO: 2374673 - RNA, 19 nt, Artificial Sequence
  Description of Artificial Sequence: Synthetic oligonucleotide
accccgcuguccucuaaag

SEQ ID NO: 2374674 - RNA, 19 nt, Artificial Sequence
  Description of Artificial Sequence: Synthetic oligonucleotide
cagugcggacaucaaaaca

SEQ ID NO: 2374675 - RNA, 19 nt, Artificial Sequence
  Description of Artificial Sequence: Synthetic oligonucleotide
ggcaccgcgacugccaucc

SEQ ID NO: 2374676 - RNA, 19 nt, Artificial Sequence
  Description of Artificial Sequence: Synthetic oligonucleotide
ugagcgcuggucgacugaa

SEQ ID NO: 2374677 - RNA, 19 nt, Artificial Sequence
  Description of Artificial Sequence: Synthetic oligonucleotide
uaauucccgcuuucuguuu

SEQ ID NO: 2374678 - RNA, 19 nt, Artificial Sequence
  Description of Artificial Sequence: Synthetic oligonucleotide
ggaggcuuuuauuauuucu

SEQ ID NO: 2374679 - RNA, 19 nt, Artificial Sequence
  Description of Artificial Sequence: Synthetic oligonucleotide
ugccgccucgauauccuuc

SEQ ID NO: 2374680 - RNA, 19 nt, Artificial Sequence
  Description of Artificial Sequence: Synthetic oligonucleotide
cuuuauacagugggcucca

SEQ ID NO: 2374681 - RNA, 19 nt, Artificial Sequence
  Description of Artificial Sequence: Synthetic oligonucleotide
cuuuguugucaccucugaa

SEQ ID NO: 2374682 - RNA, 19 nt, Artificial Sequence
  Description of Artificial Sequence: Synthetic oligonucleotide
caccgcgacugccaucccg

SEQ ID NO: 2374683 - RNA, 19 nt, Artificial Sequence
  Description of Artificial Sequence: Synthetic oligonucleotide
cugccagcgucuugaauca

SEQ ID NO: 2374684 - RNA, 19 nt, Artificial Sequence
  Description of Artificial Sequence: Synthetic oligonucleotide
caccuauccguuuaaacuu

SEQ ID NO: 2374685 - RNA, 19 nt, Artificial Sequence
  Description of Artificial Sequence: Synthetic oligonucleotide
guaggaggcacagaaucua

SEQ ID NO: 2374686 - RNA, 19 nt, Artificial Sequence
  Description of Artificial Sequence: Synthetic oligonucleotide
uucuggccuuuguugucac

SEQ ID NO: 2374687 - RNA, 19 nt, Artificial Sequence
  Description of Artificial Sequence: Synthetic oligonucleotide
gauggaacaccuauccguu

SEQ ID NO: 2374688 - RNA, 19 nt, Artificial Sequence
  Description of Artificial Sequence: Synthetic oligonucleotide
gcaguacuuuauacagugg

SEQ ID NO: 2374689 - RNA, 19 nt, Artificial Sequence
  Description of Artificial Sequence: Synthetic oligonucleotide
cagcgucuugaaucacgcc

SEQ ID NO: 2374690 - RNA, 19 nt, Artificial Sequence
  Description of Artificial Sequence: Synthetic oligonucleotide
gccgccucgauauccuucc

SEQ ID NO: 2374691 - RNA, 19 nt, Artificial Sequence
  Description of Artificial Sequence: Synthetic oligonucleotide
gaugcaaaccccuguccuu

SEQ ID NO: 2374692 - RNA, 19 nt, Artificial Sequence
  Description of Artificial Sequence: Synthetic oligonucleotide
gaaucacgccacuucuccu

SEQ ID NO: 2374693 - RNA, 19 nt, Artificial Sequence
  Description of Artificial Sequence: Synthetic oligonucleotide
acucauggaccaaaugcuu

SEQ ID NO: 2374694 - RNA, 19 nt, Artificial Sequence
  Description of Artificial Sequence: Synthetic oligonucleotide
cuuugugcuaauugguauu

SEQ ID NO: 2374695 - RNA, 19 nt, Artificial Sequence
  Description of Artificial Sequence: Synthetic oligonucleotide
ucccgcuuucuguuuccac

SEQ ID NO: 2374696 - RNA, 19 nt, Artificial Sequence
  Description of Artificial Sequence: Synthetic oligonucleotide
caucccgcugaccccugcc

SEQ ID NO: 2374697 - RNA, 19 nt, Artificial Sequence
  Description of Artificial Sequence: Synthetic oligonucleotide
accaaaugcuuuacugaaa

SEQ ID NO: 2374698 - RNA, 19 nt, Artificial Sequence
  Description of Artificial Sequence: Synthetic oligonucleotide
gcaccguaggaucaugguc

SEQ ID NO: 2374699 - RNA, 19 nt, Artificial Sequence
  Description of Artificial Sequence: Synthetic oligonucleotide
uuuauacagugggcuccac

SEQ ID NO: 2374700 - RNA, 19 nt, Artificial Sequence
  Description of Artificial Sequence: Synthetic oligonucleotide
ccucgauauccuuccuugg

SEQ ID NO: 2374701 - RNA, 19 nt, Artificial Sequence
  Description of Artificial Sequence: Synthetic oligonucleotide
ccucuaaaggcaccgcgac

SEQ ID NO: 2374702 - RNA, 19 nt, Artificial Sequence
  Description of Artificial Sequence: Synthetic oligonucleotide
cccgcuugugaguugauca

SEQ ID NO: 2374703 - RNA, 19 nt, Artificial Sequence
  Description of Artificial Sequence: Synthetic oligonucleotide
cuuuacugaaacuccgcuu

SEQ ID NO: 2374704 - RNA, 19 nt, Artificial Sequence
  Description of Artificial Sequence: Synthetic oligonucleotide
gccagugcggcugccaggg

SEQ ID NO: 2374705 - RNA, 19 nt, Artificial Sequence
  Description of Artificial Sequence: Synthetic oligonucleotide
ugccaucccgcugaccccu

SEQ ID NO: 2374706 - RNA, 19 nt, Artificial Sequence
  Description of Artificial Sequence: Synthetic oligonucleotide
gcgacugccaucccgcuga

SEQ ID NO: 2374707 - RNA, 19 nt, Artificial Sequence
  Description of Artificial Sequence: Synthetic oligonucleotide
gccagcgucuugaaucacg

SEQ ID NO: 2374708 - RNA, 19 nt, Artificial Sequence
  Description of Artificial Sequence: Synthetic oligonucleotide
gacugaaguggccccugaa

SEQ ID NO: 2374709 - RNA, 19 nt, Artificial Sequence
  Description of Artificial Sequence: Synthetic oligonucleotide
cugccaucccgcugacccc

SEQ ID NO: 2374710 - RNA, 19 nt, Artificial Sequence
  Description of Artificial Sequence: Synthetic oligonucleotide
caaugcucucgcccagcug

SEQ ID NO: 2374711 - RNA, 19 nt, Artificial Sequence
  Description of Artificial Sequence: Synthetic oligonucleotide
auggaacaccuauccguuu

SEQ ID NO: 2374712 - RNA, 19 nt, Artificial Sequence
  Description of Artificial Sequence: Synthetic oligonucleotide
ucucagcagauugcuuaaa

SEQ ID NO: 2374713 - RNA, 19 nt, Artificial Sequence
  Description of Artificial Sequence: Synthetic oligonucleotide
aaacuccgcuucuggccuu

SEQ ID NO: 2374714 - RNA, 19 nt, Artificial Sequence
  Description of Artificial Sequence: Synthetic oligonucleotide
caauggcaguaggaggcac

SEQ ID NO: 2374715 - RNA, 19 nt, Artificial Sequence
  Description of Artificial Sequence: Synthetic oligonucleotide
uuuccacuuugugcuaauu

SEQ ID NO: 2374716 - RNA, 19 nt, Artificial Sequence
  Description of Artificial Sequence: Synthetic oligonucleotide
cugcuccguggccacagug

SEQ ID NO: 2374717 - RNA, 19 nt, Artificial Sequence
  Description of Artificial Sequence: Synthetic oligonucleotide
gcagauugcuuaaaguugu

SEQ ID NO: 2374718 - RNA, 19 nt, Artificial Sequence
  Description of Artificial Sequence: Synthetic oligonucleotide
cgcuggucgacugaagugg

SEQ ID NO: 2374719 - RNA, 19 nt, Artificial Sequence
  Description of Artificial Sequence: Synthetic oligonucleotide
ccugaaaugugggccagug

SEQ ID NO: 2374720 - RNA, 19 nt, Artificial Sequence
  Description of Artificial Sequence: Synthetic oligonucleotide
auggcauaaugcaguacuu

SEQ ID NO: 2374721 - RNA, 19 nt, Artificial Sequence
  Description of Artificial Sequence: Synthetic oligonucleotide
gcggacaucaaaacaaacu

SEQ ID NO: 2374722 - RNA, 19 nt, Artificial Sequence
  Description of Artificial Sequence: Synthetic oligonucleotide
accuauccguuuaaacuua

SEQ ID NO: 2374723 - RNA, 19 nt, Artificial Sequence
  Description of Artificial Sequence: Synthetic oligonucleotide
ucgcccagcugcuccuuaa

SEQ ID NO: 2374724 - RNA, 19 nt, Artificial Sequence
  Description of Artificial Sequence: Synthetic oligonucleotide
cucauggaccaaaugcuuu

SEQ ID NO: 2374725 - RNA, 19 nt, Artificial Sequence
  Description of Artificial Sequence: Synthetic oligonucleotide
ccacagugagcugccagcg

SEQ ID NO: 2374726 - RNA, 19 nt, Artificial Sequence
  Description of Artificial Sequence: Synthetic oligonucleotide
gcgcuggucgacugaagug

SEQ ID NO: 2374727 - RNA, 19 nt, Artificial Sequence
  Description of Artificial Sequence: Synthetic oligonucleotide
uucccgcuuucuguuucca

SEQ ID NO: 2374728 - RNA, 19 nt, Artificial Sequence
  Description of Artificial Sequence: Synthetic oligonucleotide
uggagcaccguaggaucau

SEQ ID NO: 2374729 - RNA, 19 nt, Artificial Sequence
  Description of Artificial Sequence: Synthetic oligonucleotide
gcgucuugaaucacgccac

SEQ ID NO: 2374730 - RNA, 19 nt, Artificial Sequence
  Description of Artificial Sequence: Synthetic oligonucleotide
ggccucuacagcuccuuuc

SEQ ID NO: 2374731 - RNA, 19 nt, Artificial Sequence
  Description of Artificial Sequence: Synthetic oligonucleotide
cccuguccccugaaguucc

SEQ ID NO: 2374732 - RNA, 19 nt, Artificial Sequence
  Description of Artificial Sequence: Synthetic oligonucleotide
gccugucccgcccgaacgg

SEQ ID NO: 2374733 - RNA, 19 nt, Artificial Sequence
  Description of Artificial Sequence: Synthetic oligonucleotide
cugucccgcccgaacggug

SEQ ID NO: 2374734 - RNA, 19 nt, Artificial Sequence
  Description of Artificial Sequence: Synthetic oligonucleotide
caauggagcaccguaggau

SEQ ID NO: 2374735 - RNA, 19 nt, Artificial Sequence
  Description of Artificial Sequence: Synthetic oligonucleotide
ugacugcuucagugcggac

SEQ ID NO: 2374736 - RNA, 19 nt, Artificial Sequence
  Description of Artificial Sequence: Synthetic oligonucleotide
aggcaccgcgacugccauc

SEQ ID NO: 2374737 - RNA, 19 nt, Artificial Sequence
  Description of Artificial Sequence: Synthetic oligonucleotide
gugcggacaucaaaacaaa

SEQ ID NO: 2374738 - RNA, 19 nt, Artificial Sequence
  Description of Artificial Sequence: Synthetic oligonucleotide
agcugccagcgucuugaau

SEQ ID NO: 2374739 - RNA, 19 nt, Artificial Sequence
  Description of Artificial Sequence: Synthetic oligonucleotide
ccaguuuuccuuugaggaa

SEQ ID NO: 2374740 - RNA, 19 nt, Artificial Sequence
  Description of Artificial Sequence: Synthetic oligonucleotide
cguaggaucauggucacaa

SEQ ID NO: 2374741 - RNA, 19 nt, Artificial Sequence
  Description of Artificial Sequence: Synthetic oligonucleotide
ccccgcuguccucuaaagg

SEQ ID NO: 2374742 - RNA, 19 nt, Artificial Sequence
  Description of Artificial Sequence: Synthetic oligonucleotide
acgccacuucuccuguauu

SEQ ID NO: 2374743 - RNA, 19 nt, Artificial Sequence
  Description of Artificial Sequence: Synthetic oligonucleotide
ggaagaccauuccccucac

SEQ ID NO: 2374744 - RNA, 19 nt, Artificial Sequence
  Description of Artificial Sequence: Synthetic oligonucleotide
gucaccucugaaguuucua

SEQ ID NO: 2374745 - RNA, 19 nt, Artificial Sequence
  Description of Artificial Sequence: Synthetic oligonucleotide
gcuggucgacugaaguggc

SEQ ID NO: 2374746 - RNA, 19 nt, Artificial Sequence
  Description of Artificial Sequence: Synthetic oligonucleotide
uggcaguaggaggcacaga

SEQ ID NO: 2374747 - RNA, 19 nt, Artificial Sequence
  Description of Artificial Sequence: Synthetic oligonucleotide
aacuccgcuucuggccuuu

SEQ ID NO: 2374748 - RNA, 19 nt, Artificial Sequence
  Description of Artificial Sequence: Synthetic oligonucleotide
ggucacaaagcccgcuugu

SEQ ID NO: 2374749 - RNA, 19 nt, Artificial Sequence
  Description of Artificial Sequence: Synthetic oligonucleotide
cuauccguuuaaacuuaau

SEQ ID NO: 2374750 - RNA, 19 nt, Artificial Sequence
  Description of Artificial Sequence: Synthetic oligonucleotide
cucuaaaggcaccgcgacu

SEQ ID NO: 2374751 - RNA, 19 nt, Artificial Sequence
  Description of Artificial Sequence: Synthetic oligonucleotide
ucacgccacuucuccugua

SEQ ID NO: 2374752 - RNA, 19 nt, Artificial Sequence
  Description of Artificial Sequence: Synthetic oligonucleotide
gaccccugccgccucgaua

SEQ ID NO: 2374753 - RNA, 19 nt, Artificial Sequence
  Description of Artificial Sequence: Synthetic oligonucleotide
gcugaccccugccgccucg

SEQ ID NO: 2374754 - RNA, 19 nt, Artificial Sequence
  Description of Artificial Sequence: Synthetic oligonucleotide
cucuacucauggaccaaau

SEQ ID NO: 2374755 - RNA, 19 nt, Artificial Sequence
  Description of Artificial Sequence: Synthetic oligonucleotide
caccucugaaguuucuauu

SEQ ID NO: 2374756 - RNA, 19 nt, Artificial Sequence
  Description of Artificial Sequence: Synthetic oligonucleotide
guuuccacuuugugcuaau

SEQ ID NO: 2374757 - RNA, 19 nt, Artificial Sequence
  Description of Artificial Sequence: Synthetic oligonucleotide
ccacuuugugcuaauuggu

SEQ ID NO: 2374758 - RNA, 19 nt, Artificial Sequence
  Description of Artificial Sequence: Synthetic oligonucleotide
agugagcugccagcgucuu

SEQ ID NO: 2374759 - RNA, 19 nt, Artificial Sequence
  Description of Artificial Sequence: Synthetic oligonucleotide
gucucuacucauggaccaa

SEQ ID NO: 2374760 - RNA, 19 nt, Artificial Sequence
  Description of Artificial Sequence: Synthetic oligonucleotide
ggagcaccguaggaucaug

SEQ ID NO: 2374761 - RNA, 19 nt, Artificial Sequence
  Description of Artificial Sequence: Synthetic oligonucleotide
ugggucccuccagcuccgg

SEQ ID NO: 2374762 - RNA, 19 nt, Artificial Sequence
  Description of Artificial Sequence: Synthetic oligonucleotide
ugccagcgucuugaaucac

SEQ ID NO: 2374763 - RNA, 19 nt, Artificial Sequence
  Description of Artificial Sequence: Synthetic oligonucleotide
auucauccuugugcugaua

SEQ ID NO: 2374764 - RNA, 19 nt, Artificial Sequence
  Description of Artificial Sequence: Synthetic oligonucleotide
cauuucaauggagcaccgu

SEQ ID NO: 2374765 - RNA, 19 nt, Artificial Sequence
  Description of Artificial Sequence: Synthetic oligonucleotide
gcuggaggcuuuuauuauu

SEQ ID NO: 2374766 - RNA, 19 nt, Artificial Sequence
  Description of Artificial Sequence: Synthetic oligonucleotide
ccuauccguuuaaacuuaa

SEQ ID NO: 2374767 - RNA, 19 nt, Artificial Sequence
  Description of Artificial Sequence: Synthetic oligonucleotide
cccgcuuucuguuuccacu

SEQ ID NO: 2374768 - RNA, 19 nt, Artificial Sequence
  Description of Artificial Sequence: Synthetic oligonucleotide
gcaaaccccuguccuucca

SEQ ID NO: 2374769 - RNA, 19 nt, Artificial Sequence
  Description of Artificial Sequence: Synthetic oligonucleotide
caaagcccgcuugugaguu

SEQ ID NO: 2374770 - RNA, 19 nt, Artificial Sequence
  Description of Artificial Sequence: Synthetic oligonucleotide
gagcugccagcgucuugaa

SEQ ID NO: 2374771 - RNA, 19 nt, Artificial Sequence
  Description of Artificial Sequence: Synthetic oligonucleotide
ugcucucgcccagcugcuc

SEQ ID NO: 2374772 - RNA, 19 nt, Artificial Sequence
  Description of Artificial Sequence: Synthetic oligonucleotide
caccccgcuguccucuaaa

SEQ ID NO: 2374773 - RNA, 19 nt, Artificial Sequence
  Description of Artificial Sequence: Synthetic oligonucleotide
uccaccccgcuguccucua

SEQ ID NO: 2374774 - RNA, 19 nt, Artificial Sequence
  Description of Artificial Sequence: Synthetic oligonucleotide
cccugccgccucgauaucc

SEQ ID NO: 2374775 - RNA, 19 nt, Artificial Sequence
  Description of Artificial Sequence: Synthetic oligonucleotide
cacgccacuucuccuguau

SEQ ID NO: 2374776 - RNA, 19 nt, Artificial Sequence
  Description of Artificial Sequence: Synthetic oligonucleotide
auccuugcuggaggcuuuu

SEQ ID NO: 2374777 - RNA, 19 nt, Artificial Sequence
  Description of Artificial Sequence: Synthetic oligonucleotide
ucgcugccccuguccccug

SEQ ID NO: 2374778 - RNA, 19 nt, Artificial Sequence
  Description of Artificial Sequence: Synthetic oligonucleotide
ccgcuugugaguugaucaa

SEQ ID NO: 2374779 - RNA, 19 nt, Artificial Sequence
  Description of Artificial Sequence: Synthetic oligonucleotide
gucuugaaucacgccacuu

SEQ ID NO: 2374780 - RNA, 19 nt, Artificial Sequence
  Description of Artificial Sequence: Synthetic oligonucleotide
cacagugagcugccagcgu

SEQ ID NO: 2374781 - RNA, 19 nt, Artificial Sequence
  Description of Artificial Sequence: Synthetic oligonucleotide
cauccuugcuggaggcuuu

SEQ ID NO: 2374782 - RNA, 19 nt, Artificial Sequence
  Description of Artificial Sequence: Synthetic oligonucleotide
ccuuccagcucugccuguc

SEQ ID NO: 2374783 - RNA, 19 nt, Artificial Sequence
  Description of Artificial Sequence: Synthetic oligonucleotide
cucucgcccagcugcuccu

SEQ ID NO: 2374784 - RNA, 19 nt, Artificial Sequence
  Description of Artificial Sequence: Synthetic oligonucleotide
cucugccugucccgcccga

SEQ ID NO: 2374785 - RNA, 19 nt, Artificial Sequence
  Description of Artificial Sequence: Synthetic oligonucleotide
gucccgcccgaacggugaa

SEQ ID NO: 2374786 - RNA, 19 nt, Artificial Sequence
  Description of Artificial Sequence: Synthetic oligonucleotide
ccccugaaaugugggccag

SEQ ID NO: 2374787 - RNA, 19 nt, Artificial Sequence
  Description of Artificial Sequence: Synthetic oligonucleotide
gcccgcuugugaguugauc

SEQ ID NO: 2374788 - RNA, 19 nt, Artificial Sequence
  Description of Artificial Sequence: Synthetic oligonucleotide
ccagugcggcugccagggg

SEQ ID NO: 2374789 - RNA, 19 nt, Artificial Sequence
  Description of Artificial Sequence: Synthetic oligonucleotide
cugaccccugccgccucga

SEQ ID NO: 2374790 - RNA, 19 nt, Artificial Sequence
  Description of Artificial Sequence: Synthetic oligonucleotide
cgcgacugccaucccgcug

SEQ ID NO: 2374791 - RNA, 19 nt, Artificial Sequence
  Description of Artificial Sequence: Synthetic oligonucleotide
ccugccgccucgauauccu

SEQ ID NO: 2374792 - RNA, 19 nt, Artificial Sequence
  Description of Artificial Sequence: Synthetic oligonucleotide
gcuccacagugugaauagu

SEQ ID NO: 2374793 - RNA, 19 nt, Artificial Sequence
  Description of Artificial Sequence: Synthetic oligonucleotide
ccgcuuucuguuuccacuu

SEQ ID NO: 2374794 - RNA, 19 nt, Artificial Sequence
  Description of Artificial Sequence: Synthetic oligonucleotide
agcccgcuugugaguugau

SEQ ID NO: 2374795 - RNA, 19 nt, Artificial Sequence
  Description of Artificial Sequence: Synthetic oligonucleotide
gccaucccgcugaccccug

SEQ ID NO: 2374796 - RNA, 19 nt, Artificial Sequence
  Description of Artificial Sequence: Synthetic oligonucleotide
cugccgccucgauauccuu

SEQ ID NO: 2374797 - RNA, 19 nt, Artificial Sequence
  Description of Artificial Sequence: Synthetic oligonucleotide
cgacugccaucccgcugac

SEQ ID NO: 2374798 - RNA, 19 nt, Artificial Sequence
  Description of Artificial Sequence: Synthetic oligonucleotide
ccguaggaucauggucaca

SEQ ID NO: 2374799 - RNA, 19 nt, Artificial Sequence
  Description of Artificial Sequence: Synthetic oligonucleotide
gugcggcugccaggggccu

SEQ ID NO: 2374800 - RNA, 19 nt, Artificial Sequence
  Description of Artificial Sequence: Synthetic oligonucleotide
cgcuugugaguugaucaau

SEQ ID NO: 2374801 - RNA, 19 nt, Artificial Sequence
  Description of Artificial Sequence: Synthetic oligonucleotide
ccugucccgcccgaacggu

SEQ ID NO: 2374802 - RNA, 19 nt, Artificial Sequence
  Description of Artificial Sequence: Synthetic oligonucleotide
ccccugccgccucgauauc

SEQ ID NO: 2374803 - RNA, 19 nt, Artificial Sequence
  Description of Artificial Sequence: Synthetic oligonucleotide
cgcugaccccugccgccuc

SEQ ID NO: 2374804 - RNA, 19 nt, Artificial Sequence
  Description of Artificial Sequence: Synthetic oligonucleotide
ccaccccgcuguccucuaa

SEQ ID NO: 2374805 - RNA, 19 nt, Artificial Sequence
  Description of Artificial Sequence: Synthetic oligonucleotide
cccugaaaugugggccagu

SEQ ID NO: 2374806 - RNA, 19 nt, Artificial Sequence
  Description of Artificial Sequence: Synthetic oligonucleotide
ccgcgacugccaucccgcu

SEQ ID NO: 2374807 - RNA, 19 nt, Artificial Sequence
  Description of Artificial Sequence: Synthetic oligonucleotide
ccgcugaccccugccgccu

SEQ ID NO: 2374808 - RNA, 19 nt, Artificial Sequence
  Description of Artificial Sequence: Synthetic oligonucleotide
ccgccucgauauccuuccu

SEQ ID NO: 2374809 - RNA, 19 nt, Artificial Sequence
  Description of Artificial Sequence: Synthetic oligonucleotide
ugacauaccacuuucuucg

SEQ ID NO: 2374810 - RNA, 19 nt, Artificial Sequence
  Description of Artificial Sequence: Synthetic oligonucleotide
aauuacgcuauccaugcac

SEQ ID NO: 2374811 - RNA, 19 nt, Artificial Sequence
  Description of Artificial Sequence: Synthetic oligonucleotide
ucuguaaucuaccuggagg

SEQ ID NO: 2374812 - RNA, 19 nt, Artificial Sequence
  Description of Artificial Sequence: Synthetic oligonucleotide
gaauauauccccuucauca

SEQ ID NO: 2374813 - RNA, 19 nt, Artificial Sequence
  Description of Artificial Sequence: Synthetic oligonucleotide
gaaauugugucuucuaggc

SEQ ID NO: 2374814 - RNA, 19 nt, Artificial Sequence
  Description of Artificial Sequence: Synthetic oligonucleotide
aauucuuagcauugucugg

SEQ ID NO: 2374815 - RNA, 19 nt, Artificial Sequence
  Description of Artificial Sequence: Synthetic oligonucleotide
aggaaugcuauuaugaugg

SEQ ID NO: 2374816 - RNA, 19 nt, Artificial Sequence
  Description of Artificial Sequence: Synthetic oligonucleotide
uucugcaugcuauagaagc

SEQ ID NO: 2374817 - RNA, 19 nt, Artificial Sequence
  Description of Artificial Sequence: Synthetic oligonucleotide
aaugcuauuaugauggaga

SEQ ID NO: 2374818 - RNA, 19 nt, Artificial Sequence
  Description of Artificial Sequence: Synthetic oligonucleotide
ucaauggguacguuggucg

SEQ ID NO: 2374819 - RNA, 19 nt, Artificial Sequence
  Description of Artificial Sequence: Synthetic oligonucleotide
gguuauucaaggaagaugg

SEQ ID NO: 2374820 - RNA, 19 nt, Artificial Sequence
  Description of Artificial Sequence: Synthetic oligonucleotide
cuaauuacgcuauccaugc

SEQ ID NO: 2374821 - RNA, 19 nt, Artificial Sequence
  Description of Artificial Sequence: Synthetic oligonucleotide
cauaucucuagggagaugg

SEQ ID NO: 2374822 - RNA, 19 nt, Artificial Sequence
  Description of Artificial Sequence: Synthetic oligonucleotide
cagaguaacagcuaauuac

SEQ ID NO: 2374823 - RNA, 19 nt, Artificial Sequence
  Description of Artificial Sequence: Synthetic oligonucleotide
cuuucuucgaaauuguguc

SEQ ID NO: 2374824 - RNA, 19 nt, Artificial Sequence
  Description of Artificial Sequence: Synthetic oligonucleotide
ucgaaauugugucuucuag

SEQ ID NO: 2374825 - RNA, 19 nt, Artificial Sequence
  Description of Artificial Sequence: Synthetic oligonucleotide
agaguaacagcuaauuacg

SEQ ID NO: 2374826 - RNA, 19 nt, Artificial Sequence
  Description of Artificial Sequence: Synthetic oligonucleotide
gcuauuaugauggagaggc

SEQ ID NO: 2374827 - RNA, 19 nt, Artificial Sequence
  Description of Artificial Sequence: Synthetic oligonucleotide
ugugcagcugucaaugucc

SEQ ID NO: 2374828 - RNA, 19 nt, Artificial Sequence
  Description of Artificial Sequence: Synthetic oligonucleotide
auagaagccacugaucgcg

SEQ ID NO: 2374829 - RNA, 19 nt, Artificial Sequence
  Description of Artificial Sequence: Synthetic oligonucleotide
uauuauuaugggaaccaca

SEQ ID NO: 2374830 - RNA, 19 nt, Artificial Sequence
  Description of Artificial Sequence: Synthetic oligonucleotide
acgcuauccaugcacacgc

SEQ ID NO: 2374831 - RNA, 19 nt, Artificial Sequence
  Description of Artificial Sequence: Synthetic oligonucleotide
ucuugcaguccacagauac

SEQ ID NO: 2374832 - RNA, 19 nt, Artificial Sequence
  Description of Artificial Sequence: Synthetic oligonucleotide
uaugggaaccacaaccgag

SEQ ID NO: 2374833 - RNA, 19 nt, Artificial Sequence
  Description of Artificial Sequence: Synthetic oligonucleotide
acucgagugccuuucuugc

SEQ ID NO: 2374834 - RNA, 19 nt, Artificial Sequence
  Description of Artificial Sequence: Synthetic oligonucleotide
uauucaaggaagauggcuu

SEQ ID NO: 2374835 - RNA, 19 nt, Artificial Sequence
  Description of Artificial Sequence: Synthetic oligonucleotide
agguucagcaauucuuagc

SEQ ID NO: 2374836 - RNA, 19 nt, Artificial Sequence
  Description of Artificial Sequence: Synthetic oligonucleotide
cauuucuggacacaucggg

SEQ ID NO: 2374837 - RNA, 19 nt, Artificial Sequence
  Description of Artificial Sequence: Synthetic oligonucleotide
acagcuaauuacgcuaucc

SEQ ID NO: 2374838 - RNA, 19 nt, Artificial Sequence
  Description of Artificial Sequence: Synthetic oligonucleotide
uggccuuuccgcaaaacag

SEQ ID NO: 2374839 - RNA, 19 nt, Artificial Sequence
  Description of Artificial Sequence: Synthetic oligonucleotide
uacccauuguuucuucugg

SEQ ID NO: 2374840 - RNA, 19 nt, Artificial Sequence
  Description of Artificial Sequence: Synthetic oligonucleotide
  modified_base (4)..(4): a, c, u, g, unknown or other
uucnguuucugcaugcuau

SEQ ID NO: 2374841 - RNA, 19 nt, Artificial Sequence
  Description of Artificial Sequence: Synthetic oligonucleotide
auuaugggaaccacaaccg

SEQ ID NO: 2374842 - RNA, 19 nt, Artificial Sequence
  Description of Artificial Sequence: Synthetic oligonucleotide
uccaugcacacgcagcugg

SEQ ID NO: 2374843 - RNA, 19 nt, Artificial Sequence
  Description of Artificial Sequence: Synthetic oligonucleotide
  modified_base (10)..(10): a, c, u, g, unknown or other
agaugguucnguuucugca

SEQ ID NO: 2374844 - RNA, 19 nt, Artificial Sequence
  Description of Artificial Sequence: Synthetic oligonucleotide
aaucucaccacgaugauuu

SEQ ID NO: 2374845 - RNA, 19 nt, Artificial Sequence
  Description of Artificial Sequence: Synthetic oligonucleotide
gaaauugucugccuguaga

SEQ ID NO: 2374846 - RNA, 19 nt, Artificial Sequence
  Description of Artificial Sequence: Synthetic oligonucleotide
aauauauccccuucaucau

SEQ ID NO: 2374847 - RNA, 19 nt, Artificial Sequence
  Description of Artificial Sequence: Synthetic oligonucleotide
auugucugggaaccguccc

SEQ ID NO: 2374848 - RNA, 19 nt, Artificial Sequence
  Description of Artificial Sequence: Synthetic oligonucleotide
  modified_base (14)..(14): a, c, u, g, unknown or other
cuguagaugguucnguuuc

SEQ ID NO: 2374849 - RNA, 19 nt, Artificial Sequence
  Description of Artificial Sequence: Synthetic oligonucleotide
cugacgguugagcagaggg

SEQ ID NO: 2374850 - RNA, 19 nt, Artificial Sequence
  Description of Artificial Sequence: Synthetic oligonucleotide
ugcuauagaagccacugau

SEQ ID NO: 2374851 - RNA, 19 nt, Artificial Sequence
  Description of Artificial Sequence: Synthetic oligonucleotide
ucugcaugcuauagaagcc

SEQ ID NO: 2374852 - RNA, 19 nt, Artificial Sequence
  Description of Artificial Sequence: Synthetic oligonucleotide
ucuuucacaggacacggaa

SEQ ID NO: 2374853 - RNA, 19 nt, Artificial Sequence
  Description of Artificial Sequence: Synthetic oligonucleotide
caaacgucaggcuuccagg

SEQ ID NO: 2374854 - RNA, 19 nt, Artificial Sequence
  Description of Artificial Sequence: Synthetic oligonucleotide
aaauugucugccuguagau

SEQ ID NO: 2374855 - RNA, 19 nt, Artificial Sequence
  Description of Artificial Sequence: Synthetic oligonucleotide
uuauucaaggaagauggcu

SEQ ID NO: 2374856 - RNA, 19 nt, Artificial Sequence
  Description of Artificial Sequence: Synthetic oligonucleotide
acuaucucuguaaucuacc

SEQ ID NO: 2374857 - RNA, 19 nt, Artificial Sequence
  Description of Artificial Sequence: Synthetic oligonucleotide
uuucuggacacaucgggca

SEQ ID NO: 2374858 - RNA, 19 nt, Artificial Sequence
  Description of Artificial Sequence: Synthetic oligonucleotide
ugacccauaucucuaggga

SEQ ID NO: 2374859 - RNA, 19 nt, Artificial Sequence
  Description of Artificial Sequence: Synthetic oligonucleotide
cuuggaugcagccugcuac

SEQ ID NO: 2374860 - RNA, 19 nt, Artificial Sequence
  Description of Artificial Sequence: Synthetic oligonucleotide
aaccgagacaauggagucc

SEQ ID NO: 2374861 - RNA, 19 nt, Artificial Sequence
  Description of Artificial Sequence: Synthetic oligonucleotide
gacccauaucucuagggag

SEQ ID NO: 2374862 - RNA, 19 nt, Artificial Sequence
  Description of Artificial Sequence: Synthetic oligonucleotide
aguagggacaacacuggcc

SEQ ID NO: 2374863 - RNA, 19 nt, Artificial Sequence
  Description of Artificial Sequence: Synthetic oligonucleotide
ucauuuucacuuggggugg

SEQ ID NO: 2374864 - RNA, 19 nt, Artificial Sequence
  Description of Artificial Sequence: Synthetic oligonucleotide
agagcagugguacccauug

SEQ ID NO: 2374865 - RNA, 19 nt, Artificial Sequence
  Description of Artificial Sequence: Synthetic oligonucleotide
uuucuucucaauggguacg

SEQ ID NO: 2374866 - RNA, 19 nt, Artificial Sequence
  Description of Artificial Sequence: Synthetic oligonucleotide
auauuauuaugggaaccac

SEQ ID NO: 2374867 - RNA, 19 nt, Artificial Sequence
  Description of Artificial Sequence: Synthetic oligonucleotide
augcuauuaugauggagag

SEQ ID NO: 2374868 - RNA, 19 nt, Artificial Sequence
  Description of Artificial Sequence: Synthetic oligonucleotide
auuauuaugggaaccacaa

SEQ ID NO: 2374869 - RNA, 19 nt, Artificial Sequence
  Description of Artificial Sequence: Synthetic oligonucleotide
aacgucaggcuuccaggac

SEQ ID NO: 2374870 - RNA, 19 nt, Artificial Sequence
  Description of Artificial Sequence: Synthetic oligonucleotide
auuucuggacacaucgggc

SEQ ID NO: 2374871 - RNA, 19 nt, Artificial Sequence
  Description of Artificial Sequence: Synthetic oligonucleotide
uacuaucucuguaaucuac

SEQ ID NO: 2374872 - RNA, 19 nt, Artificial Sequence
  Description of Artificial Sequence: Synthetic oligonucleotide
augcacacgcagcuggugc

SEQ ID NO: 2374873 - RNA, 19 nt, Artificial Sequence
  Description of Artificial Sequence: Synthetic oligonucleotide
ucggcugccaggaauauau

SEQ ID NO: 2374874 - RNA, 19 nt, Artificial Sequence
  Description of Artificial Sequence: Synthetic oligonucleotide
acaucgggcagcaacuucc

SEQ ID NO: 2374875 - RNA, 19 nt, Artificial Sequence
  Description of Artificial Sequence: Synthetic oligonucleotide
aauggguacguuggucggc

SEQ ID NO: 2374876 - RNA, 19 nt, Artificial Sequence
  Description of Artificial Sequence: Synthetic oligonucleotide
ucgagugccuuucuugcag

SEQ ID NO: 2374877 - RNA, 19 nt, Artificial Sequence
  Description of Artificial Sequence: Synthetic oligonucleotide
caggauucagaguaacagc

SEQ ID NO: 2374878 - RNA, 19 nt, Artificial Sequence
  Description of Artificial Sequence: Synthetic oligonucleotide
gugaugagucuucacuugg

SEQ ID NO: 2374879 - RNA, 19 nt, Artificial Sequence
  Description of Artificial Sequence: Synthetic oligonucleotide
cuauccaugcacacgcagc

SEQ ID NO: 2374880 - RNA, 19 nt, Artificial Sequence
  Description of Artificial Sequence: Synthetic oligonucleotide
uugguagaaauugucugcc

SEQ ID NO: 2374881 - RNA, 19 nt, Artificial Sequence
  Description of Artificial Sequence: Synthetic oligonucleotide
aaacgucaggcuuccagga

SEQ ID NO: 2374882 - RNA, 19 nt, Artificial Sequence
  Description of Artificial Sequence: Synthetic oligonucleotide
gauucagaguaacagcuaa

SEQ ID NO: 2374883 - RNA, 19 nt, Artificial Sequence
  Description of Artificial Sequence: Synthetic oligonucleotide
uugaugagcaggaaugcua

SEQ ID NO: 2374884 - RNA, 19 nt, Artificial Sequence
  Description of Artificial Sequence: Synthetic oligonucleotide
uccgguaccagcagagcag

SEQ ID NO: 2374885 - RNA, 19 nt, Artificial Sequence
  Description of Artificial Sequence: Synthetic oligonucleotide
agugaugagucuucacuug

SEQ ID NO: 2374886 - RNA, 19 nt, Artificial Sequence
  Description of Artificial Sequence: Synthetic oligonucleotide
aucagcauaggucuuccca

SEQ ID NO: 2374887 - RNA, 19 nt, Artificial Sequence
  Description of Artificial Sequence: Synthetic oligonucleotide
ucgcgcaucagguucagca

SEQ ID NO: 2374888 - RNA, 19 nt, Artificial Sequence
  Description of Artificial Sequence: Synthetic oligonucleotide
guuucugcaugcuauagaa

SEQ ID NO: 2374889 - RNA, 19 nt, Artificial Sequence
  Description of Artificial Sequence: Synthetic oligonucleotide
ugaugagcaggaaugcuau

SEQ ID NO: 2374890 - RNA, 19 nt, Artificial Sequence
  Description of Artificial Sequence: Synthetic oligonucleotide
uauuaugauggagaggcau

SEQ ID NO: 2374891 - RNA, 19 nt, Artificial Sequence
  Description of Artificial Sequence: Synthetic oligonucleotide
caugcuauagaagccacug

SEQ ID NO: 2374892 - RNA, 19 nt, Artificial Sequence
  Description of Artificial Sequence: Synthetic oligonucleotide
aacagcuaauuacgcuauc

SEQ ID NO: 2374893 - RNA, 19 nt, Artificial Sequence
  Description of Artificial Sequence: Synthetic oligonucleotide
aaccacaaccgagacaaug

SEQ ID NO: 2374894 - RNA, 19 nt, Artificial Sequence
  Description of Artificial Sequence: Synthetic oligonucleotide
aucuaccuggaggugaccc

SEQ ID NO: 2374895 - RNA, 19 nt, Artificial Sequence
  Description of Artificial Sequence: Synthetic oligonucleotide
guaacagcuaauuacgcua

SEQ ID NO: 2374896 - RNA, 19 nt, Artificial Sequence
  Description of Artificial Sequence: Synthetic oligonucleotide
gguucagcaauucuuagca

SEQ ID NO: 2374897 - RNA, 19 nt, Artificial Sequence
  Description of Artificial Sequence: Synthetic oligonucleotide
ucagaguaacagcuaauua

SEQ ID NO: 2374898 - RNA, 19 nt, Artificial Sequence
  Description of Artificial Sequence: Synthetic oligonucleotide
gauggaugaugucauuuuc

SEQ ID NO: 2374899 - RNA, 19 nt, Artificial Sequence
  Description of Artificial Sequence: Synthetic oligonucleotide
uauauccccuucaucauuu

SEQ ID NO: 2374900 - RNA, 19 nt, Artificial Sequence
  Description of Artificial Sequence: Synthetic oligonucleotide
uuauuaugggaaccacaac

SEQ ID NO: 2374901 - RNA, 19 nt, Artificial Sequence
  Description of Artificial Sequence: Synthetic oligonucleotide
gucaaucucaccacgauga

SEQ ID NO: 2374902 - RNA, 19 nt, Artificial Sequence
  Description of Artificial Sequence: Synthetic oligonucleotide
aauugucugccuguagaug

SEQ ID NO: 2374903 - RNA, 19 nt, Artificial Sequence
  Description of Artificial Sequence: Synthetic oligonucleotide
uuaugggaaccacaaccga

SEQ ID NO: 2374904 - RNA, 19 nt, Artificial Sequence
  Description of Artificial Sequence: Synthetic oligonucleotide
ugaagugacauaccacuuu

SEQ ID NO: 2374905 - RNA, 19 nt, Artificial Sequence
  Description of Artificial Sequence: Synthetic oligonucleotide
gucaaugucccaccgcucc

SEQ ID NO: 2374906 - RNA, 19 nt, Artificial Sequence
  Description of Artificial Sequence: Synthetic oligonucleotide
gacucgagugccuuucuug

SEQ ID NO: 2374907 - RNA, 19 nt, Artificial Sequence
  Description of Artificial Sequence: Synthetic oligonucleotide
uaaucuaccuggaggugac

SEQ ID NO: 2374908 - RNA, 19 nt, Artificial Sequence
  Description of Artificial Sequence: Synthetic oligonucleotide
  modified_base (19)..(19): a, c, u, g, unknown or other
ucugccuguagaugguucn

SEQ ID NO: 2374909 - RNA, 19 nt, Artificial Sequence
  Description of Artificial Sequence: Synthetic oligonucleotide
aggauucagaguaacagcu

SEQ ID NO: 2374910 - RNA, 19 nt, Artificial Sequence
  Description of Artificial Sequence: Synthetic oligonucleotide
cuuaguugguguccgguac

SEQ ID NO: 2374911 - RNA, 19 nt, Artificial Sequence
  Description of Artificial Sequence: Synthetic oligonucleotide
uacgcuauccaugcacacg

SEQ ID NO: 2374912 - RNA, 19 nt, Artificial Sequence
  Description of Artificial Sequence: Synthetic oligonucleotide
gugacccauaucucuaggg

SEQ ID NO: 2374913 - RNA, 19 nt, Artificial Sequence
  Description of Artificial Sequence: Synthetic oligonucleotide
agaaauugucugccuguag

SEQ ID NO: 2374914 - RNA, 19 nt, Artificial Sequence
  Description of Artificial Sequence: Synthetic oligonucleotide
  modified_base (13)..(13): a, c, u, g, unknown or other
uguagaugguucnguuucu

SEQ ID NO: 2374915 - RNA, 19 nt, Artificial Sequence
  Description of Artificial Sequence: Synthetic oligonucleotide
uuucuucgaaauugugucu

SEQ ID NO: 2374916 - RNA, 19 nt, Artificial Sequence
  Description of Artificial Sequence: Synthetic oligonucleotide
acaaccgagacaauggagu

SEQ ID NO: 2374917 - RNA, 19 nt, Artificial Sequence
  Description of Artificial Sequence: Synthetic oligonucleotide
ugauggagaggcauauuau

SEQ ID NO: 2374918 - RNA, 19 nt, Artificial Sequence
  Description of Artificial Sequence: Synthetic oligonucleotide
uggagaggcauauuauuau

SEQ ID NO: 2374919 - RNA, 19 nt, Artificial Sequence
  Description of Artificial Sequence: Synthetic oligonucleotide
agcaggaaugcuauuauga

SEQ ID NO: 2374920 - RNA, 19 nt, Artificial Sequence
  Description of Artificial Sequence: Synthetic oligonucleotide
agugguacccauuguuucu

SEQ ID NO: 2374921 - RNA, 19 nt, Artificial Sequence
  Description of Artificial Sequence: Synthetic oligonucleotide
ugagcaggaaugcuauuau

SEQ ID NO: 2374922 - RNA, 19 nt, Artificial Sequence
  Description of Artificial Sequence: Synthetic oligonucleotide
cuugaugggcucagcacag

SEQ ID NO: 2374923 - RNA, 19 nt, Artificial Sequence
  Description of Artificial Sequence: Synthetic oligonucleotide
uaacagcuaauuacgcuau

SEQ ID NO: 2374924 - RNA, 19 nt, Artificial Sequence
  Description of Artificial Sequence: Synthetic oligonucleotide
uggggugggccacaugggg

SEQ ID NO: 2374925 - RNA, 19 nt, Artificial Sequence
  Description of Artificial Sequence: Synthetic oligonucleotide
uucuggacacaucgggcag

SEQ ID NO: 2374926 - RNA, 19 nt, Artificial Sequence
  Description of Artificial Sequence: Synthetic oligonucleotide
uggcacauacauuucugga

SEQ ID NO: 2374927 - RNA, 19 nt, Artificial Sequence
  Description of Artificial Sequence: Synthetic oligonucleotide
uggaguccagugaugaguc

SEQ ID NO: 2374928 - RNA, 19 nt, Artificial Sequence
  Description of Artificial Sequence: Synthetic oligonucleotide
agggucuggccuugcaggc

SEQ ID NO: 2374929 - RNA, 19 nt, Artificial Sequence
  Description of Artificial Sequence: Synthetic oligonucleotide
ugcuauuaugauggagagg

SEQ ID NO: 2374930 - RNA, 19 nt, Artificial Sequence
  Description of Artificial Sequence: Synthetic oligonucleotide
ucccacugaagugacauac

SEQ ID NO: 2374931 - RNA, 19 nt, Artificial Sequence
  Description of Artificial Sequence: Synthetic oligonucleotide
agcuaauuacgcuauccau

SEQ ID NO: 2374932 - RNA, 19 nt, Artificial Sequence
  Description of Artificial Sequence: Synthetic oligonucleotide
  modified_base (7)..(7): a, c, u, g, unknown or other
ugguucnguuucugcaugc

SEQ ID NO: 2374933 - RNA, 19 nt, Artificial Sequence
  Description of Artificial Sequence: Synthetic oligonucleotide
gguagaaauugucugccug

SEQ ID NO: 2374934 - RNA, 19 nt, Artificial Sequence
  Description of Artificial Sequence: Synthetic oligonucleotide
ucggcucuggcacauacau

SEQ ID NO: 2374935 - RNA, 19 nt, Artificial Sequence
  Description of Artificial Sequence: Synthetic oligonucleotide
agacaauggaguccaguga

SEQ ID NO: 2374936 - RNA, 19 nt, Artificial Sequence
  Description of Artificial Sequence: Synthetic oligonucleotide
guugguguccgguaccagc

SEQ ID NO: 2374937 - RNA, 19 nt, Artificial Sequence
  Description of Artificial Sequence: Synthetic oligonucleotide
caccguuugguagaaauug

SEQ ID NO: 2374938 - RNA, 19 nt, Artificial Sequence
  Description of Artificial Sequence: Synthetic oligonucleotide
agcugguuauucaaggaag

SEQ ID NO: 2374939 - RNA, 19 nt, Artificial Sequence
  Description of Artificial Sequence: Synthetic oligonucleotide
cauugucugggaaccgucc

SEQ ID NO: 2374940 - RNA, 19 nt, Artificial Sequence
  Description of Artificial Sequence: Synthetic oligonucleotide
agugacauaccacuuucuu

SEQ ID NO: 2374941 - RNA, 19 nt, Artificial Sequence
  Description of Artificial Sequence: Synthetic oligonucleotide
aggucuuucacaggacacg

SEQ ID NO: 2374942 - RNA, 19 nt, Artificial Sequence
  Description of Artificial Sequence: Synthetic oligonucleotide
uaggcaguagggacaacac

SEQ ID NO: 2374943 - RNA, 19 nt, Artificial Sequence
  Description of Artificial Sequence: Synthetic oligonucleotide
uucagaguaacagcuaauu

SEQ ID NO: 2374944 - RNA, 19 nt, Artificial Sequence
  Description of Artificial Sequence: Synthetic oligonucleotide
uuuucacuuggggugggcc

SEQ ID NO: 2374945 - RNA, 19 nt, Artificial Sequence
  Description of Artificial Sequence: Synthetic oligonucleotide
gugacauaccacuuucuuc

SEQ ID NO: 2374946 - RNA, 19 nt, Artificial Sequence
  Description of Artificial Sequence: Synthetic oligonucleotide
gcuaauuacgcuauccaug

SEQ ID NO: 2374947 - RNA, 19 nt, Artificial Sequence
  Description of Artificial Sequence: Synthetic oligonucleotide
uucacaggacacggaaggg

SEQ ID NO: 2374948 - RNA, 19 nt, Artificial Sequence
  Description of Artificial Sequence: Synthetic oligonucleotide
cacaaccgagacaauggag

SEQ ID NO: 2374949 - RNA, 19 nt, Artificial Sequence
  Description of Artificial Sequence: Synthetic oligonucleotide
gaguaacagcuaauuacgc

SEQ ID NO: 2374950 - RNA, 19 nt, Artificial Sequence
  Description of Artificial Sequence: Synthetic oligonucleotide
aacacuggccuuuccgcaa

SEQ ID NO: 2374951 - RNA, 19 nt, Artificial Sequence
  Description of Artificial Sequence: Synthetic oligonucleotide
uuaugauggagaggcauau

SEQ ID NO: 2374952 - RNA, 19 nt, Artificial Sequence
  Description of Artificial Sequence: Synthetic oligonucleotide
cugaucgcgcaucagguuc

SEQ ID NO: 2374953 - RNA, 19 nt, Artificial Sequence
  Description of Artificial Sequence: Synthetic oligonucleotide
agauggaugaugucauuuu

SEQ ID NO: 2374954 - RNA, 19 nt, Artificial Sequence
  Description of Artificial Sequence: Synthetic oligonucleotide
ugaucgcgcaucagguuca

SEQ ID NO: 2374955 - RNA, 19 nt, Artificial Sequence
  Description of Artificial Sequence: Synthetic oligonucleotide
guacccauuguuucuucug

SEQ ID NO: 2374956 - RNA, 19 nt, Artificial Sequence
  Description of Artificial Sequence: Synthetic oligonucleotide
ucuuagcauugucugggaa

SEQ ID NO: 2374957 - RNA, 19 nt, Artificial Sequence
  Description of Artificial Sequence: Synthetic oligonucleotide
ugacgguugagcagagggu

SEQ ID NO: 2374958 - RNA, 19 nt, Artificial Sequence
  Description of Artificial Sequence: Synthetic oligonucleotide
aaucuaccuggaggugacc

SEQ ID NO: 2374959 - RNA, 19 nt, Artificial Sequence
  Description of Artificial Sequence: Synthetic oligonucleotide
ucucuguaaucuaccugga

SEQ ID NO: 2374960 - RNA, 19 nt, Artificial Sequence
  Description of Artificial Sequence: Synthetic oligonucleotide
auggcuuaguugguguccg

SEQ ID NO: 2374961 - RNA, 19 nt, Artificial Sequence
  Description of Artificial Sequence: Synthetic oligonucleotide
uguaaucuaccuggaggug

SEQ ID NO: 2374962 - RNA, 19 nt, Artificial Sequence
  Description of Artificial Sequence: Synthetic oligonucleotide
auaccagcugguuauucaa

SEQ ID NO: 2374963 - RNA, 19 nt, Artificial Sequence
  Description of Artificial Sequence: Synthetic oligonucleotide
cacugaagugacauaccac

SEQ ID NO: 2374964 - RNA, 19 nt, Artificial Sequence
  Description of Artificial Sequence: Synthetic oligonucleotide
aaugucccaccgcuccuca

SEQ ID NO: 2374965 - RNA, 19 nt, Artificial Sequence
  Description of Artificial Sequence: Synthetic oligonucleotide
uggugcaaacgucaggcuu

SEQ ID NO: 2374966 - RNA, 19 nt, Artificial Sequence
  Description of Artificial Sequence: Synthetic oligonucleotide
gacaauggaguccagugau

SEQ ID NO: 2374967 - RNA, 19 nt, Artificial Sequence
  Description of Artificial Sequence: Synthetic oligonucleotide
uucgaaauugugucuucua

SEQ ID NO: 2374968 - RNA, 19 nt, Artificial Sequence
  Description of Artificial Sequence: Synthetic oligonucleotide
ggagaggcauauuauuaug

SEQ ID NO: 2374969 - RNA, 19 nt, Artificial Sequence
  Description of Artificial Sequence: Synthetic oligonucleotide
ucaucagcauaggucuucc

SEQ ID NO: 2374970 - RNA, 19 nt, Artificial Sequence
  Description of Artificial Sequence: Synthetic oligonucleotide
auuacgcuauccaugcaca

SEQ ID NO: 2374971 - RNA, 19 nt, Artificial Sequence
  Description of Artificial Sequence: Synthetic oligonucleotide
guaaucuaccuggagguga

SEQ ID NO: 2374972 - RNA, 19 nt, Artificial Sequence
  Description of Artificial Sequence: Synthetic oligonucleotide
gcaaacgucaggcuuccag

SEQ ID NO: 2374973 - RNA, 19 nt, Artificial Sequence
  Description of Artificial Sequence: Synthetic oligonucleotide
acgucaggcuuccaggacu

SEQ ID NO: 2374974 - RNA, 19 nt, Artificial Sequence
  Description of Artificial Sequence: Synthetic oligonucleotide
accgagacaauggagucca

SEQ ID NO: 2374975 - RNA, 19 nt, Artificial Sequence
  Description of Artificial Sequence: Synthetic oligonucleotide
guucacaccguuugguaga

SEQ ID NO: 2374976 - RNA, 19 nt, Artificial Sequence
  Description of Artificial Sequence: Synthetic oligonucleotide
agcagugguacccauuguu

SEQ ID NO: 2374977 - RNA, 19 nt, Artificial Sequence
  Description of Artificial Sequence: Synthetic oligonucleotide
caggucuuucacaggacac

SEQ ID NO: 2374978 - RNA, 19 nt, Artificial Sequence
  Description of Artificial Sequence: Synthetic oligonucleotide
cgaaauugugucuucuagg

SEQ ID NO: 2374979 - RNA, 19 nt, Artificial Sequence
  Description of Artificial Sequence: Synthetic oligonucleotide
uaauuacgcuauccaugca

SEQ ID NO: 2374980 - RNA, 19 nt, Artificial Sequence
  Description of Artificial Sequence: Synthetic oligonucleotide
gacgguugagcagaggguc

SEQ ID NO: 2374981 - RNA, 19 nt, Artificial Sequence
  Description of Artificial Sequence: Synthetic oligonucleotide
gguaccagcagagcagugg

SEQ ID NO: 2374982 - RNA, 19 nt, Artificial Sequence
  Description of Artificial Sequence: Synthetic oligonucleotide
uugucugggaaccgucccu

SEQ ID NO: 2374983 - RNA, 19 nt, Artificial Sequence
  Description of Artificial Sequence: Synthetic oligonucleotide
uucuucgaaauugugucuu

SEQ ID NO: 2374984 - RNA, 19 nt, Artificial Sequence
  Description of Artificial Sequence: Synthetic oligonucleotide
ggcauauuauuaugggaac

SEQ ID NO: 2374985 - RNA, 19 nt, Artificial Sequence
  Description of Artificial Sequence: Synthetic oligonucleotide
auauauccccuucaucauu

SEQ ID NO: 2374986 - RNA, 19 nt, Artificial Sequence
  Description of Artificial Sequence: Synthetic oligonucleotide
  modified_base (3)..(3): a, c, u, g, unknown or other
ucnguuucugcaugcuaua

SEQ ID NO: 2374987 - RNA, 19 nt, Artificial Sequence
  Description of Artificial Sequence: Synthetic oligonucleotide
agcuggugcaaacgucagg

SEQ ID NO: 2374988 - RNA, 19 nt, Artificial Sequence
  Description of Artificial Sequence: Synthetic oligonucleotide
cugggaaccgucccuggcc

SEQ ID NO: 2374989 - RNA, 19 nt, Artificial Sequence
  Description of Artificial Sequence: Synthetic oligonucleotide
aggugacccauaucucuag

SEQ ID NO: 2374990 - RNA, 19 nt, Artificial Sequence
  Description of Artificial Sequence: Synthetic oligonucleotide
uuacgcuauccaugcacac

SEQ ID NO: 2374991 - RNA, 19 nt, Artificial Sequence
  Description of Artificial Sequence: Synthetic oligonucleotide
caaccgagacaauggaguc

SEQ ID NO: 2374992 - RNA, 19 nt, Artificial Sequence
  Description of Artificial Sequence: Synthetic oligonucleotide
ugggaaccacaaccgagac

SEQ ID NO: 2374993 - RNA, 19 nt, Artificial Sequence
  Description of Artificial Sequence: Synthetic oligonucleotide
ucucaauggguacguuggu

SEQ ID NO: 2374994 - RNA, 19 nt, Artificial Sequence
  Description of Artificial Sequence: Synthetic oligonucleotide
cuguaaucuaccuggaggu

SEQ ID NO: 2374995 - RNA, 19 nt, Artificial Sequence
  Description of Artificial Sequence: Synthetic oligonucleotide
ggucuuucacaggacacgg

SEQ ID NO: 2374996 - RNA, 19 nt, Artificial Sequence
  Description of Artificial Sequence: Synthetic oligonucleotide
ucuucgaaauugugucuuc

SEQ ID NO: 2374997 - RNA, 19 nt, Artificial Sequence
  Description of Artificial Sequence: Synthetic oligonucleotide
gcacauacauuucuggaca

SEQ ID NO: 2374998 - RNA, 19 nt, Artificial Sequence
  Description of Artificial Sequence: Synthetic oligonucleotide
gcuacuaucucuguaaucu

SEQ ID NO: 2374999 - RNA, 19 nt, Artificial Sequence
  Description of Artificial Sequence: Synthetic oligonucleotide
cuucuaggcaguagggaca

SEQ ID NO: 2375000 - RNA, 19 nt, Artificial Sequence
  Description of Artificial Sequence: Synthetic oligonucleotide
ugcuacuaucucuguaauc

SEQ ID NO: 2375001 - RNA, 19 nt, Artificial Sequence
  Description of Artificial Sequence: Synthetic oligonucleotide
uaucucuagggagauggau

SEQ ID NO: 2375002 - RNA, 19 nt, Artificial Sequence
  Description of Artificial Sequence: Synthetic oligonucleotide
ugcacacgcagcuggugca

SEQ ID NO: 2375003 - RNA, 19 nt, Artificial Sequence
  Description of Artificial Sequence: Synthetic oligonucleotide
ugggaaccgucccuggccu

SEQ ID NO: 2375004 - RNA, 19 nt, Artificial Sequence
  Description of Artificial Sequence: Synthetic oligonucleotide
auacauuucuggacacauc

SEQ ID NO: 2375005 - RNA, 19 nt, Artificial Sequence
  Description of Artificial Sequence: Synthetic oligonucleotide
  modified_base (9)..(9): a, c, u, g, unknown or other
gaugguucnguuucugcau

SEQ ID NO: 2375006 - RNA, 19 nt, Artificial Sequence
  Description of Artificial Sequence: Synthetic oligonucleotide
aguccagugaugagucuuc

SEQ ID NO: 2375007 - RNA, 19 nt, Artificial Sequence
  Description of Artificial Sequence: Synthetic oligonucleotide
augcuauagaagccacuga

SEQ ID NO: 2375008 - RNA, 19 nt, Artificial Sequence
  Description of Artificial Sequence: Synthetic oligonucleotide
gcauauuauuaugggaacc

SEQ ID NO: 2375009 - RNA, 19 nt, Artificial Sequence
  Description of Artificial Sequence: Synthetic oligonucleotide
ugucccaccgcuccucauc

SEQ ID NO: 2375010 - RNA, 19 nt, Artificial Sequence
  Description of Artificial Sequence: Synthetic oligonucleotide
gauggagaggcauauuauu

SEQ ID NO: 2375011 - RNA, 19 nt, Artificial Sequence
  Description of Artificial Sequence: Synthetic oligonucleotide
guuauucaaggaagauggc

SEQ ID NO: 2375012 - RNA, 19 nt, Artificial Sequence
  Description of Artificial Sequence: Synthetic oligonucleotide
gcugccaggaauauauccc

SEQ ID NO: 2375013 - RNA, 19 nt, Artificial Sequence
  Description of Artificial Sequence: Synthetic oligonucleotide
caggcaguagcagugugug

SEQ ID NO: 2375014 - RNA, 19 nt, Artificial Sequence
  Description of Artificial Sequence: Synthetic oligonucleotide
agugugugcagcugucaau

SEQ ID NO: 2375015 - RNA, 19 nt, Artificial Sequence
  Description of Artificial Sequence: Synthetic oligonucleotide
ggucaaucucaccacgaug

SEQ ID NO: 2375016 - RNA, 19 nt, Artificial Sequence
  Description of Artificial Sequence: Synthetic oligonucleotide
cagcuaauuacgcuaucca

SEQ ID NO: 2375017 - RNA, 19 nt, Artificial Sequence
  Description of Artificial Sequence: Synthetic oligonucleotide
ugugugcagcugucaaugu

SEQ ID NO: 2375018 - RNA, 19 nt, Artificial Sequence
  Description of Artificial Sequence: Synthetic oligonucleotide
augggaaccacaaccgaga

SEQ ID NO: 2375019 - RNA, 19 nt, Artificial Sequence
  Description of Artificial Sequence: Synthetic oligonucleotide
aagugacauaccacuuucu

SEQ ID NO: 2375020 - RNA, 19 nt, Artificial Sequence
  Description of Artificial Sequence: Synthetic oligonucleotide
uccaccuugaugggcucag

SEQ ID NO: 2375021 - RNA, 19 nt, Artificial Sequence
  Description of Artificial Sequence: Synthetic oligonucleotide
ggccuuuccgcaaaacagg

SEQ ID NO: 2375022 - RNA, 19 nt, Artificial Sequence
  Description of Artificial Sequence: Synthetic oligonucleotide
caguagggacaacacuggc

SEQ ID NO: 2375023 - RNA, 19 nt, Artificial Sequence
  Description of Artificial Sequence: Synthetic oligonucleotide
auuaugauggagaggcaua

SEQ ID NO: 2375024 - RNA, 19 nt, Artificial Sequence
  Description of Artificial Sequence: Synthetic oligonucleotide
caauggaguccagugauga

SEQ ID NO: 2375025 - RNA, 19 nt, Artificial Sequence
  Description of Artificial Sequence: Synthetic oligonucleotide
  modified_base (12)..(12): a, c, u, g, unknown or other
guagaugguucnguuucug

SEQ ID NO: 2375026 - RNA, 19 nt, Artificial Sequence
  Description of Artificial Sequence: Synthetic oligonucleotide
ccauuguuucuucugguug

SEQ ID NO: 2375027 - RNA, 19 nt, Artificial Sequence
  Description of Artificial Sequence: Synthetic oligonucleotide
  modified_base (2)..(2): a, c, u, g, unknown or other
cnguuucugcaugcuauag

SEQ ID NO: 2375028 - RNA, 19 nt, Artificial Sequence
  Description of Artificial Sequence: Synthetic oligonucleotide
uucuaggcaguagggacaa

SEQ ID NO: 2375029 - RNA, 19 nt, Artificial Sequence
  Description of Artificial Sequence: Synthetic oligonucleotide
uagaaauugucugccugua

SEQ ID NO: 2375030 - RNA, 19 nt, Artificial Sequence
  Description of Artificial Sequence: Synthetic oligonucleotide
acccauuguuucuucuggu

SEQ ID NO: 2375031 - RNA, 19 nt, Artificial Sequence
  Description of Artificial Sequence: Synthetic oligonucleotide
auggagaggcauauuauua

SEQ ID NO: 2375032 - RNA, 19 nt, Artificial Sequence
  Description of Artificial Sequence: Synthetic oligonucleotide
cuagggagauggaugaugu

SEQ ID NO: 2375033 - RNA, 19 nt, Artificial Sequence
  Description of Artificial Sequence: Synthetic oligonucleotide
caggaauauauccccuuca

SEQ ID NO: 2375034 - RNA, 19 nt, Artificial Sequence
  Description of Artificial Sequence: Synthetic oligonucleotide
uucccuccaccuugauggg

SEQ ID NO: 2375035 - RNA, 19 nt, Artificial Sequence
  Description of Artificial Sequence: Synthetic oligonucleotide
ugucaaugucccaccgcuc

SEQ ID NO: 2375036 - RNA, 19 nt, Artificial Sequence
  Description of Artificial Sequence: Synthetic oligonucleotide
acccauaucucuagggaga

SEQ ID NO: 2375037 - RNA, 19 nt, Artificial Sequence
  Description of Artificial Sequence: Synthetic oligonucleotide
ggugacccauaucucuagg

SEQ ID NO: 2375038 - RNA, 19 nt, Artificial Sequence
  Description of Artificial Sequence: Synthetic oligonucleotide
acguuggucggcucuggca

SEQ ID NO: 2375039 - RNA, 19 nt, Artificial Sequence
  Description of Artificial Sequence: Synthetic oligonucleotide
caucgggcagcaacuuccc

SEQ ID NO: 2375040 - RNA, 19 nt, Artificial Sequence
  Description of Artificial Sequence: Synthetic oligonucleotide
gcagcaacuucccuccacc

SEQ ID NO: 2375041 - RNA, 19 nt, Artificial Sequence
  Description of Artificial Sequence: Synthetic oligonucleotide
gcuauccaugcacacgcag

SEQ ID NO: 2375042 - RNA, 19 nt, Artificial Sequence
  Description of Artificial Sequence: Synthetic oligonucleotide
cuggccuuuccgcaaaaca

SEQ ID NO: 2375043 - RNA, 19 nt, Artificial Sequence
  Description of Artificial Sequence: Synthetic oligonucleotide
ccacugaucgcgcaucagg

SEQ ID NO: 2375044 - RNA, 19 nt, Artificial Sequence
  Description of Artificial Sequence: Synthetic oligonucleotide
uuuccgcaaaacaggucuu

SEQ ID NO: 2375045 - RNA, 19 nt, Artificial Sequence
  Description of Artificial Sequence: Synthetic oligonucleotide
acauacauuucuggacaca

SEQ ID NO: 2375046 - RNA, 19 nt, Artificial Sequence
  Description of Artificial Sequence: Synthetic oligonucleotide
guccgguaccagcagagca

SEQ ID NO: 2375047 - RNA, 19 nt, Artificial Sequence
  Description of Artificial Sequence: Synthetic oligonucleotide
gaugagucuucacuuggau

SEQ ID NO: 2375048 - RNA, 19 nt, Artificial Sequence
  Description of Artificial Sequence: Synthetic oligonucleotide
gcaguagggacaacacugg

SEQ ID NO: 2375049 - RNA, 19 nt, Artificial Sequence
  Description of Artificial Sequence: Synthetic oligonucleotide
aaccgucccuggccuggac

SEQ ID NO: 2375050 - RNA, 19 nt, Artificial Sequence
  Description of Artificial Sequence: Synthetic oligonucleotide
uggcuuaguugguguccgg

SEQ ID NO: 2375051 - RNA, 19 nt, Artificial Sequence
  Description of Artificial Sequence: Synthetic oligonucleotide
gacauaccacuuucuucga

SEQ ID NO: 2375052 - RNA, 19 nt, Artificial Sequence
  Description of Artificial Sequence: Synthetic oligonucleotide
guguccgguaccagcagag

SEQ ID NO: 2375053 - RNA, 19 nt, Artificial Sequence
  Description of Artificial Sequence: Synthetic oligonucleotide
gugugcagcugucaauguc

SEQ ID NO: 2375054 - RNA, 19 nt, Artificial Sequence
  Description of Artificial Sequence: Synthetic oligonucleotide
cugucaaugucccaccgcu

SEQ ID NO: 2375055 - RNA, 19 nt, Artificial Sequence
  Description of Artificial Sequence: Synthetic oligonucleotide
acaauggaguccagugaug

SEQ ID NO: 2375056 - RNA, 19 nt, Artificial Sequence
  Description of Artificial Sequence: Synthetic oligonucleotide
cuaucucuguaaucuaccu

SEQ ID NO: 2375057 - RNA, 19 nt, Artificial Sequence
  Description of Artificial Sequence: Synthetic oligonucleotide
cagcugguuauucaaggaa

SEQ ID NO: 2375058 - RNA, 19 nt, Artificial Sequence
  Description of Artificial Sequence: Synthetic oligonucleotide
caacacuggccuuuccgca

SEQ ID NO: 2375059 - RNA, 19 nt, Artificial Sequence
  Description of Artificial Sequence: Synthetic oligonucleotide
uggacucgagugccuuucu

SEQ ID NO: 2375060 - RNA, 19 nt, Artificial Sequence
  Description of Artificial Sequence: Synthetic oligonucleotide
cuauuaugauggagaggca

SEQ ID NO: 2375061 - RNA, 19 nt, Artificial Sequence
  Description of Artificial Sequence: Synthetic oligonucleotide
cugcaugcuauagaagcca

SEQ ID NO: 2375062 - RNA, 19 nt, Artificial Sequence
  Description of Artificial Sequence: Synthetic oligonucleotide
cauuuucacuugggguggg

SEQ ID NO: 2375063 - RNA, 19 nt, Artificial Sequence
  Description of Artificial Sequence: Synthetic oligonucleotide
accguuugguagaaauugu

SEQ ID NO: 2375064 - RNA, 19 nt, Artificial Sequence
  Description of Artificial Sequence: Synthetic oligonucleotide
acugaucgcgcaucagguu

SEQ ID NO: 2375065 - RNA, 19 nt, Artificial Sequence
  Description of Artificial Sequence: Synthetic oligonucleotide
guugagcagagggucuggc

SEQ ID NO: 2375066 - RNA, 19 nt, Artificial Sequence
  Description of Artificial Sequence: Synthetic oligonucleotide
auggguacguuggucggcu

SEQ ID NO: 2375067 - RNA, 19 nt, Artificial Sequence
  Description of Artificial Sequence: Synthetic oligonucleotide
gacacaucgggcagcaacu

SEQ ID NO: 2375068 - RNA, 19 nt, Artificial Sequence
  Description of Artificial Sequence: Synthetic oligonucleotide
  modified_base (5)..(5): a, c, u, g, unknown or other
guucnguuucugcaugcua

SEQ ID NO: 2375069 - RNA, 19 nt, Artificial Sequence
  Description of Artificial Sequence: Synthetic oligonucleotide
uguccgguaccagcagagc

SEQ ID NO: 2375070 - RNA, 19 nt, Artificial Sequence
  Description of Artificial Sequence: Synthetic oligonucleotide
cacagauaccagcugguua

SEQ ID NO: 2375071 - RNA, 19 nt, Artificial Sequence
  Description of Artificial Sequence: Synthetic oligonucleotide
ccugcuacuaucucuguaa

SEQ ID NO: 2375072 - RNA, 19 nt, Artificial Sequence
  Description of Artificial Sequence: Synthetic oligonucleotide
uucacaccguuugguagaa

SEQ ID NO: 2375073 - RNA, 19 nt, Artificial Sequence
  Description of Artificial Sequence: Synthetic oligonucleotide
cacaccguuugguagaaau

SEQ ID NO: 2375074 - RNA, 19 nt, Artificial Sequence
  Description of Artificial Sequence: Synthetic oligonucleotide
cacaucgggcagcaacuuc

SEQ ID NO: 2375075 - RNA, 19 nt, Artificial Sequence
  Description of Artificial Sequence: Synthetic oligonucleotide
gcugucaaugucccaccgc

SEQ ID NO: 2375076 - RNA, 19 nt, Artificial Sequence
  Description of Artificial Sequence: Synthetic oligonucleotide
caccuugaugggcucagca

SEQ ID NO: 2375077 - RNA, 19 nt, Artificial Sequence
  Description of Artificial Sequence: Synthetic oligonucleotide
  modified_base (18)..(18): a, c, u, g, unknown or other
cugccuguagaugguucng

SEQ ID NO: 2375078 - RNA, 19 nt, Artificial Sequence
  Description of Artificial Sequence: Synthetic oligonucleotide
ugguacccauuguuucuuc

SEQ ID NO: 2375079 - RNA, 19 nt, Artificial Sequence
  Description of Artificial Sequence: Synthetic oligonucleotide
agccacugaucgcgcauca

SEQ ID NO: 2375080 - RNA, 19 nt, Artificial Sequence
  Description of Artificial Sequence: Synthetic oligonucleotide
gagauggaugaugucauuu

SEQ ID NO: 2375081 - RNA, 19 nt, Artificial Sequence
  Description of Artificial Sequence: Synthetic oligonucleotide
ccguuugguagaaauuguc

SEQ ID NO: 2375082 - RNA, 19 nt, Artificial Sequence
  Description of Artificial Sequence: Synthetic oligonucleotide
gacacggaagggcaggauu

SEQ ID NO: 2375083 - RNA, 19 nt, Artificial Sequence
  Description of Artificial Sequence: Synthetic oligonucleotide
cuggacucgagugccuuuc

SEQ ID NO: 2375084 - RNA, 19 nt, Artificial Sequence
  Description of Artificial Sequence: Synthetic oligonucleotide
cuacuaucucuguaaucua

SEQ ID NO: 2375085 - RNA, 19 nt, Artificial Sequence
  Description of Artificial Sequence: Synthetic oligonucleotide
ggaaccgucccuggccugg

SEQ ID NO: 2375086 - RNA, 19 nt, Artificial Sequence
  Description of Artificial Sequence: Synthetic oligonucleotide
cacugaucgcgcaucaggu

SEQ ID NO: 2375087 - RNA, 19 nt, Artificial Sequence
  Description of Artificial Sequence: Synthetic oligonucleotide
gaggugacccauaucucua

SEQ ID NO: 2375088 - RNA, 19 nt, Artificial Sequence
  Description of Artificial Sequence: Synthetic oligonucleotide
agggacaacacuggccuuu

SEQ ID NO: 2375089 - RNA, 19 nt, Artificial Sequence
  Description of Artificial Sequence: Synthetic oligonucleotide
gucccaccgcuccucauca

SEQ ID NO: 2375090 - RNA, 19 nt, Artificial Sequence
  Description of Artificial Sequence: Synthetic oligonucleotide
caugcacacgcagcuggug

SEQ ID NO: 2375091 - RNA, 19 nt, Artificial Sequence
  Description of Artificial Sequence: Synthetic oligonucleotide
uuccgcaaaacaggucuuu

SEQ ID NO: 2375092 - RNA, 19 nt, Artificial Sequence
  Description of Artificial Sequence: Synthetic oligonucleotide
aguugguguccgguaccag

SEQ ID NO: 2375093 - RNA, 19 nt, Artificial Sequence
  Description of Artificial Sequence: Synthetic oligonucleotide
cagcugacgguugagcaga

SEQ ID NO: 2375094 - RNA, 19 nt, Artificial Sequence
  Description of Artificial Sequence: Synthetic oligonucleotide
gcagcuggugcaaacguca

SEQ ID NO: 2375095 - RNA, 19 nt, Artificial Sequence
  Description of Artificial Sequence: Synthetic oligonucleotide
accgcuccucaucagcaua

SEQ ID NO: 2375096 - RNA, 19 nt, Artificial Sequence
  Description of Artificial Sequence: Synthetic oligonucleotide
auaucucuagggagaugga

SEQ ID NO: 2375097 - RNA, 19 nt, Artificial Sequence
  Description of Artificial Sequence: Synthetic oligonucleotide
cucgagugccuuucuugca

SEQ ID NO: 2375098 - RNA, 19 nt, Artificial Sequence
  Description of Artificial Sequence: Synthetic oligonucleotide
uaccagcagagcaguggua

SEQ ID NO: 2375099 - RNA, 19 nt, Artificial Sequence
  Description of Artificial Sequence: Synthetic oligonucleotide
ucccuccaccuugaugggc

SEQ ID NO: 2375100 - RNA, 19 nt, Artificial Sequence
  Description of Artificial Sequence: Synthetic oligonucleotide
aggagggcagcugacgguu

SEQ ID NO: 2375101 - RNA, 19 nt, Artificial Sequence
  Description of Artificial Sequence: Synthetic oligonucleotide
aucgcgcaucagguucagc

SEQ ID NO: 2375102 - RNA, 19 nt, Artificial Sequence
  Description of Artificial Sequence: Synthetic oligonucleotide
gaucgcgcaucagguucag

SEQ ID NO: 2375103 - RNA, 19 nt, Artificial Sequence
  Description of Artificial Sequence: Synthetic oligonucleotide
ggucggcucuggcacauac

SEQ ID NO: 2375104 - RNA, 19 nt, Artificial Sequence
  Description of Artificial Sequence: Synthetic oligonucleotide
cguuggucggcucuggcac

SEQ ID NO: 2375105 - RNA, 19 nt, Artificial Sequence
  Description of Artificial Sequence: Synthetic oligonucleotide
gacucggcugccaggaaua

SEQ ID NO: 2375106 - RNA, 19 nt, Artificial Sequence
  Description of Artificial Sequence: Synthetic oligonucleotide
cuucccacugaagugacau

SEQ ID NO: 2375107 - RNA, 19 nt, Artificial Sequence
  Description of Artificial Sequence: Synthetic oligonucleotide
guuggucggcucuggcaca

SEQ ID NO: 2375108 - RNA, 19 nt, Artificial Sequence
  Description of Artificial Sequence: Synthetic oligonucleotide
gguugagcagagggucugg

SEQ ID NO: 2375109 - RNA, 19 nt, Artificial Sequence
  Description of Artificial Sequence: Synthetic oligonucleotide
acaccguuugguagaaauu

SEQ ID NO: 2375110 - RNA, 19 nt, Artificial Sequence
  Description of Artificial Sequence: Synthetic oligonucleotide
cagugugugcagcugucaa

SEQ ID NO: 2375111 - RNA, 19 nt, Artificial Sequence
  Description of Artificial Sequence: Synthetic oligonucleotide
ggaaugcuauuaugaugga

SEQ ID NO: 2375112 - RNA, 19 nt, Artificial Sequence
  Description of Artificial Sequence: Synthetic oligonucleotide
cgggcagcaacuucccucc

SEQ ID NO: 2375113 - RNA, 19 nt, Artificial Sequence
  Description of Artificial Sequence: Synthetic oligonucleotide
augcagccugcuacuaucu

SEQ ID NO: 2375114 - RNA, 19 nt, Artificial Sequence
  Description of Artificial Sequence: Synthetic oligonucleotide
gcaggaaugcuauuaugau

SEQ ID NO: 2375115 - RNA, 19 nt, Artificial Sequence
  Description of Artificial Sequence: Synthetic oligonucleotide
ccagugaugagucuucacu

SEQ ID NO: 2375116 - RNA, 19 nt, Artificial Sequence
  Description of Artificial Sequence: Synthetic oligonucleotide
agccugcuacuaucucugu

SEQ ID NO: 2375117 - RNA, 19 nt, Artificial Sequence
  Description of Artificial Sequence: Synthetic oligonucleotide
ccagcagagcagugguacc

SEQ ID NO: 2375118 - RNA, 19 nt, Artificial Sequence
  Description of Artificial Sequence: Synthetic oligonucleotide
ccgcuccucaucagcauag

SEQ ID NO: 2375119 - RNA, 19 nt, Artificial Sequence
  Description of Artificial Sequence: Synthetic oligonucleotide
ucuucucaauggguacguu

SEQ ID NO: 2375120 - RNA, 19 nt, Artificial Sequence
  Description of Artificial Sequence: Synthetic oligonucleotide
uuggucggcucuggcacau

SEQ ID NO: 2375121 - RNA, 19 nt, Artificial Sequence
  Description of Artificial Sequence: Synthetic oligonucleotide
cuucgaaauugugucuucu

SEQ ID NO: 2375122 - RNA, 19 nt, Artificial Sequence
  Description of Artificial Sequence: Synthetic oligonucleotide
agcagagggucuggccuug

SEQ ID NO: 2375123 - RNA, 19 nt, Artificial Sequence
  Description of Artificial Sequence: Synthetic oligonucleotide
gucaggcuuccaggacucg

SEQ ID NO: 2375124 - RNA, 19 nt, Artificial Sequence
  Description of Artificial Sequence: Synthetic oligonucleotide
ucacuuggggugggccaca

SEQ ID NO: 2375125 - RNA, 19 nt, Artificial Sequence
  Description of Artificial Sequence: Synthetic oligonucleotide
uagggacaacacuggccuu

SEQ ID NO: 2375126 - RNA, 19 nt, Artificial Sequence
  Description of Artificial Sequence: Synthetic oligonucleotide
gggaaccacaaccgagaca

SEQ ID NO: 2375127 - RNA, 19 nt, Artificial Sequence
  Description of Artificial Sequence: Synthetic oligonucleotide
guucagcaauucuuagcau

SEQ ID NO: 2375128 - RNA, 19 nt, Artificial Sequence
  Description of Artificial Sequence: Synthetic oligonucleotide
gcuuaguugguguccggua

SEQ ID NO: 2375129 - RNA, 19 nt, Artificial Sequence
  Description of Artificial Sequence: Synthetic oligonucleotide
gucuuucacaggacacgga

SEQ ID NO: 2375130 - RNA, 19 nt, Artificial Sequence
  Description of Artificial Sequence: Synthetic oligonucleotide
cuggacacaucgggcagca

SEQ ID NO: 2375131 - RNA, 19 nt, Artificial Sequence
  Description of Artificial Sequence: Synthetic oligonucleotide
gguacccauuguuucuucu

SEQ ID NO: 2375132 - RNA, 19 nt, Artificial Sequence
  Description of Artificial Sequence: Synthetic oligonucleotide
ccgcaaaacaggucuuuca

SEQ ID NO: 2375133 - RNA, 19 nt, Artificial Sequence
  Description of Artificial Sequence: Synthetic oligonucleotide
ccuuuccgcaaaacagguc

SEQ ID NO: 2375134 - RNA, 19 nt, Artificial Sequence
  Description of Artificial Sequence: Synthetic oligonucleotide
cagcauaggucuucccacu

SEQ ID NO: 2375135 - RNA, 19 nt, Artificial Sequence
  Description of Artificial Sequence: Synthetic oligonucleotide
ggacaacacuggccuuucc

SEQ ID NO: 2375136 - RNA, 19 nt, Artificial Sequence
  Description of Artificial Sequence: Synthetic oligonucleotide
cguuugguagaaauugucu

SEQ ID NO: 2375137 - RNA, 19 nt, Artificial Sequence
  Description of Artificial Sequence: Synthetic oligonucleotide
cacggaagggcaggauuca

SEQ ID NO: 2375138 - RNA, 19 nt, Artificial Sequence
  Description of Artificial Sequence: Synthetic oligonucleotide
uggguacguuggucggcuc

SEQ ID NO: 2375139 - RNA, 19 nt, Artificial Sequence
  Description of Artificial Sequence: Synthetic oligonucleotide
acacaucgggcagcaacuu

SEQ ID NO: 2375140 - RNA, 19 nt, Artificial Sequence
  Description of Artificial Sequence: Synthetic oligonucleotide
ggauucagaguaacagcua

SEQ ID NO: 2375141 - RNA, 19 nt, Artificial Sequence
  Description of Artificial Sequence: Synthetic oligonucleotide
ucuaggcaguagggacaac

SEQ ID NO: 2375142 - RNA, 19 nt, Artificial Sequence
  Description of Artificial Sequence: Synthetic oligonucleotide
ccacaaccgagacaaugga

SEQ ID NO: 2375143 - RNA, 19 nt, Artificial Sequence
  Description of Artificial Sequence: Synthetic oligonucleotide
ugcaaacgucaggcuucca

SEQ ID NO: 2375144 - RNA, 19 nt, Artificial Sequence
  Description of Artificial Sequence: Synthetic oligonucleotide
gcugacgguugagcagagg

SEQ ID NO: 2375145 - RNA, 19 nt, Artificial Sequence
  Description of Artificial Sequence: Synthetic oligonucleotide
acucggcugccaggaauau

SEQ ID NO: 2375146 - RNA, 19 nt, Artificial Sequence
  Description of Artificial Sequence: Synthetic oligonucleotide
cuggugcaaacgucaggcu

SEQ ID NO: 2375147 - RNA, 19 nt, Artificial Sequence
  Description of Artificial Sequence: Synthetic oligonucleotide
ucacaccguuugguagaaa

SEQ ID NO: 2375148 - RNA, 19 nt, Artificial Sequence
  Description of Artificial Sequence: Synthetic oligonucleotide
ccaccgcuccucaucagca

SEQ ID NO: 2375149 - RNA, 19 nt, Artificial Sequence
  Description of Artificial Sequence: Synthetic oligonucleotide
cagcaacuucccuccaccu

SEQ ID NO: 2375150 - RNA, 19 nt, Artificial Sequence
  Description of Artificial Sequence: Synthetic oligonucleotide
  modified_base (16)..(16): a, c, u, g, unknown or other
gccuguagaugguucnguu

SEQ ID NO: 2375151 - RNA, 19 nt, Artificial Sequence
  Description of Artificial Sequence: Synthetic oligonucleotide
gaaccgucccuggccugga

SEQ ID NO: 2375152 - RNA, 19 nt, Artificial Sequence
  Description of Artificial Sequence: Synthetic oligonucleotide
gggacaacacuggccuuuc

SEQ ID NO: 2375153 - RNA, 19 nt, Artificial Sequence
  Description of Artificial Sequence: Synthetic oligonucleotide
  modified_base (6)..(6): a, c, u, g, unknown or other
gguucnguuucugcaugcu

SEQ ID NO: 2375154 - RNA, 19 nt, Artificial Sequence
  Description of Artificial Sequence: Synthetic oligonucleotide
ggguacguuggucggcucu

SEQ ID NO: 2375155 - RNA, 19 nt, Artificial Sequence
  Description of Artificial Sequence: Synthetic oligonucleotide
gccacugaucgcgcaucag

SEQ ID NO: 2375156 - RNA, 19 nt, Artificial Sequence
  Description of Artificial Sequence: Synthetic oligonucleotide
gcagugugugcagcuguca

SEQ ID NO: 2375157 - RNA, 19 nt, Artificial Sequence
  Description of Artificial Sequence: Synthetic oligonucleotide
cuaccuggaggugacccau

SEQ ID NO: 2375158 - RNA, 19 nt, Artificial Sequence
  Description of Artificial Sequence: Synthetic oligonucleotide
gggaaccgucccuggccug

SEQ ID NO: 2375159 - RNA, 19 nt, Artificial Sequence
  Description of Artificial Sequence: Synthetic oligonucleotide
gccugcuacuaucucugua

SEQ ID NO: 2375160 - RNA, 19 nt, Artificial Sequence
  Description of Artificial Sequence: Synthetic oligonucleotide
ccuugcaggcaguagcagu

SEQ ID NO: 2375161 - RNA, 19 nt, Artificial Sequence
  Description of Artificial Sequence: Synthetic oligonucleotide
ggacucggcugccaggaau

SEQ ID NO: 2375162 - RNA, 19 nt, Artificial Sequence
  Description of Artificial Sequence: Synthetic oligonucleotide
gucccuggccuggacucga

SEQ ID NO: 2375163 - RNA, 19 nt, Artificial Sequence
  Description of Artificial Sequence: Synthetic oligonucleotide
gccuuuccgcaaaacaggu

SEQ ID NO: 2375164 - RNA, 19 nt, Artificial Sequence
  Description of Artificial Sequence: Synthetic oligonucleotide
uggacacaucgggcagcaa

SEQ ID NO: 2375165 - RNA, 19 nt, Artificial Sequence
  Description of Artificial Sequence: Synthetic oligonucleotide
ggcuuaguugguguccggu

SEQ ID NO: 2375166 - RNA, 19 nt, Artificial Sequence
  Description of Artificial Sequence: Synthetic oligonucleotide
ccauaucucuagggagaug

SEQ ID NO: 2375167 - RNA, 19 nt, Artificial Sequence
  Description of Artificial Sequence: Synthetic oligonucleotide
  modified_base (15)..(15): a, c, u, g, unknown or other
ccuguagaugguucnguuu

SEQ ID NO: 2375168 - RNA, 19 nt, Artificial Sequence
  Description of Artificial Sequence: Synthetic oligonucleotide
cacacgcagcuggugcaaa

SEQ ID NO: 2375169 - RNA, 19 nt, Artificial Sequence
  Description of Artificial Sequence: Synthetic oligonucleotide
gcaugcuauagaagccacu

SEQ ID NO: 2375170 - RNA, 19 nt, Artificial Sequence
  Description of Artificial Sequence: Synthetic oligonucleotide
cucggcugccaggaauaua

SEQ ID NO: 2375171 - RNA, 19 nt, Artificial Sequence
  Description of Artificial Sequence: Synthetic oligonucleotide
gcagagggucuggccuugc

SEQ ID NO: 2375172 - RNA, 19 nt, Artificial Sequence
  Description of Artificial Sequence: Synthetic oligonucleotide
cgcgcaucagguucagcaa

SEQ ID NO: 2375173 - RNA, 19 nt, Artificial Sequence
  Description of Artificial Sequence: Synthetic oligonucleotide
uggucggcucuggcacaua

SEQ ID NO: 2375174 - RNA, 19 nt, Artificial Sequence
  Description of Artificial Sequence: Synthetic oligonucleotide
caccgcuccucaucagcau

SEQ ID NO: 2375175 - RNA, 19 nt, Artificial Sequence
  Description of Artificial Sequence: Synthetic oligonucleotide
cacuuggaugcagccugcu

SEQ ID NO: 2375176 - RNA, 19 nt, Artificial Sequence
  Description of Artificial Sequence: Synthetic oligonucleotide
gaaccacaaccgagacaau

SEQ ID NO: 2375177 - RNA, 19 nt, Artificial Sequence
  Description of Artificial Sequence: Synthetic oligonucleotide
cucuagggagauggaugau

SEQ ID NO: 2375178 - RNA, 19 nt, Artificial Sequence
  Description of Artificial Sequence: Synthetic oligonucleotide
cgguaccagcagagcagug

SEQ ID NO: 2375179 - RNA, 19 nt, Artificial Sequence
  Description of Artificial Sequence: Synthetic oligonucleotide
cagauaccagcugguuauu

SEQ ID NO: 2375180 - RNA, 19 nt, Artificial Sequence
  Description of Artificial Sequence: Synthetic oligonucleotide
cccauaucucuagggagau

SEQ ID NO: 2375181 - RNA, 19 nt, Artificial Sequence
  Description of Artificial Sequence: Synthetic oligonucleotide
cgcuauccaugcacacgca

SEQ ID NO: 2375182 - RNA, 19 nt, Artificial Sequence
  Description of Artificial Sequence: Synthetic oligonucleotide
cgagugccuuucuugcagu

SEQ ID NO: 2375183 - RNA, 19 nt, Artificial Sequence
  Description of Artificial Sequence: Synthetic oligonucleotide
ccgguaccagcagagcagu

SEQ ID NO: 2375184 - RNA, 19 nt, Artificial Sequence
  Description of Artificial Sequence: Synthetic oligonucleotide
ggacacggaagggcaggau

SEQ ID NO: 2375185 - RNA, 19 nt, Artificial Sequence
  Description of Artificial Sequence: Synthetic oligonucleotide
cacuuggggugggccacau

SEQ ID NO: 2375186 - RNA, 19 nt, Artificial Sequence
  Description of Artificial Sequence: Synthetic oligonucleotide
gccuggacucgagugccuu

SEQ ID NO: 2375187 - RNA, 19 nt, Artificial Sequence
  Description of Artificial Sequence: Synthetic oligonucleotide
  modified_base (1)..(1): a, c, u, g, unknown or other
nguuucugcaugcuauaga

SEQ ID NO: 2375188 - RNA, 19 nt, Artificial Sequence
  Description of Artificial Sequence: Synthetic oligonucleotide
uuuggagagaucaacaggg

SEQ ID NO: 2375189 - RNA, 19 nt, Artificial Sequence
  Description of Artificial Sequence: Synthetic oligonucleotide
aaggccucauaguugaugc

SEQ ID NO: 2375190 - RNA, 19 nt, Artificial Sequence
  Description of Artificial Sequence: Synthetic oligonucleotide
aacgucucaaaguccacac

SEQ ID NO: 2375191 - RNA, 19 nt, Artificial Sequence
  Description of Artificial Sequence: Synthetic oligonucleotide
cuugccaucacccacucgg

SEQ ID NO: 2375192 - RNA, 19 nt, Artificial Sequence
  Description of Artificial Sequence: Synthetic oligonucleotide
ucgucuaucugguuggucg

SEQ ID NO: 2375193 - RNA, 19 nt, Artificial Sequence
  Description of Artificial Sequence: Synthetic oligonucleotide
uccuuguuaaacucgauca

SEQ ID NO: 2375194 - RNA, 19 nt, Artificial Sequence
  Description of Artificial Sequence: Synthetic oligonucleotide
ucgaucaccacuuuggaga

SEQ ID NO: 2375195 - RNA, 19 nt, Artificial Sequence
  Description of Artificial Sequence: Synthetic oligonucleotide
uuuauuuuggggaggagaa

SEQ ID NO: 2375196 - RNA, 19 nt, Artificial Sequence
  Description of Artificial Sequence: Synthetic oligonucleotide
augucuuuuauuuugggga

SEQ ID NO: 2375197 - RNA, 19 nt, Artificial Sequence
  Description of Artificial Sequence: Synthetic oligonucleotide
ucaaacagcucaaaggccu

SEQ ID NO: 2375198 - RNA, 19 nt, Artificial Sequence
  Description of Artificial Sequence: Synthetic oligonucleotide
ucucaaaguccacacgucg

SEQ ID NO: 2375199 - RNA, 19 nt, Artificial Sequence
  Description of Artificial Sequence: Synthetic oligonucleotide
gagcucaucacucuugggg

SEQ ID NO: 2375200 - RNA, 19 nt, Artificial Sequence
  Description of Artificial Sequence: Synthetic oligonucleotide
uggagcaugggcaggaacg

SEQ ID NO: 2375201 - RNA, 19 nt, Artificial Sequence
  Description of Artificial Sequence: Synthetic oligonucleotide
uuugccauugcccucuuug

SEQ ID NO: 2375202 - RNA, 19 nt, Artificial Sequence
  Description of Artificial Sequence: Synthetic oligonucleotide
aaaguccacacgucgggac

SEQ ID NO: 2375203 - RNA, 19 nt, Artificial Sequence
  Description of Artificial Sequence: Synthetic oligonucleotide
aaaucgcacugccuggucg

SEQ ID NO: 2375204 - RNA, 19 nt, Artificial Sequence
  Description of Artificial Sequence: Synthetic oligonucleotide
cucauaugugccuuggucc

SEQ ID NO: 2375205 - RNA, 19 nt, Artificial Sequence
  Description of Artificial Sequence: Synthetic oligonucleotide
ucaaaguccacacgucggg

SEQ ID NO: 2375206 - RNA, 19 nt, Artificial Sequence
  Description of Artificial Sequence: Synthetic oligonucleotide
uccgagagugguaagaaca

SEQ ID NO: 2375207 - RNA, 19 nt, Artificial Sequence
  Description of Artificial Sequence: Synthetic oligonucleotide
aacucgaucaccacuuugg

SEQ ID NO: 2375208 - RNA, 19 nt, Artificial Sequence
  Description of Artificial Sequence: Synthetic oligonucleotide
uuguuaaacucgaucacca

SEQ ID NO: 2375209 - RNA, 19 nt, Artificial Sequence
  Description of Artificial Sequence: Synthetic oligonucleotide
aggagaaaguuguccagcc

SEQ ID NO: 2375210 - RNA, 19 nt, Artificial Sequence
  Description of Artificial Sequence: Synthetic oligonucleotide
ugucuuuuauuuuggggag

SEQ ID NO: 2375211 - RNA, 19 nt, Artificial Sequence
  Description of Artificial Sequence: Synthetic oligonucleotide
gaggcaugaugucaggugg

SEQ ID NO: 2375212 - RNA, 19 nt, Artificial Sequence
  Description of Artificial Sequence: Synthetic oligonucleotide
uuuuauuuuggggaggaga

SEQ ID NO: 2375213 - RNA, 19 nt, Artificial Sequence
  Description of Artificial Sequence: Synthetic oligonucleotide
caggcuuagagauggaggg

SEQ ID NO: 2375214 - RNA, 19 nt, Artificial Sequence
  Description of Artificial Sequence: Synthetic oligonucleotide
caugacuuugccauugccc

SEQ ID NO: 2375215 - RNA, 19 nt, Artificial Sequence
  Description of Artificial Sequence: Synthetic oligonucleotide
uuaaacucgaucaccacuu

SEQ ID NO: 2375216 - RNA, 19 nt, Artificial Sequence
  Description of Artificial Sequence: Synthetic oligonucleotide
uuggcuacugcuuggagca

SEQ ID NO: 2375217 - RNA, 19 nt, Artificial Sequence
  Description of Artificial Sequence: Synthetic oligonucleotide
gagccuuuuccucucaggg

SEQ ID NO: 2375218 - RNA, 19 nt, Artificial Sequence
  Description of Artificial Sequence: Synthetic oligonucleotide
aaguuguccagccccggcg

SEQ ID NO: 2375219 - RNA, 19 nt, Artificial Sequence
  Description of Artificial Sequence: Synthetic oligonucleotide
agauggaggguccugcugg

SEQ ID NO: 2375220 - RNA, 19 nt, Artificial Sequence
  Description of Artificial Sequence: Synthetic oligonucleotide
cuuuggagagaucaacagg

SEQ ID NO: 2375221 - RNA, 19 nt, Artificial Sequence
  Description of Artificial Sequence: Synthetic oligonucleotide
acuuuggagagaucaacag

SEQ ID NO: 2375222 - RNA, 19 nt, Artificial Sequence
  Description of Artificial Sequence: Synthetic oligonucleotide
uuggggaggagaaaguugu

SEQ ID NO: 2375223 - RNA, 19 nt, Artificial Sequence
  Description of Artificial Sequence: Synthetic oligonucleotide
augacuuugccauugcccu

SEQ ID NO: 2375224 - RNA, 19 nt, Artificial Sequence
  Description of Artificial Sequence: Synthetic oligonucleotide
ucauaugugccuugguccc

SEQ ID NO: 2375225 - RNA, 19 nt, Artificial Sequence
  Description of Artificial Sequence: Synthetic oligonucleotide
cuuaggaugugcuucagga

SEQ ID NO: 2375226 - RNA, 19 nt, Artificial Sequence
  Description of Artificial Sequence: Synthetic oligonucleotide
cuuguuaaacucgaucacc

SEQ ID NO: 2375227 - RNA, 19 nt, Artificial Sequence
  Description of Artificial Sequence: Synthetic oligonucleotide
agggcucucaucaaguccc

SEQ ID NO: 2375228 - RNA, 19 nt, Artificial Sequence
  Description of Artificial Sequence: Synthetic oligonucleotide
caugucugagcucugcucc

SEQ ID NO: 2375229 - RNA, 19 nt, Artificial Sequence
  Description of Artificial Sequence: Synthetic oligonucleotide
ugucagguggccaaaggac

SEQ ID NO: 2375230 - RNA, 19 nt, Artificial Sequence
  Description of Artificial Sequence: Synthetic oligonucleotide
ugccuggucgucuaucugg

SEQ ID NO: 2375231 - RNA, 19 nt, Artificial Sequence
  Description of Artificial Sequence: Synthetic oligonucleotide
cuuggcuacugcuuggagc

SEQ ID NO: 2375232 - RNA, 19 nt, Artificial Sequence
  Description of Artificial Sequence: Synthetic oligonucleotide
ggaacauccuucuugggag

SEQ ID NO: 2375233 - RNA, 19 nt, Artificial Sequence
  Description of Artificial Sequence: Synthetic oligonucleotide
ucuuugucaaacacgcgaa

SEQ ID NO: 2375234 - RNA, 19 nt, Artificial Sequence
  Description of Artificial Sequence: Synthetic oligonucleotide
ucggucaaacagcucaaag

SEQ ID NO: 2375235 - RNA, 19 nt, Artificial Sequence
  Description of Artificial Sequence: Synthetic oligonucleotide
uggucgaggagccuuuucc

SEQ ID NO: 2375236 - RNA, 19 nt, Artificial Sequence
  Description of Artificial Sequence: Synthetic oligonucleotide
aaacucgaucaccacuuug

SEQ ID NO: 2375237 - RNA, 19 nt, Artificial Sequence
  Description of Artificial Sequence: Synthetic oligonucleotide
ugcuaggacagucuccacc

SEQ ID NO: 2375238 - RNA, 19 nt, Artificial Sequence
  Description of Artificial Sequence: Synthetic oligonucleotide
uuggagagaucaacagggg

SEQ ID NO: 2375239 - RNA, 19 nt, Artificial Sequence
  Description of Artificial Sequence: Synthetic oligonucleotide
uugccgggugcgaagaagg

SEQ ID NO: 2375240 - RNA, 19 nt, Artificial Sequence
  Description of Artificial Sequence: Synthetic oligonucleotide
uggucgucuaucugguugg

SEQ ID NO: 2375241 - RNA, 19 nt, Artificial Sequence
  Description of Artificial Sequence: Synthetic oligonucleotide
guaagaacaugucugagcu

SEQ ID NO: 2375242 - RNA, 19 nt, Artificial Sequence
  Description of Artificial Sequence: Synthetic oligonucleotide
gacacuaggggcuggagga

SEQ ID NO: 2375243 - RNA, 19 nt, Artificial Sequence
  Description of Artificial Sequence: Synthetic oligonucleotide
agccuuuuccucucagggc

SEQ ID NO: 2375244 - RNA, 19 nt, Artificial Sequence
  Description of Artificial Sequence: Synthetic oligonucleotide
gaugucagguggccaaagg

SEQ ID NO: 2375245 - RNA, 19 nt, Artificial Sequence
  Description of Artificial Sequence: Synthetic oligonucleotide
aggaacauccuucuuggga

SEQ ID NO: 2375246 - RNA, 19 nt, Artificial Sequence
  Description of Artificial Sequence: Synthetic oligonucleotide
uagguaguccucauaugug

SEQ ID NO: 2375247 - RNA, 19 nt, Artificial Sequence
  Description of Artificial Sequence: Synthetic oligonucleotide
aguuguccagccccggcgc

SEQ ID NO: 2375248 - RNA, 19 nt, Artificial Sequence
  Description of Artificial Sequence: Synthetic oligonucleotide
ucuuuuauuuuggggagga

SEQ ID NO: 2375249 - RNA, 19 nt, Artificial Sequence
  Description of Artificial Sequence: Synthetic oligonucleotide
cuaccuguggagcucacag

SEQ ID NO: 2375250 - RNA, 19 nt, Artificial Sequence
  Description of Artificial Sequence: Synthetic oligonucleotide
agcugacucagucuugguc

SEQ ID NO: 2375251 - RNA, 19 nt, Artificial Sequence
  Description of Artificial Sequence: Synthetic oligonucleotide
gguaagaacaugucugagc

SEQ ID NO: 2375252 - RNA, 19 nt, Artificial Sequence
  Description of Artificial Sequence: Synthetic oligonucleotide
gaugcagccauugcugucc

SEQ ID NO: 2375253 - RNA, 19 nt, Artificial Sequence
  Description of Artificial Sequence: Synthetic oligonucleotide
uggaggacuaccuguggag

SEQ ID NO: 2375254 - RNA, 19 nt, Artificial Sequence
  Description of Artificial Sequence: Synthetic oligonucleotide
aacaugucugagcucugcu

SEQ ID NO: 2375255 - RNA, 19 nt, Artificial Sequence
  Description of Artificial Sequence: Synthetic oligonucleotide
uaggacagucuccaccucc

SEQ ID NO: 2375256 - RNA, 19 nt, Artificial Sequence
  Description of Artificial Sequence: Synthetic oligonucleotide
ugugccuuggucccgguuc

SEQ ID NO: 2375257 - RNA, 19 nt, Artificial Sequence
  Description of Artificial Sequence: Synthetic oligonucleotide
cugguccuuguuaaacucg

SEQ ID NO: 2375258 - RNA, 19 nt, Artificial Sequence
  Description of Artificial Sequence: Synthetic oligonucleotide
gaacauccuucuugggagg

SEQ ID NO: 2375259 - RNA, 19 nt, Artificial Sequence
  Description of Artificial Sequence: Synthetic oligonucleotide
aaucgcacugccuggucgu

SEQ ID NO: 2375260 - RNA, 19 nt, Artificial Sequence
  Description of Artificial Sequence: Synthetic oligonucleotide
ucuagguaguccucauaug

SEQ ID NO: 2375261 - RNA, 19 nt, Artificial Sequence
  Description of Artificial Sequence: Synthetic oligonucleotide
agcucaucacucuuggggu

SEQ ID NO: 2375262 - RNA, 19 nt, Artificial Sequence
  Description of Artificial Sequence: Synthetic oligonucleotide
ugguccuuguuaaacucga

SEQ ID NO: 2375263 - RNA, 19 nt, Artificial Sequence
  Description of Artificial Sequence: Synthetic oligonucleotide
guggccaaaggacagugug

SEQ ID NO: 2375264 - RNA, 19 nt, Artificial Sequence
  Description of Artificial Sequence: Synthetic oligonucleotide
ucugcucccaugacuuugc

SEQ ID NO: 2375265 - RNA, 19 nt, Artificial Sequence
  Description of Artificial Sequence: Synthetic oligonucleotide
ucuaucugguuggucgagg

SEQ ID NO: 2375266 - RNA, 19 nt, Artificial Sequence
  Description of Artificial Sequence: Synthetic oligonucleotide
uguuaaacucgaucaccac

SEQ ID NO: 2375267 - RNA, 19 nt, Artificial Sequence
  Description of Artificial Sequence: Synthetic oligonucleotide
uuggucuuggcuggagugg

SEQ ID NO: 2375268 - RNA, 19 nt, Artificial Sequence
  Description of Artificial Sequence: Synthetic oligonucleotide
aaacacgcgaagccccucu

SEQ ID NO: 2375269 - RNA, 19 nt, Artificial Sequence
  Description of Artificial Sequence: Synthetic oligonucleotide
aaguccacacgucgggacu

SEQ ID NO: 2375270 - RNA, 19 nt, Artificial Sequence
  Description of Artificial Sequence: Synthetic oligonucleotide
cuggucgucuaucugguug

SEQ ID NO: 2375271 - RNA, 19 nt, Artificial Sequence
  Description of Artificial Sequence: Synthetic oligonucleotide
ugguuucuucacaggaaca

SEQ ID NO: 2375272 - RNA, 19 nt, Artificial Sequence
  Description of Artificial Sequence: Synthetic oligonucleotide
gaggagaaaguuguccagc

SEQ ID NO: 2375273 - RNA, 19 nt, Artificial Sequence
  Description of Artificial Sequence: Synthetic oligonucleotide
cccucuuugucaaacacgc

SEQ ID NO: 2375274 - RNA, 19 nt, Artificial Sequence
  Description of Artificial Sequence: Synthetic oligonucleotide
cacucggucaaacagcuca

SEQ ID NO: 2375275 - RNA, 19 nt, Artificial Sequence
  Description of Artificial Sequence: Synthetic oligonucleotide
uuaggaugugcuucaggaa

SEQ ID NO: 2375276 - RNA, 19 nt, Artificial Sequence
  Description of Artificial Sequence: Synthetic oligonucleotide
gacgggaaaucgcacugcc

SEQ ID NO: 2375277 - RNA, 19 nt, Artificial Sequence
  Description of Artificial Sequence: Synthetic oligonucleotide
acacgucgggacuugagcu

SEQ ID NO: 2375278 - RNA, 19 nt, Artificial Sequence
  Description of Artificial Sequence: Synthetic oligonucleotide
aggacagugugccgguggg

SEQ ID NO: 2375279 - RNA, 19 nt, Artificial Sequence
  Description of Artificial Sequence: Synthetic oligonucleotide
cuuugucaaacacgcgaag

SEQ ID NO: 2375280 - RNA, 19 nt, Artificial Sequence
  Description of Artificial Sequence: Synthetic oligonucleotide
uaccuguggagcucacagg

SEQ ID NO: 2375281 - RNA, 19 nt, Artificial Sequence
  Description of Artificial Sequence: Synthetic oligonucleotide
agaaaguuguccagccccg

SEQ ID NO: 2375282 - RNA, 19 nt, Artificial Sequence
  Description of Artificial Sequence: Synthetic oligonucleotide
ucgaggagccuuuuccucu

SEQ ID NO: 2375283 - RNA, 19 nt, Artificial Sequence
  Description of Artificial Sequence: Synthetic oligonucleotide
cucgaucaccacuuuggag

SEQ ID NO: 2375284 - RNA, 19 nt, Artificial Sequence
  Description of Artificial Sequence: Synthetic oligonucleotide
agagugguaagaacauguc

SEQ ID NO: 2375285 - RNA, 19 nt, Artificial Sequence
  Description of Artificial Sequence: Synthetic oligonucleotide
uugaugcagccauugcugu

SEQ ID NO: 2375286 - RNA, 19 nt, Artificial Sequence
  Description of Artificial Sequence: Synthetic oligonucleotide
ucaggaucaaugucuuuua

SEQ ID NO: 2375287 - RNA, 19 nt, Artificial Sequence
  Description of Artificial Sequence: Synthetic oligonucleotide
ugagcucaucacucuuggg

SEQ ID NO: 2375288 - RNA, 19 nt, Artificial Sequence
  Description of Artificial Sequence: Synthetic oligonucleotide
guuaaacucgaucaccacu

SEQ ID NO: 2375289 - RNA, 19 nt, Artificial Sequence
  Description of Artificial Sequence: Synthetic oligonucleotide
acgucucaaaguccacacg

SEQ ID NO: 2375290 - RNA, 19 nt, Artificial Sequence
  Description of Artificial Sequence: Synthetic oligonucleotide
ucaaacacgcgaagccccu

SEQ ID NO: 2375291 - RNA, 19 nt, Artificial Sequence
  Description of Artificial Sequence: Synthetic oligonucleotide
gaaggccucauaguugaug

SEQ ID NO: 2375292 - RNA, 19 nt, Artificial Sequence
  Description of Artificial Sequence: Synthetic oligonucleotide
cacacgucgggacuugagc

SEQ ID NO: 2375293 - RNA, 19 nt, Artificial Sequence
  Description of Artificial Sequence: Synthetic oligonucleotide
ugguaagaacaugucugag

SEQ ID NO: 2375294 - RNA, 19 nt, Artificial Sequence
  Description of Artificial Sequence: Synthetic oligonucleotide
cacccacucggucaaacag

SEQ ID NO: 2375295 - RNA, 19 nt, Artificial Sequence
  Description of Artificial Sequence: Synthetic oligonucleotide
ucagggcgacacuaggggc

SEQ ID NO: 2375296 - RNA, 19 nt, Artificial Sequence
  Description of Artificial Sequence: Synthetic oligonucleotide
guccuuguuaaacucgauc

SEQ ID NO: 2375297 - RNA, 19 nt, Artificial Sequence
  Description of Artificial Sequence: Synthetic oligonucleotide
agcugguccuuguuaaacu

SEQ ID NO: 2375298 - RNA, 19 nt, Artificial Sequence
  Description of Artificial Sequence: Synthetic oligonucleotide
cugcuguagaccuggcagc

SEQ ID NO: 2375299 - RNA, 19 nt, Artificial Sequence
  Description of Artificial Sequence: Synthetic oligonucleotide
aggaacgucucaaagucca

SEQ ID NO: 2375300 - RNA, 19 nt, Artificial Sequence
  Description of Artificial Sequence: Synthetic oligonucleotide
uggucccugcuguagaccu

SEQ ID NO: 2375301 - RNA, 19 nt, Artificial Sequence
  Description of Artificial Sequence: Synthetic oligonucleotide
gugguaagaacaugucuga

SEQ ID NO: 2375302 - RNA, 19 nt, Artificial Sequence
  Description of Artificial Sequence: Synthetic oligonucleotide
acccacucggucaaacagc

SEQ ID NO: 2375303 - RNA, 19 nt, Artificial Sequence
  Description of Artificial Sequence: Synthetic oligonucleotide
gcaggaacgucucaaaguc

SEQ ID NO: 2375304 - RNA, 19 nt, Artificial Sequence
  Description of Artificial Sequence: Synthetic oligonucleotide
cuagguaguccucauaugu

SEQ ID NO: 2375305 - RNA, 19 nt, Artificial Sequence
  Description of Artificial Sequence: Synthetic oligonucleotide
gucuuuuauuuuggggagg

SEQ ID NO: 2375306 - RNA, 19 nt, Artificial Sequence
  Description of Artificial Sequence: Synthetic oligonucleotide
ucuucucuccgagaguggu

SEQ ID NO: 2375307 - RNA, 19 nt, Artificial Sequence
  Description of Artificial Sequence: Synthetic oligonucleotide
gucaaacagcucaaaggcc

SEQ ID NO: 2375308 - RNA, 19 nt, Artificial Sequence
  Description of Artificial Sequence: Synthetic oligonucleotide
cacgcgaagccccucuagg

SEQ ID NO: 2375309 - RNA, 19 nt, Artificial Sequence
  Description of Artificial Sequence: Synthetic oligonucleotide
cacuuuggagagaucaaca

SEQ ID NO: 2375310 - RNA, 19 nt, Artificial Sequence
  Description of Artificial Sequence: Synthetic oligonucleotide
aagccccucuagguagucc

SEQ ID NO: 2375311 - RNA, 19 nt, Artificial Sequence
  Description of Artificial Sequence: Synthetic oligonucleotide
gagagugguaagaacaugu

SEQ ID NO: 2375312 - RNA, 19 nt, Artificial Sequence
  Description of Artificial Sequence: Synthetic oligonucleotide
ggaucaaugucuuuuauuu

SEQ ID NO: 2375313 - RNA, 19 nt, Artificial Sequence
  Description of Artificial Sequence: Synthetic oligonucleotide
aucaccacuuuggagagau

SEQ ID NO: 2375314 - RNA, 19 nt, Artificial Sequence
  Description of Artificial Sequence: Synthetic oligonucleotide
cagggcucucaucaagucc

SEQ ID NO: 2375315 - RNA, 19 nt, Artificial Sequence
  Description of Artificial Sequence: Synthetic oligonucleotide
gaaaguuguccagccccgg

SEQ ID NO: 2375316 - RNA, 19 nt, Artificial Sequence
  Description of Artificial Sequence: Synthetic oligonucleotide
caggaacgucucaaagucc

SEQ ID NO: 2375317 - RNA, 19 nt, Artificial Sequence
  Description of Artificial Sequence: Synthetic oligonucleotide
ucucuugccgggugcgaag

SEQ ID NO: 2375318 - RNA, 19 nt, Artificial Sequence
  Description of Artificial Sequence: Synthetic oligonucleotide
gagauggaggguccugcug

SEQ ID NO: 2375319 - RNA, 19 nt, Artificial Sequence
  Description of Artificial Sequence: Synthetic oligonucleotide
ggaggcaugaugucaggug

SEQ ID NO: 2375320 - RNA, 19 nt, Artificial Sequence
  Description of Artificial Sequence: Synthetic oligonucleotide
cggucaaacagcucaaagg

SEQ ID NO: 2375321 - RNA, 19 nt, Artificial Sequence
  Description of Artificial Sequence: Synthetic oligonucleotide
uugccauugcccucuuugu

SEQ ID NO: 2375322 - RNA, 19 nt, Artificial Sequence
  Description of Artificial Sequence: Synthetic oligonucleotide
cuuggucccgguucuuggc

SEQ ID NO: 2375323 - RNA, 19 nt, Artificial Sequence
  Description of Artificial Sequence: Synthetic oligonucleotide
gagugguaagaacaugucu

SEQ ID NO: 2375324 - RNA, 19 nt, Artificial Sequence
  Description of Artificial Sequence: Synthetic oligonucleotide
ucuugccaucacccacucg

SEQ ID NO: 2375325 - RNA, 19 nt, Artificial Sequence
  Description of Artificial Sequence: Synthetic oligonucleotide
acucgaucaccacuuugga

SEQ ID NO: 2375326 - RNA, 19 nt, Artificial Sequence
  Description of Artificial Sequence: Synthetic oligonucleotide
caugaugucagguggccaa

SEQ ID NO: 2375327 - RNA, 19 nt, Artificial Sequence
  Description of Artificial Sequence: Synthetic oligonucleotide
agccccucuagguaguccu

SEQ ID NO: 2375328 - RNA, 19 nt, Artificial Sequence
  Description of Artificial Sequence: Synthetic oligonucleotide
ugccgggugcgaagaaggg

SEQ ID NO: 2375329 - RNA, 19 nt, Artificial Sequence
  Description of Artificial Sequence: Synthetic oligonucleotide
ugccauugcccucuuuguc

SEQ ID NO: 2375330 - RNA, 19 nt, Artificial Sequence
  Description of Artificial Sequence: Synthetic oligonucleotide
ucccaugacuuugccauug

SEQ ID NO: 2375331 - RNA, 19 nt, Artificial Sequence
  Description of Artificial Sequence: Synthetic oligonucleotide
uuggagcaugggcaggaac

SEQ ID NO: 2375332 - RNA, 19 nt, Artificial Sequence
  Description of Artificial Sequence: Synthetic oligonucleotide
ggaggagaaaguuguccag

SEQ ID NO: 2375333 - RNA, 19 nt, Artificial Sequence
  Description of Artificial Sequence: Synthetic oligonucleotide
caggcuuaggaugugcuuc

SEQ ID NO: 2375334 - RNA, 19 nt, Artificial Sequence
  Description of Artificial Sequence: Synthetic oligonucleotide
uccugcugguuucuucaca

SEQ ID NO: 2375335 - RNA, 19 nt, Artificial Sequence
  Description of Artificial Sequence: Synthetic oligonucleotide
uuggucccgguucuuggcu

SEQ ID NO: 2375336 - RNA, 19 nt, Artificial Sequence
  Description of Artificial Sequence: Synthetic oligonucleotide
uaagaacaugucugagcuc

SEQ ID NO: 2375337 - RNA, 19 nt, Artificial Sequence
  Description of Artificial Sequence: Synthetic oligonucleotide
gcaggcuuagagauggagg

SEQ ID NO: 2375338 - RNA, 19 nt, Artificial Sequence
  Description of Artificial Sequence: Synthetic oligonucleotide
aucacccacucggucaaac

SEQ ID NO: 2375339 - RNA, 19 nt, Artificial Sequence
  Description of Artificial Sequence: Synthetic oligonucleotide
caccacuuuggagagauca

SEQ ID NO: 2375340 - RNA, 19 nt, Artificial Sequence
  Description of Artificial Sequence: Synthetic oligonucleotide
accgacgggaaaucgcacu

SEQ ID NO: 2375341 - RNA, 19 nt, Artificial Sequence
  Description of Artificial Sequence: Synthetic oligonucleotide
ucacccacucggucaaaca

SEQ ID NO: 2375342 - RNA, 19 nt, Artificial Sequence
  Description of Artificial Sequence: Synthetic oligonucleotide
aggcuuaggaugugcuuca

SEQ ID NO: 2375343 - RNA, 19 nt, Artificial Sequence
  Description of Artificial Sequence: Synthetic oligonucleotide
aggcaugaugucagguggc

SEQ ID NO: 2375344 - RNA, 19 nt, Artificial Sequence
  Description of Artificial Sequence: Synthetic oligonucleotide
ucuccgagagugguaagaa

SEQ ID NO: 2375345 - RNA, 19 nt, Artificial Sequence
  Description of Artificial Sequence: Synthetic oligonucleotide
agagauggaggguccugcu

SEQ ID NO: 2375346 - RNA, 19 nt, Artificial Sequence
  Description of Artificial Sequence: Synthetic oligonucleotide
ugcuguagaccuggcagca

SEQ ID NO: 2375347 - RNA, 19 nt, Artificial Sequence
  Description of Artificial Sequence: Synthetic oligonucleotide
ugaugucagguggccaaag

SEQ ID NO: 2375348 - RNA, 19 nt, Artificial Sequence
  Description of Artificial Sequence: Synthetic oligonucleotide
gggaaaucgcacugccugg

SEQ ID NO: 2375349 - RNA, 19 nt, Artificial Sequence
  Description of Artificial Sequence: Synthetic oligonucleotide
aggacuaccuguggagcuc

SEQ ID NO: 2375350 - RNA, 19 nt, Artificial Sequence
  Description of Artificial Sequence: Synthetic oligonucleotide
ucuuggcuggagugguccc

SEQ ID NO: 2375351 - RNA, 19 nt, Artificial Sequence
  Description of Artificial Sequence: Synthetic oligonucleotide
uuauuuuggggaggagaaa

SEQ ID NO: 2375352 - RNA, 19 nt, Artificial Sequence
  Description of Artificial Sequence: Synthetic oligonucleotide
gaacgucucaaaguccaca

SEQ ID NO: 2375353 - RNA, 19 nt, Artificial Sequence
  Description of Artificial Sequence: Synthetic oligonucleotide
ugcucccaugacuuugcca

SEQ ID NO: 2375354 - RNA, 19 nt, Artificial Sequence
  Description of Artificial Sequence: Synthetic oligonucleotide
uggaggguccugcugguuu

SEQ ID NO: 2375355 - RNA, 19 nt, Artificial Sequence
  Description of Artificial Sequence: Synthetic oligonucleotide
ucugagcucugcucccaug

SEQ ID NO: 2375356 - RNA, 19 nt, Artificial Sequence
  Description of Artificial Sequence: Synthetic oligonucleotide
ggaucuugccaucacccac

SEQ ID NO: 2375357 - RNA, 19 nt, Artificial Sequence
  Description of Artificial Sequence: Synthetic oligonucleotide
gaugugcuucaggaaggcc

SEQ ID NO: 2375358 - RNA, 19 nt, Artificial Sequence
  Description of Artificial Sequence: Synthetic oligonucleotide
gggaggagaaaguugucca

SEQ ID NO: 2375359 - RNA, 19 nt, Artificial Sequence
  Description of Artificial Sequence: Synthetic oligonucleotide
agcaugggcaggaacgucu

SEQ ID NO: 2375360 - RNA, 19 nt, Artificial Sequence
  Description of Artificial Sequence: Synthetic oligonucleotide
cuaucugguuggucgagga

SEQ ID NO: 2375361 - RNA, 19 nt, Artificial Sequence
  Description of Artificial Sequence: Synthetic oligonucleotide
cucguggccugcuaggaca

SEQ ID NO: 2375362 - RNA, 19 nt, Artificial Sequence
  Description of Artificial Sequence: Synthetic oligonucleotide
ggccaaaggacagugugcc

SEQ ID NO: 2375363 - RNA, 19 nt, Artificial Sequence
  Description of Artificial Sequence: Synthetic oligonucleotide
uaaacucgaucaccacuuu

SEQ ID NO: 2375364 - RNA, 19 nt, Artificial Sequence
  Description of Artificial Sequence: Synthetic oligonucleotide
acacgcgaagccccucuag

SEQ ID NO: 2375365 - RNA, 19 nt, Artificial Sequence
  Description of Artificial Sequence: Synthetic oligonucleotide
gcugcggacggacggaccg

SEQ ID NO: 2375366 - RNA, 19 nt, Artificial Sequence
  Description of Artificial Sequence: Synthetic oligonucleotide
cuuuuauuuuggggaggag

SEQ ID NO: 2375367 - RNA, 19 nt, Artificial Sequence
  Description of Artificial Sequence: Synthetic oligonucleotide
uccucauaugugccuuggu

SEQ ID NO: 2375368 - RNA, 19 nt, Artificial Sequence
  Description of Artificial Sequence: Synthetic oligonucleotide
ggagaaaguuguccagccc

SEQ ID NO: 2375369 - RNA, 19 nt, Artificial Sequence
  Description of Artificial Sequence: Synthetic oligonucleotide
gaaaucgcacugccugguc

SEQ ID NO: 2375370 - RNA, 19 nt, Artificial Sequence
  Description of Artificial Sequence: Synthetic oligonucleotide
gcuuaggaugugcuucagg

SEQ ID NO: 2375371 - RNA, 19 nt, Artificial Sequence
  Description of Artificial Sequence: Synthetic oligonucleotide
cauaugugccuuggucccg

SEQ ID NO: 2375372 - RNA, 19 nt, Artificial Sequence
  Description of Artificial Sequence: Synthetic oligonucleotide
uguggagcucacaggcuua

SEQ ID NO: 2375373 - RNA, 19 nt, Artificial Sequence
  Description of Artificial Sequence: Synthetic oligonucleotide
uggccugcuaggacagucu

SEQ ID NO: 2375374 - RNA, 19 nt, Artificial Sequence
  Description of Artificial Sequence: Synthetic oligonucleotide
uucuuggcuacugcuugga

SEQ ID NO: 2375375 - RNA, 19 nt, Artificial Sequence
  Description of Artificial Sequence: Synthetic oligonucleotide
cuccgagagugguaagaac

SEQ ID NO: 2375376 - RNA, 19 nt, Artificial Sequence
  Description of Artificial Sequence: Synthetic oligonucleotide
aggagccuuuuccucucag

SEQ ID NO: 2375377 - RNA, 19 nt, Artificial Sequence
  Description of Artificial Sequence: Synthetic oligonucleotide
acgcgaagccccucuaggu

SEQ ID NO: 2375378 - RNA, 19 nt, Artificial Sequence
  Description of Artificial Sequence: Synthetic oligonucleotide
guccucauaugugccuugg

SEQ ID NO: 2375379 - RNA, 19 nt, Artificial Sequence
  Description of Artificial Sequence: Synthetic oligonucleotide
gcgaagccccucuagguag

SEQ ID NO: 2375380 - RNA, 19 nt, Artificial Sequence
  Description of Artificial Sequence: Synthetic oligonucleotide
uguccagccccggcgcucg

SEQ ID NO: 2375381 - RNA, 19 nt, Artificial Sequence
  Description of Artificial Sequence: Synthetic oligonucleotide
cuugccgggugcgaagaag

SEQ ID NO: 2375382 - RNA, 19 nt, Artificial Sequence
  Description of Artificial Sequence: Synthetic oligonucleotide
gcugacucagucuuggucu

SEQ ID NO: 2375383 - RNA, 19 nt, Artificial Sequence
  Description of Artificial Sequence: Synthetic oligonucleotide
ccuuguuaaacucgaucac

SEQ ID NO: 2375384 - RNA, 19 nt, Artificial Sequence
  Description of Artificial Sequence: Synthetic oligonucleotide
gucagguggccaaaggaca

SEQ ID NO: 2375385 - RNA, 19 nt, Artificial Sequence
  Description of Artificial Sequence: Synthetic oligonucleotide
ugacuuugccauugcccuc

SEQ ID NO: 2375386 - RNA, 19 nt, Artificial Sequence
  Description of Artificial Sequence: Synthetic oligonucleotide
ccucauaugugccuugguc

SEQ ID NO: 2375387 - RNA, 19 nt, Artificial Sequence
  Description of Artificial Sequence: Synthetic oligonucleotide
gucgaggagccuuuuccuc

SEQ ID NO: 2375388 - RNA, 19 nt, Artificial Sequence
  Description of Artificial Sequence: Synthetic oligonucleotide
cucuagguaguccucauau

SEQ ID NO: 2375389 - RNA, 19 nt, Artificial Sequence
  Description of Artificial Sequence: Synthetic oligonucleotide
acacuaggggcuggaggac

SEQ ID NO: 2375390 - RNA, 19 nt, Artificial Sequence
  Description of Artificial Sequence: Synthetic oligonucleotide
ugggcaggaacgucucaaa

SEQ ID NO: 2375391 - RNA, 19 nt, Artificial Sequence
  Description of Artificial Sequence: Synthetic oligonucleotide
gcacccaucucuugccggg

SEQ ID NO: 2375392 - RNA, 19 nt, Artificial Sequence
  Description of Artificial Sequence: Synthetic oligonucleotide
ucucuccgagagugguaag

SEQ ID NO: 2375393 - RNA, 19 nt, Artificial Sequence
  Description of Artificial Sequence: Synthetic oligonucleotide
ugccaucacccacucgguc

SEQ ID NO: 2375394 - RNA, 19 nt, Artificial Sequence
  Description of Artificial Sequence: Synthetic oligonucleotide
gcuacugcuuggagcaugg

SEQ ID NO: 2375395 - RNA, 19 nt, Artificial Sequence
  Description of Artificial Sequence: Synthetic oligonucleotide
gaggacuaccuguggagcu

SEQ ID NO: 2375396 - RNA, 19 nt, Artificial Sequence
  Description of Artificial Sequence: Synthetic oligonucleotide
gaguggucccugcuguaga

SEQ ID NO: 2375397 - RNA, 19 nt, Artificial Sequence
  Description of Artificial Sequence: Synthetic oligonucleotide
cacgucgggacuugagcuc

SEQ ID NO: 2375398 - RNA, 19 nt, Artificial Sequence
  Description of Artificial Sequence: Synthetic oligonucleotide
agcucugcucccaugacuu

SEQ ID NO: 2375399 - RNA, 19 nt, Artificial Sequence
  Description of Artificial Sequence: Synthetic oligonucleotide
cuggaggacuaccugugga

SEQ ID NO: 2375400 - RNA, 19 nt, Artificial Sequence
  Description of Artificial Sequence: Synthetic oligonucleotide
gcucucaucaaguccccac

SEQ ID NO: 2375401 - RNA, 19 nt, Artificial Sequence
  Description of Artificial Sequence: Synthetic oligonucleotide
aacacgcgaagccccucua

SEQ ID NO: 2375402 - RNA, 19 nt, Artificial Sequence
  Description of Artificial Sequence: Synthetic oligonucleotide
ggcacccaucucuugccgg

SEQ ID NO: 2375403 - RNA, 19 nt, Artificial Sequence
  Description of Artificial Sequence: Synthetic oligonucleotide
gcccucuuugucaaacacg

SEQ ID NO: 2375404 - RNA, 19 nt, Artificial Sequence
  Description of Artificial Sequence: Synthetic oligonucleotide
acggaccgacgggaaaucg

SEQ ID NO: 2375405 - RNA, 19 nt, Artificial Sequence
  Description of Artificial Sequence: Synthetic oligonucleotide
ggcuuagagauggaggguc

SEQ ID NO: 2375406 - RNA, 19 nt, Artificial Sequence
  Description of Artificial Sequence: Synthetic oligonucleotide
uaguccucauaugugccuu

SEQ ID NO: 2375407 - RNA, 19 nt, Artificial Sequence
  Description of Artificial Sequence: Synthetic oligonucleotide
cgggaaaucgcacugccug

SEQ ID NO: 2375408 - RNA, 19 nt, Artificial Sequence
  Description of Artificial Sequence: Synthetic oligonucleotide
gucuaucugguuggucgag

SEQ ID NO: 2375409 - RNA, 19 nt, Artificial Sequence
  Description of Artificial Sequence: Synthetic oligonucleotide
ggaggacuaccuguggagc

SEQ ID NO: 2375410 - RNA, 19 nt, Artificial Sequence
  Description of Artificial Sequence: Synthetic oligonucleotide
aucuucucuccgagagugg

SEQ ID NO: 2375411 - RNA, 19 nt, Artificial Sequence
  Description of Artificial Sequence: Synthetic oligonucleotide
uggggaggagaaaguuguc

SEQ ID NO: 2375412 - RNA, 19 nt, Artificial Sequence
  Description of Artificial Sequence: Synthetic oligonucleotide
gccaucacccacucgguca

SEQ ID NO: 2375413 - RNA, 19 nt, Artificial Sequence
  Description of Artificial Sequence: Synthetic oligonucleotide
gacuuugccauugcccucu

SEQ ID NO: 2375414 - RNA, 19 nt, Artificial Sequence
  Description of Artificial Sequence: Synthetic oligonucleotide
guaguccucauaugugccu

SEQ ID NO: 2375415 - RNA, 19 nt, Artificial Sequence
  Description of Artificial Sequence: Synthetic oligonucleotide
gucucaaaguccacacguc

SEQ ID NO: 2375416 - RNA, 19 nt, Artificial Sequence
  Description of Artificial Sequence: Synthetic oligonucleotide
ucacaggaacauccuucuu

SEQ ID NO: 2375417 - RNA, 19 nt, Artificial Sequence
  Description of Artificial Sequence: Synthetic oligonucleotide
ugguuggucgaggagccuu

SEQ ID NO: 2375418 - RNA, 19 nt, Artificial Sequence
  Description of Artificial Sequence: Synthetic oligonucleotide
acccaucucuugccgggug

SEQ ID NO: 2375419 - RNA, 19 nt, Artificial Sequence
  Description of Artificial Sequence: Synthetic oligonucleotide
gggacuugagcucaucacu

SEQ ID NO: 2375420 - RNA, 19 nt, Artificial Sequence
  Description of Artificial Sequence: Synthetic oligonucleotide
ccuuggucccgguucuugg

SEQ ID NO: 2375421 - RNA, 19 nt, Artificial Sequence
  Description of Artificial Sequence: Synthetic oligonucleotide
aggccucauaguugaugca

SEQ ID NO: 2375422 - RNA, 19 nt, Artificial Sequence
  Description of Artificial Sequence: Synthetic oligonucleotide
uuuuccucucagggcgaca

SEQ ID NO: 2375423 - RNA, 19 nt, Artificial Sequence
  Description of Artificial Sequence: Synthetic oligonucleotide
ugacucagucuuggucuug

SEQ ID NO: 2375424 - RNA, 19 nt, Artificial Sequence
  Description of Artificial Sequence: Synthetic oligonucleotide
acgucgggacuugagcuca

SEQ ID NO: 2375425 - RNA, 19 nt, Artificial Sequence
  Description of Artificial Sequence: Synthetic oligonucleotide
gacggacggaccgacggga

SEQ ID NO: 2375426 - RNA, 19 nt, Artificial Sequence
  Description of Artificial Sequence: Synthetic oligonucleotide
cucgcgcugcggacggacg

SEQ ID NO: 2375427 - RNA, 19 nt, Artificial Sequence
  Description of Artificial Sequence: Synthetic oligonucleotide
ucuugccgggugcgaagaa

SEQ ID NO: 2375428 - RNA, 19 nt, Artificial Sequence
  Description of Artificial Sequence: Synthetic oligonucleotide
uuccucucagggcgacacu

SEQ ID NO: 2375429 - RNA, 19 nt, Artificial Sequence
  Description of Artificial Sequence: Synthetic oligonucleotide
gccaaaggacagugugccg

SEQ ID NO: 2375430 - RNA, 19 nt, Artificial Sequence
  Description of Artificial Sequence: Synthetic oligonucleotide
cuuuuccucucagggcgac

SEQ ID NO: 2375431 - RNA, 19 nt, Artificial Sequence
  Description of Artificial Sequence: Synthetic oligonucleotide
ggacggacggaccgacggg

SEQ ID NO: 2375432 - RNA, 19 nt, Artificial Sequence
  Description of Artificial Sequence: Synthetic oligonucleotide
gagcucugcucccaugacu

SEQ ID NO: 2375433 - RNA, 19 nt, Artificial Sequence
  Description of Artificial Sequence: Synthetic oligonucleotide
aggcuuagagauggagggu

SEQ ID NO: 2375434 - RNA, 19 nt, Artificial Sequence
  Description of Artificial Sequence: Synthetic oligonucleotide
gcuuagagauggagggucc

SEQ ID NO: 2375435 - RNA, 19 nt, Artificial Sequence
  Description of Artificial Sequence: Synthetic oligonucleotide
ccucuuugucaaacacgcg

SEQ ID NO: 2375436 - RNA, 19 nt, Artificial Sequence
  Description of Artificial Sequence: Synthetic oligonucleotide
acuaccuguggagcucaca

SEQ ID NO: 2375437 - RNA, 19 nt, Artificial Sequence
  Description of Artificial Sequence: Synthetic oligonucleotide
cucuccgagagugguaaga

SEQ ID NO: 2375438 - RNA, 19 nt, Artificial Sequence
  Description of Artificial Sequence: Synthetic oligonucleotide
ggggcacccaucucuugcc

SEQ ID NO: 2375439 - RNA, 19 nt, Artificial Sequence
  Description of Artificial Sequence: Synthetic oligonucleotide
uggucccgguucuuggcua

SEQ ID NO: 2375440 - RNA, 19 nt, Artificial Sequence
  Description of Artificial Sequence: Synthetic oligonucleotide
accacuuuggagagaucaa

SEQ ID NO: 2375441 - RNA, 19 nt, Artificial Sequence
  Description of Artificial Sequence: Synthetic oligonucleotide
cuaggacagucuccaccuc

SEQ ID NO: 2375442 - RNA, 19 nt, Artificial Sequence
  Description of Artificial Sequence: Synthetic oligonucleotide
gaccuggcagcaggcuuag

SEQ ID NO: 2375443 - RNA, 19 nt, Artificial Sequence
  Description of Artificial Sequence: Synthetic oligonucleotide
gccucauaguugaugcagc

SEQ ID NO: 2375444 - RNA, 19 nt, Artificial Sequence
  Description of Artificial Sequence: Synthetic oligonucleotide
cucagucuuggucuuggcu

SEQ ID NO: 2375445 - RNA, 19 nt, Artificial Sequence
  Description of Artificial Sequence: Synthetic oligonucleotide
caaaguccacacgucggga

SEQ ID NO: 2375446 - RNA, 19 nt, Artificial Sequence
  Description of Artificial Sequence: Synthetic oligonucleotide
cugcucccaugacuuugcc

SEQ ID NO: 2375447 - RNA, 19 nt, Artificial Sequence
  Description of Artificial Sequence: Synthetic oligonucleotide
gucuuggucuuggcuggag

SEQ ID NO: 2375448 - RNA, 19 nt, Artificial Sequence
  Description of Artificial Sequence: Synthetic oligonucleotide
cgaucaccacuuuggagag

SEQ ID NO: 2375449 - RNA, 19 nt, Artificial Sequence
  Description of Artificial Sequence: Synthetic oligonucleotide
gauggaggguccugcuggu

SEQ ID NO: 2375450 - RNA, 19 nt, Artificial Sequence
  Description of Artificial Sequence: Synthetic oligonucleotide
guggccugcuaggacaguc

SEQ ID NO: 2375451 - RNA, 19 nt, Artificial Sequence
  Description of Artificial Sequence: Synthetic oligonucleotide
cgacacuaggggcuggagg

SEQ ID NO: 2375452 - RNA, 19 nt, Artificial Sequence
  Description of Artificial Sequence: Synthetic oligonucleotide
cuacugcuuggagcauggg

SEQ ID NO: 2375453 - RNA, 19 nt, Artificial Sequence
  Description of Artificial Sequence: Synthetic oligonucleotide
gggcacccaucucuugccg

SEQ ID NO: 2375454 - RNA, 19 nt, Artificial Sequence
  Description of Artificial Sequence: Synthetic oligonucleotide
aucucuugccgggugcgaa

SEQ ID NO: 2375455 - RNA, 19 nt, Artificial Sequence
  Description of Artificial Sequence: Synthetic oligonucleotide
ggaccgacgggaaaucgca

SEQ ID NO: 2375456 - RNA, 19 nt, Artificial Sequence
  Description of Artificial Sequence: Synthetic oligonucleotide
aucgcacugccuggucguc

SEQ ID NO: 2375457 - RNA, 19 nt, Artificial Sequence
  Description of Artificial Sequence: Synthetic oligonucleotide
ggcuggaggacuaccugug

SEQ ID NO: 2375458 - RNA, 19 nt, Artificial Sequence
  Description of Artificial Sequence: Synthetic oligonucleotide
agggcgacacuaggggcug

SEQ ID NO: 2375459 - RNA, 19 nt, Artificial Sequence
  Description of Artificial Sequence: Synthetic oligonucleotide
ccugcuaggacagucucca

SEQ ID NO: 2375460 - RNA, 19 nt, Artificial Sequence
  Description of Artificial Sequence: Synthetic oligonucleotide
gacggaccgacgggaaauc

SEQ ID NO: 2375461 - RNA, 19 nt, Artificial Sequence
  Description of Artificial Sequence: Synthetic oligonucleotide
gaccgacgggaaaucgcac

SEQ ID NO: 2375462 - RNA, 19 nt, Artificial Sequence
  Description of Artificial Sequence: Synthetic oligonucleotide
augaugucagguggccaaa

SEQ ID NO: 2375463 - RNA, 19 nt, Artificial Sequence
  Description of Artificial Sequence: Synthetic oligonucleotide
cucacaggcuuaggaugug

SEQ ID NO: 2375464 - RNA, 19 nt, Artificial Sequence
  Description of Artificial Sequence: Synthetic oligonucleotide
ccgacgggaaaucgcacug

SEQ ID NO: 2375465 - RNA, 19 nt, Artificial Sequence
  Description of Artificial Sequence: Synthetic oligonucleotide
caaaggacagugugccggu

SEQ ID NO: 2375466 - RNA, 19 nt, Artificial Sequence
  Description of Artificial Sequence: Synthetic oligonucleotide
uccacacgucgggacuuga

SEQ ID NO: 2375467 - RNA, 19 nt, Artificial Sequence
  Description of Artificial Sequence: Synthetic oligonucleotide
acucggucaaacagcucaa

SEQ ID NO: 2375468 - RNA, 19 nt, Artificial Sequence
  Description of Artificial Sequence: Synthetic oligonucleotide
acgggaaaucgcacugccu

SEQ ID NO: 2375469 - RNA, 19 nt, Artificial Sequence
  Description of Artificial Sequence: Synthetic oligonucleotide
gagcaugggcaggaacguc

SEQ ID NO: 2375470 - RNA, 19 nt, Artificial Sequence
  Description of Artificial Sequence: Synthetic oligonucleotide
aguccacacgucgggacuu

SEQ ID NO: 2375471 - RNA, 19 nt, Artificial Sequence
  Description of Artificial Sequence: Synthetic oligonucleotide
ggcuacugcuuggagcaug

SEQ ID NO: 2375472 - RNA, 19 nt, Artificial Sequence
  Description of Artificial Sequence: Synthetic oligonucleotide
cugcuaggacagucuccac

SEQ ID NO: 2375473 - RNA, 19 nt, Artificial Sequence
  Description of Artificial Sequence: Synthetic oligonucleotide
cccaucucuugccgggugc

SEQ ID NO: 2375474 - RNA, 19 nt, Artificial Sequence
  Description of Artificial Sequence: Synthetic oligonucleotide
cgggacuugagcucaucac

SEQ ID NO: 2375475 - RNA, 19 nt, Artificial Sequence
  Description of Artificial Sequence: Synthetic oligonucleotide
cuucucuccgagaguggua

SEQ ID NO: 2375476 - RNA, 19 nt, Artificial Sequence
  Description of Artificial Sequence: Synthetic oligonucleotide
caaacacgcgaagccccuc

SEQ ID NO: 2375477 - RNA, 19 nt, Artificial Sequence
  Description of Artificial Sequence: Synthetic oligonucleotide
cuaggggcuggaggacuac

SEQ ID NO: 2375478 - RNA, 19 nt, Artificial Sequence
  Description of Artificial Sequence: Synthetic oligonucleotide
ggucccgguucuuggcuac

SEQ ID NO: 2375479 - RNA, 19 nt, Artificial Sequence
  Description of Artificial Sequence: Synthetic oligonucleotide
ggccugcuaggacagucuc

SEQ ID NO: 2375480 - RNA, 19 nt, Artificial Sequence
  Description of Artificial Sequence: Synthetic oligonucleotide
ggcgcucgcgcugcggacg

SEQ ID NO: 2375481 - RNA, 19 nt, Artificial Sequence
  Description of Artificial Sequence: Synthetic oligonucleotide
cacugccuggucgucuauc

SEQ ID NO: 2375482 - RNA, 19 nt, Artificial Sequence
  Description of Artificial Sequence: Synthetic oligonucleotide
cggaccgacgggaaaucgc

SEQ ID NO: 2375483 - RNA, 19 nt, Artificial Sequence
  Description of Artificial Sequence: Synthetic oligonucleotide
ggcagcaggcuuagagaug

SEQ ID NO: 2375484 - RNA, 19 nt, Artificial Sequence
  Description of Artificial Sequence: Synthetic oligonucleotide
cuuagagauggaggguccu

SEQ ID NO: 2375485 - RNA, 19 nt, Artificial Sequence
  Description of Artificial Sequence: Synthetic oligonucleotide
cucuugccgggugcgaaga

SEQ ID NO: 2375486 - RNA, 19 nt, Artificial Sequence
  Description of Artificial Sequence: Synthetic oligonucleotide
gcuuggagcaugggcagga

SEQ ID NO: 2375487 - RNA, 19 nt, Artificial Sequence
  Description of Artificial Sequence: Synthetic oligonucleotide
augugccuuggucccgguu

SEQ ID NO: 2375488 - RNA, 19 nt, Artificial Sequence
  Description of Artificial Sequence: Synthetic oligonucleotide
ggaacgucucaaaguccac

SEQ ID NO: 2375489 - RNA, 19 nt, Artificial Sequence
  Description of Artificial Sequence: Synthetic oligonucleotide
gcuguagaccuggcagcag

SEQ ID NO: 2375490 - RNA, 19 nt, Artificial Sequence
  Description of Artificial Sequence: Synthetic oligonucleotide
cgucucaaaguccacacgu

SEQ ID NO: 2375491 - RNA, 19 nt, Artificial Sequence
  Description of Artificial Sequence: Synthetic oligonucleotide
gccugcuaggacagucucc

SEQ ID NO: 2375492 - RNA, 19 nt, Artificial Sequence
  Description of Artificial Sequence: Synthetic oligonucleotide
gugccuuggucccgguucu

SEQ ID NO: 2375493 - RNA, 19 nt, Artificial Sequence
  Description of Artificial Sequence: Synthetic oligonucleotide
gacuaccuguggagcucac

SEQ ID NO: 2375494 - RNA, 19 nt, Artificial Sequence
  Description of Artificial Sequence: Synthetic oligonucleotide
ggcuuaggaugugcuucag

SEQ ID NO: 2375495 - RNA, 19 nt, Artificial Sequence
  Description of Artificial Sequence: Synthetic oligonucleotide
ggacuaccuguggagcuca

SEQ ID NO: 2375496 - RNA, 19 nt, Artificial Sequence
  Description of Artificial Sequence: Synthetic oligonucleotide
gcucacaggcuuaggaugu

SEQ ID NO: 2375497 - RNA, 19 nt, Artificial Sequence
  Description of Artificial Sequence: Synthetic oligonucleotide
guagaccuggcagcaggcu

SEQ ID NO: 2375498 - RNA, 19 nt, Artificial Sequence
  Description of Artificial Sequence: Synthetic oligonucleotide
ggaaaucgcacugccuggu

SEQ ID NO: 2375499 - RNA, 19 nt, Artificial Sequence
  Description of Artificial Sequence: Synthetic oligonucleotide
cucggucaaacagcucaaa

SEQ ID NO: 2375500 - RNA, 19 nt, Artificial Sequence
  Description of Artificial Sequence: Synthetic oligonucleotide
ccauugcccucuuugucaa

SEQ ID NO: 2375501 - RNA, 19 nt, Artificial Sequence
  Description of Artificial Sequence: Synthetic oligonucleotide
cauccuucuugggaggcau

SEQ ID NO: 2375502 - RNA, 19 nt, Artificial Sequence
  Description of Artificial Sequence: Synthetic oligonucleotide
guuguccagccccggcgcu

SEQ ID NO: 2375503 - RNA, 19 nt, Artificial Sequence
  Description of Artificial Sequence: Synthetic oligonucleotide
cgagagugguaagaacaug

SEQ ID NO: 2375504 - RNA, 19 nt, Artificial Sequence
  Description of Artificial Sequence: Synthetic oligonucleotide
cccacucggucaaacagcu

SEQ ID NO: 2375505 - RNA, 19 nt, Artificial Sequence
  Description of Artificial Sequence: Synthetic oligonucleotide
cauugcccucuuugucaaa

SEQ ID NO: 2375506 - RNA, 19 nt, Artificial Sequence
  Description of Artificial Sequence: Synthetic oligonucleotide
cugacucagucuuggucuu

SEQ ID NO: 2375507 - RNA, 19 nt, Artificial Sequence
  Description of Artificial Sequence: Synthetic oligonucleotide
caucucuugccgggugcga

SEQ ID NO: 2375508 - RNA, 19 nt, Artificial Sequence
  Description of Artificial Sequence: Synthetic oligonucleotide
ggagcaugggcaggaacgu

SEQ ID NO: 2375509 - RNA, 19 nt, Artificial Sequence
  Description of Artificial Sequence: Synthetic oligonucleotide
cuuggagcaugggcaggaa

SEQ ID NO: 2375510 - RNA, 19 nt, Artificial Sequence
  Description of Artificial Sequence: Synthetic oligonucleotide
gucgggacuugagcucauc

SEQ ID NO: 2375511 - RNA, 19 nt, Artificial Sequence
  Description of Artificial Sequence: Synthetic oligonucleotide
cuuggcuggaguggucccu

SEQ ID NO: 2375512 - RNA, 19 nt, Artificial Sequence
  Description of Artificial Sequence: Synthetic oligonucleotide
ccuuuuccucucagggcga

SEQ ID NO: 2375513 - RNA, 19 nt, Artificial Sequence
  Description of Artificial Sequence: Synthetic oligonucleotide
gcgacacuaggggcuggag

SEQ ID NO: 2375514 - RNA, 19 nt, Artificial Sequence
  Description of Artificial Sequence: Synthetic oligonucleotide
cgucuaucugguuggucga

SEQ ID NO: 2375515 - RNA, 19 nt, Artificial Sequence
  Description of Artificial Sequence: Synthetic oligonucleotide
ccagccccggcgcucgcgc

SEQ ID NO: 2375516 - RNA, 19 nt, Artificial Sequence
  Description of Artificial Sequence: Synthetic oligonucleotide
acggacggaccgacgggaa

SEQ ID NO: 2375517 - RNA, 19 nt, Artificial Sequence
  Description of Artificial Sequence: Synthetic oligonucleotide
auggaggguccugcugguu

SEQ ID NO: 2375518 - RNA, 19 nt, Artificial Sequence
  Description of Artificial Sequence: Synthetic oligonucleotide
cacuaggggcuggaggacu

SEQ ID NO: 2375519 - RNA, 19 nt, Artificial Sequence
  Description of Artificial Sequence: Synthetic oligonucleotide
cgacgggaaaucgcacugc

SEQ ID NO: 2375520 - RNA, 19 nt, Artificial Sequence
  Description of Artificial Sequence: Synthetic oligonucleotide
gaggguccugcugguuucu

SEQ ID NO: 2375521 - RNA, 19 nt, Artificial Sequence
  Description of Artificial Sequence: Synthetic oligonucleotide
ccgagagugguaagaacau

SEQ ID NO: 2375522 - RNA, 19 nt, Artificial Sequence
  Description of Artificial Sequence: Synthetic oligonucleotide
cagcaggcuuagagaugga

SEQ ID NO: 2375523 - RNA, 19 nt, Artificial Sequence
  Description of Artificial Sequence: Synthetic oligonucleotide
ggacggaccgacgggaaau

SEQ ID NO: 2375524 - RNA, 19 nt, Artificial Sequence
  Description of Artificial Sequence: Synthetic oligonucleotide
gcucgcgcugcggacggac

SEQ ID NO: 2375525 - RNA, 19 nt, Artificial Sequence
  Description of Artificial Sequence: Synthetic oligonucleotide
ggcgacacuaggggcugga

SEQ ID NO: 2375526 - RNA, 19 nt, Artificial Sequence
  Description of Artificial Sequence: Synthetic oligonucleotide
gggaggcaugaugucaggu

SEQ ID NO: 2375527 - RNA, 19 nt, Artificial Sequence
  Description of Artificial Sequence: Synthetic oligonucleotide
ggucuuggcuggagugguc

SEQ ID NO: 2375528 - RNA, 19 nt, Artificial Sequence
  Description of Artificial Sequence: Synthetic oligonucleotide
ccgguucuuggcuacugcu

SEQ ID NO: 2375529 - RNA, 19 nt, Artificial Sequence
  Description of Artificial Sequence: Synthetic oligonucleotide
ggcucucaucaagucccca

SEQ ID NO: 2375530 - RNA, 19 nt, Artificial Sequence
  Description of Artificial Sequence: Synthetic oligonucleotide
cuguccucguggccugcua

SEQ ID NO: 2375531 - RNA, 19 nt, Artificial Sequence
  Description of Artificial Sequence: Synthetic oligonucleotide
ugccuuggucccgguucuu

SEQ ID NO: 2375532 - RNA, 19 nt, Artificial Sequence
  Description of Artificial Sequence: Synthetic oligonucleotide
cagcugacucagucuuggu

SEQ ID NO: 2375533 - RNA, 19 nt, Artificial Sequence
  Description of Artificial Sequence: Synthetic oligonucleotide
cugcggacggacggaccga

SEQ ID NO: 2375534 - RNA, 19 nt, Artificial Sequence
  Description of Artificial Sequence: Synthetic oligonucleotide
cagguggccaaaggacagu

SEQ ID NO: 2375535 - RNA, 19 nt, Artificial Sequence
  Description of Artificial Sequence: Synthetic oligonucleotide
gguggccaaaggacagugu

SEQ ID NO: 2375536 - RNA, 19 nt, Artificial Sequence
  Description of Artificial Sequence: Synthetic oligonucleotide
gggcgacacuaggggcugg

SEQ ID NO: 2375537 - RNA, 19 nt, Artificial Sequence
  Description of Artificial Sequence: Synthetic oligonucleotide
ccucuagguaguccucaua

SEQ ID NO: 2375538 - RNA, 19 nt, Artificial Sequence
  Description of Artificial Sequence: Synthetic oligonucleotide
ccccucuagguaguccuca

SEQ ID NO: 2375539 - RNA, 19 nt, Artificial Sequence
  Description of Artificial Sequence: Synthetic oligonucleotide
cucccaugacuuugccauu

SEQ ID NO: 2375540 - RNA, 19 nt, Artificial Sequence
  Description of Artificial Sequence: Synthetic oligonucleotide
guccagccccggcgcucgc

SEQ ID NO: 2375541 - RNA, 19 nt, Artificial Sequence
  Description of Artificial Sequence: Synthetic oligonucleotide
gccuggucgucuaucuggu

SEQ ID NO: 2375542 - RNA, 19 nt, Artificial Sequence
  Description of Artificial Sequence: Synthetic oligonucleotide
cgcugcggacggacggacc

SEQ ID NO: 2375543 - RNA, 19 nt, Artificial Sequence
  Description of Artificial Sequence: Synthetic oligonucleotide
guuggucgaggagccuuuu

SEQ ID NO: 2375544 - RNA, 19 nt, Artificial Sequence
  Description of Artificial Sequence: Synthetic oligonucleotide
accuggcagcaggcuuaga

SEQ ID NO: 2375545 - RNA, 19 nt, Artificial Sequence
  Description of Artificial Sequence: Synthetic oligonucleotide
cgcgaagccccucuaggua

SEQ ID NO: 2375546 - RNA, 19 nt, Artificial Sequence
  Description of Artificial Sequence: Synthetic oligonucleotide
gguccuuguuaaacucgau

SEQ ID NO: 2375547 - RNA, 19 nt, Artificial Sequence
  Description of Artificial Sequence: Synthetic oligonucleotide
gguuggucgaggagccuuu

SEQ ID NO: 2375548 - RNA, 19 nt, Artificial Sequence
  Description of Artificial Sequence: Synthetic oligonucleotide
gcgcugcggacggacggac

SEQ ID NO: 2375549 - RNA, 19 nt, Artificial Sequence
  Description of Artificial Sequence: Synthetic oligonucleotide
caucacccacucggucaaa

SEQ ID NO: 2375550 - RNA, 19 nt, Artificial Sequence
  Description of Artificial Sequence: Synthetic oligonucleotide
gccccucuagguaguccuc

SEQ ID NO: 2375551 - RNA, 19 nt, Artificial Sequence
  Description of Artificial Sequence: Synthetic oligonucleotide
ccggcgcucgcgcugcgga

SEQ ID NO: 2375552 - RNA, 19 nt, Artificial Sequence
  Description of Artificial Sequence: Synthetic oligonucleotide
cacccaucucuugccgggu

SEQ ID NO: 2375553 - RNA, 19 nt, Artificial Sequence
  Description of Artificial Sequence: Synthetic oligonucleotide
ggucgucuaucugguuggu

SEQ ID NO: 2375554 - RNA, 19 nt, Artificial Sequence
  Description of Artificial Sequence: Synthetic oligonucleotide
cugguuggucgaggagccu

SEQ ID NO: 2375555 - RNA, 19 nt, Artificial Sequence
  Description of Artificial Sequence: Synthetic oligonucleotide
gucccgguucuuggcuacu

SEQ ID NO: 2375556 - RNA, 19 nt, Artificial Sequence
  Description of Artificial Sequence: Synthetic oligonucleotide
cccucuagguaguccucau

SEQ ID NO: 2375557 - RNA, 19 nt, Artificial Sequence
  Description of Artificial Sequence: Synthetic oligonucleotide
cccggcgcucgcgcugcgg

SEQ ID NO: 2375558 - RNA, 19 nt, Artificial Sequence
  Description of Artificial Sequence: Synthetic oligonucleotide
cgaagccccucuagguagu

SEQ ID NO: 2375559 - RNA, 19 nt, Artificial Sequence
  Description of Artificial Sequence: Synthetic oligonucleotide
ggaaggccucauaguugau

SEQ ID NO: 2375560 - RNA, 19 nt, Artificial Sequence
  Description of Artificial Sequence: Synthetic oligonucleotide
cggacggaccgacgggaaa

SEQ ID NO: 2375561 - RNA, 19 nt, Artificial Sequence
  Description of Artificial Sequence: Synthetic oligonucleotide
cagccccggcgcucgcgcu

SEQ ID NO: 2375562 - RNA, 19 nt, Artificial Sequence
  Description of Artificial Sequence: Synthetic oligonucleotide
gcacugccuggucgucuau

SEQ ID NO: 2375563 - RNA, 19 nt, Artificial Sequence
  Description of Artificial Sequence: Synthetic oligonucleotide
ccuggucgucuaucugguu

SEQ ID NO: 2375564 - RNA, 19 nt, Artificial Sequence
  Description of Artificial Sequence: Synthetic oligonucleotide
cgcgcugcggacggacgga

SEQ ID NO: 2375565 - RNA, 19 nt, Artificial Sequence
  Description of Artificial Sequence: Synthetic oligonucleotide
ccccggcgcucgcgcugcg

SEQ ID NO: 2375566 - RNA, 19 nt, Artificial Sequence
  Description of Artificial Sequence: Synthetic oligonucleotide
aagacccucacucacacac

SEQ ID NO: 2375567 - RNA, 19 nt, Artificial Sequence
  Description of Artificial Sequence: Synthetic oligonucleotide
aauuccacgaggcuuucgc

SEQ ID NO: 2375568 - RNA, 19 nt, Artificial Sequence
  Description of Artificial Sequence: Synthetic oligonucleotide
caccagaagaacaagaucc

SEQ ID NO: 2375569 - RNA, 19 nt, Artificial Sequence
  Description of Artificial Sequence: Synthetic oligonucleotide
aucagugaacaccaagccc

SEQ ID NO: 2375570 - RNA, 19 nt, Artificial Sequence
  Description of Artificial Sequence: Synthetic oligonucleotide
ugagucauggugcugaagu

SEQ ID NO: 2375571 - RNA, 19 nt, Artificial Sequence
  Description of Artificial Sequence: Synthetic oligonucleotide
acagcauacaugacgaugc

SEQ ID NO: 2375572 - RNA, 19 nt, Artificial Sequence
  Description of Artificial Sequence: Synthetic oligonucleotide
agaagaacaagauccacgu

SEQ ID NO: 2375573 - RNA, 19 nt, Artificial Sequence
  Description of Artificial Sequence: Synthetic oligonucleotide
acacaugcagcuccgaagg

SEQ ID NO: 2375574 - RNA, 19 nt, Artificial Sequence
  Description of Artificial Sequence: Synthetic oligonucleotide
uucgcagggacuccgaagc

SEQ ID NO: 2375575 - RNA, 19 nt, Artificial Sequence
  Description of Artificial Sequence: Synthetic oligonucleotide
uucggaugcgaucucacgc

SEQ ID NO: 2375576 - RNA, 19 nt, Artificial Sequence
  Description of Artificial Sequence: Synthetic oligonucleotide
uguggacgcacacucuugg

SEQ ID NO: 2375577 - RNA, 19 nt, Artificial Sequence
  Description of Artificial Sequence: Synthetic oligonucleotide
gaacucgcagccaugaucc

SEQ ID NO: 2375578 - RNA, 19 nt, Artificial Sequence
  Description of Artificial Sequence: Synthetic oligonucleotide
agucauggugcugaagucc

SEQ ID NO: 2375579 - RNA, 19 nt, Artificial Sequence
  Description of Artificial Sequence: Synthetic oligonucleotide
agaacaagauccacguggc

SEQ ID NO: 2375580 - RNA, 19 nt, Artificial Sequence
  Description of Artificial Sequence: Synthetic oligonucleotide
gacacaugcagcuccgaag

SEQ ID NO: 2375581 - RNA, 19 nt, Artificial Sequence
  Description of Artificial Sequence: Synthetic oligonucleotide
cuuccggcuagucagcugg

SEQ ID NO: 2375582 - RNA, 19 nt, Artificial Sequence
  Description of Artificial Sequence: Synthetic oligonucleotide
gaagcugugcuccaccaug

SEQ ID NO: 2375583 - RNA, 19 nt, Artificial Sequence
  Description of Artificial Sequence: Synthetic oligonucleotide
gaaaugucauccugagagc

SEQ ID NO: 2375584 - RNA, 19 nt, Artificial Sequence
  Description of Artificial Sequence: Synthetic oligonucleotide
aaguucuguggacgcacac

SEQ ID NO: 2375585 - RNA, 19 nt, Artificial Sequence
  Description of Artificial Sequence: Synthetic oligonucleotide
cacguugaggucacgaggc

SEQ ID NO: 2375586 - RNA, 19 nt, Artificial Sequence
  Description of Artificial Sequence: Synthetic oligonucleotide
acaccaagcccacacgagg

SEQ ID NO: 2375587 - RNA, 19 nt, Artificial Sequence
  Description of Artificial Sequence: Synthetic oligonucleotide
aaguccggagcguaggaca

SEQ ID NO: 2375588 - RNA, 19 nt, Artificial Sequence
  Description of Artificial Sequence: Synthetic oligonucleotide
uggacgcacacucuuggag

SEQ ID NO: 2375589 - RNA, 19 nt, Artificial Sequence
  Description of Artificial Sequence: Synthetic oligonucleotide
uccaccauguggcgcagcg

SEQ ID NO: 2375590 - RNA, 19 nt, Artificial Sequence
  Description of Artificial Sequence: Synthetic oligonucleotide
auacaugacgaugccuucc

SEQ ID NO: 2375591 - RNA, 19 nt, Artificial Sequence
  Description of Artificial Sequence: Synthetic oligonucleotide
cacacuggaacucgcagcc

SEQ ID NO: 2375592 - RNA, 19 nt, Artificial Sequence
  Description of Artificial Sequence: Synthetic oligonucleotide
cacaccauugcagaagucc

SEQ ID NO: 2375593 - RNA, 19 nt, Artificial Sequence
  Description of Artificial Sequence: Synthetic oligonucleotide
cucacucacacacuggaac

SEQ ID NO: 2375594 - RNA, 19 nt, Artificial Sequence
  Description of Artificial Sequence: Synthetic oligonucleotide
acacgaggcacguugaggu

SEQ ID NO: 2375595 - RNA, 19 nt, Artificial Sequence
  Description of Artificial Sequence: Synthetic oligonucleotide
ugccauagcggcccagugg

SEQ ID NO: 2375596 - RNA, 19 nt, Artificial Sequence
  Description of Artificial Sequence: Synthetic oligonucleotide
cagcagaugagucauggug

SEQ ID NO: 2375597 - RNA, 19 nt, Artificial Sequence
  Description of Artificial Sequence: Synthetic oligonucleotide
gacuccgaagcucuguccc

SEQ ID NO: 2375598 - RNA, 19 nt, Artificial Sequence
  Description of Artificial Sequence: Synthetic oligonucleotide
ggugcugaaguccggagcg

SEQ ID NO: 2375599 - RNA, 19 nt, Artificial Sequence
  Description of Artificial Sequence: Synthetic oligonucleotide
uuccucuuuggcacgagcu

SEQ ID NO: 2375600 - RNA, 19 nt, Artificial Sequence
  Description of Artificial Sequence: Synthetic oligonucleotide
aagucgccuccccucaggg

SEQ ID NO: 2375601 - RNA, 19 nt, Artificial Sequence
  Description of Artificial Sequence: Synthetic oligonucleotide
aggacugccugcuucaccu

SEQ ID NO: 2375602 - RNA, 19 nt, Artificial Sequence
  Description of Artificial Sequence: Synthetic oligonucleotide
ucacucacacacuggaacu

SEQ ID NO: 2375603 - RNA, 19 nt, Artificial Sequence
  Description of Artificial Sequence: Synthetic oligonucleotide
uccucugggcaaaugcugc

SEQ ID NO: 2375604 - RNA, 19 nt, Artificial Sequence
  Description of Artificial Sequence: Synthetic oligonucleotide
uccacaccauugcagaagu

SEQ ID NO: 2375605 - RNA, 19 nt, Artificial Sequence
  Description of Artificial Sequence: Synthetic oligonucleotide
gcagccaugauccacacca

SEQ ID NO: 2375606 - RNA, 19 nt, Artificial Sequence
  Description of Artificial Sequence: Synthetic oligonucleotide
agucccgucauggugccgc

SEQ ID NO: 2375607 - RNA, 19 nt, Artificial Sequence
  Description of Artificial Sequence: Synthetic oligonucleotide
uacaugacgaugccuuccu

SEQ ID NO: 2375608 - RNA, 19 nt, Artificial Sequence
  Description of Artificial Sequence: Synthetic oligonucleotide
ggagccauccaccagaaga

SEQ ID NO: 2375609 - RNA, 19 nt, Artificial Sequence
  Description of Artificial Sequence: Synthetic oligonucleotide
acucuuggagccauccacc

SEQ ID NO: 2375610 - RNA, 19 nt, Artificial Sequence
  Description of Artificial Sequence: Synthetic oligonucleotide
caugcgaccuucacuuccg

SEQ ID NO: 2375611 - RNA, 19 nt, Artificial Sequence
  Description of Artificial Sequence: Synthetic oligonucleotide
ucaggggacacguccagga

SEQ ID NO: 2375612 - RNA, 19 nt, Artificial Sequence
  Description of Artificial Sequence: Synthetic oligonucleotide
acacugaaaugucauccug

SEQ ID NO: 2375613 - RNA, 19 nt, Artificial Sequence
  Description of Artificial Sequence: Synthetic oligonucleotide
ucacgaagcguuucaccag

SEQ ID NO: 2375614 - RNA, 19 nt, Artificial Sequence
  Description of Artificial Sequence: Synthetic oligonucleotide
acgaucugguucacgaagc

SEQ ID NO: 2375615 - RNA, 19 nt, Artificial Sequence
  Description of Artificial Sequence: Synthetic oligonucleotide
gacgcacacucuuggagcc

SEQ ID NO: 2375616 - RNA, 19 nt, Artificial Sequence
  Description of Artificial Sequence: Synthetic oligonucleotide
ugcgugugcccucagggga

SEQ ID NO: 2375617 - RNA, 19 nt, Artificial Sequence
  Description of Artificial Sequence: Synthetic oligonucleotide
accggucacagcucuugcc

SEQ ID NO: 2375618 - RNA, 19 nt, Artificial Sequence
  Description of Artificial Sequence: Synthetic oligonucleotide
agcucgaaguucuguggac

SEQ ID NO: 2375619 - RNA, 19 nt, Artificial Sequence
  Description of Artificial Sequence: Synthetic oligonucleotide
agaugagucauggugcuga

SEQ ID NO: 2375620 - RNA, 19 nt, Artificial Sequence
  Description of Artificial Sequence: Synthetic oligonucleotide
uuuggcacgagcugcccac

SEQ ID NO: 2375621 - RNA, 19 nt, Artificial Sequence
  Description of Artificial Sequence: Synthetic oligonucleotide
auccacguggcccucucgg

SEQ ID NO: 2375622 - RNA, 19 nt, Artificial Sequence
  Description of Artificial Sequence: Synthetic oligonucleotide
ucggaugcgaucucacgca

SEQ ID NO: 2375623 - RNA, 19 nt, Artificial Sequence
  Description of Artificial Sequence: Synthetic oligonucleotide
cucgaaguucuguggacgc

SEQ ID NO: 2375624 - RNA, 19 nt, Artificial Sequence
  Description of Artificial Sequence: Synthetic oligonucleotide
gucauggugcugaaguccg

SEQ ID NO: 2375625 - RNA, 19 nt, Artificial Sequence
  Description of Artificial Sequence: Synthetic oligonucleotide
caccauguggcgcagcgcc

SEQ ID NO: 2375626 - RNA, 19 nt, Artificial Sequence
  Description of Artificial Sequence: Synthetic oligonucleotide
accagcucgaaguucugug

SEQ ID NO: 2375627 - RNA, 19 nt, Artificial Sequence
  Description of Artificial Sequence: Synthetic oligonucleotide
caugcagcuccgaagguuc

SEQ ID NO: 2375628 - RNA, 19 nt, Artificial Sequence
  Description of Artificial Sequence: Synthetic oligonucleotide
agcggaaggaaagacccuc

SEQ ID NO: 2375629 - RNA, 19 nt, Artificial Sequence
  Description of Artificial Sequence: Synthetic oligonucleotide
ggagaacugcaccagcccg

SEQ ID NO: 2375630 - RNA, 19 nt, Artificial Sequence
  Description of Artificial Sequence: Synthetic oligonucleotide
aggcuuucgcauucgcagg

SEQ ID NO: 2375631 - RNA, 19 nt, Artificial Sequence
  Description of Artificial Sequence: Synthetic oligonucleotide
uuucgcauucgcagggacu

SEQ ID NO: 2375632 - RNA, 19 nt, Artificial Sequence
  Description of Artificial Sequence: Synthetic oligonucleotide
uuccgugucaggcucucga

SEQ ID NO: 2375633 - RNA, 19 nt, Artificial Sequence
  Description of Artificial Sequence: Synthetic oligonucleotide
ucuuggagccauccaccag

SEQ ID NO: 2375634 - RNA, 19 nt, Artificial Sequence
  Description of Artificial Sequence: Synthetic oligonucleotide
aggggacacguccaggaag

SEQ ID NO: 2375635 - RNA, 19 nt, Artificial Sequence
  Description of Artificial Sequence: Synthetic oligonucleotide
aacaccaagcccacacgag

SEQ ID NO: 2375636 - RNA, 19 nt, Artificial Sequence
  Description of Artificial Sequence: Synthetic oligonucleotide
ugcgccucugagaagcugu

SEQ ID NO: 2375637 - RNA, 19 nt, Artificial Sequence
  Description of Artificial Sequence: Synthetic oligonucleotide
aucagccugaagucgccuc

SEQ ID NO: 2375638 - RNA, 19 nt, Artificial Sequence
  Description of Artificial Sequence: Synthetic oligonucleotide
gaagucgccuccccucagg

SEQ ID NO: 2375639 - RNA, 19 nt, Artificial Sequence
  Description of Artificial Sequence: Synthetic oligonucleotide
ugcucagaccgcaugcgac

SEQ ID NO: 2375640 - RNA, 19 nt, Artificial Sequence
  Description of Artificial Sequence: Synthetic oligonucleotide
guucggaugcgaucucacg

SEQ ID NO: 2375641 - RNA, 19 nt, Artificial Sequence
  Description of Artificial Sequence: Synthetic oligonucleotide
ugguucacgaagcguuuca

SEQ ID NO: 2375642 - RNA, 19 nt, Artificial Sequence
  Description of Artificial Sequence: Synthetic oligonucleotide
auagcggcccagugggaac

SEQ ID NO: 2375643 - RNA, 19 nt, Artificial Sequence
  Description of Artificial Sequence: Synthetic oligonucleotide
gccauagcggcccaguggg

SEQ ID NO: 2375644 - RNA, 19 nt, Artificial Sequence
  Description of Artificial Sequence: Synthetic oligonucleotide
gacccucacucacacacug

SEQ ID NO: 2375645 - RNA, 19 nt, Artificial Sequence
  Description of Artificial Sequence: Synthetic oligonucleotide
agcguaggacacaugcagc

SEQ ID NO: 2375646 - RNA, 19 nt, Artificial Sequence
  Description of Artificial Sequence: Synthetic oligonucleotide
acguugaggucacgaggcc

SEQ ID NO: 2375647 - RNA, 19 nt, Artificial Sequence
  Description of Artificial Sequence: Synthetic oligonucleotide
cuuggagccauccaccaga

SEQ ID NO: 2375648 - RNA, 19 nt, Artificial Sequence
  Description of Artificial Sequence: Synthetic oligonucleotide
uucaccucagcugcagugc

SEQ ID NO: 2375649 - RNA, 19 nt, Artificial Sequence
  Description of Artificial Sequence: Synthetic oligonucleotide
cacgaagcguuucaccagc

SEQ ID NO: 2375650 - RNA, 19 nt, Artificial Sequence
  Description of Artificial Sequence: Synthetic oligonucleotide
uucgcauucgcagggacuc

SEQ ID NO: 2375651 - RNA, 19 nt, Artificial Sequence
  Description of Artificial Sequence: Synthetic oligonucleotide
ugaaguccggagcguagga

SEQ ID NO: 2375652 - RNA, 19 nt, Artificial Sequence
  Description of Artificial Sequence: Synthetic oligonucleotide
caccaagcccacacgaggc

SEQ ID NO: 2375653 - RNA, 19 nt, Artificial Sequence
  Description of Artificial Sequence: Synthetic oligonucleotide
ugccaucagccugaagucg

SEQ ID NO: 2375654 - RNA, 19 nt, Artificial Sequence
  Description of Artificial Sequence: Synthetic oligonucleotide
cacacacuggaacucgcag

SEQ ID NO: 2375655 - RNA, 19 nt, Artificial Sequence
  Description of Artificial Sequence: Synthetic oligonucleotide
aagguucggaugcgaucuc

SEQ ID NO: 2375656 - RNA, 19 nt, Artificial Sequence
  Description of Artificial Sequence: Synthetic oligonucleotide
augcgugugcccucagggg

SEQ ID NO: 2375657 - RNA, 19 nt, Artificial Sequence
  Description of Artificial Sequence: Synthetic oligonucleotide
caggcgcucggucagcugg

SEQ ID NO: 2375658 - RNA, 19 nt, Artificial Sequence
  Description of Artificial Sequence: Synthetic oligonucleotide
ucauggugcugaaguccgg

SEQ ID NO: 2375659 - RNA, 19 nt, Artificial Sequence
  Description of Artificial Sequence: Synthetic oligonucleotide
gaacucggugcgcacccgg

SEQ ID NO: 2375660 - RNA, 19 nt, Artificial Sequence
  Description of Artificial Sequence: Synthetic oligonucleotide
gaugcgaucucacgcagcu

SEQ ID NO: 2375661 - RNA, 19 nt, Artificial Sequence
  Description of Artificial Sequence: Synthetic oligonucleotide
gaagguucggaugcgaucu

SEQ ID NO: 2375662 - RNA, 19 nt, Artificial Sequence
  Description of Artificial Sequence: Synthetic oligonucleotide
agcuccgaagguucggaug

SEQ ID NO: 2375663 - RNA, 19 nt, Artificial Sequence
  Description of Artificial Sequence: Synthetic oligonucleotide
agagcggccaucagugaac

SEQ ID NO: 2375664 - RNA, 19 nt, Artificial Sequence
  Description of Artificial Sequence: Synthetic oligonucleotide
acgaggcuuucgcauucgc

SEQ ID NO: 2375665 - RNA, 19 nt, Artificial Sequence
  Description of Artificial Sequence: Synthetic oligonucleotide
aacucggugcgcacccggc

SEQ ID NO: 2375666 - RNA, 19 nt, Artificial Sequence
  Description of Artificial Sequence: Synthetic oligonucleotide
caagcccacacgaggcacg

SEQ ID NO: 2375667 - RNA, 19 nt, Artificial Sequence
  Description of Artificial Sequence: Synthetic oligonucleotide
aaaugcugccuuugagguu

SEQ ID NO: 2375668 - RNA, 19 nt, Artificial Sequence
  Description of Artificial Sequence: Synthetic oligonucleotide
aagcguuucaccagcucga

SEQ ID NO: 2375669 - RNA, 19 nt, Artificial Sequence
  Description of Artificial Sequence: Synthetic oligonucleotide
uccgugucaggcucucgag

SEQ ID NO: 2375670 - RNA, 19 nt, Artificial Sequence
  Description of Artificial Sequence: Synthetic oligonucleotide
uuccacgaggcuuucgcau

SEQ ID NO: 2375671 - RNA, 19 nt, Artificial Sequence
  Description of Artificial Sequence: Synthetic oligonucleotide
agucgccuccccucagggc

SEQ ID NO: 2375672 - RNA, 19 nt, Artificial Sequence
  Description of Artificial Sequence: Synthetic oligonucleotide
gcacguugaggucacgagg

SEQ ID NO: 2375673 - RNA, 19 nt, Artificial Sequence
  Description of Artificial Sequence: Synthetic oligonucleotide
cuccccucagggcacaggc

SEQ ID NO: 2375674 - RNA, 19 nt, Artificial Sequence
  Description of Artificial Sequence: Synthetic oligonucleotide
cauacaugacgaugccuuc

SEQ ID NO: 2375675 - RNA, 19 nt, Artificial Sequence
  Description of Artificial Sequence: Synthetic oligonucleotide
gcuccgaagguucggaugc

SEQ ID NO: 2375676 - RNA, 19 nt, Artificial Sequence
  Description of Artificial Sequence: Synthetic oligonucleotide
gagucauggugcugaaguc

SEQ ID NO: 2375677 - RNA, 19 nt, Artificial Sequence
  Description of Artificial Sequence: Synthetic oligonucleotide
acucgcagccaugauccac

SEQ ID NO: 2375678 - RNA, 19 nt, Artificial Sequence
  Description of Artificial Sequence: Synthetic oligonucleotide
accgcaugcgaccuucacu

SEQ ID NO: 2375679 - RNA, 19 nt, Artificial Sequence
  Description of Artificial Sequence: Synthetic oligonucleotide
agcugcagugccauagcgg

SEQ ID NO: 2375680 - RNA, 19 nt, Artificial Sequence
  Description of Artificial Sequence: Synthetic oligonucleotide
accagcccgaugcgugugc

SEQ ID NO: 2375681 - RNA, 19 nt, Artificial Sequence
  Description of Artificial Sequence: Synthetic oligonucleotide
cugaaguccggagcguagg

SEQ ID NO: 2375682 - RNA, 19 nt, Artificial Sequence
  Description of Artificial Sequence: Synthetic oligonucleotide
ccacacugaaaugucaucc

SEQ ID NO: 2375683 - RNA, 19 nt, Artificial Sequence
  Description of Artificial Sequence: Synthetic oligonucleotide
cacacgaggcacguugagg

SEQ ID NO: 2375684 - RNA, 19 nt, Artificial Sequence
  Description of Artificial Sequence: Synthetic oligonucleotide
ugaagucgccuccccucag

SEQ ID NO: 2375685 - RNA, 19 nt, Artificial Sequence
  Description of Artificial Sequence: Synthetic oligonucleotide
ugucaggcucucgagcgcc

SEQ ID NO: 2375686 - RNA, 19 nt, Artificial Sequence
  Description of Artificial Sequence: Synthetic oligonucleotide
auuccacgaggcuuucgca

SEQ ID NO: 2375687 - RNA, 19 nt, Artificial Sequence
  Description of Artificial Sequence: Synthetic oligonucleotide
agccugaagucgccucccc

SEQ ID NO: 2375688 - RNA, 19 nt, Artificial Sequence
  Description of Artificial Sequence: Synthetic oligonucleotide
ggcuuucgcauucgcaggg

SEQ ID NO: 2375689 - RNA, 19 nt, Artificial Sequence
  Description of Artificial Sequence: Synthetic oligonucleotide
cuuucgcauucgcagggac

SEQ ID NO: 2375690 - RNA, 19 nt, Artificial Sequence
  Description of Artificial Sequence: Synthetic oligonucleotide
ggaacucgcagccaugauc

SEQ ID NO: 2375691 - RNA, 19 nt, Artificial Sequence
  Description of Artificial Sequence: Synthetic oligonucleotide
gucgccuccccucagggca

SEQ ID NO: 2375692 - RNA, 19 nt, Artificial Sequence
  Description of Artificial Sequence: Synthetic oligonucleotide
ucugguucacgaagcguuu

SEQ ID NO: 2375693 - RNA, 19 nt, Artificial Sequence
  Description of Artificial Sequence: Synthetic oligonucleotide
aucugguucacgaagcguu

SEQ ID NO: 2375694 - RNA, 19 nt, Artificial Sequence
  Description of Artificial Sequence: Synthetic oligonucleotide
aguccggagcguaggacac

SEQ ID NO: 2375695 - RNA, 19 nt, Artificial Sequence
  Description of Artificial Sequence: Synthetic oligonucleotide
augacgaugccuuccucuu

SEQ ID NO: 2375696 - RNA, 19 nt, Artificial Sequence
  Description of Artificial Sequence: Synthetic oligonucleotide
gaauuccacgaggcuuucg

SEQ ID NO: 2375697 - RNA, 19 nt, Artificial Sequence
  Description of Artificial Sequence: Synthetic oligonucleotide
caugauccacaccauugca

SEQ ID NO: 2375698 - RNA, 19 nt, Artificial Sequence
  Description of Artificial Sequence: Synthetic oligonucleotide
ugcgaccuucacuuccggc

SEQ ID NO: 2375699 - RNA, 19 nt, Artificial Sequence
  Description of Artificial Sequence: Synthetic oligonucleotide
aggcagcggaaggaaagac

SEQ ID NO: 2375700 - RNA, 19 nt, Artificial Sequence
  Description of Artificial Sequence: Synthetic oligonucleotide
ccaugauccacaccauugc

SEQ ID NO: 2375701 - RNA, 19 nt, Artificial Sequence
  Description of Artificial Sequence: Synthetic oligonucleotide
cagcauacaugacgaugcc

SEQ ID NO: 2375702 - RNA, 19 nt, Artificial Sequence
  Description of Artificial Sequence: Synthetic oligonucleotide
cucgcagccaugauccaca

SEQ ID NO: 2375703 - RNA, 19 nt, Artificial Sequence
  Description of Artificial Sequence: Synthetic oligonucleotide
ugcagcuccgaagguucgg

SEQ ID NO: 2375704 - RNA, 19 nt, Artificial Sequence
  Description of Artificial Sequence: Synthetic oligonucleotide
cuucacuuccggcuaguca

SEQ ID NO: 2375705 - RNA, 19 nt, Artificial Sequence
  Description of Artificial Sequence: Synthetic oligonucleotide
ggcacguugaggucacgag

SEQ ID NO: 2375706 - RNA, 19 nt, Artificial Sequence
  Description of Artificial Sequence: Synthetic oligonucleotide
cgugucaggcucucgagcg

SEQ ID NO: 2375707 - RNA, 19 nt, Artificial Sequence
  Description of Artificial Sequence: Synthetic oligonucleotide
cacgcccacagcauacaug

SEQ ID NO: 2375708 - RNA, 19 nt, Artificial Sequence
  Description of Artificial Sequence: Synthetic oligonucleotide
gagccauccaccagaagaa

SEQ ID NO: 2375709 - RNA, 19 nt, Artificial Sequence
  Description of Artificial Sequence: Synthetic oligonucleotide
auccaccagaagaacaaga

SEQ ID NO: 2375710 - RNA, 19 nt, Artificial Sequence
  Description of Artificial Sequence: Synthetic oligonucleotide
gcucgaaguucuguggacg

SEQ ID NO: 2375711 - RNA, 19 nt, Artificial Sequence
  Description of Artificial Sequence: Synthetic oligonucleotide
ccagcucgaaguucugugg

SEQ ID NO: 2375712 - RNA, 19 nt, Artificial Sequence
  Description of Artificial Sequence: Synthetic oligonucleotide
ugcgcacccggcuggagaa

SEQ ID NO: 2375713 - RNA, 19 nt, Artificial Sequence
  Description of Artificial Sequence: Synthetic oligonucleotide
acgaggcacguugagguca

SEQ ID NO: 2375714 - RNA, 19 nt, Artificial Sequence
  Description of Artificial Sequence: Synthetic oligonucleotide
uccacgaggcuuucgcauu

SEQ ID NO: 2375715 - RNA, 19 nt, Artificial Sequence
  Description of Artificial Sequence: Synthetic oligonucleotide
ugagagcggccaucaguga

SEQ ID NO: 2375716 - RNA, 19 nt, Artificial Sequence
  Description of Artificial Sequence: Synthetic oligonucleotide
accaagcccacacgaggca

SEQ ID NO: 2375717 - RNA, 19 nt, Artificial Sequence
  Description of Artificial Sequence: Synthetic oligonucleotide
gcacgagcugcccacacug

SEQ ID NO: 2375718 - RNA, 19 nt, Artificial Sequence
  Description of Artificial Sequence: Synthetic oligonucleotide
gucacgaggccgcgcaccc

SEQ ID NO: 2375719 - RNA, 19 nt, Artificial Sequence
  Description of Artificial Sequence: Synthetic oligonucleotide
ugggaacucggugcgcacc

SEQ ID NO: 2375720 - RNA, 19 nt, Artificial Sequence
  Description of Artificial Sequence: Synthetic oligonucleotide
agguucuccagcagaugag

SEQ ID NO: 2375721 - RNA, 19 nt, Artificial Sequence
  Description of Artificial Sequence: Synthetic oligonucleotide
guacuccacagccaggacu

SEQ ID NO: 2375722 - RNA, 19 nt, Artificial Sequence
  Description of Artificial Sequence: Synthetic oligonucleotide
acuuccggcuagucagcug

SEQ ID NO: 2375723 - RNA, 19 nt, Artificial Sequence
  Description of Artificial Sequence: Synthetic oligonucleotide
cggagcguaggacacaugc

SEQ ID NO: 2375724 - RNA, 19 nt, Artificial Sequence
  Description of Artificial Sequence: Synthetic oligonucleotide
cucggcaccggucacagcu

SEQ ID NO: 2375725 - RNA, 19 nt, Artificial Sequence
  Description of Artificial Sequence: Synthetic oligonucleotide
ggugccgcgcuccauguac

SEQ ID NO: 2375726 - RNA, 19 nt, Artificial Sequence
  Description of Artificial Sequence: Synthetic oligonucleotide
augcgaccuucacuuccgg

SEQ ID NO: 2375727 - RNA, 19 nt, Artificial Sequence
  Description of Artificial Sequence: Synthetic oligonucleotide
acguggcccucucggcacc

SEQ ID NO: 2375728 - RNA, 19 nt, Artificial Sequence
  Description of Artificial Sequence: Synthetic oligonucleotide
gcucagaccgcaugcgacc

SEQ ID NO: 2375729 - RNA, 19 nt, Artificial Sequence
  Description of Artificial Sequence: Synthetic oligonucleotide
uggagccauccaccagaag

SEQ ID NO: 2375730 - RNA, 19 nt, Artificial Sequence
  Description of Artificial Sequence: Synthetic oligonucleotide
gaugagucauggugcugaa

SEQ ID NO: 2375731 - RNA, 19 nt, Artificial Sequence
  Description of Artificial Sequence: Synthetic oligonucleotide
agugccauagcggcccagu

SEQ ID NO: 2375732 - RNA, 19 nt, Artificial Sequence
  Description of Artificial Sequence: Synthetic oligonucleotide
cugaaaugucauccugaga

SEQ ID NO: 2375733 - RNA, 19 nt, Artificial Sequence
  Description of Artificial Sequence: Synthetic oligonucleotide
cacccugcgccucugagaa

SEQ ID NO: 2375734 - RNA, 19 nt, Artificial Sequence
  Description of Artificial Sequence: Synthetic oligonucleotide
gaugcccuccucugggcaa

SEQ ID NO: 2375735 - RNA, 19 nt, Artificial Sequence
  Description of Artificial Sequence: Synthetic oligonucleotide
cacguggcccucucggcac

SEQ ID NO: 2375736 - RNA, 19 nt, Artificial Sequence
  Description of Artificial Sequence: Synthetic oligonucleotide
cugcagugccauagcggcc

SEQ ID NO: 2375737 - RNA, 19 nt, Artificial Sequence
  Description of Artificial Sequence: Synthetic oligonucleotide
gaaguucuguggacgcaca

SEQ ID NO: 2375738 - RNA, 19 nt, Artificial Sequence
  Description of Artificial Sequence: Synthetic oligonucleotide
gagcugcccacacugaaau

SEQ ID NO: 2375739 - RNA, 19 nt, Artificial Sequence
  Description of Artificial Sequence: Synthetic oligonucleotide
augagucauggugcugaag

SEQ ID NO: 2375740 - RNA, 19 nt, Artificial Sequence
  Description of Artificial Sequence: Synthetic oligonucleotide
cacucacacacuggaacuc

SEQ ID NO: 2375741 - RNA, 19 nt, Artificial Sequence
  Description of Artificial Sequence: Synthetic oligonucleotide
ugacgaugccuuccucuuu

SEQ ID NO: 2375742 - RNA, 19 nt, Artificial Sequence
  Description of Artificial Sequence: Synthetic oligonucleotide
acaugcagcuccgaagguu

SEQ ID NO: 2375743 - RNA, 19 nt, Artificial Sequence
  Description of Artificial Sequence: Synthetic oligonucleotide
cacgaggccgcgcacccug

SEQ ID NO: 2375744 - RNA, 19 nt, Artificial Sequence
  Description of Artificial Sequence: Synthetic oligonucleotide
ggcagcggaaggaaagacc

SEQ ID NO: 2375745 - RNA, 19 nt, Artificial Sequence
  Description of Artificial Sequence: Synthetic oligonucleotide
agcggccaucagugaacac

SEQ ID NO: 2375746 - RNA, 19 nt, Artificial Sequence
  Description of Artificial Sequence: Synthetic oligonucleotide
aggucacgaggccgcgcac

SEQ ID NO: 2375747 - RNA, 19 nt, Artificial Sequence
  Description of Artificial Sequence: Synthetic oligonucleotide
aagcccacacgaggcacgu

SEQ ID NO: 2375748 - RNA, 19 nt, Artificial Sequence
  Description of Artificial Sequence: Synthetic oligonucleotide
cacacugaaaugucauccu

SEQ ID NO: 2375749 - RNA, 19 nt, Artificial Sequence
  Description of Artificial Sequence: Synthetic oligonucleotide
uccggagcguaggacacau

SEQ ID NO: 2375750 - RNA, 19 nt, Artificial Sequence
  Description of Artificial Sequence: Synthetic oligonucleotide
cucggugcgcacccggcug

SEQ ID NO: 2375751 - RNA, 19 nt, Artificial Sequence
  Description of Artificial Sequence: Synthetic oligonucleotide
gcuggagaacugcaccagc

SEQ ID NO: 2375752 - RNA, 19 nt, Artificial Sequence
  Description of Artificial Sequence: Synthetic oligonucleotide
gaccgcaugcgaccuucac

SEQ ID NO: 2375753 - RNA, 19 nt, Artificial Sequence
  Description of Artificial Sequence: Synthetic oligonucleotide
acucggugcgcacccggcu

SEQ ID NO: 2375754 - RNA, 19 nt, Artificial Sequence
  Description of Artificial Sequence: Synthetic oligonucleotide
guggcgcagcgccaguccc

SEQ ID NO: 2375755 - RNA, 19 nt, Artificial Sequence
  Description of Artificial Sequence: Synthetic oligonucleotide
gccagucccgucauggugc

SEQ ID NO: 2375756 - RNA, 19 nt, Artificial Sequence
  Description of Artificial Sequence: Synthetic oligonucleotide
gccagguuccgugucaggc

SEQ ID NO: 2375757 - RNA, 19 nt, Artificial Sequence
  Description of Artificial Sequence: Synthetic oligonucleotide
ggacacguccaggaagucc

SEQ ID NO: 2375758 - RNA, 19 nt, Artificial Sequence
  Description of Artificial Sequence: Synthetic oligonucleotide
ccucuuuggcacgagcugc

SEQ ID NO: 2375759 - RNA, 19 nt, Artificial Sequence
  Description of Artificial Sequence: Synthetic oligonucleotide
auguggcgcagcgccaguc

SEQ ID NO: 2375760 - RNA, 19 nt, Artificial Sequence
  Description of Artificial Sequence: Synthetic oligonucleotide
agcccgaugcgugugcccu

SEQ ID NO: 2375761 - RNA, 19 nt, Artificial Sequence
  Description of Artificial Sequence: Synthetic oligonucleotide
ugcugaaguccggagcgua

SEQ ID NO: 2375762 - RNA, 19 nt, Artificial Sequence
  Description of Artificial Sequence: Synthetic oligonucleotide
uggcacgagcugcccacac

SEQ ID NO: 2375763 - RNA, 19 nt, Artificial Sequence
  Description of Artificial Sequence: Synthetic oligonucleotide
gugccauagcggcccagug

SEQ ID NO: 2375764 - RNA, 19 nt, Artificial Sequence
  Description of Artificial Sequence: Synthetic oligonucleotide
gaggccgcgcacccugcgc

SEQ ID NO: 2375765 - RNA, 19 nt, Artificial Sequence
  Description of Artificial Sequence: Synthetic oligonucleotide
cugagaagcugugcuccac

SEQ ID NO: 2375766 - RNA, 19 nt, Artificial Sequence
  Description of Artificial Sequence: Synthetic oligonucleotide
caccggucacagcucuugc

SEQ ID NO: 2375767 - RNA, 19 nt, Artificial Sequence
  Description of Artificial Sequence: Synthetic oligonucleotide
aggcacguugaggucacga

SEQ ID NO: 2375768 - RNA, 19 nt, Artificial Sequence
  Description of Artificial Sequence: Synthetic oligonucleotide
gccaucagccugaagucgc

SEQ ID NO: 2375769 - RNA, 19 nt, Artificial Sequence
  Description of Artificial Sequence: Synthetic oligonucleotide
acccucacucacacacugg

SEQ ID NO: 2375770 - RNA, 19 nt, Artificial Sequence
  Description of Artificial Sequence: Synthetic oligonucleotide
ccggcuggagaacugcacc

SEQ ID NO: 2375771 - RNA, 19 nt, Artificial Sequence
  Description of Artificial Sequence: Synthetic oligonucleotide
cacgaggcuuucgcauucg

SEQ ID NO: 2375772 - RNA, 19 nt, Artificial Sequence
  Description of Artificial Sequence: Synthetic oligonucleotide
agguucggaugcgaucuca

SEQ ID NO: 2375773 - RNA, 19 nt, Artificial Sequence
  Description of Artificial Sequence: Synthetic oligonucleotide
ugcggcccuggaauuccac

SEQ ID NO: 2375774 - RNA, 19 nt, Artificial Sequence
  Description of Artificial Sequence: Synthetic oligonucleotide
ugaggucacgaggccgcgc

SEQ ID NO: 2375775 - RNA, 19 nt, Artificial Sequence
  Description of Artificial Sequence: Synthetic oligonucleotide
ggaaagacccucacucaca

SEQ ID NO: 2375776 - RNA, 19 nt, Artificial Sequence
  Description of Artificial Sequence: Synthetic oligonucleotide
ucggcaccggucacagcuc

SEQ ID NO: 2375777 - RNA, 19 nt, Artificial Sequence
  Description of Artificial Sequence: Synthetic oligonucleotide
cagaccgcaugcgaccuuc

SEQ ID NO: 2375778 - RNA, 19 nt, Artificial Sequence
  Description of Artificial Sequence: Synthetic oligonucleotide
agggcacaggcagcggaag

SEQ ID NO: 2375779 - RNA, 19 nt, Artificial Sequence
  Description of Artificial Sequence: Synthetic oligonucleotide
cacgaggcacguugagguc

SEQ ID NO: 2375780 - RNA, 19 nt, Artificial Sequence
  Description of Artificial Sequence: Synthetic oligonucleotide
gaucugguucacgaagcgu

SEQ ID NO: 2375781 - RNA, 19 nt, Artificial Sequence
  Description of Artificial Sequence: Synthetic oligonucleotide
ucgcagccaugauccacac

SEQ ID NO: 2375782 - RNA, 19 nt, Artificial Sequence
  Description of Artificial Sequence: Synthetic oligonucleotide
uuccggcuagucagcuggu

SEQ ID NO: 2375783 - RNA, 19 nt, Artificial Sequence
  Description of Artificial Sequence: Synthetic oligonucleotide
cauccugagagcggccauc

SEQ ID NO: 2375784 - RNA, 19 nt, Artificial Sequence
  Description of Artificial Sequence: Synthetic oligonucleotide
cugguucacgaagcguuuc

SEQ ID NO: 2375785 - RNA, 19 nt, Artificial Sequence
  Description of Artificial Sequence: Synthetic oligonucleotide
uagcggcccagugggaacu

SEQ ID NO: 2375786 - RNA, 19 nt, Artificial Sequence
  Description of Artificial Sequence: Synthetic oligonucleotide
ugcccacgcccacagcaua

SEQ ID NO: 2375787 - RNA, 19 nt, Artificial Sequence
  Description of Artificial Sequence: Synthetic oligonucleotide
cccugcgccucugagaagc

SEQ ID NO: 2375788 - RNA, 19 nt, Artificial Sequence
  Description of Artificial Sequence: Synthetic oligonucleotide
ccgaagcucugucccagcg

SEQ ID NO: 2375789 - RNA, 19 nt, Artificial Sequence
  Description of Artificial Sequence: Synthetic oligonucleotide
cuccgaagguucggaugcg

SEQ ID NO: 2375790 - RNA, 19 nt, Artificial Sequence
  Description of Artificial Sequence: Synthetic oligonucleotide
agggacuccgaagcucugu

SEQ ID NO: 2375791 - RNA, 19 nt, Artificial Sequence
  Description of Artificial Sequence: Synthetic oligonucleotide
guggacgcacacucuugga

SEQ ID NO: 2375792 - RNA, 19 nt, Artificial Sequence
  Description of Artificial Sequence: Synthetic oligonucleotide
gcgaccuucacuuccggcu

SEQ ID NO: 2375793 - RNA, 19 nt, Artificial Sequence
  Description of Artificial Sequence: Synthetic oligonucleotide
gucccgucauggugccgcg

SEQ ID NO: 2375794 - RNA, 19 nt, Artificial Sequence
  Description of Artificial Sequence: Synthetic oligonucleotide
ccagaagaacaagauccac

SEQ ID NO: 2375795 - RNA, 19 nt, Artificial Sequence
  Description of Artificial Sequence: Synthetic oligonucleotide
aguccacgaucugguucac

SEQ ID NO: 2375796 - RNA, 19 nt, Artificial Sequence
  Description of Artificial Sequence: Synthetic oligonucleotide
gguucacgaagcguuucac

SEQ ID NO: 2375797 - RNA, 19 nt, Artificial Sequence
  Description of Artificial Sequence: Synthetic oligonucleotide
cacccggcuggagaacugc

SEQ ID NO: 2375798 - RNA, 19 nt, Artificial Sequence
  Description of Artificial Sequence: Synthetic oligonucleotide
gagcggccaucagugaaca

SEQ ID NO: 2375799 - RNA, 19 nt, Artificial Sequence
  Description of Artificial Sequence: Synthetic oligonucleotide
guccacgaucugguucacg

SEQ ID NO: 2375800 - RNA, 19 nt, Artificial Sequence
  Description of Artificial Sequence: Synthetic oligonucleotide
ucgcauucgcagggacucc

SEQ ID NO: 2375801 - RNA, 19 nt, Artificial Sequence
  Description of Artificial Sequence: Synthetic oligonucleotide
cauagcggcccagugggaa

SEQ ID NO: 2375802 - RNA, 19 nt, Artificial Sequence
  Description of Artificial Sequence: Synthetic oligonucleotide
cagaugagucauggugcug

SEQ ID NO: 2375803 - RNA, 19 nt, Artificial Sequence
  Description of Artificial Sequence: Synthetic oligonucleotide
augcgaucucacgcagcuc

SEQ ID NO: 2375804 - RNA, 19 nt, Artificial Sequence
  Description of Artificial Sequence: Synthetic oligonucleotide
ucgccuccccucagggcac

SEQ ID NO: 2375805 - RNA, 19 nt, Artificial Sequence
  Description of Artificial Sequence: Synthetic oligonucleotide
gcugaaguccggagcguag

SEQ ID NO: 2375806 - RNA, 19 nt, Artificial Sequence
  Description of Artificial Sequence: Synthetic oligonucleotide
aagcucugucccagcgcug

SEQ ID NO: 2375807 - RNA, 19 nt, Artificial Sequence
  Description of Artificial Sequence: Synthetic oligonucleotide
ccaucagccugaagucgcc

SEQ ID NO: 2375808 - RNA, 19 nt, Artificial Sequence
  Description of Artificial Sequence: Synthetic oligonucleotide
cagcccgaugcgugugccc

SEQ ID NO: 2375809 - RNA, 19 nt, Artificial Sequence
  Description of Artificial Sequence: Synthetic oligonucleotide
uuggcacgagcugcccaca

SEQ ID NO: 2375810 - RNA, 19 nt, Artificial Sequence
  Description of Artificial Sequence: Synthetic oligonucleotide
gcauacaugacgaugccuu

SEQ ID NO: 2375811 - RNA, 19 nt, Artificial Sequence
  Description of Artificial Sequence: Synthetic oligonucleotide
ggacacaugcagcuccgaa

SEQ ID NO: 2375812 - RNA, 19 nt, Artificial Sequence
  Description of Artificial Sequence: Synthetic oligonucleotide
ugccgcgcuccauguacuc

SEQ ID NO: 2375813 - RNA, 19 nt, Artificial Sequence
  Description of Artificial Sequence: Synthetic oligonucleotide
gugcgcacccggcuggaga

SEQ ID NO: 2375814 - RNA, 19 nt, Artificial Sequence
  Description of Artificial Sequence: Synthetic oligonucleotide
gguucggaugcgaucucac

SEQ ID NO: 2375815 - RNA, 19 nt, Artificial Sequence
  Description of Artificial Sequence: Synthetic oligonucleotide
cguugaggucacgaggccg

SEQ ID NO: 2375816 - RNA, 19 nt, Artificial Sequence
  Description of Artificial Sequence: Synthetic oligonucleotide
gcguaggacacaugcagcu

SEQ ID NO: 2375817 - RNA, 19 nt, Artificial Sequence
  Description of Artificial Sequence: Synthetic oligonucleotide
gccauccaccagaagaaca

SEQ ID NO: 2375818 - RNA, 19 nt, Artificial Sequence
  Description of Artificial Sequence: Synthetic oligonucleotide
cauucgcagggacuccgaa

SEQ ID NO: 2375819 - RNA, 19 nt, Artificial Sequence
  Description of Artificial Sequence: Synthetic oligonucleotide
gcguuucaccagcucgaag

SEQ ID NO: 2375820 - RNA, 19 nt, Artificial Sequence
  Description of Artificial Sequence: Synthetic oligonucleotide
ggucacgaggccgcgcacc

SEQ ID NO: 2375821 - RNA, 19 nt, Artificial Sequence
  Description of Artificial Sequence: Synthetic oligonucleotide
gcuagucagcugguucucc

SEQ ID NO: 2375822 - RNA, 19 nt, Artificial Sequence
  Description of Artificial Sequence: Synthetic oligonucleotide
ggagcguaggacacaugca

SEQ ID NO: 2375823 - RNA, 19 nt, Artificial Sequence
  Description of Artificial Sequence: Synthetic oligonucleotide
agcgugcggcccuggaauu

SEQ ID NO: 2375824 - RNA, 19 nt, Artificial Sequence
  Description of Artificial Sequence: Synthetic oligonucleotide
gccuugcccacgcccacag

SEQ ID NO: 2375825 - RNA, 19 nt, Artificial Sequence
  Description of Artificial Sequence: Synthetic oligonucleotide
ggaugcgaucucacgcagc

SEQ ID NO: 2375826 - RNA, 19 nt, Artificial Sequence
  Description of Artificial Sequence: Synthetic oligonucleotide
aggcgcucggucagcuggg

SEQ ID NO: 2375827 - RNA, 19 nt, Artificial Sequence
  Description of Artificial Sequence: Synthetic oligonucleotide
cgaagguucggaugcgauc

SEQ ID NO: 2375828 - RNA, 19 nt, Artificial Sequence
  Description of Artificial Sequence: Synthetic oligonucleotide
acgaagcguuucaccagcu

SEQ ID NO: 2375829 - RNA, 19 nt, Artificial Sequence
  Description of Artificial Sequence: Synthetic oligonucleotide
ccggcuagucagcugguuc

SEQ ID NO: 2375830 - RNA, 19 nt, Artificial Sequence
  Description of Artificial Sequence: Synthetic oligonucleotide
cgaaguucuguggacgcac

SEQ ID NO: 2375831 - RNA, 19 nt, Artificial Sequence
  Description of Artificial Sequence: Synthetic oligonucleotide
cacgagcugcccacacuga

SEQ ID NO: 2375832 - RNA, 19 nt, Artificial Sequence
  Description of Artificial Sequence: Synthetic oligonucleotide
accuucacuuccggcuagu

SEQ ID NO: 2375833 - RNA, 19 nt, Artificial Sequence
  Description of Artificial Sequence: Synthetic oligonucleotide
gaggcacguugaggucacg

SEQ ID NO: 2375834 - RNA, 19 nt, Artificial Sequence
  Description of Artificial Sequence: Synthetic oligonucleotide
cuccacggccuugcccacg

SEQ ID NO: 2375835 - RNA, 19 nt, Artificial Sequence
  Description of Artificial Sequence: Synthetic oligonucleotide
cgaagcucugucccagcgc

SEQ ID NO: 2375836 - RNA, 19 nt, Artificial Sequence
  Description of Artificial Sequence: Synthetic oligonucleotide
ugcccucaggggacacguc

SEQ ID NO: 2375837 - RNA, 19 nt, Artificial Sequence
  Description of Artificial Sequence: Synthetic oligonucleotide
caccucagcugcagugcca

SEQ ID NO: 2375838 - RNA, 19 nt, Artificial Sequence
  Description of Artificial Sequence: Synthetic oligonucleotide
acccugcgccucugagaag

SEQ ID NO: 2375839 - RNA, 19 nt, Artificial Sequence
  Description of Artificial Sequence: Synthetic oligonucleotide
cagugggaacucggugcgc

SEQ ID NO: 2375840 - RNA, 19 nt, Artificial Sequence
  Description of Artificial Sequence: Synthetic oligonucleotide
ccagucccgucauggugcc

SEQ ID NO: 2375841 - RNA, 19 nt, Artificial Sequence
  Description of Artificial Sequence: Synthetic oligonucleotide
agcggcccagugggaacuc

SEQ ID NO: 2375842 - RNA, 19 nt, Artificial Sequence
  Description of Artificial Sequence: Synthetic oligonucleotide
cugcgccucugagaagcug

SEQ ID NO: 2375843 - RNA, 19 nt, Artificial Sequence
  Description of Artificial Sequence: Synthetic oligonucleotide
ucccgucauggugccgcgc

SEQ ID NO: 2375844 - RNA, 19 nt, Artificial Sequence
  Description of Artificial Sequence: Synthetic oligonucleotide
uccggcuagucagcugguu

SEQ ID NO: 2375845 - RNA, 19 nt, Artificial Sequence
  Description of Artificial Sequence: Synthetic oligonucleotide
caggggacacguccaggaa

SEQ ID NO: 2375846 - RNA, 19 nt, Artificial Sequence
  Description of Artificial Sequence: Synthetic oligonucleotide
cccggcuggagaacugcac

SEQ ID NO: 2375847 - RNA, 19 nt, Artificial Sequence
  Description of Artificial Sequence: Synthetic oligonucleotide
gcccucucggcaccgguca

SEQ ID NO: 2375848 - RNA, 19 nt, Artificial Sequence
  Description of Artificial Sequence: Synthetic oligonucleotide
ggggacacguccaggaagu

SEQ ID NO: 2375849 - RNA, 19 nt, Artificial Sequence
  Description of Artificial Sequence: Synthetic oligonucleotide
cagcgugcggcccuggaau

SEQ ID NO: 2375850 - RNA, 19 nt, Artificial Sequence
  Description of Artificial Sequence: Synthetic oligonucleotide
cgcauucgcagggacuccg

SEQ ID NO: 2375851 - RNA, 19 nt, Artificial Sequence
  Description of Artificial Sequence: Synthetic oligonucleotide
caccagcccgaugcgugug

SEQ ID NO: 2375852 - RNA, 19 nt, Artificial Sequence
  Description of Artificial Sequence: Synthetic oligonucleotide
acccggcuggagaacugca

SEQ ID NO: 2375853 - RNA, 19 nt, Artificial Sequence
  Description of Artificial Sequence: Synthetic oligonucleotide
cgaugcgugugcccucagg

SEQ ID NO: 2375854 - RNA, 19 nt, Artificial Sequence
  Description of Artificial Sequence: Synthetic oligonucleotide
ccugagagcggccaucagu

SEQ ID NO: 2375855 - RNA, 19 nt, Artificial Sequence
  Description of Artificial Sequence: Synthetic oligonucleotide
cgcugaugcccuccucugg

SEQ ID NO: 2375856 - RNA, 19 nt, Artificial Sequence
  Description of Artificial Sequence: Synthetic oligonucleotide
gcggaaggaaagacccuca

SEQ ID NO: 2375857 - RNA, 19 nt, Artificial Sequence
  Description of Artificial Sequence: Synthetic oligonucleotide
ggcuagucagcugguucuc

SEQ ID NO: 2375858 - RNA, 19 nt, Artificial Sequence
  Description of Artificial Sequence: Synthetic oligonucleotide
cggaugcgaucucacgcag

SEQ ID NO: 2375859 - RNA, 19 nt, Artificial Sequence
  Description of Artificial Sequence: Synthetic oligonucleotide
cucagaccgcaugcgaccu

SEQ ID NO: 2375860 - RNA, 19 nt, Artificial Sequence
  Description of Artificial Sequence: Synthetic oligonucleotide
ccgcaugcgaccuucacuu

SEQ ID NO: 2375861 - RNA, 19 nt, Artificial Sequence
  Description of Artificial Sequence: Synthetic oligonucleotide
agaccgcaugcgaccuuca

SEQ ID NO: 2375862 - RNA, 19 nt, Artificial Sequence
  Description of Artificial Sequence: Synthetic oligonucleotide
gccgcgcuccauguacucc

SEQ ID NO: 2375863 - RNA, 19 nt, Artificial Sequence
  Description of Artificial Sequence: Synthetic oligonucleotide
cacaugcagcuccgaaggu

SEQ ID NO: 2375864 - RNA, 19 nt, Artificial Sequence
  Description of Artificial Sequence: Synthetic oligonucleotide
cagucccgucauggugccg

SEQ ID NO: 2375865 - RNA, 19 nt, Artificial Sequence
  Description of Artificial Sequence: Synthetic oligonucleotide
cgaggcuuucgcauucgca

SEQ ID NO: 2375866 - RNA, 19 nt, Artificial Sequence
  Description of Artificial Sequence: Synthetic oligonucleotide
cgaggcacguugaggucac

SEQ ID NO: 2375867 - RNA, 19 nt, Artificial Sequence
  Description of Artificial Sequence: Synthetic oligonucleotide
cggcccagugggaacucgg

SEQ ID NO: 2375868 - RNA, 19 nt, Artificial Sequence
  Description of Artificial Sequence: Synthetic oligonucleotide
cgaagcguuucaccagcuc

SEQ ID NO: 2375869 - RNA, 19 nt, Artificial Sequence
  Description of Artificial Sequence: Synthetic oligonucleotide
cgcucggucagcugggcca

SEQ ID NO: 2375870 - RNA, 19 nt, Artificial Sequence
  Description of Artificial Sequence: Synthetic oligonucleotide
cgccagucccgucauggug

SEQ ID NO: 2375871 - RNA, 19 nt, Artificial Sequence
  Description of Artificial Sequence: Synthetic oligonucleotide
cagcggaaggaaagacccu

SEQ ID NO: 2375872 - RNA, 19 nt, Artificial Sequence
  Description of Artificial Sequence: Synthetic oligonucleotide
cgugcggcccuggaauucc

SEQ ID NO: 2375873 - RNA, 19 nt, Artificial Sequence
  Description of Artificial Sequence: Synthetic oligonucleotide
gcuuucgcauucgcaggga

SEQ ID NO: 2375874 - RNA, 19 nt, Artificial Sequence
  Description of Artificial Sequence: Synthetic oligonucleotide
gcgcucggucagcugggcc

SEQ ID NO: 2375875 - RNA, 19 nt, Artificial Sequence
  Description of Artificial Sequence: Synthetic oligonucleotide
ccacguggcccucucggca

SEQ ID NO: 2375876 - RNA, 19 nt, Artificial Sequence
  Description of Artificial Sequence: Synthetic oligonucleotide
ccacaccauugcagaaguc

SEQ ID NO: 2375877 - RNA, 19 nt, Artificial Sequence
  Description of Artificial Sequence: Synthetic oligonucleotide
guccggagcguaggacaca

SEQ ID NO: 2375878 - RNA, 19 nt, Artificial Sequence
  Description of Artificial Sequence: Synthetic oligonucleotide
cccacacgaggcacguuga

SEQ ID NO: 2375879 - RNA, 19 nt, Artificial Sequence
  Description of Artificial Sequence: Synthetic oligonucleotide
ccagcccgaugcgugugcc

SEQ ID NO: 2375880 - RNA, 19 nt, Artificial Sequence
  Description of Artificial Sequence: Synthetic oligonucleotide
gcccacgcccacagcauac

SEQ ID NO: 2375881 - RNA, 19 nt, Artificial Sequence
  Description of Artificial Sequence: Synthetic oligonucleotide
gucccagcgcugaugcccu

SEQ ID NO: 2375882 - RNA, 19 nt, Artificial Sequence
  Description of Artificial Sequence: Synthetic oligonucleotide
ccaccauguggcgcagcgc

SEQ ID NO: 2375883 - RNA, 19 nt, Artificial Sequence
  Description of Artificial Sequence: Synthetic oligonucleotide
gcgccucugagaagcugug

SEQ ID NO: 2375884 - RNA, 19 nt, Artificial Sequence
  Description of Artificial Sequence: Synthetic oligonucleotide
ccuucacuuccggcuaguc

SEQ ID NO: 2375885 - RNA, 19 nt, Artificial Sequence
  Description of Artificial Sequence: Synthetic oligonucleotide
ggcacgagcugcccacacu

SEQ ID NO: 2375886 - RNA, 19 nt, Artificial Sequence
  Description of Artificial Sequence: Synthetic oligonucleotide
ccacgaucugguucacgaa

SEQ ID NO: 2375887 - RNA, 19 nt, Artificial Sequence
  Description of Artificial Sequence: Synthetic oligonucleotide
augcugccuuugagguucu

SEQ ID NO: 2375888 - RNA, 19 nt, Artificial Sequence
  Description of Artificial Sequence: Synthetic oligonucleotide
ggugcgcacccggcuggag

SEQ ID NO: 2375889 - RNA, 19 nt, Artificial Sequence
  Description of Artificial Sequence: Synthetic oligonucleotide
caccagcucgaaguucugu

SEQ ID NO: 2375890 - RNA, 19 nt, Artificial Sequence
  Description of Artificial Sequence: Synthetic oligonucleotide
cgcacccugcgccucugag

SEQ ID NO: 2375891 - RNA, 19 nt, Artificial Sequence
  Description of Artificial Sequence: Synthetic oligonucleotide
gcauucgcagggacuccga

SEQ ID NO: 2375892 - RNA, 19 nt, Artificial Sequence
  Description of Artificial Sequence: Synthetic oligonucleotide
cacuuccggcuagucagcu

SEQ ID NO: 2375893 - RNA, 19 nt, Artificial Sequence
  Description of Artificial Sequence: Synthetic oligonucleotide
gccugaagucgccuccccu

SEQ ID NO: 2375894 - RNA, 19 nt, Artificial Sequence
  Description of Artificial Sequence: Synthetic oligonucleotide
cgcagggacuccgaagcuc

SEQ ID NO: 2375895 - RNA, 19 nt, Artificial Sequence
  Description of Artificial Sequence: Synthetic oligonucleotide
gugcugaaguccggagcgu

SEQ ID NO: 2375896 - RNA, 19 nt, Artificial Sequence
  Description of Artificial Sequence: Synthetic oligonucleotide
cgcagccaugauccacacc

SEQ ID NO: 2375897 - RNA, 19 nt, Artificial Sequence
  Description of Artificial Sequence: Synthetic oligonucleotide
cagcuccgaagguucggau

SEQ ID NO: 2375898 - RNA, 19 nt, Artificial Sequence
  Description of Artificial Sequence: Synthetic oligonucleotide
gggacacguccaggaaguc

SEQ ID NO: 2375899 - RNA, 19 nt, Artificial Sequence
  Description of Artificial Sequence: Synthetic oligonucleotide
gugcggcccuggaauucca

SEQ ID NO: 2375900 - RNA, 19 nt, Artificial Sequence
  Description of Artificial Sequence: Synthetic oligonucleotide
cggcuagucagcugguucu

SEQ ID NO: 2375901 - RNA, 19 nt, Artificial Sequence
  Description of Artificial Sequence: Synthetic oligonucleotide
cauguggcgcagcgccagu

SEQ ID NO: 2375902 - RNA, 19 nt, Artificial Sequence
  Description of Artificial Sequence: Synthetic oligonucleotide
gcaccagcccgaugcgugu

SEQ ID NO: 2375903 - RNA, 19 nt, Artificial Sequence
  Description of Artificial Sequence: Synthetic oligonucleotide
ccagcagaugagucauggu

SEQ ID NO: 2375904 - RNA, 19 nt, Artificial Sequence
  Description of Artificial Sequence: Synthetic oligonucleotide
gugccgcgcuccauguacu

SEQ ID NO: 2375905 - RNA, 19 nt, Artificial Sequence
  Description of Artificial Sequence: Synthetic oligonucleotide
cgaggccgcgcacccugcg

SEQ ID NO: 2375906 - RNA, 19 nt, Artificial Sequence
  Description of Artificial Sequence: Synthetic oligonucleotide
ccagcgugcggcccuggaa

SEQ ID NO: 2375907 - RNA, 19 nt, Artificial Sequence
  Description of Artificial Sequence: Synthetic oligonucleotide
gcgugcggcccuggaauuc

SEQ ID NO: 2375908 - RNA, 19 nt, Artificial Sequence
  Description of Artificial Sequence: Synthetic oligonucleotide
cgcaugcgaccuucacuuc

SEQ ID NO: 2375909 - RNA, 19 nt, Artificial Sequence
  Description of Artificial Sequence: Synthetic oligonucleotide
ccggagcguaggacacaug

SEQ ID NO: 2375910 - RNA, 19 nt, Artificial Sequence
  Description of Artificial Sequence: Synthetic oligonucleotide
cgaccuucacuuccggcua

SEQ ID NO: 2375911 - RNA, 19 nt, Artificial Sequence
  Description of Artificial Sequence: Synthetic oligonucleotide
cccucucggcaccggucac

SEQ ID NO: 2375912 - RNA, 19 nt, Artificial Sequence
  Description of Artificial Sequence: Synthetic oligonucleotide
gcccgaugcgugugcccuc

SEQ ID NO: 2375913 - RNA, 19 nt, Artificial Sequence
  Description of Artificial Sequence: Synthetic oligonucleotide
cccgucauggugccgcgcu

SEQ ID NO: 2375914 - RNA, 19 nt, Artificial Sequence
  Description of Artificial Sequence: Synthetic oligonucleotide
ccauagcggcccaguggga

SEQ ID NO: 2375915 - RNA, 19 nt, Artificial Sequence
  Description of Artificial Sequence: Synthetic oligonucleotide
ccgaagguucggaugcgau

SEQ ID NO: 2375916 - RNA, 19 nt, Artificial Sequence
  Description of Artificial Sequence: Synthetic oligonucleotide
cccgaugcgugugcccuca

SEQ ID NO: 2375917 - RNA, 19 nt, Artificial Sequence
  Description of Artificial Sequence: Synthetic oligonucleotide
ccgaugcgugugcccucag

SEQ ID NO: 2375918 - RNA, 19 nt, Artificial Sequence
  Description of Artificial Sequence: Synthetic oligonucleotide
ccucucggcaccggucaca

SEQ ID NO: 2375919 - RNA, 19 nt, Artificial Sequence
  Description of Artificial Sequence: Synthetic oligonucleotide
cguggcccucucggcaccg

SEQ ID NO: 2375920 - RNA, 19 nt, Artificial Sequence
  Description of Artificial Sequence: Synthetic oligonucleotide
gcgccagucccgucauggu

SEQ ID NO: 2375921 - RNA, 19 nt, Artificial Sequence
  Description of Artificial Sequence: Synthetic oligonucleotide
gcgcacccggcuggagaac

SEQ ID NO: 2375922 - RNA, 19 nt, Artificial Sequence
  Description of Artificial Sequence: Synthetic oligonucleotide
ccugcgccucugagaagcu

SEQ ID NO: 2375923 - RNA, 19 nt, Artificial Sequence
  Description of Artificial Sequence: Synthetic oligonucleotide
gccgcgcacccugcgccuc

SEQ ID NO: 2375924 - RNA, 19 nt, Artificial Sequence
  Description of Artificial Sequence: Synthetic oligonucleotide
ccacgcccacagcauacau

SEQ ID NO: 2375925 - RNA, 19 nt, Artificial Sequence
  Description of Artificial Sequence: Synthetic oligonucleotide
gcgaucucacgcagcucuu

SEQ ID NO: 2375926 - RNA, 19 nt, Artificial Sequence
  Description of Artificial Sequence: Synthetic oligonucleotide
gcgcagcgccagucccguc

SEQ ID NO: 2375927 - RNA, 19 nt, Artificial Sequence
  Description of Artificial Sequence: Synthetic oligonucleotide
cgcacacucuuggagccau

SEQ ID NO: 2375928 - RNA, 19 nt, Artificial Sequence
  Description of Artificial Sequence: Synthetic oligonucleotide
cgcacccggcuggagaacu

SEQ ID NO: 2375929 - RNA, 19 nt, Artificial Sequence
  Description of Artificial Sequence: Synthetic oligonucleotide
cggcaccggucacagcucu

SEQ ID NO: 2375930 - RNA, 19 nt, Artificial Sequence
  Description of Artificial Sequence: Synthetic oligonucleotide
ggcaccggucacagcucuu

SEQ ID NO: 2375931 - RNA, 19 nt, Artificial Sequence
  Description of Artificial Sequence: Synthetic oligonucleotide
aaacguaccagcucaucgg

SEQ ID NO: 2375932 - RNA, 19 nt, Artificial Sequence
  Description of Artificial Sequence: Synthetic oligonucleotide
gacuagugaagccaggugg

SEQ ID NO: 2375933 - RNA, 19 nt, Artificial Sequence
  Description of Artificial Sequence: Synthetic oligonucleotide
ugcacaaaugcgcagugcg

SEQ ID NO: 2375934 - RNA, 19 nt, Artificial Sequence
  Description of Artificial Sequence: Synthetic oligonucleotide
aacacuaggagcucccauc

SEQ ID NO: 2375935 - RNA, 19 nt, Artificial Sequence
  Description of Artificial Sequence: Synthetic oligonucleotide
gaaacguaccagcucaucg

SEQ ID NO: 2375936 - RNA, 19 nt, Artificial Sequence
  Description of Artificial Sequence: Synthetic oligonucleotide
ucuuucgcugcacaaaugc

SEQ ID NO: 2375937 - RNA, 19 nt, Artificial Sequence
  Description of Artificial Sequence: Synthetic oligonucleotide
ugugcgaaggcuuggagag

SEQ ID NO: 2375938 - RNA, 19 nt, Artificial Sequence
  Description of Artificial Sequence: Synthetic oligonucleotide
acuaggguuggccacaagg

SEQ ID NO: 2375939 - RNA, 19 nt, Artificial Sequence
  Description of Artificial Sequence: Synthetic oligonucleotide
uucacguccaugaaggaga

SEQ ID NO: 2375940 - RNA, 19 nt, Artificial Sequence
  Description of Artificial Sequence: Synthetic oligonucleotide
cuguucacguccaugaagg

SEQ ID NO: 2375941 - RNA, 19 nt, Artificial Sequence
  Description of Artificial Sequence: Synthetic oligonucleotide
acuaggagcucccaucagc

SEQ ID NO: 2375942 - RNA, 19 nt, Artificial Sequence
  Description of Artificial Sequence: Synthetic oligonucleotide
ucucugucaacacuaggag

SEQ ID NO: 2375943 - RNA, 19 nt, Artificial Sequence
  Description of Artificial Sequence: Synthetic oligonucleotide
agccagguggaauuguucc

SEQ ID NO: 2375944 - RNA, 19 nt, Artificial Sequence
  Description of Artificial Sequence: Synthetic oligonucleotide
uuucgcugcacaaaugcgc

SEQ ID NO: 2375945 - RNA, 19 nt, Artificial Sequence
  Description of Artificial Sequence: Synthetic oligonucleotide
gacacauggguaaaggucc

SEQ ID NO: 2375946 - RNA, 19 nt, Artificial Sequence
  Description of Artificial Sequence: Synthetic oligonucleotide
agagaggugguccacgguc

SEQ ID NO: 2375947 - RNA, 19 nt, Artificial Sequence
  Description of Artificial Sequence: Synthetic oligonucleotide
aguggggcaaugcaguagg

SEQ ID NO: 2375948 - RNA, 19 nt, Artificial Sequence
  Description of Artificial Sequence: Synthetic oligonucleotide
gaagcggaaacguaccagc

SEQ ID NO: 2375949 - RNA, 19 nt, Artificial Sequence
  Description of Artificial Sequence: Synthetic oligonucleotide
acaaaugcgcagugcgucc

SEQ ID NO: 2375950 - RNA, 19 nt, Artificial Sequence
  Description of Artificial Sequence: Synthetic oligonucleotide
guggaauuguuccaggcag

SEQ ID NO: 2375951 - RNA, 19 nt, Artificial Sequence
  Description of Artificial Sequence: Synthetic oligonucleotide
uccacgguccuccaggugc

SEQ ID NO: 2375952 - RNA, 19 nt, Artificial Sequence
  Description of Artificial Sequence: Synthetic oligonucleotide
agagcaacuaggguuggcc

SEQ ID NO: 2375953 - RNA, 19 nt, Artificial Sequence
  Description of Artificial Sequence: Synthetic oligonucleotide
cuaggguuggccacaaggc

SEQ ID NO: 2375954 - RNA, 19 nt, Artificial Sequence
  Description of Artificial Sequence: Synthetic oligonucleotide
ucacucaccggccuggggc

SEQ ID NO: 2375955 - RNA, 19 nt, Artificial Sequence
  Description of Artificial Sequence: Synthetic oligonucleotide
agguggaauuguuccaggc

SEQ ID NO: 2375956 - RNA, 19 nt, Artificial Sequence
  Description of Artificial Sequence: Synthetic oligonucleotide
ucugugacgcugcucagca

SEQ ID NO: 2375957 - RNA, 19 nt, Artificial Sequence
  Description of Artificial Sequence: Synthetic oligonucleotide
uggaauuguuccaggcagg

SEQ ID NO: 2375958 - RNA, 19 nt, Artificial Sequence
  Description of Artificial Sequence: Synthetic oligonucleotide
cuucauagcgagugggccg

SEQ ID NO: 2375959 - RNA, 19 nt, Artificial Sequence
  Description of Artificial Sequence: Synthetic oligonucleotide
cuaggagcucccaucagcc

SEQ ID NO: 2375960 - RNA, 19 nt, Artificial Sequence
  Description of Artificial Sequence: Synthetic oligonucleotide
agggaagcuucugugacgc

SEQ ID NO: 2375961 - RNA, 19 nt, Artificial Sequence
  Description of Artificial Sequence: Synthetic oligonucleotide
aaaugcgcagugcgucccc

SEQ ID NO: 2375962 - RNA, 19 nt, Artificial Sequence
  Description of Artificial Sequence: Synthetic oligonucleotide
agcaacuaggguuggccac

SEQ ID NO: 2375963 - RNA, 19 nt, Artificial Sequence
  Description of Artificial Sequence: Synthetic oligonucleotide
gagacggcuucauagcgag

SEQ ID NO: 2375964 - RNA, 19 nt, Artificial Sequence
  Description of Artificial Sequence: Synthetic oligonucleotide
ugguccacgguccuccagg

SEQ ID NO: 2375965 - RNA, 19 nt, Artificial Sequence
  Description of Artificial Sequence: Synthetic oligonucleotide
uucgcugcacaaaugcgca

SEQ ID NO: 2375966 - RNA, 19 nt, Artificial Sequence
  Description of Artificial Sequence: Synthetic oligonucleotide
cuuucgcugcacaaaugcg

SEQ ID NO: 2375967 - RNA, 19 nt, Artificial Sequence
  Description of Artificial Sequence: Synthetic oligonucleotide
aggagacggcuucauagcg

SEQ ID NO: 2375968 - RNA, 19 nt, Artificial Sequence
  Description of Artificial Sequence: Synthetic oligonucleotide
agcugcgcgcaucaguggc

SEQ ID NO: 2375969 - RNA, 19 nt, Artificial Sequence
  Description of Artificial Sequence: Synthetic oligonucleotide
aacguaccagcucaucgga

SEQ ID NO: 2375970 - RNA, 19 nt, Artificial Sequence
  Description of Artificial Sequence: Synthetic oligonucleotide
acgggcaccaguugcgagc

SEQ ID NO: 2375971 - RNA, 19 nt, Artificial Sequence
  Description of Artificial Sequence: Synthetic oligonucleotide
agcccagacagccgcaggc

SEQ ID NO: 2375972 - RNA, 19 nt, Artificial Sequence
  Description of Artificial Sequence: Synthetic oligonucleotide
ugacuagugaagccaggug

SEQ ID NO: 2375973 - RNA, 19 nt, Artificial Sequence
  Description of Artificial Sequence: Synthetic oligonucleotide
uccugacuagugaagccag

SEQ ID NO: 2375974 - RNA, 19 nt, Artificial Sequence
  Description of Artificial Sequence: Synthetic oligonucleotide
cucugucaacacuaggagc

SEQ ID NO: 2375975 - RNA, 19 nt, Artificial Sequence
  Description of Artificial Sequence: Synthetic oligonucleotide
cauggguaaagguccagug

SEQ ID NO: 2375976 - RNA, 19 nt, Artificial Sequence
  Description of Artificial Sequence: Synthetic oligonucleotide
gacggcuucauagcgagug

SEQ ID NO: 2375977 - RNA, 19 nt, Artificial Sequence
  Description of Artificial Sequence: Synthetic oligonucleotide
aaugcaguagggucuccaa

SEQ ID NO: 2375978 - RNA, 19 nt, Artificial Sequence
  Description of Artificial Sequence: Synthetic oligonucleotide
aucucugucaacacuagga

SEQ ID NO: 2375979 - RNA, 19 nt, Artificial Sequence
  Description of Artificial Sequence: Synthetic oligonucleotide
aaagguccagugugcgaag

SEQ ID NO: 2375980 - RNA, 19 nt, Artificial Sequence
  Description of Artificial Sequence: Synthetic oligonucleotide
ugcagccucgauuucgggc

SEQ ID NO: 2375981 - RNA, 19 nt, Artificial Sequence
  Description of Artificial Sequence: Synthetic oligonucleotide
aagagcaacuaggguuggc

SEQ ID NO: 2375982 - RNA, 19 nt, Artificial Sequence
  Description of Artificial Sequence: Synthetic oligonucleotide
uaggguuggccacaaggcu

SEQ ID NO: 2375983 - RNA, 19 nt, Artificial Sequence
  Description of Artificial Sequence: Synthetic oligonucleotide
aacggcgggacugcgggac

SEQ ID NO: 2375984 - RNA, 19 nt, Artificial Sequence
  Description of Artificial Sequence: Synthetic oligonucleotide
uccagugugcgaaggcuug

SEQ ID NO: 2375985 - RNA, 19 nt, Artificial Sequence
  Description of Artificial Sequence: Synthetic oligonucleotide
uuccugacuagugaagcca

SEQ ID NO: 2375986 - RNA, 19 nt, Artificial Sequence
  Description of Artificial Sequence: Synthetic oligonucleotide
cuggcgagggaccaucgcg

SEQ ID NO: 2375987 - RNA, 19 nt, Artificial Sequence
  Description of Artificial Sequence: Synthetic oligonucleotide
caggcagggcgacacaugg

SEQ ID NO: 2375988 - RNA, 19 nt, Artificial Sequence
  Description of Artificial Sequence: Synthetic oligonucleotide
aggcuagccaggcugaggu

SEQ ID NO: 2375989 - RNA, 19 nt, Artificial Sequence
  Description of Artificial Sequence: Synthetic oligonucleotide
gaagcuucugugacgcugc

SEQ ID NO: 2375990 - RNA, 19 nt, Artificial Sequence
  Description of Artificial Sequence: Synthetic oligonucleotide
acacuaggagcucccauca

SEQ ID NO: 2375991 - RNA, 19 nt, Artificial Sequence
  Description of Artificial Sequence: Synthetic oligonucleotide
caguaggcuagccaggcug

SEQ ID NO: 2375992 - RNA, 19 nt, Artificial Sequence
  Description of Artificial Sequence: Synthetic oligonucleotide
guuccugacuagugaagcc

SEQ ID NO: 2375993 - RNA, 19 nt, Artificial Sequence
  Description of Artificial Sequence: Synthetic oligonucleotide
aggccgagagcgcucacgg

SEQ ID NO: 2375994 - RNA, 19 nt, Artificial Sequence
  Description of Artificial Sequence: Synthetic oligonucleotide
agaagcggaaacguaccag

SEQ ID NO: 2375995 - RNA, 19 nt, Artificial Sequence
  Description of Artificial Sequence: Synthetic oligonucleotide
uggcugaucggccgggacc

SEQ ID NO: 2375996 - RNA, 19 nt, Artificial Sequence
  Description of Artificial Sequence: Synthetic oligonucleotide
acuggcgagggaccaucgc

SEQ ID NO: 2375997 - RNA, 19 nt, Artificial Sequence
  Description of Artificial Sequence: Synthetic oligonucleotide
guucacguccaugaaggag

SEQ ID NO: 2375998 - RNA, 19 nt, Artificial Sequence
  Description of Artificial Sequence: Synthetic oligonucleotide
augcaguagggucuccaag

SEQ ID NO: 2375999 - RNA, 19 nt, Artificial Sequence
  Description of Artificial Sequence: Synthetic oligonucleotide
gggacugcgggacaugggg

SEQ ID NO: 2376000 - RNA, 19 nt, Artificial Sequence
  Description of Artificial Sequence: Synthetic oligonucleotide
gggaccaucgcgaacggcg

SEQ ID NO: 2376001 - RNA, 19 nt, Artificial Sequence
  Description of Artificial Sequence: Synthetic oligonucleotide
cucaucggagcuguggccc

SEQ ID NO: 2376002 - RNA, 19 nt, Artificial Sequence
  Description of Artificial Sequence: Synthetic oligonucleotide
gagacuggagcgcgggacc

SEQ ID NO: 2376003 - RNA, 19 nt, Artificial Sequence
  Description of Artificial Sequence: Synthetic oligonucleotide
caucucugucaacacuagg

SEQ ID NO: 2376004 - RNA, 19 nt, Artificial Sequence
  Description of Artificial Sequence: Synthetic oligonucleotide
agugugcgaaggcuuggag

SEQ ID NO: 2376005 - RNA, 19 nt, Artificial Sequence
  Description of Artificial Sequence: Synthetic oligonucleotide
auagcgagugggccggcag

SEQ ID NO: 2376006 - RNA, 19 nt, Artificial Sequence
  Description of Artificial Sequence: Synthetic oligonucleotide
ugucaacacuaggagcucc

SEQ ID NO: 2376007 - RNA, 19 nt, Artificial Sequence
  Description of Artificial Sequence: Synthetic oligonucleotide
gguaaagguccagugugcg

SEQ ID NO: 2376008 - RNA, 19 nt, Artificial Sequence
  Description of Artificial Sequence: Synthetic oligonucleotide
gacagccgcaggcaguggc

SEQ ID NO: 2376009 - RNA, 19 nt, Artificial Sequence
  Description of Artificial Sequence: Synthetic oligonucleotide
gugcuguucacguccauga

SEQ ID NO: 2376010 - RNA, 19 nt, Artificial Sequence
  Description of Artificial Sequence: Synthetic oligonucleotide
cuaggccggaggcaguggg

SEQ ID NO: 2376011 - RNA, 19 nt, Artificial Sequence
  Description of Artificial Sequence: Synthetic oligonucleotide
uggcaggacucuuucgcug

SEQ ID NO: 2376012 - RNA, 19 nt, Artificial Sequence
  Description of Artificial Sequence: Synthetic oligonucleotide
uccaugaaggagacggcuu

SEQ ID NO: 2376013 - RNA, 19 nt, Artificial Sequence
  Description of Artificial Sequence: Synthetic oligonucleotide
gucugcagccucgauuucg

SEQ ID NO: 2376014 - RNA, 19 nt, Artificial Sequence
  Description of Artificial Sequence: Synthetic oligonucleotide
acggcuucauagcgagugg

SEQ ID NO: 2376015 - RNA, 19 nt, Artificial Sequence
  Description of Artificial Sequence: Synthetic oligonucleotide
acugcgggacauggggucc

SEQ ID NO: 2376016 - RNA, 19 nt, Artificial Sequence
  Description of Artificial Sequence: Synthetic oligonucleotide
cucgauuucgggcugaggu

SEQ ID NO: 2376017 - RNA, 19 nt, Artificial Sequence
  Description of Artificial Sequence: Synthetic oligonucleotide
cagguggaauuguuccagg

SEQ ID NO: 2376018 - RNA, 19 nt, Artificial Sequence
  Description of Artificial Sequence: Synthetic oligonucleotide
ucacguccaugaaggagac

SEQ ID NO: 2376019 - RNA, 19 nt, Artificial Sequence
  Description of Artificial Sequence: Synthetic oligonucleotide
aaggcuuggagagcauccu

SEQ ID NO: 2376020 - RNA, 19 nt, Artificial Sequence
  Description of Artificial Sequence: Synthetic oligonucleotide
ucccaguuccaucucuguc

SEQ ID NO: 2376021 - RNA, 19 nt, Artificial Sequence
  Description of Artificial Sequence: Synthetic oligonucleotide
gcaagagcaacuaggguug

SEQ ID NO: 2376022 - RNA, 19 nt, Artificial Sequence
  Description of Artificial Sequence: Synthetic oligonucleotide
gagaggugguccacggucc

SEQ ID NO: 2376023 - RNA, 19 nt, Artificial Sequence
  Description of Artificial Sequence: Synthetic oligonucleotide
uguucacguccaugaagga

SEQ ID NO: 2376024 - RNA, 19 nt, Artificial Sequence
  Description of Artificial Sequence: Synthetic oligonucleotide
ugccaccuaggccggaggc

SEQ ID NO: 2376025 - RNA, 19 nt, Artificial Sequence
  Description of Artificial Sequence: Synthetic oligonucleotide
gacgcugcucagcagggca

SEQ ID NO: 2376026 - RNA, 19 nt, Artificial Sequence
  Description of Artificial Sequence: Synthetic oligonucleotide
gagcaacuaggguuggcca

SEQ ID NO: 2376027 - RNA, 19 nt, Artificial Sequence
  Description of Artificial Sequence: Synthetic oligonucleotide
guccagggaagcuucugug

SEQ ID NO: 2376028 - RNA, 19 nt, Artificial Sequence
  Description of Artificial Sequence: Synthetic oligonucleotide
gguuccugacuagugaagc

SEQ ID NO: 2376029 - RNA, 19 nt, Artificial Sequence
  Description of Artificial Sequence: Synthetic oligonucleotide
aggacucuuucgcugcaca

SEQ ID NO: 2376030 - RNA, 19 nt, Artificial Sequence
  Description of Artificial Sequence: Synthetic oligonucleotide
ggggcaaugcaguaggguc

SEQ ID NO: 2376031 - RNA, 19 nt, Artificial Sequence
  Description of Artificial Sequence: Synthetic oligonucleotide
cacgagccgcugcagaagc

SEQ ID NO: 2376032 - RNA, 19 nt, Artificial Sequence
  Description of Artificial Sequence: Synthetic oligonucleotide
ucgugggccuguuuccuca

SEQ ID NO: 2376033 - RNA, 19 nt, Artificial Sequence
  Description of Artificial Sequence: Synthetic oligonucleotide
gugugcgaaggcuuggaga

SEQ ID NO: 2376034 - RNA, 19 nt, Artificial Sequence
  Description of Artificial Sequence: Synthetic oligonucleotide
ucgauuucgggcugagguu

SEQ ID NO: 2376035 - RNA, 19 nt, Artificial Sequence
  Description of Artificial Sequence: Synthetic oligonucleotide
aucgcgaacggcgggacug

SEQ ID NO: 2376036 - RNA, 19 nt, Artificial Sequence
  Description of Artificial Sequence: Synthetic oligonucleotide
gguggaauuguuccaggca

SEQ ID NO: 2376037 - RNA, 19 nt, Artificial Sequence
  Description of Artificial Sequence: Synthetic oligonucleotide
aagcggaaacguaccagcu

SEQ ID NO: 2376038 - RNA, 19 nt, Artificial Sequence
  Description of Artificial Sequence: Synthetic oligonucleotide
gacugcgggacaugggguc

SEQ ID NO: 2376039 - RNA, 19 nt, Artificial Sequence
  Description of Artificial Sequence: Synthetic oligonucleotide
uagcgagugggccggcagc

SEQ ID NO: 2376040 - RNA, 19 nt, Artificial Sequence
  Description of Artificial Sequence: Synthetic oligonucleotide
uaggcuagccaggcugagg

SEQ ID NO: 2376041 - RNA, 19 nt, Artificial Sequence
  Description of Artificial Sequence: Synthetic oligonucleotide
ugaggucgugcggggagcg

SEQ ID NO: 2376042 - RNA, 19 nt, Artificial Sequence
  Description of Artificial Sequence: Synthetic oligonucleotide
gacaugggguccagggaag

SEQ ID NO: 2376043 - RNA, 19 nt, Artificial Sequence
  Description of Artificial Sequence: Synthetic oligonucleotide
uccgggucccugcacgcgc

SEQ ID NO: 2376044 - RNA, 19 nt, Artificial Sequence
  Description of Artificial Sequence: Synthetic oligonucleotide
gaccaucgcgaacggcggg

SEQ ID NO: 2376045 - RNA, 19 nt, Artificial Sequence
  Description of Artificial Sequence: Synthetic oligonucleotide
aacuaggguuggccacaag

SEQ ID NO: 2376046 - RNA, 19 nt, Artificial Sequence
  Description of Artificial Sequence: Synthetic oligonucleotide
acauggguaaagguccagu

SEQ ID NO: 2376047 - RNA, 19 nt, Artificial Sequence
  Description of Artificial Sequence: Synthetic oligonucleotide
cucuuucgcugcacaaaug

SEQ ID NO: 2376048 - RNA, 19 nt, Artificial Sequence
  Description of Artificial Sequence: Synthetic oligonucleotide
caaaugcgcagugcguccc

SEQ ID NO: 2376049 - RNA, 19 nt, Artificial Sequence
  Description of Artificial Sequence: Synthetic oligonucleotide
ucaacacuaggagcuccca

SEQ ID NO: 2376050 - RNA, 19 nt, Artificial Sequence
  Description of Artificial Sequence: Synthetic oligonucleotide
gauuucgggcugagguucc

SEQ ID NO: 2376051 - RNA, 19 nt, Artificial Sequence
  Description of Artificial Sequence: Synthetic oligonucleotide
ugcuguucacguccaugaa

SEQ ID NO: 2376052 - RNA, 19 nt, Artificial Sequence
  Description of Artificial Sequence: Synthetic oligonucleotide
cacucaccggccuggggcc

SEQ ID NO: 2376053 - RNA, 19 nt, Artificial Sequence
  Description of Artificial Sequence: Synthetic oligonucleotide
gucaacacuaggagcuccc

SEQ ID NO: 2376054 - RNA, 19 nt, Artificial Sequence
  Description of Artificial Sequence: Synthetic oligonucleotide
gagggaccaucgcgaacgg

SEQ ID NO: 2376055 - RNA, 19 nt, Artificial Sequence
  Description of Artificial Sequence: Synthetic oligonucleotide
ugaagccagguggaauugu

SEQ ID NO: 2376056 - RNA, 19 nt, Artificial Sequence
  Description of Artificial Sequence: Synthetic oligonucleotide
ggcgacacauggguaaagg

SEQ ID NO: 2376057 - RNA, 19 nt, Artificial Sequence
  Description of Artificial Sequence: Synthetic oligonucleotide
gccgagagcgcucacgggc

SEQ ID NO: 2376058 - RNA, 19 nt, Artificial Sequence
  Description of Artificial Sequence: Synthetic oligonucleotide
cugucacucaccggccugg

SEQ ID NO: 2376059 - RNA, 19 nt, Artificial Sequence
  Description of Artificial Sequence: Synthetic oligonucleotide
gaccgcagggccccggcgc

SEQ ID NO: 2376060 - RNA, 19 nt, Artificial Sequence
  Description of Artificial Sequence: Synthetic oligonucleotide
agccaggcugaggucgugc

SEQ ID NO: 2376061 - RNA, 19 nt, Artificial Sequence
  Description of Artificial Sequence: Synthetic oligonucleotide
ucgcugcacaaaugcgcag

SEQ ID NO: 2376062 - RNA, 19 nt, Artificial Sequence
  Description of Artificial Sequence: Synthetic oligonucleotide
gcuucauagcgagugggcc

SEQ ID NO: 2376063 - RNA, 19 nt, Artificial Sequence
  Description of Artificial Sequence: Synthetic oligonucleotide
uagugaagccagguggaau

SEQ ID NO: 2376064 - RNA, 19 nt, Artificial Sequence
  Description of Artificial Sequence: Synthetic oligonucleotide
guuccaggcagggcgacac

SEQ ID NO: 2376065 - RNA, 19 nt, Artificial Sequence
  Description of Artificial Sequence: Synthetic oligonucleotide
ugucacucaccggccuggg

SEQ ID NO: 2376066 - RNA, 19 nt, Artificial Sequence
  Description of Artificial Sequence: Synthetic oligonucleotide
accagcucaucggagcugu

SEQ ID NO: 2376067 - RNA, 19 nt, Artificial Sequence
  Description of Artificial Sequence: Synthetic oligonucleotide
aguugcgagcgcaggcgac

SEQ ID NO: 2376068 - RNA, 19 nt, Artificial Sequence
  Description of Artificial Sequence: Synthetic oligonucleotide
aguaggcuagccaggcuga

SEQ ID NO: 2376069 - RNA, 19 nt, Artificial Sequence
  Description of Artificial Sequence: Synthetic oligonucleotide
cgagggaccaucgcgaacg

SEQ ID NO: 2376070 - RNA, 19 nt, Artificial Sequence
  Description of Artificial Sequence: Synthetic oligonucleotide
cugcucagcagggcaagag

SEQ ID NO: 2376071 - RNA, 19 nt, Artificial Sequence
  Description of Artificial Sequence: Synthetic oligonucleotide
cagggcuggcugaucggcc

SEQ ID NO: 2376072 - RNA, 19 nt, Artificial Sequence
  Description of Artificial Sequence: Synthetic oligonucleotide
gcucacgggcaccaguugc

SEQ ID NO: 2376073 - RNA, 19 nt, Artificial Sequence
  Description of Artificial Sequence: Synthetic oligonucleotide
cugcacaaaugcgcagugc

SEQ ID NO: 2376074 - RNA, 19 nt, Artificial Sequence
  Description of Artificial Sequence: Synthetic oligonucleotide
gaucggccgggacccgggg

SEQ ID NO: 2376075 - RNA, 19 nt, Artificial Sequence
  Description of Artificial Sequence: Synthetic oligonucleotide
gcagaagcggaaacguacc

SEQ ID NO: 2376076 - RNA, 19 nt, Artificial Sequence
  Description of Artificial Sequence: Synthetic oligonucleotide
agugggccggcagcagggc

SEQ ID NO: 2376077 - RNA, 19 nt, Artificial Sequence
  Description of Artificial Sequence: Synthetic oligonucleotide
ugcgcguaccccgcggagc

SEQ ID NO: 2376078 - RNA, 19 nt, Artificial Sequence
  Description of Artificial Sequence: Synthetic oligonucleotide
uccaggugcuguucacguc

SEQ ID NO: 2376079 - RNA, 19 nt, Artificial Sequence
  Description of Artificial Sequence: Synthetic oligonucleotide
uugcgagcgcaggcgacag

SEQ ID NO: 2376080 - RNA, 19 nt, Artificial Sequence
  Description of Artificial Sequence: Synthetic oligonucleotide
caguggggcaaugcaguag

SEQ ID NO: 2376081 - RNA, 19 nt, Artificial Sequence
  Description of Artificial Sequence: Synthetic oligonucleotide
gugaagccagguggaauug

SEQ ID NO: 2376082 - RNA, 19 nt, Artificial Sequence
  Description of Artificial Sequence: Synthetic oligonucleotide
gcaucaguggcccgcgccc

SEQ ID NO: 2376083 - RNA, 19 nt, Artificial Sequence
  Description of Artificial Sequence: Synthetic oligonucleotide
cagggcgacacauggguaa

SEQ ID NO: 2376084 - RNA, 19 nt, Artificial Sequence
  Description of Artificial Sequence: Synthetic oligonucleotide
cacuaggagcucccaucag

SEQ ID NO: 2376085 - RNA, 19 nt, Artificial Sequence
  Description of Artificial Sequence: Synthetic oligonucleotide
agcgcucacgggcaccagu

SEQ ID NO: 2376086 - RNA, 19 nt, Artificial Sequence
  Description of Artificial Sequence: Synthetic oligonucleotide
uucgugggccuguuuccuc

SEQ ID NO: 2376087 - RNA, 19 nt, Artificial Sequence
  Description of Artificial Sequence: Synthetic oligonucleotide
gggaggagacuggagcgcg

SEQ ID NO: 2376088 - RNA, 19 nt, Artificial Sequence
  Description of Artificial Sequence: Synthetic oligonucleotide
caucaguggcccgcgcccg

SEQ ID NO: 2376089 - RNA, 19 nt, Artificial Sequence
  Description of Artificial Sequence: Synthetic oligonucleotide
uaccagcucaucggagcug

SEQ ID NO: 2376090 - RNA, 19 nt, Artificial Sequence
  Description of Artificial Sequence: Synthetic oligonucleotide
ccuucgugggccuguuucc

SEQ ID NO: 2376091 - RNA, 19 nt, Artificial Sequence
  Description of Artificial Sequence: Synthetic oligonucleotide
caggccgagagcgcucacg

SEQ ID NO: 2376092 - RNA, 19 nt, Artificial Sequence
  Description of Artificial Sequence: Synthetic oligonucleotide
agagcauccucagcccaga

SEQ ID NO: 2376093 - RNA, 19 nt, Artificial Sequence
  Description of Artificial Sequence: Synthetic oligonucleotide
ccaugaaggagacggcuuc

SEQ ID NO: 2376094 - RNA, 19 nt, Artificial Sequence
  Description of Artificial Sequence: Synthetic oligonucleotide
agagcgcucacgggcacca

SEQ ID NO: 2376095 - RNA, 19 nt, Artificial Sequence
  Description of Artificial Sequence: Synthetic oligonucleotide
ggcagagaggugguccacg

SEQ ID NO: 2376096 - RNA, 19 nt, Artificial Sequence
  Description of Artificial Sequence: Synthetic oligonucleotide
cugcagccucgauuucggg

SEQ ID NO: 2376097 - RNA, 19 nt, Artificial Sequence
  Description of Artificial Sequence: Synthetic oligonucleotide
ggguaaagguccagugugc

SEQ ID NO: 2376098 - RNA, 19 nt, Artificial Sequence
  Description of Artificial Sequence: Synthetic oligonucleotide
ccagguggaauuguuccag

SEQ ID NO: 2376099 - RNA, 19 nt, Artificial Sequence
  Description of Artificial Sequence: Synthetic oligonucleotide
cacgggcaccaguugcgag

SEQ ID NO: 2376100 - RNA, 19 nt, Artificial Sequence
  Description of Artificial Sequence: Synthetic oligonucleotide
ucacgggcaccaguugcga

SEQ ID NO: 2376101 - RNA, 19 nt, Artificial Sequence
  Description of Artificial Sequence: Synthetic oligonucleotide
cugccaccuaggccggagg

SEQ ID NO: 2376102 - RNA, 19 nt, Artificial Sequence
  Description of Artificial Sequence: Synthetic oligonucleotide
ggaccaucgcgaacggcgg

SEQ ID NO: 2376103 - RNA, 19 nt, Artificial Sequence
  Description of Artificial Sequence: Synthetic oligonucleotide
ggucccugcacgcgcugcg

SEQ ID NO: 2376104 - RNA, 19 nt, Artificial Sequence
  Description of Artificial Sequence: Synthetic oligonucleotide
caccaguugcgagcgcagg

SEQ ID NO: 2376105 - RNA, 19 nt, Artificial Sequence
  Description of Artificial Sequence: Synthetic oligonucleotide
cacauggguaaagguccag

SEQ ID NO: 2376106 - RNA, 19 nt, Artificial Sequence
  Description of Artificial Sequence: Synthetic oligonucleotide
uuccaggcagggcgacaca

SEQ ID NO: 2376107 - RNA, 19 nt, Artificial Sequence
  Description of Artificial Sequence: Synthetic oligonucleotide
ggcugaucggccgggaccc

SEQ ID NO: 2376108 - RNA, 19 nt, Artificial Sequence
  Description of Artificial Sequence: Synthetic oligonucleotide
aggucgugcggggagcgug

SEQ ID NO: 2376109 - RNA, 19 nt, Artificial Sequence
  Description of Artificial Sequence: Synthetic oligonucleotide
gccuucgugggccuguuuc

SEQ ID NO: 2376110 - RNA, 19 nt, Artificial Sequence
  Description of Artificial Sequence: Synthetic oligonucleotide
gagcgugcucggcggcacg

SEQ ID NO: 2376111 - RNA, 19 nt, Artificial Sequence
  Description of Artificial Sequence: Synthetic oligonucleotide
ccucagcccagacagccgc

SEQ ID NO: 2376112 - RNA, 19 nt, Artificial Sequence
  Description of Artificial Sequence: Synthetic oligonucleotide
ggcuggggagacuguggcg

SEQ ID NO: 2376113 - RNA, 19 nt, Artificial Sequence
  Description of Artificial Sequence: Synthetic oligonucleotide
gcgcguaccccgcggagcg

SEQ ID NO: 2376114 - RNA, 19 nt, Artificial Sequence
  Description of Artificial Sequence: Synthetic oligonucleotide
gcaguagggucuccaaguc

SEQ ID NO: 2376115 - RNA, 19 nt, Artificial Sequence
  Description of Artificial Sequence: Synthetic oligonucleotide
gagcgcagcgggaggagac

SEQ ID NO: 2376116 - RNA, 19 nt, Artificial Sequence
  Description of Artificial Sequence: Synthetic oligonucleotide
cgaacggcgggacugcggg

SEQ ID NO: 2376117 - RNA, 19 nt, Artificial Sequence
  Description of Artificial Sequence: Synthetic oligonucleotide
ggcuucauagcgagugggc

SEQ ID NO: 2376118 - RNA, 19 nt, Artificial Sequence
  Description of Artificial Sequence: Synthetic oligonucleotide
caagucccaguuccaucuc

SEQ ID NO: 2376119 - RNA, 19 nt, Artificial Sequence
  Description of Artificial Sequence: Synthetic oligonucleotide
ugcgcgcaucaguggcccg

SEQ ID NO: 2376120 - RNA, 19 nt, Artificial Sequence
  Description of Artificial Sequence: Synthetic oligonucleotide
acacauggguaaaggucca

SEQ ID NO: 2376121 - RNA, 19 nt, Artificial Sequence
  Description of Artificial Sequence: Synthetic oligonucleotide
accuaggccggaggcagug

SEQ ID NO: 2376122 - RNA, 19 nt, Artificial Sequence
  Description of Artificial Sequence: Synthetic oligonucleotide
agcgagugggccggcagca

SEQ ID NO: 2376123 - RNA, 19 nt, Artificial Sequence
  Description of Artificial Sequence: Synthetic oligonucleotide
acguaccagcucaucggag

SEQ ID NO: 2376124 - RNA, 19 nt, Artificial Sequence
  Description of Artificial Sequence: Synthetic oligonucleotide
cugugacgcugcucagcag

SEQ ID NO: 2376125 - RNA, 19 nt, Artificial Sequence
  Description of Artificial Sequence: Synthetic oligonucleotide
cugaucggccgggacccgg

SEQ ID NO: 2376126 - RNA, 19 nt, Artificial Sequence
  Description of Artificial Sequence: Synthetic oligonucleotide
guaggcuagccaggcugag

SEQ ID NO: 2376127 - RNA, 19 nt, Artificial Sequence
  Description of Artificial Sequence: Synthetic oligonucleotide
guugcgagcgcaggcgaca

SEQ ID NO: 2376128 - RNA, 19 nt, Artificial Sequence
  Description of Artificial Sequence: Synthetic oligonucleotide
cugucaacacuaggagcuc

SEQ ID NO: 2376129 - RNA, 19 nt, Artificial Sequence
  Description of Artificial Sequence: Synthetic oligonucleotide
agacuggagcgcgggaccu

SEQ ID NO: 2376130 - RNA, 19 nt, Artificial Sequence
  Description of Artificial Sequence: Synthetic oligonucleotide
gcggggagcgugcucggcg

SEQ ID NO: 2376131 - RNA, 19 nt, Artificial Sequence
  Description of Artificial Sequence: Synthetic oligonucleotide
ggccuguuuccucacccac

SEQ ID NO: 2376132 - RNA, 19 nt, Artificial Sequence
  Description of Artificial Sequence: Synthetic oligonucleotide
gugguccacgguccuccag

SEQ ID NO: 2376133 - RNA, 19 nt, Artificial Sequence
  Description of Artificial Sequence: Synthetic oligonucleotide
gagagcgcucacgggcacc

SEQ ID NO: 2376134 - RNA, 19 nt, Artificial Sequence
  Description of Artificial Sequence: Synthetic oligonucleotide
aucggagcuguggcccagg

SEQ ID NO: 2376135 - RNA, 19 nt, Artificial Sequence
  Description of Artificial Sequence: Synthetic oligonucleotide
uggggagacuguggcggug

SEQ ID NO: 2376136 - RNA, 19 nt, Artificial Sequence
  Description of Artificial Sequence: Synthetic oligonucleotide
cagcgggaggagacuggag

SEQ ID NO: 2376137 - RNA, 19 nt, Artificial Sequence
  Description of Artificial Sequence: Synthetic oligonucleotide
ucgcgaacggcgggacugc

SEQ ID NO: 2376138 - RNA, 19 nt, Artificial Sequence
  Description of Artificial Sequence: Synthetic oligonucleotide
gacuguggcggugguggca

SEQ ID NO: 2376139 - RNA, 19 nt, Artificial Sequence
  Description of Artificial Sequence: Synthetic oligonucleotide
ccaagucccaguuccaucu

SEQ ID NO: 2376140 - RNA, 19 nt, Artificial Sequence
  Description of Artificial Sequence: Synthetic oligonucleotide
cuccaggugcuguucacgu

SEQ ID NO: 2376141 - RNA, 19 nt, Artificial Sequence
  Description of Artificial Sequence: Synthetic oligonucleotide
cgugcggggagcgugcucg

SEQ ID NO: 2376142 - RNA, 19 nt, Artificial Sequence
  Description of Artificial Sequence: Synthetic oligonucleotide
caguugcgagcgcaggcga

SEQ ID NO: 2376143 - RNA, 19 nt, Artificial Sequence
  Description of Artificial Sequence: Synthetic oligonucleotide
cugcgcguaccccgcggag

SEQ ID NO: 2376144 - RNA, 19 nt, Artificial Sequence
  Description of Artificial Sequence: Synthetic oligonucleotide
ggaaacguaccagcucauc

SEQ ID NO: 2376145 - RNA, 19 nt, Artificial Sequence
  Description of Artificial Sequence: Synthetic oligonucleotide
ggagacggcuucauagcga

SEQ ID NO: 2376146 - RNA, 19 nt, Artificial Sequence
  Description of Artificial Sequence: Synthetic oligonucleotide
gcaacuaggguuggccaca

SEQ ID NO: 2376147 - RNA, 19 nt, Artificial Sequence
  Description of Artificial Sequence: Synthetic oligonucleotide
caggcgacagcugcgcgca

SEQ ID NO: 2376148 - RNA, 19 nt, Artificial Sequence
  Description of Artificial Sequence: Synthetic oligonucleotide
ggcaaugcaguagggucuc

SEQ ID NO: 2376149 - RNA, 19 nt, Artificial Sequence
  Description of Artificial Sequence: Synthetic oligonucleotide
cuagugaagccagguggaa

SEQ ID NO: 2376150 - RNA, 19 nt, Artificial Sequence
  Description of Artificial Sequence: Synthetic oligonucleotide
auuucgggcugagguuccu

SEQ ID NO: 2376151 - RNA, 19 nt, Artificial Sequence
  Description of Artificial Sequence: Synthetic oligonucleotide
guccacgguccuccaggug

SEQ ID NO: 2376152 - RNA, 19 nt, Artificial Sequence
  Description of Artificial Sequence: Synthetic oligonucleotide
gacuggagcgcgggaccug

SEQ ID NO: 2376153 - RNA, 19 nt, Artificial Sequence
  Description of Artificial Sequence: Synthetic oligonucleotide
caggacucuuucgcugcac

SEQ ID NO: 2376154 - RNA, 19 nt, Artificial Sequence
  Description of Artificial Sequence: Synthetic oligonucleotide
cccaucagccuucgugggc

SEQ ID NO: 2376155 - RNA, 19 nt, Artificial Sequence
  Description of Artificial Sequence: Synthetic oligonucleotide
gcgggacugcgggacaugg

SEQ ID NO: 2376156 - RNA, 19 nt, Artificial Sequence
  Description of Artificial Sequence: Synthetic oligonucleotide
gaagccagguggaauuguu

SEQ ID NO: 2376157 - RNA, 19 nt, Artificial Sequence
  Description of Artificial Sequence: Synthetic oligonucleotide
ggcaccaguugcgagcgca

SEQ ID NO: 2376158 - RNA, 19 nt, Artificial Sequence
  Description of Artificial Sequence: Synthetic oligonucleotide
ugcgggacaugggguccag

SEQ ID NO: 2376159 - RNA, 19 nt, Artificial Sequence
  Description of Artificial Sequence: Synthetic oligonucleotide
ugcacgcgcugcgcguacc

SEQ ID NO: 2376160 - RNA, 19 nt, Artificial Sequence
  Description of Artificial Sequence: Synthetic oligonucleotide
ggaggagacuggagcgcgg

SEQ ID NO: 2376161 - RNA, 19 nt, Artificial Sequence
  Description of Artificial Sequence: Synthetic oligonucleotide
gcugcagaagcggaaacgu

SEQ ID NO: 2376162 - RNA, 19 nt, Artificial Sequence
  Description of Artificial Sequence: Synthetic oligonucleotide
agcgcgggaccuggcggcg

SEQ ID NO: 2376163 - RNA, 19 nt, Artificial Sequence
  Description of Artificial Sequence: Synthetic oligonucleotide
ucauagcgagugggccggc

SEQ ID NO: 2376164 - RNA, 19 nt, Artificial Sequence
  Description of Artificial Sequence: Synthetic oligonucleotide
agggcgacacauggguaaa

SEQ ID NO: 2376165 - RNA, 19 nt, Artificial Sequence
  Description of Artificial Sequence: Synthetic oligonucleotide
gugcgaaggcuuggagagc

SEQ ID NO: 2376166 - RNA, 19 nt, Artificial Sequence
  Description of Artificial Sequence: Synthetic oligonucleotide
ccaggcugaggucgugcgg

SEQ ID NO: 2376167 - RNA, 19 nt, Artificial Sequence
  Description of Artificial Sequence: Synthetic oligonucleotide
gugcggggagcgugcucgg

SEQ ID NO: 2376168 - RNA, 19 nt, Artificial Sequence
  Description of Artificial Sequence: Synthetic oligonucleotide
gaacggcgggacugcggga

SEQ ID NO: 2376169 - RNA, 19 nt, Artificial Sequence
  Description of Artificial Sequence: Synthetic oligonucleotide
ggccgagagcgcucacggg

SEQ ID NO: 2376170 - RNA, 19 nt, Artificial Sequence
  Description of Artificial Sequence: Synthetic oligonucleotide
cuggagcgcgggaccuggc

SEQ ID NO: 2376171 - RNA, 19 nt, Artificial Sequence
  Description of Artificial Sequence: Synthetic oligonucleotide
cagccucgauuucgggcug

SEQ ID NO: 2376172 - RNA, 19 nt, Artificial Sequence
  Description of Artificial Sequence: Synthetic oligonucleotide
cgauuucgggcugagguuc

SEQ ID NO: 2376173 - RNA, 19 nt, Artificial Sequence
  Description of Artificial Sequence: Synthetic oligonucleotide
cuguggcggugguggcagg

SEQ ID NO: 2376174 - RNA, 19 nt, Artificial Sequence
  Description of Artificial Sequence: Synthetic oligonucleotide
agcuguggcccaggccgag

SEQ ID NO: 2376175 - RNA, 19 nt, Artificial Sequence
  Description of Artificial Sequence: Synthetic oligonucleotide
agcgugcucggcggcacga

SEQ ID NO: 2376176 - RNA, 19 nt, Artificial Sequence
  Description of Artificial Sequence: Synthetic oligonucleotide
cacgcgcugcgcguacccc

SEQ ID NO: 2376177 - RNA, 19 nt, Artificial Sequence
  Description of Artificial Sequence: Synthetic oligonucleotide
cucagcccagacagccgca

SEQ ID NO: 2376178 - RNA, 19 nt, Artificial Sequence
  Description of Artificial Sequence: Synthetic oligonucleotide
gcgacacauggguaaaggu

SEQ ID NO: 2376179 - RNA, 19 nt, Artificial Sequence
  Description of Artificial Sequence: Synthetic oligonucleotide
ugcggggagcgugcucggc

SEQ ID NO: 2376180 - RNA, 19 nt, Artificial Sequence
  Description of Artificial Sequence: Synthetic oligonucleotide
ucgugcggggagcgugcuc

SEQ ID NO: 2376181 - RNA, 19 nt, Artificial Sequence
  Description of Artificial Sequence: Synthetic oligonucleotide
acggcgggacugcgggaca

SEQ ID NO: 2376182 - RNA, 19 nt, Artificial Sequence
  Description of Artificial Sequence: Synthetic oligonucleotide
ccagugugcgaaggcuugg

SEQ ID NO: 2376183 - RNA, 19 nt, Artificial Sequence
  Description of Artificial Sequence: Synthetic oligonucleotide
gucugucacucaccggccu

SEQ ID NO: 2376184 - RNA, 19 nt, Artificial Sequence
  Description of Artificial Sequence: Synthetic oligonucleotide
cagugugcgaaggcuugga

SEQ ID NO: 2376185 - RNA, 19 nt, Artificial Sequence
  Description of Artificial Sequence: Synthetic oligonucleotide
gucccugcacgcgcugcgc

SEQ ID NO: 2376186 - RNA, 19 nt, Artificial Sequence
  Description of Artificial Sequence: Synthetic oligonucleotide
cgcaucaguggcccgcgcc

SEQ ID NO: 2376187 - RNA, 19 nt, Artificial Sequence
  Description of Artificial Sequence: Synthetic oligonucleotide
gggccuguuuccucaccca

SEQ ID NO: 2376188 - RNA, 19 nt, Artificial Sequence
  Description of Artificial Sequence: Synthetic oligonucleotide
caacacuaggagcucccau

SEQ ID NO: 2376189 - RNA, 19 nt, Artificial Sequence
  Description of Artificial Sequence: Synthetic oligonucleotide
gcaccaguugcgagcgcag

SEQ ID NO: 2376190 - RNA, 19 nt, Artificial Sequence
  Description of Artificial Sequence: Synthetic oligonucleotide
cugcacgcgcugcgcguac

SEQ ID NO: 2376191 - RNA, 19 nt, Artificial Sequence
  Description of Artificial Sequence: Synthetic oligonucleotide
cggcuucauagcgaguggg

SEQ ID NO: 2376192 - RNA, 19 nt, Artificial Sequence
  Description of Artificial Sequence: Synthetic oligonucleotide
gguccagugugcgaaggcu

SEQ ID NO: 2376193 - RNA, 19 nt, Artificial Sequence
  Description of Artificial Sequence: Synthetic oligonucleotide
gggcaaugcaguagggucu

SEQ ID NO: 2376194 - RNA, 19 nt, Artificial Sequence
  Description of Artificial Sequence: Synthetic oligonucleotide
ggucgugcggggagcgugc

SEQ ID NO: 2376195 - RNA, 19 nt, Artificial Sequence
  Description of Artificial Sequence: Synthetic oligonucleotide
ccggcgcccaguaggcuag

SEQ ID NO: 2376196 - RNA, 19 nt, Artificial Sequence
  Description of Artificial Sequence: Synthetic oligonucleotide
ggggcgaccgcagggcccc

SEQ ID NO: 2376197 - RNA, 19 nt, Artificial Sequence
  Description of Artificial Sequence: Synthetic oligonucleotide
cauagcgagugggccggca

SEQ ID NO: 2376198 - RNA, 19 nt, Artificial Sequence
  Description of Artificial Sequence: Synthetic oligonucleotide
agccucgauuucgggcuga

SEQ ID NO: 2376199 - RNA, 19 nt, Artificial Sequence
  Description of Artificial Sequence: Synthetic oligonucleotide
gcgaacggcgggacugcgg

SEQ ID NO: 2376200 - RNA, 19 nt, Artificial Sequence
  Description of Artificial Sequence: Synthetic oligonucleotide
gcacgcgcugcgcguaccc

SEQ ID NO: 2376201 - RNA, 19 nt, Artificial Sequence
  Description of Artificial Sequence: Synthetic oligonucleotide
ggcggugguggcaggacuc

SEQ ID NO: 2376202 - RNA, 19 nt, Artificial Sequence
  Description of Artificial Sequence: Synthetic oligonucleotide
gggcgacacauggguaaag

SEQ ID NO: 2376203 - RNA, 19 nt, Artificial Sequence
  Description of Artificial Sequence: Synthetic oligonucleotide
aggacuggcgagggaccau

SEQ ID NO: 2376204 - RNA, 19 nt, Artificial Sequence
  Description of Artificial Sequence: Synthetic oligonucleotide
gcgcccaguaggcuagcca

SEQ ID NO: 2376205 - RNA, 19 nt, Artificial Sequence
  Description of Artificial Sequence: Synthetic oligonucleotide
cgggcaccaguugcgagcg

SEQ ID NO: 2376206 - RNA, 19 nt, Artificial Sequence
  Description of Artificial Sequence: Synthetic oligonucleotide
guaccccgcggagcgcagc

SEQ ID NO: 2376207 - RNA, 19 nt, Artificial Sequence
  Description of Artificial Sequence: Synthetic oligonucleotide
cuucgugggccuguuuccu

SEQ ID NO: 2376208 - RNA, 19 nt, Artificial Sequence
  Description of Artificial Sequence: Synthetic oligonucleotide
ucaccggccuggggccuga

SEQ ID NO: 2376209 - RNA, 19 nt, Artificial Sequence
  Description of Artificial Sequence: Synthetic oligonucleotide
gcgagggaccaucgcgaac

SEQ ID NO: 2376210 - RNA, 19 nt, Artificial Sequence
  Description of Artificial Sequence: Synthetic oligonucleotide
acucaccggccuggggccu

SEQ ID NO: 2376211 - RNA, 19 nt, Artificial Sequence
  Description of Artificial Sequence: Synthetic oligonucleotide
ggcuagccaggcugagguc

SEQ ID NO: 2376212 - RNA, 19 nt, Artificial Sequence
  Description of Artificial Sequence: Synthetic oligonucleotide
ccgagagcgcucacgggca

SEQ ID NO: 2376213 - RNA, 19 nt, Artificial Sequence
  Description of Artificial Sequence: Synthetic oligonucleotide
agacggcuucauagcgagu

SEQ ID NO: 2376214 - RNA, 19 nt, Artificial Sequence
  Description of Artificial Sequence: Synthetic oligonucleotide
gccugaggucugcagccuc

SEQ ID NO: 2376215 - RNA, 19 nt, Artificial Sequence
  Description of Artificial Sequence: Synthetic oligonucleotide
gcaguggggcaaugcagua

SEQ ID NO: 2376216 - RNA, 19 nt, Artificial Sequence
  Description of Artificial Sequence: Synthetic oligonucleotide
gcagcgggaggagacugga

SEQ ID NO: 2376217 - RNA, 19 nt, Artificial Sequence
  Description of Artificial Sequence: Synthetic oligonucleotide
ggcgagggaccaucgcgaa

SEQ ID NO: 2376218 - RNA, 19 nt, Artificial Sequence
  Description of Artificial Sequence: Synthetic oligonucleotide
gcgccaggacuggcgaggg

SEQ ID NO: 2376219 - RNA, 19 nt, Artificial Sequence
  Description of Artificial Sequence: Synthetic oligonucleotide
ccucgauuucgggcugagg

SEQ ID NO: 2376220 - RNA, 19 nt, Artificial Sequence
  Description of Artificial Sequence: Synthetic oligonucleotide
gcgcgcaucaguggcccgc

SEQ ID NO: 2376221 - RNA, 19 nt, Artificial Sequence
  Description of Artificial Sequence: Synthetic oligonucleotide
ggggagcgugcucggcggc

SEQ ID NO: 2376222 - RNA, 19 nt, Artificial Sequence
  Description of Artificial Sequence: Synthetic oligonucleotide
ccgcugcagaagcggaaac

SEQ ID NO: 2376223 - RNA, 19 nt, Artificial Sequence
  Description of Artificial Sequence: Synthetic oligonucleotide
guccagugugcgaaggcuu

SEQ ID NO: 2376224 - RNA, 19 nt, Artificial Sequence
  Description of Artificial Sequence: Synthetic oligonucleotide
ggugguccacgguccucca

SEQ ID NO: 2376225 - RNA, 19 nt, Artificial Sequence
  Description of Artificial Sequence: Synthetic oligonucleotide
gcgagcgcaggcgacagcu

SEQ ID NO: 2376226 - RNA, 19 nt, Artificial Sequence
  Description of Artificial Sequence: Synthetic oligonucleotide
gccucgauuucgggcugag

SEQ ID NO: 2376227 - RNA, 19 nt, Artificial Sequence
  Description of Artificial Sequence: Synthetic oligonucleotide
agccuucgugggccuguuu

SEQ ID NO: 2376228 - RNA, 19 nt, Artificial Sequence
  Description of Artificial Sequence: Synthetic oligonucleotide
cagagaggugguccacggu

SEQ ID NO: 2376229 - RNA, 19 nt, Artificial Sequence
  Description of Artificial Sequence: Synthetic oligonucleotide
gcaaugcaguagggucucc

SEQ ID NO: 2376230 - RNA, 19 nt, Artificial Sequence
  Description of Artificial Sequence: Synthetic oligonucleotide
gguccacgguccuccaggu

SEQ ID NO: 2376231 - RNA, 19 nt, Artificial Sequence
  Description of Artificial Sequence: Synthetic oligonucleotide
gcacaaaugcgcagugcgu

SEQ ID NO: 2376232 - RNA, 19 nt, Artificial Sequence
  Description of Artificial Sequence: Synthetic oligonucleotide
cgugcucggcggcacgagc

SEQ ID NO: 2376233 - RNA, 19 nt, Artificial Sequence
  Description of Artificial Sequence: Synthetic oligonucleotide
cuccaagucccaguuccau

SEQ ID NO: 2376234 - RNA, 19 nt, Artificial Sequence
  Description of Artificial Sequence: Synthetic oligonucleotide
gcgaccgcagggccccggc

SEQ ID NO: 2376235 - RNA, 19 nt, Artificial Sequence
  Description of Artificial Sequence: Synthetic oligonucleotide
cugcgggacauggggucca

SEQ ID NO: 2376236 - RNA, 19 nt, Artificial Sequence
  Description of Artificial Sequence: Synthetic oligonucleotide
ggagcgcagcgggaggaga

SEQ ID NO: 2376237 - RNA, 19 nt, Artificial Sequence
  Description of Artificial Sequence: Synthetic oligonucleotide
cacgguccuccaggugcug

SEQ ID NO: 2376238 - RNA, 19 nt, Artificial Sequence
  Description of Artificial Sequence: Synthetic oligonucleotide
cgggaggagacuggagcgc

SEQ ID NO: 2376239 - RNA, 19 nt, Artificial Sequence
  Description of Artificial Sequence: Synthetic oligonucleotide
gcugaucggccgggacccg

SEQ ID NO: 2376240 - RNA, 19 nt, Artificial Sequence
  Description of Artificial Sequence: Synthetic oligonucleotide
ggccggaggcaguggggca

SEQ ID NO: 2376241 - RNA, 19 nt, Artificial Sequence
  Description of Artificial Sequence: Synthetic oligonucleotide
ccaucgcgaacggcgggac

SEQ ID NO: 2376242 - RNA, 19 nt, Artificial Sequence
  Description of Artificial Sequence: Synthetic oligonucleotide
cucggcggcacgagccgcu

SEQ ID NO: 2376243 - RNA, 19 nt, Artificial Sequence
  Description of Artificial Sequence: Synthetic oligonucleotide
cgcgcugcgcguaccccgc

SEQ ID NO: 2376244 - RNA, 19 nt, Artificial Sequence
  Description of Artificial Sequence: Synthetic oligonucleotide
ccggccuggggccugaggu

SEQ ID NO: 2376245 - RNA, 19 nt, Artificial Sequence
  Description of Artificial Sequence: Synthetic oligonucleotide
ggacugcgggacauggggu

SEQ ID NO: 2376246 - RNA, 19 nt, Artificial Sequence
  Description of Artificial Sequence: Synthetic oligonucleotide
gcgagugggccggcagcag

SEQ ID NO: 2376247 - RNA, 19 nt, Artificial Sequence
  Description of Artificial Sequence: Synthetic oligonucleotide
cgcaggcgacagcugcgcg

SEQ ID NO: 2376248 - RNA, 19 nt, Artificial Sequence
  Description of Artificial Sequence: Synthetic oligonucleotide
gccccggcgcccaguaggc

SEQ ID NO: 2376249 - RNA, 19 nt, Artificial Sequence
  Description of Artificial Sequence: Synthetic oligonucleotide
caucgcgaacggcgggacu

SEQ ID NO: 2376250 - RNA, 19 nt, Artificial Sequence
  Description of Artificial Sequence: Synthetic oligonucleotide
gcugcucagcagggcaaga

SEQ ID NO: 2376251 - RNA, 19 nt, Artificial Sequence
  Description of Artificial Sequence: Synthetic oligonucleotide
gcguaccccgcggagcgca

SEQ ID NO: 2376252 - RNA, 19 nt, Artificial Sequence
  Description of Artificial Sequence: Synthetic oligonucleotide
gcgcugcgcguaccccgcg

SEQ ID NO: 2376253 - RNA, 19 nt, Artificial Sequence
  Description of Artificial Sequence: Synthetic oligonucleotide
ggcgggacugcgggacaug

SEQ ID NO: 2376254 - RNA, 19 nt, Artificial Sequence
  Description of Artificial Sequence: Synthetic oligonucleotide
gcggagcgcagcgggagga

SEQ ID NO: 2376255 - RNA, 19 nt, Artificial Sequence
  Description of Artificial Sequence: Synthetic oligonucleotide
gcucggcggcacgagccgc

SEQ ID NO: 2376256 - RNA, 19 nt, Artificial Sequence
  Description of Artificial Sequence: Synthetic oligonucleotide
ggccuggggccugaggucu

SEQ ID NO: 2376257 - RNA, 19 nt, Artificial Sequence
  Description of Artificial Sequence: Synthetic oligonucleotide
ggcgaccgcagggccccgg

SEQ ID NO: 2376258 - RNA, 19 nt, Artificial Sequence
  Description of Artificial Sequence: Synthetic oligonucleotide
gcggcacgagccgcugcag

SEQ ID NO: 2376259 - RNA, 19 nt, Artificial Sequence
  Description of Artificial Sequence: Synthetic oligonucleotide
gccggaggcaguggggcaa

SEQ ID NO: 2376260 - RNA, 19 nt, Artificial Sequence
  Description of Artificial Sequence: Synthetic oligonucleotide
cgcugcgcguaccccgcgg

SEQ ID NO: 2376261 - RNA, 19 nt, Artificial Sequence
  Description of Artificial Sequence: Synthetic oligonucleotide
gcgcaucaguggcccgcgc

SEQ ID NO: 2376262 - RNA, 19 nt, Artificial Sequence
  Description of Artificial Sequence: Synthetic oligonucleotide
cgagcgcaggcgacagcug

SEQ ID NO: 2376263 - RNA, 19 nt, Artificial Sequence
  Description of Artificial Sequence: Synthetic oligonucleotide
gaggucgugcggggagcgu

SEQ ID NO: 2376264 - RNA, 19 nt, Artificial Sequence
  Description of Artificial Sequence: Synthetic oligonucleotide
cgcucacgggcaccaguug

SEQ ID NO: 2376265 - RNA, 19 nt, Artificial Sequence
  Description of Artificial Sequence: Synthetic oligonucleotide
gggcaccaguugcgagcgc

SEQ ID NO: 2376266 - RNA, 19 nt, Artificial Sequence
  Description of Artificial Sequence: Synthetic oligonucleotide
cgcgggaccuggcggcggg

SEQ ID NO: 2376267 - RNA, 19 nt, Artificial Sequence
  Description of Artificial Sequence: Synthetic oligonucleotide
cgagagcgcucacgggcac

SEQ ID NO: 2376268 - RNA, 19 nt, Artificial Sequence
  Description of Artificial Sequence: Synthetic oligonucleotide
cgaccgcagggccccggcg

SEQ ID NO: 2376269 - RNA, 19 nt, Artificial Sequence
  Description of Artificial Sequence: Synthetic oligonucleotide
caccuaggccggaggcagu

SEQ ID NO: 2376270 - RNA, 19 nt, Artificial Sequence
  Description of Artificial Sequence: Synthetic oligonucleotide
cguaccccgcggagcgcag

SEQ ID NO: 2376271 - RNA, 19 nt, Artificial Sequence
  Description of Artificial Sequence: Synthetic oligonucleotide
gggaagcuucugugacgcu

SEQ ID NO: 2376272 - RNA, 19 nt, Artificial Sequence
  Description of Artificial Sequence: Synthetic oligonucleotide
gcgcgggaccuggcggcgg

SEQ ID NO: 2376273 - RNA, 19 nt, Artificial Sequence
  Description of Artificial Sequence: Synthetic oligonucleotide
gcgggaccuggcggcgggg

SEQ ID NO: 2376274 - RNA, 19 nt, Artificial Sequence
  Description of Artificial Sequence: Synthetic oligonucleotide
ggcccaggccgagagcgcu

SEQ ID NO: 2376275 - RNA, 19 nt, Artificial Sequence
  Description of Artificial Sequence: Synthetic oligonucleotide
ccacgguccuccaggugcu

SEQ ID NO: 2376276 - RNA, 19 nt, Artificial Sequence
  Description of Artificial Sequence: Synthetic oligonucleotide
cgcgaacggcgggacugcg

SEQ ID NO: 2376277 - RNA, 19 nt, Artificial Sequence
  Description of Artificial Sequence: Synthetic oligonucleotide
gucgugcggggagcgugcu

SEQ ID NO: 2376278 - RNA, 19 nt, Artificial Sequence
  Description of Artificial Sequence: Synthetic oligonucleotide
cccaggccgagagcgcuca

SEQ ID NO: 2376279 - RNA, 19 nt, Artificial Sequence
  Description of Artificial Sequence: Synthetic oligonucleotide
ccaguaggcuagccaggcu

SEQ ID NO: 2376280 - RNA, 19 nt, Artificial Sequence
  Description of Artificial Sequence: Synthetic oligonucleotide
cgcccggcugcuccggguc

SEQ ID NO: 2376281 - RNA, 19 nt, Artificial Sequence
  Description of Artificial Sequence: Synthetic oligonucleotide
cgcugcacaaaugcgcagu

SEQ ID NO: 2376282 - RNA, 19 nt, Artificial Sequence
  Description of Artificial Sequence: Synthetic oligonucleotide
gcggugguggcaggacucu

SEQ ID NO: 2376283 - RNA, 19 nt, Artificial Sequence
  Description of Artificial Sequence: Synthetic oligonucleotide
gcgcucacgggcaccaguu

SEQ ID NO: 2376284 - RNA, 19 nt, Artificial Sequence
  Description of Artificial Sequence: Synthetic oligonucleotide
caguggcccgcgcccggcu

SEQ ID NO: 2376285 - RNA, 19 nt, Artificial Sequence
  Description of Artificial Sequence: Synthetic oligonucleotide
ccugcacgcgcugcgcgua

SEQ ID NO: 2376286 - RNA, 19 nt, Artificial Sequence
  Description of Artificial Sequence: Synthetic oligonucleotide
cgcgcccggcugcuccggg

SEQ ID NO: 2376287 - RNA, 19 nt, Artificial Sequence
  Description of Artificial Sequence: Synthetic oligonucleotide
cccugcacgcgcugcgcgu

SEQ ID NO: 2376288 - RNA, 19 nt, Artificial Sequence
  Description of Artificial Sequence: Synthetic oligonucleotide
gggcgaccgcagggccccg

SEQ ID NO: 2376289 - RNA, 19 nt, Artificial Sequence
  Description of Artificial Sequence: Synthetic oligonucleotide
cgcguaccccgcggagcgc

SEQ ID NO: 2376290 - RNA, 19 nt, Artificial Sequence
  Description of Artificial Sequence: Synthetic oligonucleotide
cagccuucgugggccuguu

SEQ ID NO: 2376291 - RNA, 19 nt, Artificial Sequence
  Description of Artificial Sequence: Synthetic oligonucleotide
cagggccccggcgcccagu

SEQ ID NO: 2376292 - RNA, 19 nt, Artificial Sequence
  Description of Artificial Sequence: Synthetic oligonucleotide
cggcgcccaguaggcuagc

SEQ ID NO: 2376293 - RNA, 19 nt, Artificial Sequence
  Description of Artificial Sequence: Synthetic oligonucleotide
ccggaggcaguggggcaau

SEQ ID NO: 2376294 - RNA, 19 nt, Artificial Sequence
  Description of Artificial Sequence: Synthetic oligonucleotide
ccccaggcagguggccggu

SEQ ID NO: 2376295 - RNA, 19 nt, Artificial Sequence
  Description of Artificial Sequence: Synthetic oligonucleotide
ccccggcgcccaguaggcu

SEQ ID NO: 2376296 - RNA, 19 nt, Artificial Sequence
  Description of Artificial Sequence: Synthetic oligonucleotide
cccaggcagguggccgguu

SEQ ID NO: 2376297 - RNA, 19 nt, Artificial Sequence
  Description of Artificial Sequence: Synthetic oligonucleotide
uguaaucuggguaucagcg

SEQ ID NO: 2376298 - RNA, 19 nt, Artificial Sequence
  Description of Artificial Sequence: Synthetic oligonucleotide
auuccgagucuccagaucc

SEQ ID NO: 2376299 - RNA, 19 nt, Artificial Sequence
  Description of Artificial Sequence: Synthetic oligonucleotide
auucuagaaaacucuacac

SEQ ID NO: 2376300 - RNA, 19 nt, Artificial Sequence
  Description of Artificial Sequence: Synthetic oligonucleotide
uagaaaacucuacacagug

SEQ ID NO: 2376301 - RNA, 19 nt, Artificial Sequence
  Description of Artificial Sequence: Synthetic oligonucleotide
aacacguagaaguguaauc

SEQ ID NO: 2376302 - RNA, 19 nt, Artificial Sequence
  Description of Artificial Sequence: Synthetic oligonucleotide
aaagcucagaggcagaggu

SEQ ID NO: 2376303 - RNA, 19 nt, Artificial Sequence
  Description of Artificial Sequence: Synthetic oligonucleotide
gaaaacucuacacagugca

SEQ ID NO: 2376304 - RNA, 19 nt, Artificial Sequence
  Description of Artificial Sequence: Synthetic oligonucleotide
aacucacucagcucgaaca

SEQ ID NO: 2376305 - RNA, 19 nt, Artificial Sequence
  Description of Artificial Sequence: Synthetic oligonucleotide
gauucuagaaaacucuaca

SEQ ID NO: 2376306 - RNA, 19 nt, Artificial Sequence
  Description of Artificial Sequence: Synthetic oligonucleotide
uugagauuucucccgagcc

SEQ ID NO: 2376307 - RNA, 19 nt, Artificial Sequence
  Description of Artificial Sequence: Synthetic oligonucleotide
aacucuacacagugcaaag

SEQ ID NO: 2376308 - RNA, 19 nt, Artificial Sequence
  Description of Artificial Sequence: Synthetic oligonucleotide
acgcaacucacucagcucg

SEQ ID NO: 2376309 - RNA, 19 nt, Artificial Sequence
  Description of Artificial Sequence: Synthetic oligonucleotide
uucuaaacacguagaagug

SEQ ID NO: 2376310 - RNA, 19 nt, Artificial Sequence
  Description of Artificial Sequence: Synthetic oligonucleotide
acuaucugcccacugcccg

SEQ ID NO: 2376311 - RNA, 19 nt, Artificial Sequence
  Description of Artificial Sequence: Synthetic oligonucleotide
cauggauucuagaaaacuc

SEQ ID NO: 2376312 - RNA, 19 nt, Artificial Sequence
  Description of Artificial Sequence: Synthetic oligonucleotide
ucacucagcucgaacagcc

SEQ ID NO: 2376313 - RNA, 19 nt, Artificial Sequence
  Description of Artificial Sequence: Synthetic oligonucleotide
ugucccugagcucugauuc

SEQ ID NO: 2376314 - RNA, 19 nt, Artificial Sequence
  Description of Artificial Sequence: Synthetic oligonucleotide
caucuugagauuucucccg

SEQ ID NO: 2376315 - RNA, 19 nt, Artificial Sequence
  Description of Artificial Sequence: Synthetic oligonucleotide
gacuagugaauucuccacc

SEQ ID NO: 2376316 - RNA, 19 nt, Artificial Sequence
  Description of Artificial Sequence: Synthetic oligonucleotide
uagaaguguaaucugggua

SEQ ID NO: 2376317 - RNA, 19 nt, Artificial Sequence
  Description of Artificial Sequence: Synthetic oligonucleotide
uccaacuccgcauuccgag

SEQ ID NO: 2376318 - RNA, 19 nt, Artificial Sequence
  Description of Artificial Sequence: Synthetic oligonucleotide
acuagugaauucuccacca

SEQ ID NO: 2376319 - RNA, 19 nt, Artificial Sequence
  Description of Artificial Sequence: Synthetic oligonucleotide
ugcagcgcaaagaacucag

SEQ ID NO: 2376320 - RNA, 19 nt, Artificial Sequence
  Description of Artificial Sequence: Synthetic oligonucleotide
ucgacuaucugcccacugc

SEQ ID NO: 2376321 - RNA, 19 nt, Artificial Sequence
  Description of Artificial Sequence: Synthetic oligonucleotide
aagucuggaucuccugguc

SEQ ID NO: 2376322 - RNA, 19 nt, Artificial Sequence
  Description of Artificial Sequence: Synthetic oligonucleotide
acacguagaaguguaaucu

SEQ ID NO: 2376323 - RNA, 19 nt, Artificial Sequence
  Description of Artificial Sequence: Synthetic oligonucleotide
aaagccuaggccauagaca

SEQ ID NO: 2376324 - RNA, 19 nt, Artificial Sequence
  Description of Artificial Sequence: Synthetic oligonucleotide
guaucagcgccacccaugg

SEQ ID NO: 2376325 - RNA, 19 nt, Artificial Sequence
  Description of Artificial Sequence: Synthetic oligonucleotide
ucuaaacacguagaagugu

SEQ ID NO: 2376326 - RNA, 19 nt, Artificial Sequence
  Description of Artificial Sequence: Synthetic oligonucleotide
caaagccuaggccauagac

SEQ ID NO: 2376327 - RNA, 19 nt, Artificial Sequence
  Description of Artificial Sequence: Synthetic oligonucleotide
aaacucuacacagugcaaa

SEQ ID NO: 2376328 - RNA, 19 nt, Artificial Sequence
  Description of Artificial Sequence: Synthetic oligonucleotide
agugaauucuccaccaucu

SEQ ID NO: 2376329 - RNA, 19 nt, Artificial Sequence
  Description of Artificial Sequence: Synthetic oligonucleotide
agcgcaaagaacucagccu

SEQ ID NO: 2376330 - RNA, 19 nt, Artificial Sequence
  Description of Artificial Sequence: Synthetic oligonucleotide
aggacuagugaauucucca

SEQ ID NO: 2376331 - RNA, 19 nt, Artificial Sequence
  Description of Artificial Sequence: Synthetic oligonucleotide
gacacaagggcuagggcag

SEQ ID NO: 2376332 - RNA, 19 nt, Artificial Sequence
  Description of Artificial Sequence: Synthetic oligonucleotide
uagugaauucuccaccauc

SEQ ID NO: 2376333 - RNA, 19 nt, Artificial Sequence
  Description of Artificial Sequence: Synthetic oligonucleotide
ucaggcgcuucucuugucc

SEQ ID NO: 2376334 - RNA, 19 nt, Artificial Sequence
  Description of Artificial Sequence: Synthetic oligonucleotide
cuggguaucagcgccaccc

SEQ ID NO: 2376335 - RNA, 19 nt, Artificial Sequence
  Description of Artificial Sequence: Synthetic oligonucleotide
acuauggugcggccucugc

SEQ ID NO: 2376336 - RNA, 19 nt, Artificial Sequence
  Description of Artificial Sequence: Synthetic oligonucleotide
accugggccaacuauggug

SEQ ID NO: 2376337 - RNA, 19 nt, Artificial Sequence
  Description of Artificial Sequence: Synthetic oligonucleotide
ugguccuuggucugcaccc

SEQ ID NO: 2376338 - RNA, 19 nt, Artificial Sequence
  Description of Artificial Sequence: Synthetic oligonucleotide
uauggugcggccucugcca

SEQ ID NO: 2376339 - RNA, 19 nt, Artificial Sequence
  Description of Artificial Sequence: Synthetic oligonucleotide
guuggcucgacuaucugcc

SEQ ID NO: 2376340 - RNA, 19 nt, Artificial Sequence
  Description of Artificial Sequence: Synthetic oligonucleotide
auggauucuagaaaacucu

SEQ ID NO: 2376341 - RNA, 19 nt, Artificial Sequence
  Description of Artificial Sequence: Synthetic oligonucleotide
acguagaaguguaaucugg

SEQ ID NO: 2376342 - RNA, 19 nt, Artificial Sequence
  Description of Artificial Sequence: Synthetic oligonucleotide
guaaucuggguaucagcgc

SEQ ID NO: 2376343 - RNA, 19 nt, Artificial Sequence
  Description of Artificial Sequence: Synthetic oligonucleotide
acccauggauucuagaaaa

SEQ ID NO: 2376344 - RNA, 19 nt, Artificial Sequence
  Description of Artificial Sequence: Synthetic oligonucleotide
aaacacguagaaguguaau

SEQ ID NO: 2376345 - RNA, 19 nt, Artificial Sequence
  Description of Artificial Sequence: Synthetic oligonucleotide
ucucccggaccauuggugc

SEQ ID NO: 2376346 - RNA, 19 nt, Artificial Sequence
  Description of Artificial Sequence: Synthetic oligonucleotide
cagcgcaaagaacucagcc

SEQ ID NO: 2376347 - RNA, 19 nt, Artificial Sequence
  Description of Artificial Sequence: Synthetic oligonucleotide
cugaccaaggggcuugggg

SEQ ID NO: 2376348 - RNA, 19 nt, Artificial Sequence
  Description of Artificial Sequence: Synthetic oligonucleotide
aucagcgccacccauggau

SEQ ID NO: 2376349 - RNA, 19 nt, Artificial Sequence
  Description of Artificial Sequence: Synthetic oligonucleotide
ucagaggcagagguggucc

SEQ ID NO: 2376350 - RNA, 19 nt, Artificial Sequence
  Description of Artificial Sequence: Synthetic oligonucleotide
aguguaaucuggguaucag

SEQ ID NO: 2376351 - RNA, 19 nt, Artificial Sequence
  Description of Artificial Sequence: Synthetic oligonucleotide
cacccuagccuccaguugc

SEQ ID NO: 2376352 - RNA, 19 nt, Artificial Sequence
  Description of Artificial Sequence: Synthetic oligonucleotide
uucagaggcaaagccuagg

SEQ ID NO: 2376353 - RNA, 19 nt, Artificial Sequence
  Description of Artificial Sequence: Synthetic oligonucleotide
aaggucauguuggggugac

SEQ ID NO: 2376354 - RNA, 19 nt, Artificial Sequence
  Description of Artificial Sequence: Synthetic oligonucleotide
caggacuagugaauucucc

SEQ ID NO: 2376355 - RNA, 19 nt, Artificial Sequence
  Description of Artificial Sequence: Synthetic oligonucleotide
aaccgcucccgcucgguag

SEQ ID NO: 2376356 - RNA, 19 nt, Artificial Sequence
  Description of Artificial Sequence: Synthetic oligonucleotide
gacaguguuggcucgacua

SEQ ID NO: 2376357 - RNA, 19 nt, Artificial Sequence
  Description of Artificial Sequence: Synthetic oligonucleotide
cucgaacagccgcacaucc

SEQ ID NO: 2376358 - RNA, 19 nt, Artificial Sequence
  Description of Artificial Sequence: Synthetic oligonucleotide
agcucugauucuucaaagu

SEQ ID NO: 2376359 - RNA, 19 nt, Artificial Sequence
  Description of Artificial Sequence: Synthetic oligonucleotide
uaaacacguagaaguguaa

SEQ ID NO: 2376360 - RNA, 19 nt, Artificial Sequence
  Description of Artificial Sequence: Synthetic oligonucleotide
cuaaacacguagaagugua

SEQ ID NO: 2376361 - RNA, 19 nt, Artificial Sequence
  Description of Artificial Sequence: Synthetic oligonucleotide
ugguugcuguccugcagcg

SEQ ID NO: 2376362 - RNA, 19 nt, Artificial Sequence
  Description of Artificial Sequence: Synthetic oligonucleotide
cacguagaaguguaaucug

SEQ ID NO: 2376363 - RNA, 19 nt, Artificial Sequence
  Description of Artificial Sequence: Synthetic oligonucleotide
uggaccucgcccacggagc

SEQ ID NO: 2376364 - RNA, 19 nt, Artificial Sequence
  Description of Artificial Sequence: Synthetic oligonucleotide
ugggaugccacagacccac

SEQ ID NO: 2376365 - RNA, 19 nt, Artificial Sequence
  Description of Artificial Sequence: Synthetic oligonucleotide
ggacacaagggcuagggca

SEQ ID NO: 2376366 - RNA, 19 nt, Artificial Sequence
  Description of Artificial Sequence: Synthetic oligonucleotide
gauuucucccgagccagcc

SEQ ID NO: 2376367 - RNA, 19 nt, Artificial Sequence
  Description of Artificial Sequence: Synthetic oligonucleotide
cuauggugcggccucugcc

SEQ ID NO: 2376368 - RNA, 19 nt, Artificial Sequence
  Description of Artificial Sequence: Synthetic oligonucleotide
ugucuccucccgcucagug

SEQ ID NO: 2376369 - RNA, 19 nt, Artificial Sequence
  Description of Artificial Sequence: Synthetic oligonucleotide
ugucaggcgcuucucuugu

SEQ ID NO: 2376370 - RNA, 19 nt, Artificial Sequence
  Description of Artificial Sequence: Synthetic oligonucleotide
cugauucuucaaagucugg

SEQ ID NO: 2376371 - RNA, 19 nt, Artificial Sequence
  Description of Artificial Sequence: Synthetic oligonucleotide
cacugcccgaacuucugcg

SEQ ID NO: 2376372 - RNA, 19 nt, Artificial Sequence
  Description of Artificial Sequence: Synthetic oligonucleotide
aucuugagauuucucccga

SEQ ID NO: 2376373 - RNA, 19 nt, Artificial Sequence
  Description of Artificial Sequence: Synthetic oligonucleotide
ugcccgaacuucugcgagg

SEQ ID NO: 2376374 - RNA, 19 nt, Artificial Sequence
  Description of Artificial Sequence: Synthetic oligonucleotide
cagaggcaaagccuaggcc

SEQ ID NO: 2376375 - RNA, 19 nt, Artificial Sequence
  Description of Artificial Sequence: Synthetic oligonucleotide
agcucgaacagccgcacau

SEQ ID NO: 2376376 - RNA, 19 nt, Artificial Sequence
  Description of Artificial Sequence: Synthetic oligonucleotide
uccugaaacuucucagcaa

SEQ ID NO: 2376377 - RNA, 19 nt, Artificial Sequence
  Description of Artificial Sequence: Synthetic oligonucleotide
ggaccauuggugcugacca

SEQ ID NO: 2376378 - RNA, 19 nt, Artificial Sequence
  Description of Artificial Sequence: Synthetic oligonucleotide
ucugcccacugcccgaacu

SEQ ID NO: 2376379 - RNA, 19 nt, Artificial Sequence
  Description of Artificial Sequence: Synthetic oligonucleotide
aacugggucagcugcuguu

SEQ ID NO: 2376380 - RNA, 19 nt, Artificial Sequence
  Description of Artificial Sequence: Synthetic oligonucleotide
uccaccaucuugagauuuc

SEQ ID NO: 2376381 - RNA, 19 nt, Artificial Sequence
  Description of Artificial Sequence: Synthetic oligonucleotide
ugcuguucagaggcaaagc

SEQ ID NO: 2376382 - RNA, 19 nt, Artificial Sequence
  Description of Artificial Sequence: Synthetic oligonucleotide
ugcggaacagcuucuccuc

SEQ ID NO: 2376383 - RNA, 19 nt, Artificial Sequence
  Description of Artificial Sequence: Synthetic oligonucleotide
ucgaacagccgcacaucca

SEQ ID NO: 2376384 - RNA, 19 nt, Artificial Sequence
  Description of Artificial Sequence: Synthetic oligonucleotide
cuggaccucgcccacggag

SEQ ID NO: 2376385 - RNA, 19 nt, Artificial Sequence
  Description of Artificial Sequence: Synthetic oligonucleotide
uggcucgacuaucugccca

SEQ ID NO: 2376386 - RNA, 19 nt, Artificial Sequence
  Description of Artificial Sequence: Synthetic oligonucleotide
acaguguuggcucgacuau

SEQ ID NO: 2376387 - RNA, 19 nt, Artificial Sequence
  Description of Artificial Sequence: Synthetic oligonucleotide
ggacuagugaauucuccac

SEQ ID NO: 2376388 - RNA, 19 nt, Artificial Sequence
  Description of Artificial Sequence: Synthetic oligonucleotide
cuucaaccgcucccgcucg

SEQ ID NO: 2376389 - RNA, 19 nt, Artificial Sequence
  Description of Artificial Sequence: Synthetic oligonucleotide
caguugcuccaucugguug

SEQ ID NO: 2376390 - RNA, 19 nt, Artificial Sequence
  Description of Artificial Sequence: Synthetic oligonucleotide
uucucccgagccagccugg

SEQ ID NO: 2376391 - RNA, 19 nt, Artificial Sequence
  Description of Artificial Sequence: Synthetic oligonucleotide
ucugcgagguuuggugaag

SEQ ID NO: 2376392 - RNA, 19 nt, Artificial Sequence
  Description of Artificial Sequence: Synthetic oligonucleotide
cucuacacagugcaaagcu

SEQ ID NO: 2376393 - RNA, 19 nt, Artificial Sequence
  Description of Artificial Sequence: Synthetic oligonucleotide
gugucaggcgcuucucuug

SEQ ID NO: 2376394 - RNA, 19 nt, Artificial Sequence
  Description of Artificial Sequence: Synthetic oligonucleotide
uucugcgagguuuggugaa

SEQ ID NO: 2376395 - RNA, 19 nt, Artificial Sequence
  Description of Artificial Sequence: Synthetic oligonucleotide
agccagggcaccugggaug

SEQ ID NO: 2376396 - RNA, 19 nt, Artificial Sequence
  Description of Artificial Sequence: Synthetic oligonucleotide
cucucccggaccauuggug

SEQ ID NO: 2376397 - RNA, 19 nt, Artificial Sequence
  Description of Artificial Sequence: Synthetic oligonucleotide
aacuucugcgagguuuggu

SEQ ID NO: 2376398 - RNA, 19 nt, Artificial Sequence
  Description of Artificial Sequence: Synthetic oligonucleotide
uggguaucagcgccaccca

SEQ ID NO: 2376399 - RNA, 19 nt, Artificial Sequence
  Description of Artificial Sequence: Synthetic oligonucleotide
uucaaccgcucccgcucgg

SEQ ID NO: 2376400 - RNA, 19 nt, Artificial Sequence
  Description of Artificial Sequence: Synthetic oligonucleotide
cacuggaccucgcccacgg

SEQ ID NO: 2376401 - RNA, 19 nt, Artificial Sequence
  Description of Artificial Sequence: Synthetic oligonucleotide
cagccuggcagcuuccuuc

SEQ ID NO: 2376402 - RNA, 19 nt, Artificial Sequence
  Description of Artificial Sequence: Synthetic oligonucleotide
ggucauguuggggugacug

SEQ ID NO: 2376403 - RNA, 19 nt, Artificial Sequence
  Description of Artificial Sequence: Synthetic oligonucleotide
ugcacgcucccgcucggcc

SEQ ID NO: 2376404 - RNA, 19 nt, Artificial Sequence
  Description of Artificial Sequence: Synthetic oligonucleotide
cagccgcacauccagcagc

SEQ ID NO: 2376405 - RNA, 19 nt, Artificial Sequence
  Description of Artificial Sequence: Synthetic oligonucleotide
cugcuguucagaggcaaag

SEQ ID NO: 2376406 - RNA, 19 nt, Artificial Sequence
  Description of Artificial Sequence: Synthetic oligonucleotide
acugcccgaacuucugcga

SEQ ID NO: 2376407 - RNA, 19 nt, Artificial Sequence
  Description of Artificial Sequence: Synthetic oligonucleotide
accgcucccgcucgguagg

SEQ ID NO: 2376408 - RNA, 19 nt, Artificial Sequence
  Description of Artificial Sequence: Synthetic oligonucleotide
gcgcaaagaacucagccuc

SEQ ID NO: 2376409 - RNA, 19 nt, Artificial Sequence
  Description of Artificial Sequence: Synthetic oligonucleotide
auguuggggugacugugcu

SEQ ID NO: 2376410 - RNA, 19 nt, Artificial Sequence
  Description of Artificial Sequence: Synthetic oligonucleotide
caacuccgcauuccgaguc

SEQ ID NO: 2376411 - RNA, 19 nt, Artificial Sequence
  Description of Artificial Sequence: Synthetic oligonucleotide
ugcacccuagccuccaguu

SEQ ID NO: 2376412 - RNA, 19 nt, Artificial Sequence
  Description of Artificial Sequence: Synthetic oligonucleotide
auuucucccgagccagccu

SEQ ID NO: 2376413 - RNA, 19 nt, Artificial Sequence
  Description of Artificial Sequence: Synthetic oligonucleotide
agugcaaagcucagaggca

SEQ ID NO: 2376414 - RNA, 19 nt, Artificial Sequence
  Description of Artificial Sequence: Synthetic oligonucleotide
gcucgguagguccaggggc

SEQ ID NO: 2376415 - RNA, 19 nt, Artificial Sequence
  Description of Artificial Sequence: Synthetic oligonucleotide
uccgcauuccgagucucca

SEQ ID NO: 2376416 - RNA, 19 nt, Artificial Sequence
  Description of Artificial Sequence: Synthetic oligonucleotide
ugcggccucugccaggcgu

SEQ ID NO: 2376417 - RNA, 19 nt, Artificial Sequence
  Description of Artificial Sequence: Synthetic oligonucleotide
acaagggcuagggcaggac

SEQ ID NO: 2376418 - RNA, 19 nt, Artificial Sequence
  Description of Artificial Sequence: Synthetic oligonucleotide
uuccgagucuccagauccu

SEQ ID NO: 2376419 - RNA, 19 nt, Artificial Sequence
  Description of Artificial Sequence: Synthetic oligonucleotide
ggugaaggucauguugggg

SEQ ID NO: 2376420 - RNA, 19 nt, Artificial Sequence
  Description of Artificial Sequence: Synthetic oligonucleotide
ccucacgcaacucacucag

SEQ ID NO: 2376421 - RNA, 19 nt, Artificial Sequence
  Description of Artificial Sequence: Synthetic oligonucleotide
ggauucuagaaaacucuac

SEQ ID NO: 2376422 - RNA, 19 nt, Artificial Sequence
  Description of Artificial Sequence: Synthetic oligonucleotide
ugacagcaucuucuucaac

SEQ ID NO: 2376423 - RNA, 19 nt, Artificial Sequence
  Description of Artificial Sequence: Synthetic oligonucleotide
ugcgagguuuggugaaggu

SEQ ID NO: 2376424 - RNA, 19 nt, Artificial Sequence
  Description of Artificial Sequence: Synthetic oligonucleotide
caacucacucagcucgaac

SEQ ID NO: 2376425 - RNA, 19 nt, Artificial Sequence
  Description of Artificial Sequence: Synthetic oligonucleotide
ucagcgccacccauggauu

SEQ ID NO: 2376426 - RNA, 19 nt, Artificial Sequence
  Description of Artificial Sequence: Synthetic oligonucleotide
gaacuucugcgagguuugg

SEQ ID NO: 2376427 - RNA, 19 nt, Artificial Sequence
  Description of Artificial Sequence: Synthetic oligonucleotide
cugcccgaacuucugcgag

SEQ ID NO: 2376428 - RNA, 19 nt, Artificial Sequence
  Description of Artificial Sequence: Synthetic oligonucleotide
cauuccgagucuccagauc

SEQ ID NO: 2376429 - RNA, 19 nt, Artificial Sequence
  Description of Artificial Sequence: Synthetic oligonucleotide
cuagggcaggacuagugaa

SEQ ID NO: 2376430 - RNA, 19 nt, Artificial Sequence
  Description of Artificial Sequence: Synthetic oligonucleotide
gccuaggccauagacagug

SEQ ID NO: 2376431 - RNA, 19 nt, Artificial Sequence
  Description of Artificial Sequence: Synthetic oligonucleotide
cacgcaacucacucagcuc

SEQ ID NO: 2376432 - RNA, 19 nt, Artificial Sequence
  Description of Artificial Sequence: Synthetic oligonucleotide
caccugggaugccacagac

SEQ ID NO: 2376433 - RNA, 19 nt, Artificial Sequence
  Description of Artificial Sequence: Synthetic oligonucleotide
aacuauggugcggccucug

SEQ ID NO: 2376434 - RNA, 19 nt, Artificial Sequence
  Description of Artificial Sequence: Synthetic oligonucleotide
cucagcucgaacagccgca

SEQ ID NO: 2376435 - RNA, 19 nt, Artificial Sequence
  Description of Artificial Sequence: Synthetic oligonucleotide
cucgguagguccaggggca

SEQ ID NO: 2376436 - RNA, 19 nt, Artificial Sequence
  Description of Artificial Sequence: Synthetic oligonucleotide
cgagguuuggugaagguca

SEQ ID NO: 2376437 - RNA, 19 nt, Artificial Sequence
  Description of Artificial Sequence: Synthetic oligonucleotide
ucagcucgaacagccgcac

SEQ ID NO: 2376438 - RNA, 19 nt, Artificial Sequence
  Description of Artificial Sequence: Synthetic oligonucleotide
cugcgagguuuggugaagg

SEQ ID NO: 2376439 - RNA, 19 nt, Artificial Sequence
  Description of Artificial Sequence: Synthetic oligonucleotide
agggcuagggcaggacuag

SEQ ID NO: 2376440 - RNA, 19 nt, Artificial Sequence
  Description of Artificial Sequence: Synthetic oligonucleotide
caaacugggucagcugcug

SEQ ID NO: 2376441 - RNA, 19 nt, Artificial Sequence
  Description of Artificial Sequence: Synthetic oligonucleotide
ccacggagccuucugacag

SEQ ID NO: 2376442 - RNA, 19 nt, Artificial Sequence
  Description of Artificial Sequence: Synthetic oligonucleotide
agacaguguuggcucgacu

SEQ ID NO: 2376443 - RNA, 19 nt, Artificial Sequence
  Description of Artificial Sequence: Synthetic oligonucleotide
gguaucagcgccacccaug

SEQ ID NO: 2376444 - RNA, 19 nt, Artificial Sequence
  Description of Artificial Sequence: Synthetic oligonucleotide
cacggagccuucugacagc

SEQ ID NO: 2376445 - RNA, 19 nt, Artificial Sequence
  Description of Artificial Sequence: Synthetic oligonucleotide
cacccauggauucuagaaa

SEQ ID NO: 2376446 - RNA, 19 nt, Artificial Sequence
  Description of Artificial Sequence: Synthetic oligonucleotide
cacgcucccgcucggcccg

SEQ ID NO: 2376447 - RNA, 19 nt, Artificial Sequence
  Description of Artificial Sequence: Synthetic oligonucleotide
cucgacuaucugcccacug

SEQ ID NO: 2376448 - RNA, 19 nt, Artificial Sequence
  Description of Artificial Sequence: Synthetic oligonucleotide
gaaggucauguugggguga

SEQ ID NO: 2376449 - RNA, 19 nt, Artificial Sequence
  Description of Artificial Sequence: Synthetic oligonucleotide
cucacgcaacucacucagc

SEQ ID NO: 2376450 - RNA, 19 nt, Artificial Sequence
  Description of Artificial Sequence: Synthetic oligonucleotide
auagacaguguuggcucga

SEQ ID NO: 2376451 - RNA, 19 nt, Artificial Sequence
  Description of Artificial Sequence: Synthetic oligonucleotide
cgaacagccgcacauccag

SEQ ID NO: 2376452 - RNA, 19 nt, Artificial Sequence
  Description of Artificial Sequence: Synthetic oligonucleotide
ucccggaccauuggugcug

SEQ ID NO: 2376453 - RNA, 19 nt, Artificial Sequence
  Description of Artificial Sequence: Synthetic oligonucleotide
cugggccaacuauggugcg

SEQ ID NO: 2376454 - RNA, 19 nt, Artificial Sequence
  Description of Artificial Sequence: Synthetic oligonucleotide
gaacagccgcacauccagc

SEQ ID NO: 2376455 - RNA, 19 nt, Artificial Sequence
  Description of Artificial Sequence: Synthetic oligonucleotide
cuccgcauuccgagucucc

SEQ ID NO: 2376456 - RNA, 19 nt, Artificial Sequence
  Description of Artificial Sequence: Synthetic oligonucleotide
aucagcacucuggcugcgg

SEQ ID NO: 2376457 - RNA, 19 nt, Artificial Sequence
  Description of Artificial Sequence: Synthetic oligonucleotide
acuccgcauuccgagucuc

SEQ ID NO: 2376458 - RNA, 19 nt, Artificial Sequence
  Description of Artificial Sequence: Synthetic oligonucleotide
uagacaguguuggcucgac

SEQ ID NO: 2376459 - RNA, 19 nt, Artificial Sequence
  Description of Artificial Sequence: Synthetic oligonucleotide
auuccaugguucgcagcug

SEQ ID NO: 2376460 - RNA, 19 nt, Artificial Sequence
  Description of Artificial Sequence: Synthetic oligonucleotide
gcuagggcaggacuaguga

SEQ ID NO: 2376461 - RNA, 19 nt, Artificial Sequence
  Description of Artificial Sequence: Synthetic oligonucleotide
gguuuggugaaggucaugu

SEQ ID NO: 2376462 - RNA, 19 nt, Artificial Sequence
  Description of Artificial Sequence: Synthetic oligonucleotide
cuaucugcccacugcccga

SEQ ID NO: 2376463 - RNA, 19 nt, Artificial Sequence
  Description of Artificial Sequence: Synthetic oligonucleotide
gaaccuggugggacacaag

SEQ ID NO: 2376464 - RNA, 19 nt, Artificial Sequence
  Description of Artificial Sequence: Synthetic oligonucleotide
ugguccccagccagggcac

SEQ ID NO: 2376465 - RNA, 19 nt, Artificial Sequence
  Description of Artificial Sequence: Synthetic oligonucleotide
cuucuccucucccggacca

SEQ ID NO: 2376466 - RNA, 19 nt, Artificial Sequence
  Description of Artificial Sequence: Synthetic oligonucleotide
uaucagcgccacccaugga

SEQ ID NO: 2376467 - RNA, 19 nt, Artificial Sequence
  Description of Artificial Sequence: Synthetic oligonucleotide
ccgcacauccagcagcugc

SEQ ID NO: 2376468 - RNA, 19 nt, Artificial Sequence
  Description of Artificial Sequence: Synthetic oligonucleotide
cacuuccacccgugcacgc

SEQ ID NO: 2376469 - RNA, 19 nt, Artificial Sequence
  Description of Artificial Sequence: Synthetic oligonucleotide
acccaccugggccaacuau

SEQ ID NO: 2376470 - RNA, 19 nt, Artificial Sequence
  Description of Artificial Sequence: Synthetic oligonucleotide
cccacuuccacccgugcac

SEQ ID NO: 2376471 - RNA, 19 nt, Artificial Sequence
  Description of Artificial Sequence: Synthetic oligonucleotide
gguucgcagcugcugcucc

SEQ ID NO: 2376472 - RNA, 19 nt, Artificial Sequence
  Description of Artificial Sequence: Synthetic oligonucleotide
acggagccuucugacagca

SEQ ID NO: 2376473 - RNA, 19 nt, Artificial Sequence
  Description of Artificial Sequence: Synthetic oligonucleotide
gugcugaccaaggggcuug

SEQ ID NO: 2376474 - RNA, 19 nt, Artificial Sequence
  Description of Artificial Sequence: Synthetic oligonucleotide
gcucccgcucgguaggucc

SEQ ID NO: 2376475 - RNA, 19 nt, Artificial Sequence
  Description of Artificial Sequence: Synthetic oligonucleotide
ggcucgacuaucugcccac

SEQ ID NO: 2376476 - RNA, 19 nt, Artificial Sequence
  Description of Artificial Sequence: Synthetic oligonucleotide
aucugcccacugcccgaac

SEQ ID NO: 2376477 - RNA, 19 nt, Artificial Sequence
  Description of Artificial Sequence: Synthetic oligonucleotide
gggccaacuauggugcggc

SEQ ID NO: 2376478 - RNA, 19 nt, Artificial Sequence
  Description of Artificial Sequence: Synthetic oligonucleotide
cgaacuucugcgagguuug

SEQ ID NO: 2376479 - RNA, 19 nt, Artificial Sequence
  Description of Artificial Sequence: Synthetic oligonucleotide
uaucugcccacugcccgaa

SEQ ID NO: 2376480 - RNA, 19 nt, Artificial Sequence
  Description of Artificial Sequence: Synthetic oligonucleotide
cccauggauucuagaaaac

SEQ ID NO: 2376481 - RNA, 19 nt, Artificial Sequence
  Description of Artificial Sequence: Synthetic oligonucleotide
cuggugggacacaagggcu

SEQ ID NO: 2376482 - RNA, 19 nt, Artificial Sequence
  Description of Artificial Sequence: Synthetic oligonucleotide
ccacccauggauucuagaa

SEQ ID NO: 2376483 - RNA, 19 nt, Artificial Sequence
  Description of Artificial Sequence: Synthetic oligonucleotide
uccucccgcucaguggugu

SEQ ID NO: 2376484 - RNA, 19 nt, Artificial Sequence
  Description of Artificial Sequence: Synthetic oligonucleotide
ucaaccgcucccgcucggu

SEQ ID NO: 2376485 - RNA, 19 nt, Artificial Sequence
  Description of Artificial Sequence: Synthetic oligonucleotide
gaccauuggugcugaccaa

SEQ ID NO: 2376486 - RNA, 19 nt, Artificial Sequence
  Description of Artificial Sequence: Synthetic oligonucleotide
agacccaccugggccaacu

SEQ ID NO: 2376487 - RNA, 19 nt, Artificial Sequence
  Description of Artificial Sequence: Synthetic oligonucleotide
ugguucgcagcugcugcuc

SEQ ID NO: 2376488 - RNA, 19 nt, Artificial Sequence
  Description of Artificial Sequence: Synthetic oligonucleotide
ggaccucgcccacggagcc

SEQ ID NO: 2376489 - RNA, 19 nt, Artificial Sequence
  Description of Artificial Sequence: Synthetic oligonucleotide
cugugucuccucccgcuca

SEQ ID NO: 2376490 - RNA, 19 nt, Artificial Sequence
  Description of Artificial Sequence: Synthetic oligonucleotide
gcuucuccucucccggacc

SEQ ID NO: 2376491 - RNA, 19 nt, Artificial Sequence
  Description of Artificial Sequence: Synthetic oligonucleotide
caucagcacucuggcugcg

SEQ ID NO: 2376492 - RNA, 19 nt, Artificial Sequence
  Description of Artificial Sequence: Synthetic oligonucleotide
uccgagucuccagauccuu

SEQ ID NO: 2376493 - RNA, 19 nt, Artificial Sequence
  Description of Artificial Sequence: Synthetic oligonucleotide
ggcaggacuagugaauucu

SEQ ID NO: 2376494 - RNA, 19 nt, Artificial Sequence
  Description of Artificial Sequence: Synthetic oligonucleotide
acucagccucccacuggac

SEQ ID NO: 2376495 - RNA, 19 nt, Artificial Sequence
  Description of Artificial Sequence: Synthetic oligonucleotide
cagcgccacccauggauuc

SEQ ID NO: 2376496 - RNA, 19 nt, Artificial Sequence
  Description of Artificial Sequence: Synthetic oligonucleotide
gcugcauuccaugguucgc

SEQ ID NO: 2376497 - RNA, 19 nt, Artificial Sequence
  Description of Artificial Sequence: Synthetic oligonucleotide
ccugcagcgcaaagaacuc

SEQ ID NO: 2376498 - RNA, 19 nt, Artificial Sequence
  Description of Artificial Sequence: Synthetic oligonucleotide
agcgccacccauggauucu

SEQ ID NO: 2376499 - RNA, 19 nt, Artificial Sequence
  Description of Artificial Sequence: Synthetic oligonucleotide
agguuuggugaaggucaug

SEQ ID NO: 2376500 - RNA, 19 nt, Artificial Sequence
  Description of Artificial Sequence: Synthetic oligonucleotide
gcacccuagccuccaguug

SEQ ID NO: 2376501 - RNA, 19 nt, Artificial Sequence
  Description of Artificial Sequence: Synthetic oligonucleotide
ucaguggugucaggcgcuu

SEQ ID NO: 2376502 - RNA, 19 nt, Artificial Sequence
  Description of Artificial Sequence: Synthetic oligonucleotide
gcccucacgcaacucacuc

SEQ ID NO: 2376503 - RNA, 19 nt, Artificial Sequence
  Description of Artificial Sequence: Synthetic oligonucleotide
caagggcuagggcaggacu

SEQ ID NO: 2376504 - RNA, 19 nt, Artificial Sequence
  Description of Artificial Sequence: Synthetic oligonucleotide
gcgugccaggcccucacgc

SEQ ID NO: 2376505 - RNA, 19 nt, Artificial Sequence
  Description of Artificial Sequence: Synthetic oligonucleotide
gcgagguuuggugaagguc

SEQ ID NO: 2376506 - RNA, 19 nt, Artificial Sequence
  Description of Artificial Sequence: Synthetic oligonucleotide
cugcagcgcaaagaacuca

SEQ ID NO: 2376507 - RNA, 19 nt, Artificial Sequence
  Description of Artificial Sequence: Synthetic oligonucleotide
cugggaugccacagaccca

SEQ ID NO: 2376508 - RNA, 19 nt, Artificial Sequence
  Description of Artificial Sequence: Synthetic oligonucleotide
ucccgcucgguagguccag

SEQ ID NO: 2376509 - RNA, 19 nt, Artificial Sequence
  Description of Artificial Sequence: Synthetic oligonucleotide
ugcuguccugcagcgcaaa

SEQ ID NO: 2376510 - RNA, 19 nt, Artificial Sequence
  Description of Artificial Sequence: Synthetic oligonucleotide
cagaggugguccccagcca

SEQ ID NO: 2376511 - RNA, 19 nt, Artificial Sequence
  Description of Artificial Sequence: Synthetic oligonucleotide
gcccacggagccuucugac

SEQ ID NO: 2376512 - RNA, 19 nt, Artificial Sequence
  Description of Artificial Sequence: Synthetic oligonucleotide
ccacugcccgaacuucugc

SEQ ID NO: 2376513 - RNA, 19 nt, Artificial Sequence
  Description of Artificial Sequence: Synthetic oligonucleotide
gucaggcgcuucucuuguc

SEQ ID NO: 2376514 - RNA, 19 nt, Artificial Sequence
  Description of Artificial Sequence: Synthetic oligonucleotide
ccgcauuccgagucuccag

SEQ ID NO: 2376515 - RNA, 19 nt, Artificial Sequence
  Description of Artificial Sequence: Synthetic oligonucleotide
ccgcucgguagguccaggg

SEQ ID NO: 2376516 - RNA, 19 nt, Artificial Sequence
  Description of Artificial Sequence: Synthetic oligonucleotide
caggcugcauuccaugguu

SEQ ID NO: 2376517 - RNA, 19 nt, Artificial Sequence
  Description of Artificial Sequence: Synthetic oligonucleotide
ucgguagguccaggggcau

SEQ ID NO: 2376518 - RNA, 19 nt, Artificial Sequence
  Description of Artificial Sequence: Synthetic oligonucleotide
ccauggauucuagaaaacu

SEQ ID NO: 2376519 - RNA, 19 nt, Artificial Sequence
  Description of Artificial Sequence: Synthetic oligonucleotide
ccgagucuccagauccuuc

SEQ ID NO: 2376520 - RNA, 19 nt, Artificial Sequence
  Description of Artificial Sequence: Synthetic oligonucleotide
guggugucaggcgcuucuc

SEQ ID NO: 2376521 - RNA, 19 nt, Artificial Sequence
  Description of Artificial Sequence: Synthetic oligonucleotide
uucuccucucccggaccau

SEQ ID NO: 2376522 - RNA, 19 nt, Artificial Sequence
  Description of Artificial Sequence: Synthetic oligonucleotide
cgcucgguagguccagggg

SEQ ID NO: 2376523 - RNA, 19 nt, Artificial Sequence
  Description of Artificial Sequence: Synthetic oligonucleotide
gagguuuggugaaggucau

SEQ ID NO: 2376524 - RNA, 19 nt, Artificial Sequence
  Description of Artificial Sequence: Synthetic oligonucleotide
ggccaacuauggugcggcc

SEQ ID NO: 2376525 - RNA, 19 nt, Artificial Sequence
  Description of Artificial Sequence: Synthetic oligonucleotide
cggaccauuggugcugacc

SEQ ID NO: 2376526 - RNA, 19 nt, Artificial Sequence
  Description of Artificial Sequence: Synthetic oligonucleotide
gccacccauggauucuaga

SEQ ID NO: 2376527 - RNA, 19 nt, Artificial Sequence
  Description of Artificial Sequence: Synthetic oligonucleotide
gcaaagccuaggccauaga

SEQ ID NO: 2376528 - RNA, 19 nt, Artificial Sequence
  Description of Artificial Sequence: Synthetic oligonucleotide
gcacucuggcugcggaaca

SEQ ID NO: 2376529 - RNA, 19 nt, Artificial Sequence
  Description of Artificial Sequence: Synthetic oligonucleotide
ggggaaccuggugggacac

SEQ ID NO: 2376530 - RNA, 19 nt, Artificial Sequence
  Description of Artificial Sequence: Synthetic oligonucleotide
aggucauguuggggugacu

SEQ ID NO: 2376531 - RNA, 19 nt, Artificial Sequence
  Description of Artificial Sequence: Synthetic oligonucleotide
agccuaggccauagacagu

SEQ ID NO: 2376532 - RNA, 19 nt, Artificial Sequence
  Description of Artificial Sequence: Synthetic oligonucleotide
acagacccaccugggccaa

SEQ ID NO: 2376533 - RNA, 19 nt, Artificial Sequence
  Description of Artificial Sequence: Synthetic oligonucleotide
cagcucgaacagccgcaca

SEQ ID NO: 2376534 - RNA, 19 nt, Artificial Sequence
  Description of Artificial Sequence: Synthetic oligonucleotide
guugcuccaucugguugcu

SEQ ID NO: 2376535 - RNA, 19 nt, Artificial Sequence
  Description of Artificial Sequence: Synthetic oligonucleotide
cgcauuccgagucuccaga

SEQ ID NO: 2376536 - RNA, 19 nt, Artificial Sequence
  Description of Artificial Sequence: Synthetic oligonucleotide
cccacggagccuucugaca

SEQ ID NO: 2376537 - RNA, 19 nt, Artificial Sequence
  Description of Artificial Sequence: Synthetic oligonucleotide
cucccggaccauuggugcu

SEQ ID NO: 2376538 - RNA, 19 nt, Artificial Sequence
  Description of Artificial Sequence: Synthetic oligonucleotide
cccucacgcaacucacuca

SEQ ID NO: 2376539 - RNA, 19 nt, Artificial Sequence
  Description of Artificial Sequence: Synthetic oligonucleotide
gugcggccucugccaggcg

SEQ ID NO: 2376540 - RNA, 19 nt, Artificial Sequence
  Description of Artificial Sequence: Synthetic oligonucleotide
cccacuggaccucgcccac

SEQ ID NO: 2376541 - RNA, 19 nt, Artificial Sequence
  Description of Artificial Sequence: Synthetic oligonucleotide
gugcacgcucccgcucggc

SEQ ID NO: 2376542 - RNA, 19 nt, Artificial Sequence
  Description of Artificial Sequence: Synthetic oligonucleotide
caaccgcucccgcucggua

SEQ ID NO: 2376543 - RNA, 19 nt, Artificial Sequence
  Description of Artificial Sequence: Synthetic oligonucleotide
cuugucccugagcucugau

SEQ ID NO: 2376544 - RNA, 19 nt, Artificial Sequence
  Description of Artificial Sequence: Synthetic oligonucleotide
cugcacccuagccuccagu

SEQ ID NO: 2376545 - RNA, 19 nt, Artificial Sequence
  Description of Artificial Sequence: Synthetic oligonucleotide
gccaacuauggugcggccu

SEQ ID NO: 2376546 - RNA, 19 nt, Artificial Sequence
  Description of Artificial Sequence: Synthetic oligonucleotide
ccacuggaccucgcccacg

SEQ ID NO: 2376547 - RNA, 19 nt, Artificial Sequence
  Description of Artificial Sequence: Synthetic oligonucleotide
cugcccacugcccgaacuu

SEQ ID NO: 2376548 - RNA, 19 nt, Artificial Sequence
  Description of Artificial Sequence: Synthetic oligonucleotide
cgcggcccugcccacuucc

SEQ ID NO: 2376549 - RNA, 19 nt, Artificial Sequence
  Description of Artificial Sequence: Synthetic oligonucleotide
gcaacucacucagcucgaa

SEQ ID NO: 2376550 - RNA, 19 nt, Artificial Sequence
  Description of Artificial Sequence: Synthetic oligonucleotide
ccgaacuucugcgagguuu

SEQ ID NO: 2376551 - RNA, 19 nt, Artificial Sequence
  Description of Artificial Sequence: Synthetic oligonucleotide
gggaugccacagacccacc

SEQ ID NO: 2376552 - RNA, 19 nt, Artificial Sequence
  Description of Artificial Sequence: Synthetic oligonucleotide
ggguaucagcgccacccau

SEQ ID NO: 2376553 - RNA, 19 nt, Artificial Sequence
  Description of Artificial Sequence: Synthetic oligonucleotide
ccaacuccgcauuccgagu

SEQ ID NO: 2376554 - RNA, 19 nt, Artificial Sequence
  Description of Artificial Sequence: Synthetic oligonucleotide
caacuauggugcggccucu

SEQ ID NO: 2376555 - RNA, 19 nt, Artificial Sequence
  Description of Artificial Sequence: Synthetic oligonucleotide
gguccccagccagggcacc

SEQ ID NO: 2376556 - RNA, 19 nt, Artificial Sequence
  Description of Artificial Sequence: Synthetic oligonucleotide
cagacccaccugggccaac

SEQ ID NO: 2376557 - RNA, 19 nt, Artificial Sequence
  Description of Artificial Sequence: Synthetic oligonucleotide
cccugcccacuuccacccg

SEQ ID NO: 2376558 - RNA, 19 nt, Artificial Sequence
  Description of Artificial Sequence: Synthetic oligonucleotide
gggcaucagcacucuggcu

SEQ ID NO: 2376559 - RNA, 19 nt, Artificial Sequence
  Description of Artificial Sequence: Synthetic oligonucleotide
cgcaacucacucagcucga

SEQ ID NO: 2376560 - RNA, 19 nt, Artificial Sequence
  Description of Artificial Sequence: Synthetic oligonucleotide
gggaaccuggugggacaca

SEQ ID NO: 2376561 - RNA, 19 nt, Artificial Sequence
  Description of Artificial Sequence: Synthetic oligonucleotide
ggugcugaccaaggggcuu

SEQ ID NO: 2376562 - RNA, 19 nt, Artificial Sequence
  Description of Artificial Sequence: Synthetic oligonucleotide
gcugcgcggcccugcccac

SEQ ID NO: 2376563 - RNA, 19 nt, Artificial Sequence
  Description of Artificial Sequence: Synthetic oligonucleotide
cccgcucgguagguccagg

SEQ ID NO: 2376564 - RNA, 19 nt, Artificial Sequence
  Description of Artificial Sequence: Synthetic oligonucleotide
ccucucccggaccauuggu

SEQ ID NO: 2376565 - RNA, 19 nt, Artificial Sequence
  Description of Artificial Sequence: Synthetic oligonucleotide
cggcccugcccacuuccac

SEQ ID NO: 2376566 - RNA, 19 nt, Artificial Sequence
  Description of Artificial Sequence: Synthetic oligonucleotide
ccuaggccauagacagugu

SEQ ID NO: 2376567 - RNA, 19 nt, Artificial Sequence
  Description of Artificial Sequence: Synthetic oligonucleotide
ccugcccacuuccacccgu

SEQ ID NO: 2376568 - RNA, 19 nt, Artificial Sequence
  Description of Artificial Sequence: Synthetic oligonucleotide
ccggaccauuggugcugac

SEQ ID NO: 2376569 - RNA, 19 nt, Artificial Sequence
  Description of Artificial Sequence: Synthetic oligonucleotide
gcgccacccauggauucua

SEQ ID NO: 2376570 - RNA, 19 nt, Artificial Sequence
  Description of Artificial Sequence: Synthetic oligonucleotide
ggcccucacgcaacucacu

SEQ ID NO: 2376571 - RNA, 19 nt, Artificial Sequence
  Description of Artificial Sequence: Synthetic oligonucleotide
cccggaccauuggugcuga

SEQ ID NO: 2376572 - RNA, 19 nt, Artificial Sequence
  Description of Artificial Sequence: Synthetic oligonucleotide
gcucgacuaucugcccacu

SEQ ID NO: 2376573 - RNA, 19 nt, Artificial Sequence
  Description of Artificial Sequence: Synthetic oligonucleotide
gcggcccugcccacuucca

SEQ ID NO: 2376574 - RNA, 19 nt, Artificial Sequence
  Description of Artificial Sequence: Synthetic oligonucleotide
gggcuagggcaggacuagu

SEQ ID NO: 2376575 - RNA, 19 nt, Artificial Sequence
  Description of Artificial Sequence: Synthetic oligonucleotide
cgguagguccaggggcauc

SEQ ID NO: 2376576 - RNA, 19 nt, Artificial Sequence
  Description of Artificial Sequence: Synthetic oligonucleotide
gcgcggcccugcccacuuc

SEQ ID NO: 2376577 - RNA, 19 nt, Artificial Sequence
  Description of Artificial Sequence: Synthetic oligonucleotide
cugcgcggcccugcccacu

SEQ ID NO: 2376578 - RNA, 19 nt, Artificial Sequence
  Description of Artificial Sequence: Synthetic oligonucleotide
cgcucccgcucgguagguc

SEQ ID NO: 2376579 - RNA, 19 nt, Artificial Sequence
  Description of Artificial Sequence: Synthetic oligonucleotide
ccgcucccgcucgguaggu

SEQ ID NO: 2376580 - RNA, 19 nt, Artificial Sequence
  Description of Artificial Sequence: Synthetic oligonucleotide
uguacaaccaaucacuugg

SEQ ID NO: 2376581 - RNA, 19 nt, Artificial Sequence
  Description of Artificial Sequence: Synthetic oligonucleotide
aaagauauuuaauaccaag

SEQ ID NO: 2376582 - RNA, 19 nt, Artificial Sequence
  Description of Artificial Sequence: Synthetic oligonucleotide
uauaaagagaucagggugg

SEQ ID NO: 2376583 - RNA, 19 nt, Artificial Sequence
  Description of Artificial Sequence: Synthetic oligonucleotide
aaugucuacacccauaagu

SEQ ID NO: 2376584 - RNA, 19 nt, Artificial Sequence
  Description of Artificial Sequence: Synthetic oligonucleotide
agauauuuaauaccaaguc

SEQ ID NO: 2376585 - RNA, 19 nt, Artificial Sequence
  Description of Artificial Sequence: Synthetic oligonucleotide
gauauuuaauaccaagucc

SEQ ID NO: 2376586 - RNA, 19 nt, Artificial Sequence
  Description of Artificial Sequence: Synthetic oligonucleotide
aacaacugaacaguggugc

SEQ ID NO: 2376587 - RNA, 19 nt, Artificial Sequence
  Description of Artificial Sequence: Synthetic oligonucleotide
uaguaagugacauaaaaug

SEQ ID NO: 2376588 - RNA, 19 nt, Artificial Sequence
  Description of Artificial Sequence: Synthetic oligonucleotide
aauaccaaguccaaacucg

SEQ ID NO: 2376589 - RNA, 19 nt, Artificial Sequence
  Description of Artificial Sequence: Synthetic oligonucleotide
ugguauuucuccaugacgc

SEQ ID NO: 2376590 - RNA, 19 nt, Artificial Sequence
  Description of Artificial Sequence: Synthetic oligonucleotide
ugugggauaaaccaggggu

SEQ ID NO: 2376591 - RNA, 19 nt, Artificial Sequence
  Description of Artificial Sequence: Synthetic oligonucleotide
acaaccaaucacuuggccc

SEQ ID NO: 2376592 - RNA, 19 nt, Artificial Sequence
  Description of Artificial Sequence: Synthetic oligonucleotide
agugacauaaaaugucuac

SEQ ID NO: 2376593 - RNA, 19 nt, Artificial Sequence
  Description of Artificial Sequence: Synthetic oligonucleotide
acuagaaugccaaaguggc

SEQ ID NO: 2376594 - RNA, 19 nt, Artificial Sequence
  Description of Artificial Sequence: Synthetic oligonucleotide
aauacuuaagguuccugcu

SEQ ID NO: 2376595 - RNA, 19 nt, Artificial Sequence
  Description of Artificial Sequence: Synthetic oligonucleotide
guauaaagagaucagggug

SEQ ID NO: 2376596 - RNA, 19 nt, Artificial Sequence
  Description of Artificial Sequence: Synthetic oligonucleotide
caguauaaagagaucaggg

SEQ ID NO: 2376597 - RNA, 19 nt, Artificial Sequence
  Description of Artificial Sequence: Synthetic oligonucleotide
aaaaugucuacacccauaa

SEQ ID NO: 2376598 - RNA, 19 nt, Artificial Sequence
  Description of Artificial Sequence: Synthetic oligonucleotide
aguaacaauacuuaagguu

SEQ ID NO: 2376599 - RNA, 19 nt, Artificial Sequence
  Description of Artificial Sequence: Synthetic oligonucleotide
uaagugacauaaaaugucu

SEQ ID NO: 2376600 - RNA, 19 nt, Artificial Sequence
  Description of Artificial Sequence: Synthetic oligonucleotide
uuaguaagugacauaaaau

SEQ ID NO: 2376601 - RNA, 19 nt, Artificial Sequence
  Description of Artificial Sequence: Synthetic oligonucleotide
aguauaaagagaucagggu

SEQ ID NO: 2376602 - RNA, 19 nt, Artificial Sequence
  Description of Artificial Sequence: Synthetic oligonucleotide
uugccuaacaacugaacag

SEQ ID NO: 2376603 - RNA, 19 nt, Artificial Sequence
  Description of Artificial Sequence: Synthetic oligonucleotide
aagauauuuaauaccaagu

SEQ ID NO: 2376604 - RNA, 19 nt, Artificial Sequence
  Description of Artificial Sequence: Synthetic oligonucleotide
auuucugccucccgcagcc

SEQ ID NO: 2376605 - RNA, 19 nt, Artificial Sequence
  Description of Artificial Sequence: Synthetic oligonucleotide
guaacaauacuuaagguuc

SEQ ID NO: 2376606 - RNA, 19 nt, Artificial Sequence
  Description of Artificial Sequence: Synthetic oligonucleotide
ucccuuagcaccauggggc

SEQ ID NO: 2376607 - RNA, 19 nt, Artificial Sequence
  Description of Artificial Sequence: Synthetic oligonucleotide
cacuagaaugccaaagugg

SEQ ID NO: 2376608 - RNA, 19 nt, Artificial Sequence
  Description of Artificial Sequence: Synthetic oligonucleotide
uuucccacugucuugaggu

SEQ ID NO: 2376609 - RNA, 19 nt, Artificial Sequence
  Description of Artificial Sequence: Synthetic oligonucleotide
uacuuaagguuccugcuag

SEQ ID NO: 2376610 - RNA, 19 nt, Artificial Sequence
  Description of Artificial Sequence: Synthetic oligonucleotide
uaagcuacuaaagauauuu

SEQ ID NO: 2376611 - RNA, 19 nt, Artificial Sequence
  Description of Artificial Sequence: Synthetic oligonucleotide
ugaacaguggugcagacuu

SEQ ID NO: 2376612 - RNA, 19 nt, Artificial Sequence
  Description of Artificial Sequence: Synthetic oligonucleotide
caaccaaucacuuggcccc

SEQ ID NO: 2376613 - RNA, 19 nt, Artificial Sequence
  Description of Artificial Sequence: Synthetic oligonucleotide
auaaguaacaauacuuaag

SEQ ID NO: 2376614 - RNA, 19 nt, Artificial Sequence
  Description of Artificial Sequence: Synthetic oligonucleotide
aacucgggcugauaaacag

SEQ ID NO: 2376615 - RNA, 19 nt, Artificial Sequence
  Description of Artificial Sequence: Synthetic oligonucleotide
aaguaacaauacuuaaggu

SEQ ID NO: 2376616 - RNA, 19 nt, Artificial Sequence
  Description of Artificial Sequence: Synthetic oligonucleotide
uucccuuagcaccaugggg

SEQ ID NO: 2376617 - RNA, 19 nt, Artificial Sequence
  Description of Artificial Sequence: Synthetic oligonucleotide
ucuacacccauaaguaaca

SEQ ID NO: 2376618 - RNA, 19 nt, Artificial Sequence
  Description of Artificial Sequence: Synthetic oligonucleotide
uaacaauacuuaagguucc

SEQ ID NO: 2376619 - RNA, 19 nt, Artificial Sequence
  Description of Artificial Sequence: Synthetic oligonucleotide
acgaacuccuuccaccgcc

SEQ ID NO: 2376620 - RNA, 19 nt, Artificial Sequence
  Description of Artificial Sequence: Synthetic oligonucleotide
uaauaccaaguccaaacuc

SEQ ID NO: 2376621 - RNA, 19 nt, Artificial Sequence
  Description of Artificial Sequence: Synthetic oligonucleotide
ugacgcuucccuuagcacc

SEQ ID NO: 2376622 - RNA, 19 nt, Artificial Sequence
  Description of Artificial Sequence: Synthetic oligonucleotide
uaaacagcuguacaaccaa

SEQ ID NO: 2376623 - RNA, 19 nt, Artificial Sequence
  Description of Artificial Sequence: Synthetic oligonucleotide
ucucggaagcggcagaucu

SEQ ID NO: 2376624 - RNA, 19 nt, Artificial Sequence
  Description of Artificial Sequence: Synthetic oligonucleotide
uauuuaauaccaaguccaa

SEQ ID NO: 2376625 - RNA, 19 nt, Artificial Sequence
  Description of Artificial Sequence: Synthetic oligonucleotide
uauuucuccaugacgcuuc

SEQ ID NO: 2376626 - RNA, 19 nt, Artificial Sequence
  Description of Artificial Sequence: Synthetic oligonucleotide
ugcuagggucacuagaaug

SEQ ID NO: 2376627 - RNA, 19 nt, Artificial Sequence
  Description of Artificial Sequence: Synthetic oligonucleotide
aaaugucuacacccauaag

SEQ ID NO: 2376628 - RNA, 19 nt, Artificial Sequence
  Description of Artificial Sequence: Synthetic oligonucleotide
guaagugacauaaaauguc

SEQ ID NO: 2376629 - RNA, 19 nt, Artificial Sequence
  Description of Artificial Sequence: Synthetic oligonucleotide
cauaaaaugucuacaccca

SEQ ID NO: 2376630 - RNA, 19 nt, Artificial Sequence
  Description of Artificial Sequence: Synthetic oligonucleotide
uaacaacugaacaguggug

SEQ ID NO: 2376631 - RNA, 19 nt, Artificial Sequence
  Description of Artificial Sequence: Synthetic oligonucleotide
agaaugccaaaguggcugg

SEQ ID NO: 2376632 - RNA, 19 nt, Artificial Sequence
  Description of Artificial Sequence: Synthetic oligonucleotide
guugccuaacaacugaaca

SEQ ID NO: 2376633 - RNA, 19 nt, Artificial Sequence
  Description of Artificial Sequence: Synthetic oligonucleotide
augccaaaguggcuggugg

SEQ ID NO: 2376634 - RNA, 19 nt, Artificial Sequence
  Description of Artificial Sequence: Synthetic oligonucleotide
gaaccacaggcuugcaagg

SEQ ID NO: 2376635 - RNA, 19 nt, Artificial Sequence
  Description of Artificial Sequence: Synthetic oligonucleotide
acagcuguacaaccaauca

SEQ ID NO: 2376636 - RNA, 19 nt, Artificial Sequence
  Description of Artificial Sequence: Synthetic oligonucleotide
cuuaagguuccugcuaggg

SEQ ID NO: 2376637 - RNA, 19 nt, Artificial Sequence
  Description of Artificial Sequence: Synthetic oligonucleotide
ucucauacugcuggucucg

SEQ ID NO: 2376638 - RNA, 19 nt, Artificial Sequence
  Description of Artificial Sequence: Synthetic oligonucleotide
cacagccucaauuucugcc

SEQ ID NO: 2376639 - RNA, 19 nt, Artificial Sequence
  Description of Artificial Sequence: Synthetic oligonucleotide
uaugggcgcugucugaggc

SEQ ID NO: 2376640 - RNA, 19 nt, Artificial Sequence
  Description of Artificial Sequence: Synthetic oligonucleotide
agagauggguagucugugg

SEQ ID NO: 2376641 - RNA, 19 nt, Artificial Sequence
  Description of Artificial Sequence: Synthetic oligonucleotide
gaggcggagagauggguag

SEQ ID NO: 2376642 - RNA, 19 nt, Artificial Sequence
  Description of Artificial Sequence: Synthetic oligonucleotide
cauaaguaacaauacuuaa

SEQ ID NO: 2376643 - RNA, 19 nt, Artificial Sequence
  Description of Artificial Sequence: Synthetic oligonucleotide
gagcauagcagccggcgag

SEQ ID NO: 2376644 - RNA, 19 nt, Artificial Sequence
  Description of Artificial Sequence: Synthetic oligonucleotide
gcaucggcaguauaaagag

SEQ ID NO: 2376645 - RNA, 19 nt, Artificial Sequence
  Description of Artificial Sequence: Synthetic oligonucleotide
acacccauaaguaacaaua

SEQ ID NO: 2376646 - RNA, 19 nt, Artificial Sequence
  Description of Artificial Sequence: Synthetic oligonucleotide
aucucauacugcuggucuc

SEQ ID NO: 2376647 - RNA, 19 nt, Artificial Sequence
  Description of Artificial Sequence: Synthetic oligonucleotide
uguugccuaacaacugaac

SEQ ID NO: 2376648 - RNA, 19 nt, Artificial Sequence
  Description of Artificial Sequence: Synthetic oligonucleotide
ugccuaacaacugaacagu

SEQ ID NO: 2376649 - RNA, 19 nt, Artificial Sequence
  Description of Artificial Sequence: Synthetic oligonucleotide
augacgcuucccuuagcac

SEQ ID NO: 2376650 - RNA, 19 nt, Artificial Sequence
  Description of Artificial Sequence: Synthetic oligonucleotide
caagcaagcagggucgagg

SEQ ID NO: 2376651 - RNA, 19 nt, Artificial Sequence
  Description of Artificial Sequence: Synthetic oligonucleotide
acccauaaguaacaauacu

SEQ ID NO: 2376652 - RNA, 19 nt, Artificial Sequence
  Description of Artificial Sequence: Synthetic oligonucleotide
uccaguuguugccuaacaa

SEQ ID NO: 2376653 - RNA, 19 nt, Artificial Sequence
  Description of Artificial Sequence: Synthetic oligonucleotide
uggugggccucacaucacg

SEQ ID NO: 2376654 - RNA, 19 nt, Artificial Sequence
  Description of Artificial Sequence: Synthetic oligonucleotide
caucauagagcugcgggcc

SEQ ID NO: 2376655 - RNA, 19 nt, Artificial Sequence
  Description of Artificial Sequence: Synthetic oligonucleotide
uggagcauagcagccggcg

SEQ ID NO: 2376656 - RNA, 19 nt, Artificial Sequence
  Description of Artificial Sequence: Synthetic oligonucleotide
caaacucgggcugauaaac

SEQ ID NO: 2376657 - RNA, 19 nt, Artificial Sequence
  Description of Artificial Sequence: Synthetic oligonucleotide
guuguugccuaacaacuga

SEQ ID NO: 2376658 - RNA, 19 nt, Artificial Sequence
  Description of Artificial Sequence: Synthetic oligonucleotide
ugcaggaaccacaggcuug

SEQ ID NO: 2376659 - RNA, 19 nt, Artificial Sequence
  Description of Artificial Sequence: Synthetic oligonucleotide
cagccggcgagccugaagg

SEQ ID NO: 2376660 - RNA, 19 nt, Artificial Sequence
  Description of Artificial Sequence: Synthetic oligonucleotide
ugcaaggcuggcaucggca

SEQ ID NO: 2376661 - RNA, 19 nt, Artificial Sequence
  Description of Artificial Sequence: Synthetic oligonucleotide
aucggcaguauaaagagau

SEQ ID NO: 2376662 - RNA, 19 nt, Artificial Sequence
  Description of Artificial Sequence: Synthetic oligonucleotide
acuuaagguuccugcuagg

SEQ ID NO: 2376663 - RNA, 19 nt, Artificial Sequence
  Description of Artificial Sequence: Synthetic oligonucleotide
gcaguauaaagagaucagg

SEQ ID NO: 2376664 - RNA, 19 nt, Artificial Sequence
  Description of Artificial Sequence: Synthetic oligonucleotide
ugggauaaaccaggggucc

SEQ ID NO: 2376665 - RNA, 19 nt, Artificial Sequence
  Description of Artificial Sequence: Synthetic oligonucleotide
ucugaggcggagagauggg

SEQ ID NO: 2376666 - RNA, 19 nt, Artificial Sequence
  Description of Artificial Sequence: Synthetic oligonucleotide
acugaacaguggugcagac

SEQ ID NO: 2376667 - RNA, 19 nt, Artificial Sequence
  Description of Artificial Sequence: Synthetic oligonucleotide
cuucccuuagcaccauggg

SEQ ID NO: 2376668 - RNA, 19 nt, Artificial Sequence
  Description of Artificial Sequence: Synthetic oligonucleotide
uccugcuagggucacuaga

SEQ ID NO: 2376669 - RNA, 19 nt, Artificial Sequence
  Description of Artificial Sequence: Synthetic oligonucleotide
auaccaaguccaaacucgg

SEQ ID NO: 2376670 - RNA, 19 nt, Artificial Sequence
  Description of Artificial Sequence: Synthetic oligonucleotide
agugcgcacgaacuccuuc

SEQ ID NO: 2376671 - RNA, 19 nt, Artificial Sequence
  Description of Artificial Sequence: Synthetic oligonucleotide
auacugcuggucucggaag

SEQ ID NO: 2376672 - RNA, 19 nt, Artificial Sequence
  Description of Artificial Sequence: Synthetic oligonucleotide
cuacgcaggaccgugcuag

SEQ ID NO: 2376673 - RNA, 19 nt, Artificial Sequence
  Description of Artificial Sequence: Synthetic oligonucleotide
aacaauacuuaagguuccu

SEQ ID NO: 2376674 - RNA, 19 nt, Artificial Sequence
  Description of Artificial Sequence: Synthetic oligonucleotide
gucuacacccauaaguaac

SEQ ID NO: 2376675 - RNA, 19 nt, Artificial Sequence
  Description of Artificial Sequence: Synthetic oligonucleotide
agauggguagucuguggug

SEQ ID NO: 2376676 - RNA, 19 nt, Artificial Sequence
  Description of Artificial Sequence: Synthetic oligonucleotide
cauagauggcacccaggcc

SEQ ID NO: 2376677 - RNA, 19 nt, Artificial Sequence
  Description of Artificial Sequence: Synthetic oligonucleotide
ccuaacaacugaacagugg

SEQ ID NO: 2376678 - RNA, 19 nt, Artificial Sequence
  Description of Artificial Sequence: Synthetic oligonucleotide
acaacugaacaguggugca

SEQ ID NO: 2376679 - RNA, 19 nt, Artificial Sequence
  Description of Artificial Sequence: Synthetic oligonucleotide
auacuuaagguuccugcua

SEQ ID NO: 2376680 - RNA, 19 nt, Artificial Sequence
  Description of Artificial Sequence: Synthetic oligonucleotide
gcuagggucacuagaaugc

SEQ ID NO: 2376681 - RNA, 19 nt, Artificial Sequence
  Description of Artificial Sequence: Synthetic oligonucleotide
agcaccauggggcaagcaa

SEQ ID NO: 2376682 - RNA, 19 nt, Artificial Sequence
  Description of Artificial Sequence: Synthetic oligonucleotide
uccugguauuucuccauga

SEQ ID NO: 2376683 - RNA, 19 nt, Artificial Sequence
  Description of Artificial Sequence: Synthetic oligonucleotide
aacuccuuccaccgccgug

SEQ ID NO: 2376684 - RNA, 19 nt, Artificial Sequence
  Description of Artificial Sequence: Synthetic oligonucleotide
auagcagccggcgagccug

SEQ ID NO: 2376685 - RNA, 19 nt, Artificial Sequence
  Description of Artificial Sequence: Synthetic oligonucleotide
uggcaucggcaguauaaag

SEQ ID NO: 2376686 - RNA, 19 nt, Artificial Sequence
  Description of Artificial Sequence: Synthetic oligonucleotide
cagcuguacaaccaaucac

SEQ ID NO: 2376687 - RNA, 19 nt, Artificial Sequence
  Description of Artificial Sequence: Synthetic oligonucleotide
ccaagcaggaaugaggccc

SEQ ID NO: 2376688 - RNA, 19 nt, Artificial Sequence
  Description of Artificial Sequence: Synthetic oligonucleotide
agcauagcagccggcgagc

SEQ ID NO: 2376689 - RNA, 19 nt, Artificial Sequence
  Description of Artificial Sequence: Synthetic oligonucleotide
aaaguggcuggugggccuc

SEQ ID NO: 2376690 - RNA, 19 nt, Artificial Sequence
  Description of Artificial Sequence: Synthetic oligonucleotide
gugugggauaaaccagggg

SEQ ID NO: 2376691 - RNA, 19 nt, Artificial Sequence
  Description of Artificial Sequence: Synthetic oligonucleotide
acaauacuuaagguuccug

SEQ ID NO: 2376692 - RNA, 19 nt, Artificial Sequence
  Description of Artificial Sequence: Synthetic oligonucleotide
aggguaugggcgcugucug

SEQ ID NO: 2376693 - RNA, 19 nt, Artificial Sequence
  Description of Artificial Sequence: Synthetic oligonucleotide
augucuacacccauaagua

SEQ ID NO: 2376694 - RNA, 19 nt, Artificial Sequence
  Description of Artificial Sequence: Synthetic oligonucleotide
ccaguuguugccuaacaac

SEQ ID NO: 2376695 - RNA, 19 nt, Artificial Sequence
  Description of Artificial Sequence: Synthetic oligonucleotide
uuaagcuacuaaagauauu

SEQ ID NO: 2376696 - RNA, 19 nt, Artificial Sequence
  Description of Artificial Sequence: Synthetic oligonucleotide
caguggugcagacuuuccc

SEQ ID NO: 2376697 - RNA, 19 nt, Artificial Sequence
  Description of Artificial Sequence: Synthetic oligonucleotide
ucacaucauagagcugcgg

SEQ ID NO: 2376698 - RNA, 19 nt, Artificial Sequence
  Description of Artificial Sequence: Synthetic oligonucleotide
caugacgcuucccuuagca

SEQ ID NO: 2376699 - RNA, 19 nt, Artificial Sequence
  Description of Artificial Sequence: Synthetic oligonucleotide
cuagggucacuagaaugcc

SEQ ID NO: 2376700 - RNA, 19 nt, Artificial Sequence
  Description of Artificial Sequence: Synthetic oligonucleotide
uacacccauaaguaacaau

SEQ ID NO: 2376701 - RNA, 19 nt, Artificial Sequence
  Description of Artificial Sequence: Synthetic oligonucleotide
gucacuagaaugccaaagu

SEQ ID NO: 2376702 - RNA, 19 nt, Artificial Sequence
  Description of Artificial Sequence: Synthetic oligonucleotide
aaacucgggcugauaaaca

SEQ ID NO: 2376703 - RNA, 19 nt, Artificial Sequence
  Description of Artificial Sequence: Synthetic oligonucleotide
gugcgcacgaacuccuucc

SEQ ID NO: 2376704 - RNA, 19 nt, Artificial Sequence
  Description of Artificial Sequence: Synthetic oligonucleotide
caaguccaaacucgggcug

SEQ ID NO: 2376705 - RNA, 19 nt, Artificial Sequence
  Description of Artificial Sequence: Synthetic oligonucleotide
acaguggugcagacuuucc

SEQ ID NO: 2376706 - RNA, 19 nt, Artificial Sequence
  Description of Artificial Sequence: Synthetic oligonucleotide
gcacgaacuccuuccaccg

SEQ ID NO: 2376707 - RNA, 19 nt, Artificial Sequence
  Description of Artificial Sequence: Synthetic oligonucleotide
ugaggcggagagaugggua

SEQ ID NO: 2376708 - RNA, 19 nt, Artificial Sequence
  Description of Artificial Sequence: Synthetic oligonucleotide
uugcaaggcuggcaucggc

SEQ ID NO: 2376709 - RNA, 19 nt, Artificial Sequence
  Description of Artificial Sequence: Synthetic oligonucleotide
gacuuucccacugucuuga

SEQ ID NO: 2376710 - RNA, 19 nt, Artificial Sequence
  Description of Artificial Sequence: Synthetic oligonucleotide
cagagugcgcacgaacucc

SEQ ID NO: 2376711 - RNA, 19 nt, Artificial Sequence
  Description of Artificial Sequence: Synthetic oligonucleotide
ggguuaguaagugacauaa

SEQ ID NO: 2376712 - RNA, 19 nt, Artificial Sequence
  Description of Artificial Sequence: Synthetic oligonucleotide
ggcaguauaaagagaucag

SEQ ID NO: 2376713 - RNA, 19 nt, Artificial Sequence
  Description of Artificial Sequence: Synthetic oligonucleotide
ugcuacgcaggaccgugcu

SEQ ID NO: 2376714 - RNA, 19 nt, Artificial Sequence
  Description of Artificial Sequence: Synthetic oligonucleotide
aaguccaaacucgggcuga

SEQ ID NO: 2376715 - RNA, 19 nt, Artificial Sequence
  Description of Artificial Sequence: Synthetic oligonucleotide
uggguagucuguggugagg

SEQ ID NO: 2376716 - RNA, 19 nt, Artificial Sequence
  Description of Artificial Sequence: Synthetic oligonucleotide
ucauagagcugcgggccag

SEQ ID NO: 2376717 - RNA, 19 nt, Artificial Sequence
  Description of Artificial Sequence: Synthetic oligonucleotide
augggcgcugucugaggcg

SEQ ID NO: 2376718 - RNA, 19 nt, Artificial Sequence
  Description of Artificial Sequence: Synthetic oligonucleotide
aagguuccugcuaggguca

SEQ ID NO: 2376719 - RNA, 19 nt, Artificial Sequence
  Description of Artificial Sequence: Synthetic oligonucleotide
auagagcugcgggccaggc

SEQ ID NO: 2376720 - RNA, 19 nt, Artificial Sequence
  Description of Artificial Sequence: Synthetic oligonucleotide
aagugacauaaaaugucua

SEQ ID NO: 2376721 - RNA, 19 nt, Artificial Sequence
  Description of Artificial Sequence: Synthetic oligonucleotide
ggggcaagcaagcaggguc

SEQ ID NO: 2376722 - RNA, 19 nt, Artificial Sequence
  Description of Artificial Sequence: Synthetic oligonucleotide
ucggcaguauaaagagauc

SEQ ID NO: 2376723 - RNA, 19 nt, Artificial Sequence
  Description of Artificial Sequence: Synthetic oligonucleotide
gagauggguagucuguggu

SEQ ID NO: 2376724 - RNA, 19 nt, Artificial Sequence
  Description of Artificial Sequence: Synthetic oligonucleotide
gcuggagcauagcagccgg

SEQ ID NO: 2376725 - RNA, 19 nt, Artificial Sequence
  Description of Artificial Sequence: Synthetic oligonucleotide
ccugagugugggauaaacc

SEQ ID NO: 2376726 - RNA, 19 nt, Artificial Sequence
  Description of Artificial Sequence: Synthetic oligonucleotide
auaaaccagggguccaguu

SEQ ID NO: 2376727 - RNA, 19 nt, Artificial Sequence
  Description of Artificial Sequence: Synthetic oligonucleotide
gcguuugagcaucucauac

SEQ ID NO: 2376728 - RNA, 19 nt, Artificial Sequence
  Description of Artificial Sequence: Synthetic oligonucleotide
guaugggcgcugucugagg

SEQ ID NO: 2376729 - RNA, 19 nt, Artificial Sequence
  Description of Artificial Sequence: Synthetic oligonucleotide
ggcccaagcaggaaugagg

SEQ ID NO: 2376730 - RNA, 19 nt, Artificial Sequence
  Description of Artificial Sequence: Synthetic oligonucleotide
ugccgccagcguuugagca

SEQ ID NO: 2376731 - RNA, 19 nt, Artificial Sequence
  Description of Artificial Sequence: Synthetic oligonucleotide
acaggcuugcaaggcuggc

SEQ ID NO: 2376732 - RNA, 19 nt, Artificial Sequence
  Description of Artificial Sequence: Synthetic oligonucleotide
cagggucgaggccagccgg

SEQ ID NO: 2376733 - RNA, 19 nt, Artificial Sequence
  Description of Artificial Sequence: Synthetic oligonucleotide
gugggauaaaccagggguc

SEQ ID NO: 2376734 - RNA, 19 nt, Artificial Sequence
  Description of Artificial Sequence: Synthetic oligonucleotide
guacaaccaaucacuuggc

SEQ ID NO: 2376735 - RNA, 19 nt, Artificial Sequence
  Description of Artificial Sequence: Synthetic oligonucleotide
gacgcuucccuuagcacca

SEQ ID NO: 2376736 - RNA, 19 nt, Artificial Sequence
  Description of Artificial Sequence: Synthetic oligonucleotide
aagcuacuaaagauauuua

SEQ ID NO: 2376737 - RNA, 19 nt, Artificial Sequence
  Description of Artificial Sequence: Synthetic oligonucleotide
ucacaucacgggccgugcu

SEQ ID NO: 2376738 - RNA, 19 nt, Artificial Sequence
  Description of Artificial Sequence: Synthetic oligonucleotide
uaaagagaucagggugggc

SEQ ID NO: 2376739 - RNA, 19 nt, Artificial Sequence
  Description of Artificial Sequence: Synthetic oligonucleotide
gaagcggcagaucuccacu

SEQ ID NO: 2376740 - RNA, 19 nt, Artificial Sequence
  Description of Artificial Sequence: Synthetic oligonucleotide
cacaucacgggccgugcug

SEQ ID NO: 2376741 - RNA, 19 nt, Artificial Sequence
  Description of Artificial Sequence: Synthetic oligonucleotide
ucgggcugauaaacagcug

SEQ ID NO: 2376742 - RNA, 19 nt, Artificial Sequence
  Description of Artificial Sequence: Synthetic oligonucleotide
agggucacuagaaugccaa

SEQ ID NO: 2376743 - RNA, 19 nt, Artificial Sequence
  Description of Artificial Sequence: Synthetic oligonucleotide
ggcaucggcaguauaaaga

SEQ ID NO: 2376744 - RNA, 19 nt, Artificial Sequence
  Description of Artificial Sequence: Synthetic oligonucleotide
cucgggcugauaaacagcu

SEQ ID NO: 2376745 - RNA, 19 nt, Artificial Sequence
  Description of Artificial Sequence: Synthetic oligonucleotide
aggaaccacaggcuugcaa

SEQ ID NO: 2376746 - RNA, 19 nt, Artificial Sequence
  Description of Artificial Sequence: Synthetic oligonucleotide
agggccgcauagauggcac

SEQ ID NO: 2376747 - RNA, 19 nt, Artificial Sequence
  Description of Artificial Sequence: Synthetic oligonucleotide
cugcgggccaggcuggagc

SEQ ID NO: 2376748 - RNA, 19 nt, Artificial Sequence
  Description of Artificial Sequence: Synthetic oligonucleotide
gguaugggcgcugucugag

SEQ ID NO: 2376749 - RNA, 19 nt, Artificial Sequence
  Description of Artificial Sequence: Synthetic oligonucleotide
uggugcagacuuucccacu

SEQ ID NO: 2376750 - RNA, 19 nt, Artificial Sequence
  Description of Artificial Sequence: Synthetic oligonucleotide
acuuggccccuccugguau

SEQ ID NO: 2376751 - RNA, 19 nt, Artificial Sequence
  Description of Artificial Sequence: Synthetic oligonucleotide
cccacugcgcuccagggcc

SEQ ID NO: 2376752 - RNA, 19 nt, Artificial Sequence
  Description of Artificial Sequence: Synthetic oligonucleotide
uccaccgccgugcggggac

SEQ ID NO: 2376753 - RNA, 19 nt, Artificial Sequence
  Description of Artificial Sequence: Synthetic oligonucleotide
gcccaagcaggaaugaggc

SEQ ID NO: 2376754 - RNA, 19 nt, Artificial Sequence
  Description of Artificial Sequence: Synthetic oligonucleotide
ggauaaaccagggguccag

SEQ ID NO: 2376755 - RNA, 19 nt, Artificial Sequence
  Description of Artificial Sequence: Synthetic oligonucleotide
ucccgcagccccagagugc

SEQ ID NO: 2376756 - RNA, 19 nt, Artificial Sequence
  Description of Artificial Sequence: Synthetic oligonucleotide
aaccaaucacuuggccccu

SEQ ID NO: 2376757 - RNA, 19 nt, Artificial Sequence
  Description of Artificial Sequence: Synthetic oligonucleotide
ugcggggacugcauccauc

SEQ ID NO: 2376758 - RNA, 19 nt, Artificial Sequence
  Description of Artificial Sequence: Synthetic oligonucleotide
cacgaacuccuuccaccgc

SEQ ID NO: 2376759 - RNA, 19 nt, Artificial Sequence
  Description of Artificial Sequence: Synthetic oligonucleotide
cucggaagcggcagaucuc

SEQ ID NO: 2376760 - RNA, 19 nt, Artificial Sequence
  Description of Artificial Sequence: Synthetic oligonucleotide
ugcgcagguccucccgcca

SEQ ID NO: 2376761 - RNA, 19 nt, Artificial Sequence
  Description of Artificial Sequence: Synthetic oligonucleotide
gcuacuaaagauauuuaau

SEQ ID NO: 2376762 - RNA, 19 nt, Artificial Sequence
  Description of Artificial Sequence: Synthetic oligonucleotide
cuggagcauagcagccggc

SEQ ID NO: 2376763 - RNA, 19 nt, Artificial Sequence
  Description of Artificial Sequence: Synthetic oligonucleotide
agggucgaggccagccggc

SEQ ID NO: 2376764 - RNA, 19 nt, Artificial Sequence
  Description of Artificial Sequence: Synthetic oligonucleotide
ggccucacaucacgggccg

SEQ ID NO: 2376765 - RNA, 19 nt, Artificial Sequence
  Description of Artificial Sequence: Synthetic oligonucleotide
caucggcaguauaaagaga

SEQ ID NO: 2376766 - RNA, 19 nt, Artificial Sequence
  Description of Artificial Sequence: Synthetic oligonucleotide
ggcugauaaacagcuguac

SEQ ID NO: 2376767 - RNA, 19 nt, Artificial Sequence
  Description of Artificial Sequence: Synthetic oligonucleotide
gcagaucuccacuuccaca

SEQ ID NO: 2376768 - RNA, 19 nt, Artificial Sequence
  Description of Artificial Sequence: Synthetic oligonucleotide
cugcuacgcaggaccgugc

SEQ ID NO: 2376769 - RNA, 19 nt, Artificial Sequence
  Description of Artificial Sequence: Synthetic oligonucleotide
ccggcgagccugaaggagg

SEQ ID NO: 2376770 - RNA, 19 nt, Artificial Sequence
  Description of Artificial Sequence: Synthetic oligonucleotide
ggcuggagcauagcagccg

SEQ ID NO: 2376771 - RNA, 19 nt, Artificial Sequence
  Description of Artificial Sequence: Synthetic oligonucleotide
gcagggucgaggccagccg

SEQ ID NO: 2376772 - RNA, 19 nt, Artificial Sequence
  Description of Artificial Sequence: Synthetic oligonucleotide
agagaucagggugggccca

SEQ ID NO: 2376773 - RNA, 19 nt, Artificial Sequence
  Description of Artificial Sequence: Synthetic oligonucleotide
ggcagaucuccacuuccac

SEQ ID NO: 2376774 - RNA, 19 nt, Artificial Sequence
  Description of Artificial Sequence: Synthetic oligonucleotide
cugucuugaggugccagga

SEQ ID NO: 2376775 - RNA, 19 nt, Artificial Sequence
  Description of Artificial Sequence: Synthetic oligonucleotide
cuuccaccgccgugcgggg

SEQ ID NO: 2376776 - RNA, 19 nt, Artificial Sequence
  Description of Artificial Sequence: Synthetic oligonucleotide
aucuccacuuccacagccu

SEQ ID NO: 2376777 - RNA, 19 nt, Artificial Sequence
  Description of Artificial Sequence: Synthetic oligonucleotide
cuagaaugccaaaguggcu

SEQ ID NO: 2376778 - RNA, 19 nt, Artificial Sequence
  Description of Artificial Sequence: Synthetic oligonucleotide
ggugggccucacaucacgg

SEQ ID NO: 2376779 - RNA, 19 nt, Artificial Sequence
  Description of Artificial Sequence: Synthetic oligonucleotide
ccugcuagggucacuagaa

SEQ ID NO: 2376780 - RNA, 19 nt, Artificial Sequence
  Description of Artificial Sequence: Synthetic oligonucleotide
cuccaugacgcuucccuua

SEQ ID NO: 2376781 - RNA, 19 nt, Artificial Sequence
  Description of Artificial Sequence: Synthetic oligonucleotide
gagccugaaggaggcgccc

SEQ ID NO: 2376782 - RNA, 19 nt, Artificial Sequence
  Description of Artificial Sequence: Synthetic oligonucleotide
gauaaaccagggguccagu

SEQ ID NO: 2376783 - RNA, 19 nt, Artificial Sequence
  Description of Artificial Sequence: Synthetic oligonucleotide
gcugcuacgcaggaccgug

SEQ ID NO: 2376784 - RNA, 19 nt, Artificial Sequence
  Description of Artificial Sequence: Synthetic oligonucleotide
ggugaggucagggucucca

SEQ ID NO: 2376785 - RNA, 19 nt, Artificial Sequence
  Description of Artificial Sequence: Synthetic oligonucleotide
cagcguuugagcaucucau

SEQ ID NO: 2376786 - RNA, 19 nt, Artificial Sequence
  Description of Artificial Sequence: Synthetic oligonucleotide
gccuaacaacugaacagug

SEQ ID NO: 2376787 - RNA, 19 nt, Artificial Sequence
  Description of Artificial Sequence: Synthetic oligonucleotide
ccaaaguggcuggugggcc

SEQ ID NO: 2376788 - RNA, 19 nt, Artificial Sequence
  Description of Artificial Sequence: Synthetic oligonucleotide
gcuggcaucggcaguauaa

SEQ ID NO: 2376789 - RNA, 19 nt, Artificial Sequence
  Description of Artificial Sequence: Synthetic oligonucleotide
gguauuucuccaugacgcu

SEQ ID NO: 2376790 - RNA, 19 nt, Artificial Sequence
  Description of Artificial Sequence: Synthetic oligonucleotide
gcggggacugcauccauca

SEQ ID NO: 2376791 - RNA, 19 nt, Artificial Sequence
  Description of Artificial Sequence: Synthetic oligonucleotide
ggccgcauagauggcaccc

SEQ ID NO: 2376792 - RNA, 19 nt, Artificial Sequence
  Description of Artificial Sequence: Synthetic oligonucleotide
gagcugcgggccaggcugg

SEQ ID NO: 2376793 - RNA, 19 nt, Artificial Sequence
  Description of Artificial Sequence: Synthetic oligonucleotide
accaaucacuuggccccuc

SEQ ID NO: 2376794 - RNA, 19 nt, Artificial Sequence
  Description of Artificial Sequence: Synthetic oligonucleotide
cccgccaccagccuuccac

SEQ ID NO: 2376795 - RNA, 19 nt, Artificial Sequence
  Description of Artificial Sequence: Synthetic oligonucleotide
uccucccgccaccagccuu

SEQ ID NO: 2376796 - RNA, 19 nt, Artificial Sequence
  Description of Artificial Sequence: Synthetic oligonucleotide
cuggcaucggcaguauaaa

SEQ ID NO: 2376797 - RNA, 19 nt, Artificial Sequence
  Description of Artificial Sequence: Synthetic oligonucleotide
gcgagccugaaggaggcgc

SEQ ID NO: 2376798 - RNA, 19 nt, Artificial Sequence
  Description of Artificial Sequence: Synthetic oligonucleotide
ccagcguuugagcaucuca

SEQ ID NO: 2376799 - RNA, 19 nt, Artificial Sequence
  Description of Artificial Sequence: Synthetic oligonucleotide
agaucagggugggcccaag

SEQ ID NO: 2376800 - RNA, 19 nt, Artificial Sequence
  Description of Artificial Sequence: Synthetic oligonucleotide
ccagagugcgcacgaacuc

SEQ ID NO: 2376801 - RNA, 19 nt, Artificial Sequence
  Description of Artificial Sequence: Synthetic oligonucleotide
gggccucacaucacgggcc

SEQ ID NO: 2376802 - RNA, 19 nt, Artificial Sequence
  Description of Artificial Sequence: Synthetic oligonucleotide
cagccccagagugcgcacg

SEQ ID NO: 2376803 - RNA, 19 nt, Artificial Sequence
  Description of Artificial Sequence: Synthetic oligonucleotide
cggagagauggguagucug

SEQ ID NO: 2376804 - RNA, 19 nt, Artificial Sequence
  Description of Artificial Sequence: Synthetic oligonucleotide
accgccgugcggggacugc

SEQ ID NO: 2376805 - RNA, 19 nt, Artificial Sequence
  Description of Artificial Sequence: Synthetic oligonucleotide
caaaguggcuggugggccu

SEQ ID NO: 2376806 - RNA, 19 nt, Artificial Sequence
  Description of Artificial Sequence: Synthetic oligonucleotide
agccggcgagccugaagga

SEQ ID NO: 2376807 - RNA, 19 nt, Artificial Sequence
  Description of Artificial Sequence: Synthetic oligonucleotide
guauuucuccaugacgcuu

SEQ ID NO: 2376808 - RNA, 19 nt, Artificial Sequence
  Description of Artificial Sequence: Synthetic oligonucleotide
cccaagcaggaaugaggcc

SEQ ID NO: 2376809 - RNA, 19 nt, Artificial Sequence
  Description of Artificial Sequence: Synthetic oligonucleotide
ccgugcggggacugcaucc

SEQ ID NO: 2376810 - RNA, 19 nt, Artificial Sequence
  Description of Artificial Sequence: Synthetic oligonucleotide
caggcuugcaaggcuggca

SEQ ID NO: 2376811 - RNA, 19 nt, Artificial Sequence
  Description of Artificial Sequence: Synthetic oligonucleotide
aggaggguaugggcgcugu

SEQ ID NO: 2376812 - RNA, 19 nt, Artificial Sequence
  Description of Artificial Sequence: Synthetic oligonucleotide
cgaacuccuuccaccgccg

SEQ ID NO: 2376813 - RNA, 19 nt, Artificial Sequence
  Description of Artificial Sequence: Synthetic oligonucleotide
gcugcgcagguccucccgc

SEQ ID NO: 2376814 - RNA, 19 nt, Artificial Sequence
  Description of Artificial Sequence: Synthetic oligonucleotide
agccugaaggaggcgccca

SEQ ID NO: 2376815 - RNA, 19 nt, Artificial Sequence
  Description of Artificial Sequence: Synthetic oligonucleotide
ccgcauagauggcacccag

SEQ ID NO: 2376816 - RNA, 19 nt, Artificial Sequence
  Description of Artificial Sequence: Synthetic oligonucleotide
gguuaguaagugacauaaa

SEQ ID NO: 2376817 - RNA, 19 nt, Artificial Sequence
  Description of Artificial Sequence: Synthetic oligonucleotide
ccaaguccaaacucgggcu

SEQ ID NO: 2376818 - RNA, 19 nt, Artificial Sequence
  Description of Artificial Sequence: Synthetic oligonucleotide
aggcggagagauggguagu

SEQ ID NO: 2376819 - RNA, 19 nt, Artificial Sequence
  Description of Artificial Sequence: Synthetic oligonucleotide
gccucccgcagccccagag

SEQ ID NO: 2376820 - RNA, 19 nt, Artificial Sequence
  Description of Artificial Sequence: Synthetic oligonucleotide
gggguuaguaagugacaua

SEQ ID NO: 2376821 - RNA, 19 nt, Artificial Sequence
  Description of Artificial Sequence: Synthetic oligonucleotide
ccugaaggaggcgcccagg

SEQ ID NO: 2376822 - RNA, 19 nt, Artificial Sequence
  Description of Artificial Sequence: Synthetic oligonucleotide
gggcccaagcaggaaugag

SEQ ID NO: 2376823 - RNA, 19 nt, Artificial Sequence
  Description of Artificial Sequence: Synthetic oligonucleotide
cagggccgcauagauggca

SEQ ID NO: 2376824 - RNA, 19 nt, Artificial Sequence
  Description of Artificial Sequence: Synthetic oligonucleotide
gggauaaaccaggggucca

SEQ ID NO: 2376825 - RNA, 19 nt, Artificial Sequence
  Description of Artificial Sequence: Synthetic oligonucleotide
ggucgaggccagccggcgc

SEQ ID NO: 2376826 - RNA, 19 nt, Artificial Sequence
  Description of Artificial Sequence: Synthetic oligonucleotide
gccggcgagccugaaggag

SEQ ID NO: 2376827 - RNA, 19 nt, Artificial Sequence
  Description of Artificial Sequence: Synthetic oligonucleotide
gaacuccuuccaccgccgu

SEQ ID NO: 2376828 - RNA, 19 nt, Artificial Sequence
  Description of Artificial Sequence: Synthetic oligonucleotide
ccagccggcgcugcuacgc

SEQ ID NO: 2376829 - RNA, 19 nt, Artificial Sequence
  Description of Artificial Sequence: Synthetic oligonucleotide
gaaugccaaaguggcuggu

SEQ ID NO: 2376830 - RNA, 19 nt, Artificial Sequence
  Description of Artificial Sequence: Synthetic oligonucleotide
gggucgaggccagccggcg

SEQ ID NO: 2376831 - RNA, 19 nt, Artificial Sequence
  Description of Artificial Sequence: Synthetic oligonucleotide
ccucacaucacgggccgug

SEQ ID NO: 2376832 - RNA, 19 nt, Artificial Sequence
  Description of Artificial Sequence: Synthetic oligonucleotide
ccaaacucgggcugauaaa

SEQ ID NO: 2376833 - RNA, 19 nt, Artificial Sequence
  Description of Artificial Sequence: Synthetic oligonucleotide
gcaagcaagcagggucgag

SEQ ID NO: 2376834 - RNA, 19 nt, Artificial Sequence
  Description of Artificial Sequence: Synthetic oligonucleotide
ggcggagagauggguaguc

SEQ ID NO: 2376835 - RNA, 19 nt, Artificial Sequence
  Description of Artificial Sequence: Synthetic oligonucleotide
gcuguggagacuggcugca

SEQ ID NO: 2376836 - RNA, 19 nt, Artificial Sequence
  Description of Artificial Sequence: Synthetic oligonucleotide
ggugggcccaagcaggaau

SEQ ID NO: 2376837 - RNA, 19 nt, Artificial Sequence
  Description of Artificial Sequence: Synthetic oligonucleotide
ccccagagugcgcacgaac

SEQ ID NO: 2376838 - RNA, 19 nt, Artificial Sequence
  Description of Artificial Sequence: Synthetic oligonucleotide
gccggcgcugcuacgcagg

SEQ ID NO: 2376839 - RNA, 19 nt, Artificial Sequence
  Description of Artificial Sequence: Synthetic oligonucleotide
cagggucuccaucccagcu

SEQ ID NO: 2376840 - RNA, 19 nt, Artificial Sequence
  Description of Artificial Sequence: Synthetic oligonucleotide
ggcgcccagggcuguggag

SEQ ID NO: 2376841 - RNA, 19 nt, Artificial Sequence
  Description of Artificial Sequence: Synthetic oligonucleotide
caucacgggccgugcugca

SEQ ID NO: 2376842 - RNA, 19 nt, Artificial Sequence
  Description of Artificial Sequence: Synthetic oligonucleotide
caggaggguaugggcgcug

SEQ ID NO: 2376843 - RNA, 19 nt, Artificial Sequence
  Description of Artificial Sequence: Synthetic oligonucleotide
caaucacuuggccccuccu

SEQ ID NO: 2376844 - RNA, 19 nt, Artificial Sequence
  Description of Artificial Sequence: Synthetic oligonucleotide
gcgcugcuacgcaggaccg

SEQ ID NO: 2376845 - RNA, 19 nt, Artificial Sequence
  Description of Artificial Sequence: Synthetic oligonucleotide
cccagagugcgcacgaacu

SEQ ID NO: 2376846 - RNA, 19 nt, Artificial Sequence
  Description of Artificial Sequence: Synthetic oligonucleotide
gggcugauaaacagcugua

SEQ ID NO: 2376847 - RNA, 19 nt, Artificial Sequence
  Description of Artificial Sequence: Synthetic oligonucleotide
cguuugagcaucucauacu

SEQ ID NO: 2376848 - RNA, 19 nt, Artificial Sequence
  Description of Artificial Sequence: Synthetic oligonucleotide
cauagcagccggcgagccu

SEQ ID NO: 2376849 - RNA, 19 nt, Artificial Sequence
  Description of Artificial Sequence: Synthetic oligonucleotide
ccaugacgcuucccuuagc

SEQ ID NO: 2376850 - RNA, 19 nt, Artificial Sequence
  Description of Artificial Sequence: Synthetic oligonucleotide
uggccccuccugguauuuc

SEQ ID NO: 2376851 - RNA, 19 nt, Artificial Sequence
  Description of Artificial Sequence: Synthetic oligonucleotide
cggcgagccugaaggaggc

SEQ ID NO: 2376852 - RNA, 19 nt, Artificial Sequence
  Description of Artificial Sequence: Synthetic oligonucleotide
cugcuagggucacuagaau

SEQ ID NO: 2376853 - RNA, 19 nt, Artificial Sequence
  Description of Artificial Sequence: Synthetic oligonucleotide
gcgcccagggcuguggaga

SEQ ID NO: 2376854 - RNA, 19 nt, Artificial Sequence
  Description of Artificial Sequence: Synthetic oligonucleotide
ggaggguaugggcgcuguc

SEQ ID NO: 2376855 - RNA, 19 nt, Artificial Sequence
  Description of Artificial Sequence: Synthetic oligonucleotide
ggcgagccugaaggaggcg

SEQ ID NO: 2376856 - RNA, 19 nt, Artificial Sequence
  Description of Artificial Sequence: Synthetic oligonucleotide
gcggcugcgcagguccucc

SEQ ID NO: 2376857 - RNA, 19 nt, Artificial Sequence
  Description of Artificial Sequence: Synthetic oligonucleotide
gcgcagguccucccgccac

SEQ ID NO: 2376858 - RNA, 19 nt, Artificial Sequence
  Description of Artificial Sequence: Synthetic oligonucleotide
caccuccugagugugggau

SEQ ID NO: 2376859 - RNA, 19 nt, Artificial Sequence
  Description of Artificial Sequence: Synthetic oligonucleotide
ccuccugagugugggauaa

SEQ ID NO: 2376860 - RNA, 19 nt, Artificial Sequence
  Description of Artificial Sequence: Synthetic oligonucleotide
ccagggccgcauagauggc

SEQ ID NO: 2376861 - RNA, 19 nt, Artificial Sequence
  Description of Artificial Sequence: Synthetic oligonucleotide
ggcaagcaagcagggucga

SEQ ID NO: 2376862 - RNA, 19 nt, Artificial Sequence
  Description of Artificial Sequence: Synthetic oligonucleotide
cagccggcgcugcuacgca

SEQ ID NO: 2376863 - RNA, 19 nt, Artificial Sequence
  Description of Artificial Sequence: Synthetic oligonucleotide
gccagccggcgcugcuacg

SEQ ID NO: 2376864 - RNA, 19 nt, Artificial Sequence
  Description of Artificial Sequence: Synthetic oligonucleotide
ccgccagcguuugagcauc

SEQ ID NO: 2376865 - RNA, 19 nt, Artificial Sequence
  Description of Artificial Sequence: Synthetic oligonucleotide
gccgugcggggacugcauc

SEQ ID NO: 2376866 - RNA, 19 nt, Artificial Sequence
  Description of Artificial Sequence: Synthetic oligonucleotide
gcuacgcaggaccgugcua

SEQ ID NO: 2376867 - RNA, 19 nt, Artificial Sequence
  Description of Artificial Sequence: Synthetic oligonucleotide
cuuggccccuccugguauu

SEQ ID NO: 2376868 - RNA, 19 nt, Artificial Sequence
  Description of Artificial Sequence: Synthetic oligonucleotide
agcugcgggccaggcugga

SEQ ID NO: 2376869 - RNA, 19 nt, Artificial Sequence
  Description of Artificial Sequence: Synthetic oligonucleotide
cggcagaucuccacuucca

SEQ ID NO: 2376870 - RNA, 19 nt, Artificial Sequence
  Description of Artificial Sequence: Synthetic oligonucleotide
gcugcgggccaggcuggag

SEQ ID NO: 2376871 - RNA, 19 nt, Artificial Sequence
  Description of Artificial Sequence: Synthetic oligonucleotide
acgcuucccuuagcaccau

SEQ ID NO: 2376872 - RNA, 19 nt, Artificial Sequence
  Description of Artificial Sequence: Synthetic oligonucleotide
gccgccagcguuugagcau

SEQ ID NO: 2376873 - RNA, 19 nt, Artificial Sequence
  Description of Artificial Sequence: Synthetic oligonucleotide
gcggagagauggguagucu

SEQ ID NO: 2376874 - RNA, 19 nt, Artificial Sequence
  Description of Artificial Sequence: Synthetic oligonucleotide
cuccugagugugggauaaa

SEQ ID NO: 2376875 - RNA, 19 nt, Artificial Sequence
  Description of Artificial Sequence: Synthetic oligonucleotide
ggaggcgcccagggcugug

SEQ ID NO: 2376876 - RNA, 19 nt, Artificial Sequence
  Description of Artificial Sequence: Synthetic oligonucleotide
gccagcguuugagcaucuc

SEQ ID NO: 2376877 - RNA, 19 nt, Artificial Sequence
  Description of Artificial Sequence: Synthetic oligonucleotide
gugcggggacugcauccau

SEQ ID NO: 2376878 - RNA, 19 nt, Artificial Sequence
  Description of Artificial Sequence: Synthetic oligonucleotide
gagugcgcacgaacuccuu

SEQ ID NO: 2376879 - RNA, 19 nt, Artificial Sequence
  Description of Artificial Sequence: Synthetic oligonucleotide
guccucccgccaccagccu

SEQ ID NO: 2376880 - RNA, 19 nt, Artificial Sequence
  Description of Artificial Sequence: Synthetic oligonucleotide
cgugcggggacugcaucca

SEQ ID NO: 2376881 - RNA, 19 nt, Artificial Sequence
  Description of Artificial Sequence: Synthetic oligonucleotide
gcgcugucugaggcggaga

SEQ ID NO: 2376882 - RNA, 19 nt, Artificial Sequence
  Description of Artificial Sequence: Synthetic oligonucleotide
ccuuagcaccauggggcaa

SEQ ID NO: 2376883 - RNA, 19 nt, Artificial Sequence
  Description of Artificial Sequence: Synthetic oligonucleotide
ccggcgcugcuacgcagga

SEQ ID NO: 2376884 - RNA, 19 nt, Artificial Sequence
  Description of Artificial Sequence: Synthetic oligonucleotide
ccgccgugcggggacugca

SEQ ID NO: 2376885 - RNA, 19 nt, Artificial Sequence
  Description of Artificial Sequence: Synthetic oligonucleotide
gccucacaucacgggccgu

SEQ ID NO: 2376886 - RNA, 19 nt, Artificial Sequence
  Description of Artificial Sequence: Synthetic oligonucleotide
cgcugcuacgcaggaccgu

SEQ ID NO: 2376887 - RNA, 19 nt, Artificial Sequence
  Description of Artificial Sequence: Synthetic oligonucleotide
cgccgugcggggacugcau

SEQ ID NO: 2376888 - RNA, 19 nt, Artificial Sequence
  Description of Artificial Sequence: Synthetic oligonucleotide
ccaccgccgugcggggacu

SEQ ID NO: 2376889 - RNA, 19 nt, Artificial Sequence
  Description of Artificial Sequence: Synthetic oligonucleotide
auaaguuucagcuuucgga

SEQ ID NO: 2376890 - RNA, 19 nt, Artificial Sequence
  Description of Artificial Sequence: Synthetic oligonucleotide
aguuucagcuuucggaacc

SEQ ID NO: 2376891 - RNA, 19 nt, Artificial Sequence
  Description of Artificial Sequence: Synthetic oligonucleotide
uuuagcagauacuugacaa

SEQ ID NO: 2376892 - RNA, 19 nt, Artificial Sequence
  Description of Artificial Sequence: Synthetic oligonucleotide
aaaggcaaaggcugauugg

SEQ ID NO: 2376893 - RNA, 19 nt, Artificial Sequence
  Description of Artificial Sequence: Synthetic oligonucleotide
uuauuuccaugguaggugg

SEQ ID NO: 2376894 - RNA, 19 nt, Artificial Sequence
  Description of Artificial Sequence: Synthetic oligonucleotide
gucaggaucauucagcagc

SEQ ID NO: 2376895 - RNA, 19 nt, Artificial Sequence
  Description of Artificial Sequence: Synthetic oligonucleotide
ugaggaaugaggugagugg

SEQ ID NO: 2376896 - RNA, 19 nt, Artificial Sequence
  Description of Artificial Sequence: Synthetic oligonucleotide
aauuuuacuggccugcgua

SEQ ID NO: 2376897 - RNA, 19 nt, Artificial Sequence
  Description of Artificial Sequence: Synthetic oligonucleotide
aaugcuggggaauuuuacu

SEQ ID NO: 2376898 - RNA, 19 nt, Artificial Sequence
  Description of Artificial Sequence: Synthetic oligonucleotide
uaaguuucagcuuucggaa

SEQ ID NO: 2376899 - RNA, 19 nt, Artificial Sequence
  Description of Artificial Sequence: Synthetic oligonucleotide
agcaucaccaggucaaagg

SEQ ID NO: 2376900 - RNA, 19 nt, Artificial Sequence
  Description of Artificial Sequence: Synthetic oligonucleotide
aaguuucagcuuucggaac

SEQ ID NO: 2376901 - RNA, 19 nt, Artificial Sequence
  Description of Artificial Sequence: Synthetic oligonucleotide
uucggaaccuguuuggaca

SEQ ID NO: 2376902 - RNA, 19 nt, Artificial Sequence
  Description of Artificial Sequence: Synthetic oligonucleotide
cauggacuacuucaggugg

SEQ ID NO: 2376903 - RNA, 19 nt, Artificial Sequence
  Description of Artificial Sequence: Synthetic oligonucleotide
uugucagcaacacaucuuc

SEQ ID NO: 2376904 - RNA, 19 nt, Artificial Sequence
  Description of Artificial Sequence: Synthetic oligonucleotide
uucugcucagacaauccag

SEQ ID NO: 2376905 - RNA, 19 nt, Artificial Sequence
  Description of Artificial Sequence: Synthetic oligonucleotide
aggucaaaggccguguagc

SEQ ID NO: 2376906 - RNA, 19 nt, Artificial Sequence
  Description of Artificial Sequence: Synthetic oligonucleotide
cagucgaacaaguucagug

SEQ ID NO: 2376907 - RNA, 19 nt, Artificial Sequence
  Description of Artificial Sequence: Synthetic oligonucleotide
cuacacugccaccugagcg

SEQ ID NO: 2376908 - RNA, 19 nt, Artificial Sequence
  Description of Artificial Sequence: Synthetic oligonucleotide
aggaucauucagcagcauc

SEQ ID NO: 2376909 - RNA, 19 nt, Artificial Sequence
  Description of Artificial Sequence: Synthetic oligonucleotide
auacuugacaauuuccuua

SEQ ID NO: 2376910 - RNA, 19 nt, Artificial Sequence
  Description of Artificial Sequence: Synthetic oligonucleotide
agucgaacaaguucagugu

SEQ ID NO: 2376911 - RNA, 19 nt, Artificial Sequence
  Description of Artificial Sequence: Synthetic oligonucleotide
ugagcagcgaucugggaca

SEQ ID NO: 2376912 - RNA, 19 nt, Artificial Sequence
  Description of Artificial Sequence: Synthetic oligonucleotide
auuuuacuggccugcguag

SEQ ID NO: 2376913 - RNA, 19 nt, Artificial Sequence
  Description of Artificial Sequence: Synthetic oligonucleotide
agccccuugauuuagcaga

SEQ ID NO: 2376914 - RNA, 19 nt, Artificial Sequence
  Description of Artificial Sequence: Synthetic oligonucleotide
cuugucgucaggcagcaug

SEQ ID NO: 2376915 - RNA, 19 nt, Artificial Sequence
  Description of Artificial Sequence: Synthetic oligonucleotide
cauaaguuucagcuuucgg

SEQ ID NO: 2376916 - RNA, 19 nt, Artificial Sequence
  Description of Artificial Sequence: Synthetic oligonucleotide
cuucaguccucccuugucg

SEQ ID NO: 2376917 - RNA, 19 nt, Artificial Sequence
  Description of Artificial Sequence: Synthetic oligonucleotide
uguccagccaugcacgcug

SEQ ID NO: 2376918 - RNA, 19 nt, Artificial Sequence
  Description of Artificial Sequence: Synthetic oligonucleotide
aaggcugauuggcagccag

SEQ ID NO: 2376919 - RNA, 19 nt, Artificial Sequence
  Description of Artificial Sequence: Synthetic oligonucleotide
ugcauggacuacuucaggu

SEQ ID NO: 2376920 - RNA, 19 nt, Artificial Sequence
  Description of Artificial Sequence: Synthetic oligonucleotide
ccugcaugcacacagacgc

SEQ ID NO: 2376921 - RNA, 19 nt, Artificial Sequence
  Description of Artificial Sequence: Synthetic oligonucleotide
ugggacaagacacugucua

SEQ ID NO: 2376922 - RNA, 19 nt, Artificial Sequence
  Description of Artificial Sequence: Synthetic oligonucleotide
agacacugucuacacugcc

SEQ ID NO: 2376923 - RNA, 19 nt, Artificial Sequence
  Description of Artificial Sequence: Synthetic oligonucleotide
accuguuuggacauccggc

SEQ ID NO: 2376924 - RNA, 19 nt, Artificial Sequence
  Description of Artificial Sequence: Synthetic oligonucleotide
ugcucagacaauccagcug

SEQ ID NO: 2376925 - RNA, 19 nt, Artificial Sequence
  Description of Artificial Sequence: Synthetic oligonucleotide
gcucagacaauccagcugc

SEQ ID NO: 2376926 - RNA, 19 nt, Artificial Sequence
  Description of Artificial Sequence: Synthetic oligonucleotide
gucugcauaaguuucagcu

SEQ ID NO: 2376927 - RNA, 19 nt, Artificial Sequence
  Description of Artificial Sequence: Synthetic oligonucleotide
ucgguccuuauucaccugc

SEQ ID NO: 2376928 - RNA, 19 nt, Artificial Sequence
  Description of Artificial Sequence: Synthetic oligonucleotide
uuugguugcauggacuacu

SEQ ID NO: 2376929 - RNA, 19 nt, Artificial Sequence
  Description of Artificial Sequence: Synthetic oligonucleotide
uacuucaggugguccaagg

SEQ ID NO: 2376930 - RNA, 19 nt, Artificial Sequence
  Description of Artificial Sequence: Synthetic oligonucleotide
ccgaagagcaacaucagcc

SEQ ID NO: 2376931 - RNA, 19 nt, Artificial Sequence
  Description of Artificial Sequence: Synthetic oligonucleotide
gacaagacacugucuacac

SEQ ID NO: 2376932 - RNA, 19 nt, Artificial Sequence
  Description of Artificial Sequence: Synthetic oligonucleotide
ucuuugguugcauggacua

SEQ ID NO: 2376933 - RNA, 19 nt, Artificial Sequence
  Description of Artificial Sequence: Synthetic oligonucleotide
uucaaguggggcaggggug

SEQ ID NO: 2376934 - RNA, 19 nt, Artificial Sequence
  Description of Artificial Sequence: Synthetic oligonucleotide
ugguagguggccugcauga

SEQ ID NO: 2376935 - RNA, 19 nt, Artificial Sequence
  Description of Artificial Sequence: Synthetic oligonucleotide
ugucuuugguugcauggac

SEQ ID NO: 2376936 - RNA, 19 nt, Artificial Sequence
  Description of Artificial Sequence: Synthetic oligonucleotide
agcaacacaucuuccuucu

SEQ ID NO: 2376937 - RNA, 19 nt, Artificial Sequence
  Description of Artificial Sequence: Synthetic oligonucleotide
uuagcagauacuugacaau

SEQ ID NO: 2376938 - RNA, 19 nt, Artificial Sequence
  Description of Artificial Sequence: Synthetic oligonucleotide
gguugcauggacuacuuca

SEQ ID NO: 2376939 - RNA, 19 nt, Artificial Sequence
  Description of Artificial Sequence: Synthetic oligonucleotide
gcugucuuugguugcaugg

SEQ ID NO: 2376940 - RNA, 19 nt, Artificial Sequence
  Description of Artificial Sequence: Synthetic oligonucleotide
accugagcgguuaugcagc

SEQ ID NO: 2376941 - RNA, 19 nt, Artificial Sequence
  Description of Artificial Sequence: Synthetic oligonucleotide
auuuccuuauuuccauggu

SEQ ID NO: 2376942 - RNA, 19 nt, Artificial Sequence
  Description of Artificial Sequence: Synthetic oligonucleotide
uuucggaaccuguuuggac

SEQ ID NO: 2376943 - RNA, 19 nt, Artificial Sequence
  Description of Artificial Sequence: Synthetic oligonucleotide
caacucaggcuccucagag

SEQ ID NO: 2376944 - RNA, 19 nt, Artificial Sequence
  Description of Artificial Sequence: Synthetic oligonucleotide
gaguccagcgccaacucag

SEQ ID NO: 2376945 - RNA, 19 nt, Artificial Sequence
  Description of Artificial Sequence: Synthetic oligonucleotide
ucugcauaaguuucagcuu

SEQ ID NO: 2376946 - RNA, 19 nt, Artificial Sequence
  Description of Artificial Sequence: Synthetic oligonucleotide
acugucuacacugccaccu

SEQ ID NO: 2376947 - RNA, 19 nt, Artificial Sequence
  Description of Artificial Sequence: Synthetic oligonucleotide
gucccgaagagcaacauca

SEQ ID NO: 2376948 - RNA, 19 nt, Artificial Sequence
  Description of Artificial Sequence: Synthetic oligonucleotide
caccugagcgguuaugcag

SEQ ID NO: 2376949 - RNA, 19 nt, Artificial Sequence
  Description of Artificial Sequence: Synthetic oligonucleotide
aggugagugguugaagcuc

SEQ ID NO: 2376950 - RNA, 19 nt, Artificial Sequence
  Description of Artificial Sequence: Synthetic oligonucleotide
uccugaggaaugaggugag

SEQ ID NO: 2376951 - RNA, 19 nt, Artificial Sequence
  Description of Artificial Sequence: Synthetic oligonucleotide
guugccuggccuucaagug

SEQ ID NO: 2376952 - RNA, 19 nt, Artificial Sequence
  Description of Artificial Sequence: Synthetic oligonucleotide
uggcagccagcccacgugg

SEQ ID NO: 2376953 - RNA, 19 nt, Artificial Sequence
  Description of Artificial Sequence: Synthetic oligonucleotide
agcgaucugggacaagaca

SEQ ID NO: 2376954 - RNA, 19 nt, Artificial Sequence
  Description of Artificial Sequence: Synthetic oligonucleotide
caaguucagugucaggauc

SEQ ID NO: 2376955 - RNA, 19 nt, Artificial Sequence
  Description of Artificial Sequence: Synthetic oligonucleotide
aaugaggugagugguugaa

SEQ ID NO: 2376956 - RNA, 19 nt, Artificial Sequence
  Description of Artificial Sequence: Synthetic oligonucleotide
gucugcaugcuucuccacc

SEQ ID NO: 2376957 - RNA, 19 nt, Artificial Sequence
  Description of Artificial Sequence: Synthetic oligonucleotide
ucagcuuucggaaccuguu

SEQ ID NO: 2376958 - RNA, 19 nt, Artificial Sequence
  Description of Artificial Sequence: Synthetic oligonucleotide
ugucuacacugccaccuga

SEQ ID NO: 2376959 - RNA, 19 nt, Artificial Sequence
  Description of Artificial Sequence: Synthetic oligonucleotide
uuuuacuggccugcguagc

SEQ ID NO: 2376960 - RNA, 19 nt, Artificial Sequence
  Description of Artificial Sequence: Synthetic oligonucleotide
caaaggcugauuggcagcc

SEQ ID NO: 2376961 - RNA, 19 nt, Artificial Sequence
  Description of Artificial Sequence: Synthetic oligonucleotide
cacacagacgccagcaguc

SEQ ID NO: 2376962 - RNA, 19 nt, Artificial Sequence
  Description of Artificial Sequence: Synthetic oligonucleotide
gugucaggaucauucagca

SEQ ID NO: 2376963 - RNA, 19 nt, Artificial Sequence
  Description of Artificial Sequence: Synthetic oligonucleotide
ucccgaagagcaacaucag

SEQ ID NO: 2376964 - RNA, 19 nt, Artificial Sequence
  Description of Artificial Sequence: Synthetic oligonucleotide
uagcagauacuugacaauu

SEQ ID NO: 2376965 - RNA, 19 nt, Artificial Sequence
  Description of Artificial Sequence: Synthetic oligonucleotide
gucgaacaaguucaguguc

SEQ ID NO: 2376966 - RNA, 19 nt, Artificial Sequence
  Description of Artificial Sequence: Synthetic oligonucleotide
ugcauaaguuucagcuuuc

SEQ ID NO: 2376967 - RNA, 19 nt, Artificial Sequence
  Description of Artificial Sequence: Synthetic oligonucleotide
augguagguggccugcaug

SEQ ID NO: 2376968 - RNA, 19 nt, Artificial Sequence
  Description of Artificial Sequence: Synthetic oligonucleotide
ugcaugcacacagacgcca

SEQ ID NO: 2376969 - RNA, 19 nt, Artificial Sequence
  Description of Artificial Sequence: Synthetic oligonucleotide
uccggcuccaccaggacuu

SEQ ID NO: 2376970 - RNA, 19 nt, Artificial Sequence
  Description of Artificial Sequence: Synthetic oligonucleotide
guuaugcagcuccccaccc

SEQ ID NO: 2376971 - RNA, 19 nt, Artificial Sequence
  Description of Artificial Sequence: Synthetic oligonucleotide
guaacagcugccagcauca

SEQ ID NO: 2376972 - RNA, 19 nt, Artificial Sequence
  Description of Artificial Sequence: Synthetic oligonucleotide
cuaguccuguccuggggag

SEQ ID NO: 2376973 - RNA, 19 nt, Artificial Sequence
  Description of Artificial Sequence: Synthetic oligonucleotide
gcuuucggaaccuguuugg

SEQ ID NO: 2376974 - RNA, 19 nt, Artificial Sequence
  Description of Artificial Sequence: Synthetic oligonucleotide
augcacgcuguccugcuug

SEQ ID NO: 2376975 - RNA, 19 nt, Artificial Sequence
  Description of Artificial Sequence: Synthetic oligonucleotide
agacaauccagcugcuuuu

SEQ ID NO: 2376976 - RNA, 19 nt, Artificial Sequence
  Description of Artificial Sequence: Synthetic oligonucleotide
cucccuugucgucaggcag

SEQ ID NO: 2376977 - RNA, 19 nt, Artificial Sequence
  Description of Artificial Sequence: Synthetic oligonucleotide
cuugauuuagcagauacuu

SEQ ID NO: 2376978 - RNA, 19 nt, Artificial Sequence
  Description of Artificial Sequence: Synthetic oligonucleotide
gguuaugcagcuccccacc

SEQ ID NO: 2376979 - RNA, 19 nt, Artificial Sequence
  Description of Artificial Sequence: Synthetic oligonucleotide
gaucauucagcagcaucac

SEQ ID NO: 2376980 - RNA, 19 nt, Artificial Sequence
  Description of Artificial Sequence: Synthetic oligonucleotide
uuggucccgaagagcaaca

SEQ ID NO: 2376981 - RNA, 19 nt, Artificial Sequence
  Description of Artificial Sequence: Synthetic oligonucleotide
ugaagcucccagagcuggc

SEQ ID NO: 2376982 - RNA, 19 nt, Artificial Sequence
  Description of Artificial Sequence: Synthetic oligonucleotide
cccuugauuuagcagauac

SEQ ID NO: 2376983 - RNA, 19 nt, Artificial Sequence
  Description of Artificial Sequence: Synthetic oligonucleotide
gacgccagcagucgaacaa

SEQ ID NO: 2376984 - RNA, 19 nt, Artificial Sequence
  Description of Artificial Sequence: Synthetic oligonucleotide
uuuccaugguagguggccu

SEQ ID NO: 2376985 - RNA, 19 nt, Artificial Sequence
  Description of Artificial Sequence: Synthetic oligonucleotide
agcgguuaugcagcucccc

SEQ ID NO: 2376986 - RNA, 19 nt, Artificial Sequence
  Description of Artificial Sequence: Synthetic oligonucleotide
gcauggacuacuucaggug

SEQ ID NO: 2376987 - RNA, 19 nt, Artificial Sequence
  Description of Artificial Sequence: Synthetic oligonucleotide
cuccugaggaaugagguga

SEQ ID NO: 2376988 - RNA, 19 nt, Artificial Sequence
  Description of Artificial Sequence: Synthetic oligonucleotide
gaaccuguuuggacauccg

SEQ ID NO: 2376989 - RNA, 19 nt, Artificial Sequence
  Description of Artificial Sequence: Synthetic oligonucleotide
gggaauuuuacuggccugc

SEQ ID NO: 2376990 - RNA, 19 nt, Artificial Sequence
  Description of Artificial Sequence: Synthetic oligonucleotide
guugggccggccucggucc

SEQ ID NO: 2376991 - RNA, 19 nt, Artificial Sequence
  Description of Artificial Sequence: Synthetic oligonucleotide
ggaauuuuacuggccugcg

SEQ ID NO: 2376992 - RNA, 19 nt, Artificial Sequence
  Description of Artificial Sequence: Synthetic oligonucleotide
agagaaaggcaaaggcuga

SEQ ID NO: 2376993 - RNA, 19 nt, Artificial Sequence
  Description of Artificial Sequence: Synthetic oligonucleotide
ugguugucagcaacacauc

SEQ ID NO: 2376994 - RNA, 19 nt, Artificial Sequence
  Description of Artificial Sequence: Synthetic oligonucleotide
agcagcaucaccaggucaa

SEQ ID NO: 2376995 - RNA, 19 nt, Artificial Sequence
  Description of Artificial Sequence: Synthetic oligonucleotide
accugcaugcacacagacg

SEQ ID NO: 2376996 - RNA, 19 nt, Artificial Sequence
  Description of Artificial Sequence: Synthetic oligonucleotide
ucggaaccuguuuggacau

SEQ ID NO: 2376997 - RNA, 19 nt, Artificial Sequence
  Description of Artificial Sequence: Synthetic oligonucleotide
ggaaccuguuuggacaucc

SEQ ID NO: 2376998 - RNA, 19 nt, Artificial Sequence
  Description of Artificial Sequence: Synthetic oligonucleotide
ccaacugcccuguaacagc

SEQ ID NO: 2376999 - RNA, 19 nt, Artificial Sequence
  Description of Artificial Sequence: Synthetic oligonucleotide
uugguugcauggacuacuu

SEQ ID NO: 2377000 - RNA, 19 nt, Artificial Sequence
  Description of Artificial Sequence: Synthetic oligonucleotide
gcaaaggcugauuggcagc

SEQ ID NO: 2377001 - RNA, 19 nt, Artificial Sequence
  Description of Artificial Sequence: Synthetic oligonucleotide
ggaccgcugucuuugguug

SEQ ID NO: 2377002 - RNA, 19 nt, Artificial Sequence
  Description of Artificial Sequence: Synthetic oligonucleotide
aggaccgcugucuuugguu

SEQ ID NO: 2377003 - RNA, 19 nt, Artificial Sequence
  Description of Artificial Sequence: Synthetic oligonucleotide
gagcuggcaggagaggcug

SEQ ID NO: 2377004 - RNA, 19 nt, Artificial Sequence
  Description of Artificial Sequence: Synthetic oligonucleotide
cagccccuugauuuagcag

SEQ ID NO: 2377005 - RNA, 19 nt, Artificial Sequence
  Description of Artificial Sequence: Synthetic oligonucleotide
cugcaugcacacagacgcc

SEQ ID NO: 2377006 - RNA, 19 nt, Artificial Sequence
  Description of Artificial Sequence: Synthetic oligonucleotide
gcauaaguuucagcuuucg

SEQ ID NO: 2377007 - RNA, 19 nt, Artificial Sequence
  Description of Artificial Sequence: Synthetic oligonucleotide
cuguuuggacauccggcuc

SEQ ID NO: 2377008 - RNA, 19 nt, Artificial Sequence
  Description of Artificial Sequence: Synthetic oligonucleotide
gaggugagugguugaagcu

SEQ ID NO: 2377009 - RNA, 19 nt, Artificial Sequence
  Description of Artificial Sequence: Synthetic oligonucleotide
uggcaccuccugaggaaug

SEQ ID NO: 2377010 - RNA, 19 nt, Artificial Sequence
  Description of Artificial Sequence: Synthetic oligonucleotide
cuuugguugcauggacuac

SEQ ID NO: 2377011 - RNA, 19 nt, Artificial Sequence
  Description of Artificial Sequence: Synthetic oligonucleotide
ggggaauuuuacuggccug

SEQ ID NO: 2377012 - RNA, 19 nt, Artificial Sequence
  Description of Artificial Sequence: Synthetic oligonucleotide
cacugucuacacugccacc

SEQ ID NO: 2377013 - RNA, 19 nt, Artificial Sequence
  Description of Artificial Sequence: Synthetic oligonucleotide
uaccaggggccaacugccc

SEQ ID NO: 2377014 - RNA, 19 nt, Artificial Sequence
  Description of Artificial Sequence: Synthetic oligonucleotide
cccuguaacagcugccagc

SEQ ID NO: 2377015 - RNA, 19 nt, Artificial Sequence
  Description of Artificial Sequence: Synthetic oligonucleotide
gaagcucccagagcuggca

SEQ ID NO: 2377016 - RNA, 19 nt, Artificial Sequence
  Description of Artificial Sequence: Synthetic oligonucleotide
ggacaagacacugucuaca

SEQ ID NO: 2377017 - RNA, 19 nt, Artificial Sequence
  Description of Artificial Sequence: Synthetic oligonucleotide
ggcuguccagccaugcacg

SEQ ID NO: 2377018 - RNA, 19 nt, Artificial Sequence
  Description of Artificial Sequence: Synthetic oligonucleotide
ugguugcauggacuacuuc

SEQ ID NO: 2377019 - RNA, 19 nt, Artificial Sequence
  Description of Artificial Sequence: Synthetic oligonucleotide
gcauggggaugcuccaggg

SEQ ID NO: 2377020 - RNA, 19 nt, Artificial Sequence
  Description of Artificial Sequence: Synthetic oligonucleotide
acgccagcagucgaacaag

SEQ ID NO: 2377021 - RNA, 19 nt, Artificial Sequence
  Description of Artificial Sequence: Synthetic oligonucleotide
aaaggcugauuggcagcca

SEQ ID NO: 2377022 - RNA, 19 nt, Artificial Sequence
  Description of Artificial Sequence: Synthetic oligonucleotide
ggcugauuggcagccagcc

SEQ ID NO: 2377023 - RNA, 19 nt, Artificial Sequence
  Description of Artificial Sequence: Synthetic oligonucleotide
gccaacugcccuguaacag

SEQ ID NO: 2377024 - RNA, 19 nt, Artificial Sequence
  Description of Artificial Sequence: Synthetic oligonucleotide
aaggccguguagccauuuu

SEQ ID NO: 2377025 - RNA, 19 nt, Artificial Sequence
  Description of Artificial Sequence: Synthetic oligonucleotide
ggcuaguccuguccugggg

SEQ ID NO: 2377026 - RNA, 19 nt, Artificial Sequence
  Description of Artificial Sequence: Synthetic oligonucleotide
ugguccaaggcggcuaguc

SEQ ID NO: 2377027 - RNA, 19 nt, Artificial Sequence
  Description of Artificial Sequence: Synthetic oligonucleotide
gggccaacugcccuguaac

SEQ ID NO: 2377028 - RNA, 19 nt, Artificial Sequence
  Description of Artificial Sequence: Synthetic oligonucleotide
cagcgaucugggacaagac

SEQ ID NO: 2377029 - RNA, 19 nt, Artificial Sequence
  Description of Artificial Sequence: Synthetic oligonucleotide
gggacaagacacugucuac

SEQ ID NO: 2377030 - RNA, 19 nt, Artificial Sequence
  Description of Artificial Sequence: Synthetic oligonucleotide
cugcauaaguuucagcuuu

SEQ ID NO: 2377031 - RNA, 19 nt, Artificial Sequence
  Description of Artificial Sequence: Synthetic oligonucleotide
ggugguccaaggcggcuag

SEQ ID NO: 2377032 - RNA, 19 nt, Artificial Sequence
  Description of Artificial Sequence: Synthetic oligonucleotide
gccaacucaggcuccucag

SEQ ID NO: 2377033 - RNA, 19 nt, Artificial Sequence
  Description of Artificial Sequence: Synthetic oligonucleotide
agacgccagcagucgaaca

SEQ ID NO: 2377034 - RNA, 19 nt, Artificial Sequence
  Description of Artificial Sequence: Synthetic oligonucleotide
guccaaggcggcuaguccu

SEQ ID NO: 2377035 - RNA, 19 nt, Artificial Sequence
  Description of Artificial Sequence: Synthetic oligonucleotide
agcagauacuugacaauuu

SEQ ID NO: 2377036 - RNA, 19 nt, Artificial Sequence
  Description of Artificial Sequence: Synthetic oligonucleotide
cuuucggaaccuguuugga

SEQ ID NO: 2377037 - RNA, 19 nt, Artificial Sequence
  Description of Artificial Sequence: Synthetic oligonucleotide
gucaaaggccguguagcca

SEQ ID NO: 2377038 - RNA, 19 nt, Artificial Sequence
  Description of Artificial Sequence: Synthetic oligonucleotide
gcuaguccuguccugggga

SEQ ID NO: 2377039 - RNA, 19 nt, Artificial Sequence
  Description of Artificial Sequence: Synthetic oligonucleotide
uggccugcguagcaugguu

SEQ ID NO: 2377040 - RNA, 19 nt, Artificial Sequence
  Description of Artificial Sequence: Synthetic oligonucleotide
uggccggugguugggccgg

SEQ ID NO: 2377041 - RNA, 19 nt, Artificial Sequence
  Description of Artificial Sequence: Synthetic oligonucleotide
aggcggcuaguccuguccu

SEQ ID NO: 2377042 - RNA, 19 nt, Artificial Sequence
  Description of Artificial Sequence: Synthetic oligonucleotide
guccagcgccaacucaggc

SEQ ID NO: 2377043 - RNA, 19 nt, Artificial Sequence
  Description of Artificial Sequence: Synthetic oligonucleotide
cgcaugguggaguccagcg

SEQ ID NO: 2377044 - RNA, 19 nt, Artificial Sequence
  Description of Artificial Sequence: Synthetic oligonucleotide
uuacuggccugcguagcau

SEQ ID NO: 2377045 - RNA, 19 nt, Artificial Sequence
  Description of Artificial Sequence: Synthetic oligonucleotide
cccgaagagcaacaucagc

SEQ ID NO: 2377046 - RNA, 19 nt, Artificial Sequence
  Description of Artificial Sequence: Synthetic oligonucleotide
uccgggaaugcuggggaau

SEQ ID NO: 2377047 - RNA, 19 nt, Artificial Sequence
  Description of Artificial Sequence: Synthetic oligonucleotide
cagccagcccacguggcag

SEQ ID NO: 2377048 - RNA, 19 nt, Artificial Sequence
  Description of Artificial Sequence: Synthetic oligonucleotide
aguucagugucaggaucau

SEQ ID NO: 2377049 - RNA, 19 nt, Artificial Sequence
  Description of Artificial Sequence: Synthetic oligonucleotide
gcagcgaucugggacaaga

SEQ ID NO: 2377050 - RNA, 19 nt, Artificial Sequence
  Description of Artificial Sequence: Synthetic oligonucleotide
cagacaauccagcugcuuu

SEQ ID NO: 2377051 - RNA, 19 nt, Artificial Sequence
  Description of Artificial Sequence: Synthetic oligonucleotide
aacugcccuguaacagcug

SEQ ID NO: 2377052 - RNA, 19 nt, Artificial Sequence
  Description of Artificial Sequence: Synthetic oligonucleotide
cucgguccuuauucaccug

SEQ ID NO: 2377053 - RNA, 19 nt, Artificial Sequence
  Description of Artificial Sequence: Synthetic oligonucleotide
gcggcuaguccuguccugg

SEQ ID NO: 2377054 - RNA, 19 nt, Artificial Sequence
  Description of Artificial Sequence: Synthetic oligonucleotide
ccuguaacagcugccagca

SEQ ID NO: 2377055 - RNA, 19 nt, Artificial Sequence
  Description of Artificial Sequence: Synthetic oligonucleotide
gagcgguuaugcagcuccc

SEQ ID NO: 2377056 - RNA, 19 nt, Artificial Sequence
  Description of Artificial Sequence: Synthetic oligonucleotide
accgcugucuuugguugca

SEQ ID NO: 2377057 - RNA, 19 nt, Artificial Sequence
  Description of Artificial Sequence: Synthetic oligonucleotide
cagacgccagcagucgaac

SEQ ID NO: 2377058 - RNA, 19 nt, Artificial Sequence
  Description of Artificial Sequence: Synthetic oligonucleotide
ccggccucgguccuuauuc

SEQ ID NO: 2377059 - RNA, 19 nt, Artificial Sequence
  Description of Artificial Sequence: Synthetic oligonucleotide
gacuucaguccucccuugu

SEQ ID NO: 2377060 - RNA, 19 nt, Artificial Sequence
  Description of Artificial Sequence: Synthetic oligonucleotide
gguugggccggccucgguc

SEQ ID NO: 2377061 - RNA, 19 nt, Artificial Sequence
  Description of Artificial Sequence: Synthetic oligonucleotide
ggucccgaagagcaacauc

SEQ ID NO: 2377062 - RNA, 19 nt, Artificial Sequence
  Description of Artificial Sequence: Synthetic oligonucleotide
ggacuacuucagguggucc

SEQ ID NO: 2377063 - RNA, 19 nt, Artificial Sequence
  Description of Artificial Sequence: Synthetic oligonucleotide
ggcuccaccaggacuucag

SEQ ID NO: 2377064 - RNA, 19 nt, Artificial Sequence
  Description of Artificial Sequence: Synthetic oligonucleotide
gucuuugguugcauggacu

SEQ ID NO: 2377065 - RNA, 19 nt, Artificial Sequence
  Description of Artificial Sequence: Synthetic oligonucleotide
gcgguuaugcagcucccca

SEQ ID NO: 2377066 - RNA, 19 nt, Artificial Sequence
  Description of Artificial Sequence: Synthetic oligonucleotide
ggcuccgggaaugcugggg

SEQ ID NO: 2377067 - RNA, 19 nt, Artificial Sequence
  Description of Artificial Sequence: Synthetic oligonucleotide
aggaaugaggugagugguu

SEQ ID NO: 2377068 - RNA, 19 nt, Artificial Sequence
  Description of Artificial Sequence: Synthetic oligonucleotide
caaggcggcuaguccuguc

SEQ ID NO: 2377069 - RNA, 19 nt, Artificial Sequence
  Description of Artificial Sequence: Synthetic oligonucleotide
cccaggaccgcugucuuug

SEQ ID NO: 2377070 - RNA, 19 nt, Artificial Sequence
  Description of Artificial Sequence: Synthetic oligonucleotide
cagcgccaacucaggcucc

SEQ ID NO: 2377071 - RNA, 19 nt, Artificial Sequence
  Description of Artificial Sequence: Synthetic oligonucleotide
uggucccgaagagcaacau

SEQ ID NO: 2377072 - RNA, 19 nt, Artificial Sequence
  Description of Artificial Sequence: Synthetic oligonucleotide
cacagacgccagcagucga

SEQ ID NO: 2377073 - RNA, 19 nt, Artificial Sequence
  Description of Artificial Sequence: Synthetic oligonucleotide
uggagcgcugggugggcuu

SEQ ID NO: 2377074 - RNA, 19 nt, Artificial Sequence
  Description of Artificial Sequence: Synthetic oligonucleotide
aggguugccuggccuucaa

SEQ ID NO: 2377075 - RNA, 19 nt, Artificial Sequence
  Description of Artificial Sequence: Synthetic oligonucleotide
agcgccaacucaggcuccu

SEQ ID NO: 2377076 - RNA, 19 nt, Artificial Sequence
  Description of Artificial Sequence: Synthetic oligonucleotide
ccuguuuggacauccggcu

SEQ ID NO: 2377077 - RNA, 19 nt, Artificial Sequence
  Description of Artificial Sequence: Synthetic oligonucleotide
gccuucaaguggggcaggg

SEQ ID NO: 2377078 - RNA, 19 nt, Artificial Sequence
  Description of Artificial Sequence: Synthetic oligonucleotide
acguggcagugucugcaua

SEQ ID NO: 2377079 - RNA, 19 nt, Artificial Sequence
  Description of Artificial Sequence: Synthetic oligonucleotide
ggguugccuggccuucaag

SEQ ID NO: 2377080 - RNA, 19 nt, Artificial Sequence
  Description of Artificial Sequence: Synthetic oligonucleotide
gcagcauggggaugcucca

SEQ ID NO: 2377081 - RNA, 19 nt, Artificial Sequence
  Description of Artificial Sequence: Synthetic oligonucleotide
gccaugcacgcuguccugc

SEQ ID NO: 2377082 - RNA, 19 nt, Artificial Sequence
  Description of Artificial Sequence: Synthetic oligonucleotide
ggccugcguagcaugguug

SEQ ID NO: 2377083 - RNA, 19 nt, Artificial Sequence
  Description of Artificial Sequence: Synthetic oligonucleotide
ugguggaguccagcgccaa

SEQ ID NO: 2377084 - RNA, 19 nt, Artificial Sequence
  Description of Artificial Sequence: Synthetic oligonucleotide
gcccacguggcagugucug

SEQ ID NO: 2377085 - RNA, 19 nt, Artificial Sequence
  Description of Artificial Sequence: Synthetic oligonucleotide
ggcggcuaguccuguccug

SEQ ID NO: 2377086 - RNA, 19 nt, Artificial Sequence
  Description of Artificial Sequence: Synthetic oligonucleotide
cgguuaugcagcuccccac

SEQ ID NO: 2377087 - RNA, 19 nt, Artificial Sequence
  Description of Artificial Sequence: Synthetic oligonucleotide
ccaggaccgcugucuuugg

SEQ ID NO: 2377088 - RNA, 19 nt, Artificial Sequence
  Description of Artificial Sequence: Synthetic oligonucleotide
ccuuauucaccugcaugca

SEQ ID NO: 2377089 - RNA, 19 nt, Artificial Sequence
  Description of Artificial Sequence: Synthetic oligonucleotide
cugagcgguuaugcagcuc

SEQ ID NO: 2377090 - RNA, 19 nt, Artificial Sequence
  Description of Artificial Sequence: Synthetic oligonucleotide
agcagcgaucugggacaag

SEQ ID NO: 2377091 - RNA, 19 nt, Artificial Sequence
  Description of Artificial Sequence: Synthetic oligonucleotide
ggggccaacugcccuguaa

SEQ ID NO: 2377092 - RNA, 19 nt, Artificial Sequence
  Description of Artificial Sequence: Synthetic oligonucleotide
ccuggccuucaaguggggc

SEQ ID NO: 2377093 - RNA, 19 nt, Artificial Sequence
  Description of Artificial Sequence: Synthetic oligonucleotide
gagcagcgaucugggacaa

SEQ ID NO: 2377094 - RNA, 19 nt, Artificial Sequence
  Description of Artificial Sequence: Synthetic oligonucleotide
gcccgcaugguggagucca

SEQ ID NO: 2377095 - RNA, 19 nt, Artificial Sequence
  Description of Artificial Sequence: Synthetic oligonucleotide
gcguagcaugguugucagc

SEQ ID NO: 2377096 - RNA, 19 nt, Artificial Sequence
  Description of Artificial Sequence: Synthetic oligonucleotide
gccugcguagcaugguugu

SEQ ID NO: 2377097 - RNA, 19 nt, Artificial Sequence
  Description of Artificial Sequence: Synthetic oligonucleotide
ccaccugagcgguuaugca

SEQ ID NO: 2377098 - RNA, 19 nt, Artificial Sequence
  Description of Artificial Sequence: Synthetic oligonucleotide
cguggcagugucugcauaa

SEQ ID NO: 2377099 - RNA, 19 nt, Artificial Sequence
  Description of Artificial Sequence: Synthetic oligonucleotide
gguggccugcaugagggcu

SEQ ID NO: 2377100 - RNA, 19 nt, Artificial Sequence
  Description of Artificial Sequence: Synthetic oligonucleotide
gguccuuauucaccugcau

SEQ ID NO: 2377101 - RNA, 19 nt, Artificial Sequence
  Description of Artificial Sequence: Synthetic oligonucleotide
ccucccuugucgucaggca

SEQ ID NO: 2377102 - RNA, 19 nt, Artificial Sequence
  Description of Artificial Sequence: Synthetic oligonucleotide
cgcugucuuugguugcaug

SEQ ID NO: 2377103 - RNA, 19 nt, Artificial Sequence
  Description of Artificial Sequence: Synthetic oligonucleotide
ccacguggcagugucugca

SEQ ID NO: 2377104 - RNA, 19 nt, Artificial Sequence
  Description of Artificial Sequence: Synthetic oligonucleotide
cggcuaguccuguccuggg

SEQ ID NO: 2377105 - RNA, 19 nt, Artificial Sequence
  Description of Artificial Sequence: Synthetic oligonucleotide
ggagcgcugggugggcuuc

SEQ ID NO: 2377106 - RNA, 19 nt, Artificial Sequence
  Description of Artificial Sequence: Synthetic oligonucleotide
gcgcugggugggcuucugc

SEQ ID NO: 2377107 - RNA, 19 nt, Artificial Sequence
  Description of Artificial Sequence: Synthetic oligonucleotide
cacguggcagugucugcau

SEQ ID NO: 2377108 - RNA, 19 nt, Artificial Sequence
  Description of Artificial Sequence: Synthetic oligonucleotide
ccgcaugguggaguccagc

SEQ ID NO: 2377109 - RNA, 19 nt, Artificial Sequence
  Description of Artificial Sequence: Synthetic oligonucleotide
gggaaugcuggggaauuuu

SEQ ID NO: 2377110 - RNA, 19 nt, Artificial Sequence
  Description of Artificial Sequence: Synthetic oligonucleotide
cuggcaccuccugaggaau

SEQ ID NO: 2377111 - RNA, 19 nt, Artificial Sequence
  Description of Artificial Sequence: Synthetic oligonucleotide
gcgcccgcaugguggaguc

SEQ ID NO: 2377112 - RNA, 19 nt, Artificial Sequence
  Description of Artificial Sequence: Synthetic oligonucleotide
ccaggguugccuggccuuc

SEQ ID NO: 2377113 - RNA, 19 nt, Artificial Sequence
  Description of Artificial Sequence: Synthetic oligonucleotide
cgguccuuauucaccugca

SEQ ID NO: 2377114 - RNA, 19 nt, Artificial Sequence
  Description of Artificial Sequence: Synthetic oligonucleotide
gcagucgaacaaguucagu

SEQ ID NO: 2377115 - RNA, 19 nt, Artificial Sequence
  Description of Artificial Sequence: Synthetic oligonucleotide
caggaccgcugucuuuggu

SEQ ID NO: 2377116 - RNA, 19 nt, Artificial Sequence
  Description of Artificial Sequence: Synthetic oligonucleotide
cgaucugggacaagacacu

SEQ ID NO: 2377117 - RNA, 19 nt, Artificial Sequence
  Description of Artificial Sequence: Synthetic oligonucleotide
cuguccagccaugcacgcu

SEQ ID NO: 2377118 - RNA, 19 nt, Artificial Sequence
  Description of Artificial Sequence: Synthetic oligonucleotide
aggcgcccgcaugguggag

SEQ ID NO: 2377119 - RNA, 19 nt, Artificial Sequence
  Description of Artificial Sequence: Synthetic oligonucleotide
aggggccaacugcccugua

SEQ ID NO: 2377120 - RNA, 19 nt, Artificial Sequence
  Description of Artificial Sequence: Synthetic oligonucleotide
caugcacgcuguccugcuu

SEQ ID NO: 2377121 - RNA, 19 nt, Artificial Sequence
  Description of Artificial Sequence: Synthetic oligonucleotide
cuggccugcguagcauggu

SEQ ID NO: 2377122 - RNA, 19 nt, Artificial Sequence
  Description of Artificial Sequence: Synthetic oligonucleotide
caaaggccguguagccauu

SEQ ID NO: 2377123 - RNA, 19 nt, Artificial Sequence
  Description of Artificial Sequence: Synthetic oligonucleotide
cggugguugggccggccuc

SEQ ID NO: 2377124 - RNA, 19 nt, Artificial Sequence
  Description of Artificial Sequence: Synthetic oligonucleotide
ugggccggccucgguccuu

SEQ ID NO: 2377125 - RNA, 19 nt, Artificial Sequence
  Description of Artificial Sequence: Synthetic oligonucleotide
ccaugcacgcuguccugcu

SEQ ID NO: 2377126 - RNA, 19 nt, Artificial Sequence
  Description of Artificial Sequence: Synthetic oligonucleotide
ggcgcccgcaugguggagu

SEQ ID NO: 2377127 - RNA, 19 nt, Artificial Sequence
  Description of Artificial Sequence: Synthetic oligonucleotide
cuggagcgcugggugggcu

SEQ ID NO: 2377128 - RNA, 19 nt, Artificial Sequence
  Description of Artificial Sequence: Synthetic oligonucleotide
cgcugggugggcuucugcu

SEQ ID NO: 2377129 - RNA, 19 nt, Artificial Sequence
  Description of Artificial Sequence: Synthetic oligonucleotide
caggaucauucagcagcau

SEQ ID NO: 2377130 - RNA, 19 nt, Artificial Sequence
  Description of Artificial Sequence: Synthetic oligonucleotide
gccggugguugggccggcc

SEQ ID NO: 2377131 - RNA, 19 nt, Artificial Sequence
  Description of Artificial Sequence: Synthetic oligonucleotide
gugguccaaggcggcuagu

SEQ ID NO: 2377132 - RNA, 19 nt, Artificial Sequence
  Description of Artificial Sequence: Synthetic oligonucleotide
cgucaggcagcauggggau

SEQ ID NO: 2377133 - RNA, 19 nt, Artificial Sequence
  Description of Artificial Sequence: Synthetic oligonucleotide
cggaaccuguuuggacauc

SEQ ID NO: 2377134 - RNA, 19 nt, Artificial Sequence
  Description of Artificial Sequence: Synthetic oligonucleotide
gcgccaacucaggcuccuc

SEQ ID NO: 2377135 - RNA, 19 nt, Artificial Sequence
  Description of Artificial Sequence: Synthetic oligonucleotide
cgccagcagucgaacaagu

SEQ ID NO: 2377136 - RNA, 19 nt, Artificial Sequence
  Description of Artificial Sequence: Synthetic oligonucleotide
ccggcuccaccaggacuuc

SEQ ID NO: 2377137 - RNA, 19 nt, Artificial Sequence
  Description of Artificial Sequence: Synthetic oligonucleotide
ccgggaaugcuggggaauu

SEQ ID NO: 2377138 - RNA, 19 nt, Artificial Sequence
  Description of Artificial Sequence: Synthetic oligonucleotide
ccggugguugggccggccu

SEQ ID NO: 2377139 - RNA, 19 nt, Artificial Sequence
  Description of Artificial Sequence: Synthetic oligonucleotide
ccccuugauuuagcagaua

SEQ ID NO: 2377140 - RNA, 19 nt, Artificial Sequence
  Description of Artificial Sequence: Synthetic oligonucleotide
gccggccucgguccuuauu

SEQ ID NO: 2377141 - RNA, 19 nt, Artificial Sequence
  Description of Artificial Sequence: Synthetic oligonucleotide
ccaaggcggcuaguccugu

SEQ ID NO: 2377142 - RNA, 19 nt, Artificial Sequence
  Description of Artificial Sequence: Synthetic oligonucleotide
ccgcugucuuugguugcau

SEQ ID NO: 2377143 - RNA, 19 nt, Artificial Sequence
  Description of Artificial Sequence: Synthetic oligonucleotide
ggccggccucgguccuuau

SEQ ID NO: 2377144 - RNA, 19 nt, Artificial Sequence
  Description of Artificial Sequence: Synthetic oligonucleotide
ugaaguacaacuuuaaugc

SEQ ID NO: 2377145 - RNA, 19 nt, Artificial Sequence
  Description of Artificial Sequence: Synthetic oligonucleotide
aaugcuauaggaauuuugc

SEQ ID NO: 2377146 - RNA, 19 nt, Artificial Sequence
  Description of Artificial Sequence: Synthetic oligonucleotide
uugagauccacuaaaauca

SEQ ID NO: 2377147 - RNA, 19 nt, Artificial Sequence
  Description of Artificial Sequence: Synthetic oligonucleotide
uuuaacaagacauuaacau

SEQ ID NO: 2377148 - RNA, 19 nt, Artificial Sequence
  Description of Artificial Sequence: Synthetic oligonucleotide
uaacaagacauuaacauga

SEQ ID NO: 2377149 - RNA, 19 nt, Artificial Sequence
  Description of Artificial Sequence: Synthetic oligonucleotide
aagaguuuaacacaauugu

SEQ ID NO: 2377150 - RNA, 19 nt, Artificial Sequence
  Description of Artificial Sequence: Synthetic oligonucleotide
aauuuugccauuuugcuaa

SEQ ID NO: 2377151 - RNA, 19 nt, Artificial Sequence
  Description of Artificial Sequence: Synthetic oligonucleotide
cauaguuuguccuuggugg

SEQ ID NO: 2377152 - RNA, 19 nt, Artificial Sequence
  Description of Artificial Sequence: Synthetic oligonucleotide
uauaccugcacuuuaaaca

SEQ ID NO: 2377153 - RNA, 19 nt, Artificial Sequence
  Description of Artificial Sequence: Synthetic oligonucleotide
uuuugaauauuucagguuc

SEQ ID NO: 2377154 - RNA, 19 nt, Artificial Sequence
  Description of Artificial Sequence: Synthetic oligonucleotide
ugcagucuaaggaugaugg

SEQ ID NO: 2377155 - RNA, 19 nt, Artificial Sequence
  Description of Artificial Sequence: Synthetic oligonucleotide
uaagacaaguuugagaucc

SEQ ID NO: 2377156 - RNA, 19 nt, Artificial Sequence
  Description of Artificial Sequence: Synthetic oligonucleotide
aaaucuaacugauggagga

SEQ ID NO: 2377157 - RNA, 19 nt, Artificial Sequence
  Description of Artificial Sequence: Synthetic oligonucleotide
uuugagauccacuaaaauc

SEQ ID NO: 2377158 - RNA, 19 nt, Artificial Sequence
  Description of Artificial Sequence: Synthetic oligonucleotide
ugcuauaguagucagcacc

SEQ ID NO: 2377159 - RNA, 19 nt, Artificial Sequence
  Description of Artificial Sequence: Synthetic oligonucleotide
aaugacagugcuuuaacaa

SEQ ID NO: 2377160 - RNA, 19 nt, Artificial Sequence
  Description of Artificial Sequence: Synthetic oligonucleotide
uuuagauccacauucuacu

SEQ ID NO: 2377161 - RNA, 19 nt, Artificial Sequence
  Description of Artificial Sequence: Synthetic oligonucleotide
caucuuuuauuauaaauac

SEQ ID NO: 2377162 - RNA, 19 nt, Artificial Sequence
  Description of Artificial Sequence: Synthetic oligonucleotide
uuaacaagacauuaacaug

SEQ ID NO: 2377163 - RNA, 19 nt, Artificial Sequence
  Description of Artificial Sequence: Synthetic oligonucleotide
uuugcuaacacugguaugc

SEQ ID NO: 2377164 - RNA, 19 nt, Artificial Sequence
  Description of Artificial Sequence: Synthetic oligonucleotide
caauuuugaauauuucagg

SEQ ID NO: 2377165 - RNA, 19 nt, Artificial Sequence
  Description of Artificial Sequence: Synthetic oligonucleotide
agguuguuugauuuaagac

SEQ ID NO: 2377166 - RNA, 19 nt, Artificial Sequence
  Description of Artificial Sequence: Synthetic oligonucleotide
uguaugucuguccuucugg

SEQ ID NO: 2377167 - RNA, 19 nt, Artificial Sequence
  Description of Artificial Sequence: Synthetic oligonucleotide
cauuaacaugaguagaagg

SEQ ID NO: 2377168 - RNA, 19 nt, Artificial Sequence
  Description of Artificial Sequence: Synthetic oligonucleotide
ugauggauaaagcaugcca

SEQ ID NO: 2377169 - RNA, 19 nt, Artificial Sequence
  Description of Artificial Sequence: Synthetic oligonucleotide
aauaaucaugccuguccac

SEQ ID NO: 2377170 - RNA, 19 nt, Artificial Sequence
  Description of Artificial Sequence: Synthetic oligonucleotide
ugcuauaggaauuuugcca

SEQ ID NO: 2377171 - RNA, 19 nt, Artificial Sequence
  Description of Artificial Sequence: Synthetic oligonucleotide
aagcaugccauuucuguuc

SEQ ID NO: 2377172 - RNA, 19 nt, Artificial Sequence
  Description of Artificial Sequence: Synthetic oligonucleotide
ugucaugucuucaucaucu

SEQ ID NO: 2377173 - RNA, 19 nt, Artificial Sequence
  Description of Artificial Sequence: Synthetic oligonucleotide
aguuguuguaugucugucc

SEQ ID NO: 2377174 - RNA, 19 nt, Artificial Sequence
  Description of Artificial Sequence: Synthetic oligonucleotide
ggaacuuuaacuccugugg

SEQ ID NO: 2377175 - RNA, 19 nt, Artificial Sequence
  Description of Artificial Sequence: Synthetic oligonucleotide
aaaaucaguuguuguaugu

SEQ ID NO: 2377176 - RNA, 19 nt, Artificial Sequence
  Description of Artificial Sequence: Synthetic oligonucleotide
uuauugauuccauucauau

SEQ ID NO: 2377177 - RNA, 19 nt, Artificial Sequence
  Description of Artificial Sequence: Synthetic oligonucleotide
cacacauacacacacacac

SEQ ID NO: 2377178 - RNA, 19 nt, Artificial Sequence
  Description of Artificial Sequence: Synthetic oligonucleotide
auaccugcacuuuaaacag

SEQ ID NO: 2377179 - RNA, 19 nt, Artificial Sequence
  Description of Artificial Sequence: Synthetic oligonucleotide
ucagguucauguuuaaaug

SEQ ID NO: 2377180 - RNA, 19 nt, Artificial Sequence
  Description of Artificial Sequence: Synthetic oligonucleotide
augaguagaagguuguuug

SEQ ID NO: 2377181 - RNA, 19 nt, Artificial Sequence
  Description of Artificial Sequence: Synthetic oligonucleotide
aagguuguuugauuuaaga

SEQ ID NO: 2377182 - RNA, 19 nt, Artificial Sequence
  Description of Artificial Sequence: Synthetic oligonucleotide
uacacacacacacacacac

SEQ ID NO: 2377183 - RNA, 19 nt, Artificial Sequence
  Description of Artificial Sequence: Synthetic oligonucleotide
augcuauaggaauuuugcc

SEQ ID NO: 2377184 - RNA, 19 nt, Artificial Sequence
  Description of Artificial Sequence: Synthetic oligonucleotide
cacuucaagaguuuaacac

SEQ ID NO: 2377185 - RNA, 19 nt, Artificial Sequence
  Description of Artificial Sequence: Synthetic oligonucleotide
acaaaucuaacugauggag

SEQ ID NO: 2377186 - RNA, 19 nt, Artificial Sequence
  Description of Artificial Sequence: Synthetic oligonucleotide
aaagguuuccacugccauc

SEQ ID NO: 2377187 - RNA, 19 nt, Artificial Sequence
  Description of Artificial Sequence: Synthetic oligonucleotide
aaaucaguuguuguauguc

SEQ ID NO: 2377188 - RNA, 19 nt, Artificial Sequence
  Description of Artificial Sequence: Synthetic oligonucleotide
auuuagauccacauucuac

SEQ ID NO: 2377189 - RNA, 19 nt, Artificial Sequence
  Description of Artificial Sequence: Synthetic oligonucleotide
gaugcuauaguagucagca

SEQ ID NO: 2377190 - RNA, 19 nt, Artificial Sequence
  Description of Artificial Sequence: Synthetic oligonucleotide
cugaauucaauuuugaaua

SEQ ID NO: 2377191 - RNA, 19 nt, Artificial Sequence
  Description of Artificial Sequence: Synthetic oligonucleotide
cauacacacacacacacac

SEQ ID NO: 2377192 - RNA, 19 nt, Artificial Sequence
  Description of Artificial Sequence: Synthetic oligonucleotide
cauguuuaaaugacagugc

SEQ ID NO: 2377193 - RNA, 19 nt, Artificial Sequence
  Description of Artificial Sequence: Synthetic oligonucleotide
aacacaauugugacuacuc

SEQ ID NO: 2377194 - RNA, 19 nt, Artificial Sequence
  Description of Artificial Sequence: Synthetic oligonucleotide
uaaugcuauaggaauuuug

SEQ ID NO: 2377195 - RNA, 19 nt, Artificial Sequence
  Description of Artificial Sequence: Synthetic oligonucleotide
auaguuuguccuugguggc

SEQ ID NO: 2377196 - RNA, 19 nt, Artificial Sequence
  Description of Artificial Sequence: Synthetic oligonucleotide
aaguuugagauccacuaaa

SEQ ID NO: 2377197 - RNA, 19 nt, Artificial Sequence
  Description of Artificial Sequence: Synthetic oligonucleotide
caaaucuaacugauggagg

SEQ ID NO: 2377198 - RNA, 19 nt, Artificial Sequence
  Description of Artificial Sequence: Synthetic oligonucleotide
acaagcgaaaauuccgagg

SEQ ID NO: 2377199 - RNA, 19 nt, Artificial Sequence
  Description of Artificial Sequence: Synthetic oligonucleotide
aauucaauuuugaauauuu

SEQ ID NO: 2377200 - RNA, 19 nt, Artificial Sequence
  Description of Artificial Sequence: Synthetic oligonucleotide
uuaaacaguucacugcagu

SEQ ID NO: 2377201 - RNA, 19 nt, Artificial Sequence
  Description of Artificial Sequence: Synthetic oligonucleotide
aaaugacagugcuuuaaca

SEQ ID NO: 2377202 - RNA, 19 nt, Artificial Sequence
  Description of Artificial Sequence: Synthetic oligonucleotide
aaaacaauccugaagcaau

SEQ ID NO: 2377203 - RNA, 19 nt, Artificial Sequence
  Description of Artificial Sequence: Synthetic oligonucleotide
uuugaugcuauaguaguca

SEQ ID NO: 2377204 - RNA, 19 nt, Artificial Sequence
  Description of Artificial Sequence: Synthetic oligonucleotide
ucuacuuucaggcuauaua

SEQ ID NO: 2377205 - RNA, 19 nt, Artificial Sequence
  Description of Artificial Sequence: Synthetic oligonucleotide
uaaaugacagugcuuuaac

SEQ ID NO: 2377206 - RNA, 19 nt, Artificial Sequence
  Description of Artificial Sequence: Synthetic oligonucleotide
ugugacuacucauuauacc

SEQ ID NO: 2377207 - RNA, 19 nt, Artificial Sequence
  Description of Artificial Sequence: Synthetic oligonucleotide
auccacuaaaaucaguugu

SEQ ID NO: 2377208 - RNA, 19 nt, Artificial Sequence
  Description of Artificial Sequence: Synthetic oligonucleotide
uaaggaugauggauaaagc

SEQ ID NO: 2377209 - RNA, 19 nt, Artificial Sequence
  Description of Artificial Sequence: Synthetic oligonucleotide
gacgucuuagcucuugaag

SEQ ID NO: 2377210 - RNA, 19 nt, Artificial Sequence
  Description of Artificial Sequence: Synthetic oligonucleotide
auguuuaaaugacagugcu

SEQ ID NO: 2377211 - RNA, 19 nt, Artificial Sequence
  Description of Artificial Sequence: Synthetic oligonucleotide
aucuaacugauggaggagc

SEQ ID NO: 2377212 - RNA, 19 nt, Artificial Sequence
  Description of Artificial Sequence: Synthetic oligonucleotide
uaugcuucgugcauccacc

SEQ ID NO: 2377213 - RNA, 19 nt, Artificial Sequence
  Description of Artificial Sequence: Synthetic oligonucleotide
uuuggacaucauuagacgu

SEQ ID NO: 2377214 - RNA, 19 nt, Artificial Sequence
  Description of Artificial Sequence: Synthetic oligonucleotide
cacacacacacacacaccc

SEQ ID NO: 2377215 - RNA, 19 nt, Artificial Sequence
  Description of Artificial Sequence: Synthetic oligonucleotide
gguuguuugauuuaagaca

SEQ ID NO: 2377216 - RNA, 19 nt, Artificial Sequence
  Description of Artificial Sequence: Synthetic oligonucleotide
uacucauuauaccugcacu

SEQ ID NO: 2377217 - RNA, 19 nt, Artificial Sequence
  Description of Artificial Sequence: Synthetic oligonucleotide
ugacagugcuuuaacaaga

SEQ ID NO: 2377218 - RNA, 19 nt, Artificial Sequence
  Description of Artificial Sequence: Synthetic oligonucleotide
ugcacuuuaaacaguucac

SEQ ID NO: 2377219 - RNA, 19 nt, Artificial Sequence
  Description of Artificial Sequence: Synthetic oligonucleotide
aacacugguaugcuucgug

SEQ ID NO: 2377220 - RNA, 19 nt, Artificial Sequence
  Description of Artificial Sequence: Synthetic oligonucleotide
uuauaccugcacuuuaaac

SEQ ID NO: 2377221 - RNA, 19 nt, Artificial Sequence
  Description of Artificial Sequence: Synthetic oligonucleotide
acaaguuugagauccacua

SEQ ID NO: 2377222 - RNA, 19 nt, Artificial Sequence
  Description of Artificial Sequence: Synthetic oligonucleotide
gacuacucauuauaccugc

SEQ ID NO: 2377223 - RNA, 19 nt, Artificial Sequence
  Description of Artificial Sequence: Synthetic oligonucleotide
ugacuacucauuauaccug

SEQ ID NO: 2377224 - RNA, 19 nt, Artificial Sequence
  Description of Artificial Sequence: Synthetic oligonucleotide
agcgaaaauuccgaggaac

SEQ ID NO: 2377225 - RNA, 19 nt, Artificial Sequence
  Description of Artificial Sequence: Synthetic oligonucleotide
ucuguuuucauaguuuguc

SEQ ID NO: 2377226 - RNA, 19 nt, Artificial Sequence
  Description of Artificial Sequence: Synthetic oligonucleotide
uauuucagguucauguuua

SEQ ID NO: 2377227 - RNA, 19 nt, Artificial Sequence
  Description of Artificial Sequence: Synthetic oligonucleotide
cacauacacacacacacac

SEQ ID NO: 2377228 - RNA, 19 nt, Artificial Sequence
  Description of Artificial Sequence: Synthetic oligonucleotide
ugccuguccaccuuguaag

SEQ ID NO: 2377229 - RNA, 19 nt, Artificial Sequence
  Description of Artificial Sequence: Synthetic oligonucleotide
auccgcaccacuucaagag

SEQ ID NO: 2377230 - RNA, 19 nt, Artificial Sequence
  Description of Artificial Sequence: Synthetic oligonucleotide
acgucuuagcucuugaagu

SEQ ID NO: 2377231 - RNA, 19 nt, Artificial Sequence
  Description of Artificial Sequence: Synthetic oligonucleotide
acuggaauuauugauucca

SEQ ID NO: 2377232 - RNA, 19 nt, Artificial Sequence
  Description of Artificial Sequence: Synthetic oligonucleotide
aacuuuaaugcuauaggaa

SEQ ID NO: 2377233 - RNA, 19 nt, Artificial Sequence
  Description of Artificial Sequence: Synthetic oligonucleotide
aauugugacuacucauuau

SEQ ID NO: 2377234 - RNA, 19 nt, Artificial Sequence
  Description of Artificial Sequence: Synthetic oligonucleotide
uccuucuugagacuuuacu

SEQ ID NO: 2377235 - RNA, 19 nt, Artificial Sequence
  Description of Artificial Sequence: Synthetic oligonucleotide
uuuucauaguuuguccuug

SEQ ID NO: 2377236 - RNA, 19 nt, Artificial Sequence
  Description of Artificial Sequence: Synthetic oligonucleotide
uuaaaugacagugcuuuaa

SEQ ID NO: 2377237 - RNA, 19 nt, Artificial Sequence
  Description of Artificial Sequence: Synthetic oligonucleotide
caucauuagacgucuuagc

SEQ ID NO: 2377238 - RNA, 19 nt, Artificial Sequence
  Description of Artificial Sequence: Synthetic oligonucleotide
uugugacuacucauuauac

SEQ ID NO: 2377239 - RNA, 19 nt, Artificial Sequence
  Description of Artificial Sequence: Synthetic oligonucleotide
cacacacacacacacacac

SEQ ID NO: 2377240 - RNA, 19 nt, Artificial Sequence
  Description of Artificial Sequence: Synthetic oligonucleotide
cuaacacugguaugcuucg

SEQ ID NO: 2377241 - RNA, 19 nt, Artificial Sequence
  Description of Artificial Sequence: Synthetic oligonucleotide
uuuugaugcuauaguaguc

SEQ ID NO: 2377242 - RNA, 19 nt, Artificial Sequence
  Description of Artificial Sequence: Synthetic oligonucleotide
acaucauuagacgucuuag

SEQ ID NO: 2377243 - RNA, 19 nt, Artificial Sequence
  Description of Artificial Sequence: Synthetic oligonucleotide
uugaugcuauaguagucag

SEQ ID NO: 2377244 - RNA, 19 nt, Artificial Sequence
  Description of Artificial Sequence: Synthetic oligonucleotide
ugcuuuaacaagacauuaa

SEQ ID NO: 2377245 - RNA, 19 nt, Artificial Sequence
  Description of Artificial Sequence: Synthetic oligonucleotide
caagcgaaaauuccgagga

SEQ ID NO: 2377246 - RNA, 19 nt, Artificial Sequence
  Description of Artificial Sequence: Synthetic oligonucleotide
uuggacaucauuagacguc

SEQ ID NO: 2377247 - RNA, 19 nt, Artificial Sequence
  Description of Artificial Sequence: Synthetic oligonucleotide
uucuuuggacaucauuaga

SEQ ID NO: 2377248 - RNA, 19 nt, Artificial Sequence
  Description of Artificial Sequence: Synthetic oligonucleotide
uuccgaggaacuuuaacuc

SEQ ID NO: 2377249 - RNA, 19 nt, Artificial Sequence
  Description of Artificial Sequence: Synthetic oligonucleotide
ucuaacugauggaggagcu

SEQ ID NO: 2377250 - RNA, 19 nt, Artificial Sequence
  Description of Artificial Sequence: Synthetic oligonucleotide
agguucauguuuaaaugac

SEQ ID NO: 2377251 - RNA, 19 nt, Artificial Sequence
  Description of Artificial Sequence: Synthetic oligonucleotide
aaagcaugccauuucuguu

SEQ ID NO: 2377252 - RNA, 19 nt, Artificial Sequence
  Description of Artificial Sequence: Synthetic oligonucleotide
uccgaggaacuuuaacucc

SEQ ID NO: 2377253 - RNA, 19 nt, Artificial Sequence
  Description of Artificial Sequence: Synthetic oligonucleotide
agcuaaccguaccaucacc

SEQ ID NO: 2377254 - RNA, 19 nt, Artificial Sequence
  Description of Artificial Sequence: Synthetic oligonucleotide
gacaaagguuuccacugcc

SEQ ID NO: 2377255 - RNA, 19 nt, Artificial Sequence
  Description of Artificial Sequence: Synthetic oligonucleotide
cacacacauacacacacac

SEQ ID NO: 2377256 - RNA, 19 nt, Artificial Sequence
  Description of Artificial Sequence: Synthetic oligonucleotide
ccaacaagcgaaaauuccg

SEQ ID NO: 2377257 - RNA, 19 nt, Artificial Sequence
  Description of Artificial Sequence: Synthetic oligonucleotide
auauuuucuuuggacauca

SEQ ID NO: 2377258 - RNA, 19 nt, Artificial Sequence
  Description of Artificial Sequence: Synthetic oligonucleotide
aacuccuguggagaccgcc

SEQ ID NO: 2377259 - RNA, 19 nt, Artificial Sequence
  Description of Artificial Sequence: Synthetic oligonucleotide
aguucacugcagucuaagg

SEQ ID NO: 2377260 - RNA, 19 nt, Artificial Sequence
  Description of Artificial Sequence: Synthetic oligonucleotide
uguuguaugucuguccuuc

SEQ ID NO: 2377261 - RNA, 19 nt, Artificial Sequence
  Description of Artificial Sequence: Synthetic oligonucleotide
aacaguucacugcagucua

SEQ ID NO: 2377262 - RNA, 19 nt, Artificial Sequence
  Description of Artificial Sequence: Synthetic oligonucleotide
aacaagacauuaacaugag

SEQ ID NO: 2377263 - RNA, 19 nt, Artificial Sequence
  Description of Artificial Sequence: Synthetic oligonucleotide
uccacuaaaaucaguuguu

SEQ ID NO: 2377264 - RNA, 19 nt, Artificial Sequence
  Description of Artificial Sequence: Synthetic oligonucleotide
uaaccguaccaucaccuac

SEQ ID NO: 2377265 - RNA, 19 nt, Artificial Sequence
  Description of Artificial Sequence: Synthetic oligonucleotide
ugaugcuauaguagucagc

SEQ ID NO: 2377266 - RNA, 19 nt, Artificial Sequence
  Description of Artificial Sequence: Synthetic oligonucleotide
uccaccauuccacuggaau

SEQ ID NO: 2377267 - RNA, 19 nt, Artificial Sequence
  Description of Artificial Sequence: Synthetic oligonucleotide
uuccaacaagcgaaaauuc

SEQ ID NO: 2377268 - RNA, 19 nt, Artificial Sequence
  Description of Artificial Sequence: Synthetic oligonucleotide
aucaccuacuccuuucugu

SEQ ID NO: 2377269 - RNA, 19 nt, Artificial Sequence
  Description of Artificial Sequence: Synthetic oligonucleotide
uugagacuuuacuuuucag

SEQ ID NO: 2377270 - RNA, 19 nt, Artificial Sequence
  Description of Artificial Sequence: Synthetic oligonucleotide
auauuucagguucauguuu

SEQ ID NO: 2377271 - RNA, 19 nt, Artificial Sequence
  Description of Artificial Sequence: Synthetic oligonucleotide
ucgugcauccaccauucca

SEQ ID NO: 2377272 - RNA, 19 nt, Artificial Sequence
  Description of Artificial Sequence: Synthetic oligonucleotide
agaguuuaacacaauugug

SEQ ID NO: 2377273 - RNA, 19 nt, Artificial Sequence
  Description of Artificial Sequence: Synthetic oligonucleotide
acauuaacaugaguagaag

SEQ ID NO: 2377274 - RNA, 19 nt, Artificial Sequence
  Description of Artificial Sequence: Synthetic oligonucleotide
ccaauaaucaugccugucc

SEQ ID NO: 2377275 - RNA, 19 nt, Artificial Sequence
  Description of Artificial Sequence: Synthetic oligonucleotide
ucauuauaccugcacuuua

SEQ ID NO: 2377276 - RNA, 19 nt, Artificial Sequence
  Description of Artificial Sequence: Synthetic oligonucleotide
gugacuacucauuauaccu

SEQ ID NO: 2377277 - RNA, 19 nt, Artificial Sequence
  Description of Artificial Sequence: Synthetic oligonucleotide
uuaacaugaguagaagguu

SEQ ID NO: 2377278 - RNA, 19 nt, Artificial Sequence
  Description of Artificial Sequence: Synthetic oligonucleotide
acucauuauaccugcacuu

SEQ ID NO: 2377279 - RNA, 19 nt, Artificial Sequence
  Description of Artificial Sequence: Synthetic oligonucleotide
cuugguggcccaauaauca

SEQ ID NO: 2377280 - RNA, 19 nt, Artificial Sequence
  Description of Artificial Sequence: Synthetic oligonucleotide
auuccacuggaauuauuga

SEQ ID NO: 2377281 - RNA, 19 nt, Artificial Sequence
  Description of Artificial Sequence: Synthetic oligonucleotide
augauggauaaagcaugcc

SEQ ID NO: 2377282 - RNA, 19 nt, Artificial Sequence
  Description of Artificial Sequence: Synthetic oligonucleotide
aaaauuccgaggaacuuua

SEQ ID NO: 2377283 - RNA, 19 nt, Artificial Sequence
  Description of Artificial Sequence: Synthetic oligonucleotide
ugaauauuucagguucaug

SEQ ID NO: 2377284 - RNA, 19 nt, Artificial Sequence
  Description of Artificial Sequence: Synthetic oligonucleotide
cuacucauuauaccugcac

SEQ ID NO: 2377285 - RNA, 19 nt, Artificial Sequence
  Description of Artificial Sequence: Synthetic oligonucleotide
uugauuccauucauauuaa

SEQ ID NO: 2377286 - RNA, 19 nt, Artificial Sequence
  Description of Artificial Sequence: Synthetic oligonucleotide
uaaucaugccuguccaccu

SEQ ID NO: 2377287 - RNA, 19 nt, Artificial Sequence
  Description of Artificial Sequence: Synthetic oligonucleotide
uaacugauggaggagcuuc

SEQ ID NO: 2377288 - RNA, 19 nt, Artificial Sequence
  Description of Artificial Sequence: Synthetic oligonucleotide
cauuagacgucuuagcucu

SEQ ID NO: 2377289 - RNA, 19 nt, Artificial Sequence
  Description of Artificial Sequence: Synthetic oligonucleotide
aguacaacuuuaaugcuau

SEQ ID NO: 2377290 - RNA, 19 nt, Artificial Sequence
  Description of Artificial Sequence: Synthetic oligonucleotide
agucagcacccacauccgc

SEQ ID NO: 2377291 - RNA, 19 nt, Artificial Sequence
  Description of Artificial Sequence: Synthetic oligonucleotide
acuuuaacuccuguggaga

SEQ ID NO: 2377292 - RNA, 19 nt, Artificial Sequence
  Description of Artificial Sequence: Synthetic oligonucleotide
gguaucaaaacaauccuga

SEQ ID NO: 2377293 - RNA, 19 nt, Artificial Sequence
  Description of Artificial Sequence: Synthetic oligonucleotide
uucaggcuauauauucugu

SEQ ID NO: 2377294 - RNA, 19 nt, Artificial Sequence
  Description of Artificial Sequence: Synthetic oligonucleotide
aaguacaacuuuaaugcua

SEQ ID NO: 2377295 - RNA, 19 nt, Artificial Sequence
  Description of Artificial Sequence: Synthetic oligonucleotide
uggacaucauuagacgucu

SEQ ID NO: 2377296 - RNA, 19 nt, Artificial Sequence
  Description of Artificial Sequence: Synthetic oligonucleotide
ucaccuacuccuuucuguc

SEQ ID NO: 2377297 - RNA, 19 nt, Artificial Sequence
  Description of Artificial Sequence: Synthetic oligonucleotide
uucuugagacuuuacuuuu

SEQ ID NO: 2377298 - RNA, 19 nt, Artificial Sequence
  Description of Artificial Sequence: Synthetic oligonucleotide
agauccacuaaaaucaguu

SEQ ID NO: 2377299 - RNA, 19 nt, Artificial Sequence
  Description of Artificial Sequence: Synthetic oligonucleotide
uauugauuccauucauauu

SEQ ID NO: 2377300 - RNA, 19 nt, Artificial Sequence
  Description of Artificial Sequence: Synthetic oligonucleotide
auuuugccauuuugcuaac

SEQ ID NO: 2377301 - RNA, 19 nt, Artificial Sequence
  Description of Artificial Sequence: Synthetic oligonucleotide
agugucaugucuucaucau

SEQ ID NO: 2377302 - RNA, 19 nt, Artificial Sequence
  Description of Artificial Sequence: Synthetic oligonucleotide
cagguucauguuuaaauga

SEQ ID NO: 2377303 - RNA, 19 nt, Artificial Sequence
  Description of Artificial Sequence: Synthetic oligonucleotide
agacaaguuugagauccac

SEQ ID NO: 2377304 - RNA, 19 nt, Artificial Sequence
  Description of Artificial Sequence: Synthetic oligonucleotide
aggaugauggauaaagcau

SEQ ID NO: 2377305 - RNA, 19 nt, Artificial Sequence
  Description of Artificial Sequence: Synthetic oligonucleotide
auuauaccugcacuuuaaa

SEQ ID NO: 2377306 - RNA, 19 nt, Artificial Sequence
  Description of Artificial Sequence: Synthetic oligonucleotide
uccuugguggcccaauaau

SEQ ID NO: 2377307 - RNA, 19 nt, Artificial Sequence
  Description of Artificial Sequence: Synthetic oligonucleotide
guaugcuucgugcauccac

SEQ ID NO: 2377308 - RNA, 19 nt, Artificial Sequence
  Description of Artificial Sequence: Synthetic oligonucleotide
cuacuuucaggcuauauau

SEQ ID NO: 2377309 - RNA, 19 nt, Artificial Sequence
  Description of Artificial Sequence: Synthetic oligonucleotide
uuagauccacauucuacuu

SEQ ID NO: 2377310 - RNA, 19 nt, Artificial Sequence
  Description of Artificial Sequence: Synthetic oligonucleotide
acaagacauuaacaugagu

SEQ ID NO: 2377311 - RNA, 19 nt, Artificial Sequence
  Description of Artificial Sequence: Synthetic oligonucleotide
cuucgugcauccaccauuc

SEQ ID NO: 2377312 - RNA, 19 nt, Artificial Sequence
  Description of Artificial Sequence: Synthetic oligonucleotide
augcuauaguagucagcac

SEQ ID NO: 2377313 - RNA, 19 nt, Artificial Sequence
  Description of Artificial Sequence: Synthetic oligonucleotide
aaccguaccaucaccuacu

SEQ ID NO: 2377314 - RNA, 19 nt, Artificial Sequence
  Description of Artificial Sequence: Synthetic oligonucleotide
uauaggaauuuugccauuu

SEQ ID NO: 2377315 - RNA, 19 nt, Artificial Sequence
  Description of Artificial Sequence: Synthetic oligonucleotide
acauccgcaccacuucaag

SEQ ID NO: 2377316 - RNA, 19 nt, Artificial Sequence
  Description of Artificial Sequence: Synthetic oligonucleotide
cuugagacuuuacuuuuca

SEQ ID NO: 2377317 - RNA, 19 nt, Artificial Sequence
  Description of Artificial Sequence: Synthetic oligonucleotide
acacacacacaccccaaca

SEQ ID NO: 2377318 - RNA, 19 nt, Artificial Sequence
  Description of Artificial Sequence: Synthetic oligonucleotide
uggaauuauugauuccauu

SEQ ID NO: 2377319 - RNA, 19 nt, Artificial Sequence
  Description of Artificial Sequence: Synthetic oligonucleotide
ugucuguccuucugguggc

SEQ ID NO: 2377320 - RNA, 19 nt, Artificial Sequence
  Description of Artificial Sequence: Synthetic oligonucleotide
agguaucaaaacaauccug

SEQ ID NO: 2377321 - RNA, 19 nt, Artificial Sequence
  Description of Artificial Sequence: Synthetic oligonucleotide
guuguuguaugucuguccu

SEQ ID NO: 2377322 - RNA, 19 nt, Artificial Sequence
  Description of Artificial Sequence: Synthetic oligonucleotide
agacuuuacuuuucagaaa

SEQ ID NO: 2377323 - RNA, 19 nt, Artificial Sequence
  Description of Artificial Sequence: Synthetic oligonucleotide
uuagacgucuuagcucuug

SEQ ID NO: 2377324 - RNA, 19 nt, Artificial Sequence
  Description of Artificial Sequence: Synthetic oligonucleotide
uacuuucaggcuauauauu

SEQ ID NO: 2377325 - RNA, 19 nt, Artificial Sequence
  Description of Artificial Sequence: Synthetic oligonucleotide
accuuguaagugucauguc

SEQ ID NO: 2377326 - RNA, 19 nt, Artificial Sequence
  Description of Artificial Sequence: Synthetic oligonucleotide
aucaugccuguccaccuug

SEQ ID NO: 2377327 - RNA, 19 nt, Artificial Sequence
  Description of Artificial Sequence: Synthetic oligonucleotide
acaauugugacuacucauu

SEQ ID NO: 2377328 - RNA, 19 nt, Artificial Sequence
  Description of Artificial Sequence: Synthetic oligonucleotide
acacacacacacacacacc

SEQ ID NO: 2377329 - RNA, 19 nt, Artificial Sequence
  Description of Artificial Sequence: Synthetic oligonucleotide
cauuauaccugcacuuuaa

SEQ ID NO: 2377330 - RNA, 19 nt, Artificial Sequence
  Description of Artificial Sequence: Synthetic oligonucleotide
gauggauaaagcaugccau

SEQ ID NO: 2377331 - RNA, 19 nt, Artificial Sequence
  Description of Artificial Sequence: Synthetic oligonucleotide
ugcauccaccauuccacug

SEQ ID NO: 2377332 - RNA, 19 nt, Artificial Sequence
  Description of Artificial Sequence: Synthetic oligonucleotide
uagaagguuguuugauuua

SEQ ID NO: 2377333 - RNA, 19 nt, Artificial Sequence
  Description of Artificial Sequence: Synthetic oligonucleotide
auggauaaagcaugccauu

SEQ ID NO: 2377334 - RNA, 19 nt, Artificial Sequence
  Description of Artificial Sequence: Synthetic oligonucleotide
gacaucauuagacgucuua

SEQ ID NO: 2377335 - RNA, 19 nt, Artificial Sequence
  Description of Artificial Sequence: Synthetic oligonucleotide
agcaugccauuucuguucu

SEQ ID NO: 2377336 - RNA, 19 nt, Artificial Sequence
  Description of Artificial Sequence: Synthetic oligonucleotide
acagugcuuuaacaagaca

SEQ ID NO: 2377337 - RNA, 19 nt, Artificial Sequence
  Description of Artificial Sequence: Synthetic oligonucleotide
gaaguacaacuuuaaugcu

SEQ ID NO: 2377338 - RNA, 19 nt, Artificial Sequence
  Description of Artificial Sequence: Synthetic oligonucleotide
gacagugcuuuaacaagac

SEQ ID NO: 2377339 - RNA, 19 nt, Artificial Sequence
  Description of Artificial Sequence: Synthetic oligonucleotide
acacacacacacacacccc

SEQ ID NO: 2377340 - RNA, 19 nt, Artificial Sequence
  Description of Artificial Sequence: Synthetic oligonucleotide
aagcgaaaauuccgaggaa

SEQ ID NO: 2377341 - RNA, 19 nt, Artificial Sequence
  Description of Artificial Sequence: Synthetic oligonucleotide
agucuaaggaugauggaua

SEQ ID NO: 2377342 - RNA, 19 nt, Artificial Sequence
  Description of Artificial Sequence: Synthetic oligonucleotide
ggaauuuugccauuuugcu

SEQ ID NO: 2377343 - RNA, 19 nt, Artificial Sequence
  Description of Artificial Sequence: Synthetic oligonucleotide
ugauuccauucauauuaau

SEQ ID NO: 2377344 - RNA, 19 nt, Artificial Sequence
  Description of Artificial Sequence: Synthetic oligonucleotide
accguaccaucaccuacuc

SEQ ID NO: 2377345 - RNA, 19 nt, Artificial Sequence
  Description of Artificial Sequence: Synthetic oligonucleotide
augccuguccaccuuguaa

SEQ ID NO: 2377346 - RNA, 19 nt, Artificial Sequence
  Description of Artificial Sequence: Synthetic oligonucleotide
guagaagguuguuugauuu

SEQ ID NO: 2377347 - RNA, 19 nt, Artificial Sequence
  Description of Artificial Sequence: Synthetic oligonucleotide
uccgcaccacuucaagagu

SEQ ID NO: 2377348 - RNA, 19 nt, Artificial Sequence
  Description of Artificial Sequence: Synthetic oligonucleotide
gguggcccaauaaucaugc

SEQ ID NO: 2377349 - RNA, 19 nt, Artificial Sequence
  Description of Artificial Sequence: Synthetic oligonucleotide
aaacaauccugaagcaauu

SEQ ID NO: 2377350 - RNA, 19 nt, Artificial Sequence
  Description of Artificial Sequence: Synthetic oligonucleotide
agugcuuuaacaagacauu

SEQ ID NO: 2377351 - RNA, 19 nt, Artificial Sequence
  Description of Artificial Sequence: Synthetic oligonucleotide
cauuuugcuaacacuggua

SEQ ID NO: 2377352 - RNA, 19 nt, Artificial Sequence
  Description of Artificial Sequence: Synthetic oligonucleotide
uugguggcccaauaaucau

SEQ ID NO: 2377353 - RNA, 19 nt, Artificial Sequence
  Description of Artificial Sequence: Synthetic oligonucleotide
uggaggagcuucuggguau

SEQ ID NO: 2377354 - RNA, 19 nt, Artificial Sequence
  Description of Artificial Sequence: Synthetic oligonucleotide
uugccaugcuuuugucuug

SEQ ID NO: 2377355 - RNA, 19 nt, Artificial Sequence
  Description of Artificial Sequence: Synthetic oligonucleotide
gcuaacacugguaugcuuc

SEQ ID NO: 2377356 - RNA, 19 nt, Artificial Sequence
  Description of Artificial Sequence: Synthetic oligonucleotide
auaggaauuuugccauuuu

SEQ ID NO: 2377357 - RNA, 19 nt, Artificial Sequence
  Description of Artificial Sequence: Synthetic oligonucleotide
aguuugagauccacuaaaa

SEQ ID NO: 2377358 - RNA, 19 nt, Artificial Sequence
  Description of Artificial Sequence: Synthetic oligonucleotide
gucuaaggaugauggauaa

SEQ ID NO: 2377359 - RNA, 19 nt, Artificial Sequence
  Description of Artificial Sequence: Synthetic oligonucleotide
cacacacacacacacccca

SEQ ID NO: 2377360 - RNA, 19 nt, Artificial Sequence
  Description of Artificial Sequence: Synthetic oligonucleotide
cuucuugagacuuuacuuu

SEQ ID NO: 2377361 - RNA, 19 nt, Artificial Sequence
  Description of Artificial Sequence: Synthetic oligonucleotide
caccuacuccuuucugucc

SEQ ID NO: 2377362 - RNA, 19 nt, Artificial Sequence
  Description of Artificial Sequence: Synthetic oligonucleotide
uaccugcacuuuaaacagu

SEQ ID NO: 2377363 - RNA, 19 nt, Artificial Sequence
  Description of Artificial Sequence: Synthetic oligonucleotide
cugaaacuccuuugccaug

SEQ ID NO: 2377364 - RNA, 19 nt, Artificial Sequence
  Description of Artificial Sequence: Synthetic oligonucleotide
auggaggagcuucugggua

SEQ ID NO: 2377365 - RNA, 19 nt, Artificial Sequence
  Description of Artificial Sequence: Synthetic oligonucleotide
auacagguaucaaaacaau

SEQ ID NO: 2377366 - RNA, 19 nt, Artificial Sequence
  Description of Artificial Sequence: Synthetic oligonucleotide
aacugauggaggagcuucu

SEQ ID NO: 2377367 - RNA, 19 nt, Artificial Sequence
  Description of Artificial Sequence: Synthetic oligonucleotide
uuaaugcuauaggaauuuu

SEQ ID NO: 2377368 - RNA, 19 nt, Artificial Sequence
  Description of Artificial Sequence: Synthetic oligonucleotide
ucaugccuguccaccuugu

SEQ ID NO: 2377369 - RNA, 19 nt, Artificial Sequence
  Description of Artificial Sequence: Synthetic oligonucleotide
cagguaucaaaacaauccu

SEQ ID NO: 2377370 - RNA, 19 nt, Artificial Sequence
  Description of Artificial Sequence: Synthetic oligonucleotide
ucuaaggaugauggauaaa

SEQ ID NO: 2377371 - RNA, 19 nt, Artificial Sequence
  Description of Artificial Sequence: Synthetic oligonucleotide
cacacacacacaccccaac

SEQ ID NO: 2377372 - RNA, 19 nt, Artificial Sequence
  Description of Artificial Sequence: Synthetic oligonucleotide
cuuuaaugcuauaggaauu

SEQ ID NO: 2377373 - RNA, 19 nt, Artificial Sequence
  Description of Artificial Sequence: Synthetic oligonucleotide
gcuauaggaauuuugccau

SEQ ID NO: 2377374 - RNA, 19 nt, Artificial Sequence
  Description of Artificial Sequence: Synthetic oligonucleotide
cgugcauccaccauuccac

SEQ ID NO: 2377375 - RNA, 19 nt, Artificial Sequence
  Description of Artificial Sequence: Synthetic oligonucleotide
cuuguaagugucaugucuu

SEQ ID NO: 2377376 - RNA, 19 nt, Artificial Sequence
  Description of Artificial Sequence: Synthetic oligonucleotide
guuugagauccacuaaaau

SEQ ID NO: 2377377 - RNA, 19 nt, Artificial Sequence
  Description of Artificial Sequence: Synthetic oligonucleotide
acacauacacacacacaca

SEQ ID NO: 2377378 - RNA, 19 nt, Artificial Sequence
  Description of Artificial Sequence: Synthetic oligonucleotide
acauacacacacacacaca

SEQ ID NO: 2377379 - RNA, 19 nt, Artificial Sequence
  Description of Artificial Sequence: Synthetic oligonucleotide
uugcuaacacugguaugcu

SEQ ID NO: 2377380 - RNA, 19 nt, Artificial Sequence
  Description of Artificial Sequence: Synthetic oligonucleotide
agacgucuuagcucuugaa

SEQ ID NO: 2377381 - RNA, 19 nt, Artificial Sequence
  Description of Artificial Sequence: Synthetic oligonucleotide
caccuuguaagugucaugu

SEQ ID NO: 2377382 - RNA, 19 nt, Artificial Sequence
  Description of Artificial Sequence: Synthetic oligonucleotide
ccuugguggcccaauaauc

SEQ ID NO: 2377383 - RNA, 19 nt, Artificial Sequence
  Description of Artificial Sequence: Synthetic oligonucleotide
augcuucgugcauccacca

SEQ ID NO: 2377384 - RNA, 19 nt, Artificial Sequence
  Description of Artificial Sequence: Synthetic oligonucleotide
acacacauacacacacaca

SEQ ID NO: 2377385 - RNA, 19 nt, Artificial Sequence
  Description of Artificial Sequence: Synthetic oligonucleotide
gguucauguuuaaaugaca

SEQ ID NO: 2377386 - RNA, 19 nt, Artificial Sequence
  Description of Artificial Sequence: Synthetic oligonucleotide
ugcuaacacugguaugcuu

SEQ ID NO: 2377387 - RNA, 19 nt, Artificial Sequence
  Description of Artificial Sequence: Synthetic oligonucleotide
guuuucauaguuuguccuu

SEQ ID NO: 2377388 - RNA, 19 nt, Artificial Sequence
  Description of Artificial Sequence: Synthetic oligonucleotide
auacacacacacacacaca

SEQ ID NO: 2377389 - RNA, 19 nt, Artificial Sequence
  Description of Artificial Sequence: Synthetic oligonucleotide
cauccgcaccacuucaaga

SEQ ID NO: 2377390 - RNA, 19 nt, Artificial Sequence
  Description of Artificial Sequence: Synthetic oligonucleotide
guaugucuguccuucuggu

SEQ ID NO: 2377391 - RNA, 19 nt, Artificial Sequence
  Description of Artificial Sequence: Synthetic oligonucleotide
cugguaugcuucgugcauc

SEQ ID NO: 2377392 - RNA, 19 nt, Artificial Sequence
  Description of Artificial Sequence: Synthetic oligonucleotide
uuguuguaugucuguccuu

SEQ ID NO: 2377393 - RNA, 19 nt, Artificial Sequence
  Description of Artificial Sequence: Synthetic oligonucleotide
ugcuucgugcauccaccau

SEQ ID NO: 2377394 - RNA, 19 nt, Artificial Sequence
  Description of Artificial Sequence: Synthetic oligonucleotide
gucagcacccacauccgca

SEQ ID NO: 2377395 - RNA, 19 nt, Artificial Sequence
  Description of Artificial Sequence: Synthetic oligonucleotide
aaauuccgaggaacuuuaa

SEQ ID NO: 2377396 - RNA, 19 nt, Artificial Sequence
  Description of Artificial Sequence: Synthetic oligonucleotide
cauucuacuuucaggcuau

SEQ ID NO: 2377397 - RNA, 19 nt, Artificial Sequence
  Description of Artificial Sequence: Synthetic oligonucleotide
acuacucauuauaccugca

SEQ ID NO: 2377398 - RNA, 19 nt, Artificial Sequence
  Description of Artificial Sequence: Synthetic oligonucleotide
cuaaccguaccaucaccua

SEQ ID NO: 2377399 - RNA, 19 nt, Artificial Sequence
  Description of Artificial Sequence: Synthetic oligonucleotide
uccuguggagaccgccauc

SEQ ID NO: 2377400 - RNA, 19 nt, Artificial Sequence
  Description of Artificial Sequence: Synthetic oligonucleotide
acacacacauacacacaca

SEQ ID NO: 2377401 - RNA, 19 nt, Artificial Sequence
  Description of Artificial Sequence: Synthetic oligonucleotide
uaacacugguaugcuucgu

SEQ ID NO: 2377402 - RNA, 19 nt, Artificial Sequence
  Description of Artificial Sequence: Synthetic oligonucleotide
gaguagaagguuguuugau

SEQ ID NO: 2377403 - RNA, 19 nt, Artificial Sequence
  Description of Artificial Sequence: Synthetic oligonucleotide
caccauuccacuggaauua

SEQ ID NO: 2377404 - RNA, 19 nt, Artificial Sequence
  Description of Artificial Sequence: Synthetic oligonucleotide
uaacuccuguggagaccgc

SEQ ID NO: 2377405 - RNA, 19 nt, Artificial Sequence
  Description of Artificial Sequence: Synthetic oligonucleotide
acacacacacacacacaca

SEQ ID NO: 2377406 - RNA, 19 nt, Artificial Sequence
  Description of Artificial Sequence: Synthetic oligonucleotide
caccacuucaagaguuuaa

SEQ ID NO: 2377407 - RNA, 19 nt, Artificial Sequence
  Description of Artificial Sequence: Synthetic oligonucleotide
aaggccccagcuaaccgua

SEQ ID NO: 2377408 - RNA, 19 nt, Artificial Sequence
  Description of Artificial Sequence: Synthetic oligonucleotide
guggcccaauaaucaugcc

SEQ ID NO: 2377409 - RNA, 19 nt, Artificial Sequence
  Description of Artificial Sequence: Synthetic oligonucleotide
caaagguuuccacugccau

SEQ ID NO: 2377410 - RNA, 19 nt, Artificial Sequence
  Description of Artificial Sequence: Synthetic oligonucleotide
cagucuaaggaugauggau

SEQ ID NO: 2377411 - RNA, 19 nt, Artificial Sequence
  Description of Artificial Sequence: Synthetic oligonucleotide
ccuuguaagugucaugucu

SEQ ID NO: 2377412 - RNA, 19 nt, Artificial Sequence
  Description of Artificial Sequence: Synthetic oligonucleotide
gguuuccacugccaucuga

SEQ ID NO: 2377413 - RNA, 19 nt, Artificial Sequence
  Description of Artificial Sequence: Synthetic oligonucleotide
guccuugguggcccaauaa

SEQ ID NO: 2377414 - RNA, 19 nt, Artificial Sequence
  Description of Artificial Sequence: Synthetic oligonucleotide
ccacuucaagaguuuaaca

SEQ ID NO: 2377415 - RNA, 19 nt, Artificial Sequence
  Description of Artificial Sequence: Synthetic oligonucleotide
acacaccccaacaucuuuu

SEQ ID NO: 2377416 - RNA, 19 nt, Artificial Sequence
  Description of Artificial Sequence: Synthetic oligonucleotide
gagauccacuaaaaucagu

SEQ ID NO: 2377417 - RNA, 19 nt, Artificial Sequence
  Description of Artificial Sequence: Synthetic oligonucleotide
accauuccacuggaauuau

SEQ ID NO: 2377418 - RNA, 19 nt, Artificial Sequence
  Description of Artificial Sequence: Synthetic oligonucleotide
caccccaacaucuuuuauu

SEQ ID NO: 2377419 - RNA, 19 nt, Artificial Sequence
  Description of Artificial Sequence: Synthetic oligonucleotide
cacaccccaacaucuuuua

SEQ ID NO: 2377420 - RNA, 19 nt, Artificial Sequence
  Description of Artificial Sequence: Synthetic oligonucleotide
caaggccccagcuaaccgu

SEQ ID NO: 2377421 - RNA, 19 nt, Artificial Sequence
  Description of Artificial Sequence: Synthetic oligonucleotide
uuuguccuugguggcccaa

SEQ ID NO: 2377422 - RNA, 19 nt, Artificial Sequence
  Description of Artificial Sequence: Synthetic oligonucleotide
caugaguagaagguuguuu

SEQ ID NO: 2377423 - RNA, 19 nt, Artificial Sequence
  Description of Artificial Sequence: Synthetic oligonucleotide
gcagucuaaggaugaugga

SEQ ID NO: 2377424 - RNA, 19 nt, Artificial Sequence
  Description of Artificial Sequence: Synthetic oligonucleotide
guuuguccuugguggccca

SEQ ID NO: 2377425 - RNA, 19 nt, Artificial Sequence
  Description of Artificial Sequence: Synthetic oligonucleotide
gcuaaccguaccaucaccu

SEQ ID NO: 2377426 - RNA, 19 nt, Artificial Sequence
  Description of Artificial Sequence: Synthetic oligonucleotide
cacauccgcaccacuucaa

SEQ ID NO: 2377427 - RNA, 19 nt, Artificial Sequence
  Description of Artificial Sequence: Synthetic oligonucleotide
cucauuauaccugcacuuu

SEQ ID NO: 2377428 - RNA, 19 nt, Artificial Sequence
  Description of Artificial Sequence: Synthetic oligonucleotide
ggccccagcuaaccguacc

SEQ ID NO: 2377429 - RNA, 19 nt, Artificial Sequence
  Description of Artificial Sequence: Synthetic oligonucleotide
acacacacacacaccccaa

SEQ ID NO: 2377430 - RNA, 19 nt, Artificial Sequence
  Description of Artificial Sequence: Synthetic oligonucleotide
gcgaaaauuccgaggaacu

SEQ ID NO: 2377431 - RNA, 19 nt, Artificial Sequence
  Description of Artificial Sequence: Synthetic oligonucleotide
ccuuugccaugcuuuuguc

SEQ ID NO: 2377432 - RNA, 19 nt, Artificial Sequence
  Description of Artificial Sequence: Synthetic oligonucleotide
acacacaccccaacaucuu

SEQ ID NO: 2377433 - RNA, 19 nt, Artificial Sequence
  Description of Artificial Sequence: Synthetic oligonucleotide
cuauaggaauuuugccauu

SEQ ID NO: 2377434 - RNA, 19 nt, Artificial Sequence
  Description of Artificial Sequence: Synthetic oligonucleotide
cccaauaaucaugccuguc

SEQ ID NO: 2377435 - RNA, 19 nt, Artificial Sequence
  Description of Artificial Sequence: Synthetic oligonucleotide
aggccccagcuaaccguac

SEQ ID NO: 2377436 - RNA, 19 nt, Artificial Sequence
  Description of Artificial Sequence: Synthetic oligonucleotide
ccaugcuuuugucuugaaa

SEQ ID NO: 2377437 - RNA, 19 nt, Artificial Sequence
  Description of Artificial Sequence: Synthetic oligonucleotide
ccgaggaacuuuaacuccu

SEQ ID NO: 2377438 - RNA, 19 nt, Artificial Sequence
  Description of Artificial Sequence: Synthetic oligonucleotide
ccguaccaucaccuacucc

SEQ ID NO: 2377439 - RNA, 19 nt, Artificial Sequence
  Description of Artificial Sequence: Synthetic oligonucleotide
cgucuuagcucuugaagua

SEQ ID NO: 2377440 - RNA, 19 nt, Artificial Sequence
  Description of Artificial Sequence: Synthetic oligonucleotide
caugccuguccaccuugua

SEQ ID NO: 2377441 - RNA, 19 nt, Artificial Sequence
  Description of Artificial Sequence: Synthetic oligonucleotide
ccacauccgcaccacuuca

SEQ ID NO: 2377442 - RNA, 19 nt, Artificial Sequence
  Description of Artificial Sequence: Synthetic oligonucleotide
cacacaccccaacaucuuu

SEQ ID NO: 2377443 - RNA, 19 nt, Artificial Sequence
  Description of Artificial Sequence: Synthetic oligonucleotide
gguaugcuucgugcaucca

SEQ ID NO: 2377444 - RNA, 19 nt, Artificial Sequence
  Description of Artificial Sequence: Synthetic oligonucleotide
ccaccauuccacuggaauu

SEQ ID NO: 2377445 - RNA, 19 nt, Artificial Sequence
  Description of Artificial Sequence: Synthetic oligonucleotide
guaccaucaccuacuccuu

SEQ ID NO: 2377446 - RNA, 19 nt, Artificial Sequence
  Description of Artificial Sequence: Synthetic oligonucleotide
gcccaauaaucaugccugu

SEQ ID NO: 2377447 - RNA, 19 nt, Artificial Sequence
  Description of Artificial Sequence: Synthetic oligonucleotide
gcaccacuucaagaguuua

SEQ ID NO: 2377448 - RNA, 19 nt, Artificial Sequence
  Description of Artificial Sequence: Synthetic oligonucleotide
gucuguccuucugguggcu

SEQ ID NO: 2377449 - RNA, 19 nt, Artificial Sequence
  Description of Artificial Sequence: Synthetic oligonucleotide
ccgcaccacuucaagaguu

SEQ ID NO: 2377450 - RNA, 19 nt, Artificial Sequence
  Description of Artificial Sequence: Synthetic oligonucleotide
cgaaaauuccgaggaacuu

SEQ ID NO: 2377451 - RNA, 19 nt, Artificial Sequence
  Description of Artificial Sequence: Synthetic oligonucleotide
cuguggagaccgccaucuu

SEQ ID NO: 2377452 - RNA, 19 nt, Artificial Sequence
  Description of Artificial Sequence: Synthetic oligonucleotide
ggaggagcuucuggguauu

SEQ ID NO: 2377453 - RNA, 19 nt, Artificial Sequence
  Description of Artificial Sequence: Synthetic oligonucleotide
ccccaacaucuuuuauuau

SEQ ID NO: 2377454 - RNA, 19 nt, Artificial Sequence
  Description of Artificial Sequence: Synthetic oligonucleotide
ccauuccacuggaauuauu

SEQ ID NO: 2377455 - RNA, 19 nt, Artificial Sequence
  Description of Artificial Sequence: Synthetic oligonucleotide
cgcaccacuucaagaguuu

SEQ ID NO: 2377456 - RNA, 19 nt, Artificial Sequence
  Description of Artificial Sequence: Synthetic oligonucleotide
ccccagcuaaccguaccau

SEQ ID NO: 2377457 - RNA, 19 nt, Artificial Sequence
  Description of Artificial Sequence: Synthetic oligonucleotide
aucuucaccgauuugaucc

SEQ ID NO: 2377458 - RNA, 19 nt, Artificial Sequence
  Description of Artificial Sequence: Synthetic oligonucleotide
uuagaaacaacauuuaaca

SEQ ID NO: 2377459 - RNA, 19 nt, Artificial Sequence
  Description of Artificial Sequence: Synthetic oligonucleotide
uucuaaaucguccugaugc

SEQ ID NO: 2377460 - RNA, 19 nt, Artificial Sequence
  Description of Artificial Sequence: Synthetic oligonucleotide
aaaguuuccguauugaagu

SEQ ID NO: 2377461 - RNA, 19 nt, Artificial Sequence
  Description of Artificial Sequence: Synthetic oligonucleotide
uuaacauugaaguaagcag

SEQ ID NO: 2377462 - RNA, 19 nt, Artificial Sequence
  Description of Artificial Sequence: Synthetic oligonucleotide
aguauuuuacaccugaaug

SEQ ID NO: 2377463 - RNA, 19 nt, Artificial Sequence
  Description of Artificial Sequence: Synthetic oligonucleotide
uuucuuuuggcucugaaac

SEQ ID NO: 2377464 - RNA, 19 nt, Artificial Sequence
  Description of Artificial Sequence: Synthetic oligonucleotide
accgauuugauccaguuuc

SEQ ID NO: 2377465 - RNA, 19 nt, Artificial Sequence
  Description of Artificial Sequence: Synthetic oligonucleotide
aaucguauuucuuuccuug

SEQ ID NO: 2377466 - RNA, 19 nt, Artificial Sequence
  Description of Artificial Sequence: Synthetic oligonucleotide
uaacauugaaguaagcaga

SEQ ID NO: 2377467 - RNA, 19 nt, Artificial Sequence
  Description of Artificial Sequence: Synthetic oligonucleotide
uuuaacauugaaguaagca

SEQ ID NO: 2377468 - RNA, 19 nt, Artificial Sequence
  Description of Artificial Sequence: Synthetic oligonucleotide
uauuucuuuccuuggauag

SEQ ID NO: 2377469 - RNA, 19 nt, Artificial Sequence
  Description of Artificial Sequence: Synthetic oligonucleotide
ucuaguauuuuacaccuga

SEQ ID NO: 2377470 - RNA, 19 nt, Artificial Sequence
  Description of Artificial Sequence: Synthetic oligonucleotide
aagaaugccgaucggguuc

SEQ ID NO: 2377471 - RNA, 19 nt, Artificial Sequence
  Description of Artificial Sequence: Synthetic oligonucleotide
augacuuugauccgaaguc

SEQ ID NO: 2377472 - RNA, 19 nt, Artificial Sequence
  Description of Artificial Sequence: Synthetic oligonucleotide
agaacaugucgauggaucc

SEQ ID NO: 2377473 - RNA, 19 nt, Artificial Sequence
  Description of Artificial Sequence: Synthetic oligonucleotide
uccgaagucucucacagag

SEQ ID NO: 2377474 - RNA, 19 nt, Artificial Sequence
  Description of Artificial Sequence: Synthetic oligonucleotide
ucuaugaccucugagaaca

SEQ ID NO: 2377475 - RNA, 19 nt, Artificial Sequence
  Description of Artificial Sequence: Synthetic oligonucleotide
uaauugauaacaucagaac

SEQ ID NO: 2377476 - RNA, 19 nt, Artificial Sequence
  Description of Artificial Sequence: Synthetic oligonucleotide
aauccgacaacauagucuu

SEQ ID NO: 2377477 - RNA, 19 nt, Artificial Sequence
  Description of Artificial Sequence: Synthetic oligonucleotide
agcucaagaaugccgaucg

SEQ ID NO: 2377478 - RNA, 19 nt, Artificial Sequence
  Description of Artificial Sequence: Synthetic oligonucleotide
uguaauugauaacaucaga

SEQ ID NO: 2377479 - RNA, 19 nt, Artificial Sequence
  Description of Artificial Sequence: Synthetic oligonucleotide
uaaaucguccugaugccgg

SEQ ID NO: 2377480 - RNA, 19 nt, Artificial Sequence
  Description of Artificial Sequence: Synthetic oligonucleotide
uuuagaaagccauucuugu

SEQ ID NO: 2377481 - RNA, 19 nt, Artificial Sequence
  Description of Artificial Sequence: Synthetic oligonucleotide
agaaacaacauuuaacauu

SEQ ID NO: 2377482 - RNA, 19 nt, Artificial Sequence
  Description of Artificial Sequence: Synthetic oligonucleotide
uccacauuuagcuucaaaa

SEQ ID NO: 2377483 - RNA, 19 nt, Artificial Sequence
  Description of Artificial Sequence: Synthetic oligonucleotide
gauaacaucagaacaacca

SEQ ID NO: 2377484 - RNA, 19 nt, Artificial Sequence
  Description of Artificial Sequence: Synthetic oligonucleotide
ugucuaguauuuuacaccu

SEQ ID NO: 2377485 - RNA, 19 nt, Artificial Sequence
  Description of Artificial Sequence: Synthetic oligonucleotide
uguagaaauggcaaaccac

SEQ ID NO: 2377486 - RNA, 19 nt, Artificial Sequence
  Description of Artificial Sequence: Synthetic oligonucleotide
gagcuuagcagccuggagg

SEQ ID NO: 2377487 - RNA, 19 nt, Artificial Sequence
  Description of Artificial Sequence: Synthetic oligonucleotide
ucuuuuggcucugaaacgg

SEQ ID NO: 2377488 - RNA, 19 nt, Artificial Sequence
  Description of Artificial Sequence: Synthetic oligonucleotide
ugucccaaauuucuuuugg

SEQ ID NO: 2377489 - RNA, 19 nt, Artificial Sequence
  Description of Artificial Sequence: Synthetic oligonucleotide
gacaacauagucuugcguc

SEQ ID NO: 2377490 - RNA, 19 nt, Artificial Sequence
  Description of Artificial Sequence: Synthetic oligonucleotide
aauguggugucucuguaga

SEQ ID NO: 2377491 - RNA, 19 nt, Artificial Sequence
  Description of Artificial Sequence: Synthetic oligonucleotide
ucuuguuucuguugguggg

SEQ ID NO: 2377492 - RNA, 19 nt, Artificial Sequence
  Description of Artificial Sequence: Synthetic oligonucleotide
uuuuacaccugaauguggu

SEQ ID NO: 2377493 - RNA, 19 nt, Artificial Sequence
  Description of Artificial Sequence: Synthetic oligonucleotide
uuugaggaguuccagcuca

SEQ ID NO: 2377494 - RNA, 19 nt, Artificial Sequence
  Description of Artificial Sequence: Synthetic oligonucleotide
ucuguauuuccuaggucgg

SEQ ID NO: 2377495 - RNA, 19 nt, Artificial Sequence
  Description of Artificial Sequence: Synthetic oligonucleotide
ucucacagaggaauggugc

SEQ ID NO: 2377496 - RNA, 19 nt, Artificial Sequence
  Description of Artificial Sequence: Synthetic oligonucleotide
gauccauuaccuuccauug

SEQ ID NO: 2377497 - RNA, 19 nt, Artificial Sequence
  Description of Artificial Sequence: Synthetic oligonucleotide
aacaacauuuaacauugaa

SEQ ID NO: 2377498 - RNA, 19 nt, Artificial Sequence
  Description of Artificial Sequence: Synthetic oligonucleotide
aacaaccaagucuccacuc

SEQ ID NO: 2377499 - RNA, 19 nt, Artificial Sequence
  Description of Artificial Sequence: Synthetic oligonucleotide
cugucuaguauuuuacacc

SEQ ID NO: 2377500 - RNA, 19 nt, Artificial Sequence
  Description of Artificial Sequence: Synthetic oligonucleotide
uauuuuacaccugaaugug

SEQ ID NO: 2377501 - RNA, 19 nt, Artificial Sequence
  Description of Artificial Sequence: Synthetic oligonucleotide
uacgaagggaggaaguugc

SEQ ID NO: 2377502 - RNA, 19 nt, Artificial Sequence
  Description of Artificial Sequence: Synthetic oligonucleotide
auagucuugcgucuugccg

SEQ ID NO: 2377503 - RNA, 19 nt, Artificial Sequence
  Description of Artificial Sequence: Synthetic oligonucleotide
uuggauaguuuucuuuucc

SEQ ID NO: 2377504 - RNA, 19 nt, Artificial Sequence
  Description of Artificial Sequence: Synthetic oligonucleotide
guccaagugacuuuccacg

SEQ ID NO: 2377505 - RNA, 19 nt, Artificial Sequence
  Description of Artificial Sequence: Synthetic oligonucleotide
augccgaucggguucacgc

SEQ ID NO: 2377506 - RNA, 19 nt, Artificial Sequence
  Description of Artificial Sequence: Synthetic oligonucleotide
ugucgauggauccauuacc

SEQ ID NO: 2377507 - RNA, 19 nt, Artificial Sequence
  Description of Artificial Sequence: Synthetic oligonucleotide
ugaauuucagaguccaagu

SEQ ID NO: 2377508 - RNA, 19 nt, Artificial Sequence
  Description of Artificial Sequence: Synthetic oligonucleotide
auuucagaguccaagugac

SEQ ID NO: 2377509 - RNA, 19 nt, Artificial Sequence
  Description of Artificial Sequence: Synthetic oligonucleotide
uucuuuuggcucugaaacg

SEQ ID NO: 2377510 - RNA, 19 nt, Artificial Sequence
  Description of Artificial Sequence: Synthetic oligonucleotide
ucaagaaugccgaucgggu

SEQ ID NO: 2377511 - RNA, 19 nt, Artificial Sequence
  Description of Artificial Sequence: Synthetic oligonucleotide
ugauaacaucagaacaacc

SEQ ID NO: 2377512 - RNA, 19 nt, Artificial Sequence
  Description of Artificial Sequence: Synthetic oligonucleotide
aguccaagugacuuuccac

SEQ ID NO: 2377513 - RNA, 19 nt, Artificial Sequence
  Description of Artificial Sequence: Synthetic oligonucleotide
uuuccacuguaauugauaa

SEQ ID NO: 2377514 - RNA, 19 nt, Artificial Sequence
  Description of Artificial Sequence: Synthetic oligonucleotide
ucucuaugaccucugagaa

SEQ ID NO: 2377515 - RNA, 19 nt, Artificial Sequence
  Description of Artificial Sequence: Synthetic oligonucleotide
auuugauccaguuucugaa

SEQ ID NO: 2377516 - RNA, 19 nt, Artificial Sequence
  Description of Artificial Sequence: Synthetic oligonucleotide
cuccauuaaauuuccacug

SEQ ID NO: 2377517 - RNA, 19 nt, Artificial Sequence
  Description of Artificial Sequence: Synthetic oligonucleotide
ugaaucguauuucuuuccu

SEQ ID NO: 2377518 - RNA, 19 nt, Artificial Sequence
  Description of Artificial Sequence: Synthetic oligonucleotide
ggugaauccgacaacauag

SEQ ID NO: 2377519 - RNA, 19 nt, Artificial Sequence
  Description of Artificial Sequence: Synthetic oligonucleotide
augucgauggauccauuac

SEQ ID NO: 2377520 - RNA, 19 nt, Artificial Sequence
  Description of Artificial Sequence: Synthetic oligonucleotide
ucuaaaucguccugaugcc

SEQ ID NO: 2377521 - RNA, 19 nt, Artificial Sequence
  Description of Artificial Sequence: Synthetic oligonucleotide
uugcagcucaagaaugccg

SEQ ID NO: 2377522 - RNA, 19 nt, Artificial Sequence
  Description of Artificial Sequence: Synthetic oligonucleotide
ucugaaucguauuucuuuc

SEQ ID NO: 2377523 - RNA, 19 nt, Artificial Sequence
  Description of Artificial Sequence: Synthetic oligonucleotide
ugcagcucaagaaugccga

SEQ ID NO: 2377524 - RNA, 19 nt, Artificial Sequence
  Description of Artificial Sequence: Synthetic oligonucleotide
ugucugucuaguauuuuac

SEQ ID NO: 2377525 - RNA, 19 nt, Artificial Sequence
  Description of Artificial Sequence: Synthetic oligonucleotide
guucacgcagguuucagcc

SEQ ID NO: 2377526 - RNA, 19 nt, Artificial Sequence
  Description of Artificial Sequence: Synthetic oligonucleotide
aaaucguccugaugccggg

SEQ ID NO: 2377527 - RNA, 19 nt, Artificial Sequence
  Description of Artificial Sequence: Synthetic oligonucleotide
aucggugaugccuacgaag

SEQ ID NO: 2377528 - RNA, 19 nt, Artificial Sequence
  Description of Artificial Sequence: Synthetic oligonucleotide
aucguauuucuuuccuugg

SEQ ID NO: 2377529 - RNA, 19 nt, Artificial Sequence
  Description of Artificial Sequence: Synthetic oligonucleotide
guaauugauaacaucagaa

SEQ ID NO: 2377530 - RNA, 19 nt, Artificial Sequence
  Description of Artificial Sequence: Synthetic oligonucleotide
uuuccacgagcuuagcagc

SEQ ID NO: 2377531 - RNA, 19 nt, Artificial Sequence
  Description of Artificial Sequence: Synthetic oligonucleotide
gaacugguucucuaugacc

SEQ ID NO: 2377532 - RNA, 19 nt, Artificial Sequence
  Description of Artificial Sequence: Synthetic oligonucleotide
uaguauuuuacaccugaau

SEQ ID NO: 2377533 - RNA, 19 nt, Artificial Sequence
  Description of Artificial Sequence: Synthetic oligonucleotide
ugacuuuccacgagcuuag

SEQ ID NO: 2377534 - RNA, 19 nt, Artificial Sequence
  Description of Artificial Sequence: Synthetic oligonucleotide
uccauuaaauuuccacugu

SEQ ID NO: 2377535 - RNA, 19 nt, Artificial Sequence
  Description of Artificial Sequence: Synthetic oligonucleotide
acuggcaauuucucuguac

SEQ ID NO: 2377536 - RNA, 19 nt, Artificial Sequence
  Description of Artificial Sequence: Synthetic oligonucleotide
ucucucacuggcaauuucu

SEQ ID NO: 2377537 - RNA, 19 nt, Artificial Sequence
  Description of Artificial Sequence: Synthetic oligonucleotide
ugaaguaagcagacagaca

SEQ ID NO: 2377538 - RNA, 19 nt, Artificial Sequence
  Description of Artificial Sequence: Synthetic oligonucleotide
ucccaaauuucuuuuggcu

SEQ ID NO: 2377539 - RNA, 19 nt, Artificial Sequence
  Description of Artificial Sequence: Synthetic oligonucleotide
ucuaaaguuuccguauuga

SEQ ID NO: 2377540 - RNA, 19 nt, Artificial Sequence
  Description of Artificial Sequence: Synthetic oligonucleotide
guauuuuacaccugaaugu

SEQ ID NO: 2377541 - RNA, 19 nt, Artificial Sequence
  Description of Artificial Sequence: Synthetic oligonucleotide
ucuguagaaauggcaaacc

SEQ ID NO: 2377542 - RNA, 19 nt, Artificial Sequence
  Description of Artificial Sequence: Synthetic oligonucleotide
aguauggcacagucuaguc

SEQ ID NO: 2377543 - RNA, 19 nt, Artificial Sequence
  Description of Artificial Sequence: Synthetic oligonucleotide
uucucuguacuccccaugu

SEQ ID NO: 2377544 - RNA, 19 nt, Artificial Sequence
  Description of Artificial Sequence: Synthetic oligonucleotide
cucuguacuccccaugucc

SEQ ID NO: 2377545 - RNA, 19 nt, Artificial Sequence
  Description of Artificial Sequence: Synthetic oligonucleotide
gugguuuacaaguauggca

SEQ ID NO: 2377546 - RNA, 19 nt, Artificial Sequence
  Description of Artificial Sequence: Synthetic oligonucleotide
aaagccauucuuguuucug

SEQ ID NO: 2377547 - RNA, 19 nt, Artificial Sequence
  Description of Artificial Sequence: Synthetic oligonucleotide
uuccguauugaagucaucu

SEQ ID NO: 2377548 - RNA, 19 nt, Artificial Sequence
  Description of Artificial Sequence: Synthetic oligonucleotide
uuuucacucuccuuuacuu

SEQ ID NO: 2377549 - RNA, 19 nt, Artificial Sequence
  Description of Artificial Sequence: Synthetic oligonucleotide
uggauaguuuucuuuucca

SEQ ID NO: 2377550 - RNA, 19 nt, Artificial Sequence
  Description of Artificial Sequence: Synthetic oligonucleotide
aguugcagcucaagaaugc

SEQ ID NO: 2377551 - RNA, 19 nt, Artificial Sequence
  Description of Artificial Sequence: Synthetic oligonucleotide
uuuuggcucugaaacggug

SEQ ID NO: 2377552 - RNA, 19 nt, Artificial Sequence
  Description of Artificial Sequence: Synthetic oligonucleotide
uccauuguucuaaaucguc

SEQ ID NO: 2377553 - RNA, 19 nt, Artificial Sequence
  Description of Artificial Sequence: Synthetic oligonucleotide
uccauuaccuuccauuguu

SEQ ID NO: 2377554 - RNA, 19 nt, Artificial Sequence
  Description of Artificial Sequence: Synthetic oligonucleotide
aagccauucuuguuucugu

SEQ ID NO: 2377555 - RNA, 19 nt, Artificial Sequence
  Description of Artificial Sequence: Synthetic oligonucleotide
uagucuugcgucuugccgu

SEQ ID NO: 2377556 - RNA, 19 nt, Artificial Sequence
  Description of Artificial Sequence: Synthetic oligonucleotide
cucaagaaugccgaucggg

SEQ ID NO: 2377557 - RNA, 19 nt, Artificial Sequence
  Description of Artificial Sequence: Synthetic oligonucleotide
caagugacuuuccacgagc

SEQ ID NO: 2377558 - RNA, 19 nt, Artificial Sequence
  Description of Artificial Sequence: Synthetic oligonucleotide
uccuuuagaaagccauucu

SEQ ID NO: 2377559 - RNA, 19 nt, Artificial Sequence
  Description of Artificial Sequence: Synthetic oligonucleotide
uuaccuuccauuguucuaa

SEQ ID NO: 2377560 - RNA, 19 nt, Artificial Sequence
  Description of Artificial Sequence: Synthetic oligonucleotide
uguauuuccuaggucggug

SEQ ID NO: 2377561 - RNA, 19 nt, Artificial Sequence
  Description of Artificial Sequence: Synthetic oligonucleotide
uacaaguauggcacagucu

SEQ ID NO: 2377562 - RNA, 19 nt, Artificial Sequence
  Description of Artificial Sequence: Synthetic oligonucleotide
ugugaaguuugucccaaau

SEQ ID NO: 2377563 - RNA, 19 nt, Artificial Sequence
  Description of Artificial Sequence: Synthetic oligonucleotide
gaugacuuugauccgaagu

SEQ ID NO: 2377564 - RNA, 19 nt, Artificial Sequence
  Description of Artificial Sequence: Synthetic oligonucleotide
uccuaggucggugaauccg

SEQ ID NO: 2377565 - RNA, 19 nt, Artificial Sequence
  Description of Artificial Sequence: Synthetic oligonucleotide
uuacaccugaauguggugu

SEQ ID NO: 2377566 - RNA, 19 nt, Artificial Sequence
  Description of Artificial Sequence: Synthetic oligonucleotide
aaguauggcacagucuagu

SEQ ID NO: 2377567 - RNA, 19 nt, Artificial Sequence
  Description of Artificial Sequence: Synthetic oligonucleotide
uccguauugaagucaucug

SEQ ID NO: 2377568 - RNA, 19 nt, Artificial Sequence
  Description of Artificial Sequence: Synthetic oligonucleotide
agucuagucaucaucagaa

SEQ ID NO: 2377569 - RNA, 19 nt, Artificial Sequence
  Description of Artificial Sequence: Synthetic oligonucleotide
ucguauuucuuuccuugga

SEQ ID NO: 2377570 - RNA, 19 nt, Artificial Sequence
  Description of Artificial Sequence: Synthetic oligonucleotide
cugaaucguauuucuuucc

SEQ ID NO: 2377571 - RNA, 19 nt, Artificial Sequence
  Description of Artificial Sequence: Synthetic oligonucleotide
aagucucucucacuggcaa

SEQ ID NO: 2377572 - RNA, 19 nt, Artificial Sequence
  Description of Artificial Sequence: Synthetic oligonucleotide
ugaauccgacaacauaguc

SEQ ID NO: 2377573 - RNA, 19 nt, Artificial Sequence
  Description of Artificial Sequence: Synthetic oligonucleotide
uguuggugggccuuccuga

SEQ ID NO: 2377574 - RNA, 19 nt, Artificial Sequence
  Description of Artificial Sequence: Synthetic oligonucleotide
uuccauuguucuaaaucgu

SEQ ID NO: 2377575 - RNA, 19 nt, Artificial Sequence
  Description of Artificial Sequence: Synthetic oligonucleotide
uccacucuaaaguuuccgu

SEQ ID NO: 2377576 - RNA, 19 nt, Artificial Sequence
  Description of Artificial Sequence: Synthetic oligonucleotide
ggugucucuguagaaaugg

SEQ ID NO: 2377577 - RNA, 19 nt, Artificial Sequence
  Description of Artificial Sequence: Synthetic oligonucleotide
gaggaauggugccuuuucc

SEQ ID NO: 2377578 - RNA, 19 nt, Artificial Sequence
  Description of Artificial Sequence: Synthetic oligonucleotide
aggugguuuacaaguaugg

SEQ ID NO: 2377579 - RNA, 19 nt, Artificial Sequence
  Description of Artificial Sequence: Synthetic oligonucleotide
uuucuuugaggaguuccag

SEQ ID NO: 2377580 - RNA, 19 nt, Artificial Sequence
  Description of Artificial Sequence: Synthetic oligonucleotide
aucggguucacgcagguuu

SEQ ID NO: 2377581 - RNA, 19 nt, Artificial Sequence
  Description of Artificial Sequence: Synthetic oligonucleotide
auuuuacaccugaaugugg

SEQ ID NO: 2377582 - RNA, 19 nt, Artificial Sequence
  Description of Artificial Sequence: Synthetic oligonucleotide
cacagucuagucaucauca

SEQ ID NO: 2377583 - RNA, 19 nt, Artificial Sequence
  Description of Artificial Sequence: Synthetic oligonucleotide
agcuuagcagccuggagga

SEQ ID NO: 2377584 - RNA, 19 nt, Artificial Sequence
  Description of Artificial Sequence: Synthetic oligonucleotide
gagaacaugucgauggauc

SEQ ID NO: 2377585 - RNA, 19 nt, Artificial Sequence
  Description of Artificial Sequence: Synthetic oligonucleotide
uuucucuguacuccccaug

SEQ ID NO: 2377586 - RNA, 19 nt, Artificial Sequence
  Description of Artificial Sequence: Synthetic oligonucleotide
cagguuucagccucgcagc

SEQ ID NO: 2377587 - RNA, 19 nt, Artificial Sequence
  Description of Artificial Sequence: Synthetic oligonucleotide
uuuacaccugaauguggug

SEQ ID NO: 2377588 - RNA, 19 nt, Artificial Sequence
  Description of Artificial Sequence: Synthetic oligonucleotide
uuuccuaggucggugaauc

SEQ ID NO: 2377589 - RNA, 19 nt, Artificial Sequence
  Description of Artificial Sequence: Synthetic oligonucleotide
cucaggagugcuagugugg

SEQ ID NO: 2377590 - RNA, 19 nt, Artificial Sequence
  Description of Artificial Sequence: Synthetic oligonucleotide
agccuggaggaacugguuc

SEQ ID NO: 2377591 - RNA, 19 nt, Artificial Sequence
  Description of Artificial Sequence: Synthetic oligonucleotide
uccaagugacuuuccacga

SEQ ID NO: 2377592 - RNA, 19 nt, Artificial Sequence
  Description of Artificial Sequence: Synthetic oligonucleotide
caguauugccaaaugucug

SEQ ID NO: 2377593 - RNA, 19 nt, Artificial Sequence
  Description of Artificial Sequence: Synthetic oligonucleotide
cucgcagcgguuguuaagg

SEQ ID NO: 2377594 - RNA, 19 nt, Artificial Sequence
  Description of Artificial Sequence: Synthetic oligonucleotide
cuaaaucguccugaugccg

SEQ ID NO: 2377595 - RNA, 19 nt, Artificial Sequence
  Description of Artificial Sequence: Synthetic oligonucleotide
ugacuuugauccgaagucu

SEQ ID NO: 2377596 - RNA, 19 nt, Artificial Sequence
  Description of Artificial Sequence: Synthetic oligonucleotide
guucucuaugaccucugag

SEQ ID NO: 2377597 - RNA, 19 nt, Artificial Sequence
  Description of Artificial Sequence: Synthetic oligonucleotide
ucucuguagaaauggcaaa

SEQ ID NO: 2377598 - RNA, 19 nt, Artificial Sequence
  Description of Artificial Sequence: Synthetic oligonucleotide
cuuggauaguuuucuuuuc

SEQ ID NO: 2377599 - RNA, 19 nt, Artificial Sequence
  Description of Artificial Sequence: Synthetic oligonucleotide
ccccauguccuuuagaaag

SEQ ID NO: 2377600 - RNA, 19 nt, Artificial Sequence
  Description of Artificial Sequence: Synthetic oligonucleotide
ugaugccuacgaagggagg

SEQ ID NO: 2377601 - RNA, 19 nt, Artificial Sequence
  Description of Artificial Sequence: Synthetic oligonucleotide
aacaugucgauggauccau

SEQ ID NO: 2377602 - RNA, 19 nt, Artificial Sequence
  Description of Artificial Sequence: Synthetic oligonucleotide
cucuaaaguuuccguauug

SEQ ID NO: 2377603 - RNA, 19 nt, Artificial Sequence
  Description of Artificial Sequence: Synthetic oligonucleotide
acagucuagucaucaucag

SEQ ID NO: 2377604 - RNA, 19 nt, Artificial Sequence
  Description of Artificial Sequence: Synthetic oligonucleotide
cucuguagaaauggcaaac

SEQ ID NO: 2377605 - RNA, 19 nt, Artificial Sequence
  Description of Artificial Sequence: Synthetic oligonucleotide
ugaaacgguggcuccauua

SEQ ID NO: 2377606 - RNA, 19 nt, Artificial Sequence
  Description of Artificial Sequence: Synthetic oligonucleotide
guagaaauggcaaaccacu

SEQ ID NO: 2377607 - RNA, 19 nt, Artificial Sequence
  Description of Artificial Sequence: Synthetic oligonucleotide
caucagaacaaccaagucu

SEQ ID NO: 2377608 - RNA, 19 nt, Artificial Sequence
  Description of Artificial Sequence: Synthetic oligonucleotide
aaucguccugaugccgggc

SEQ ID NO: 2377609 - RNA, 19 nt, Artificial Sequence
  Description of Artificial Sequence: Synthetic oligonucleotide
uguggggaugacuuugauc

SEQ ID NO: 2377610 - RNA, 19 nt, Artificial Sequence
  Description of Artificial Sequence: Synthetic oligonucleotide
uauugccaaaugucugucu

SEQ ID NO: 2377611 - RNA, 19 nt, Artificial Sequence
  Description of Artificial Sequence: Synthetic oligonucleotide
cauagucuugcgucuugcc

SEQ ID NO: 2377612 - RNA, 19 nt, Artificial Sequence
  Description of Artificial Sequence: Synthetic oligonucleotide
cagacaggugguuuacaag

SEQ ID NO: 2377613 - RNA, 19 nt, Artificial Sequence
  Description of Artificial Sequence: Synthetic oligonucleotide
acuuuccacgagcuuagca

SEQ ID NO: 2377614 - RNA, 19 nt, Artificial Sequence
  Description of Artificial Sequence: Synthetic oligonucleotide
uagucaucaucagaaucug

SEQ ID NO: 2377615 - RNA, 19 nt, Artificial Sequence
  Description of Artificial Sequence: Synthetic oligonucleotide
ccauuguucuaaaucgucc

SEQ ID NO: 2377616 - RNA, 19 nt, Artificial Sequence
  Description of Artificial Sequence: Synthetic oligonucleotide
uuucuuuccuuggauaguu

SEQ ID NO: 2377617 - RNA, 19 nt, Artificial Sequence
  Description of Artificial Sequence: Synthetic oligonucleotide
ggcaauuucucuguacucc

SEQ ID NO: 2377618 - RNA, 19 nt, Artificial Sequence
  Description of Artificial Sequence: Synthetic oligonucleotide
gaauccgacaacauagucu

SEQ ID NO: 2377619 - RNA, 19 nt, Artificial Sequence
  Description of Artificial Sequence: Synthetic oligonucleotide
ugaauguggugucucugua

SEQ ID NO: 2377620 - RNA, 19 nt, Artificial Sequence
  Description of Artificial Sequence: Synthetic oligonucleotide
ucacgcagguuucagccuc

SEQ ID NO: 2377621 - RNA, 19 nt, Artificial Sequence
  Description of Artificial Sequence: Synthetic oligonucleotide
augucugucuaguauuuua

SEQ ID NO: 2377622 - RNA, 19 nt, Artificial Sequence
  Description of Artificial Sequence: Synthetic oligonucleotide
aaugccgaucggguucacg

SEQ ID NO: 2377623 - RNA, 19 nt, Artificial Sequence
  Description of Artificial Sequence: Synthetic oligonucleotide
agucuugcgucuugccguc

SEQ ID NO: 2377624 - RNA, 19 nt, Artificial Sequence
  Description of Artificial Sequence: Synthetic oligonucleotide
uaguguggggaugacuuug

SEQ ID NO: 2377625 - RNA, 19 nt, Artificial Sequence
  Description of Artificial Sequence: Synthetic oligonucleotide
agguuucagccucgcagcg

SEQ ID NO: 2377626 - RNA, 19 nt, Artificial Sequence
  Description of Artificial Sequence: Synthetic oligonucleotide
uauuuccuaggucggugaa

SEQ ID NO: 2377627 - RNA, 19 nt, Artificial Sequence
  Description of Artificial Sequence: Synthetic oligonucleotide
aaacgguggcuccauuaaa

SEQ ID NO: 2377628 - RNA, 19 nt, Artificial Sequence
  Description of Artificial Sequence: Synthetic oligonucleotide
aacgguggcuccauuaaau

SEQ ID NO: 2377629 - RNA, 19 nt, Artificial Sequence
  Description of Artificial Sequence: Synthetic oligonucleotide
caaguauggcacagucuag

SEQ ID NO: 2377630 - RNA, 19 nt, Artificial Sequence
  Description of Artificial Sequence: Synthetic oligonucleotide
uuucagaguccaagugacu

SEQ ID NO: 2377631 - RNA, 19 nt, Artificial Sequence
  Description of Artificial Sequence: Synthetic oligonucleotide
ugaugccgggcuaucggug

SEQ ID NO: 2377632 - RNA, 19 nt, Artificial Sequence
  Description of Artificial Sequence: Synthetic oligonucleotide
cuuguuucuguuggugggc

SEQ ID NO: 2377633 - RNA, 19 nt, Artificial Sequence
  Description of Artificial Sequence: Synthetic oligonucleotide
gaugccuacgaagggagga

SEQ ID NO: 2377634 - RNA, 19 nt, Artificial Sequence
  Description of Artificial Sequence: Synthetic oligonucleotide
uccuuggauaguuuucuuu

SEQ ID NO: 2377635 - RNA, 19 nt, Artificial Sequence
  Description of Artificial Sequence: Synthetic oligonucleotide
aaaugucugucuaguauuu

SEQ ID NO: 2377636 - RNA, 19 nt, Artificial Sequence
  Description of Artificial Sequence: Synthetic oligonucleotide
gucucucacagaggaaugg

SEQ ID NO: 2377637 - RNA, 19 nt, Artificial Sequence
  Description of Artificial Sequence: Synthetic oligonucleotide
uaugaccucugagaacaug

SEQ ID NO: 2377638 - RNA, 19 nt, Artificial Sequence
  Description of Artificial Sequence: Synthetic oligonucleotide
agugcuaguguggggauga

SEQ ID NO: 2377639 - RNA, 19 nt, Artificial Sequence
  Description of Artificial Sequence: Synthetic oligonucleotide
aagugacuuuccacgagcu

SEQ ID NO: 2377640 - RNA, 19 nt, Artificial Sequence
  Description of Artificial Sequence: Synthetic oligonucleotide
acaggugguuuacaaguau

SEQ ID NO: 2377641 - RNA, 19 nt, Artificial Sequence
  Description of Artificial Sequence: Synthetic oligonucleotide
gugaugccuacgaagggag

SEQ ID NO: 2377642 - RNA, 19 nt, Artificial Sequence
  Description of Artificial Sequence: Synthetic oligonucleotide
cucuaugaccucugagaac

SEQ ID NO: 2377643 - RNA, 19 nt, Artificial Sequence
  Description of Artificial Sequence: Synthetic oligonucleotide
uggccaguauugccaaaug

SEQ ID NO: 2377644 - RNA, 19 nt, Artificial Sequence
  Description of Artificial Sequence: Synthetic oligonucleotide
aguuuccguauugaaguca

SEQ ID NO: 2377645 - RNA, 19 nt, Artificial Sequence
  Description of Artificial Sequence: Synthetic oligonucleotide
auccauuaccuuccauugu

SEQ ID NO: 2377646 - RNA, 19 nt, Artificial Sequence
  Description of Artificial Sequence: Synthetic oligonucleotide
uuccacuguaauugauaac

SEQ ID NO: 2377647 - RNA, 19 nt, Artificial Sequence
  Description of Artificial Sequence: Synthetic oligonucleotide
uucaccgauuugauccagu

SEQ ID NO: 2377648 - RNA, 19 nt, Artificial Sequence
  Description of Artificial Sequence: Synthetic oligonucleotide
cuaucggugaugccuacga

SEQ ID NO: 2377649 - RNA, 19 nt, Artificial Sequence
  Description of Artificial Sequence: Synthetic oligonucleotide
agugccgccagccucuuuu

SEQ ID NO: 2377650 - RNA, 19 nt, Artificial Sequence
  Description of Artificial Sequence: Synthetic oligonucleotide
acucuaaaguuuccguauu

SEQ ID NO: 2377651 - RNA, 19 nt, Artificial Sequence
  Description of Artificial Sequence: Synthetic oligonucleotide
cuacgaagggaggaaguug

SEQ ID NO: 2377652 - RNA, 19 nt, Artificial Sequence
  Description of Artificial Sequence: Synthetic oligonucleotide
guugcagcucaagaaugcc

SEQ ID NO: 2377653 - RNA, 19 nt, Artificial Sequence
  Description of Artificial Sequence: Synthetic oligonucleotide
cauuguucuaaaucguccu

SEQ ID NO: 2377654 - RNA, 19 nt, Artificial Sequence
  Description of Artificial Sequence: Synthetic oligonucleotide
gaugccgggcuaucgguga

SEQ ID NO: 2377655 - RNA, 19 nt, Artificial Sequence
  Description of Artificial Sequence: Synthetic oligonucleotide
gacuuugauccgaagucuc

SEQ ID NO: 2377656 - RNA, 19 nt, Artificial Sequence
  Description of Artificial Sequence: Synthetic oligonucleotide
uucacgcagguuucagccu

SEQ ID NO: 2377657 - RNA, 19 nt, Artificial Sequence
  Description of Artificial Sequence: Synthetic oligonucleotide
ucgcagcgguuguuaaggg

SEQ ID NO: 2377658 - RNA, 19 nt, Artificial Sequence
  Description of Artificial Sequence: Synthetic oligonucleotide
uuggccaguauugccaaau

SEQ ID NO: 2377659 - RNA, 19 nt, Artificial Sequence
  Description of Artificial Sequence: Synthetic oligonucleotide
cacgagcuuagcagccugg

SEQ ID NO: 2377660 - RNA, 19 nt, Artificial Sequence
  Description of Artificial Sequence: Synthetic oligonucleotide
gucggugaauccgacaaca

SEQ ID NO: 2377661 - RNA, 19 nt, Artificial Sequence
  Description of Artificial Sequence: Synthetic oligonucleotide
uaucggugaugccuacgaa

SEQ ID NO: 2377662 - RNA, 19 nt, Artificial Sequence
  Description of Artificial Sequence: Synthetic oligonucleotide
gugacuuuccacgagcuua

SEQ ID NO: 2377663 - RNA, 19 nt, Artificial Sequence
  Description of Artificial Sequence: Synthetic oligonucleotide
uucagccucgcagcgguug

SEQ ID NO: 2377664 - RNA, 19 nt, Artificial Sequence
  Description of Artificial Sequence: Synthetic oligonucleotide
cuugccgucucucaggagu

SEQ ID NO: 2377665 - RNA, 19 nt, Artificial Sequence
  Description of Artificial Sequence: Synthetic oligonucleotide
uuccuaggucggugaaucc

SEQ ID NO: 2377666 - RNA, 19 nt, Artificial Sequence
  Description of Artificial Sequence: Synthetic oligonucleotide
cuguuggugggccuuccug

SEQ ID NO: 2377667 - RNA, 19 nt, Artificial Sequence
  Description of Artificial Sequence: Synthetic oligonucleotide
ugccuacgaagggaggaag

SEQ ID NO: 2377668 - RNA, 19 nt, Artificial Sequence
  Description of Artificial Sequence: Synthetic oligonucleotide
ucucuguacuccccauguc

SEQ ID NO: 2377669 - RNA, 19 nt, Artificial Sequence
  Description of Artificial Sequence: Synthetic oligonucleotide
cuaguauuuuacaccugaa

SEQ ID NO: 2377670 - RNA, 19 nt, Artificial Sequence
  Description of Artificial Sequence: Synthetic oligonucleotide
accugaauguggugucucu

SEQ ID NO: 2377671 - RNA, 19 nt, Artificial Sequence
  Description of Artificial Sequence: Synthetic oligonucleotide
guggcuccauuaaauuucc

SEQ ID NO: 2377672 - RNA, 19 nt, Artificial Sequence
  Description of Artificial Sequence: Synthetic oligonucleotide
ucuugcgucuugccgucuc

SEQ ID NO: 2377673 - RNA, 19 nt, Artificial Sequence
  Description of Artificial Sequence: Synthetic oligonucleotide
aucguccugaugccgggcu

SEQ ID NO: 2377674 - RNA, 19 nt, Artificial Sequence
  Description of Artificial Sequence: Synthetic oligonucleotide
ucuguuggugggccuuccu

SEQ ID NO: 2377675 - RNA, 19 nt, Artificial Sequence
  Description of Artificial Sequence: Synthetic oligonucleotide
uccccauguccuuuagaaa

SEQ ID NO: 2377676 - RNA, 19 nt, Artificial Sequence
  Description of Artificial Sequence: Synthetic oligonucleotide
ucggguucacgcagguuuc

SEQ ID NO: 2377677 - RNA, 19 nt, Artificial Sequence
  Description of Artificial Sequence: Synthetic oligonucleotide
ucggugaauccgacaacau

SEQ ID NO: 2377678 - RNA, 19 nt, Artificial Sequence
  Description of Artificial Sequence: Synthetic oligonucleotide
caaaugucugucuaguauu

SEQ ID NO: 2377679 - RNA, 19 nt, Artificial Sequence
  Description of Artificial Sequence: Synthetic oligonucleotide
uaggucggugaauccgaca

SEQ ID NO: 2377680 - RNA, 19 nt, Artificial Sequence
  Description of Artificial Sequence: Synthetic oligonucleotide
cagucuagucaucaucaga

SEQ ID NO: 2377681 - RNA, 19 nt, Artificial Sequence
  Description of Artificial Sequence: Synthetic oligonucleotide
gccaguauugccaaauguc

SEQ ID NO: 2377682 - RNA, 19 nt, Artificial Sequence
  Description of Artificial Sequence: Synthetic oligonucleotide
accaagucuccacucuaaa

SEQ ID NO: 2377683 - RNA, 19 nt, Artificial Sequence
  Description of Artificial Sequence: Synthetic oligonucleotide
aaccaagucuccacucuaa

SEQ ID NO: 2377684 - RNA, 19 nt, Artificial Sequence
  Description of Artificial Sequence: Synthetic oligonucleotide
cuggcaauuucucuguacu

SEQ ID NO: 2377685 - RNA, 19 nt, Artificial Sequence
  Description of Artificial Sequence: Synthetic oligonucleotide
agaaugccgaucggguuca

SEQ ID NO: 2377686 - RNA, 19 nt, Artificial Sequence
  Description of Artificial Sequence: Synthetic oligonucleotide
gguucacgcagguuucagc

SEQ ID NO: 2377687 - RNA, 19 nt, Artificial Sequence
  Description of Artificial Sequence: Synthetic oligonucleotide
aaacaacauuuaacauuga

SEQ ID NO: 2377688 - RNA, 19 nt, Artificial Sequence
  Description of Artificial Sequence: Synthetic oligonucleotide
cuaggucggugaauccgac

SEQ ID NO: 2377689 - RNA, 19 nt, Artificial Sequence
  Description of Artificial Sequence: Synthetic oligonucleotide
ugccgaucggguucacgca

SEQ ID NO: 2377690 - RNA, 19 nt, Artificial Sequence
  Description of Artificial Sequence: Synthetic oligonucleotide
agacagacagacagguggu

SEQ ID NO: 2377691 - RNA, 19 nt, Artificial Sequence
  Description of Artificial Sequence: Synthetic oligonucleotide
uuuccguauugaagucauc

SEQ ID NO: 2377692 - RNA, 19 nt, Artificial Sequence
  Description of Artificial Sequence: Synthetic oligonucleotide
cacgcagguuucagccucg

SEQ ID NO: 2377693 - RNA, 19 nt, Artificial Sequence
  Description of Artificial Sequence: Synthetic oligonucleotide
caggagugcuagugugggg

SEQ ID NO: 2377694 - RNA, 19 nt, Artificial Sequence
  Description of Artificial Sequence: Synthetic oligonucleotide
guauugccaaaugucuguc

SEQ ID NO: 2377695 - RNA, 19 nt, Artificial Sequence
  Description of Artificial Sequence: Synthetic oligonucleotide
caugucgauggauccauua

SEQ ID NO: 2377696 - RNA, 19 nt, Artificial Sequence
  Description of Artificial Sequence: Synthetic oligonucleotide
agucucucacagaggaaug

SEQ ID NO: 2377697 - RNA, 19 nt, Artificial Sequence
  Description of Artificial Sequence: Synthetic oligonucleotide
acgguggcuccauuaaauu

SEQ ID NO: 2377698 - RNA, 19 nt, Artificial Sequence
  Description of Artificial Sequence: Synthetic oligonucleotide
ucgauggauccauuaccuu

SEQ ID NO: 2377699 - RNA, 19 nt, Artificial Sequence
  Description of Artificial Sequence: Synthetic oligonucleotide
agugacuuuccacgagcuu

SEQ ID NO: 2377700 - RNA, 19 nt, Artificial Sequence
  Description of Artificial Sequence: Synthetic oligonucleotide
agggaggaaguugcagcuc

SEQ ID NO: 2377701 - RNA, 19 nt, Artificial Sequence
  Description of Artificial Sequence: Synthetic oligonucleotide
ucuugccgucucucaggag

SEQ ID NO: 2377702 - RNA, 19 nt, Artificial Sequence
  Description of Artificial Sequence: Synthetic oligonucleotide
uuggugggccuuccugagu

SEQ ID NO: 2377703 - RNA, 19 nt, Artificial Sequence
  Description of Artificial Sequence: Synthetic oligonucleotide
ugcuaguguggggaugacu

SEQ ID NO: 2377704 - RNA, 19 nt, Artificial Sequence
  Description of Artificial Sequence: Synthetic oligonucleotide
cacucuaaaguuuccguau

SEQ ID NO: 2377705 - RNA, 19 nt, Artificial Sequence
  Description of Artificial Sequence: Synthetic oligonucleotide
ccugaugccgggcuaucgg

SEQ ID NO: 2377706 - RNA, 19 nt, Artificial Sequence
  Description of Artificial Sequence: Synthetic oligonucleotide
ccgacaacauagucuugcg

SEQ ID NO: 2377707 - RNA, 19 nt, Artificial Sequence
  Description of Artificial Sequence: Synthetic oligonucleotide
uugugaaguuugucccaaa

SEQ ID NO: 2377708 - RNA, 19 nt, Artificial Sequence
  Description of Artificial Sequence: Synthetic oligonucleotide
gucuugccgucucucagga

SEQ ID NO: 2377709 - RNA, 19 nt, Artificial Sequence
  Description of Artificial Sequence: Synthetic oligonucleotide
ggugaugccuacgaaggga

SEQ ID NO: 2377710 - RNA, 19 nt, Artificial Sequence
  Description of Artificial Sequence: Synthetic oligonucleotide
gucgauggauccauuaccu

SEQ ID NO: 2377711 - RNA, 19 nt, Artificial Sequence
  Description of Artificial Sequence: Synthetic oligonucleotide
gaaucguauuucuuuccuu

SEQ ID NO: 2377712 - RNA, 19 nt, Artificial Sequence
  Description of Artificial Sequence: Synthetic oligonucleotide
uggauccauuaccuuccau

SEQ ID NO: 2377713 - RNA, 19 nt, Artificial Sequence
  Description of Artificial Sequence: Synthetic oligonucleotide
ggauccauuaccuuccauu

SEQ ID NO: 2377714 - RNA, 19 nt, Artificial Sequence
  Description of Artificial Sequence: Synthetic oligonucleotide
gguuuacaaguauggcaca

SEQ ID NO: 2377715 - RNA, 19 nt, Artificial Sequence
  Description of Artificial Sequence: Synthetic oligonucleotide
cugaauguggugucucugu

SEQ ID NO: 2377716 - RNA, 19 nt, Artificial Sequence
  Description of Artificial Sequence: Synthetic oligonucleotide
auccgaagucucucacaga

SEQ ID NO: 2377717 - RNA, 19 nt, Artificial Sequence
  Description of Artificial Sequence: Synthetic oligonucleotide
uaccuuccauuguucuaaa

SEQ ID NO: 2377718 - RNA, 19 nt, Artificial Sequence
  Description of Artificial Sequence: Synthetic oligonucleotide
gucuaguauuuuacaccug

SEQ ID NO: 2377719 - RNA, 19 nt, Artificial Sequence
  Description of Artificial Sequence: Synthetic oligonucleotide
cuucaccgauuugauccag

SEQ ID NO: 2377720 - RNA, 19 nt, Artificial Sequence
  Description of Artificial Sequence: Synthetic oligonucleotide
gagugcuaguguggggaug

SEQ ID NO: 2377721 - RNA, 19 nt, Artificial Sequence
  Description of Artificial Sequence: Synthetic oligonucleotide
uucuguuggugggccuucc

SEQ ID NO: 2377722 - RNA, 19 nt, Artificial Sequence
  Description of Artificial Sequence: Synthetic oligonucleotide
ggaugacuuugauccgaag

SEQ ID NO: 2377723 - RNA, 19 nt, Artificial Sequence
  Description of Artificial Sequence: Synthetic oligonucleotide
ccaagugacuuuccacgag

SEQ ID NO: 2377724 - RNA, 19 nt, Artificial Sequence
  Description of Artificial Sequence: Synthetic oligonucleotide
guaagcagacagacagaca

SEQ ID NO: 2377725 - RNA, 19 nt, Artificial Sequence
  Description of Artificial Sequence: Synthetic oligonucleotide
gguuucagccucgcagcgg

SEQ ID NO: 2377726 - RNA, 19 nt, Artificial Sequence
  Description of Artificial Sequence: Synthetic oligonucleotide
gacaggugguuuacaagua

SEQ ID NO: 2377727 - RNA, 19 nt, Artificial Sequence
  Description of Artificial Sequence: Synthetic oligonucleotide
ccaguauugccaaaugucu

SEQ ID NO: 2377728 - RNA, 19 nt, Artificial Sequence
  Description of Artificial Sequence: Synthetic oligonucleotide
gccgaucggguucacgcag

SEQ ID NO: 2377729 - RNA, 19 nt, Artificial Sequence
  Description of Artificial Sequence: Synthetic oligonucleotide
gcucaagaaugccgaucgg

SEQ ID NO: 2377730 - RNA, 19 nt, Artificial Sequence
  Description of Artificial Sequence: Synthetic oligonucleotide
gaaagccauucuuguuucu

SEQ ID NO: 2377731 - RNA, 19 nt, Artificial Sequence
  Description of Artificial Sequence: Synthetic oligonucleotide
acaccugaauguggugucu

SEQ ID NO: 2377732 - RNA, 19 nt, Artificial Sequence
  Description of Artificial Sequence: Synthetic oligonucleotide
ccauguccuuuagaaagcc

SEQ ID NO: 2377733 - RNA, 19 nt, Artificial Sequence
  Description of Artificial Sequence: Synthetic oligonucleotide
gcucugaaacgguggcucc

SEQ ID NO: 2377734 - RNA, 19 nt, Artificial Sequence
  Description of Artificial Sequence: Synthetic oligonucleotide
guuuccguauugaagucau

SEQ ID NO: 2377735 - RNA, 19 nt, Artificial Sequence
  Description of Artificial Sequence: Synthetic oligonucleotide
acgcagguuucagccucgc

SEQ ID NO: 2377736 - RNA, 19 nt, Artificial Sequence
  Description of Artificial Sequence: Synthetic oligonucleotide
ccgaagucucucacagagg

SEQ ID NO: 2377737 - RNA, 19 nt, Artificial Sequence
  Description of Artificial Sequence: Synthetic oligonucleotide
gcgucuugccgucucucag

SEQ ID NO: 2377738 - RNA, 19 nt, Artificial Sequence
  Description of Artificial Sequence: Synthetic oligonucleotide
ucucucucacuggcaauuu

SEQ ID NO: 2377739 - RNA, 19 nt, Artificial Sequence
  Description of Artificial Sequence: Synthetic oligonucleotide
gcuaucggugaugccuacg

SEQ ID NO: 2377740 - RNA, 19 nt, Artificial Sequence
  Description of Artificial Sequence: Synthetic oligonucleotide
ucguccugaugccgggcua

SEQ ID NO: 2377741 - RNA, 19 nt, Artificial Sequence
  Description of Artificial Sequence: Synthetic oligonucleotide
caccugaauguggugucuc

SEQ ID NO: 2377742 - RNA, 19 nt, Artificial Sequence
  Description of Artificial Sequence: Synthetic oligonucleotide
augccuacgaagggaggaa

SEQ ID NO: 2377743 - RNA, 19 nt, Artificial Sequence
  Description of Artificial Sequence: Synthetic oligonucleotide
cgucuugccgucucucagg

SEQ ID NO: 2377744 - RNA, 19 nt, Artificial Sequence
  Description of Artificial Sequence: Synthetic oligonucleotide
uugcgucuugccgucucuc

SEQ ID NO: 2377745 - RNA, 19 nt, Artificial Sequence
  Description of Artificial Sequence: Synthetic oligonucleotide
ccuaggucggugaauccga

SEQ ID NO: 2377746 - RNA, 19 nt, Artificial Sequence
  Description of Artificial Sequence: Synthetic oligonucleotide
ugccgucucucaggagugc

SEQ ID NO: 2377747 - RNA, 19 nt, Artificial Sequence
  Description of Artificial Sequence: Synthetic oligonucleotide
ggucggugaauccgacaac

SEQ ID NO: 2377748 - RNA, 19 nt, Artificial Sequence
  Description of Artificial Sequence: Synthetic oligonucleotide
cguauugaagucaucugua

SEQ ID NO: 2377749 - RNA, 19 nt, Artificial Sequence
  Description of Artificial Sequence: Synthetic oligonucleotide
ccauuaaauuuccacugua

SEQ ID NO: 2377750 - RNA, 19 nt, Artificial Sequence
  Description of Artificial Sequence: Synthetic oligonucleotide
ggggaugacuuugauccga

SEQ ID NO: 2377751 - RNA, 19 nt, Artificial Sequence
  Description of Artificial Sequence: Synthetic oligonucleotide
gugaauccgacaacauagu

SEQ ID NO: 2377752 - RNA, 19 nt, Artificial Sequence
  Description of Artificial Sequence: Synthetic oligonucleotide
cucugaaacgguggcucca

SEQ ID NO: 2377753 - RNA, 19 nt, Artificial Sequence
  Description of Artificial Sequence: Synthetic oligonucleotide
ggccaguauugccaaaugu

SEQ ID NO: 2377754 - RNA, 19 nt, Artificial Sequence
  Description of Artificial Sequence: Synthetic oligonucleotide
gucuagucaucaucagaau

SEQ ID NO: 2377755 - RNA, 19 nt, Artificial Sequence
  Description of Artificial Sequence: Synthetic oligonucleotide
gcuaguguggggaugacuu

SEQ ID NO: 2377756 - RNA, 19 nt, Artificial Sequence
  Description of Artificial Sequence: Synthetic oligonucleotide
ccgaucggguucacgcagg

SEQ ID NO: 2377757 - RNA, 19 nt, Artificial Sequence
  Description of Artificial Sequence: Synthetic oligonucleotide
ccugaauguggugucucug

SEQ ID NO: 2377758 - RNA, 19 nt, Artificial Sequence
  Description of Artificial Sequence: Synthetic oligonucleotide
cugagugccgccagccucu

SEQ ID NO: 2377759 - RNA, 19 nt, Artificial Sequence
  Description of Artificial Sequence: Synthetic oligonucleotide
caagaaugccgaucggguu

SEQ ID NO: 2377760 - RNA, 19 nt, Artificial Sequence
  Description of Artificial Sequence: Synthetic oligonucleotide
ccguauugaagucaucugu

SEQ ID NO: 2377761 - RNA, 19 nt, Artificial Sequence
  Description of Artificial Sequence: Synthetic oligonucleotide
ugccgggcuaucggugaug

SEQ ID NO: 2377762 - RNA, 19 nt, Artificial Sequence
  Description of Artificial Sequence: Synthetic oligonucleotide
ccacucuaaaguuuccgua

SEQ ID NO: 2377763 - RNA, 19 nt, Artificial Sequence
  Description of Artificial Sequence: Synthetic oligonucleotide
ccucgcagcgguuguuaag

SEQ ID NO: 2377764 - RNA, 19 nt, Artificial Sequence
  Description of Artificial Sequence: Synthetic oligonucleotide
cugaugccgggcuaucggu

SEQ ID NO: 2377765 - RNA, 19 nt, Artificial Sequence
  Description of Artificial Sequence: Synthetic oligonucleotide
ggguucacgcagguuucag

SEQ ID NO: 2377766 - RNA, 19 nt, Artificial Sequence
  Description of Artificial Sequence: Synthetic oligonucleotide
ggugggccuuccugagugc

SEQ ID NO: 2377767 - RNA, 19 nt, Artificial Sequence
  Description of Artificial Sequence: Synthetic oligonucleotide
cugguucucuaugaccucu

SEQ ID NO: 2377768 - RNA, 19 nt, Artificial Sequence
  Description of Artificial Sequence: Synthetic oligonucleotide
cgcagcgguuguuaagggc

SEQ ID NO: 2377769 - RNA, 19 nt, Artificial Sequence
  Description of Artificial Sequence: Synthetic oligonucleotide
guacuccccauguccuuua

SEQ ID NO: 2377770 - RNA, 19 nt, Artificial Sequence
  Description of Artificial Sequence: Synthetic oligonucleotide
augccgggcuaucggugau

SEQ ID NO: 2377771 - RNA, 19 nt, Artificial Sequence
  Description of Artificial Sequence: Synthetic oligonucleotide
ccucuuuucuuugaggagu

SEQ ID NO: 2377772 - RNA, 19 nt, Artificial Sequence
  Description of Artificial Sequence: Synthetic oligonucleotide
gccgggcuaucggugaugc

SEQ ID NO: 2377773 - RNA, 19 nt, Artificial Sequence
  Description of Artificial Sequence: Synthetic oligonucleotide
gccaaaugucugucuagua

SEQ ID NO: 2377774 - RNA, 19 nt, Artificial Sequence
  Description of Artificial Sequence: Synthetic oligonucleotide
ccacgagcuuagcagccug

SEQ ID NO: 2377775 - RNA, 19 nt, Artificial Sequence
  Description of Artificial Sequence: Synthetic oligonucleotide
gugccgccagccucuuuuc

SEQ ID NO: 2377776 - RNA, 19 nt, Artificial Sequence
  Description of Artificial Sequence: Synthetic oligonucleotide
cggugaugccuacgaaggg

SEQ ID NO: 2377777 - RNA, 19 nt, Artificial Sequence
  Description of Artificial Sequence: Synthetic oligonucleotide
agccucgcagcgguuguua

SEQ ID NO: 2377778 - RNA, 19 nt, Artificial Sequence
  Description of Artificial Sequence: Synthetic oligonucleotide
ggcuaucggugaugccuac

SEQ ID NO: 2377779 - RNA, 19 nt, Artificial Sequence
  Description of Artificial Sequence: Synthetic oligonucleotide
cgauuugauccaguuucug

SEQ ID NO: 2377780 - RNA, 19 nt, Artificial Sequence
  Description of Artificial Sequence: Synthetic oligonucleotide
cuaguguggggaugacuuu

SEQ ID NO: 2377781 - RNA, 19 nt, Artificial Sequence
  Description of Artificial Sequence: Synthetic oligonucleotide
cuugcgucuugccgucucu

SEQ ID NO: 2377782 - RNA, 19 nt, Artificial Sequence
  Description of Artificial Sequence: Synthetic oligonucleotide
cuguauuuccuaggucggu

SEQ ID NO: 2377783 - RNA, 19 nt, Artificial Sequence
  Description of Artificial Sequence: Synthetic oligonucleotide
gggaugacuuugauccgaa

SEQ ID NO: 2377784 - RNA, 19 nt, Artificial Sequence
  Description of Artificial Sequence: Synthetic oligonucleotide
cacuggcaauuucucugua

SEQ ID NO: 2377785 - RNA, 19 nt, Artificial Sequence
  Description of Artificial Sequence: Synthetic oligonucleotide
acaugucgauggauccauu

SEQ ID NO: 2377786 - RNA, 19 nt, Artificial Sequence
  Description of Artificial Sequence: Synthetic oligonucleotide
caccgauuugauccaguuu

SEQ ID NO: 2377787 - RNA, 19 nt, Artificial Sequence
  Description of Artificial Sequence: Synthetic oligonucleotide
gaaugccgaucggguucac

SEQ ID NO: 2377788 - RNA, 19 nt, Artificial Sequence
  Description of Artificial Sequence: Synthetic oligonucleotide
cacagaggaauggugccuu

SEQ ID NO: 2377789 - RNA, 19 nt, Artificial Sequence
  Description of Artificial Sequence: Synthetic oligonucleotide
gugcuaguguggggaugac

SEQ ID NO: 2377790 - RNA, 19 nt, Artificial Sequence
  Description of Artificial Sequence: Synthetic oligonucleotide
guguggggaugacuuugau

SEQ ID NO: 2377791 - RNA, 19 nt, Artificial Sequence
  Description of Artificial Sequence: Synthetic oligonucleotide
cuaugaccucugagaacau

SEQ ID NO: 2377792 - RNA, 19 nt, Artificial Sequence
  Description of Artificial Sequence: Synthetic oligonucleotide
ccacuguaauugauaacau

SEQ ID NO: 2377793 - RNA, 19 nt, Artificial Sequence
  Description of Artificial Sequence: Synthetic oligonucleotide
gggcuaucggugaugccua

SEQ ID NO: 2377794 - RNA, 19 nt, Artificial Sequence
  Description of Artificial Sequence: Synthetic oligonucleotide
ccgauuugauccaguuucu

SEQ ID NO: 2377795 - RNA, 19 nt, Artificial Sequence
  Description of Artificial Sequence: Synthetic oligonucleotide
cggugaauccgacaacaua

SEQ ID NO: 2377796 - RNA, 19 nt, Artificial Sequence
  Description of Artificial Sequence: Synthetic oligonucleotide
ccucugagaacaugucgau

SEQ ID NO: 2377797 - RNA, 19 nt, Artificial Sequence
  Description of Artificial Sequence: Synthetic oligonucleotide
gccucgcagcgguuguuaa

SEQ ID NO: 2377798 - RNA, 19 nt, Artificial Sequence
  Description of Artificial Sequence: Synthetic oligonucleotide
cgggcuaucggugaugccu

SEQ ID NO: 2377799 - RNA, 19 nt, Artificial Sequence
  Description of Artificial Sequence: Synthetic oligonucleotide
gccuacgaagggaggaagu

SEQ ID NO: 2377800 - RNA, 19 nt, Artificial Sequence
  Description of Artificial Sequence: Synthetic oligonucleotide
gccuuccugagugccgcca

SEQ ID NO: 2377801 - RNA, 19 nt, Artificial Sequence
  Description of Artificial Sequence: Synthetic oligonucleotide
gaucggguucacgcagguu

SEQ ID NO: 2377802 - RNA, 19 nt, Artificial Sequence
  Description of Artificial Sequence: Synthetic oligonucleotide
ccgggcuaucggugaugcc

SEQ ID NO: 2377803 - RNA, 19 nt, Artificial Sequence
  Description of Artificial Sequence: Synthetic oligonucleotide
cgacaacauagucuugcgu

SEQ ID NO: 2377804 - RNA, 19 nt, Artificial Sequence
  Description of Artificial Sequence: Synthetic oligonucleotide
ccuacgaagggaggaaguu

SEQ ID NO: 2377805 - RNA, 19 nt, Artificial Sequence
  Description of Artificial Sequence: Synthetic oligonucleotide
cugaaacgguggcuccauu

SEQ ID NO: 2377806 - RNA, 19 nt, Artificial Sequence
  Description of Artificial Sequence: Synthetic oligonucleotide
ccgucucucaggagugcua

SEQ ID NO: 2377807 - RNA, 19 nt, Artificial Sequence
  Description of Artificial Sequence: Synthetic oligonucleotide
gccgucucucaggagugcu

SEQ ID NO: 2377808 - RNA, 19 nt, Artificial Sequence
  Description of Artificial Sequence: Synthetic oligonucleotide
cgguggcuccauuaaauuu

SEQ ID NO: 2377809 - RNA, 19 nt, Artificial Sequence
  Description of Artificial Sequence: Synthetic oligonucleotide
gucuugcgucuugccgucu

SEQ ID NO: 2377810 - RNA, 19 nt, Artificial Sequence
  Description of Artificial Sequence: Synthetic oligonucleotide
gagugccgccagccucuuu

SEQ ID NO: 2377811 - RNA, 19 nt, Artificial Sequence
  Description of Artificial Sequence: Synthetic oligonucleotide
cgaucggguucacgcaggu

SEQ ID NO: 2377812 - RNA, 19 nt, Artificial Sequence
  Description of Artificial Sequence: Synthetic oligonucleotide
cagccucgcagcgguuguu

SEQ ID NO: 2377813 - RNA, 19 nt, Artificial Sequence
  Description of Artificial Sequence: Synthetic oligonucleotide
aaaacaaaugagcauuggc

SEQ ID NO: 2377814 - RNA, 19 nt, Artificial Sequence
  Description of Artificial Sequence: Synthetic oligonucleotide
aaugcuggcaguuucaggg

SEQ ID NO: 2377815 - RNA, 19 nt, Artificial Sequence
  Description of Artificial Sequence: Synthetic oligonucleotide
ugcacgaaaacccaaacgg

SEQ ID NO: 2377816 - RNA, 19 nt, Artificial Sequence
  Description of Artificial Sequence: Synthetic oligonucleotide
aagaauauaaacugcacga

SEQ ID NO: 2377817 - RNA, 19 nt, Artificial Sequence
  Description of Artificial Sequence: Synthetic oligonucleotide
uugauuucugcucaaaagg

SEQ ID NO: 2377818 - RNA, 19 nt, Artificial Sequence
  Description of Artificial Sequence: Synthetic oligonucleotide
aaucauuugauuucugcuc

SEQ ID NO: 2377819 - RNA, 19 nt, Artificial Sequence
  Description of Artificial Sequence: Synthetic oligonucleotide
uuugcuuuucgcuuaaugg

SEQ ID NO: 2377820 - RNA, 19 nt, Artificial Sequence
  Description of Artificial Sequence: Synthetic oligonucleotide
aacaaaugagcauuggcuc

SEQ ID NO: 2377821 - RNA, 19 nt, Artificial Sequence
  Description of Artificial Sequence: Synthetic oligonucleotide
aucuuuacaaguuuugugg

SEQ ID NO: 2377822 - RNA, 19 nt, Artificial Sequence
  Description of Artificial Sequence: Synthetic oligonucleotide
uuagaauucaacuuuauua

SEQ ID NO: 2377823 - RNA, 19 nt, Artificial Sequence
  Description of Artificial Sequence: Synthetic oligonucleotide
gaagaauauaaacugcacg

SEQ ID NO: 2377824 - RNA, 19 nt, Artificial Sequence
  Description of Artificial Sequence: Synthetic oligonucleotide
uuuagaucaaugcuggcag

SEQ ID NO: 2377825 - RNA, 19 nt, Artificial Sequence
  Description of Artificial Sequence: Synthetic oligonucleotide
auaacuuaaaucuuuacaa

SEQ ID NO: 2377826 - RNA, 19 nt, Artificial Sequence
  Description of Artificial Sequence: Synthetic oligonucleotide
aaauuuagaucaaugcugg

SEQ ID NO: 2377827 - RNA, 19 nt, Artificial Sequence
  Description of Artificial Sequence: Synthetic oligonucleotide
agugaauugcccuugcugg

SEQ ID NO: 2377828 - RNA, 19 nt, Artificial Sequence
  Description of Artificial Sequence: Synthetic oligonucleotide
ugauuucugcucaaaaggg

SEQ ID NO: 2377829 - RNA, 19 nt, Artificial Sequence
  Description of Artificial Sequence: Synthetic oligonucleotide
uuugauuucugcucaaaag

SEQ ID NO: 2377830 - RNA, 19 nt, Artificial Sequence
  Description of Artificial Sequence: Synthetic oligonucleotide
aaucuuuacaaguuuugug

SEQ ID NO: 2377831 - RNA, 19 nt, Artificial Sequence
  Description of Artificial Sequence: Synthetic oligonucleotide
uagaauucaacuuuauuac

SEQ ID NO: 2377832 - RNA, 19 nt, Artificial Sequence
  Description of Artificial Sequence: Synthetic oligonucleotide
uauuacaagacuaaaucau

SEQ ID NO: 2377833 - RNA, 19 nt, Artificial Sequence
  Description of Artificial Sequence: Synthetic oligonucleotide
uuccuaaccaacuuaaucu

SEQ ID NO: 2377834 - RNA, 19 nt, Artificial Sequence
  Description of Artificial Sequence: Synthetic oligonucleotide
uugcuuuucgcuuaauggg

SEQ ID NO: 2377835 - RNA, 19 nt, Artificial Sequence
  Description of Artificial Sequence: Synthetic oligonucleotide
uuguggaagaauauaaacu

SEQ ID NO: 2377836 - RNA, 19 nt, Artificial Sequence
  Description of Artificial Sequence: Synthetic oligonucleotide
uucaacuuuauuacaagac

SEQ ID NO: 2377837 - RNA, 19 nt, Artificial Sequence
  Description of Artificial Sequence: Synthetic oligonucleotide
uuuguggaagaauauaaac

SEQ ID NO: 2377838 - RNA, 19 nt, Artificial Sequence
  Description of Artificial Sequence: Synthetic oligonucleotide
uuucuuugagaccauccgg

SEQ ID NO: 2377839 - RNA, 19 nt, Artificial Sequence
  Description of Artificial Sequence: Synthetic oligonucleotide
gaauucucgcuccagaacc

SEQ ID NO: 2377840 - RNA, 19 nt, Artificial Sequence
  Description of Artificial Sequence: Synthetic oligonucleotide
uuaaucucuaguuuucuga

SEQ ID NO: 2377841 - RNA, 19 nt, Artificial Sequence
  Description of Artificial Sequence: Synthetic oligonucleotide
aauuuagaucaaugcuggc

SEQ ID NO: 2377842 - RNA, 19 nt, Artificial Sequence
  Description of Artificial Sequence: Synthetic oligonucleotide
aaacaaaugagcauuggcu

SEQ ID NO: 2377843 - RNA, 19 nt, Artificial Sequence
  Description of Artificial Sequence: Synthetic oligonucleotide
ugcuuuucgcuuaaugggg

SEQ ID NO: 2377844 - RNA, 19 nt, Artificial Sequence
  Description of Artificial Sequence: Synthetic oligonucleotide
agcaaaguuccucugcccc

SEQ ID NO: 2377845 - RNA, 19 nt, Artificial Sequence
  Description of Artificial Sequence: Synthetic oligonucleotide
agcuauguaauuuacaguu

SEQ ID NO: 2377846 - RNA, 19 nt, Artificial Sequence
  Description of Artificial Sequence: Synthetic oligonucleotide
aaaacccaaacgguuuucc

SEQ ID NO: 2377847 - RNA, 19 nt, Artificial Sequence
  Description of Artificial Sequence: Synthetic oligonucleotide
uuugagaccauccggaaau

SEQ ID NO: 2377848 - RNA, 19 nt, Artificial Sequence
  Description of Artificial Sequence: Synthetic oligonucleotide
uuucugauccacaauaaau

SEQ ID NO: 2377849 - RNA, 19 nt, Artificial Sequence
  Description of Artificial Sequence: Synthetic oligonucleotide
ucuaugauuugccauggcu

SEQ ID NO: 2377850 - RNA, 19 nt, Artificial Sequence
  Description of Artificial Sequence: Synthetic oligonucleotide
uuuacaaguuuuguggaag

SEQ ID NO: 2377851 - RNA, 19 nt, Artificial Sequence
  Description of Artificial Sequence: Synthetic oligonucleotide
aaugucacuuucuuugaga

SEQ ID NO: 2377852 - RNA, 19 nt, Artificial Sequence
  Description of Artificial Sequence: Synthetic oligonucleotide
ugauccacaauaaauuaaa

SEQ ID NO: 2377853 - RNA, 19 nt, Artificial Sequence
  Description of Artificial Sequence: Synthetic oligonucleotide
aaacacuccucauucacga

SEQ ID NO: 2377854 - RNA, 19 nt, Artificial Sequence
  Description of Artificial Sequence: Synthetic oligonucleotide
uauaaacugcacgaaaacc

SEQ ID NO: 2377855 - RNA, 19 nt, Artificial Sequence
  Description of Artificial Sequence: Synthetic oligonucleotide
aauauaaacugcacgaaaa

SEQ ID NO: 2377856 - RNA, 19 nt, Artificial Sequence
  Description of Artificial Sequence: Synthetic oligonucleotide
acccaaacgguuuuccugc

SEQ ID NO: 2377857 - RNA, 19 nt, Artificial Sequence
  Description of Artificial Sequence: Synthetic oligonucleotide
cucaauguccuuaguaggg

SEQ ID NO: 2377858 - RNA, 19 nt, Artificial Sequence
  Description of Artificial Sequence: Synthetic oligonucleotide
uucuuugagaccauccgga

SEQ ID NO: 2377859 - RNA, 19 nt, Artificial Sequence
  Description of Artificial Sequence: Synthetic oligonucleotide
acaagacuaaaucauuuga

SEQ ID NO: 2377860 - RNA, 19 nt, Artificial Sequence
  Description of Artificial Sequence: Synthetic oligonucleotide
augagcauuggcucgcccc

SEQ ID NO: 2377861 - RNA, 19 nt, Artificial Sequence
  Description of Artificial Sequence: Synthetic oligonucleotide
ugcucaaaagggauguaag

SEQ ID NO: 2377862 - RNA, 19 nt, Artificial Sequence
  Description of Artificial Sequence: Synthetic oligonucleotide
uacaagacuaaaucauuug

SEQ ID NO: 2377863 - RNA, 19 nt, Artificial Sequence
  Description of Artificial Sequence: Synthetic oligonucleotide
aacccaaacgguuuuccug

SEQ ID NO: 2377864 - RNA, 19 nt, Artificial Sequence
  Description of Artificial Sequence: Synthetic oligonucleotide
cagaaccaaauuuagauca

SEQ ID NO: 2377865 - RNA, 19 nt, Artificial Sequence
  Description of Artificial Sequence: Synthetic oligonucleotide
aaaacacuccucauucacg

SEQ ID NO: 2377866 - RNA, 19 nt, Artificial Sequence
  Description of Artificial Sequence: Synthetic oligonucleotide
agggauguaagcuauguaa

SEQ ID NO: 2377867 - RNA, 19 nt, Artificial Sequence
  Description of Artificial Sequence: Synthetic oligonucleotide
ucuaucacggugcccuugg

SEQ ID NO: 2377868 - RNA, 19 nt, Artificial Sequence
  Description of Artificial Sequence: Synthetic oligonucleotide
aguuuucugauccacaaua

SEQ ID NO: 2377869 - RNA, 19 nt, Artificial Sequence
  Description of Artificial Sequence: Synthetic oligonucleotide
uguaagcuauguaauuuac

SEQ ID NO: 2377870 - RNA, 19 nt, Artificial Sequence
  Description of Artificial Sequence: Synthetic oligonucleotide
uuuuguggaagaauauaaa

SEQ ID NO: 2377871 - RNA, 19 nt, Artificial Sequence
  Description of Artificial Sequence: Synthetic oligonucleotide
aaaguggccccugaccagc

SEQ ID NO: 2377872 - RNA, 19 nt, Artificial Sequence
  Description of Artificial Sequence: Synthetic oligonucleotide
aacuuaaucucuaguuuuc

SEQ ID NO: 2377873 - RNA, 19 nt, Artificial Sequence
  Description of Artificial Sequence: Synthetic oligonucleotide
uccucagaaauccucaguc

SEQ ID NO: 2377874 - RNA, 19 nt, Artificial Sequence
  Description of Artificial Sequence: Synthetic oligonucleotide
aggaccuucaaagaucugg

SEQ ID NO: 2377875 - RNA, 19 nt, Artificial Sequence
  Description of Artificial Sequence: Synthetic oligonucleotide
aucauuugauuucugcuca

SEQ ID NO: 2377876 - RNA, 19 nt, Artificial Sequence
  Description of Artificial Sequence: Synthetic oligonucleotide
ugaggaccuucaaagaucu

SEQ ID NO: 2377877 - RNA, 19 nt, Artificial Sequence
  Description of Artificial Sequence: Synthetic oligonucleotide
uccucauucacgacugaag

SEQ ID NO: 2377878 - RNA, 19 nt, Artificial Sequence
  Description of Artificial Sequence: Synthetic oligonucleotide
aaugagcauuggcucgccc

SEQ ID NO: 2377879 - RNA, 19 nt, Artificial Sequence
  Description of Artificial Sequence: Synthetic oligonucleotide
gacacugaauucucgcucc

SEQ ID NO: 2377880 - RNA, 19 nt, Artificial Sequence
  Description of Artificial Sequence: Synthetic oligonucleotide
acuuucuuugagaccaucc

SEQ ID NO: 2377881 - RNA, 19 nt, Artificial Sequence
  Description of Artificial Sequence: Synthetic oligonucleotide
ucaaaagggauguaagcua

SEQ ID NO: 2377882 - RNA, 19 nt, Artificial Sequence
  Description of Artificial Sequence: Synthetic oligonucleotide
ucugaggaccuucaaagau

SEQ ID NO: 2377883 - RNA, 19 nt, Artificial Sequence
  Description of Artificial Sequence: Synthetic oligonucleotide
ugcgccuugagcaaaguuc

SEQ ID NO: 2377884 - RNA, 19 nt, Artificial Sequence
  Description of Artificial Sequence: Synthetic oligonucleotide
ucagaaauccucagucucu

SEQ ID NO: 2377885 - RNA, 19 nt, Artificial Sequence
  Description of Artificial Sequence: Synthetic oligonucleotide
uucacgacugaaguuaagc

SEQ ID NO: 2377886 - RNA, 19 nt, Artificial Sequence
  Description of Artificial Sequence: Synthetic oligonucleotide
uauguaauuuacaguuccu

SEQ ID NO: 2377887 - RNA, 19 nt, Artificial Sequence
  Description of Artificial Sequence: Synthetic oligonucleotide
uuucuauucuccccaccag

SEQ ID NO: 2377888 - RNA, 19 nt, Artificial Sequence
  Description of Artificial Sequence: Synthetic oligonucleotide
agaauucaacuuuauuaca

SEQ ID NO: 2377889 - RNA, 19 nt, Artificial Sequence
  Description of Artificial Sequence: Synthetic oligonucleotide
auuuagaucaaugcuggca

SEQ ID NO: 2377890 - RNA, 19 nt, Artificial Sequence
  Description of Artificial Sequence: Synthetic oligonucleotide
aaccaaauuuagaucaaug

SEQ ID NO: 2377891 - RNA, 19 nt, Artificial Sequence
  Description of Artificial Sequence: Synthetic oligonucleotide
aguuucuauucuccccacc

SEQ ID NO: 2377892 - RNA, 19 nt, Artificial Sequence
  Description of Artificial Sequence: Synthetic oligonucleotide
aaaaguggccccugaccag

SEQ ID NO: 2377893 - RNA, 19 nt, Artificial Sequence
  Description of Artificial Sequence: Synthetic oligonucleotide
ucugauccacaauaaauua

SEQ ID NO: 2377894 - RNA, 19 nt, Artificial Sequence
  Description of Artificial Sequence: Synthetic oligonucleotide
acugcacgaaaacccaaac

SEQ ID NO: 2377895 - RNA, 19 nt, Artificial Sequence
  Description of Artificial Sequence: Synthetic oligonucleotide
gaauauaaacugcacgaaa

SEQ ID NO: 2377896 - RNA, 19 nt, Artificial Sequence
  Description of Artificial Sequence: Synthetic oligonucleotide
ucauucacgacugaaguua

SEQ ID NO: 2377897 - RNA, 19 nt, Artificial Sequence
  Description of Artificial Sequence: Synthetic oligonucleotide
acuaaaucauuugauuucu

SEQ ID NO: 2377898 - RNA, 19 nt, Artificial Sequence
  Description of Artificial Sequence: Synthetic oligonucleotide
accaacuuaaucucuaguu

SEQ ID NO: 2377899 - RNA, 19 nt, Artificial Sequence
  Description of Artificial Sequence: Synthetic oligonucleotide
gacgucugcgccuugagca

SEQ ID NO: 2377900 - RNA, 19 nt, Artificial Sequence
  Description of Artificial Sequence: Synthetic oligonucleotide
ucaggcuccucagaaaucc

SEQ ID NO: 2377901 - RNA, 19 nt, Artificial Sequence
  Description of Artificial Sequence: Synthetic oligonucleotide
uuucagagggugguggagg

SEQ ID NO: 2377902 - RNA, 19 nt, Artificial Sequence
  Description of Artificial Sequence: Synthetic oligonucleotide
aaauccucagucucuggaa

SEQ ID NO: 2377903 - RNA, 19 nt, Artificial Sequence
  Description of Artificial Sequence: Synthetic oligonucleotide
aacacuccucauucacgac

SEQ ID NO: 2377904 - RNA, 19 nt, Artificial Sequence
  Description of Artificial Sequence: Synthetic oligonucleotide
uguucugaggaccuucaaa

SEQ ID NO: 2377905 - RNA, 19 nt, Artificial Sequence
  Description of Artificial Sequence: Synthetic oligonucleotide
ucacgacugaaguuaagcu

SEQ ID NO: 2377906 - RNA, 19 nt, Artificial Sequence
  Description of Artificial Sequence: Synthetic oligonucleotide
cuuaaucucuaguuuucug

SEQ ID NO: 2377907 - RNA, 19 nt, Artificial Sequence
  Description of Artificial Sequence: Synthetic oligonucleotide
uuaagcucuggacacugaa

SEQ ID NO: 2377908 - RNA, 19 nt, Artificial Sequence
  Description of Artificial Sequence: Synthetic oligonucleotide
uucuauucuccccaccagu

SEQ ID NO: 2377909 - RNA, 19 nt, Artificial Sequence
  Description of Artificial Sequence: Synthetic oligonucleotide
gaaugucacuuucuuugag

SEQ ID NO: 2377910 - RNA, 19 nt, Artificial Sequence
  Description of Artificial Sequence: Synthetic oligonucleotide
gaaauccucagucucugga

SEQ ID NO: 2377911 - RNA, 19 nt, Artificial Sequence
  Description of Artificial Sequence: Synthetic oligonucleotide
aaacccaaacgguuuuccu

SEQ ID NO: 2377912 - RNA, 19 nt, Artificial Sequence
  Description of Artificial Sequence: Synthetic oligonucleotide
cuugccugugcucagcuac

SEQ ID NO: 2377913 - RNA, 19 nt, Artificial Sequence
  Description of Artificial Sequence: Synthetic oligonucleotide
cauccggaaauucugccag

SEQ ID NO: 2377914 - RNA, 19 nt, Artificial Sequence
  Description of Artificial Sequence: Synthetic oligonucleotide
guuugcuuuucgcuuaaug

SEQ ID NO: 2377915 - RNA, 19 nt, Artificial Sequence
  Description of Artificial Sequence: Synthetic oligonucleotide
ugggcaaccacugcucugg

SEQ ID NO: 2377916 - RNA, 19 nt, Artificial Sequence
  Description of Artificial Sequence: Synthetic oligonucleotide
caaguuuuguggaagaaua

SEQ ID NO: 2377917 - RNA, 19 nt, Artificial Sequence
  Description of Artificial Sequence: Synthetic oligonucleotide
uccuaaccaacuuaaucuc

SEQ ID NO: 2377918 - RNA, 19 nt, Artificial Sequence
  Description of Artificial Sequence: Synthetic oligonucleotide
aagggacuggucgacgacg

SEQ ID NO: 2377919 - RNA, 19 nt, Artificial Sequence
  Description of Artificial Sequence: Synthetic oligonucleotide
cucagaaauccucagucuc

SEQ ID NO: 2377920 - RNA, 19 nt, Artificial Sequence
  Description of Artificial Sequence: Synthetic oligonucleotide
cugcacgaaaacccaaacg

SEQ ID NO: 2377921 - RNA, 19 nt, Artificial Sequence
  Description of Artificial Sequence: Synthetic oligonucleotide
cacgacugaaguuaagcuc

SEQ ID NO: 2377922 - RNA, 19 nt, Artificial Sequence
  Description of Artificial Sequence: Synthetic oligonucleotide
aaaugagcauuggcucgcc

SEQ ID NO: 2377923 - RNA, 19 nt, Artificial Sequence
  Description of Artificial Sequence: Synthetic oligonucleotide
cuggacacugaauucucgc

SEQ ID NO: 2377924 - RNA, 19 nt, Artificial Sequence
  Description of Artificial Sequence: Synthetic oligonucleotide
ucaauguccuuaguagggc

SEQ ID NO: 2377925 - RNA, 19 nt, Artificial Sequence
  Description of Artificial Sequence: Synthetic oligonucleotide
agcucuggacacugaauuc

SEQ ID NO: 2377926 - RNA, 19 nt, Artificial Sequence
  Description of Artificial Sequence: Synthetic oligonucleotide
gggucuuucucuaucacgg

SEQ ID NO: 2377927 - RNA, 19 nt, Artificial Sequence
  Description of Artificial Sequence: Synthetic oligonucleotide
acgacugaaguuaagcucu

SEQ ID NO: 2377928 - RNA, 19 nt, Artificial Sequence
  Description of Artificial Sequence: Synthetic oligonucleotide
caaaaguggccccugacca

SEQ ID NO: 2377929 - RNA, 19 nt, Artificial Sequence
  Description of Artificial Sequence: Synthetic oligonucleotide
guuuuguggaagaauauaa

SEQ ID NO: 2377930 - RNA, 19 nt, Artificial Sequence
  Description of Artificial Sequence: Synthetic oligonucleotide
ucuauucuccccaccaguu

SEQ ID NO: 2377931 - RNA, 19 nt, Artificial Sequence
  Description of Artificial Sequence: Synthetic oligonucleotide
gugaauugcccuugcuggg

SEQ ID NO: 2377932 - RNA, 19 nt, Artificial Sequence
  Description of Artificial Sequence: Synthetic oligonucleotide
uccuuaguagggcugcccu

SEQ ID NO: 2377933 - RNA, 19 nt, Artificial Sequence
  Description of Artificial Sequence: Synthetic oligonucleotide
cuucuaugauuugccaugg

SEQ ID NO: 2377934 - RNA, 19 nt, Artificial Sequence
  Description of Artificial Sequence: Synthetic oligonucleotide
uucugcucaaaagggaugu

SEQ ID NO: 2377935 - RNA, 19 nt, Artificial Sequence
  Description of Artificial Sequence: Synthetic oligonucleotide
cugaggaccuucaaagauc

SEQ ID NO: 2377936 - RNA, 19 nt, Artificial Sequence
  Description of Artificial Sequence: Synthetic oligonucleotide
ugcccuuggagucuugccu

SEQ ID NO: 2377937 - RNA, 19 nt, Artificial Sequence
  Description of Artificial Sequence: Synthetic oligonucleotide
cuggaagauguucugagga

SEQ ID NO: 2377938 - RNA, 19 nt, Artificial Sequence
  Description of Artificial Sequence: Synthetic oligonucleotide
gcucaauguccuuaguagg

SEQ ID NO: 2377939 - RNA, 19 nt, Artificial Sequence
  Description of Artificial Sequence: Synthetic oligonucleotide
auguaagcuauguaauuua

SEQ ID NO: 2377940 - RNA, 19 nt, Artificial Sequence
  Description of Artificial Sequence: Synthetic oligonucleotide
ucaagggacuggucgacga

SEQ ID NO: 2377941 - RNA, 19 nt, Artificial Sequence
  Description of Artificial Sequence: Synthetic oligonucleotide
gcugcccuguuucagaggg

SEQ ID NO: 2377942 - RNA, 19 nt, Artificial Sequence
  Description of Artificial Sequence: Synthetic oligonucleotide
aauugcccuugcugggcuc

SEQ ID NO: 2377943 - RNA, 19 nt, Artificial Sequence
  Description of Artificial Sequence: Synthetic oligonucleotide
agauguucugaggaccuuc

SEQ ID NO: 2377944 - RNA, 19 nt, Artificial Sequence
  Description of Artificial Sequence: Synthetic oligonucleotide
ggaacugaagcucaauguc

SEQ ID NO: 2377945 - RNA, 19 nt, Artificial Sequence
  Description of Artificial Sequence: Synthetic oligonucleotide
gauuucugcucaaaaggga

SEQ ID NO: 2377946 - RNA, 19 nt, Artificial Sequence
  Description of Artificial Sequence: Synthetic oligonucleotide
agaauauaaacugcacgaa

SEQ ID NO: 2377947 - RNA, 19 nt, Artificial Sequence
  Description of Artificial Sequence: Synthetic oligonucleotide
cuaaaucauuugauuucug

SEQ ID NO: 2377948 - RNA, 19 nt, Artificial Sequence
  Description of Artificial Sequence: Synthetic oligonucleotide
cugaguccagugaauugcc

SEQ ID NO: 2377949 - RNA, 19 nt, Artificial Sequence
  Description of Artificial Sequence: Synthetic oligonucleotide
uguuucagaggguggugga

SEQ ID NO: 2377950 - RNA, 19 nt, Artificial Sequence
  Description of Artificial Sequence: Synthetic oligonucleotide
aaacgguuuuccugcaguu

SEQ ID NO: 2377951 - RNA, 19 nt, Artificial Sequence
  Description of Artificial Sequence: Synthetic oligonucleotide
ugaguccagugaauugccc

SEQ ID NO: 2377952 - RNA, 19 nt, Artificial Sequence
  Description of Artificial Sequence: Synthetic oligonucleotide
ugaauugcccuugcugggc

SEQ ID NO: 2377953 - RNA, 19 nt, Artificial Sequence
  Description of Artificial Sequence: Synthetic oligonucleotide
uggucgacgacgucugcgc

SEQ ID NO: 2377954 - RNA, 19 nt, Artificial Sequence
  Description of Artificial Sequence: Synthetic oligonucleotide
uaagcucuggacacugaau

SEQ ID NO: 2377955 - RNA, 19 nt, Artificial Sequence
  Description of Artificial Sequence: Synthetic oligonucleotide
uuagaucaaugcuggcagu

SEQ ID NO: 2377956 - RNA, 19 nt, Artificial Sequence
  Description of Artificial Sequence: Synthetic oligonucleotide
cuguuucagaggguggugg

SEQ ID NO: 2377957 - RNA, 19 nt, Artificial Sequence
  Description of Artificial Sequence: Synthetic oligonucleotide
aguuaagcucuggacacug

SEQ ID NO: 2377958 - RNA, 19 nt, Artificial Sequence
  Description of Artificial Sequence: Synthetic oligonucleotide
ugcuguuugcuuuucgcuu

SEQ ID NO: 2377959 - RNA, 19 nt, Artificial Sequence
  Description of Artificial Sequence: Synthetic oligonucleotide
gcucaaaagggauguaagc

SEQ ID NO: 2377960 - RNA, 19 nt, Artificial Sequence
  Description of Artificial Sequence: Synthetic oligonucleotide
uucuaugauuugccauggc

SEQ ID NO: 2377961 - RNA, 19 nt, Artificial Sequence
  Description of Artificial Sequence: Synthetic oligonucleotide
auuucugcucaaaagggau

SEQ ID NO: 2377962 - RNA, 19 nt, Artificial Sequence
  Description of Artificial Sequence: Synthetic oligonucleotide
cuuggagucuugccugugc

SEQ ID NO: 2377963 - RNA, 19 nt, Artificial Sequence
  Description of Artificial Sequence: Synthetic oligonucleotide
acaguuccuaaccaacuua

SEQ ID NO: 2377964 - RNA, 19 nt, Artificial Sequence
  Description of Artificial Sequence: Synthetic oligonucleotide
auggggcaaaaguggcccc

SEQ ID NO: 2377965 - RNA, 19 nt, Artificial Sequence
  Description of Artificial Sequence: Synthetic oligonucleotide
ucuuugagaccauccggaa

SEQ ID NO: 2377966 - RNA, 19 nt, Artificial Sequence
  Description of Artificial Sequence: Synthetic oligonucleotide
acaaguuuuguggaagaau

SEQ ID NO: 2377967 - RNA, 19 nt, Artificial Sequence
  Description of Artificial Sequence: Synthetic oligonucleotide
aguuuuguggaagaauaua

SEQ ID NO: 2377968 - RNA, 19 nt, Artificial Sequence
  Description of Artificial Sequence: Synthetic oligonucleotide
gcaaaaguggccccugacc

SEQ ID NO: 2377969 - RNA, 19 nt, Artificial Sequence
  Description of Artificial Sequence: Synthetic oligonucleotide
gaccagccuaggcugcucg

SEQ ID NO: 2377970 - RNA, 19 nt, Artificial Sequence
  Description of Artificial Sequence: Synthetic oligonucleotide
ucgcuccagaaccaaauuu

SEQ ID NO: 2377971 - RNA, 19 nt, Artificial Sequence
  Description of Artificial Sequence: Synthetic oligonucleotide
aaaagggauguaagcuaug

SEQ ID NO: 2377972 - RNA, 19 nt, Artificial Sequence
  Description of Artificial Sequence: Synthetic oligonucleotide
uccggaaauucugccaggc

SEQ ID NO: 2377973 - RNA, 19 nt, Artificial Sequence
  Description of Artificial Sequence: Synthetic oligonucleotide
cugauccacaauaaauuaa

SEQ ID NO: 2377974 - RNA, 19 nt, Artificial Sequence
  Description of Artificial Sequence: Synthetic oligonucleotide
cugugcucagcuacugggc

SEQ ID NO: 2377975 - RNA, 19 nt, Artificial Sequence
  Description of Artificial Sequence: Synthetic oligonucleotide
ucucuaguuuucugaucca

SEQ ID NO: 2377976 - RNA, 19 nt, Artificial Sequence
  Description of Artificial Sequence: Synthetic oligonucleotide
cacucaucugaguccagug

SEQ ID NO: 2377977 - RNA, 19 nt, Artificial Sequence
  Description of Artificial Sequence: Synthetic oligonucleotide
ccugcaguuucuauucucc

SEQ ID NO: 2377978 - RNA, 19 nt, Artificial Sequence
  Description of Artificial Sequence: Synthetic oligonucleotide
cacucagaaugucacuuuc

SEQ ID NO: 2377979 - RNA, 19 nt, Artificial Sequence
  Description of Artificial Sequence: Synthetic oligonucleotide
ugauuugccauggcucugu

SEQ ID NO: 2377980 - RNA, 19 nt, Artificial Sequence
  Description of Artificial Sequence: Synthetic oligonucleotide
cuaaccaacuuaaucucua

SEQ ID NO: 2377981 - RNA, 19 nt, Artificial Sequence
  Description of Artificial Sequence: Synthetic oligonucleotide
guaagcuauguaauuuaca

SEQ ID NO: 2377982 - RNA, 19 nt, Artificial Sequence
  Description of Artificial Sequence: Synthetic oligonucleotide
ugcgugucaggcuccucag

SEQ ID NO: 2377983 - RNA, 19 nt, Artificial Sequence
  Description of Artificial Sequence: Synthetic oligonucleotide
auccggaaauucugccagg

SEQ ID NO: 2377984 - RNA, 19 nt, Artificial Sequence
  Description of Artificial Sequence: Synthetic oligonucleotide
gcuggaagauguucugagg

SEQ ID NO: 2377985 - RNA, 19 nt, Artificial Sequence
  Description of Artificial Sequence: Synthetic oligonucleotide
uacaaguuuuguggaagaa

SEQ ID NO: 2377986 - RNA, 19 nt, Artificial Sequence
  Description of Artificial Sequence: Synthetic oligonucleotide
ucauuugauuucugcucaa

SEQ ID NO: 2377987 - RNA, 19 nt, Artificial Sequence
  Description of Artificial Sequence: Synthetic oligonucleotide
cucuaguuuucugauccac

SEQ ID NO: 2377988 - RNA, 19 nt, Artificial Sequence
  Description of Artificial Sequence: Synthetic oligonucleotide
accagccuaggcugcucgc

SEQ ID NO: 2377989 - RNA, 19 nt, Artificial Sequence
  Description of Artificial Sequence: Synthetic oligonucleotide
agucuugccugugcucagc

SEQ ID NO: 2377990 - RNA, 19 nt, Artificial Sequence
  Description of Artificial Sequence: Synthetic oligonucleotide
ucgcuuaauggggcaaaag

SEQ ID NO: 2377991 - RNA, 19 nt, Artificial Sequence
  Description of Artificial Sequence: Synthetic oligonucleotide
gauguucugaggaccuuca

SEQ ID NO: 2377992 - RNA, 19 nt, Artificial Sequence
  Description of Artificial Sequence: Synthetic oligonucleotide
caagacuaaaucauuugau

SEQ ID NO: 2377993 - RNA, 19 nt, Artificial Sequence
  Description of Artificial Sequence: Synthetic oligonucleotide
aacugcacgaaaacccaaa

SEQ ID NO: 2377994 - RNA, 19 nt, Artificial Sequence
  Description of Artificial Sequence: Synthetic oligonucleotide
aaaguuccucugccccucu

SEQ ID NO: 2377995 - RNA, 19 nt, Artificial Sequence
  Description of Artificial Sequence: Synthetic oligonucleotide
uuuucgcuuaauggggcaa

SEQ ID NO: 2377996 - RNA, 19 nt, Artificial Sequence
  Description of Artificial Sequence: Synthetic oligonucleotide
gcaguuucuauucucccca

SEQ ID NO: 2377997 - RNA, 19 nt, Artificial Sequence
  Description of Artificial Sequence: Synthetic oligonucleotide
gaccauccggaaauucugc

SEQ ID NO: 2377998 - RNA, 19 nt, Artificial Sequence
  Description of Artificial Sequence: Synthetic oligonucleotide
auggcucugugcuucguaa

SEQ ID NO: 2377999 - RNA, 19 nt, Artificial Sequence
  Description of Artificial Sequence: Synthetic oligonucleotide
acuggucgacgacgucugc

SEQ ID NO: 2378000 - RNA, 19 nt, Artificial Sequence
  Description of Artificial Sequence: Synthetic oligonucleotide
caguuccuaaccaacuuaa

SEQ ID NO: 2378001 - RNA, 19 nt, Artificial Sequence
  Description of Artificial Sequence: Synthetic oligonucleotide
ucgccuggcccugugguag

SEQ ID NO: 2378002 - RNA, 19 nt, Artificial Sequence
  Description of Artificial Sequence: Synthetic oligonucleotide
cucuggacacugaauucuc

SEQ ID NO: 2378003 - RNA, 19 nt, Artificial Sequence
  Description of Artificial Sequence: Synthetic oligonucleotide
gaaaacccaaacgguuuuc

SEQ ID NO: 2378004 - RNA, 19 nt, Artificial Sequence
  Description of Artificial Sequence: Synthetic oligonucleotide
cugggugccacugcucagg

SEQ ID NO: 2378005 - RNA, 19 nt, Artificial Sequence
  Description of Artificial Sequence: Synthetic oligonucleotide
cuggucgacgacgucugcg

SEQ ID NO: 2378006 - RNA, 19 nt, Artificial Sequence
  Description of Artificial Sequence: Synthetic oligonucleotide
gagucuugccugugcucag

SEQ ID NO: 2378007 - RNA, 19 nt, Artificial Sequence
  Description of Artificial Sequence: Synthetic oligonucleotide
gacuggucgacgacgucug

SEQ ID NO: 2378008 - RNA, 19 nt, Artificial Sequence
  Description of Artificial Sequence: Synthetic oligonucleotide
uuucgcuuaauggggcaaa

SEQ ID NO: 2378009 - RNA, 19 nt, Artificial Sequence
  Description of Artificial Sequence: Synthetic oligonucleotide
ugggugccacugcucaggc

SEQ ID NO: 2378010 - RNA, 19 nt, Artificial Sequence
  Description of Artificial Sequence: Synthetic oligonucleotide
caacuuaaucucuaguuuu

SEQ ID NO: 2378011 - RNA, 19 nt, Artificial Sequence
  Description of Artificial Sequence: Synthetic oligonucleotide
ggacacugaauucucgcuc

SEQ ID NO: 2378012 - RNA, 19 nt, Artificial Sequence
  Description of Artificial Sequence: Synthetic oligonucleotide
cuuuucgcuuaauggggca

SEQ ID NO: 2378013 - RNA, 19 nt, Artificial Sequence
  Description of Artificial Sequence: Synthetic oligonucleotide
ucuccccaccaguuuaaaa

SEQ ID NO: 2378014 - RNA, 19 nt, Artificial Sequence
  Description of Artificial Sequence: Synthetic oligonucleotide
aacgguuuuccugcaguuu

SEQ ID NO: 2378015 - RNA, 19 nt, Artificial Sequence
  Description of Artificial Sequence: Synthetic oligonucleotide
ucaccgggccacucgcugc

SEQ ID NO: 2378016 - RNA, 19 nt, Artificial Sequence
  Description of Artificial Sequence: Synthetic oligonucleotide
caaaagggauguaagcuau

SEQ ID NO: 2378017 - RNA, 19 nt, Artificial Sequence
  Description of Artificial Sequence: Synthetic oligonucleotide
ugucaagggacuggucgac

SEQ ID NO: 2378018 - RNA, 19 nt, Artificial Sequence
  Description of Artificial Sequence: Synthetic oligonucleotide
uggccccugaccagccuag

SEQ ID NO: 2378019 - RNA, 19 nt, Artificial Sequence
  Description of Artificial Sequence: Synthetic oligonucleotide
aaacugcacgaaaacccaa

SEQ ID NO: 2378020 - RNA, 19 nt, Artificial Sequence
  Description of Artificial Sequence: Synthetic oligonucleotide
acucagaaugucacuuucu

SEQ ID NO: 2378021 - RNA, 19 nt, Artificial Sequence
  Description of Artificial Sequence: Synthetic oligonucleotide
gagaccauccggaaauucu

SEQ ID NO: 2378022 - RNA, 19 nt, Artificial Sequence
  Description of Artificial Sequence: Synthetic oligonucleotide
cugucaagggacuggucga

SEQ ID NO: 2378023 - RNA, 19 nt, Artificial Sequence
  Description of Artificial Sequence: Synthetic oligonucleotide
acgaaaacccaaacgguuu

SEQ ID NO: 2378024 - RNA, 19 nt, Artificial Sequence
  Description of Artificial Sequence: Synthetic oligonucleotide
agcuacugggcaaccacug

SEQ ID NO: 2378025 - RNA, 19 nt, Artificial Sequence
  Description of Artificial Sequence: Synthetic oligonucleotide
gucaagggacuggucgacg

SEQ ID NO: 2378026 - RNA, 19 nt, Artificial Sequence
  Description of Artificial Sequence: Synthetic oligonucleotide
gugcgugucaggcuccuca

SEQ ID NO: 2378027 - RNA, 19 nt, Artificial Sequence
  Description of Artificial Sequence: Synthetic oligonucleotide
caguuucuauucuccccac

SEQ ID NO: 2378028 - RNA, 19 nt, Artificial Sequence
  Description of Artificial Sequence: Synthetic oligonucleotide
acacugaauucucgcucca

SEQ ID NO: 2378029 - RNA, 19 nt, Artificial Sequence
  Description of Artificial Sequence: Synthetic oligonucleotide
cugcugcccagcugggugc

SEQ ID NO: 2378030 - RNA, 19 nt, Artificial Sequence
  Description of Artificial Sequence: Synthetic oligonucleotide
cuuugagaccauccggaaa

SEQ ID NO: 2378031 - RNA, 19 nt, Artificial Sequence
  Description of Artificial Sequence: Synthetic oligonucleotide
ucuggaacugaagcucaau

SEQ ID NO: 2378032 - RNA, 19 nt, Artificial Sequence
  Description of Artificial Sequence: Synthetic oligonucleotide
acgacgucugcgccuugag

SEQ ID NO: 2378033 - RNA, 19 nt, Artificial Sequence
  Description of Artificial Sequence: Synthetic oligonucleotide
caagggacuggucgacgac

SEQ ID NO: 2378034 - RNA, 19 nt, Artificial Sequence
  Description of Artificial Sequence: Synthetic oligonucleotide
cauucacgacugaaguuaa

SEQ ID NO: 2378035 - RNA, 19 nt, Artificial Sequence
  Description of Artificial Sequence: Synthetic oligonucleotide
cucugggugccacugcuca

SEQ ID NO: 2378036 - RNA, 19 nt, Artificial Sequence
  Description of Artificial Sequence: Synthetic oligonucleotide
uucgcuuaauggggcaaaa

SEQ ID NO: 2378037 - RNA, 19 nt, Artificial Sequence
  Description of Artificial Sequence: Synthetic oligonucleotide
gcgccuugagcaaaguucc

SEQ ID NO: 2378038 - RNA, 19 nt, Artificial Sequence
  Description of Artificial Sequence: Synthetic oligonucleotide
cucaccgggccacucgcug

SEQ ID NO: 2378039 - RNA, 19 nt, Artificial Sequence
  Description of Artificial Sequence: Synthetic oligonucleotide
uguccuuaguagggcugcc

SEQ ID NO: 2378040 - RNA, 19 nt, Artificial Sequence
  Description of Artificial Sequence: Synthetic oligonucleotide
caaacgguuuuccugcagu

SEQ ID NO: 2378041 - RNA, 19 nt, Artificial Sequence
  Description of Artificial Sequence: Synthetic oligonucleotide
uggcugucaagggacuggu

SEQ ID NO: 2378042 - RNA, 19 nt, Artificial Sequence
  Description of Artificial Sequence: Synthetic oligonucleotide
ugggugcgugucaggcucc

SEQ ID NO: 2378043 - RNA, 19 nt, Artificial Sequence
  Description of Artificial Sequence: Synthetic oligonucleotide
cugugguaggcugcugccc

SEQ ID NO: 2378044 - RNA, 19 nt, Artificial Sequence
  Description of Artificial Sequence: Synthetic oligonucleotide
auucacgacugaaguuaag

SEQ ID NO: 2378045 - RNA, 19 nt, Artificial Sequence
  Description of Artificial Sequence: Synthetic oligonucleotide
cacugaauucucgcuccag

SEQ ID NO: 2378046 - RNA, 19 nt, Artificial Sequence
  Description of Artificial Sequence: Synthetic oligonucleotide
agaucaaugcuggcaguuu

SEQ ID NO: 2378047 - RNA, 19 nt, Artificial Sequence
  Description of Artificial Sequence: Synthetic oligonucleotide
gcuuuucgcuuaauggggc

SEQ ID NO: 2378048 - RNA, 19 nt, Artificial Sequence
  Description of Artificial Sequence: Synthetic oligonucleotide
cacgaaaacccaaacgguu

SEQ ID NO: 2378049 - RNA, 19 nt, Artificial Sequence
  Description of Artificial Sequence: Synthetic oligonucleotide
gcuacugggcaaccacugc

SEQ ID NO: 2378050 - RNA, 19 nt, Artificial Sequence
  Description of Artificial Sequence: Synthetic oligonucleotide
ggaccuucaaagaucugga

SEQ ID NO: 2378051 - RNA, 19 nt, Artificial Sequence
  Description of Artificial Sequence: Synthetic oligonucleotide
cuggcaguuucaggguggc

SEQ ID NO: 2378052 - RNA, 19 nt, Artificial Sequence
  Description of Artificial Sequence: Synthetic oligonucleotide
acugaagcucaauguccuu

SEQ ID NO: 2378053 - RNA, 19 nt, Artificial Sequence
  Description of Artificial Sequence: Synthetic oligonucleotide
gaauugcccuugcugggcu

SEQ ID NO: 2378054 - RNA, 19 nt, Artificial Sequence
  Description of Artificial Sequence: Synthetic oligonucleotide
ggcaaaaguggccccugac

SEQ ID NO: 2378055 - RNA, 19 nt, Artificial Sequence
  Description of Artificial Sequence: Synthetic oligonucleotide
auguucugaggaccuucaa

SEQ ID NO: 2378056 - RNA, 19 nt, Artificial Sequence
  Description of Artificial Sequence: Synthetic oligonucleotide
gcccuuggagucuugccug

SEQ ID NO: 2378057 - RNA, 19 nt, Artificial Sequence
  Description of Artificial Sequence: Synthetic oligonucleotide
gaaccaaauuuagaucaau

SEQ ID NO: 2378058 - RNA, 19 nt, Artificial Sequence
  Description of Artificial Sequence: Synthetic oligonucleotide
cucaggcugcacucaucug

SEQ ID NO: 2378059 - RNA, 19 nt, Artificial Sequence
  Description of Artificial Sequence: Synthetic oligonucleotide
gugguaggcugcugcccag

SEQ ID NO: 2378060 - RNA, 19 nt, Artificial Sequence
  Description of Artificial Sequence: Synthetic oligonucleotide
acgucugcgccuugagcaa

SEQ ID NO: 2378061 - RNA, 19 nt, Artificial Sequence
  Description of Artificial Sequence: Synthetic oligonucleotide
ccugugguaggcugcugcc

SEQ ID NO: 2378062 - RNA, 19 nt, Artificial Sequence
  Description of Artificial Sequence: Synthetic oligonucleotide
caauguccuuaguagggcu

SEQ ID NO: 2378063 - RNA, 19 nt, Artificial Sequence
  Description of Artificial Sequence: Synthetic oligonucleotide
aguuccuaaccaacuuaau

SEQ ID NO: 2378064 - RNA, 19 nt, Artificial Sequence
  Description of Artificial Sequence: Synthetic oligonucleotide
cucagaaugucacuuucuu

SEQ ID NO: 2378065 - RNA, 19 nt, Artificial Sequence
  Description of Artificial Sequence: Synthetic oligonucleotide
ucgcugcuggaagauguuc

SEQ ID NO: 2378066 - RNA, 19 nt, Artificial Sequence
  Description of Artificial Sequence: Synthetic oligonucleotide
cuuaguagggcugcccugu

SEQ ID NO: 2378067 - RNA, 19 nt, Artificial Sequence
  Description of Artificial Sequence: Synthetic oligonucleotide
cauuugauuucugcucaaa

SEQ ID NO: 2378068 - RNA, 19 nt, Artificial Sequence
  Description of Artificial Sequence: Synthetic oligonucleotide
cucuaucacggugcccuug

SEQ ID NO: 2378069 - RNA, 19 nt, Artificial Sequence
  Description of Artificial Sequence: Synthetic oligonucleotide
cccugaccagccuaggcug

SEQ ID NO: 2378070 - RNA, 19 nt, Artificial Sequence
  Description of Artificial Sequence: Synthetic oligonucleotide
ccucaugagggucuuucuc

SEQ ID NO: 2378071 - RNA, 19 nt, Artificial Sequence
  Description of Artificial Sequence: Synthetic oligonucleotide
agggacuggucgacgacgu

SEQ ID NO: 2378072 - RNA, 19 nt, Artificial Sequence
  Description of Artificial Sequence: Synthetic oligonucleotide
ucgacgacgucugcgccuu

SEQ ID NO: 2378073 - RNA, 19 nt, Artificial Sequence
  Description of Artificial Sequence: Synthetic oligonucleotide
guuaagcucuggacacuga

SEQ ID NO: 2378074 - RNA, 19 nt, Artificial Sequence
  Description of Artificial Sequence: Synthetic oligonucleotide
gaccuucaaagaucuggau

SEQ ID NO: 2378075 - RNA, 19 nt, Artificial Sequence
  Description of Artificial Sequence: Synthetic oligonucleotide
ggcucugugcuucguaaaa

SEQ ID NO: 2378076 - RNA, 19 nt, Artificial Sequence
  Description of Artificial Sequence: Synthetic oligonucleotide
uugagaccauccggaaauu

SEQ ID NO: 2378077 - RNA, 19 nt, Artificial Sequence
  Description of Artificial Sequence: Synthetic oligonucleotide
aggcugcucgccuggcccu

SEQ ID NO: 2378078 - RNA, 19 nt, Artificial Sequence
  Description of Artificial Sequence: Synthetic oligonucleotide
gacgacgucugcgccuuga

SEQ ID NO: 2378079 - RNA, 19 nt, Artificial Sequence
  Description of Artificial Sequence: Synthetic oligonucleotide
cucauucacgacugaaguu

SEQ ID NO: 2378080 - RNA, 19 nt, Artificial Sequence
  Description of Artificial Sequence: Synthetic oligonucleotide
ggucgacgacgucugcgcc

SEQ ID NO: 2378081 - RNA, 19 nt, Artificial Sequence
  Description of Artificial Sequence: Synthetic oligonucleotide
auucuccccaccaguuuaa

SEQ ID NO: 2378082 - RNA, 19 nt, Artificial Sequence
  Description of Artificial Sequence: Synthetic oligonucleotide
ggcucaccgggccacucgc

SEQ ID NO: 2378083 - RNA, 19 nt, Artificial Sequence
  Description of Artificial Sequence: Synthetic oligonucleotide
ccggaaauucugccaggcc

SEQ ID NO: 2378084 - RNA, 19 nt, Artificial Sequence
  Description of Artificial Sequence: Synthetic oligonucleotide
gccuaggcugcucgccugg

SEQ ID NO: 2378085 - RNA, 19 nt, Artificial Sequence
  Description of Artificial Sequence: Synthetic oligonucleotide
gugcucagcuacugggcaa

SEQ ID NO: 2378086 - RNA, 19 nt, Artificial Sequence
  Description of Artificial Sequence: Synthetic oligonucleotide
uucuccccaccaguuuaaa

SEQ ID NO: 2378087 - RNA, 19 nt, Artificial Sequence
  Description of Artificial Sequence: Synthetic oligonucleotide
ccauccggaaauucugcca

SEQ ID NO: 2378088 - RNA, 19 nt, Artificial Sequence
  Description of Artificial Sequence: Synthetic oligonucleotide
ccugaccagccuaggcugc

SEQ ID NO: 2378089 - RNA, 19 nt, Artificial Sequence
  Description of Artificial Sequence: Synthetic oligonucleotide
gaggaccuucaaagaucug

SEQ ID NO: 2378090 - RNA, 19 nt, Artificial Sequence
  Description of Artificial Sequence: Synthetic oligonucleotide
ccccucuuggugcuguuug

SEQ ID NO: 2378091 - RNA, 19 nt, Artificial Sequence
  Description of Artificial Sequence: Synthetic oligonucleotide
ccucauucacgacugaagu

SEQ ID NO: 2378092 - RNA, 19 nt, Artificial Sequence
  Description of Artificial Sequence: Synthetic oligonucleotide
ggugcccuuggagucuugc

SEQ ID NO: 2378093 - RNA, 19 nt, Artificial Sequence
  Description of Artificial Sequence: Synthetic oligonucleotide
gggauguaagcuauguaau

SEQ ID NO: 2378094 - RNA, 19 nt, Artificial Sequence
  Description of Artificial Sequence: Synthetic oligonucleotide
cccucuuggugcuguuugc

SEQ ID NO: 2378095 - RNA, 19 nt, Artificial Sequence
  Description of Artificial Sequence: Synthetic oligonucleotide
cauggcucugugcuucgua

SEQ ID NO: 2378096 - RNA, 19 nt, Artificial Sequence
  Description of Artificial Sequence: Synthetic oligonucleotide
ccuugagcaaaguuccucu

SEQ ID NO: 2378097 - RNA, 19 nt, Artificial Sequence
  Description of Artificial Sequence: Synthetic oligonucleotide
cucuggaacugaagcucaa

SEQ ID NO: 2378098 - RNA, 19 nt, Artificial Sequence
  Description of Artificial Sequence: Synthetic oligonucleotide
cacucgcugcuggaagaug

SEQ ID NO: 2378099 - RNA, 19 nt, Artificial Sequence
  Description of Artificial Sequence: Synthetic oligonucleotide
cucagcuacugggcaacca

SEQ ID NO: 2378100 - RNA, 19 nt, Artificial Sequence
  Description of Artificial Sequence: Synthetic oligonucleotide
gucgacgacgucugcgccu

SEQ ID NO: 2378101 - RNA, 19 nt, Artificial Sequence
  Description of Artificial Sequence: Synthetic oligonucleotide
ccaacuuaaucucuaguuu

SEQ ID NO: 2378102 - RNA, 19 nt, Artificial Sequence
  Description of Artificial Sequence: Synthetic oligonucleotide
cuuggugcuguuugcuuuu

SEQ ID NO: 2378103 - RNA, 19 nt, Artificial Sequence
  Description of Artificial Sequence: Synthetic oligonucleotide
ugaccagccuaggcugcuc

SEQ ID NO: 2378104 - RNA, 19 nt, Artificial Sequence
  Description of Artificial Sequence: Synthetic oligonucleotide
gggcaaccacugcucuggg

SEQ ID NO: 2378105 - RNA, 19 nt, Artificial Sequence
  Description of Artificial Sequence: Synthetic oligonucleotide
ccagcugggugcgugucag

SEQ ID NO: 2378106 - RNA, 19 nt, Artificial Sequence
  Description of Artificial Sequence: Synthetic oligonucleotide
ugcccuugcugggcucacc

SEQ ID NO: 2378107 - RNA, 19 nt, Artificial Sequence
  Description of Artificial Sequence: Synthetic oligonucleotide
ccuaaccaacuuaaucucu

SEQ ID NO: 2378108 - RNA, 19 nt, Artificial Sequence
  Description of Artificial Sequence: Synthetic oligonucleotide
cagcuacugggcaaccacu

SEQ ID NO: 2378109 - RNA, 19 nt, Artificial Sequence
  Description of Artificial Sequence: Synthetic oligonucleotide
cugcccagcugggugcgug

SEQ ID NO: 2378110 - RNA, 19 nt, Artificial Sequence
  Description of Artificial Sequence: Synthetic oligonucleotide
cuaucacggugcccuugga

SEQ ID NO: 2378111 - RNA, 19 nt, Artificial Sequence
  Description of Artificial Sequence: Synthetic oligonucleotide
gccccugaccagccuaggc

SEQ ID NO: 2378112 - RNA, 19 nt, Artificial Sequence
  Description of Artificial Sequence: Synthetic oligonucleotide
uggcaguuucaggguggcu

SEQ ID NO: 2378113 - RNA, 19 nt, Artificial Sequence
  Description of Artificial Sequence: Synthetic oligonucleotide
ccagccuaggcugcucgcc

SEQ ID NO: 2378114 - RNA, 19 nt, Artificial Sequence
  Description of Artificial Sequence: Synthetic oligonucleotide
ccuguuucagaggguggug

SEQ ID NO: 2378115 - RNA, 19 nt, Artificial Sequence
  Description of Artificial Sequence: Synthetic oligonucleotide
gcccuguuucagagggugg

SEQ ID NO: 2378116 - RNA, 19 nt, Artificial Sequence
  Description of Artificial Sequence: Synthetic oligonucleotide
cgcuuaauggggcaaaagu

SEQ ID NO: 2378117 - RNA, 19 nt, Artificial Sequence
  Description of Artificial Sequence: Synthetic oligonucleotide
gcacgaaaacccaaacggu

SEQ ID NO: 2378118 - RNA, 19 nt, Artificial Sequence
  Description of Artificial Sequence: Synthetic oligonucleotide
ggucuuucucuaucacggu

SEQ ID NO: 2378119 - RNA, 19 nt, Artificial Sequence
  Description of Artificial Sequence: Synthetic oligonucleotide
ccucagaaauccucagucu

SEQ ID NO: 2378120 - RNA, 19 nt, Artificial Sequence
  Description of Artificial Sequence: Synthetic oligonucleotide
cgugucaggcuccucagaa

SEQ ID NO: 2378121 - RNA, 19 nt, Artificial Sequence
  Description of Artificial Sequence: Synthetic oligonucleotide
cgacgucugcgccuugagc

SEQ ID NO: 2378122 - RNA, 19 nt, Artificial Sequence
  Description of Artificial Sequence: Synthetic oligonucleotide
cucgccuggcccuguggua

SEQ ID NO: 2378123 - RNA, 19 nt, Artificial Sequence
  Description of Artificial Sequence: Synthetic oligonucleotide
cagccuaggcugcucgccu

SEQ ID NO: 2378124 - RNA, 19 nt, Artificial Sequence
  Description of Artificial Sequence: Synthetic oligonucleotide
ugccccucuuggugcuguu

SEQ ID NO: 2378125 - RNA, 19 nt, Artificial Sequence
  Description of Artificial Sequence: Synthetic oligonucleotide
agagggugguggaggucuu

SEQ ID NO: 2378126 - RNA, 19 nt, Artificial Sequence
  Description of Artificial Sequence: Synthetic oligonucleotide
acggugcccuuggagucuu

SEQ ID NO: 2378127 - RNA, 19 nt, Artificial Sequence
  Description of Artificial Sequence: Synthetic oligonucleotide
ccagcuguucuucuaugau

SEQ ID NO: 2378128 - RNA, 19 nt, Artificial Sequence
  Description of Artificial Sequence: Synthetic oligonucleotide
cccaaacgguuuuccugca

SEQ ID NO: 2378129 - RNA, 19 nt, Artificial Sequence
  Description of Artificial Sequence: Synthetic oligonucleotide
ggccccugaccagccuagg

SEQ ID NO: 2378130 - RNA, 19 nt, Artificial Sequence
  Description of Artificial Sequence: Synthetic oligonucleotide
gcucgccuggcccuguggu

SEQ ID NO: 2378131 - RNA, 19 nt, Artificial Sequence
  Description of Artificial Sequence: Synthetic oligonucleotide
ccccugaccagccuaggcu

SEQ ID NO: 2378132 - RNA, 19 nt, Artificial Sequence
  Description of Artificial Sequence: Synthetic oligonucleotide
gcugggugcgugucaggcu

SEQ ID NO: 2378133 - RNA, 19 nt, Artificial Sequence
  Description of Artificial Sequence: Synthetic oligonucleotide
ggcaaccacugcucugggu

SEQ ID NO: 2378134 - RNA, 19 nt, Artificial Sequence
  Description of Artificial Sequence: Synthetic oligonucleotide
ccuaggcugcucgccuggc

SEQ ID NO: 2378135 - RNA, 19 nt, Artificial Sequence
  Description of Artificial Sequence: Synthetic oligonucleotide
accgggccacucgcugcug

SEQ ID NO: 2378136 - RNA, 19 nt, Artificial Sequence
  Description of Artificial Sequence: Synthetic oligonucleotide
cugcgccuugagcaaaguu

SEQ ID NO: 2378137 - RNA, 19 nt, Artificial Sequence
  Description of Artificial Sequence: Synthetic oligonucleotide
caccgggccacucgcugcu

SEQ ID NO: 2378138 - RNA, 19 nt, Artificial Sequence
  Description of Artificial Sequence: Synthetic oligonucleotide
ggcugucaagggacugguc

SEQ ID NO: 2378139 - RNA, 19 nt, Artificial Sequence
  Description of Artificial Sequence: Synthetic oligonucleotide
cacggugcccuuggagucu

SEQ ID NO: 2378140 - RNA, 19 nt, Artificial Sequence
  Description of Artificial Sequence: Synthetic oligonucleotide
cugaccagccuaggcugcu

SEQ ID NO: 2378141 - RNA, 19 nt, Artificial Sequence
  Description of Artificial Sequence: Synthetic oligonucleotide
cugcccuguuucagagggu

SEQ ID NO: 2378142 - RNA, 19 nt, Artificial Sequence
  Description of Artificial Sequence: Synthetic oligonucleotide
ggcugcucgccuggcccug

SEQ ID NO: 2378143 - RNA, 19 nt, Artificial Sequence
  Description of Artificial Sequence: Synthetic oligonucleotide
ggugcgugucaggcuccuc

SEQ ID NO: 2378144 - RNA, 19 nt, Artificial Sequence
  Description of Artificial Sequence: Synthetic oligonucleotide
gcccagcugggugcguguc

SEQ ID NO: 2378145 - RNA, 19 nt, Artificial Sequence
  Description of Artificial Sequence: Synthetic oligonucleotide
gggugcgugucaggcuccu

SEQ ID NO: 2378146 - RNA, 19 nt, Artificial Sequence
  Description of Artificial Sequence: Synthetic oligonucleotide
gcucaccgggccacucgcu

SEQ ID NO: 2378147 - RNA, 19 nt, Artificial Sequence
  Description of Artificial Sequence: Synthetic oligonucleotide
cgucugcgccuugagcaaa

SEQ ID NO: 2378148 - RNA, 19 nt, Artificial Sequence
  Description of Artificial Sequence: Synthetic oligonucleotide
cgccuugagcaaaguuccu

SEQ ID NO: 2378149 - RNA, 19 nt, Artificial Sequence
  Description of Artificial Sequence: Synthetic oligonucleotide
cggugcccuuggagucuug

SEQ ID NO: 2378150 - RNA, 19 nt, Artificial Sequence
  Description of Artificial Sequence: Synthetic oligonucleotide
gccccucuuggugcuguuu

SEQ ID NO: 2378151 - RNA, 19 nt, Artificial Sequence
  Description of Artificial Sequence: Synthetic oligonucleotide
ggcccucaugagggucuuu

SEQ ID NO: 2378152 - RNA, 19 nt, Artificial Sequence
  Description of Artificial Sequence: Synthetic oligonucleotide
uguaaaauaaacauguugg

SEQ ID NO: 2378153 - RNA, 19 nt, Artificial Sequence
  Description of Artificial Sequence: Synthetic oligonucleotide
uuaagaaagaaauaaauag

SEQ ID NO: 2378154 - RNA, 19 nt, Artificial Sequence
  Description of Artificial Sequence: Synthetic oligonucleotide
aauucauuguaucucaagc

SEQ ID NO: 2378155 - RNA, 19 nt, Artificial Sequence
  Description of Artificial Sequence: Synthetic oligonucleotide
gaaagaaauaaauaggucc

SEQ ID NO: 2378156 - RNA, 19 nt, Artificial Sequence
  Description of Artificial Sequence: Synthetic oligonucleotide
aaauauacuaccauuacac

SEQ ID NO: 2378157 - RNA, 19 nt, Artificial Sequence
  Description of Artificial Sequence: Synthetic oligonucleotide
aauuaaugcuguuaucacc

SEQ ID NO: 2378158 - RNA, 19 nt, Artificial Sequence
  Description of Artificial Sequence: Synthetic oligonucleotide
uguauuaauuguaaaaugc

SEQ ID NO: 2378159 - RNA, 19 nt, Artificial Sequence
  Description of Artificial Sequence: Synthetic oligonucleotide
auauuauguacauaauugc

SEQ ID NO: 2378160 - RNA, 19 nt, Artificial Sequence
  Description of Artificial Sequence: Synthetic oligonucleotide
uauuaauuguaaaaugcgg

SEQ ID NO: 2378161 - RNA, 19 nt, Artificial Sequence
  Description of Artificial Sequence: Synthetic oligonucleotide
acuaccauuacacagaaug

SEQ ID NO: 2378162 - RNA, 19 nt, Artificial Sequence
  Description of Artificial Sequence: Synthetic oligonucleotide
uggauuuaaaauuuaacag

SEQ ID NO: 2378163 - RNA, 19 nt, Artificial Sequence
  Description of Artificial Sequence: Synthetic oligonucleotide
uuagaaucagaucuuagcc

SEQ ID NO: 2378164 - RNA, 19 nt, Artificial Sequence
  Description of Artificial Sequence: Synthetic oligonucleotide
aauucagaacuuuugagca

SEQ ID NO: 2378165 - RNA, 19 nt, Artificial Sequence
  Description of Artificial Sequence: Synthetic oligonucleotide
uuucaaaacaaguauaggu

SEQ ID NO: 2378166 - RNA, 19 nt, Artificial Sequence
  Description of Artificial Sequence: Synthetic oligonucleotide
auuaauuguaaaaugcggc

SEQ ID NO: 2378167 - RNA, 19 nt, Artificial Sequence
  Description of Artificial Sequence: Synthetic oligonucleotide
aaugggaagaggaugagcg

SEQ ID NO: 2378168 - RNA, 19 nt, Artificial Sequence
  Description of Artificial Sequence: Synthetic oligonucleotide
aguccuuagaaucagaucu

SEQ ID NO: 2378169 - RNA, 19 nt, Artificial Sequence
  Description of Artificial Sequence: Synthetic oligonucleotide
auaaauagguccaaauucc

SEQ ID NO: 2378170 - RNA, 19 nt, Artificial Sequence
  Description of Artificial Sequence: Synthetic oligonucleotide
auggauuuaaaauuuaaca

SEQ ID NO: 2378171 - RNA, 19 nt, Artificial Sequence
  Description of Artificial Sequence: Synthetic oligonucleotide
uagggaauuaaucaguuug

SEQ ID NO: 2378172 - RNA, 19 nt, Artificial Sequence
  Description of Artificial Sequence: Synthetic oligonucleotide
auaaauauacuaccauuac

SEQ ID NO: 2378173 - RNA, 19 nt, Artificial Sequence
  Description of Artificial Sequence: Synthetic oligonucleotide
aacuguaaaauaaacaugu

SEQ ID NO: 2378174 - RNA, 19 nt, Artificial Sequence
  Description of Artificial Sequence: Synthetic oligonucleotide
uauaaaaugccuuauggau

SEQ ID NO: 2378175 - RNA, 19 nt, Artificial Sequence
  Description of Artificial Sequence: Synthetic oligonucleotide
acauucugaaggcaaaacc

SEQ ID NO: 2378176 - RNA, 19 nt, Artificial Sequence
  Description of Artificial Sequence: Synthetic oligonucleotide
auauacuaccauuacacag

SEQ ID NO: 2378177 - RNA, 19 nt, Artificial Sequence
  Description of Artificial Sequence: Synthetic oligonucleotide
aaacaugauucuuguaaac

SEQ ID NO: 2378178 - RNA, 19 nt, Artificial Sequence
  Description of Artificial Sequence: Synthetic oligonucleotide
uguaucucaagccagacua

SEQ ID NO: 2378179 - RNA, 19 nt, Artificial Sequence
  Description of Artificial Sequence: Synthetic oligonucleotide
uauacuaccauuacacaga

SEQ ID NO: 2378180 - RNA, 19 nt, Artificial Sequence
  Description of Artificial Sequence: Synthetic oligonucleotide
ugucauagggaauuaauca

SEQ ID NO: 2378181 - RNA, 19 nt, Artificial Sequence
  Description of Artificial Sequence: Synthetic oligonucleotide
guaaaauaaacauguuggg

SEQ ID NO: 2378182 - RNA, 19 nt, Artificial Sequence
  Description of Artificial Sequence: Synthetic oligonucleotide
acaaguauagguaugguuc

SEQ ID NO: 2378183 - RNA, 19 nt, Artificial Sequence
  Description of Artificial Sequence: Synthetic oligonucleotide
uuaauuguaaaaugcggca

SEQ ID NO: 2378184 - RNA, 19 nt, Artificial Sequence
  Description of Artificial Sequence: Synthetic oligonucleotide
cauucugaaggcaaaaccc

SEQ ID NO: 2378185 - RNA, 19 nt, Artificial Sequence
  Description of Artificial Sequence: Synthetic oligonucleotide
gauucuuguaaacauagca

SEQ ID NO: 2378186 - RNA, 19 nt, Artificial Sequence
  Description of Artificial Sequence: Synthetic oligonucleotide
cauuucaaaacaaguauag

SEQ ID NO: 2378187 - RNA, 19 nt, Artificial Sequence
  Description of Artificial Sequence: Synthetic oligonucleotide
cuuagaaucagaucuuagc

SEQ ID NO: 2378188 - RNA, 19 nt, Artificial Sequence
  Description of Artificial Sequence: Synthetic oligonucleotide
uuguuaaaggcaugaaagg

SEQ ID NO: 2378189 - RNA, 19 nt, Artificial Sequence
  Description of Artificial Sequence: Synthetic oligonucleotide
uuauaaaaugccuuaugga

SEQ ID NO: 2378190 - RNA, 19 nt, Artificial Sequence
  Description of Artificial Sequence: Synthetic oligonucleotide
auaauugccgggcugcagc

SEQ ID NO: 2378191 - RNA, 19 nt, Artificial Sequence
  Description of Artificial Sequence: Synthetic oligonucleotide
caauucagaacuuuugagc

SEQ ID NO: 2378192 - RNA, 19 nt, Artificial Sequence
  Description of Artificial Sequence: Synthetic oligonucleotide
ugguucuaaaauauuaugu

SEQ ID NO: 2378193 - RNA, 19 nt, Artificial Sequence
  Description of Artificial Sequence: Synthetic oligonucleotide
auuauguacauaauugccg

SEQ ID NO: 2378194 - RNA, 19 nt, Artificial Sequence
  Description of Artificial Sequence: Synthetic oligonucleotide
uauggauuuaaaauuuaac

SEQ ID NO: 2378195 - RNA, 19 nt, Artificial Sequence
  Description of Artificial Sequence: Synthetic oligonucleotide
uucaaaacaaguauaggua

SEQ ID NO: 2378196 - RNA, 19 nt, Artificial Sequence
  Description of Artificial Sequence: Synthetic oligonucleotide
guauuaauuguaaaaugcg

SEQ ID NO: 2378197 - RNA, 19 nt, Artificial Sequence
  Description of Artificial Sequence: Synthetic oligonucleotide
uaaaauaaacauguugggc

SEQ ID NO: 2378198 - RNA, 19 nt, Artificial Sequence
  Description of Artificial Sequence: Synthetic oligonucleotide
uaugggaucaacuguaaga

SEQ ID NO: 2378199 - RNA, 19 nt, Artificial Sequence
  Description of Artificial Sequence: Synthetic oligonucleotide
guaaacauagcaaagauaa

SEQ ID NO: 2378200 - RNA, 19 nt, Artificial Sequence
  Description of Artificial Sequence: Synthetic oligonucleotide
ucaauucagaacuuuugag

SEQ ID NO: 2378201 - RNA, 19 nt, Artificial Sequence
  Description of Artificial Sequence: Synthetic oligonucleotide
uuguauuaauuguaaaaug

SEQ ID NO: 2378202 - RNA, 19 nt, Artificial Sequence
  Description of Artificial Sequence: Synthetic oligonucleotide
auagguaugguucuaaaau

SEQ ID NO: 2378203 - RNA, 19 nt, Artificial Sequence
  Description of Artificial Sequence: Synthetic oligonucleotide
ugcauaaguuuauaaaaug

SEQ ID NO: 2378204 - RNA, 19 nt, Artificial Sequence
  Description of Artificial Sequence: Synthetic oligonucleotide
aauagguccaaauuccaaa

SEQ ID NO: 2378205 - RNA, 19 nt, Artificial Sequence
  Description of Artificial Sequence: Synthetic oligonucleotide
cauguaauggcuuuaaaga

SEQ ID NO: 2378206 - RNA, 19 nt, Artificial Sequence
  Description of Artificial Sequence: Synthetic oligonucleotide
uuaacagaaacauuucaaa

SEQ ID NO: 2378207 - RNA, 19 nt, Artificial Sequence
  Description of Artificial Sequence: Synthetic oligonucleotide
uuuucaguccuuuauggga

SEQ ID NO: 2378208 - RNA, 19 nt, Artificial Sequence
  Description of Artificial Sequence: Synthetic oligonucleotide
aaggcaaaacccuucucuc

SEQ ID NO: 2378209 - RNA, 19 nt, Artificial Sequence
  Description of Artificial Sequence: Synthetic oligonucleotide
aauuguaaaaugcggcagu

SEQ ID NO: 2378210 - RNA, 19 nt, Artificial Sequence
  Description of Artificial Sequence: Synthetic oligonucleotide
aauuuaacagaaacauuuc

SEQ ID NO: 2378211 - RNA, 19 nt, Artificial Sequence
  Description of Artificial Sequence: Synthetic oligonucleotide
acuaugaagagucaucacu

SEQ ID NO: 2378212 - RNA, 19 nt, Artificial Sequence
  Description of Artificial Sequence: Synthetic oligonucleotide
uucucuuagccaaaggggc

SEQ ID NO: 2378213 - RNA, 19 nt, Artificial Sequence
  Description of Artificial Sequence: Synthetic oligonucleotide
uaucaauucagaacuuuug

SEQ ID NO: 2378214 - RNA, 19 nt, Artificial Sequence
  Description of Artificial Sequence: Synthetic oligonucleotide
aauauacuaccauuacaca

SEQ ID NO: 2378215 - RNA, 19 nt, Artificial Sequence
  Description of Artificial Sequence: Synthetic oligonucleotide
uuuuaaacaugauucuugu

SEQ ID NO: 2378216 - RNA, 19 nt, Artificial Sequence
  Description of Artificial Sequence: Synthetic oligonucleotide
cuucucuuagccaaagggg

SEQ ID NO: 2378217 - RNA, 19 nt, Artificial Sequence
  Description of Artificial Sequence: Synthetic oligonucleotide
guaagaaguccuuagaauc

SEQ ID NO: 2378218 - RNA, 19 nt, Artificial Sequence
  Description of Artificial Sequence: Synthetic oligonucleotide
uguuguuuugccaugggaa

SEQ ID NO: 2378219 - RNA, 19 nt, Artificial Sequence
  Description of Artificial Sequence: Synthetic oligonucleotide
aaacauagcaaagauaauu

SEQ ID NO: 2378220 - RNA, 19 nt, Artificial Sequence
  Description of Artificial Sequence: Synthetic oligonucleotide
ugacauuccauguaauggc

SEQ ID NO: 2378221 - RNA, 19 nt, Artificial Sequence
  Description of Artificial Sequence: Synthetic oligonucleotide
uaguacuuaucacugguug

SEQ ID NO: 2378222 - RNA, 19 nt, Artificial Sequence
  Description of Artificial Sequence: Synthetic oligonucleotide
uuuuaguacuuaucacugg

SEQ ID NO: 2378223 - RNA, 19 nt, Artificial Sequence
  Description of Artificial Sequence: Synthetic oligonucleotide
uuguauuuguuaaaggcau

SEQ ID NO: 2378224 - RNA, 19 nt, Artificial Sequence
  Description of Artificial Sequence: Synthetic oligonucleotide
aucaguuuguauuaauugu

SEQ ID NO: 2378225 - RNA, 19 nt, Artificial Sequence
  Description of Artificial Sequence: Synthetic oligonucleotide
uaaguuuauaaaaugccuu

SEQ ID NO: 2378226 - RNA, 19 nt, Artificial Sequence
  Description of Artificial Sequence: Synthetic oligonucleotide
aaguccuuagaaucagauc

SEQ ID NO: 2378227 - RNA, 19 nt, Artificial Sequence
  Description of Artificial Sequence: Synthetic oligonucleotide
uguaauggcuuuaaagaaa

SEQ ID NO: 2378228 - RNA, 19 nt, Artificial Sequence
  Description of Artificial Sequence: Synthetic oligonucleotide
ugaagagucaucacuaaua

SEQ ID NO: 2378229 - RNA, 19 nt, Artificial Sequence
  Description of Artificial Sequence: Synthetic oligonucleotide
gucaucacuaauaaaacug

SEQ ID NO: 2378230 - RNA, 19 nt, Artificial Sequence
  Description of Artificial Sequence: Synthetic oligonucleotide
uaugguucuaaaauauuau

SEQ ID NO: 2378231 - RNA, 19 nt, Artificial Sequence
  Description of Artificial Sequence: Synthetic oligonucleotide
uccuuuaugggaucaacug

SEQ ID NO: 2378232 - RNA, 19 nt, Artificial Sequence
  Description of Artificial Sequence: Synthetic oligonucleotide
gucauagggaauuaaucag

SEQ ID NO: 2378233 - RNA, 19 nt, Artificial Sequence
  Description of Artificial Sequence: Synthetic oligonucleotide
ucauuguaucucaagccag

SEQ ID NO: 2378234 - RNA, 19 nt, Artificial Sequence
  Description of Artificial Sequence: Synthetic oligonucleotide
ucauagggaauuaaucagu

SEQ ID NO: 2378235 - RNA, 19 nt, Artificial Sequence
  Description of Artificial Sequence: Synthetic oligonucleotide
aucaauucagaacuuuuga

SEQ ID NO: 2378236 - RNA, 19 nt, Artificial Sequence
  Description of Artificial Sequence: Synthetic oligonucleotide
uaauuguaaaaugcggcag

SEQ ID NO: 2378237 - RNA, 19 nt, Artificial Sequence
  Description of Artificial Sequence: Synthetic oligonucleotide
ucaguuuguauuaauugua

SEQ ID NO: 2378238 - RNA, 19 nt, Artificial Sequence
  Description of Artificial Sequence: Synthetic oligonucleotide
uguaaaaugcggcagucuu

SEQ ID NO: 2378239 - RNA, 19 nt, Artificial Sequence
  Description of Artificial Sequence: Synthetic oligonucleotide
ucacugguugaaauuaaug

SEQ ID NO: 2378240 - RNA, 19 nt, Artificial Sequence
  Description of Artificial Sequence: Synthetic oligonucleotide
ugaagaucccagaaugucu

SEQ ID NO: 2378241 - RNA, 19 nt, Artificial Sequence
  Description of Artificial Sequence: Synthetic oligonucleotide
augguucuaaaauauuaug

SEQ ID NO: 2378242 - RNA, 19 nt, Artificial Sequence
  Description of Artificial Sequence: Synthetic oligonucleotide
agccaaaggggccuugucc

SEQ ID NO: 2378243 - RNA, 19 nt, Artificial Sequence
  Description of Artificial Sequence: Synthetic oligonucleotide
gaauuaaucaguuuguauu

SEQ ID NO: 2378244 - RNA, 19 nt, Artificial Sequence
  Description of Artificial Sequence: Synthetic oligonucleotide
uaaauagguccaaauucca

SEQ ID NO: 2378245 - RNA, 19 nt, Artificial Sequence
  Description of Artificial Sequence: Synthetic oligonucleotide
ucuuccuucucuuagccaa

SEQ ID NO: 2378246 - RNA, 19 nt, Artificial Sequence
  Description of Artificial Sequence: Synthetic oligonucleotide
uagaaucagaucuuagccu

SEQ ID NO: 2378247 - RNA, 19 nt, Artificial Sequence
  Description of Artificial Sequence: Synthetic oligonucleotide
uugucauagggaauuaauc

SEQ ID NO: 2378248 - RNA, 19 nt, Artificial Sequence
  Description of Artificial Sequence: Synthetic oligonucleotide
auuuguuaaaggcaugaaa

SEQ ID NO: 2378249 - RNA, 19 nt, Artificial Sequence
  Description of Artificial Sequence: Synthetic oligonucleotide
ucaagccagacuauuuuca

SEQ ID NO: 2378250 - RNA, 19 nt, Artificial Sequence
  Description of Artificial Sequence: Synthetic oligonucleotide
uguugucuguaucaauuca

SEQ ID NO: 2378251 - RNA, 19 nt, Artificial Sequence
  Description of Artificial Sequence: Synthetic oligonucleotide
gucuguaucaauucagaac

SEQ ID NO: 2378252 - RNA, 19 nt, Artificial Sequence
  Description of Artificial Sequence: Synthetic oligonucleotide
augauucuuguaaacauag

SEQ ID NO: 2378253 - RNA, 19 nt, Artificial Sequence
  Description of Artificial Sequence: Synthetic oligonucleotide
cuaccauuacacagaaugc

SEQ ID NO: 2378254 - RNA, 19 nt, Artificial Sequence
  Description of Artificial Sequence: Synthetic oligonucleotide
aacauagcaaagauaauuu

SEQ ID NO: 2378255 - RNA, 19 nt, Artificial Sequence
  Description of Artificial Sequence: Synthetic oligonucleotide
agucaucacuaauaaaacu

SEQ ID NO: 2378256 - RNA, 19 nt, Artificial Sequence
  Description of Artificial Sequence: Synthetic oligonucleotide
uuaugggaucaacuguaag

SEQ ID NO: 2378257 - RNA, 19 nt, Artificial Sequence
  Description of Artificial Sequence: Synthetic oligonucleotide
uauagguaugguucuaaaa

SEQ ID NO: 2378258 - RNA, 19 nt, Artificial Sequence
  Description of Artificial Sequence: Synthetic oligonucleotide
ugguugaaauuaaugcugu

SEQ ID NO: 2378259 - RNA, 19 nt, Artificial Sequence
  Description of Artificial Sequence: Synthetic oligonucleotide
ucucucuuguauuuguuaa

SEQ ID NO: 2378260 - RNA, 19 nt, Artificial Sequence
  Description of Artificial Sequence: Synthetic oligonucleotide
ucagaccugacauuccaug

SEQ ID NO: 2378261 - RNA, 19 nt, Artificial Sequence
  Description of Artificial Sequence: Synthetic oligonucleotide
ugcuguuaucaccuuaaga

SEQ ID NO: 2378262 - RNA, 19 nt, Artificial Sequence
  Description of Artificial Sequence: Synthetic oligonucleotide
gaagccaauucauuguauc

SEQ ID NO: 2378263 - RNA, 19 nt, Artificial Sequence
  Description of Artificial Sequence: Synthetic oligonucleotide
cucuuguauuuguuaaagg

SEQ ID NO: 2378264 - RNA, 19 nt, Artificial Sequence
  Description of Artificial Sequence: Synthetic oligonucleotide
uguacauaauugccgggcu

SEQ ID NO: 2378265 - RNA, 19 nt, Artificial Sequence
  Description of Artificial Sequence: Synthetic oligonucleotide
gaagagucaucacuaauaa

SEQ ID NO: 2378266 - RNA, 19 nt, Artificial Sequence
  Description of Artificial Sequence: Synthetic oligonucleotide
uuucaguccuuuaugggau

SEQ ID NO: 2378267 - RNA, 19 nt, Artificial Sequence
  Description of Artificial Sequence: Synthetic oligonucleotide
ucuuucaaugaaaugucuu

SEQ ID NO: 2378268 - RNA, 19 nt, Artificial Sequence
  Description of Artificial Sequence: Synthetic oligonucleotide
aagaaguccuuagaaucag

SEQ ID NO: 2378269 - RNA, 19 nt, Artificial Sequence
  Description of Artificial Sequence: Synthetic oligonucleotide
aaugcggcagucuuucaau

SEQ ID NO: 2378270 - RNA, 19 nt, Artificial Sequence
  Description of Artificial Sequence: Synthetic oligonucleotide
agcacuuguugucuguauc

SEQ ID NO: 2378271 - RNA, 19 nt, Artificial Sequence
  Description of Artificial Sequence: Synthetic oligonucleotide
aacauguugggcaguaucu

SEQ ID NO: 2378272 - RNA, 19 nt, Artificial Sequence
  Description of Artificial Sequence: Synthetic oligonucleotide
aguacuuaucacugguuga

SEQ ID NO: 2378273 - RNA, 19 nt, Artificial Sequence
  Description of Artificial Sequence: Synthetic oligonucleotide
auuguaaaaugcggcaguc

SEQ ID NO: 2378274 - RNA, 19 nt, Artificial Sequence
  Description of Artificial Sequence: Synthetic oligonucleotide
augaaaugucuucauggca

SEQ ID NO: 2378275 - RNA, 19 nt, Artificial Sequence
  Description of Artificial Sequence: Synthetic oligonucleotide
uuaucacugguugaaauua

SEQ ID NO: 2378276 - RNA, 19 nt, Artificial Sequence
  Description of Artificial Sequence: Synthetic oligonucleotide
aaaugcggcagucuuucaa

SEQ ID NO: 2378277 - RNA, 19 nt, Artificial Sequence
  Description of Artificial Sequence: Synthetic oligonucleotide
uaaaaugcggcagucuuuc

SEQ ID NO: 2378278 - RNA, 19 nt, Artificial Sequence
  Description of Artificial Sequence: Synthetic oligonucleotide
uagguaugguucuaaaaua

SEQ ID NO: 2378279 - RNA, 19 nt, Artificial Sequence
  Description of Artificial Sequence: Synthetic oligonucleotide
uuucacacaggugugcaca

SEQ ID NO: 2378280 - RNA, 19 nt, Artificial Sequence
  Description of Artificial Sequence: Synthetic oligonucleotide
aaugcuguuaucaccuuaa

SEQ ID NO: 2378281 - RNA, 19 nt, Artificial Sequence
  Description of Artificial Sequence: Synthetic oligonucleotide
aaaggcaugaaagguugcu

SEQ ID NO: 2378282 - RNA, 19 nt, Artificial Sequence
  Description of Artificial Sequence: Synthetic oligonucleotide
uaauugccgggcugcagcg

SEQ ID NO: 2378283 - RNA, 19 nt, Artificial Sequence
  Description of Artificial Sequence: Synthetic oligonucleotide
ugaaauuaaugcuguuauc

SEQ ID NO: 2378284 - RNA, 19 nt, Artificial Sequence
  Description of Artificial Sequence: Synthetic oligonucleotide
gcauaaguuuauaaaaugc

SEQ ID NO: 2378285 - RNA, 19 nt, Artificial Sequence
  Description of Artificial Sequence: Synthetic oligonucleotide
agccaauucauuguaucuc

SEQ ID NO: 2378286 - RNA, 19 nt, Artificial Sequence
  Description of Artificial Sequence: Synthetic oligonucleotide
aaauaccuguaauuucuuu

SEQ ID NO: 2378287 - RNA, 19 nt, Artificial Sequence
  Description of Artificial Sequence: Synthetic oligonucleotide
aagugcucugcauaaguuu

SEQ ID NO: 2378288 - RNA, 19 nt, Artificial Sequence
  Description of Artificial Sequence: Synthetic oligonucleotide
uuucucagaccugacauuc

SEQ ID NO: 2378289 - RNA, 19 nt, Artificial Sequence
  Description of Artificial Sequence: Synthetic oligonucleotide
auuguaucucaagccagac

SEQ ID NO: 2378290 - RNA, 19 nt, Artificial Sequence
  Description of Artificial Sequence: Synthetic oligonucleotide
ccauguaauggcuuuaaag

SEQ ID NO: 2378291 - RNA, 19 nt, Artificial Sequence
  Description of Artificial Sequence: Synthetic oligonucleotide
uaucaccuuaagaaagaaa

SEQ ID NO: 2378292 - RNA, 19 nt, Artificial Sequence
  Description of Artificial Sequence: Synthetic oligonucleotide
ugcacagcggcuccugaag

SEQ ID NO: 2378293 - RNA, 19 nt, Artificial Sequence
  Description of Artificial Sequence: Synthetic oligonucleotide
aagccagacuauuuucagu

SEQ ID NO: 2378294 - RNA, 19 nt, Artificial Sequence
  Description of Artificial Sequence: Synthetic oligonucleotide
uuuaugggaucaacuguaa

SEQ ID NO: 2378295 - RNA, 19 nt, Artificial Sequence
  Description of Artificial Sequence: Synthetic oligonucleotide
acuuaucacugguugaaau

SEQ ID NO: 2378296 - RNA, 19 nt, Artificial Sequence
  Description of Artificial Sequence: Synthetic oligonucleotide
ugucuguaucaauucagaa

SEQ ID NO: 2378297 - RNA, 19 nt, Artificial Sequence
  Description of Artificial Sequence: Synthetic oligonucleotide
gaucaacuguaagaagucc

SEQ ID NO: 2378298 - RNA, 19 nt, Artificial Sequence
  Description of Artificial Sequence: Synthetic oligonucleotide
ucucaagccagacuauuuu

SEQ ID NO: 2378299 - RNA, 19 nt, Artificial Sequence
  Description of Artificial Sequence: Synthetic oligonucleotide
gagucaucacuaauaaaac

SEQ ID NO: 2378300 - RNA, 19 nt, Artificial Sequence
  Description of Artificial Sequence: Synthetic oligonucleotide
agaaugucuggagucauca

SEQ ID NO: 2378301 - RNA, 19 nt, Artificial Sequence
  Description of Artificial Sequence: Synthetic oligonucleotide
ucaccuuaagaaagaaaua

SEQ ID NO: 2378302 - RNA, 19 nt, Artificial Sequence
  Description of Artificial Sequence: Synthetic oligonucleotide
uaaaggcaugaaagguugc

SEQ ID NO: 2378303 - RNA, 19 nt, Artificial Sequence
  Description of Artificial Sequence: Synthetic oligonucleotide
uuguugucuguaucaauuc

SEQ ID NO: 2378304 - RNA, 19 nt, Artificial Sequence
  Description of Artificial Sequence: Synthetic oligonucleotide
cuaugaagagucaucacua

SEQ ID NO: 2378305 - RNA, 19 nt, Artificial Sequence
  Description of Artificial Sequence: Synthetic oligonucleotide
uuguaucucaagccagacu

SEQ ID NO: 2378306 - RNA, 19 nt, Artificial Sequence
  Description of Artificial Sequence: Synthetic oligonucleotide
uaaacauagcaaagauaau

SEQ ID NO: 2378307 - RNA, 19 nt, Artificial Sequence
  Description of Artificial Sequence: Synthetic oligonucleotide
aguccuuuaugggaucaac

SEQ ID NO: 2378308 - RNA, 19 nt, Artificial Sequence
  Description of Artificial Sequence: Synthetic oligonucleotide
guauuuguuaaaggcauga

SEQ ID NO: 2378309 - RNA, 19 nt, Artificial Sequence
  Description of Artificial Sequence: Synthetic oligonucleotide
uuuaaacaugauucuugua

SEQ ID NO: 2378310 - RNA, 19 nt, Artificial Sequence
  Description of Artificial Sequence: Synthetic oligonucleotide
uaucacugguugaaauuaa

SEQ ID NO: 2378311 - RNA, 19 nt, Artificial Sequence
  Description of Artificial Sequence: Synthetic oligonucleotide
acauagcaaagauaauuuu

SEQ ID NO: 2378312 - RNA, 19 nt, Artificial Sequence
  Description of Artificial Sequence: Synthetic oligonucleotide
aucaggaggauuggaggac

SEQ ID NO: 2378313 - RNA, 19 nt, Artificial Sequence
  Description of Artificial Sequence: Synthetic oligonucleotide
aaauagguccaaauuccaa

SEQ ID NO: 2378314 - RNA, 19 nt, Artificial Sequence
  Description of Artificial Sequence: Synthetic oligonucleotide
uguaucaauucagaacuuu

SEQ ID NO: 2378315 - RNA, 19 nt, Artificial Sequence
  Description of Artificial Sequence: Synthetic oligonucleotide
auugccgggcugcagcguc

SEQ ID NO: 2378316 - RNA, 19 nt, Artificial Sequence
  Description of Artificial Sequence: Synthetic oligonucleotide
caccuuaagaaagaaauaa

SEQ ID NO: 2378317 - RNA, 19 nt, Artificial Sequence
  Description of Artificial Sequence: Synthetic oligonucleotide
aucaacuguaagaaguccu

SEQ ID NO: 2378318 - RNA, 19 nt, Artificial Sequence
  Description of Artificial Sequence: Synthetic oligonucleotide
uacacagaaugcaguauuu

SEQ ID NO: 2378319 - RNA, 19 nt, Artificial Sequence
  Description of Artificial Sequence: Synthetic oligonucleotide
aacccuucucucuuguauu

SEQ ID NO: 2378320 - RNA, 19 nt, Artificial Sequence
  Description of Artificial Sequence: Synthetic oligonucleotide
uccaaacuaugaagaguca

SEQ ID NO: 2378321 - RNA, 19 nt, Artificial Sequence
  Description of Artificial Sequence: Synthetic oligonucleotide
augaaagguugcuuucaca

SEQ ID NO: 2378322 - RNA, 19 nt, Artificial Sequence
  Description of Artificial Sequence: Synthetic oligonucleotide
ugaagccaauucauuguau

SEQ ID NO: 2378323 - RNA, 19 nt, Artificial Sequence
  Description of Artificial Sequence: Synthetic oligonucleotide
auacuaccauuacacagaa

SEQ ID NO: 2378324 - RNA, 19 nt, Artificial Sequence
  Description of Artificial Sequence: Synthetic oligonucleotide
guaugguucuaaaauauua

SEQ ID NO: 2378325 - RNA, 19 nt, Artificial Sequence
  Description of Artificial Sequence: Synthetic oligonucleotide
uggcauagcacuuguuguc

SEQ ID NO: 2378326 - RNA, 19 nt, Artificial Sequence
  Description of Artificial Sequence: Synthetic oligonucleotide
ucccagaaugucuggaguc

SEQ ID NO: 2378327 - RNA, 19 nt, Artificial Sequence
  Description of Artificial Sequence: Synthetic oligonucleotide
augaagagucaucacuaau

SEQ ID NO: 2378328 - RNA, 19 nt, Artificial Sequence
  Description of Artificial Sequence: Synthetic oligonucleotide
ugucuggagucaucaggag

SEQ ID NO: 2378329 - RNA, 19 nt, Artificial Sequence
  Description of Artificial Sequence: Synthetic oligonucleotide
uuaucaccuuaagaaagaa

SEQ ID NO: 2378330 - RNA, 19 nt, Artificial Sequence
  Description of Artificial Sequence: Synthetic oligonucleotide
acauuucaaaacaaguaua

SEQ ID NO: 2378331 - RNA, 19 nt, Artificial Sequence
  Description of Artificial Sequence: Synthetic oligonucleotide
ugcggcagucuuucaauga

SEQ ID NO: 2378332 - RNA, 19 nt, Artificial Sequence
  Description of Artificial Sequence: Synthetic oligonucleotide
aggcaugaaagguugcuuu

SEQ ID NO: 2378333 - RNA, 19 nt, Artificial Sequence
  Description of Artificial Sequence: Synthetic oligonucleotide
cauuacacagaaugcagua

SEQ ID NO: 2378334 - RNA, 19 nt, Artificial Sequence
  Description of Artificial Sequence: Synthetic oligonucleotide
aggcaaaacccuucucucu

SEQ ID NO: 2378335 - RNA, 19 nt, Artificial Sequence
  Description of Artificial Sequence: Synthetic oligonucleotide
aaaaugcggcagucuuuca

SEQ ID NO: 2378336 - RNA, 19 nt, Artificial Sequence
  Description of Artificial Sequence: Synthetic oligonucleotide
caucaggaggauuggagga

SEQ ID NO: 2378337 - RNA, 19 nt, Artificial Sequence
  Description of Artificial Sequence: Synthetic oligonucleotide
aaagugcucugcauaaguu

SEQ ID NO: 2378338 - RNA, 19 nt, Artificial Sequence
  Description of Artificial Sequence: Synthetic oligonucleotide
cugcgugucucugugcugg

SEQ ID NO: 2378339 - RNA, 19 nt, Artificial Sequence
  Description of Artificial Sequence: Synthetic oligonucleotide
uuguaaaaugcggcagucu

SEQ ID NO: 2378340 - RNA, 19 nt, Artificial Sequence
  Description of Artificial Sequence: Synthetic oligonucleotide
agguaugguucuaaaauau

SEQ ID NO: 2378341 - RNA, 19 nt, Artificial Sequence
  Description of Artificial Sequence: Synthetic oligonucleotide
cuuauggauuuaaaauuua

SEQ ID NO: 2378342 - RNA, 19 nt, Artificial Sequence
  Description of Artificial Sequence: Synthetic oligonucleotide
gagucaucaggaggauugg

SEQ ID NO: 2378343 - RNA, 19 nt, Artificial Sequence
  Description of Artificial Sequence: Synthetic oligonucleotide
ugguggguguuguuuugcc

SEQ ID NO: 2378344 - RNA, 19 nt, Artificial Sequence
  Description of Artificial Sequence: Synthetic oligonucleotide
cagcggcuccugaagaucc

SEQ ID NO: 2378345 - RNA, 19 nt, Artificial Sequence
  Description of Artificial Sequence: Synthetic oligonucleotide
uccauguaauggcuuuaaa

SEQ ID NO: 2378346 - RNA, 19 nt, Artificial Sequence
  Description of Artificial Sequence: Synthetic oligonucleotide
auagggaauuaaucaguuu

SEQ ID NO: 2378347 - RNA, 19 nt, Artificial Sequence
  Description of Artificial Sequence: Synthetic oligonucleotide
ucaguccuuuaugggauca

SEQ ID NO: 2378348 - RNA, 19 nt, Artificial Sequence
  Description of Artificial Sequence: Synthetic oligonucleotide
acuuguugucuguaucaau

SEQ ID NO: 2378349 - RNA, 19 nt, Artificial Sequence
  Description of Artificial Sequence: Synthetic oligonucleotide
accuuaagaaagaaauaaa

SEQ ID NO: 2378350 - RNA, 19 nt, Artificial Sequence
  Description of Artificial Sequence: Synthetic oligonucleotide
aguauagguaugguucuaa

SEQ ID NO: 2378351 - RNA, 19 nt, Artificial Sequence
  Description of Artificial Sequence: Synthetic oligonucleotide
aggaggauuggaggacagc

SEQ ID NO: 2378352 - RNA, 19 nt, Artificial Sequence
  Description of Artificial Sequence: Synthetic oligonucleotide
ugacugccauccugaagcc

SEQ ID NO: 2378353 - RNA, 19 nt, Artificial Sequence
  Description of Artificial Sequence: Synthetic oligonucleotide
ugcuuucacacaggugugc

SEQ ID NO: 2378354 - RNA, 19 nt, Artificial Sequence
  Description of Artificial Sequence: Synthetic oligonucleotide
aaggcaugaaagguugcuu

SEQ ID NO: 2378355 - RNA, 19 nt, Artificial Sequence
  Description of Artificial Sequence: Synthetic oligonucleotide
guguuguuuugccauggga

SEQ ID NO: 2378356 - RNA, 19 nt, Artificial Sequence
  Description of Artificial Sequence: Synthetic oligonucleotide
auaaacauguugggcagua

SEQ ID NO: 2378357 - RNA, 19 nt, Artificial Sequence
  Description of Artificial Sequence: Synthetic oligonucleotide
augcggcagucuuucaaug

SEQ ID NO: 2378358 - RNA, 19 nt, Artificial Sequence
  Description of Artificial Sequence: Synthetic oligonucleotide
gagcgggagcucucgcugg

SEQ ID NO: 2378359 - RNA, 19 nt, Artificial Sequence
  Description of Artificial Sequence: Synthetic oligonucleotide
agugcucugcauaaguuua

SEQ ID NO: 2378360 - RNA, 19 nt, Artificial Sequence
  Description of Artificial Sequence: Synthetic oligonucleotide
uugguggguguuguuuugc

SEQ ID NO: 2378361 - RNA, 19 nt, Artificial Sequence
  Description of Artificial Sequence: Synthetic oligonucleotide
ugugcuggugcuuguccuc

SEQ ID NO: 2378362 - RNA, 19 nt, Artificial Sequence
  Description of Artificial Sequence: Synthetic oligonucleotide
gguguuguuuugccauggg

SEQ ID NO: 2378363 - RNA, 19 nt, Artificial Sequence
  Description of Artificial Sequence: Synthetic oligonucleotide
caaguauagguaugguucu

SEQ ID NO: 2378364 - RNA, 19 nt, Artificial Sequence
  Description of Artificial Sequence: Synthetic oligonucleotide
uccuuagaaucagaucuua

SEQ ID NO: 2378365 - RNA, 19 nt, Artificial Sequence
  Description of Artificial Sequence: Synthetic oligonucleotide
guuguuuugccaugggaau

SEQ ID NO: 2378366 - RNA, 19 nt, Artificial Sequence
  Description of Artificial Sequence: Synthetic oligonucleotide
ccuuagaaucagaucuuag

SEQ ID NO: 2378367 - RNA, 19 nt, Artificial Sequence
  Description of Artificial Sequence: Synthetic oligonucleotide
ccaaauuccaaacuaugaa

SEQ ID NO: 2378368 - RNA, 19 nt, Artificial Sequence
  Description of Artificial Sequence: Synthetic oligonucleotide
uuaaugcuguuaucaccuu

SEQ ID NO: 2378369 - RNA, 19 nt, Artificial Sequence
  Description of Artificial Sequence: Synthetic oligonucleotide
cauaauugccgggcugcag

SEQ ID NO: 2378370 - RNA, 19 nt, Artificial Sequence
  Description of Artificial Sequence: Synthetic oligonucleotide
gacuauuuucaguccuuua

SEQ ID NO: 2378371 - RNA, 19 nt, Artificial Sequence
  Description of Artificial Sequence: Synthetic oligonucleotide
uucaguccuuuaugggauc

SEQ ID NO: 2378372 - RNA, 19 nt, Artificial Sequence
  Description of Artificial Sequence: Synthetic oligonucleotide
uacuuaucacugguugaaa

SEQ ID NO: 2378373 - RNA, 19 nt, Artificial Sequence
  Description of Artificial Sequence: Synthetic oligonucleotide
guuaaaggcaugaaagguu

SEQ ID NO: 2378374 - RNA, 19 nt, Artificial Sequence
  Description of Artificial Sequence: Synthetic oligonucleotide
gaaguccuuagaaucagau

SEQ ID NO: 2378375 - RNA, 19 nt, Artificial Sequence
  Description of Artificial Sequence: Synthetic oligonucleotide
gcacuuguugucuguauca

SEQ ID NO: 2378376 - RNA, 19 nt, Artificial Sequence
  Description of Artificial Sequence: Synthetic oligonucleotide
caggaggauuggaggacag

SEQ ID NO: 2378377 - RNA, 19 nt, Artificial Sequence
  Description of Artificial Sequence: Synthetic oligonucleotide
cuuaucacugguugaaauu

SEQ ID NO: 2378378 - RNA, 19 nt, Artificial Sequence
  Description of Artificial Sequence: Synthetic oligonucleotide
ggaauuaaucaguuuguau

SEQ ID NO: 2378379 - RNA, 19 nt, Artificial Sequence
  Description of Artificial Sequence: Synthetic oligonucleotide
aaguauagguaugguucua

SEQ ID NO: 2378380 - RNA, 19 nt, Artificial Sequence
  Description of Artificial Sequence: Synthetic oligonucleotide
uagcacuuguugucuguau

SEQ ID NO: 2378381 - RNA, 19 nt, Artificial Sequence
  Description of Artificial Sequence: Synthetic oligonucleotide
cucucuuguauuuguuaaa

SEQ ID NO: 2378382 - RNA, 19 nt, Artificial Sequence
  Description of Artificial Sequence: Synthetic oligonucleotide
gccaaaggggccuugucca

SEQ ID NO: 2378383 - RNA, 19 nt, Artificial Sequence
  Description of Artificial Sequence: Synthetic oligonucleotide
ggcaugaaagguugcuuuc

SEQ ID NO: 2378384 - RNA, 19 nt, Artificial Sequence
  Description of Artificial Sequence: Synthetic oligonucleotide
ggacagcugacugccaucc

SEQ ID NO: 2378385 - RNA, 19 nt, Artificial Sequence
  Description of Artificial Sequence: Synthetic oligonucleotide
cauagggaauuaaucaguu

SEQ ID NO: 2378386 - RNA, 19 nt, Artificial Sequence
  Description of Artificial Sequence: Synthetic oligonucleotide
gauuggaggacagcugacu

SEQ ID NO: 2378387 - RNA, 19 nt, Artificial Sequence
  Description of Artificial Sequence: Synthetic oligonucleotide
acacagaaugcaguauuuu

SEQ ID NO: 2378388 - RNA, 19 nt, Artificial Sequence
  Description of Artificial Sequence: Synthetic oligonucleotide
gccuuauggauuuaaaauu

SEQ ID NO: 2378389 - RNA, 19 nt, Artificial Sequence
  Description of Artificial Sequence: Synthetic oligonucleotide
aucacugguugaaauuaau

SEQ ID NO: 2378390 - RNA, 19 nt, Artificial Sequence
  Description of Artificial Sequence: Synthetic oligonucleotide
gccagacuauuuucagucc

SEQ ID NO: 2378391 - RNA, 19 nt, Artificial Sequence
  Description of Artificial Sequence: Synthetic oligonucleotide
guggguguuguuuugccau

SEQ ID NO: 2378392 - RNA, 19 nt, Artificial Sequence
  Description of Artificial Sequence: Synthetic oligonucleotide
ggugcuuguccucuucauc

SEQ ID NO: 2378393 - RNA, 19 nt, Artificial Sequence
  Description of Artificial Sequence: Synthetic oligonucleotide
gcugcugcgugucucugug

SEQ ID NO: 2378394 - RNA, 19 nt, Artificial Sequence
  Description of Artificial Sequence: Synthetic oligonucleotide
ggguguuguuuugccaugg

SEQ ID NO: 2378395 - RNA, 19 nt, Artificial Sequence
  Description of Artificial Sequence: Synthetic oligonucleotide
acauaauugccgggcugca

SEQ ID NO: 2378396 - RNA, 19 nt, Artificial Sequence
  Description of Artificial Sequence: Synthetic oligonucleotide
acauguugggcaguaucuu

SEQ ID NO: 2378397 - RNA, 19 nt, Artificial Sequence
  Description of Artificial Sequence: Synthetic oligonucleotide
aauugccgggcugcagcgu

SEQ ID NO: 2378398 - RNA, 19 nt, Artificial Sequence
  Description of Artificial Sequence: Synthetic oligonucleotide
uacuaccauuacacagaau

SEQ ID NO: 2378399 - RNA, 19 nt, Artificial Sequence
  Description of Artificial Sequence: Synthetic oligonucleotide
auguugggcaguaucuuuu

SEQ ID NO: 2378400 - RNA, 19 nt, Artificial Sequence
  Description of Artificial Sequence: Synthetic oligonucleotide
ccauccugaagccaauuca

SEQ ID NO: 2378401 - RNA, 19 nt, Artificial Sequence
  Description of Artificial Sequence: Synthetic oligonucleotide
guaucaauucagaacuuuu

SEQ ID NO: 2378402 - RNA, 19 nt, Artificial Sequence
  Description of Artificial Sequence: Synthetic oligonucleotide
agcggcuccugaagauccc

SEQ ID NO: 2378403 - RNA, 19 nt, Artificial Sequence
  Description of Artificial Sequence: Synthetic oligonucleotide
aucucaagccagacuauuu

SEQ ID NO: 2378404 - RNA, 19 nt, Artificial Sequence
  Description of Artificial Sequence: Synthetic oligonucleotide
gcauagcacuuguugucug

SEQ ID NO: 2378405 - RNA, 19 nt, Artificial Sequence
  Description of Artificial Sequence: Synthetic oligonucleotide
uggagcugcugcgugucuc

SEQ ID NO: 2378406 - RNA, 19 nt, Artificial Sequence
  Description of Artificial Sequence: Synthetic oligonucleotide
cgugucucugugcuggugc

SEQ ID NO: 2378407 - RNA, 19 nt, Artificial Sequence
  Description of Artificial Sequence: Synthetic oligonucleotide
cagaccugacauuccaugu

SEQ ID NO: 2378408 - RNA, 19 nt, Artificial Sequence
  Description of Artificial Sequence: Synthetic oligonucleotide
gaggacagcugacugccau

SEQ ID NO: 2378409 - RNA, 19 nt, Artificial Sequence
  Description of Artificial Sequence: Synthetic oligonucleotide
agcgucuugguggguguug

SEQ ID NO: 2378410 - RNA, 19 nt, Artificial Sequence
  Description of Artificial Sequence: Synthetic oligonucleotide
cauagcacuuguugucugu

SEQ ID NO: 2378411 - RNA, 19 nt, Artificial Sequence
  Description of Artificial Sequence: Synthetic oligonucleotide
gaggaugagcgggagcucu

SEQ ID NO: 2378412 - RNA, 19 nt, Artificial Sequence
  Description of Artificial Sequence: Synthetic oligonucleotide
cuggugcuuguccucuuca

SEQ ID NO: 2378413 - RNA, 19 nt, Artificial Sequence
  Description of Artificial Sequence: Synthetic oligonucleotide
guccuuuaugggaucaacu

SEQ ID NO: 2378414 - RNA, 19 nt, Artificial Sequence
  Description of Artificial Sequence: Synthetic oligonucleotide
caaaacccuucucucuugu

SEQ ID NO: 2378415 - RNA, 19 nt, Artificial Sequence
  Description of Artificial Sequence: Synthetic oligonucleotide
gggaauuaaucaguuugua

SEQ ID NO: 2378416 - RNA, 19 nt, Artificial Sequence
  Description of Artificial Sequence: Synthetic oligonucleotide
gcggcagucuuucaaugaa

SEQ ID NO: 2378417 - RNA, 19 nt, Artificial Sequence
  Description of Artificial Sequence: Synthetic oligonucleotide
ccugaagccaauucauugu

SEQ ID NO: 2378418 - RNA, 19 nt, Artificial Sequence
  Description of Artificial Sequence: Synthetic oligonucleotide
gccaugggaaugggaagag

SEQ ID NO: 2378419 - RNA, 19 nt, Artificial Sequence
  Description of Artificial Sequence: Synthetic oligonucleotide
guaaaaugcggcagucuuu

SEQ ID NO: 2378420 - RNA, 19 nt, Artificial Sequence
  Description of Artificial Sequence: Synthetic oligonucleotide
gugcacagcggcuccugaa

SEQ ID NO: 2378421 - RNA, 19 nt, Artificial Sequence
  Description of Artificial Sequence: Synthetic oligonucleotide
ggauuggaggacagcugac

SEQ ID NO: 2378422 - RNA, 19 nt, Artificial Sequence
  Description of Artificial Sequence: Synthetic oligonucleotide
ccaaaggggccuuguccac

SEQ ID NO: 2378423 - RNA, 19 nt, Artificial Sequence
  Description of Artificial Sequence: Synthetic oligonucleotide
ggcauagcacuuguugucu

SEQ ID NO: 2378424 - RNA, 19 nt, Artificial Sequence
  Description of Artificial Sequence: Synthetic oligonucleotide
gguaugguucuaaaauauu

SEQ ID NO: 2378425 - RNA, 19 nt, Artificial Sequence
  Description of Artificial Sequence: Synthetic oligonucleotide
cuguaucaauucagaacuu

SEQ ID NO: 2378426 - RNA, 19 nt, Artificial Sequence
  Description of Artificial Sequence: Synthetic oligonucleotide
guaucucaagccagacuau

SEQ ID NO: 2378427 - RNA, 19 nt, Artificial Sequence
  Description of Artificial Sequence: Synthetic oligonucleotide
gguugaaauuaaugcuguu

SEQ ID NO: 2378428 - RNA, 19 nt, Artificial Sequence
  Description of Artificial Sequence: Synthetic oligonucleotide
guccuuagaaucagaucuu

SEQ ID NO: 2378429 - RNA, 19 nt, Artificial Sequence
  Description of Artificial Sequence: Synthetic oligonucleotide
cacagcggcuccugaagau

SEQ ID NO: 2378430 - RNA, 19 nt, Artificial Sequence
  Description of Artificial Sequence: Synthetic oligonucleotide
ggagcugcugcgugucucu

SEQ ID NO: 2378431 - RNA, 19 nt, Artificial Sequence
  Description of Artificial Sequence: Synthetic oligonucleotide
ccaaacuaugaagagucau

SEQ ID NO: 2378432 - RNA, 19 nt, Artificial Sequence
  Description of Artificial Sequence: Synthetic oligonucleotide
caguccuuuaugggaucaa

SEQ ID NO: 2378433 - RNA, 19 nt, Artificial Sequence
  Description of Artificial Sequence: Synthetic oligonucleotide
gcgugucucugugcuggug

SEQ ID NO: 2378434 - RNA, 19 nt, Artificial Sequence
  Description of Artificial Sequence: Synthetic oligonucleotide
gcagcgucuuggugggugu

SEQ ID NO: 2378435 - RNA, 19 nt, Artificial Sequence
  Description of Artificial Sequence: Synthetic oligonucleotide
gcggcuccugaagauccca

SEQ ID NO: 2378436 - RNA, 19 nt, Artificial Sequence
  Description of Artificial Sequence: Synthetic oligonucleotide
gcgucuugguggguguugu

SEQ ID NO: 2378437 - RNA, 19 nt, Artificial Sequence
  Description of Artificial Sequence: Synthetic oligonucleotide
cagcgucuugguggguguu

SEQ ID NO: 2378438 - RNA, 19 nt, Artificial Sequence
  Description of Artificial Sequence: Synthetic oligonucleotide
aaucuuucgaaccaugugc

SEQ ID NO: 2378439 - RNA, 19 nt, Artificial Sequence
  Description of Artificial Sequence: Synthetic oligonucleotide
uuacauaaggaacagaaug

SEQ ID NO: 2378440 - RNA, 19 nt, Artificial Sequence
  Description of Artificial Sequence: Synthetic oligonucleotide
uuauccaucacguucuugg

SEQ ID NO: 2378441 - RNA, 19 nt, Artificial Sequence
  Description of Artificial Sequence: Synthetic oligonucleotide
  modified_base (18)..(18): a, c, u, g, unknown or other
aacagaaugguccuuugng

SEQ ID NO: 2378442 - RNA, 19 nt, Artificial Sequence
  Description of Artificial Sequence: Synthetic oligonucleotide
aauucuuaagcaguguagg

SEQ ID NO: 2378443 - RNA, 19 nt, Artificial Sequence
  Description of Artificial Sequence: Synthetic oligonucleotide
aaugguaauuugcugagcu

SEQ ID NO: 2378444 - RNA, 19 nt, Artificial Sequence
  Description of Artificial Sequence: Synthetic oligonucleotide
uccaauggcacuuaucugc

SEQ ID NO: 2378445 - RNA, 19 nt, Artificial Sequence
  Description of Artificial Sequence: Synthetic oligonucleotide
gauuuaaaaucuuucgaac

SEQ ID NO: 2378446 - RNA, 19 nt, Artificial Sequence
  Description of Artificial Sequence: Synthetic oligonucleotide
uggcccaucauucugaaug

SEQ ID NO: 2378447 - RNA, 19 nt, Artificial Sequence
  Description of Artificial Sequence: Synthetic oligonucleotide
ugcaccacggccuucaggg

SEQ ID NO: 2378448 - RNA, 19 nt, Artificial Sequence
  Description of Artificial Sequence: Synthetic oligonucleotide
aaaucuuucgaaccaugug

SEQ ID NO: 2378449 - RNA, 19 nt, Artificial Sequence
  Description of Artificial Sequence: Synthetic oligonucleotide
auauuugaguccugaauuc

SEQ ID NO: 2378450 - RNA, 19 nt, Artificial Sequence
  Description of Artificial Sequence: Synthetic oligonucleotide
aucauucugaaugugcacc

SEQ ID NO: 2378451 - RNA, 19 nt, Artificial Sequence
  Description of Artificial Sequence: Synthetic oligonucleotide
aguucuauagucacuggcc

SEQ ID NO: 2378452 - RNA, 19 nt, Artificial Sequence
  Description of Artificial Sequence: Synthetic oligonucleotide
uucuuaagcaguguagggg

SEQ ID NO: 2378453 - RNA, 19 nt, Artificial Sequence
  Description of Artificial Sequence: Synthetic oligonucleotide
agaguuagcagcuccagca

SEQ ID NO: 2378454 - RNA, 19 nt, Artificial Sequence
  Description of Artificial Sequence: Synthetic oligonucleotide
uguuguagaagcucucugc

SEQ ID NO: 2378455 - RNA, 19 nt, Artificial Sequence
  Description of Artificial Sequence: Synthetic oligonucleotide
gaguccugaauucuuaagc

SEQ ID NO: 2378456 - RNA, 19 nt, Artificial Sequence
  Description of Artificial Sequence: Synthetic oligonucleotide
ugaaugugcaccugcaugu

SEQ ID NO: 2378457 - RNA, 19 nt, Artificial Sequence
  Description of Artificial Sequence: Synthetic oligonucleotide
auucuuaagcaguguaggg

SEQ ID NO: 2378458 - RNA, 19 nt, Artificial Sequence
  Description of Artificial Sequence: Synthetic oligonucleotide
cauuacauaaggaacagaa

SEQ ID NO: 2378459 - RNA, 19 nt, Artificial Sequence
  Description of Artificial Sequence: Synthetic oligonucleotide
uggaagucaggcuuguucc

SEQ ID NO: 2378460 - RNA, 19 nt, Artificial Sequence
  Description of Artificial Sequence: Synthetic oligonucleotide
ucauauuugaguccugaau

SEQ ID NO: 2378461 - RNA, 19 nt, Artificial Sequence
  Description of Artificial Sequence: Synthetic oligonucleotide
ugugacgcuagccugggug

SEQ ID NO: 2378462 - RNA, 19 nt, Artificial Sequence
  Description of Artificial Sequence: Synthetic oligonucleotide
ugguaauuugcugagcucc

SEQ ID NO: 2378463 - RNA, 19 nt, Artificial Sequence
  Description of Artificial Sequence: Synthetic oligonucleotide
ucucugaugagcucuggcc

SEQ ID NO: 2378464 - RNA, 19 nt, Artificial Sequence
  Description of Artificial Sequence: Synthetic oligonucleotide
cuggcugacacacagcacc

SEQ ID NO: 2378465 - RNA, 19 nt, Artificial Sequence
  Description of Artificial Sequence: Synthetic oligonucleotide
agugucuuacuucugauuu

SEQ ID NO: 2378466 - RNA, 19 nt, Artificial Sequence
  Description of Artificial Sequence: Synthetic oligonucleotide
ugaauucuuaagcagugua

SEQ ID NO: 2378467 - RNA, 19 nt, Artificial Sequence
  Description of Artificial Sequence: Synthetic oligonucleotide
ugcuuauccaucacguucu

SEQ ID NO: 2378468 - RNA, 19 nt, Artificial Sequence
  Description of Artificial Sequence: Synthetic oligonucleotide
uuugggucagaguuagcag

SEQ ID NO: 2378469 - RNA, 19 nt, Artificial Sequence
  Description of Artificial Sequence: Synthetic oligonucleotide
aguccugaauucuuaagca

SEQ ID NO: 2378470 - RNA, 19 nt, Artificial Sequence
  Description of Artificial Sequence: Synthetic oligonucleotide
agggugaacuggcugacac

SEQ ID NO: 2378471 - RNA, 19 nt, Artificial Sequence
  Description of Artificial Sequence: Synthetic oligonucleotide
uacugcuuauccaucacgu

SEQ ID NO: 2378472 - RNA, 19 nt, Artificial Sequence
  Description of Artificial Sequence: Synthetic oligonucleotide
uccaguucuauagucacug

SEQ ID NO: 2378473 - RNA, 19 nt, Artificial Sequence
  Description of Artificial Sequence: Synthetic oligonucleotide
cccagcaacacacagaugc

SEQ ID NO: 2378474 - RNA, 19 nt, Artificial Sequence
  Description of Artificial Sequence: Synthetic oligonucleotide
cacggaaauacccagcaac

SEQ ID NO: 2378475 - RNA, 19 nt, Artificial Sequence
  Description of Artificial Sequence: Synthetic oligonucleotide
ugcaccugcauguaggcac

SEQ ID NO: 2378476 - RNA, 19 nt, Artificial Sequence
  Description of Artificial Sequence: Synthetic oligonucleotide
cuugccaucucugaugagc

SEQ ID NO: 2378477 - RNA, 19 nt, Artificial Sequence
  Description of Artificial Sequence: Synthetic oligonucleotide
uccacggaaauacccagca

SEQ ID NO: 2378478 - RNA, 19 nt, Artificial Sequence
  Description of Artificial Sequence: Synthetic oligonucleotide
guucuauagucacuggccc

SEQ ID NO: 2378479 - RNA, 19 nt, Artificial Sequence
  Description of Artificial Sequence: Synthetic oligonucleotide
uugacagcugcuuuggguc

SEQ ID NO: 2378480 - RNA, 19 nt, Artificial Sequence
  Description of Artificial Sequence: Synthetic oligonucleotide
aauuugcugagcucccacu

SEQ ID NO: 2378481 - RNA, 19 nt, Artificial Sequence
  Description of Artificial Sequence: Synthetic oligonucleotide
cacacgcagauuuaaaauc

SEQ ID NO: 2378482 - RNA, 19 nt, Artificial Sequence
  Description of Artificial Sequence: Synthetic oligonucleotide
ucguucuuugcuugacucg

SEQ ID NO: 2378483 - RNA, 19 nt, Artificial Sequence
  Description of Artificial Sequence: Synthetic oligonucleotide
cuuucgaaccaugugcucc

SEQ ID NO: 2378484 - RNA, 19 nt, Artificial Sequence
  Description of Artificial Sequence: Synthetic oligonucleotide
aguguuucccacucucauc

SEQ ID NO: 2378485 - RNA, 19 nt, Artificial Sequence
  Description of Artificial Sequence: Synthetic oligonucleotide
ugcccaaugguaauuugcu

SEQ ID NO: 2378486 - RNA, 19 nt, Artificial Sequence
  Description of Artificial Sequence: Synthetic oligonucleotide
ugaauguuucaggauccgg

SEQ ID NO: 2378487 - RNA, 19 nt, Artificial Sequence
  Description of Artificial Sequence: Synthetic oligonucleotide
aaucuuccacggaaauacc

SEQ ID NO: 2378488 - RNA, 19 nt, Artificial Sequence
  Description of Artificial Sequence: Synthetic oligonucleotide
aucuuccacggaaauaccc

SEQ ID NO: 2378489 - RNA, 19 nt, Artificial Sequence
  Description of Artificial Sequence: Synthetic oligonucleotide
guacugcuuauccaucacg

SEQ ID NO: 2378490 - RNA, 19 nt, Artificial Sequence
  Description of Artificial Sequence: Synthetic oligonucleotide
agcaacacacagaugcccc

SEQ ID NO: 2378491 - RNA, 19 nt, Artificial Sequence
  Description of Artificial Sequence: Synthetic oligonucleotide
agaugccccguccaauggc

SEQ ID NO: 2378492 - RNA, 19 nt, Artificial Sequence
  Description of Artificial Sequence: Synthetic oligonucleotide
cugaaugugcaccugcaug

SEQ ID NO: 2378493 - RNA, 19 nt, Artificial Sequence
  Description of Artificial Sequence: Synthetic oligonucleotide
aagacacaucgcccucugc

SEQ ID NO: 2378494 - RNA, 19 nt, Artificial Sequence
  Description of Artificial Sequence: Synthetic oligonucleotide
uggccuguagcucuugcgc

SEQ ID NO: 2378495 - RNA, 19 nt, Artificial Sequence
  Description of Artificial Sequence: Synthetic oligonucleotide
ugugaaucuuccacggaaa

SEQ ID NO: 2378496 - RNA, 19 nt, Artificial Sequence
  Description of Artificial Sequence: Synthetic oligonucleotide
uucguucuuugcuugacuc

SEQ ID NO: 2378497 - RNA, 19 nt, Artificial Sequence
  Description of Artificial Sequence: Synthetic oligonucleotide
caguucuauagucacuggc

SEQ ID NO: 2378498 - RNA, 19 nt, Artificial Sequence
  Description of Artificial Sequence: Synthetic oligonucleotide
cuuuucggggugcacuucg

SEQ ID NO: 2378499 - RNA, 19 nt, Artificial Sequence
  Description of Artificial Sequence: Synthetic oligonucleotide
cacuuaucugcucuccucc

SEQ ID NO: 2378500 - RNA, 19 nt, Artificial Sequence
  Description of Artificial Sequence: Synthetic oligonucleotide
ugcuugacucggaaggccc

SEQ ID NO: 2378501 - RNA, 19 nt, Artificial Sequence
  Description of Artificial Sequence: Synthetic oligonucleotide
acacaucgcccucugcccc

SEQ ID NO: 2378502 - RNA, 19 nt, Artificial Sequence
  Description of Artificial Sequence: Synthetic oligonucleotide
cugcuuauccaucacguuc

SEQ ID NO: 2378503 - RNA, 19 nt, Artificial Sequence
  Description of Artificial Sequence: Synthetic oligonucleotide
uaauuugcugagcucccac

SEQ ID NO: 2378504 - RNA, 19 nt, Artificial Sequence
  Description of Artificial Sequence: Synthetic oligonucleotide
cucugaagacacaucgccc

SEQ ID NO: 2378505 - RNA, 19 nt, Artificial Sequence
  Description of Artificial Sequence: Synthetic oligonucleotide
uuaucugcucuccuccaac

SEQ ID NO: 2378506 - RNA, 19 nt, Artificial Sequence
  Description of Artificial Sequence: Synthetic oligonucleotide
guccugaauucuuaagcag

SEQ ID NO: 2378507 - RNA, 19 nt, Artificial Sequence
  Description of Artificial Sequence: Synthetic oligonucleotide
uauuugaguccugaauucu

SEQ ID NO: 2378508 - RNA, 19 nt, Artificial Sequence
  Description of Artificial Sequence: Synthetic oligonucleotide
ugagcucuggccuguagcu

SEQ ID NO: 2378509 - RNA, 19 nt, Artificial Sequence
  Description of Artificial Sequence: Synthetic oligonucleotide
acucggaaggccccuuggc

SEQ ID NO: 2378510 - RNA, 19 nt, Artificial Sequence
  Description of Artificial Sequence: Synthetic oligonucleotide
auggcucccgcucugaaga

SEQ ID NO: 2378511 - RNA, 19 nt, Artificial Sequence
  Description of Artificial Sequence: Synthetic oligonucleotide
uggagggugaacuggcuga

SEQ ID NO: 2378512 - RNA, 19 nt, Artificial Sequence
  Description of Artificial Sequence: Synthetic oligonucleotide
aacugugacgcuagccugg

SEQ ID NO: 2378513 - RNA, 19 nt, Artificial Sequence
  Description of Artificial Sequence: Synthetic oligonucleotide
cugcccaaugguaauuugc

SEQ ID NO: 2378514 - RNA, 19 nt, Artificial Sequence
  Description of Artificial Sequence: Synthetic oligonucleotide
uuaaaaucuuucgaaccau

SEQ ID NO: 2378515 - RNA, 19 nt, Artificial Sequence
  Description of Artificial Sequence: Synthetic oligonucleotide
ugcuuugggucagaguuag

SEQ ID NO: 2378516 - RNA, 19 nt, Artificial Sequence
  Description of Artificial Sequence: Synthetic oligonucleotide
caucuugaauguuucagga

SEQ ID NO: 2378517 - RNA, 19 nt, Artificial Sequence
  Description of Artificial Sequence: Synthetic oligonucleotide
cagcauuacauaaggaaca

SEQ ID NO: 2378518 - RNA, 19 nt, Artificial Sequence
  Description of Artificial Sequence: Synthetic oligonucleotide
gacacaucgcccucugccc

SEQ ID NO: 2378519 - RNA, 19 nt, Artificial Sequence
  Description of Artificial Sequence: Synthetic oligonucleotide
ugcggucuucuuuucgggg

SEQ ID NO: 2378520 - RNA, 19 nt, Artificial Sequence
  Description of Artificial Sequence: Synthetic oligonucleotide
uucuauagucacuggccca

SEQ ID NO: 2378521 - RNA, 19 nt, Artificial Sequence
  Description of Artificial Sequence: Synthetic oligonucleotide
uugaauguuucaggauccg

SEQ ID NO: 2378522 - RNA, 19 nt, Artificial Sequence
  Description of Artificial Sequence: Synthetic oligonucleotide
ucuuacuucugauuuucuu

SEQ ID NO: 2378523 - RNA, 19 nt, Artificial Sequence
  Description of Artificial Sequence: Synthetic oligonucleotide
cuuccacggaaauacccag

SEQ ID NO: 2378524 - RNA, 19 nt, Artificial Sequence
  Description of Artificial Sequence: Synthetic oligonucleotide
uggcuacuggggcaggccg

SEQ ID NO: 2378525 - RNA, 19 nt, Artificial Sequence
  Description of Artificial Sequence: Synthetic oligonucleotide
auccgguucugcccaaugg

SEQ ID NO: 2378526 - RNA, 19 nt, Artificial Sequence
  Description of Artificial Sequence: Synthetic oligonucleotide
ugucuuacuucugauuuuc

SEQ ID NO: 2378527 - RNA, 19 nt, Artificial Sequence
  Description of Artificial Sequence: Synthetic oligonucleotide
uccgguucugcccaauggu

SEQ ID NO: 2378528 - RNA, 19 nt, Artificial Sequence
  Description of Artificial Sequence: Synthetic oligonucleotide
ggggacuccaguucuauag

SEQ ID NO: 2378529 - RNA, 19 nt, Artificial Sequence
  Description of Artificial Sequence: Synthetic oligonucleotide
acagaugccccguccaaug

SEQ ID NO: 2378530 - RNA, 19 nt, Artificial Sequence
  Description of Artificial Sequence: Synthetic oligonucleotide
ucguacugcuuauccauca

SEQ ID NO: 2378531 - RNA, 19 nt, Artificial Sequence
  Description of Artificial Sequence: Synthetic oligonucleotide
agucacuggcccaucauuc

SEQ ID NO: 2378532 - RNA, 19 nt, Artificial Sequence
  Description of Artificial Sequence: Synthetic oligonucleotide
cugcauguaggcaccaaac

SEQ ID NO: 2378533 - RNA, 19 nt, Artificial Sequence
  Description of Artificial Sequence: Synthetic oligonucleotide
uauggcucccgcucugaag

SEQ ID NO: 2378534 - RNA, 19 nt, Artificial Sequence
  Description of Artificial Sequence: Synthetic oligonucleotide
ucugugaaucuuccacgga

SEQ ID NO: 2378535 - RNA, 19 nt, Artificial Sequence
  Description of Artificial Sequence: Synthetic oligonucleotide
ucugcaggcguagucaggu

SEQ ID NO: 2378536 - RNA, 19 nt, Artificial Sequence
  Description of Artificial Sequence: Synthetic oligonucleotide
ucagaguuagcagcuccag

SEQ ID NO: 2378537 - RNA, 19 nt, Artificial Sequence
  Description of Artificial Sequence: Synthetic oligonucleotide
cuuugggucagaguuagca

SEQ ID NO: 2378538 - RNA, 19 nt, Artificial Sequence
  Description of Artificial Sequence: Synthetic oligonucleotide
ucuauagucacuggcccau

SEQ ID NO: 2378539 - RNA, 19 nt, Artificial Sequence
  Description of Artificial Sequence: Synthetic oligonucleotide
acacgcagauuuaaaaucu

SEQ ID NO: 2378540 - RNA, 19 nt, Artificial Sequence
  Description of Artificial Sequence: Synthetic oligonucleotide
caucauucugaaugugcac

SEQ ID NO: 2378541 - RNA, 19 nt, Artificial Sequence
  Description of Artificial Sequence: Synthetic oligonucleotide
uuccacggaaauacccagc

SEQ ID NO: 2378542 - RNA, 19 nt, Artificial Sequence
  Description of Artificial Sequence: Synthetic oligonucleotide
ucggggugcacuucguucu

SEQ ID NO: 2378543 - RNA, 19 nt, Artificial Sequence
  Description of Artificial Sequence: Synthetic oligonucleotide
ugcaggcguagucagguuc

SEQ ID NO: 2378544 - RNA, 19 nt, Artificial Sequence
  Description of Artificial Sequence: Synthetic oligonucleotide
uaggcaccaaacuugccau

SEQ ID NO: 2378545 - RNA, 19 nt, Artificial Sequence
  Description of Artificial Sequence: Synthetic oligonucleotide
gaccacagcauuacauaag

SEQ ID NO: 2378546 - RNA, 19 nt, Artificial Sequence
  Description of Artificial Sequence: Synthetic oligonucleotide
cauauuugaguccugaauu

SEQ ID NO: 2378547 - RNA, 19 nt, Artificial Sequence
  Description of Artificial Sequence: Synthetic oligonucleotide
uucuuugcuugacucggaa

SEQ ID NO: 2378548 - RNA, 19 nt, Artificial Sequence
  Description of Artificial Sequence: Synthetic oligonucleotide
augugcuccaguuccuucu

SEQ ID NO: 2378549 - RNA, 19 nt, Artificial Sequence
  Description of Artificial Sequence: Synthetic oligonucleotide
gaagucaggcuuguucccc

SEQ ID NO: 2378550 - RNA, 19 nt, Artificial Sequence
  Description of Artificial Sequence: Synthetic oligonucleotide
acuucguucuuugcuugac

SEQ ID NO: 2378551 - RNA, 19 nt, Artificial Sequence
  Description of Artificial Sequence: Synthetic oligonucleotide
acguucuuggaccaguguu

SEQ ID NO: 2378552 - RNA, 19 nt, Artificial Sequence
  Description of Artificial Sequence: Synthetic oligonucleotide
agcuguuccaggaagcugu

SEQ ID NO: 2378553 - RNA, 19 nt, Artificial Sequence
  Description of Artificial Sequence: Synthetic oligonucleotide
gacucggaaggccccuugg

SEQ ID NO: 2378554 - RNA, 19 nt, Artificial Sequence
  Description of Artificial Sequence: Synthetic oligonucleotide
aucuugaauguuucaggau

SEQ ID NO: 2378555 - RNA, 19 nt, Artificial Sequence
  Description of Artificial Sequence: Synthetic oligonucleotide
ucugcccaaugguaauuug

SEQ ID NO: 2378556 - RNA, 19 nt, Artificial Sequence
  Description of Artificial Sequence: Synthetic oligonucleotide
caccucguacugcuuaucc

SEQ ID NO: 2378557 - RNA, 19 nt, Artificial Sequence
  Description of Artificial Sequence: Synthetic oligonucleotide
uccaacugugacgcuagcc

SEQ ID NO: 2378558 - RNA, 19 nt, Artificial Sequence
  Description of Artificial Sequence: Synthetic oligonucleotide
  modified_base (15)..(15): a, c, u, g, unknown or other
agaaugguccuuugnguuu

SEQ ID NO: 2378559 - RNA, 19 nt, Artificial Sequence
  Description of Artificial Sequence: Synthetic oligonucleotide
auuacauaaggaacagaau

SEQ ID NO: 2378560 - RNA, 19 nt, Artificial Sequence
  Description of Artificial Sequence: Synthetic oligonucleotide
cuguuguagaagcucucug

SEQ ID NO: 2378561 - RNA, 19 nt, Artificial Sequence
  Description of Artificial Sequence: Synthetic oligonucleotide
uucggggugcacuucguuc

SEQ ID NO: 2378562 - RNA, 19 nt, Artificial Sequence
  Description of Artificial Sequence: Synthetic oligonucleotide
aucuuucgaaccaugugcu

SEQ ID NO: 2378563 - RNA, 19 nt, Artificial Sequence
  Description of Artificial Sequence: Synthetic oligonucleotide
uguaggcaccaaacuugcc

SEQ ID NO: 2378564 - RNA, 19 nt, Artificial Sequence
  Description of Artificial Sequence: Synthetic oligonucleotide
ugaaucuuccacggaaaua

SEQ ID NO: 2378565 - RNA, 19 nt, Artificial Sequence
  Description of Artificial Sequence: Synthetic oligonucleotide
gcugcggucuucuuuucgg

SEQ ID NO: 2378566 - RNA, 19 nt, Artificial Sequence
  Description of Artificial Sequence: Synthetic oligonucleotide
gaugagcucuggccuguag

SEQ ID NO: 2378567 - RNA, 19 nt, Artificial Sequence
  Description of Artificial Sequence: Synthetic oligonucleotide
ucuggccuguagcucuugc

SEQ ID NO: 2378568 - RNA, 19 nt, Artificial Sequence
  Description of Artificial Sequence: Synthetic oligonucleotide
cagaguuagcagcuccagc

SEQ ID NO: 2378569 - RNA, 19 nt, Artificial Sequence
  Description of Artificial Sequence: Synthetic oligonucleotide
acuuaucugcucuccucca

SEQ ID NO: 2378570 - RNA, 19 nt, Artificial Sequence
  Description of Artificial Sequence: Synthetic oligonucleotide
acggaaauacccagcaaca

SEQ ID NO: 2378571 - RNA, 19 nt, Artificial Sequence
  Description of Artificial Sequence: Synthetic oligonucleotide
ggcguagucagguucccag

SEQ ID NO: 2378572 - RNA, 19 nt, Artificial Sequence
  Description of Artificial Sequence: Synthetic oligonucleotide
acgcuagccugggugacgc

SEQ ID NO: 2378573 - RNA, 19 nt, Artificial Sequence
  Description of Artificial Sequence: Synthetic oligonucleotide
uugcuugacucggaaggcc

SEQ ID NO: 2378574 - RNA, 19 nt, Artificial Sequence
  Description of Artificial Sequence: Synthetic oligonucleotide
uagucacuggcccaucauu

SEQ ID NO: 2378575 - RNA, 19 nt, Artificial Sequence
  Description of Artificial Sequence: Synthetic oligonucleotide
gacuccaguucuauaguca

SEQ ID NO: 2378576 - RNA, 19 nt, Artificial Sequence
  Description of Artificial Sequence: Synthetic oligonucleotide
ggugaacuggcugacacac

SEQ ID NO: 2378577 - RNA, 19 nt, Artificial Sequence
  Description of Artificial Sequence: Synthetic oligonucleotide
ugcaucuauggcucccgcu

SEQ ID NO: 2378578 - RNA, 19 nt, Artificial Sequence
  Description of Artificial Sequence: Synthetic oligonucleotide
uucuuuucggggugcacuu

SEQ ID NO: 2378579 - RNA, 19 nt, Artificial Sequence
  Description of Artificial Sequence: Synthetic oligonucleotide
ggcgguuguggcuacuggg

SEQ ID NO: 2378580 - RNA, 19 nt, Artificial Sequence
  Description of Artificial Sequence: Synthetic oligonucleotide
uuccccuugaggacacacu

SEQ ID NO: 2378581 - RNA, 19 nt, Artificial Sequence
  Description of Artificial Sequence: Synthetic oligonucleotide
ugggugacgcgcugcacca

SEQ ID NO: 2378582 - RNA, 19 nt, Artificial Sequence
  Description of Artificial Sequence: Synthetic oligonucleotide
cccacucucauccucaaac

SEQ ID NO: 2378583 - RNA, 19 nt, Artificial Sequence
  Description of Artificial Sequence: Synthetic oligonucleotide
cugcggucuucuuuucggg

SEQ ID NO: 2378584 - RNA, 19 nt, Artificial Sequence
  Description of Artificial Sequence: Synthetic oligonucleotide
accucguacugcuuaucca

SEQ ID NO: 2378585 - RNA, 19 nt, Artificial Sequence
  Description of Artificial Sequence: Synthetic oligonucleotide
ccgcucugaagacacaucg

SEQ ID NO: 2378586 - RNA, 19 nt, Artificial Sequence
  Description of Artificial Sequence: Synthetic oligonucleotide
guccaauggcacuuaucug

SEQ ID NO: 2378587 - RNA, 19 nt, Artificial Sequence
  Description of Artificial Sequence: Synthetic oligonucleotide
aaacacacgcagauuuaaa

SEQ ID NO: 2378588 - RNA, 19 nt, Artificial Sequence
  Description of Artificial Sequence: Synthetic oligonucleotide
ucuuucgaaccaugugcuc

SEQ ID NO: 2378589 - RNA, 19 nt, Artificial Sequence
  Description of Artificial Sequence: Synthetic oligonucleotide
cagcaacacacagaugccc

SEQ ID NO: 2378590 - RNA, 19 nt, Artificial Sequence
  Description of Artificial Sequence: Synthetic oligonucleotide
ggucagaguuagcagcucc

SEQ ID NO: 2378591 - RNA, 19 nt, Artificial Sequence
  Description of Artificial Sequence: Synthetic oligonucleotide
aaauacccagcaacacaca

SEQ ID NO: 2378592 - RNA, 19 nt, Artificial Sequence
  Description of Artificial Sequence: Synthetic oligonucleotide
cagaugccccguccaaugg

SEQ ID NO: 2378593 - RNA, 19 nt, Artificial Sequence
  Description of Artificial Sequence: Synthetic oligonucleotide
uuuucggggugcacuucgu

SEQ ID NO: 2378594 - RNA, 19 nt, Artificial Sequence
  Description of Artificial Sequence: Synthetic oligonucleotide
auagucacuggcccaucau

SEQ ID NO: 2378595 - RNA, 19 nt, Artificial Sequence
  Description of Artificial Sequence: Synthetic oligonucleotide
uacuggggcaggccgugug

SEQ ID NO: 2378596 - RNA, 19 nt, Artificial Sequence
  Description of Artificial Sequence: Synthetic oligonucleotide
cccaaugguaauuugcuga

SEQ ID NO: 2378597 - RNA, 19 nt, Artificial Sequence
  Description of Artificial Sequence: Synthetic oligonucleotide
caaugguaauuugcugagc

SEQ ID NO: 2378598 - RNA, 19 nt, Artificial Sequence
  Description of Artificial Sequence: Synthetic oligonucleotide
cagguggaagucaggcuug

SEQ ID NO: 2378599 - RNA, 19 nt, Artificial Sequence
  Description of Artificial Sequence: Synthetic oligonucleotide
acugugacgcuagccuggg

SEQ ID NO: 2378600 - RNA, 19 nt, Artificial Sequence
  Description of Artificial Sequence: Synthetic oligonucleotide
aggcaccaaacuugccauc

SEQ ID NO: 2378601 - RNA, 19 nt, Artificial Sequence
  Description of Artificial Sequence: Synthetic oligonucleotide
aucgccagguggaagucag

SEQ ID NO: 2378602 - RNA, 19 nt, Artificial Sequence
  Description of Artificial Sequence: Synthetic oligonucleotide
aucuauggcucccgcucug

SEQ ID NO: 2378603 - RNA, 19 nt, Artificial Sequence
  Description of Artificial Sequence: Synthetic oligonucleotide
ggugacgcgcugcaccacg

SEQ ID NO: 2378604 - RNA, 19 nt, Artificial Sequence
  Description of Artificial Sequence: Synthetic oligonucleotide
cacaucgcccucugccccg

SEQ ID NO: 2378605 - RNA, 19 nt, Artificial Sequence
  Description of Artificial Sequence: Synthetic oligonucleotide
uuggaccaguguuucccac

SEQ ID NO: 2378606 - RNA, 19 nt, Artificial Sequence
  Description of Artificial Sequence: Synthetic oligonucleotide
gguaauuugcugagcuccc

SEQ ID NO: 2378607 - RNA, 19 nt, Artificial Sequence
  Description of Artificial Sequence: Synthetic oligonucleotide
uggcacuuaucugcucucc

SEQ ID NO: 2378608 - RNA, 19 nt, Artificial Sequence
  Description of Artificial Sequence: Synthetic oligonucleotide
acggccuucagggcggcgg

SEQ ID NO: 2378609 - RNA, 19 nt, Artificial Sequence
  Description of Artificial Sequence: Synthetic oligonucleotide
gacgcuagccugggugacg

SEQ ID NO: 2378610 - RNA, 19 nt, Artificial Sequence
  Description of Artificial Sequence: Synthetic oligonucleotide
ucgcccucugccccgcugc

SEQ ID NO: 2378611 - RNA, 19 nt, Artificial Sequence
  Description of Artificial Sequence: Synthetic oligonucleotide
ggaacagaaugguccuuug

SEQ ID NO: 2378612 - RNA, 19 nt, Artificial Sequence
  Description of Artificial Sequence: Synthetic oligonucleotide
gaugccccguccaauggca

SEQ ID NO: 2378613 - RNA, 19 nt, Artificial Sequence
  Description of Artificial Sequence: Synthetic oligonucleotide
gugacgcuagccuggguga

SEQ ID NO: 2378614 - RNA, 19 nt, Artificial Sequence
  Description of Artificial Sequence: Synthetic oligonucleotide
ccaucauucugaaugugca

SEQ ID NO: 2378615 - RNA, 19 nt, Artificial Sequence
  Description of Artificial Sequence: Synthetic oligonucleotide
uguuucccacucucauccu

SEQ ID NO: 2378616 - RNA, 19 nt, Artificial Sequence
  Description of Artificial Sequence: Synthetic oligonucleotide
cagguucccagugucuuac

SEQ ID NO: 2378617 - RNA, 19 nt, Artificial Sequence
  Description of Artificial Sequence: Synthetic oligonucleotide
aggaacagaaugguccuuu

SEQ ID NO: 2378618 - RNA, 19 nt, Artificial Sequence
  Description of Artificial Sequence: Synthetic oligonucleotide
auuugaguccugaauucuu

SEQ ID NO: 2378619 - RNA, 19 nt, Artificial Sequence
  Description of Artificial Sequence: Synthetic oligonucleotide
agcucccacuucugcaucu

SEQ ID NO: 2378620 - RNA, 19 nt, Artificial Sequence
  Description of Artificial Sequence: Synthetic oligonucleotide
ucgccagguggaagucagg

SEQ ID NO: 2378621 - RNA, 19 nt, Artificial Sequence
  Description of Artificial Sequence: Synthetic oligonucleotide
ucuauggcucccgcucuga

SEQ ID NO: 2378622 - RNA, 19 nt, Artificial Sequence
  Description of Artificial Sequence: Synthetic oligonucleotide
gguuuagcaucuugaaugu

SEQ ID NO: 2378623 - RNA, 19 nt, Artificial Sequence
  Description of Artificial Sequence: Synthetic oligonucleotide
ugacgcgcugcaccacggc

SEQ ID NO: 2378624 - RNA, 19 nt, Artificial Sequence
  Description of Artificial Sequence: Synthetic oligonucleotide
uuucggggugcacuucguu

SEQ ID NO: 2378625 - RNA, 19 nt, Artificial Sequence
  Description of Artificial Sequence: Synthetic oligonucleotide
ucuucuuuucggggugcac

SEQ ID NO: 2378626 - RNA, 19 nt, Artificial Sequence
  Description of Artificial Sequence: Synthetic oligonucleotide
agcaccucguacugcuuau

SEQ ID NO: 2378627 - RNA, 19 nt, Artificial Sequence
  Description of Artificial Sequence: Synthetic oligonucleotide
cguucuuugcuugacucgg

SEQ ID NO: 2378628 - RNA, 19 nt, Artificial Sequence
  Description of Artificial Sequence: Synthetic oligonucleotide
ccagcaacacacagaugcc

SEQ ID NO: 2378629 - RNA, 19 nt, Artificial Sequence
  Description of Artificial Sequence: Synthetic oligonucleotide
  modified_base (14)..(14): a, c, u, g, unknown or other
gaaugguccuuugnguuuu

SEQ ID NO: 2378630 - RNA, 19 nt, Artificial Sequence
  Description of Artificial Sequence: Synthetic oligonucleotide
cucugugggcaucgccagg

SEQ ID NO: 2378631 - RNA, 19 nt, Artificial Sequence
  Description of Artificial Sequence: Synthetic oligonucleotide
guaauuugcugagcuccca

SEQ ID NO: 2378632 - RNA, 19 nt, Artificial Sequence
  Description of Artificial Sequence: Synthetic oligonucleotide
caggauccgguucugccca

SEQ ID NO: 2378633 - RNA, 19 nt, Artificial Sequence
  Description of Artificial Sequence: Synthetic oligonucleotide
caggccguguggucagacc

SEQ ID NO: 2378634 - RNA, 19 nt, Artificial Sequence
  Description of Artificial Sequence: Synthetic oligonucleotide
acuggcccaucauucugaa

SEQ ID NO: 2378635 - RNA, 19 nt, Artificial Sequence
  Description of Artificial Sequence: Synthetic oligonucleotide
ggugcacuucguucuuugc

SEQ ID NO: 2378636 - RNA, 19 nt, Artificial Sequence
  Description of Artificial Sequence: Synthetic oligonucleotide
cugcucugugggcaucgcc

SEQ ID NO: 2378637 - RNA, 19 nt, Artificial Sequence
  Description of Artificial Sequence: Synthetic oligonucleotide
caucucugaugagcucugg

SEQ ID NO: 2378638 - RNA, 19 nt, Artificial Sequence
  Description of Artificial Sequence: Synthetic oligonucleotide
cugcaucuauggcucccgc

SEQ ID NO: 2378639 - RNA, 19 nt, Artificial Sequence
  Description of Artificial Sequence: Synthetic oligonucleotide
ugccccguccaauggcacu

SEQ ID NO: 2378640 - RNA, 19 nt, Artificial Sequence
  Description of Artificial Sequence: Synthetic oligonucleotide
ccaguucuauagucacugg

SEQ ID NO: 2378641 - RNA, 19 nt, Artificial Sequence
  Description of Artificial Sequence: Synthetic oligonucleotide
uucgaaccaugugcuccag

SEQ ID NO: 2378642 - RNA, 19 nt, Artificial Sequence
  Description of Artificial Sequence: Synthetic oligonucleotide
gcacuucguucuuugcuug

SEQ ID NO: 2378643 - RNA, 19 nt, Artificial Sequence
  Description of Artificial Sequence: Synthetic oligonucleotide
gcacuuaucugcucuccuc

SEQ ID NO: 2378644 - RNA, 19 nt, Artificial Sequence
  Description of Artificial Sequence: Synthetic oligonucleotide
gcccaaugguaauuugcug

SEQ ID NO: 2378645 - RNA, 19 nt, Artificial Sequence
  Description of Artificial Sequence: Synthetic oligonucleotide
gggugcacuucguucuuug

SEQ ID NO: 2378646 - RNA, 19 nt, Artificial Sequence
  Description of Artificial Sequence: Synthetic oligonucleotide
acgcagauuuaaaaucuuu

SEQ ID NO: 2378647 - RNA, 19 nt, Artificial Sequence
  Description of Artificial Sequence: Synthetic oligonucleotide
cucugccugcucugugggc

SEQ ID NO: 2378648 - RNA, 19 nt, Artificial Sequence
  Description of Artificial Sequence: Synthetic oligonucleotide
ucuuuucggggugcacuuc

SEQ ID NO: 2378649 - RNA, 19 nt, Artificial Sequence
  Description of Artificial Sequence: Synthetic oligonucleotide
acaucgcccucugccccgc

SEQ ID NO: 2378650 - RNA, 19 nt, Artificial Sequence
  Description of Artificial Sequence: Synthetic oligonucleotide
aggccccuuggcucugguc

SEQ ID NO: 2378651 - RNA, 19 nt, Artificial Sequence
  Description of Artificial Sequence: Synthetic oligonucleotide
gcaggcguagucagguucc

SEQ ID NO: 2378652 - RNA, 19 nt, Artificial Sequence
  Description of Artificial Sequence: Synthetic oligonucleotide
uggcgcugcggucuucuuu

SEQ ID NO: 2378653 - RNA, 19 nt, Artificial Sequence
  Description of Artificial Sequence: Synthetic oligonucleotide
ucccacucucauccucaaa

SEQ ID NO: 2378654 - RNA, 19 nt, Artificial Sequence
  Description of Artificial Sequence: Synthetic oligonucleotide
gacacacuggagggugaac

SEQ ID NO: 2378655 - RNA, 19 nt, Artificial Sequence
  Description of Artificial Sequence: Synthetic oligonucleotide
ugacgcuagccugggugac

SEQ ID NO: 2378656 - RNA, 19 nt, Artificial Sequence
  Description of Artificial Sequence: Synthetic oligonucleotide
cacuucguucuuugcuuga

SEQ ID NO: 2378657 - RNA, 19 nt, Artificial Sequence
  Description of Artificial Sequence: Synthetic oligonucleotide
ccacuucugcaucuauggc

SEQ ID NO: 2378658 - RNA, 19 nt, Artificial Sequence
  Description of Artificial Sequence: Synthetic oligonucleotide
gcuagccugggugacgcgc

SEQ ID NO: 2378659 - RNA, 19 nt, Artificial Sequence
  Description of Artificial Sequence: Synthetic oligonucleotide
gaaugugcaccugcaugua

SEQ ID NO: 2378660 - RNA, 19 nt, Artificial Sequence
  Description of Artificial Sequence: Synthetic oligonucleotide
cuccaacugugacgcuagc

SEQ ID NO: 2378661 - RNA, 19 nt, Artificial Sequence
  Description of Artificial Sequence: Synthetic oligonucleotide
gaaggccccuuggcucugg

SEQ ID NO: 2378662 - RNA, 19 nt, Artificial Sequence
  Description of Artificial Sequence: Synthetic oligonucleotide
agguucccagugucuuacu

SEQ ID NO: 2378663 - RNA, 19 nt, Artificial Sequence
  Description of Artificial Sequence: Synthetic oligonucleotide
cguccaauggcacuuaucu

SEQ ID NO: 2378664 - RNA, 19 nt, Artificial Sequence
  Description of Artificial Sequence: Synthetic oligonucleotide
augccccguccaauggcac

SEQ ID NO: 2378665 - RNA, 19 nt, Artificial Sequence
  Description of Artificial Sequence: Synthetic oligonucleotide
uggcucccgcucugaagac

SEQ ID NO: 2378666 - RNA, 19 nt, Artificial Sequence
  Description of Artificial Sequence: Synthetic oligonucleotide
cuucguucuuugcuugacu

SEQ ID NO: 2378667 - RNA, 19 nt, Artificial Sequence
  Description of Artificial Sequence: Synthetic oligonucleotide
aggggacuccaguucuaua

SEQ ID NO: 2378668 - RNA, 19 nt, Artificial Sequence
  Description of Artificial Sequence: Synthetic oligonucleotide
ggucuucuuuucggggugc

SEQ ID NO: 2378669 - RNA, 19 nt, Artificial Sequence
  Description of Artificial Sequence: Synthetic oligonucleotide
caggcguagucagguuccc

SEQ ID NO: 2378670 - RNA, 19 nt, Artificial Sequence
  Description of Artificial Sequence: Synthetic oligonucleotide
ugggcaucgccagguggaa

SEQ ID NO: 2378671 - RNA, 19 nt, Artificial Sequence
  Description of Artificial Sequence: Synthetic oligonucleotide
uggggcaggccgugugguc

SEQ ID NO: 2378672 - RNA, 19 nt, Artificial Sequence
  Description of Artificial Sequence: Synthetic oligonucleotide
cugugggcaucgccaggug

SEQ ID NO: 2378673 - RNA, 19 nt, Artificial Sequence
  Description of Artificial Sequence: Synthetic oligonucleotide
agggcggcgguuguggcua

SEQ ID NO: 2378674 - RNA, 19 nt, Artificial Sequence
  Description of Artificial Sequence: Synthetic oligonucleotide
gugucuuacuucugauuuu

SEQ ID NO: 2378675 - RNA, 19 nt, Artificial Sequence
  Description of Artificial Sequence: Synthetic oligonucleotide
cugacacacagcaccucgu

SEQ ID NO: 2378676 - RNA, 19 nt, Artificial Sequence
  Description of Artificial Sequence: Synthetic oligonucleotide
ggagggugaacuggcugac

SEQ ID NO: 2378677 - RNA, 19 nt, Artificial Sequence
  Description of Artificial Sequence: Synthetic oligonucleotide
cuucagggcggcgguugug

SEQ ID NO: 2378678 - RNA, 19 nt, Artificial Sequence
  Description of Artificial Sequence: Synthetic oligonucleotide
gcaccugcauguaggcacc

SEQ ID NO: 2378679 - RNA, 19 nt, Artificial Sequence
  Description of Artificial Sequence: Synthetic oligonucleotide
cuauggcucccgcucugaa

SEQ ID NO: 2378680 - RNA, 19 nt, Artificial Sequence
  Description of Artificial Sequence: Synthetic oligonucleotide
gugaacuggcugacacaca

SEQ ID NO: 2378681 - RNA, 19 nt, Artificial Sequence
  Description of Artificial Sequence: Synthetic oligonucleotide
cagugucuuacuucugauu

SEQ ID NO: 2378682 - RNA, 19 nt, Artificial Sequence
  Description of Artificial Sequence: Synthetic oligonucleotide
cacgcagauuuaaaaucuu

SEQ ID NO: 2378683 - RNA, 19 nt, Artificial Sequence
  Description of Artificial Sequence: Synthetic oligonucleotide
aggcguagucagguuccca

SEQ ID NO: 2378684 - RNA, 19 nt, Artificial Sequence
  Description of Artificial Sequence: Synthetic oligonucleotide
gcuacuggggcaggccgug

SEQ ID NO: 2378685 - RNA, 19 nt, Artificial Sequence
  Description of Artificial Sequence: Synthetic oligonucleotide
gggcaggccguguggucag

SEQ ID NO: 2378686 - RNA, 19 nt, Artificial Sequence
  Description of Artificial Sequence: Synthetic oligonucleotide
uguuccccuugaggacaca

SEQ ID NO: 2378687 - RNA, 19 nt, Artificial Sequence
  Description of Artificial Sequence: Synthetic oligonucleotide
cggaaauacccagcaacac

SEQ ID NO: 2378688 - RNA, 19 nt, Artificial Sequence
  Description of Artificial Sequence: Synthetic oligonucleotide
caucgccagguggaaguca

SEQ ID NO: 2378689 - RNA, 19 nt, Artificial Sequence
  Description of Artificial Sequence: Synthetic oligonucleotide
gguucugcccaaugguaau

SEQ ID NO: 2378690 - RNA, 19 nt, Artificial Sequence
  Description of Artificial Sequence: Synthetic oligonucleotide
cgguuguggcuacuggggc

SEQ ID NO: 2378691 - RNA, 19 nt, Artificial Sequence
  Description of Artificial Sequence: Synthetic oligonucleotide
ggcacuuaucugcucuccu

SEQ ID NO: 2378692 - RNA, 19 nt, Artificial Sequence
  Description of Artificial Sequence: Synthetic oligonucleotide
gcggucuucuuuucggggu

SEQ ID NO: 2378693 - RNA, 19 nt, Artificial Sequence
  Description of Artificial Sequence: Synthetic oligonucleotide
gucagguucccagugucuu

SEQ ID NO: 2378694 - RNA, 19 nt, Artificial Sequence
  Description of Artificial Sequence: Synthetic oligonucleotide
gcuguuguagaagcucucu

SEQ ID NO: 2378695 - RNA, 19 nt, Artificial Sequence
  Description of Artificial Sequence: Synthetic oligonucleotide
gucuuacuucugauuuucu

SEQ ID NO: 2378696 - RNA, 19 nt, Artificial Sequence
  Description of Artificial Sequence: Synthetic oligonucleotide
aggauccgguucugcccaa

SEQ ID NO: 2378697 - RNA, 19 nt, Artificial Sequence
  Description of Artificial Sequence: Synthetic oligonucleotide
ccguccaauggcacuuauc

SEQ ID NO: 2378698 - RNA, 19 nt, Artificial Sequence
  Description of Artificial Sequence: Synthetic oligonucleotide
ugccccgcugcuggcgcug

SEQ ID NO: 2378699 - RNA, 19 nt, Artificial Sequence
  Description of Artificial Sequence: Synthetic oligonucleotide
ccaauggcacuuaucugcu

SEQ ID NO: 2378700 - RNA, 19 nt, Artificial Sequence
  Description of Artificial Sequence: Synthetic oligonucleotide
accugcauguaggcaccaa

SEQ ID NO: 2378701 - RNA, 19 nt, Artificial Sequence
  Description of Artificial Sequence: Synthetic oligonucleotide
cacguucuuggaccagugu

SEQ ID NO: 2378702 - RNA, 19 nt, Artificial Sequence
  Description of Artificial Sequence: Synthetic oligonucleotide
ggcgcugcggucuucuuuu

SEQ ID NO: 2378703 - RNA, 19 nt, Artificial Sequence
  Description of Artificial Sequence: Synthetic oligonucleotide
gcccaucauucugaaugug

SEQ ID NO: 2378704 - RNA, 19 nt, Artificial Sequence
  Description of Artificial Sequence: Synthetic oligonucleotide
cgcugcggucuucuuuucg

SEQ ID NO: 2378705 - RNA, 19 nt, Artificial Sequence
  Description of Artificial Sequence: Synthetic oligonucleotide
acccagcaacacacagaug

SEQ ID NO: 2378706 - RNA, 19 nt, Artificial Sequence
  Description of Artificial Sequence: Synthetic oligonucleotide
gguucccagugucuuacuu

SEQ ID NO: 2378707 - RNA, 19 nt, Artificial Sequence
  Description of Artificial Sequence: Synthetic oligonucleotide
cucuggccuguagcucuug

SEQ ID NO: 2378708 - RNA, 19 nt, Artificial Sequence
  Description of Artificial Sequence: Synthetic oligonucleotide
gcugcuggcgcugcggucu

SEQ ID NO: 2378709 - RNA, 19 nt, Artificial Sequence
  Description of Artificial Sequence: Synthetic oligonucleotide
gggcaucgccagguggaag

SEQ ID NO: 2378710 - RNA, 19 nt, Artificial Sequence
  Description of Artificial Sequence: Synthetic oligonucleotide
ccgguucugcccaauggua

SEQ ID NO: 2378711 - RNA, 19 nt, Artificial Sequence
  Description of Artificial Sequence: Synthetic oligonucleotide
cucccgcucugaagacaca

SEQ ID NO: 2378712 - RNA, 19 nt, Artificial Sequence
  Description of Artificial Sequence: Synthetic oligonucleotide
cgguucugcccaaugguaa

SEQ ID NO: 2378713 - RNA, 19 nt, Artificial Sequence
  Description of Artificial Sequence: Synthetic oligonucleotide
cgaaccaugugcuccaguu

SEQ ID NO: 2378714 - RNA, 19 nt, Artificial Sequence
  Description of Artificial Sequence: Synthetic oligonucleotide
cacggccuucagggcggcg

SEQ ID NO: 2378715 - RNA, 19 nt, Artificial Sequence
  Description of Artificial Sequence: Synthetic oligonucleotide
ggcucccgcucugaagaca

SEQ ID NO: 2378716 - RNA, 19 nt, Artificial Sequence
  Description of Artificial Sequence: Synthetic oligonucleotide
gcaucgccagguggaaguc

SEQ ID NO: 2378717 - RNA, 19 nt, Artificial Sequence
  Description of Artificial Sequence: Synthetic oligonucleotide
gcaggccguguggucagac

SEQ ID NO: 2378718 - RNA, 19 nt, Artificial Sequence
  Description of Artificial Sequence: Synthetic oligonucleotide
cguucuuggaccaguguuu

SEQ ID NO: 2378719 - RNA, 19 nt, Artificial Sequence
  Description of Artificial Sequence: Synthetic oligonucleotide
cagggcggcgguuguggcu

SEQ ID NO: 2378720 - RNA, 19 nt, Artificial Sequence
  Description of Artificial Sequence: Synthetic oligonucleotide
caccugcauguaggcacca

SEQ ID NO: 2378721 - RNA, 19 nt, Artificial Sequence
  Description of Artificial Sequence: Synthetic oligonucleotide
ccacggaaauacccagcaa

SEQ ID NO: 2378722 - RNA, 19 nt, Artificial Sequence
  Description of Artificial Sequence: Synthetic oligonucleotide
caggggacuccaguucuau

SEQ ID NO: 2378723 - RNA, 19 nt, Artificial Sequence
  Description of Artificial Sequence: Synthetic oligonucleotide
cuggcccaucauucugaau

SEQ ID NO: 2378724 - RNA, 19 nt, Artificial Sequence
  Description of Artificial Sequence: Synthetic oligonucleotide
gcuuauccaucacguucuu

SEQ ID NO: 2378725 - RNA, 19 nt, Artificial Sequence
  Description of Artificial Sequence: Synthetic oligonucleotide
ggcuacuggggcaggccgu

SEQ ID NO: 2378726 - RNA, 19 nt, Artificial Sequence
  Description of Artificial Sequence: Synthetic oligonucleotide
cgcuagccugggugacgcg

SEQ ID NO: 2378727 - RNA, 19 nt, Artificial Sequence
  Description of Artificial Sequence: Synthetic oligonucleotide
cugcaggcguagucagguu

SEQ ID NO: 2378728 - RNA, 19 nt, Artificial Sequence
  Description of Artificial Sequence: Synthetic oligonucleotide
gccccguccaauggcacuu

SEQ ID NO: 2378729 - RNA, 19 nt, Artificial Sequence
  Description of Artificial Sequence: Synthetic oligonucleotide
ccuucagggcggcgguugu

SEQ ID NO: 2378730 - RNA, 19 nt, Artificial Sequence
  Description of Artificial Sequence: Synthetic oligonucleotide
gguggaagucaggcuuguu

SEQ ID NO: 2378731 - RNA, 19 nt, Artificial Sequence
  Description of Artificial Sequence: Synthetic oligonucleotide
ggcaggccguguggucaga

SEQ ID NO: 2378732 - RNA, 19 nt, Artificial Sequence
  Description of Artificial Sequence: Synthetic oligonucleotide
ggccguguggucagaccuu

SEQ ID NO: 2378733 - RNA, 19 nt, Artificial Sequence
  Description of Artificial Sequence: Synthetic oligonucleotide
ggggugcacuucguucuuu

SEQ ID NO: 2378734 - RNA, 19 nt, Artificial Sequence
  Description of Artificial Sequence: Synthetic oligonucleotide
caucgcccucugccccgcu

SEQ ID NO: 2378735 - RNA, 19 nt, Artificial Sequence
  Description of Artificial Sequence: Synthetic oligonucleotide
cccguccaauggcacuuau

SEQ ID NO: 2378736 - RNA, 19 nt, Artificial Sequence
  Description of Artificial Sequence: Synthetic oligonucleotide
gcgcugcaccacggccuuc

SEQ ID NO: 2378737 - RNA, 19 nt, Artificial Sequence
  Description of Artificial Sequence: Synthetic oligonucleotide
ggcggcgguuguggcuacu

SEQ ID NO: 2378738 - RNA, 19 nt, Artificial Sequence
  Description of Artificial Sequence: Synthetic oligonucleotide
ccccguccaauggcacuua

SEQ ID NO: 2378739 - RNA, 19 nt, Artificial Sequence
  Description of Artificial Sequence: Synthetic oligonucleotide
ggccuucagggcggcgguu

SEQ ID NO: 2378740 - RNA, 19 nt, Artificial Sequence
  Description of Artificial Sequence: Synthetic oligonucleotide
cggggugcacuucguucuu

SEQ ID NO: 2378741 - RNA, 19 nt, Artificial Sequence
  Description of Artificial Sequence: Synthetic oligonucleotide
agaaauagcaaccaugagc

SEQ ID NO: 2378742 - RNA, 19 nt, Artificial Sequence
  Description of Artificial Sequence: Synthetic oligonucleotide
uagauugcaaaacuggucg

SEQ ID NO: 2378743 - RNA, 19 nt, Artificial Sequence
  Description of Artificial Sequence: Synthetic oligonucleotide
aaugauucaaaucuucuca

SEQ ID NO: 2378744 - RNA, 19 nt, Artificial Sequence
  Description of Artificial Sequence: Synthetic oligonucleotide
auaaaggacgcuuauguac

SEQ ID NO: 2378745 - RNA, 19 nt, Artificial Sequence
  Description of Artificial Sequence: Synthetic oligonucleotide
gauuaaaugauucaaaucu

SEQ ID NO: 2378746 - RNA, 19 nt, Artificial Sequence
  Description of Artificial Sequence: Synthetic oligonucleotide
gaaauagcaaccaugagcc

SEQ ID NO: 2378747 - RNA, 19 nt, Artificial Sequence
  Description of Artificial Sequence: Synthetic oligonucleotide
uuugguuaaaguaagcaga

SEQ ID NO: 2378748 - RNA, 19 nt, Artificial Sequence
  Description of Artificial Sequence: Synthetic oligonucleotide
caaagguccacuauuaugc

SEQ ID NO: 2378749 - RNA, 19 nt, Artificial Sequence
  Description of Artificial Sequence: Synthetic oligonucleotide
aaacauuuccuguauuguc

SEQ ID NO: 2378750 - RNA, 19 nt, Artificial Sequence
  Description of Artificial Sequence: Synthetic oligonucleotide
uuuugguuaaaguaagcag

SEQ ID NO: 2378751 - RNA, 19 nt, Artificial Sequence
  Description of Artificial Sequence: Synthetic oligonucleotide
aaaaccuccucagauggcc

SEQ ID NO: 2378752 - RNA, 19 nt, Artificial Sequence
  Description of Artificial Sequence: Synthetic oligonucleotide
gguuaaaguaagcagaagg

SEQ ID NO: 2378753 - RNA, 19 nt, Artificial Sequence
  Description of Artificial Sequence: Synthetic oligonucleotide
uuaaaguaagcagaagggg

SEQ ID NO: 2378754 - RNA, 19 nt, Artificial Sequence
  Description of Artificial Sequence: Synthetic oligonucleotide
auguacuggacccacacac

SEQ ID NO: 2378755 - RNA, 19 nt, Artificial Sequence
  Description of Artificial Sequence: Synthetic oligonucleotide
acggauacauguuucagac

SEQ ID NO: 2378756 - RNA, 19 nt, Artificial Sequence
  Description of Artificial Sequence: Synthetic oligonucleotide
auugcuuucccugugggcc

SEQ ID NO: 2378757 - RNA, 19 nt, Artificial Sequence
  Description of Artificial Sequence: Synthetic oligonucleotide
cuaaaaccuccucagaugg

SEQ ID NO: 2378758 - RNA, 19 nt, Artificial Sequence
  Description of Artificial Sequence: Synthetic oligonucleotide
aacauuuccuguauugucg

SEQ ID NO: 2378759 - RNA, 19 nt, Artificial Sequence
  Description of Artificial Sequence: Synthetic oligonucleotide
aaagguccacuauuaugcc

SEQ ID NO: 2378760 - RNA, 19 nt, Artificial Sequence
  Description of Artificial Sequence: Synthetic oligonucleotide
guaaaacgcagcuugauac

SEQ ID NO: 2378761 - RNA, 19 nt, Artificial Sequence
  Description of Artificial Sequence: Synthetic oligonucleotide
auaauggagauuuucuuca

SEQ ID NO: 2378762 - RNA, 19 nt, Artificial Sequence
  Description of Artificial Sequence: Synthetic oligonucleotide
auuaucccaucguaaaacg

SEQ ID NO: 2378763 - RNA, 19 nt, Artificial Sequence
  Description of Artificial Sequence: Synthetic oligonucleotide
uuaaaugauucaaaucuuc

SEQ ID NO: 2378764 - RNA, 19 nt, Artificial Sequence
  Description of Artificial Sequence: Synthetic oligonucleotide
ucugcuucagaaccugucg

SEQ ID NO: 2378765 - RNA, 19 nt, Artificial Sequence
  Description of Artificial Sequence: Synthetic oligonucleotide
aaacuggucgaacguauuc

SEQ ID NO: 2378766 - RNA, 19 nt, Artificial Sequence
  Description of Artificial Sequence: Synthetic oligonucleotide
acgcuuauguacuggaccc

SEQ ID NO: 2378767 - RNA, 19 nt, Artificial Sequence
  Description of Artificial Sequence: Synthetic oligonucleotide
ggauacauguuucagacag

SEQ ID NO: 2378768 - RNA, 19 nt, Artificial Sequence
  Description of Artificial Sequence: Synthetic oligonucleotide
ugcagaaauagcaaccaug

SEQ ID NO: 2378769 - RNA, 19 nt, Artificial Sequence
  Description of Artificial Sequence: Synthetic oligonucleotide
aaauguguucaucauaauu

SEQ ID NO: 2378770 - RNA, 19 nt, Artificial Sequence
  Description of Artificial Sequence: Synthetic oligonucleotide
gauaauggagauuuucuuc

SEQ ID NO: 2378771 - RNA, 19 nt, Artificial Sequence
  Description of Artificial Sequence: Synthetic oligonucleotide
aacuggucgaacguauucc

SEQ ID NO: 2378772 - RNA, 19 nt, Artificial Sequence
  Description of Artificial Sequence: Synthetic oligonucleotide
accgagaacagauuaaaug

SEQ ID NO: 2378773 - RNA, 19 nt, Artificial Sequence
  Description of Artificial Sequence: Synthetic oligonucleotide
uguauucaggauaaaggac

SEQ ID NO: 2378774 - RNA, 19 nt, Artificial Sequence
  Description of Artificial Sequence: Synthetic oligonucleotide
uccucagauggccagaugc

SEQ ID NO: 2378775 - RNA, 19 nt, Artificial Sequence
  Description of Artificial Sequence: Synthetic oligonucleotide
uugacaucugcagaaauag

SEQ ID NO: 2378776 - RNA, 19 nt, Artificial Sequence
  Description of Artificial Sequence: Synthetic oligonucleotide
uaucccaucguaaaacgca

SEQ ID NO: 2378777 - RNA, 19 nt, Artificial Sequence
  Description of Artificial Sequence: Synthetic oligonucleotide
ucuucuaucccauuuuggu

SEQ ID NO: 2378778 - RNA, 19 nt, Artificial Sequence
  Description of Artificial Sequence: Synthetic oligonucleotide
agaacagauuaaaugauuc

SEQ ID NO: 2378779 - RNA, 19 nt, Artificial Sequence
  Description of Artificial Sequence: Synthetic oligonucleotide
gcaguaguaagcuaaaacc

SEQ ID NO: 2378780 - RNA, 19 nt, Artificial Sequence
  Description of Artificial Sequence: Synthetic oligonucleotide
ugucaaaauguccuuccag

SEQ ID NO: 2378781 - RNA, 19 nt, Artificial Sequence
  Description of Artificial Sequence: Synthetic oligonucleotide
ucaaagguccacuauuaug

SEQ ID NO: 2378782 - RNA, 19 nt, Artificial Sequence
  Description of Artificial Sequence: Synthetic oligonucleotide
uaaaggacgcuuauguacu

SEQ ID NO: 2378783 - RNA, 19 nt, Artificial Sequence
  Description of Artificial Sequence: Synthetic oligonucleotide
aacaaggcuggcucuguac

SEQ ID NO: 2378784 - RNA, 19 nt, Artificial Sequence
  Description of Artificial Sequence: Synthetic oligonucleotide
uugcaaaacuggucgaacg

SEQ ID NO: 2378785 - RNA, 19 nt, Artificial Sequence
  Description of Artificial Sequence: Synthetic oligonucleotide
uuucagacagucauccagc

SEQ ID NO: 2378786 - RNA, 19 nt, Artificial Sequence
  Description of Artificial Sequence: Synthetic oligonucleotide
aaauagcaaccaugagccc

SEQ ID NO: 2378787 - RNA, 19 nt, Artificial Sequence
  Description of Artificial Sequence: Synthetic oligonucleotide
aauagcaaccaugagccca

SEQ ID NO: 2378788 - RNA, 19 nt, Artificial Sequence
  Description of Artificial Sequence: Synthetic oligonucleotide
aacagauuaaaugauucaa

SEQ ID NO: 2378789 - RNA, 19 nt, Artificial Sequence
  Description of Artificial Sequence: Synthetic oligonucleotide
ucuucucacggauacaugu

SEQ ID NO: 2378790 - RNA, 19 nt, Artificial Sequence
  Description of Artificial Sequence: Synthetic oligonucleotide
aucucuuuauugcaucaac

SEQ ID NO: 2378791 - RNA, 19 nt, Artificial Sequence
  Description of Artificial Sequence: Synthetic oligonucleotide
caucguaaaacgcagcuug

SEQ ID NO: 2378792 - RNA, 19 nt, Artificial Sequence
  Description of Artificial Sequence: Synthetic oligonucleotide
aguuaacagaacuucuuug

SEQ ID NO: 2378793 - RNA, 19 nt, Artificial Sequence
  Description of Artificial Sequence: Synthetic oligonucleotide
aacgcagcuugauacuuuc

SEQ ID NO: 2378794 - RNA, 19 nt, Artificial Sequence
  Description of Artificial Sequence: Synthetic oligonucleotide
uuaacagaacuucuuugac

SEQ ID NO: 2378795 - RNA, 19 nt, Artificial Sequence
  Description of Artificial Sequence: Synthetic oligonucleotide
uuuccuguauugucgaagc

SEQ ID NO: 2378796 - RNA, 19 nt, Artificial Sequence
  Description of Artificial Sequence: Synthetic oligonucleotide
uauucaggauaaaggacgc

SEQ ID NO: 2378797 - RNA, 19 nt, Artificial Sequence
  Description of Artificial Sequence: Synthetic oligonucleotide
uuuucagcuagauugcaaa

SEQ ID NO: 2378798 - RNA, 19 nt, Artificial Sequence
  Description of Artificial Sequence: Synthetic oligonucleotide
uccacuauuaugccucaag

SEQ ID NO: 2378799 - RNA, 19 nt, Artificial Sequence
  Description of Artificial Sequence: Synthetic oligonucleotide
aaacacgccagucuucuga

SEQ ID NO: 2378800 - RNA, 19 nt, Artificial Sequence
  Description of Artificial Sequence: Synthetic oligonucleotide
gaaguuugaaauguguuca

SEQ ID NO: 2378801 - RNA, 19 nt, Artificial Sequence
  Description of Artificial Sequence: Synthetic oligonucleotide
acagucauccagcuguuuc

SEQ ID NO: 2378802 - RNA, 19 nt, Artificial Sequence
  Description of Artificial Sequence: Synthetic oligonucleotide
gacgcuuauguacuggacc

SEQ ID NO: 2378803 - RNA, 19 nt, Artificial Sequence
  Description of Artificial Sequence: Synthetic oligonucleotide
aaggggauaauggagauuu

SEQ ID NO: 2378804 - RNA, 19 nt, Artificial Sequence
  Description of Artificial Sequence: Synthetic oligonucleotide
ugauugcuuucgaugaugc

SEQ ID NO: 2378805 - RNA, 19 nt, Artificial Sequence
  Description of Artificial Sequence: Synthetic oligonucleotide
uauuaugccucaaggagau

SEQ ID NO: 2378806 - RNA, 19 nt, Artificial Sequence
  Description of Artificial Sequence: Synthetic oligonucleotide
auacauguuucagacaguc

SEQ ID NO: 2378807 - RNA, 19 nt, Artificial Sequence
  Description of Artificial Sequence: Synthetic oligonucleotide
ggaguaaucucuuuauugc

SEQ ID NO: 2378808 - RNA, 19 nt, Artificial Sequence
  Description of Artificial Sequence: Synthetic oligonucleotide
aguaguaagcuaaaaccuc

SEQ ID NO: 2378809 - RNA, 19 nt, Artificial Sequence
  Description of Artificial Sequence: Synthetic oligonucleotide
uucaacuuggaguggaagu

SEQ ID NO: 2378810 - RNA, 19 nt, Artificial Sequence
  Description of Artificial Sequence: Synthetic oligonucleotide
uucuaucccauuuugguua

SEQ ID NO: 2378811 - RNA, 19 nt, Artificial Sequence
  Description of Artificial Sequence: Synthetic oligonucleotide
uacuguauucaggauaaag

SEQ ID NO: 2378812 - RNA, 19 nt, Artificial Sequence
  Description of Artificial Sequence: Synthetic oligonucleotide
ucauauauguccgaguuuu

SEQ ID NO: 2378813 - RNA, 19 nt, Artificial Sequence
  Description of Artificial Sequence: Synthetic oligonucleotide
uuaugccucaaggagauac

SEQ ID NO: 2378814 - RNA, 19 nt, Artificial Sequence
  Description of Artificial Sequence: Synthetic oligonucleotide
cuucaacauucaaaggucc

SEQ ID NO: 2378815 - RNA, 19 nt, Artificial Sequence
  Description of Artificial Sequence: Synthetic oligonucleotide
uuaucccaucguaaaacgc

SEQ ID NO: 2378816 - RNA, 19 nt, Artificial Sequence
  Description of Artificial Sequence: Synthetic oligonucleotide
ucccauuuugguuaaagua

SEQ ID NO: 2378817 - RNA, 19 nt, Artificial Sequence
  Description of Artificial Sequence: Synthetic oligonucleotide
gacaucugcagaaauagca

SEQ ID NO: 2378818 - RNA, 19 nt, Artificial Sequence
  Description of Artificial Sequence: Synthetic oligonucleotide
cuguauucaggauaaagga

SEQ ID NO: 2378819 - RNA, 19 nt, Artificial Sequence
  Description of Artificial Sequence: Synthetic oligonucleotide
agcuagauugcaaaacugg

SEQ ID NO: 2378820 - RNA, 19 nt, Artificial Sequence
  Description of Artificial Sequence: Synthetic oligonucleotide
aguugagagacaucugucu

SEQ ID NO: 2378821 - RNA, 19 nt, Artificial Sequence
  Description of Artificial Sequence: Synthetic oligonucleotide
aacguauucccucggcgug

SEQ ID NO: 2378822 - RNA, 19 nt, Artificial Sequence
  Description of Artificial Sequence: Synthetic oligonucleotide
aguaagcuaaaaccuccuc

SEQ ID NO: 2378823 - RNA, 19 nt, Artificial Sequence
  Description of Artificial Sequence: Synthetic oligonucleotide
uuugaaauguguucaucau

SEQ ID NO: 2378824 - RNA, 19 nt, Artificial Sequence
  Description of Artificial Sequence: Synthetic oligonucleotide
aaucuucucacggauacau

SEQ ID NO: 2378825 - RNA, 19 nt, Artificial Sequence
  Description of Artificial Sequence: Synthetic oligonucleotide
uuucugauggccuuuucau

SEQ ID NO: 2378826 - RNA, 19 nt, Artificial Sequence
  Description of Artificial Sequence: Synthetic oligonucleotide
ugcaaaacuggucgaacgu

SEQ ID NO: 2378827 - RNA, 19 nt, Artificial Sequence
  Description of Artificial Sequence: Synthetic oligonucleotide
auuucugauggccuuuuca

SEQ ID NO: 2378828 - RNA, 19 nt, Artificial Sequence
  Description of Artificial Sequence: Synthetic oligonucleotide
gaacagauuaaaugauuca

SEQ ID NO: 2378829 - RNA, 19 nt, Artificial Sequence
  Description of Artificial Sequence: Synthetic oligonucleotide
gauacuguauucaggauaa

SEQ ID NO: 2378830 - RNA, 19 nt, Artificial Sequence
  Description of Artificial Sequence: Synthetic oligonucleotide
cuagauugcaaaacugguc

SEQ ID NO: 2378831 - RNA, 19 nt, Artificial Sequence
  Description of Artificial Sequence: Synthetic oligonucleotide
ugugaccgagaacagauua

SEQ ID NO: 2378832 - RNA, 19 nt, Artificial Sequence
  Description of Artificial Sequence: Synthetic oligonucleotide
guaguaagcuaaaaccucc

SEQ ID NO: 2378833 - RNA, 19 nt, Artificial Sequence
  Description of Artificial Sequence: Synthetic oligonucleotide
uuggagagagaaaccagcu

SEQ ID NO: 2378834 - RNA, 19 nt, Artificial Sequence
  Description of Artificial Sequence: Synthetic oligonucleotide
auugcaaaacuggucgaac

SEQ ID NO: 2378835 - RNA, 19 nt, Artificial Sequence
  Description of Artificial Sequence: Synthetic oligonucleotide
auucaaaucuucucacgga

SEQ ID NO: 2378836 - RNA, 19 nt, Artificial Sequence
  Description of Artificial Sequence: Synthetic oligonucleotide
uguauugucgaagcuggug

SEQ ID NO: 2378837 - RNA, 19 nt, Artificial Sequence
  Description of Artificial Sequence: Synthetic oligonucleotide
gaugcaaacauuuccugua

SEQ ID NO: 2378838 - RNA, 19 nt, Artificial Sequence
  Description of Artificial Sequence: Synthetic oligonucleotide
aaaguaagcagaaggggau

SEQ ID NO: 2378839 - RNA, 19 nt, Artificial Sequence
  Description of Artificial Sequence: Synthetic oligonucleotide
agaugcaaacauuuccugu

SEQ ID NO: 2378840 - RNA, 19 nt, Artificial Sequence
  Description of Artificial Sequence: Synthetic oligonucleotide
cauuaucccaucguaaaac

SEQ ID NO: 2378841 - RNA, 19 nt, Artificial Sequence
  Description of Artificial Sequence: Synthetic oligonucleotide
uuaaacacgccagucuucu

SEQ ID NO: 2378842 - RNA, 19 nt, Artificial Sequence
  Description of Artificial Sequence: Synthetic oligonucleotide
ggagauacuguauucagga

SEQ ID NO: 2378843 - RNA, 19 nt, Artificial Sequence
  Description of Artificial Sequence: Synthetic oligonucleotide
uaucccauuuugguuaaag

SEQ ID NO: 2378844 - RNA, 19 nt, Artificial Sequence
  Description of Artificial Sequence: Synthetic oligonucleotide
uaaaacgcagcuugauacu

SEQ ID NO: 2378845 - RNA, 19 nt, Artificial Sequence
  Description of Artificial Sequence: Synthetic oligonucleotide
gucuucaacauucaaaggu

SEQ ID NO: 2378846 - RNA, 19 nt, Artificial Sequence
  Description of Artificial Sequence: Synthetic oligonucleotide
ucuucauauauguccgagu

SEQ ID NO: 2378847 - RNA, 19 nt, Artificial Sequence
  Description of Artificial Sequence: Synthetic oligonucleotide
uccuguauugucgaagcug

SEQ ID NO: 2378848 - RNA, 19 nt, Artificial Sequence
  Description of Artificial Sequence: Synthetic oligonucleotide
ucauuaucccaucguaaaa

SEQ ID NO: 2378849 - RNA, 19 nt, Artificial Sequence
  Description of Artificial Sequence: Synthetic oligonucleotide
uggaaguuugaaauguguu

SEQ ID NO: 2378850 - RNA, 19 nt, Artificial Sequence
  Description of Artificial Sequence: Synthetic oligonucleotide
cuauuaugccucaaggaga

SEQ ID NO: 2378851 - RNA, 19 nt, Artificial Sequence
  Description of Artificial Sequence: Synthetic oligonucleotide
ugucucauuaucccaucgu

SEQ ID NO: 2378852 - RNA, 19 nt, Artificial Sequence
  Description of Artificial Sequence: Synthetic oligonucleotide
gaguaaucucuuuauugca

SEQ ID NO: 2378853 - RNA, 19 nt, Artificial Sequence
  Description of Artificial Sequence: Synthetic oligonucleotide
gaacauguuccugugcuug

SEQ ID NO: 2378854 - RNA, 19 nt, Artificial Sequence
  Description of Artificial Sequence: Synthetic oligonucleotide
ccuguauugucgaagcugg

SEQ ID NO: 2378855 - RNA, 19 nt, Artificial Sequence
  Description of Artificial Sequence: Synthetic oligonucleotide
ucaacauucaaagguccac

SEQ ID NO: 2378856 - RNA, 19 nt, Artificial Sequence
  Description of Artificial Sequence: Synthetic oligonucleotide
uuucaacuuggaguggaag

SEQ ID NO: 2378857 - RNA, 19 nt, Artificial Sequence
  Description of Artificial Sequence: Synthetic oligonucleotide
aaaggacgcuuauguacug

SEQ ID NO: 2378858 - RNA, 19 nt, Artificial Sequence
  Description of Artificial Sequence: Synthetic oligonucleotide
ggaaguuugaaauguguuc

SEQ ID NO: 2378859 - RNA, 19 nt, Artificial Sequence
  Description of Artificial Sequence: Synthetic oligonucleotide
caucaguuaacagaacuuc

SEQ ID NO: 2378860 - RNA, 19 nt, Artificial Sequence
  Description of Artificial Sequence: Synthetic oligonucleotide
agguccacuauuaugccuc

SEQ ID NO: 2378861 - RNA, 19 nt, Artificial Sequence
  Description of Artificial Sequence: Synthetic oligonucleotide
aaguuugaaauguguucau

SEQ ID NO: 2378862 - RNA, 19 nt, Artificial Sequence
  Description of Artificial Sequence: Synthetic oligonucleotide
aacauguuccugugcuuga

SEQ ID NO: 2378863 - RNA, 19 nt, Artificial Sequence
  Description of Artificial Sequence: Synthetic oligonucleotide
uauauguccgaguuuucuu

SEQ ID NO: 2378864 - RNA, 19 nt, Artificial Sequence
  Description of Artificial Sequence: Synthetic oligonucleotide
aggaacaggcagucagcgc

SEQ ID NO: 2378865 - RNA, 19 nt, Artificial Sequence
  Description of Artificial Sequence: Synthetic oligonucleotide
uaguaagcuaaaaccuccu

SEQ ID NO: 2378866 - RNA, 19 nt, Artificial Sequence
  Description of Artificial Sequence: Synthetic oligonucleotide
aaggacgcuuauguacugg

SEQ ID NO: 2378867 - RNA, 19 nt, Artificial Sequence
  Description of Artificial Sequence: Synthetic oligonucleotide
uauguacuggacccacaca

SEQ ID NO: 2378868 - RNA, 19 nt, Artificial Sequence
  Description of Artificial Sequence: Synthetic oligonucleotide
auauauguccgaguuuucu

SEQ ID NO: 2378869 - RNA, 19 nt, Artificial Sequence
  Description of Artificial Sequence: Synthetic oligonucleotide
uggggcaaauaccauugcu

SEQ ID NO: 2378870 - RNA, 19 nt, Artificial Sequence
  Description of Artificial Sequence: Synthetic oligonucleotide
uaaaaccuccucagauggc

SEQ ID NO: 2378871 - RNA, 19 nt, Artificial Sequence
  Description of Artificial Sequence: Synthetic oligonucleotide
gucgaagcuggugagaaug

SEQ ID NO: 2378872 - RNA, 19 nt, Artificial Sequence
  Description of Artificial Sequence: Synthetic oligonucleotide
aagcuaaaaccuccucaga

SEQ ID NO: 2378873 - RNA, 19 nt, Artificial Sequence
  Description of Artificial Sequence: Synthetic oligonucleotide
uacauguuucagacaguca

SEQ ID NO: 2378874 - RNA, 19 nt, Artificial Sequence
  Description of Artificial Sequence: Synthetic oligonucleotide
uuggaguggaaguuugaaa

SEQ ID NO: 2378875 - RNA, 19 nt, Artificial Sequence
  Description of Artificial Sequence: Synthetic oligonucleotide
guugagagacaucugucuc

SEQ ID NO: 2378876 - RNA, 19 nt, Artificial Sequence
  Description of Artificial Sequence: Synthetic oligonucleotide
cacgccagucuucugauug

SEQ ID NO: 2378877 - RNA, 19 nt, Artificial Sequence
  Description of Artificial Sequence: Synthetic oligonucleotide
ucccugaacauguuccugu

SEQ ID NO: 2378878 - RNA, 19 nt, Artificial Sequence
  Description of Artificial Sequence: Synthetic oligonucleotide
ucagauggccagaugcaaa

SEQ ID NO: 2378879 - RNA, 19 nt, Artificial Sequence
  Description of Artificial Sequence: Synthetic oligonucleotide
uaugccucaaggagauacu

SEQ ID NO: 2378880 - RNA, 19 nt, Artificial Sequence
  Description of Artificial Sequence: Synthetic oligonucleotide
ucucacggauacauguuuc

SEQ ID NO: 2378881 - RNA, 19 nt, Artificial Sequence
  Description of Artificial Sequence: Synthetic oligonucleotide
ggcaguaguaagcuaaaac

SEQ ID NO: 2378882 - RNA, 19 nt, Artificial Sequence
  Description of Artificial Sequence: Synthetic oligonucleotide
auauguccgaguuuucuuu

SEQ ID NO: 2378883 - RNA, 19 nt, Artificial Sequence
  Description of Artificial Sequence: Synthetic oligonucleotide
ucaaaucuucucacggaua

SEQ ID NO: 2378884 - RNA, 19 nt, Artificial Sequence
  Description of Artificial Sequence: Synthetic oligonucleotide
uuucagcuagauugcaaaa

SEQ ID NO: 2378885 - RNA, 19 nt, Artificial Sequence
  Description of Artificial Sequence: Synthetic oligonucleotide
uucaaagguccacuauuau

SEQ ID NO: 2378886 - RNA, 19 nt, Artificial Sequence
  Description of Artificial Sequence: Synthetic oligonucleotide
cacuauuaugccucaagga

SEQ ID NO: 2378887 - RNA, 19 nt, Artificial Sequence
  Description of Artificial Sequence: Synthetic oligonucleotide
gauaaaggacgcuuaugua

SEQ ID NO: 2378888 - RNA, 19 nt, Artificial Sequence
  Description of Artificial Sequence: Synthetic oligonucleotide
uggccagaugcaaacauuu

SEQ ID NO: 2378889 - RNA, 19 nt, Artificial Sequence
  Description of Artificial Sequence: Synthetic oligonucleotide
gcuaaaaccuccucagaug

SEQ ID NO: 2378890 - RNA, 19 nt, Artificial Sequence
  Description of Artificial Sequence: Synthetic oligonucleotide
ucggcguggggcaaauacc

SEQ ID NO: 2378891 - RNA, 19 nt, Artificial Sequence
  Description of Artificial Sequence: Synthetic oligonucleotide
cucauuaucccaucguaaa

SEQ ID NO: 2378892 - RNA, 19 nt, Artificial Sequence
  Description of Artificial Sequence: Synthetic oligonucleotide
uucauauauguccgaguuu

SEQ ID NO: 2378893 - RNA, 19 nt, Artificial Sequence
  Description of Artificial Sequence: Synthetic oligonucleotide
ucacggauacauguuucag

SEQ ID NO: 2378894 - RNA, 19 nt, Artificial Sequence
  Description of Artificial Sequence: Synthetic oligonucleotide
acgccagucuucugauugc

SEQ ID NO: 2378895 - RNA, 19 nt, Artificial Sequence
  Description of Artificial Sequence: Synthetic oligonucleotide
accaugagcccagccaagc

SEQ ID NO: 2378896 - RNA, 19 nt, Artificial Sequence
  Description of Artificial Sequence: Synthetic oligonucleotide
uauucccucggcguggggc

SEQ ID NO: 2378897 - RNA, 19 nt, Artificial Sequence
  Description of Artificial Sequence: Synthetic oligonucleotide
ucgaacguauucccucggc

SEQ ID NO: 2378898 - RNA, 19 nt, Artificial Sequence
  Description of Artificial Sequence: Synthetic oligonucleotide
uucucacggauacauguuu

SEQ ID NO: 2378899 - RNA, 19 nt, Artificial Sequence
  Description of Artificial Sequence: Synthetic oligonucleotide
cuuaaacacgccagucuuc

SEQ ID NO: 2378900 - RNA, 19 nt, Artificial Sequence
  Description of Artificial Sequence: Synthetic oligonucleotide
auuaaaugauucaaaucuu

SEQ ID NO: 2378901 - RNA, 19 nt, Artificial Sequence
  Description of Artificial Sequence: Synthetic oligonucleotide
ccauuuugguuaaaguaag

SEQ ID NO: 2378902 - RNA, 19 nt, Artificial Sequence
  Description of Artificial Sequence: Synthetic oligonucleotide
acagauuaaaugauucaaa

SEQ ID NO: 2378903 - RNA, 19 nt, Artificial Sequence
  Description of Artificial Sequence: Synthetic oligonucleotide
aaaacgcagcuugauacuu

SEQ ID NO: 2378904 - RNA, 19 nt, Artificial Sequence
  Description of Artificial Sequence: Synthetic oligonucleotide
aacacgccagucuucugau

SEQ ID NO: 2378905 - RNA, 19 nt, Artificial Sequence
  Description of Artificial Sequence: Synthetic oligonucleotide
cugucucauuaucccaucg

SEQ ID NO: 2378906 - RNA, 19 nt, Artificial Sequence
  Description of Artificial Sequence: Synthetic oligonucleotide
cagcuagauugcaaaacug

SEQ ID NO: 2378907 - RNA, 19 nt, Artificial Sequence
  Description of Artificial Sequence: Synthetic oligonucleotide
ccgagaacagauuaaauga

SEQ ID NO: 2378908 - RNA, 19 nt, Artificial Sequence
  Description of Artificial Sequence: Synthetic oligonucleotide
cauugcuuucccugugggc

SEQ ID NO: 2378909 - RNA, 19 nt, Artificial Sequence
  Description of Artificial Sequence: Synthetic oligonucleotide
ugacuucugugaccgagaa

SEQ ID NO: 2378910 - RNA, 19 nt, Artificial Sequence
  Description of Artificial Sequence: Synthetic oligonucleotide
gucagcgcacauaacaaug

SEQ ID NO: 2378911 - RNA, 19 nt, Artificial Sequence
  Description of Artificial Sequence: Synthetic oligonucleotide
aaccugucgcaggagcuuc

SEQ ID NO: 2378912 - RNA, 19 nt, Artificial Sequence
  Description of Artificial Sequence: Synthetic oligonucleotide
uggucgaacguauucccuc

SEQ ID NO: 2378913 - RNA, 19 nt, Artificial Sequence
  Description of Artificial Sequence: Synthetic oligonucleotide
ugaccgagaacagauuaaa

SEQ ID NO: 2378914 - RNA, 19 nt, Artificial Sequence
  Description of Artificial Sequence: Synthetic oligonucleotide
ccacuauuaugccucaagg

SEQ ID NO: 2378915 - RNA, 19 nt, Artificial Sequence
  Description of Artificial Sequence: Synthetic oligonucleotide
agauugcaaaacuggucga

SEQ ID NO: 2378916 - RNA, 19 nt, Artificial Sequence
  Description of Artificial Sequence: Synthetic oligonucleotide
cucggcguggggcaaauac

SEQ ID NO: 2378917 - RNA, 19 nt, Artificial Sequence
  Description of Artificial Sequence: Synthetic oligonucleotide
ugauggccuuuucauuccc

SEQ ID NO: 2378918 - RNA, 19 nt, Artificial Sequence
  Description of Artificial Sequence: Synthetic oligonucleotide
uccaguugagagacaucug

SEQ ID NO: 2378919 - RNA, 19 nt, Artificial Sequence
  Description of Artificial Sequence: Synthetic oligonucleotide
cagacagucauccagcugu

SEQ ID NO: 2378920 - RNA, 19 nt, Artificial Sequence
  Description of Artificial Sequence: Synthetic oligonucleotide
ugccucaaggagauacugu

SEQ ID NO: 2378921 - RNA, 19 nt, Artificial Sequence
  Description of Artificial Sequence: Synthetic oligonucleotide
auagcaaccaugagcccag

SEQ ID NO: 2378922 - RNA, 19 nt, Artificial Sequence
  Description of Artificial Sequence: Synthetic oligonucleotide
ucugauugcuuucgaugau

SEQ ID NO: 2378923 - RNA, 19 nt, Artificial Sequence
  Description of Artificial Sequence: Synthetic oligonucleotide
aguaaucucuuuauugcau

SEQ ID NO: 2378924 - RNA, 19 nt, Artificial Sequence
  Description of Artificial Sequence: Synthetic oligonucleotide
cauucccaucaguuaacag

SEQ ID NO: 2378925 - RNA, 19 nt, Artificial Sequence
  Description of Artificial Sequence: Synthetic oligonucleotide
cagaaccugucgcaggagc

SEQ ID NO: 2378926 - RNA, 19 nt, Artificial Sequence
  Description of Artificial Sequence: Synthetic oligonucleotide
cagaaauagcaaccaugag

SEQ ID NO: 2378927 - RNA, 19 nt, Artificial Sequence
  Description of Artificial Sequence: Synthetic oligonucleotide
aucaguuaacagaacuucu

SEQ ID NO: 2378928 - RNA, 19 nt, Artificial Sequence
  Description of Artificial Sequence: Synthetic oligonucleotide
uggugagaaugucuucaac

SEQ ID NO: 2378929 - RNA, 19 nt, Artificial Sequence
  Description of Artificial Sequence: Synthetic oligonucleotide
uguuucagacagucaucca

SEQ ID NO: 2378930 - RNA, 19 nt, Artificial Sequence
  Description of Artificial Sequence: Synthetic oligonucleotide
ggucgaacguauucccucg

SEQ ID NO: 2378931 - RNA, 19 nt, Artificial Sequence
  Description of Artificial Sequence: Synthetic oligonucleotide
uugucgaagcuggugagaa

SEQ ID NO: 2378932 - RNA, 19 nt, Artificial Sequence
  Description of Artificial Sequence: Synthetic oligonucleotide
caguugagagacaucuguc

SEQ ID NO: 2378933 - RNA, 19 nt, Artificial Sequence
  Description of Artificial Sequence: Synthetic oligonucleotide
cagauuaaaugauucaaau

SEQ ID NO: 2378934 - RNA, 19 nt, Artificial Sequence
  Description of Artificial Sequence: Synthetic oligonucleotide
gcagucagcgcacauaaca

SEQ ID NO: 2378935 - RNA, 19 nt, Artificial Sequence
  Description of Artificial Sequence: Synthetic oligonucleotide
ucuaucccauuuugguuaa

SEQ ID NO: 2378936 - RNA, 19 nt, Artificial Sequence
  Description of Artificial Sequence: Synthetic oligonucleotide
ucauucccaucaguuaaca

SEQ ID NO: 2378937 - RNA, 19 nt, Artificial Sequence
  Description of Artificial Sequence: Synthetic oligonucleotide
ugcaucaacaaggcuggcu

SEQ ID NO: 2378938 - RNA, 19 nt, Artificial Sequence
  Description of Artificial Sequence: Synthetic oligonucleotide
aggacgcuuauguacugga

SEQ ID NO: 2378939 - RNA, 19 nt, Artificial Sequence
  Description of Artificial Sequence: Synthetic oligonucleotide
ggagauuuucuucauauau

SEQ ID NO: 2378940 - RNA, 19 nt, Artificial Sequence
  Description of Artificial Sequence: Synthetic oligonucleotide
aaaucuucucacggauaca

SEQ ID NO: 2378941 - RNA, 19 nt, Artificial Sequence
  Description of Artificial Sequence: Synthetic oligonucleotide
aggcagucagcgcacauaa

SEQ ID NO: 2378942 - RNA, 19 nt, Artificial Sequence
  Description of Artificial Sequence: Synthetic oligonucleotide
aauguccuuccaguugaga

SEQ ID NO: 2378943 - RNA, 19 nt, Artificial Sequence
  Description of Artificial Sequence: Synthetic oligonucleotide
agcaaggucccugaacaug

SEQ ID NO: 2378944 - RNA, 19 nt, Artificial Sequence
  Description of Artificial Sequence: Synthetic oligonucleotide
gcaucaacaaggcuggcuc

SEQ ID NO: 2378945 - RNA, 19 nt, Artificial Sequence
  Description of Artificial Sequence: Synthetic oligonucleotide
cagccaagcaugucaugcc

SEQ ID NO: 2378946 - RNA, 19 nt, Artificial Sequence
  Description of Artificial Sequence: Synthetic oligonucleotide
gauacuuucugagccuuaa

SEQ ID NO: 2378947 - RNA, 19 nt, Artificial Sequence
  Description of Artificial Sequence: Synthetic oligonucleotide
ucccaucguaaaacgcagc

SEQ ID NO: 2378948 - RNA, 19 nt, Artificial Sequence
  Description of Artificial Sequence: Synthetic oligonucleotide
aggauaaaggacgcuuaug

SEQ ID NO: 2378949 - RNA, 19 nt, Artificial Sequence
  Description of Artificial Sequence: Synthetic oligonucleotide
cugauugcuuucgaugaug

SEQ ID NO: 2378950 - RNA, 19 nt, Artificial Sequence
  Description of Artificial Sequence: Synthetic oligonucleotide
agucagcgcacauaacaau

SEQ ID NO: 2378951 - RNA, 19 nt, Artificial Sequence
  Description of Artificial Sequence: Synthetic oligonucleotide
augcaaacauuuccuguau

SEQ ID NO: 2378952 - RNA, 19 nt, Artificial Sequence
  Description of Artificial Sequence: Synthetic oligonucleotide
gcacauaacaaugucaaaa

SEQ ID NO: 2378953 - RNA, 19 nt, Artificial Sequence
  Description of Artificial Sequence: Synthetic oligonucleotide
uuccuguauugucgaagcu

SEQ ID NO: 2378954 - RNA, 19 nt, Artificial Sequence
  Description of Artificial Sequence: Synthetic oligonucleotide
cacggauacauguuucaga

SEQ ID NO: 2378955 - RNA, 19 nt, Artificial Sequence
  Description of Artificial Sequence: Synthetic oligonucleotide
gaacguauucccucggcgu

SEQ ID NO: 2378956 - RNA, 19 nt, Artificial Sequence
  Description of Artificial Sequence: Synthetic oligonucleotide
ugcaaacauuuccuguauu

SEQ ID NO: 2378957 - RNA, 19 nt, Artificial Sequence
  Description of Artificial Sequence: Synthetic oligonucleotide
aguggaaguuugaaaugug

SEQ ID NO: 2378958 - RNA, 19 nt, Artificial Sequence
  Description of Artificial Sequence: Synthetic oligonucleotide
aucccaucguaaaacgcag

SEQ ID NO: 2378959 - RNA, 19 nt, Artificial Sequence
  Description of Artificial Sequence: Synthetic oligonucleotide
gcuggcucuguacuggucc

SEQ ID NO: 2378960 - RNA, 19 nt, Artificial Sequence
  Description of Artificial Sequence: Synthetic oligonucleotide
gauugcaaaacuggucgaa

SEQ ID NO: 2378961 - RNA, 19 nt, Artificial Sequence
  Description of Artificial Sequence: Synthetic oligonucleotide
aagcuggugagaaugucuu

SEQ ID NO: 2378962 - RNA, 19 nt, Artificial Sequence
  Description of Artificial Sequence: Synthetic oligonucleotide
agcgcacauaacaauguca

SEQ ID NO: 2378963 - RNA, 19 nt, Artificial Sequence
  Description of Artificial Sequence: Synthetic oligonucleotide
auucaaagguccacuauua

SEQ ID NO: 2378964 - RNA, 19 nt, Artificial Sequence
  Description of Artificial Sequence: Synthetic oligonucleotide
uucugauggccuuuucauu

SEQ ID NO: 2378965 - RNA, 19 nt, Artificial Sequence
  Description of Artificial Sequence: Synthetic oligonucleotide
aguaagcagaaggggauaa

SEQ ID NO: 2378966 - RNA, 19 nt, Artificial Sequence
  Description of Artificial Sequence: Synthetic oligonucleotide
gaguggaaguuugaaaugu

SEQ ID NO: 2378967 - RNA, 19 nt, Artificial Sequence
  Description of Artificial Sequence: Synthetic oligonucleotide
uucugugaccgagaacaga

SEQ ID NO: 2378968 - RNA, 19 nt, Artificial Sequence
  Description of Artificial Sequence: Synthetic oligonucleotide
cauauauguccgaguuuuc

SEQ ID NO: 2378969 - RNA, 19 nt, Artificial Sequence
  Description of Artificial Sequence: Synthetic oligonucleotide
caagcaugucaugccaccc

SEQ ID NO: 2378970 - RNA, 19 nt, Artificial Sequence
  Description of Artificial Sequence: Synthetic oligonucleotide
aucaacaaggcuggcucug

SEQ ID NO: 2378971 - RNA, 19 nt, Artificial Sequence
  Description of Artificial Sequence: Synthetic oligonucleotide
gucucauuaucccaucgua

SEQ ID NO: 2378972 - RNA, 19 nt, Artificial Sequence
  Description of Artificial Sequence: Synthetic oligonucleotide
auucccucggcguggggca

SEQ ID NO: 2378973 - RNA, 19 nt, Artificial Sequence
  Description of Artificial Sequence: Synthetic oligonucleotide
ugaacauguuccugugcuu

SEQ ID NO: 2378974 - RNA, 19 nt, Artificial Sequence
  Description of Artificial Sequence: Synthetic oligonucleotide
ugagcccagccaagcaugu

SEQ ID NO: 2378975 - RNA, 19 nt, Artificial Sequence
  Description of Artificial Sequence: Synthetic oligonucleotide
gucgaacguauucccucgg

SEQ ID NO: 2378976 - RNA, 19 nt, Artificial Sequence
  Description of Artificial Sequence: Synthetic oligonucleotide
cggaguaaucucuuuauug

SEQ ID NO: 2378977 - RNA, 19 nt, Artificial Sequence
  Description of Artificial Sequence: Synthetic oligonucleotide
aaauguccuuccaguugag

SEQ ID NO: 2378978 - RNA, 19 nt, Artificial Sequence
  Description of Artificial Sequence: Synthetic oligonucleotide
cuucauauauguccgaguu

SEQ ID NO: 2378979 - RNA, 19 nt, Artificial Sequence
  Description of Artificial Sequence: Synthetic oligonucleotide
cucacggauacauguuuca

SEQ ID NO: 2378980 - RNA, 19 nt, Artificial Sequence
  Description of Artificial Sequence: Synthetic oligonucleotide
uaaacacgccagucuucug

SEQ ID NO: 2378981 - RNA, 19 nt, Artificial Sequence
  Description of Artificial Sequence: Synthetic oligonucleotide
gcaaccaugagcccagcca

SEQ ID NO: 2378982 - RNA, 19 nt, Artificial Sequence
  Description of Artificial Sequence: Synthetic oligonucleotide
aaguaagcagaaggggaua

SEQ ID NO: 2378983 - RNA, 19 nt, Artificial Sequence
  Description of Artificial Sequence: Synthetic oligonucleotide
augccucaaggagauacug

SEQ ID NO: 2378984 - RNA, 19 nt, Artificial Sequence
  Description of Artificial Sequence: Synthetic oligonucleotide
ugauacuuucugagccuua

SEQ ID NO: 2378985 - RNA, 19 nt, Artificial Sequence
  Description of Artificial Sequence: Synthetic oligonucleotide
acguauucccucggcgugg

SEQ ID NO: 2378986 - RNA, 19 nt, Artificial Sequence
  Description of Artificial Sequence: Synthetic oligonucleotide
aaaacuggucgaacguauu

SEQ ID NO: 2378987 - RNA, 19 nt, Artificial Sequence
  Description of Artificial Sequence: Synthetic oligonucleotide
acauguuccugugcuugag

SEQ ID NO: 2378988 - RNA, 19 nt, Artificial Sequence
  Description of Artificial Sequence: Synthetic oligonucleotide
ucguaaaacgcagcuugau

SEQ ID NO: 2378989 - RNA, 19 nt, Artificial Sequence
  Description of Artificial Sequence: Synthetic oligonucleotide
caaccaugagcccagccaa

SEQ ID NO: 2378990 - RNA, 19 nt, Artificial Sequence
  Description of Artificial Sequence: Synthetic oligonucleotide
aaaccuccucagauggcca

SEQ ID NO: 2378991 - RNA, 19 nt, Artificial Sequence
  Description of Artificial Sequence: Synthetic oligonucleotide
ucgcaggagcuuccaccgg

SEQ ID NO: 2378992 - RNA, 19 nt, Artificial Sequence
  Description of Artificial Sequence: Synthetic oligonucleotide
augagcccagccaagcaug

SEQ ID NO: 2378993 - RNA, 19 nt, Artificial Sequence
  Description of Artificial Sequence: Synthetic oligonucleotide
ucaacaaggcuggcucugu

SEQ ID NO: 2378994 - RNA, 19 nt, Artificial Sequence
  Description of Artificial Sequence: Synthetic oligonucleotide
cuugauacuuucugagccu

SEQ ID NO: 2378995 - RNA, 19 nt, Artificial Sequence
  Description of Artificial Sequence: Synthetic oligonucleotide
auacuuucugagccuuaaa

SEQ ID NO: 2378996 - RNA, 19 nt, Artificial Sequence
  Description of Artificial Sequence: Synthetic oligonucleotide
cuuauguacuggacccaca

SEQ ID NO: 2378997 - RNA, 19 nt, Artificial Sequence
  Description of Artificial Sequence: Synthetic oligonucleotide
cagucagcgcacauaacaa

SEQ ID NO: 2378998 - RNA, 19 nt, Artificial Sequence
  Description of Artificial Sequence: Synthetic oligonucleotide
gcagcuugauacuuucuga

SEQ ID NO: 2378999 - RNA, 19 nt, Artificial Sequence
  Description of Artificial Sequence: Synthetic oligonucleotide
uuuugacuucugugaccga

SEQ ID NO: 2379000 - RNA, 19 nt, Artificial Sequence
  Description of Artificial Sequence: Synthetic oligonucleotide
gcuugaggcaguaguaagc

SEQ ID NO: 2379001 - RNA, 19 nt, Artificial Sequence
  Description of Artificial Sequence: Synthetic oligonucleotide
cauucaaagguccacuauu

SEQ ID NO: 2379002 - RNA, 19 nt, Artificial Sequence
  Description of Artificial Sequence: Synthetic oligonucleotide
ugugggccggaguaaucuc

SEQ ID NO: 2379003 - RNA, 19 nt, Artificial Sequence
  Description of Artificial Sequence: Synthetic oligonucleotide
cgagcucacacacagcaag

SEQ ID NO: 2379004 - RNA, 19 nt, Artificial Sequence
  Description of Artificial Sequence: Synthetic oligonucleotide
ggagcuuccaccgggcggc

SEQ ID NO: 2379005 - RNA, 19 nt, Artificial Sequence
  Description of Artificial Sequence: Synthetic oligonucleotide
gagacaucugucucauuau

SEQ ID NO: 2379006 - RNA, 19 nt, Artificial Sequence
  Description of Artificial Sequence: Synthetic oligonucleotide
cagcgcacauaacaauguc

SEQ ID NO: 2379007 - RNA, 19 nt, Artificial Sequence
  Description of Artificial Sequence: Synthetic oligonucleotide
aucguaaaacgcagcuuga

SEQ ID NO: 2379008 - RNA, 19 nt, Artificial Sequence
  Description of Artificial Sequence: Synthetic oligonucleotide
caggagcuuccaccgggcg

SEQ ID NO: 2379009 - RNA, 19 nt, Artificial Sequence
  Description of Artificial Sequence: Synthetic oligonucleotide
caaaacuggucgaacguau

SEQ ID NO: 2379010 - RNA, 19 nt, Artificial Sequence
  Description of Artificial Sequence: Synthetic oligonucleotide
ggggauaauggagauuuuc

SEQ ID NO: 2379011 - RNA, 19 nt, Artificial Sequence
  Description of Artificial Sequence: Synthetic oligonucleotide
cuuggaguggaaguuugaa

SEQ ID NO: 2379012 - RNA, 19 nt, Artificial Sequence
  Description of Artificial Sequence: Synthetic oligonucleotide
aaacgcagcuugauacuuu

SEQ ID NO: 2379013 - RNA, 19 nt, Artificial Sequence
  Description of Artificial Sequence: Synthetic oligonucleotide
cuugaggcaguaguaagcu

SEQ ID NO: 2379014 - RNA, 19 nt, Artificial Sequence
  Description of Artificial Sequence: Synthetic oligonucleotide
cguggggcaaauaccauug

SEQ ID NO: 2379015 - RNA, 19 nt, Artificial Sequence
  Description of Artificial Sequence: Synthetic oligonucleotide
gagaacagauuaaaugauu

SEQ ID NO: 2379016 - RNA, 19 nt, Artificial Sequence
  Description of Artificial Sequence: Synthetic oligonucleotide
cgaacguauucccucggcg

SEQ ID NO: 2379017 - RNA, 19 nt, Artificial Sequence
  Description of Artificial Sequence: Synthetic oligonucleotide
gaacaggcagucagcgcac

SEQ ID NO: 2379018 - RNA, 19 nt, Artificial Sequence
  Description of Artificial Sequence: Synthetic oligonucleotide
ugucgaagcuggugagaau

SEQ ID NO: 2379019 - RNA, 19 nt, Artificial Sequence
  Description of Artificial Sequence: Synthetic oligonucleotide
cucaaggagauacuguauu

SEQ ID NO: 2379020 - RNA, 19 nt, Artificial Sequence
  Description of Artificial Sequence: Synthetic oligonucleotide
agauggccagaugcaaaca

SEQ ID NO: 2379021 - RNA, 19 nt, Artificial Sequence
  Description of Artificial Sequence: Synthetic oligonucleotide
ugggccggaguaaucucuu

SEQ ID NO: 2379022 - RNA, 19 nt, Artificial Sequence
  Description of Artificial Sequence: Synthetic oligonucleotide
guggaaguuugaaaugugu

SEQ ID NO: 2379023 - RNA, 19 nt, Artificial Sequence
  Description of Artificial Sequence: Synthetic oligonucleotide
aucuucucacggauacaug

SEQ ID NO: 2379024 - RNA, 19 nt, Artificial Sequence
  Description of Artificial Sequence: Synthetic oligonucleotide
gagauacuguauucaggau

SEQ ID NO: 2379025 - RNA, 19 nt, Artificial Sequence
  Description of Artificial Sequence: Synthetic oligonucleotide
accugucgcaggagcuucc

SEQ ID NO: 2379026 - RNA, 19 nt, Artificial Sequence
  Description of Artificial Sequence: Synthetic oligonucleotide
ggauaauggagauuuucuu

SEQ ID NO: 2379027 - RNA, 19 nt, Artificial Sequence
  Description of Artificial Sequence: Synthetic oligonucleotide
cuggugagaaugucuucaa

SEQ ID NO: 2379028 - RNA, 19 nt, Artificial Sequence
  Description of Artificial Sequence: Synthetic oligonucleotide
gcuuauguacuggacccac

SEQ ID NO: 2379029 - RNA, 19 nt, Artificial Sequence
  Description of Artificial Sequence: Synthetic oligonucleotide
ccugaacauguuccugugc

SEQ ID NO: 2379030 - RNA, 19 nt, Artificial Sequence
  Description of Artificial Sequence: Synthetic oligonucleotide
gcgcacauaacaaugucaa

SEQ ID NO: 2379031 - RNA, 19 nt, Artificial Sequence
  Description of Artificial Sequence: Synthetic oligonucleotide
gauacauguuucagacagu

SEQ ID NO: 2379032 - RNA, 19 nt, Artificial Sequence
  Description of Artificial Sequence: Synthetic oligonucleotide
ggcucuguacugguccagg

SEQ ID NO: 2379033 - RNA, 19 nt, Artificial Sequence
  Description of Artificial Sequence: Synthetic oligonucleotide
gugaccgagaacagauuaa

SEQ ID NO: 2379034 - RNA, 19 nt, Artificial Sequence
  Description of Artificial Sequence: Synthetic oligonucleotide
cccgagcucacacacagca

SEQ ID NO: 2379035 - RNA, 19 nt, Artificial Sequence
  Description of Artificial Sequence: Synthetic oligonucleotide
acaggcagucagcgcacau

SEQ ID NO: 2379036 - RNA, 19 nt, Artificial Sequence
  Description of Artificial Sequence: Synthetic oligonucleotide
cuuugacaucugcagaaau

SEQ ID NO: 2379037 - RNA, 19 nt, Artificial Sequence
  Description of Artificial Sequence: Synthetic oligonucleotide
gugcuugaggcaguaguaa

SEQ ID NO: 2379038 - RNA, 19 nt, Artificial Sequence
  Description of Artificial Sequence: Synthetic oligonucleotide
gcuagauugcaaaacuggu

SEQ ID NO: 2379039 - RNA, 19 nt, Artificial Sequence
  Description of Artificial Sequence: Synthetic oligonucleotide
auggccagaugcaaacauu

SEQ ID NO: 2379040 - RNA, 19 nt, Artificial Sequence
  Description of Artificial Sequence: Synthetic oligonucleotide
cucagauggccagaugcaa

SEQ ID NO: 2379041 - RNA, 19 nt, Artificial Sequence
  Description of Artificial Sequence: Synthetic oligonucleotide
guauucccucggcgugggg

SEQ ID NO: 2379042 - RNA, 19 nt, Artificial Sequence
  Description of Artificial Sequence: Synthetic oligonucleotide
gagagagaaaccagcuuuu

SEQ ID NO: 2379043 - RNA, 19 nt, Artificial Sequence
  Description of Artificial Sequence: Synthetic oligonucleotide
caugagcccagccaagcau

SEQ ID NO: 2379044 - RNA, 19 nt, Artificial Sequence
  Description of Artificial Sequence: Synthetic oligonucleotide
gccuuaaacacgccagucu

SEQ ID NO: 2379045 - RNA, 19 nt, Artificial Sequence
  Description of Artificial Sequence: Synthetic oligonucleotide
cugucgcaggagcuuccac

SEQ ID NO: 2379046 - RNA, 19 nt, Artificial Sequence
  Description of Artificial Sequence: Synthetic oligonucleotide
caucaacaaggcuggcucu

SEQ ID NO: 2379047 - RNA, 19 nt, Artificial Sequence
  Description of Artificial Sequence: Synthetic oligonucleotide
aggcaguaguaagcuaaaa

SEQ ID NO: 2379048 - RNA, 19 nt, Artificial Sequence
  Description of Artificial Sequence: Synthetic oligonucleotide
cuccucagauggccagaug

SEQ ID NO: 2379049 - RNA, 19 nt, Artificial Sequence
  Description of Artificial Sequence: Synthetic oligonucleotide
ccucagauggccagaugca

SEQ ID NO: 2379050 - RNA, 19 nt, Artificial Sequence
  Description of Artificial Sequence: Synthetic oligonucleotide
cuucucacggauacauguu

SEQ ID NO: 2379051 - RNA, 19 nt, Artificial Sequence
  Description of Artificial Sequence: Synthetic oligonucleotide
uccugugcuugaggcagua

SEQ ID NO: 2379052 - RNA, 19 nt, Artificial Sequence
  Description of Artificial Sequence: Synthetic oligonucleotide
gaccgagaacagauuaaau

SEQ ID NO: 2379053 - RNA, 19 nt, Artificial Sequence
  Description of Artificial Sequence: Synthetic oligonucleotide
ggacgcuuauguacuggac

SEQ ID NO: 2379054 - RNA, 19 nt, Artificial Sequence
  Description of Artificial Sequence: Synthetic oligonucleotide
gcucuguacugguccagga

SEQ ID NO: 2379055 - RNA, 19 nt, Artificial Sequence
  Description of Artificial Sequence: Synthetic oligonucleotide
cuggucgaacguauucccu

SEQ ID NO: 2379056 - RNA, 19 nt, Artificial Sequence
  Description of Artificial Sequence: Synthetic oligonucleotide
auacuguauucaggauaaa

SEQ ID NO: 2379057 - RNA, 19 nt, Artificial Sequence
  Description of Artificial Sequence: Synthetic oligonucleotide
ggccggaguaaucucuuua

SEQ ID NO: 2379058 - RNA, 19 nt, Artificial Sequence
  Description of Artificial Sequence: Synthetic oligonucleotide
gccaagcaugucaugccac

SEQ ID NO: 2379059 - RNA, 19 nt, Artificial Sequence
  Description of Artificial Sequence: Synthetic oligonucleotide
cugugggccggaguaaucu

SEQ ID NO: 2379060 - RNA, 19 nt, Artificial Sequence
  Description of Artificial Sequence: Synthetic oligonucleotide
acacgccagucuucugauu

SEQ ID NO: 2379061 - RNA, 19 nt, Artificial Sequence
  Description of Artificial Sequence: Synthetic oligonucleotide
gcuuucgaugaugcuguuc

SEQ ID NO: 2379062 - RNA, 19 nt, Artificial Sequence
  Description of Artificial Sequence: Synthetic oligonucleotide
gccggaguaaucucuuuau

SEQ ID NO: 2379063 - RNA, 19 nt, Artificial Sequence
  Description of Artificial Sequence: Synthetic oligonucleotide
ccuuaaacacgccagucuu

SEQ ID NO: 2379064 - RNA, 19 nt, Artificial Sequence
  Description of Artificial Sequence: Synthetic oligonucleotide
agacagucauccagcuguu

SEQ ID NO: 2379065 - RNA, 19 nt, Artificial Sequence
  Description of Artificial Sequence: Synthetic oligonucleotide
cccaucguaaaacgcagcu

SEQ ID NO: 2379066 - RNA, 19 nt, Artificial Sequence
  Description of Artificial Sequence: Synthetic oligonucleotide
cguaaaacgcagcuugaua

SEQ ID NO: 2379067 - RNA, 19 nt, Artificial Sequence
  Description of Artificial Sequence: Synthetic oligonucleotide
ccaucaguuaacagaacuu

SEQ ID NO: 2379068 - RNA, 19 nt, Artificial Sequence
  Description of Artificial Sequence: Synthetic oligonucleotide
auuaugccucaaggagaua

SEQ ID NO: 2379069 - RNA, 19 nt, Artificial Sequence
  Description of Artificial Sequence: Synthetic oligonucleotide
guaagcagaaggggauaau

SEQ ID NO: 2379070 - RNA, 19 nt, Artificial Sequence
  Description of Artificial Sequence: Synthetic oligonucleotide
gugggccggaguaaucucu

SEQ ID NO: 2379071 - RNA, 19 nt, Artificial Sequence
  Description of Artificial Sequence: Synthetic oligonucleotide
gagcccagccaagcauguc

SEQ ID NO: 2379072 - RNA, 19 nt, Artificial Sequence
  Description of Artificial Sequence: Synthetic oligonucleotide
cuguauugucgaagcuggu

SEQ ID NO: 2379073 - RNA, 19 nt, Artificial Sequence
  Description of Artificial Sequence: Synthetic oligonucleotide
cggcguggggcaaauacca

SEQ ID NO: 2379074 - RNA, 19 nt, Artificial Sequence
  Description of Artificial Sequence: Synthetic oligonucleotide
cgagaacagauuaaaugau

SEQ ID NO: 2379075 - RNA, 19 nt, Artificial Sequence
  Description of Artificial Sequence: Synthetic oligonucleotide
caacuuggaguggaaguuu

SEQ ID NO: 2379076 - RNA, 19 nt, Artificial Sequence
  Description of Artificial Sequence: Synthetic oligonucleotide
cguauucccucggcguggg

SEQ ID NO: 2379077 - RNA, 19 nt, Artificial Sequence
  Description of Artificial Sequence: Synthetic oligonucleotide
ccugugggccggaguaauc

SEQ ID NO: 2379078 - RNA, 19 nt, Artificial Sequence
  Description of Artificial Sequence: Synthetic oligonucleotide
uucccucggcguggggcaa

SEQ ID NO: 2379079 - RNA, 19 nt, Artificial Sequence
  Description of Artificial Sequence: Synthetic oligonucleotide
guccacuauuaugccucaa

SEQ ID NO: 2379080 - RNA, 19 nt, Artificial Sequence
  Description of Artificial Sequence: Synthetic oligonucleotide
cugugaccgagaacagauu

SEQ ID NO: 2379081 - RNA, 19 nt, Artificial Sequence
  Description of Artificial Sequence: Synthetic oligonucleotide
ucccucggcguggggcaaa

SEQ ID NO: 2379082 - RNA, 19 nt, Artificial Sequence
  Description of Artificial Sequence: Synthetic oligonucleotide
gcguggggcaaauaccauu

SEQ ID NO: 2379083 - RNA, 19 nt, Artificial Sequence
  Description of Artificial Sequence: Synthetic oligonucleotide
gacagucauccagcuguuu

SEQ ID NO: 2379084 - RNA, 19 nt, Artificial Sequence
  Description of Artificial Sequence: Synthetic oligonucleotide
cgcacauaacaaugucaaa

SEQ ID NO: 2379085 - RNA, 19 nt, Artificial Sequence
  Description of Artificial Sequence: Synthetic oligonucleotide
ccgagcucacacacagcaa

SEQ ID NO: 2379086 - RNA, 19 nt, Artificial Sequence
  Description of Artificial Sequence: Synthetic oligonucleotide
ggcuggcucuguacugguc

SEQ ID NO: 2379087 - RNA, 19 nt, Artificial Sequence
  Description of Artificial Sequence: Synthetic oligonucleotide
ccugucgcaggagcuucca

SEQ ID NO: 2379088 - RNA, 19 nt, Artificial Sequence
  Description of Artificial Sequence: Synthetic oligonucleotide
ccggaguaaucucuuuauu

SEQ ID NO: 2379089 - RNA, 19 nt, Artificial Sequence
  Description of Artificial Sequence: Synthetic oligonucleotide
ccaucguaaaacgcagcuu

SEQ ID NO: 2379090 - RNA, 19 nt, Artificial Sequence
  Description of Artificial Sequence: Synthetic oligonucleotide
ggcguggggcaaauaccau

SEQ ID NO: 2379091 - RNA, 19 nt, Artificial Sequence
  Description of Artificial Sequence: Synthetic oligonucleotide
gggccggaguaaucucuuu

SEQ ID NO: 2379092 - RNA, 19 nt, Artificial Sequence
  Description of Artificial Sequence: Synthetic oligonucleotide
cgaugaugcuguucacauu

SEQ ID NO: 2379093 - RNA, 19 nt, Artificial Sequence
  Description of Artificial Sequence: Synthetic oligonucleotide
cgccagucuucugauugcu

SEQ ID NO: 2379094 - RNA, 19 nt, Artificial Sequence
  Description of Artificial Sequence: Synthetic oligonucleotide
cccugugggccggaguaau

SEQ ID NO: 2379095 - RNA, 19 nt, Artificial Sequence
  Description of Artificial Sequence: Synthetic oligonucleotide
ccucggcguggggcaaaua

SEQ ID NO: 2379096 - RNA, 19 nt, Artificial Sequence
  Description of Artificial Sequence: Synthetic oligonucleotide
aauaaaaugguaaucaacc

SEQ ID NO: 2379097 - RNA, 19 nt, Artificial Sequence
  Description of Artificial Sequence: Synthetic oligonucleotide
aagacugucauguucaagc

SEQ ID NO: 2379098 - RNA, 19 nt, Artificial Sequence
  Description of Artificial Sequence: Synthetic oligonucleotide
ugugcuauuaaacacaaug

SEQ ID NO: 2379099 - RNA, 19 nt, Artificial Sequence
  Description of Artificial Sequence: Synthetic oligonucleotide
aaagucuacaacuugaaga

SEQ ID NO: 2379100 - RNA, 19 nt, Artificial Sequence
  Description of Artificial Sequence: Synthetic oligonucleotide
ucaacuagcaugcuaauag

SEQ ID NO: 2379101 - RNA, 19 nt, Artificial Sequence
  Description of Artificial Sequence: Synthetic oligonucleotide
guaacaaucauccugagca

SEQ ID NO: 2379102 - RNA, 19 nt, Artificial Sequence
  Description of Artificial Sequence: Synthetic oligonucleotide
aaugguaaucaaccgaggg

SEQ ID NO: 2379103 - RNA, 19 nt, Artificial Sequence
  Description of Artificial Sequence: Synthetic oligonucleotide
ucuuugaugagagagaaag

SEQ ID NO: 2379104 - RNA, 19 nt, Artificial Sequence
  Description of Artificial Sequence: Synthetic oligonucleotide
aucagaaaaggcuaaaguc

SEQ ID NO: 2379105 - RNA, 19 nt, Artificial Sequence
  Description of Artificial Sequence: Synthetic oligonucleotide
cuaguaagcacuuaaacug

SEQ ID NO: 2379106 - RNA, 19 nt, Artificial Sequence
  Description of Artificial Sequence: Synthetic oligonucleotide
ucuaauaguaagauguccc

SEQ ID NO: 2379107 - RNA, 19 nt, Artificial Sequence
  Description of Artificial Sequence: Synthetic oligonucleotide
ugcuaaguaaaacacaucu

SEQ ID NO: 2379108 - RNA, 19 nt, Artificial Sequence
  Description of Artificial Sequence: Synthetic oligonucleotide
cuauuaaacacaauggcac

SEQ ID NO: 2379109 - RNA, 19 nt, Artificial Sequence
  Description of Artificial Sequence: Synthetic oligonucleotide
agcagucucacguuuaugc

SEQ ID NO: 2379110 - RNA, 19 nt, Artificial Sequence
  Description of Artificial Sequence: Synthetic oligonucleotide
auaguuaacuaguaagcac

SEQ ID NO: 2379111 - RNA, 19 nt, Artificial Sequence
  Description of Artificial Sequence: Synthetic oligonucleotide
uaugccuuuaauaucaagu

SEQ ID NO: 2379112 - RNA, 19 nt, Artificial Sequence
  Description of Artificial Sequence: Synthetic oligonucleotide
caugcuaauaguuaacuag

SEQ ID NO: 2379113 - RNA, 19 nt, Artificial Sequence
  Description of Artificial Sequence: Synthetic oligonucleotide
aauaucaagugcuuuacau

SEQ ID NO: 2379114 - RNA, 19 nt, Artificial Sequence
  Description of Artificial Sequence: Synthetic oligonucleotide
aaaaugguaaucaaccgag

SEQ ID NO: 2379115 - RNA, 19 nt, Artificial Sequence
  Description of Artificial Sequence: Synthetic oligonucleotide
uuucucuacacacauuuag

SEQ ID NO: 2379116 - RNA, 19 nt, Artificial Sequence
  Description of Artificial Sequence: Synthetic oligonucleotide
auaaaaugguaaucaaccg

SEQ ID NO: 2379117 - RNA, 19 nt, Artificial Sequence
  Description of Artificial Sequence: Synthetic oligonucleotide
aagaugucccaauaaaaug

SEQ ID NO: 2379118 - RNA, 19 nt, Artificial Sequence
  Description of Artificial Sequence: Synthetic oligonucleotide
ugcuauuaaacacaauggc

SEQ ID NO: 2379119 - RNA, 19 nt, Artificial Sequence
  Description of Artificial Sequence: Synthetic oligonucleotide
uaaaaugguaaucaaccga

SEQ ID NO: 2379120 - RNA, 19 nt, Artificial Sequence
  Description of Artificial Sequence: Synthetic oligonucleotide
uugacuuuugucauaaggu

SEQ ID NO: 2379121 - RNA, 19 nt, Artificial Sequence
  Description of Artificial Sequence: Synthetic oligonucleotide
uaaaacacaucuucaaaug

SEQ ID NO: 2379122 - RNA, 19 nt, Artificial Sequence
  Description of Artificial Sequence: Synthetic oligonucleotide
uuacauaucaaguugucuc

SEQ ID NO: 2379123 - RNA, 19 nt, Artificial Sequence
  Description of Artificial Sequence: Synthetic oligonucleotide
aacaugucaguuucucuac

SEQ ID NO: 2379124 - RNA, 19 nt, Artificial Sequence
  Description of Artificial Sequence: Synthetic oligonucleotide
uuuucugauguauguaggg

SEQ ID NO: 2379125 - RNA, 19 nt, Artificial Sequence
  Description of Artificial Sequence: Synthetic oligonucleotide
aagucuacaacuugaagaa

SEQ ID NO: 2379126 - RNA, 19 nt, Artificial Sequence
  Description of Artificial Sequence: Synthetic oligonucleotide
uccaucaagagcuucuggg

SEQ ID NO: 2379127 - RNA, 19 nt, Artificial Sequence
  Description of Artificial Sequence: Synthetic oligonucleotide
uuaacuaguaagcacuuaa

SEQ ID NO: 2379128 - RNA, 19 nt, Artificial Sequence
  Description of Artificial Sequence: Synthetic oligonucleotide
acugguaacaaucauccug

SEQ ID NO: 2379129 - RNA, 19 nt, Artificial Sequence
  Description of Artificial Sequence: Synthetic oligonucleotide
ucaagugcuuuacauauca

SEQ ID NO: 2379130 - RNA, 19 nt, Artificial Sequence
  Description of Artificial Sequence: Synthetic oligonucleotide
acauuuagcagucucacgu

SEQ ID NO: 2379131 - RNA, 19 nt, Artificial Sequence
  Description of Artificial Sequence: Synthetic oligonucleotide
uugauagccaucucuagcc

SEQ ID NO: 2379132 - RNA, 19 nt, Artificial Sequence
  Description of Artificial Sequence: Synthetic oligonucleotide
aauaguuaacuaguaagca

SEQ ID NO: 2379133 - RNA, 19 nt, Artificial Sequence
  Description of Artificial Sequence: Synthetic oligonucleotide
ugucauaagguuaaauuuc

SEQ ID NO: 2379134 - RNA, 19 nt, Artificial Sequence
  Description of Artificial Sequence: Synthetic oligonucleotide
ugcuuuacauaucaaguug

SEQ ID NO: 2379135 - RNA, 19 nt, Artificial Sequence
  Description of Artificial Sequence: Synthetic oligonucleotide
uuugucauaagguuaaauu

SEQ ID NO: 2379136 - RNA, 19 nt, Artificial Sequence
  Description of Artificial Sequence: Synthetic oligonucleotide
ucuacacacauuuagcagu

SEQ ID NO: 2379137 - RNA, 19 nt, Artificial Sequence
  Description of Artificial Sequence: Synthetic oligonucleotide
cuaucuaauaguaagaugu

SEQ ID NO: 2379138 - RNA, 19 nt, Artificial Sequence
  Description of Artificial Sequence: Synthetic oligonucleotide
uaguaagcacuuaaacugg

SEQ ID NO: 2379139 - RNA, 19 nt, Artificial Sequence
  Description of Artificial Sequence: Synthetic oligonucleotide
acuuaaacugguaacaauc

SEQ ID NO: 2379140 - RNA, 19 nt, Artificial Sequence
  Description of Artificial Sequence: Synthetic oligonucleotide
uaucagaaaaggcuaaagu

SEQ ID NO: 2379141 - RNA, 19 nt, Artificial Sequence
  Description of Artificial Sequence: Synthetic oligonucleotide
aaggcuaaaguccccuaac

SEQ ID NO: 2379142 - RNA, 19 nt, Artificial Sequence
  Description of Artificial Sequence: Synthetic oligonucleotide
aauaguaagaugucccaau

SEQ ID NO: 2379143 - RNA, 19 nt, Artificial Sequence
  Description of Artificial Sequence: Synthetic oligonucleotide
uuguauuaagucuccauca

SEQ ID NO: 2379144 - RNA, 19 nt, Artificial Sequence
  Description of Artificial Sequence: Synthetic oligonucleotide
gaugucagccuuuuggacc

SEQ ID NO: 2379145 - RNA, 19 nt, Artificial Sequence
  Description of Artificial Sequence: Synthetic oligonucleotide
agagauaucagaaaaggcu

SEQ ID NO: 2379146 - RNA, 19 nt, Artificial Sequence
  Description of Artificial Sequence: Synthetic oligonucleotide
uggugaacuucucagagca

SEQ ID NO: 2379147 - RNA, 19 nt, Artificial Sequence
  Description of Artificial Sequence: Synthetic oligonucleotide
agaugucccaauaaaaugg

SEQ ID NO: 2379148 - RNA, 19 nt, Artificial Sequence
  Description of Artificial Sequence: Synthetic oligonucleotide
uaucaagugcuuuacauau

SEQ ID NO: 2379149 - RNA, 19 nt, Artificial Sequence
  Description of Artificial Sequence: Synthetic oligonucleotide
uaaacugguaacaaucauc

SEQ ID NO: 2379150 - RNA, 19 nt, Artificial Sequence
  Description of Artificial Sequence: Synthetic oligonucleotide
aagguuaaauuucacuuaa

SEQ ID NO: 2379151 - RNA, 19 nt, Artificial Sequence
  Description of Artificial Sequence: Synthetic oligonucleotide
gauacguaugugcagagca

SEQ ID NO: 2379152 - RNA, 19 nt, Artificial Sequence
  Description of Artificial Sequence: Synthetic oligonucleotide
aucuaauaguaagaugucc

SEQ ID NO: 2379153 - RNA, 19 nt, Artificial Sequence
  Description of Artificial Sequence: Synthetic oligonucleotide
ugucccaauaaaaugguaa

SEQ ID NO: 2379154 - RNA, 19 nt, Artificial Sequence
  Description of Artificial Sequence: Synthetic oligonucleotide
cacaccuucagcuacugcc

SEQ ID NO: 2379155 - RNA, 19 nt, Artificial Sequence
  Description of Artificial Sequence: Synthetic oligonucleotide
ugaagaauuugacuuuugu

SEQ ID NO: 2379156 - RNA, 19 nt, Artificial Sequence
  Description of Artificial Sequence: Synthetic oligonucleotide
ucucuacacacauuuagca

SEQ ID NO: 2379157 - RNA, 19 nt, Artificial Sequence
  Description of Artificial Sequence: Synthetic oligonucleotide
aagaucugaagccacucca

SEQ ID NO: 2379158 - RNA, 19 nt, Artificial Sequence
  Description of Artificial Sequence: Synthetic oligonucleotide
auaccuacauaguccagac

SEQ ID NO: 2379159 - RNA, 19 nt, Artificial Sequence
  Description of Artificial Sequence: Synthetic oligonucleotide
cuuuagucuuugaugagag

SEQ ID NO: 2379160 - RNA, 19 nt, Artificial Sequence
  Description of Artificial Sequence: Synthetic oligonucleotide
accaggcucaaguagaaag

SEQ ID NO: 2379161 - RNA, 19 nt, Artificial Sequence
  Description of Artificial Sequence: Synthetic oligonucleotide
acguuuaugccuuuaauau

SEQ ID NO: 2379162 - RNA, 19 nt, Artificial Sequence
  Description of Artificial Sequence: Synthetic oligonucleotide
uaagcacuuaaacugguaa

SEQ ID NO: 2379163 - RNA, 19 nt, Artificial Sequence
  Description of Artificial Sequence: Synthetic oligonucleotide
uucucuacacacauuuagc

SEQ ID NO: 2379164 - RNA, 19 nt, Artificial Sequence
  Description of Artificial Sequence: Synthetic oligonucleotide
cacagugauacguaugugc

SEQ ID NO: 2379165 - RNA, 19 nt, Artificial Sequence
  Description of Artificial Sequence: Synthetic oligonucleotide
augccuuuaauaucaagug

SEQ ID NO: 2379166 - RNA, 19 nt, Artificial Sequence
  Description of Artificial Sequence: Synthetic oligonucleotide
uccagggacuaucuaauag

SEQ ID NO: 2379167 - RNA, 19 nt, Artificial Sequence
  Description of Artificial Sequence: Synthetic oligonucleotide
auguucaagccuccaauac

SEQ ID NO: 2379168 - RNA, 19 nt, Artificial Sequence
  Description of Artificial Sequence: Synthetic oligonucleotide
aaugacgacagaugcuucu

SEQ ID NO: 2379169 - RNA, 19 nt, Artificial Sequence
  Description of Artificial Sequence: Synthetic oligonucleotide
uuagccuugccuaccaggc

SEQ ID NO: 2379170 - RNA, 19 nt, Artificial Sequence
  Description of Artificial Sequence: Synthetic oligonucleotide
aauaccuacauaguccaga

SEQ ID NO: 2379171 - RNA, 19 nt, Artificial Sequence
  Description of Artificial Sequence: Synthetic oligonucleotide
agacugucauguucaagcc

SEQ ID NO: 2379172 - RNA, 19 nt, Artificial Sequence
  Description of Artificial Sequence: Synthetic oligonucleotide
gggacuaucuaauaguaag

SEQ ID NO: 2379173 - RNA, 19 nt, Artificial Sequence
  Description of Artificial Sequence: Synthetic oligonucleotide
aguuucucuacacacauuu

SEQ ID NO: 2379174 - RNA, 19 nt, Artificial Sequence
  Description of Artificial Sequence: Synthetic oligonucleotide
uuggccaucacggaucugg

SEQ ID NO: 2379175 - RNA, 19 nt, Artificial Sequence
  Description of Artificial Sequence: Synthetic oligonucleotide
agagagaaagacaacacug

SEQ ID NO: 2379176 - RNA, 19 nt, Artificial Sequence
  Description of Artificial Sequence: Synthetic oligonucleotide
aguaagaugucccaauaaa

SEQ ID NO: 2379177 - RNA, 19 nt, Artificial Sequence
  Description of Artificial Sequence: Synthetic oligonucleotide
uacauaucaaguugucuca

SEQ ID NO: 2379178 - RNA, 19 nt, Artificial Sequence
  Description of Artificial Sequence: Synthetic oligonucleotide
acuaucuaauaguaagaug

SEQ ID NO: 2379179 - RNA, 19 nt, Artificial Sequence
  Description of Artificial Sequence: Synthetic oligonucleotide
aaccauaccacaguguggu

SEQ ID NO: 2379180 - RNA, 19 nt, Artificial Sequence
  Description of Artificial Sequence: Synthetic oligonucleotide
uggacugucccacauauua

SEQ ID NO: 2379181 - RNA, 19 nt, Artificial Sequence
  Description of Artificial Sequence: Synthetic oligonucleotide
gaaagucuacaacuugaag

SEQ ID NO: 2379182 - RNA, 19 nt, Artificial Sequence
  Description of Artificial Sequence: Synthetic oligonucleotide
aggcuaaaguccccuaacc

SEQ ID NO: 2379183 - RNA, 19 nt, Artificial Sequence
  Description of Artificial Sequence: Synthetic oligonucleotide
ucaaauggcugccuccaag

SEQ ID NO: 2379184 - RNA, 19 nt, Artificial Sequence
  Description of Artificial Sequence: Synthetic oligonucleotide
guuguauuaagucuccauc

SEQ ID NO: 2379185 - RNA, 19 nt, Artificial Sequence
  Description of Artificial Sequence: Synthetic oligonucleotide
guuuaugccuuuaauauca

SEQ ID NO: 2379186 - RNA, 19 nt, Artificial Sequence
  Description of Artificial Sequence: Synthetic oligonucleotide
accuacauaguccagacuu

SEQ ID NO: 2379187 - RNA, 19 nt, Artificial Sequence
  Description of Artificial Sequence: Synthetic oligonucleotide
agagcacaccuucagcuac

SEQ ID NO: 2379188 - RNA, 19 nt, Artificial Sequence
  Description of Artificial Sequence: Synthetic oligonucleotide
uuuugauagccaucucuag

SEQ ID NO: 2379189 - RNA, 19 nt, Artificial Sequence
  Description of Artificial Sequence: Synthetic oligonucleotide
cuacugccaacuaaugacg

SEQ ID NO: 2379190 - RNA, 19 nt, Artificial Sequence
  Description of Artificial Sequence: Synthetic oligonucleotide
uguauuaagucuccaucaa

SEQ ID NO: 2379191 - RNA, 19 nt, Artificial Sequence
  Description of Artificial Sequence: Synthetic oligonucleotide
aagacguuuugauagccau

SEQ ID NO: 2379192 - RNA, 19 nt, Artificial Sequence
  Description of Artificial Sequence: Synthetic oligonucleotide
uuaauaucaagugcuuuac

SEQ ID NO: 2379193 - RNA, 19 nt, Artificial Sequence
  Description of Artificial Sequence: Synthetic oligonucleotide
cauacgguuggccaucacg

SEQ ID NO: 2379194 - RNA, 19 nt, Artificial Sequence
  Description of Artificial Sequence: Synthetic oligonucleotide
uugccuaccaggcucaagu

SEQ ID NO: 2379195 - RNA, 19 nt, Artificial Sequence
  Description of Artificial Sequence: Synthetic oligonucleotide
agaauuugacuuuugucau

SEQ ID NO: 2379196 - RNA, 19 nt, Artificial Sequence
  Description of Artificial Sequence: Synthetic oligonucleotide
ugucccacauauuaaacau

SEQ ID NO: 2379197 - RNA, 19 nt, Artificial Sequence
  Description of Artificial Sequence: Synthetic oligonucleotide
guuaaauuucacuuaaagu

SEQ ID NO: 2379198 - RNA, 19 nt, Artificial Sequence
  Description of Artificial Sequence: Synthetic oligonucleotide
cacaauggcacgaccaacc

SEQ ID NO: 2379199 - RNA, 19 nt, Artificial Sequence
  Description of Artificial Sequence: Synthetic oligonucleotide
gaccaugccacagugauac

SEQ ID NO: 2379200 - RNA, 19 nt, Artificial Sequence
  Description of Artificial Sequence: Synthetic oligonucleotide
acugucauguucaagccuc

SEQ ID NO: 2379201 - RNA, 19 nt, Artificial Sequence
  Description of Artificial Sequence: Synthetic oligonucleotide
gccuccaauaccuacauag

SEQ ID NO: 2379202 - RNA, 19 nt, Artificial Sequence
  Description of Artificial Sequence: Synthetic oligonucleotide
cuuagccuugccuaccagg

SEQ ID NO: 2379203 - RNA, 19 nt, Artificial Sequence
  Description of Artificial Sequence: Synthetic oligonucleotide
ucuaugcuuagccuugccu

SEQ ID NO: 2379204 - RNA, 19 nt, Artificial Sequence
  Description of Artificial Sequence: Synthetic oligonucleotide
uccaagagugcaucugggg

SEQ ID NO: 2379205 - RNA, 19 nt, Artificial Sequence
  Description of Artificial Sequence: Synthetic oligonucleotide
ugcagagcacugaagacgu

SEQ ID NO: 2379206 - RNA, 19 nt, Artificial Sequence
  Description of Artificial Sequence: Synthetic oligonucleotide
uuuacauaucaaguugucu

SEQ ID NO: 2379207 - RNA, 19 nt, Artificial Sequence
  Description of Artificial Sequence: Synthetic oligonucleotide
agugcuuuacauaucaagu

SEQ ID NO: 2379208 - RNA, 19 nt, Artificial Sequence
  Description of Artificial Sequence: Synthetic oligonucleotide
caaguagaaagucuacaac

SEQ ID NO: 2379209 - RNA, 19 nt, Artificial Sequence
  Description of Artificial Sequence: Synthetic oligonucleotide
uaaacacaauggcacgacc

SEQ ID NO: 2379210 - RNA, 19 nt, Artificial Sequence
  Description of Artificial Sequence: Synthetic oligonucleotide
aaucaaccgagggaugggg

SEQ ID NO: 2379211 - RNA, 19 nt, Artificial Sequence
  Description of Artificial Sequence: Synthetic oligonucleotide
ugccaacuaaugacgacag

SEQ ID NO: 2379212 - RNA, 19 nt, Artificial Sequence
  Description of Artificial Sequence: Synthetic oligonucleotide
uguauguaggguguggacu

SEQ ID NO: 2379213 - RNA, 19 nt, Artificial Sequence
  Description of Artificial Sequence: Synthetic oligonucleotide
cucuacacacauuuagcag

SEQ ID NO: 2379214 - RNA, 19 nt, Artificial Sequence
  Description of Artificial Sequence: Synthetic oligonucleotide
acauaguccagacuugggu

SEQ ID NO: 2379215 - RNA, 19 nt, Artificial Sequence
  Description of Artificial Sequence: Synthetic oligonucleotide
uaucuaauaguaagauguc

SEQ ID NO: 2379216 - RNA, 19 nt, Artificial Sequence
  Description of Artificial Sequence: Synthetic oligonucleotide
cuuaaacugguaacaauca

SEQ ID NO: 2379217 - RNA, 19 nt, Artificial Sequence
  Description of Artificial Sequence: Synthetic oligonucleotide
guagaaagucuacaacuug

SEQ ID NO: 2379218 - RNA, 19 nt, Artificial Sequence
  Description of Artificial Sequence: Synthetic oligonucleotide
ugagcacuagaugucagcc

SEQ ID NO: 2379219 - RNA, 19 nt, Artificial Sequence
  Description of Artificial Sequence: Synthetic oligonucleotide
ugugugcuauuaaacacaa

SEQ ID NO: 2379220 - RNA, 19 nt, Artificial Sequence
  Description of Artificial Sequence: Synthetic oligonucleotide
ucucacacaucuaugcuua

SEQ ID NO: 2379221 - RNA, 19 nt, Artificial Sequence
  Description of Artificial Sequence: Synthetic oligonucleotide
augguaaucaaccgaggga

SEQ ID NO: 2379222 - RNA, 19 nt, Artificial Sequence
  Description of Artificial Sequence: Synthetic oligonucleotide
aaaggcuaaaguccccuaa

SEQ ID NO: 2379223 - RNA, 19 nt, Artificial Sequence
  Description of Artificial Sequence: Synthetic oligonucleotide
uguggacugucccacauau

SEQ ID NO: 2379224 - RNA, 19 nt, Artificial Sequence
  Description of Artificial Sequence: Synthetic oligonucleotide
auacgguuggccaucacgg

SEQ ID NO: 2379225 - RNA, 19 nt, Artificial Sequence
  Description of Artificial Sequence: Synthetic oligonucleotide
aacacaauggcacgaccaa

SEQ ID NO: 2379226 - RNA, 19 nt, Artificial Sequence
  Description of Artificial Sequence: Synthetic oligonucleotide
caacuaaugacgacagaug

SEQ ID NO: 2379227 - RNA, 19 nt, Artificial Sequence
  Description of Artificial Sequence: Synthetic oligonucleotide
guauguaggguguggacug

SEQ ID NO: 2379228 - RNA, 19 nt, Artificial Sequence
  Description of Artificial Sequence: Synthetic oligonucleotide
aaaugguaaucaaccgagg

SEQ ID NO: 2379229 - RNA, 19 nt, Artificial Sequence
  Description of Artificial Sequence: Synthetic oligonucleotide
uggaccaugccacagugau

SEQ ID NO: 2379230 - RNA, 19 nt, Artificial Sequence
  Description of Artificial Sequence: Synthetic oligonucleotide
auagccaucucuagccugc

SEQ ID NO: 2379231 - RNA, 19 nt, Artificial Sequence
  Description of Artificial Sequence: Synthetic oligonucleotide
ucuacaacuugaagaauuu

SEQ ID NO: 2379232 - RNA, 19 nt, Artificial Sequence
  Description of Artificial Sequence: Synthetic oligonucleotide
ugguaaucaaccgagggau

SEQ ID NO: 2379233 - RNA, 19 nt, Artificial Sequence
  Description of Artificial Sequence: Synthetic oligonucleotide
uuaugccuuuaauaucaag

SEQ ID NO: 2379234 - RNA, 19 nt, Artificial Sequence
  Description of Artificial Sequence: Synthetic oligonucleotide
uguuguauuaagucuccau

SEQ ID NO: 2379235 - RNA, 19 nt, Artificial Sequence
  Description of Artificial Sequence: Synthetic oligonucleotide
cauaguccagacuuggguc

SEQ ID NO: 2379236 - RNA, 19 nt, Artificial Sequence
  Description of Artificial Sequence: Synthetic oligonucleotide
cuaaaguccccuaaccuca

SEQ ID NO: 2379237 - RNA, 19 nt, Artificial Sequence
  Description of Artificial Sequence: Synthetic oligonucleotide
agcaagagcacaccuucag

SEQ ID NO: 2379238 - RNA, 19 nt, Artificial Sequence
  Description of Artificial Sequence: Synthetic oligonucleotide
ugaacuucucagagcaaga

SEQ ID NO: 2379239 - RNA, 19 nt, Artificial Sequence
  Description of Artificial Sequence: Synthetic oligonucleotide
acugccaacuaaugacgac

SEQ ID NO: 2379240 - RNA, 19 nt, Artificial Sequence
  Description of Artificial Sequence: Synthetic oligonucleotide
gcuacugccaacuaaugac

SEQ ID NO: 2379241 - RNA, 19 nt, Artificial Sequence
  Description of Artificial Sequence: Synthetic oligonucleotide
aauggcacgaccaaccaua

SEQ ID NO: 2379242 - RNA, 19 nt, Artificial Sequence
  Description of Artificial Sequence: Synthetic oligonucleotide
uaguaagaugucccaauaa

SEQ ID NO: 2379243 - RNA, 19 nt, Artificial Sequence
  Description of Artificial Sequence: Synthetic oligonucleotide
ugauguauguagggugugg

SEQ ID NO: 2379244 - RNA, 19 nt, Artificial Sequence
  Description of Artificial Sequence: Synthetic oligonucleotide
uaugcuuagccuugccuac

SEQ ID NO: 2379245 - RNA, 19 nt, Artificial Sequence
  Description of Artificial Sequence: Synthetic oligonucleotide
agugauacguaugugcaga

SEQ ID NO: 2379246 - RNA, 19 nt, Artificial Sequence
  Description of Artificial Sequence: Synthetic oligonucleotide
auaucaagugcuuuacaua

SEQ ID NO: 2379247 - RNA, 19 nt, Artificial Sequence
  Description of Artificial Sequence: Synthetic oligonucleotide
ucagagcaagagcacaccu

SEQ ID NO: 2379248 - RNA, 19 nt, Artificial Sequence
  Description of Artificial Sequence: Synthetic oligonucleotide
ugucucacacaucuaugcu

SEQ ID NO: 2379249 - RNA, 19 nt, Artificial Sequence
  Description of Artificial Sequence: Synthetic oligonucleotide
uuuuggaccaugccacagu

SEQ ID NO: 2379250 - RNA, 19 nt, Artificial Sequence
  Description of Artificial Sequence: Synthetic oligonucleotide
cuaauaguaagauguccca

SEQ ID NO: 2379251 - RNA, 19 nt, Artificial Sequence
  Description of Artificial Sequence: Synthetic oligonucleotide
agccuugccuaccaggcuc

SEQ ID NO: 2379252 - RNA, 19 nt, Artificial Sequence
  Description of Artificial Sequence: Synthetic oligonucleotide
uuaaacacaauggcacgac

SEQ ID NO: 2379253 - RNA, 19 nt, Artificial Sequence
  Description of Artificial Sequence: Synthetic oligonucleotide
aaagacugucauguucaag

SEQ ID NO: 2379254 - RNA, 19 nt, Artificial Sequence
  Description of Artificial Sequence: Synthetic oligonucleotide
cuuuacauaucaaguuguc

SEQ ID NO: 2379255 - RNA, 19 nt, Artificial Sequence
  Description of Artificial Sequence: Synthetic oligonucleotide
agccugcuaaguaaaacac

SEQ ID NO: 2379256 - RNA, 19 nt, Artificial Sequence
  Description of Artificial Sequence: Synthetic oligonucleotide
auuaaacacaauggcacga

SEQ ID NO: 2379257 - RNA, 19 nt, Artificial Sequence
  Description of Artificial Sequence: Synthetic oligonucleotide
ggcacgaccaaccauacca

SEQ ID NO: 2379258 - RNA, 19 nt, Artificial Sequence
  Description of Artificial Sequence: Synthetic oligonucleotide
aaucauccugagcacuaga

SEQ ID NO: 2379259 - RNA, 19 nt, Artificial Sequence
  Description of Artificial Sequence: Synthetic oligonucleotide
gguggugaacuucucagag

SEQ ID NO: 2379260 - RNA, 19 nt, Artificial Sequence
  Description of Artificial Sequence: Synthetic oligonucleotide
gaaagacaacacugugugc

SEQ ID NO: 2379261 - RNA, 19 nt, Artificial Sequence
  Description of Artificial Sequence: Synthetic oligonucleotide
uguaggguguggacugucc

SEQ ID NO: 2379262 - RNA, 19 nt, Artificial Sequence
  Description of Artificial Sequence: Synthetic oligonucleotide
acauaucaaguugucucac

SEQ ID NO: 2379263 - RNA, 19 nt, Artificial Sequence
  Description of Artificial Sequence: Synthetic oligonucleotide
aucuaugcuuagccuugcc

SEQ ID NO: 2379264 - RNA, 19 nt, Artificial Sequence
  Description of Artificial Sequence: Synthetic oligonucleotide
uaaucaaccgagggauggg

SEQ ID NO: 2379265 - RNA, 19 nt, Artificial Sequence
  Description of Artificial Sequence: Synthetic oligonucleotide
caugucaguuucucuacac

SEQ ID NO: 2379266 - RNA, 19 nt, Artificial Sequence
  Description of Artificial Sequence: Synthetic oligonucleotide
cuccaauaccuacauaguc

SEQ ID NO: 2379267 - RNA, 19 nt, Artificial Sequence
  Description of Artificial Sequence: Synthetic oligonucleotide
ugcuaauaguuaacuagua

SEQ ID NO: 2379268 - RNA, 19 nt, Artificial Sequence
  Description of Artificial Sequence: Synthetic oligonucleotide
uacugccaacuaaugacga

SEQ ID NO: 2379269 - RNA, 19 nt, Artificial Sequence
  Description of Artificial Sequence: Synthetic oligonucleotide
agcuacugccaacuaauga

SEQ ID NO: 2379270 - RNA, 19 nt, Artificial Sequence
  Description of Artificial Sequence: Synthetic oligonucleotide
augucagccuuuuggacca

SEQ ID NO: 2379271 - RNA, 19 nt, Artificial Sequence
  Description of Artificial Sequence: Synthetic oligonucleotide
gagauaucagaaaaggcua

SEQ ID NO: 2379272 - RNA, 19 nt, Artificial Sequence
  Description of Artificial Sequence: Synthetic oligonucleotide
uuuagcagucucacguuua

SEQ ID NO: 2379273 - RNA, 19 nt, Artificial Sequence
  Description of Artificial Sequence: Synthetic oligonucleotide
cuagcaugcuaauaguuaa

SEQ ID NO: 2379274 - RNA, 19 nt, Artificial Sequence
  Description of Artificial Sequence: Synthetic oligonucleotide
auuucacuuaaaguuuuca

SEQ ID NO: 2379275 - RNA, 19 nt, Artificial Sequence
  Description of Artificial Sequence: Synthetic oligonucleotide
caaccauaccacagugugg

SEQ ID NO: 2379276 - RNA, 19 nt, Artificial Sequence
  Description of Artificial Sequence: Synthetic oligonucleotide
auaguaagaugucccaaua

SEQ ID NO: 2379277 - RNA, 19 nt, Artificial Sequence
  Description of Artificial Sequence: Synthetic oligonucleotide
augcuaauaguuaacuagu

SEQ ID NO: 2379278 - RNA, 19 nt, Artificial Sequence
  Description of Artificial Sequence: Synthetic oligonucleotide
uaauaguaagaugucccaa

SEQ ID NO: 2379279 - RNA, 19 nt, Artificial Sequence
  Description of Artificial Sequence: Synthetic oligonucleotide
uggaaucaauuuucugaug

SEQ ID NO: 2379280 - RNA, 19 nt, Artificial Sequence
  Description of Artificial Sequence: Synthetic oligonucleotide
agcacuagaugucagccuu

SEQ ID NO: 2379281 - RNA, 19 nt, Artificial Sequence
  Description of Artificial Sequence: Synthetic oligonucleotide
cuacacacauuuagcaguc

SEQ ID NO: 2379282 - RNA, 19 nt, Artificial Sequence
  Description of Artificial Sequence: Synthetic oligonucleotide
acagugauacguaugugca

SEQ ID NO: 2379283 - RNA, 19 nt, Artificial Sequence
  Description of Artificial Sequence: Synthetic oligonucleotide
ucacguuuaugccuuuaau

SEQ ID NO: 2379284 - RNA, 19 nt, Artificial Sequence
  Description of Artificial Sequence: Synthetic oligonucleotide
agcaugcuaauaguuaacu

SEQ ID NO: 2379285 - RNA, 19 nt, Artificial Sequence
  Description of Artificial Sequence: Synthetic oligonucleotide
ugacgacagaugcuucugc

SEQ ID NO: 2379286 - RNA, 19 nt, Artificial Sequence
  Description of Artificial Sequence: Synthetic oligonucleotide
acuuuugucauaagguuaa

SEQ ID NO: 2379287 - RNA, 19 nt, Artificial Sequence
  Description of Artificial Sequence: Synthetic oligonucleotide
cacugugugcuauuaaaca

SEQ ID NO: 2379288 - RNA, 19 nt, Artificial Sequence
  Description of Artificial Sequence: Synthetic oligonucleotide
uuagcagucucacguuuau

SEQ ID NO: 2379289 - RNA, 19 nt, Artificial Sequence
  Description of Artificial Sequence: Synthetic oligonucleotide
ugauagccaucucuagccu

SEQ ID NO: 2379290 - RNA, 19 nt, Artificial Sequence
  Description of Artificial Sequence: Synthetic oligonucleotide
aacugguaacaaucauccu

SEQ ID NO: 2379291 - RNA, 19 nt, Artificial Sequence
  Description of Artificial Sequence: Synthetic oligonucleotide
cugugugcuauuaaacaca

SEQ ID NO: 2379292 - RNA, 19 nt, Artificial Sequence
  Description of Artificial Sequence: Synthetic oligonucleotide
ggaaucaauuuucugaugu

SEQ ID NO: 2379293 - RNA, 19 nt, Artificial Sequence
  Description of Artificial Sequence: Synthetic oligonucleotide
cugagcacuagaugucagc

SEQ ID NO: 2379294 - RNA, 19 nt, Artificial Sequence
  Description of Artificial Sequence: Synthetic oligonucleotide
gucauaagguuaaauuuca

SEQ ID NO: 2379295 - RNA, 19 nt, Artificial Sequence
  Description of Artificial Sequence: Synthetic oligonucleotide
auacguaugugcagagcac

SEQ ID NO: 2379296 - RNA, 19 nt, Artificial Sequence
  Description of Artificial Sequence: Synthetic oligonucleotide
aagagcacaccuucagcua

SEQ ID NO: 2379297 - RNA, 19 nt, Artificial Sequence
  Description of Artificial Sequence: Synthetic oligonucleotide
uagcaugcuaauaguuaac

SEQ ID NO: 2379298 - RNA, 19 nt, Artificial Sequence
  Description of Artificial Sequence: Synthetic oligonucleotide
agugcaucuggggaagauc

SEQ ID NO: 2379299 - RNA, 19 nt, Artificial Sequence
  Description of Artificial Sequence: Synthetic oligonucleotide
gagagagaaagacaacacu

SEQ ID NO: 2379300 - RNA, 19 nt, Artificial Sequence
  Description of Artificial Sequence: Synthetic oligonucleotide
gcuauuaaacacaauggca

SEQ ID NO: 2379301 - RNA, 19 nt, Artificial Sequence
  Description of Artificial Sequence: Synthetic oligonucleotide
cuccaagagugcaucuggg

SEQ ID NO: 2379302 - RNA, 19 nt, Artificial Sequence
  Description of Artificial Sequence: Synthetic oligonucleotide
acacaucuaugcuuagccu

SEQ ID NO: 2379303 - RNA, 19 nt, Artificial Sequence
  Description of Artificial Sequence: Synthetic oligonucleotide
aaguccccuaaccucacuu

SEQ ID NO: 2379304 - RNA, 19 nt, Artificial Sequence
  Description of Artificial Sequence: Synthetic oligonucleotide
uuuaugccuuuaauaucaa

SEQ ID NO: 2379305 - RNA, 19 nt, Artificial Sequence
  Description of Artificial Sequence: Synthetic oligonucleotide
acgaggucugucuuaauuu

SEQ ID NO: 2379306 - RNA, 19 nt, Artificial Sequence
  Description of Artificial Sequence: Synthetic oligonucleotide
uacguaugugcagagcacu

SEQ ID NO: 2379307 - RNA, 19 nt, Artificial Sequence
  Description of Artificial Sequence: Synthetic oligonucleotide
ccacauauuaaacauguca

SEQ ID NO: 2379308 - RNA, 19 nt, Artificial Sequence
  Description of Artificial Sequence: Synthetic oligonucleotide
aagccuccaauaccuacau

SEQ ID NO: 2379309 - RNA, 19 nt, Artificial Sequence
  Description of Artificial Sequence: Synthetic oligonucleotide
gauguauguagggugugga

SEQ ID NO: 2379310 - RNA, 19 nt, Artificial Sequence
  Description of Artificial Sequence: Synthetic oligonucleotide
cacguuuaugccuuuaaua

SEQ ID NO: 2379311 - RNA, 19 nt, Artificial Sequence
  Description of Artificial Sequence: Synthetic oligonucleotide
aguagaaagucuacaacuu

SEQ ID NO: 2379312 - RNA, 19 nt, Artificial Sequence
  Description of Artificial Sequence: Synthetic oligonucleotide
ccaaccauaccacagugug

SEQ ID NO: 2379313 - RNA, 19 nt, Artificial Sequence
  Description of Artificial Sequence: Synthetic oligonucleotide
gacgacagaugcuucugca

SEQ ID NO: 2379314 - RNA, 19 nt, Artificial Sequence
  Description of Artificial Sequence: Synthetic oligonucleotide
gguaacaaucauccugagc

SEQ ID NO: 2379315 - RNA, 19 nt, Artificial Sequence
  Description of Artificial Sequence: Synthetic oligonucleotide
aagacaacacugugugcua

SEQ ID NO: 2379316 - RNA, 19 nt, Artificial Sequence
  Description of Artificial Sequence: Synthetic oligonucleotide
cugucccacauauuaaaca

SEQ ID NO: 2379317 - RNA, 19 nt, Artificial Sequence
  Description of Artificial Sequence: Synthetic oligonucleotide
gaaucaauuuucugaugua

SEQ ID NO: 2379318 - RNA, 19 nt, Artificial Sequence
  Description of Artificial Sequence: Synthetic oligonucleotide
aacuagcaugcuaauaguu

SEQ ID NO: 2379319 - RNA, 19 nt, Artificial Sequence
  Description of Artificial Sequence: Synthetic oligonucleotide
acacaauggcacgaccaac

SEQ ID NO: 2379320 - RNA, 19 nt, Artificial Sequence
  Description of Artificial Sequence: Synthetic oligonucleotide
cuaugcuuagccuugccua

SEQ ID NO: 2379321 - RNA, 19 nt, Artificial Sequence
  Description of Artificial Sequence: Synthetic oligonucleotide
acaucuaugcuuagccuug

SEQ ID NO: 2379322 - RNA, 19 nt, Artificial Sequence
  Description of Artificial Sequence: Synthetic oligonucleotide
guaggguguggacuguccc

SEQ ID NO: 2379323 - RNA, 19 nt, Artificial Sequence
  Description of Artificial Sequence: Synthetic oligonucleotide
ucacacaucuaugcuuagc

SEQ ID NO: 2379324 - RNA, 19 nt, Artificial Sequence
  Description of Artificial Sequence: Synthetic oligonucleotide
cagugauacguaugugcag

SEQ ID NO: 2379325 - RNA, 19 nt, Artificial Sequence
  Description of Artificial Sequence: Synthetic oligonucleotide
ugauacguaugugcagagc

SEQ ID NO: 2379326 - RNA, 19 nt, Artificial Sequence
  Description of Artificial Sequence: Synthetic oligonucleotide
aggucaacuagcaugcuaa

SEQ ID NO: 2379327 - RNA, 19 nt, Artificial Sequence
  Description of Artificial Sequence: Synthetic oligonucleotide
caaauggcugccuccaaga

SEQ ID NO: 2379328 - RNA, 19 nt, Artificial Sequence
  Description of Artificial Sequence: Synthetic oligonucleotide
cuagccugcuaaguaaaac

SEQ ID NO: 2379329 - RNA, 19 nt, Artificial Sequence
  Description of Artificial Sequence: Synthetic oligonucleotide
cacuuuagucuuugaugag

SEQ ID NO: 2379330 - RNA, 19 nt, Artificial Sequence
  Description of Artificial Sequence: Synthetic oligonucleotide
ucacggaucuggaaucaau

SEQ ID NO: 2379331 - RNA, 19 nt, Artificial Sequence
  Description of Artificial Sequence: Synthetic oligonucleotide
gugauacguaugugcagag

SEQ ID NO: 2379332 - RNA, 19 nt, Artificial Sequence
  Description of Artificial Sequence: Synthetic oligonucleotide
acuaaugacgacagaugcu

SEQ ID NO: 2379333 - RNA, 19 nt, Artificial Sequence
  Description of Artificial Sequence: Synthetic oligonucleotide
ucaaguugucucacacauc

SEQ ID NO: 2379334 - RNA, 19 nt, Artificial Sequence
  Description of Artificial Sequence: Synthetic oligonucleotide
uaaugacgacagaugcuuc

SEQ ID NO: 2379335 - RNA, 19 nt, Artificial Sequence
  Description of Artificial Sequence: Synthetic oligonucleotide
acgaccaaccauaccacag

SEQ ID NO: 2379336 - RNA, 19 nt, Artificial Sequence
  Description of Artificial Sequence: Synthetic oligonucleotide
auuugacuuuugucauaag

SEQ ID NO: 2379337 - RNA, 19 nt, Artificial Sequence
  Description of Artificial Sequence: Synthetic oligonucleotide
ggaucuggaaucaauuuuc

SEQ ID NO: 2379338 - RNA, 19 nt, Artificial Sequence
  Description of Artificial Sequence: Synthetic oligonucleotide
guuuugauagccaucucua

SEQ ID NO: 2379339 - RNA, 19 nt, Artificial Sequence
  Description of Artificial Sequence: Synthetic oligonucleotide
acuagcaugcuaauaguua

SEQ ID NO: 2379340 - RNA, 19 nt, Artificial Sequence
  Description of Artificial Sequence: Synthetic oligonucleotide
ugguaacaaucauccugag

SEQ ID NO: 2379341 - RNA, 19 nt, Artificial Sequence
  Description of Artificial Sequence: Synthetic oligonucleotide
cuuuuggaccaugccacag

SEQ ID NO: 2379342 - RNA, 19 nt, Artificial Sequence
  Description of Artificial Sequence: Synthetic oligonucleotide
caagccuccaauaccuaca

SEQ ID NO: 2379343 - RNA, 19 nt, Artificial Sequence
  Description of Artificial Sequence: Synthetic oligonucleotide
acaugucaguuucucuaca

SEQ ID NO: 2379344 - RNA, 19 nt, Artificial Sequence
  Description of Artificial Sequence: Synthetic oligonucleotide
augcuuagccuugccuacc

SEQ ID NO: 2379345 - RNA, 19 nt, Artificial Sequence
  Description of Artificial Sequence: Synthetic oligonucleotide
uccugagcacuagauguca

SEQ ID NO: 2379346 - RNA, 19 nt, Artificial Sequence
  Description of Artificial Sequence: Synthetic oligonucleotide
acggaucuggaaucaauuu

SEQ ID NO: 2379347 - RNA, 19 nt, Artificial Sequence
  Description of Artificial Sequence: Synthetic oligonucleotide
gaauuugacuuuugucaua

SEQ ID NO: 2379348 - RNA, 19 nt, Artificial Sequence
  Description of Artificial Sequence: Synthetic oligonucleotide
gacuaucuaauaguaagau

SEQ ID NO: 2379349 - RNA, 19 nt, Artificial Sequence
  Description of Artificial Sequence: Synthetic oligonucleotide
gaagacguuuugauagcca

SEQ ID NO: 2379350 - RNA, 19 nt, Artificial Sequence
  Description of Artificial Sequence: Synthetic oligonucleotide
acuagaugucagccuuuug

SEQ ID NO: 2379351 - RNA, 19 nt, Artificial Sequence
  Description of Artificial Sequence: Synthetic oligonucleotide
gagcacugaagacguuuug

SEQ ID NO: 2379352 - RNA, 19 nt, Artificial Sequence
  Description of Artificial Sequence: Synthetic oligonucleotide
agaaagucuacaacuugaa

SEQ ID NO: 2379353 - RNA, 19 nt, Artificial Sequence
  Description of Artificial Sequence: Synthetic oligonucleotide
agacguuuugauagccauc

SEQ ID NO: 2379354 - RNA, 19 nt, Artificial Sequence
  Description of Artificial Sequence: Synthetic oligonucleotide
cugcuaaguaaaacacauc

SEQ ID NO: 2379355 - RNA, 19 nt, Artificial Sequence
  Description of Artificial Sequence: Synthetic oligonucleotide
caauaccuacauaguccag

SEQ ID NO: 2379356 - RNA, 19 nt, Artificial Sequence
  Description of Artificial Sequence: Synthetic oligonucleotide
uuggaccaugccacaguga

SEQ ID NO: 2379357 - RNA, 19 nt, Artificial Sequence
  Description of Artificial Sequence: Synthetic oligonucleotide
guaugugcagagcacugaa

SEQ ID NO: 2379358 - RNA, 19 nt, Artificial Sequence
  Description of Artificial Sequence: Synthetic oligonucleotide
uaccuacauaguccagacu

SEQ ID NO: 2379359 - RNA, 19 nt, Artificial Sequence
  Description of Artificial Sequence: Synthetic oligonucleotide
aguaagcacuuaaacuggu

SEQ ID NO: 2379360 - RNA, 19 nt, Artificial Sequence
  Description of Artificial Sequence: Synthetic oligonucleotide
cugucauguucaagccucc

SEQ ID NO: 2379361 - RNA, 19 nt, Artificial Sequence
  Description of Artificial Sequence: Synthetic oligonucleotide
acguuuugauagccaucuc

SEQ ID NO: 2379362 - RNA, 19 nt, Artificial Sequence
  Description of Artificial Sequence: Synthetic oligonucleotide
agauaucagaaaaggcuaa

SEQ ID NO: 2379363 - RNA, 19 nt, Artificial Sequence
  Description of Artificial Sequence: Synthetic oligonucleotide
acgacagaugcuucugcaa

SEQ ID NO: 2379364 - RNA, 19 nt, Artificial Sequence
  Description of Artificial Sequence: Synthetic oligonucleotide
ugggucuccuguuguauua

SEQ ID NO: 2379365 - RNA, 19 nt, Artificial Sequence
  Description of Artificial Sequence: Synthetic oligonucleotide
cuggaaucaauuuucugau

SEQ ID NO: 2379366 - RNA, 19 nt, Artificial Sequence
  Description of Artificial Sequence: Synthetic oligonucleotide
gaaaaggcuaaaguccccu

SEQ ID NO: 2379367 - RNA, 19 nt, Artificial Sequence
  Description of Artificial Sequence: Synthetic oligonucleotide
augacgacagaugcuucug

SEQ ID NO: 2379368 - RNA, 19 nt, Artificial Sequence
  Description of Artificial Sequence: Synthetic oligonucleotide
uacgguuggccaucacgga

SEQ ID NO: 2379369 - RNA, 19 nt, Artificial Sequence
  Description of Artificial Sequence: Synthetic oligonucleotide
cugccaacuaaugacgaca

SEQ ID NO: 2379370 - RNA, 19 nt, Artificial Sequence
  Description of Artificial Sequence: Synthetic oligonucleotide
gcagucucacguuuaugcc

SEQ ID NO: 2379371 - RNA, 19 nt, Artificial Sequence
  Description of Artificial Sequence: Synthetic oligonucleotide
ccuccaagagugcaucugg

SEQ ID NO: 2379372 - RNA, 19 nt, Artificial Sequence
  Description of Artificial Sequence: Synthetic oligonucleotide
ccaauaccuacauagucca

SEQ ID NO: 2379373 - RNA, 19 nt, Artificial Sequence
  Description of Artificial Sequence: Synthetic oligonucleotide
agccacuccagggacuauc

SEQ ID NO: 2379374 - RNA, 19 nt, Artificial Sequence
  Description of Artificial Sequence: Synthetic oligonucleotide
ccauaccacaguguggugg

SEQ ID NO: 2379375 - RNA, 19 nt, Artificial Sequence
  Description of Artificial Sequence: Synthetic oligonucleotide
aguccagacuugggucucc

SEQ ID NO: 2379376 - RNA, 19 nt, Artificial Sequence
  Description of Artificial Sequence: Synthetic oligonucleotide
gucccacauauuaaacaug

SEQ ID NO: 2379377 - RNA, 19 nt, Artificial Sequence
  Description of Artificial Sequence: Synthetic oligonucleotide
gcaagagcacaccuucagc

SEQ ID NO: 2379378 - RNA, 19 nt, Artificial Sequence
  Description of Artificial Sequence: Synthetic oligonucleotide
cagggacuaucuaauagua

SEQ ID NO: 2379379 - RNA, 19 nt, Artificial Sequence
  Description of Artificial Sequence: Synthetic oligonucleotide
gucauguucaagccuccaa

SEQ ID NO: 2379380 - RNA, 19 nt, Artificial Sequence
  Description of Artificial Sequence: Synthetic oligonucleotide
uggccaucacggaucugga

SEQ ID NO: 2379381 - RNA, 19 nt, Artificial Sequence
  Description of Artificial Sequence: Synthetic oligonucleotide
cuaaugacgacagaugcuu

SEQ ID NO: 2379382 - RNA, 19 nt, Artificial Sequence
  Description of Artificial Sequence: Synthetic oligonucleotide
acuccagggacuaucuaau

SEQ ID NO: 2379383 - RNA, 19 nt, Artificial Sequence
  Description of Artificial Sequence: Synthetic oligonucleotide
gacgaggucugucuuaauu

SEQ ID NO: 2379384 - RNA, 19 nt, Artificial Sequence
  Description of Artificial Sequence: Synthetic oligonucleotide
uucaagccuccaauaccua

SEQ ID NO: 2379385 - RNA, 19 nt, Artificial Sequence
  Description of Artificial Sequence: Synthetic oligonucleotide
aguccccuaaccucacuuu

SEQ ID NO: 2379386 - RNA, 19 nt, Artificial Sequence
  Description of Artificial Sequence: Synthetic oligonucleotide
gccuuuaauaucaagugcu

SEQ ID NO: 2379387 - RNA, 19 nt, Artificial Sequence
  Description of Artificial Sequence: Synthetic oligonucleotide
ggacuaucuaauaguaaga

SEQ ID NO: 2379388 - RNA, 19 nt, Artificial Sequence
  Description of Artificial Sequence: Synthetic oligonucleotide
gccuaccaggcucaaguag

SEQ ID NO: 2379389 - RNA, 19 nt, Artificial Sequence
  Description of Artificial Sequence: Synthetic oligonucleotide
ccuacauaguccagacuug

SEQ ID NO: 2379390 - RNA, 19 nt, Artificial Sequence
  Description of Artificial Sequence: Synthetic oligonucleotide
uggcacgaccaaccauacc

SEQ ID NO: 2379391 - RNA, 19 nt, Artificial Sequence
  Description of Artificial Sequence: Synthetic oligonucleotide
caucuaugcuuagccuugc

SEQ ID NO: 2379392 - RNA, 19 nt, Artificial Sequence
  Description of Artificial Sequence: Synthetic oligonucleotide
auguaggguguggacuguc

SEQ ID NO: 2379393 - RNA, 19 nt, Artificial Sequence
  Description of Artificial Sequence: Synthetic oligonucleotide
gugcuuuacauaucaaguu

SEQ ID NO: 2379394 - RNA, 19 nt, Artificial Sequence
  Description of Artificial Sequence: Synthetic oligonucleotide
acaaucauccugagcacua

SEQ ID NO: 2379395 - RNA, 19 nt, Artificial Sequence
  Description of Artificial Sequence: Synthetic oligonucleotide
uauguaggguguggacugu

SEQ ID NO: 2379396 - RNA, 19 nt, Artificial Sequence
  Description of Artificial Sequence: Synthetic oligonucleotide
cucuagccugcuaaguaaa

SEQ ID NO: 2379397 - RNA, 19 nt, Artificial Sequence
  Description of Artificial Sequence: Synthetic oligonucleotide
agucucacguuuaugccuu

SEQ ID NO: 2379398 - RNA, 19 nt, Artificial Sequence
  Description of Artificial Sequence: Synthetic oligonucleotide
ccuaccaggcucaaguaga

SEQ ID NO: 2379399 - RNA, 19 nt, Artificial Sequence
  Description of Artificial Sequence: Synthetic oligonucleotide
cugauguauguagggugug

SEQ ID NO: 2379400 - RNA, 19 nt, Artificial Sequence
  Description of Artificial Sequence: Synthetic oligonucleotide
gucuacaacuugaagaauu

SEQ ID NO: 2379401 - RNA, 19 nt, Artificial Sequence
  Description of Artificial Sequence: Synthetic oligonucleotide
acaacacugugugcuauua

SEQ ID NO: 2379402 - RNA, 19 nt, Artificial Sequence
  Description of Artificial Sequence: Synthetic oligonucleotide
cacaucuaugcuuagccuu

SEQ ID NO: 2379403 - RNA, 19 nt, Artificial Sequence
  Description of Artificial Sequence: Synthetic oligonucleotide
cauaccacagugugguggu

SEQ ID NO: 2379404 - RNA, 19 nt, Artificial Sequence
  Description of Artificial Sequence: Synthetic oligonucleotide
cucacguuuaugccuuuaa

SEQ ID NO: 2379405 - RNA, 19 nt, Artificial Sequence
  Description of Artificial Sequence: Synthetic oligonucleotide
aggucugucuuaauuucaa

SEQ ID NO: 2379406 - RNA, 19 nt, Artificial Sequence
  Description of Artificial Sequence: Synthetic oligonucleotide
ccuaaccucacuuuagucu

SEQ ID NO: 2379407 - RNA, 19 nt, Artificial Sequence
  Description of Artificial Sequence: Synthetic oligonucleotide
cacagugugguggugaacu

SEQ ID NO: 2379408 - RNA, 19 nt, Artificial Sequence
  Description of Artificial Sequence: Synthetic oligonucleotide
acuugggucuccuguugua

SEQ ID NO: 2379409 - RNA, 19 nt, Artificial Sequence
  Description of Artificial Sequence: Synthetic oligonucleotide
cguuuaugccuuuaauauc

SEQ ID NO: 2379410 - RNA, 19 nt, Artificial Sequence
  Description of Artificial Sequence: Synthetic oligonucleotide
ccaagagugcaucugggga

SEQ ID NO: 2379411 - RNA, 19 nt, Artificial Sequence
  Description of Artificial Sequence: Synthetic oligonucleotide
cgacagaugcuucugcaag

SEQ ID NO: 2379412 - RNA, 19 nt, Artificial Sequence
  Description of Artificial Sequence: Synthetic oligonucleotide
uacacacauuuagcagucu

SEQ ID NO: 2379413 - RNA, 19 nt, Artificial Sequence
  Description of Artificial Sequence: Synthetic oligonucleotide
ccaucacggaucuggaauc

SEQ ID NO: 2379414 - RNA, 19 nt, Artificial Sequence
  Description of Artificial Sequence: Synthetic oligonucleotide
accaaccauaccacagugu

SEQ ID NO: 2379415 - RNA, 19 nt, Artificial Sequence
  Description of Artificial Sequence: Synthetic oligonucleotide
gugcaucuggggaagaucu

SEQ ID NO: 2379416 - RNA, 19 nt, Artificial Sequence
  Description of Artificial Sequence: Synthetic oligonucleotide
gccaucucuagccugcuaa

SEQ ID NO: 2379417 - RNA, 19 nt, Artificial Sequence
  Description of Artificial Sequence: Synthetic oligonucleotide
accauaccacaguguggug

SEQ ID NO: 2379418 - RNA, 19 nt, Artificial Sequence
  Description of Artificial Sequence: Synthetic oligonucleotide
agucuacaacuugaagaau

SEQ ID NO: 2379419 - RNA, 19 nt, Artificial Sequence
  Description of Artificial Sequence: Synthetic oligonucleotide
cagucucacguuuaugccu

SEQ ID NO: 2379420 - RNA, 19 nt, Artificial Sequence
  Description of Artificial Sequence: Synthetic oligonucleotide
ugccuaccaggcucaagua

SEQ ID NO: 2379421 - RNA, 19 nt, Artificial Sequence
  Description of Artificial Sequence: Synthetic oligonucleotide
caacuagcaugcuaauagu

SEQ ID NO: 2379422 - RNA, 19 nt, Artificial Sequence
  Description of Artificial Sequence: Synthetic oligonucleotide
cuaccaggcucaaguagaa

SEQ ID NO: 2379423 - RNA, 19 nt, Artificial Sequence
  Description of Artificial Sequence: Synthetic oligonucleotide
ggcuaaaguccccuaaccu

SEQ ID NO: 2379424 - RNA, 19 nt, Artificial Sequence
  Description of Artificial Sequence: Synthetic oligonucleotide
cacgaccaaccauaccaca

SEQ ID NO: 2379425 - RNA, 19 nt, Artificial Sequence
  Description of Artificial Sequence: Synthetic oligonucleotide
gguaaucaaccgagggaug

SEQ ID NO: 2379426 - RNA, 19 nt, Artificial Sequence
  Description of Artificial Sequence: Synthetic oligonucleotide
ggcucaaguagaaagucua

SEQ ID NO: 2379427 - RNA, 19 nt, Artificial Sequence
  Description of Artificial Sequence: Synthetic oligonucleotide
gacuugggucuccuguugu

SEQ ID NO: 2379428 - RNA, 19 nt, Artificial Sequence
  Description of Artificial Sequence: Synthetic oligonucleotide
cacuuaaacugguaacaau

SEQ ID NO: 2379429 - RNA, 19 nt, Artificial Sequence
  Description of Artificial Sequence: Synthetic oligonucleotide
agguuaaauuucacuuaaa

SEQ ID NO: 2379430 - RNA, 19 nt, Artificial Sequence
  Description of Artificial Sequence: Synthetic oligonucleotide
gucaacuagcaugcuaaua

SEQ ID NO: 2379431 - RNA, 19 nt, Artificial Sequence
  Description of Artificial Sequence: Synthetic oligonucleotide
gcaugcuaauaguuaacua

SEQ ID NO: 2379432 - RNA, 19 nt, Artificial Sequence
  Description of Artificial Sequence: Synthetic oligonucleotide
gagcaagagcacaccuuca

SEQ ID NO: 2379433 - RNA, 19 nt, Artificial Sequence
  Description of Artificial Sequence: Synthetic oligonucleotide
ucaggucaacuagcaugcu

SEQ ID NO: 2379434 - RNA, 19 nt, Artificial Sequence
  Description of Artificial Sequence: Synthetic oligonucleotide
ccugagcacuagaugucag

SEQ ID NO: 2379435 - RNA, 19 nt, Artificial Sequence
  Description of Artificial Sequence: Synthetic oligonucleotide
caggucaacuagcaugcua

SEQ ID NO: 2379436 - RNA, 19 nt, Artificial Sequence
  Description of Artificial Sequence: Synthetic oligonucleotide
gcucaaguagaaagucuac

SEQ ID NO: 2379437 - RNA, 19 nt, Artificial Sequence
  Description of Artificial Sequence: Synthetic oligonucleotide
caucacggaucuggaauca

SEQ ID NO: 2379438 - RNA, 19 nt, Artificial Sequence
  Description of Artificial Sequence: Synthetic oligonucleotide
uaccaggcucaaguagaaa

SEQ ID NO: 2379439 - RNA, 19 nt, Artificial Sequence
  Description of Artificial Sequence: Synthetic oligonucleotide
gccaucacggaucuggaau

SEQ ID NO: 2379440 - RNA, 19 nt, Artificial Sequence
  Description of Artificial Sequence: Synthetic oligonucleotide
cccuaaccucacuuuaguc

SEQ ID NO: 2379441 - RNA, 19 nt, Artificial Sequence
  Description of Artificial Sequence: Synthetic oligonucleotide
cacggaucuggaaucaauu

SEQ ID NO: 2379442 - RNA, 19 nt, Artificial Sequence
  Description of Artificial Sequence: Synthetic oligonucleotide
gucuccuguuguauuaagu

SEQ ID NO: 2379443 - RNA, 19 nt, Artificial Sequence
  Description of Artificial Sequence: Synthetic oligonucleotide
ccagggacuaucuaauagu

SEQ ID NO: 2379444 - RNA, 19 nt, Artificial Sequence
  Description of Artificial Sequence: Synthetic oligonucleotide
aucacggaucuggaaucaa

SEQ ID NO: 2379445 - RNA, 19 nt, Artificial Sequence
  Description of Artificial Sequence: Synthetic oligonucleotide
cuguuguauuaagucucca

SEQ ID NO: 2379446 - RNA, 19 nt, Artificial Sequence
  Description of Artificial Sequence: Synthetic oligonucleotide
cauuuagcagucucacguu

SEQ ID NO: 2379447 - RNA, 19 nt, Artificial Sequence
  Description of Artificial Sequence: Synthetic oligonucleotide
gacaacacugugugcuauu

SEQ ID NO: 2379448 - RNA, 19 nt, Artificial Sequence
  Description of Artificial Sequence: Synthetic oligonucleotide
gcuuagccuugccuaccag

SEQ ID NO: 2379449 - RNA, 19 nt, Artificial Sequence
  Description of Artificial Sequence: Synthetic oligonucleotide
augucccaauaaaauggua

SEQ ID NO: 2379450 - RNA, 19 nt, Artificial Sequence
  Description of Artificial Sequence: Synthetic oligonucleotide
gccugcuaaguaaaacaca

SEQ ID NO: 2379451 - RNA, 19 nt, Artificial Sequence
  Description of Artificial Sequence: Synthetic oligonucleotide
auaccacagugugguggug

SEQ ID NO: 2379452 - RNA, 19 nt, Artificial Sequence
  Description of Artificial Sequence: Synthetic oligonucleotide
gcacugaagacguuuugau

SEQ ID NO: 2379453 - RNA, 19 nt, Artificial Sequence
  Description of Artificial Sequence: Synthetic oligonucleotide
gcacgaccaaccauaccac

SEQ ID NO: 2379454 - RNA, 19 nt, Artificial Sequence
  Description of Artificial Sequence: Synthetic oligonucleotide
cuccagggacuaucuaaua

SEQ ID NO: 2379455 - RNA, 19 nt, Artificial Sequence
  Description of Artificial Sequence: Synthetic oligonucleotide
ggaagccaccugcagagau

SEQ ID NO: 2379456 - RNA, 19 nt, Artificial Sequence
  Description of Artificial Sequence: Synthetic oligonucleotide
guguggacugucccacaua

SEQ ID NO: 2379457 - RNA, 19 nt, Artificial Sequence
  Description of Artificial Sequence: Synthetic oligonucleotide
ggacugucccacauauuaa

SEQ ID NO: 2379458 - RNA, 19 nt, Artificial Sequence
  Description of Artificial Sequence: Synthetic oligonucleotide
agccaucucuagccugcua

SEQ ID NO: 2379459 - RNA, 19 nt, Artificial Sequence
  Description of Artificial Sequence: Synthetic oligonucleotide
caucucuagccugcuaagu

SEQ ID NO: 2379460 - RNA, 19 nt, Artificial Sequence
  Description of Artificial Sequence: Synthetic oligonucleotide
cgguuggccaucacggauc

SEQ ID NO: 2379461 - RNA, 19 nt, Artificial Sequence
  Description of Artificial Sequence: Synthetic oligonucleotide
gguuggccaucacggaucu

SEQ ID NO: 2379462 - RNA, 19 nt, Artificial Sequence
  Description of Artificial Sequence: Synthetic oligonucleotide
ggggcgacgaggucugucu

SEQ ID NO: 2379463 - RNA, 19 nt, Artificial Sequence
  Description of Artificial Sequence: Synthetic oligonucleotide
cuugggucuccuguuguau

SEQ ID NO: 2379464 - RNA, 19 nt, Artificial Sequence
  Description of Artificial Sequence: Synthetic oligonucleotide
caauggcacgaccaaccau

SEQ ID NO: 2379465 - RNA, 19 nt, Artificial Sequence
  Description of Artificial Sequence: Synthetic oligonucleotide
gagcacaccuucagcuacu

SEQ ID NO: 2379466 - RNA, 19 nt, Artificial Sequence
  Description of Artificial Sequence: Synthetic oligonucleotide
ccuuuuggaccaugccaca

SEQ ID NO: 2379467 - RNA, 19 nt, Artificial Sequence
  Description of Artificial Sequence: Synthetic oligonucleotide
gagugcaucuggggaagau

SEQ ID NO: 2379468 - RNA, 19 nt, Artificial Sequence
  Description of Artificial Sequence: Synthetic oligonucleotide
aagccacuccagggacuau

SEQ ID NO: 2379469 - RNA, 19 nt, Artificial Sequence
  Description of Artificial Sequence: Synthetic oligonucleotide
ccuuuaauaucaagugcuu

SEQ ID NO: 2379470 - RNA, 19 nt, Artificial Sequence
  Description of Artificial Sequence: Synthetic oligonucleotide
ggcgacgaggucugucuua

SEQ ID NO: 2379471 - RNA, 19 nt, Artificial Sequence
  Description of Artificial Sequence: Synthetic oligonucleotide
gugugguggugaacuucuc

SEQ ID NO: 2379472 - RNA, 19 nt, Artificial Sequence
  Description of Artificial Sequence: Synthetic oligonucleotide
gcgacgaggucugucuuaa

SEQ ID NO: 2379473 - RNA, 19 nt, Artificial Sequence
  Description of Artificial Sequence: Synthetic oligonucleotide
ggccaucacggaucuggaa

SEQ ID NO: 2379474 - RNA, 19 nt, Artificial Sequence
  Description of Artificial Sequence: Synthetic oligonucleotide
gggaagaucugaagccacu

SEQ ID NO: 2379475 - RNA, 19 nt, Artificial Sequence
  Description of Artificial Sequence: Synthetic oligonucleotide
ggucaacuagcaugcuaau

SEQ ID NO: 2379476 - RNA, 19 nt, Artificial Sequence
  Description of Artificial Sequence: Synthetic oligonucleotide
ugucagccuuuuggaccau

SEQ ID NO: 2379477 - RNA, 19 nt, Artificial Sequence
  Description of Artificial Sequence: Synthetic oligonucleotide
cugcaaguuucuggucaaa

SEQ ID NO: 2379478 - RNA, 19 nt, Artificial Sequence
  Description of Artificial Sequence: Synthetic oligonucleotide
gggucuccuguuguauuaa

SEQ ID NO: 2379479 - RNA, 19 nt, Artificial Sequence
  Description of Artificial Sequence: Synthetic oligonucleotide
gcauacgguuggccaucac

SEQ ID NO: 2379480 - RNA, 19 nt, Artificial Sequence
  Description of Artificial Sequence: Synthetic oligonucleotide
cacuagaugucagccuuuu

SEQ ID NO: 2379481 - RNA, 19 nt, Artificial Sequence
  Description of Artificial Sequence: Synthetic oligonucleotide
cguaugugcagagcacuga

SEQ ID NO: 2379482 - RNA, 19 nt, Artificial Sequence
  Description of Artificial Sequence: Synthetic oligonucleotide
cggaucuggaaucaauuuu

SEQ ID NO: 2379483 - RNA, 19 nt, Artificial Sequence
  Description of Artificial Sequence: Synthetic oligonucleotide
guccagacuugggucuccu

SEQ ID NO: 2379484 - RNA, 19 nt, Artificial Sequence
  Description of Artificial Sequence: Synthetic oligonucleotide
gccacuccagggacuaucu

SEQ ID NO: 2379485 - RNA, 19 nt, Artificial Sequence
  Description of Artificial Sequence: Synthetic oligonucleotide
ggaccaugccacagugaua

SEQ ID NO: 2379486 - RNA, 19 nt, Artificial Sequence
  Description of Artificial Sequence: Synthetic oligonucleotide
gugugcuauuaaacacaau

SEQ ID NO: 2379487 - RNA, 19 nt, Artificial Sequence
  Description of Artificial Sequence: Synthetic oligonucleotide
cgaccaaccauaccacagu

SEQ ID NO: 2379488 - RNA, 19 nt, Artificial Sequence
  Description of Artificial Sequence: Synthetic oligonucleotide
ccaucaggucaacuagcau

SEQ ID NO: 2379489 - RNA, 19 nt, Artificial Sequence
  Description of Artificial Sequence: Synthetic oligonucleotide
ccacuccagggacuaucua

SEQ ID NO: 2379490 - RNA, 19 nt, Artificial Sequence
  Description of Artificial Sequence: Synthetic oligonucleotide
gcacuagaugucagccuuu

SEQ ID NO: 2379491 - RNA, 19 nt, Artificial Sequence
  Description of Artificial Sequence: Synthetic oligonucleotide
gggcgacgaggucugucuu

SEQ ID NO: 2379492 - RNA, 19 nt, Artificial Sequence
  Description of Artificial Sequence: Synthetic oligonucleotide
cgacgaggucugucuuaau

SEQ ID NO: 2379493 - RNA, 19 nt, Artificial Sequence
  Description of Artificial Sequence: Synthetic oligonucleotide
aauaauacaacacaaaaca

SEQ ID NO: 2379494 - RNA, 19 nt, Artificial Sequence
  Description of Artificial Sequence: Synthetic oligonucleotide
aaaagcauagaucugucuc

SEQ ID NO: 2379495 - RNA, 19 nt, Artificial Sequence
  Description of Artificial Sequence: Synthetic oligonucleotide
aacggaaccguccaggucc

SEQ ID NO: 2379496 - RNA, 19 nt, Artificial Sequence
  Description of Artificial Sequence: Synthetic oligonucleotide
aagaauggcagauauuuac

SEQ ID NO: 2379497 - RNA, 19 nt, Artificial Sequence
  Description of Artificial Sequence: Synthetic oligonucleotide
uucagcauaacacaaaacc

SEQ ID NO: 2379498 - RNA, 19 nt, Artificial Sequence
  Description of Artificial Sequence: Synthetic oligonucleotide
ucuacuuucagcauaacac

SEQ ID NO: 2379499 - RNA, 19 nt, Artificial Sequence
  Description of Artificial Sequence: Synthetic oligonucleotide
aauauugccauacauuuga

SEQ ID NO: 2379500 - RNA, 19 nt, Artificial Sequence
  Description of Artificial Sequence: Synthetic oligonucleotide
aaguguuuccgccagcucc

SEQ ID NO: 2379501 - RNA, 19 nt, Artificial Sequence
  Description of Artificial Sequence: Synthetic oligonucleotide
aauggcagauauuuacagc

SEQ ID NO: 2379502 - RNA, 19 nt, Artificial Sequence
  Description of Artificial Sequence: Synthetic oligonucleotide
agaaguaucgcuuucuguc

SEQ ID NO: 2379503 - RNA, 19 nt, Artificial Sequence
  Description of Artificial Sequence: Synthetic oligonucleotide
auugccauacauuugagug

SEQ ID NO: 2379504 - RNA, 19 nt, Artificial Sequence
  Description of Artificial Sequence: Synthetic oligonucleotide
auuggucagauaccgaucc

SEQ ID NO: 2379505 - RNA, 19 nt, Artificial Sequence
  Description of Artificial Sequence: Synthetic oligonucleotide
uuuucaguaaugaaugcug

SEQ ID NO: 2379506 - RNA, 19 nt, Artificial Sequence
  Description of Artificial Sequence: Synthetic oligonucleotide
uugugcaucgccauguugg

SEQ ID NO: 2379507 - RNA, 19 nt, Artificial Sequence
  Description of Artificial Sequence: Synthetic oligonucleotide
uugagugucuuccagguag

SEQ ID NO: 2379508 - RNA, 19 nt, Artificial Sequence
  Description of Artificial Sequence: Synthetic oligonucleotide
aaaagaauggcagauauuu

SEQ ID NO: 2379509 - RNA, 19 nt, Artificial Sequence
  Description of Artificial Sequence: Synthetic oligonucleotide
auuuacagccuccaucugc

SEQ ID NO: 2379510 - RNA, 19 nt, Artificial Sequence
  Description of Artificial Sequence: Synthetic oligonucleotide
uuugauuggucagauaccg

SEQ ID NO: 2379511 - RNA, 19 nt, Artificial Sequence
  Description of Artificial Sequence: Synthetic oligonucleotide
ucagauaccgaucccagcc

SEQ ID NO: 2379512 - RNA, 19 nt, Artificial Sequence
  Description of Artificial Sequence: Synthetic oligonucleotide
auauuuacagccuccaucu

SEQ ID NO: 2379513 - RNA, 19 nt, Artificial Sequence
  Description of Artificial Sequence: Synthetic oligonucleotide
auaauauugccauacauuu

SEQ ID NO: 2379514 - RNA, 19 nt, Artificial Sequence
  Description of Artificial Sequence: Synthetic oligonucleotide
auaacacaaaaccagagau

SEQ ID NO: 2379515 - RNA, 19 nt, Artificial Sequence
  Description of Artificial Sequence: Synthetic oligonucleotide
ucagcauaacacaaaacca

SEQ ID NO: 2379516 - RNA, 19 nt, Artificial Sequence
  Description of Artificial Sequence: Synthetic oligonucleotide
acaaaauagucccaaaaga

SEQ ID NO: 2379517 - RNA, 19 nt, Artificial Sequence
  Description of Artificial Sequence: Synthetic oligonucleotide
uuggguucuacuuucagca

SEQ ID NO: 2379518 - RNA, 19 nt, Artificial Sequence
  Description of Artificial Sequence: Synthetic oligonucleotide
aauagucccaaaagaaaac

SEQ ID NO: 2379519 - RNA, 19 nt, Artificial Sequence
  Description of Artificial Sequence: Synthetic oligonucleotide
aaagcauagaucugucucu

SEQ ID NO: 2379520 - RNA, 19 nt, Artificial Sequence
  Description of Artificial Sequence: Synthetic oligonucleotide
aaguaucgcuuucuguccc

SEQ ID NO: 2379521 - RNA, 19 nt, Artificial Sequence
  Description of Artificial Sequence: Synthetic oligonucleotide
gauauuuacagccuccauc

SEQ ID NO: 2379522 - RNA, 19 nt, Artificial Sequence
  Description of Artificial Sequence: Synthetic oligonucleotide
gaaacagacgaucagaugu

SEQ ID NO: 2379523 - RNA, 19 nt, Artificial Sequence
  Description of Artificial Sequence: Synthetic oligonucleotide
gagacauucauucuguguc

SEQ ID NO: 2379524 - RNA, 19 nt, Artificial Sequence
  Description of Artificial Sequence: Synthetic oligonucleotide
aguaaugaaugcugacacc

SEQ ID NO: 2379525 - RNA, 19 nt, Artificial Sequence
  Description of Artificial Sequence: Synthetic oligonucleotide
auagucccaaaagaaaacc

SEQ ID NO: 2379526 - RNA, 19 nt, Artificial Sequence
  Description of Artificial Sequence: Synthetic oligonucleotide
ucugcaauggaacuugggu

SEQ ID NO: 2379527 - RNA, 19 nt, Artificial Sequence
  Description of Artificial Sequence: Synthetic oligonucleotide
ugaacuuccgguuccuccg

SEQ ID NO: 2379528 - RNA, 19 nt, Artificial Sequence
  Description of Artificial Sequence: Synthetic oligonucleotide
aaguuugcaaguguuuccg

SEQ ID NO: 2379529 - RNA, 19 nt, Artificial Sequence
  Description of Artificial Sequence: Synthetic oligonucleotide
agaugugucaucaggaagg

SEQ ID NO: 2379530 - RNA, 19 nt, Artificial Sequence
  Description of Artificial Sequence: Synthetic oligonucleotide
ucacagauggagcuggugc

SEQ ID NO: 2379531 - RNA, 19 nt, Artificial Sequence
  Description of Artificial Sequence: Synthetic oligonucleotide
aaugaaugcugacaccaca

SEQ ID NO: 2379532 - RNA, 19 nt, Artificial Sequence
  Description of Artificial Sequence: Synthetic oligonucleotide
gauuguggaagucaggaga

SEQ ID NO: 2379533 - RNA, 19 nt, Artificial Sequence
  Description of Artificial Sequence: Synthetic oligonucleotide
uuuucgaugagcugguccu

SEQ ID NO: 2379534 - RNA, 19 nt, Artificial Sequence
  Description of Artificial Sequence: Synthetic oligonucleotide
cagcauaacacaaaaccag

SEQ ID NO: 2379535 - RNA, 19 nt, Artificial Sequence
  Description of Artificial Sequence: Synthetic oligonucleotide
uuuacagccuccaucugca

SEQ ID NO: 2379536 - RNA, 19 nt, Artificial Sequence
  Description of Artificial Sequence: Synthetic oligonucleotide
uuuugauuggucagauacc

SEQ ID NO: 2379537 - RNA, 19 nt, Artificial Sequence
  Description of Artificial Sequence: Synthetic oligonucleotide
acaaaagaauggcagauau

SEQ ID NO: 2379538 - RNA, 19 nt, Artificial Sequence
  Description of Artificial Sequence: Synthetic oligonucleotide
gaugugcacuucucgaugg

SEQ ID NO: 2379539 - RNA, 19 nt, Artificial Sequence
  Description of Artificial Sequence: Synthetic oligonucleotide
acggauaauauugccauac

SEQ ID NO: 2379540 - RNA, 19 nt, Artificial Sequence
  Description of Artificial Sequence: Synthetic oligonucleotide
ucacaaaauagucccaaaa

SEQ ID NO: 2379541 - RNA, 19 nt, Artificial Sequence
  Description of Artificial Sequence: Synthetic oligonucleotide
uaauauugccauacauuug

SEQ ID NO: 2379542 - RNA, 19 nt, Artificial Sequence
  Description of Artificial Sequence: Synthetic oligonucleotide
ucaguaaugaaugcugaca

SEQ ID NO: 2379543 - RNA, 19 nt, Artificial Sequence
  Description of Artificial Sequence: Synthetic oligonucleotide
gaaguaucgcuuucugucc

SEQ ID NO: 2379544 - RNA, 19 nt, Artificial Sequence
  Description of Artificial Sequence: Synthetic oligonucleotide
ugaacuccugccaaggcac

SEQ ID NO: 2379545 - RNA, 19 nt, Artificial Sequence
  Description of Artificial Sequence: Synthetic oligonucleotide
uccugguucccucuuuucg

SEQ ID NO: 2379546 - RNA, 19 nt, Artificial Sequence
  Description of Artificial Sequence: Synthetic oligonucleotide
cauuugagugucuuccagg

SEQ ID NO: 2379547 - RNA, 19 nt, Artificial Sequence
  Description of Artificial Sequence: Synthetic oligonucleotide
agacauucauucugugucg

SEQ ID NO: 2379548 - RNA, 19 nt, Artificial Sequence
  Description of Artificial Sequence: Synthetic oligonucleotide
caguaaugaaugcugacac

SEQ ID NO: 2379549 - RNA, 19 nt, Artificial Sequence
  Description of Artificial Sequence: Synthetic oligonucleotide
auuugagugucuuccaggu

SEQ ID NO: 2379550 - RNA, 19 nt, Artificial Sequence
  Description of Artificial Sequence: Synthetic oligonucleotide
ugcaauggaacuuggguuc

SEQ ID NO: 2379551 - RNA, 19 nt, Artificial Sequence
  Description of Artificial Sequence: Synthetic oligonucleotide
ugaggauuugcugaagagc

SEQ ID NO: 2379552 - RNA, 19 nt, Artificial Sequence
  Description of Artificial Sequence: Synthetic oligonucleotide
gguagcuuccuucaaaagc

SEQ ID NO: 2379553 - RNA, 19 nt, Artificial Sequence
  Description of Artificial Sequence: Synthetic oligonucleotide
ugauuggucagauaccgau

SEQ ID NO: 2379554 - RNA, 19 nt, Artificial Sequence
  Description of Artificial Sequence: Synthetic oligonucleotide
ucaggaaggguacaggcau

SEQ ID NO: 2379555 - RNA, 19 nt, Artificial Sequence
  Description of Artificial Sequence: Synthetic oligonucleotide
uccugauuguggaagucag

SEQ ID NO: 2379556 - RNA, 19 nt, Artificial Sequence
  Description of Artificial Sequence: Synthetic oligonucleotide
aagucaggagaaguaucgc

SEQ ID NO: 2379557 - RNA, 19 nt, Artificial Sequence
  Description of Artificial Sequence: Synthetic oligonucleotide
caccacaugaaacagacga

SEQ ID NO: 2379558 - RNA, 19 nt, Artificial Sequence
  Description of Artificial Sequence: Synthetic oligonucleotide
auagaucugucucuccaag

SEQ ID NO: 2379559 - RNA, 19 nt, Artificial Sequence
  Description of Artificial Sequence: Synthetic oligonucleotide
uuugcaaguguuuccgcca

SEQ ID NO: 2379560 - RNA, 19 nt, Artificial Sequence
  Description of Artificial Sequence: Synthetic oligonucleotide
cauguugggcucaagcggc

SEQ ID NO: 2379561 - RNA, 19 nt, Artificial Sequence
  Description of Artificial Sequence: Synthetic oligonucleotide
cuuggguucuacuuucagc

SEQ ID NO: 2379562 - RNA, 19 nt, Artificial Sequence
  Description of Artificial Sequence: Synthetic oligonucleotide
guaaugaaugcugacacca

SEQ ID NO: 2379563 - RNA, 19 nt, Artificial Sequence
  Description of Artificial Sequence: Synthetic oligonucleotide
uugaacuuccgguuccucc

SEQ ID NO: 2379564 - RNA, 19 nt, Artificial Sequence
  Description of Artificial Sequence: Synthetic oligonucleotide
caaguuugcaaguguuucc

SEQ ID NO: 2379565 - RNA, 19 nt, Artificial Sequence
  Description of Artificial Sequence: Synthetic oligonucleotide
acaugaaacagacgaucag

SEQ ID NO: 2379566 - RNA, 19 nt, Artificial Sequence
  Description of Artificial Sequence: Synthetic oligonucleotide
aguuugcaaguguuuccgc

SEQ ID NO: 2379567 - RNA, 19 nt, Artificial Sequence
  Description of Artificial Sequence: Synthetic oligonucleotide
ugcaucgccauguugggcu

SEQ ID NO: 2379568 - RNA, 19 nt, Artificial Sequence
  Description of Artificial Sequence: Synthetic oligonucleotide
gaaugcugacaccacauga

SEQ ID NO: 2379569 - RNA, 19 nt, Artificial Sequence
  Description of Artificial Sequence: Synthetic oligonucleotide
ugccaaggcacuuacugca

SEQ ID NO: 2379570 - RNA, 19 nt, Artificial Sequence
  Description of Artificial Sequence: Synthetic oligonucleotide
ugauuguggaagucaggag

SEQ ID NO: 2379571 - RNA, 19 nt, Artificial Sequence
  Description of Artificial Sequence: Synthetic oligonucleotide
guuugcaaguguuuccgcc

SEQ ID NO: 2379572 - RNA, 19 nt, Artificial Sequence
  Description of Artificial Sequence: Synthetic oligonucleotide
agagaugugcacuucucga

SEQ ID NO: 2379573 - RNA, 19 nt, Artificial Sequence
  Description of Artificial Sequence: Synthetic oligonucleotide
aggcacuuacugcagcggc

SEQ ID NO: 2379574 - RNA, 19 nt, Artificial Sequence
  Description of Artificial Sequence: Synthetic oligonucleotide
gggacaaucacagauggag

SEQ ID NO: 2379575 - RNA, 19 nt, Artificial Sequence
  Description of Artificial Sequence: Synthetic oligonucleotide
aagcauagaucugucucuc

SEQ ID NO: 2379576 - RNA, 19 nt, Artificial Sequence
  Description of Artificial Sequence: Synthetic oligonucleotide
cuuccgguuccuccgaucg

SEQ ID NO: 2379577 - RNA, 19 nt, Artificial Sequence
  Description of Artificial Sequence: Synthetic oligonucleotide
ugugcaucgccauguuggg

SEQ ID NO: 2379578 - RNA, 19 nt, Artificial Sequence
  Description of Artificial Sequence: Synthetic oligonucleotide
agccacggauaauauugcc

SEQ ID NO: 2379579 - RNA, 19 nt, Artificial Sequence
  Description of Artificial Sequence: Synthetic oligonucleotide
guagcuuccuucaaaagca

SEQ ID NO: 2379580 - RNA, 19 nt, Artificial Sequence
  Description of Artificial Sequence: Synthetic oligonucleotide
acaggcaucacaaaauagu

SEQ ID NO: 2379581 - RNA, 19 nt, Artificial Sequence
  Description of Artificial Sequence: Synthetic oligonucleotide
caaggcacuuacugcagcg

SEQ ID NO: 2379582 - RNA, 19 nt, Artificial Sequence
  Description of Artificial Sequence: Synthetic oligonucleotide
uauugccauacauuugagu

SEQ ID NO: 2379583 - RNA, 19 nt, Artificial Sequence
  Description of Artificial Sequence: Synthetic oligonucleotide
agauaccgaucccagccac

SEQ ID NO: 2379584 - RNA, 19 nt, Artificial Sequence
  Description of Artificial Sequence: Synthetic oligonucleotide
uuccgcuucaccagcucgg

SEQ ID NO: 2379585 - RNA, 19 nt, Artificial Sequence
  Description of Artificial Sequence: Synthetic oligonucleotide
cauaacacaaaaccagaga

SEQ ID NO: 2379586 - RNA, 19 nt, Artificial Sequence
  Description of Artificial Sequence: Synthetic oligonucleotide
agucaggagaaguaucgcu

SEQ ID NO: 2379587 - RNA, 19 nt, Artificial Sequence
  Description of Artificial Sequence: Synthetic oligonucleotide
aaacagacgaucagaugug

SEQ ID NO: 2379588 - RNA, 19 nt, Artificial Sequence
  Description of Artificial Sequence: Synthetic oligonucleotide
uugccauacauuugagugu

SEQ ID NO: 2379589 - RNA, 19 nt, Artificial Sequence
  Description of Artificial Sequence: Synthetic oligonucleotide
cagagaugugcacuucucg

SEQ ID NO: 2379590 - RNA, 19 nt, Artificial Sequence
  Description of Artificial Sequence: Synthetic oligonucleotide
aaagccacuuuaguuuuca

SEQ ID NO: 2379591 - RNA, 19 nt, Artificial Sequence
  Description of Artificial Sequence: Synthetic oligonucleotide
aaugcugacaccacaugaa

SEQ ID NO: 2379592 - RNA, 19 nt, Artificial Sequence
  Description of Artificial Sequence: Synthetic oligonucleotide
ucagaugugucaucaggaa

SEQ ID NO: 2379593 - RNA, 19 nt, Artificial Sequence
  Description of Artificial Sequence: Synthetic oligonucleotide
cugaggauuugcugaagag

SEQ ID NO: 2379594 - RNA, 19 nt, Artificial Sequence
  Description of Artificial Sequence: Synthetic oligonucleotide
ucccucuuuucgaugagcu

SEQ ID NO: 2379595 - RNA, 19 nt, Artificial Sequence
  Description of Artificial Sequence: Synthetic oligonucleotide
cacagauggagcuggugcc

SEQ ID NO: 2379596 - RNA, 19 nt, Artificial Sequence
  Description of Artificial Sequence: Synthetic oligonucleotide
ucaucaggaaggguacagg

SEQ ID NO: 2379597 - RNA, 19 nt, Artificial Sequence
  Description of Artificial Sequence: Synthetic oligonucleotide
uaaugaaugcugacaccac

SEQ ID NO: 2379598 - RNA, 19 nt, Artificial Sequence
  Description of Artificial Sequence: Synthetic oligonucleotide
uguggaagucaggagaagu

SEQ ID NO: 2379599 - RNA, 19 nt, Artificial Sequence
  Description of Artificial Sequence: Synthetic oligonucleotide
ucuccaaguuugcaagugu

SEQ ID NO: 2379600 - RNA, 19 nt, Artificial Sequence
  Description of Artificial Sequence: Synthetic oligonucleotide
uugcaaguguuuccgccag

SEQ ID NO: 2379601 - RNA, 19 nt, Artificial Sequence
  Description of Artificial Sequence: Synthetic oligonucleotide
gaacuuggguucuacuuuc

SEQ ID NO: 2379602 - RNA, 19 nt, Artificial Sequence
  Description of Artificial Sequence: Synthetic oligonucleotide
gaaggguacaggcaucaca

SEQ ID NO: 2379603 - RNA, 19 nt, Artificial Sequence
  Description of Artificial Sequence: Synthetic oligonucleotide
gacauucauucugugucgg

SEQ ID NO: 2379604 - RNA, 19 nt, Artificial Sequence
  Description of Artificial Sequence: Synthetic oligonucleotide
uacauuugagugucuucca

SEQ ID NO: 2379605 - RNA, 19 nt, Artificial Sequence
  Description of Artificial Sequence: Synthetic oligonucleotide
cagaugugucaucaggaag

SEQ ID NO: 2379606 - RNA, 19 nt, Artificial Sequence
  Description of Artificial Sequence: Synthetic oligonucleotide
gacaaucacagauggagcu

SEQ ID NO: 2379607 - RNA, 19 nt, Artificial Sequence
  Description of Artificial Sequence: Synthetic oligonucleotide
agccacuuuaguuuucagu

SEQ ID NO: 2379608 - RNA, 19 nt, Artificial Sequence
  Description of Artificial Sequence: Synthetic oligonucleotide
aaggcacuuacugcagcgg

SEQ ID NO: 2379609 - RNA, 19 nt, Artificial Sequence
  Description of Artificial Sequence: Synthetic oligonucleotide
gauaauauugccauacauu

SEQ ID NO: 2379610 - RNA, 19 nt, Artificial Sequence
  Description of Artificial Sequence: Synthetic oligonucleotide
cauacauuugagugucuuc

SEQ ID NO: 2379611 - RNA, 19 nt, Artificial Sequence
  Description of Artificial Sequence: Synthetic oligonucleotide
cucguucuccugauugugg

SEQ ID NO: 2379612 - RNA, 19 nt, Artificial Sequence
  Description of Artificial Sequence: Synthetic oligonucleotide
gugucugggaucugcggcg

SEQ ID NO: 2379613 - RNA, 19 nt, Artificial Sequence
  Description of Artificial Sequence: Synthetic oligonucleotide
ugagugucuuccagguagc

SEQ ID NO: 2379614 - RNA, 19 nt, Artificial Sequence
  Description of Artificial Sequence: Synthetic oligonucleotide
ugacaccacaugaaacaga

SEQ ID NO: 2379615 - RNA, 19 nt, Artificial Sequence
  Description of Artificial Sequence: Synthetic oligonucleotide
auaauacaacacaaaacaa

SEQ ID NO: 2379616 - RNA, 19 nt, Artificial Sequence
  Description of Artificial Sequence: Synthetic oligonucleotide
cuuuaguuuucaguaauga

SEQ ID NO: 2379617 - RNA, 19 nt, Artificial Sequence
  Description of Artificial Sequence: Synthetic oligonucleotide
gaggagguagaggaggcag

SEQ ID NO: 2379618 - RNA, 19 nt, Artificial Sequence
  Description of Artificial Sequence: Synthetic oligonucleotide
gaaccguccagguccucgg

SEQ ID NO: 2379619 - RNA, 19 nt, Artificial Sequence
  Description of Artificial Sequence: Synthetic oligonucleotide
aggcucguucuccugauug

SEQ ID NO: 2379620 - RNA, 19 nt, Artificial Sequence
  Description of Artificial Sequence: Synthetic oligonucleotide
gcuggugccagccaguuug

SEQ ID NO: 2379621 - RNA, 19 nt, Artificial Sequence
  Description of Artificial Sequence: Synthetic oligonucleotide
gccauguugggcucaagcg

SEQ ID NO: 2379622 - RNA, 19 nt, Artificial Sequence
  Description of Artificial Sequence: Synthetic oligonucleotide
uccugaacuccugccaagg

SEQ ID NO: 2379623 - RNA, 19 nt, Artificial Sequence
  Description of Artificial Sequence: Synthetic oligonucleotide
auaccgaucccagccacgg

SEQ ID NO: 2379624 - RNA, 19 nt, Artificial Sequence
  Description of Artificial Sequence: Synthetic oligonucleotide
ucguucuccugauugugga

SEQ ID NO: 2379625 - RNA, 19 nt, Artificial Sequence
  Description of Artificial Sequence: Synthetic oligonucleotide
cagacgaucagauguguca

SEQ ID NO: 2379626 - RNA, 19 nt, Artificial Sequence
  Description of Artificial Sequence: Synthetic oligonucleotide
cacaugaaacagacgauca

SEQ ID NO: 2379627 - RNA, 19 nt, Artificial Sequence
  Description of Artificial Sequence: Synthetic oligonucleotide
ugaacggaaccguccaggu

SEQ ID NO: 2379628 - RNA, 19 nt, Artificial Sequence
  Description of Artificial Sequence: Synthetic oligonucleotide
ucggccuccuugaacuucc

SEQ ID NO: 2379629 - RNA, 19 nt, Artificial Sequence
  Description of Artificial Sequence: Synthetic oligonucleotide
ccucuuuucgaugagcugg

SEQ ID NO: 2379630 - RNA, 19 nt, Artificial Sequence
  Description of Artificial Sequence: Synthetic oligonucleotide
uauuuacagccuccaucug

SEQ ID NO: 2379631 - RNA, 19 nt, Artificial Sequence
  Description of Artificial Sequence: Synthetic oligonucleotide
ugguccugaacuccugcca

SEQ ID NO: 2379632 - RNA, 19 nt, Artificial Sequence
  Description of Artificial Sequence: Synthetic oligonucleotide
ugagcugguccugaacucc

SEQ ID NO: 2379633 - RNA, 19 nt, Artificial Sequence
  Description of Artificial Sequence: Synthetic oligonucleotide
ugccauacauuugaguguc

SEQ ID NO: 2379634 - RNA, 19 nt, Artificial Sequence
  Description of Artificial Sequence: Synthetic oligonucleotide
ucccugaacggaaccgucc

SEQ ID NO: 2379635 - RNA, 19 nt, Artificial Sequence
  Description of Artificial Sequence: Synthetic oligonucleotide
cuuccagguagcuuccuuc

SEQ ID NO: 2379636 - RNA, 19 nt, Artificial Sequence
  Description of Artificial Sequence: Synthetic oligonucleotide
aucagaugugucaucagga

SEQ ID NO: 2379637 - RNA, 19 nt, Artificial Sequence
  Description of Artificial Sequence: Synthetic oligonucleotide
cugaacggaaccguccagg

SEQ ID NO: 2379638 - RNA, 19 nt, Artificial Sequence
  Description of Artificial Sequence: Synthetic oligonucleotide
uggcagauauuuacagccu

SEQ ID NO: 2379639 - RNA, 19 nt, Artificial Sequence
  Description of Artificial Sequence: Synthetic oligonucleotide
agaauggcagauauuuaca

SEQ ID NO: 2379640 - RNA, 19 nt, Artificial Sequence
  Description of Artificial Sequence: Synthetic oligonucleotide
uuguugugcaucgccaugu

SEQ ID NO: 2379641 - RNA, 19 nt, Artificial Sequence
  Description of Artificial Sequence: Synthetic oligonucleotide
uugauuggucagauaccga

SEQ ID NO: 2379642 - RNA, 19 nt, Artificial Sequence
  Description of Artificial Sequence: Synthetic oligonucleotide
cugccaaggcacuuacugc

SEQ ID NO: 2379643 - RNA, 19 nt, Artificial Sequence
  Description of Artificial Sequence: Synthetic oligonucleotide
uggucagauaccgauccca

SEQ ID NO: 2379644 - RNA, 19 nt, Artificial Sequence
  Description of Artificial Sequence: Synthetic oligonucleotide
agcauaacacaaaaccaga

SEQ ID NO: 2379645 - RNA, 19 nt, Artificial Sequence
  Description of Artificial Sequence: Synthetic oligonucleotide
cugauuguggaagucagga

SEQ ID NO: 2379646 - RNA, 19 nt, Artificial Sequence
  Description of Artificial Sequence: Synthetic oligonucleotide
uagaucugucucuccaagu

SEQ ID NO: 2379647 - RNA, 19 nt, Artificial Sequence
  Description of Artificial Sequence: Synthetic oligonucleotide
agaaaaccagaaugguaaa

SEQ ID NO: 2379648 - RNA, 19 nt, Artificial Sequence
  Description of Artificial Sequence: Synthetic oligonucleotide
acuuuaguuuucaguaaug

SEQ ID NO: 2379649 - RNA, 19 nt, Artificial Sequence
  Description of Artificial Sequence: Synthetic oligonucleotide
acgaucagaugugucauca

SEQ ID NO: 2379650 - RNA, 19 nt, Artificial Sequence
  Description of Artificial Sequence: Synthetic oligonucleotide
uccaaguuugcaaguguuu

SEQ ID NO: 2379651 - RNA, 19 nt, Artificial Sequence
  Description of Artificial Sequence: Synthetic oligonucleotide
aucugucucuccaaguuug

SEQ ID NO: 2379652 - RNA, 19 nt, Artificial Sequence
  Description of Artificial Sequence: Synthetic oligonucleotide
gauggagcuggugccagcc

SEQ ID NO: 2379653 - RNA, 19 nt, Artificial Sequence
  Description of Artificial Sequence: Synthetic oligonucleotide
uucacucccugaacggaac

SEQ ID NO: 2379654 - RNA, 19 nt, Artificial Sequence
  Description of Artificial Sequence: Synthetic oligonucleotide
agguagcuuccuucaaaag

SEQ ID NO: 2379655 - RNA, 19 nt, Artificial Sequence
  Description of Artificial Sequence: Synthetic oligonucleotide
gauaccgaucccagccacg

SEQ ID NO: 2379656 - RNA, 19 nt, Artificial Sequence
  Description of Artificial Sequence: Synthetic oligonucleotide
uggaagucaggagaaguau

SEQ ID NO: 2379657 - RNA, 19 nt, Artificial Sequence
  Description of Artificial Sequence: Synthetic oligonucleotide
aacagacgaucagaugugu

SEQ ID NO: 2379658 - RNA, 19 nt, Artificial Sequence
  Description of Artificial Sequence: Synthetic oligonucleotide
gccacuuuaguuuucagua

SEQ ID NO: 2379659 - RNA, 19 nt, Artificial Sequence
  Description of Artificial Sequence: Synthetic oligonucleotide
auuugcugaagagccgcuc

SEQ ID NO: 2379660 - RNA, 19 nt, Artificial Sequence
  Description of Artificial Sequence: Synthetic oligonucleotide
uuggucagauaccgauccc

SEQ ID NO: 2379661 - RNA, 19 nt, Artificial Sequence
  Description of Artificial Sequence: Synthetic oligonucleotide
uucugucccacuuccuggu

SEQ ID NO: 2379662 - RNA, 19 nt, Artificial Sequence
  Description of Artificial Sequence: Synthetic oligonucleotide
ccauguugggcucaagcgg

SEQ ID NO: 2379663 - RNA, 19 nt, Artificial Sequence
  Description of Artificial Sequence: Synthetic oligonucleotide
uggggcuucacucccugaa

SEQ ID NO: 2379664 - RNA, 19 nt, Artificial Sequence
  Description of Artificial Sequence: Synthetic oligonucleotide
augugcacuucucgauggg

SEQ ID NO: 2379665 - RNA, 19 nt, Artificial Sequence
  Description of Artificial Sequence: Synthetic oligonucleotide
ggugucugggaucugcggc

SEQ ID NO: 2379666 - RNA, 19 nt, Artificial Sequence
  Description of Artificial Sequence: Synthetic oligonucleotide
ggugccagccaguuugggg

SEQ ID NO: 2379667 - RNA, 19 nt, Artificial Sequence
  Description of Artificial Sequence: Synthetic oligonucleotide
agauauuuacagccuccau

SEQ ID NO: 2379668 - RNA, 19 nt, Artificial Sequence
  Description of Artificial Sequence: Synthetic oligonucleotide
auuguggaagucaggagaa

SEQ ID NO: 2379669 - RNA, 19 nt, Artificial Sequence
  Description of Artificial Sequence: Synthetic oligonucleotide
cugguccugaacuccugcc

SEQ ID NO: 2379670 - RNA, 19 nt, Artificial Sequence
  Description of Artificial Sequence: Synthetic oligonucleotide
ucucuccaaguuugcaagu

SEQ ID NO: 2379671 - RNA, 19 nt, Artificial Sequence
  Description of Artificial Sequence: Synthetic oligonucleotide
acuuccgguuccuccgauc

SEQ ID NO: 2379672 - RNA, 19 nt, Artificial Sequence
  Description of Artificial Sequence: Synthetic oligonucleotide
uucauucugugucgguuuu

SEQ ID NO: 2379673 - RNA, 19 nt, Artificial Sequence
  Description of Artificial Sequence: Synthetic oligonucleotide
agguagaggaggcagccuu

SEQ ID NO: 2379674 - RNA, 19 nt, Artificial Sequence
  Description of Artificial Sequence: Synthetic oligonucleotide
cagccacggauaauauugc

SEQ ID NO: 2379675 - RNA, 19 nt, Artificial Sequence
  Description of Artificial Sequence: Synthetic oligonucleotide
ccugccaaggcacuuacug

SEQ ID NO: 2379676 - RNA, 19 nt, Artificial Sequence
  Description of Artificial Sequence: Synthetic oligonucleotide
gauuggucagauaccgauc

SEQ ID NO: 2379677 - RNA, 19 nt, Artificial Sequence
  Description of Artificial Sequence: Synthetic oligonucleotide
uuugagugucuuccaggua

SEQ ID NO: 2379678 - RNA, 19 nt, Artificial Sequence
  Description of Artificial Sequence: Synthetic oligonucleotide
accgaucccagccacggau

SEQ ID NO: 2379679 - RNA, 19 nt, Artificial Sequence
  Description of Artificial Sequence: Synthetic oligonucleotide
uugggcucaagcggcggcg

SEQ ID NO: 2379680 - RNA, 19 nt, Artificial Sequence
  Description of Artificial Sequence: Synthetic oligonucleotide
guugugcaucgccauguug

SEQ ID NO: 2379681 - RNA, 19 nt, Artificial Sequence
  Description of Artificial Sequence: Synthetic oligonucleotide
gucagauaccgaucccagc

SEQ ID NO: 2379682 - RNA, 19 nt, Artificial Sequence
  Description of Artificial Sequence: Synthetic oligonucleotide
augcugacaccacaugaaa

SEQ ID NO: 2379683 - RNA, 19 nt, Artificial Sequence
  Description of Artificial Sequence: Synthetic oligonucleotide
ggagaaguaucgcuuucug

SEQ ID NO: 2379684 - RNA, 19 nt, Artificial Sequence
  Description of Artificial Sequence: Synthetic oligonucleotide
guuuucaguaaugaaugcu

SEQ ID NO: 2379685 - RNA, 19 nt, Artificial Sequence
  Description of Artificial Sequence: Synthetic oligonucleotide
caagcggcggcggaggcgg

SEQ ID NO: 2379686 - RNA, 19 nt, Artificial Sequence
  Description of Artificial Sequence: Synthetic oligonucleotide
ggauuugcugaagagccgc

SEQ ID NO: 2379687 - RNA, 19 nt, Artificial Sequence
  Description of Artificial Sequence: Synthetic oligonucleotide
accguccagguccucgggg

SEQ ID NO: 2379688 - RNA, 19 nt, Artificial Sequence
  Description of Artificial Sequence: Synthetic oligonucleotide
acagacgaucagauguguc

SEQ ID NO: 2379689 - RNA, 19 nt, Artificial Sequence
  Description of Artificial Sequence: Synthetic oligonucleotide
ggaggcagccuucuggggc

SEQ ID NO: 2379690 - RNA, 19 nt, Artificial Sequence
  Description of Artificial Sequence: Synthetic oligonucleotide
aguaucgcuuucuguccca

SEQ ID NO: 2379691 - RNA, 19 nt, Artificial Sequence
  Description of Artificial Sequence: Synthetic oligonucleotide
ggcuucacucccugaacgg

SEQ ID NO: 2379692 - RNA, 19 nt, Artificial Sequence
  Description of Artificial Sequence: Synthetic oligonucleotide
aggauuugcugaagagccg

SEQ ID NO: 2379693 - RNA, 19 nt, Artificial Sequence
  Description of Artificial Sequence: Synthetic oligonucleotide
ugucugggaucugcggcgg

SEQ ID NO: 2379694 - RNA, 19 nt, Artificial Sequence
  Description of Artificial Sequence: Synthetic oligonucleotide
auauugccauacauuugag

SEQ ID NO: 2379695 - RNA, 19 nt, Artificial Sequence
  Description of Artificial Sequence: Synthetic oligonucleotide
gcuguggugacucccugag

SEQ ID NO: 2379696 - RNA, 19 nt, Artificial Sequence
  Description of Artificial Sequence: Synthetic oligonucleotide
uacugcagcggccgaugug

SEQ ID NO: 2379697 - RNA, 19 nt, Artificial Sequence
  Description of Artificial Sequence: Synthetic oligonucleotide
aggagaaguaucgcuuucu

SEQ ID NO: 2379698 - RNA, 19 nt, Artificial Sequence
  Description of Artificial Sequence: Synthetic oligonucleotide
cucuccaaguuugcaagug

SEQ ID NO: 2379699 - RNA, 19 nt, Artificial Sequence
  Description of Artificial Sequence: Synthetic oligonucleotide
uguuuccgccagcuccugc

SEQ ID NO: 2379700 - RNA, 19 nt, Artificial Sequence
  Description of Artificial Sequence: Synthetic oligonucleotide
gagaaguaucgcuuucugu

SEQ ID NO: 2379701 - RNA, 19 nt, Artificial Sequence
  Description of Artificial Sequence: Synthetic oligonucleotide
uguugggcucaagcggcgg

SEQ ID NO: 2379702 - RNA, 19 nt, Artificial Sequence
  Description of Artificial Sequence: Synthetic oligonucleotide
ugacucccugaggagguag

SEQ ID NO: 2379703 - RNA, 19 nt, Artificial Sequence
  Description of Artificial Sequence: Synthetic oligonucleotide
uucccucuuuucgaugagc

SEQ ID NO: 2379704 - RNA, 19 nt, Artificial Sequence
  Description of Artificial Sequence: Synthetic oligonucleotide
uccugggcaggcucguucu

SEQ ID NO: 2379705 - RNA, 19 nt, Artificial Sequence
  Description of Artificial Sequence: Synthetic oligonucleotide
ucuuccagguagcuuccuu

SEQ ID NO: 2379706 - RNA, 19 nt, Artificial Sequence
  Description of Artificial Sequence: Synthetic oligonucleotide
uuacugcagcggccgaugu

SEQ ID NO: 2379707 - RNA, 19 nt, Artificial Sequence
  Description of Artificial Sequence: Synthetic oligonucleotide
cacucccugaacggaaccg

SEQ ID NO: 2379708 - RNA, 19 nt, Artificial Sequence
  Description of Artificial Sequence: Synthetic oligonucleotide
cuuacugcagcggccgaug

SEQ ID NO: 2379709 - RNA, 19 nt, Artificial Sequence
  Description of Artificial Sequence: Synthetic oligonucleotide
aucaggaaggguacaggca

SEQ ID NO: 2379710 - RNA, 19 nt, Artificial Sequence
  Description of Artificial Sequence: Synthetic oligonucleotide
aggaggcagccuucugggg

SEQ ID NO: 2379711 - RNA, 19 nt, Artificial Sequence
  Description of Artificial Sequence: Synthetic oligonucleotide
agacgaucagaugugucau

SEQ ID NO: 2379712 - RNA, 19 nt, Artificial Sequence
  Description of Artificial Sequence: Synthetic oligonucleotide
aggaaggguacaggcauca

SEQ ID NO: 2379713 - RNA, 19 nt, Artificial Sequence
  Description of Artificial Sequence: Synthetic oligonucleotide
gccgucuuguugugcaucg

SEQ ID NO: 2379714 - RNA, 19 nt, Artificial Sequence
  Description of Artificial Sequence: Synthetic oligonucleotide
gcauagaucugucucucca

SEQ ID NO: 2379715 - RNA, 19 nt, Artificial Sequence
  Description of Artificial Sequence: Synthetic oligonucleotide
aguguuuccgccagcuccu

SEQ ID NO: 2379716 - RNA, 19 nt, Artificial Sequence
  Description of Artificial Sequence: Synthetic oligonucleotide
cauagaucugucucuccaa

SEQ ID NO: 2379717 - RNA, 19 nt, Artificial Sequence
  Description of Artificial Sequence: Synthetic oligonucleotide
acuuucagcauaacacaaa

SEQ ID NO: 2379718 - RNA, 19 nt, Artificial Sequence
  Description of Artificial Sequence: Synthetic oligonucleotide
gcagauauuuacagccucc

SEQ ID NO: 2379719 - RNA, 19 nt, Artificial Sequence
  Description of Artificial Sequence: Synthetic oligonucleotide
uuucgaugagcugguccug

SEQ ID NO: 2379720 - RNA, 19 nt, Artificial Sequence
  Description of Artificial Sequence: Synthetic oligonucleotide
gacgaucagaugugucauc

SEQ ID NO: 2379721 - RNA, 19 nt, Artificial Sequence
  Description of Artificial Sequence: Synthetic oligonucleotide
ugguucccucuuuucgaug

SEQ ID NO: 2379722 - RNA, 19 nt, Artificial Sequence
  Description of Artificial Sequence: Synthetic oligonucleotide
gugucaucaggaaggguac

SEQ ID NO: 2379723 - RNA, 19 nt, Artificial Sequence
  Description of Artificial Sequence: Synthetic oligonucleotide
uagcuuccuucaaaagcau

SEQ ID NO: 2379724 - RNA, 19 nt, Artificial Sequence
  Description of Artificial Sequence: Synthetic oligonucleotide
ggacaaucacagauggagc

SEQ ID NO: 2379725 - RNA, 19 nt, Artificial Sequence
  Description of Artificial Sequence: Synthetic oligonucleotide
guugggcucaagcggcggc

SEQ ID NO: 2379726 - RNA, 19 nt, Artificial Sequence
  Description of Artificial Sequence: Synthetic oligonucleotide
gaacggaaccguccagguc

SEQ ID NO: 2379727 - RNA, 19 nt, Artificial Sequence
  Description of Artificial Sequence: Synthetic oligonucleotide
caucacaaaauagucccaa

SEQ ID NO: 2379728 - RNA, 19 nt, Artificial Sequence
  Description of Artificial Sequence: Synthetic oligonucleotide
ccugcuuccgcuucaccag

SEQ ID NO: 2379729 - RNA, 19 nt, Artificial Sequence
  Description of Artificial Sequence: Synthetic oligonucleotide
cagauauuuacagccucca

SEQ ID NO: 2379730 - RNA, 19 nt, Artificial Sequence
  Description of Artificial Sequence: Synthetic oligonucleotide
ggauaauauugccauacau

SEQ ID NO: 2379731 - RNA, 19 nt, Artificial Sequence
  Description of Artificial Sequence: Synthetic oligonucleotide
uaucgcuuucugucccacu

SEQ ID NO: 2379732 - RNA, 19 nt, Artificial Sequence
  Description of Artificial Sequence: Synthetic oligonucleotide
ggaaccguccagguccucg

SEQ ID NO: 2379733 - RNA, 19 nt, Artificial Sequence
  Description of Artificial Sequence: Synthetic oligonucleotide
uggguucuacuuucagcau

SEQ ID NO: 2379734 - RNA, 19 nt, Artificial Sequence
  Description of Artificial Sequence: Synthetic oligonucleotide
gcacuuacugcagcggccg

SEQ ID NO: 2379735 - RNA, 19 nt, Artificial Sequence
  Description of Artificial Sequence: Synthetic oligonucleotide
ugcuuccgcuucaccagcu

SEQ ID NO: 2379736 - RNA, 19 nt, Artificial Sequence
  Description of Artificial Sequence: Synthetic oligonucleotide
ugggcaggcucguucuccu

SEQ ID NO: 2379737 - RNA, 19 nt, Artificial Sequence
  Description of Artificial Sequence: Synthetic oligonucleotide
uguugugcaucgccauguu

SEQ ID NO: 2379738 - RNA, 19 nt, Artificial Sequence
  Description of Artificial Sequence: Synthetic oligonucleotide
ggucagauaccgaucccag

SEQ ID NO: 2379739 - RNA, 19 nt, Artificial Sequence
  Description of Artificial Sequence: Synthetic oligonucleotide
acagauggagcuggugcca

SEQ ID NO: 2379740 - RNA, 19 nt, Artificial Sequence
  Description of Artificial Sequence: Synthetic oligonucleotide
gucuuguugugcaucgcca

SEQ ID NO: 2379741 - RNA, 19 nt, Artificial Sequence
  Description of Artificial Sequence: Synthetic oligonucleotide
aacuuccgguuccuccgau

SEQ ID NO: 2379742 - RNA, 19 nt, Artificial Sequence
  Description of Artificial Sequence: Synthetic oligonucleotide
cugcuuccgcuucaccagc

SEQ ID NO: 2379743 - RNA, 19 nt, Artificial Sequence
  Description of Artificial Sequence: Synthetic oligonucleotide
acucccugaggagguagag

SEQ ID NO: 2379744 - RNA, 19 nt, Artificial Sequence
  Description of Artificial Sequence: Synthetic oligonucleotide
acucccugaacggaaccgu

SEQ ID NO: 2379745 - RNA, 19 nt, Artificial Sequence
  Description of Artificial Sequence: Synthetic oligonucleotide
aaucacagauggagcuggu

SEQ ID NO: 2379746 - RNA, 19 nt, Artificial Sequence
  Description of Artificial Sequence: Synthetic oligonucleotide
ucuccugauuguggaaguc

SEQ ID NO: 2379747 - RNA, 19 nt, Artificial Sequence
  Description of Artificial Sequence: Synthetic oligonucleotide
caaaagcauagaucugucu

SEQ ID NO: 2379748 - RNA, 19 nt, Artificial Sequence
  Description of Artificial Sequence: Synthetic oligonucleotide
ugggcucaagcggcggcgg

SEQ ID NO: 2379749 - RNA, 19 nt, Artificial Sequence
  Description of Artificial Sequence: Synthetic oligonucleotide
ccacaugaaacagacgauc

SEQ ID NO: 2379750 - RNA, 19 nt, Artificial Sequence
  Description of Artificial Sequence: Synthetic oligonucleotide
ugggaucugcggcggcgcc

SEQ ID NO: 2379751 - RNA, 19 nt, Artificial Sequence
  Description of Artificial Sequence: Synthetic oligonucleotide
gaacuuccgguuccuccga

SEQ ID NO: 2379752 - RNA, 19 nt, Artificial Sequence
  Description of Artificial Sequence: Synthetic oligonucleotide
ucgaugagcugguccugaa

SEQ ID NO: 2379753 - RNA, 19 nt, Artificial Sequence
  Description of Artificial Sequence: Synthetic oligonucleotide
cugggcaggcucguucucc

SEQ ID NO: 2379754 - RNA, 19 nt, Artificial Sequence
  Description of Artificial Sequence: Synthetic oligonucleotide
cacuuuaguuuucaguaau

SEQ ID NO: 2379755 - RNA, 19 nt, Artificial Sequence
  Description of Artificial Sequence: Synthetic oligonucleotide
cugcaauggaacuuggguu

SEQ ID NO: 2379756 - RNA, 19 nt, Artificial Sequence
  Description of Artificial Sequence: Synthetic oligonucleotide
cuccugauuguggaaguca

SEQ ID NO: 2379757 - RNA, 19 nt, Artificial Sequence
  Description of Artificial Sequence: Synthetic oligonucleotide
cucgggguccuccugggca

SEQ ID NO: 2379758 - RNA, 19 nt, Artificial Sequence
  Description of Artificial Sequence: Synthetic oligonucleotide
cuccugccaaggcacuuac

SEQ ID NO: 2379759 - RNA, 19 nt, Artificial Sequence
  Description of Artificial Sequence: Synthetic oligonucleotide
accacaugaaacagacgau

SEQ ID NO: 2379760 - RNA, 19 nt, Artificial Sequence
  Description of Artificial Sequence: Synthetic oligonucleotide
guuuccgccagcuccugcu

SEQ ID NO: 2379761 - RNA, 19 nt, Artificial Sequence
  Description of Artificial Sequence: Synthetic oligonucleotide
gggugucugggaucugcgg

SEQ ID NO: 2379762 - RNA, 19 nt, Artificial Sequence
  Description of Artificial Sequence: Synthetic oligonucleotide
uuccgguuccuccgaucgu

SEQ ID NO: 2379763 - RNA, 19 nt, Artificial Sequence
  Description of Artificial Sequence: Synthetic oligonucleotide
ggagacauucauucugugu

SEQ ID NO: 2379764 - RNA, 19 nt, Artificial Sequence
  Description of Artificial Sequence: Synthetic oligonucleotide
ucccagccacggauaauau

SEQ ID NO: 2379765 - RNA, 19 nt, Artificial Sequence
  Description of Artificial Sequence: Synthetic oligonucleotide
uccgguuccuccgaucguu

SEQ ID NO: 2379766 - RNA, 19 nt, Artificial Sequence
  Description of Artificial Sequence: Synthetic oligonucleotide
cagauaccgaucccagcca

SEQ ID NO: 2379767 - RNA, 19 nt, Artificial Sequence
  Description of Artificial Sequence: Synthetic oligonucleotide
uggugccagccaguuuggg

SEQ ID NO: 2379768 - RNA, 19 nt, Artificial Sequence
  Description of Artificial Sequence: Synthetic oligonucleotide
uaccgaucccagccacgga

SEQ ID NO: 2379769 - RNA, 19 nt, Artificial Sequence
  Description of Artificial Sequence: Synthetic oligonucleotide
uccugccaaggcacuuacu

SEQ ID NO: 2379770 - RNA, 19 nt, Artificial Sequence
  Description of Artificial Sequence: Synthetic oligonucleotide
ucugcggcggcgccgucuu

SEQ ID NO: 2379771 - RNA, 19 nt, Artificial Sequence
  Description of Artificial Sequence: Synthetic oligonucleotide
ugcagcggccgaugugacu

SEQ ID NO: 2379772 - RNA, 19 nt, Artificial Sequence
  Description of Artificial Sequence: Synthetic oligonucleotide
ucugucccacuuccugguu

SEQ ID NO: 2379773 - RNA, 19 nt, Artificial Sequence
  Description of Artificial Sequence: Synthetic oligonucleotide
cucaagcggcggcggaggc

SEQ ID NO: 2379774 - RNA, 19 nt, Artificial Sequence
  Description of Artificial Sequence: Synthetic oligonucleotide
ggcacuuacugcagcggcc

SEQ ID NO: 2379775 - RNA, 19 nt, Artificial Sequence
  Description of Artificial Sequence: Synthetic oligonucleotide
auggagcuggugccagcca

SEQ ID NO: 2379776 - RNA, 19 nt, Artificial Sequence
  Description of Artificial Sequence: Synthetic oligonucleotide
cuugaacuuccgguuccuc

SEQ ID NO: 2379777 - RNA, 19 nt, Artificial Sequence
  Description of Artificial Sequence: Synthetic oligonucleotide
gccacggauaauauugcca

SEQ ID NO: 2379778 - RNA, 19 nt, Artificial Sequence
  Description of Artificial Sequence: Synthetic oligonucleotide
acuuacugcagcggccgau

SEQ ID NO: 2379779 - RNA, 19 nt, Artificial Sequence
  Description of Artificial Sequence: Synthetic oligonucleotide
ggguucuacuuucagcaua

SEQ ID NO: 2379780 - RNA, 19 nt, Artificial Sequence
  Description of Artificial Sequence: Synthetic oligonucleotide
gguacaggcaucacaaaau

SEQ ID NO: 2379781 - RNA, 19 nt, Artificial Sequence
  Description of Artificial Sequence: Synthetic oligonucleotide
guaucgcuuucugucccac

SEQ ID NO: 2379782 - RNA, 19 nt, Artificial Sequence
  Description of Artificial Sequence: Synthetic oligonucleotide
gguccugaacuccugccaa

SEQ ID NO: 2379783 - RNA, 19 nt, Artificial Sequence
  Description of Artificial Sequence: Synthetic oligonucleotide
ccugaacuccugccaaggc

SEQ ID NO: 2379784 - RNA, 19 nt, Artificial Sequence
  Description of Artificial Sequence: Synthetic oligonucleotide
ccagagaugugcacuucuc

SEQ ID NO: 2379785 - RNA, 19 nt, Artificial Sequence
  Description of Artificial Sequence: Synthetic oligonucleotide
cucuuuucgaugagcuggu

SEQ ID NO: 2379786 - RNA, 19 nt, Artificial Sequence
  Description of Artificial Sequence: Synthetic oligonucleotide
ggcgccgucuuguugugca

SEQ ID NO: 2379787 - RNA, 19 nt, Artificial Sequence
  Description of Artificial Sequence: Synthetic oligonucleotide
ugcggcggcgccgucuugu

SEQ ID NO: 2379788 - RNA, 19 nt, Artificial Sequence
  Description of Artificial Sequence: Synthetic oligonucleotide
gucaggagaaguaucgcuu

SEQ ID NO: 2379789 - RNA, 19 nt, Artificial Sequence
  Description of Artificial Sequence: Synthetic oligonucleotide
cuccaucugcaauggaacu

SEQ ID NO: 2379790 - RNA, 19 nt, Artificial Sequence
  Description of Artificial Sequence: Synthetic oligonucleotide
caaaagaauggcagauauu

SEQ ID NO: 2379791 - RNA, 19 nt, Artificial Sequence
  Description of Artificial Sequence: Synthetic oligonucleotide
ccugguucccucuuuucga

SEQ ID NO: 2379792 - RNA, 19 nt, Artificial Sequence
  Description of Artificial Sequence: Synthetic oligonucleotide
cgcuuucugucccacuucc

SEQ ID NO: 2379793 - RNA, 19 nt, Artificial Sequence
  Description of Artificial Sequence: Synthetic oligonucleotide
gcucguucuccugauugug

SEQ ID NO: 2379794 - RNA, 19 nt, Artificial Sequence
  Description of Artificial Sequence: Synthetic oligonucleotide
gacucccugaggagguaga

SEQ ID NO: 2379795 - RNA, 19 nt, Artificial Sequence
  Description of Artificial Sequence: Synthetic oligonucleotide
ggcaggcucguucuccuga

SEQ ID NO: 2379796 - RNA, 19 nt, Artificial Sequence
  Description of Artificial Sequence: Synthetic oligonucleotide
cuccaaguuugcaaguguu

SEQ ID NO: 2379797 - RNA, 19 nt, Artificial Sequence
  Description of Artificial Sequence: Synthetic oligonucleotide
gugcaucgccauguugggc

SEQ ID NO: 2379798 - RNA, 19 nt, Artificial Sequence
  Description of Artificial Sequence: Synthetic oligonucleotide
gauuugcugaagagccgcu

SEQ ID NO: 2379799 - RNA, 19 nt, Artificial Sequence
  Description of Artificial Sequence: Synthetic oligonucleotide
gcucaagcggcggcggagg

SEQ ID NO: 2379800 - RNA, 19 nt, Artificial Sequence
  Description of Artificial Sequence: Synthetic oligonucleotide
cagguccucgggguccucc

SEQ ID NO: 2379801 - RNA, 19 nt, Artificial Sequence
  Description of Artificial Sequence: Synthetic oligonucleotide
cgccauguugggcucaagc

SEQ ID NO: 2379802 - RNA, 19 nt, Artificial Sequence
  Description of Artificial Sequence: Synthetic oligonucleotide
cauucauucugugucgguu

SEQ ID NO: 2379803 - RNA, 19 nt, Artificial Sequence
  Description of Artificial Sequence: Synthetic oligonucleotide
acuccugccaaggcacuua

SEQ ID NO: 2379804 - RNA, 19 nt, Artificial Sequence
  Description of Artificial Sequence: Synthetic oligonucleotide
guucuacuuucagcauaac

SEQ ID NO: 2379805 - RNA, 19 nt, Artificial Sequence
  Description of Artificial Sequence: Synthetic oligonucleotide
cacggauaauauugccaua

SEQ ID NO: 2379806 - RNA, 19 nt, Artificial Sequence
  Description of Artificial Sequence: Synthetic oligonucleotide
agcuuccuucaaaagcaua

SEQ ID NO: 2379807 - RNA, 19 nt, Artificial Sequence
  Description of Artificial Sequence: Synthetic oligonucleotide
ccacggauaauauugccau

SEQ ID NO: 2379808 - RNA, 19 nt, Artificial Sequence
  Description of Artificial Sequence: Synthetic oligonucleotide
cccucuuuucgaugagcug

SEQ ID NO: 2379809 - RNA, 19 nt, Artificial Sequence
  Description of Artificial Sequence: Synthetic oligonucleotide
ccacuuuaguuuucaguaa

SEQ ID NO: 2379810 - RNA, 19 nt, Artificial Sequence
  Description of Artificial Sequence: Synthetic oligonucleotide
ccugaacggaaccguccag

SEQ ID NO: 2379811 - RNA, 19 nt, Artificial Sequence
  Description of Artificial Sequence: Synthetic oligonucleotide
gguagaggaggcagccuuc

SEQ ID NO: 2379812 - RNA, 19 nt, Artificial Sequence
  Description of Artificial Sequence: Synthetic oligonucleotide
agcggccgaugugacugag

SEQ ID NO: 2379813 - RNA, 19 nt, Artificial Sequence
  Description of Artificial Sequence: Synthetic oligonucleotide
gcuucacucccugaacgga

SEQ ID NO: 2379814 - RNA, 19 nt, Artificial Sequence
  Description of Artificial Sequence: Synthetic oligonucleotide
guagaggaggcagccuucu

SEQ ID NO: 2379815 - RNA, 19 nt, Artificial Sequence
  Description of Artificial Sequence: Synthetic oligonucleotide
gcaucacaaaauaguccca

SEQ ID NO: 2379816 - RNA, 19 nt, Artificial Sequence
  Description of Artificial Sequence: Synthetic oligonucleotide
ggcucaagcggcggcggag

SEQ ID NO: 2379817 - RNA, 19 nt, Artificial Sequence
  Description of Artificial Sequence: Synthetic oligonucleotide
gggaucugcggcggcgccg

SEQ ID NO: 2379818 - RNA, 19 nt, Artificial Sequence
  Description of Artificial Sequence: Synthetic oligonucleotide
aucugcggcggcgccgucu

SEQ ID NO: 2379819 - RNA, 19 nt, Artificial Sequence
  Description of Artificial Sequence: Synthetic oligonucleotide
cccugaggagguagaggag

SEQ ID NO: 2379820 - RNA, 19 nt, Artificial Sequence
  Description of Artificial Sequence: Synthetic oligonucleotide
ggcggcgccgucuuguugu

SEQ ID NO: 2379821 - RNA, 19 nt, Artificial Sequence
  Description of Artificial Sequence: Synthetic oligonucleotide
cugguucccucuuuucgau

SEQ ID NO: 2379822 - RNA, 19 nt, Artificial Sequence
  Description of Artificial Sequence: Synthetic oligonucleotide
gagcugguccugaacuccu

SEQ ID NO: 2379823 - RNA, 19 nt, Artificial Sequence
  Description of Artificial Sequence: Synthetic oligonucleotide
aucgccauguugggcucaa

SEQ ID NO: 2379824 - RNA, 19 nt, Artificial Sequence
  Description of Artificial Sequence: Synthetic oligonucleotide
ucgccauguugggcucaag

SEQ ID NO: 2379825 - RNA, 19 nt, Artificial Sequence
  Description of Artificial Sequence: Synthetic oligonucleotide
cgggugucugggaucugcg

SEQ ID NO: 2379826 - RNA, 19 nt, Artificial Sequence
  Description of Artificial Sequence: Synthetic oligonucleotide
acggaaccguccagguccu

SEQ ID NO: 2379827 - RNA, 19 nt, Artificial Sequence
  Description of Artificial Sequence: Synthetic oligonucleotide
gagugucuuccagguagcu

SEQ ID NO: 2379828 - RNA, 19 nt, Artificial Sequence
  Description of Artificial Sequence: Synthetic oligonucleotide
ccgggugucugggaucugc

SEQ ID NO: 2379829 - RNA, 19 nt, Artificial Sequence
  Description of Artificial Sequence: Synthetic oligonucleotide
guguuuccgccagcuccug

SEQ ID NO: 2379830 - RNA, 19 nt, Artificial Sequence
  Description of Artificial Sequence: Synthetic oligonucleotide
cccugaacggaaccgucca

SEQ ID NO: 2379831 - RNA, 19 nt, Artificial Sequence
  Description of Artificial Sequence: Synthetic oligonucleotide
gagguagaggaggcagccu

SEQ ID NO: 2379832 - RNA, 19 nt, Artificial Sequence
  Description of Artificial Sequence: Synthetic oligonucleotide
ggcucguucuccugauugu

SEQ ID NO: 2379833 - RNA, 19 nt, Artificial Sequence
  Description of Artificial Sequence: Synthetic oligonucleotide
ggugacucccugaggaggu

SEQ ID NO: 2379834 - RNA, 19 nt, Artificial Sequence
  Description of Artificial Sequence: Synthetic oligonucleotide
aagagccgcucggccuccu

SEQ ID NO: 2379835 - RNA, 19 nt, Artificial Sequence
  Description of Artificial Sequence: Synthetic oligonucleotide
cacuuacugcagcggccga

SEQ ID NO: 2379836 - RNA, 19 nt, Artificial Sequence
  Description of Artificial Sequence: Synthetic oligonucleotide
gaacuccugccaaggcacu

SEQ ID NO: 2379837 - RNA, 19 nt, Artificial Sequence
  Description of Artificial Sequence: Synthetic oligonucleotide
cgaugagcugguccugaac

SEQ ID NO: 2379838 - RNA, 19 nt, Artificial Sequence
  Description of Artificial Sequence: Synthetic oligonucleotide
gcaucgccauguugggcuc

SEQ ID NO: 2379839 - RNA, 19 nt, Artificial Sequence
  Description of Artificial Sequence: Synthetic oligonucleotide
cggauaauauugccauaca

SEQ ID NO: 2379840 - RNA, 19 nt, Artificial Sequence
  Description of Artificial Sequence: Synthetic oligonucleotide
gcggccgaugugacugagg

SEQ ID NO: 2379841 - RNA, 19 nt, Artificial Sequence
  Description of Artificial Sequence: Synthetic oligonucleotide
ggggacaaucacagaugga

SEQ ID NO: 2379842 - RNA, 19 nt, Artificial Sequence
  Description of Artificial Sequence: Synthetic oligonucleotide
gcaauggaacuuggguucu

SEQ ID NO: 2379843 - RNA, 19 nt, Artificial Sequence
  Description of Artificial Sequence: Synthetic oligonucleotide
gggcaggcucguucuccug

SEQ ID NO: 2379844 - RNA, 19 nt, Artificial Sequence
  Description of Artificial Sequence: Synthetic oligonucleotide
caauggaacuuggguucua

SEQ ID NO: 2379845 - RNA, 19 nt, Artificial Sequence
  Description of Artificial Sequence: Synthetic oligonucleotide
cagcggccgaugugacuga

SEQ ID NO: 2379846 - RNA, 19 nt, Artificial Sequence
  Description of Artificial Sequence: Synthetic oligonucleotide
ccgucuuguugugcaucgc

SEQ ID NO: 2379847 - RNA, 19 nt, Artificial Sequence
  Description of Artificial Sequence: Synthetic oligonucleotide
gaucugcggcggcgccguc

SEQ ID NO: 2379848 - RNA, 19 nt, Artificial Sequence
  Description of Artificial Sequence: Synthetic oligonucleotide
cgaugugacugaggauuug

SEQ ID NO: 2379849 - RNA, 19 nt, Artificial Sequence
  Description of Artificial Sequence: Synthetic oligonucleotide
gcagccuucuggggcuuca

SEQ ID NO: 2379850 - RNA, 19 nt, Artificial Sequence
  Description of Artificial Sequence: Synthetic oligonucleotide
gcggcgccgucuuguugug

SEQ ID NO: 2379851 - RNA, 19 nt, Artificial Sequence
  Description of Artificial Sequence: Synthetic oligonucleotide
gggcucaagcggcggcgga

SEQ ID NO: 2379852 - RNA, 19 nt, Artificial Sequence
  Description of Artificial Sequence: Synthetic oligonucleotide
ggaucugcggcggcgccgu

SEQ ID NO: 2379853 - RNA, 19 nt, Artificial Sequence
  Description of Artificial Sequence: Synthetic oligonucleotide
ccauacauuugagugucuu

SEQ ID NO: 2379854 - RNA, 19 nt, Artificial Sequence
  Description of Artificial Sequence: Synthetic oligonucleotide
gcaggcucguucuccugau

SEQ ID NO: 2379855 - RNA, 19 nt, Artificial Sequence
  Description of Artificial Sequence: Synthetic oligonucleotide
ccgccgggugucugggauc

SEQ ID NO: 2379856 - RNA, 19 nt, Artificial Sequence
  Description of Artificial Sequence: Synthetic oligonucleotide
cgaucccagccacggauaa

SEQ ID NO: 2379857 - RNA, 19 nt, Artificial Sequence
  Description of Artificial Sequence: Synthetic oligonucleotide
cugcggcggcgccgucuug

SEQ ID NO: 2379858 - RNA, 19 nt, Artificial Sequence
  Description of Artificial Sequence: Synthetic oligonucleotide
ggccgaugugacugaggau

SEQ ID NO: 2379859 - RNA, 19 nt, Artificial Sequence
  Description of Artificial Sequence: Synthetic oligonucleotide
ccgaugugacugaggauuu

SEQ ID NO: 2379860 - RNA, 19 nt, Artificial Sequence
  Description of Artificial Sequence: Synthetic oligonucleotide
cgccgucuuguugugcauc

SEQ ID NO: 2379861 - RNA, 19 nt, Artificial Sequence
  Description of Artificial Sequence: Synthetic oligonucleotide
gccauacauuugagugucu

SEQ ID NO: 2379862 - RNA, 19 nt, Artificial Sequence
  Description of Artificial Sequence: Synthetic oligonucleotide
cccagccacggauaauauu

SEQ ID NO: 2379863 - RNA, 19 nt, Artificial Sequence
  Description of Artificial Sequence: Synthetic oligonucleotide
caggcucguucuccugauu

SEQ ID NO: 2379864 - RNA, 19 nt, Artificial Sequence
  Description of Artificial Sequence: Synthetic oligonucleotide
cggcggcgccgucuuguug

SEQ ID NO: 2379865 - RNA, 19 nt, Artificial Sequence
  Description of Artificial Sequence: Synthetic oligonucleotide
ggguccuccugggcaggcu

SEQ ID NO: 2379866 - RNA, 19 nt, Artificial Sequence
  Description of Artificial Sequence: Synthetic oligonucleotide
gccgggugucugggaucug

SEQ ID NO: 2379867 - RNA, 19 nt, Artificial Sequence
  Description of Artificial Sequence: Synthetic oligonucleotide
gcgccgucuuguugugcau

SEQ ID NO: 2379868 - RNA, 19 nt, Artificial Sequence
  Description of Artificial Sequence: Synthetic oligonucleotide
cggcgccgucuuguugugc

SEQ ID NO: 2379869 - RNA, 19 nt, Artificial Sequence
  Description of Artificial Sequence: Synthetic oligonucleotide
ccgguuccuccgaucguuu

SEQ ID NO: 2379870 - RNA, 19 nt, Artificial Sequence
  Description of Artificial Sequence: Synthetic oligonucleotide
cgguuccuccgaucguuuu

SEQ ID NO: 2379871 - RNA, 19 nt, Artificial Sequence
  Description of Artificial Sequence: Synthetic oligonucleotide
cagcucccgccgggugucu

SEQ ID NO: 2379872 - RNA, 19 nt, Artificial Sequence
  Description of Artificial Sequence: Synthetic oligonucleotide
cggaaccguccagguccuc

SEQ ID NO: 2379873 - RNA, 19 nt, Artificial Sequence
  Description of Artificial Sequence: Synthetic oligonucleotide
aaagcuucauucuacaugg

SEQ ID NO: 2379874 - RNA, 19 nt, Artificial Sequence
  Description of Artificial Sequence: Synthetic oligonucleotide
aaaauaaggaacuguuagg

SEQ ID NO: 2379875 - RNA, 19 nt, Artificial Sequence
  Description of Artificial Sequence: Synthetic oligonucleotide
cucguauugacaaagagcc

SEQ ID NO: 2379876 - RNA, 19 nt, Artificial Sequence
  Description of Artificial Sequence: Synthetic oligonucleotide
acuguuaggauugagcucc

SEQ ID NO: 2379877 - RNA, 19 nt, Artificial Sequence
  Description of Artificial Sequence: Synthetic oligonucleotide
uccagaaacacacaaagcu

SEQ ID NO: 2379878 - RNA, 19 nt, Artificial Sequence
  Description of Artificial Sequence: Synthetic oligonucleotide
auuaaccagacuuugaugu

SEQ ID NO: 2379879 - RNA, 19 nt, Artificial Sequence
  Description of Artificial Sequence: Synthetic oligonucleotide
aagaaucuucgcuggaugc

SEQ ID NO: 2379880 - RNA, 19 nt, Artificial Sequence
  Description of Artificial Sequence: Synthetic oligonucleotide
auugacucugcccauaggg

SEQ ID NO: 2379881 - RNA, 19 nt, Artificial Sequence
  Description of Artificial Sequence: Synthetic oligonucleotide
uguaacaaagaauuucuca

SEQ ID NO: 2379882 - RNA, 19 nt, Artificial Sequence
  Description of Artificial Sequence: Synthetic oligonucleotide
uuugcucucaaaaggauca

SEQ ID NO: 2379883 - RNA, 19 nt, Artificial Sequence
  Description of Artificial Sequence: Synthetic oligonucleotide
acagaauuauuuaaggugg

SEQ ID NO: 2379884 - RNA, 19 nt, Artificial Sequence
  Description of Artificial Sequence: Synthetic oligonucleotide
aaauaaggaacuguuagga

SEQ ID NO: 2379885 - RNA, 19 nt, Artificial Sequence
  Description of Artificial Sequence: Synthetic oligonucleotide
ucaccaauauuuuauguug

SEQ ID NO: 2379886 - RNA, 19 nt, Artificial Sequence
  Description of Artificial Sequence: Synthetic oligonucleotide
aagaauaagucucucguau

SEQ ID NO: 2379887 - RNA, 19 nt, Artificial Sequence
  Description of Artificial Sequence: Synthetic oligonucleotide
ucucguauugacaaagagc

SEQ ID NO: 2379888 - RNA, 19 nt, Artificial Sequence
  Description of Artificial Sequence: Synthetic oligonucleotide
aauuaaccagacuuugaug

SEQ ID NO: 2379889 - RNA, 19 nt, Artificial Sequence
  Description of Artificial Sequence: Synthetic oligonucleotide
aauuauuuaaggugggaua

SEQ ID NO: 2379890 - RNA, 19 nt, Artificial Sequence
  Description of Artificial Sequence: Synthetic oligonucleotide
uuuaaggugggauaguaaa

SEQ ID NO: 2379891 - RNA, 19 nt, Artificial Sequence
  Description of Artificial Sequence: Synthetic oligonucleotide
caugcugagacccagcuag

SEQ ID NO: 2379892 - RNA, 19 nt, Artificial Sequence
  Description of Artificial Sequence: Synthetic oligonucleotide
uucuacauggccaacuaga

SEQ ID NO: 2379893 - RNA, 19 nt, Artificial Sequence
  Description of Artificial Sequence: Synthetic oligonucleotide
cauccagaaacacacaaag

SEQ ID NO: 2379894 - RNA, 19 nt, Artificial Sequence
  Description of Artificial Sequence: Synthetic oligonucleotide
aauccggguaacuggcacc

SEQ ID NO: 2379895 - RNA, 19 nt, Artificial Sequence
  Description of Artificial Sequence: Synthetic oligonucleotide
gaauaagucucucguauug

SEQ ID NO: 2379896 - RNA, 19 nt, Artificial Sequence
  Description of Artificial Sequence: Synthetic oligonucleotide
uaacaaagaauuucucacc

SEQ ID NO: 2379897 - RNA, 19 nt, Artificial Sequence
  Description of Artificial Sequence: Synthetic oligonucleotide
cuuuagucuucuuugcucc

SEQ ID NO: 2379898 - RNA, 19 nt, Artificial Sequence
  Description of Artificial Sequence: Synthetic oligonucleotide
aacuagaccccaaagguag

SEQ ID NO: 2379899 - RNA, 19 nt, Artificial Sequence
  Description of Artificial Sequence: Synthetic oligonucleotide
aguaccuacugccagaccu

SEQ ID NO: 2379900 - RNA, 19 nt, Artificial Sequence
  Description of Artificial Sequence: Synthetic oligonucleotide
aaaaggaucaguuguccau

SEQ ID NO: 2379901 - RNA, 19 nt, Artificial Sequence
  Description of Artificial Sequence: Synthetic oligonucleotide
auaagucucucguauugac

SEQ ID NO: 2379902 - RNA, 19 nt, Artificial Sequence
  Description of Artificial Sequence: Synthetic oligonucleotide
aacuguuaggauugagcuc

SEQ ID NO: 2379903 - RNA, 19 nt, Artificial Sequence
  Description of Artificial Sequence: Synthetic oligonucleotide
aagucucucguauugacaa

SEQ ID NO: 2379904 - RNA, 19 nt, Artificial Sequence
  Description of Artificial Sequence: Synthetic oligonucleotide
uuuugucuagacaguacag

SEQ ID NO: 2379905 - RNA, 19 nt, Artificial Sequence
  Description of Artificial Sequence: Synthetic oligonucleotide
uuucucaccaauauuuuau

SEQ ID NO: 2379906 - RNA, 19 nt, Artificial Sequence
  Description of Artificial Sequence: Synthetic oligonucleotide
ugagcuucuagcuccaggc

SEQ ID NO: 2379907 - RNA, 19 nt, Artificial Sequence
  Description of Artificial Sequence: Synthetic oligonucleotide
ucugccaacagacuaugac

SEQ ID NO: 2379908 - RNA, 19 nt, Artificial Sequence
  Description of Artificial Sequence: Synthetic oligonucleotide
auugagcuccuccagugac

SEQ ID NO: 2379909 - RNA, 19 nt, Artificial Sequence
  Description of Artificial Sequence: Synthetic oligonucleotide
uuuuauguuggcgucaccu

SEQ ID NO: 2379910 - RNA, 19 nt, Artificial Sequence
  Description of Artificial Sequence: Synthetic oligonucleotide
ugucuagacaguacagaag

SEQ ID NO: 2379911 - RNA, 19 nt, Artificial Sequence
  Description of Artificial Sequence: Synthetic oligonucleotide
caaagcuucauucuacaug

SEQ ID NO: 2379912 - RNA, 19 nt, Artificial Sequence
  Description of Artificial Sequence: Synthetic oligonucleotide
ugcuccguguuccuggugg

SEQ ID NO: 2379913 - RNA, 19 nt, Artificial Sequence
  Description of Artificial Sequence: Synthetic oligonucleotide
aauaaggaacuguuaggau

SEQ ID NO: 2379914 - RNA, 19 nt, Artificial Sequence
  Description of Artificial Sequence: Synthetic oligonucleotide
uuaggauugagcuccucca

SEQ ID NO: 2379915 - RNA, 19 nt, Artificial Sequence
  Description of Artificial Sequence: Synthetic oligonucleotide
uccaaaguuggccaaccgc

SEQ ID NO: 2379916 - RNA, 19 nt, Artificial Sequence
  Description of Artificial Sequence: Synthetic oligonucleotide
uuugauguacugcaauaaa

SEQ ID NO: 2379917 - RNA, 19 nt, Artificial Sequence
  Description of Artificial Sequence: Synthetic oligonucleotide
uggccaaccgcccaauccg

SEQ ID NO: 2379918 - RNA, 19 nt, Artificial Sequence
  Description of Artificial Sequence: Synthetic oligonucleotide
ugcccuacuguccugagcu

SEQ ID NO: 2379919 - RNA, 19 nt, Artificial Sequence
  Description of Artificial Sequence: Synthetic oligonucleotide
cacacgcucauccagaaac

SEQ ID NO: 2379920 - RNA, 19 nt, Artificial Sequence
  Description of Artificial Sequence: Synthetic oligonucleotide
cagaaacacacaaagcuuc

SEQ ID NO: 2379921 - RNA, 19 nt, Artificial Sequence
  Description of Artificial Sequence: Synthetic oligonucleotide
gaagaaucuucgcuggaug

SEQ ID NO: 2379922 - RNA, 19 nt, Artificial Sequence
  Description of Artificial Sequence: Synthetic oligonucleotide
agcuaggccggcuuuaguc

SEQ ID NO: 2379923 - RNA, 19 nt, Artificial Sequence
  Description of Artificial Sequence: Synthetic oligonucleotide
guuaggauugagcuccucc

SEQ ID NO: 2379924 - RNA, 19 nt, Artificial Sequence
  Description of Artificial Sequence: Synthetic oligonucleotide
uugucuagacaguacagaa

SEQ ID NO: 2379925 - RNA, 19 nt, Artificial Sequence
  Description of Artificial Sequence: Synthetic oligonucleotide
aacacccucccucugcuug

SEQ ID NO: 2379926 - RNA, 19 nt, Artificial Sequence
  Description of Artificial Sequence: Synthetic oligonucleotide
agaaucuucgcuggaugcc

SEQ ID NO: 2379927 - RNA, 19 nt, Artificial Sequence
  Description of Artificial Sequence: Synthetic oligonucleotide
uuuagucuucuuugcuccg

SEQ ID NO: 2379928 - RNA, 19 nt, Artificial Sequence
  Description of Artificial Sequence: Synthetic oligonucleotide
ucaaaaggaucaguugucc

SEQ ID NO: 2379929 - RNA, 19 nt, Artificial Sequence
  Description of Artificial Sequence: Synthetic oligonucleotide
aaacacacaaagcuucauu

SEQ ID NO: 2379930 - RNA, 19 nt, Artificial Sequence
  Description of Artificial Sequence: Synthetic oligonucleotide
gaacuguuaggauugagcu

SEQ ID NO: 2379931 - RNA, 19 nt, Artificial Sequence
  Description of Artificial Sequence: Synthetic oligonucleotide
uuugucuagacaguacaga

SEQ ID NO: 2379932 - RNA, 19 nt, Artificial Sequence
  Description of Artificial Sequence: Synthetic oligonucleotide
ugguggaagaaucuucgcu

SEQ ID NO: 2379933 - RNA, 19 nt, Artificial Sequence
  Description of Artificial Sequence: Synthetic oligonucleotide
uuaaggugggauaguaaaa

SEQ ID NO: 2379934 - RNA, 19 nt, Artificial Sequence
  Description of Artificial Sequence: Synthetic oligonucleotide
cagaauuauuuaagguggg

SEQ ID NO: 2379935 - RNA, 19 nt, Artificial Sequence
  Description of Artificial Sequence: Synthetic oligonucleotide
cuuugcuccguguuccugg

SEQ ID NO: 2379936 - RNA, 19 nt, Artificial Sequence
  Description of Artificial Sequence: Synthetic oligonucleotide
aauaagucucucguauuga

SEQ ID NO: 2379937 - RNA, 19 nt, Artificial Sequence
  Description of Artificial Sequence: Synthetic oligonucleotide
uucucaccaauauuuuaug

SEQ ID NO: 2379938 - RNA, 19 nt, Artificial Sequence
  Description of Artificial Sequence: Synthetic oligonucleotide
uuauguuggcgucaccuaa

SEQ ID NO: 2379939 - RNA, 19 nt, Artificial Sequence
  Description of Artificial Sequence: Synthetic oligonucleotide
ucuagcuccaggccaccgg

SEQ ID NO: 2379940 - RNA, 19 nt, Artificial Sequence
  Description of Artificial Sequence: Synthetic oligonucleotide
guggaagaaucuucgcugg

SEQ ID NO: 2379941 - RNA, 19 nt, Artificial Sequence
  Description of Artificial Sequence: Synthetic oligonucleotide
ugggcaaggacacacgcuc

SEQ ID NO: 2379942 - RNA, 19 nt, Artificial Sequence
  Description of Artificial Sequence: Synthetic oligonucleotide
caguuguccaugcugagac

SEQ ID NO: 2379943 - RNA, 19 nt, Artificial Sequence
  Description of Artificial Sequence: Synthetic oligonucleotide
uuggccaaccgcccaaucc

SEQ ID NO: 2379944 - RNA, 19 nt, Artificial Sequence
  Description of Artificial Sequence: Synthetic oligonucleotide
guuggcgucaccuaauuaa

SEQ ID NO: 2379945 - RNA, 19 nt, Artificial Sequence
  Description of Artificial Sequence: Synthetic oligonucleotide
ucucaccaauauuuuaugu

SEQ ID NO: 2379946 - RNA, 19 nt, Artificial Sequence
  Description of Artificial Sequence: Synthetic oligonucleotide
acuuccuacucauggaggu

SEQ ID NO: 2379947 - RNA, 19 nt, Artificial Sequence
  Description of Artificial Sequence: Synthetic oligonucleotide
uccugguggacauccacag

SEQ ID NO: 2379948 - RNA, 19 nt, Artificial Sequence
  Description of Artificial Sequence: Synthetic oligonucleotide
ugcuuauguggcuugcucu

SEQ ID NO: 2379949 - RNA, 19 nt, Artificial Sequence
  Description of Artificial Sequence: Synthetic oligonucleotide
uuauguggcuugcucucag

SEQ ID NO: 2379950 - RNA, 19 nt, Artificial Sequence
  Description of Artificial Sequence: Synthetic oligonucleotide
caauauuuuauguuggcgu

SEQ ID NO: 2379951 - RNA, 19 nt, Artificial Sequence
  Description of Artificial Sequence: Synthetic oligonucleotide
ucuagacaguacagaagca

SEQ ID NO: 2379952 - RNA, 19 nt, Artificial Sequence
  Description of Artificial Sequence: Synthetic oligonucleotide
ugacucugcccauagggga

SEQ ID NO: 2379953 - RNA, 19 nt, Artificial Sequence
  Description of Artificial Sequence: Synthetic oligonucleotide
cucaaaaggaucaguuguc

SEQ ID NO: 2379954 - RNA, 19 nt, Artificial Sequence
  Description of Artificial Sequence: Synthetic oligonucleotide
acaugggguucuuuugcac

SEQ ID NO: 2379955 - RNA, 19 nt, Artificial Sequence
  Description of Artificial Sequence: Synthetic oligonucleotide
auuuuauguuggcgucacc

SEQ ID NO: 2379956 - RNA, 19 nt, Artificial Sequence
  Description of Artificial Sequence: Synthetic oligonucleotide
cucucguauugacaaagag

SEQ ID NO: 2379957 - RNA, 19 nt, Artificial Sequence
  Description of Artificial Sequence: Synthetic oligonucleotide
aggugcuuccgcucaacac

SEQ ID NO: 2379958 - RNA, 19 nt, Artificial Sequence
  Description of Artificial Sequence: Synthetic oligonucleotide
auucuacauggccaacuag

SEQ ID NO: 2379959 - RNA, 19 nt, Artificial Sequence
  Description of Artificial Sequence: Synthetic oligonucleotide
agaccccaaagguagcuag

SEQ ID NO: 2379960 - RNA, 19 nt, Artificial Sequence
  Description of Artificial Sequence: Synthetic oligonucleotide
ggugcuuccgcucaacacc

SEQ ID NO: 2379961 - RNA, 19 nt, Artificial Sequence
  Description of Artificial Sequence: Synthetic oligonucleotide
uacugccagaccuccaaag

SEQ ID NO: 2379962 - RNA, 19 nt, Artificial Sequence
  Description of Artificial Sequence: Synthetic oligonucleotide
uuggcgucaccuaauuaac

SEQ ID NO: 2379963 - RNA, 19 nt, Artificial Sequence
  Description of Artificial Sequence: Synthetic oligonucleotide
uauuuuauguuggcgucac

SEQ ID NO: 2379964 - RNA, 19 nt, Artificial Sequence
  Description of Artificial Sequence: Synthetic oligonucleotide
caaagagccucccauugac

SEQ ID NO: 2379965 - RNA, 19 nt, Artificial Sequence
  Description of Artificial Sequence: Synthetic oligonucleotide
gcucacuuccuacucaugg

SEQ ID NO: 2379966 - RNA, 19 nt, Artificial Sequence
  Description of Artificial Sequence: Synthetic oligonucleotide
ccaaaguuggccaaccgcc

SEQ ID NO: 2379967 - RNA, 19 nt, Artificial Sequence
  Description of Artificial Sequence: Synthetic oligonucleotide
caacagacuaugacauggg

SEQ ID NO: 2379968 - RNA, 19 nt, Artificial Sequence
  Description of Artificial Sequence: Synthetic oligonucleotide
gccaacuagaccccaaagg

SEQ ID NO: 2379969 - RNA, 19 nt, Artificial Sequence
  Description of Artificial Sequence: Synthetic oligonucleotide
agugucugccaacagacua

SEQ ID NO: 2379970 - RNA, 19 nt, Artificial Sequence
  Description of Artificial Sequence: Synthetic oligonucleotide
aaagaauuucucaccaaua

SEQ ID NO: 2379971 - RNA, 19 nt, Artificial Sequence
  Description of Artificial Sequence: Synthetic oligonucleotide
uuccuacucauggaggugc

SEQ ID NO: 2379972 - RNA, 19 nt, Artificial Sequence
  Description of Artificial Sequence: Synthetic oligonucleotide
uauuuaaggugggauagua

SEQ ID NO: 2379973 - RNA, 19 nt, Artificial Sequence
  Description of Artificial Sequence: Synthetic oligonucleotide
cccaaagguagcuaggccg

SEQ ID NO: 2379974 - RNA, 19 nt, Artificial Sequence
  Description of Artificial Sequence: Synthetic oligonucleotide
guccugagcuucuagcucc

SEQ ID NO: 2379975 - RNA, 19 nt, Artificial Sequence
  Description of Artificial Sequence: Synthetic oligonucleotide
augacaugggguucuuuug

SEQ ID NO: 2379976 - RNA, 19 nt, Artificial Sequence
  Description of Artificial Sequence: Synthetic oligonucleotide
ucauuagccuggcccaccc

SEQ ID NO: 2379977 - RNA, 19 nt, Artificial Sequence
  Description of Artificial Sequence: Synthetic oligonucleotide
guuguccaugcugagaccc

SEQ ID NO: 2379978 - RNA, 19 nt, Artificial Sequence
  Description of Artificial Sequence: Synthetic oligonucleotide
caaaguuggccaaccgccc

SEQ ID NO: 2379979 - RNA, 19 nt, Artificial Sequence
  Description of Artificial Sequence: Synthetic oligonucleotide
gauggcacaagaagccugc

SEQ ID NO: 2379980 - RNA, 19 nt, Artificial Sequence
  Description of Artificial Sequence: Synthetic oligonucleotide
cacuuccuacucauggagg

SEQ ID NO: 2379981 - RNA, 19 nt, Artificial Sequence
  Description of Artificial Sequence: Synthetic oligonucleotide
uaaccagacuuugauguac

SEQ ID NO: 2379982 - RNA, 19 nt, Artificial Sequence
  Description of Artificial Sequence: Synthetic oligonucleotide
uauguggcuugcucucagg

SEQ ID NO: 2379983 - RNA, 19 nt, Artificial Sequence
  Description of Artificial Sequence: Synthetic oligonucleotide
accccaaagguagcuaggc

SEQ ID NO: 2379984 - RNA, 19 nt, Artificial Sequence
  Description of Artificial Sequence: Synthetic oligonucleotide
cuugcucucagggcgagcc

SEQ ID NO: 2379985 - RNA, 19 nt, Artificial Sequence
  Description of Artificial Sequence: Synthetic oligonucleotide
ucaccuaauuaaccagacu

SEQ ID NO: 2379986 - RNA, 19 nt, Artificial Sequence
  Description of Artificial Sequence: Synthetic oligonucleotide
ucauucuacauggccaacu

SEQ ID NO: 2379987 - RNA, 19 nt, Artificial Sequence
  Description of Artificial Sequence: Synthetic oligonucleotide
ucucucguauugacaaaga

SEQ ID NO: 2379988 - RNA, 19 nt, Artificial Sequence
  Description of Artificial Sequence: Synthetic oligonucleotide
agcuucuagcuccaggcca

SEQ ID NO: 2379989 - RNA, 19 nt, Artificial Sequence
  Description of Artificial Sequence: Synthetic oligonucleotide
ccaacagacuaugacaugg

SEQ ID NO: 2379990 - RNA, 19 nt, Artificial Sequence
  Description of Artificial Sequence: Synthetic oligonucleotide
auugacaaagagccuccca

SEQ ID NO: 2379991 - RNA, 19 nt, Artificial Sequence
  Description of Artificial Sequence: Synthetic oligonucleotide
ucuuuugcacagaauuauu

SEQ ID NO: 2379992 - RNA, 19 nt, Artificial Sequence
  Description of Artificial Sequence: Synthetic oligonucleotide
acaguacagaagcaauagu

SEQ ID NO: 2379993 - RNA, 19 nt, Artificial Sequence
  Description of Artificial Sequence: Synthetic oligonucleotide
cugguggacauccacagca

SEQ ID NO: 2379994 - RNA, 19 nt, Artificial Sequence
  Description of Artificial Sequence: Synthetic oligonucleotide
auaguggggucucugcacu

SEQ ID NO: 2379995 - RNA, 19 nt, Artificial Sequence
  Description of Artificial Sequence: Synthetic oligonucleotide
guggacauccacagcaggg

SEQ ID NO: 2379996 - RNA, 19 nt, Artificial Sequence
  Description of Artificial Sequence: Synthetic oligonucleotide
ucaacacccucccucugcu

SEQ ID NO: 2379997 - RNA, 19 nt, Artificial Sequence
  Description of Artificial Sequence: Synthetic oligonucleotide
ggaacuguuaggauugagc

SEQ ID NO: 2379998 - RNA, 19 nt, Artificial Sequence
  Description of Artificial Sequence: Synthetic oligonucleotide
ggaucaguuguccaugcug

SEQ ID NO: 2379999 - RNA, 19 nt, Artificial Sequence
  Description of Artificial Sequence: Synthetic oligonucleotide
acugccagaccuccaaagu

SEQ ID NO: 2380000 - RNA, 19 nt, Artificial Sequence
  Description of Artificial Sequence: Synthetic oligonucleotide
agaauuauuuaagguggga

SEQ ID NO: 2380001 - RNA, 19 nt, Artificial Sequence
  Description of Artificial Sequence: Synthetic oligonucleotide
uauguuggcgucaccuaau

SEQ ID NO: 2380002 - RNA, 19 nt, Artificial Sequence
  Description of Artificial Sequence: Synthetic oligonucleotide
guauugacaaagagccucc

SEQ ID NO: 2380003 - RNA, 19 nt, Artificial Sequence
  Description of Artificial Sequence: Synthetic oligonucleotide
uggcgucaccuaauuaacc

SEQ ID NO: 2380004 - RNA, 19 nt, Artificial Sequence
  Description of Artificial Sequence: Synthetic oligonucleotide
gccaagaauaagucucucg

SEQ ID NO: 2380005 - RNA, 19 nt, Artificial Sequence
  Description of Artificial Sequence: Synthetic oligonucleotide
agaauaagucucucguauu

SEQ ID NO: 2380006 - RNA, 19 nt, Artificial Sequence
  Description of Artificial Sequence: Synthetic oligonucleotide
aaucuucgcuggaugccac

SEQ ID NO: 2380007 - RNA, 19 nt, Artificial Sequence
  Description of Artificial Sequence: Synthetic oligonucleotide
auauuuuauguuggcguca

SEQ ID NO: 2380008 - RNA, 19 nt, Artificial Sequence
  Description of Artificial Sequence: Synthetic oligonucleotide
cugcccauaggggaggugg

SEQ ID NO: 2380009 - RNA, 19 nt, Artificial Sequence
  Description of Artificial Sequence: Synthetic oligonucleotide
acagacuaugacauggggu

SEQ ID NO: 2380010 - RNA, 19 nt, Artificial Sequence
  Description of Artificial Sequence: Synthetic oligonucleotide
uuaaccagacuuugaugua

SEQ ID NO: 2380011 - RNA, 19 nt, Artificial Sequence
  Description of Artificial Sequence: Synthetic oligonucleotide
uuauuuaaggugggauagu

SEQ ID NO: 2380012 - RNA, 19 nt, Artificial Sequence
  Description of Artificial Sequence: Synthetic oligonucleotide
cuagcuccaggccaccggc

SEQ ID NO: 2380013 - RNA, 19 nt, Artificial Sequence
  Description of Artificial Sequence: Synthetic oligonucleotide
uggacauccacagcaggga

SEQ ID NO: 2380014 - RNA, 19 nt, Artificial Sequence
  Description of Artificial Sequence: Synthetic oligonucleotide
gaauuauuuaaggugggau

SEQ ID NO: 2380015 - RNA, 19 nt, Artificial Sequence
  Description of Artificial Sequence: Synthetic oligonucleotide
uacuguccugagcuucuag

SEQ ID NO: 2380016 - RNA, 19 nt, Artificial Sequence
  Description of Artificial Sequence: Synthetic oligonucleotide
ccaauauuuuauguuggcg

SEQ ID NO: 2380017 - RNA, 19 nt, Artificial Sequence
  Description of Artificial Sequence: Synthetic oligonucleotide
auuagccuggcccacccaa

SEQ ID NO: 2380018 - RNA, 19 nt, Artificial Sequence
  Description of Artificial Sequence: Synthetic oligonucleotide
uuccgcucaacacccuccc

SEQ ID NO: 2380019 - RNA, 19 nt, Artificial Sequence
  Description of Artificial Sequence: Synthetic oligonucleotide
aucaguuguccaugcugag

SEQ ID NO: 2380020 - RNA, 19 nt, Artificial Sequence
  Description of Artificial Sequence: Synthetic oligonucleotide
ucaguuguccaugcugaga

SEQ ID NO: 2380021 - RNA, 19 nt, Artificial Sequence
  Description of Artificial Sequence: Synthetic oligonucleotide
uagccuggcccacccaaag

SEQ ID NO: 2380022 - RNA, 19 nt, Artificial Sequence
  Description of Artificial Sequence: Synthetic oligonucleotide
ccaaagguagcuaggccgg

SEQ ID NO: 2380023 - RNA, 19 nt, Artificial Sequence
  Description of Artificial Sequence: Synthetic oligonucleotide
ucguauugacaaagagccu

SEQ ID NO: 2380024 - RNA, 19 nt, Artificial Sequence
  Description of Artificial Sequence: Synthetic oligonucleotide
uaggguggcugcccuacug

SEQ ID NO: 2380025 - RNA, 19 nt, Artificial Sequence
  Description of Artificial Sequence: Synthetic oligonucleotide
caaaaggaucaguugucca

SEQ ID NO: 2380026 - RNA, 19 nt, Artificial Sequence
  Description of Artificial Sequence: Synthetic oligonucleotide
caccuaauuaaccagacuu

SEQ ID NO: 2380027 - RNA, 19 nt, Artificial Sequence
  Description of Artificial Sequence: Synthetic oligonucleotide
cacuggccaagaauaaguc

SEQ ID NO: 2380028 - RNA, 19 nt, Artificial Sequence
  Description of Artificial Sequence: Synthetic oligonucleotide
gaaucuucgcuggaugcca

SEQ ID NO: 2380029 - RNA, 19 nt, Artificial Sequence
  Description of Artificial Sequence: Synthetic oligonucleotide
ucagggcgagccuuggccu

SEQ ID NO: 2380030 - RNA, 19 nt, Artificial Sequence
  Description of Artificial Sequence: Synthetic oligonucleotide
aaagguagcuaggccggcu

SEQ ID NO: 2380031 - RNA, 19 nt, Artificial Sequence
  Description of Artificial Sequence: Synthetic oligonucleotide
caugggguucuuuugcaca

SEQ ID NO: 2380032 - RNA, 19 nt, Artificial Sequence
  Description of Artificial Sequence: Synthetic oligonucleotide
uccagugacagcccugcuu

SEQ ID NO: 2380033 - RNA, 19 nt, Artificial Sequence
  Description of Artificial Sequence: Synthetic oligonucleotide
cucauggaggugcuuccgc

SEQ ID NO: 2380034 - RNA, 19 nt, Artificial Sequence
  Description of Artificial Sequence: Synthetic oligonucleotide
ugucugccaacagacuaug

SEQ ID NO: 2380035 - RNA, 19 nt, Artificial Sequence
  Description of Artificial Sequence: Synthetic oligonucleotide
acuagaccccaaagguagc

SEQ ID NO: 2380036 - RNA, 19 nt, Artificial Sequence
  Description of Artificial Sequence: Synthetic oligonucleotide
aaccagacuuugauguacu

SEQ ID NO: 2380037 - RNA, 19 nt, Artificial Sequence
  Description of Artificial Sequence: Synthetic oligonucleotide
aagguagcuaggccggcuu

SEQ ID NO: 2380038 - RNA, 19 nt, Artificial Sequence
  Description of Artificial Sequence: Synthetic oligonucleotide
agacuaugacaugggguuc

SEQ ID NO: 2380039 - RNA, 19 nt, Artificial Sequence
  Description of Artificial Sequence: Synthetic oligonucleotide
cacaaagcuucauucuaca

SEQ ID NO: 2380040 - RNA, 19 nt, Artificial Sequence
  Description of Artificial Sequence: Synthetic oligonucleotide
cuccaaaguuggccaaccg

SEQ ID NO: 2380041 - RNA, 19 nt, Artificial Sequence
  Description of Artificial Sequence: Synthetic oligonucleotide
aaguuggccaaccgcccaa

SEQ ID NO: 2380042 - RNA, 19 nt, Artificial Sequence
  Description of Artificial Sequence: Synthetic oligonucleotide
uuagucuucuuugcuccgu

SEQ ID NO: 2380043 - RNA, 19 nt, Artificial Sequence
  Description of Artificial Sequence: Synthetic oligonucleotide
agaaacacacaaagcuuca

SEQ ID NO: 2380044 - RNA, 19 nt, Artificial Sequence
  Description of Artificial Sequence: Synthetic oligonucleotide
ccacccaaagcccaguacc

SEQ ID NO: 2380045 - RNA, 19 nt, Artificial Sequence
  Description of Artificial Sequence: Synthetic oligonucleotide
cuagacaguacagaagcaa

SEQ ID NO: 2380046 - RNA, 19 nt, Artificial Sequence
  Description of Artificial Sequence: Synthetic oligonucleotide
aaagagccucccauugacu

SEQ ID NO: 2380047 - RNA, 19 nt, Artificial Sequence
  Description of Artificial Sequence: Synthetic oligonucleotide
cuucgcuggaugccacugg

SEQ ID NO: 2380048 - RNA, 19 nt, Artificial Sequence
  Description of Artificial Sequence: Synthetic oligonucleotide
cauugacucugcccauagg

SEQ ID NO: 2380049 - RNA, 19 nt, Artificial Sequence
  Description of Artificial Sequence: Synthetic oligonucleotide
ccuaauuaaccagacuuug

SEQ ID NO: 2380050 - RNA, 19 nt, Artificial Sequence
  Description of Artificial Sequence: Synthetic oligonucleotide
ggcgucaccuaauuaacca

SEQ ID NO: 2380051 - RNA, 19 nt, Artificial Sequence
  Description of Artificial Sequence: Synthetic oligonucleotide
gaugccacuggccaagaau

SEQ ID NO: 2380052 - RNA, 19 nt, Artificial Sequence
  Description of Artificial Sequence: Synthetic oligonucleotide
gguggacauccacagcagg

SEQ ID NO: 2380053 - RNA, 19 nt, Artificial Sequence
  Description of Artificial Sequence: Synthetic oligonucleotide
uuugcuccguguuccuggu

SEQ ID NO: 2380054 - RNA, 19 nt, Artificial Sequence
  Description of Artificial Sequence: Synthetic oligonucleotide
caaagcccaguaccuacug

SEQ ID NO: 2380055 - RNA, 19 nt, Artificial Sequence
  Description of Artificial Sequence: Synthetic oligonucleotide
accagacuuugauguacug

SEQ ID NO: 2380056 - RNA, 19 nt, Artificial Sequence
  Description of Artificial Sequence: Synthetic oligonucleotide
cagacuaugacaugggguu

SEQ ID NO: 2380057 - RNA, 19 nt, Artificial Sequence
  Description of Artificial Sequence: Synthetic oligonucleotide
uccguguuccugguggaca

SEQ ID NO: 2380058 - RNA, 19 nt, Artificial Sequence
  Description of Artificial Sequence: Synthetic oligonucleotide
cugcuuauguggcuugcuc

SEQ ID NO: 2380059 - RNA, 19 nt, Artificial Sequence
  Description of Artificial Sequence: Synthetic oligonucleotide
caauaguggggucucugca

SEQ ID NO: 2380060 - RNA, 19 nt, Artificial Sequence
  Description of Artificial Sequence: Synthetic oligonucleotide
uguuggcgucaccuaauua

SEQ ID NO: 2380061 - RNA, 19 nt, Artificial Sequence
  Description of Artificial Sequence: Synthetic oligonucleotide
gcaauaguggggucucugc

SEQ ID NO: 2380062 - RNA, 19 nt, Artificial Sequence
  Description of Artificial Sequence: Synthetic oligonucleotide
agcaauaguggggucucug

SEQ ID NO: 2380063 - RNA, 19 nt, Artificial Sequence
  Description of Artificial Sequence: Synthetic oligonucleotide
acucauggaggugcuuccg

SEQ ID NO: 2380064 - RNA, 19 nt, Artificial Sequence
  Description of Artificial Sequence: Synthetic oligonucleotide
ccggcuuuagucuucuuug

SEQ ID NO: 2380065 - RNA, 19 nt, Artificial Sequence
  Description of Artificial Sequence: Synthetic oligonucleotide
ugcucucaaaaggaucagu

SEQ ID NO: 2380066 - RNA, 19 nt, Artificial Sequence
  Description of Artificial Sequence: Synthetic oligonucleotide
gcccaauccggguaacugg

SEQ ID NO: 2380067 - RNA, 19 nt, Artificial Sequence
  Description of Artificial Sequence: Synthetic oligonucleotide
uucuagcuccaggccaccg

SEQ ID NO: 2380068 - RNA, 19 nt, Artificial Sequence
  Description of Artificial Sequence: Synthetic oligonucleotide
caagaauaagucucucgua

SEQ ID NO: 2380069 - RNA, 19 nt, Artificial Sequence
  Description of Artificial Sequence: Synthetic oligonucleotide
aggcauggccccucauuag

SEQ ID NO: 2380070 - RNA, 19 nt, Artificial Sequence
  Description of Artificial Sequence: Synthetic oligonucleotide
auggccccucauuagccug

SEQ ID NO: 2380071 - RNA, 19 nt, Artificial Sequence
  Description of Artificial Sequence: Synthetic oligonucleotide
ugcucacuuccuacucaug

SEQ ID NO: 2380072 - RNA, 19 nt, Artificial Sequence
  Description of Artificial Sequence: Synthetic oligonucleotide
cucuccccgagcccgcucg

SEQ ID NO: 2380073 - RNA, 19 nt, Artificial Sequence
  Description of Artificial Sequence: Synthetic oligonucleotide
uggccaacuagaccccaaa

SEQ ID NO: 2380074 - RNA, 19 nt, Artificial Sequence
  Description of Artificial Sequence: Synthetic oligonucleotide
gacuuugauguacugcaau

SEQ ID NO: 2380075 - RNA, 19 nt, Artificial Sequence
  Description of Artificial Sequence: Synthetic oligonucleotide
gagccucccauugacucug

SEQ ID NO: 2380076 - RNA, 19 nt, Artificial Sequence
  Description of Artificial Sequence: Synthetic oligonucleotide
accuaauuaaccagacuuu

SEQ ID NO: 2380077 - RNA, 19 nt, Artificial Sequence
  Description of Artificial Sequence: Synthetic oligonucleotide
cuggaugccacuggccaag

SEQ ID NO: 2380078 - RNA, 19 nt, Artificial Sequence
  Description of Artificial Sequence: Synthetic oligonucleotide
uccuacucauggaggugcu

SEQ ID NO: 2380079 - RNA, 19 nt, Artificial Sequence
  Description of Artificial Sequence: Synthetic oligonucleotide
ugccacuggccaagaauaa

SEQ ID NO: 2380080 - RNA, 19 nt, Artificial Sequence
  Description of Artificial Sequence: Synthetic oligonucleotide
ucuuugcuccguguuccug

SEQ ID NO: 2380081 - RNA, 19 nt, Artificial Sequence
  Description of Artificial Sequence: Synthetic oligonucleotide
aaccgcccaauccggguaa

SEQ ID NO: 2380082 - RNA, 19 nt, Artificial Sequence
  Description of Artificial Sequence: Synthetic oligonucleotide
gcgucaccuaauuaaccag

SEQ ID NO: 2380083 - RNA, 19 nt, Artificial Sequence
  Description of Artificial Sequence: Synthetic oligonucleotide
ggcauggccccucauuagc

SEQ ID NO: 2380084 - RNA, 19 nt, Artificial Sequence
  Description of Artificial Sequence: Synthetic oligonucleotide
aggaacuguuaggauugag

SEQ ID NO: 2380085 - RNA, 19 nt, Artificial Sequence
  Description of Artificial Sequence: Synthetic oligonucleotide
cguauugacaaagagccuc

SEQ ID NO: 2380086 - RNA, 19 nt, Artificial Sequence
  Description of Artificial Sequence: Synthetic oligonucleotide
aggaucaguuguccaugcu

SEQ ID NO: 2380087 - RNA, 19 nt, Artificial Sequence
  Description of Artificial Sequence: Synthetic oligonucleotide
caacuagaccccaaaggua

SEQ ID NO: 2380088 - RNA, 19 nt, Artificial Sequence
  Description of Artificial Sequence: Synthetic oligonucleotide
guagcuaggccggcuuuag

SEQ ID NO: 2380089 - RNA, 19 nt, Artificial Sequence
  Description of Artificial Sequence: Synthetic oligonucleotide
gcuuauguggcuugcucuc

SEQ ID NO: 2380090 - RNA, 19 nt, Artificial Sequence
  Description of Artificial Sequence: Synthetic oligonucleotide
gugcuuccgcucaacaccc

SEQ ID NO: 2380091 - RNA, 19 nt, Artificial Sequence
  Description of Artificial Sequence: Synthetic oligonucleotide
uaacuggcaccuuccucuc

SEQ ID NO: 2380092 - RNA, 19 nt, Artificial Sequence
  Description of Artificial Sequence: Synthetic oligonucleotide
uaguggggucucugcacug

SEQ ID NO: 2380093 - RNA, 19 nt, Artificial Sequence
  Description of Artificial Sequence: Synthetic oligonucleotide
uggcuugcucucagggcga

SEQ ID NO: 2380094 - RNA, 19 nt, Artificial Sequence
  Description of Artificial Sequence: Synthetic oligonucleotide
cccaauccggguaacuggc

SEQ ID NO: 2380095 - RNA, 19 nt, Artificial Sequence
  Description of Artificial Sequence: Synthetic oligonucleotide
agacaguacagaagcaaua

SEQ ID NO: 2380096 - RNA, 19 nt, Artificial Sequence
  Description of Artificial Sequence: Synthetic oligonucleotide
auccggguaacuggcaccu

SEQ ID NO: 2380097 - RNA, 19 nt, Artificial Sequence
  Description of Artificial Sequence: Synthetic oligonucleotide
uucauucuacauggccaac

SEQ ID NO: 2380098 - RNA, 19 nt, Artificial Sequence
  Description of Artificial Sequence: Synthetic oligonucleotide
aaggaacuguuaggauuga

SEQ ID NO: 2380099 - RNA, 19 nt, Artificial Sequence
  Description of Artificial Sequence: Synthetic oligonucleotide
cucauuagccuggcccacc

SEQ ID NO: 2380100 - RNA, 19 nt, Artificial Sequence
  Description of Artificial Sequence: Synthetic oligonucleotide
agcccgcucgcugagcauc

SEQ ID NO: 2380101 - RNA, 19 nt, Artificial Sequence
  Description of Artificial Sequence: Synthetic oligonucleotide
cacgcucauccagaaacac

SEQ ID NO: 2380102 - RNA, 19 nt, Artificial Sequence
  Description of Artificial Sequence: Synthetic oligonucleotide
cuuccuacucauggaggug

SEQ ID NO: 2380103 - RNA, 19 nt, Artificial Sequence
  Description of Artificial Sequence: Synthetic oligonucleotide
ccucccauugacucugccc

SEQ ID NO: 2380104 - RNA, 19 nt, Artificial Sequence
  Description of Artificial Sequence: Synthetic oligonucleotide
ggccaacuagaccccaaag

SEQ ID NO: 2380105 - RNA, 19 nt, Artificial Sequence
  Description of Artificial Sequence: Synthetic oligonucleotide
agucucucguauugacaaa

SEQ ID NO: 2380106 - RNA, 19 nt, Artificial Sequence
  Description of Artificial Sequence: Synthetic oligonucleotide
auguuggcgucaccuaauu

SEQ ID NO: 2380107 - RNA, 19 nt, Artificial Sequence
  Description of Artificial Sequence: Synthetic oligonucleotide
ccaagaauaagucucucgu

SEQ ID NO: 2380108 - RNA, 19 nt, Artificial Sequence
  Description of Artificial Sequence: Synthetic oligonucleotide
gacuaugacaugggguucu

SEQ ID NO: 2380109 - RNA, 19 nt, Artificial Sequence
  Description of Artificial Sequence: Synthetic oligonucleotide
agggcgagccuuggccugc

SEQ ID NO: 2380110 - RNA, 19 nt, Artificial Sequence
  Description of Artificial Sequence: Synthetic oligonucleotide
cucgcugagcaucugcuua

SEQ ID NO: 2380111 - RNA, 19 nt, Artificial Sequence
  Description of Artificial Sequence: Synthetic oligonucleotide
ccaacuagaccccaaaggu

SEQ ID NO: 2380112 - RNA, 19 nt, Artificial Sequence
  Description of Artificial Sequence: Synthetic oligonucleotide
uagcuaggccggcuuuagu

SEQ ID NO: 2380113 - RNA, 19 nt, Artificial Sequence
  Description of Artificial Sequence: Synthetic oligonucleotide
caaagguagcuaggccggc

SEQ ID NO: 2380114 - RNA, 19 nt, Artificial Sequence
  Description of Artificial Sequence: Synthetic oligonucleotide
cugcccuacuguccugagc

SEQ ID NO: 2380115 - RNA, 19 nt, Artificial Sequence
  Description of Artificial Sequence: Synthetic oligonucleotide
cuguccugagcuucuagcu

SEQ ID NO: 2380116 - RNA, 19 nt, Artificial Sequence
  Description of Artificial Sequence: Synthetic oligonucleotide
aagcaauaguggggucucu

SEQ ID NO: 2380117 - RNA, 19 nt, Artificial Sequence
  Description of Artificial Sequence: Synthetic oligonucleotide
auaggggagguggccuguc

SEQ ID NO: 2380118 - RNA, 19 nt, Artificial Sequence
  Description of Artificial Sequence: Synthetic oligonucleotide
acgcucauccagaaacaca

SEQ ID NO: 2380119 - RNA, 19 nt, Artificial Sequence
  Description of Artificial Sequence: Synthetic oligonucleotide
guaccuacugccagaccuc

SEQ ID NO: 2380120 - RNA, 19 nt, Artificial Sequence
  Description of Artificial Sequence: Synthetic oligonucleotide
uggggucucugcacugcuc

SEQ ID NO: 2380121 - RNA, 19 nt, Artificial Sequence
  Description of Artificial Sequence: Synthetic oligonucleotide
ccauugacucugcccauag

SEQ ID NO: 2380122 - RNA, 19 nt, Artificial Sequence
  Description of Artificial Sequence: Synthetic oligonucleotide
cuuauguggcuugcucuca

SEQ ID NO: 2380123 - RNA, 19 nt, Artificial Sequence
  Description of Artificial Sequence: Synthetic oligonucleotide
acacgcucauccagaaaca

SEQ ID NO: 2380124 - RNA, 19 nt, Artificial Sequence
  Description of Artificial Sequence: Synthetic oligonucleotide
uuccucuccccgagcccgc

SEQ ID NO: 2380125 - RNA, 19 nt, Artificial Sequence
  Description of Artificial Sequence: Synthetic oligonucleotide
uugcuccguguuccuggug

SEQ ID NO: 2380126 - RNA, 19 nt, Artificial Sequence
  Description of Artificial Sequence: Synthetic oligonucleotide
caguaccuacugccagacc

SEQ ID NO: 2380127 - RNA, 19 nt, Artificial Sequence
  Description of Artificial Sequence: Synthetic oligonucleotide
ugcucucagggcgagccuu

SEQ ID NO: 2380128 - RNA, 19 nt, Artificial Sequence
  Description of Artificial Sequence: Synthetic oligonucleotide
gcccaguaccuacugccag

SEQ ID NO: 2380129 - RNA, 19 nt, Artificial Sequence
  Description of Artificial Sequence: Synthetic oligonucleotide
agacuuugauguacugcaa

SEQ ID NO: 2380130 - RNA, 19 nt, Artificial Sequence
  Description of Artificial Sequence: Synthetic oligonucleotide
gccaacagacuaugacaug

SEQ ID NO: 2380131 - RNA, 19 nt, Artificial Sequence
  Description of Artificial Sequence: Synthetic oligonucleotide
uguuaggauugagcuccuc

SEQ ID NO: 2380132 - RNA, 19 nt, Artificial Sequence
  Description of Artificial Sequence: Synthetic oligonucleotide
acacacgcucauccagaaa

SEQ ID NO: 2380133 - RNA, 19 nt, Artificial Sequence
  Description of Artificial Sequence: Synthetic oligonucleotide
gcgagccuuggccugccgg

SEQ ID NO: 2380134 - RNA, 19 nt, Artificial Sequence
  Description of Artificial Sequence: Synthetic oligonucleotide
gcuucuagcuccaggccac

SEQ ID NO: 2380135 - RNA, 19 nt, Artificial Sequence
  Description of Artificial Sequence: Synthetic oligonucleotide
cuucuagcuccaggccacc

SEQ ID NO: 2380136 - RNA, 19 nt, Artificial Sequence
  Description of Artificial Sequence: Synthetic oligonucleotide
ucuccccgagcccgcucgc

SEQ ID NO: 2380137 - RNA, 19 nt, Artificial Sequence
  Description of Artificial Sequence: Synthetic oligonucleotide
ugcuuccgcucaacacccu

SEQ ID NO: 2380138 - RNA, 19 nt, Artificial Sequence
  Description of Artificial Sequence: Synthetic oligonucleotide
aggccaccggcuggggugg

SEQ ID NO: 2380139 - RNA, 19 nt, Artificial Sequence
  Description of Artificial Sequence: Synthetic oligonucleotide
ucugcccauaggggaggug

SEQ ID NO: 2380140 - RNA, 19 nt, Artificial Sequence
  Description of Artificial Sequence: Synthetic oligonucleotide
agcccaguaccuacugcca

SEQ ID NO: 2380141 - RNA, 19 nt, Artificial Sequence
  Description of Artificial Sequence: Synthetic oligonucleotide
agguagcuaggccggcuuu

SEQ ID NO: 2380142 - RNA, 19 nt, Artificial Sequence
  Description of Artificial Sequence: Synthetic oligonucleotide
guuggccaaccgcccaauc

SEQ ID NO: 2380143 - RNA, 19 nt, Artificial Sequence
  Description of Artificial Sequence: Synthetic oligonucleotide
gcauggccccucauuagcc

SEQ ID NO: 2380144 - RNA, 19 nt, Artificial Sequence
  Description of Artificial Sequence: Synthetic oligonucleotide
cacccaaagcccaguaccu

SEQ ID NO: 2380145 - RNA, 19 nt, Artificial Sequence
  Description of Artificial Sequence: Synthetic oligonucleotide
ccccaaagguagcuaggcc

SEQ ID NO: 2380146 - RNA, 19 nt, Artificial Sequence
  Description of Artificial Sequence: Synthetic oligonucleotide
gagacccagcuaggguggc

SEQ ID NO: 2380147 - RNA, 19 nt, Artificial Sequence
  Description of Artificial Sequence: Synthetic oligonucleotide
ggcuuuagucuucuuugcu

SEQ ID NO: 2380148 - RNA, 19 nt, Artificial Sequence
  Description of Artificial Sequence: Synthetic oligonucleotide
guccaugcugagacccagc

SEQ ID NO: 2380149 - RNA, 19 nt, Artificial Sequence
  Description of Artificial Sequence: Synthetic oligonucleotide
accgcccaauccggguaac

SEQ ID NO: 2380150 - RNA, 19 nt, Artificial Sequence
  Description of Artificial Sequence: Synthetic oligonucleotide
gcuaggccggcuuuagucu

SEQ ID NO: 2380151 - RNA, 19 nt, Artificial Sequence
  Description of Artificial Sequence: Synthetic oligonucleotide
ccaguaccuacugccagac

SEQ ID NO: 2380152 - RNA, 19 nt, Artificial Sequence
  Description of Artificial Sequence: Synthetic oligonucleotide
cgucaccuaauuaaccaga

SEQ ID NO: 2380153 - RNA, 19 nt, Artificial Sequence
  Description of Artificial Sequence: Synthetic oligonucleotide
cggcuuuagucuucuuugc

SEQ ID NO: 2380154 - RNA, 19 nt, Artificial Sequence
  Description of Artificial Sequence: Synthetic oligonucleotide
gcuaggguggcugcccuac

SEQ ID NO: 2380155 - RNA, 19 nt, Artificial Sequence
  Description of Artificial Sequence: Synthetic oligonucleotide
ggaggagauggcacaagaa

SEQ ID NO: 2380156 - RNA, 19 nt, Artificial Sequence
  Description of Artificial Sequence: Synthetic oligonucleotide
ggccaaccgcccaauccgg

SEQ ID NO: 2380157 - RNA, 19 nt, Artificial Sequence
  Description of Artificial Sequence: Synthetic oligonucleotide
ccauaggggagguggccug

SEQ ID NO: 2380158 - RNA, 19 nt, Artificial Sequence
  Description of Artificial Sequence: Synthetic oligonucleotide
acuaugacaugggguucuu

SEQ ID NO: 2380159 - RNA, 19 nt, Artificial Sequence
  Description of Artificial Sequence: Synthetic oligonucleotide
cccugcuuugcucucaaaa

SEQ ID NO: 2380160 - RNA, 19 nt, Artificial Sequence
  Description of Artificial Sequence: Synthetic oligonucleotide
cuccguguuccugguggac

SEQ ID NO: 2380161 - RNA, 19 nt, Artificial Sequence
  Description of Artificial Sequence: Synthetic oligonucleotide
gcuuccgcucaacacccuc

SEQ ID NO: 2380162 - RNA, 19 nt, Artificial Sequence
  Description of Artificial Sequence: Synthetic oligonucleotide
cuacugccagaccuccaaa

SEQ ID NO: 2380163 - RNA, 19 nt, Artificial Sequence
  Description of Artificial Sequence: Synthetic oligonucleotide
cuagaccccaaagguagcu

SEQ ID NO: 2380164 - RNA, 19 nt, Artificial Sequence
  Description of Artificial Sequence: Synthetic oligonucleotide
aguuggccaaccgcccaau

SEQ ID NO: 2380165 - RNA, 19 nt, Artificial Sequence
  Description of Artificial Sequence: Synthetic oligonucleotide
ccggguaacuggcaccuuc

SEQ ID NO: 2380166 - RNA, 19 nt, Artificial Sequence
  Description of Artificial Sequence: Synthetic oligonucleotide
cauggccccucauuagccu

SEQ ID NO: 2380167 - RNA, 19 nt, Artificial Sequence
  Description of Artificial Sequence: Synthetic oligonucleotide
ccagaaacacacaaagcuu

SEQ ID NO: 2380168 - RNA, 19 nt, Artificial Sequence
  Description of Artificial Sequence: Synthetic oligonucleotide
cugcucacuuccuacucau

SEQ ID NO: 2380169 - RNA, 19 nt, Artificial Sequence
  Description of Artificial Sequence: Synthetic oligonucleotide
cugccagaccuccaaaguu

SEQ ID NO: 2380170 - RNA, 19 nt, Artificial Sequence
  Description of Artificial Sequence: Synthetic oligonucleotide
caaccgcccaauccgggua

SEQ ID NO: 2380171 - RNA, 19 nt, Artificial Sequence
  Description of Artificial Sequence: Synthetic oligonucleotide
cauuagccuggcccaccca

SEQ ID NO: 2380172 - RNA, 19 nt, Artificial Sequence
  Description of Artificial Sequence: Synthetic oligonucleotide
ccuacugccagaccuccaa

SEQ ID NO: 2380173 - RNA, 19 nt, Artificial Sequence
  Description of Artificial Sequence: Synthetic oligonucleotide
gugucugccaacagacuau

SEQ ID NO: 2380174 - RNA, 19 nt, Artificial Sequence
  Description of Artificial Sequence: Synthetic oligonucleotide
gcucucaaaaggaucaguu

SEQ ID NO: 2380175 - RNA, 19 nt, Artificial Sequence
  Description of Artificial Sequence: Synthetic oligonucleotide
gcugcccuacuguccugag

SEQ ID NO: 2380176 - RNA, 19 nt, Artificial Sequence
  Description of Artificial Sequence: Synthetic oligonucleotide
agacccagcuaggguggcu

SEQ ID NO: 2380177 - RNA, 19 nt, Artificial Sequence
  Description of Artificial Sequence: Synthetic oligonucleotide
gccaaccgcccaauccggg

SEQ ID NO: 2380178 - RNA, 19 nt, Artificial Sequence
  Description of Artificial Sequence: Synthetic oligonucleotide
agcuaggguggcugcccua

SEQ ID NO: 2380179 - RNA, 19 nt, Artificial Sequence
  Description of Artificial Sequence: Synthetic oligonucleotide
auggccaacuagaccccaa

SEQ ID NO: 2380180 - RNA, 19 nt, Artificial Sequence
  Description of Artificial Sequence: Synthetic oligonucleotide
cugcacugcucacuuccua

SEQ ID NO: 2380181 - RNA, 19 nt, Artificial Sequence
  Description of Artificial Sequence: Synthetic oligonucleotide
cauccacagcagggaggag

SEQ ID NO: 2380182 - RNA, 19 nt, Artificial Sequence
  Description of Artificial Sequence: Synthetic oligonucleotide
ggccaagaauaagucucuc

SEQ ID NO: 2380183 - RNA, 19 nt, Artificial Sequence
  Description of Artificial Sequence: Synthetic oligonucleotide
cuaggccggcuuuagucuu

SEQ ID NO: 2380184 - RNA, 19 nt, Artificial Sequence
  Description of Artificial Sequence: Synthetic oligonucleotide
gcccauaggggagguggcc

SEQ ID NO: 2380185 - RNA, 19 nt, Artificial Sequence
  Description of Artificial Sequence: Synthetic oligonucleotide
ggaggugcuuccgcucaac

SEQ ID NO: 2380186 - RNA, 19 nt, Artificial Sequence
  Description of Artificial Sequence: Synthetic oligonucleotide
ccagugacagcccugcuuu

SEQ ID NO: 2380187 - RNA, 19 nt, Artificial Sequence
  Description of Artificial Sequence: Synthetic oligonucleotide
gguagcuaggccggcuuua

SEQ ID NO: 2380188 - RNA, 19 nt, Artificial Sequence
  Description of Artificial Sequence: Synthetic oligonucleotide
gccucccauugacucugcc

SEQ ID NO: 2380189 - RNA, 19 nt, Artificial Sequence
  Description of Artificial Sequence: Synthetic oligonucleotide
ggcaaggacacacgcucau

SEQ ID NO: 2380190 - RNA, 19 nt, Artificial Sequence
  Description of Artificial Sequence: Synthetic oligonucleotide
gcucucagggcgagccuug

SEQ ID NO: 2380191 - RNA, 19 nt, Artificial Sequence
  Description of Artificial Sequence: Synthetic oligonucleotide
gguccugguggaagaaucu

SEQ ID NO: 2380192 - RNA, 19 nt, Artificial Sequence
  Description of Artificial Sequence: Synthetic oligonucleotide
gccggcuuuagucuucuuu

SEQ ID NO: 2380193 - RNA, 19 nt, Artificial Sequence
  Description of Artificial Sequence: Synthetic oligonucleotide
ggcuugcucucagggcgag

SEQ ID NO: 2380194 - RNA, 19 nt, Artificial Sequence
  Description of Artificial Sequence: Synthetic oligonucleotide
ccaauccggguaacuggca

SEQ ID NO: 2380195 - RNA, 19 nt, Artificial Sequence
  Description of Artificial Sequence: Synthetic oligonucleotide
ggcugcccuacuguccuga

SEQ ID NO: 2380196 - RNA, 19 nt, Artificial Sequence
  Description of Artificial Sequence: Synthetic oligonucleotide
accggcuggggugggcaau

SEQ ID NO: 2380197 - RNA, 19 nt, Artificial Sequence
  Description of Artificial Sequence: Synthetic oligonucleotide
ggcgagccuuggccugccg

SEQ ID NO: 2380198 - RNA, 19 nt, Artificial Sequence
  Description of Artificial Sequence: Synthetic oligonucleotide
ggaugccacuggccaagaa

SEQ ID NO: 2380199 - RNA, 19 nt, Artificial Sequence
  Description of Artificial Sequence: Synthetic oligonucleotide
cuuggccugccgggccuuc

SEQ ID NO: 2380200 - RNA, 19 nt, Artificial Sequence
  Description of Artificial Sequence: Synthetic oligonucleotide
cauaggggagguggccugu

SEQ ID NO: 2380201 - RNA, 19 nt, Artificial Sequence
  Description of Artificial Sequence: Synthetic oligonucleotide
uccggguaacuggcaccuu

SEQ ID NO: 2380202 - RNA, 19 nt, Artificial Sequence
  Description of Artificial Sequence: Synthetic oligonucleotide
cuaggguggcugcccuacu

SEQ ID NO: 2380203 - RNA, 19 nt, Artificial Sequence
  Description of Artificial Sequence: Synthetic oligonucleotide
cagcuaggguggcugcccu

SEQ ID NO: 2380204 - RNA, 19 nt, Artificial Sequence
  Description of Artificial Sequence: Synthetic oligonucleotide
ggugggcaaugggcaagga

SEQ ID NO: 2380205 - RNA, 19 nt, Artificial Sequence
  Description of Artificial Sequence: Synthetic oligonucleotide
caccggcuggggugggcaa

SEQ ID NO: 2380206 - RNA, 19 nt, Artificial Sequence
  Description of Artificial Sequence: Synthetic oligonucleotide
cgagcccgcucgcugagca

SEQ ID NO: 2380207 - RNA, 19 nt, Artificial Sequence
  Description of Artificial Sequence: Synthetic oligonucleotide
ccaaccgcccaauccgggu

SEQ ID NO: 2380208 - RNA, 19 nt, Artificial Sequence
  Description of Artificial Sequence: Synthetic oligonucleotide
cuaugacaugggguucuuu

SEQ ID NO: 2380209 - RNA, 19 nt, Artificial Sequence
  Description of Artificial Sequence: Synthetic oligonucleotide
gccugccgggccuucucaa

SEQ ID NO: 2380210 - RNA, 19 nt, Artificial Sequence
  Description of Artificial Sequence: Synthetic oligonucleotide
gagcccgcucgcugagcau

SEQ ID NO: 2380211 - RNA, 19 nt, Artificial Sequence
  Description of Artificial Sequence: Synthetic oligonucleotide
ccggcuggggugggcaaug

SEQ ID NO: 2380212 - RNA, 19 nt, Artificial Sequence
  Description of Artificial Sequence: Synthetic oligonucleotide
ggguucuuuugcacagaau

SEQ ID NO: 2380213 - RNA, 19 nt, Artificial Sequence
  Description of Artificial Sequence: Synthetic oligonucleotide
cgcucaacacccucccucu

SEQ ID NO: 2380214 - RNA, 19 nt, Artificial Sequence
  Description of Artificial Sequence: Synthetic oligonucleotide
cccauaggggagguggccu

SEQ ID NO: 2380215 - RNA, 19 nt, Artificial Sequence
  Description of Artificial Sequence: Synthetic oligonucleotide
caacacccucccucugcuu

SEQ ID NO: 2380216 - RNA, 19 nt, Artificial Sequence
  Description of Artificial Sequence: Synthetic oligonucleotide
cccauugacucugcccaua

SEQ ID NO: 2380217 - RNA, 19 nt, Artificial Sequence
  Description of Artificial Sequence: Synthetic oligonucleotide
ccgagcccgcucgcugagc

SEQ ID NO: 2380218 - RNA, 19 nt, Artificial Sequence
  Description of Artificial Sequence: Synthetic oligonucleotide
ggccaccggcugggguggg

SEQ ID NO: 2380219 - RNA, 19 nt, Artificial Sequence
  Description of Artificial Sequence: Synthetic oligonucleotide
gcccugcuuugcucucaaa

SEQ ID NO: 2380220 - RNA, 19 nt, Artificial Sequence
  Description of Artificial Sequence: Synthetic oligonucleotide
cuccccgagcccgcucgcu

SEQ ID NO: 2380221 - RNA, 19 nt, Artificial Sequence
  Description of Artificial Sequence: Synthetic oligonucleotide
ccuacucauggaggugcuu

SEQ ID NO: 2380222 - RNA, 19 nt, Artificial Sequence
  Description of Artificial Sequence: Synthetic oligonucleotide
ccgcccaauccggguaacu

SEQ ID NO: 2380223 - RNA, 19 nt, Artificial Sequence
  Description of Artificial Sequence: Synthetic oligonucleotide
  modified_base (4)..(4): a, c, u, g, unknown or other
ucunuaaaugacaacaggg

SEQ ID NO: 2380224 - RNA, 19 nt, Artificial Sequence
  Description of Artificial Sequence: Synthetic oligonucleotide
aauuaaacaagggagaggg

SEQ ID NO: 2380225 - RNA, 19 nt, Artificial Sequence
  Description of Artificial Sequence: Synthetic oligonucleotide
uuuagaucacgcaugaugg

SEQ ID NO: 2380226 - RNA, 19 nt, Artificial Sequence
  Description of Artificial Sequence: Synthetic oligonucleotide
aauugaguguaauaguaac

SEQ ID NO: 2380227 - RNA, 19 nt, Artificial Sequence
  Description of Artificial Sequence: Synthetic oligonucleotide
aauaguaaccgcuccaaac

SEQ ID NO: 2380228 - RNA, 19 nt, Artificial Sequence
  Description of Artificial Sequence: Synthetic oligonucleotide
auugauauaucagaaaggc

SEQ ID NO: 2380229 - RNA, 19 nt, Artificial Sequence
  Description of Artificial Sequence: Synthetic oligonucleotide
aaaggaaggauacaguauc

SEQ ID NO: 2380230 - RNA, 19 nt, Artificial Sequence
  Description of Artificial Sequence: Synthetic oligonucleotide
caagaauuaaacaagggag

SEQ ID NO: 2380231 - RNA, 19 nt, Artificial Sequence
  Description of Artificial Sequence: Synthetic oligonucleotide
ugcaauaacagaccaagcg

SEQ ID NO: 2380232 - RNA, 19 nt, Artificial Sequence
  Description of Artificial Sequence: Synthetic oligonucleotide
uuugaauugaguguaauag

SEQ ID NO: 2380233 - RNA, 19 nt, Artificial Sequence
  Description of Artificial Sequence: Synthetic oligonucleotide
uguagaugcaauaacagac

SEQ ID NO: 2380234 - RNA, 19 nt, Artificial Sequence
  Description of Artificial Sequence: Synthetic oligonucleotide
uuuuagaucacgcaugaug

SEQ ID NO: 2380235 - RNA, 19 nt, Artificial Sequence
  Description of Artificial Sequence: Synthetic oligonucleotide
auaguaaccgcuccaaacc

SEQ ID NO: 2380236 - RNA, 19 nt, Artificial Sequence
  Description of Artificial Sequence: Synthetic oligonucleotide
ucaagaauuaaacaaggga

SEQ ID NO: 2380237 - RNA, 19 nt, Artificial Sequence
  Description of Artificial Sequence: Synthetic oligonucleotide
gaaucaugaaguuuauugg

SEQ ID NO: 2380238 - RNA, 19 nt, Artificial Sequence
  Description of Artificial Sequence: Synthetic oligonucleotide
gauacaguauccaaggacg

SEQ ID NO: 2380239 - RNA, 19 nt, Artificial Sequence
  Description of Artificial Sequence: Synthetic oligonucleotide
ugugaaauugauauaucag

SEQ ID NO: 2380240 - RNA, 19 nt, Artificial Sequence
  Description of Artificial Sequence: Synthetic oligonucleotide
aguaucauccaacugauca

SEQ ID NO: 2380241 - RNA, 19 nt, Artificial Sequence
  Description of Artificial Sequence: Synthetic oligonucleotide
  modified_base (5)..(5): a, c, u, g, unknown or other
uucunuaaaugacaacagg

SEQ ID NO: 2380242 - RNA, 19 nt, Artificial Sequence
  Description of Artificial Sequence: Synthetic oligonucleotide
  modified_base (3)..(3): a, c, u, g, unknown or other
cunuaaaugacaacagggc

SEQ ID NO: 2380243 - RNA, 19 nt, Artificial Sequence
  Description of Artificial Sequence: Synthetic oligonucleotide
ugagcuuucaguucauugg

SEQ ID NO: 2380244 - RNA, 19 nt, Artificial Sequence
  Description of Artificial Sequence: Synthetic oligonucleotide
ugucuugugaaauugauau

SEQ ID NO: 2380245 - RNA, 19 nt, Artificial Sequence
  Description of Artificial Sequence: Synthetic oligonucleotide
  modified_base (2)..(2): a, c, u, g, unknown or other
unuaaaugacaacagggcu

SEQ ID NO: 2380246 - RNA, 19 nt, Artificial Sequence
  Description of Artificial Sequence: Synthetic oligonucleotide
uggauacacagcaagagcc

SEQ ID NO: 2380247 - RNA, 19 nt, Artificial Sequence
  Description of Artificial Sequence: Synthetic oligonucleotide
uccagauucacuauggagu

SEQ ID NO: 2380248 - RNA, 19 nt, Artificial Sequence
  Description of Artificial Sequence: Synthetic oligonucleotide
uuggauauaaaacaugcau

SEQ ID NO: 2380249 - RNA, 19 nt, Artificial Sequence
  Description of Artificial Sequence: Synthetic oligonucleotide
uauccaaggacgcacaggc

SEQ ID NO: 2380250 - RNA, 19 nt, Artificial Sequence
  Description of Artificial Sequence: Synthetic oligonucleotide
aauugauauaucagaaagg

SEQ ID NO: 2380251 - RNA, 19 nt, Artificial Sequence
  Description of Artificial Sequence: Synthetic oligonucleotide
gaugcaauaacagaccaag

SEQ ID NO: 2380252 - RNA, 19 nt, Artificial Sequence
  Description of Artificial Sequence: Synthetic oligonucleotide
ugaaauugauauaucagaa

SEQ ID NO: 2380253 - RNA, 19 nt, Artificial Sequence
  Description of Artificial Sequence: Synthetic oligonucleotide
aguuuauuggucccugccc

SEQ ID NO: 2380254 - RNA, 19 nt, Artificial Sequence
  Description of Artificial Sequence: Synthetic oligonucleotide
gugaaugugaguaucaucc

SEQ ID NO: 2380255 - RNA, 19 nt, Artificial Sequence
  Description of Artificial Sequence: Synthetic oligonucleotide
aaugugaguaucauccaac

SEQ ID NO: 2380256 - RNA, 19 nt, Artificial Sequence
  Description of Artificial Sequence: Synthetic oligonucleotide
uugugaaauugauauauca

SEQ ID NO: 2380257 - RNA, 19 nt, Artificial Sequence
  Description of Artificial Sequence: Synthetic oligonucleotide
  modified_base (18)..(18): a, c, u, g, unknown or other
aaauauuaguuccuucunu

SEQ ID NO: 2380258 - RNA, 19 nt, Artificial Sequence
  Description of Artificial Sequence: Synthetic oligonucleotide
ugaauugaguguaauagua

SEQ ID NO: 2380259 - RNA, 19 nt, Artificial Sequence
  Description of Artificial Sequence: Synthetic oligonucleotide
agaccaagcgaacaucacc

SEQ ID NO: 2380260 - RNA, 19 nt, Artificial Sequence
  Description of Artificial Sequence: Synthetic oligonucleotide
  modified_base (17)..(17): a, c, u, g, unknown or other
aauauuaguuccuucunua

SEQ ID NO: 2380261 - RNA, 19 nt, Artificial Sequence
  Description of Artificial Sequence: Synthetic oligonucleotide
ucaugaaguuuauuggucc

SEQ ID NO: 2380262 - RNA, 19 nt, Artificial Sequence
  Description of Artificial Sequence: Synthetic oligonucleotide
uaaugcaagugucacacac

SEQ ID NO: 2380263 - RNA, 19 nt, Artificial Sequence
  Description of Artificial Sequence: Synthetic oligonucleotide
uaccucaagaauuaaacaa

SEQ ID NO: 2380264 - RNA, 19 nt, Artificial Sequence
  Description of Artificial Sequence: Synthetic oligonucleotide
ugccaaaagcaccaggcgg

SEQ ID NO: 2380265 - RNA, 19 nt, Artificial Sequence
  Description of Artificial Sequence: Synthetic oligonucleotide
agaaagaaauguugcccgc

SEQ ID NO: 2380266 - RNA, 19 nt, Artificial Sequence
  Description of Artificial Sequence: Synthetic oligonucleotide
uucacuauggagugaaugu

SEQ ID NO: 2380267 - RNA, 19 nt, Artificial Sequence
  Description of Artificial Sequence: Synthetic oligonucleotide
ucuugugaaauugauauau

SEQ ID NO: 2380268 - RNA, 19 nt, Artificial Sequence
  Description of Artificial Sequence: Synthetic oligonucleotide
auugaguguaauaguaacc

SEQ ID NO: 2380269 - RNA, 19 nt, Artificial Sequence
  Description of Artificial Sequence: Synthetic oligonucleotide
aaccgcuccaaaccaaacg

SEQ ID NO: 2380270 - RNA, 19 nt, Artificial Sequence
  Description of Artificial Sequence: Synthetic oligonucleotide
uguaauaguaaccgcucca

SEQ ID NO: 2380271 - RNA, 19 nt, Artificial Sequence
  Description of Artificial Sequence: Synthetic oligonucleotide
  modified_base (13)..(13): a, c, u, g, unknown or other
uuaguuccuucunuaaaug

SEQ ID NO: 2380272 - RNA, 19 nt, Artificial Sequence
  Description of Artificial Sequence: Synthetic oligonucleotide
ugguauggcgaacagauuc

SEQ ID NO: 2380273 - RNA, 19 nt, Artificial Sequence
  Description of Artificial Sequence: Synthetic oligonucleotide
uggauauaaaacaugcaua

SEQ ID NO: 2380274 - RNA, 19 nt, Artificial Sequence
  Description of Artificial Sequence: Synthetic oligonucleotide
gugaaauugauauaucaga

SEQ ID NO: 2380275 - RNA, 19 nt, Artificial Sequence
  Description of Artificial Sequence: Synthetic oligonucleotide
aagaauuaaacaagggaga

SEQ ID NO: 2380276 - RNA, 19 nt, Artificial Sequence
  Description of Artificial Sequence: Synthetic oligonucleotide
gugaguaucauccaacuga

SEQ ID NO: 2380277 - RNA, 19 nt, Artificial Sequence
  Description of Artificial Sequence: Synthetic oligonucleotide
uauggagugaaugugagua

SEQ ID NO: 2380278 - RNA, 19 nt, Artificial Sequence
  Description of Artificial Sequence: Synthetic oligonucleotide
  modified_base (6)..(6): a, c, u, g, unknown or other
cuucunuaaaugacaacag

SEQ ID NO: 2380279 - RNA, 19 nt, Artificial Sequence
  Description of Artificial Sequence: Synthetic oligonucleotide
uugauauaucagaaaggcc

SEQ ID NO: 2380280 - RNA, 19 nt, Artificial Sequence
  Description of Artificial Sequence: Synthetic oligonucleotide
ucaaaggaaggauacagua

SEQ ID NO: 2380281 - RNA, 19 nt, Artificial Sequence
  Description of Artificial Sequence: Synthetic oligonucleotide
auuaaugggccccacaaau

SEQ ID NO: 2380282 - RNA, 19 nt, Artificial Sequence
  Description of Artificial Sequence: Synthetic oligonucleotide
cucaagaauuaaacaaggg

SEQ ID NO: 2380283 - RNA, 19 nt, Artificial Sequence
  Description of Artificial Sequence: Synthetic oligonucleotide
cugaucacaaaauagaaua

SEQ ID NO: 2380284 - RNA, 19 nt, Artificial Sequence
  Description of Artificial Sequence: Synthetic oligonucleotide
aaaucccaaucucuuagca

SEQ ID NO: 2380285 - RNA, 19 nt, Artificial Sequence
  Description of Artificial Sequence: Synthetic oligonucleotide
aauaacagaccaagcgaac

SEQ ID NO: 2380286 - RNA, 19 nt, Artificial Sequence
  Description of Artificial Sequence: Synthetic oligonucleotide
aaggaaggauacaguaucc

SEQ ID NO: 2380287 - RNA, 19 nt, Artificial Sequence
  Description of Artificial Sequence: Synthetic oligonucleotide
aaaagccgaaucaugaagu

SEQ ID NO: 2380288 - RNA, 19 nt, Artificial Sequence
  Description of Artificial Sequence: Synthetic oligonucleotide
agucaaaggaaggauacag

SEQ ID NO: 2380289 - RNA, 19 nt, Artificial Sequence
  Description of Artificial Sequence: Synthetic oligonucleotide
  modified_base (15)..(15): a, c, u, g, unknown or other
uauuaguuccuucunuaaa

SEQ ID NO: 2380290 - RNA, 19 nt, Artificial Sequence
  Description of Artificial Sequence: Synthetic oligonucleotide
aaucucuccuucuacugga

SEQ ID NO: 2380291 - RNA, 19 nt, Artificial Sequence
  Description of Artificial Sequence: Synthetic oligonucleotide
uagaugcaauaacagacca

SEQ ID NO: 2380292 - RNA, 19 nt, Artificial Sequence
  Description of Artificial Sequence: Synthetic oligonucleotide
gagccuugcgguuuggagg

SEQ ID NO: 2380293 - RNA, 19 nt, Artificial Sequence
  Description of Artificial Sequence: Synthetic oligonucleotide
acaaaacuucugcaaauug

SEQ ID NO: 2380294 - RNA, 19 nt, Artificial Sequence
  Description of Artificial Sequence: Synthetic oligonucleotide
uaaauuucuuccccacagc

SEQ ID NO: 2380295 - RNA, 19 nt, Artificial Sequence
  Description of Artificial Sequence: Synthetic oligonucleotide
agcauugcgacagucaaag

SEQ ID NO: 2380296 - RNA, 19 nt, Artificial Sequence
  Description of Artificial Sequence: Synthetic oligonucleotide
gacgcacaggcucugaaag

SEQ ID NO: 2380297 - RNA, 19 nt, Artificial Sequence
  Description of Artificial Sequence: Synthetic oligonucleotide
uuuaauguggaguggucaa

SEQ ID NO: 2380298 - RNA, 19 nt, Artificial Sequence
  Description of Artificial Sequence: Synthetic oligonucleotide
aggccugaaaacaaaggcc

SEQ ID NO: 2380299 - RNA, 19 nt, Artificial Sequence
  Description of Artificial Sequence: Synthetic oligonucleotide
uucauugguuuccagugcu

SEQ ID NO: 2380300 - RNA, 19 nt, Artificial Sequence
  Description of Artificial Sequence: Synthetic oligonucleotide
aagguuguugguaagcugu

SEQ ID NO: 2380301 - RNA, 19 nt, Artificial Sequence
  Description of Artificial Sequence: Synthetic oligonucleotide
  modified_base (16)..(16): a, c, u, g, unknown or other
auauuaguuccuucunuaa

SEQ ID NO: 2380302 - RNA, 19 nt, Artificial Sequence
  Description of Artificial Sequence: Synthetic oligonucleotide
auccagauucacuauggag

SEQ ID NO: 2380303 - RNA, 19 nt, Artificial Sequence
  Description of Artificial Sequence: Synthetic oligonucleotide
acaguauccaaggacgcac

SEQ ID NO: 2380304 - RNA, 19 nt, Artificial Sequence
  Description of Artificial Sequence: Synthetic oligonucleotide
aacaucaccacuaccacaa

SEQ ID NO: 2380305 - RNA, 19 nt, Artificial Sequence
  Description of Artificial Sequence: Synthetic oligonucleotide
ugcgacagucaaaggaagg

SEQ ID NO: 2380306 - RNA, 19 nt, Artificial Sequence
  Description of Artificial Sequence: Synthetic oligonucleotide
aagcgaacaucaccacuac

SEQ ID NO: 2380307 - RNA, 19 nt, Artificial Sequence
  Description of Artificial Sequence: Synthetic oligonucleotide
aaccaaacgacggacaaaa

SEQ ID NO: 2380308 - RNA, 19 nt, Artificial Sequence
  Description of Artificial Sequence: Synthetic oligonucleotide
uccuuggauauaaaacaug

SEQ ID NO: 2380309 - RNA, 19 nt, Artificial Sequence
  Description of Artificial Sequence: Synthetic oligonucleotide
ccuuggauauaaaacaugc

SEQ ID NO: 2380310 - RNA, 19 nt, Artificial Sequence
  Description of Artificial Sequence: Synthetic oligonucleotide
aaguuuugaauugagugua

SEQ ID NO: 2380311 - RNA, 19 nt, Artificial Sequence
  Description of Artificial Sequence: Synthetic oligonucleotide
auaccucaagaauuaaaca

SEQ ID NO: 2380312 - RNA, 19 nt, Artificial Sequence
  Description of Artificial Sequence: Synthetic oligonucleotide
ucuacuggaaugucuugug

SEQ ID NO: 2380313 - RNA, 19 nt, Artificial Sequence
  Description of Artificial Sequence: Synthetic oligonucleotide
ugugaguaucauccaacug

SEQ ID NO: 2380314 - RNA, 19 nt, Artificial Sequence
  Description of Artificial Sequence: Synthetic oligonucleotide
uuuugaauugaguguaaua

SEQ ID NO: 2380315 - RNA, 19 nt, Artificial Sequence
  Description of Artificial Sequence: Synthetic oligonucleotide
caacugaucacaaaauaga

SEQ ID NO: 2380316 - RNA, 19 nt, Artificial Sequence
  Description of Artificial Sequence: Synthetic oligonucleotide
agaaauguugcccgccaag

SEQ ID NO: 2380317 - RNA, 19 nt, Artificial Sequence
  Description of Artificial Sequence: Synthetic oligonucleotide
uucauuuaauguggagugg

SEQ ID NO: 2380318 - RNA, 19 nt, Artificial Sequence
  Description of Artificial Sequence: Synthetic oligonucleotide
caagaaguuuugaauugag

SEQ ID NO: 2380319 - RNA, 19 nt, Artificial Sequence
  Description of Artificial Sequence: Synthetic oligonucleotide
agauucauuuaauguggag

SEQ ID NO: 2380320 - RNA, 19 nt, Artificial Sequence
  Description of Artificial Sequence: Synthetic oligonucleotide
ucauuuaauguggaguggu

SEQ ID NO: 2380321 - RNA, 19 nt, Artificial Sequence
  Description of Artificial Sequence: Synthetic oligonucleotide
aguguaauaguaaccgcuc

SEQ ID NO: 2380322 - RNA, 19 nt, Artificial Sequence
  Description of Artificial Sequence: Synthetic oligonucleotide
acacaguauuaaugggccc

SEQ ID NO: 2380323 - RNA, 19 nt, Artificial Sequence
  Description of Artificial Sequence: Synthetic oligonucleotide
  modified_base (9)..(9): a, c, u, g, unknown or other
uuccuucunuaaaugacaa

SEQ ID NO: 2380324 - RNA, 19 nt, Artificial Sequence
  Description of Artificial Sequence: Synthetic oligonucleotide
ugaguguaauaguaaccgc

SEQ ID NO: 2380325 - RNA, 19 nt, Artificial Sequence
  Description of Artificial Sequence: Synthetic oligonucleotide
ugcacgagcucucauggga

SEQ ID NO: 2380326 - RNA, 19 nt, Artificial Sequence
  Description of Artificial Sequence: Synthetic oligonucleotide
aagugucacacacaguauu

SEQ ID NO: 2380327 - RNA, 19 nt, Artificial Sequence
  Description of Artificial Sequence: Synthetic oligonucleotide
augcauuacuuuuccuugg

SEQ ID NO: 2380328 - RNA, 19 nt, Artificial Sequence
  Description of Artificial Sequence: Synthetic oligonucleotide
cuuguauccagauucacua

SEQ ID NO: 2380329 - RNA, 19 nt, Artificial Sequence
  Description of Artificial Sequence: Synthetic oligonucleotide
ugguaagcuguucuuucag

SEQ ID NO: 2380330 - RNA, 19 nt, Artificial Sequence
  Description of Artificial Sequence: Synthetic oligonucleotide
aaacgacggacaaaacuuc

SEQ ID NO: 2380331 - RNA, 19 nt, Artificial Sequence
  Description of Artificial Sequence: Synthetic oligonucleotide
aucaugaaguuuauugguc

SEQ ID NO: 2380332 - RNA, 19 nt, Artificial Sequence
  Description of Artificial Sequence: Synthetic oligonucleotide
uccaacugaucacaaaaua

SEQ ID NO: 2380333 - RNA, 19 nt, Artificial Sequence
  Description of Artificial Sequence: Synthetic oligonucleotide
guauccagauucacuaugg

SEQ ID NO: 2380334 - RNA, 19 nt, Artificial Sequence
  Description of Artificial Sequence: Synthetic oligonucleotide
caaauugugguccuccauc

SEQ ID NO: 2380335 - RNA, 19 nt, Artificial Sequence
  Description of Artificial Sequence: Synthetic oligonucleotide
cgaaucaugaaguuuauug

SEQ ID NO: 2380336 - RNA, 19 nt, Artificial Sequence
  Description of Artificial Sequence: Synthetic oligonucleotide
gauucauuuaauguggagu

SEQ ID NO: 2380337 - RNA, 19 nt, Artificial Sequence
  Description of Artificial Sequence: Synthetic oligonucleotide
cauugcgacagucaaagga

SEQ ID NO: 2380338 - RNA, 19 nt, Artificial Sequence
  Description of Artificial Sequence: Synthetic oligonucleotide
uaguaaccgcuccaaacca

SEQ ID NO: 2380339 - RNA, 19 nt, Artificial Sequence
  Description of Artificial Sequence: Synthetic oligonucleotide
guagaugcaauaacagacc

SEQ ID NO: 2380340 - RNA, 19 nt, Artificial Sequence
  Description of Artificial Sequence: Synthetic oligonucleotide
cuggauacacagcaagagc

SEQ ID NO: 2380341 - RNA, 19 nt, Artificial Sequence
  Description of Artificial Sequence: Synthetic oligonucleotide
aaugggccccacaaauccc

SEQ ID NO: 2380342 - RNA, 19 nt, Artificial Sequence
  Description of Artificial Sequence: Synthetic oligonucleotide
ccaacugaucacaaaauag

SEQ ID NO: 2380343 - RNA, 19 nt, Artificial Sequence
  Description of Artificial Sequence: Synthetic oligonucleotide
aacugaucacaaaauagaa

SEQ ID NO: 2380344 - RNA, 19 nt, Artificial Sequence
  Description of Artificial Sequence: Synthetic oligonucleotide
uaaaugacaacagggcuau

SEQ ID NO: 2380345 - RNA, 19 nt, Artificial Sequence
  Description of Artificial Sequence: Synthetic oligonucleotide
auuuaauguggagugguca

SEQ ID NO: 2380346 - RNA, 19 nt, Artificial Sequence
  Description of Artificial Sequence: Synthetic oligonucleotide
cacagcuuuuagaucacgc

SEQ ID NO: 2380347 - RNA, 19 nt, Artificial Sequence
  Description of Artificial Sequence: Synthetic oligonucleotide
uaauguggaguggucaagc

SEQ ID NO: 2380348 - RNA, 19 nt, Artificial Sequence
  Description of Artificial Sequence: Synthetic oligonucleotide
auacaguauccaaggacgc

SEQ ID NO: 2380349 - RNA, 19 nt, Artificial Sequence
  Description of Artificial Sequence: Synthetic oligonucleotide
ugcauuacuuuuccuugga

SEQ ID NO: 2380350 - RNA, 19 nt, Artificial Sequence
  Description of Artificial Sequence: Synthetic oligonucleotide
uggagguuggcugucagca

SEQ ID NO: 2380351 - RNA, 19 nt, Artificial Sequence
  Description of Artificial Sequence: Synthetic oligonucleotide
gaaagaaauguugcccgcc

SEQ ID NO: 2380352 - RNA, 19 nt, Artificial Sequence
  Description of Artificial Sequence: Synthetic oligonucleotide
uuaaugggccccacaaauc

SEQ ID NO: 2380353 - RNA, 19 nt, Artificial Sequence
  Description of Artificial Sequence: Synthetic oligonucleotide
guagcauuaaugcaagugu

SEQ ID NO: 2380354 - RNA, 19 nt, Artificial Sequence
  Description of Artificial Sequence: Synthetic oligonucleotide
ugaaugugaguaucaucca

SEQ ID NO: 2380355 - RNA, 19 nt, Artificial Sequence
  Description of Artificial Sequence: Synthetic oligonucleotide
accgcuccaaaccaaacga

SEQ ID NO: 2380356 - RNA, 19 nt, Artificial Sequence
  Description of Artificial Sequence: Synthetic oligonucleotide
ucacuauggagugaaugug

SEQ ID NO: 2380357 - RNA, 19 nt, Artificial Sequence
  Description of Artificial Sequence: Synthetic oligonucleotide
aaauguugcccgccaagaa

SEQ ID NO: 2380358 - RNA, 19 nt, Artificial Sequence
  Description of Artificial Sequence: Synthetic oligonucleotide
uaacagaccaagcgaacau

SEQ ID NO: 2380359 - RNA, 19 nt, Artificial Sequence
  Description of Artificial Sequence: Synthetic oligonucleotide
agcgaacaucaccacuacc

SEQ ID NO: 2380360 - RNA, 19 nt, Artificial Sequence
  Description of Artificial Sequence: Synthetic oligonucleotide
uauuaaugggccccacaaa

SEQ ID NO: 2380361 - RNA, 19 nt, Artificial Sequence
  Description of Artificial Sequence: Synthetic oligonucleotide
aaggcuguagaugcaauaa

SEQ ID NO: 2380362 - RNA, 19 nt, Artificial Sequence
  Description of Artificial Sequence: Synthetic oligonucleotide
cuuuuguagcauuaaugca

SEQ ID NO: 2380363 - RNA, 19 nt, Artificial Sequence
  Description of Artificial Sequence: Synthetic oligonucleotide
  modified_base (7)..(7): a, c, u, g, unknown or other
ccuucunuaaaugacaaca

SEQ ID NO: 2380364 - RNA, 19 nt, Artificial Sequence
  Description of Artificial Sequence: Synthetic oligonucleotide
ccucaagaauuaaacaagg

SEQ ID NO: 2380365 - RNA, 19 nt, Artificial Sequence
  Description of Artificial Sequence: Synthetic oligonucleotide
aaagccgaaucaugaaguu

SEQ ID NO: 2380366 - RNA, 19 nt, Artificial Sequence
  Description of Artificial Sequence: Synthetic oligonucleotide
agcaagaaaggcuguagau

SEQ ID NO: 2380367 - RNA, 19 nt, Artificial Sequence
  Description of Artificial Sequence: Synthetic oligonucleotide
  modified_base (10)..(10): a, c, u, g, unknown or other
guuccuucunuaaaugaca

SEQ ID NO: 2380368 - RNA, 19 nt, Artificial Sequence
  Description of Artificial Sequence: Synthetic oligonucleotide
augugaguaucauccaacu

SEQ ID NO: 2380369 - RNA, 19 nt, Artificial Sequence
  Description of Artificial Sequence: Synthetic oligonucleotide
uuaauguggaguggucaag

SEQ ID NO: 2380370 - RNA, 19 nt, Artificial Sequence
  Description of Artificial Sequence: Synthetic oligonucleotide
guauuaaugggccccacaa

SEQ ID NO: 2380371 - RNA, 19 nt, Artificial Sequence
  Description of Artificial Sequence: Synthetic oligonucleotide
gaaugguaaucucuccuuc

SEQ ID NO: 2380372 - RNA, 19 nt, Artificial Sequence
  Description of Artificial Sequence: Synthetic oligonucleotide
caaaucccaaucucuuagc

SEQ ID NO: 2380373 - RNA, 19 nt, Artificial Sequence
  Description of Artificial Sequence: Synthetic oligonucleotide
uugcgacagucaaaggaag

SEQ ID NO: 2380374 - RNA, 19 nt, Artificial Sequence
  Description of Artificial Sequence: Synthetic oligonucleotide
agagccuugcgguuuggag

SEQ ID NO: 2380375 - RNA, 19 nt, Artificial Sequence
  Description of Artificial Sequence: Synthetic oligonucleotide
uauccagauucacuaugga

SEQ ID NO: 2380376 - RNA, 19 nt, Artificial Sequence
  Description of Artificial Sequence: Synthetic oligonucleotide
ugaaguuuauuggucccug

SEQ ID NO: 2380377 - RNA, 19 nt, Artificial Sequence
  Description of Artificial Sequence: Synthetic oligonucleotide
caauaacagaccaagcgaa

SEQ ID NO: 2380378 - RNA, 19 nt, Artificial Sequence
  Description of Artificial Sequence: Synthetic oligonucleotide
ucuccuucuacuggaaugu

SEQ ID NO: 2380379 - RNA, 19 nt, Artificial Sequence
  Description of Artificial Sequence: Synthetic oligonucleotide
aguauuaaugggccccaca

SEQ ID NO: 2380380 - RNA, 19 nt, Artificial Sequence
  Description of Artificial Sequence: Synthetic oligonucleotide
ucucuuagcaaugcauuac

SEQ ID NO: 2380381 - RNA, 19 nt, Artificial Sequence
  Description of Artificial Sequence: Synthetic oligonucleotide
auaacagaccaagcgaaca

SEQ ID NO: 2380382 - RNA, 19 nt, Artificial Sequence
  Description of Artificial Sequence: Synthetic oligonucleotide
cuugugaaauugauauauc

SEQ ID NO: 2380383 - RNA, 19 nt, Artificial Sequence
  Description of Artificial Sequence: Synthetic oligonucleotide
ggcaaaucagcauugcgac

SEQ ID NO: 2380384 - RNA, 19 nt, Artificial Sequence
  Description of Artificial Sequence: Synthetic oligonucleotide
gaccaagcgaacaucacca

SEQ ID NO: 2380385 - RNA, 19 nt, Artificial Sequence
  Description of Artificial Sequence: Synthetic oligonucleotide
ugguaaucucuccuucuac

SEQ ID NO: 2380386 - RNA, 19 nt, Artificial Sequence
  Description of Artificial Sequence: Synthetic oligonucleotide
uuuauuggucccugcccug

SEQ ID NO: 2380387 - RNA, 19 nt, Artificial Sequence
  Description of Artificial Sequence: Synthetic oligonucleotide
guugguaagcuguucuuuc

SEQ ID NO: 2380388 - RNA, 19 nt, Artificial Sequence
  Description of Artificial Sequence: Synthetic oligonucleotide
uaauaguaaccgcuccaaa

SEQ ID NO: 2380389 - RNA, 19 nt, Artificial Sequence
  Description of Artificial Sequence: Synthetic oligonucleotide
guguaauaguaaccgcucc

SEQ ID NO: 2380390 - RNA, 19 nt, Artificial Sequence
  Description of Artificial Sequence: Synthetic oligonucleotide
uucuacuggaaugucuugu

SEQ ID NO: 2380391 - RNA, 19 nt, Artificial Sequence
  Description of Artificial Sequence: Synthetic oligonucleotide
aguauccaaggacgcacag

SEQ ID NO: 2380392 - RNA, 19 nt, Artificial Sequence
  Description of Artificial Sequence: Synthetic oligonucleotide
gaaugugaguaucauccaa

SEQ ID NO: 2380393 - RNA, 19 nt, Artificial Sequence
  Description of Artificial Sequence: Synthetic oligonucleotide
gguaagcuguucuuucagg

SEQ ID NO: 2380394 - RNA, 19 nt, Artificial Sequence
  Description of Artificial Sequence: Synthetic oligonucleotide
caagcucucgugcacgagc

SEQ ID NO: 2380395 - RNA, 19 nt, Artificial Sequence
  Description of Artificial Sequence: Synthetic oligonucleotide
gcaauaacagaccaagcga

SEQ ID NO: 2380396 - RNA, 19 nt, Artificial Sequence
  Description of Artificial Sequence: Synthetic oligonucleotide
uccaaaccaaacgacggac

SEQ ID NO: 2380397 - RNA, 19 nt, Artificial Sequence
  Description of Artificial Sequence: Synthetic oligonucleotide
acuggaaugucuugugaaa

SEQ ID NO: 2380398 - RNA, 19 nt, Artificial Sequence
  Description of Artificial Sequence: Synthetic oligonucleotide
guucauugguuuccagugc

SEQ ID NO: 2380399 - RNA, 19 nt, Artificial Sequence
  Description of Artificial Sequence: Synthetic oligonucleotide
ucacgcaugaugguauggc

SEQ ID NO: 2380400 - RNA, 19 nt, Artificial Sequence
  Description of Artificial Sequence: Synthetic oligonucleotide
auugcgacagucaaaggaa

SEQ ID NO: 2380401 - RNA, 19 nt, Artificial Sequence
  Description of Artificial Sequence: Synthetic oligonucleotide
uuagaucacgcaugauggu

SEQ ID NO: 2380402 - RNA, 19 nt, Artificial Sequence
  Description of Artificial Sequence: Synthetic oligonucleotide
ugggaaugguaaucucucc

SEQ ID NO: 2380403 - RNA, 19 nt, Artificial Sequence
  Description of Artificial Sequence: Synthetic oligonucleotide
accaagcgaacaucaccac

SEQ ID NO: 2380404 - RNA, 19 nt, Artificial Sequence
  Description of Artificial Sequence: Synthetic oligonucleotide
ugcaaauugugguccucca

SEQ ID NO: 2380405 - RNA, 19 nt, Artificial Sequence
  Description of Artificial Sequence: Synthetic oligonucleotide
augcaauaacagaccaagc

SEQ ID NO: 2380406 - RNA, 19 nt, Artificial Sequence
  Description of Artificial Sequence: Synthetic oligonucleotide
ccugccaaaagcaccaggc

SEQ ID NO: 2380407 - RNA, 19 nt, Artificial Sequence
  Description of Artificial Sequence: Synthetic oligonucleotide
aagaaauguugcccgccaa

SEQ ID NO: 2380408 - RNA, 19 nt, Artificial Sequence
  Description of Artificial Sequence: Synthetic oligonucleotide
ucuuagcaaugcauuacuu

SEQ ID NO: 2380409 - RNA, 19 nt, Artificial Sequence
  Description of Artificial Sequence: Synthetic oligonucleotide
gaaauguugcccgccaaga

SEQ ID NO: 2380410 - RNA, 19 nt, Artificial Sequence
  Description of Artificial Sequence: Synthetic oligonucleotide
augaugguauggcgaacag

SEQ ID NO: 2380411 - RNA, 19 nt, Artificial Sequence
  Description of Artificial Sequence: Synthetic oligonucleotide
caaaacuucugcaaauugu

SEQ ID NO: 2380412 - RNA, 19 nt, Artificial Sequence
  Description of Artificial Sequence: Synthetic oligonucleotide
  modified_base (8)..(8): a, c, u, g, unknown or other
uccuucunuaaaugacaac

SEQ ID NO: 2380413 - RNA, 19 nt, Artificial Sequence
  Description of Artificial Sequence: Synthetic oligonucleotide
agccuugcgguuuggaggu

SEQ ID NO: 2380414 - RNA, 19 nt, Artificial Sequence
  Description of Artificial Sequence: Synthetic oligonucleotide
auaucagaaaggccugaaa

SEQ ID NO: 2380415 - RNA, 19 nt, Artificial Sequence
  Description of Artificial Sequence: Synthetic oligonucleotide
gaguggucaagcucucgug

SEQ ID NO: 2380416 - RNA, 19 nt, Artificial Sequence
  Description of Artificial Sequence: Synthetic oligonucleotide
acagagcucuuuuguagca

SEQ ID NO: 2380417 - RNA, 19 nt, Artificial Sequence
  Description of Artificial Sequence: Synthetic oligonucleotide
ucgugcacgagcucucaug

SEQ ID NO: 2380418 - RNA, 19 nt, Artificial Sequence
  Description of Artificial Sequence: Synthetic oligonucleotide
cuugcgguuuggagguugg

SEQ ID NO: 2380419 - RNA, 19 nt, Artificial Sequence
  Description of Artificial Sequence: Synthetic oligonucleotide
caagcgaacaucaccacua

SEQ ID NO: 2380420 - RNA, 19 nt, Artificial Sequence
  Description of Artificial Sequence: Synthetic oligonucleotide
ucucaugggaaugguaauc

SEQ ID NO: 2380421 - RNA, 19 nt, Artificial Sequence
  Description of Artificial Sequence: Synthetic oligonucleotide
aucucuuagcaaugcauua

SEQ ID NO: 2380422 - RNA, 19 nt, Artificial Sequence
  Description of Artificial Sequence: Synthetic oligonucleotide
gcaaauauuaguuccuucu

SEQ ID NO: 2380423 - RNA, 19 nt, Artificial Sequence
  Description of Artificial Sequence: Synthetic oligonucleotide
agcauuaaugcaaguguca

SEQ ID NO: 2380424 - RNA, 19 nt, Artificial Sequence
  Description of Artificial Sequence: Synthetic oligonucleotide
gaguguaauaguaaccgcu

SEQ ID NO: 2380425 - RNA, 19 nt, Artificial Sequence
  Description of Artificial Sequence: Synthetic oligonucleotide
guauccaaggacgcacagg

SEQ ID NO: 2380426 - RNA, 19 nt, Artificial Sequence
  Description of Artificial Sequence: Synthetic oligonucleotide
aacgacggacaaaacuucu

SEQ ID NO: 2380427 - RNA, 19 nt, Artificial Sequence
  Description of Artificial Sequence: Synthetic oligonucleotide
uuauuggucccugcccugc

SEQ ID NO: 2380428 - RNA, 19 nt, Artificial Sequence
  Description of Artificial Sequence: Synthetic oligonucleotide
gaucacgcaugaugguaug

SEQ ID NO: 2380429 - RNA, 19 nt, Artificial Sequence
  Description of Artificial Sequence: Synthetic oligonucleotide
uugcccgccaagaaguuuu

SEQ ID NO: 2380430 - RNA, 19 nt, Artificial Sequence
  Description of Artificial Sequence: Synthetic oligonucleotide
caaacgacggacaaaacuu

SEQ ID NO: 2380431 - RNA, 19 nt, Artificial Sequence
  Description of Artificial Sequence: Synthetic oligonucleotide
acugaucacaaaauagaau

SEQ ID NO: 2380432 - RNA, 19 nt, Artificial Sequence
  Description of Artificial Sequence: Synthetic oligonucleotide
uacaguauccaaggacgca

SEQ ID NO: 2380433 - RNA, 19 nt, Artificial Sequence
  Description of Artificial Sequence: Synthetic oligonucleotide
cacuauggagugaauguga

SEQ ID NO: 2380434 - RNA, 19 nt, Artificial Sequence
  Description of Artificial Sequence: Synthetic oligonucleotide
cauuaaugcaagugucaca

SEQ ID NO: 2380435 - RNA, 19 nt, Artificial Sequence
  Description of Artificial Sequence: Synthetic oligonucleotide
guuguugguaagcuguucu

SEQ ID NO: 2380436 - RNA, 19 nt, Artificial Sequence
  Description of Artificial Sequence: Synthetic oligonucleotide
uagaucacgcaugauggua

SEQ ID NO: 2380437 - RNA, 19 nt, Artificial Sequence
  Description of Artificial Sequence: Synthetic oligonucleotide
uccacagagcucuuuugua

SEQ ID NO: 2380438 - RNA, 19 nt, Artificial Sequence
  Description of Artificial Sequence: Synthetic oligonucleotide
caccaggcggcaaaucagc

SEQ ID NO: 2380439 - RNA, 19 nt, Artificial Sequence
  Description of Artificial Sequence: Synthetic oligonucleotide
guaagcuguucuuucaggu

SEQ ID NO: 2380440 - RNA, 19 nt, Artificial Sequence
  Description of Artificial Sequence: Synthetic oligonucleotide
guuuauuggucccugcccu

SEQ ID NO: 2380441 - RNA, 19 nt, Artificial Sequence
  Description of Artificial Sequence: Synthetic oligonucleotide
acagaccaagcgaacauca

SEQ ID NO: 2380442 - RNA, 19 nt, Artificial Sequence
  Description of Artificial Sequence: Synthetic oligonucleotide
gcuccaaaccaaacgacgg

SEQ ID NO: 2380443 - RNA, 19 nt, Artificial Sequence
  Description of Artificial Sequence: Synthetic oligonucleotide
  modified_base (19)..(19): a, c, u, g, unknown or other
caaauauuaguuccuucun

SEQ ID NO: 2380444 - RNA, 19 nt, Artificial Sequence
  Description of Artificial Sequence: Synthetic oligonucleotide
uaaccgcuccaaaccaaac

SEQ ID NO: 2380445 - RNA, 19 nt, Artificial Sequence
  Description of Artificial Sequence: Synthetic oligonucleotide
uuggagguuggcugucagc

SEQ ID NO: 2380446 - RNA, 19 nt, Artificial Sequence
  Description of Artificial Sequence: Synthetic oligonucleotide
agccgaaucaugaaguuua

SEQ ID NO: 2380447 - RNA, 19 nt, Artificial Sequence
  Description of Artificial Sequence: Synthetic oligonucleotide
ccagauucacuauggagug

SEQ ID NO: 2380448 - RNA, 19 nt, Artificial Sequence
  Description of Artificial Sequence: Synthetic oligonucleotide
auguugcccgccaagaagu

SEQ ID NO: 2380449 - RNA, 19 nt, Artificial Sequence
  Description of Artificial Sequence: Synthetic oligonucleotide
uguucuccaggcgauuccu

SEQ ID NO: 2380450 - RNA, 19 nt, Artificial Sequence
  Description of Artificial Sequence: Synthetic oligonucleotide
cauccacagagcucuuuug

SEQ ID NO: 2380451 - RNA, 19 nt, Artificial Sequence
  Description of Artificial Sequence: Synthetic oligonucleotide
uguugguaagcuguucuuu

SEQ ID NO: 2380452 - RNA, 19 nt, Artificial Sequence
  Description of Artificial Sequence: Synthetic oligonucleotide
augaaguuuauuggucccu

SEQ ID NO: 2380453 - RNA, 19 nt, Artificial Sequence
  Description of Artificial Sequence: Synthetic oligonucleotide
augguaaucucuccuucua

SEQ ID NO: 2380454 - RNA, 19 nt, Artificial Sequence
  Description of Artificial Sequence: Synthetic oligonucleotide
guaauaguaaccgcuccaa

SEQ ID NO: 2380455 - RNA, 19 nt, Artificial Sequence
  Description of Artificial Sequence: Synthetic oligonucleotide
aucacgcaugaugguaugg

SEQ ID NO: 2380456 - RNA, 19 nt, Artificial Sequence
  Description of Artificial Sequence: Synthetic oligonucleotide
ucccugcccugccaaaagc

SEQ ID NO: 2380457 - RNA, 19 nt, Artificial Sequence
  Description of Artificial Sequence: Synthetic oligonucleotide
ccugaaaacaaaggccucg

SEQ ID NO: 2380458 - RNA, 19 nt, Artificial Sequence
  Description of Artificial Sequence: Synthetic oligonucleotide
ugcgguuuggagguuggcu

SEQ ID NO: 2380459 - RNA, 19 nt, Artificial Sequence
  Description of Artificial Sequence: Synthetic oligonucleotide
aggaaggauacaguaucca

SEQ ID NO: 2380460 - RNA, 19 nt, Artificial Sequence
  Description of Artificial Sequence: Synthetic oligonucleotide
caaaccaaacgacggacaa

SEQ ID NO: 2380461 - RNA, 19 nt, Artificial Sequence
  Description of Artificial Sequence: Synthetic oligonucleotide
gagcuuucaguucauuggu

SEQ ID NO: 2380462 - RNA, 19 nt, Artificial Sequence
  Description of Artificial Sequence: Synthetic oligonucleotide
agaaaggcuguagaugcaa

SEQ ID NO: 2380463 - RNA, 19 nt, Artificial Sequence
  Description of Artificial Sequence: Synthetic oligonucleotide
caugaugguauggcgaaca

SEQ ID NO: 2380464 - RNA, 19 nt, Artificial Sequence
  Description of Artificial Sequence: Synthetic oligonucleotide
auauaucagaaaggccuga

SEQ ID NO: 2380465 - RNA, 19 nt, Artificial Sequence
  Description of Artificial Sequence: Synthetic oligonucleotide
uuguugguaagcuguucuu

SEQ ID NO: 2380466 - RNA, 19 nt, Artificial Sequence
  Description of Artificial Sequence: Synthetic oligonucleotide
aagcucucgugcacgagcu

SEQ ID NO: 2380467 - RNA, 19 nt, Artificial Sequence
  Description of Artificial Sequence: Synthetic oligonucleotide
cgaacagauucauuuaaug

SEQ ID NO: 2380468 - RNA, 19 nt, Artificial Sequence
  Description of Artificial Sequence: Synthetic oligonucleotide
auggagugaaugugaguau

SEQ ID NO: 2380469 - RNA, 19 nt, Artificial Sequence
  Description of Artificial Sequence: Synthetic oligonucleotide
aagaaaggcuguagaugca

SEQ ID NO: 2380470 - RNA, 19 nt, Artificial Sequence
  Description of Artificial Sequence: Synthetic oligonucleotide
gcuuuuagaucacgcauga

SEQ ID NO: 2380471 - RNA, 19 nt, Artificial Sequence
  Description of Artificial Sequence: Synthetic oligonucleotide
gcauuaaugcaagugucac

SEQ ID NO: 2380472 - RNA, 19 nt, Artificial Sequence
  Description of Artificial Sequence: Synthetic oligonucleotide
uugcaaauauuaguuccuu

SEQ ID NO: 2380473 - RNA, 19 nt, Artificial Sequence
  Description of Artificial Sequence: Synthetic oligonucleotide
uauggcgaacagauucauu

SEQ ID NO: 2380474 - RNA, 19 nt, Artificial Sequence
  Description of Artificial Sequence: Synthetic oligonucleotide
ugcaagugucacacacagu

SEQ ID NO: 2380475 - RNA, 19 nt, Artificial Sequence
  Description of Artificial Sequence: Synthetic oligonucleotide
aagccgaaucaugaaguuu

SEQ ID NO: 2380476 - RNA, 19 nt, Artificial Sequence
  Description of Artificial Sequence: Synthetic oligonucleotide
cagaccaagcgaacaucac

SEQ ID NO: 2380477 - RNA, 19 nt, Artificial Sequence
  Description of Artificial Sequence: Synthetic oligonucleotide
agaucacgcaugaugguau

SEQ ID NO: 2380478 - RNA, 19 nt, Artificial Sequence
  Description of Artificial Sequence: Synthetic oligonucleotide
gccaaaagcaccaggcggc

SEQ ID NO: 2380479 - RNA, 19 nt, Artificial Sequence
  Description of Artificial Sequence: Synthetic oligonucleotide
ggcuguagaugcaauaaca

SEQ ID NO: 2380480 - RNA, 19 nt, Artificial Sequence
  Description of Artificial Sequence: Synthetic oligonucleotide
ucauugguuuccagugcuu

SEQ ID NO: 2380481 - RNA, 19 nt, Artificial Sequence
  Description of Artificial Sequence: Synthetic oligonucleotide
gcggcaaaucagcauugcg

SEQ ID NO: 2380482 - RNA, 19 nt, Artificial Sequence
  Description of Artificial Sequence: Synthetic oligonucleotide
ugcuuguauccagauucac

SEQ ID NO: 2380483 - RNA, 19 nt, Artificial Sequence
  Description of Artificial Sequence: Synthetic oligonucleotide
caaucucuuagcaaugcau

SEQ ID NO: 2380484 - RNA, 19 nt, Artificial Sequence
  Description of Artificial Sequence: Synthetic oligonucleotide
cuacuggaaugucuuguga

SEQ ID NO: 2380485 - RNA, 19 nt, Artificial Sequence
  Description of Artificial Sequence: Synthetic oligonucleotide
caggcucugaaagaaagaa

SEQ ID NO: 2380486 - RNA, 19 nt, Artificial Sequence
  Description of Artificial Sequence: Synthetic oligonucleotide
ucaagcucucgugcacgag

SEQ ID NO: 2380487 - RNA, 19 nt, Artificial Sequence
  Description of Artificial Sequence: Synthetic oligonucleotide
aggcgauuccucggcuucc

SEQ ID NO: 2380488 - RNA, 19 nt, Artificial Sequence
  Description of Artificial Sequence: Synthetic oligonucleotide
caaaggaaggauacaguau

SEQ ID NO: 2380489 - RNA, 19 nt, Artificial Sequence
  Description of Artificial Sequence: Synthetic oligonucleotide
cuccaaaccaaacgacgga

SEQ ID NO: 2380490 - RNA, 19 nt, Artificial Sequence
  Description of Artificial Sequence: Synthetic oligonucleotide
gugcacgagcucucauggg

SEQ ID NO: 2380491 - RNA, 19 nt, Artificial Sequence
  Description of Artificial Sequence: Synthetic oligonucleotide
acgacggacaaaacuucug

SEQ ID NO: 2380492 - RNA, 19 nt, Artificial Sequence
  Description of Artificial Sequence: Synthetic oligonucleotide
cgugcacgagcucucaugg

SEQ ID NO: 2380493 - RNA, 19 nt, Artificial Sequence
  Description of Artificial Sequence: Synthetic oligonucleotide
ggcgaacagauucauuuaa

SEQ ID NO: 2380494 - RNA, 19 nt, Artificial Sequence
  Description of Artificial Sequence: Synthetic oligonucleotide
gucccugcccugccaaaag

SEQ ID NO: 2380495 - RNA, 19 nt, Artificial Sequence
  Description of Artificial Sequence: Synthetic oligonucleotide
agcuguucuuucaggugag

SEQ ID NO: 2380496 - RNA, 19 nt, Artificial Sequence
  Description of Artificial Sequence: Synthetic oligonucleotide
agaugcaauaacagaccaa

SEQ ID NO: 2380497 - RNA, 19 nt, Artificial Sequence
  Description of Artificial Sequence: Synthetic oligonucleotide
accaaacgacggacaaaac

SEQ ID NO: 2380498 - RNA, 19 nt, Artificial Sequence
  Description of Artificial Sequence: Synthetic oligonucleotide
aagagccuugcgguuugga

SEQ ID NO: 2380499 - RNA, 19 nt, Artificial Sequence
  Description of Artificial Sequence: Synthetic oligonucleotide
caggcgauuccucggcuuc

SEQ ID NO: 2380500 - RNA, 19 nt, Artificial Sequence
  Description of Artificial Sequence: Synthetic oligonucleotide
ggccccacaaaucccaauc

SEQ ID NO: 2380501 - RNA, 19 nt, Artificial Sequence
  Description of Artificial Sequence: Synthetic oligonucleotide
acgagcucucaugggaaug

SEQ ID NO: 2380502 - RNA, 19 nt, Artificial Sequence
  Description of Artificial Sequence: Synthetic oligonucleotide
agaacuggauacacagcaa

SEQ ID NO: 2380503 - RNA, 19 nt, Artificial Sequence
  Description of Artificial Sequence: Synthetic oligonucleotide
cacaaaucccaaucucuua

SEQ ID NO: 2380504 - RNA, 19 nt, Artificial Sequence
  Description of Artificial Sequence: Synthetic oligonucleotide
uccccacagcuuuuagauc

SEQ ID NO: 2380505 - RNA, 19 nt, Artificial Sequence
  Description of Artificial Sequence: Synthetic oligonucleotide
aguuuugaauugaguguaa

SEQ ID NO: 2380506 - RNA, 19 nt, Artificial Sequence
  Description of Artificial Sequence: Synthetic oligonucleotide
cgacggacaaaacuucugc

SEQ ID NO: 2380507 - RNA, 19 nt, Artificial Sequence
  Description of Artificial Sequence: Synthetic oligonucleotide
gucuugugaaauugauaua

SEQ ID NO: 2380508 - RNA, 19 nt, Artificial Sequence
  Description of Artificial Sequence: Synthetic oligonucleotide
ugcccgccaagaaguuuug

SEQ ID NO: 2380509 - RNA, 19 nt, Artificial Sequence
  Description of Artificial Sequence: Synthetic oligonucleotide
gguauggcgaacagauuca

SEQ ID NO: 2380510 - RNA, 19 nt, Artificial Sequence
  Description of Artificial Sequence: Synthetic oligonucleotide
ggagaggggaagguuguug

SEQ ID NO: 2380511 - RNA, 19 nt, Artificial Sequence
  Description of Artificial Sequence: Synthetic oligonucleotide
caguauccaaggacgcaca

SEQ ID NO: 2380512 - RNA, 19 nt, Artificial Sequence
  Description of Artificial Sequence: Synthetic oligonucleotide
gcucucaugggaaugguaa

SEQ ID NO: 2380513 - RNA, 19 nt, Artificial Sequence
  Description of Artificial Sequence: Synthetic oligonucleotide
aaaugacaacagggcuaug

SEQ ID NO: 2380514 - RNA, 19 nt, Artificial Sequence
  Description of Artificial Sequence: Synthetic oligonucleotide
gucaagcucucgugcacga

SEQ ID NO: 2380515 - RNA, 19 nt, Artificial Sequence
  Description of Artificial Sequence: Synthetic oligonucleotide
guucuuucaggugagcuuu

SEQ ID NO: 2380516 - RNA, 19 nt, Artificial Sequence
  Description of Artificial Sequence: Synthetic oligonucleotide
guaaccgcuccaaaccaaa

SEQ ID NO: 2380517 - RNA, 19 nt, Artificial Sequence
  Description of Artificial Sequence: Synthetic oligonucleotide
ggagugaaugugaguauca

SEQ ID NO: 2380518 - RNA, 19 nt, Artificial Sequence
  Description of Artificial Sequence: Synthetic oligonucleotide
aguaaccgcuccaaaccaa

SEQ ID NO: 2380519 - RNA, 19 nt, Artificial Sequence
  Description of Artificial Sequence: Synthetic oligonucleotide
uguugcccgccaagaaguu

SEQ ID NO: 2380520 - RNA, 19 nt, Artificial Sequence
  Description of Artificial Sequence: Synthetic oligonucleotide
cagcuuuuagaucacgcau

SEQ ID NO: 2380521 - RNA, 19 nt, Artificial Sequence
  Description of Artificial Sequence: Synthetic oligonucleotide
aggacgcacaggcucugaa

SEQ ID NO: 2380522 - RNA, 19 nt, Artificial Sequence
  Description of Artificial Sequence: Synthetic oligonucleotide
cucucgugcacgagcucuc

SEQ ID NO: 2380523 - RNA, 19 nt, Artificial Sequence
  Description of Artificial Sequence: Synthetic oligonucleotide
ggccugaaaacaaaggccu

SEQ ID NO: 2380524 - RNA, 19 nt, Artificial Sequence
  Description of Artificial Sequence: Synthetic oligonucleotide
gggaaugguaaucucuccu

SEQ ID NO: 2380525 - RNA, 19 nt, Artificial Sequence
  Description of Artificial Sequence: Synthetic oligonucleotide
guuggcugucagcaagaaa

SEQ ID NO: 2380526 - RNA, 19 nt, Artificial Sequence
  Description of Artificial Sequence: Synthetic oligonucleotide
ucucgugcacgagcucuca

SEQ ID NO: 2380527 - RNA, 19 nt, Artificial Sequence
  Description of Artificial Sequence: Synthetic oligonucleotide
gcauugcgacagucaaagg

SEQ ID NO: 2380528 - RNA, 19 nt, Artificial Sequence
  Description of Artificial Sequence: Synthetic oligonucleotide
gcgacagucaaaggaagga

SEQ ID NO: 2380529 - RNA, 19 nt, Artificial Sequence
  Description of Artificial Sequence: Synthetic oligonucleotide
ccaaacgacggacaaaacu

SEQ ID NO: 2380530 - RNA, 19 nt, Artificial Sequence
  Description of Artificial Sequence: Synthetic oligonucleotide
gcaagagccuugcgguuug

SEQ ID NO: 2380531 - RNA, 19 nt, Artificial Sequence
  Description of Artificial Sequence: Synthetic oligonucleotide
guuuugaauugaguguaau

SEQ ID NO: 2380532 - RNA, 19 nt, Artificial Sequence
  Description of Artificial Sequence: Synthetic oligonucleotide
gcaaaucagcauugcgaca

SEQ ID NO: 2380533 - RNA, 19 nt, Artificial Sequence
  Description of Artificial Sequence: Synthetic oligonucleotide
ggacaaaacuucugcaaau

SEQ ID NO: 2380534 - RNA, 19 nt, Artificial Sequence
  Description of Artificial Sequence: Synthetic oligonucleotide
aaggacgcacaggcucuga

SEQ ID NO: 2380535 - RNA, 19 nt, Artificial Sequence
  Description of Artificial Sequence: Synthetic oligonucleotide
cggcaaaucagcauugcga

SEQ ID NO: 2380536 - RNA, 19 nt, Artificial Sequence
  Description of Artificial Sequence: Synthetic oligonucleotide
gauacacagcaagagccuu

SEQ ID NO: 2380537 - RNA, 19 nt, Artificial Sequence
  Description of Artificial Sequence: Synthetic oligonucleotide
uugcgguuuggagguuggc

SEQ ID NO: 2380538 - RNA, 19 nt, Artificial Sequence
  Description of Artificial Sequence: Synthetic oligonucleotide
aggcggcaaaucagcauug

SEQ ID NO: 2380539 - RNA, 19 nt, Artificial Sequence
  Description of Artificial Sequence: Synthetic oligonucleotide
ccaaaccaaacgacggaca

SEQ ID NO: 2380540 - RNA, 19 nt, Artificial Sequence
  Description of Artificial Sequence: Synthetic oligonucleotide
caguauuaaugggccccac

SEQ ID NO: 2380541 - RNA, 19 nt, Artificial Sequence
  Description of Artificial Sequence: Synthetic oligonucleotide
guuuggagguuggcuguca

SEQ ID NO: 2380542 - RNA, 19 nt, Artificial Sequence
  Description of Artificial Sequence: Synthetic oligonucleotide
ccaagaaguuuugaauuga

SEQ ID NO: 2380543 - RNA, 19 nt, Artificial Sequence
  Description of Artificial Sequence: Synthetic oligonucleotide
cgauuccucggcuuccgcc

SEQ ID NO: 2380544 - RNA, 19 nt, Artificial Sequence
  Description of Artificial Sequence: Synthetic oligonucleotide
gcuuucaguucauugguuu

SEQ ID NO: 2380545 - RNA, 19 nt, Artificial Sequence
  Description of Artificial Sequence: Synthetic oligonucleotide
agcuuucaguucauugguu

SEQ ID NO: 2380546 - RNA, 19 nt, Artificial Sequence
  Description of Artificial Sequence: Synthetic oligonucleotide
gucagcaagaaaggcugua

SEQ ID NO: 2380547 - RNA, 19 nt, Artificial Sequence
  Description of Artificial Sequence: Synthetic oligonucleotide
ggcgauuccucggcuuccg

SEQ ID NO: 2380548 - RNA, 19 nt, Artificial Sequence
  Description of Artificial Sequence: Synthetic oligonucleotide
caggcggcaaaucagcauu

SEQ ID NO: 2380549 - RNA, 19 nt, Artificial Sequence
  Description of Artificial Sequence: Synthetic oligonucleotide
caagagccuugcgguuugg

SEQ ID NO: 2380550 - RNA, 19 nt, Artificial Sequence
  Description of Artificial Sequence: Synthetic oligonucleotide
acagggcuauggggcuccc

SEQ ID NO: 2380551 - RNA, 19 nt, Artificial Sequence
  Description of Artificial Sequence: Synthetic oligonucleotide
cccugccaaaagcaccagg

SEQ ID NO: 2380552 - RNA, 19 nt, Artificial Sequence
  Description of Artificial Sequence: Synthetic oligonucleotide
caaggacgcacaggcucug

SEQ ID NO: 2380553 - RNA, 19 nt, Artificial Sequence
  Description of Artificial Sequence: Synthetic oligonucleotide
ccaaucucuuagcaaugca

SEQ ID NO: 2380554 - RNA, 19 nt, Artificial Sequence
  Description of Artificial Sequence: Synthetic oligonucleotide
gcuuguauccagauucacu

SEQ ID NO: 2380555 - RNA, 19 nt, Artificial Sequence
  Description of Artificial Sequence: Synthetic oligonucleotide
ccgcuccaaaccaaacgac

SEQ ID NO: 2380556 - RNA, 19 nt, Artificial Sequence
  Description of Artificial Sequence: Synthetic oligonucleotide
cucucaugggaaugguaau

SEQ ID NO: 2380557 - RNA, 19 nt, Artificial Sequence
  Description of Artificial Sequence: Synthetic oligonucleotide
ggacgcacaggcucugaaa

SEQ ID NO: 2380558 - RNA, 19 nt, Artificial Sequence
  Description of Artificial Sequence: Synthetic oligonucleotide
cagauucacuauggaguga

SEQ ID NO: 2380559 - RNA, 19 nt, Artificial Sequence
  Description of Artificial Sequence: Synthetic oligonucleotide
ggcggcaaaucagcauugc

SEQ ID NO: 2380560 - RNA, 19 nt, Artificial Sequence
  Description of Artificial Sequence: Synthetic oligonucleotide
ggauacacagcaagagccu

SEQ ID NO: 2380561 - RNA, 19 nt, Artificial Sequence
  Description of Artificial Sequence: Synthetic oligonucleotide
cccgccaagaaguuuugaa

SEQ ID NO: 2380562 - RNA, 19 nt, Artificial Sequence
  Description of Artificial Sequence: Synthetic oligonucleotide
gcucuuuuguagcauuaau

SEQ ID NO: 2380563 - RNA, 19 nt, Artificial Sequence
  Description of Artificial Sequence: Synthetic oligonucleotide
agcucucaugggaauggua

SEQ ID NO: 2380564 - RNA, 19 nt, Artificial Sequence
  Description of Artificial Sequence: Synthetic oligonucleotide
aucucuccuucuacuggaa

SEQ ID NO: 2380565 - RNA, 19 nt, Artificial Sequence
  Description of Artificial Sequence: Synthetic oligonucleotide
ccacagcuuuuagaucacg

SEQ ID NO: 2380566 - RNA, 19 nt, Artificial Sequence
  Description of Artificial Sequence: Synthetic oligonucleotide
cggacaaaacuucugcaaa

SEQ ID NO: 2380567 - RNA, 19 nt, Artificial Sequence
  Description of Artificial Sequence: Synthetic oligonucleotide
ccuucuacuggaaugucuu

SEQ ID NO: 2380568 - RNA, 19 nt, Artificial Sequence
  Description of Artificial Sequence: Synthetic oligonucleotide
augguauggcgaacagauu

SEQ ID NO: 2380569 - RNA, 19 nt, Artificial Sequence
  Description of Artificial Sequence: Synthetic oligonucleotide
gcuguucuuucaggugagc

SEQ ID NO: 2380570 - RNA, 19 nt, Artificial Sequence
  Description of Artificial Sequence: Synthetic oligonucleotide
gccucggcaucccugccuc

SEQ ID NO: 2380571 - RNA, 19 nt, Artificial Sequence
  Description of Artificial Sequence: Synthetic oligonucleotide
guauggcgaacagauucau

SEQ ID NO: 2380572 - RNA, 19 nt, Artificial Sequence
  Description of Artificial Sequence: Synthetic oligonucleotide
gcaaugcauuacuuuuccu

SEQ ID NO: 2380573 - RNA, 19 nt, Artificial Sequence
  Description of Artificial Sequence: Synthetic oligonucleotide
gguuuggagguuggcuguc

SEQ ID NO: 2380574 - RNA, 19 nt, Artificial Sequence
  Description of Artificial Sequence: Synthetic oligonucleotide
gccugaaaacaaaggccuc

SEQ ID NO: 2380575 - RNA, 19 nt, Artificial Sequence
  Description of Artificial Sequence: Synthetic oligonucleotide
gauucacuauggagugaau

SEQ ID NO: 2380576 - RNA, 19 nt, Artificial Sequence
  Description of Artificial Sequence: Synthetic oligonucleotide
ccuugcgguuuggagguug

SEQ ID NO: 2380577 - RNA, 19 nt, Artificial Sequence
  Description of Artificial Sequence: Synthetic oligonucleotide
cgcaugaugguauggcgaa

SEQ ID NO: 2380578 - RNA, 19 nt, Artificial Sequence
  Description of Artificial Sequence: Synthetic oligonucleotide
gcaugaugguauggcgaac

SEQ ID NO: 2380579 - RNA, 19 nt, Artificial Sequence
  Description of Artificial Sequence: Synthetic oligonucleotide
gcgauuccucggcuuccgc

SEQ ID NO: 2380580 - RNA, 19 nt, Artificial Sequence
  Description of Artificial Sequence: Synthetic oligonucleotide
cuccuguucuccaggcgau

SEQ ID NO: 2380581 - RNA, 19 nt, Artificial Sequence
  Description of Artificial Sequence: Synthetic oligonucleotide
gcucucgugcacgagcucu

SEQ ID NO: 2380582 - RNA, 19 nt, Artificial Sequence
  Description of Artificial Sequence: Synthetic oligonucleotide
ccgccaagaaguuuugaau

SEQ ID NO: 2380583 - RNA, 19 nt, Artificial Sequence
  Description of Artificial Sequence: Synthetic oligonucleotide
ccaagcgaacaucaccacu

SEQ ID NO: 2380584 - RNA, 19 nt, Artificial Sequence
  Description of Artificial Sequence: Synthetic oligonucleotide
gcacgagcucucaugggaa

SEQ ID NO: 2380585 - RNA, 19 nt, Artificial Sequence
  Description of Artificial Sequence: Synthetic oligonucleotide
ccaaggacgcacaggcucu

SEQ ID NO: 2380586 - RNA, 19 nt, Artificial Sequence
  Description of Artificial Sequence: Synthetic oligonucleotide
cacgagcucucaugggaau

SEQ ID NO: 2380587 - RNA, 19 nt, Artificial Sequence
  Description of Artificial Sequence: Synthetic oligonucleotide
cuuuuagaucacgcaugau

SEQ ID NO: 2380588 - RNA, 19 nt, Artificial Sequence
  Description of Artificial Sequence: Synthetic oligonucleotide
cgccaagaaguuuugaauu

SEQ ID NO: 2380589 - RNA, 19 nt, Artificial Sequence
  Description of Artificial Sequence: Synthetic oligonucleotide
gcgaacagauucauuuaau

SEQ ID NO: 2380590 - RNA, 19 nt, Artificial Sequence
  Description of Artificial Sequence: Synthetic oligonucleotide
caagggagaggggaagguu

SEQ ID NO: 2380591 - RNA, 19 nt, Artificial Sequence
  Description of Artificial Sequence: Synthetic oligonucleotide
ccaaaagcaccaggcggca

SEQ ID NO: 2380592 - RNA, 19 nt, Artificial Sequence
  Description of Artificial Sequence: Synthetic oligonucleotide
ggucccugcccugccaaaa

SEQ ID NO: 2380593 - RNA, 19 nt, Artificial Sequence
  Description of Artificial Sequence: Synthetic oligonucleotide
caaaggccucggcaucccu

SEQ ID NO: 2380594 - RNA, 19 nt, Artificial Sequence
  Description of Artificial Sequence: Synthetic oligonucleotide
ggcuauggggcucccuuuu

SEQ ID NO: 2380595 - RNA, 19 nt, Artificial Sequence
  Description of Artificial Sequence: Synthetic oligonucleotide
guugcccgccaagaaguuu

SEQ ID NO: 2380596 - RNA, 19 nt, Artificial Sequence
  Description of Artificial Sequence: Synthetic oligonucleotide
cagcaagagccuugcgguu

SEQ ID NO: 2380597 - RNA, 19 nt, Artificial Sequence
  Description of Artificial Sequence: Synthetic oligonucleotide
ccagugcuuguauccagau

SEQ ID NO: 2380598 - RNA, 19 nt, Artificial Sequence
  Description of Artificial Sequence: Synthetic oligonucleotide
cucgugcacgagcucucau

SEQ ID NO: 2380599 - RNA, 19 nt, Artificial Sequence
  Description of Artificial Sequence: Synthetic oligonucleotide
ccaggcggcaaaucagcau

SEQ ID NO: 2380600 - RNA, 19 nt, Artificial Sequence
  Description of Artificial Sequence: Synthetic oligonucleotide
gccgaaucaugaaguuuau

SEQ ID NO: 2380601 - RNA, 19 nt, Artificial Sequence
  Description of Artificial Sequence: Synthetic oligonucleotide
gcccgccaagaaguuuuga

SEQ ID NO: 2380602 - RNA, 19 nt, Artificial Sequence
  Description of Artificial Sequence: Synthetic oligonucleotide
gggcuauggggcucccuuu

SEQ ID NO: 2380603 - RNA, 19 nt, Artificial Sequence
  Description of Artificial Sequence: Synthetic oligonucleotide
cgguuuggagguuggcugu

SEQ ID NO: 2380604 - RNA, 19 nt, Artificial Sequence
  Description of Artificial Sequence: Synthetic oligonucleotide
cgacagucaaaggaaggau

SEQ ID NO: 2380605 - RNA, 19 nt, Artificial Sequence
  Description of Artificial Sequence: Synthetic oligonucleotide
gggccccacaaaucccaau

SEQ ID NO: 2380606 - RNA, 19 nt, Artificial Sequence
  Description of Artificial Sequence: Synthetic oligonucleotide
ccaggcgauuccucggcuu

SEQ ID NO: 2380607 - RNA, 19 nt, Artificial Sequence
  Description of Artificial Sequence: Synthetic oligonucleotide
cagggcuauggggcucccu

SEQ ID NO: 2380608 - RNA, 19 nt, Artificial Sequence
  Description of Artificial Sequence: Synthetic oligonucleotide
ccgaaucaugaaguuuauu

SEQ ID NO: 2380609 - RNA, 19 nt, Artificial Sequence
  Description of Artificial Sequence: Synthetic oligonucleotide
gccuugcgguuuggagguu

SEQ ID NO: 2380610 - RNA, 19 nt, Artificial Sequence
  Description of Artificial Sequence: Synthetic oligonucleotide
accauuacaaaauguaugc

SEQ ID NO: 2380611 - RNA, 19 nt, Artificial Sequence
  Description of Artificial Sequence: Synthetic oligonucleotide
aauaggauguaacugagca

SEQ ID NO: 2380612 - RNA, 19 nt, Artificial Sequence
  Description of Artificial Sequence: Synthetic oligonucleotide
uuuuguaucgauuuguucu

SEQ ID NO: 2380613 - RNA, 19 nt, Artificial Sequence
  Description of Artificial Sequence: Synthetic oligonucleotide
uguuugacuacuaugagcu

SEQ ID NO: 2380614 - RNA, 19 nt, Artificial Sequence
  Description of Artificial Sequence: Synthetic oligonucleotide
aauaauaucgccugucugu

SEQ ID NO: 2380615 - RNA, 19 nt, Artificial Sequence
  Description of Artificial Sequence: Synthetic oligonucleotide
uaaguauucaaguaggaca

SEQ ID NO: 2380616 - RNA, 19 nt, Artificial Sequence
  Description of Artificial Sequence: Synthetic oligonucleotide
aaauguaugcagaagacuc

SEQ ID NO: 2380617 - RNA, 19 nt, Artificial Sequence
  Description of Artificial Sequence: Synthetic oligonucleotide
uagguuaucuuuuaaaggc

SEQ ID NO: 2380618 - RNA, 19 nt, Artificial Sequence
  Description of Artificial Sequence: Synthetic oligonucleotide
gaugauauccccuugacuc

SEQ ID NO: 2380619 - RNA, 19 nt, Artificial Sequence
  Description of Artificial Sequence: Synthetic oligonucleotide
aacuacaugaaucucuuug

SEQ ID NO: 2380620 - RNA, 19 nt, Artificial Sequence
  Description of Artificial Sequence: Synthetic oligonucleotide
ucaagugauacccaguaag

SEQ ID NO: 2380621 - RNA, 19 nt, Artificial Sequence
  Description of Artificial Sequence: Synthetic oligonucleotide
uaaauaaaagugcacuaag

SEQ ID NO: 2380622 - RNA, 19 nt, Artificial Sequence
  Description of Artificial Sequence: Synthetic oligonucleotide
uccacauugaugcauaccc

SEQ ID NO: 2380623 - RNA, 19 nt, Artificial Sequence
  Description of Artificial Sequence: Synthetic oligonucleotide
aguagcucacccuugaaac

SEQ ID NO: 2380624 - RNA, 19 nt, Artificial Sequence
  Description of Artificial Sequence: Synthetic oligonucleotide
aauaaaagugcacuaagua

SEQ ID NO: 2380625 - RNA, 19 nt, Artificial Sequence
  Description of Artificial Sequence: Synthetic oligonucleotide
gaaauagugaugcuucccg

SEQ ID NO: 2380626 - RNA, 19 nt, Artificial Sequence
  Description of Artificial Sequence: Synthetic oligonucleotide
uguuucuaccaguauaugg

SEQ ID NO: 2380627 - RNA, 19 nt, Artificial Sequence
  Description of Artificial Sequence: Synthetic oligonucleotide
ugaaauuuggcacuucuga

SEQ ID NO: 2380628 - RNA, 19 nt, Artificial Sequence
  Description of Artificial Sequence: Synthetic oligonucleotide
aaacgaauaauaucgccug

SEQ ID NO: 2380629 - RNA, 19 nt, Artificial Sequence
  Description of Artificial Sequence: Synthetic oligonucleotide
aaguauucaaguaggacac

SEQ ID NO: 2380630 - RNA, 19 nt, Artificial Sequence
  Description of Artificial Sequence: Synthetic oligonucleotide
agguuuucaagugauaccc

SEQ ID NO: 2380631 - RNA, 19 nt, Artificial Sequence
  Description of Artificial Sequence: Synthetic oligonucleotide
uucaauaggauguaacuga

SEQ ID NO: 2380632 - RNA, 19 nt, Artificial Sequence
  Description of Artificial Sequence: Synthetic oligonucleotide
ggucaaacgaauaauaucg

SEQ ID NO: 2380633 - RNA, 19 nt, Artificial Sequence
  Description of Artificial Sequence: Synthetic oligonucleotide
agugauacccaguaaguuc

SEQ ID NO: 2380634 - RNA, 19 nt, Artificial Sequence
  Description of Artificial Sequence: Synthetic oligonucleotide
uucacaguuaaccauaaau

SEQ ID NO: 2380635 - RNA, 19 nt, Artificial Sequence
  Description of Artificial Sequence: Synthetic oligonucleotide
uaaaagugcacuaaguauu

SEQ ID NO: 2380636 - RNA, 19 nt, Artificial Sequence
  Description of Artificial Sequence: Synthetic oligonucleotide
aagaugauauccccuugac

SEQ ID NO: 2380637 - RNA, 19 nt, Artificial Sequence
  Description of Artificial Sequence: Synthetic oligonucleotide
cuaucagcuaccuugcagg

SEQ ID NO: 2380638 - RNA, 19 nt, Artificial Sequence
  Description of Artificial Sequence: Synthetic oligonucleotide
uaucgauuuguucugcugc

SEQ ID NO: 2380639 - RNA, 19 nt, Artificial Sequence
  Description of Artificial Sequence: Synthetic oligonucleotide
aauaucgccugucuguaug

SEQ ID NO: 2380640 - RNA, 19 nt, Artificial Sequence
  Description of Artificial Sequence: Synthetic oligonucleotide
uacaccauacaaaauuccc

SEQ ID NO: 2380641 - RNA, 19 nt, Artificial Sequence
  Description of Artificial Sequence: Synthetic oligonucleotide
ucuaccaguauauggaaga

SEQ ID NO: 2380642 - RNA, 19 nt, Artificial Sequence
  Description of Artificial Sequence: Synthetic oligonucleotide
auucaaguaggacacguag

SEQ ID NO: 2380643 - RNA, 19 nt, Artificial Sequence
  Description of Artificial Sequence: Synthetic oligonucleotide
auaaaagugcacuaaguau

SEQ ID NO: 2380644 - RNA, 19 nt, Artificial Sequence
  Description of Artificial Sequence: Synthetic oligonucleotide
aacuuuucacaguuaacca

SEQ ID NO: 2380645 - RNA, 19 nt, Artificial Sequence
  Description of Artificial Sequence: Synthetic oligonucleotide
uucugaauacaccauacaa

SEQ ID NO: 2380646 - RNA, 19 nt, Artificial Sequence
  Description of Artificial Sequence: Synthetic oligonucleotide
uaggauguaacugagcagc

SEQ ID NO: 2380647 - RNA, 19 nt, Artificial Sequence
  Description of Artificial Sequence: Synthetic oligonucleotide
uccaguauaaagugucagg

SEQ ID NO: 2380648 - RNA, 19 nt, Artificial Sequence
  Description of Artificial Sequence: Synthetic oligonucleotide
uauaaucuggguuuggcuc

SEQ ID NO: 2380649 - RNA, 19 nt, Artificial Sequence
  Description of Artificial Sequence: Synthetic oligonucleotide
ucacaguuaaccauaaaua

SEQ ID NO: 2380650 - RNA, 19 nt, Artificial Sequence
  Description of Artificial Sequence: Synthetic oligonucleotide
uguaugagcccuccgaucu

SEQ ID NO: 2380651 - RNA, 19 nt, Artificial Sequence
  Description of Artificial Sequence: Synthetic oligonucleotide
ucaauaggauguaacugag

SEQ ID NO: 2380652 - RNA, 19 nt, Artificial Sequence
  Description of Artificial Sequence: Synthetic oligonucleotide
ucacccuugaaacagggac

SEQ ID NO: 2380653 - RNA, 19 nt, Artificial Sequence
  Description of Artificial Sequence: Synthetic oligonucleotide
ucaaacgaauaauaucgcc

SEQ ID NO: 2380654 - RNA, 19 nt, Artificial Sequence
  Description of Artificial Sequence: Synthetic oligonucleotide
aggaucucacuucauggcc

SEQ ID NO: 2380655 - RNA, 19 nt, Artificial Sequence
  Description of Artificial Sequence: Synthetic oligonucleotide
ucuuccaguauaaaguguc

SEQ ID NO: 2380656 - RNA, 19 nt, Artificial Sequence
  Description of Artificial Sequence: Synthetic oligonucleotide
acuacuaugagcuccugga

SEQ ID NO: 2380657 - RNA, 19 nt, Artificial Sequence
  Description of Artificial Sequence: Synthetic oligonucleotide
uuugcaacuggcccaagug

SEQ ID NO: 2380658 - RNA, 19 nt, Artificial Sequence
  Description of Artificial Sequence: Synthetic oligonucleotide
aaccauuacaaaauguaug

SEQ ID NO: 2380659 - RNA, 19 nt, Artificial Sequence
  Description of Artificial Sequence: Synthetic oligonucleotide
guaugcagaagacucacag

SEQ ID NO: 2380660 - RNA, 19 nt, Artificial Sequence
  Description of Artificial Sequence: Synthetic oligonucleotide
uacuaugagcuccuggaag

SEQ ID NO: 2380661 - RNA, 19 nt, Artificial Sequence
  Description of Artificial Sequence: Synthetic oligonucleotide
uuuguaucgauuuguucug

SEQ ID NO: 2380662 - RNA, 19 nt, Artificial Sequence
  Description of Artificial Sequence: Synthetic oligonucleotide
aauuuggcacuucugaaua

SEQ ID NO: 2380663 - RNA, 19 nt, Artificial Sequence
  Description of Artificial Sequence: Synthetic oligonucleotide
acagaaauagugaugcuuc

SEQ ID NO: 2380664 - RNA, 19 nt, Artificial Sequence
  Description of Artificial Sequence: Synthetic oligonucleotide
aucgauuuguucugcugcc

SEQ ID NO: 2380665 - RNA, 19 nt, Artificial Sequence
  Description of Artificial Sequence: Synthetic oligonucleotide
gaagcuguugauugauggg

SEQ ID NO: 2380666 - RNA, 19 nt, Artificial Sequence
  Description of Artificial Sequence: Synthetic oligonucleotide
ugucguaaguagcucaccc

SEQ ID NO: 2380667 - RNA, 19 nt, Artificial Sequence
  Description of Artificial Sequence: Synthetic oligonucleotide
aaauguucccgcuuucaga

SEQ ID NO: 2380668 - RNA, 19 nt, Artificial Sequence
  Description of Artificial Sequence: Synthetic oligonucleotide
gauguaacugagcagcuca

SEQ ID NO: 2380669 - RNA, 19 nt, Artificial Sequence
  Description of Artificial Sequence: Synthetic oligonucleotide
aaaauaaauguucccgcuu

SEQ ID NO: 2380670 - RNA, 19 nt, Artificial Sequence
  Description of Artificial Sequence: Synthetic oligonucleotide
ucugcugcccuuuauaauc

SEQ ID NO: 2380671 - RNA, 19 nt, Artificial Sequence
  Description of Artificial Sequence: Synthetic oligonucleotide
uuuauaaucuggguuuggc

SEQ ID NO: 2380672 - RNA, 19 nt, Artificial Sequence
  Description of Artificial Sequence: Synthetic oligonucleotide
ucaucccaaacagaaauag

SEQ ID NO: 2380673 - RNA, 19 nt, Artificial Sequence
  Description of Artificial Sequence: Synthetic oligonucleotide
gaugcauacccucugguca

SEQ ID NO: 2380674 - RNA, 19 nt, Artificial Sequence
  Description of Artificial Sequence: Synthetic oligonucleotide
ucgccugucuguaugagcc

SEQ ID NO: 2380675 - RNA, 19 nt, Artificial Sequence
  Description of Artificial Sequence: Synthetic oligonucleotide
caaaauguaugcagaagac

SEQ ID NO: 2380676 - RNA, 19 nt, Artificial Sequence
  Description of Artificial Sequence: Synthetic oligonucleotide
aguuccuauucuucaauag

SEQ ID NO: 2380677 - RNA, 19 nt, Artificial Sequence
  Description of Artificial Sequence: Synthetic oligonucleotide
accgaugcucacucuaucc

SEQ ID NO: 2380678 - RNA, 19 nt, Artificial Sequence
  Description of Artificial Sequence: Synthetic oligonucleotide
agaaauagugaugcuuccc

SEQ ID NO: 2380679 - RNA, 19 nt, Artificial Sequence
  Description of Artificial Sequence: Synthetic oligonucleotide
aguauauggaagaugauau

SEQ ID NO: 2380680 - RNA, 19 nt, Artificial Sequence
  Description of Artificial Sequence: Synthetic oligonucleotide
aaguucaccaccucuucca

SEQ ID NO: 2380681 - RNA, 19 nt, Artificial Sequence
  Description of Artificial Sequence: Synthetic oligonucleotide
uuucaagugauacccagua

SEQ ID NO: 2380682 - RNA, 19 nt, Artificial Sequence
  Description of Artificial Sequence: Synthetic oligonucleotide
auagugaugcuucccguuc

SEQ ID NO: 2380683 - RNA, 19 nt, Artificial Sequence
  Description of Artificial Sequence: Synthetic oligonucleotide
gaauaauaucgccugucug

SEQ ID NO: 2380684 - RNA, 19 nt, Artificial Sequence
  Description of Artificial Sequence: Synthetic oligonucleotide
acaccauacaaaauucccc

SEQ ID NO: 2380685 - RNA, 19 nt, Artificial Sequence
  Description of Artificial Sequence: Synthetic oligonucleotide
guuuucaagugauacccag

SEQ ID NO: 2380686 - RNA, 19 nt, Artificial Sequence
  Description of Artificial Sequence: Synthetic oligonucleotide
auugaugcauacccucugg

SEQ ID NO: 2380687 - RNA, 19 nt, Artificial Sequence
  Description of Artificial Sequence: Synthetic oligonucleotide
ucaaguaggacacguaguu

SEQ ID NO: 2380688 - RNA, 19 nt, Artificial Sequence
  Description of Artificial Sequence: Synthetic oligonucleotide
uuauaaucuggguuuggcu

SEQ ID NO: 2380689 - RNA, 19 nt, Artificial Sequence
  Description of Artificial Sequence: Synthetic oligonucleotide
aguguaccgaugcucacuc

SEQ ID NO: 2380690 - RNA, 19 nt, Artificial Sequence
  Description of Artificial Sequence: Synthetic oligonucleotide
acuuauuguggucaugacu

SEQ ID NO: 2380691 - RNA, 19 nt, Artificial Sequence
  Description of Artificial Sequence: Synthetic oligonucleotide
caguuaaccauaaauaaaa

SEQ ID NO: 2380692 - RNA, 19 nt, Artificial Sequence
  Description of Artificial Sequence: Synthetic oligonucleotide
ucagcuaccuugcaggauc

SEQ ID NO: 2380693 - RNA, 19 nt, Artificial Sequence
  Description of Artificial Sequence: Synthetic oligonucleotide
cuguuugacuacuaugagc

SEQ ID NO: 2380694 - RNA, 19 nt, Artificial Sequence
  Description of Artificial Sequence: Synthetic oligonucleotide
uaaagugucaggcauccuu

SEQ ID NO: 2380695 - RNA, 19 nt, Artificial Sequence
  Description of Artificial Sequence: Synthetic oligonucleotide
aaauagugaugcuucccgu

SEQ ID NO: 2380696 - RNA, 19 nt, Artificial Sequence
  Description of Artificial Sequence: Synthetic oligonucleotide
ucuggucaaacgaauaaua

SEQ ID NO: 2380697 - RNA, 19 nt, Artificial Sequence
  Description of Artificial Sequence: Synthetic oligonucleotide
acaugaaucucuuuggcuu

SEQ ID NO: 2380698 - RNA, 19 nt, Artificial Sequence
  Description of Artificial Sequence: Synthetic oligonucleotide
gacuguuugacuacuauga

SEQ ID NO: 2380699 - RNA, 19 nt, Artificial Sequence
  Description of Artificial Sequence: Synthetic oligonucleotide
uuggcucacugaaauuugg

SEQ ID NO: 2380700 - RNA, 19 nt, Artificial Sequence
  Description of Artificial Sequence: Synthetic oligonucleotide
ugacuguuugacuacuaug

SEQ ID NO: 2380701 - RNA, 19 nt, Artificial Sequence
  Description of Artificial Sequence: Synthetic oligonucleotide
ggaagcuguugauugaugg

SEQ ID NO: 2380702 - RNA, 19 nt, Artificial Sequence
  Description of Artificial Sequence: Synthetic oligonucleotide
accaguauauggaagauga

SEQ ID NO: 2380703 - RNA, 19 nt, Artificial Sequence
  Description of Artificial Sequence: Synthetic oligonucleotide
ugauugauggguucccagc

SEQ ID NO: 2380704 - RNA, 19 nt, Artificial Sequence
  Description of Artificial Sequence: Synthetic oligonucleotide
ugaaauguuagggcaacca

SEQ ID NO: 2380705 - RNA, 19 nt, Artificial Sequence
  Description of Artificial Sequence: Synthetic oligonucleotide
uccgaucucaucccaaaca

SEQ ID NO: 2380706 - RNA, 19 nt, Artificial Sequence
  Description of Artificial Sequence: Synthetic oligonucleotide
auacaccauacaaaauucc

SEQ ID NO: 2380707 - RNA, 19 nt, Artificial Sequence
  Description of Artificial Sequence: Synthetic oligonucleotide
ucauuuuguaucgauuugu

SEQ ID NO: 2380708 - RNA, 19 nt, Artificial Sequence
  Description of Artificial Sequence: Synthetic oligonucleotide
uggucaaacgaauaauauc

SEQ ID NO: 2380709 - RNA, 19 nt, Artificial Sequence
  Description of Artificial Sequence: Synthetic oligonucleotide
ugcagaagacucacagagg

SEQ ID NO: 2380710 - RNA, 19 nt, Artificial Sequence
  Description of Artificial Sequence: Synthetic oligonucleotide
auaaauaaaagugcacuaa

SEQ ID NO: 2380711 - RNA, 19 nt, Artificial Sequence
  Description of Artificial Sequence: Synthetic oligonucleotide
aacagaaauagugaugcuu

SEQ ID NO: 2380712 - RNA, 19 nt, Artificial Sequence
  Description of Artificial Sequence: Synthetic oligonucleotide
uuuaaaggcucuucucgga

SEQ ID NO: 2380713 - RNA, 19 nt, Artificial Sequence
  Description of Artificial Sequence: Synthetic oligonucleotide
uucuaccaguauauggaag

SEQ ID NO: 2380714 - RNA, 19 nt, Artificial Sequence
  Description of Artificial Sequence: Synthetic oligonucleotide
uacaugaaucucuuuggcu

SEQ ID NO: 2380715 - RNA, 19 nt, Artificial Sequence
  Description of Artificial Sequence: Synthetic oligonucleotide
acuucugaauacaccauac

SEQ ID NO: 2380716 - RNA, 19 nt, Artificial Sequence
  Description of Artificial Sequence: Synthetic oligonucleotide
aauguuagggcaaccauua

SEQ ID NO: 2380717 - RNA, 19 nt, Artificial Sequence
  Description of Artificial Sequence: Synthetic oligonucleotide
aagugcacuaaguauucaa

SEQ ID NO: 2380718 - RNA, 19 nt, Artificial Sequence
  Description of Artificial Sequence: Synthetic oligonucleotide
aaucucuuuggcuuagguu

SEQ ID NO: 2380719 - RNA, 19 nt, Artificial Sequence
  Description of Artificial Sequence: Synthetic oligonucleotide
auaggauguaacugagcag

SEQ ID NO: 2380720 - RNA, 19 nt, Artificial Sequence
  Description of Artificial Sequence: Synthetic oligonucleotide
gaggcuauaaagcuggugu

SEQ ID NO: 2380721 - RNA, 19 nt, Artificial Sequence
  Description of Artificial Sequence: Synthetic oligonucleotide
uuuucaagugauacccagu

SEQ ID NO: 2380722 - RNA, 19 nt, Artificial Sequence
  Description of Artificial Sequence: Synthetic oligonucleotide
uucaaguaggacacguagu

SEQ ID NO: 2380723 - RNA, 19 nt, Artificial Sequence
  Description of Artificial Sequence: Synthetic oligonucleotide
uucccguucuaucagcuac

SEQ ID NO: 2380724 - RNA, 19 nt, Artificial Sequence
  Description of Artificial Sequence: Synthetic oligonucleotide
acuguuugacuacuaugag

SEQ ID NO: 2380725 - RNA, 19 nt, Artificial Sequence
  Description of Artificial Sequence: Synthetic oligonucleotide
aauagugaugcuucccguu

SEQ ID NO: 2380726 - RNA, 19 nt, Artificial Sequence
  Description of Artificial Sequence: Synthetic oligonucleotide
guuucuaccaguauaugga

SEQ ID NO: 2380727 - RNA, 19 nt, Artificial Sequence
  Description of Artificial Sequence: Synthetic oligonucleotide
cacuucauggccaucuuug

SEQ ID NO: 2380728 - RNA, 19 nt, Artificial Sequence
  Description of Artificial Sequence: Synthetic oligonucleotide
auuuggcacuucugaauac

SEQ ID NO: 2380729 - RNA, 19 nt, Artificial Sequence
  Description of Artificial Sequence: Synthetic oligonucleotide
aagcuguugauugaugggu

SEQ ID NO: 2380730 - RNA, 19 nt, Artificial Sequence
  Description of Artificial Sequence: Synthetic oligonucleotide
cuucaauaggauguaacug

SEQ ID NO: 2380731 - RNA, 19 nt, Artificial Sequence
  Description of Artificial Sequence: Synthetic oligonucleotide
aaguagcucacccuugaaa

SEQ ID NO: 2380732 - RNA, 19 nt, Artificial Sequence
  Description of Artificial Sequence: Synthetic oligonucleotide
gacuacuaugagcuccugg

SEQ ID NO: 2380733 - RNA, 19 nt, Artificial Sequence
  Description of Artificial Sequence: Synthetic oligonucleotide
cuacaugaaucucuuuggc

SEQ ID NO: 2380734 - RNA, 19 nt, Artificial Sequence
  Description of Artificial Sequence: Synthetic oligonucleotide
aaccaaccauucuucuuag

SEQ ID NO: 2380735 - RNA, 19 nt, Artificial Sequence
  Description of Artificial Sequence: Synthetic oligonucleotide
gagcccuccgaucucaucc

SEQ ID NO: 2380736 - RNA, 19 nt, Artificial Sequence
  Description of Artificial Sequence: Synthetic oligonucleotide
cuaaguauucaaguaggac

SEQ ID NO: 2380737 - RNA, 19 nt, Artificial Sequence
  Description of Artificial Sequence: Synthetic oligonucleotide
gcagaagacucacagaggc

SEQ ID NO: 2380738 - RNA, 19 nt, Artificial Sequence
  Description of Artificial Sequence: Synthetic oligonucleotide
aacgaauaauaucgccugu

SEQ ID NO: 2380739 - RNA, 19 nt, Artificial Sequence
  Description of Artificial Sequence: Synthetic oligonucleotide
ucugaacaccauuugcaac

SEQ ID NO: 2380740 - RNA, 19 nt, Artificial Sequence
  Description of Artificial Sequence: Synthetic oligonucleotide
gaaguucaccaccucuucc

SEQ ID NO: 2380741 - RNA, 19 nt, Artificial Sequence
  Description of Artificial Sequence: Synthetic oligonucleotide
gaaauuuggcacuucugaa

SEQ ID NO: 2380742 - RNA, 19 nt, Artificial Sequence
  Description of Artificial Sequence: Synthetic oligonucleotide
auaaagcuggugucguaag

SEQ ID NO: 2380743 - RNA, 19 nt, Artificial Sequence
  Description of Artificial Sequence: Synthetic oligonucleotide
uauaaagcuggugucguaa

SEQ ID NO: 2380744 - RNA, 19 nt, Artificial Sequence
  Description of Artificial Sequence: Synthetic oligonucleotide
cagguuuucaagugauacc

SEQ ID NO: 2380745 - RNA, 19 nt, Artificial Sequence
  Description of Artificial Sequence: Synthetic oligonucleotide
auacccucuggucaaacga

SEQ ID NO: 2380746 - RNA, 19 nt, Artificial Sequence
  Description of Artificial Sequence: Synthetic oligonucleotide
aggcuauaaagcugguguc

SEQ ID NO: 2380747 - RNA, 19 nt, Artificial Sequence
  Description of Artificial Sequence: Synthetic oligonucleotide
uugaaacagggacagguuu

SEQ ID NO: 2380748 - RNA, 19 nt, Artificial Sequence
  Description of Artificial Sequence: Synthetic oligonucleotide
uauccuucucauuuuguau

SEQ ID NO: 2380749 - RNA, 19 nt, Artificial Sequence
  Description of Artificial Sequence: Synthetic oligonucleotide
uaacugagcagcucaacau

SEQ ID NO: 2380750 - RNA, 19 nt, Artificial Sequence
  Description of Artificial Sequence: Synthetic oligonucleotide
caccauuugcaacuggccc

SEQ ID NO: 2380751 - RNA, 19 nt, Artificial Sequence
  Description of Artificial Sequence: Synthetic oligonucleotide
accauuugcaacuggccca

SEQ ID NO: 2380752 - RNA, 19 nt, Artificial Sequence
  Description of Artificial Sequence: Synthetic oligonucleotide
uaggacacguaguuuaaaa

SEQ ID NO: 2380753 - RNA, 19 nt, Artificial Sequence
  Description of Artificial Sequence: Synthetic oligonucleotide
uuccaguauaaagugucag

SEQ ID NO: 2380754 - RNA, 19 nt, Artificial Sequence
  Description of Artificial Sequence: Synthetic oligonucleotide
aaacagaaauagugaugcu

SEQ ID NO: 2380755 - RNA, 19 nt, Artificial Sequence
  Description of Artificial Sequence: Synthetic oligonucleotide
uggcauuacuuauuguggu

SEQ ID NO: 2380756 - RNA, 19 nt, Artificial Sequence
  Description of Artificial Sequence: Synthetic oligonucleotide
aguuaaccauaaauaaaag

SEQ ID NO: 2380757 - RNA, 19 nt, Artificial Sequence
  Description of Artificial Sequence: Synthetic oligonucleotide
uuaaaggcucuucucggau

SEQ ID NO: 2380758 - RNA, 19 nt, Artificial Sequence
  Description of Artificial Sequence: Synthetic oligonucleotide
acgaauaauaucgccuguc

SEQ ID NO: 2380759 - RNA, 19 nt, Artificial Sequence
  Description of Artificial Sequence: Synthetic oligonucleotide
cguucuaucagcuaccuug

SEQ ID NO: 2380760 - RNA, 19 nt, Artificial Sequence
  Description of Artificial Sequence: Synthetic oligonucleotide
caccucuuccaguauaaag

SEQ ID NO: 2380761 - RNA, 19 nt, Artificial Sequence
  Description of Artificial Sequence: Synthetic oligonucleotide
uuucuaccaguauauggaa

SEQ ID NO: 2380762 - RNA, 19 nt, Artificial Sequence
  Description of Artificial Sequence: Synthetic oligonucleotide
cauaaauaaaagugcacua

SEQ ID NO: 2380763 - RNA, 19 nt, Artificial Sequence
  Description of Artificial Sequence: Synthetic oligonucleotide
ucuguaugagcccuccgau

SEQ ID NO: 2380764 - RNA, 19 nt, Artificial Sequence
  Description of Artificial Sequence: Synthetic oligonucleotide
gucaaaggaaaucuguaaa

SEQ ID NO: 2380765 - RNA, 19 nt, Artificial Sequence
  Description of Artificial Sequence: Synthetic oligonucleotide
ucuauccuucucauuuugu

SEQ ID NO: 2380766 - RNA, 19 nt, Artificial Sequence
  Description of Artificial Sequence: Synthetic oligonucleotide
ugaauacaccauacaaaau

SEQ ID NO: 2380767 - RNA, 19 nt, Artificial Sequence
  Description of Artificial Sequence: Synthetic oligonucleotide
uugcaacuggcccaagugu

SEQ ID NO: 2380768 - RNA, 19 nt, Artificial Sequence
  Description of Artificial Sequence: Synthetic oligonucleotide
caggaucucacuucauggc

SEQ ID NO: 2380769 - RNA, 19 nt, Artificial Sequence
  Description of Artificial Sequence: Synthetic oligonucleotide
uuggucacgcguccuaucu

SEQ ID NO: 2380770 - RNA, 19 nt, Artificial Sequence
  Description of Artificial Sequence: Synthetic oligonucleotide
agugcacuaaguauucaag

SEQ ID NO: 2380771 - RNA, 19 nt, Artificial Sequence
  Description of Artificial Sequence: Synthetic oligonucleotide
aaauguuagggcaaccauu

SEQ ID NO: 2380772 - RNA, 19 nt, Artificial Sequence
  Description of Artificial Sequence: Synthetic oligonucleotide
ucaggcauccuuuccacau

SEQ ID NO: 2380773 - RNA, 19 nt, Artificial Sequence
  Description of Artificial Sequence: Synthetic oligonucleotide
cauacccucuggucaaacg

SEQ ID NO: 2380774 - RNA, 19 nt, Artificial Sequence
  Description of Artificial Sequence: Synthetic oligonucleotide
agaugauauccccuugacu

SEQ ID NO: 2380775 - RNA, 19 nt, Artificial Sequence
  Description of Artificial Sequence: Synthetic oligonucleotide
uaaagcuggugucguaagu

SEQ ID NO: 2380776 - RNA, 19 nt, Artificial Sequence
  Description of Artificial Sequence: Synthetic oligonucleotide
acccaguaaguucuugcuc

SEQ ID NO: 2380777 - RNA, 19 nt, Artificial Sequence
  Description of Artificial Sequence: Synthetic oligonucleotide
cagucugaacaccauuugc

SEQ ID NO: 2380778 - RNA, 19 nt, Artificial Sequence
  Description of Artificial Sequence: Synthetic oligonucleotide
uccuauucuucaauaggau

SEQ ID NO: 2380779 - RNA, 19 nt, Artificial Sequence
  Description of Artificial Sequence: Synthetic oligonucleotide
ucguaaguagcucacccuu

SEQ ID NO: 2380780 - RNA, 19 nt, Artificial Sequence
  Description of Artificial Sequence: Synthetic oligonucleotide
cucauuuuguaucgauuug

SEQ ID NO: 2380781 - RNA, 19 nt, Artificial Sequence
  Description of Artificial Sequence: Synthetic oligonucleotide
cagaaauagugaugcuucc

SEQ ID NO: 2380782 - RNA, 19 nt, Artificial Sequence
  Description of Artificial Sequence: Synthetic oligonucleotide
ucucacuucauggccaucu

SEQ ID NO: 2380783 - RNA, 19 nt, Artificial Sequence
  Description of Artificial Sequence: Synthetic oligonucleotide
caaacgaauaauaucgccu

SEQ ID NO: 2380784 - RNA, 19 nt, Artificial Sequence
  Description of Artificial Sequence: Synthetic oligonucleotide
cugaaauuuggcacuucug

SEQ ID NO: 2380785 - RNA, 19 nt, Artificial Sequence
  Description of Artificial Sequence: Synthetic oligonucleotide
guaucgauuuguucugcug

SEQ ID NO: 2380786 - RNA, 19 nt, Artificial Sequence
  Description of Artificial Sequence: Synthetic oligonucleotide
caauaggauguaacugagc

SEQ ID NO: 2380787 - RNA, 19 nt, Artificial Sequence
  Description of Artificial Sequence: Synthetic oligonucleotide
uguaucgauuuguucugcu

SEQ ID NO: 2380788 - RNA, 19 nt, Artificial Sequence
  Description of Artificial Sequence: Synthetic oligonucleotide
uggaagaugauauccccuu

SEQ ID NO: 2380789 - RNA, 19 nt, Artificial Sequence
  Description of Artificial Sequence: Synthetic oligonucleotide
uucucauuuuguaucgauu

SEQ ID NO: 2380790 - RNA, 19 nt, Artificial Sequence
  Description of Artificial Sequence: Synthetic oligonucleotide
ggcacuucugaauacacca

SEQ ID NO: 2380791 - RNA, 19 nt, Artificial Sequence
  Description of Artificial Sequence: Synthetic oligonucleotide
aaagcuggugucguaagua

SEQ ID NO: 2380792 - RNA, 19 nt, Artificial Sequence
  Description of Artificial Sequence: Synthetic oligonucleotide
agggacagguuuucaagug

SEQ ID NO: 2380793 - RNA, 19 nt, Artificial Sequence
  Description of Artificial Sequence: Synthetic oligonucleotide
uggcacuucugaauacacc

SEQ ID NO: 2380794 - RNA, 19 nt, Artificial Sequence
  Description of Artificial Sequence: Synthetic oligonucleotide
uugaugcauacccucuggu

SEQ ID NO: 2380795 - RNA, 19 nt, Artificial Sequence
  Description of Artificial Sequence: Synthetic oligonucleotide
ugcaacuggcccaagugua

SEQ ID NO: 2380796 - RNA, 19 nt, Artificial Sequence
  Description of Artificial Sequence: Synthetic oligonucleotide
ugaugcauacccucugguc

SEQ ID NO: 2380797 - RNA, 19 nt, Artificial Sequence
  Description of Artificial Sequence: Synthetic oligonucleotide
augauauccccuugacuca

SEQ ID NO: 2380798 - RNA, 19 nt, Artificial Sequence
  Description of Artificial Sequence: Synthetic oligonucleotide
acuguuucuaccaguauau

SEQ ID NO: 2380799 - RNA, 19 nt, Artificial Sequence
  Description of Artificial Sequence: Synthetic oligonucleotide
ucuucuuagcaaacccaaa

SEQ ID NO: 2380800 - RNA, 19 nt, Artificial Sequence
  Description of Artificial Sequence: Synthetic oligonucleotide
acaguuaaccauaaauaaa

SEQ ID NO: 2380801 - RNA, 19 nt, Artificial Sequence
  Description of Artificial Sequence: Synthetic oligonucleotide
uguucccgcuuucagaguu

SEQ ID NO: 2380802 - RNA, 19 nt, Artificial Sequence
  Description of Artificial Sequence: Synthetic oligonucleotide
uaucuuuuaaaggcucuuc

SEQ ID NO: 2380803 - RNA, 19 nt, Artificial Sequence
  Description of Artificial Sequence: Synthetic oligonucleotide
cuucuuagcaaacccaaaa

SEQ ID NO: 2380804 - RNA, 19 nt, Artificial Sequence
  Description of Artificial Sequence: Synthetic oligonucleotide
ugauauccccuugacucag

SEQ ID NO: 2380805 - RNA, 19 nt, Artificial Sequence
  Description of Artificial Sequence: Synthetic oligonucleotide
guauauggaagaugauauc

SEQ ID NO: 2380806 - RNA, 19 nt, Artificial Sequence
  Description of Artificial Sequence: Synthetic oligonucleotide
uucaagugauacccaguaa

SEQ ID NO: 2380807 - RNA, 19 nt, Artificial Sequence
  Description of Artificial Sequence: Synthetic oligonucleotide
ucuggguuuggcucacuga

SEQ ID NO: 2380808 - RNA, 19 nt, Artificial Sequence
  Description of Artificial Sequence: Synthetic oligonucleotide
accaaccauucuucuuagc

SEQ ID NO: 2380809 - RNA, 19 nt, Artificial Sequence
  Description of Artificial Sequence: Synthetic oligonucleotide
guggucaugacuguuugac

SEQ ID NO: 2380810 - RNA, 19 nt, Artificial Sequence
  Description of Artificial Sequence: Synthetic oligonucleotide
ugucuguaugagcccuccg

SEQ ID NO: 2380811 - RNA, 19 nt, Artificial Sequence
  Description of Artificial Sequence: Synthetic oligonucleotide
agaagacucacagaggcua

SEQ ID NO: 2380812 - RNA, 19 nt, Artificial Sequence
  Description of Artificial Sequence: Synthetic oligonucleotide
ugguuuuggucacgcgucc

SEQ ID NO: 2380813 - RNA, 19 nt, Artificial Sequence
  Description of Artificial Sequence: Synthetic oligonucleotide
agcccuccgaucucauccc

SEQ ID NO: 2380814 - RNA, 19 nt, Artificial Sequence
  Description of Artificial Sequence: Synthetic oligonucleotide
aaguguaccgaugcucacu

SEQ ID NO: 2380815 - RNA, 19 nt, Artificial Sequence
  Description of Artificial Sequence: Synthetic oligonucleotide
augacuguuugacuacuau

SEQ ID NO: 2380816 - RNA, 19 nt, Artificial Sequence
  Description of Artificial Sequence: Synthetic oligonucleotide
uuuugaaguucaccaccuc

SEQ ID NO: 2380817 - RNA, 19 nt, Artificial Sequence
  Description of Artificial Sequence: Synthetic oligonucleotide
guaaguucuugcucuaaaa

SEQ ID NO: 2380818 - RNA, 19 nt, Artificial Sequence
  Description of Artificial Sequence: Synthetic oligonucleotide
gcucacugaaauuuggcac

SEQ ID NO: 2380819 - RNA, 19 nt, Artificial Sequence
  Description of Artificial Sequence: Synthetic oligonucleotide
cauugaugcauacccucug

SEQ ID NO: 2380820 - RNA, 19 nt, Artificial Sequence
  Description of Artificial Sequence: Synthetic oligonucleotide
aagugauacccaguaaguu

SEQ ID NO: 2380821 - RNA, 19 nt, Artificial Sequence
  Description of Artificial Sequence: Synthetic oligonucleotide
agaguuccuauucuucaau

SEQ ID NO: 2380822 - RNA, 19 nt, Artificial Sequence
  Description of Artificial Sequence: Synthetic oligonucleotide
cugaacaccauuugcaacu

SEQ ID NO: 2380823 - RNA, 19 nt, Artificial Sequence
  Description of Artificial Sequence: Synthetic oligonucleotide
gucaaacgaauaauaucgc

SEQ ID NO: 2380824 - RNA, 19 nt, Artificial Sequence
  Description of Artificial Sequence: Synthetic oligonucleotide
uaaaggcucuucucggauc

SEQ ID NO: 2380825 - RNA, 19 nt, Artificial Sequence
  Description of Artificial Sequence: Synthetic oligonucleotide
ugucaggcauccuuuccac

SEQ ID NO: 2380826 - RNA, 19 nt, Artificial Sequence
  Description of Artificial Sequence: Synthetic oligonucleotide
uagugaugcuucccguucu

SEQ ID NO: 2380827 - RNA, 19 nt, Artificial Sequence
  Description of Artificial Sequence: Synthetic oligonucleotide
aaagugucaggcauccuuu

SEQ ID NO: 2380828 - RNA, 19 nt, Artificial Sequence
  Description of Artificial Sequence: Synthetic oligonucleotide
aguauucaaguaggacacg

SEQ ID NO: 2380829 - RNA, 19 nt, Artificial Sequence
  Description of Artificial Sequence: Synthetic oligonucleotide
guucuaucagcuaccuugc

SEQ ID NO: 2380830 - RNA, 19 nt, Artificial Sequence
  Description of Artificial Sequence: Synthetic oligonucleotide
aggcauccuuuccacauug

SEQ ID NO: 2380831 - RNA, 19 nt, Artificial Sequence
  Description of Artificial Sequence: Synthetic oligonucleotide
ggcuauaaagcuggugucg

SEQ ID NO: 2380832 - RNA, 19 nt, Artificial Sequence
  Description of Artificial Sequence: Synthetic oligonucleotide
ucccguucuaucagcuacc

SEQ ID NO: 2380833 - RNA, 19 nt, Artificial Sequence
  Description of Artificial Sequence: Synthetic oligonucleotide
ccuauucuucaauaggaug

SEQ ID NO: 2380834 - RNA, 19 nt, Artificial Sequence
  Description of Artificial Sequence: Synthetic oligonucleotide
uacuuauuguggucaugac

SEQ ID NO: 2380835 - RNA, 19 nt, Artificial Sequence
  Description of Artificial Sequence: Synthetic oligonucleotide
ucucuuuggcuuagguuau

SEQ ID NO: 2380836 - RNA, 19 nt, Artificial Sequence
  Description of Artificial Sequence: Synthetic oligonucleotide
ugcccuuuauaaucugggu

SEQ ID NO: 2380837 - RNA, 19 nt, Artificial Sequence
  Description of Artificial Sequence: Synthetic oligonucleotide
uacccucuggucaaacgaa

SEQ ID NO: 2380838 - RNA, 19 nt, Artificial Sequence
  Description of Artificial Sequence: Synthetic oligonucleotide
aaagugcacuaaguauuca

SEQ ID NO: 2380839 - RNA, 19 nt, Artificial Sequence
  Description of Artificial Sequence: Synthetic oligonucleotide
cucuauccuucucauuuug

SEQ ID NO: 2380840 - RNA, 19 nt, Artificial Sequence
  Description of Artificial Sequence: Synthetic oligonucleotide
auaucgccugucuguauga

SEQ ID NO: 2380841 - RNA, 19 nt, Artificial Sequence
  Description of Artificial Sequence: Synthetic oligonucleotide
uuaucuuuuaaaggcucuu

SEQ ID NO: 2380842 - RNA, 19 nt, Artificial Sequence
  Description of Artificial Sequence: Synthetic oligonucleotide
gucuguaugagcccuccga

SEQ ID NO: 2380843 - RNA, 19 nt, Artificial Sequence
  Description of Artificial Sequence: Synthetic oligonucleotide
uggucaugacuguuugacu

SEQ ID NO: 2380844 - RNA, 19 nt, Artificial Sequence
  Description of Artificial Sequence: Synthetic oligonucleotide
gaaauguuagggcaaccau

SEQ ID NO: 2380845 - RNA, 19 nt, Artificial Sequence
  Description of Artificial Sequence: Synthetic oligonucleotide
uguaacugagcagcucaac

SEQ ID NO: 2380846 - RNA, 19 nt, Artificial Sequence
  Description of Artificial Sequence: Synthetic oligonucleotide
ugaaucucuuuggcuuagg

SEQ ID NO: 2380847 - RNA, 19 nt, Artificial Sequence
  Description of Artificial Sequence: Synthetic oligonucleotide
augcuucccguucuaucag

SEQ ID NO: 2380848 - RNA, 19 nt, Artificial Sequence
  Description of Artificial Sequence: Synthetic oligonucleotide
cacgcguccuaucuccagg

SEQ ID NO: 2380849 - RNA, 19 nt, Artificial Sequence
  Description of Artificial Sequence: Synthetic oligonucleotide
agguuaucuuuuaaaggcu

SEQ ID NO: 2380850 - RNA, 19 nt, Artificial Sequence
  Description of Artificial Sequence: Synthetic oligonucleotide
auauccccuugacucaggu

SEQ ID NO: 2380851 - RNA, 19 nt, Artificial Sequence
  Description of Artificial Sequence: Synthetic oligonucleotide
uuguaucgauuuguucugc

SEQ ID NO: 2380852 - RNA, 19 nt, Artificial Sequence
  Description of Artificial Sequence: Synthetic oligonucleotide
ugacucagguccagucuga

SEQ ID NO: 2380853 - RNA, 19 nt, Artificial Sequence
  Description of Artificial Sequence: Synthetic oligonucleotide
ugcuucccguucuaucagc

SEQ ID NO: 2380854 - RNA, 19 nt, Artificial Sequence
  Description of Artificial Sequence: Synthetic oligonucleotide
auaauaucgccugucugua

SEQ ID NO: 2380855 - RNA, 19 nt, Artificial Sequence
  Description of Artificial Sequence: Synthetic oligonucleotide
uucuaucagcuaccuugca

SEQ ID NO: 2380856 - RNA, 19 nt, Artificial Sequence
  Description of Artificial Sequence: Synthetic oligonucleotide
aaggcucuucucggauccc

SEQ ID NO: 2380857 - RNA, 19 nt, Artificial Sequence
  Description of Artificial Sequence: Synthetic oligonucleotide
ggucaugacuguuugacua

SEQ ID NO: 2380858 - RNA, 19 nt, Artificial Sequence
  Description of Artificial Sequence: Synthetic oligonucleotide
ggucacgcguccuaucucc

SEQ ID NO: 2380859 - RNA, 19 nt, Artificial Sequence
  Description of Artificial Sequence: Synthetic oligonucleotide
agcucaacauugugcagaa

SEQ ID NO: 2380860 - RNA, 19 nt, Artificial Sequence
  Description of Artificial Sequence: Synthetic oligonucleotide
accauacaaaauuccccaa

SEQ ID NO: 2380861 - RNA, 19 nt, Artificial Sequence
  Description of Artificial Sequence: Synthetic oligonucleotide
guauaaagugucaggcauc

SEQ ID NO: 2380862 - RNA, 19 nt, Artificial Sequence
  Description of Artificial Sequence: Synthetic oligonucleotide
cucacugaaauuuggcacu

SEQ ID NO: 2380863 - RNA, 19 nt, Artificial Sequence
  Description of Artificial Sequence: Synthetic oligonucleotide
ucgauuuguucugcugccc

SEQ ID NO: 2380864 - RNA, 19 nt, Artificial Sequence
  Description of Artificial Sequence: Synthetic oligonucleotide
uuagggcaaccauuacaaa

SEQ ID NO: 2380865 - RNA, 19 nt, Artificial Sequence
  Description of Artificial Sequence: Synthetic oligonucleotide
caguauauggaagaugaua

SEQ ID NO: 2380866 - RNA, 19 nt, Artificial Sequence
  Description of Artificial Sequence: Synthetic oligonucleotide
ucacgcguccuaucuccag

SEQ ID NO: 2380867 - RNA, 19 nt, Artificial Sequence
  Description of Artificial Sequence: Synthetic oligonucleotide
uaccuugcaggaucucacu

SEQ ID NO: 2380868 - RNA, 19 nt, Artificial Sequence
  Description of Artificial Sequence: Synthetic oligonucleotide
cuguaugagcccuccgauc

SEQ ID NO: 2380869 - RNA, 19 nt, Artificial Sequence
  Description of Artificial Sequence: Synthetic oligonucleotide
cacuguuucuaccaguaua

SEQ ID NO: 2380870 - RNA, 19 nt, Artificial Sequence
  Description of Artificial Sequence: Synthetic oligonucleotide
augcauacccucuggucaa

SEQ ID NO: 2380871 - RNA, 19 nt, Artificial Sequence
  Description of Artificial Sequence: Synthetic oligonucleotide
agaggcuauaaagcuggug

SEQ ID NO: 2380872 - RNA, 19 nt, Artificial Sequence
  Description of Artificial Sequence: Synthetic oligonucleotide
augaaucucuuuggcuuag

SEQ ID NO: 2380873 - RNA, 19 nt, Artificial Sequence
  Description of Artificial Sequence: Synthetic oligonucleotide
gcuuagguuaucuuuuaaa

SEQ ID NO: 2380874 - RNA, 19 nt, Artificial Sequence
  Description of Artificial Sequence: Synthetic oligonucleotide
gauauccccuugacucagg

SEQ ID NO: 2380875 - RNA, 19 nt, Artificial Sequence
  Description of Artificial Sequence: Synthetic oligonucleotide
auggaagaugauauccccu

SEQ ID NO: 2380876 - RNA, 19 nt, Artificial Sequence
  Description of Artificial Sequence: Synthetic oligonucleotide
ccaaccauucuucuuagca

SEQ ID NO: 2380877 - RNA, 19 nt, Artificial Sequence
  Description of Artificial Sequence: Synthetic oligonucleotide
gaaucucuuuggcuuaggu

SEQ ID NO: 2380878 - RNA, 19 nt, Artificial Sequence
  Description of Artificial Sequence: Synthetic oligonucleotide
gugauacccaguaaguucu

SEQ ID NO: 2380879 - RNA, 19 nt, Artificial Sequence
  Description of Artificial Sequence: Synthetic oligonucleotide
caagugauacccaguaagu

SEQ ID NO: 2380880 - RNA, 19 nt, Artificial Sequence
  Description of Artificial Sequence: Synthetic oligonucleotide
uaucgccugucuguaugag

SEQ ID NO: 2380881 - RNA, 19 nt, Artificial Sequence
  Description of Artificial Sequence: Synthetic oligonucleotide
ggcccaaguguaccgaugc

SEQ ID NO: 2380882 - RNA, 19 nt, Artificial Sequence
  Description of Artificial Sequence: Synthetic oligonucleotide
gguuaucuuuuaaaggcuc

SEQ ID NO: 2380883 - RNA, 19 nt, Artificial Sequence
  Description of Artificial Sequence: Synthetic oligonucleotide
cacccuugaaacagggaca

SEQ ID NO: 2380884 - RNA, 19 nt, Artificial Sequence
  Description of Artificial Sequence: Synthetic oligonucleotide
gcaaccauuacaaaaugua

SEQ ID NO: 2380885 - RNA, 19 nt, Artificial Sequence
  Description of Artificial Sequence: Synthetic oligonucleotide
uuuggucacgcguccuauc

SEQ ID NO: 2380886 - RNA, 19 nt, Artificial Sequence
  Description of Artificial Sequence: Synthetic oligonucleotide
uaccgaugcucacucuauc

SEQ ID NO: 2380887 - RNA, 19 nt, Artificial Sequence
  Description of Artificial Sequence: Synthetic oligonucleotide
uaauaucgccugucuguau

SEQ ID NO: 2380888 - RNA, 19 nt, Artificial Sequence
  Description of Artificial Sequence: Synthetic oligonucleotide
acucuauccuucucauuuu

SEQ ID NO: 2380889 - RNA, 19 nt, Artificial Sequence
  Description of Artificial Sequence: Synthetic oligonucleotide
caaguguaccgaugcucac

SEQ ID NO: 2380890 - RNA, 19 nt, Artificial Sequence
  Description of Artificial Sequence: Synthetic oligonucleotide
uccuaucuccaggacaaua

SEQ ID NO: 2380891 - RNA, 19 nt, Artificial Sequence
  Description of Artificial Sequence: Synthetic oligonucleotide
caacuggcccaaguguacc

SEQ ID NO: 2380892 - RNA, 19 nt, Artificial Sequence
  Description of Artificial Sequence: Synthetic oligonucleotide
ucucggaucccuggcauua

SEQ ID NO: 2380893 - RNA, 19 nt, Artificial Sequence
  Description of Artificial Sequence: Synthetic oligonucleotide
cauacaaaauuccccaauu

SEQ ID NO: 2380894 - RNA, 19 nt, Artificial Sequence
  Description of Artificial Sequence: Synthetic oligonucleotide
guauucaaguaggacacgu

SEQ ID NO: 2380895 - RNA, 19 nt, Artificial Sequence
  Description of Artificial Sequence: Synthetic oligonucleotide
ugcugcccuuuauaaucug

SEQ ID NO: 2380896 - RNA, 19 nt, Artificial Sequence
  Description of Artificial Sequence: Synthetic oligonucleotide
uggcuuagguuaucuuuua

SEQ ID NO: 2380897 - RNA, 19 nt, Artificial Sequence
  Description of Artificial Sequence: Synthetic oligonucleotide
uauccccuugacucagguc

SEQ ID NO: 2380898 - RNA, 19 nt, Artificial Sequence
  Description of Artificial Sequence: Synthetic oligonucleotide
cuggucaaacgaauaauau

SEQ ID NO: 2380899 - RNA, 19 nt, Artificial Sequence
  Description of Artificial Sequence: Synthetic oligonucleotide
guuuggcucacugaaauuu

SEQ ID NO: 2380900 - RNA, 19 nt, Artificial Sequence
  Description of Artificial Sequence: Synthetic oligonucleotide
guuugacuacuaugagcuc

SEQ ID NO: 2380901 - RNA, 19 nt, Artificial Sequence
  Description of Artificial Sequence: Synthetic oligonucleotide
cuccgaucucaucccaaac

SEQ ID NO: 2380902 - RNA, 19 nt, Artificial Sequence
  Description of Artificial Sequence: Synthetic oligonucleotide
gaucccuggcauuacuuau

SEQ ID NO: 2380903 - RNA, 19 nt, Artificial Sequence
  Description of Artificial Sequence: Synthetic oligonucleotide
acgcguccuaucuccagga

SEQ ID NO: 2380904 - RNA, 19 nt, Artificial Sequence
  Description of Artificial Sequence: Synthetic oligonucleotide
gacucacagaggcuauaaa

SEQ ID NO: 2380905 - RNA, 19 nt, Artificial Sequence
  Description of Artificial Sequence: Synthetic oligonucleotide
ccaaguguaccgaugcuca

SEQ ID NO: 2380906 - RNA, 19 nt, Artificial Sequence
  Description of Artificial Sequence: Synthetic oligonucleotide
agacucacagaggcuauaa

SEQ ID NO: 2380907 - RNA, 19 nt, Artificial Sequence
  Description of Artificial Sequence: Synthetic oligonucleotide
gggcaaccauuacaaaaug

SEQ ID NO: 2380908 - RNA, 19 nt, Artificial Sequence
  Description of Artificial Sequence: Synthetic oligonucleotide
cuguuucuaccaguauaug

SEQ ID NO: 2380909 - RNA, 19 nt, Artificial Sequence
  Description of Artificial Sequence: Synthetic oligonucleotide
uggucacgcguccuaucuc

SEQ ID NO: 2380910 - RNA, 19 nt, Artificial Sequence
  Description of Artificial Sequence: Synthetic oligonucleotide
cacuucugaauacaccaua

SEQ ID NO: 2380911 - RNA, 19 nt, Artificial Sequence
  Description of Artificial Sequence: Synthetic oligonucleotide
agguccagucugaacacca

SEQ ID NO: 2380912 - RNA, 19 nt, Artificial Sequence
  Description of Artificial Sequence: Synthetic oligonucleotide
guugauugauggguuccca

SEQ ID NO: 2380913 - RNA, 19 nt, Artificial Sequence
  Description of Artificial Sequence: Synthetic oligonucleotide
gggacagguuuucaaguga

SEQ ID NO: 2380914 - RNA, 19 nt, Artificial Sequence
  Description of Artificial Sequence: Synthetic oligonucleotide
cucaucccaaacagaaaua

SEQ ID NO: 2380915 - RNA, 19 nt, Artificial Sequence
  Description of Artificial Sequence: Synthetic oligonucleotide
cuacuaugagcuccuggaa

SEQ ID NO: 2380916 - RNA, 19 nt, Artificial Sequence
  Description of Artificial Sequence: Synthetic oligonucleotide
aagacucacagaggcuaua

SEQ ID NO: 2380917 - RNA, 19 nt, Artificial Sequence
  Description of Artificial Sequence: Synthetic oligonucleotide
ccuaucuccaggacaauaa

SEQ ID NO: 2380918 - RNA, 19 nt, Artificial Sequence
  Description of Artificial Sequence: Synthetic oligonucleotide
gucguaaguagcucacccu

SEQ ID NO: 2380919 - RNA, 19 nt, Artificial Sequence
  Description of Artificial Sequence: Synthetic oligonucleotide
ucacucuauccuucucauu

SEQ ID NO: 2380920 - RNA, 19 nt, Artificial Sequence
  Description of Artificial Sequence: Synthetic oligonucleotide
ggugucguaaguagcucac

SEQ ID NO: 2380921 - RNA, 19 nt, Artificial Sequence
  Description of Artificial Sequence: Synthetic oligonucleotide
ccagucugaacaccauuug

SEQ ID NO: 2380922 - RNA, 19 nt, Artificial Sequence
  Description of Artificial Sequence: Synthetic oligonucleotide
ggaucucacuucauggcca

SEQ ID NO: 2380923 - RNA, 19 nt, Artificial Sequence
  Description of Artificial Sequence: Synthetic oligonucleotide
auguucccgcuuucagagu

SEQ ID NO: 2380924 - RNA, 19 nt, Artificial Sequence
  Description of Artificial Sequence: Synthetic oligonucleotide
cagguccagucugaacacc

SEQ ID NO: 2380925 - RNA, 19 nt, Artificial Sequence
  Description of Artificial Sequence: Synthetic oligonucleotide
ugagcccuccgaucucauc

SEQ ID NO: 2380926 - RNA, 19 nt, Artificial Sequence
  Description of Artificial Sequence: Synthetic oligonucleotide
guaugagcccuccgaucuc

SEQ ID NO: 2380927 - RNA, 19 nt, Artificial Sequence
  Description of Artificial Sequence: Synthetic oligonucleotide
auaaagugucaggcauccu

SEQ ID NO: 2380928 - RNA, 19 nt, Artificial Sequence
  Description of Artificial Sequence: Synthetic oligonucleotide
cuauaaagcuggugucgua

SEQ ID NO: 2380929 - RNA, 19 nt, Artificial Sequence
  Description of Artificial Sequence: Synthetic oligonucleotide
gcagcucaacauugugcag

SEQ ID NO: 2380930 - RNA, 19 nt, Artificial Sequence
  Description of Artificial Sequence: Synthetic oligonucleotide
gucaggcauccuuuccaca

SEQ ID NO: 2380931 - RNA, 19 nt, Artificial Sequence
  Description of Artificial Sequence: Synthetic oligonucleotide
gaucucacuucauggccau

SEQ ID NO: 2380932 - RNA, 19 nt, Artificial Sequence
  Description of Artificial Sequence: Synthetic oligonucleotide
uucucggaucccuggcauu

SEQ ID NO: 2380933 - RNA, 19 nt, Artificial Sequence
  Description of Artificial Sequence: Synthetic oligonucleotide
cagggacagguuuucaagu

SEQ ID NO: 2380934 - RNA, 19 nt, Artificial Sequence
  Description of Artificial Sequence: Synthetic oligonucleotide
ugacuacuaugagcuccug

SEQ ID NO: 2380935 - RNA, 19 nt, Artificial Sequence
  Description of Artificial Sequence: Synthetic oligonucleotide
gauuuguucugcugcccuu

SEQ ID NO: 2380936 - RNA, 19 nt, Artificial Sequence
  Description of Artificial Sequence: Synthetic oligonucleotide
agcuguugauugauggguu

SEQ ID NO: 2380937 - RNA, 19 nt, Artificial Sequence
  Description of Artificial Sequence: Synthetic oligonucleotide
gcuaccuugcaggaucuca

SEQ ID NO: 2380938 - RNA, 19 nt, Artificial Sequence
  Description of Artificial Sequence: Synthetic oligonucleotide
cccaguaaguucuugcucu

SEQ ID NO: 2380939 - RNA, 19 nt, Artificial Sequence
  Description of Artificial Sequence: Synthetic oligonucleotide
aucagcuaccuugcaggau

SEQ ID NO: 2380940 - RNA, 19 nt, Artificial Sequence
  Description of Artificial Sequence: Synthetic oligonucleotide
gcguccuaucuccaggaca

SEQ ID NO: 2380941 - RNA, 19 nt, Artificial Sequence
  Description of Artificial Sequence: Synthetic oligonucleotide
aggcucuucucggaucccu

SEQ ID NO: 2380942 - RNA, 19 nt, Artificial Sequence
  Description of Artificial Sequence: Synthetic oligonucleotide
gguuuucaagugauaccca

SEQ ID NO: 2380943 - RNA, 19 nt, Artificial Sequence
  Description of Artificial Sequence: Synthetic oligonucleotide
gacagguuuucaagugaua

SEQ ID NO: 2380944 - RNA, 19 nt, Artificial Sequence
  Description of Artificial Sequence: Synthetic oligonucleotide
ggguuuggcucacugaaau

SEQ ID NO: 2380945 - RNA, 19 nt, Artificial Sequence
  Description of Artificial Sequence: Synthetic oligonucleotide
agcuaccuugcaggaucuc

SEQ ID NO: 2380946 - RNA, 19 nt, Artificial Sequence
  Description of Artificial Sequence: Synthetic oligonucleotide
guaggacacguaguuuaaa

SEQ ID NO: 2380947 - RNA, 19 nt, Artificial Sequence
  Description of Artificial Sequence: Synthetic oligonucleotide
ggauguaacugagcagcuc

SEQ ID NO: 2380948 - RNA, 19 nt, Artificial Sequence
  Description of Artificial Sequence: Synthetic oligonucleotide
cguccuaucuccaggacaa

SEQ ID NO: 2380949 - RNA, 19 nt, Artificial Sequence
  Description of Artificial Sequence: Synthetic oligonucleotide
ucccgcuuucagaguuccu

SEQ ID NO: 2380950 - RNA, 19 nt, Artificial Sequence
  Description of Artificial Sequence: Synthetic oligonucleotide
aucccuggcauuacuuauu

SEQ ID NO: 2380951 - RNA, 19 nt, Artificial Sequence
  Description of Artificial Sequence: Synthetic oligonucleotide
ggcuuagguuaucuuuuaa

SEQ ID NO: 2380952 - RNA, 19 nt, Artificial Sequence
  Description of Artificial Sequence: Synthetic oligonucleotide
cagaagacucacagaggcu

SEQ ID NO: 2380953 - RNA, 19 nt, Artificial Sequence
  Description of Artificial Sequence: Synthetic oligonucleotide
ccucuggucaaacgaauaa

SEQ ID NO: 2380954 - RNA, 19 nt, Artificial Sequence
  Description of Artificial Sequence: Synthetic oligonucleotide
ccauuacaaaauguaugca

SEQ ID NO: 2380955 - RNA, 19 nt, Artificial Sequence
  Description of Artificial Sequence: Synthetic oligonucleotide
ugcauacccucuggucaaa

SEQ ID NO: 2380956 - RNA, 19 nt, Artificial Sequence
  Description of Artificial Sequence: Synthetic oligonucleotide
gcuauaaagcuggugucgu

SEQ ID NO: 2380957 - RNA, 19 nt, Artificial Sequence
  Description of Artificial Sequence: Synthetic oligonucleotide
cccaaacagaaauagugau

SEQ ID NO: 2380958 - RNA, 19 nt, Artificial Sequence
  Description of Artificial Sequence: Synthetic oligonucleotide
gaagacucacagaggcuau

SEQ ID NO: 2380959 - RNA, 19 nt, Artificial Sequence
  Description of Artificial Sequence: Synthetic oligonucleotide
acccucuggucaaacgaau

SEQ ID NO: 2380960 - RNA, 19 nt, Artificial Sequence
  Description of Artificial Sequence: Synthetic oligonucleotide
gacucagguccagucugaa

SEQ ID NO: 2380961 - RNA, 19 nt, Artificial Sequence
  Description of Artificial Sequence: Synthetic oligonucleotide
cucggaucccuggcauuac

SEQ ID NO: 2380962 - RNA, 19 nt, Artificial Sequence
  Description of Artificial Sequence: Synthetic oligonucleotide
ggcaaccauuacaaaaugu

SEQ ID NO: 2380963 - RNA, 19 nt, Artificial Sequence
  Description of Artificial Sequence: Synthetic oligonucleotide
cucuggucaaacgaauaau

SEQ ID NO: 2380964 - RNA, 19 nt, Artificial Sequence
  Description of Artificial Sequence: Synthetic oligonucleotide
ccuggaagcuguugauuga

SEQ ID NO: 2380965 - RNA, 19 nt, Artificial Sequence
  Description of Artificial Sequence: Synthetic oligonucleotide
cauuugcaacuggcccaag

SEQ ID NO: 2380966 - RNA, 19 nt, Artificial Sequence
  Description of Artificial Sequence: Synthetic oligonucleotide
caguaaguucuugcucuaa

SEQ ID NO: 2380967 - RNA, 19 nt, Artificial Sequence
  Description of Artificial Sequence: Synthetic oligonucleotide
cuaccaguauauggaagau

SEQ ID NO: 2380968 - RNA, 19 nt, Artificial Sequence
  Description of Artificial Sequence: Synthetic oligonucleotide
cuaugagcuccuggaagcu

SEQ ID NO: 2380969 - RNA, 19 nt, Artificial Sequence
  Description of Artificial Sequence: Synthetic oligonucleotide
guaccgaugcucacucuau

SEQ ID NO: 2380970 - RNA, 19 nt, Artificial Sequence
  Description of Artificial Sequence: Synthetic oligonucleotide
gucacgcguccuaucucca

SEQ ID NO: 2380971 - RNA, 19 nt, Artificial Sequence
  Description of Artificial Sequence: Synthetic oligonucleotide
guccagucugaacaccauu

SEQ ID NO: 2380972 - RNA, 19 nt, Artificial Sequence
  Description of Artificial Sequence: Synthetic oligonucleotide
ccugucuguaugagcccuc

SEQ ID NO: 2380973 - RNA, 19 nt, Artificial Sequence
  Description of Artificial Sequence: Synthetic oligonucleotide
ccauacaaaauuccccaau

SEQ ID NO: 2380974 - RNA, 19 nt, Artificial Sequence
  Description of Artificial Sequence: Synthetic oligonucleotide
caaguaggacacguaguuu

SEQ ID NO: 2380975 - RNA, 19 nt, Artificial Sequence
  Description of Artificial Sequence: Synthetic oligonucleotide
gcauacccucuggucaaac

SEQ ID NO: 2380976 - RNA, 19 nt, Artificial Sequence
  Description of Artificial Sequence: Synthetic oligonucleotide
ccuccgaucucaucccaaa

SEQ ID NO: 2380977 - RNA, 19 nt, Artificial Sequence
  Description of Artificial Sequence: Synthetic oligonucleotide
guguaccgaugcucacucu

SEQ ID NO: 2380978 - RNA, 19 nt, Artificial Sequence
  Description of Artificial Sequence: Synthetic oligonucleotide
cccgcuuucagaguuccua

SEQ ID NO: 2380979 - RNA, 19 nt, Artificial Sequence
  Description of Artificial Sequence: Synthetic oligonucleotide
ccaguaaguucuugcucua

SEQ ID NO: 2380980 - RNA, 19 nt, Artificial Sequence
  Description of Artificial Sequence: Synthetic oligonucleotide
cccucuggucaaacgaaua

SEQ ID NO: 2380981 - RNA, 19 nt, Artificial Sequence
  Description of Artificial Sequence: Synthetic oligonucleotide
cagaggcuauaaagcuggu

SEQ ID NO: 2380982 - RNA, 19 nt, Artificial Sequence
  Description of Artificial Sequence: Synthetic oligonucleotide
gcuucccguucuaucagcu

SEQ ID NO: 2380983 - RNA, 19 nt, Artificial Sequence
  Description of Artificial Sequence: Synthetic oligonucleotide
ccuucucauuuuguaucga

SEQ ID NO: 2380984 - RNA, 19 nt, Artificial Sequence
  Description of Artificial Sequence: Synthetic oligonucleotide
caggcauccuuuccacauu

SEQ ID NO: 2380985 - RNA, 19 nt, Artificial Sequence
  Description of Artificial Sequence: Synthetic oligonucleotide
gcccuccgaucucauccca

SEQ ID NO: 2380986 - RNA, 19 nt, Artificial Sequence
  Description of Artificial Sequence: Synthetic oligonucleotide
ccaguauauggaagaugau

SEQ ID NO: 2380987 - RNA, 19 nt, Artificial Sequence
  Description of Artificial Sequence: Synthetic oligonucleotide
cgcguccuaucuccaggac

SEQ ID NO: 2380988 - RNA, 19 nt, Artificial Sequence
  Description of Artificial Sequence: Synthetic oligonucleotide
ccccuugacucagguccag

SEQ ID NO: 2380989 - RNA, 19 nt, Artificial Sequence
  Description of Artificial Sequence: Synthetic oligonucleotide
guccuaucuccaggacaau

SEQ ID NO: 2380990 - RNA, 19 nt, Artificial Sequence
  Description of Artificial Sequence: Synthetic oligonucleotide
cccguucuaucagcuaccu

SEQ ID NO: 2380991 - RNA, 19 nt, Artificial Sequence
  Description of Artificial Sequence: Synthetic oligonucleotide
cccuggcauuacuuauugu

SEQ ID NO: 2380992 - RNA, 19 nt, Artificial Sequence
  Description of Artificial Sequence: Synthetic oligonucleotide
cggaucccuggcauuacuu

SEQ ID NO: 2380993 - RNA, 19 nt, Artificial Sequence
  Description of Artificial Sequence: Synthetic oligonucleotide
cgcuuucagaguuccuauu

SEQ ID NO: 2380994 - RNA, 19 nt, Artificial Sequence
  Description of Artificial Sequence: Synthetic oligonucleotide
cccuugacucagguccagu

SEQ ID NO: 2380995 - RNA, 19 nt, Artificial Sequence
  Description of Artificial Sequence: Synthetic oligonucleotide
ccguucuaucagcuaccuu

SEQ ID NO: 2380996 - RNA, 19 nt, Artificial Sequence
  Description of Artificial Sequence: Synthetic oligonucleotide
aaaagaaugcaucaaauca

SEQ ID NO: 2380997 - RNA, 19 nt, Artificial Sequence
  Description of Artificial Sequence: Synthetic oligonucleotide
cucucuuuggaaauuaagg

SEQ ID NO: 2380998 - RNA, 19 nt, Artificial Sequence
  Description of Artificial Sequence: Synthetic oligonucleotide
ugauauacauauuugcagu

SEQ ID NO: 2380999 - RNA, 19 nt, Artificial Sequence
  Description of Artificial Sequence: Synthetic oligonucleotide
gaaauuaaggcaucaugug

SEQ ID NO: 2381000 - RNA, 19 nt, Artificial Sequence
  Description of Artificial Sequence: Synthetic oligonucleotide
uggaaauuaaggcaucaug

SEQ ID NO: 2381001 - RNA, 19 nt, Artificial Sequence
  Description of Artificial Sequence: Synthetic oligonucleotide
agaguauuggaaaagaaug

SEQ ID NO: 2381002 - RNA, 19 nt, Artificial Sequence
  Description of Artificial Sequence: Synthetic oligonucleotide
caugguuucgaucacuucc

SEQ ID NO: 2381003 - RNA, 19 nt, Artificial Sequence
  Description of Artificial Sequence: Synthetic oligonucleotide
gagaccgagaucugaaugg

SEQ ID NO: 2381004 - RNA, 19 nt, Artificial Sequence
  Description of Artificial Sequence: Synthetic oligonucleotide
uucgaucacuuccagauca

SEQ ID NO: 2381005 - RNA, 19 nt, Artificial Sequence
  Description of Artificial Sequence: Synthetic oligonucleotide
gaagggugcacucaucggg

SEQ ID NO: 2381006 - RNA, 19 nt, Artificial Sequence
  Description of Artificial Sequence: Synthetic oligonucleotide
aauugcauugauccccgag

SEQ ID NO: 2381007 - RNA, 19 nt, Artificial Sequence
  Description of Artificial Sequence: Synthetic oligonucleotide
gaaaagaaugcaucaaauc

SEQ ID NO: 2381008 - RNA, 19 nt, Artificial Sequence
  Description of Artificial Sequence: Synthetic oligonucleotide
uuugcagugacaccauccc

SEQ ID NO: 2381009 - RNA, 19 nt, Artificial Sequence
  Description of Artificial Sequence: Synthetic oligonucleotide
aaaaugccaagaguauugg

SEQ ID NO: 2381010 - RNA, 19 nt, Artificial Sequence
  Description of Artificial Sequence: Synthetic oligonucleotide
uagagcuuggaaaaugcca

SEQ ID NO: 2381011 - RNA, 19 nt, Artificial Sequence
  Description of Artificial Sequence: Synthetic oligonucleotide
ugguaauagagcuuggaaa

SEQ ID NO: 2381012 - RNA, 19 nt, Artificial Sequence
  Description of Artificial Sequence: Synthetic oligonucleotide
acauauuugcagugacacc

SEQ ID NO: 2381013 - RNA, 19 nt, Artificial Sequence
  Description of Artificial Sequence: Synthetic oligonucleotide
uaggcugauauacauauuu

SEQ ID NO: 2381014 - RNA, 19 nt, Artificial Sequence
  Description of Artificial Sequence: Synthetic oligonucleotide
aucaugugcagagaccucc

SEQ ID NO: 2381015 - RNA, 19 nt, Artificial Sequence
  Description of Artificial Sequence: Synthetic oligonucleotide
aaagaaugcaucaaaucaa

SEQ ID NO: 2381016 - RNA, 19 nt, Artificial Sequence
  Description of Artificial Sequence: Synthetic oligonucleotide
cugugcguggcacaaaugg

SEQ ID NO: 2381017 - RNA, 19 nt, Artificial Sequence
  Description of Artificial Sequence: Synthetic oligonucleotide
aaugccaagaguauuggaa

SEQ ID NO: 2381018 - RNA, 19 nt, Artificial Sequence
  Description of Artificial Sequence: Synthetic oligonucleotide
aguccagaagcucagggug

SEQ ID NO: 2381019 - RNA, 19 nt, Artificial Sequence
  Description of Artificial Sequence: Synthetic oligonucleotide
aaaucaaaguccagaagcu

SEQ ID NO: 2381020 - RNA, 19 nt, Artificial Sequence
  Description of Artificial Sequence: Synthetic oligonucleotide
auugcauugauccccgagu

SEQ ID NO: 2381021 - RNA, 19 nt, Artificial Sequence
  Description of Artificial Sequence: Synthetic oligonucleotide
ucgucuucugggaaugggg

SEQ ID NO: 2381022 - RNA, 19 nt, Artificial Sequence
  Description of Artificial Sequence: Synthetic oligonucleotide
gaauggggcguucagugag

SEQ ID NO: 2381023 - RNA, 19 nt, Artificial Sequence
  Description of Artificial Sequence: Synthetic oligonucleotide
cauauuugcagugacacca

SEQ ID NO: 2381024 - RNA, 19 nt, Artificial Sequence
  Description of Artificial Sequence: Synthetic oligonucleotide
aucaaaucaaaguccagaa

SEQ ID NO: 2381025 - RNA, 19 nt, Artificial Sequence
  Description of Artificial Sequence: Synthetic oligonucleotide
aagaguauuggaaaagaau

SEQ ID NO: 2381026 - RNA, 19 nt, Artificial Sequence
  Description of Artificial Sequence: Synthetic oligonucleotide
uuccagaucagacugugau

SEQ ID NO: 2381027 - RNA, 19 nt, Artificial Sequence
  Description of Artificial Sequence: Synthetic oligonucleotide
uaauagagcuuggaaaaug

SEQ ID NO: 2381028 - RNA, 19 nt, Artificial Sequence
  Description of Artificial Sequence: Synthetic oligonucleotide
agugacaccaucccaggug

SEQ ID NO: 2381029 - RNA, 19 nt, Artificial Sequence
  Description of Artificial Sequence: Synthetic oligonucleotide
aguauuggaaaagaaugca

SEQ ID NO: 2381030 - RNA, 19 nt, Artificial Sequence
  Description of Artificial Sequence: Synthetic oligonucleotide
auuccacauagugagcccc

SEQ ID NO: 2381031 - RNA, 19 nt, Artificial Sequence
  Description of Artificial Sequence: Synthetic oligonucleotide
ugguugguaauagagcuug

SEQ ID NO: 2381032 - RNA, 19 nt, Artificial Sequence
  Description of Artificial Sequence: Synthetic oligonucleotide
aaguccagaagcucagggu

SEQ ID NO: 2381033 - RNA, 19 nt, Artificial Sequence
  Description of Artificial Sequence: Synthetic oligonucleotide
cacaggauuccacauagug

SEQ ID NO: 2381034 - RNA, 19 nt, Artificial Sequence
  Description of Artificial Sequence: Synthetic oligonucleotide
uguaauccuccucggaacu

SEQ ID NO: 2381035 - RNA, 19 nt, Artificial Sequence
  Description of Artificial Sequence: Synthetic oligonucleotide
acauagugagccccaauug

SEQ ID NO: 2381036 - RNA, 19 nt, Artificial Sequence
  Description of Artificial Sequence: Synthetic oligonucleotide
auuaaggcaucaugugcag

SEQ ID NO: 2381037 - RNA, 19 nt, Artificial Sequence
  Description of Artificial Sequence: Synthetic oligonucleotide
ggcacaaauggacagcccg

SEQ ID NO: 2381038 - RNA, 19 nt, Artificial Sequence
  Description of Artificial Sequence: Synthetic oligonucleotide
auagagcuuggaaaaugcc

SEQ ID NO: 2381039 - RNA, 19 nt, Artificial Sequence
  Description of Artificial Sequence: Synthetic oligonucleotide
gccccaauugcauugaucc

SEQ ID NO: 2381040 - RNA, 19 nt, Artificial Sequence
  Description of Artificial Sequence: Synthetic oligonucleotide
cuccucggaacucaguucc

SEQ ID NO: 2381041 - RNA, 19 nt, Artificial Sequence
  Description of Artificial Sequence: Synthetic oligonucleotide
uggaaaaugccaagaguau

SEQ ID NO: 2381042 - RNA, 19 nt, Artificial Sequence
  Description of Artificial Sequence: Synthetic oligonucleotide
agaucagacugugaugggg

SEQ ID NO: 2381043 - RNA, 19 nt, Artificial Sequence
  Description of Artificial Sequence: Synthetic oligonucleotide
uuuggaaauuaaggcauca

SEQ ID NO: 2381044 - RNA, 19 nt, Artificial Sequence
  Description of Artificial Sequence: Synthetic oligonucleotide
ggcugauauacauauuugc

SEQ ID NO: 2381045 - RNA, 19 nt, Artificial Sequence
  Description of Artificial Sequence: Synthetic oligonucleotide
acucaguuccgccccuucc

SEQ ID NO: 2381046 - RNA, 19 nt, Artificial Sequence
  Description of Artificial Sequence: Synthetic oligonucleotide
ggagcagugauccaguuuc

SEQ ID NO: 2381047 - RNA, 19 nt, Artificial Sequence
  Description of Artificial Sequence: Synthetic oligonucleotide
ggggcuguaauccuccucg

SEQ ID NO: 2381048 - RNA, 19 nt, Artificial Sequence
  Description of Artificial Sequence: Synthetic oligonucleotide
ugugcguggcacaaaugga

SEQ ID NO: 2381049 - RNA, 19 nt, Artificial Sequence
  Description of Artificial Sequence: Synthetic oligonucleotide
gauuccacauagugagccc

SEQ ID NO: 2381050 - RNA, 19 nt, Artificial Sequence
  Description of Artificial Sequence: Synthetic oligonucleotide
agugauccaguuucggagu

SEQ ID NO: 2381051 - RNA, 19 nt, Artificial Sequence
  Description of Artificial Sequence: Synthetic oligonucleotide
uggcggaggagccaccccg

SEQ ID NO: 2381052 - RNA, 19 nt, Artificial Sequence
  Description of Artificial Sequence: Synthetic oligonucleotide
gaucacuuccagaucagac

SEQ ID NO: 2381053 - RNA, 19 nt, Artificial Sequence
  Description of Artificial Sequence: Synthetic oligonucleotide
ccagaucagacugugaugg

SEQ ID NO: 2381054 - RNA, 19 nt, Artificial Sequence
  Description of Artificial Sequence: Synthetic oligonucleotide
agugagugagaccgagauc

SEQ ID NO: 2381055 - RNA, 19 nt, Artificial Sequence
  Description of Artificial Sequence: Synthetic oligonucleotide
uccaguuucggagugucac

SEQ ID NO: 2381056 - RNA, 19 nt, Artificial Sequence
  Description of Artificial Sequence: Synthetic oligonucleotide
aacucaguuccgccccuuc

SEQ ID NO: 2381057 - RNA, 19 nt, Artificial Sequence
  Description of Artificial Sequence: Synthetic oligonucleotide
cguucagugagugagaccg

SEQ ID NO: 2381058 - RNA, 19 nt, Artificial Sequence
  Description of Artificial Sequence: Synthetic oligonucleotide
cuguaauccuccucggaac

SEQ ID NO: 2381059 - RNA, 19 nt, Artificial Sequence
  Description of Artificial Sequence: Synthetic oligonucleotide
agugguuuccaugguuucg

SEQ ID NO: 2381060 - RNA, 19 nt, Artificial Sequence
  Description of Artificial Sequence: Synthetic oligonucleotide
cagcuugaagcacuugccg

SEQ ID NO: 2381061 - RNA, 19 nt, Artificial Sequence
  Description of Artificial Sequence: Synthetic oligonucleotide
ucggaacucaguuccgccc

SEQ ID NO: 2381062 - RNA, 19 nt, Artificial Sequence
  Description of Artificial Sequence: Synthetic oligonucleotide
gugagugagaccgagaucu

SEQ ID NO: 2381063 - RNA, 19 nt, Artificial Sequence
  Description of Artificial Sequence: Synthetic oligonucleotide
uucagugagugagaccgag

SEQ ID NO: 2381064 - RNA, 19 nt, Artificial Sequence
  Description of Artificial Sequence: Synthetic oligonucleotide
caucaaaucaaaguccaga

SEQ ID NO: 2381065 - RNA, 19 nt, Artificial Sequence
  Description of Artificial Sequence: Synthetic oligonucleotide
ucauaggcugauauacaua

SEQ ID NO: 2381066 - RNA, 19 nt, Artificial Sequence
  Description of Artificial Sequence: Synthetic oligonucleotide
ucgaucacuuccagaucag

SEQ ID NO: 2381067 - RNA, 19 nt, Artificial Sequence
  Description of Artificial Sequence: Synthetic oligonucleotide
cuuuggaaauuaaggcauc

SEQ ID NO: 2381068 - RNA, 19 nt, Artificial Sequence
  Description of Artificial Sequence: Synthetic oligonucleotide
agagcuuggaaaaugccaa

SEQ ID NO: 2381069 - RNA, 19 nt, Artificial Sequence
  Description of Artificial Sequence: Synthetic oligonucleotide
cauaggcugauauacauau

SEQ ID NO: 2381070 - RNA, 19 nt, Artificial Sequence
  Description of Artificial Sequence: Synthetic oligonucleotide
cuggaagucgggucugcgg

SEQ ID NO: 2381071 - RNA, 19 nt, Artificial Sequence
  Description of Artificial Sequence: Synthetic oligonucleotide
cacuuucucgcucuuccag

SEQ ID NO: 2381072 - RNA, 19 nt, Artificial Sequence
  Description of Artificial Sequence: Synthetic oligonucleotide
augugcagagaccuccuca

SEQ ID NO: 2381073 - RNA, 19 nt, Artificial Sequence
  Description of Artificial Sequence: Synthetic oligonucleotide
cuugaagcacuugccgugg

SEQ ID NO: 2381074 - RNA, 19 nt, Artificial Sequence
  Description of Artificial Sequence: Synthetic oligonucleotide
aucagacugugauggggag

SEQ ID NO: 2381075 - RNA, 19 nt, Artificial Sequence
  Description of Artificial Sequence: Synthetic oligonucleotide
uaauccuccucggaacuca

SEQ ID NO: 2381076 - RNA, 19 nt, Artificial Sequence
  Description of Artificial Sequence: Synthetic oligonucleotide
uuucggagugucacucucu

SEQ ID NO: 2381077 - RNA, 19 nt, Artificial Sequence
  Description of Artificial Sequence: Synthetic oligonucleotide
auugauccccgaguccucg

SEQ ID NO: 2381078 - RNA, 19 nt, Artificial Sequence
  Description of Artificial Sequence: Synthetic oligonucleotide
ucuucugggaauggggcgu

SEQ ID NO: 2381079 - RNA, 19 nt, Artificial Sequence
  Description of Artificial Sequence: Synthetic oligonucleotide
cugacuacacagugguuuc

SEQ ID NO: 2381080 - RNA, 19 nt, Artificial Sequence
  Description of Artificial Sequence: Synthetic oligonucleotide
agaaugcaucaaaucaaag

SEQ ID NO: 2381081 - RNA, 19 nt, Artificial Sequence
  Description of Artificial Sequence: Synthetic oligonucleotide
uccuccucggaacucaguu

SEQ ID NO: 2381082 - RNA, 19 nt, Artificial Sequence
  Description of Artificial Sequence: Synthetic oligonucleotide
gugagccccaauugcauug

SEQ ID NO: 2381083 - RNA, 19 nt, Artificial Sequence
  Description of Artificial Sequence: Synthetic oligonucleotide
ggauuccacauagugagcc

SEQ ID NO: 2381084 - RNA, 19 nt, Artificial Sequence
  Description of Artificial Sequence: Synthetic oligonucleotide
agcacucaucucucccggc

SEQ ID NO: 2381085 - RNA, 19 nt, Artificial Sequence
  Description of Artificial Sequence: Synthetic oligonucleotide
ucucucccggcgcggagcg

SEQ ID NO: 2381086 - RNA, 19 nt, Artificial Sequence
  Description of Artificial Sequence: Synthetic oligonucleotide
ggaaauuaaggcaucaugu

SEQ ID NO: 2381087 - RNA, 19 nt, Artificial Sequence
  Description of Artificial Sequence: Synthetic oligonucleotide
accgagaucugaauggugu

SEQ ID NO: 2381088 - RNA, 19 nt, Artificial Sequence
  Description of Artificial Sequence: Synthetic oligonucleotide
guugcggggagucuccgug

SEQ ID NO: 2381089 - RNA, 19 nt, Artificial Sequence
  Description of Artificial Sequence: Synthetic oligonucleotide
gggaauggggcguucagug

SEQ ID NO: 2381090 - RNA, 19 nt, Artificial Sequence
  Description of Artificial Sequence: Synthetic oligonucleotide
auccccgaguccucggaac

SEQ ID NO: 2381091 - RNA, 19 nt, Artificial Sequence
  Description of Artificial Sequence: Synthetic oligonucleotide
uccaugguuucgaucacuu

SEQ ID NO: 2381092 - RNA, 19 nt, Artificial Sequence
  Description of Artificial Sequence: Synthetic oligonucleotide
ucggguucccagcugcucu

SEQ ID NO: 2381093 - RNA, 19 nt, Artificial Sequence
  Description of Artificial Sequence: Synthetic oligonucleotide
acaccaucccaggugacag

SEQ ID NO: 2381094 - RNA, 19 nt, Artificial Sequence
  Description of Artificial Sequence: Synthetic oligonucleotide
ugguuucgaucacuuccag

SEQ ID NO: 2381095 - RNA, 19 nt, Artificial Sequence
  Description of Artificial Sequence: Synthetic oligonucleotide
uugcagugacaccauccca

SEQ ID NO: 2381096 - RNA, 19 nt, Artificial Sequence
  Description of Artificial Sequence: Synthetic oligonucleotide
gaagucgggucugcgggcg

SEQ ID NO: 2381097 - RNA, 19 nt, Artificial Sequence
  Description of Artificial Sequence: Synthetic oligonucleotide
cucggaacucaguuccgcc

SEQ ID NO: 2381098 - RNA, 19 nt, Artificial Sequence
  Description of Artificial Sequence: Synthetic oligonucleotide
uuccacauagugagcccca

SEQ ID NO: 2381099 - RNA, 19 nt, Artificial Sequence
  Description of Artificial Sequence: Synthetic oligonucleotide
ucgcacggcuggaagucgg

SEQ ID NO: 2381100 - RNA, 19 nt, Artificial Sequence
  Description of Artificial Sequence: Synthetic oligonucleotide
uggggagcugcuccacggg

SEQ ID NO: 2381101 - RNA, 19 nt, Artificial Sequence
  Description of Artificial Sequence: Synthetic oligonucleotide
gggucauaggcugauauac

SEQ ID NO: 2381102 - RNA, 19 nt, Artificial Sequence
  Description of Artificial Sequence: Synthetic oligonucleotide
acggcuggaagucgggucu

SEQ ID NO: 2381103 - RNA, 19 nt, Artificial Sequence
  Description of Artificial Sequence: Synthetic oligonucleotide
uccucggaacucaguuccg

SEQ ID NO: 2381104 - RNA, 19 nt, Artificial Sequence
  Description of Artificial Sequence: Synthetic oligonucleotide
gagaccuccucagggcucg

SEQ ID NO: 2381105 - RNA, 19 nt, Artificial Sequence
  Description of Artificial Sequence: Synthetic oligonucleotide
uuggugggcgucucguggc

SEQ ID NO: 2381106 - RNA, 19 nt, Artificial Sequence
  Description of Artificial Sequence: Synthetic oligonucleotide
cacucaucggguucccagc

SEQ ID NO: 2381107 - RNA, 19 nt, Artificial Sequence
  Description of Artificial Sequence: Synthetic oligonucleotide
cucaggguggaucccggcc

SEQ ID NO: 2381108 - RNA, 19 nt, Artificial Sequence
  Description of Artificial Sequence: Synthetic oligonucleotide
cuuccagccgcgcucgggc

SEQ ID NO: 2381109 - RNA, 19 nt, Artificial Sequence
  Description of Artificial Sequence: Synthetic oligonucleotide
gcugauauacauauuugca

SEQ ID NO: 2381110 - RNA, 19 nt, Artificial Sequence
  Description of Artificial Sequence: Synthetic oligonucleotide
ucguccacuuucucgcucu

SEQ ID NO: 2381111 - RNA, 19 nt, Artificial Sequence
  Description of Artificial Sequence: Synthetic oligonucleotide
uagugagccccaauugcau

SEQ ID NO: 2381112 - RNA, 19 nt, Artificial Sequence
  Description of Artificial Sequence: Synthetic oligonucleotide
ucucguggccguugcgggg

SEQ ID NO: 2381113 - RNA, 19 nt, Artificial Sequence
  Description of Artificial Sequence: Synthetic oligonucleotide
ucucgcucuuccagccgcg

SEQ ID NO: 2381114 - RNA, 19 nt, Artificial Sequence
  Description of Artificial Sequence: Synthetic oligonucleotide
agcagugauccaguuucgg

SEQ ID NO: 2381115 - RNA, 19 nt, Artificial Sequence
  Description of Artificial Sequence: Synthetic oligonucleotide
guucccagcugcucucggg

SEQ ID NO: 2381116 - RNA, 19 nt, Artificial Sequence
  Description of Artificial Sequence: Synthetic oligonucleotide
gcagcuccgagccagggcc

SEQ ID NO: 2381117 - RNA, 19 nt, Artificial Sequence
  Description of Artificial Sequence: Synthetic oligonucleotide
ugagugagaccgagaucug

SEQ ID NO: 2381118 - RNA, 19 nt, Artificial Sequence
  Description of Artificial Sequence: Synthetic oligonucleotide
aagggugcacucaucgggu

SEQ ID NO: 2381119 - RNA, 19 nt, Artificial Sequence
  Description of Artificial Sequence: Synthetic oligonucleotide
ggggcguucagugagugag

SEQ ID NO: 2381120 - RNA, 19 nt, Artificial Sequence
  Description of Artificial Sequence: Synthetic oligonucleotide
agcuuggaaaaugccaaga

SEQ ID NO: 2381121 - RNA, 19 nt, Artificial Sequence
  Description of Artificial Sequence: Synthetic oligonucleotide
uugauccccgaguccucgg

SEQ ID NO: 2381122 - RNA, 19 nt, Artificial Sequence
  Description of Artificial Sequence: Synthetic oligonucleotide
cagaucagacugugauggg

SEQ ID NO: 2381123 - RNA, 19 nt, Artificial Sequence
  Description of Artificial Sequence: Synthetic oligonucleotide
guuucggagugucacucuc

SEQ ID NO: 2381124 - RNA, 19 nt, Artificial Sequence
  Description of Artificial Sequence: Synthetic oligonucleotide
cucgucacaggauuccaca

SEQ ID NO: 2381125 - RNA, 19 nt, Artificial Sequence
  Description of Artificial Sequence: Synthetic oligonucleotide
acucaucggguucccagcu

SEQ ID NO: 2381126 - RNA, 19 nt, Artificial Sequence
  Description of Artificial Sequence: Synthetic oligonucleotide
uucggagugucacucucuu

SEQ ID NO: 2381127 - RNA, 19 nt, Artificial Sequence
  Description of Artificial Sequence: Synthetic oligonucleotide
cuuggaaaaugccaagagu

SEQ ID NO: 2381128 - RNA, 19 nt, Artificial Sequence
  Description of Artificial Sequence: Synthetic oligonucleotide
aguuucggagugucacucu

SEQ ID NO: 2381129 - RNA, 19 nt, Artificial Sequence
  Description of Artificial Sequence: Synthetic oligonucleotide
aggcugauauacauauuug

SEQ ID NO: 2381130 - RNA, 19 nt, Artificial Sequence
  Description of Artificial Sequence: Synthetic oligonucleotide
augguuucgaucacuucca

SEQ ID NO: 2381131 - RNA, 19 nt, Artificial Sequence
  Description of Artificial Sequence: Synthetic oligonucleotide
uccucggaacuggaagggg

SEQ ID NO: 2381132 - RNA, 19 nt, Artificial Sequence
  Description of Artificial Sequence: Synthetic oligonucleotide
aggauuccacauagugagc

SEQ ID NO: 2381133 - RNA, 19 nt, Artificial Sequence
  Description of Artificial Sequence: Synthetic oligonucleotide
cucgucuucugggaauggg

SEQ ID NO: 2381134 - RNA, 19 nt, Artificial Sequence
  Description of Artificial Sequence: Synthetic oligonucleotide
ugauccccgaguccucgga

SEQ ID NO: 2381135 - RNA, 19 nt, Artificial Sequence
  Description of Artificial Sequence: Synthetic oligonucleotide
ucucccggcgcggagcggg

SEQ ID NO: 2381136 - RNA, 19 nt, Artificial Sequence
  Description of Artificial Sequence: Synthetic oligonucleotide
aguuccgccccuuccucug

SEQ ID NO: 2381137 - RNA, 19 nt, Artificial Sequence
  Description of Artificial Sequence: Synthetic oligonucleotide
uggcacaaauggacagccc

SEQ ID NO: 2381138 - RNA, 19 nt, Artificial Sequence
  Description of Artificial Sequence: Synthetic oligonucleotide
guugguaauagagcuugga

SEQ ID NO: 2381139 - RNA, 19 nt, Artificial Sequence
  Description of Artificial Sequence: Synthetic oligonucleotide
aagucgggucugcgggcgg

SEQ ID NO: 2381140 - RNA, 19 nt, Artificial Sequence
  Description of Artificial Sequence: Synthetic oligonucleotide
uguccucgucacaggauuc

SEQ ID NO: 2381141 - RNA, 19 nt, Artificial Sequence
  Description of Artificial Sequence: Synthetic oligonucleotide
ucagacugugauggggaga

SEQ ID NO: 2381142 - RNA, 19 nt, Artificial Sequence
  Description of Artificial Sequence: Synthetic oligonucleotide
ugacuacacagugguuucc

SEQ ID NO: 2381143 - RNA, 19 nt, Artificial Sequence
  Description of Artificial Sequence: Synthetic oligonucleotide
agcccgggagcggaggugc

SEQ ID NO: 2381144 - RNA, 19 nt, Artificial Sequence
  Description of Artificial Sequence: Synthetic oligonucleotide
uccccgaguccucggaacu

SEQ ID NO: 2381145 - RNA, 19 nt, Artificial Sequence
  Description of Artificial Sequence: Synthetic oligonucleotide
cacucaucucucccggcgc

SEQ ID NO: 2381146 - RNA, 19 nt, Artificial Sequence
  Description of Artificial Sequence: Synthetic oligonucleotide
ucgucacaggauuccacau

SEQ ID NO: 2381147 - RNA, 19 nt, Artificial Sequence
  Description of Artificial Sequence: Synthetic oligonucleotide
gucauaggcugauauacau

SEQ ID NO: 2381148 - RNA, 19 nt, Artificial Sequence
  Description of Artificial Sequence: Synthetic oligonucleotide
ugcgccucguccacuuucu

SEQ ID NO: 2381149 - RNA, 19 nt, Artificial Sequence
  Description of Artificial Sequence: Synthetic oligonucleotide
guccucggaacuggaaggg

SEQ ID NO: 2381150 - RNA, 19 nt, Artificial Sequence
  Description of Artificial Sequence: Synthetic oligonucleotide
aauccuccucggaacucag

SEQ ID NO: 2381151 - RNA, 19 nt, Artificial Sequence
  Description of Artificial Sequence: Synthetic oligonucleotide
ucugggaauggggcguuca

SEQ ID NO: 2381152 - RNA, 19 nt, Artificial Sequence
  Description of Artificial Sequence: Synthetic oligonucleotide
gacuacacagugguuucca

SEQ ID NO: 2381153 - RNA, 19 nt, Artificial Sequence
  Description of Artificial Sequence: Synthetic oligonucleotide
gaucggcuggcggaggagc

SEQ ID NO: 2381154 - RNA, 19 nt, Artificial Sequence
  Description of Artificial Sequence: Synthetic oligonucleotide
agugagaccgagaucugaa

SEQ ID NO: 2381155 - RNA, 19 nt, Artificial Sequence
  Description of Artificial Sequence: Synthetic oligonucleotide
gagcagugauccaguuucg

SEQ ID NO: 2381156 - RNA, 19 nt, Artificial Sequence
  Description of Artificial Sequence: Synthetic oligonucleotide
acugcugugguugguaaua

SEQ ID NO: 2381157 - RNA, 19 nt, Artificial Sequence
  Description of Artificial Sequence: Synthetic oligonucleotide
cugaaugguguuggugggc

SEQ ID NO: 2381158 - RNA, 19 nt, Artificial Sequence
  Description of Artificial Sequence: Synthetic oligonucleotide
gcuguaauccuccucggaa

SEQ ID NO: 2381159 - RNA, 19 nt, Artificial Sequence
  Description of Artificial Sequence: Synthetic oligonucleotide
agaccgagaucugaauggu

SEQ ID NO: 2381160 - RNA, 19 nt, Artificial Sequence
  Description of Artificial Sequence: Synthetic oligonucleotide
gcacucaucggguucccag

SEQ ID NO: 2381161 - RNA, 19 nt, Artificial Sequence
  Description of Artificial Sequence: Synthetic oligonucleotide
agugagccccaauugcauu

SEQ ID NO: 2381162 - RNA, 19 nt, Artificial Sequence
  Description of Artificial Sequence: Synthetic oligonucleotide
caguuucggagugucacuc

SEQ ID NO: 2381163 - RNA, 19 nt, Artificial Sequence
  Description of Artificial Sequence: Synthetic oligonucleotide
ugagccccaauugcauuga

SEQ ID NO: 2381164 - RNA, 19 nt, Artificial Sequence
  Description of Artificial Sequence: Synthetic oligonucleotide
aucggcuggcggaggagcc

SEQ ID NO: 2381165 - RNA, 19 nt, Artificial Sequence
  Description of Artificial Sequence: Synthetic oligonucleotide
cacaaauggacagcccguc

SEQ ID NO: 2381166 - RNA, 19 nt, Artificial Sequence
  Description of Artificial Sequence: Synthetic oligonucleotide
aauggggcguucagugagu

SEQ ID NO: 2381167 - RNA, 19 nt, Artificial Sequence
  Description of Artificial Sequence: Synthetic oligonucleotide
uugcggggagucuccgugc

SEQ ID NO: 2381168 - RNA, 19 nt, Artificial Sequence
  Description of Artificial Sequence: Synthetic oligonucleotide
agagaagggugcacucauc

SEQ ID NO: 2381169 - RNA, 19 nt, Artificial Sequence
  Description of Artificial Sequence: Synthetic oligonucleotide
ugcggggagucuccgugcu

SEQ ID NO: 2381170 - RNA, 19 nt, Artificial Sequence
  Description of Artificial Sequence: Synthetic oligonucleotide
cagugguuuccaugguuuc

SEQ ID NO: 2381171 - RNA, 19 nt, Artificial Sequence
  Description of Artificial Sequence: Synthetic oligonucleotide
cggagugucacucucuuug

SEQ ID NO: 2381172 - RNA, 19 nt, Artificial Sequence
  Description of Artificial Sequence: Synthetic oligonucleotide
gacccggagcccgggagcg

SEQ ID NO: 2381173 - RNA, 19 nt, Artificial Sequence
  Description of Artificial Sequence: Synthetic oligonucleotide
gugcggggcgggcaggacg

SEQ ID NO: 2381174 - RNA, 19 nt, Artificial Sequence
  Description of Artificial Sequence: Synthetic oligonucleotide
ggugcacucaucggguucc

SEQ ID NO: 2381175 - RNA, 19 nt, Artificial Sequence
  Description of Artificial Sequence: Synthetic oligonucleotide
cacggcuggaagucggguc

SEQ ID NO: 2381176 - RNA, 19 nt, Artificial Sequence
  Description of Artificial Sequence: Synthetic oligonucleotide
uggugggcgucucguggcc

SEQ ID NO: 2381177 - RNA, 19 nt, Artificial Sequence
  Description of Artificial Sequence: Synthetic oligonucleotide
agggcgcagcgaccgggcc

SEQ ID NO: 2381178 - RNA, 19 nt, Artificial Sequence
  Description of Artificial Sequence: Synthetic oligonucleotide
gaagcucaggguggauccc

SEQ ID NO: 2381179 - RNA, 19 nt, Artificial Sequence
  Description of Artificial Sequence: Synthetic oligonucleotide
agucgggucugcgggcggc

SEQ ID NO: 2381180 - RNA, 19 nt, Artificial Sequence
  Description of Artificial Sequence: Synthetic oligonucleotide
caucaugugcagagaccuc

SEQ ID NO: 2381181 - RNA, 19 nt, Artificial Sequence
  Description of Artificial Sequence: Synthetic oligonucleotide
ugauccaguuucggagugu

SEQ ID NO: 2381182 - RNA, 19 nt, Artificial Sequence
  Description of Artificial Sequence: Synthetic oligonucleotide
ugcucucggggcuguaauc

SEQ ID NO: 2381183 - RNA, 19 nt, Artificial Sequence
  Description of Artificial Sequence: Synthetic oligonucleotide
guauuggaaaagaaugcau

SEQ ID NO: 2381184 - RNA, 19 nt, Artificial Sequence
  Description of Artificial Sequence: Synthetic oligonucleotide
gguggaucccggccggccg

SEQ ID NO: 2381185 - RNA, 19 nt, Artificial Sequence
  Description of Artificial Sequence: Synthetic oligonucleotide
gagugagaccgagaucuga

SEQ ID NO: 2381186 - RNA, 19 nt, Artificial Sequence
  Description of Artificial Sequence: Synthetic oligonucleotide
guccucgucacaggauucc

SEQ ID NO: 2381187 - RNA, 19 nt, Artificial Sequence
  Description of Artificial Sequence: Synthetic oligonucleotide
caggguggaucccggccgg

SEQ ID NO: 2381188 - RNA, 19 nt, Artificial Sequence
  Description of Artificial Sequence: Synthetic oligonucleotide
cacuugccguggcugugcg

SEQ ID NO: 2381189 - RNA, 19 nt, Artificial Sequence
  Description of Artificial Sequence: Synthetic oligonucleotide
gcucucggggcuguaaucc

SEQ ID NO: 2381190 - RNA, 19 nt, Artificial Sequence
  Description of Artificial Sequence: Synthetic oligonucleotide
ucgcucuuccagccgcgcu

SEQ ID NO: 2381191 - RNA, 19 nt, Artificial Sequence
  Description of Artificial Sequence: Synthetic oligonucleotide
cagcugacuacacaguggu

SEQ ID NO: 2381192 - RNA, 19 nt, Artificial Sequence
  Description of Artificial Sequence: Synthetic oligonucleotide
ggcaucaugugcagagacc

SEQ ID NO: 2381193 - RNA, 19 nt, Artificial Sequence
  Description of Artificial Sequence: Synthetic oligonucleotide
gguuucgaucacuuccaga

SEQ ID NO: 2381194 - RNA, 19 nt, Artificial Sequence
  Description of Artificial Sequence: Synthetic oligonucleotide
gguuuccaugguuucgauc

SEQ ID NO: 2381195 - RNA, 19 nt, Artificial Sequence
  Description of Artificial Sequence: Synthetic oligonucleotide
ugguuuccaugguuucgau

SEQ ID NO: 2381196 - RNA, 19 nt, Artificial Sequence
  Description of Artificial Sequence: Synthetic oligonucleotide
caccaucccaggugacagc

SEQ ID NO: 2381197 - RNA, 19 nt, Artificial Sequence
  Description of Artificial Sequence: Synthetic oligonucleotide
aggagccaccccgggaggg

SEQ ID NO: 2381198 - RNA, 19 nt, Artificial Sequence
  Description of Artificial Sequence: Synthetic oligonucleotide
uuccgccccuuccucugug

SEQ ID NO: 2381199 - RNA, 19 nt, Artificial Sequence
  Description of Artificial Sequence: Synthetic oligonucleotide
ucaucucucccggcgcgga

SEQ ID NO: 2381200 - RNA, 19 nt, Artificial Sequence
  Description of Artificial Sequence: Synthetic oligonucleotide
gguugguaauagagcuugg

SEQ ID NO: 2381201 - RNA, 19 nt, Artificial Sequence
  Description of Artificial Sequence: Synthetic oligonucleotide
cucaucucucccggcgcgg

SEQ ID NO: 2381202 - RNA, 19 nt, Artificial Sequence
  Description of Artificial Sequence: Synthetic oligonucleotide
gucgcacggcuggaagucg

SEQ ID NO: 2381203 - RNA, 19 nt, Artificial Sequence
  Description of Artificial Sequence: Synthetic oligonucleotide
uggggcguucagugaguga

SEQ ID NO: 2381204 - RNA, 19 nt, Artificial Sequence
  Description of Artificial Sequence: Synthetic oligonucleotide
cucguccacuuucucgcuc

SEQ ID NO: 2381205 - RNA, 19 nt, Artificial Sequence
  Description of Artificial Sequence: Synthetic oligonucleotide
cuuccagaucagacuguga

SEQ ID NO: 2381206 - RNA, 19 nt, Artificial Sequence
  Description of Artificial Sequence: Synthetic oligonucleotide
gauccccgaguccucggaa

SEQ ID NO: 2381207 - RNA, 19 nt, Artificial Sequence
  Description of Artificial Sequence: Synthetic oligonucleotide
gcaucaugugcagagaccu

SEQ ID NO: 2381208 - RNA, 19 nt, Artificial Sequence
  Description of Artificial Sequence: Synthetic oligonucleotide
cugcgccucguccacuuuc

SEQ ID NO: 2381209 - RNA, 19 nt, Artificial Sequence
  Description of Artificial Sequence: Synthetic oligonucleotide
guggaucccggccggccgc

SEQ ID NO: 2381210 - RNA, 19 nt, Artificial Sequence
  Description of Artificial Sequence: Synthetic oligonucleotide
auggggcguucagugagug

SEQ ID NO: 2381211 - RNA, 19 nt, Artificial Sequence
  Description of Artificial Sequence: Synthetic oligonucleotide
ggaauggggcguucaguga

SEQ ID NO: 2381212 - RNA, 19 nt, Artificial Sequence
  Description of Artificial Sequence: Synthetic oligonucleotide
guaauagagcuuggaaaau

SEQ ID NO: 2381213 - RNA, 19 nt, Artificial Sequence
  Description of Artificial Sequence: Synthetic oligonucleotide
ggucauaggcugauauaca

SEQ ID NO: 2381214 - RNA, 19 nt, Artificial Sequence
  Description of Artificial Sequence: Synthetic oligonucleotide
ggcguucagugagugagac

SEQ ID NO: 2381215 - RNA, 19 nt, Artificial Sequence
  Description of Artificial Sequence: Synthetic oligonucleotide
ccccaauugcauugauccc

SEQ ID NO: 2381216 - RNA, 19 nt, Artificial Sequence
  Description of Artificial Sequence: Synthetic oligonucleotide
ggagagaagggugcacuca

SEQ ID NO: 2381217 - RNA, 19 nt, Artificial Sequence
  Description of Artificial Sequence: Synthetic oligonucleotide
cuggcggaggagccacccc

SEQ ID NO: 2381218 - RNA, 19 nt, Artificial Sequence
  Description of Artificial Sequence: Synthetic oligonucleotide
ucggagugucacucucuuu

SEQ ID NO: 2381219 - RNA, 19 nt, Artificial Sequence
  Description of Artificial Sequence: Synthetic oligonucleotide
gagcggaggugcggggcgg

SEQ ID NO: 2381220 - RNA, 19 nt, Artificial Sequence
  Description of Artificial Sequence: Synthetic oligonucleotide
uccgccccuuccucugugu

SEQ ID NO: 2381221 - RNA, 19 nt, Artificial Sequence
  Description of Artificial Sequence: Synthetic oligonucleotide
ugcacucaucggguuccca

SEQ ID NO: 2381222 - RNA, 19 nt, Artificial Sequence
  Description of Artificial Sequence: Synthetic oligonucleotide
gcaggcgcggcggggaucg

SEQ ID NO: 2381223 - RNA, 19 nt, Artificial Sequence
  Description of Artificial Sequence: Synthetic oligonucleotide
cagggcucgucuucuggga

SEQ ID NO: 2381224 - RNA, 19 nt, Artificial Sequence
  Description of Artificial Sequence: Synthetic oligonucleotide
gagggcgcagcgaccgggc

SEQ ID NO: 2381225 - RNA, 19 nt, Artificial Sequence
  Description of Artificial Sequence: Synthetic oligonucleotide
aggguggaucccggccggc

SEQ ID NO: 2381226 - RNA, 19 nt, Artificial Sequence
  Description of Artificial Sequence: Synthetic oligonucleotide
cuccgagccagggccugcg

SEQ ID NO: 2381227 - RNA, 19 nt, Artificial Sequence
  Description of Artificial Sequence: Synthetic oligonucleotide
ggagggcgcagcgaccggg

SEQ ID NO: 2381228 - RNA, 19 nt, Artificial Sequence
  Description of Artificial Sequence: Synthetic oligonucleotide
aggcgcggcggggaucggc

SEQ ID NO: 2381229 - RNA, 19 nt, Artificial Sequence
  Description of Artificial Sequence: Synthetic oligonucleotide
gcugacuacacagugguuu

SEQ ID NO: 2381230 - RNA, 19 nt, Artificial Sequence
  Description of Artificial Sequence: Synthetic oligonucleotide
cggaacucaguuccgcccc

SEQ ID NO: 2381231 - RNA, 19 nt, Artificial Sequence
  Description of Artificial Sequence: Synthetic oligonucleotide
uccgugcuggggagcugcu

SEQ ID NO: 2381232 - RNA, 19 nt, Artificial Sequence
  Description of Artificial Sequence: Synthetic oligonucleotide
acuugccguggcugugcgu

SEQ ID NO: 2381233 - RNA, 19 nt, Artificial Sequence
  Description of Artificial Sequence: Synthetic oligonucleotide
ggcucgucuucugggaaug

SEQ ID NO: 2381234 - RNA, 19 nt, Artificial Sequence
  Description of Artificial Sequence: Synthetic oligonucleotide
ggcggggaucggcuggcgg

SEQ ID NO: 2381235 - RNA, 19 nt, Artificial Sequence
  Description of Artificial Sequence: Synthetic oligonucleotide
gcguucagugagugagacc

SEQ ID NO: 2381236 - RNA, 19 nt, Artificial Sequence
  Description of Artificial Sequence: Synthetic oligonucleotide
ccucggaacuggaagggga

SEQ ID NO: 2381237 - RNA, 19 nt, Artificial Sequence
  Description of Artificial Sequence: Synthetic oligonucleotide
cagagaccuccucagggcu

SEQ ID NO: 2381238 - RNA, 19 nt, Artificial Sequence
  Description of Artificial Sequence: Synthetic oligonucleotide
gacagcaccagugcagcuu

SEQ ID NO: 2381239 - RNA, 19 nt, Artificial Sequence
  Description of Artificial Sequence: Synthetic oligonucleotide
ucugcgggcggcgcagcuc

SEQ ID NO: 2381240 - RNA, 19 nt, Artificial Sequence
  Description of Artificial Sequence: Synthetic oligonucleotide
guggccguugcggggaguc

SEQ ID NO: 2381241 - RNA, 19 nt, Artificial Sequence
  Description of Artificial Sequence: Synthetic oligonucleotide
gggugcacucaucggguuc

SEQ ID NO: 2381242 - RNA, 19 nt, Artificial Sequence
  Description of Artificial Sequence: Synthetic oligonucleotide
ggcgucucguggccguugc

SEQ ID NO: 2381243 - RNA, 19 nt, Artificial Sequence
  Description of Artificial Sequence: Synthetic oligonucleotide
agcggaggugcggggcggg

SEQ ID NO: 2381244 - RNA, 19 nt, Artificial Sequence
  Description of Artificial Sequence: Synthetic oligonucleotide
gugagaccgagaucugaau

SEQ ID NO: 2381245 - RNA, 19 nt, Artificial Sequence
  Description of Artificial Sequence: Synthetic oligonucleotide
cgagaucugaaugguguug

SEQ ID NO: 2381246 - RNA, 19 nt, Artificial Sequence
  Description of Artificial Sequence: Synthetic oligonucleotide
ggacugcugugguugguaa

SEQ ID NO: 2381247 - RNA, 19 nt, Artificial Sequence
  Description of Artificial Sequence: Synthetic oligonucleotide
gacagcccgucgcacggcu

SEQ ID NO: 2381248 - RNA, 19 nt, Artificial Sequence
  Description of Artificial Sequence: Synthetic oligonucleotide
gucgggucugcgggcggcg

SEQ ID NO: 2381249 - RNA, 19 nt, Artificial Sequence
  Description of Artificial Sequence: Synthetic oligonucleotide
ggggucauaggcugauaua

SEQ ID NO: 2381250 - RNA, 19 nt, Artificial Sequence
  Description of Artificial Sequence: Synthetic oligonucleotide
cucguggccguugcgggga

SEQ ID NO: 2381251 - RNA, 19 nt, Artificial Sequence
  Description of Artificial Sequence: Synthetic oligonucleotide
guggcugugcguggcacaa

SEQ ID NO: 2381252 - RNA, 19 nt, Artificial Sequence
  Description of Artificial Sequence: Synthetic oligonucleotide
ccucggaacucaguuccgc

SEQ ID NO: 2381253 - RNA, 19 nt, Artificial Sequence
  Description of Artificial Sequence: Synthetic oligonucleotide
ggugggcgucucguggccg

SEQ ID NO: 2381254 - RNA, 19 nt, Artificial Sequence
  Description of Artificial Sequence: Synthetic oligonucleotide
guucagugagugagaccga

SEQ ID NO: 2381255 - RNA, 19 nt, Artificial Sequence
  Description of Artificial Sequence: Synthetic oligonucleotide
cgucucguggccguugcgg

SEQ ID NO: 2381256 - RNA, 19 nt, Artificial Sequence
  Description of Artificial Sequence: Synthetic oligonucleotide
ggcgggcuccggcugcagg

SEQ ID NO: 2381257 - RNA, 19 nt, Artificial Sequence
  Description of Artificial Sequence: Synthetic oligonucleotide
acgcgggcgggcuccggcu

SEQ ID NO: 2381258 - RNA, 19 nt, Artificial Sequence
  Description of Artificial Sequence: Synthetic oligonucleotide
gccgcggcagcacucaucu

SEQ ID NO: 2381259 - RNA, 19 nt, Artificial Sequence
  Description of Artificial Sequence: Synthetic oligonucleotide
ggcggaggagccaccccgg

SEQ ID NO: 2381260 - RNA, 19 nt, Artificial Sequence
  Description of Artificial Sequence: Synthetic oligonucleotide
gcggggaucggcuggcgga

SEQ ID NO: 2381261 - RNA, 19 nt, Artificial Sequence
  Description of Artificial Sequence: Synthetic oligonucleotide
ucgggucugcgggcggcgc

SEQ ID NO: 2381262 - RNA, 19 nt, Artificial Sequence
  Description of Artificial Sequence: Synthetic oligonucleotide
ggguucccagcugcucucg

SEQ ID NO: 2381263 - RNA, 19 nt, Artificial Sequence
  Description of Artificial Sequence: Synthetic oligonucleotide
uucugggaauggggcguuc

SEQ ID NO: 2381264 - RNA, 19 nt, Artificial Sequence
  Description of Artificial Sequence: Synthetic oligonucleotide
cccgggagggcgcagcgac

SEQ ID NO: 2381265 - RNA, 19 nt, Artificial Sequence
  Description of Artificial Sequence: Synthetic oligonucleotide
gcucgucuucugggaaugg

SEQ ID NO: 2381266 - RNA, 19 nt, Artificial Sequence
  Description of Artificial Sequence: Synthetic oligonucleotide
gcacuugccguggcugugc

SEQ ID NO: 2381267 - RNA, 19 nt, Artificial Sequence
  Description of Artificial Sequence: Synthetic oligonucleotide
gcucaggguggaucccggc

SEQ ID NO: 2381268 - RNA, 19 nt, Artificial Sequence
  Description of Artificial Sequence: Synthetic oligonucleotide
gcggaggagccaccccggg

SEQ ID NO: 2381269 - RNA, 19 nt, Artificial Sequence
  Description of Artificial Sequence: Synthetic oligonucleotide
gcuggcggaggagccaccc

SEQ ID NO: 2381270 - RNA, 19 nt, Artificial Sequence
  Description of Artificial Sequence: Synthetic oligonucleotide
ggaucggcuggcggaggag

SEQ ID NO: 2381271 - RNA, 19 nt, Artificial Sequence
  Description of Artificial Sequence: Synthetic oligonucleotide
gggaucggcuggcggagga

SEQ ID NO: 2381272 - RNA, 19 nt, Artificial Sequence
  Description of Artificial Sequence: Synthetic oligonucleotide
cuggaaggggaggagcagu

SEQ ID NO: 2381273 - RNA, 19 nt, Artificial Sequence
  Description of Artificial Sequence: Synthetic oligonucleotide
cucucggggcuguaauccu

SEQ ID NO: 2381274 - RNA, 19 nt, Artificial Sequence
  Description of Artificial Sequence: Synthetic oligonucleotide
gcugugcguggcacaaaug

SEQ ID NO: 2381275 - RNA, 19 nt, Artificial Sequence
  Description of Artificial Sequence: Synthetic oligonucleotide
cccgucgcacggcuggaag

SEQ ID NO: 2381276 - RNA, 19 nt, Artificial Sequence
  Description of Artificial Sequence: Synthetic oligonucleotide
uggccguugcggggagucu

SEQ ID NO: 2381277 - RNA, 19 nt, Artificial Sequence
  Description of Artificial Sequence: Synthetic oligonucleotide
ggcuccggcugcaggcgcg

SEQ ID NO: 2381278 - RNA, 19 nt, Artificial Sequence
  Description of Artificial Sequence: Synthetic oligonucleotide
agacugugauggggagaga

SEQ ID NO: 2381279 - RNA, 19 nt, Artificial Sequence
  Description of Artificial Sequence: Synthetic oligonucleotide
ggcugugcguggcacaaau

SEQ ID NO: 2381280 - RNA, 19 nt, Artificial Sequence
  Description of Artificial Sequence: Synthetic oligonucleotide
ggagccaccccgggagggc

SEQ ID NO: 2381281 - RNA, 19 nt, Artificial Sequence
  Description of Artificial Sequence: Synthetic oligonucleotide
cgccccuuccucugugucc

SEQ ID NO: 2381282 - RNA, 19 nt, Artificial Sequence
  Description of Artificial Sequence: Synthetic oligonucleotide
acagcccgucgcacggcug

SEQ ID NO: 2381283 - RNA, 19 nt, Artificial Sequence
  Description of Artificial Sequence: Synthetic oligonucleotide
gcgucucguggccguugcg

SEQ ID NO: 2381284 - RNA, 19 nt, Artificial Sequence
  Description of Artificial Sequence: Synthetic oligonucleotide
ggguggaucccggccggcc

SEQ ID NO: 2381285 - RNA, 19 nt, Artificial Sequence
  Description of Artificial Sequence: Synthetic oligonucleotide
gggagggcgcagcgaccgg

SEQ ID NO: 2381286 - RNA, 19 nt, Artificial Sequence
  Description of Artificial Sequence: Synthetic oligonucleotide
gcacaaauggacagcccgu

SEQ ID NO: 2381287 - RNA, 19 nt, Artificial Sequence
  Description of Artificial Sequence: Synthetic oligonucleotide
cagugacaccaucccaggu

SEQ ID NO: 2381288 - RNA, 19 nt, Artificial Sequence
  Description of Artificial Sequence: Synthetic oligonucleotide
gugguugguaauagagcuu

SEQ ID NO: 2381289 - RNA, 19 nt, Artificial Sequence
  Description of Artificial Sequence: Synthetic oligonucleotide
ccaucccaggugacagcac

SEQ ID NO: 2381290 - RNA, 19 nt, Artificial Sequence
  Description of Artificial Sequence: Synthetic oligonucleotide
cgggagggcgcagcgaccg

SEQ ID NO: 2381291 - RNA, 19 nt, Artificial Sequence
  Description of Artificial Sequence: Synthetic oligonucleotide
gccguugcggggagucucc

SEQ ID NO: 2381292 - RNA, 19 nt, Artificial Sequence
  Description of Artificial Sequence: Synthetic oligonucleotide
uggcugugcguggcacaaa

SEQ ID NO: 2381293 - RNA, 19 nt, Artificial Sequence
  Description of Artificial Sequence: Synthetic oligonucleotide
ggccguugcggggagucuc

SEQ ID NO: 2381294 - RNA, 19 nt, Artificial Sequence
  Description of Artificial Sequence: Synthetic oligonucleotide
agcgaccgggccgggccug

SEQ ID NO: 2381295 - RNA, 19 nt, Artificial Sequence
  Description of Artificial Sequence: Synthetic oligonucleotide
gugggcgucucguggccgu

SEQ ID NO: 2381296 - RNA, 19 nt, Artificial Sequence
  Description of Artificial Sequence: Synthetic oligonucleotide
cgcacggcuggaagucggg

SEQ ID NO: 2381297 - RNA, 19 nt, Artificial Sequence
  Description of Artificial Sequence: Synthetic oligonucleotide
ggggaucggcuggcggagg

SEQ ID NO: 2381298 - RNA, 19 nt, Artificial Sequence
  Description of Artificial Sequence: Synthetic oligonucleotide
caucggguucccagcugcu

SEQ ID NO: 2381299 - RNA, 19 nt, Artificial Sequence
  Description of Artificial Sequence: Synthetic oligonucleotide
gaucccggccggccgcagu

SEQ ID NO: 2381300 - RNA, 19 nt, Artificial Sequence
  Description of Artificial Sequence: Synthetic oligonucleotide
ggaacucaguuccgccccu

SEQ ID NO: 2381301 - RNA, 19 nt, Artificial Sequence
  Description of Artificial Sequence: Synthetic oligonucleotide
gggcuccggcugcaggcgc

SEQ ID NO: 2381302 - RNA, 19 nt, Artificial Sequence
  Description of Artificial Sequence: Synthetic oligonucleotide
gagccccaauugcauugau

SEQ ID NO: 2381303 - RNA, 19 nt, Artificial Sequence
  Description of Artificial Sequence: Synthetic oligonucleotide
ggcgcagcuccgagccagg

SEQ ID NO: 2381304 - RNA, 19 nt, Artificial Sequence
  Description of Artificial Sequence: Synthetic oligonucleotide
ccucagggcucgucuucug

SEQ ID NO: 2381305 - RNA, 19 nt, Artificial Sequence
  Description of Artificial Sequence: Synthetic oligonucleotide
cgcagcuccgagccagggc

SEQ ID NO: 2381306 - RNA, 19 nt, Artificial Sequence
  Description of Artificial Sequence: Synthetic oligonucleotide
cagcaccagugcagcuuga

SEQ ID NO: 2381307 - RNA, 19 nt, Artificial Sequence
  Description of Artificial Sequence: Synthetic oligonucleotide
cucucccggcgcggagcgg

SEQ ID NO: 2381308 - RNA, 19 nt, Artificial Sequence
  Description of Artificial Sequence: Synthetic oligonucleotide
ccaguuucggagugucacu

SEQ ID NO: 2381309 - RNA, 19 nt, Artificial Sequence
  Description of Artificial Sequence: Synthetic oligonucleotide
gcgcagcuccgagccaggg

SEQ ID NO: 2381310 - RNA, 19 nt, Artificial Sequence
  Description of Artificial Sequence: Synthetic oligonucleotide
gcggggagucuccgugcug

SEQ ID NO: 2381311 - RNA, 19 nt, Artificial Sequence
  Description of Artificial Sequence: Synthetic oligonucleotide
cgucgcacggcuggaaguc

SEQ ID NO: 2381312 - RNA, 19 nt, Artificial Sequence
  Description of Artificial Sequence: Synthetic oligonucleotide
agcccgucgcacggcugga

SEQ ID NO: 2381313 - RNA, 19 nt, Artificial Sequence
  Description of Artificial Sequence: Synthetic oligonucleotide
gggcguucagugagugaga

SEQ ID NO: 2381314 - RNA, 19 nt, Artificial Sequence
  Description of Artificial Sequence: Synthetic oligonucleotide
ccgggagggcgcagcgacc

SEQ ID NO: 2381315 - RNA, 19 nt, Artificial Sequence
  Description of Artificial Sequence: Synthetic oligonucleotide
ucccggccggccgcaguuc

SEQ ID NO: 2381316 - RNA, 19 nt, Artificial Sequence
  Description of Artificial Sequence: Synthetic oligonucleotide
gcggagcggggacccggag

SEQ ID NO: 2381317 - RNA, 19 nt, Artificial Sequence
  Description of Artificial Sequence: Synthetic oligonucleotide
ugggcgucucguggccguu

SEQ ID NO: 2381318 - RNA, 19 nt, Artificial Sequence
  Description of Artificial Sequence: Synthetic oligonucleotide
gcucgggcgccgcggcagc

SEQ ID NO: 2381319 - RNA, 19 nt, Artificial Sequence
  Description of Artificial Sequence: Synthetic oligonucleotide
gggcucgucuucugggaau

SEQ ID NO: 2381320 - RNA, 19 nt, Artificial Sequence
  Description of Artificial Sequence: Synthetic oligonucleotide
ccagccgcgcucgggcgcc

SEQ ID NO: 2381321 - RNA, 19 nt, Artificial Sequence
  Description of Artificial Sequence: Synthetic oligonucleotide
agaccuccucagggcucgu

SEQ ID NO: 2381322 - RNA, 19 nt, Artificial Sequence
  Description of Artificial Sequence: Synthetic oligonucleotide
gggcgucucguggccguug

SEQ ID NO: 2381323 - RNA, 19 nt, Artificial Sequence
  Description of Artificial Sequence: Synthetic oligonucleotide
ccguugcggggagucuccg

SEQ ID NO: 2381324 - RNA, 19 nt, Artificial Sequence
  Description of Artificial Sequence: Synthetic oligonucleotide
ggcgccgcggcagcacuca

SEQ ID NO: 2381325 - RNA, 19 nt, Artificial Sequence
  Description of Artificial Sequence: Synthetic oligonucleotide
gucugcgggcggcgcagcu

SEQ ID NO: 2381326 - RNA, 19 nt, Artificial Sequence
  Description of Artificial Sequence: Synthetic oligonucleotide
ccgccccuuccucuguguc

SEQ ID NO: 2381327 - RNA, 19 nt, Artificial Sequence
  Description of Artificial Sequence: Synthetic oligonucleotide
ccguggcugugcguggcac

SEQ ID NO: 2381328 - RNA, 19 nt, Artificial Sequence
  Description of Artificial Sequence: Synthetic oligonucleotide
gcaggacgcgggcgggcuc

SEQ ID NO: 2381329 - RNA, 19 nt, Artificial Sequence
  Description of Artificial Sequence: Synthetic oligonucleotide
cggggaucggcuggcggag

SEQ ID NO: 2381330 - RNA, 19 nt, Artificial Sequence
  Description of Artificial Sequence: Synthetic oligonucleotide
cguggcugugcguggcaca

SEQ ID NO: 2381331 - RNA, 19 nt, Artificial Sequence
  Description of Artificial Sequence: Synthetic oligonucleotide
cuucugggaauggggcguu

SEQ ID NO: 2381332 - RNA, 19 nt, Artificial Sequence
  Description of Artificial Sequence: Synthetic oligonucleotide
ccggagcccgggagcggag

SEQ ID NO: 2381333 - RNA, 19 nt, Artificial Sequence
  Description of Artificial Sequence: Synthetic oligonucleotide
ggugcggggcgggcaggac

SEQ ID NO: 2381334 - RNA, 19 nt, Artificial Sequence
  Description of Artificial Sequence: Synthetic oligonucleotide
ccgagaucugaaugguguu

SEQ ID NO: 2381335 - RNA, 19 nt, Artificial Sequence
  Description of Artificial Sequence: Synthetic oligonucleotide
ggaucccggccggccgcag

SEQ ID NO: 2381336 - RNA, 19 nt, Artificial Sequence
  Description of Artificial Sequence: Synthetic oligonucleotide
ccggccgcaguucccagcu

SEQ ID NO: 2381337 - RNA, 19 nt, Artificial Sequence
  Description of Artificial Sequence: Synthetic oligonucleotide
cagccgcgcucgggcgccg

SEQ ID NO: 2381338 - RNA, 19 nt, Artificial Sequence
  Description of Artificial Sequence: Synthetic oligonucleotide
ggacgcgggcgggcuccgg

SEQ ID NO: 2381339 - RNA, 19 nt, Artificial Sequence
  Description of Artificial Sequence: Synthetic oligonucleotide
ccgucgcacggcuggaagu

SEQ ID NO: 2381340 - RNA, 19 nt, Artificial Sequence
  Description of Artificial Sequence: Synthetic oligonucleotide
cucgggcgccgcggcagca

SEQ ID NO: 2381341 - RNA, 19 nt, Artificial Sequence
  Description of Artificial Sequence: Synthetic oligonucleotide
gcggaggugcggggcgggc

SEQ ID NO: 2381342 - RNA, 19 nt, Artificial Sequence
  Description of Artificial Sequence: Synthetic oligonucleotide
agcugcucucggggcugua

SEQ ID NO: 2381343 - RNA, 19 nt, Artificial Sequence
  Description of Artificial Sequence: Synthetic oligonucleotide
cgccgcggcagcacucauc

SEQ ID NO: 2381344 - RNA, 19 nt, Artificial Sequence
  Description of Artificial Sequence: Synthetic oligonucleotide
cagcgaccgggccgggccu

SEQ ID NO: 2381345 - RNA, 19 nt, Artificial Sequence
  Description of Artificial Sequence: Synthetic oligonucleotide
gcacggcuggaagucgggu

SEQ ID NO: 2381346 - RNA, 19 nt, Artificial Sequence
  Description of Artificial Sequence: Synthetic oligonucleotide
ccacauagugagccccaau

SEQ ID NO: 2381347 - RNA, 19 nt, Artificial Sequence
  Description of Artificial Sequence: Synthetic oligonucleotide
ccucguccacuuucucgcu

SEQ ID NO: 2381348 - RNA, 19 nt, Artificial Sequence
  Description of Artificial Sequence: Synthetic oligonucleotide
gcgaccgggccgggccugc

SEQ ID NO: 2381349 - RNA, 19 nt, Artificial Sequence
  Description of Artificial Sequence: Synthetic oligonucleotide
gcggcgcagcuccgagcca

SEQ ID NO: 2381350 - RNA, 19 nt, Artificial Sequence
  Description of Artificial Sequence: Synthetic oligonucleotide
cgcgggcgggcuccggcug

SEQ ID NO: 2381351 - RNA, 19 nt, Artificial Sequence
  Description of Artificial Sequence: Synthetic oligonucleotide
cugcaggcgcggcggggau

SEQ ID NO: 2381352 - RNA, 19 nt, Artificial Sequence
  Description of Artificial Sequence: Synthetic oligonucleotide
gcgcucgggcgccgcggca

SEQ ID NO: 2381353 - RNA, 19 nt, Artificial Sequence
  Description of Artificial Sequence: Synthetic oligonucleotide
gcccgucgcacggcuggaa

SEQ ID NO: 2381354 - RNA, 19 nt, Artificial Sequence
  Description of Artificial Sequence: Synthetic oligonucleotide
ccgcaguucccagcugacu

SEQ ID NO: 2381355 - RNA, 19 nt, Artificial Sequence
  Description of Artificial Sequence: Synthetic oligonucleotide
cguugcggggagucuccgu

SEQ ID NO: 2381356 - RNA, 19 nt, Artificial Sequence
  Description of Artificial Sequence: Synthetic oligonucleotide
cggcggggaucggcuggcg

SEQ ID NO: 2381357 - RNA, 19 nt, Artificial Sequence
  Description of Artificial Sequence: Synthetic oligonucleotide
ggccugcgccucguccacu

SEQ ID NO: 2381358 - RNA, 19 nt, Artificial Sequence
  Description of Artificial Sequence: Synthetic oligonucleotide
gcgccgcggcagcacucau

SEQ ID NO: 2381359 - RNA, 19 nt, Artificial Sequence
  Description of Artificial Sequence: Synthetic oligonucleotide
cgggcgccgcggcagcacu

SEQ ID NO: 2381360 - RNA, 19 nt, Artificial Sequence
  Description of Artificial Sequence: Synthetic oligonucleotide
gaaccuuucauauuuaggg

SEQ ID NO: 2381361 - RNA, 19 nt, Artificial Sequence
  Description of Artificial Sequence: Synthetic oligonucleotide
uuuucaugcaucuuaauag

SEQ ID NO: 2381362 - RNA, 19 nt, Artificial Sequence
  Description of Artificial Sequence: Synthetic oligonucleotide
uauacaauggggaggaugg

SEQ ID NO: 2381363 - RNA, 19 nt, Artificial Sequence
  Description of Artificial Sequence: Synthetic oligonucleotide
auacuuuccccauauaacc

SEQ ID NO: 2381364 - RNA, 19 nt, Artificial Sequence
  Description of Artificial Sequence: Synthetic oligonucleotide
uguaaaaccaucaccaaca

SEQ ID NO: 2381365 - RNA, 19 nt, Artificial Sequence
  Description of Artificial Sequence: Synthetic oligonucleotide
agcaagacugcauuuaugc

SEQ ID NO: 2381366 - RNA, 19 nt, Artificial Sequence
  Description of Artificial Sequence: Synthetic oligonucleotide
uuaguaaccauccucuucc

SEQ ID NO: 2381367 - RNA, 19 nt, Artificial Sequence
  Description of Artificial Sequence: Synthetic oligonucleotide
aguauuggcaggcaaaagg

SEQ ID NO: 2381368 - RNA, 19 nt, Artificial Sequence
  Description of Artificial Sequence: Synthetic oligonucleotide
uuuaugguagagcuuagcc

SEQ ID NO: 2381369 - RNA, 19 nt, Artificial Sequence
  Description of Artificial Sequence: Synthetic oligonucleotide
ucucaugauaauccaaacg

SEQ ID NO: 2381370 - RNA, 19 nt, Artificial Sequence
  Description of Artificial Sequence: Synthetic oligonucleotide
uauuuucucagcauggcgc

SEQ ID NO: 2381371 - RNA, 19 nt, Artificial Sequence
  Description of Artificial Sequence: Synthetic oligonucleotide
uguaauucaauauauucau

SEQ ID NO: 2381372 - RNA, 19 nt, Artificial Sequence
  Description of Artificial Sequence: Synthetic oligonucleotide
ucacuaucaaaccagcaag

SEQ ID NO: 2381373 - RNA, 19 nt, Artificial Sequence
  Description of Artificial Sequence: Synthetic oligonucleotide
ucuuugaacguucaugggc

SEQ ID NO: 2381374 - RNA, 19 nt, Artificial Sequence
  Description of Artificial Sequence: Synthetic oligonucleotide
auacccauagcguuuacgg

SEQ ID NO: 2381375 - RNA, 19 nt, Artificial Sequence
  Description of Artificial Sequence: Synthetic oligonucleotide
acgaacuuuggguagaggg

SEQ ID NO: 2381376 - RNA, 19 nt, Artificial Sequence
  Description of Artificial Sequence: Synthetic oligonucleotide
uuucguuucugcuuaauca

SEQ ID NO: 2381377 - RNA, 19 nt, Artificial Sequence
  Description of Artificial Sequence: Synthetic oligonucleotide
aaguacuuuugcucuagac

SEQ ID NO: 2381378 - RNA, 19 nt, Artificial Sequence
  Description of Artificial Sequence: Synthetic oligonucleotide
ugaaccuuucauauuuagg

SEQ ID NO: 2381379 - RNA, 19 nt, Artificial Sequence
  Description of Artificial Sequence: Synthetic oligonucleotide
ugcuaaaacccucuucugg

SEQ ID NO: 2381380 - RNA, 19 nt, Artificial Sequence
  Description of Artificial Sequence: Synthetic oligonucleotide
cacauugacuucaauaacc

SEQ ID NO: 2381381 - RNA, 19 nt, Artificial Sequence
  Description of Artificial Sequence: Synthetic oligonucleotide
uucuuguaaaaccaucacc

SEQ ID NO: 2381382 - RNA, 19 nt, Artificial Sequence
  Description of Artificial Sequence: Synthetic oligonucleotide
augauaauccaaacgauac

SEQ ID NO: 2381383 - RNA, 19 nt, Artificial Sequence
  Description of Artificial Sequence: Synthetic oligonucleotide
uagagcuuagccuucaggc

SEQ ID NO: 2381384 - RNA, 19 nt, Artificial Sequence
  Description of Artificial Sequence: Synthetic oligonucleotide
uuggugauuacacccagag

SEQ ID NO: 2381385 - RNA, 19 nt, Artificial Sequence
  Description of Artificial Sequence: Synthetic oligonucleotide
uugacuucaauaaccgugc

SEQ ID NO: 2381386 - RNA, 19 nt, Artificial Sequence
  Description of Artificial Sequence: Synthetic oligonucleotide
ucaauaaccgugccuuugg

SEQ ID NO: 2381387 - RNA, 19 nt, Artificial Sequence
  Description of Artificial Sequence: Synthetic oligonucleotide
aguacuuuugcucuagacu

SEQ ID NO: 2381388 - RNA, 19 nt, Artificial Sequence
  Description of Artificial Sequence: Synthetic oligonucleotide
cagacuuuaguaaccaucc

SEQ ID NO: 2381389 - RNA, 19 nt, Artificial Sequence
  Description of Artificial Sequence: Synthetic oligonucleotide
aacucacucacauugacuu

SEQ ID NO: 2381390 - RNA, 19 nt, Artificial Sequence
  Description of Artificial Sequence: Synthetic oligonucleotide
ucgaauaacuuucaauacu

SEQ ID NO: 2381391 - RNA, 19 nt, Artificial Sequence
  Description of Artificial Sequence: Synthetic oligonucleotide
ugcuuaaucauguuggaaa

SEQ ID NO: 2381392 - RNA, 19 nt, Artificial Sequence
  Description of Artificial Sequence: Synthetic oligonucleotide
agagggacuucccauuucc

SEQ ID NO: 2381393 - RNA, 19 nt, Artificial Sequence
  Description of Artificial Sequence: Synthetic oligonucleotide
aguuguauacaauggggag

SEQ ID NO: 2381394 - RNA, 19 nt, Artificial Sequence
  Description of Artificial Sequence: Synthetic oligonucleotide
agagcuuagccuucaggcc

SEQ ID NO: 2381395 - RNA, 19 nt, Artificial Sequence
  Description of Artificial Sequence: Synthetic oligonucleotide
ucaauauauucauuuugug

SEQ ID NO: 2381396 - RNA, 19 nt, Artificial Sequence
  Description of Artificial Sequence: Synthetic oligonucleotide
aaccuugccuccuuguguc

SEQ ID NO: 2381397 - RNA, 19 nt, Artificial Sequence
  Description of Artificial Sequence: Synthetic oligonucleotide
uagcuuucagcucaggaug

SEQ ID NO: 2381398 - RNA, 19 nt, Artificial Sequence
  Description of Artificial Sequence: Synthetic oligonucleotide
auccaaacgauacccauag

SEQ ID NO: 2381399 - RNA, 19 nt, Artificial Sequence
  Description of Artificial Sequence: Synthetic oligonucleotide
aaaccaucaccaacaaagc

SEQ ID NO: 2381400 - RNA, 19 nt, Artificial Sequence
  Description of Artificial Sequence: Synthetic oligonucleotide
ugauaauccaaacgauacc

SEQ ID NO: 2381401 - RNA, 19 nt, Artificial Sequence
  Description of Artificial Sequence: Synthetic oligonucleotide
gcacccaucauuuucaggg

SEQ ID NO: 2381402 - RNA, 19 nt, Artificial Sequence
  Description of Artificial Sequence: Synthetic oligonucleotide
aauaaccgugccuuuggug

SEQ ID NO: 2381403 - RNA, 19 nt, Artificial Sequence
  Description of Artificial Sequence: Synthetic oligonucleotide
guucgaauaacuuucaaua

SEQ ID NO: 2381404 - RNA, 19 nt, Artificial Sequence
  Description of Artificial Sequence: Synthetic oligonucleotide
uuaugguagagcuuagccu

SEQ ID NO: 2381405 - RNA, 19 nt, Artificial Sequence
  Description of Artificial Sequence: Synthetic oligonucleotide
uuguaaaaccaucaccaac

SEQ ID NO: 2381406 - RNA, 19 nt, Artificial Sequence
  Description of Artificial Sequence: Synthetic oligonucleotide
uaugguagagcuuagccuu

SEQ ID NO: 2381407 - RNA, 19 nt, Artificial Sequence
  Description of Artificial Sequence: Synthetic oligonucleotide
aaucauguuggaaaguacu

SEQ ID NO: 2381408 - RNA, 19 nt, Artificial Sequence
  Description of Artificial Sequence: Synthetic oligonucleotide
uuuacgguguaauucaaua

SEQ ID NO: 2381409 - RNA, 19 nt, Artificial Sequence
  Description of Artificial Sequence: Synthetic oligonucleotide
uuggaaaguacuuuugcuc

SEQ ID NO: 2381410 - RNA, 19 nt, Artificial Sequence
  Description of Artificial Sequence: Synthetic oligonucleotide
uccuguucgaauaacuuuc

SEQ ID NO: 2381411 - RNA, 19 nt, Artificial Sequence
  Description of Artificial Sequence: Synthetic oligonucleotide
agaguuguauacaaugggg

SEQ ID NO: 2381412 - RNA, 19 nt, Artificial Sequence
  Description of Artificial Sequence: Synthetic oligonucleotide
uuucaugcaucuuaauagu

SEQ ID NO: 2381413 - RNA, 19 nt, Artificial Sequence
  Description of Artificial Sequence: Synthetic oligonucleotide
uuuaguaaccauccucuuc

SEQ ID NO: 2381414 - RNA, 19 nt, Artificial Sequence
  Description of Artificial Sequence: Synthetic oligonucleotide
uuuuccuguucgaauaacu

SEQ ID NO: 2381415 - RNA, 19 nt, Artificial Sequence
  Description of Artificial Sequence: Synthetic oligonucleotide
gguguaauucaauauauuc

SEQ ID NO: 2381416 - RNA, 19 nt, Artificial Sequence
  Description of Artificial Sequence: Synthetic oligonucleotide
guauuuucucagcauggcg

SEQ ID NO: 2381417 - RNA, 19 nt, Artificial Sequence
  Description of Artificial Sequence: Synthetic oligonucleotide
guuguauacaauggggagg

SEQ ID NO: 2381418 - RNA, 19 nt, Artificial Sequence
  Description of Artificial Sequence: Synthetic oligonucleotide
ugaagcguaggcccauugg

SEQ ID NO: 2381419 - RNA, 19 nt, Artificial Sequence
  Description of Artificial Sequence: Synthetic oligonucleotide
guaacuugggcauacuuuc

SEQ ID NO: 2381420 - RNA, 19 nt, Artificial Sequence
  Description of Artificial Sequence: Synthetic oligonucleotide
uguucgaauaacuuucaau

SEQ ID NO: 2381421 - RNA, 19 nt, Artificial Sequence
  Description of Artificial Sequence: Synthetic oligonucleotide
uuaugcacccaucauuuuc

SEQ ID NO: 2381422 - RNA, 19 nt, Artificial Sequence
  Description of Artificial Sequence: Synthetic oligonucleotide
uacgguguaauucaauaua

SEQ ID NO: 2381423 - RNA, 19 nt, Artificial Sequence
  Description of Artificial Sequence: Synthetic oligonucleotide
ucauuuguauuuucucagc

SEQ ID NO: 2381424 - RNA, 19 nt, Artificial Sequence
  Description of Artificial Sequence: Synthetic oligonucleotide
gaagcguaggcccauuggc

SEQ ID NO: 2381425 - RNA, 19 nt, Artificial Sequence
  Description of Artificial Sequence: Synthetic oligonucleotide
acuugggcauacuuucccc

SEQ ID NO: 2381426 - RNA, 19 nt, Artificial Sequence
  Description of Artificial Sequence: Synthetic oligonucleotide
ccaaacgauacccauagcg

SEQ ID NO: 2381427 - RNA, 19 nt, Artificial Sequence
  Description of Artificial Sequence: Synthetic oligonucleotide
ugugucacaaggcccaacu

SEQ ID NO: 2381428 - RNA, 19 nt, Artificial Sequence
  Description of Artificial Sequence: Synthetic oligonucleotide
aaaacccucuucugggucu

SEQ ID NO: 2381429 - RNA, 19 nt, Artificial Sequence
  Description of Artificial Sequence: Synthetic oligonucleotide
acuaucaaaccagcaagac

SEQ ID NO: 2381430 - RNA, 19 nt, Artificial Sequence
  Description of Artificial Sequence: Synthetic oligonucleotide
agcguuuacgguguaauuc

SEQ ID NO: 2381431 - RNA, 19 nt, Artificial Sequence
  Description of Artificial Sequence: Synthetic oligonucleotide
gacuuuaguaaccauccuc

SEQ ID NO: 2381432 - RNA, 19 nt, Artificial Sequence
  Description of Artificial Sequence: Synthetic oligonucleotide
uuaaucauguuggaaagua

SEQ ID NO: 2381433 - RNA, 19 nt, Artificial Sequence
  Description of Artificial Sequence: Synthetic oligonucleotide
aaacgauacccauagcguu

SEQ ID NO: 2381434 - RNA, 19 nt, Artificial Sequence
  Description of Artificial Sequence: Synthetic oligonucleotide
agcauggcgcuguuuaugg

SEQ ID NO: 2381435 - RNA, 19 nt, Artificial Sequence
  Description of Artificial Sequence: Synthetic oligonucleotide
uuuucguuucugcuuaauc

SEQ ID NO: 2381436 - RNA, 19 nt, Artificial Sequence
  Description of Artificial Sequence: Synthetic oligonucleotide
uguccagcagauaggcagg

SEQ ID NO: 2381437 - RNA, 19 nt, Artificial Sequence
  Description of Artificial Sequence: Synthetic oligonucleotide
acuuuaguaaccauccucu

SEQ ID NO: 2381438 - RNA, 19 nt, Artificial Sequence
  Description of Artificial Sequence: Synthetic oligonucleotide
uugggcacgaacuuugggu

SEQ ID NO: 2381439 - RNA, 19 nt, Artificial Sequence
  Description of Artificial Sequence: Synthetic oligonucleotide
aagcguaggcccauuggcc

SEQ ID NO: 2381440 - RNA, 19 nt, Artificial Sequence
  Description of Artificial Sequence: Synthetic oligonucleotide
acccauagcguuuacggug

SEQ ID NO: 2381441 - RNA, 19 nt, Artificial Sequence
  Description of Artificial Sequence: Synthetic oligonucleotide
ucaugauaauccaaacgau

SEQ ID NO: 2381442 - RNA, 19 nt, Artificial Sequence
  Description of Artificial Sequence: Synthetic oligonucleotide
augaugacagccgcggagc

SEQ ID NO: 2381443 - RNA, 19 nt, Artificial Sequence
  Description of Artificial Sequence: Synthetic oligonucleotide
acucacauugacuucaaua

SEQ ID NO: 2381444 - RNA, 19 nt, Artificial Sequence
  Description of Artificial Sequence: Synthetic oligonucleotide
uguauuuucucagcauggc

SEQ ID NO: 2381445 - RNA, 19 nt, Artificial Sequence
  Description of Artificial Sequence: Synthetic oligonucleotide
uucaccccaaguauuggca

SEQ ID NO: 2381446 - RNA, 19 nt, Artificial Sequence
  Description of Artificial Sequence: Synthetic oligonucleotide
uucguuucugcuuaaucau

SEQ ID NO: 2381447 - RNA, 19 nt, Artificial Sequence
  Description of Artificial Sequence: Synthetic oligonucleotide
agacugucccucucugucc

SEQ ID NO: 2381448 - RNA, 19 nt, Artificial Sequence
  Description of Artificial Sequence: Synthetic oligonucleotide
uuuggguagagggacuucc

SEQ ID NO: 2381449 - RNA, 19 nt, Artificial Sequence
  Description of Artificial Sequence: Synthetic oligonucleotide
acuuucaauacuucuguuu

SEQ ID NO: 2381450 - RNA, 19 nt, Artificial Sequence
  Description of Artificial Sequence: Synthetic oligonucleotide
gggguuuucuuguaaaacc

SEQ ID NO: 2381451 - RNA, 19 nt, Artificial Sequence
  Description of Artificial Sequence: Synthetic oligonucleotide
guagagcuuagccuucagg

SEQ ID NO: 2381452 - RNA, 19 nt, Artificial Sequence
  Description of Artificial Sequence: Synthetic oligonucleotide
gauacccauagcguuuacg

SEQ ID NO: 2381453 - RNA, 19 nt, Artificial Sequence
  Description of Artificial Sequence: Synthetic oligonucleotide
ucuagacugucccucucug

SEQ ID NO: 2381454 - RNA, 19 nt, Artificial Sequence
  Description of Artificial Sequence: Synthetic oligonucleotide
uuucaauacuucuguuucu

SEQ ID NO: 2381455 - RNA, 19 nt, Artificial Sequence
  Description of Artificial Sequence: Synthetic oligonucleotide
cauuuuguggcaugaugac

SEQ ID NO: 2381456 - RNA, 19 nt, Artificial Sequence
  Description of Artificial Sequence: Synthetic oligonucleotide
auuuucucagcauggcgcu

SEQ ID NO: 2381457 - RNA, 19 nt, Artificial Sequence
  Description of Artificial Sequence: Synthetic oligonucleotide
uagacugucccucucuguc

SEQ ID NO: 2381458 - RNA, 19 nt, Artificial Sequence
  Description of Artificial Sequence: Synthetic oligonucleotide
uaauccaaacgauacccau

SEQ ID NO: 2381459 - RNA, 19 nt, Artificial Sequence
  Description of Artificial Sequence: Synthetic oligonucleotide
uauucauuuuguggcauga

SEQ ID NO: 2381460 - RNA, 19 nt, Artificial Sequence
  Description of Artificial Sequence: Synthetic oligonucleotide
uaaccuugccuccuugugu

SEQ ID NO: 2381461 - RNA, 19 nt, Artificial Sequence
  Description of Artificial Sequence: Synthetic oligonucleotide
uucaugcaucuuaauaguc

SEQ ID NO: 2381462 - RNA, 19 nt, Artificial Sequence
  Description of Artificial Sequence: Synthetic oligonucleotide
uguuucucuuuucaugcau

SEQ ID NO: 2381463 - RNA, 19 nt, Artificial Sequence
  Description of Artificial Sequence: Synthetic oligonucleotide
auaaccuugccuccuugug

SEQ ID NO: 2381464 - RNA, 19 nt, Artificial Sequence
  Description of Artificial Sequence: Synthetic oligonucleotide
uucucaugauaauccaaac

SEQ ID NO: 2381465 - RNA, 19 nt, Artificial Sequence
  Description of Artificial Sequence: Synthetic oligonucleotide
auauucauuuuguggcaug

SEQ ID NO: 2381466 - RNA, 19 nt, Artificial Sequence
  Description of Artificial Sequence: Synthetic oligonucleotide
uccccauauaaccuugccu

SEQ ID NO: 2381467 - RNA, 19 nt, Artificial Sequence
  Description of Artificial Sequence: Synthetic oligonucleotide
uucaauaaccgugccuuug

SEQ ID NO: 2381468 - RNA, 19 nt, Artificial Sequence
  Description of Artificial Sequence: Synthetic oligonucleotide
uaacuugggcauacuuucc

SEQ ID NO: 2381469 - RNA, 19 nt, Artificial Sequence
  Description of Artificial Sequence: Synthetic oligonucleotide
gucacuaucaaaccagcaa

SEQ ID NO: 2381470 - RNA, 19 nt, Artificial Sequence
  Description of Artificial Sequence: Synthetic oligonucleotide
uuuucaccccaaguauugg

SEQ ID NO: 2381471 - RNA, 19 nt, Artificial Sequence
  Description of Artificial Sequence: Synthetic oligonucleotide
cuugucaucauucuuuugu

SEQ ID NO: 2381472 - RNA, 19 nt, Artificial Sequence
  Description of Artificial Sequence: Synthetic oligonucleotide
gaguuguauacaaugggga

SEQ ID NO: 2381473 - RNA, 19 nt, Artificial Sequence
  Description of Artificial Sequence: Synthetic oligonucleotide
aaaguacuuuugcucuaga

SEQ ID NO: 2381474 - RNA, 19 nt, Artificial Sequence
  Description of Artificial Sequence: Synthetic oligonucleotide
uaaaacccucuucuggguc

SEQ ID NO: 2381475 - RNA, 19 nt, Artificial Sequence
  Description of Artificial Sequence: Synthetic oligonucleotide
cuuuucaugcaucuuaaua

SEQ ID NO: 2381476 - RNA, 19 nt, Artificial Sequence
  Description of Artificial Sequence: Synthetic oligonucleotide
ggugauuacacccagaguu

SEQ ID NO: 2381477 - RNA, 19 nt, Artificial Sequence
  Description of Artificial Sequence: Synthetic oligonucleotide
gagcuuagccuucaggcca

SEQ ID NO: 2381478 - RNA, 19 nt, Artificial Sequence
  Description of Artificial Sequence: Synthetic oligonucleotide
auuuaugcacccaucauuu

SEQ ID NO: 2381479 - RNA, 19 nt, Artificial Sequence
  Description of Artificial Sequence: Synthetic oligonucleotide
guauacaauggggaggaug

SEQ ID NO: 2381480 - RNA, 19 nt, Artificial Sequence
  Description of Artificial Sequence: Synthetic oligonucleotide
cuucuguuucuccuugggc

SEQ ID NO: 2381481 - RNA, 19 nt, Artificial Sequence
  Description of Artificial Sequence: Synthetic oligonucleotide
cauuuguauuuucucagca

SEQ ID NO: 2381482 - RNA, 19 nt, Artificial Sequence
  Description of Artificial Sequence: Synthetic oligonucleotide
uuuggugauuacacccaga

SEQ ID NO: 2381483 - RNA, 19 nt, Artificial Sequence
  Description of Artificial Sequence: Synthetic oligonucleotide
caugauaauccaaacgaua

SEQ ID NO: 2381484 - RNA, 19 nt, Artificial Sequence
  Description of Artificial Sequence: Synthetic oligonucleotide
ugaacguucaugggccucc

SEQ ID NO: 2381485 - RNA, 19 nt, Artificial Sequence
  Description of Artificial Sequence: Synthetic oligonucleotide
uaaaaccaucaccaacaaa

SEQ ID NO: 2381486 - RNA, 19 nt, Artificial Sequence
  Description of Artificial Sequence: Synthetic oligonucleotide
uuccuguucgaauaacuuu

SEQ ID NO: 2381487 - RNA, 19 nt, Artificial Sequence
  Description of Artificial Sequence: Synthetic oligonucleotide
cucccgggugcuaaaaccc

SEQ ID NO: 2381488 - RNA, 19 nt, Artificial Sequence
  Description of Artificial Sequence: Synthetic oligonucleotide
uuccccauauaaccuugcc

SEQ ID NO: 2381489 - RNA, 19 nt, Artificial Sequence
  Description of Artificial Sequence: Synthetic oligonucleotide
gcaaaagguagcuuucagc

SEQ ID NO: 2381490 - RNA, 19 nt, Artificial Sequence
  Description of Artificial Sequence: Synthetic oligonucleotide
accccaaguauuggcaggc

SEQ ID NO: 2381491 - RNA, 19 nt, Artificial Sequence
  Description of Artificial Sequence: Synthetic oligonucleotide
gggacuucccauuuccccg

SEQ ID NO: 2381492 - RNA, 19 nt, Artificial Sequence
  Description of Artificial Sequence: Synthetic oligonucleotide
aagcagacuuuaguaacca

SEQ ID NO: 2381493 - RNA, 19 nt, Artificial Sequence
  Description of Artificial Sequence: Synthetic oligonucleotide
uacuuuugcucuagacugu

SEQ ID NO: 2381494 - RNA, 19 nt, Artificial Sequence
  Description of Artificial Sequence: Synthetic oligonucleotide
uucagcucaggauguguga

SEQ ID NO: 2381495 - RNA, 19 nt, Artificial Sequence
  Description of Artificial Sequence: Synthetic oligonucleotide
ugcaucuuaauagucuuuu

SEQ ID NO: 2381496 - RNA, 19 nt, Artificial Sequence
  Description of Artificial Sequence: Synthetic oligonucleotide
ugcacccaucauuuucagg

SEQ ID NO: 2381497 - RNA, 19 nt, Artificial Sequence
  Description of Artificial Sequence: Synthetic oligonucleotide
uauauucauuuuguggcau

SEQ ID NO: 2381498 - RNA, 19 nt, Artificial Sequence
  Description of Artificial Sequence: Synthetic oligonucleotide
uuuccccauauaaccuugc
